(19) United States
(12) Patent Application Publication
(10) Pub. No.: US 2022/0064737 A1
(43) Pub. Date: Mar. 3, 2022

(54) DETECTING CANCER, CANCER TISSUE OF ORIGIN, AND/OR A CANCER CELL TYPE

(71) Applicant: GRAIL, LLC, Menlo Park, CA (US)

(72) Inventors: Samuel S. Gross, Menlo Park, CA (US); Oliver Claude Venn, Menlo Park, CA (US); Alexander P. Fields, Menlo Park, CA (US); Qinwen Liu, Menlo Park, CA (US); Jan Schellenberger, Menlo Park, CA (US); Joerg Bredno, Menlo Park, CA (US); John F. Beausang, Menlo Park, CA (US); Seyedmehdi Shojaee, Menlo Park, CA (US); Arash Jamshidi, Menlo Park, CA (US)

(21) Appl. No.: 17/393,609

(22) Filed: Aug. 4, 2021

Related U.S. Application Data
(63) Continuation of application No. PCT/US2020/016673, filed on Feb. 4, 2020.
Application No. PCT/US2020/016673 is a continuation-in-part of application No. PCT/US2020/015082, filed on Jan. 24, 2020.
(60) Provisional application No. 62/801,556, filed on Feb. 5, 2019.
(60) Provisional application No. 62/801,561, filed on Feb. 5, 2019.
(60) Provisional application No. 62/965,327, filed on Jan. 24, 2020.
(60) Provisional application No. 62/965,342, filed on Jan. 24, 2020.

(51) Int. Cl. C12Q 1/6886; G16B 25/10

(52) U.S. Cl. CPC C12Q 1/6886; G16B 25/10; G01N 2800/7028; G01N 2800/22; C12Q 2600/154

(57) ABSTRACT

The present description provides a hematological disorder (HD) assay panel for targeted detection of methylation patterns or variants specific to various hematological disorders, such as clonal hematopoiesis of indeterminate potential (CHIP) and blood cancers, such as leukemia, lymphoid neoplasms (e.g. lymphoma), multiple myeloma, and myeloid neoplasm. Further provided herein includes methods of designing, making, and using the HD assay panel for detection of various hematological disorders.

### CROSS-REFERENCE

[0001] This is a continuation application of International Patent Application No. PCT/US2020/016673, filed Feb. 4, 2020, which claims benefit of U.S. Provisional Application No. 62/801,556, filed Feb. 5, 2019; 62/801,556, filed Feb. 5, 2019; U.S. Provisional Application No. 62/801,561, filed Feb. 5, 2019; U.S. Provisional Application No. 62/965,327, filed Jan. 24, 2020; U.S. Provisional Application No. 62/965,342, filed Jan. 24, 2020; and PCT International Application No. PCT/US2020/015082, filed Jan. 24, 2020, which applications are incorporated herein by reference in their entireties.

### SEQUENCE LISTING

[0002] The instant application contains a Sequence Listing which has been electronically submitted in ASCII format and is hereby incorporated by reference in its entirety. Said ASCII copy, created on Feb. 3, 2020, is named 50251-851_601_SL.txt and is 16,952,822 bytes in size.

### BACKGROUND

[0003] Hematopoietic stem cells (HSCs) and hematopoietic progenitor cells (HPCs) divide to produce blood cells by a continuous regeneration process. As the cells divide, they are prone to accumulating mutations that generally do not affect function. About 3-5% of normal individuals above the age of 50 and approximately 10% of people aged 70 to 80 are determined to have clonal hematopoiesis of indeterminate potential (CHIP) defined by the presence of low-level mutations in the peripheral blood in clinically normal individuals.

[0004] Some mutations confer advantages in self-renewal, proliferation or both, resulting in clonal expansion of the cells comprising the mutations in question. Although these mutations are not necessarily indicative of a hematological disease, the accumulation of mutations during clonal expansion can, eventually, lead to a disease state (e.g., cancer). Having clonal hematopoiesis has been linked to a more than 10-fold increased risk of developing a blood cancer. Detection of the clonal hematopoiesis can therefore allow an early detection of cancer, which in turn allows for earlier treatment and therefore a greater chance for survival. Differentiation of CHIP from other hematological disorders, such as leukemia, multiple myeloma, and lymphoma, further enables proper treatments and prophylactic activities.

[0005] Recent sequencing studies have identified a set of recurrent mutations in several types of hematological malignancies (see, e.g., Mardis E R et al. The New England Journal of Medicine 2009; Bejar R et al. The New England Journal of Medicine 2011; Papaemmanuil E et al. The New England Journal of Medicine 2011; and Walter et al. Leukemia 2011). However, the frequency of these somatic mutations in the general population is unknown.

[0006] Accordingly, a cost-effective method of accurately detecting various hematological disorders by detecting differentially methylated regions has not yet been available.

### SUMMARY

[0007] Provided herein are compositions comprising a plurality of different bait oligonucleotides, wherein the plurality of different bait oligonucleotides are configured to collectively hybridize to DNA molecules derived from at least 100 target genomic regions, wherein each genomic region of the at least 100 target genomic regions is differentially methylated in at least a first hematological disorder or hematological cancer relative to another hematological disorder or non-hematological cancer type, wherein the first hematological disorder and the another hematological disorder are selected from leukemia, lymphoid neoplasms (e.g., lymphoma), multiple myeloma, and a myeloid neoplasm.

[0008] In some embodiments, the plurality of bait oligonucleotides are configured to hybridize to DNA molecules derived from at least 20%, at least 25% or at least 50% of the target genomic regions of any one of Lists 1-8. In some embodiments, the plurality of bait oligonucleotides are configured to hybridize to DNA molecules derived from at least 20%, at least 25% or at least 50% of the target genomic regions of Lists 1-8. In some embodiments, the plurality of bait oligonucleotides are configured to hybridize to DNA molecules derived from at least 20% of the target genomic regions of Lists 1 or 8. In some embodiments, the DNA molecules are derived from at least 25%, 30%, 40%, 50%, 60%, 70%, or 80% of the target genomic regions of Lists 1 or 8. In some embodiments, the plurality of bait oligonucleotides are configured to hybridize to DNA molecules derived from at least 20% the target genomic regions of any one of Lists 2-4. In some embodiments, the plurality of bait oligonucleotides are configured to hybridize to DNA molecules derived from at least 20% of the target genomic regions of Lists 2-4. In some embodiments, the plurality of bait oligonucleotides are configured to hybridize to DNA molecules derived from at least 25%, 30%, 40%, 50%, 60%, 70%, or 80% of the target genomic regions of Lists 2-4. In some embodiments, the plurality of bait oligonucleotides are configured to hybridize to DNA molecules derived from at least 20% of the target genomic regions of any one of Lists 5-7. In some embodiments, the plurality of bait oligonucleotides are configured to hybridize to DNA molecules derived from at least 20% of the target genomic regions of Lists 5-7. In some embodiments, the plurality of bait oligonucleotides are configured to hybridize to DNA molecules derived from at least 25%, 30%, 40%, 50%, 60%, 70%, or 80% of the target genomic regions of Lists 5-7. In some embodiments, the first hematological disorder and the another hematological disorder are selected from lymphoid neoplasm, multiple myeloma, and myeloid neoplasm.

[0009] Also provided herein are compositions comprising a plurality of different bait oligonucleotides configured to hybridize to DNA molecules derived from at least 20% of the target genomic regions of any one of Lists 1-7. In some embodiments, the plurality of bait oligonucleotides are configured to hybridize to DNA molecules derived from at least 20% of the target genomic regions of Lists 1 or 8. In some embodiments, the DNA molecules are derived from at least 25%, 30%, 40%, 50%, 60%, 70%, or 80% of the target genomic regions of Lists 1 or 8. In some embodiments, the plurality of bait oligonucleotides are configured to hybridize to DNA molecules derived from at least 20% the target genomic regions of any one of Lists 2-4. In some embodiments, the plurality of bait oligonucleotides are configured to hybridize to DNA molecules derived from at least 20% of the target genomic regions of Lists 2-4. In some embodiments, the plurality of bait oligonucleotides are configured to hybridize to DNA molecules derived from at least 20% of the target genomic regions of any one of Lists 5-7. In some embodiments, the plurality of bait oligonucleotides are configured to hybridize to DNA molecules derived from at least 20% of the target genomic regions of Lists 5-7.

[0010] Also provided herein are compositions provided above, wherein the plurality of different bait oligonucleotides are configured to hybridize to DNA molecules derived from at least 20% of the target genomic regions of List 2. In some embodiments, the DNA molecules are derived from at least 25%, 30%, 40%, 50%, 60%, 70%, or 80% of the target genomic regions of List 2.

[0011] Also provided herein are compositions provided above, wherein the plurality of different bait oligonucleotides are configured to hybridize to DNA molecules derived from at least 20% of the target genomic regions of List 3. In some embodiments, the DNA molecules are derived from at least 25%, 30%, 40%, 50%, 60%, 70%, or 80% of the target genomic regions of List 3.

[0012] Also provided herein are compositions provided above, wherein the plurality of different bait oligonucleotides are configured to hybridize to DNA molecules derived from at least 20% of the target genomic regions of List 4. In some embodiments, the DNA molecules are derived from at least 25%, 30%, 40%, 50%, 60%, 70%, or 80% of the target genomic regions of List 4.

[0013] Also provided herein are compositions provided above, wherein the plurality of different bait oligonucleotides are configured to hybridize to DNA molecules derived from at least 20% of the target genomic regions of List 5. In some embodiments, the DNA molecules are derived from at least 25%, 30%, 40%, 50%, 60%, 70%, or 80% of the target genomic regions of List 5.

[0014] Also provided herein are compositions provided above, wherein the plurality of different bait oligonucleotides are configured to hybridize to DNA molecules derived from at least 20% of the target genomic regions of List 6. In some embodiments, the DNA molecules are derived from at least 25%, 30%, 40%, 50%, 60%, 70%, or 80% of the target genomic regions of List 6.

[0015] Also provided herein are compositions provided above, wherein the plurality of different bait oligonucleotides are configured to hybridize to DNA molecules derived from at least 20% of the target genomic regions of List 7. In some embodiments, the DNA molecules are derived from at least 25%, 30%, 40%, 50%, 60%, 70%, or 80% of the target genomic regions of List 7.

[0016] Also provided herein are compositions provided above, wherein the plurality of different bait oligonucleotides are configured to hybridize to DNA molecules derived from at least 20% of the target genomic regions of List 8. In some embodiments, the DNA molecules are derived from at least 25%, 30%, 40%, 50%, 60%, 70%, or 80% of the target genomic regions of List 8.

[0017] Also provided herein are compositions provided above, wherein the total size of the of the target genomic regions is less than 2000 kb, less than 1500 kb, less than 1200 kb, less than 1000 kb, less than 500 kb, or less than 300 kb.

[0018] Also provided herein are compositions provided above, wherein the DNA molecules are converted cfDNA fragments. In some embodiments, the target genomic regions are hypermethylated regions, hypomethylated regions, or binary regions that can be either hypermethylated or hypomethylated, as indicated in the sequence listing. In some embodiments, the bait oligonucleotides are configured to hybridize to hypermethylated converted DNA molecules, hypomethylated converted DNA molecules, or both hypermethylated and hypomethylated converted DNA molecules derived from each targeted genomic region, as indicated in the sequence listing.

[0019] Also provided herein are compositions provided above, wherein the bait oligonucleotides are each conjugated to an affinity moiety. In some embodiments, the affinity moiety is biotin. In some embodiments, the bait oligonucleotides are each conjugated to a solid surface. In some embodiments, the solid surface is a microarray or chip.

[0020] Also provided herein are compositions provided above, wherein the bait oligonucleotides each have a length of 45 to 300 nucleotide bases, 75-200 nucleotide bases, 100-150 nucleotide bases, or about 120 nucleotide bases.

[0021] Also provided herein are compositions provided above, wherein the bait oligonucleotides comprise a plurality of sets of two or more bait oligonucleotides, wherein each bait oligonucleotide within a set of bait oligonucleotides is configured to bind to converted DNA molecules derived from the same target genomic region. In some embodiments, each set of bait oligonucleotides comprises 1 or more pairs of a first bait oligonucleotide and a second bait oligonucleotide, each bait oligonucleotide comprises a 5′ end and a 3′ end, a sequence of at least X nucleotide bases at the 3′ end of the first bait oligonucleotide is identical to a sequence of X nucleotide bases at the 5′ end the second bait oligonucleotide, and X is at least 25, 30, 35, 40, 45, 50, 60, 70, 75 or 100. In some embodiments, the first bait oligonucleotide comprises a sequence of at least 31, 40, 50 or 60 nucleotide bases that does not overlap a sequence of the second bait oligonucleotide.

[0022] Also provided herein are compositions provided above, wherein the at least 100 target regions comprises at least 200, at least 500, at least 1000, at least 1500, at least 2000, at least 3000, at least 4000, at least 5000, at least 8000, at least 10,000, at least 15,000, or at least 20,000 genomic regions genomic regions.

[0023] Also provided herein are compositions provided above, further comprising converted cfDNA from a test subject.

[0024] Also provided herein are compositions provided above, wherein the cfDNA from the test subject is converted by a process comprising treatment with bisulfite or a cytosine deaminase.

[0025] Also provided herein are methods of enriching converted cfDNA fragments informative of a type of hematological disorder, the method comprising: contacting the bait oligonucleotide composition provided above with DNA derived from a test subject, and enriching the sample for cfDNA corresponding to genomic regions associated with the type of cancer by hybridization capture.

[0026] Also provided herein are methods for obtaining sequence information informative of a presence or absence of a type of hematological disorder, a method comprising enriching converted DNA from a test subject by contacting the DNA with a bait oligonucleotide composition provided above, and sequencing the enriched converted DNA.

[0027] Also provided herein are methods for determining that a test subject has a type of hematological disorder (HD), a method comprising capturing cfDNA fragments from the test subject with a bait oligonucleotide composition provided above, sequencing the captured cfDNA fragments, and applying a trained classifier to the cfDNA sequences to determine that the test subject has the type of HD. Also provided herein are methods for determining that a test subject has a type of hematological disorder (HD), a method comprising capturing cfDNA fragments from the test subject with a bait oligonucleotide composition provided above, detecting the captured cfDNA fragments by DNA microarray, and applying a trained classifier to the DNA fragments hybridized to the DNA microarray to determine that the test subject has the type of HD.

[0028] In some embodiments, the trained classifier determines a presence or absence of cancer and, if the classifier determines a presence of cancer, the classifier determines a cancer type. In some embodiments, the cancer type is selected from the group consisting of uterine cancer, upper GI squamous cancer, all other upper GI cancers, thyroid cancer, sarcoma, urothelial renal cancer, all other renal cancers, prostate cancer, pancreatic cancer, ovarian cancer, neuroendocrine cancer, multiple myeloma, melanoma, lymphoma, small cell lung cancer, lung adenocarcinoma, all other lung cancers, leukemia, hepatobiliary carcinoma, hepatobiliary biliary, head and neck cancer, colorectal cancer, cervical cancer, breast cancer, bladder cancer, and anorectal cancer. In some embodiments, the cancer type is selected from the group consisting of anal cancer, bladder cancer, colorectal cancer, esophageal cancer, head and neck cancer, liver/bile-duct cancer, lung cancer, lymphoma, ovarian cancer, pancreatic cancer, plasma cell neoplasm, and stomach cancer. In some embodiments, the cancer type is selected from the group consisting of thyroid cancer, melanoma, sarcoma, myeloid neoplasm, renal cancer, prostate cancer, breast cancer, uterine cancer, ovarian cancer, bladder cancer, urothelial cancer, cervical cancer, anorectal cancer, head & neck cancer, colorectal cancer, liver cancer, bile duct cancer, pancreatic cancer gallbladder cancer, upper GI cancer, multiple myeloma, lymphoid neoplasm, and lung cancer. In some embodiments, the cancer type is a HD and the HD is selected from the group consisting of CHIP, leukemia, lymphoid neoplasms (e.g., lymphoma), multiple myeloma, and a myeloid neoplasm. In some embodiments, the type of hematological disorder is selected from lymphoid neoplasm, multiple myeloma, and myeloid neoplasm. In some embodiments, the trained classifier is a mixture model classifier. In some embodiments, the classifier was trained on converted DNA sequences derived from at least 1000, at least 2000, or at least 4000 target genomic regions selected from any one of Lists 1-8. In some embodiments, the trained classifier determines the presence or absence of cancer or a cancer type by: (i) generating a set of features for the sample, wherein each feature in the set of features comprises a numerical value; (ii) inputting the set of features into the classifier, wherein the classifier comprises a multinomial classifier; (iii) based on the set of features, determining, at the classifier, a set of probability scores, wherein the set of probability scores comprises one probability score per cancer type class and per non-cancer type class; and (iv) thresholding the set of probability scores based on one or more values determined during training of the classifier to determine a final cancer classification of the sample. In some embodiments, the set of features comprises a set of binarized features. In some embodiments, the numerical value comprises a single binary value. In some embodiments, the multinomial classifier comprises a multinomial logistic regression ensemble trained to predict a source tissue for the cancer. In some embodiments, the method further comprises determining the final cancer classification based on a top-two probability score differential relative to a minimum value, wherein the minimum value corresponds to a predefined percentage of training cancer samples that had been assigned the correct cancer type as their highest score during training of the classifier. In some embodiments, (i) in accordance with a determination that the top-two probability score differential exceeds the minimum value, assign a cancer label corresponding to the highest probability score determined by the classifier as the final cancer classification; and (ii) in accordance with a determination that the top-two probability score differential does not exceed the minimum value, assigning an indeterminate cancer label as the final cancer classification. In some embodiments, the type of hematological disorder is selected from CHIP, leukemia, lymphoid neoplasms (e.g., lymphoma), multiple myeloma, and a myeloid neoplasm. In some embodiments, the type of hematological disorder is selected from lymphoid neoplasm, multiple myeloma, and myeloid neoplasm. In some embodiments, the subject is determined to have a cancer and the specificity is at least 0.990. In some embodiments, the ratio of the likelihood of accurately determining a hematological disorder to the likelihood of inaccurately determining a solid tumor is at least 25:1 or at least 50:1. In some embodiments, the ratio of the likelihood of accurately determining a hematological disorder to the likelihood of inaccurately determining a hematological disorder is at least 8, at least 12:1, or at least 16:1. In some embodiments, the likelihood of accurately determining a cancer type is at least 80%, at least 85%, or at least 89%. In some embodiments, the cancer is a stage I cancer and the likelihood of accurately determining a cancer type is at least 65%, at least 70%, at least 75%, or at least 80%. In some embodiments, the cancer is a stage II cancer and the likelihood of accurately determining a cancer type is at least 75%, at least 80%, at least 85%, or at least 90%. In some embodiments, the cancer is a stage III cancer or a stage IV cancer and the likelihood of accurately determining a cancer type is at least 85% or at least 90%. In some embodiments, the sensitivity for multiple myeloma is at least 55%, at least 65%, at least 75% or at least 85%. In some embodiments, the sensitivity for stage I multiple myeloma is at least 60%, at least 65%, or at least 70%. In some embodiments, the sensitivity for stage II multiple myeloma is at least 60%, at least 75%, or at least 85%. In some embodiments, the bait oligonucleotide composition is configured to hybridize to cfDNA derived from target genomic regions of list 3 or list 6. In some embodiments, the sensitivity for lymphoid neoplasm is at least 55%, at least 60%, at least 65% or at least 70%. In some embodiments, the sensitivity for stage I lymphoid neoplasm is at least 30%. In some embodiments, the sensitivity for stage II lymphoid neoplasm is at least 65%, at least 75%, at least 85% or at least 90%. In some embodiments, the bait oligonucleotide composition is configured to hybridize to cfDNA derived from target genomic regions of list 2 or list 5.

[0029] Also provided herein are hematological disorder (HD) assay panels, comprising: at least 500 pairs of probes, wherein each pair of the at least 500 pairs comprise two probes configured to overlap each other by an overlapping sequence, wherein the overlapping sequence comprises a sequence of at least 30-nucleotides, and wherein the at least 30-nucleotide sequence is configured to hybridize to a converted cfDNA molecule corresponding to, or derived from one or more of genomic regions, wherein each of the genomic regions comprises at least five methylation sites, and wherein the at least five methylation sites have an abnormal methylation pattern in HD samples. In some embodiments, each probe of the of the at least 5 pairs of probes comprises a non-overlapping sequence of at least 31 nucleotides. In some embodiments, the converted cfDNA molecules comprise cfDNA molecules treated to covert unmethylated C (cytosine) to U (uracil). In some embodiments, each of the at least 500 pairs of probes is conjugated to a non-nucleotide affinity moiety. In some embodiments, the non-nucleotide affinity moiety is a biotin moiety. In some embodiments, the HD samples are from subjects having a hematological disorder selected from the group consisting of CHIP, leukemia, multiple myeloma, and lymphoma. In some embodiments, the abnormal methylation pattern has at least a threshold p-value rarity in the HD samples. In some embodiments, each of the probes is designed to have sequence homology or sequence complementarity with less than 20 off-target genomic regions. In some embodiments, the less than 20 off-target genomic regions are identified using a k-mer seeding strategy. In some embodiments, the less than 20 off-target genomic regions are identified using k-mer seeding strategy combined to local alignment at seed locations. In some embodiments, the HD assay panel comprises at least 1,000, 2,000, 5,000, 10,000, 50,000, 100,000, 150,000, 200,000, or 250,000 probes. In some embodiments, the at least 500 pairs of probes together comprise at least 10,000, 20,000, 30,000, 40,000, 50,000, 60,000, 70,000, 80,000, 90,000, 100,000, 120,000, 140,000, 160,000, 180,000, 200,000, 240,000, 260,000, 280,000, 300,000, 320,000, 400,000, 450,000, 500,000, 550,000, 600,000, 650,000, 700,000, 750,000, 800,000, 850,000, 900,000, 1 million, 1.5 million, 2 million, 2.5 million, 3 million, 3.5 million, 4 million, 4.5 million, or 5 million nucleotides. In some embodiments, of the probes comprises at least 50, 75, 100, or 120 nucleotides. In some embodiments, each of the probes comprises less than 300, 250, 200, or 150 nucleotides. In some embodiments, each of the probes comprises 100-150 nucleotides. In some embodiments, each of the probes comprises less than 20, 15, 10, 8, or 6 methylation sites. In some embodiments, at least 80, 85, 90, 92, 95, or 98% of the at least five methylation sites are either methylated or unmethylated in the HD samples. In some embodiments, at least 3%, 5%, 10%, 15%, or 20% of the probes comprise no G (Guanine). In some embodiments, each of the probes comprise multiple binding sites to the methylation sites of the converted cfDNA molecule, wherein at least 80, 85, 90, 92, 95, or 98% of the multiple binding sites comprise exclusively either CpG or CpA. In some embodiments, each of the probes is configured to have sequence homology or sequence complementarity with less than 15, 10 or 8 off-target genomic regions. In some embodiments, at least 30% of the genomic regions are in exons or introns. In some embodiments, at least 15% of the genomic regions are in exons. In some embodiments, at least 20% of the genomic regions are in exons. In some embodiments, less than 10% of the genomic regions are in intergenic regions. In some embodiments, the genomic regions are selected from List 1. In some embodiments, the genomic regions comprise at least 20%, 30%, 40%, 50%, 60%, 70%, 80%, 90%, 95% or 100% of the genomic regions in List 1. In some embodiments, the genomic regions comprise at least 100, 200, 300, 400, 500, 1,000, 5000, 10,000, 15,000, 16,000, 17,000, 18,000, 19,000, 20,000, 21,000 or 23,000 genomic regions in List 1.

[0030] Also provided herein are methods of detecting a hematological disorder (HD), comprising: receiving a sample comprising a plurality of cfDNA molecules; treating the plurality of cfDNA molecules to convert unmethylated C (cytosine) to U (uracil), thereby obtaining a plurality of converted cfDNA molecules; applying the HD assay panel of any one of the above embodiments to the plurality of converted cfDNA molecules, thereby enriching a subset of the converted cfDNA molecules; and sequencing the enriched subset of the converted cfDNA molecule, thereby providing a set of sequence reads. In some embodiments, the method further comprises the step of: determining a health condition by evaluating the set of sequence reads, wherein the health condition is a presence or absence of a hematological disorder; a stage of a hematological disorder; a presence or absence of a type of blood cancer; or a presence or absence of at least 1, 2, or 3 different types of hematological disorders. In some embodiments, the sample comprising a plurality of cfDNA molecules was obtained from a human subject. In some embodiments, the hematological disorder is selected from the group consisting of: lymphoid neoplasm, multiple myeloma, and myeloid neoplasm.

[0031] Also provided herein are methods for detecting a hematological disorder (HD), comprising the steps of: obtaining a set of sequence reads by sequencing a set of nucleic acid fragments from a subject, wherein each of the nucleic acid fragments corresponds to or is derived from a plurality of genomic regions selected from any one of Lists 1-8; for each of the sequence reads, determining methylation status at a plurality of CpG sites; and detecting a hematological disorder of the subject by evaluating the methylation status for the sequence reads, wherein the hematological disorder detected comprises one or more of: (i) a presence or absence of a hematological disorder; (ii) a stage of a hematological disorder; (iii) a presence or absence of a type of blood cancer; and (iv) a presence or absence of at least 1, 2, or 3 different types of hematological disorders. In some embodiments, the plurality of genomic regions comprises at least 20%, 30%, 40%, 50%, 60%, 70%, 80%, 90%, 95%, or 100% of the genomic regions of List 1. In some embodiments, the plurality of genomic regions comprises 100, 200, 300, 400, 500, 1,000, 5000, 10,000, 15,000, 16,000, 17,000, 18,000, 19,000, 20,000, 21,000 or 23,000 of the genomic regions of any one of Lists 1-8.

[0032] Also provided herein are methods of designing a hematological disorder (HD) assay panel comprising the steps of: identifying a plurality of genomic regions, wherein each of the plurality of genomic regions (i) comprises at least 30 nucleotides, and (ii) comprises at least five methylation sites, selecting a subset of the genomic regions, wherein the selection is made when cfDNA molecules corresponding to, or derived from each of the genomic regions in HD samples have an abnormal methylation pattern, wherein the abnormal methylation pattern comprises at least five methylation sites either hypomethylated or hypermethylated, and designing an HD assay panel comprising a plurality of probes, wherein each of the probes is configured to hybridize to a converted cfDNA molecule corresponding to, or derived from one or more of the subset of the genomic regions. In some embodiments, the converted cfDNA molecules comprise cfDNA molecules treated to convert unmethylated cytosines to uracils.

[0033] Also provided herein are hematological disorder (HD) assay panels comprising a plurality of probes, wherein each of the plurality of probes is configured to hybridize to a converted cfDNA molecule corresponding to one or more of the genomic regions in List 1. In some embodiments, the converted cfDNA molecules comprise cfDNA molecules treated to convert unmethylated cytosines to uracils. In some embodiments, the plurality of probes is configured to hybridize to a plurality of converted ctDNA molecules corresponding to or derived from at least 20%, 30%, 40%, 50%, 60%, 70%, 80%, or 90%, 95% or 100% of the genomic regions of any one of Lists 1-8. In some embodiments, the plurality of probes is configured to hybridize to a plurality of converted cfDNA molecules corresponding to or derived from at least 100, 200, 300, 400, 500, 1,000, 5000, 10,000, 15,000, 16,000, 17,000, 18,000, 19,000, 20,000, 21,000 or 23,000 genomic regions of any one of Lists 1-8. In some embodiments, at least 3%, 5%, 10%, 15%, or 20% of the probes comprise no G (Guanine). In some embodiments, each of the probes comprise multiple binding sites to methylation sites of the converted cfDNA molecule, wherein at least 80, 85, 90, 92, 95, or 98% of the multiple binding sites comprise exclusively either CpG or CpA. In some embodiments, each of the probes is conjugated to a non-nucleotide affinity moiety. In some embodiments, the non-nucleotide affinity moiety is a biotin moiety.

### INCORPORATION BY REFERENCE

[0034] All publications, patents, and patent applications mentioned in this specification are herein incorporated by reference to the same extent as if each individual publication, patent, or patent application was specifically and individually indicated to be incorporated by reference.

### BRIEF DESCRIPTION OF THE DRAWINGS

[0035] The novel features of the disclosure are set forth with particularity in the appended claims. A better understanding of the features and advantages of the present disclosure will be obtained by reference to the following detailed description that sets forth illustrative embodiments, in which the principles of the disclosure are utilized, and the accompanying drawings of which:

[0036] FIG. 1A illustrates a 2× tiled probe design, with three probes targeting a small target region, where each base in a target region (boxed in the dotted rectangle) is covered by at least two probes, according to an embodiment.

[0037] FIG. 1B illustrates a 2× tiled probe design, with more than three probes targeting a larger target region, where each base in a target region (boxed in the dotted rectangle) is covered by at least two probes, according to an embodiment.

[0038] FIG. 1C illustrates probe design targeting hypomethylated and/or hypermethylated fragments in genomic regions, according to an embodiment.

[0039] FIG. 2 illustrates a process of generating a Heme assay panel, according to an embodiment.

[0040] FIG. 3A is a flowchart describing a process of creating a data structure for a control group, according to an embodiment.

[0041] FIG. 3B is a flowchart describing an additional step of validating the data structure for the control group of FIG. 3A, according to an embodiment.

[0042] FIG. 4 is a flowchart describing a process for selecting genomic regions for designing probes for an HD assay panel, according to an embodiment.

[0043] FIG. 5 is an illustration of an example p-value score calculation, according to an embodiment.

[0044] FIG. 6A is a flowchart describing a process of training a classifier based on hypomethylated and hypermethylated fragments indicative of a hematological disorder, according to an embodiment.

[0045] FIG. 6B is a flowchart describing a process of identifying fragments indicative of cancer determined by probabilistic models, according to an embodiment.

[0046] FIG. 7A is a flowchart describing a process of sequencing a fragment of cell-free (cf) DNA, according to an embodiment.

[0047] FIG. 7B is an illustration of the process of FIG. 7A of sequencing a fragment of cell-free (cf) DNA to obtain a methylation state vector, according to an embodiment.

[0048] FIG. 8 is a graph of the amounts of DNA fragments hybridizing to probes depending on the sizes of overlaps between the DNA fragments and the probes.

[0049] FIG. 9A illustrates a flowchart of devices for sequencing nucleic acid samples according to one embodiment. FIG. 9B illustrates an analytic system that analyzes methylation status of cfDNA according to one embodiment.

[0050] FIG. 10 is a receiver operator curve comparing the true positive rate and false positive rate of cancer detection by a trained classifier utilizing methylation status information from a random 50% of the target genomic regions of List 8.

### DETAILED DESCRIPTION

### Definitions

[0051] Unless defined otherwise, all technical and scientific terms used herein have the meaning commonly understood by a person skilled in the art to which this description belongs. As used herein, the following terms have the meanings ascribed to them below.

[0052] As used herein any reference to “one embodiment” or “an embodiment” means that a particular element, feature, structure, or characteristic described in connection with the embodiment is included in at least one embodiment. The appearances of the phrase “in one embodiment” in various places in the specification are not necessarily all referring to the same embodiment, thereby providing a framework for various possibilities of described embodiments to function together.

[0053] As used herein, the terms “comprises,” “comprising,” “includes,” “including,” “has,” “having” or any other variation thereof, are intended to cover a non-exclusive inclusion. For example, a process, method, article, or apparatus that comprises a list of elements is not necessarily limited to only those elements but may include other elements not expressly listed or inherent to such process, method, article, or apparatus. Further, unless expressly stated to the contrary, “or” refers to an inclusive or and not to an exclusive or. For example, a condition A or B is satisfied by any one of the following: A is true (or present) and B is false (or not present), A is false (or not present) and B is true (or present), and both A and B are true (or present).

[0054] In addition, use of the “a” or “an” are employed to describe elements and components of the embodiments herein. This is done merely for convenience and to give a general sense of the description. This description should be read to include one or at least one and the singular also includes the plural unless it is obvious that it is meant otherwise.

[0055] As used herein, ranges and amounts can be expressed as “about” a particular value or range. About also includes the exact amount. Hence “about 5 μg” means “about 5 μg” and also “5 μg.” Generally, the term “about” includes an amount that would be expected to be within experimental error. In some embodiments, “about” refers to the number or value recited, “+” or “−” 20%, 10%, or 5% of the number or value. Additionally, ranges recited herein are understood to be shorthand for all of the values within the range, inclusive of the recited endpoints. For example, a range of 1 to 50 is understood to include any number, combination of numbers, or sub-range from the group consisting of 1, 2, 3, 4, 5, 6, 7, 8, 9, 10, 11, 12, 13, 14, 15, 16, 17, 18, 19, 20, 21, 22, 23, 24, 25, 26, 27, 28, 29, 30, 31, 32, 33, 34, 35, 36, 37, 38, 39, 40, 41, 42, 43, 44, 45, 46, 47, 48, 49, and 50.

[0056] The term “hematological disorder” or “HD” as used herein refers to a disorder which primarily affecting the blood, selected from the group consisting of CHIP, leukemia, lymphoid neoplasms (e.g. lymphoma), multiple myeloma, and myeloid neoplasm.

[0057] The term “methylation” as used herein refers to a process by which a methyl group is added to a DNA molecule. For example, a hydrogen atom on the pyrimidine ring of a cytosine base can be converted to a methyl group, forming 5-methylcytosine. The term also refers to a process by which a hydroxymethyl group is added to a DNA molecule, for example by oxidation of a methyl group on the pyrimidine ring of a cytosine base. Methylation and hydroxymethylation tend to occur at dinucleotides of cytosine and guanine referred to herein as “CpG sites.”

[0058] The term “methylation” can also refer to the methylation status of a CpG site. A CpG site with a 5-methylcytosine moiety is methylated. A CpG site with a hydrogen atom on the pyrimidine ring of the cytosine base is unmethylated.

[0059] In such embodiments, the wet laboratory assay used to detect methylation may vary from those described herein as is well known in the art.

[0060] The term “methylation site” as used herein refers to a region of a DNA molecule where a methyl group can be added. “CpG” sites are the most common methylation site, but methylation sites are not limited to CpG sites. For example, DNA methylation may occur in cytosines in CHG and CHH, where H is adenine, cytosine or thymine. Cytosine methylation in the form of 5-hydroxymethylcytosine may also assessed (see, e.g., WO 2010/037001 and WO 2011/127136, which are incorporated herein by reference), and features thereof, using the methods and procedures disclosed herein.

[0061] The term “CpG site” as used herein refers to a region of a DNA molecule where a cytosine nucleotide is followed by a guanine nucleotide in the linear sequence of bases along its 5′ to 3′ direction. “CpG” is a shorthand for 5′-C-phosphate-G-3′ that is cytosine and guanine separated by only one phosphate group. Cytosines in CpG dinucleotides can be methylated to form 5-methylcytosine.

[0062] The term “CpG detection site” as used herein refers to a region in a probe that is configured to hybridize to a CpG site of a target DNA molecule. The CpG site on the target DNA molecule can comprise cytosine and guanine separated by one phosphate group, where cytosine is methylated or unmethylated. The CpG site on the target DNA molecule can comprise uracil and guanine separated by one phosphate group, where the uracil is generated by the conversion of unmethylated cytosine.

[0063] The term “UpG” is a shorthand for 5′-U-phosphate-G-3′ that is uracil and guanine separated by only one phosphate group. UpG can be generated by a bisulfite treatment of a DNA that converts unmethylated cytosines to uracils. Cytosines can be converted to uracils by other methods known in the art, such as chemical modification, synthesis, or enzymatic conversion.

[0064] The term “hypomethylated” or “hypermethylated” as used herein refers to a methylation status of a DNA molecule containing multiple CpG sites (e.g., more than 3, 4, 5, 6, 7, 8, 9, 10, etc.) where a high percentage of the CpG sites (e.g., more than 80%, 85%, 90%, or 95%, or any other percentage within the range of 50%-100%) are unmethylated or methylated, respectively.

[0065] The terms “methylation state vector” or “methylation status vector” as used herein refers to a vector comprising multiple elements, where each element indicates the methylation status of a methylation site in a DNA molecule comprising multiple methylation sites, in the order they appear from 5′ to 3′ in the DNA molecule. For example, <Mₓ, Mₓ₊₁, Mₓ₊₂>, <Mₓ, Mₓ₊₁, Uₓ₊₂>, . . . , <Uₓ, Uₓ₊₁, Uₓ₊₂> can be methylation vectors for DNA molecules comprising three methylation sites, where M represents a methylated methylation site and U represents an unmethylated methylation site.

[0066] The term “abnormal methylation pattern” or “anomalous methylation pattern” as used herein refers to the methylation pattern of a DNA molecule or a methylation state vector that is expected to be found in a sample less frequently than a threshold value. In one embodiment provided herein, the expectedness of finding a specific methylation state vector in a healthy control group comprising healthy individuals is represented by a p-value. A low p-value score generally corresponds to a methylation state vector which is relatively unexpected in comparison to other methylation state vectors within samples from healthy individuals. A high p-value score generally corresponds to a methylation state vector which is relatively more expected in comparison to other methylation state vectors found in samples from healthy individuals in the healthy control group. A methylation state vector having a p-value lower than a threshold value (e.g., 0.1, 0.01, 0.001, 0.0001, etc.) can be defined as an abnormal/anomalous methylation pattern. Various methods known in the art can be used to calculate a p-value or expectedness of a methylation pattern or a methylation state vector. Exemplary methods provided herein involve use of a Markov chain probability that assumes methylation statuses of CpG sites to be dependent on methylation statuses of neighboring CpG sites. Alternate methods provided herein calculate the expectedness of observing a specific methylation state vector in healthy individuals by utilizing a mixture model including multiple mixture components, each being an independent-sites model where methylation at each CpG site is assumed to be independent of methylation statuses at other CpG sites.

[0067] The term “HD sample” as used herein refers to a sample comprising genomic DNAs from an individual diagnosed with a hematological disorder. The genomic DNAs can be, but are not limited to, cfDNA fragments or chromosomal DNAs from a subject with a hematological disorder. The genomic DNAs can be sequenced (or otherwise detected) and their methylation status can be assessed by methods known in the art, for example, bisulfite sequencing. When genomic sequences are obtained from public database (e.g., The Cancer Genome Atlas (TCGA)) or experimentally obtained by sequencing a genome of an individual diagnosed with a hematological disorder, HD sample can refer to genomic DNAs or cfDNA fragments having the genomic sequences. The term “HD samples” as a plural refers to samples comprising genomic DNAs from multiple individuals, each individual has been diagnosed with a hematological disorder. In various embodiments, HD samples from more than 10, 20, 50, 100, 200, 300, 500, 1,000, 2,000, 5,000, 10,000, 20,000, 40,000, 50,000, or more individuals diagnosed with a hematological disorder are used.

[0068] The term “non-HD sample” or “healthy sample” as used herein refers to a sample comprising genomic DNAs from an individual not diagnosed with a hematological disorder. The genomic DNAs can be, but are not limited to, cfDNA fragments or chromosomal DNAs from a subject without a hematological disorder (e.g., a healthy subject). The genomic DNAs can be sequenced (or otherwise detected) and their methylation status can be assessed by methods known in the art, for example, bisulfite sequencing. When genomic sequences are obtained from public database (e.g., The Cancer Genome Atlas (TCGA)) or experimentally obtained by sequencing a genome of an individual without a hematological disorder, non-HD sample can refer to genomic DNAs or cfDNA fragments having the genomic sequences. The term “non-HD samples” as a plural refers to samples comprising genomic DNAs from multiple individuals, each individual is without a hematological disorder. In various embodiments, healthy samples from more than 10, 20, 50, 100, 200, 300, 500, 1,000, 2,000, 5,000, 10,000, 20,000, 40,000, 50,000, or more individuals without a hematological disorder are used.

[0069] The term “training sample” as used herein refers to a sample used to train a classifier described herein and/or to select one or more genomic regions for hematological disorder detection. The training samples can comprise genomic DNAs or a modification there of, from one or more healthy subjects and from one or more subjects having a hematological disorder. The genomic DNAs can be, but are not limited to, cfDNA fragments or chromosomal DNAs. The genomic DNAs can be sequenced (or otherwise detected) and their methylation status can be assessed by methods known in the art, for example, bisulfite sequencing. When genomic sequences are obtained from public database (e.g., The Cancer Genome Atlas (TCGA)) or experimentally obtained by sequencing a genome of an individual, a training sample can refer to genomic DNAs or cfDNA fragments having the genomic sequences.

[0070] The term “test sample” as used herein refers to a sample from a subject, whose health condition was, has been or will be tested using a classifier and/or an assay panel described herein. The test sample can comprise genomic DNAs or a modification there of. The genomic DNAs can be, but are not limited to, cfDNA fragments or chromosomal DNAs.

[0071] The term “target genomic region” as used herein refers to a region in a genome selected for analysis in test samples. An assay panel is generated with probes designed to hybridize to (and optionally pull down) nucleic acid fragments derived from the target genomic region or a fragment thereof. A nucleic acid fragment derived from the target genomic region refers to a nucleic acid fragment generated by degradation, cleavage, bisulfite conversion, or other processing of the DNA from the target genomic region.

[0072] Various target genomic regions are described according to their chromosomal location in the sequence listing filed herewith. Chromosomal DNA is double-stranded, so a target genomic region includes two DNA strands: one with the sequence provided in the listing and a second that is a reverse complement to the sequence in the listing. Probes can be designed to hybridize to one or both sequences. Optionally, probes hybridize to converted sequences resulting from, for example, treatment with sodium bisulfite.

[0073] The term “off-target genomic region” as used herein refers to a region in a genome which has not been selected for analysis in test samples, but has sufficient homology to a target genomic region to potentially be bound and pulled down by a probe designed to target the target genomic region. In one embodiment, an off-target genomic region is a genomic region that aligns to a probe along at least 45 bp with at least a 90% match rate.

[0074] The terms “converted DNA molecules,” “converted cfDNA molecules,” and “modified fragment obtained from processing of the cfDNA molecules” refer to DNA molecules obtained by processing DNA or cfDNA molecules in a sample for the purpose of differentiating a methylated nucleotide and an unmethylated nucleotide in the DNA or cfDNA molecules. For example, in one embodiment, the sample can be treated with bisulfite ion (e.g., using sodium bisulfite), as is well-known in the art, to convert unmethylated cytosines (“C”) to uracils (“U”). In another embodiment, the conversion of unmethylated cytosines to uracils is accomplished using an enzymatic conversion reaction, for example, using a cytidine deaminase (such as APOBEC). After treatment, converted DNA molecules or cfDNA molecules include additional uracils which are not present in the original cfDNA sample. Replication by DNA polymerase of a DNA strand comprising a uracil results in addition of an adenine to the nascent complementary strand instead of the guanine normally added as the complement to a cytosine or methylcytosine.

[0075] The terms “cell free nucleic acid,” “cell free DNA,” or “cfDNA” refers to nucleic acid fragments that circulate in an individual's body (e.g., bloodstream) and originate from one or more healthy cells and/or from one or more HD cells (i.e., cells from a subject having a hematological disorder). Additionally, cfDNA may come from other sources such as viruses, fetuses, etc.

[0076] The term “circulating tumor DNA” or “ctDNA” refers to nucleic acid fragments that originate from tumor cells, which may be released into an individual's bloodstream as result of biological processes such as apoptosis or necrosis of dying cells or actively released by viable tumor cells.

[0077] The term “fragment” as used herein can refer to a fragment of a nucleic acid molecule. For example, in one embodiment, a fragment can refer to a cfDNA molecule in a blood or plasma sample, or a cfDNA molecule that has been extracted from a blood or plasma sample. An amplification product of a cfDNA molecule may also be referred to as a “fragment.” In another embodiment, the term “fragment” refers to a sequence read, or set of sequence reads, that have been processed for subsequent analysis (e.g., for in machine-learning based classification), as described herein. For example, as is well known in the art, raw sequence reads can be aligned to a reference genome and matching paired end sequence reads assembled into a longer fragment for subsequent analysis.

[0078] The term “individual” refers to a human individual. The term “healthy individual” refers to an individual presumed not to have a hematological disorder.

[0079] The term “subject” refers to an individual whose DNA is being analyzed. A subject may be a test subject whose DNA is be evaluated using a targeted panel as described herein to evaluate whether the person has a hematological disorder or another disease. A subject may also be part of a control group known not to have a hematological disorder or another disease. A subject may also be part of a hematological disorder or other disease group known to have a hematological disorder or another disease. Control and cancer/disease groups may be used to assist in designing or validating the targeted panel.

[0080] The term “sequence reads” as used herein refers to nucleotide sequences reads from a sample. Sequence reads can be obtained through various methods provided herein or as known in the art.

[0081] The term “sequencing depth” as used herein refers to the count of the number of times a given target nucleic acid within a sample has been sequenced (e.g., the count of sequence reads at a given target region). Increasing sequencing depth can reduce required amounts of nucleic acids required to assess a disease state (e.g., hematological disease state).

[0082] The term “tissue of origin” or “TOO” as used herein refers to the organ, organ group, body region or cell type that a hematological disease arises or originates from. The identification of a tissue of origin or cancer cell type typically allows for identification of the most appropriate next steps in the care continuum of cancer to further detect, diagnose, stage and decide on treatment.

[0083] The term “transition” generally refers to changes in base composition from one purine to another purine, or from one pyrimidine to another pyrimidine. For instance, the following changes are transitions: C→U, U→C, G→A, A→G, C→T, and T→C.

[0084] “An entirety of probes” of a panel or bait set or “an entirety of polynucleotide-containing probes” of a panel or bait set generally refers to all of the probes delivered with a specified panel or bait set. For instance, in some embodiments, a panel or bait set may include both (1) probes having features specified herein (e.g., probes for binding to cell-free DNA fragments corresponding to or derived from genomic regions set forth herein in one or more Lists) and (2) additional probes that do not contain such feature(s). The entirety of probes of a panel generally refers to all probes delivered with the panel or bait set, including such probes that do not contain the specified feature(s).

### HD Assay Panel

[0085] In a first aspect, the present description provides an HD assay panel comprising a plurality of probes or a plurality of probe pairs. The assay panels described herein can alternatively be referred to as bait sets or as compositions comprising bait oligonucleotides. The probes can be polynucleotide-containing probes that are specifically designed to target one or more nucleic acid molecules corresponding to, or derived from genomic regions differentially methylated between HD and non-HD samples, between different HD types, between CHIP and other HD samples, between different cancer tissue of origin (TOO) types, or between samples of different stages of HD. In some embodiments, the target genomic regions (or nucleic acid molecules derived therefrom) are selected to maximize classification accuracy, subject to a size budget (which is determined by sequencing budget and desired depth of sequencing).

[0086] The HD assay panel's design and utility is generally described in FIG. 2. For designing the HD assay panel, an analytics system collects information on the methylation status of CpG sites of nucleic acid fragments from samples corresponding to various outcomes under consideration, e.g., samples known to have HD, samples with or without CHIP, samples with HD other than CHIP, samples considered to be healthy, samples from a known TOO, etc. These samples may be processed using one or more methods known in the art to determine the methylation status of CpG sites (e.g., with whole-genome bisulfite sequencing (WGBS)), or the information may be obtained from a public database (e.g., TCGA). The analytics system may be any generic computing system with a computer processor and a computer-readable storage medium with instructions for executing the computer processor to perform any or all operations described in this present disclosure.

[0087] Exemplary methodology for designing a hematological disorder assay panel is generally described in FIG. 2. For instance, to design a hematological disorder assay panel, an analytics system may collect information on the methylationn status of CpG sites of nucleic acid fragments from samples corresponding to various outcomes under consideration, e.g., samples known to have hematological disorder, samples considered to be healthy, etc. These samples may be processed (e.g., with whole-genome bisulfite sequencing (WGBS)) to determine the methylation status of CpG sites, or the information may be obtained from TCGA. The analytics system may be any generic computing system with a computer processor and a computer-readable storage medium with instructions for executing the computer processor to perform any or all operations described in this present disclosure.

[0088] The analytics system may then select target genomic regions based on methylation patterns of nucleic acid fragments. One approach considers pairwise distinguishability between pairs of outcomes for regions (or more specifically for CpG sites within regions). Another approach considers distinguishability for regions (or more specifically for CpG sites within regions) when considering each outcome against the remaining outcomes. From the selected target genomic regions with high distinguishability power, the analytics system may design probes to target fragments from the selected genomic regions. The analytics system may generate variable sizes of the hematological disorder assay panel, e.g., where a small sized hematological disorder assay panel includes probes targeting the most informative genomic regions, a medium sized hematological disorder assay panel includes probes from the small sized hematological disorder assay panel and additional probes targeting a second tier of informative genomic regions, and a large sized hematological disorder assay panel includes probes from the small-sized and the medium-sized hematological disorder assay panels along with even more probes targeting a third tier of informative genomic regions. With data obtained such hematological disorder assay panels (e.g., the methylation status on nucleic acids derived from the hematological disorder assay panels), the analytics system may train classifiers with various classification techniques to predict a sample's likelihood of having a particular outcome or state, e.g., hematological disorder, other disorder, other disease, etc.

[0089] In some embodiments, the HD assay panel comprises at least 500 pairs of probes, wherein each pair of the at least 500 pairs comprises two probes configured to overlap each other by an overlapping sequence, wherein the overlapping sequence comprises at least 30-nucleotides, and wherein each probe is configured to hybridize to a converted DNA (e.g., a cfDNA) molecule corresponding to one or more genomic regions. In some embodiments, each of the genomic regions comprises at least five methylation sites, and wherein the at least five methylation sites have an abnormal methylation pattern in HD samples or a different methylation pattern between samples of a different HD. For example, in one embodiment, the at least five methylation sites are differentially methylated between HD and non-HD samples, between different HD types, between CHIP and other HD samples, between blood cancer and solid cancer, between different cancer tissue of origin (TOO) types, or between samples of different stages of HD. In some embodiments, each pair of probes comprises a first probe and a second probe, wherein the second probe differs from the first probe. The second probe can overlap with the first probe by an overlapping sequence that is at least 30, at least 40, at least 50, or at least 60 nucleotides in length.

[0090] The target genomic regions can be selected from any one of Lists 1-8 (TABLE 1). In some embodiments, the HD assay panel comprises a plurality of probes, wherein each of the plurality of probes is configured to hybridize to a converted cfDNA molecule corresponding to one or more of the genomic regions in any one of Lists 1-8. In some embodiments, the plurality of different bait oligonucleotides is configured to hybridize to DNA molecules derived from at least 20% of the target genomic regions of any one of Lists 1-8. In some embodiments, the plurality of different bait oligonucleotides is configured to hybridize to DNA molecules derived from at least 30%, 40%, 50%, 60%, 70%, or 80% of the target genomic regions of any one of Lists 1-8. For example, the plurality of different bait oligonucleotides can be configured to hybridize to DNA molecules derived from at least 20%, 30%, 40%, 50%, 60%, 70%, or 80% of the target genomic regions of Lists 2-4, or from at least 20%, 30%, 40%, 50%, 60%, 70%, or 80% of the target genomic regions of Lists 5-7.

[0091] The target genomic regions can be selected from List 1. The target genomic regions can be selected from List 2. In some embodiments, a method for detecting lymphoid neoplasm comprises evaluating the methylation status for sequencing reads derived from the target genomic regions of List 2. The target genomic regions can be selected from List 3. In some embodiments, a method for detecting multiple myeloma comprises evaluating the methylation status for sequencing reads derived from the target genomic regions of List 3. The target genomic regions can be selected from List 4. In some embodiments, a method for detecting myeloid neoplasm comprises evaluating the methylation status for sequencing reads derived from the target genomic regions of List 4. The target genomic regions can be selected from List 5. In some embodiments, a method for detecting lymphoid neoplasm comprises evaluating the methylation status for sequencing reads derived from the target genomic regions of List 5. The target genomic regions can be selected from List 6. In some embodiments, a method for detecting multiple myeloma comprises evaluating the methylation status for sequencing reads derived from the target genomic regions of List 6. The target genomic regions can be selected from List 7. In some embodiments, a method for detecting myeloid neoplasm comprises evaluating the methylation status for sequencing reads derived from the target genomic regions of List 7. The target genomic regions can be selected from List 8. In some embodiments, a method for detecting myeloid neoplasm comprises evaluating the methylation status for sequencing reads derived from the target genomic regions of List 8. In some embodiments, the genomic regions can be selected from two or more, three or more, four or more, five or more, six or more, of Lists 1-8.

[0092] Since the probes are configured to hybridize to a converted DNA or cfDNA molecule corresponding to, or derived from, one or more genomic regions, the probes can have a sequence different from the targeted genomic region. For example, a DNA containing unmethylated CpG site will be converted to include UpG instead of CpG because unmethylated cytosines are converted to uracils by a conversion reaction (e.g., bisulfite treatment). As a result, a probe is configured to hybridize to a sequence including UpG instead of a naturally existing unmethylated CpG. Accordingly, a complementary site in the probe to the unmethylation site can comprise CpA instead of CpG, and some probes targeting a hypomethylated site where all methylation sites are unmethylated can have no guanine (G) bases. In some embodiments, at least 3%, 5%, 10%, 15%, or 20% of the probes comprise no CpG sequences.

[0093] The HD assay panel can be used to detect the presence or absence of HD generally and/or provide an HD classification such as an HD type or a stage of HD. In some embodiments, the HD assay panel can be used to provide a cancer classification such as cancer type, stage of cancer such as non-cancer, cancer stage I, cancer stage II, cancer stage III, or cancer stage IV. The panel may include probes targeting nucleic acids derived genomic regions differentially methylated between HD and non-HD samples, between different HD types, between CHIP and other HD samples, between different cancer tissue of origin (TOO) types, or between samples of different stages of HD. For example, in some embodiments, an HD assay panel is designed to enrich nucleic acids derived from differentially methylated genomic regions based on bisulfite sequencing data generated from the cfDNA from HD and non-HD individuals.

[0094] Each probe, probe pair, or probe set can be designed to target nucleic acid fragments corresponding to or derived from one or more target genomic regions. The target genomic regions are selected based on several criteria designed to increase selective enriching of informative nucleic acid fragments while decreasing noise and non-specific bindings.

[0095] In one example, a panel can include probes that can selectively hybridize (i.e., bind to) and optionally enrich cfDNA fragments that are differentially methylated in HD samples. In this case, sequence from the enriched fragments can provide information relevant to detection of HD. Furthermore, the probes are designed to target genomic regions that are determined to have an abnormal methylation pattern in HD samples, or in sample from a specific type of HD. In one embodiment, probes are designed to target genomic regions determined to be hypermethylated or hypomethylated in certain HDs, or cancer tissue of origins, to provide additional selectivity and specificity of the detection. In some embodiments, a panel comprises probes targeting hypomethylated fragments. In some embodiments, a panel comprises probes targeting hypermethylated fragments. In some embodiments, a panel comprises both a first set of probes targeting hypermethylated fragments and a second set of probes targeting hypomethylated fragments. (FIG. 1C) In some embodiments, the ratio between the first set of probes targeting hypermethylated fragments and the second set of probes targeting hypomethylated fragments (Hyper:Hypo ratio) ranges between 0.4 and 2, between 0.5 and 1.8, between 0.5 and 1.6, between 1.4 and 1.6, between 1.2 and 1.4, between 1 and 1.2, between 0.8 and 1, between 0.6 and 0.8 or between 0.4 and 0.6. Methods of identifying genomic regions (i.e., genomic regions giving rise to differentially methylated DNA molecules or anomalously methylated DNA molecules) between HD and non-HD samples, between different HD types, between CHIP and other HD samples, between different cancer tissue of origin (TOO) types, or between samples of different stages of HD (e.g., non-cancer, cancer stage I, cancer stage II, cancer stage III, cancer stage IV) are provided in detail herein. and methods of identifying anomalously methylated DNA molecules or fragments that are identified as indicative of HD are provided in detail herein.

[0096] In a second example, genomic regions can be selected when the genomic regions give rise to anomalously methylated DNA molecules in HD samples or samples with known HD types (e.g., CHIP, blood cancer). For example, as described herein, a Markov model trained on a set of non-HD samples can be used to identify genomic regions that give rise to anomalously methylated DNA molecules (i.e., DNA molecules having a methylation pattern below a p-value threshold).

[0097] Each of the probes can target a genomic region comprising at least 30 bp, 35 bp, 40 bp, 45 bp, 50 bp, 60 bp, 70 bp, 80 bp, 90 bp, 100 bp or more. In some embodiments, the genomic regions can be selected to have less than 30, 25, 20, 15, 12, 10, 8, or 6 methylation sites.

[0098] The genomic regions can be selected when at least 80, 85, 90, 92, 95, or 98% of the at least five methylation (e.g., CpG) sites within the region are either methylated or unmethylated in non-HD or HD samples, samples of a specific type of HD (e.g., samples of CHIP or cancer samples from a tissue of origin (TOO)) or samples of a specific stage of HD.

[0099] Genomic regions may be further filtered to select only those that are likely to be informative based on their methylation patterns, for example, CpG sites that are differentially methylated between HD and non-HD samples (e.g., abnormally methylated or unmethylated in HD versus non-HD), between different HD types, between CHIP and other HD samples, or between samples of different stages of HD. For the selection, calculation can be performed with respect to each CpG or a plurality of CpG sites. For example, a first count is determined that is the number of HD-containing samples (HD_count) that include a fragment overlapping that CpG, and a second count is determined that is the number of total samples containing fragments overlapping that CpG site (total). Genomic regions can be selected based on criteria positively correlated to the number of HD-containing samples (HD_count) that include a fragment indicative of HD overlapping that CpG site, and inversely correlated with the number of total samples containing fragments indicative of HD overlapping that CpG site (total). In one embodiment, the number of non-HD samples (n_{non-HD}) and the number of HD samples (n_{HD}) having a fragment overlapping a CpG site are counted. Then the probability that a sample is HD is estimated, for example as (n_{HD}+1)/(n_{HD}+n_{non-HD}+2).

[0100] CpG sites scored by this metric are ranked and greedily added to a panel until the panel size budget is exhausted. The process of selecting genomic regions indicative of HD is further detailed herein.

[0101] Different target regions may be selected depending on whether the assay is intended to be a pan-HD assay or a single-HD assay, or what kind of flexibility is desired. A panel for detecting a specific HD type can be designed using a similar process. In this embodiment, for each HD type, and for each CpG site, the information gain is computed to determine whether to include a probe targeting that CpG site. The information gain may be computed for samples with a given HD compared to all other samples. For example, consider two random variables, “AF” and “CT”. “AF” is a binary variable that indicates whether there is an abnormal fragment overlapping a particular CpG site in a particular sample (yes or no). “CT” is a binary random variable indicating whether the HD is of a particular type (e.g., CHIP, leukemia, lymphoid neoplasms (e.g. lymphoma), multiple myeloma, and myeloid neoplasm). One can compute the mutual information with respect to “CT” given “AF.” That is, how many bits of information about the HD type (e.g., CHIP vs. blood cancer) are gained if one knows whether there is an anomalous fragment overlapping a particular CpG site. This can be used to rank CpG's based on how CHIP-specific they are. This procedure is repeated for a plurality of HD types. If a particular region is differentially methylated only in CHIP (and not blood cancer), CpG's in that region would tend to have high information gains for CHIP. For each HD type, CpG sites are ranked by this information gain metric, and then greedily added to a panel until the size budget for that HD type is exhausted.

[0102] Further filtration can be performed to select probes with high specificity for enrichment (i.e., high binding efficiency) of nucleic acids derived from targeted genomic regions. Probes can be filtered to reduce non-specific binding (or off-target binding) to nucleic acids derived from non-targeted genomic regions. For example, probes can be filtered to select only those probes having less than a set threshold of off-target binding events. In one embodiment, probes can be aligned to a reference genome (e.g., a human reference genome) to select probes that align to less than a set threshold of regions across the genome. For example, probes can be selected that align to less than 25, 24, 23, 22, 21, 20, 19, 18, 17, 16, 15, 14, 13, 12, 11, 10, 9 or 8 off-target regions across the reference genome. In other cases, filtration is performed to remove genomic regions when the sequence of the target genomic regions appears more than 5, 10, 15, 20, 21, 22, 23, 24, 25, 26, 27, 28, 29, 30, 31, 32, 33, 34 or 35 times in a genome. Further filtration can be performed to select target genomic regions when a probe sequence, or a set of probe sequences that are 90%, 91%, 92%, 93%, 94%, 95%, 96%, 97%, 98% or 99% homologous to the target genomic regions, appear less than 25, 24, 23, 22, 21, 20, 19, 18, 17, 16, 15, 14, 13, 12, 11, 10, 9 or 8 times in a reference genome, or to remove target genomic regions when the probe sequence, or a set of probe sequences designed to enrich for the targeted genomic region are 90%, 91%, 92%, 93%, 94%, 95%, 96%, 97%, 98% or 99% homologous to the target genomic regions, appear more than 5, 10, 15, 20, 21, 22, 23, 24, 25, 26, 27, 28, 29, 30, 31, 32, 33, 34 or 35 times in a reference genome. This is for excluding repetitive probes that can pull down off-target fragments, which are not desired and can impact assay efficiency.

[0103] In some embodiments, a fragment-probe overlap of at least 45 bp was demonstrated to be effective for achieving a non-negligible amount of pulldown (though as one of skill in the art would appreciate this number can very) as provided in Example 1. In some embodiments, more than a 10% mismatch rate between the probe and fragment sequences in the region of overlap is sufficient to greatly disrupt binding, and thus pulldown efficiency. Therefore, sequences that can align to the probe along at least 45 bp with at least a 90% match rate can be candidates for off-target pulldown. Thus, in one embodiment, the number of such regions are scored. The best probes have a score of 1, meaning they match in only one place (the intended target region). Probes with an intermediate score (say, less than 5 or 10) may in some instances be accepted, and in some instances any probes above a particular score are discarded. Other cutoff values can be used for specific samples.

[0104] Once the probes hybridize and capture DNA fragments corresponding to, or derived from a target genomic region, the hybridized probe-DNA fragment intermediates are pulled down (or isolated), and the targeted DNA is amplified and its methylation status is determined by, for example, sequencing or hybridization to a microarray, etc. The sequence read provides information relevant for detection of HD. For this end, a panel is designed to include a plurality of probes that can capture fragments that can together provide information relevant to detection of HD. In some embodiments, a panel includes at least 500, 1,000, 2,000, 2,500, 5,000, 6,000, 7,500, 10,000, 15,000, 20,000, 25,000, 30,000, 35,000, 40,000, 50,000, 60,000, 70,000, 80,000, 90,000, 100,000, 110,000 or 120,000 pairs of probes. In other embodiments, a panel includes at least 1,000, 2,000, 5,000, 10,000, 50,000, 100,000, 150,000, 200,000, 250,000, 300,000, 400,000, 500,000, 550,000, 600,000, 700,000, or 800,000 probes. The plurality of probes together can comprise at least 10,000, 20,000, 30,000, 40,000, 50,000, 60,000, 70,000, 80,000, 90,000, 100,000, 120,000, 140,000, 160,000, 180,000, 200,000, 240,000, 260,000, 280,000, 300,000, 320,000, 400,000, 450,000, 500,000, 550,000, 600,000, 650,000, 700,000, 750,000, 800,000, 850,000, 900,000, 1 million, 1.5 million, 2 million, 2.5 million, 3 million, 3.5 million, 4 million, 4.5 million, or 5 million nucleotides.

[0105] The selected target genomic regions can be located in various positions in a genome, including but not limited to exons, introns, intergenic regions, and other parts. In some embodiments, probes targeting non-human genomic regions, such as those targeting viral genomic regions, can be added.

[0106] In some instances, primers may be used to specifically amplify targets/biomarkers of interest (e.g., by PCR), thereby enriching the sample for desired targets/biomarkers (optionally without hybridization capture). For example, forward and reverse primers can be prepared for each genomic region of interest and used to amplify fragments that correspond to or are derived from the desired genomic region. Thus, while the present disclosure pays particular attention to HD assay panels and bait sets for hybridization capture, the disclosure is broad enough to encompass other methods for enrichment of cell-free DNA. Accordingly, a skilled artisan, with the benefit of this disclosure, will recognize that methods analogous to those described herein in connection with hybridization capture can alternatively be accomplished by replacing hybridization capture with some other enrichment strategy, such as PCR amplification of cell-free DNA fragments that correspond with genomic regions of interest. In some embodiments, bisulfite padlock probe capture is used to enrich regions of interest, such as is described in Zhang et al. (US 2016/0340740). In some embodiments, additional or alternative methods are used for enrichment (e.g., non-targeted enrichment) such as reduced representation bisulfite sequencing, methylation restriction enzyme sequencing, methylation DNA immunoprecipitation sequencing, methyl-CpG-binding domain protein sequencing, methyl DNA capture sequencing, or microdroplet PCR.

### Probes

[0107] The HD assay panel provided herein is a panel including a set of hybridization probes (also referred to herein as “probes”) designed to, during enrichment, target and pull down nucleic acid fragments of interest for the assay. In some embodiments, the probes are designed to hybridize and enrich DNA or cfDNA molecules from HD samples that have been treated to convert unmethylated cytosines (C) to uracils (U). In other embodiments, the probes are designed to hybridize and enrich DNA or cfDNA molecules from a specific type of HD that has been treated to convert unmethylated cytosines (C) to uracils (U). The probes can be designed to anneal (or hybridize) to a target (complementary) strand of DNA or RNA. The target strand can be the “positive” strand (e.g., the strand transcribed into mRNA, and subsequently translated into a protein) or the complementary “negative” strand. In a particular embodiment, an HD assay panel may include sets of two probes, one probe targeting the positive strand and the other probe targeting the negative strand of a target genomic region.

[0108] For each target genomic region, four possible probe sequences can be designed. DNA molecules corresponding to, or derived from, each target region is double-stranded, as such, a probe or probe set can target either the “positive” or forward strand or its reverse complement (the “negative” strand). Additionally, in some embodiments, the probes or probe sets are designed to enrich DNA molecules or fragments that have been treated to convert unmethylated cytosines (C) to uracils (U). Because the probes or probe sets are designed to enrich DNA molecules corresponding to, or derived from the targeted regions after conversion, the probe's sequence can be designed to enrich DNA molecules of fragments where unmethylated C's have been converted to U's (by utilizing A's in place of G's at sites that are unmethylated cytosines in DNA molecules or fragments corresponding to, or derived from, the targeted region). In one embodiment, probes are designed to bind to, or hybridize to, DNA molecules or fragments from genomic regions known to contain HD-specific methylation patterns (e.g., hypermethylated or hypomethylated DNA molecules), thereby enriching (or detecting) HD-specific DNA molecules or fragments. Targeting genomic regions, or HD-specific methylation patterns, can be advantageous allowing one to specifically enrich for DNA molecules or fragments identified as informative for pan-HD or a specific type of HD, and thus, lowering detection needs and costs (e.g., lowering sequencing costs). In other embodiments, two probe sequences can be designed per a target genomic region (one for each DNA strand).

[0109] In still other cases, probes are designed to enrich for all DNA molecules or fragments corresponding to, or derived from a targeted region (i.e., regardless of strand or methylation status). This might be because the HD methylation status is not highly methylated or unmethylated, or because the probes are designed to target small mutations or other variations rather than methylation changes, with these other variations similarly indicative of the presence or absence of an HD or the presence or absence of a specific HD. In that case, all four possible probe sequences can be included per a target genomic region.

[0110] In some embodiments, some probes are designed to detect variants and mutations indicative to the presence or absence of an HD or the presence or absence of a specific HD. Such probes are designed to enrich DNA molecules or fragments corresponding to or derived from a targeted region that can include such variants or mutations. Some of the variants or mutations can be one or more loci known to be associated with or suspected of being associated with CHIP or another HD. Some of the variants or mutations can be one or more loci identified to be indicative of CHIP or other HD by methods described in 4.5.

[0111] The probes can range in length from 10 s, 100 s, 200 s, or 300 s of base pairs. The probes can comprise at least 50, 75, 100, or 120 nucleotides. The probes can comprise less than 300, 250, 200, or 150 nucleotides. In an embodiment, the probes comprise 100-150 nucleotides. In one embodiment, the probes comprise 120 nucleotides.

[0112] In some embodiments, the probes are designed in a “2× tiled” fashion to cover overlapping portions of a target region. Each probe optionally overlaps in coverage at least partially with another probe in the library. In such embodiments, the panel contains multiple pairs of probes, with each probe in a pair overlapping the other by at least 25, 30, 35, 40, 45, 50, 60, 70, 75 or 100 nucleotides. In some embodiments, the overlapping sequence can be designed to be complementary to a target genomic region (or cfDNA derived therefrom) or to be complementary to a sequence with homology to a target region or cfDNA. Thus, in some embodiments, at least two probes are complementary to the same sequence within a target genomic region, and a nucleotide fragment corresponding to or derived from the target genomic region can be bound and pulled down by at least one of the probes. Other levels of tiling are possible, such as 3× tiling, 4× tiling, etc., wherein each nucleotide in a target region can bind to more than two probes.

[0113] In one embodiment, each base in a target genomic region is overlapped by exactly two probes, as illustrated in FIG. 1A. A single pair of probes is enough to pull down a genomic region if the overlap between the two probes is longer than the target genomic region and extends beyond both ends of the target genomic region. In some instances, even relatively small target regions may be targeted with three probes (see FIG. 1A). A probe set comprising three or more probes is optionally used to capture a larger genomic region (see FIG. 1B). In some embodiments, subsets of probes will collectively extend across an entire genomic region (e.g., may be complementary to non-converted or converted fragments from the genomic region). A tiled probe set optionally comprises probes that collectively include at least two probes that overlap every nucleotide in the genomic region. This is done to ensure that cfDNAs comprising a small portion of a target genomic region at one end will have a substantial overlap extending into the adjacent non-targeted genomic region with at least one probe, to provide for efficient capture.

[0114] For example, a 100 bp cfDNA fragment comprising a 30 nt target genomic region can be guaranteed to have at least 65 bp overlap with at least one of the overlapping probes. Other levels of tiling are possible. For example, to increase target size and add more probes in a panel, probes can be designed to expand a 30 bp target region by at least 70 bp, 65 bp, 60 bp, 55 bp, or 50 bp. To capture any fragment that overlaps the target region at all (even if by only 1 bp), the probes can be designed to extend past the ends of the target region on either side.

[0115] The probes are designed to analyze methylation status of target genomic regions (e.g., of the human or another organism) that are suspected to correlate with the presence or absence of HD generally, presence or absence of certain types of HD, HD stage, or presence or absence of other types of diseases (e.g., other types of cancer such as solid cancer).

[0116] Furthermore, the probes are designed to effectively hybridize to (or bind to) and optionally pull down cfDNA fragments containing a target genomic region. In some embodiments, the probes are designed to cover overlapping portions of a target region, so that each probe is “tiled” in coverage such that each probe overlaps in coverage at least partially with another probe in the library. In such embodiments, the panel contains multiple pairs of probes, where each pair comprises at least two probes overlapping each other by an overlapping sequence of at least 25, 30, 35, 40, 45, 50, 60, 70, 75 or 100 nucleotides. In some embodiments, the overlapping sequence can be designed to have sequence homology with or to be complementary to a target genomic region (or a converted version thereof), thus a nucleotide fragment derived from or corresponding to the target genomic region can be bound and optionally pulled down by at least one of the probes.

[0117] In one embodiment, the smallest target genomic region is 30 bp. When a new target region is added to the panel (based on the greedy selection as described above), the new target region of 30 bp can be centered on a specific CpG site of interest. Then, it is checked whether each edge of this new target is close enough to other targets such that they can be merged. This is based on a “merge distance” parameter which can be 200 bp by default but can be tuned. This allows close but distinct target regions to be enriched with overlapping probes. Depending on whether close enough targets exist to the left or right of the new target, the new target can be merged with nothing (increasing the number of panel targets by one), merged with just one target either to the left or the right (not changing the number of panel targets), or merged with existing targets both to the left and right (reducing the number of panel targets by one).

### Methods of Selecting Target Genomic Regions Based on Methylation Status

[0118] In another aspect, methods of selecting target genomic regions for detecting HD and/or a specific type or stage of HD are provided. The targeted genomic regions can be used to design and manufacture probes for an HD assay panel. Methylation status of DNA or cfDNA molecules corresponding to, or derived from, the target genomic regions can be screened using the HD assay panel. Alternative methods, for example by WGBS or other methods known in the art, can be also implemented to detect methylation status of DNA molecules or fragments corresponding to, or derived from, the target genomic regions.

### Sample Processing

[0119] FIG. 7A is a flowchart of a process 100 for processing a nucleic acid sample and generating methylation state vectors for DNA fragments, according to one embodiment. While the present disclosure pays particular attention to sequencing based approaches for detecting nucleic acids and determining methylation status, the disclosure is broad enough to encompass other methods for determining methylation status of nucleic acid sequences (such as methylation-aware sequencing approaches described in WO 2014/043763, which is incorporated herein by reference). As described in FIG. 7A, the method includes, but is not limited to, the following steps. For example, any step of the method may comprise a quantitation sub-step for quality control or other laboratory assay procedures known to one skilled in the art.

[0120] In step 105, a nucleic acid sample (DNA or RNA) is extracted from a subject. In the present disclosure, DNA and RNA may be used interchangeably unless otherwise indicated. That is, the embodiments described herein may be applicable to both DNA and RNA types of nucleic acid sequences. However, the examples described herein may focus on DNA for purposes of clarity and explanation. The sample may be any subset of the human genome, including the whole genome. The sample may include blood, plasma, serum, urine, fecal, saliva, other types of bodily fluids, or any combination thereof. In some embodiments, methods for drawing a blood sample (e.g., syringe or finger prick) may be less invasive than procedures for obtaining a tissue biopsy, which may require surgery. The extracted sample may comprise cfDNA and/or ctDNA. For healthy individuals, the human body may naturally clear out cfDNA and other cellular debris. If a subject has a cancer or disease, cfDNA and/or ctDNA in an extracted sample may be present at a level sufficient to detect the hematological disorder.

[0121] In step 110, the cfDNA fragments are treated to convert unmethylated cytosines to uracils. In one embodiment, the method uses a bisulfite treatment of the DNA which converts the unmethylated cytosines to uracils without converting the methylated cytosines. For example, a commercial kit such as the EZ DNA Methylation™—Gold, EZ DNA Methylation™—Direct or an EZ DNA Methylation™—Lightning kit (available from Zymo Research Corp (Irvine, Calif.)) is used for the bisulfite conversion. In another embodiment, the conversion of unmethylated cytosines to uracils is accomplished using an enzymatic reaction. For example, the conversion can use a commercially available kit for conversion of unmethylated cytosines to uracils, such as APOBEC-Seq (NEBiolabs, Ipswich, Mass.).

[0122] In step 115, a sequencing library is prepared. In a first step, a ssDNA adapter is added to the 3′-OH end of a bisulfite-converted ssDNA molecule using a ssDNA ligation reaction. In one embodiment, the ssDNA ligation reaction uses CircLigase II (Epicentre) to ligate the ssDNA adapter to the 3′-OH end of a bisulfite-converted ssDNA molecule, wherein the 5′-end of the adapter is phosphorylated and the bisulfite-converted ssDNA has been dephosphorylated (i.e., the 3′ end has a hydroxyl group). In another embodiment, the ssDNA ligation reaction uses Thermostable 5′ AppDNA/RNA ligase (available from New England BioLabs (Ipswich, Mass.)) to ligate the ssDNA adapter to the 3′-OH end of a bisulfite-converted ssDNA molecule. In this example, the first UMI adapter is adenylated at the 5′-end and blocked at the 3′-end. In another embodiment, the ssDNA ligation reaction uses a T4 RNA ligase (available from New England BioLabs) to ligate the ssDNA adapter to the 3′-OH end of a bisulfite-converted ssDNA molecule. In a second step, a second strand DNA is synthesized in an extension reaction. For example, an extension primer, that hybridizes to a primer sequence included in the ssDNA adapter, is used in a primer extension reaction to form a double-stranded bisulfite-converted DNA molecule. Optionally, in one embodiment, the extension reaction uses an enzyme that is able to read through uracil residues in the bisulfite-converted template strand. Optionally, in a third step, a dsDNA adapter is added to the double-stranded bisulfite-converted DNA molecule. Finally, the double-stranded bisulfite-converted DNA is amplified to add sequencing adapters. For example, PCR amplification using a forward primer that includes a P5 sequence and a reverse primer that includes a P7 sequence is used to add P5 and P7 sequences to the bisulfite-converted DNA. Optionally, during library preparation, unique molecular identifiers (UMI) may be added to the nucleic acid molecules (e.g., DNA molecules) through adapter ligation. The UMIs are short nucleic acid sequences (e.g., 4-10 base pairs) that are added to ends of DNA fragments during adapter ligation. In some embodiments, UMIs are degenerate base pairs that serve as a unique tag that can be used to identify sequence reads originating from a specific DNA fragment. During PCR amplification following adapter ligation, the UMIs are replicated along with the attached DNA fragment, which provides a way to identify sequence reads that came from the same original fragment in downstream analysis.

[0123] In step 120, targeted DNA sequences may be enriched from the library. This is used, for example, where a targeted panel assay is being performed on the samples. During enrichment, hybridization probes (also referred to herein as “probes”) are used to target, and pull down, nucleic acid fragments informative for the presence or absence of HD (or disease), HD status, or an HD classification (e.g., HD type or tissue of origin). For a given workflow, the probes may be designed to anneal (or hybridize) to a target (complementary) strand of DNA or RNA. The target strand may be the “positive” strand (e.g., the strand transcribed into mRNA, and subsequently translated into a protein) or the complementary “negative” strand. The probes may range in length from 10 s, 100 s, or 1000 s of base pairs. Moreover, the probes may cover overlapping portions of a target region.

[0124] After a hybridization step 120, the hybridized nucleic acid fragments are captured and may also be amplified using PCR (enrichment 125). For example, the target sequences can be enriched to obtain enriched sequences that can be subsequently sequenced. In general, any known method in the art can be used to isolate, and enrich for, probe-hybridized target nucleic acids. For example, as is well known in the art, a biotin moiety can be added to the 5′-end of the probes (i.e., biotinylated) to facilitate isolation of target nucleic acids hybridized to probes using a streptavidin-coated surface (e.g., streptavidin-coated beads).

[0125] In step 130, sequence reads are generated from the enriched DNA sequences, e.g., enriched sequences. Sequence data may be acquired from the enriched DNA sequences by known means in the art. For example, the method may include next generation sequencing (NGS) techniques including synthesis technology (Illumina), pyrosequencing (454 Life Sciences), ion semiconductor technology (Ion Torrent sequencing), single-molecule real-time sequencing (Pacific Biosciences), sequencing by ligation (SOLiD sequencing), nanopore sequencing (Oxford Nanopore Technologies), or paired-end sequencing. In some embodiments, massively parallel sequencing is performed using sequencing-by-synthesis with reversible dye terminators. In other embodiments, as would be readily understood by one of skill in the art, any known means for detecting nucleic acids and determining methylations status can be used. For example, sequences can be detected, and methylation status determined, using known methylation-aware sequencing (see e.g., WO 2014/043763), a DNA microarray (e.g., with labeled probes adhered or conjugated to a solid surface or DNA array chip), etc.

[0126] In step 140, methylation state vectors are generated from the sequence reads. To do so, a sequence read is aligned to a reference genome. The reference genome helps provide the context as to what position in a human genome the fragment cfDNA originates from. In a simplified example, the sequence read is aligned such that the three CpG sites correlate to CpG sites 23, 24, and 25 (arbitrary reference identifiers used for convenience of description). After alignment, there is information both on methylation status of all CpG sites on the cfDNA fragment and which position in the human genome the CpG sites map to. With the methylation status and location, a methylation state vector may be generated for the fragment cfDNA.

### Generation of Data Structure

[0127] FIG. 3A is a flowchart describing a process 300 of generating a data structure for a healthy control group, according to an embodiment. To create a healthy control group data structure, the analytics system obtains information related to methylation status of a plurality of CpG sites on sequence reads derived from a plurality of DNA molecules or fragments from a plurality of healthy subjects. The method provided herein for creating a healthy control group data structure can be performed similarly for subjects with HD, subjects with a specific type of HD, or subjects with another known disease state. A methylation state vector is generated for each DNA molecule or fragment, for example via the process 100.

[0128] With each fragment's methylation state vector, the analytics system subdivides 310 the methylation state vector into strings of CpG sites. In one embodiment, the analytics system subdivides 310 the methylation state vector such that the resulting strings are all less than a given length. For example, a methylation state vector of length 11 may be subdivided into strings of length less than or equal to 3 would result in 9 strings of length 3, 10 strings of length 2, and 11 strings of length 1. In another example, a methylation state vector of length 7 being subdivided into strings of length less than or equal to 4 would result in 4 strings of length 4, 5 strings of length 3, 6 strings of length 2, and 7 strings of length 1. If a methylation state vector is shorter than or the same length as the specified string length, then the methylation state vector may be converted into a single string containing all of the CpG sites of the vector.

[0129] The analytics system tallies 320 the strings by counting, for each possible CpG site and possibility of methylation states in the vector, the number of strings present in the control group having the specified CpG site as the first CpG site in the string and having that possibility of methylation states. For example, at a given CpG site and considering string lengths of 3, there are 2\hat{ }3 or 8 possible string configurations. At that given CpG site, for each of the 8 possible string configurations, the analytics system tallies 320 how many occurrences of each methylation state vector possibility come up in the control group. Continuing this example, this may involve tallying the following quantities: <Mₓ, Mₓ₊₁, Mₓ₊₂>, <Mₓ, Mₓ₊₁, Uₓ₊₂>, . . . , <Uₓ, Uₓ₊₁, Uₓ₊₂> for each starting CpG site x in the reference genome. The analytics system creates 330 the data structure storing the tallied counts for each starting CpG site and string possibility.

[0130] There are several benefits to setting an upper limit on string length. First, depending on the maximum length for a string, the size of the data structure created by the analytics system can dramatically increase in size. For instance, maximum string length of 4 means that every CpG site has at the very least 2\hat{ }4 numbers to tally for strings of length 4. Increasing the maximum string length to 5 means that every CpG site has an additional 2\hat{ }4 or 16 numbers to tally, doubling the numbers to tally (and computer memory required) compared to the prior string length. Reducing string size helps keep the data structure creation and performance (e.g., use for later accessing as described below), in terms of computational and storage, reasonable. Second, a statistical consideration to limiting the maximum string length is to avoid overfitting downstream models that use the string counts. If long strings of CpG sites do not, biologically, have a strong effect on the outcome (e.g., predictions of anomalousness that predictive of the presence of HD), calculating probabilities based on large strings of CpG sites can be problematic as it requires a significant amount of data that may not be available, and thus would be too sparse for a model to perform appropriately. For example, calculating a probability of anomalousness/HD conditioned on the prior 100 CpG sites would require counts of strings in the data structure of length 100, ideally some matching exactly the prior 100 methylation states. If only sparse counts of strings of length 100 are available, there will be insufficient data to determine whether a given string of length of 100 in a test sample is anomalous or not.

### Validation of Data Structure

[0131] Once the data structure has been created, the analytics system may seek to validate 340 the data structure and/or any downstream models making use of the data structure. One type of validation checks consistency within the control group's data structure. For example, if there are any outlier subjects, samples, and/or fragments within a control group, then the analytics system may perform various calculations to determine whether to exclude any fragments from one of those categories. In a representative example, the healthy control group may contain a sample that is undiagnosed but has an HD such that the sample contains anomalously methylated fragments. This first type of validation ensures that potential HD samples are removed from the healthy control group so as to not affect the control group's purity.

[0132] A second type of validation checks the probabilistic model used to calculate p-values with the counts from the data structure itself (i.e., from the healthy control group). A process for p-value calculation is described below in conjunction with FIG. 5. Once the analytics system generates a p-value for the methylation state vectors in the validation group, the analytics system builds a cumulative density function (CDF) with the p-values. With the CDF, the analytics system may perform various calculations on the CDF to validate the control group's data structure. One test uses the fact that the CDF should ideally be at or below an identity function, such that CDF(x)≤x. On the converse, being above the identity function reveals some deficiency within the probabilistic model used for the control group's data structure. For example, if 1/100 of fragments have a p-value score of 1/1000 meaning CDF ( 1/1000)= 1/100> 1/1000, then the second type of validation fails indicating an issue with the probabilistic model.

[0133] A third type of validation uses a healthy set of validation samples separate from those used to build the data structure, which tests if the data structure is properly built and the model works. An example process for carrying out this type of validation is described below in conjunction with FIG. 3B. The third type of validation can quantify how well the healthy control group generalizes the distribution of healthy samples. If the third type of validation fails, then the healthy control group does not generalize well to the healthy distribution.

[0134] A fourth type of validation tests with samples from a non-healthy validation group. The analytics system calculates p-values and builds the CDF for the non-healthy validation group. With a non-healthy validation group, the analytics system expects to see the CDF(x)>x for at least some samples or, stated differently, the converse of what was expected in the second type of validation and the third type of validation with the healthy control group and the healthy validation group. If the fourth type of validation fails, then this is indicative that the model is not appropriately identifying the anomalousness that it was designed to identify.

[0135] FIG. 3B is a flowchart describing the additional step 340 of validating the data structure for the control group of FIG. 3A, according to an embodiment. In this embodiment of the step 340 of validating the data structure, the analytics system performs the fourth type of validation test as described above which utilizes a validation group with a supposedly similar composition of subjects, samples, and/or fragments as the control group. For example, if the analytics system selected healthy subjects without HD for the control group, then the analytics system also uses healthy subjects without HD in the validation group.

[0136] The analytics system takes the validation group and generates 100 a set of methylation state vectors as described in FIG. 3A. The analytics system performs a p-value calculation for each methylation state vector from the validation group. The p-value calculation process will be further described in conjunction with FIGS. 4 & 5. For each possibility of methylation state vector, the analytics system calculates a probability from the control group's data structure. Once the probabilities are calculated for the possibilities of methylation state vectors, the analytics system calculates 350 a p-value score for that methylation state vector based on the calculated probabilities. The p-value score represents an expectedness of finding that specific methylation state vector and other possible methylation state vectors having even lower probabilities in the control group. A low p-value score, thereby, generally corresponds to a methylation state vector which is relatively unexpected in comparison to other methylation state vectors within the control group, where a high p-value score generally corresponds to a methylation state vector which is relatively more expected in comparison to other methylation state vectors found in the control group. Once the analytics system generates a p-value score for the methylation state vectors in the validation group, the analytics system builds 360 a cumulative density function (CDF) with the p-value scores from the validation group. The analytics system validates 370 consistency of the CDF as described above in the fourth type of validation tests.

### Anomalously Methylated Fragments

[0137] Anomalously methylated fragments having abnormal methylation patterns in HD samples, subject with a specific type of HD, or subjects with another known disease state, are selected as target genomic regions, according to an embodiment as outlined in FIG. 4. Exemplary processes of selected anomalously methylated fragments 440 are visually illustrated in FIG. 5, and is further described below the description of FIG. 4. In process 400, the analytics system generates 100 methylation state vectors from cfDNA fragments of the sample. The analytics system handles each methylation state vector as follows.

[0138] For a given methylation state vector, the analytics system enumerates 410 all possibilities of methylation state vectors having the same starting CpG site and same length (i.e., set of CpG sites) in the methylation state vector. As each methylation state may be methylated or unmethylated there are only two possible states at each CpG site, and thus the count of distinct possibilities of methylation state vectors depends on a power of 2, such that a methylation state vector of length n would be associated with 2n possibilities of methylation state vectors.

[0139] The analytics system calculates 420 the probability of observing each possibility of methylation state vector for the identified starting CpG site/methylation state vector length by accessing the healthy control group data structure. In one embodiment, calculating the probability of observing a given possibility uses a Markov chain probability to model the joint probability calculation which will be described in greater detail with respect to FIG. 5 below. In other embodiments, calculation methods other than Markov chain probabilities are used to determine the probability of observing each possibility of methylation state vector.

[0140] The analytics system calculates 430 a p-value score for the methylation state vector using the calculated probabilities for each possibility. In one embodiment, this includes identifying the calculated probability corresponding to the possibility that matches the methylation state vector in question. Specifically, this is the possibility having the same set of CpG sites, or similarly the same starting CpG site and length as the methylation state vector. The analytics system sums the calculated probabilities of any possibilities having probabilities less than or equal to the identified probability to generate the p-value score.

[0141] This p-value represents the probability of observing the methylation state vector of the fragment or other methylation state vectors even less probable in the healthy control group. A low p-value score, thereby, generally corresponds to a methylation state vector which is rare in a healthy subject, and which causes the fragment to be labeled abnormally methylated, relative to the healthy control group. A high p-value score generally relates to a methylation state vector is expected to be present, in a relative sense, in a healthy subject. If the healthy control group is a non-HD group, for example, a low p-value indicates that the fragment is abnormally methylated relative to the non-HD group, and therefore possibly indicative of the presence of HD in the test subject.

[0142] As above, the analytics system calculates p-value scores for each of a plurality of methylation state vectors, each representing a cfDNA fragment in the test sample. To identify which of the fragments are abnormally methylated, the analytics system may filter 440 the set of methylation state vectors based on their p-value scores. In one embodiment, filtering is performed by comparing the p-values scores against a threshold and keeping only those fragments below the threshold. This threshold p-value score could be on the order of 0.1, 0.01, 0.001, 0.0001, or similar.

### P-Value Score Calculation

[0143] FIG. 5 is an illustration 500 of an example p-value score calculation, according to an embodiment. To calculate a p-value score given a test methylation state vector 505, the analytics system takes that test methylation state vector 505 and enumerates 410 possibilities of methylation state vectors. In this illustrative example, the test methylation state vector 505 is <M₂₃, M₂₄, M₂₅, U₂₆>. As the length of the test methylation state vector 505 is 4, there are 2\hat{ }4 possibilities of methylation state vectors encompassing CpG sites 23-26. In a generic example, the number of possibilities of methylation state vectors is 2\hat{ }n, where n is the length of the test methylation state vector or alternatively the length of the sliding window (described further below).

[0144] The analytics system calculates 420 probabilities 515 for the enumerated possibilities of methylation state vectors. As methylation is conditionally dependent on methylation status of nearby CpG sites, one way to calculate the probability of observing a given methylation state vector possibility is to use Markov chain model. Generally, a methylation state vector such as <S₁, S₂, . . . , Sₙ>, where S denotes the methylation state whether methylated (denoted as M), unmethylated (denoted as U), or indeterminate (denoted as I), has a joint probability that can be expanded using the chain rule of probabilities as:

P(<S₁,S₂, . . . ,Sₙ>)=P(Sₙ|S₁, . . . ,Sₙ₋₁>)*P(Sₙ₋₁|S₁, . . . ,Sₙ₋₂>)* . . . *P(S₂|S₁)*P(S₁) (1)

Markov chain model can be used to make the calculation of the conditional probabilities of each possibility more efficient. In one embodiment, the analytics system selects a Markov chain order k which corresponds to how many prior CpG sites in the vector (or window) to consider in the conditional probability calculation, such that the conditional probability is modeled as P(Sₙ|Sᵢ, . . . , Sₙ₋₁)˜P(Sₙ|Sₙ₋ₖ₋₂, . . . , Sₙ₋₁).

[0145] To calculate each Markov modeled probability for a possibility of methylation state vector, the analytics system accesses the control group's data structure, specifically the counts of various strings of CpG sites and states. To calculate P(Mₙ|Sₙ₋ₖ₋₂, . . . , Sₙ₋₁), the analytics system takes a ratio of the stored count of the number of strings from the data structure matching <Sₙ₋ₖ₋₂, . . . , Sₙ₋₁, Mₙ> divided by the sum of the stored count of the number of strings from the data structure matching <Sₙ₋ₖ₋₂, . . . , Sₙ₋₁, Mₙ> and <Sₙ₋ₖ₋₂, . . . , Sₙ₋₁, Uₙ>. Thus, P(Mₙ|Sₙ₋ₖ₋₂, . . . , Sₙ₋₁), is calculated ratio having the form:

$$\frac{£ of < {S}_{n - k - 2} , … , {S}_{n - 1} , {M}_{n} >}{\begin{matrix}£ of < {S}_{n - k - 2} , … , {S}_{n - 1} , {M}_{n} > + \\ £ of < {S}_{n - k - 2} , … , {S}_{n - 1} , {U}_{n} >\end{matrix}} \qquad ( 2 )$$

[0146] The calculation may additionally implement a smoothing of the counts by applying a prior distribution. In one embodiment, the prior distribution is a uniform prior as in Laplace smoothing. As an example of this, a constant is added to the numerator and another constant (e.g., twice the constant in the numerator) is added to the denominator of the above equation. In other embodiments, an algorithmic technique such as Knesser-Ney smoothing is used.

[0147] In the illustration, the above denoted formulas are applied to the test methylation state vector 505 covering sites 23-26. Once the calculated probabilities 515 are completed, the analytics system calculates 430 a p-value score 525 that sums the probabilities that are less than or equal to the probability of possibility of methylation state vector matching the test methylation state vector 505.

[0148] In one embodiment, the computational burden of calculating probabilities and/or p-value scores may be further reduced by caching at least some calculations. For example, the analytic system may cache in transitory or persistent memory calculations of probabilities for possibilities of methylation state vectors (or windows thereof). If other fragments have the same CpG sites, caching the possibility probabilities allows for efficient calculation of p-value scores without needing to re-calculate the underlying possibility probabilities. Equivalently, the analytics system may calculate p-value scores for each of the possibilities of methylation state vectors associated with a set of CpG sites from vector (or window thereof). The analytics system may cache the p-value scores for use in determining the p-value scores of other fragments including the same CpG sites. Generally, the p-value scores of possibilities of methylation state vectors having the same CpG sites may be used to determine the p-value score of a different one of the possibilities from the same set of CpG sites.

### Sliding Window

[0149] In one embodiment, the analytics system uses 435 a sliding window to determine possibilities of methylation state vectors and calculate p-values. Rather than enumerating possibilities and calculating p-values for entire methylation state vectors, the analytics system enumerates possibilities and calculates p-values for only a window of sequential CpG sites, where the window is shorter in length (of CpG sites) than at least some fragments (otherwise, the window would serve no purpose). The window length may be static, user determined, dynamic, or otherwise selected.

[0150] In calculating p-values for a methylation state vector larger than the window, the window identifies the sequential set of CpG sites from the vector within the window starting from the first CpG site in the vector. The analytic system calculates a p-value score for the window including the first CpG site. The analytics system then “slides” the window to the second CpG site in the vector, and calculates another p-value score for the second window. Thus, for a window size l and methylation vector length m, each methylation state vector will generate m−l+1 p-value scores. After completing the p-value calculations for each portion of the vector, the lowest p-value score from all sliding windows is taken as the overall p-value score for the methylation state vector. In another embodiment, the analytics system aggregates the p-value scores for the methylation state vectors to generate an overall p-value score.

[0151] Using the sliding window helps to reduce the number of enumerated possibilities of methylation state vectors and their corresponding probability calculations that would otherwise need to be performed. Example probability calculations are shown in FIG. 5, but generally the number of possibilities of methylation state vectors increases exponentially by a factor of 2 with the size of the methylation state vector. To give a realistic example, it is possible for fragments to have upwards of 54 CpG sites. Instead of computing probabilities for 2\hat{ }54 (˜1.8×10\hat{ }16) possibilities to generate a single p-value, the analytics system can instead use a window of size 5 (for example) which results in 50 p-value calculations for each of the 50 windows of the methylation state vector for that fragment. Each of the 50 calculations enumerates 2\hat{ }5 (32) possibilities of methylation state vectors, which total results in 50×2\hat{ }5 (1.6×10\hat{ }3) probability calculations. This results in a vast reduction of calculations to be performed, with no meaningful hit to the accurate identification of anomalous fragments. This additional step can also be applied when validating 340 the control group with the validation group's methylation state vectors.

### Identifying Fragments Indicative of HD

[0152] The analytics system identifies 450 DNA fragments indicative of HD from the filtered set of anomalously methylated fragments.

### Hypomethylated and Hypermethylated Fragments

[0153] According to a first method, the analytics system may identify DNA fragments that are deemed hypomethylated or hypermethylated as fragments indicative of HD from the filtered set of anomalously methylated fragments. Hypomethylated and hypermethylated fragments can be defined as fragments of a certain length of CpG sites (e.g., more than 3, 4, 5, 6, 7, 8, 9, 10, etc.) with a high percentage of methylated CpG sites (e.g., more than 80%, 85%, 90%, or 95%, or any other percentage within the range of 50%-100%) or a high percentage of unmethylated CpG sites (e.g., more than 80%, 85%, 90%, or 95%, or any other percentage within the range of 50%-100%).

### Probabilistic Models

[0154] According to a second method, the analytics system identifies fragments indicative of HD utilizing probabilistic models of methylation patterns fitted to each HD type and non-HD type. The analytics system calculates log-likelihood ratios for a sample using DNA fragments in the genomic regions considering the various HD types with the fitted probabilistic models for each HD type and non-HD type. The analytics system may determine a DNA fragment to be indicative of HD based on whether at least one of the log-likelihood ratios considered against the various HD types is above a threshold value.

[0155] In one embodiment of partitioning the genome, the analytics system partitions the genome into regions by multiple stages. In a first stage, the analytics system separates the genome into blocks of CpG sites. Each block is defined when there is a separation between two adjacent CpG sites that exceeds some threshold, e.g., greater than 200 bp, 300 bp, 400 bp, 500 bp, 600 bp, 700 bp, 800 bp, 900 bp, or 1,000 bp. From each block, the analytics system subdivides at a second stage each block into regions of a certain length, e.g., 500 bp, 600 bp, 700 bp, 800 bp, 900 bp, 1,000 bp, 1,100 bp, 1,200 bp, 1,300 bp, 1,400 bp, or 1,500 bp. The analytics system may further overlap adjacent regions by a percentage of the length, e.g., 10%, 20%, 30%, 40%, 50%, or 60%.

[0156] The analytics system analyzes sequence reads derived from DNA fragments for each region. The analytics system may process samples from tissue and/or high-signal cfDNA. High-signal cfDNA samples may be determined by a binary classification model, by HD stage, or by another metric.

[0157] For each HD type and non-HD, the analytics system fits a separate probabilistic model for fragments. In one example, each probabilistic model is mixture model comprising a combination of a plurality of mixture components with each mixture component being an independent-sites model where methylation at each CpG site is assumed to be independent of methylation statuses at other CpG sites.

[0158] In alternate embodiments, calculation is performed with respect to each CpG site. Specifically, a first count is determined that is the number of HD samples (HD_count) that include an anomalously methylated DNA fragment overlapping that CpG, and a second count is determined that is the total number of samples containing fragments overlapping that CpG (total) in the set. Genomic regions can be selected based on the numbers, for example, based on criteria positively correlated to the number of HD samples (HD_count) that include a DNA fragment overlapping that CpG, and inversely correlated to the total number of samples containing fragments overlapping that CpG (total) in the set.

[0159] The analytics system can further calculate log-likelihood ratios (“R”) for a fragment indicating a likelihood of the fragment being indicative of HD considering the various HD types with the fitted probabilistic models for each HD type and non-HD type. The two probabilities may be taken from probabilistic models fitted for each of the HD types and the non-HD type, the probabilistic models defined to calculate a likelihood of observing a methylation pattern on a fragment given each of the HD types and the non-HD type. For example, the probabilistic models may be defined fitted for each of the HD types and the non-HD type.

### Selection of Genomic Regions Indicative of HD

[0160] The analytics system identifies 460 genomic regions indicative of HD. To identify these informative regions, the analytics system calculates an information gain for each genomic region or more specifically each CpG site that describes an ability to distinguish between various outcomes.

[0161] A method for identifying genomic regions capable of distinguishing between HD type and non-HD type utilizes a trained classification model that can be applied on the set of anomalously methylated DNA molecules or fragments corresponding to, or derived from an HD or non-HD group. The trained classification model can be trained to identify any condition of interest that can be identified from the methylation state vectors.

[0162] In one embodiment, the trained classification model is a binary classifier trained based on methylation states for cfDNA fragments or genomic sequences obtained from a subject cohort with HD or a specific type of HD, and a healthy subject cohort without HD, and is then used to classify a test subject probability of having HD, or not having HD, based on anomalously methylation state vectors. In other embodiments, different classifiers may be trained using subject cohorts known to have particular HD (e.g., CHIP, leukemia, etc.); or known to have different stages of particular HD (e.g., CHIP, cancer stage I, II, III, or IV). In these embodiments, different classifiers may be trained using sequence reads obtained from samples enriched for tumor cells from subject cohorts known to have particular blood cancer (e.g., leukemia, lymphoid neoplasms (e.g. lymphoma), multiple myeloma, and myeloid neoplasm, etc.). Each genomic region's ability to distinguish between HD type and non-HD type in the classification model is used to rank the genomic regions from most informative to least informative in classification performance. The analytics system may identify genomic regions from the ranking according to information gain in classification between non-HD type and HD type.

Computing Information Gain from Hypomethylated and Hypermethylated Fragments Indicative of HD

[0163] With fragments indicative of HD, the analytics system may train a classifier according to a process 600 illustrated in FIG. 6A, according to an embodiment. The process 600 accesses two training groups of samples—a non-HD group and an HD group—and obtains 605 a non-HD set of methylation state vectors and an HD set of methylation state vectors comprising anomalously methylated fragments, e.g., via step 440 from the process 400.

[0164] The analytics system determines 610, for each methylation state vector, whether the methylation state vector is indicative of HD. Here, fragments indicative of HD may be defined as hypermethylated or hypomethylated fragments determined if at least some number of CpG sites have a particular state (methylated or unmethylated, respectively) and/or have a threshold percentage of sites that are the particular state (again, methylated or unmethylated, respectively). In one example, cfDNA fragments are identified as hypomethylated or hypermethylated, respectively, if the fragment overlaps at least 5 CpG sites, and at least 80%, 90%, or 100% of its CpG sites are methylated or at least 80%, 90%, or 100% are unmethylated.

[0165] In an alternate embodiment, the analytics system considers portions of the methylation state vector and determines whether the portion is hypomethylated or hypermethylated, and may distinguish that portion to be hypomethylated or hypermethylated. This alternative resolves missing methylation state vectors which are large in size but contain at least one region of dense hypomethylation or hypermethylation. This process of defining hypomethylation and hypermethylation can be applied in step 450 of FIG. 4. In another embodiment, the fragments indicative of HD may be defined according to likelihoods outputted from trained probabilistic models.

[0166] In one embodiment, the process generates 620 a hypomethylation score (P_{hypo}) and a hypermethylation score (P_{hyper}) per CpG site in the genome. To generate either score at a given CpG site, the classifier takes four counts at that CpG site—(1) count of (methylations state) vectors of the HD set labeled hypomethylated that overlap the CpG site; (2) count of vectors of the HD set labeled hypermethylated that overlap the CpG site; (3) count of vectors of the non-HD set labeled hypomethylated that overlap the CpG site; and (4) count of vectors of the non-HD set labeled hypermethylated that overlap the CpG site. Additionally, the process may normalize these counts for each group to account for variance in group size between the non-HD group and the HD group. In alternative embodiments wherein fragments indicative of HD are more generally used, the scores may be more broadly defined as counts of fragments indicative of HD at each genomic region and/or CpG site.

[0167] In one embodiment, to generate 620 the hypomethylation score at a given CpG site, the process takes a ratio of (1) over (1) summed with (3). Similarly, the hypermethylation score is calculated by taking a ratio of (2) over (2) and (4). Additionally, these ratios may be calculated with an additional smoothing technique as discussed above. The hypomethylation score and the hypermethylation score relate to an estimate of HD probability given the presence of hypomethylation or hypermethylation of fragments from the HD set.

[0168] The analytics system generates 630 an aggregate hypomethylation score and an aggregate hypermethylation score for each anomalous methylation state vector. The aggregate hyper and hypo methylation scores are determined based on the hyper and hypo methylation scores of the CpG sites in the methylation state vector. In one embodiment, the aggregate hyper and hypo methylation scores are assigned as the largest hyper and hypo methylation scores of the sites in each state vector, respectively. However, in alternate embodiments, the aggregate scores could be based on means, medians, or other calculations that use the hyper/hypo methylation scores of the sites in each vector.

[0169] The analytics system ranks 640 all of that subject's methylation state vectors by their aggregate hypomethylation score and by their aggregate hypermethylation score, resulting in two rankings per subject. The process selects aggregate hypomethylation scores from the hypomethylation ranking and aggregate hypermethylation scores from the hypermethylation ranking. With the selected scores, the classifier generates 650 a single feature vector for each subject. In one embodiment, the scores selected from either ranking are selected with a fixed order that is the same for each generated feature vector for each subject in each of the training groups. As an example, in one embodiment the classifier selects the first, the second, the fourth, and the eighth aggregate hyper methylation score, and similarly for each aggregate hypo methylation score, from each ranking and writes those scores in the feature vector for that subject.

[0170] The analytics system trains 660 a binary classifier to distinguish feature vectors between the HD and non-HD training groups. Generally, any one of a number of classification techniques may be used. In one embodiment the classifier is a non-linear classifier. In a specific embodiment, the classifier is a non-linear classifier utilizing a L2-regularized kernel logistic regression with a Gaussian radial basis function (RBF) kernel.

[0171] Specifically, in one embodiment, the number of non-HD samples or different HD type(s) (nₒₜₕₑᵣ) and the number of HD samples or HD type(s) (n_{HD}) having an anomalously methylated fragment overlapping a CpG site are counted. Then the probability that a sample is HD is estimated by a score (“S”) that positively correlates to n_{HD} and inversely correlated to nₘ. The score can be calculated using the equation: (n_{HD}+1)/(n_{HD}+nₒₜₕₑᵣ+2) or (n_{HD})/(n_{HD}+nₒₜₕₑᵣ). The analytics system computes 670 an information gain for each HD type and for each genomic region or CpG site to determine whether the genomic region or CpG site is indicative of HD. The information gain is computed for training samples with a given HD type compared to all other samples. For example, two random variables ‘anomalous fragment’ (‘AF’) and ‘HD type’ (‘CT’) are used. In on embodiment, AF is a binary variable indicating whether there is an anomalous fragment overlapping a given CpG site in a given samples as determined for the anomaly score/feature vector above. CT is a random variable indicating whether the HD is of a particular type. The analytics system computes the mutual information with respect to CT given AF. That is, how many bits of information about the HD type are gained if it is known whether there is an anomalous fragment overlapping a particular CpG site.

[0172] For a given HD type, the analytics system uses this information to rank CpG sites based on how HD specific they are. This procedure is repeated for all HD types under consideration. If a particular region is commonly anomalously methylated in training samples of a given HD but not in training samples of other HD types or in healthy training samples, then CpG sites overlapped by those anomalous fragments will tend to have high information gains for the given HD type. The ranked CpG sites for each HD type are greedily added (selected) to a selected set of CpG sites based on their rank for use in the HD classifier.

Computing Pairwise Information Gain from Fragments Indicative of HD Identified from Probabilistic Models

[0173] With fragments indicative of HD identified according to the method described herein, the analytics may identify genomic regions according to the process 680 in FIG. 6B. The analytics system defines 690 a feature vector for each sample, for each region, for each HD type by a count of DNA fragments that have a calculated log-likelihood ratio that the fragment is indicative of HD above a plurality of thresholds, wherein each count is a value in the feature vector. In one embodiment, the analytics system counts the number of fragments present in a sample at a region for each HD type with log-likelihood ratios above one or a plurality of possible threshold values. The analytics system defines a feature vector for each sample, by a count of DNA fragments for each genomic region for each HD type that provides a calculated log-likelihood ratio for the fragment above a plurality of thresholds, wherein each count is a value in the feature vector. The analytics system uses the defined feature vectors to calculate an informative score for each genomic region describing that genomic region's ability to distinguish between each pair of HD types. For each pair of HD types, the analytics system ranks regions based on the informative scores. The analytics system may select regions based on the ranking according to informative scores.

[0174] The analytics system calculates 695 an informative score for each region describing that region's ability to distinguish between each pair of HD types. For each pair of distinct HD types, the analytics system may specify one type as a positive type and the other as a negative type. In one embodiment, a region's ability to distinguish between the positive type and the negative type is based on mutual information, calculated using the estimated fraction of cfDNA samples of the positive type and of the negative type for which the feature would be expected to be non-zero in the final assay, i.e., at least one fragment of that tier that would be sequenced in a targeted methylation assay. Those fractions are estimated using the observed rates at which the feature occurs in healthy cfDNA, and in high-signal cfDNA and/or tumor samples of each HD type. For example, if a feature occurs frequently in healthy cfDNA, then it will also be estimated to occur frequently in cfDNA of any HD type, and would likely result in a low informative score. The analytics system may choose a certain number of regions for each pair of HD types from the ranking, e.g., 1024.

[0175] In additional embodiments, the analytics system further identifies predominantly hypermethylated or hypomethylated regions from the ranking of regions. The analytics system may load the set of fragments in the positive type(s) for a region that was identified as informative. The analytics system, from the loaded fragments, evaluates whether the loaded fragments are predominantly hypermethylated or hypomethylated. If the loaded fragments are predominately hypermethylated or hypomethylated, the analytics system may select probes corresponding to the predominant methylation pattern. If the loaded fragments are not predominantly hypermethylated or hypomethylated, the analytics system may use a mixture of probes for targeting both hypermethylation and hypomethylation. The analytics system may further identify a minimal set of CpG sites that overlap more than some percentage of the fragments.

[0176] In other embodiments, the analytics system, after ranking the regions based on informative scores, labels each region with the lowest informative ranking across all pairs of HD types. For example, if a region was the 10th-most-informative region for distinguishing breast from lung, and the 5th-most-informative for distinguishing breast from colorectal, then it would be given an overall label of “5”. The analytics system may design probes starting with the lowest-labeled regions while adding regions to the panel, e.g., until the panel's size budget has been exhausted.

### Off-Target Genomic Regions

[0177] In some embodiments, probes targeting selected genomic regions are further filtered 475 based on the number of their off-target regions. This is for screening probes that pull down too many cfDNA fragments corresponding to, or derived from, off-target genomic regions. Exclusion of probes having many off-target regions can be valuable by decreasing off-target rates and increasing target coverage for a given amount of sequencing.

[0178] An off-target genomic region is a genomic region that has sufficient homology to a target genomic region, such that DNA molecules or fragments derived from off-target genomic regions are hybridized to and pulled down by a probe designed to hybridize to a target genomic region. An off-target genomic region can be a genomic region (or a converted sequence of that same region) that aligns to a probe along at least 35 bp, 40 bp, 45 bp, 50 bp, 60 bp, 70 bp, or 80 bp with at least an 80%, 85%, 90%, 95%, or 97% match rate. In one embodiment, an off-target genomic region is a genomic region (or a converted sequence of that same region) that aligns to a probe along at least 45 bp with at least a 90% match rate. Various methods known in the art can be adopted to screen off-target genomic regions.

[0179] Exhaustively searching the genome to find all off-target genomic regions can be computationally challenging. In one embodiment, a k-mer seeding strategy (which can allow one or more mismatches) is combined to local alignment at the seed locations. In this case, exhaustive searching of good alignments can be guaranteed based on k-mer length, number of mismatches allowed, and number of k-mer seed hits at a particular location. This requires doing dynamic programing local alignment at a large number of locations, so this approach is highly optimized to use vector CPU instructions (e.g., AVX2, AVX512) and also can be parallelized across many cores within a machine and also across many machines connected by a network. A person of ordinary skill will recognize that modifications and variations of this approach can be implemented for the purpose of identifying off-target genomic regions.

[0180] In some embodiments, probes having sequence homology with off-target genomic regions, or DNA molecules corresponding to, or derived from off-target genomic regions comprising more than a threshold number are excluded (or filtered) from the panel. For example, probes having sequence homology with off-target genomic regions, or DNA molecules corresponding to, or derived from off-target genomic regions from more than 30, more than 25, more than 20, more than 18, more than 15, more than 12, more than 10, or more than 5 off-target regions are excluded.

[0181] In some embodiments, probes are divided into 2, 3, 4, 5, 6, or more separate groups depending on the numbers of off-target regions. For example, probes having sequence homology with no off-target regions or DNA molecules corresponding to, or derived from off-target regions are assigned to high-quality group, probes having sequence homology with 1-18 off-target regions or DNA molecules corresponding to, or derived from 1-18 off-target regions, are assigned to low-quality group, and probes having sequence homology with more than 19 off-target regions or DNA molecules corresponding to, or derived from 19 off-target regions, are assigned to poor-quality group. Other cut-off values can be used for the grouping.

[0182] In some embodiments, probes in the lowest quality group are excluded. In some embodiments, probes in groups other than the highest-quality group are excluded. In some embodiments, separate panels are made for the probes in each group. In some embodiments, all the probes are put on the same panel, but separate analysis is performed based on the assigned groups.

[0183] In some embodiments, a panel comprises a larger number of high-quality probes than the number of probes in lower groups. In some embodiments, a panel comprises a smaller number of poor-quality probes than the number of probes in other group. In some embodiments, more than 95%, 90%, 85%, 80%, 75%, or 70% of probes in a panel are high-quality probes. In some embodiments, less than 35%, 30%, 20%, 10%, 5%, 4%, 3%, 2% or 1% of the probes in a panel are low-quality probes. In some embodiments, less than 5%, 4%, 3%, 2% or 1% of the probes in a panel are poor-quality probes. In some embodiments, no poor-quality probes are included in a panel.

[0184] In some embodiments, probes having below 50%, below 40%, below 30%, below 20%, below 10% or below 5% are excluded. In some embodiments, probes having above 30%, above 40%, above 50%, above 60%, above 70%, above 80%, or above 90% are selectively included in a panel.

### Methods of Using HD Assay Panel

[0185] In yet another aspect, methods of using an HD assay panel are provided. The methods can comprise steps of treating DNA molecules or fragments to convert unmethylated cytosines to uracils (e.g., using bisulfite treatment), applying an HD panel (as described herein) to the converted DNA molecules or fragments, enriching a subset of converted DNA molecules or fragments that hybridize (or bind) to the probes in the panel, and detecting the nucleic acid sequence and determining the methylation status thereof, for example, by sequencing the enriched cfDNA fragments. In some embodiments, the sequence reads can be compared to a reference genome (e.g., a human reference genome), allowing for identification of methylation states at a plurality of CpG sites within the DNA molecules or fragments and thus provide information relevant to detecting a hematological disorder (HD). While the present disclosure pays particular attention to sequencing based approaches for detecting nucleic acids and determining methylation status thereof (via sequence reads), the disclosure is broad enough to encompass other methods for detecting nucleic acids and determining methylation status thereof (such as other methylation-aware sequencing approaches (e.g., as described in WO 2014/043763, which is incorporated herein by reference), DNA microarrays (e.g., with labeled probes adhered or conjugated to a solid surface or DNA array chip), etc.

### Analysis of Sequence Reads

[0186] In some embodiments, the sequence reads may be aligned to a reference genome using known methods in the art to determine alignment position information. The alignment position information may indicate a beginning position and an end position of a region in the reference genome that corresponds to a beginning nucleotide base and end nucleotide base of a given sequence read. Alignment position information may also include sequence read length, which can be determined from the beginning position and end position. A region in the reference genome may be associated with a gene or a segment of a gene.

[0187] In various embodiments, a sequence read is comprised of a read pair denoted as R₁ and R₂. For example, the first read R₁ may be sequenced from a first end of a nucleic acid fragment whereas the second read R₂ may be sequenced from the second end of the nucleic acid fragment. Therefore, nucleotide base pairs of the first read R₁ and second read R₂ may be aligned consistently (e.g., in opposite orientations) with nucleotide bases of the reference genome. Alignment position information derived from the read pair R₁ and R₂ may include a beginning position in the reference genome that corresponds to an end of a first read (e.g., R₁) and an end position in the reference genome that corresponds to an end of a second read (e.g., R₂). In other words, the beginning position and end position in the reference genome represent the likely location within the reference genome to which the nucleic acid fragment corresponds. An output file having SAM (sequence alignment map) format or BAM (binary alignment map) format may be generated and output for further analysis.

[0188] From the sequence reads, the location and methylation state for each of CpG site may be determined based on alignment to a reference genome. Further, a methylation state vector for each fragment may be generated specifying a location of the fragment in the reference genome (e.g., as specified by the position of the first CpG site in each fragment, or another similar metric), a number of CpG sites in the fragment, and the methylation state of each CpG site in the fragment whether methylated (e.g., denoted as M), unmethylated (e.g., denoted as U), or indeterminate (e.g., denoted as I). The methylation state vectors may be stored in temporary or persistent computer memory for later use and processing. Further, duplicate reads or duplicate methylation state vectors from a single subject may be removed. In an additional embodiment, it may be determined that a certain fragment has one or more CpG sites that have an indeterminate methylation status. Such fragments may be excluded from later processing or selectively included where downstream data model accounts for such indeterminate methylation statuses.

[0189] FIG. 7B is an illustration of the process 100 of FIG. 7A of sequencing a cfDNA fragment to obtain a methylation state vector, according to an embodiment. As an example, the analytics system takes a cfDNA fragment 112. In this example, the cfDNA fragment 112 contains three CpG sites. As shown, the first and third CpG sites of the cfDNA fragment 112 are methylated 114. During the treatment step 120, the cfDNA fragment 112 is converted to generate a converted cfDNA fragment 122. During the treatment 120, the second CpG site which was unmethylated has its cytosine converted to uracil. However, the first and third CpG sites are not convert.

[0190] After conversion, a sequencing library 130 is prepared and sequenced 140 generating a sequence read 142. The analytics system aligns 150 the sequence read 142 to a reference genome 144. The reference genome 144 provides the context as to what position in a human genome the fragment cfDNA originates from. In this simplified example, the analytics system aligns 150 the sequence read such that the three CpG sites correlate to CpG sites 23, 24, and 25 (arbitrary reference identifiers used for convenience of description). The analytics system thus generates information both on methylation status of all CpG sites on the cfDNA fragment 112 and which to position in the human genome the CpG sites map. As shown, the CpG sites on sequence read 142 which were methylated are read as cytosines. In this example, the cytosine's appear in the sequence read 142 only in the first and third CpG site which allows one to infer that the first and third CpG sites in the original cfDNA fragment were methylated. The second CpG site is read as a thymine (U is converted to T during the sequencing process), and thus, one can infer that the second CpG site was unmethylated in the original cfDNA fragment. With these two pieces of information, the methylation status and location, the analytics system generates 160 a methylation state vector 152 for the fragment cfDNA 112. In this example, the resulting methylation state vector 152 is <M₂₃, U₂₄, M₂₅>, wherein M corresponds to a methylated CpG site, U corresponds to an unmethylated CpG site, and the subscript numbers correspond to positions of each CpG site in the reference genome.

### Detection of HD

[0191] Sequence reads obtained by the methods provided herein are further processed by automated algorithms. For example, the analytics system is used to receive sequencing data from a sequencer and perform various aspects of processing as described herein. The analytics system can be one of a personal computer (PC), a desktop computer, a laptop computer, a notebook, a tablet PC, a mobile device. A computing device can be communicatively coupled to the sequencer through a wireless, wired, or a combination of wireless and wired communication technologies. Generally, the computing device is configured with a processor and memory storing computer instructions that, when executed by the processor, cause the processor to perform steps as described in the remainder of this document. Generally, the amount of genetic data and data derived therefrom is sufficiently large, and the amount of computational power required so great, so as to be impossible to be performed on paper or by the human mind alone.

[0192] The clinical interpretation of methylation status of targeted genomic regions is a process that includes classifying the clinical effect of each or a combination of the methylation status and reporting the results in ways that are meaningful to a medical professional. The clinical interpretation can be based on comparison of the sequence reads with database specific to HD or non-HD subjects, and/or based on numbers and types of the cfDNA fragments having HD-specific methylation patterns identified from a sample.

[0193] In some embodiments, targeted genomic regions are ranked or classified based on their likeness to be differentially methylated in HD samples, and the ranks or classifications are used in the interpretation process. The ranks and classifications can include (1) the type of clinical effect, (2) the strength of evidence of the effect, and (3) the size of the effect. Various methods for clinical analysis and interpretation of genome data can be adopted for analysis of the sequence reads. In some other embodiments, the clinical interpretation of the methylation states of such differentially methylated regions can be based on machine learning approaches that interpret a current sample based on a classification or regression method that was trained using the methylation states of such differentially methylated regions from samples from HD and non-HD patients with known HD status, HD type, HD stage, etc.

[0194] The clinically meaning information can include the presence or absence of HD generally, presence or absence of certain types of HDs, HD stage, or presence or absence of other types of diseases. In some embodiments, the information relates to a presence or absence of one or more hematological disorders, selected from the group consisting of CHIP, leukemia, lymphoid neoplasms (e.g. lymphoma), multiple myeloma, and myeloid neoplasm. In some embodiments, the information relates to a presence or absence of one or more hematological disorders, selected from the group consisting of lymphoid neoplasm, multiple myeloma, and myeloid neoplasm. In some embodiments, the samples are not cancerous and are from subjects having white blood cell clonal expansion or no hematological disorder.

### HD Classifier

[0195] To train an HD type classifier, the analytics system obtains a plurality of training samples each having a set of hypomethylated and hypermethylated fragments indicative of HD, e.g., identified via step 450 in the process 400, and a label of the training sample's HD type. The analytics system determines, for each training sample, a feature vector based on the set of hypomethylated and hypermethylated fragments indicative of HD. The analytics system calculates an anomaly score for each CpG site in the targeted genomic regions. In one embodiment, the analytics system defines the anomaly score for the feature vector as a binary scoring based on whether there is a hypomethylated or hypermethylated fragment from the set that encompasses the CpG site. Once all anomaly scores are determined for a training sample, the analytics system determines the feature vector as a vector of elements including, for each element, one of the anomaly scores associated with one of the CpG sites. The analytics system may normalize the anomaly scores of the feature vector based on a coverage of the sample, i.e., a median or average sequencing depth over all CpG sites.

[0196] With the feature vectors of the training samples, the analytics system can train the HD classifier. In one embodiment, the analytics system trains a binary HD classifier to distinguish between the labels, HD and non-HD, based on the feature vectors of the training samples. In this embodiment, the classifier outputs a prediction score indicating the likelihood of the presence or absence of HD. In another embodiment, the analytics system trains a multiclass HD classifier to distinguish between many HD types. In this multiclass HD classifier embodiment, the HD classifier is trained to determine an HD prediction that comprises a prediction value for each of the HD types being classified for. The prediction values may correspond to a likelihood that a given sample has each of the HD types. For example, the HD classifier returns an HD prediction including a prediction value for CHIP, leukemia, lymphoid neoplasms (e.g. lymphoma), multiple myeloma, myeloid neoplasm, or any combination thereof. For example, the HD classifier may return an HD prediction for a test sample including a prediction score for CHIP, leukemia, lymphoid neoplasms (e.g. lymphoma), multiple myeloma, myeloid neoplasm, or any combination thereof. In either embodiment, the analytics system trains the HD classifier by inputting sets of training samples with their feature vectors into the HD classifier and adjusting classification parameters so that a function of the classifier accurately relates the training feature vectors to their corresponding label. The analytics system may group the training samples into sets of one or more training samples for iterative batch training of the HD classifier. After inputting all sets of training samples including their training feature vectors and adjusting the classification parameters, the HD classifier is sufficiently trained to label test samples according to their feature vector within some margin of error. The analytics system may train the HD classifier according to any one of a number of methods. As an example, the binary HD classifier may be a L2-regularized logistic regression classifier that is trained using a log-loss function. As another example, the multi-HD classifier may be a multinomial logistic regression. In practice either type of HD classifier may be trained using other techniques. These techniques are numerous including potential use of kernel methods, machine learning algorithms such as multilayer neural networks, etc. In particular, methods as described in PCT/US2019/022122 and U.S. patent application Ser. No. 16/352,602 which are incorporated by reference in their entireties herein can be used for various embodiments.

[0197] During deployment, the analytics system obtains a test sample from a subject of unknown HD type. The analytics system processes the test sample to achieve a set of hypomethylated and hypermethylated fragments indicative of HD. The analytics system defines a test feature vector in a similar process as described for the training samples. The analytics system then inputs the test feature vector into the trained HD classifier to yield an HD prediction, e.g., binary prediction (HD or non-HD) or multiclass HD prediction (prediction score for each of a plurality of HD types).

### Hematological Disorder Classifier

[0198] In some examples, the assay panel described herein can be used with a hematological disorder classifier that predicts a disease state for a sample, such as a hematological disorder or non-hematological disorder prediction, and/or an indeterminate prediction. In some examples, the hematological disorder classifier can generate features based on sequence reads by taking into account methylated or unmethylated fragments of DNA at certain genomic areas of interest. For instance, if the hematological disorder classifier determines that a methylation pattern at a fragment resembles that of a certain hematological disorder, then the hematological disorder classifier can set a feature for that fragment as 1, and otherwise if no such fragment is present, then the feature can be set as 0. In this way, the hematological disorder classifier can produce a set of binary features (merely by way of example, 30,000 features) for each sample. Further, in some examples, all or a portion of the set of binary features for a sample can be input into the hematological disorder classifier to provide a set of probability scores, such as one probability score per hematological disorder class and for a non-hematological disorder class. Furthermore, in some examples, the hematological disorder classifier can incorporate or otherwise be used in conjunction with thresholding to determine whether a sample is to be called as hematological disorder or non-hematological disorder, and/or indeterminate thresholding to reflect confidence in a specific hematological disorder call. Such methods are described further below.

[0199] To train the hematological disorder classifier, the analytics system (e.g., analytics system 800) can obtain a set of training samples. In some examples, each training sample includes fragment file(s) (e.g., file containing sequence read data), a label corresponding to a type of hematological disorder or non-hematological disorder status of the sample, and/or sex of the individual of the sample. The analytics system can utilize the training set to train the hematological disorder classifier to predict the disease state of the sample.

[0200] In some examples, for training, the analytics system divides the genome (e.g., whole genome) or a subset of the genome (e.g., targeted methylation regions) into regions. Merely by way of example, portions of the genome can be separated into “blocks” of CpGs, whereby a new block begins whenever there is a separation between nearest-neighbor CpGs is at least a minimum separation distance (e.g., at least 500 bp). Further, in some examples, each block can be divided into 1000 bp regions and positioned such that neighboring regions have a certain amount (e.g., 50% or 500 bp) of overlap.

[0201] Furthermore, in some examples, the analytics system can split the training set into K subsets or folds to be used in a K-fold cross-validation. In some examples, the folds can be balanced for hematological disorder/non-hematological disorder status, cancer stage, age (e.g., grouped in 10 yr buckets), and/or smoking status. In some examples, the training set is split into 5 folds, whereby 5 separate classifiers are trained, in each case training on ⅘ of the training samples and using the remaining ⅕ for validation.

[0202] During training with the training set, the analytics system can, for each hematological disorder (and for healthy cfDNA), fit a probabilistic model to the fragments deriving from the samples of that type. As used herein a “probabilistic model” is any mathematical model capable of assigning a probability to a sequence read based on methylation status at one or more sites on the read. During training, the analytics system fits sequence reads derived from one or more samples from subjects having a known disease and can be used to determine sequence reads probabilities indicative of a disease state utilizing methylation information or methylation state vectors. In particular, in some cases, the analytics system determines observed rates of methylation for each CpG site within a sequence read. The rate of methylation represents a fraction or percentage of base pairs that are methylated within a CpG site. The trained probabilistic model can be parameterized by products of the rates of methylation. In general, any known probabilistic model for assigning probabilities to sequence reads from a sample can be used. For example, the probabilistic model can be a binomial model, in which every site (e.g., CpG site) on a nucleic acid fragment is assigned a probability of methylation, or an independent sites model, in which each CpG's methylation is specified by a distinct methylation probability with methylation at one site assumed to be independent of methylation at one or more other sites on the nucleic acid fragment.

[0203] In some examples, the probabilistic model is a Markov model, in which the probability of methylation at each CpG site is dependent on the methylation state at some number of preceding CpG sites in the sequence read, or nucleic acid molecule from which the sequence read is derived. See, e.g., U.S. patent application Ser. No. 16/352,602, entitled “Anomalous Fragment Detection and Classification,” and filed Mar. 13, 2019, which is incorporated by reference in its entirety herein and can be used for various embodiments.

[0204] In some examples, the probabilistic model is a “mixture model” fitted using a mixture of components from underlying models. For example, in some embodiments, the mixture components can be determined using multiple independent sites models, where methylation (e.g., rates of methylation) at each CpG site is assumed to be independent of methylation at other CpG sites. Utilizing an independent sites model, the probability assigned to a sequence read, or the nucleic acid molecule from which it derives, is the product of the methylation probability at each CpG site where the sequence read is methylated and one minus the methylation probability at each CpG site where the sequence read is unmethylated. In accordance with this example, the analytics system determines rates of methylation of each of the mixture components. The mixture model is parameterized by a sum of the mixture components each associated with a product of the rates of methylation. A probabilistic model Pr of n mixture components can be represented as:

$$Pr ( fragment \vert \{ {β}_{k i} , {f}_{k} \} ) = {\sum }_{k = 1}^{n} {f}_{k} {\prod }_{i} {{β}_{k i}^{{m}_{i}} ( 1 - {β}_{k i} )}^{1 - {m}_{i}}$$

For an input fragment, mᵢ∈{0, 1} represents the fragment's observed methylation status at position i of a reference genome, with 0 indicating unmethylation and 1 indicating methylation. A fractional assignment to each mixture component k is fₖ, where fₖ≥0 and Σₖ₌₁ⁿ fₖ=1. The probability of methylation at position i in a CpG site of mixture component k is βₖᵢ. Thus, the probability of unmethylation is 1−βₖᵢ. The number of mixture components n can be 1, 2, 3, 4, 5, 6, 7, 8, 9, 10, etc.

[0205] In some examples, the analytics system fits the probabilistic model using maximum-likelihood estimation to identify a set of parameters {βₖᵢ, fₖ} that maximizes the log-likelihood of all fragments deriving from a disease state, subject to a regularization penalty applied to each methylation probability with regularization strength r. The maximized quantity for N total fragments can be represented as:

$${\sum }_{j}^{N} ln ( Pr ( {fragment}_{j} \vert \{ {β}_{k i} , {f}_{k} \} ) ) + r \cdot ln ( {β}_{k i} ( 1 - {β}_{k i} ) )$$

[0206] In some examples, the analytics system performs fits separately for each hematological disorder and for healthy cfDNA. As one of skill in the art would appreciate, other means can be used to fit the probabilistic models or to identify parameters that maximize the log-likelihood of all sequence reads derived from the reference samples. For example, in some examples, Bayesian fitting (using e.g., Markov chain Monte Carlo), in which each parameter is not assigned a single value but instead is associated to a distribution, is used. In some examples, gradient-based optimization, in which the gradient of the likelihood (or log-likelihood) with respect to the parameter values is used to step through parameter space towards an optimum, is used. In still some examples, expectation-maximization, in which a set of latent parameters (such as identities of the mixture component from which each fragment is derived) are set to their expected values under the previous model parameters, and then the model's parameters are assigned to maximize the likelihood conditional on the assumed values of those latent variables. The two-step process is then repeated until convergence.

[0207] Further, in some examples, the analytics system can generate features for each sample in the training set. For example, for each sample (regardless of label), in each region, for each hematological disorder, for each fragment, the analytics system can evaluate the log-likelihood ratio R with the fitted probabilistic models according to:

$${R}_{hematological disorder A} ( fragment ) ≡ ln ( \frac{Pr ( fragment \vert hematological disorder A )}{Pr ( fragment \vert healthy cfDNA )} )$$

Next, for each sample, for each region, for each hematological disorder, for each of a set of “tier” values, the analytics system can count the number of fragments with R_{hematological disorder}> tier and assign those counts as non-negative integer-valued features. For example, the tiers include threshold values of 1, 2, 3, 4, 5, 6, 7, 8, and 9, resulting in each region hosting 9 features per hematological disorder.

[0208] In some examples, the analytics system can select certain features for inclusion in a feature vector for each sample. For example, for each pair of distinct hematological disorder, the analytics system can specify one type as the “positive type” and the other as the “negative type” and rank the features by their ability to distinguish those types. In some cases, the ranking is based on mutual information calculated by the analytics system. For example, the mutual information can be calculated using the estimated fraction of samples of the positive type and negative type (e.g., hematological disorders A and B) for which the feature is expected to be nonzero in a resulting assay. For instance, if a feature occurs frequently in healthy cfDNA, the analytics system determines the feature is unlikely to occur frequently in cfDNA associated with various types of hematological disorder. Consequently, the feature can be a weak measure in distinguishing between disease states. In calculating mutual information I, the variable X is a certain feature (e.g., binary) and variable Y represents a disease state, e.g., hematological disorders A or B:

$$I ( X ; Y ) = {\sum }_{y ∈ Y} {\sum }_{x ∈ X} p ( x , y ) log log ( \frac{p ( x , y )}{p ( x ) p ( y )} ) \\ I \approx \frac{1}{2} ( p ( 1 \vert A ) \cdot log ( \frac{p ( 1 \vert A )}{\frac{1}{2} ( p ( 1 \vert A ) + p ( 1 \vert B ) )} ) + p ( 1 \vert B ) \cdot log ( \frac{p ( 1 \vert B )}{\frac{1}{2} ( p ( 1 \vert A ) p ( 1 \vert B ) )} ) ) \\ p ( 1 \vert A ) = {f}_{A} + {f}_{H} - {f}_{H} {f}_{A} \qquad$$

The joint probability mass function of X and Y is p(x, y) and the marginal probability mass functions are p(x) and p(y). The analytics system can assume that feature absence is uninformative and either disease state is equally likely a priori, for example, p(Y=A)=p(Y=B)=0.5. The probability of observing (e.g., in cfDNA) a given binary feature of hematological disorder A is represented by p(1|A), where f_{A} is the probability of observing the feature in ctDNA samples from tumor (or high-signal cfDNA samples) associated with hematological disorder A, and f_{H} is the probability of observing the feature in a healthy or non-hematological disorder cfDNA sample.

[0209] In some examples, only features corresponding to the positive type are included in the ranking, and only when those features' predicted rate of occurrence is greater in the positive type than in the negative type. For example, if “liver” is the positive type and “breast” is the negative type, then only “liver_x” features are considered, and only if their estimated occurrence in liver cfDNA is greater than their estimated occurrence in breast cfDNA. Further, in some examples, for each region, for each hematological disorder pair (including non-hematological disorder as a negative type), the analytics system keeps only the best performing tier. Further, in some examples, the analytics system transforms feature values by binarization, whereby any feature value greater than 0 is set to 1, such that all features are either 0 or 1.

[0210] In some examples, the analytics system trains a multinomial logistic regression classifier on the training data for a fold, and generates predictions for the held-out data. For example, for each of the K folds, one logistic regression can be trained for each combination of hyperparameters. Such hyperparameters can include L2 penalty and/or topK (e.g., the number of high-ranking regions to keep per tissue type pair (including non-hematological disorder), as ranked by the mutual information procedure outlined above). For each set of hyperparameters, performance is evaluated on the cross-validated predictions of the full training set, and the set of hyperparameters with the best performance is selected for retraining on the full training set. In some examples, the analytics system uses log-loss as a performance metric, whereby the log-loss is calculated by taking the negative logarithm of the prediction for the correct label for each sample, and then summing over samples (i.e. a perfect prediction of 1.0 for the correct label would give a log-loss of 0).

[0211] To generate predictions for a new sample, feature values are calculated using the same method described above, but restricted to features (region/positive class combinations) selected under the chosen topK value. Generated features are then used to create a prediction using the logistic regression model trained above.

[0212] In some examples, the analytics trains a two-stage classifier. For example, the analytics system trains a binary hematological disorder classifier to distinguish between the labels, hematological disorder and non-hematological disorder, based on the feature vectors of the training samples. In this case, the binary classifier outputs a prediction score indicating the likelihood of the presence or absence of hematological disorder. In another example, the analytics system trains a multiclass hematological disorder classifier to distinguish between many hematological disorders. In this multiclass hematological disorder classifier, the hematological disorder classifier is trained to determine a hematological disorder prediction that comprises a prediction value for each of the hematological disorders being classified for. The prediction values can correspond to a likelihood that a given sample has each of the hematological disorders. For example, the hematological disorder classifier returns a hematological disorder prediction including a prediction value for CHIP, leukemia, lymphoid neoplasms (e.g., lymphoma), multiple myeloma, a myeloid neoplasm, and non-hematological disorder. For example, the hematological disorder classifier may return a hematological disorder prediction for a test sample including a prediction score for CHIP, leukemia, lymphoid neoplasms (e.g., lymphoma), multiple myeloma, a myeloid neoplasm, and/or non-hematological disorder.

[0213] The analytics system can train the hematological disorder classifier according to any one of a number of methods. As an example, the binary hematological disorder classifier may be a L2-regularized logistic regression classifier that is trained using a log-loss function. As another example, the multi-hematological disorder classifier may be a multinomial logistic regression. In practice either type of hematological disorder classifier may be trained using other techniques. These techniques are numerous including potential use of kernel methods, machine learning algorithms such as multilayer neural networks, etc. In particular, methods as described in PCT/US2019/022122 and U.S. patent application Ser. No. 16/352,602 which are incorporated by reference in their entireties herein can be used for various embodiments.

### Exemplary Sequencer and Analytics System

[0214] FIG. 9A is a flowchart of systems and devices for sequencing nucleic acid samples according to one embodiment. This illustrative flowchart includes devices such as a sequencer 820 and an analytics system 800. The sequencer 820 and the analytics system 800 may work in tandem to perform one or more steps in the processes described herein.

[0215] In various embodiments, the sequencer 820 receives an enriched nucleic acid sample 810. As shown in FIG. 9A, the sequencer 820 can include a graphical user interface 825 that enables user interactions with particular tasks (e.g., initiate sequencing or terminate sequencing) as well as one more loading stations 830 for loading a sequencing cartridge including the enriched fragment samples and/or for loading necessary buffers for performing the sequencing assays. Therefore, once a user of the sequencer 820 has provided the necessary reagents and sequencing cartridge to the loading station 830 of the sequencer 820, the user can initiate sequencing by interacting with the graphical user interface 825 of the sequencer 820. Once initiated, the sequencer 820 performs the sequencing and outputs the sequence reads of the enriched fragments from the nucleic acid sample 810.

[0216] In some embodiments, the sequencer 820 is communicatively coupled with the analytics system 800. The analytics system 800 includes some number of computing devices used for processing the sequence reads for various applications such as assessing methylation status at one or more CpG sites, variant calling or quality control. The sequencer 820 may provide the sequence reads in a BAM file format to the analytics system 800. The analytics system 800 can be communicatively coupled to the sequencer 820 through a wireless, wired, or a combination of wireless and wired communication technologies. Generally, the analytics system 800 is configured with a processor and non-transitory computer-readable storage medium storing computer instructions that, when executed by the processor, cause the processor to process the sequence reads or to perform one or more steps of any of the methods or processes disclosed herein.

[0217] In some embodiments, the sequence reads may be aligned to a reference genome using known methods in the art to determine alignment position information. Alignment position may generally describe a beginning position and an end position of a region in the reference genome that corresponds to a beginning nucleotide based and an end nucleotide base of a given sequence read. Corresponding to methylation sequencing, the alignment position information may be generalized to indicate a first CpG site and a last CpG site included in the sequence read according to the alignment to the reference genome. The alignment position information may further indicate methylation statuses and locations of all CpG sites in a given sequence read. A region in the reference genome may be associated with a gene or a segment of a gene; as such, the analytics system 800 may label a sequence read with one or more genes that align to the sequence read. In one embodiment, fragment length (or size) is determined from the beginning and end positions.

[0218] In various embodiments, for example when a paired-end sequencing process is used, a sequence read is comprised of a read pair denoted as R_1 and R_2. For example, the first read R_1 may be sequenced from a first end of a double-stranded DNA (dsDNA) molecule whereas the second read R_2 may be sequenced from the second end of the double-stranded DNA (dsDNA). Therefore, nucleotide base pairs of the first read R_1 and second read R_2 may be aligned consistently (e.g., in opposite orientations) with nucleotide bases of the reference genome. Alignment position information derived from the read pair R_1 and R_2 may include a beginning position in the reference genome that corresponds to an end of a first read (e.g., R_1) and an end position in the reference genome that corresponds to an end of a second read (e.g., R_2). In other words, the beginning position and end position in the reference genome represent the likely location within the reference genome to which the nucleic acid fragment corresponds. In one embodiment, the read pair R_1 and R_2 can be assembled into a fragment, and the fragment used for subsequent analysis and/or classification. An output file having SAM (sequence alignment map) format or BAM (binary) format may be generated and output for further analysis.

[0219] Referring now to FIG. 9B, FIG. 9B is a block diagram of an analytics system 800 for processing DNA samples according to one embodiment. The analytics system implements one or more computing devices for use in analyzing DNA samples. The analytics system 800 includes a sequence processor 840, sequence database 845, model database 855, models 850, parameter database 865, and score engine 860. In some embodiments, the analytics system 800 performs one or more steps in the processes 300 of FIG. 3A, 340 of FIG. 3B, 400 of FIG. 4, 500 of FIG. 5, 600 of FIG. 6A, or 680 of FIG. 6B and other process described herein.

[0220] The sequence processor 840 generates methylation state vectors for fragments from a sample. At each CpG site on a fragment, the sequence processor 840 generates a methylation state vector for each fragment specifying a location of the fragment in the reference genome, a number of CpG sites in the fragment, and the methylation state of each CpG site in the fragment whether methylated, unmethylated, or indeterminate via the process 300 of FIG. 3A. The sequence processor 840 may store methylation state vectors for fragments in the sequence database 845. Data in the sequence database 845 may be organized such that the methylation state vectors from a sample are associated to one another.

[0221] Further, multiple different models 850 may be stored in the model database 855 or retrieved for use with test samples. In one example, a model is a trained hematological disorder classifier for determining a hematological disorder prediction for a test sample using a feature vector derived from anomalous fragments. The training and use of the hematological disorder classifier is discussed elsewhere herein. The analytics system 800 may train the one or more models 850 and store various trained parameters in the parameter database 865. The analytics system 800 stores the models 850 along with functions in the model database 855.

[0222] During inference, the score engine 860 uses the one or more models 850 to return outputs. The score engine 860 accesses the models 850 in the model database 855 along with trained parameters from the parameter database 865. According to each model, the score engine receives an appropriate input for the model and calculates an output based on the received input, the parameters, and a function of each model relating the input and the output. In some use cases, the score engine 860 further calculates metrics correlating to a confidence in the calculated outputs from the model. In other use cases, the score engine 860 calculates other intermediary values for use in the model.

### EXAMPLES

[0223] The following examples are put forth so as to provide those of ordinary skill in the art with a complete disclosure and description of how to make and use the present description, and are not intended to limit the scope of what the inventors regard as their description nor are they intended to represent that the experiments below are all or the only experiments performed. Efforts have been made to ensure accuracy with respect to numbers used (e.g., amounts, temperature, etc.) but some experimental errors and deviations should be accounted for.

### Example 1—Analysis of Probe Qualities

[0224] To test how much overlap between a cfDNA fragment and a probe is required to achieve a non-negligible amount of pulldown, various lengths of overlaps were tested using panels designed to include three different types of probes (V1D3, V1D4, V1E2) having various overlaps with 175 bp target DNA fragments specific to each probe. Tested overlaps ranged between Obp and 120 bp. Samples comprising 175 bp target DNA fragments were applied to the panel and washed, and then DNA fragments bound to the probes were collected. The amounts of the collected DNA fragments were measured and the amounts were plotted as densities over the sizes of overlaps as provided in FIG. 8.

[0225] There was no significant binding and pull down of target DNA fragments when there were less than 45 bp of overlaps. These results suggest that a fragment-probe overlap of at least 45 bp is generally required to achieve a non-negligible amount of pulldown although this number can vary depending on the assay conditions.

[0226] Furthermore, it has been suggested that more than a 10% mismatch rate between the probe and fragment sequences in the region of overlap is sufficient to greatly disrupt binding, and thus pulldown efficiency. Therefore, sequences that can align to the probe along at least 45 bp with at least a 90% match rate are candidates for off-target pulldown.

[0227] Thus, we have performed an exhaustive searching of all genomic regions having 45 bp alignments with 90%+ match rate (i.e., off-target regions) for each probe. Specifically, we combined a k-mer seeding strategy (which can allow one or more mismatches) with local alignment at the seed locations. This guaranteed not missing any good alignments based on k-mer length, number of mismatches allowed, and number of k-mer seed hits at a particular location. This involves performing dynamic programing local alignment at a large number of locations, so the implementation was optimized to use vector CPU instructions (e.g., AVX2, AVX512) and parallelized across many cores within a machine and also across many machines connected by a network. This allows exhaustive search which is valuable in designing a high-performance panel (i.e., low off-target rate and high target coverage for a given amount of sequencing).

[0228] Following the exhaustive searching, each probe was scored based on the number of off-target regions. The best probes have a score of 1, meaning they match in only one place (high Q). Probes with a low score between 2-19 hits (low Q) were accepted but probes with a poor score more than 20 hits (poor Q) were discarded. Other cutoff values can be used for specific samples.

[0229] Numbers of high quality, low quality, and poor quality probes were then counted among probes targeting hypermethylated genomic regions or hypomethylated genomic regions.

### Example 2—an Assay Panel for Detecting Hematological Disorders

[0230] Hematological disorders: A HD panel was designed to detect different types of hematological disorders including CHIP, leukemia, multiple myeloma, and lymphoma.

[0231] Samples used for genomic region selection: Sample from different sources were used for selection of target genomic regions. They include (1) cell-enriched disseminated tumor cells (DTC) from cancers of different types, (2) bone marrow mononuclear cell (PBMC) samples from patients with leukemia, lymphoma, or multiple myeloma, (3) peripheral blood mononuclear cell (PBMC) samples from patients with leukemia, lymphoma, or multiple myeloma, (4) genomic DNA from FFPE tissue blocks of cancer samples, or (5) genomic DNA from white blood cells, or (7) cfDNA samples from more than 1800 individuals.

[0232] Region selection (based on methylation status): For target selection, fragments having abnormal methylation patterns in samples with various hematological disorders were selected as using one or more method as described herein. Us of these methods allowed identification of low noise regions as putative targets. Among the low noise regions, fragments most informative in discriminating disease types were ranked and selected.

[0233] Specifically, in some embodiments, when WGBS data were used, fragment sequences in the database were filtered based on p-value using a distribution in healthy control individuals, and only fragments with p<0.001 were retained, as described herein. In some cases, the selected cfDNAs were further filtered to retain only those that were at least 90% methylated or 90% unmethylated. Next, for each CpG site in the selected fragments, the numbers of samples with a hematological disorder or healthy control samples were counted that include fragments overlapping that CpG site. Specifically, P (hematological disorder | overlapping fragment) for each CpG was calculated and genomic sites with high P values were selected as general disorder targets. By design, the selected fragments had very low noise (i.e., few healthy control fragments overlapping).

[0234] To find targets specific to a hematological disorder, similar selection processes were performed. CpG sites were ranked based on their information gain, comparing (i) between the numbers of samples of a specific hematological disorder and other samples, wherein other samples including both healthy control samples and samples of a different hematological disorder, (ii) between the numbers of samples of a specific hematological disorder and healthy, control samples, and/or (iii) between the numbers of samples of a specific hematological disorder and a different hematological disorder that include fragments overlapping that CpG site. The process was applied to each of the hematological disorders and the comparison was done for all pairwise combinations for the hematological disorders as illustrated in FIG. 2. For example, P (a hematological disorder | overlapping fragment) was calculated and then compared with P (a different hematological disorder | overlapping fragment). An outlier fragment in each hematological disorder having much greater likelihood under a hematological disorder than under a different hematological disorder was selected as a target for the hematological disorder. Accordingly, genomic regions selected by the pairwise comparisons included genomic regions differentially methylated to separate a target hematological disorder and a contrast hematological disorder.

[0235] Target genomic regions selected as described in this section are listed in TABLE 1. The target genomic regions of Lists 2-4 contain subsets of the methylation sites of the target genomic regions of Lists 5-7, respectively. Likewise, the target genomic regions of List 8 contain a subset of the methylation sites of the target genomic regions of List 1.

TABLE 1
SEQ ID NOs corresponding to Lists 1-8. For each list, the table
identifies the total number of target genomic regions in the list,
a range of SEQ ID NOs corresponding to all target genomic
regions in the list to be found in the sequence listing submitted
with this application, and the total of the lengths of all target
genomic regions in the list. The sequence listing identifies the
chromosomal location of each target genomic region, whether
the cfDNA fragments to be enriched from the region are
hypermethylated or hypomethylated, and the sequence of one
DNA strand of the target genomic region. The chromosome
numbers and the start and stop positions are provided relative
to a known human reference genome, hg19. The sequence of
the human reference genome, hg19, is available from Genome
Reference Consortium with a reference number, GRCh37/hg19,
and also available from Genome Browser provided by Santa
Cruz Genomics Institute.

| | Targeted | Target | | | Panel |
|---|---|---|---|---|---|
| | Hematological | Genomic | SEQ ID NOs | | Size |
| List | disorder | Regions | First | Last | (kb) |
| 1 | All | 28130 | 1 | 28130 | 1586 |
| 2 | Lymphoid neoplasm | 1447 | 28131 | 29577 | 403 |
| 3 | Multiple myeloma | 879 | 29578 | 30456 | 277 |
| 4 | Myeloid neoplasm | 1255 | 30457 | 31711 | 299 |
| 5 | Lymphoid neoplasm | 1170 | 31712 | 32881 | 612 |
| 6 | Multiple myeloma | 822 | 32882 | 33703 | 315 |
| 7 | Myeloid neoplasm | 1177 | 33704 | 34880 | 447 |
| 8 | All | 22456 | 34881 | 57336 | 1160 |

### Example 3—Generation of a Mixture Model Classifier

[0236] To maximize performance, the predictive cancer models described in this Example were trained using sequence data obtained from a plurality of samples from known cancer types and non-cancers from both CCGA sub-studies (CCGA1 and CCGA22), a plurality of tissue samples for known cancers obtained from CCGA1, and a plurality of non-cancer samples from the STRIVE study (See Clinical Trail.gov Identifier: NCT03085888 (//clinicaltrials.gov/ct2/show/NCT03085888)). The STRIVE study is a prospective, multi-center, observational cohort study to validate an assay for the early detection of breast cancer and other invasive cancers, from which additional non-cancer training samples were obtained to train the classifier described herein. The known cancer types included from the CCGA sample set included the following: breast, lung, prostate, colorectal, renal, uterine, pancreas, esophageal, lymphoma, head and neck, ovarian, hepatobiliary, melanoma, cervical, multiple myeloma, leukemia, thyroid, bladder, gastric, and anorectal. As such, a model can be a multi-cancer model (or a multi-cancer classifier) for detecting one or more, two or more, three or more, four or more, five or more, ten or more, or 20 or more different types of cancer.

[0237] The classifier performance data shown below was reported out for a locked classifier trained on cancer and non-cancer samples obtained from CCGA2, a CCGA sub-study, and on non-cancer samples from STRIVE. The individuals in the CCGA2 sub-study were different from the individuals in the CCGA1 sub-study whose cfDNA was used to select target genomes. From the CCGA2 study, blood samples were collected from individuals diagnosed with untreated cancer (including 20 tumor types and all stages of cancer) and healthy individuals with no cancer diagnosis (controls). For STRIVE, blood samples were collected from women within 28 days of their screening mammogram. Cell-free DNA (cfDNA) was extracted from each sample and treated with bisulfite to convert unmethylated cytosines to uracils. The bisulfite treated cfDNA was enriched for informative cfDNA molecules using hybridization probes designed to enrich bisulfite-converted nucleic acids derived from each of a plurality of targeted genomic regions in an assay panel comprising all of the genomic regions of Lists 1-8. The enriched bisulfite-converted nucleic acid molecules were sequenced using paired-end sequencing on an Illumina platform (San Diego, Calif.) to obtain a set of sequence reads for each of the training samples, and the resulting read pairs were aligned to the reference genome, assembled into fragments, and methylated and unmethylated CpG sites identified.

### Mixture Model Based Featurization

[0238] For each cancer type (including non-cancer) a probabilistic mixture model was trained and utilized to assign a probability to each fragment from each cancer and non-cancer sample based on how likely it was that the fragment would be observed in a given sample type.

### Fragment-Level Analysis

[0239] Briefly, for each sample type (cancer and non-cancer samples), for each region (where each region was used as-is if less than 1 kb, or else subdivided into 1 kb regions in length with a 50% overlap (e.g., 500 base pairs overlap) between adjacent regions), a probabilistic model was fit to the fragments derived from the training samples for each type of cancer and non-cancer. The probabilistic model trained for each sample type was a mixture model, where each of three mixture components was an independent-sites model in which methylation at each CpG is assumed to be independent of methylation at other CpGs. Fragments were excluded from the model if: they had a p-value (from a non-cancer Markov model) greater than 0.01; were marked as duplicate fragments; the fragments had a bag size of greater than 1 (for targeted methylation samples only); they did not cover at least one CpG site; or if the fragment was greater than 1000 bases in length. Retained training fragments were assigned to a region if they overlapped at least one CpG from that region. If a fragment overlapped CpGs in multiple regions, it was assigned to all of them.

### Local Source Models

[0240] Each probabilistic model was fit using maximum-likelihood estimation to identify a set of parameters that maximized the log-likelihood of all fragments deriving from each sample type, subject to a regularization penalty.

[0241] Specifically, in each classification region, a set of probabilistic models were trained, one for each training label (i.e., one for each cancer type and one for non-cancer). Each model took the form of a Bernoulli mixture model with three components. Mathematically,

Pr(fragment|{βₖᵢ,fₖ})=Σₖ₌₁ⁿfₖΠᵢβₖᵢ^{m}^{ᵢ}(1−βₖᵢ)^{1-m}^{ᵢ} (1)

where n is the number of mixture components, set to 3; mᵢ∈{0, 1} is the fragment's observed methylation at position i; fₖ is the fractional assignment to component k (with fₖ≥0 and Σfₖ=1); and βₖᵢ is the methylation fraction in component k at CpG i. The product over i included only those positions for which a methylation state could be identified from the sequencing. Maximum-likelihood values of the parameters {fₖ, βₖᵢ} of each model were estimated by using the rprop algorithm (e.g., the rprop algorithm as described in Riedmiller M, Braun H. RPROP—A Fast Adaptive Learning Algorithm. Proceedings of the International Symposium on Computer and Information Science VII, 1992) to maximize the total log-likelihood of the fragments of one training label, subject to a regularization penalty on βₖᵢ that took the form of a beta-distributed prior. Mathematically, the maximized quantity was

Σⱼ ln(Pr(fragmentⱼ|{βₖᵢ,fₖ}))+Σ_{k,i}r ln(βₖᵢ(1−βₖᵢ)) (2)

where r is the regularization strength, which was set to 1.

### Featurization

[0242] Once the probabilistic models were trained, a set of numerical features was computed for each sample. Specifically, features were extracted for each fragment from each training sample, for each cancer type and non-cancer sample, in each region. The extracted features were the tallies of outlier fragments (i.e., anomalously methylated fragments), which were defined as those whose log-likelihood under a first cancer model exceeded the log-likelihood under a second cancer model or non-cancer model by at least a threshold tier value. Outlier fragments were tallied separately for each genomic region, sample model (i.e., cancer type), and tier (for tiers 1, 2, 3, 4, 5, 6, 7, 8, and 9), yielding 9 features per region for each sample type. In this way, each feature was defined by three properties: a genomic region; a “positive” cancer type label (excluding non-cancer); and the tier value selected from the set {1, 2, 3, 4, 5, 6, 7, 8, 9}. The numerical value of each feature was defined as the number of fragments in that region such that

$$ln ( \frac{Pr ( fragment \vert positive cancer type )}{Pr ( fragment \vert non \text{-} cancer} ) > tier \qquad ( 3 )$$

where the probabilities were defined by equation (1) using the maximum-likelihood-estimated parameter values corresponding to the “positive” cancer type (in the numerator of the logarithm) or to non-cancer (in the denominator).

### Feature Ranking

[0243] For each set of pairwise features, the features were ranked using mutual information based on their ability to distinguish the first cancer type (which defined the log-likelihood model from which the feature was derived) from the second cancer type or non-cancer. Specifically, two ranked lists of features were compiled for each unique pair of class labels: one with the first label assigned as the “positive” and the second as the “negative”, and the other with the positive/negative assignment swapped (with the exception of the “non-cancer” label, which was only permitted as the negative label). For each of these ranked lists, only features whose positive cancer type label (as in equation (3)) matched the positive label under consideration were included in the ranking. For each such feature, the fraction of training samples with non-zero feature value was calculated separately for the positive and negative labels. Features for which this fraction was greater in the positive label were ranked by their mutual information with respect to that pair of class labels.

[0244] The top ranked 256 features from each pairwise comparison were identified and added to the final feature set for each cancer type and non-cancer. To avoid redundancy, if more than one feature was selected from the same positive type and genomic region (i.e., for multiple negative types), only the one assigned the lowest (most informative) rank for its cancer type pair was retained, breaking ties by choosing the higher tier value. The features in the final feature set for each sample (cancer type and non-cancer) were binarized (any feature value greater than 0 was set to 1, so that all features were either 0 or 1).

### Classifier Training

[0245] The training samples were then divided into distinct 5-fold cross-validation training sets, and a two-stage classifier was trained for each fold, in each case training on ⅘ of the training samples and using the remaining ⅕ for validation.

[0246] In the first stage of training, a binary (two-class) logistic regression model for detecting the presence of cancer was trained to discriminate the cancer samples (regardless of TOO) from non-cancer. When training this binary classifier, a sample weight was assigned to the male non-cancer samples to counteract sex-imbalance in the training set. For each sample, the binary classifier outputs a prediction score indicating the likelihood of a presence or absence of cancer.

[0247] In the second stage of training, a parallel multi-class logistic regression model for determining cancer tissue of origin was trained with TOO as the target label. Only the cancer samples that received a score above the 95th percentile of the non-cancer samples in the first stage classifier were included in the training of this multi-class classifier. For each cancer sample used in training the multi-class classifier, the multi-class classifier outputs prediction values for the cancer types being classified, where each prediction value is a likelihood that the given sample has a certain cancer type. For example, the cancer classifier can return a cancer prediction for a test sample including a prediction score for breast cancer, a prediction score for lung cancer, and/or a prediction score for no cancer.

[0248] Both binary and multi-class classifiers were trained by stochastic gradient descent with mini-batches, and in each case, training was stopped early when the performance on the validation fold (assessed by cross-entropy loss) began to degrade. For predicting on samples outside of the training set, in each stage, the scores assigned by the five cross-validated classifiers were averaged. Scores assigned to sex-inappropriate cancer types were set to zero, with the remaining values renormalized to sum to one.

[0249] Scores assigned to the validation folds within the training set were retained for use in assigning cutoff values (thresholds) to target certain performance metrics. In particular, the probability scores assigned to the training set non-cancer samples were used to define thresholds corresponding to particular specificity levels. For example, for a desired specificity target of 99.4%, the threshold was set at the 99.4th percentile of the cross-validated cancer detection probability scores assigned to the non-cancer samples in the training set. Training samples with a probability score that exceeded a threshold were called as positive for cancer.

[0250] Subsequently, for each training sample determined to be positive for cancer, a TOO or cancer type assessment was made from the multiclass classifier. First, the multi-class logistic regression classifier assigned a set of probability scores, one for each prospective cancer type, to each sample. Next, the confidence of these scores was assessed as the difference between the highest and second-highest scores assigned by the multi-class classifier for each sample. Then, the cross-validated training set scores were used to identify the lowest threshold value such that of the cancer samples in the training set with top-two score differential exceeding the threshold, 90% had been assigned the correct TOO label as their highest score. In this way, the scores assigned to the validation folds during training were further used to determine a second threshold for distinguishing between confident and indeterminate TOO calls.

[0251] At prediction time, samples receiving a score from the binary (first-stage) classifier below the predefined specificity threshold were assigned a “non-cancer” label. For the remaining samples, those whose top-two TOO-score differential from the second-stage classifier was below the second predefined threshold were assigned the “indeterminate cancer” label. The remaining samples were assigned the cancer label to which the TOO classifier assigned the highest score.

### Example 4—Classification with the Target Genomic Regions of Lists 2-4

[0252] The discriminatory value of the target genomic regions of Lists 2-4 was evaluated by testing the ability of a cancer classifier to detect 3 different hematological disorders according to the methylation status of these target genomic regions. Performance was evaluated over a set of 1,532 cancer samples and 1,521 non-cancer samples that were not used to train the classifier, as shown in TABLE 2. For each sample, differentially methylated cfDNA was enriched using a bait set comprising all of the target genomic regions of Lists 1-8. The classifier was then constrained to provide cancer determinations based only on the methylation status of the target genomic regions of the List being evaluated.

TABLE 2
Cancer diagnoses of individuals whose cfDNA was used to
validate the classifier

| | | Stage | | | | |
|---|---|---|---|---|---|---|
| | | | | | | Not |
| Cancer Type | Total | I | II | III | IV | Reported |
| Non-cancer | 1521 | — | — | — | — | — |
| Lung | 261 | 60 | 23 | 72 | 106 | 0 |
| Breast | 247 | 102 | 110 | 27 | 8 | 0 |
| Prostate | 188 | 39 | 113 | 19 | 17 | 0 |
| Lymphoid neoplasm | 147 | 15 | 27 | 27 | 39 | 39 |
| Colorectal | 121 | 13 | 22 | 41 | 45 | 0 |
| Pancreas and gallbladder | 95 | 15 | 15 | 19 | 46 | 0 |
| Uterine | 84 | 73 | 3 | 5 | 3 | 0 |
| Upper GI | 67 | 9 | 12 | 19 | 27 | 0 |
| Head and neck | 62 | 7 | 13 | 16 | 26 | 0 |
| Renal | 56 | 37 | 4 | 4 | 11 | 0 |
| Ovary | 37 | 4 | 2 | 25 | 6 | 0 |
| Multiple myeloma | 34 | 10 | 13 | 11 | 0 | 0 |
| Not reported | 29 | 8 | 5 | 7 | 6 | 3 |
| Liver bile duct | 29 | 5 | 7 | 7 | 10 | 0 |
| Sarcoma | 17 | 2 | 4 | 5 | 6 | 0 |
| Bladder and urothelial | 16 | 6 | 7 | 3 | 1 | 0 |
| Anorectal | 14 | 4 | 5 | 5 | 0 | 0 |
| Cervical | 11 | 8 | 1 | 2 | 0 | 0 |
| Melanoma | 7 | 3 | 1 | 0 | 3 | 0 |
| Myeloid neoplasm | 4 | 2 | 1 | 0 | 1 | 0 |
| Thyroid | 4 | 0 | 0 | 0 | 0 | 4 |
| Prediction only | 2 | 0 | 0 | 0 | 2 | 0 |

[0253] Results from the classifier performance analysis for Lists 2-4 are presented in TABLES 2-3. TABLE 2 shows the accuracy of determining a hematological disorder by a classifier considering the methylation status of the target genomic regions of Lists 2, 3 or 4. TABLE 3 shows the sensitivity with a specificity of 0.990 for detecting different stages of the three hematological disorders by a classifier that utilizes only the methylation markers of the corresponding List.

TABLE 3
Hematological disorder classification accuracy using
the genomic regions of Lists 2-4

| | List 2 | | List 3 | | List 4 | |
|---|---|---|---|---|---|---|
| | (Lymphoid | | (Multiple | | (Myeloid | |
| | Neoplasm) | | Myeloma) | | Neoplasm) | |
| | % | Fxn | % | Fxn | % | Fxn |
| Lymphoid Neoplasm | 88 | 93/106 | 95 | 54/57 | 94 | 87/93 |
| Multiple Myeloma | 100 | 9/9 | 89 | 25/28 | 100 | 21/21 |
| Myeloid Neoplasm | n/a | 0/0 | n/a | 0/0 | 100 | 2/2 |

TABLE 4
Hematological disorder classification sensitivity using
the genomic regions of Lists 2-4

| | Lymphoid | Multiple | Myeloid |
|---|---|---|---|
| | Neoplasm | Myeloma | Neoplasm |
| Stage | (List 2) | (List 3) | (List 4) |
| I | 33.3% [11.8-61.6] | 70% [34.8-93.3] | n.d. |
| | (5/15) | (7/10) | |
| II | 92.6% [75.7-99.1] | 84.6% [54.6-98.1] | n.d. |
| | (25/27) | (11/13) | |
| III | 74.1% [53.7-88.9] | 100% [71.5-100] | n.d. |
| | (20/27) | (11/11) | |
| IV | 82.1% [66.5-92.5] | 100% [71.5-100] | n.d. |
| | (32/39) | (11/11) | |
| All | 71.4% [63.4-78.6] | 85.3% [68.9-95] | 75% [19.4-99.4] |
| | (105/147) | (29/34) | (3/4) |

### Example 5—Classification with the Target Genomic Regions of Lists 2-4 and 8

[0254] Results from the classifier performance analysis for List 8 and additional results for Lists 2-4 and 8 are presented in TABLES 5-8. An exemplary receiver operator curve (ROC) generated by a trained classifier is shown in FIG. 10. The ROC shows true positive results and false positive results for a determination of cancer or no-cancer based on the methylation status of a randomly selected 50% subset of the target genomic regions of List 8. The asymmetric shape of the ROC curve illustrates that the classifier was designed to minimize false positive results. The areas under the curve are tightly clustered between 0.76 and 0.79, as shown in TABLE 5. These results indicate that a cancer determination can be made based solely on the methylation status of target genomic regions selected for the discrimination of hematological disorders or even individual hematological disorders. Furthermore, the performance of small panels of <500 kb indicates that panels of this size are sufficient for accurate cancer detection.

TABLE 5
Cancer detection and cancer type determination using
data for lists of target genomic regions optimized
for the detection of hematological disorders

| | | True | False | False |
|---|---|---|---|---|
| Genomic Regions | AUC | Positive | Positive | Negative |
| List 2 | 0.76 | 103 | 12 | 1 |
| List 3 | 0.76 | 79 | 6 | 0 |
| List 4 | 0.78 | 110 | 6 | 0 |
| Random 25% of List 8 | 0.78 | 101 | 7 | 0 |
| Random 50% of List 8 | 0.79 | 106 | 6 | 0 |

[0255] Once a determination of cancer is made, the classifier assigns the cancer to one of twenty distinct cancer types. The accuracy of these determinations with a specificity of 0.990 is presented in various formats. TABLE 5 shows true positives, false positives, and false negatives as scored based on the methylation status of lists of target genomic regions optimized for the detection of specific hematological disorders or random subsets of a list optimized for the detection of all hematological disorders. A true positive occurs when the presence of cancer is detected and the classifier accurately determines that the sample came from a subject with a hematological disorder. A false positive occurs for samples from individuals diagnosed with a solid tumor when presence of cancer is detected and inaccurately determined to be a hematological disorder. A false negative occurs when the sample came from an individual diagnosed with a hematological disorder but the classifier inaccurately determines that the sample came from an individual with a solid tumor. False negatives were very rare for Lists 2-4 and 8. Approximately 5-10% of the samples were false negatives. This might occur because Lists 2-4 and 8 do not include some markers that would aid in accurately determining that a cancer was a solid tumor.

[0256] The accuracy of cancer detection based upon the methylation status of target genomic regions in Lists 2-4 and 8 is evaluated for various stages of cancer in TABLE 6. When cancer is detected, a cancer type is assigned from one of twenty possible classes of cancer types. The accuracy of cancer type determination is presented in TABLE 7. The cancer type determination results are for the accuracy of determining all twenty cancer types, even though the lists of target genomic regions were optimized to detect a hematological disorders.

[0257] The results in TABLES 6-7 are segregated for various stages of cancer. Cancer detection and cancer type determination were more accurate for samples from individuals diagnosed with later stages of cancer. This was expected because late stage tumors shed more cfDNA. Nevertheless, the accuracy of detecting cancer and assigning a cancer type for early stage cancers is remarkably high. Furthermore, classification accuracy was reasonable accurate with only 50% or even 25% of the target genomic regions of List 8 (all hematological disorders).

[0258] The sensitivity at a specificity of 0.990 for detecting stages I-IV hematological disorders by a classifier acting on the methylation status of target genomic regions in Lists 2-4 or random subsets of List 8 is presented in TABLE 8. For example, when the false positive rate for detecting cancer is limited to 1%, a classifier considering the methylation status of the target genomic regions of List 3 (optimized for multiple myeloma), detected multiple myeloma in 70% (7 out of 10) of the samples collected from individuals diagnosed with stage I multiple myeloma. Likewise, when the false positive rate for detecting cancer is limited to 1%, a classifier considering the methylation status of the target genomic regions of List 2 (optimized for lymphoid neoplasm), detected lymphoid neoplasm in 93% (25 out of 27) of the samples collected from individuals diagnosed with stage II lymphoid neoplasm. Furthermore, the sensitivity for HD based upon the methylation status of random 50% and 25% subsets of the target genomic regions of List 8 were essentially identical (with the exception of stage I lymphoid neoplasm), indicating that a substantial fraction of the target genomic regions of List 8 contribute to accurate HD determinations by the classifier.

TABLE 6
Cancer detection accuracy with 99.0% specificity by a classifier considering the
methylation status of target genomic regions from the indicated List.

| | List 2 | | List 3 | | List 4 | | Random 25% | | Random 50% | |
|---|---|---|---|---|---|---|---|---|---|---|
| | (Lymphoid | | (Multiple | | (Myeloid | | of List 8 | | of List 8 | |
| | Neoplasm) | | Myeloma) | | Neoplasm) | | (All HD) | | (All HD) | |
| Stage | % | Fxn | % | Fxn | % | Fxn | % | Fxn | % | Fxn |
| All | 39 | 603/1532 | 36 | 551/1532 | 43 | 663/1532 | 41 | 622/1532 | 43 | 655/1532 |
| I | 7 | 30/422 | 8 | 34/422 | 11 | 45/422 | 8 | 35/422 | 9 | 39/422 |
| II | 28 | 107/388 | 25 | 98/388 | 31 | 119/388 | 27 | 105/388 | 29 | 111/388 |
| III | 53 | 167/313 | 51 | 159/313 | 60 | 188/313 | 58 | 182/313 | 60 | 187/313 |
| I + II | 17 | 137/810 | 16 | 132/810 | 20 | 164/810 | 17 | 140/810 | 19 | 150/810 |
| I + II + III | 27 | 304/1123 | 26 | 291/1123 | 31 | 352/1123 | 29 | 322/1123 | 30 | 337/1123 |
| III + IV | 65 | 442/676 | 61 | 409/676 | 71 | 477/676 | 68 | 460/676 | 71 | 481/676 |
| IV | 76 | 275/363 | 69 | 250/363 | 80 | 289/363 | 77 | 278/363 | 81 | 294/363 |

TABLE 7
Accuracy of cancer type determinations with 99.0% specificity by a classifier
considering the methylation status of target genomic regions from the indicated list.

| | List 2 | | List 3 | | List 4 | | Random 25% | | Random 50% | |
|---|---|---|---|---|---|---|---|---|---|---|
| | (Lymphoid | | (Multiple | | (Myeloid | | of List 8 | | of List 8 | |
| | Neoplasm) | | Myeloma) | | Neoplasm) | | (All HD) | | (All HD) | |
| Stage | % | Fxn | % | Fxn | % | Fxn | % | Fxn | % | Fxn |
| All | 90 | 427/477 | 90 | 322/358 | 90 | 496/553 | 89 | 420/470 | 90 | 495/551 |
| I | 74 | 14/19 | 74 | 14/19 | 75 | 21/28 | 71 | 10/14 | 82 | 18/22 |
| II | 88 | 73/83 | 92 | 60/65 | 91 | 90/99 | 89 | 69/78 | 90 | 81/90 |
| III | 89 | 113/127 | 90 | 96/107 | 88 | 137/155 | 89 | 122/137 | 89 | 140/157 |
| I + II | 85 | 87/102 | 88 | 74/84 | 87 | 111/127 | 86 | 79/92 | 88 | 99/112 |
| I + II + III | 87 | 200/229 | 89 | 170/191 | 88 | 248/282 | 88 | 201/229 | 89 | 239/269 |
| III + IV | 90 | 319/354 | 90 | 245/271 | 90 | 366/407 | 90 | 321/358 | 90 | 374/417 |
| IV | 91 | 206/227 | 91 | 149/164 | 91 | 229/252 | 90 | 199/221 | 90 | 234/260 |

TABLE 8
Sensitivity with 99.0% specificity for the indicated hematological disorder by
a classifier using only target genomic regions from the indicated list.

| | | List 2 | | List 3 | | List 4 | | Random 25% | | Random 50% | |
|---|---|---|---|---|---|---|---|---|---|---|---|
| | | (Lymphoid | | (Multiple | | (Myeloid | | of List 8 | | of List 8 | |
| Hematological | | Neoplasm) | | Myeloma) | | Neoplasm) | | (All HD | | (All HD) | |
| Disorder | Stage | % | Fxn | % | Fxn | % | Fxn | % | Fxn | % | Fxn |
| Multiple | All | 38 | 13/34 | 85 | 29/34 | 68 | 23/34 | 56 | 19/34 | 56 | 19/34 |
| Myeloma | I | 10 | 1/10 | 70 | 7/10 | 40 | 4/10 | 30 | 3/10 | 30 | 3/10 |
| | II | 23 | 3/13 | 85 | 11/13 | 62 | 8/13 | 39 | 5/13 | 39 | 5/13 |
| | III | 82 | 9/11 | 100 | 11/11 | 100 | 11/11 | 100 | 11/11 | 100 | 11/11 |
| | I + II | 17 | 4/23 | 78 | 18/23 | 52 | 12/23 | 35 | 8/23 | 35 | 8/23 |
| | I + II + III | 38 | 13/34 | 85 | 29/34 | 68 | 23/34 | 56 | 19/34 | 56 | 19/34 |
| Lymphoid | All | 71 | 105/147 | 46 | 67/147 | 65 | 96/147 | 61 | 89/147 | 65 | 96/147 |
| Neoplasm | I | 33 | 5/15 | 13 | 2/15 | 33 | 5/15 | 13 | 2/15 | 27 | 4/15 |
| | II | 93 | 25/27 | 52 | 14/27 | 78 | 21/27 | 67 | 18/27 | 67 | 18/27 |
| | III | 74 | 20/27 | 74 | 20/27 | 74 | 20/27 | 70 | 19/27 | 70 | 19/27 |
| | I + II | 71 | 30/42 | 38 | 16/42 | 62 | 26/42 | 48 | 20/42 | 52 | 22/42 |
| | I + II + III | 73 | 50/69 | 52 | 36/69 | 67 | 46/69 | 57 | 39/69 | 59 | 41/69 |
| | III + IV | 79 | 52/66 | 67 | 44/66 | 77 | 51/66 | 71 | 47/66 | 76 | 50/66 |
| | IV | 82 | 32/39 | 62 | 24/39 | 80 | 31/39 | 72 | 28/39 | 80 | 31/39 |
| Myeloid | All | 0 | 0/4 | 75 | 3/4 | 75 | 3/4 | 0 | 0/4 | 0 | 0/4 |
| Neoplasm | | | | | | | | | | | |

### Example 6—Detecting Hematological Disorders Using Assay Panel

[0259] Blood samples are collected from a group of individuals previously diagnosed with a hematological disorder (“test group”), and other groups of individuals without a hematological disorder or diagnosed with a different type of hematological disorder (“other group”). cfDNA fragments are extracted from the blood samples and treated with bisulfite to convert unmethylated cytosines to uracils. The cancer assay panel described herein was applied to the bisulfite treated samples. Unbound cfDNA fragments are washed and cfDNA fragments bound to the probes are collected. The collected cfDNA fragments are amplified and sequenced. The sequence reads confirm that the probes specifically enrich cfDNA fragments having methylation patterns indicative of a hematological disorder and samples from the test group include significantly more of the differentially methylated cfDNA fragments compared to the other group.

[0260] While preferred embodiments of the present disclosure have been shown and described herein, it will be obvious to those skilled in the art that such embodiments are provided by way of example only. Numerous variations, changes, and substitutions will now occur to those skilled in the art without departing from the disclosure. It should be understood that various alternatives to the embodiments of the disclosure described herein may be employed in practicing the disclosure. It is intended that the following claims define the scope of the disclosure and that methods and structures within the scope of these claims and their equivalents be covered thereby.

The application's sequence listing, which the Patent Office published only in electronic form, follows.

SEQUENCE LISTING (57336 sequences)

SEQ ID NO: 1 - DNA, 65 bp, Homo sapiens
  chr1:859735-859800
  hyper
cgacccaactccagcccgggccggaataagttgctgccgccggcggagagcggggctgcggagcc

SEQ ID NO: 2 - DNA, 96 bp, Homo sapiens
  chr1:935361-935457
  hyper
ccgcgcctccccgtgccgggtggagcgcgccgccacggaccacgggcgggctggcgggcgagcggcgagcgcgcggcgatccgagcccctagggcg

SEQ ID NO: 3 - DNA, 31 bp, Homo sapiens
  chr1:935826-935857
  hyper
gggagccggggctggacggagctggggctgt

SEQ ID NO: 4 - DNA, 67 bp, Homo sapiens
  chr1:936193-936260
  hyper
atggcgcgggccgggccggaccacgaggagcagaacgtgcgcgtgacgcgagcgggctggtgacgtc

SEQ ID NO: 5 - DNA, 353 bp, Homo sapiens
  chr1:955507-955860
  hyper
ccccggcgcggcccgcgcgctcctccgccgcctctcgcctgcgccatggccggccggtcccacccgggcccgctgcggccgctgctgccgctccttgtggtggccgcgtgcgtcctgcccggagccggcgggacatgcccggagcgcgcgctggagcggcgcgaggaggaggcgaacgtggtgctcaccgggacggtggaggagatcctcaacgtggacccggtgcagcacacgtactcctgcaaggtgcgcccacccggaccccggcctcccctcgcgacgcctgccgccccgccgggacccccgccccaggccgtgggaaccagccccggtcgctccgcagcccccgctcc

SEQ ID NO: 6 - DNA, 31 bp, Homo sapiens
  chr1:955869-955900
  hyper
ggcgaccgccaagccccgggagggggggtcg

SEQ ID NO: 7 - DNA, 31 bp, Homo sapiens
  chr1:995029-995060
  hyper
gcccggggcgtggcatcggggcgaggcttcg

SEQ ID NO: 8 - DNA, 113 bp, Homo sapiens
  chr1:1004071-1004184
  hyper
gcagcaagccgcgggccgggcccatggtggtgcacttcagctgcggcggggcgggcccacgcgggctgtgcagatgcaggtgcggcggggcggggccacgcgggctgtgcagg

SEQ ID NO: 9 - DNA, 80 bp, Homo sapiens
  chr1:1014972-1015052
  hyper
gctcccggctgacactcgtgccggaggcaaaggtgaggaaaggccggaggaatgtgtggtctcggcgccaggccaggcct

SEQ ID NO: 10 - DNA, 57 bp, Homo sapiens
  chr1:1052181-1052238
  hyper
ggccccggggtctgggcggcgtcgctgccccacaggccgggcgcgtgggtttttccg

SEQ ID NO: 11 - DNA, 128 bp, Homo sapiens
  chr1:1737717-1737845
  hyper
gtccagaggaagagaccgtgacaggtggcacgtgactcagcttctatctcacctgcgcaacttcactactaacaaacagagcttgccgctgctgccttccctatcctgtattacgtgatttaacaaaa

SEQ ID NO: 12 - DNA, 83 bp, Homo sapiens
  chr1:1976104-1976187
  hyper
caccgcgcccggcccaatccgcagattttaagcggggacgacttaaaaacaggattgctgagctgcgacgaggggggctgcaa

SEQ ID NO: 13 - DNA, 176 bp, Homo sapiens
  chr1:1981252-1981428
  hyper
gactcgggccaatgccgcgtccttgacctgggcgaagtgagcggttgcactcacgagtgtggacggcccttccctacaggggaccttggattcgctgggggcggagtgggggctggggcccagagaacccgagtccggacgctcccgtccgtgaccctggccgggttctccgctcc

SEQ ID NO: 14 - DNA, 97 bp, Homo sapiens
  chr1:1981457-1981554
  hyper
tcaggggacccctggacggcggggccctcgggctggcagcgcgcgccgcaggagtttcgattcggagggtctgggcgaaggccgagaactcgcgttt

SEQ ID NO: 15 - DNA, 173 bp, Homo sapiens
  chr1:1981576-1981749
  hyper
gctccgtcccagaggccggggcccctccggttgccgggcagagccgcgccgcgcgcggtcccattggcgcaggtgcgccgcgccccgcccaacaggtagccccgcccgacaggtagccccgcccgcgcctcgccattgggccgcggccgggtgtcccccgaggattggcccag

SEQ ID NO: 16 - DNA, 193 bp, Homo sapiens
  chr1:1981788-1981981
  hyper
ccgcccgccccgggaccgcccgccccgcggattggccgctggctccacctcggtccgccatgttcggacaccgccccccgcccccgccggacggtcccgccccgcgcgccccccgctcccgccccgcgcgccgccggagttccgcggagttgaccgggtcggcgccgtcggtcctgagcgctgccttccgcgt

SEQ ID NO: 17 - DNA, 31 bp, Homo sapiens
  chr1:1982244-1982275
  hyper
gaggtcgctgcgggcccggggctgtcgcggg

SEQ ID NO: 18 - DNA, 49 bp, Homo sapiens
  chr1:1982476-1982525
  hyper
ttgtgaaaactcctggcgggtttcttaaaatcagcgtttcctaaacgtt

SEQ ID NO: 19 - DNA, 31 bp, Homo sapiens
  chr1:2078422-2078453
  hyper
cacgatccatccatctcgtcatccagccagc

SEQ ID NO: 20 - DNA, 31 bp, Homo sapiens
  chr1:2078482-2078513
  hyper
ccagctatcttccattcgttcatctgttgtc

SEQ ID NO: 21 - DNA, 4 bp, Homo sapiens
  chr1:2078575-2078579
  hyper
tgtc

SEQ ID NO: 22 - DNA, 31 bp, Homo sapiens
  chr1:2517090-2517121
  hyper
agcagcagcacccccccggggcctctcttta

SEQ ID NO: 23 - DNA, 31 bp, Homo sapiens
  chr1:3370920-3370951
  hyper
agccgctctggccccacgcctggcaggcgac

SEQ ID NO: 24 - DNA, 50 bp, Homo sapiens
  chr1:3371087-3371137
  hyper
tgacctgtgacgcaggcggcgccgccacaggtgcccgggacgcgccccgc

SEQ ID NO: 25 - DNA, 73 bp, Homo sapiens
  chr1:3371189-3371262
  hyper
gcccagcgcccacctgcggggccgcagccgccgccctccagccagaccgcgcaggaagcggaggaggcgcccc

SEQ ID NO: 26 - DNA, 39 bp, Homo sapiens
  chr1:3371630-3371669
  hyper
cctgcttgcccccgcccgctcgctcgctgccctctcttg

SEQ ID NO: 27 - DNA, 31 bp, Homo sapiens
  chr1:3447460-3447491
  hyper
gactcctcagcgcccacggaccctgtcccag

SEQ ID NO: 28 - DNA, 39 bp, Homo sapiens
  chr1:3447532-3447571
  hyper
ccagcctagcaggcagcgccctggcgcaaactttaaaaa

SEQ ID NO: 29 - DNA, 119 bp, Homo sapiens
  chr1:3447572-3447691
  hyper
aggaaacaaagggagcgcgccggggagcgccctggccccgcccgccctgcccaggctcgcccggcgcccacctggcctctggtcaccggcgctcacggggtagccggcctggcccaggt

SEQ ID NO: 30 - DNA, 52 bp, Homo sapiens
  chr1:3447704-3447756
  hyper
gcccctccagaggtagcggtagtgcgtgcccgcgacgcgcgccaggcccccc

SEQ ID NO: 31 - DNA, 49 bp, Homo sapiens
  chr1:3447761-3447810
  hyper
cccaaggcaccagagcgcggccagcccgcggtcccgggacgcccccatg

SEQ ID NO: 32 - DNA, 162 bp, Homo sapiens
  chr1:3447822-3447984
  hyper
ggcgggcgggagggggcgaggaccaaccgcgctgcgccctaagccggcggccgggcgacggggcaggcggctcgggctggttctgggttccgggcgggcgcgcaatcccagccccgggatccgctccgctcggcgccgcccgggagccgctctgggccgggc

SEQ ID NO: 33 - DNA, 36 bp, Homo sapiens
  chr1:3448358-3448394
  hyper
cgtcctggccgggccgcggggcgggggaggggggcc

SEQ ID NO: 34 - DNA, 49 bp, Homo sapiens
  chr1:3540866-3540915
  hyper
cacacatgttccacctcgaactgcgagcgctgaccgggatctctgggca

SEQ ID NO: 35 - DNA, 88 bp, Homo sapiens
  chr1:3817993-3818081
  hyper
ggtctggatggacacacggcggccacgcctcctccagcaaacacgcccctagcaggcctgggctgctgtgatgcgtcctctttggccg

SEQ ID NO: 36 - DNA, 44 bp, Homo sapiens
  chr1:4004557-4004601
  hyper
tgcccccaccctgagtcgggatctgtgccgcggtatagactgca

SEQ ID NO: 37 - DNA, 31 bp, Homo sapiens
  chr1:5805925-5805956
  hyper
caccagccaatgcctgcgtccaggttgctgc

SEQ ID NO: 38 - DNA, 68 bp, Homo sapiens
  chr1:6053624-6053692
  hyper
cggcattagcagcagccggggtacctgcccaccttcccaccccgccaaccagccgcatcctggtgtcc

SEQ ID NO: 39 - DNA, 41 bp, Homo sapiens
  chr1:6053725-6053766
  hyper
gggactgtgctttgcccgcagcatcccggggtgctccaggt

SEQ ID NO: 40 - DNA, 31 bp, Homo sapiens
  chr1:6474590-6474621
  hyper
gcgtgttctctagatccgttctcacgatcct

SEQ ID NO: 41 - DNA, 43 bp, Homo sapiens
  chr1:6479749-6479792
  hyper
gcggcttcaggctctgcggacgggcggcgcggtggttagacgg

SEQ ID NO: 42 - DNA, 44 bp, Homo sapiens
  chr1:6480128-6480172
  hyper
ccgctccccgcctttgcgtcctgtctaccgcggggtggcggccc

SEQ ID NO: 43 - DNA, 81 bp, Homo sapiens
  chr1:6507490-6507571
  hyper
ggtgtcgcatttcctgcaacgtgagccaggtcgggcggggtgaagggtctgaggccaccgcagggacgcatgggctggaga

SEQ ID NO: 44 - DNA, 51 bp, Homo sapiens
  chr1:6507703-6507754
  hyper
tacggcccctgaaatccgaggcttgagcgcgggtgtcggtgtcgctttcgt

SEQ ID NO: 45 - DNA, 35 bp, Homo sapiens
  chr1:6507846-6507881
  hyper
cagccctctcccctctcgggcggggatgaaggtgg

SEQ ID NO: 46 - DNA, 56 bp, Homo sapiens
  chr1:6508011-6508067
  hyper
ttcagcctgggattggcgggccccgggtgatgtcaggccgtcggagcccataggct

SEQ ID NO: 47 - DNA, 124 bp, Homo sapiens
  chr1:7843508-7843632
  hyper
cacgggcggtgaaaaccgtgggaacccagaaagacggccaaagcacgatgaggaccgctgccggcagcccgccccaccctgggctcctccccacacccgctcgggcagccgggagccacctaca

SEQ ID NO: 48 - DNA, 41 bp, Homo sapiens
  chr1:7843652-7843693
  hyper
gagcgctggcctgagccgcccctgctcgcccccagtccccg

SEQ ID NO: 49 - DNA, 189 bp, Homo sapiens
  chr1:7844212-7844401
  hyper
gcttatataacccgggcgcaccggctcgcgccccgccccagggccaatggaggcctgcggagtcggccccgacgaccaatcgcacggcccgggggcgggaccggtcacgcggcggcagggggcgcggcgccggctgctgaccggcacgcggcgagcctcgagactgcgcgagggcggccccgggggcga

SEQ ID NO: 50 - DNA, 62 bp, Homo sapiens
  chr1:8085828-8085890
  hyper
cccccgtccgctcctgcggtcccggtgctgcggggacgtatcccgggcgctcgggtgcatgg

SEQ ID NO: 51 - DNA, 160 bp, Homo sapiens
  chr1:8086055-8086215
  hyper
ccatcccagagactccgcgtcgcggcgaccctccccgcgccctccacgcccccgccctcgcgtcggggagccgcctggatcccggcgcccggcgcggggccccctgagggaacggagcgctgcgtggccctccccaccccctcagcgcgccaggcccctt

SEQ ID NO: 52 - DNA, 31 bp, Homo sapiens
  chr1:8086228-8086259
  hyper
ggcggctgccccgcggcgccctcccgcgcat

SEQ ID NO: 53 - DNA, 46 bp, Homo sapiens
  chr1:8086282-8086328
  hyper
cgcgggctcaggggcccggacatcgcgcaggcgcctcttgctggct

SEQ ID NO: 54 - DNA, 47 bp, Homo sapiens
  chr1:8086513-8086560
  hyper
ccaccgtggcgtatcgcggcgctgcagggagccggctttgtctcccg

SEQ ID NO: 55 - DNA, 64 bp, Homo sapiens
  chr1:8086646-8086710
  hyper
ctttcctcagaagcccgcggcgacccgggcctcggccgctgttcctgcccgaactgagggcaca

SEQ ID NO: 56 - DNA, 31 bp, Homo sapiens
  chr1:9188650-9188681
  hyper
aggggtcggcctgtgtcgggggctcctggaa

SEQ ID NO: 57 - DNA, 31 bp, Homo sapiens
  chr1:9188691-9188722
  hyper
accgccacccacctgacgacatggaaggccc

SEQ ID NO: 58 - DNA, 138 bp, Homo sapiens
  chr1:9188767-9188905
  hyper
tgaggtacaagtagagcgcaatggccacggtccagaagaaggagctggtgttggcgaaggtggacagcgcgccctgcagcacgcagtcccacgacgggcccgcgaagttctgcagcactccgtagaagtaggaggcgg

SEQ ID NO: 59 - DNA, 201 bp, Homo sapiens
  chr1:9189021-9189222
  hyper
cacgacagcagcaccacggcgcgctccgacggcaccagctcggtgggcggcggggacggctgcatggcgtggggggccaggagccggagcgccgcgaggacagaagccgggccgcgcgtgcggccacgccgccgccgtctgggcaccgaggcgccctaggctcgcgtccaggcgcccgccccgcccgcgtccggccgctcc

SEQ ID NO: 60 - DNA, 31 bp, Homo sapiens
  chr1:9352659-9352690
  hyper
acgcgtttcccaaagacgcctccggagggac

SEQ ID NO: 61 - DNA, 190 bp, Homo sapiens
  chr1:9352964-9353154
  hyper
cgctcgggcagcctgcgcgctcgcagcaggaaccaggctccaggcgccggcgccggggccggggccgcggggaggaggcgacttcgctccctgcggcgggcgcggcccgggcgcccgagcctcctcggccttggagagcagcggcggcggcggcaccccgggcgcggtaggcggcgcggggcacctggga

SEQ ID NO: 62 - DNA, 48 bp, Homo sapiens
  chr1:9353808-9353856
  hyper
gggcgtgtactgggctcggtggcgtccaggttccggtgaggacgggac

SEQ ID NO: 63 - DNA, 106 bp, Homo sapiens
  chr1:9489049-9489155
  hyper
atctgagagcgccacgcgcggtcccgaaaacctgagcaccctctggctaaggcgttgctgtagagacggtgcgccagccccgcccccgaggcgggattggaggaaa

SEQ ID NO: 64 - DNA, 54 bp, Homo sapiens
  chr1:9489161-9489215
  hyper
cagctgacaagggtgacgtttcgaaagcgcgcgggaggccgtgctgggacgcag

SEQ ID NO: 65 - DNA, 376 bp, Homo sapiens
  chr1:9711913-9712289
  hyper
ggggctttgggagctgcggctgcgctcgggggcgcggggctggctggcgggcgtctctccggcacacacagcccgtgcgccctggccctgggcgcctccccgagtctagcgagccgggtcctgggagccccgggggccgggctgctgggacctgggcgggggctgccctagaggcccggggccgtcccccgtgggcccgccgagaggggcgtgcgcagctccccggcgcctgcactgcgcgccttgcccgcctggcccggcagcggggtttcagctgcgctcacagcggcggtgcggcctccggtgcgccggctgaggcgcgaggatactggaagcgctcagcgcgtgcgcccgctccgagcgctgactagaggac

SEQ ID NO: 66 - DNA, 376 bp, Homo sapiens
  chr1:9712290-9712666
  hyper
aggggcctcctctgtacggcagcggggtccacagagagcgcgctggtgatgtcgcccgagtgccctggcgcggagagagggctgcgcacagttcgccggcgcccgggtcctgtgcgcccttcccagcctgggcaagtggggagcggggctgcagaggggccggggtggaagttttcggggcttcctcccggctcgtggacccgcgccccgcctcccagtcccgggcctcccgcgttgctcgccgcgtttgctgcagcggcgcaggcgagatcagctccggatctgcggccgagccggggttacgccggcaaaaccgcccccagctttgcatttccggactttttaaaaaaatactcttacccgtaattcagcctga

SEQ ID NO: 67 - DNA, 31 bp, Homo sapiens
  chr1:9712670-9712701
  hyper
ggctttttaaaaaaatcgagtttcctgtttt

SEQ ID NO: 68 - DNA, 271 bp, Homo sapiens
  chr1:9712743-9713014
  hyper
aagaggggaactgggacgacctttcgtgggcaccaggatgggggcgttgcagggcggggagacgggggtccagagaaccggggaagggccgctgggaggtcccgaaaagtgcgctgtgggtggggcgagggtgaagcaggtaggggcgagatttccggggtcgcgggtggggggcgccctggagcggccaaggtgcagggtcctcgcgtggcacccttgggatctgcccagtttgcggatggagcgcggggctgatcgggcaggtctcact

SEQ ID NO: 69 - DNA, 155 bp, Homo sapiens
  chr1:9747556-9747711
  hyper
gggtcccagctgccctcggatgtctgctgcaccgctcccctccctcaggcgggggacggcaggaaggagggagagatgggagggcgtgggggcggggccgggggcggtctccagcccccggcccgggctccgccctctcccgggatctgtgaaag

SEQ ID NO: 70 - DNA, 47 bp, Homo sapiens
  chr1:9749326-9749373
  hyper
tctggggctcagggtgcgaaccccaagggccccgcctggcagcgtcc

SEQ ID NO: 71 - DNA, 100 bp, Homo sapiens
  chr1:9749378-9749478
  hyper
ctccgggcgagaacagcgggggtcggggaggatttgcagcgtccactcctctctccgccgcccgtgtgagctcgggcgcttctcccggctgggggtgtga

SEQ ID NO: 72 - DNA, 31 bp, Homo sapiens
  chr1:10271340-10271371
  hyper
ggtgggcatcgggcttcggctgggaatgtgg

SEQ ID NO: 73 - DNA, 31 bp, Homo sapiens
  chr1:10853672-10853703
  hyper
acaggaggcataagatcgctggaaacctgat

SEQ ID NO: 74 - DNA, 31 bp, Homo sapiens
  chr1:10853727-10853758
  hyper
ataaactctccttaaccgcctctaaggtggc

SEQ ID NO: 75 - DNA, 47 bp, Homo sapiens
  chr1:10853763-10853810
  hyper
agaagggggtgggtggcgggggggcggggcggcgatctctccaattc

SEQ ID NO: 76 - DNA, 172 bp, Homo sapiens
  chr1:10853955-10854127
  hyper
gagtggcgcgggcggccggagattgcgcaggtcgcgacgcccgcccgggacgcaccgcctggtcgccaccaggacgcaaacccggcgctttgcgctcgggcgccgaacggcccagcgccccctccgggcacgtggagcgcagccccggctcagcccccggggaacaactacc

SEQ ID NO: 77 - DNA, 31 bp, Homo sapiens
  chr1:10854266-10854297
  hyper
cgcgtcgtgggttgggcggggggacaccaag

SEQ ID NO: 78 - DNA, 56 bp, Homo sapiens
  chr1:10854374-10854430
  hyper
ttactaactttgccccgcgactaccagggccttttccccctcgccaccccctgagt

SEQ ID NO: 79 - DNA, 55 bp, Homo sapiens
  chr1:10854472-10854527
  hyper
acccccacactccactcggtcagaaacgcacactccgccccgtggcccagtgatc

SEQ ID NO: 80 - DNA, 118 bp, Homo sapiens
  chr1:10854543-10854661
  hyper
ccatactcaggagaggcgctactgccgcttttccggtgggcacgcacccgcacccgcaccgtagccagcgtggctggaaggaggtcctcgccgcgcccagagccggctttccaagctg

SEQ ID NO: 81 - DNA, 92 bp, Homo sapiens
  chr1:10854700-10854792
  hyper
cccctgcctccctcagcgctccactagcctcccccaactccggacccgggtcggggatgacttggaagaagaatctgcgcccaccccttaga

SEQ ID NO: 82 - DNA, 167 bp, Homo sapiens
  chr1:10854805-10854972
  hyper
ttattatcttaatctacgcccccaaagtgtccctccagccgtgattgacggcgcatacacctgttcccttcgcggaggagcttccagcgccggggacagacattcgcccaaacgctccgcagcggcccagcaaccgcccgcccgcccgcgcccggccagcccccgcc

SEQ ID NO: 83 - DNA, 59 bp, Homo sapiens
  chr1:10854994-10855053
  hyper
ccgcacctcgccaccccggcggccgccccctccccttccagacccggctgcccggcccg

SEQ ID NO: 84 - DNA, 34 bp, Homo sapiens
  chr1:10855103-10855137
  hyper
aaaacttcctggcggccgacggccatcagctgca

SEQ ID NO: 85 - DNA, 261 bp, Homo sapiens
  chr1:10855138-10855399
  hyper
attctgcaaatgccaccgagtaaaaataaaccggccgccgctccgcccgtccggctcaccccgggcgcacgaatcggccccctgccccgggagatccctgactcggtctggcccgatcccccattcccgcgcgccccctggatccccgctccccgacgctcctccgtcagtcaccacgctctcctttgccgttaagccggaccctaagtgaccgggaaaccggctctctccctttggtgttccctgcgcccccacaaacta

SEQ ID NO: 86 - DNA, 206 bp, Homo sapiens
  chr1:10855536-10855742
  hyper
cgctgcagagcccccccggagcgcaccactctaccagcccgctagcccgccagcccagcgtcccacgtccccgggcgcaacttctcttctggcgcacacaacagccggcaacaactcgcccgaactttccccgggacccaggcgggctccagccgacagccgggcagctctgggccgatgccccggctccccgtgccctgtgttgc

SEQ ID NO: 87 - DNA, 44 bp, Homo sapiens
  chr1:10855788-10855832
  hyper
aggaacgccacttgccgcgcctggagcagcgcacttgagataaa

SEQ ID NO: 88 - DNA, 34 bp, Homo sapiens
  chr1:10855843-10855877
  hyper
cagatgaaaaagggggcgccgctccccccatcta

SEQ ID NO: 89 - DNA, 69 bp, Homo sapiens
  chr1:10856314-10856383
  hyper
ccctcccccggagccgcgcgccgggcattcccctggccacggcaggcaacgcgccgccccgcgcccggg

SEQ ID NO: 90 - DNA, 56 bp, Homo sapiens
  chr1:10856465-10856521
  hyper
cgctcgctcgctcgcccgctccctgctgcaagcggcagccccgggggtgggggggg

SEQ ID NO: 91 - DNA, 97 bp, Homo sapiens
  chr1:10856550-10856647
  hyper
gcgccccgggaggcccgcggagctgggggacgtgggggggccgcggcggagggagcgccgagtctcttacctgcacttggggcggctttgggtgact

SEQ ID NO: 92 - DNA, 145 bp, Homo sapiens
  chr1:10856713-10856858
  hyper
caaagttgccggatcccggatttttcgctcccagtctccgctctcgcccgctgtgattatggaattctccgcggccgggcgggcgagtgggtggcatgcaaaacccgggccggatcgcggggccgggctccgctccaccctcaca

SEQ ID NO: 93 - DNA, 31 bp, Homo sapiens
  chr1:10856861-10856892
  hyper
ccagacctgcccctcccggatccttcccacc

SEQ ID NO: 94 - DNA, 37 bp, Homo sapiens
  chr1:11751777-11751814
  hyper
gcccgggcacatcctccggctgcccgcgcacctctcc

SEQ ID NO: 95 - DNA, 54 bp, Homo sapiens
  chr1:12123222-12123276
  hyper
agaagctgcctgcctccgctccccgcagcccaggtgcggcgggcagcacactcc

SEQ ID NO: 96 - DNA, 71 bp, Homo sapiens
  chr1:12123282-12123353
  hyper
ccaggaccactagttccgtcaaatccggggcgggccattcaaacagctaagggaggcgtctcctagtgtgc

SEQ ID NO: 97 - DNA, 53 bp, Homo sapiens
  chr1:12123359-12123412
  hyper
ctgagtcatctctgcacgtgtttgcccccttttttcttcgctgcttgtagcta

SEQ ID NO: 98 - DNA, 133 bp, Homo sapiens
  chr1:12123420-12123553
  hyper
tggaaccaatttgatacgggagaactaaggctgaaacctcggaggaacaaccacttttgaagtgacttcgcggcgtgcgttgggtgcggactaggtggccgcggcgggagtgtgctggagcctgaagtccacg

SEQ ID NO: 99 - DNA, 39 bp, Homo sapiens
  chr1:12123787-12123826
  hyper
cgcaagggaggacactcctcaccccgttccctgcccagc

SEQ ID NO: 100 - DNA, 31 bp, Homo sapiens
  chr1:12227483-12227514
  hyper
cgcaccctggttcctccgcgagcgcaggccg

SEQ ID NO: 101 - DNA, 81 bp, Homo sapiens
  chr1:14026538-14026619
  hyper
gatccgcggtgacctacgaggggcggctgggtggtggccattgggcgacggcgcagggtcaagggccgggctctgggatcg

SEQ ID NO: 102 - DNA, 117 bp, Homo sapiens
  chr1:14026621-14026738
  hyper
gggagaccgggggtcccggagccccccagccccgcaggccactgcctcgccgcccgacgtcacttccgactggagtcaagatggcggcggcgcggccgcgggcgccggggccggcga

SEQ ID NO: 103 - DNA, 85 bp, Homo sapiens
  chr1:14026746-14026831
  hyper
cggcggcggcggccctcggtgctctgaggcgctggcgcggcgggcgcgggtaaggagtggcgcgggtgggcggcctctgggctcg

SEQ ID NO: 104 - DNA, 80 bp, Homo sapiens
  chr1:14026839-14026919
  hyper
cgctggtccctccccccgaggagcgcggcggcgacggcggcggcgacacgctggggacccggcgccgcagggatggccgg

SEQ ID NO: 105 - DNA, 214 bp, Homo sapiens
  chr1:14026931-14027145
  hyper
gccccctcagaggtcccgggcgtgccgggggccccgggacgaggcgcgggcctccgggtcggtggccccgcgggtgggtggcggcgccgggctcctccttgtcggccgtggggtccctgcggcgaagttcgggattcggtttgtcgccgtgaagagccgcgcgccccgcgggggacgcgtgcgggctgcagagactggccgggtgcgggcggcg

SEQ ID NO: 106 - DNA, 39 bp, Homo sapiens
  chr1:15250612-15250651
  hyper
ccgcgggactgagagccgttcccacgtgagaggctccgc

SEQ ID NO: 107 - DNA, 125 bp, Homo sapiens
  chr1:15250889-15251014
  hyper
gcgcgtccgccagctcgcggcgcagggcgagccggcgccttcctgcggggcgggggccgggcccgcgcggcccccgggacccgcagcctgcgagcagtgcgtggacgcggcggggcccggcgatc

SEQ ID NO: 108 - DNA, 172 bp, Homo sapiens
  chr1:15251271-15251443
  hyper
ggctcgggggctgcaccggggggccaggaccgcgcttgccggagccaggcgatcccgcggcgcctggagacccagctccgggctggaccccgcgtctgctgggggaagcgtgggaaaggggccagccctgcgcgaagttggttcggccccctgggaccgcacctgtgagcca

SEQ ID NO: 109 - DNA, 31 bp, Homo sapiens
  chr1:15251513-15251544
  hyper
tcgcatttgctaggagcggagagattgctgc

SEQ ID NO: 110 - DNA, 59 bp, Homo sapiens
  chr1:15478881-15478940
  hyper
tctgcaggtgtacacacgtggacaccatatgtacccatgaattccgcctttggaagtga

SEQ ID NO: 111 - DNA, 31 bp, Homo sapiens
  chr1:15479056-15479087
  hyper
acttcaaagggctggacgctcacccaagaag

SEQ ID NO: 112 - DNA, 31 bp, Homo sapiens
  chr1:15479093-15479124
  hyper
ccggcctgacctctctcggaattcaaaaaaa

SEQ ID NO: 113 - DNA, 230 bp, Homo sapiens
  chr1:15479163-15479393
  hyper
ctgtgtttagcatccacgttttttggcggtctggctgaaaccagcccaccctagttcgggcgccagagcaacgcagttccgagggcagatctccaaggggcggaggcagagccgcgggtgagaggcttccgcgccgacttcgggtttgcactccccggagccagaactccgtggcggctccgggcctccgtggatccgagcagagactggctgcccgcctgccactcgca

SEQ ID NO: 114 - DNA, 95 bp, Homo sapiens
  chr1:15479466-15479561
  hyper
aggctcccggtgcagcgcgcccccatccattgcccgcgcgcaagaacccggaatgggccccacctgggccgggactcgggcgtgcgatcccgagg

SEQ ID NO: 115 - DNA, 118 bp, Homo sapiens
  chr1:15479565-15479683
  hyper
cctggggaccacgcatcgggtggggaccctggccgagggcgtgagctgactcagtttttaaaaactcgcttcctccttccctacttgtgccggtcactcacctcgctgggaaccagcc

SEQ ID NO: 116 - DNA, 47 bp, Homo sapiens
  chr1:15480029-15480076
  hyper
ccggcacacgctcagcgcgctccagcggcatacgctggggagtgggt

SEQ ID NO: 117 - DNA, 31 bp, Homo sapiens
  chr1:15480209-15480240
  hyper
cgcggtccctccctcccgcacgccggcgctc

SEQ ID NO: 118 - DNA, 62 bp, Homo sapiens
  chr1:15480241-15480303
  hyper
caggccgcgcttcctgcgtccccaacccggtccctgagagggcagtgcgccctctccaccac

SEQ ID NO: 119 - DNA, 167 bp, Homo sapiens
  chr1:15480538-15480705
  hyper
gtttgggtctcctgtccgtccgtctgtccgccgagcgcttcccgcctggggtcgaccaccgggaggactccgcaccccgcaccctctgcggccgcgccccgccggcgcgggacgctcccgcctcccgggcaccgcgcctggccagctggcctcggctggggaaggca

SEQ ID NO: 120 - DNA, 31 bp, Homo sapiens
  chr1:15480714-15480745
  hyper
gggggccccctgttggcgggaacaggtgcta

SEQ ID NO: 121 - DNA, 41 bp, Homo sapiens
  chr1:15573651-15573692
  hyper
ccacgccccctctgccgcgcaggccacgccctcatctatta

SEQ ID NO: 122 - DNA, 31 bp, Homo sapiens
  chr1:15928988-15929019
  hyper
atgactataatttctccggtcatgtttcctt

SEQ ID NO: 123 - DNA, 73 bp, Homo sapiens
  chr1:16481895-16481968
  hyper
ccccctccccaaaatgcgaggcctgcacagtatgccttctccgcaaaacctcggcaagcgggttagtgaattc

SEQ ID NO: 124 - DNA, 31 bp, Homo sapiens
  chr1:16481974-16482005
  hyper
ctaagaagctgagcccgcggaaagctgccca

SEQ ID NO: 125 - DNA, 229 bp, Homo sapiens
  chr1:16482017-16482246
  hyper
tctaggggactccccacgccccccgccgggacgcgttcccgaagtcgccgcctggactgcaaccgcgtggcctgcgccgcgtcctcttctccgcagcctccgaggcccgtgcgaccaagctgaaaccgcttattctccggagcccctatgaccccgggtgggggccagggctcgcctcgatcgcagcccgtgcgccctccggactccagttcgccgggactgggcgaca

SEQ ID NO: 126 - DNA, 94 bp, Homo sapiens
  chr1:16482252-16482346
  hyper
aggttccaaagttgcgcgcgtcaaggagcgccgggctctagggggcactggggcccgggggccaggggtccagacgccgcgcgcactcaccttc

SEQ ID NO: 127 - DNA, 86 bp, Homo sapiens
  chr1:16482709-16482795
  hyper
gggccctctggactcgcgggctccccgcaggccttccaaagtttgagcgtctcaaagcgccagcgcccctacggattagcccccag

SEQ ID NO: 128 - DNA, 69 bp, Homo sapiens
  chr1:16514365-16514434
  hyper
ggcaatgagcaggctgcgctcggaggaccccgctatcccagccctgggctctgccgccctctggtggct

SEQ ID NO: 129 - DNA, 87 bp, Homo sapiens
  chr1:17865913-17866000
  hyper
cgggaagtggggaccccggggtaggtgaaggagcgaggaggtcgccgtgtggccggggccgggccccatccccgcgggcctcagttt

SEQ ID NO: 130 - DNA, 118 bp, Homo sapiens
  chr1:17866005-17866123
  hyper
ctgtactgtggggggccggtgggctgccgggaccgctgggggctcgcagcgggtcgggggaggccacgtctccctcgcggcgcgctgggagcagggagggggcgcggcggccgctgcc

SEQ ID NO: 131 - DNA, 263 bp, Homo sapiens
  chr1:17866227-17866490
  hyper
cggagcgcggcgggcgcgggcgcagtcccggcgggcccggacctcgcgggcgggcgggcggcgcggccattggctcgggtggcggcggctgcggcggtgggggcgccgtcccggccatgggcgcccgcggcggcctgcggagctggaggcgcggcgccggccgccaggcgcctttgtgagcggcgcggacgacaaaggcgcgggcccgggcagccgaggtgggtgagtgagcgcgggggccctgcctccgcgggatcctcgcg

SEQ ID NO: 132 - DNA, 31 bp, Homo sapiens
  chr1:18960803-18960834
  hyper
cccgcttggccaaggccgggtcaatcagctg

SEQ ID NO: 133 - DNA, 31 bp, Homo sapiens
  chr1:18978534-18978565
  hyper
acccatcaaggctcaccggccccctggcagg

SEQ ID NO: 134 - DNA, 55 bp, Homo sapiens
  chr1:18978566-18978621
  hyper
ggcagcaagagaatcccgggcagcagcggaaaggctgggccggctgggcccacag

SEQ ID NO: 135 - DNA, 51 bp, Homo sapiens
  chr1:19229564-19229615
  hyper
ccgctaccagactcctcgaccccgcagggccacagcgcggccagccccctg

SEQ ID NO: 136 - DNA, 115 bp, Homo sapiens
  chr1:19639207-19639322
  hyper
tatccctccaaacaggcggcccgcgccgggctgagtcaccaggagggagctgtggccgaggacgccgaggcctggagtgggtggtagccccgagctgggacgctcctccctccac

SEQ ID NO: 137 - DNA, 35 bp, Homo sapiens
  chr1:19639477-19639512
  hyper
aaggcgcctgtgtgcccggacgctggaggggctac

SEQ ID NO: 138 - DNA, 35 bp, Homo sapiens
  chr1:20512596-20512631
  hyper
ccagcaggacagagcccgggcgcaggcggcggatg

SEQ ID NO: 139 - DNA, 31 bp, Homo sapiens
  chr1:20512671-20512702
  hyper
gcctgcccttggcctccgccaggcctggaag

SEQ ID NO: 140 - DNA, 110 bp, Homo sapiens
  chr1:20512727-20512837
  hyper
accccagcacatcacccgggagggcctccccagacccagcccgggggacgcaaaccccgggagacaggcgaggagcctggagaaaagtctgctcccgaggcaaagcaagc

SEQ ID NO: 141 - DNA, 40 bp, Homo sapiens
  chr1:20811903-20811943
  hyper
cctccgcccgcgtccccgcccgcggcggacagggtcagcg

SEQ ID NO: 142 - DNA, 52 bp, Homo sapiens
  chr1:20811986-20812038
  hyper
gctgcggcggtggcgccggcgagaggccgggggacgccgctagggcaagagc

SEQ ID NO: 143 - DNA, 63 bp, Homo sapiens
  chr1:20812133-20812196
  hyper
gcaggactcacatcctcggcgcgctggggctctgggcgggggccgggccgggcggggccgcga

SEQ ID NO: 144 - DNA, 87 bp, Homo sapiens
  chr1:20812225-20812312
  hyper
ccggagggcgcgggaccgaggagggcgcaccccgggagccgggcgggccggtcctgcggcgagtgcgggcggcggcgccggttcggg

SEQ ID NO: 145 - DNA, 37 bp, Homo sapiens
  chr1:20812695-20812732
  hyper
ggagaaatgccggccgcggcgccgaggcgaggcgcgg

SEQ ID NO: 146 - DNA, 144 bp, Homo sapiens
  chr1:20813299-20813443
  hyper
agggaaggggcagccccgcctcccgcaggagaagggagcgcctcattacgccgggctcgcccgggatgcctggctcccggcgtccgctgcctccgctggggacgtcccgggtctgccgccctctgccctcgggggtctcccttc

SEQ ID NO: 147 - DNA, 31 bp, Homo sapiens
  chr1:20959848-20959879
  hyper
aagtcactgctagaggcgccagtaccagcat

SEQ ID NO: 148 - DNA, 79 bp, Homo sapiens
  chr1:21058206-21058285
  hyper
cgaggcccctgaggggcgggcgcgggggtgcgaagcgctccagagtgggctgccggtcccgctgcgctacctcgctcgg

SEQ ID NO: 149 - DNA, 50 bp, Homo sapiens
  chr1:21058378-21058428
  hyper
cagggagggcagatgacgacggagcgggtgacgggcgcccctcactcccg

SEQ ID NO: 150 - DNA, 31 bp, Homo sapiens
  chr1:22140662-22140693
  hyper
ccgcatcttagggtttcgaataagggattgt

SEQ ID NO: 151 - DNA, 51 bp, Homo sapiens
  chr1:22263554-22263605
  hyper
gccccagccaagttggcgggaggcggcgagcgggaccggggcgcccctagc

SEQ ID NO: 152 - DNA, 46 bp, Homo sapiens
  chr1:22469042-22469088
  hyper
gcgctcgcacccctggcgccctcgagagccccgagccgcctaccgg

SEQ ID NO: 153 - DNA, 44 bp, Homo sapiens
  chr1:23037112-23037156
  hyper
gcacgcggggtcgccgcgctccagcgcccgcgctgcccccgggt

SEQ ID NO: 154 - DNA, 120 bp, Homo sapiens
  chr1:23037774-23037894
  hyper
ggctttgtagccagcccggcgagcgccgcccagggctgggggctgcccacgcgcgctcgccgcccccggctcgggcagccgcctcgcgccggcctggtcttgctccgcacagggtggagg

SEQ ID NO: 155 - DNA, 39 bp, Homo sapiens
  chr1:23038019-23038058
  hyper
cccccgagatggggcccggcgccccggagagcagggact

SEQ ID NO: 156 - DNA, 58 bp, Homo sapiens
  chr1:23038236-23038294
  hyper
gtggcggctggagccccgggaactctccagctgccgccggggccggaccagatgctct

SEQ ID NO: 157 - DNA, 31 bp, Homo sapiens
  chr1:23038305-23038336
  hyper
ggccttggccagggtcgcgggccctctcccc

SEQ ID NO: 158 - DNA, 31 bp, Homo sapiens
  chr1:23346339-23346370
  hyper
aggccggccctactgtcgtgcctgggtctgc

SEQ ID NO: 159 - DNA, 47 bp, Homo sapiens
  chr1:23543644-23543691
  hyper
ctggcgcgcgcccgtccgagggcacagagaggcgggacgccccgggc

SEQ ID NO: 160 - DNA, 35 bp, Homo sapiens
  chr1:23543857-23543892
  hyper
gcggccgccttgtctccgccgcgacccccgccgaa

SEQ ID NO: 161 - DNA, 31 bp, Homo sapiens
  chr1:23857852-23857883
  hyper
cccccccggaaagaacgcgtcctcgaggcgg

SEQ ID NO: 162 - DNA, 66 bp, Homo sapiens
  chr1:24126328-24126394
  hyper
tggacttggccaggtgcgcacctccaccctgaacaaactctgcgggtagtacggggaggaagcccc

SEQ ID NO: 163 - DNA, 86 bp, Homo sapiens
  chr1:24126403-24126489
  hyper
ggcctttcattcccagcgaccgggcccgctgccgccttcctccacgctgcctctatccccttctgggctcacgcagctccaaccca

SEQ ID NO: 164 - DNA, 43 bp, Homo sapiens
  chr1:24126492-24126535
  hyper
gaccaagagccctctgcgtgccaggctccgtaccaggcacttt

SEQ ID NO: 165 - DNA, 31 bp, Homo sapiens
  chr1:24126678-24126709
  hyper
cgccaggctcgcagcccggccctctccccag

SEQ ID NO: 166 - DNA, 31 bp, Homo sapiens
  chr1:24648595-24648626
  hyper
cgctccaggcaggccccgttgacagcccagg

SEQ ID NO: 167 - DNA, 101 bp, Homo sapiens
  chr1:24648831-24648932
  hyper
atctgatctccaggagcgccggctccagactgcctggagcgctgaaagagttaatcaggaacgcctccccgctgtggttttgtggtcgaaaccatgattgc

SEQ ID NO: 168 - DNA, 65 bp, Homo sapiens
  chr1:24648933-24648998
  hyper
aggagcaaatttttgtcgtgcacgaggtgtgttattaaaagtcggagctacgctgctgctgaatg

SEQ ID NO: 169 - DNA, 144 bp, Homo sapiens
  chr1:24649007-24649151
  hyper
aagccctctttgagttcgggctgtaaaactggcggactgggccgagaggcttgagccaaccctaacggcggcggcccgggcggcgcgggggtcctgcggctccgccagctgctgggagcgggcaggctgcgcagtcccagcagt

SEQ ID NO: 170 - DNA, 163 bp, Homo sapiens
  chr1:25255920-25256083
  hyper
ggagccgagcgcgcagccagactgaaccgggtgcccgggtgtcgccgcggcgtctcgggcacctcccatccccactgctcccgaggctctggctcccgcagctcagacgcccggagccccagggccggcgccctcccgccccgggtcccgcactcaccttgaa

SEQ ID NO: 171 - DNA, 590 bp, Homo sapiens
  chr1:25256156-25256746
  hyper
cgcacgagctcgcctgcgtggtccgccagcacgtccaccatcgagcgcacctcgggccgggcgcgccctccgggccccacggccgcctgcgcgctcagcgcgccgctgttctcgcccatcttgccgccgccgccgccgcaggggaaggccggggagggaggtgtgaagcggcggctggtgcttgggtctacgggaatacgcataacagcggccgtcagggcgccgggcaggcggagacggcgcggcttcccccgggggcggccggcgcgggcgcctcctcggccgccgctgccgcgagaagcgggaaagcagaagcggcggggcccgggcctcagggcgcagggggcggcgcccggccactactcgccagggcccgcccgctgcgaggcctcgctggcccgacggccgcccgcagcctgcccggctagtcccgcatcctcggcgcgcggccccgcgtgcggccgcccctcgtggctgtcccggctgcctgggccgcggcggggcccgcgcggggctgtgccgctgccgccgcctcccgccccgaagctcgcccgcggccgccccgactccgcggccgcagccccagaaca

SEQ ID NO: 172 - DNA, 73 bp, Homo sapiens
  chr1:25256750-25256823
  hyper
ctccagaatcaagtggcggggccgcggccgcccgcgcggggttagtacccccggggcccgcggggcggggctg

SEQ ID NO: 173 - DNA, 118 bp, Homo sapiens
  chr1:25257156-25257274
  hyper
gggcctgtgacttctgcaaccccgggctgggggccgcggggtctcagggccggtgacgccgcactgggagccgccccaaagaggttactcacctccctcgtcccgcacattattctga

SEQ ID NO: 174 - DNA, 62 bp, Homo sapiens
  chr1:25870617-25870679
  hyper
gggggaggcaggcgctcgtcgtcggtgcctaggggaggaggagagggcgcaggggcttggga

SEQ ID NO: 175 - DNA, 81 bp, Homo sapiens
  chr1:25870705-25870786
  hyper
ccccagccagcagctgcggcggtcaggagcccactggcccgttctcccgccccctgcccgacccaccgggccaacttttga

SEQ ID NO: 176 - DNA, 31 bp, Homo sapiens
  chr1:26248902-26248933
  hyper
gggaaaggaaaggccacggtgtgagagggag

SEQ ID NO: 177 - DNA, 58 bp, Homo sapiens
  chr1:26758409-26758467
  hyper
gtgctctaatgaagcccggttctgcggcattccaaggtaaggacgctgccttacccag

SEQ ID NO: 178 - DNA, 80 bp, Homo sapiens
  chr1:26758476-26758556
  hyper
agtcctaagctgccttcgacggccgagaagcgcctcgattcttgcccctggctcatttccctggcgcgttttccagacgc

SEQ ID NO: 179 - DNA, 41 bp, Homo sapiens
  chr1:26855979-26856020
  hyper
ttccaaaagagctgagcgggggagaacggtggccctggtgt

SEQ ID NO: 180 - DNA, 31 bp, Homo sapiens
  chr1:26856055-26856086
  hyper
gccagcagggcctctccggcggagccgagcg

SEQ ID NO: 181 - DNA, 31 bp, Homo sapiens
  chr1:27286147-27286178
  hyper
cttcccccttagtcccgcgaacacacacaca

SEQ ID NO: 182 - DNA, 118 bp, Homo sapiens
  chr1:27286496-27286614
  hyper
ggccctaccccgcgggcggacccagcctccctcccgtcccgacgctgttcctcggggtgagcaccagcgtttgtcccatcccgacgctgccccccggtgagtgcggcccccgcaccca

SEQ ID NO: 183 - DNA, 31 bp, Homo sapiens
  chr1:27321039-27321070
  hyper
ggaaggactacggatccgcaggaagaggcag

SEQ ID NO: 184 - DNA, 29 bp, Homo sapiens
  chr1:27684151-27684180
  hyper
gtgtcctgaccctttgcgaccaccagggg

SEQ ID NO: 185 - DNA, 31 bp, Homo sapiens
  chr1:27883559-27883590
  hyper
tcctttgtgcaaccctcgcccacccccttcc

SEQ ID NO: 186 - DNA, 49 bp, Homo sapiens
  chr1:27902441-27902490
  hyper
ccgtcgcgatccgggtcgggctcgggctctgccccggcccggggactgg

SEQ ID NO: 187 - DNA, 105 bp, Homo sapiens
  chr1:27960741-27960846
  hyper
tcaaaggcaggatttccgtcggggcggcagcaattcccggatccagcggggagcgcgggccgagaccgccgcgggcgcggagggggcgcccggagaggcctgtcc

SEQ ID NO: 188 - DNA, 31 bp, Homo sapiens
  chr1:28241431-28241462
  hyper
atctaaagggctgtagcggagttttggcttc

SEQ ID NO: 189 - DNA, 31 bp, Homo sapiens
  chr1:28241560-28241591
  hyper
gaggtcacattctcttcgtgtaatgccacca

SEQ ID NO: 190 - DNA, 46 bp, Homo sapiens
  chr1:28879901-28879947
  hyper
atccaaggactgaggcgcgctgttctgggaccggaggagtggggtt

SEQ ID NO: 191 - DNA, 31 bp, Homo sapiens
  chr1:28879959-28879990
  hyper
gggaggctccctaaagcggggcaagcttgaa

SEQ ID NO: 192 - DNA, 49 bp, Homo sapiens
  chr1:29586587-29586636
  hyper
cctcaccctcgaggggcggggccggcgacgggggcgggctctgcccggg

SEQ ID NO: 193 - DNA, 42 bp, Homo sapiens
  chr1:29586643-29586685
  hyper
ccgtggggggtggggccggcagggtgtcgctggggcgctatc

SEQ ID NO: 194 - DNA, 31 bp, Homo sapiens
  chr1:31192286-31192317
  hyper
cttgctgtccttgtcccggtaagaccgggga

SEQ ID NO: 195 - DNA, 31 bp, Homo sapiens
  chr1:32666346-32666377
  hyper
aatgacgcgggtctgacgctctgtcttcgag

SEQ ID NO: 196 - DNA, 58 bp, Homo sapiens
  chr1:32687708-32687766
  hyper
ccccacttccctccttcgctctcttcgcctcggctgcgactggcggctaaggcaggcc

SEQ ID NO: 197 - DNA, 31 bp, Homo sapiens
  chr1:32852879-32852910
  hyper
gatatgctttaaatcacgatattcataccaa

SEQ ID NO: 198 - DNA, 26 bp, Homo sapiens
  chr1:32852955-32852981
  hyper
tcttgagacagagtctcgctctcgtt

SEQ ID NO: 199 - DNA, 37 bp, Homo sapiens
  chr1:33005605-33005642
  hyper
cgggcgcggccaggggcgctgccggggaacctggctc

SEQ ID NO: 200 - DNA, 37 bp, Homo sapiens
  chr1:33207543-33207580
  hyper
cccccgcctgccatggcggcccgcgcgccccccgccg

SEQ ID NO: 201 - DNA, 55 bp, Homo sapiens
  chr1:33207711-33207766
  hyper
gccgagggcgccgaaccggccgccccccgggccaagaaggcggaggacaaggcca

SEQ ID NO: 202 - DNA, 41 bp, Homo sapiens
  chr1:33207770-33207811
  hyper
ggccaagggcaaaggccgaggtaaggcggtcggcacctggg

SEQ ID NO: 203 - DNA, 45 bp, Homo sapiens
  chr1:33207825-33207870
  hyper
gcgtcgagggtgcggccgagggggctctgccgggggtccgcgcgc

SEQ ID NO: 204 - DNA, 35 bp, Homo sapiens
  chr1:33721671-33721706
  hyper
ccccgcgcggctcaggcgggcggaggggggcgagg

SEQ ID NO: 205 - DNA, 85 bp, Homo sapiens
  chr1:33896550-33896635
  hyper
ccagcgcgcacgcgcccgcccgttacctgcggtcgcctccgcgctcctcctccacctggccgctctctcccgggggccgcccctc

SEQ ID NO: 206 - DNA, 91 bp, Homo sapiens
  chr1:33896721-33896812
  hyper
tattagcataccagcgcgcgtcacgtggccgctccagccaatggtcaccctagaagggcggggattgggcggaacacgccttagtgctgct

SEQ ID NO: 207 - DNA, 31 bp, Homo sapiens
  chr1:35208445-35208476
  hyper
ctctgctgccccccagcggctgaatggagca

SEQ ID NO: 208 - DNA, 31 bp, Homo sapiens
  chr1:35258519-35258550
  hyper
cgccgccctccccgtcgcgtttcctgccccc

SEQ ID NO: 209 - DNA, 48 bp, Homo sapiens
  chr1:35258560-35258608
  hyper
tctgcgctatttaaggcgcccccgccgctcgtgcggtccagcagggct

SEQ ID NO: 210 - DNA, 52 bp, Homo sapiens
  chr1:35394613-35394665
  hyper
cacacagtgacacactcggcacagacacacagcgacacgcactcacattcac

SEQ ID NO: 211 - DNA, 49 bp, Homo sapiens
  chr1:35394673-35394722
  hyper
agaggaaacttctctccggatctccccagcaccacgacttcccccacaa

SEQ ID NO: 212 - DNA, 144 bp, Homo sapiens
  chr1:35394731-35394875
  hyper
tactccctcccagacccgagcctccagccgggcgagggctgggccggggctggcctgtccccgcggccctgaccgggagcgtgggtccgcggtccgcgtggtcccctgcccgcccctcgggtcgggcccgcgggcagccaggcc

SEQ ID NO: 213 - DNA, 133 bp, Homo sapiens
  chr1:35394944-35395077
  hyper
gagcccggggcgtgggcggcgccggggccgcagccgggccgtgcctggggggcgctgcagagggagccgcgagcgcggccccgtccccactcctccccgcggcttacctggcccggctcgggctccggccggg

SEQ ID NO: 214 - DNA, 153 bp, Homo sapiens
  chr1:35395184-35395337
  hyper
cggagccccaagcgagcgccgagcggcagcgggcgcgggagcgggaggcggccaagccacggaggctggatttcccggggaccgggaaggggaggcggggggatcccgcccgcgcgctccgcccccgcccccgcccccgcgcagggcagccga

SEQ ID NO: 215 - DNA, 288 bp, Homo sapiens
  chr1:35395359-35395647
  hyper
gaagagggagggggaccgagctccccgcccccgcgcggacccaggagggccgaggtcgccgcccgcgggcggccgccggggtcccggaggagcgcccacctcgctgagcgacggtgctgggggcgcccagcgtaggggcaggaatgagatccccctccccggggacccaggaacaggcacccgaagtgtcacggccacgcacagccgacctgggtacagggacccaagcccggcggcgggcgggcggtcggggaccagctcagcctcacggaccgggtctcgcccccc

SEQ ID NO: 216 - DNA, 52 bp, Homo sapiens
  chr1:35395789-35395841
  hyper
ccctgccaggatggggcgctgtgcccggcctcggagccgctggcaggcgtcc

SEQ ID NO: 217 - DNA, 35 bp, Homo sapiens
  chr1:35395924-35395959
  hyper
ccgtgcccactgtgcccgcccgcctctgggccctg

SEQ ID NO: 218 - DNA, 103 bp, Homo sapiens
  chr1:36042654-36042757
  hyper
ctgtggcccagtggagcgagtggagcgctggcgacctgagcggagactgcgccctggacgccccagcctagacgtcaagttacagcccgcgcagcagcagcaa

SEQ ID NO: 219 - DNA, 31 bp, Homo sapiens
  chr1:36042759-36042790
  hyper
gggaaggggcaggagccgggcacagttggat

SEQ ID NO: 220 - DNA, 77 bp, Homo sapiens
  chr1:36042994-36043071
  hyper
tcgtcctcggcccttccgacggcacgaggaactcctgtcctgccccacagaccttcggcctccgccgagtgcggtac

SEQ ID NO: 221 - DNA, 125 bp, Homo sapiens
  chr1:36043094-36043219
  hyper
tggaatcagagaaagtcgctctttggccacctgaagcgtcggatccctacagtgcctcccagcctgggcgggagcggcggctgcgtcgctgaaggttggggtccttggtgcgaaagggaggcagc

SEQ ID NO: 222 - DNA, 159 bp, Homo sapiens
  chr1:36043228-36043387
  hyper
agccccaccccagaagcggccttcgcatcgctgcggtgggcgttctcgggcttcgacttcgccagcgccgcggggcagaggcacctggagctcgcagggcccagacctgggttggaaaagcttcgctgactgcaggcaagcgtccgggaggggcggcca

SEQ ID NO: 223 - DNA, 31 bp, Homo sapiens
  chr1:36043565-36043596
  hyper
aggactggtggggagacggagcttaacagga

SEQ ID NO: 224 - DNA, 31 bp, Homo sapiens
  chr1:36789069-36789100
  hyper
ccgcttcccggctgcccggccccagcgcgtc

SEQ ID NO: 225 - DNA, 48 bp, Homo sapiens
  chr1:38100357-38100405
  hyper
caagttgctcaatctgcggacggctcacgccctcggggccagcgcccc

SEQ ID NO: 226 - DNA, 36 bp, Homo sapiens
  chr1:38100408-38100444
  hyper
cggcgcatcggtcctccggggcggctcggagctgcc

SEQ ID NO: 227 - DNA, 52 bp, Homo sapiens
  chr1:38100539-38100591
  hyper
gccggagctcccagcccggagaggggccagtcctctgcgagcaccagggagg

SEQ ID NO: 228 - DNA, 38 bp, Homo sapiens
  chr1:38461632-38461670
  hyper
tccgcctgcccagggccgggcctcgctgcaggcagctg

SEQ ID NO: 229 - DNA, 59 bp, Homo sapiens
  chr1:38510674-38510733
  hyper
ggggaatccctaaccccgcactgcgttacctgtcgctttggggaggccgctgccgggat

SEQ ID NO: 230 - DNA, 15 bp, Homo sapiens
  chr1:38510773-38510788
  hyper
cgaggggatgggggc

SEQ ID NO: 231 - DNA, 43 bp, Homo sapiens
  chr1:39874198-39874241
  hyper
cgggaactcgagtggccgtcgccagagccggctagctggggga

SEQ ID NO: 232 - DNA, 60 bp, Homo sapiens
  chr1:39874756-39874816
  hyper
cgagctagcgagctagcgggtcgcgctgcgcgggggaggaggactcgccccccgcccgac

SEQ ID NO: 233 - DNA, 237 bp, Homo sapiens
  chr1:40781128-40781365
  hyper
cggcgccgcctattggcgacgaggggcactacatctccgggcaccccgaagtccccacccccaccacagcgctcacaaagttctcctttgtctgccgcctccctcccgccctggtctcaggttagagacttacgtcgatgccgtcggatccaggcactcccggcggtcccgggggacccggggggccccgctctcccggtggacctctctgaaaaacacacacggggtggggcagtc

SEQ ID NO: 234 - DNA, 142 bp, Homo sapiens
  chr1:40781521-40781663
  hyper
actcagaaccgggaggcgggcgctattacgggccccagtttgcagtcgaagaaactggctcagaacgtgaagggtccatggtcactgagagtgggcggcggcgccaggagtccgccctggatctgcccgactccttccactg

SEQ ID NO: 235 - DNA, 56 bp, Homo sapiens
  chr1:41284221-41284277
  hyper
cccagggcaacatcttcgccacgtccgcgctgcgcagcatgcgcttcctgcagatc

SEQ ID NO: 236 - DNA, 123 bp, Homo sapiens
  chr1:41284481-41284604
  hyper
gagccctagcaggaggcgaggtctaagcgggtggggcgaagtggattctgaattaggtaggggcgggcctaggagtccggaccggatcagggggcggggccggagaggcggggcttgagggtt

SEQ ID NO: 237 - DNA, 31 bp, Homo sapiens
  chr1:41284622-41284653
  hyper
gtttgaagggaccactcgtaccacaaagtgg

SEQ ID NO: 238 - DNA, 31 bp, Homo sapiens
  chr1:41284671-41284702
  hyper
gagggtggggctggagcggggctagggtggg

SEQ ID NO: 239 - DNA, 75 bp, Homo sapiens
  chr1:41328099-41328174
  hyper
cattggctgggcgagacgcttctgggcgggccgcgcacgcctgcatctaggtcttggccccgcccctcccactgg

SEQ ID NO: 240 - DNA, 31 bp, Homo sapiens
  chr1:41444959-41444990
  hyper
cgaccctccgcacttccgtcttggaggccag

SEQ ID NO: 241 - DNA, 230 bp, Homo sapiens
  chr1:41981772-41982002
  hyper
agtcccctgcccagctcggggctggccggggcctccacatctgcgttcctgcagggcgctgagggaatgcccctggctgggcggccccgcccctgctgggatccaggccaacgctccacaaatgagagagcttgagcgcgcggcgggcgccgctgggagaggccacacggtggcgctagcgcccagcctggccagcaccatgggcagggccggggcgcctggctccttcc

SEQ ID NO: 242 - DNA, 31 bp, Homo sapiens
  chr1:41982130-41982161
  hyper
ctccatggctccttttcgttcttccccctct

SEQ ID NO: 243 - DNA, 70 bp, Homo sapiens
  chr1:42128196-42128266
  hyper
tcactgctggccaccccgggatgccttcgcggccggggtcgcagatgggcccgggcgcggctggcggctg

SEQ ID NO: 244 - DNA, 60 bp, Homo sapiens
  chr1:42128267-42128327
  hyper
caggggagggtctcctcgcccggggaatccctggctgccggcggccgcggggagggtctg

SEQ ID NO: 245 - DNA, 62 bp, Homo sapiens
  chr1:42928781-42928843
  hyper
gaatgagttgtactatcgatacggccgggacaactccgcccccgacccgaaggccaatggtg

SEQ ID NO: 246 - DNA, 155 bp, Homo sapiens
  chr1:42928877-42929032
  hyper
tctctggttccactggcgtgcgtcgtctctatggttcccgccggaaggacgcgtctgcgtctctgcggcgagcgcggttgctatgacgcccaggtctccgtaggcacctgcagctagcagctgagcgcgtaggggccgagcgaccccgggacgct

SEQ ID NO: 247 - DNA, 38 bp, Homo sapiens
  chr1:42929107-42929145
  hyper
attctcccctcttttccgcattacgggccttttctgct

SEQ ID NO: 248 - DNA, 31 bp, Homo sapiens
  chr1:42929207-42929238
  hyper
ctggctggagtgattccgcctgaaggagaat

SEQ ID NO: 249 - DNA, 173 bp, Homo sapiens
  chr1:43919240-43919413
  hyper
ccagccctcccggcccgcgacgcacccgggggcgtgttgatcagtacaagccgcagccccgcttctcgcgcggcgcgcgccagcgcctcaggcgtctccgcgtacggccaggccacctcgacggcctcgaagcccgagctgcccgcggcccgcacccgcgcggggaggccgga

SEQ ID NO: 250 - DNA, 93 bp, Homo sapiens
  chr1:43919567-43919660
  hyper
acgaacgagcactgttcgtggttagaaaagcgaagtgctgtaaaaacccgggccttcacgaaaagcgcctacggttagcgagagagggatcac

SEQ ID NO: 251 - DNA, 35 bp, Homo sapiens
  chr1:43996429-43996464
  hyper
cggctccgcggctctacgagcgagagtgcacgagg

SEQ ID NO: 252 - DNA, 61 bp, Homo sapiens
  chr1:43997370-43997431
  hyper
atggggaggggccgaacgggctgtacccgcccccaaccgggtgcaacgccctggaggccct

SEQ ID NO: 253 - DNA, 111 bp, Homo sapiens
  chr1:43997477-43997588
  hyper
aagttcactcagtggccgccccgcgtcccgtcccgtcccgtcccggctccccatcgccgtgccggcgtctctgtctcggctgctttctgttttcctcggcgtctctgcctc

SEQ ID NO: 254 - DNA, 49 bp, Homo sapiens
  chr1:44444660-44444709
  hyper
ccgctaagggactccacggtctgcacccgctcgccggtccgacctctaa

SEQ ID NO: 255 - DNA, 43 bp, Homo sapiens
  chr1:45097399-45097442
  hyper
gggccgggcgatggggcggaaggagccccgcagcgggaggggt

SEQ ID NO: 256 - DNA, 87 bp, Homo sapiens
  chr1:45097717-45097804
  hyper
cgccgccctcgccggccgggcggccgtggggcccagagcgccggaggccagggctggggcggcaccgcgcagcggccacggggtccc

SEQ ID NO: 257 - DNA, 31 bp, Homo sapiens
  chr1:45098108-45098139
  hyper
ctccctcactgcctgccgctcctggcttgcc

SEQ ID NO: 258 - DNA, 31 bp, Homo sapiens
  chr1:45098296-45098327
  hyper
ggggggcaataagtgccggagaatgaggaac

SEQ ID NO: 259 - DNA, 31 bp, Homo sapiens
  chr1:45252161-45252192
  hyper
ggaagcgcttaagcacgcgggtgctgaccga

SEQ ID NO: 260 - DNA, 31 bp, Homo sapiens
  chr1:46957409-46957440
  hyper
gttgttttcaatttttcggggatttgtgttt

SEQ ID NO: 261 - DNA, 238 bp, Homo sapiens
  chr1:47903679-47903917
  hyper
gcctgcctcagtcccccgccccctccccgcccgcgcgcaaaacgcactcgccccagaggcagcgcggccgagcccgagccgctgccggagcggagccggagagtggcggcggcggcggcagcggcaccatgaccctgggcagctgctgctgcgagatcatgtcctccgagagctccccggccgcgctgtccgaggccgacgcagacatagacgtggtgggcggcggcagcggcggggg

SEQ ID NO: 262 - DNA, 35 bp, Homo sapiens
  chr1:47904094-47904129
  hyper
cccggggccaggcgccgcggcggcccgcggcgcag

SEQ ID NO: 263 - DNA, 31 bp, Homo sapiens
  chr1:47909741-47909772
  hyper
ccagcgccgccgcagcgcgcacttaatgaag

SEQ ID NO: 264 - DNA, 54 bp, Homo sapiens
  chr1:47973919-47973973
  hyper
gggtggcgacagagcgcgggcggggacagcgcgtgggccgcggggggcggggcg

SEQ ID NO: 265 - DNA, 31 bp, Homo sapiens
  chr1:47974261-47974292
  hyper
cgacccgaggctgagccggggctccttcgct

SEQ ID NO: 266 - DNA, 31 bp, Homo sapiens
  chr1:48175593-48175624
  hyper
ttcagcggggaccgggcggggtggggctgag

SEQ ID NO: 267 - DNA, 31 bp, Homo sapiens
  chr1:48175630-48175661
  hyper
ggcccctaggcttctccgactgttttggcct

SEQ ID NO: 268 - DNA, 31 bp, Homo sapiens
  chr1:48463141-48463172
  hyper
cgggggggcgaggggccggggccgcgccggg

SEQ ID NO: 269 - DNA, 60 bp, Homo sapiens
  chr1:48463405-48463465
  hyper
ccctcctccttcccttcgccaggcgcgaccgggccgcagcttccccgtgcggccgccaga

SEQ ID NO: 270 - DNA, 48 bp, Homo sapiens
  chr1:48937983-48938031
  hyper
ggagtcgggcagggggcggggcttccgaaggggcggggtgaggcaagg

SEQ ID NO: 271 - DNA, 75 bp, Homo sapiens
  chr1:48938039-48938114
  hyper
ctgtgacgtcaaactgcgcccaaagccggacgaaagggagctgctgtttgtataatgggacggtgctctgttcag

SEQ ID NO: 272 - DNA, 45 bp, Homo sapiens
  chr1:49242175-49242220
  hyper
aagcagtggctccccccggtcccctccgcccgggcccccggcccc

SEQ ID NO: 273 - DNA, 258 bp, Homo sapiens
  chr1:49242226-49242484
  hyper
ggtcccagcccccgcccgggtcccaccgtccctccccgcccgcttgctcacctgccagcgccaggatctgggccttgtggagcaacagcgcgccccagtcgcggggggcgcgcggggggctctcgggcccggcgcccaattcctccgggccccggtacacggcgtacaccttctggttgtcaaaatccagccgcgagcgggggctgaagtcgcgcacgcacgacacgggcagcgcgtagcagacgttgtcctccagga

SEQ ID NO: 274 - DNA, 89 bp, Homo sapiens
  chr1:49242496-49242585
  hyper
cgtacatggtgggcgccgggggcgggccccggtcgggcagctcagcccgcggggcgggcgcggaggtggggatccggcggggggcgcga

SEQ ID NO: 275 - DNA, 31 bp, Homo sapiens
  chr1:49242792-49242823
  hyper
cagccggagcgcgattcgaatggggagggaa

SEQ ID NO: 276 - DNA, 31 bp, Homo sapiens
  chr1:50717516-50717547
  hyper
ccacccccatgcctgtcgagtgcccagttca

SEQ ID NO: 277 - DNA, 31 bp, Homo sapiens
  chr1:52194973-52195004
  hyper
tatcaaggtgaaactccggggaccaggctcc

SEQ ID NO: 278 - DNA, 191 bp, Homo sapiens
  chr1:52195012-52195203
  hyper
cataaactggatggcacgttagaagccggtgggtgtaggtgaggcacgctggcgcccgcgggcccttctccagccgctacccagtgggaatccgcggggctgaagccccgaaaccaggctgagcgtcccagagcgcaacctccctttcccccagcagcgccggcgccgcagaagccgcgtgtccccaggcg

SEQ ID NO: 279 - DNA, 70 bp, Homo sapiens
  chr1:53067877-53067947
  hyper
gtccggggcaggggtgcgctgcctcaggacagacggtgaaactgaggtccagagccggacatccaccgcc

SEQ ID NO: 280 - DNA, 113 bp, Homo sapiens
  chr1:53099036-53099149
  hyper
ggcccctgggtctcttcgtctctgccgttctcaggctcagctccgtctcgctcggtccctcgcttccccgccgggctctagccggccgtctggtggcccgaggtggcggcggg

SEQ ID NO: 281 - DNA, 67 bp, Homo sapiens
  chr1:53168864-53168931
  hyper
cctctgcagatcccctcgggactctcagcattttgtgggttagccgtggagacgccctgcccttcct

SEQ ID NO: 282 - DNA, 121 bp, Homo sapiens
  chr1:53387230-53387351
  hyper
ccggacccgccagggcgcgcacttggatctctgagcccccggccgccccgtcggaagcgcagccgcgggcccgaaggggcctccaggggcgcaggaggcacagaacgcgcagcatcggggc

SEQ ID NO: 283 - DNA, 31 bp, Homo sapiens
  chr1:53401231-53401262
  hyper
agcctcagccacagtgcgagactcagtcaaa

SEQ ID NO: 284 - DNA, 31 bp, Homo sapiens
  chr1:54871324-54871355
  hyper
tcgcccaccactcaccgcgggcccccgcgct

SEQ ID NO: 285 - DNA, 31 bp, Homo sapiens
  chr1:55352447-55352478
  hyper
cccaggaagtcctggccgcccccgcaccgca

SEQ ID NO: 286 - DNA, 101 bp, Homo sapiens
  chr1:55352583-55352684
  hyper
cgctgctcgtgcaggcgcggagcgctgctgagcttgaacaccacccaggcgcgcacgtagtagtagatatcgaagataagcgagagcggcaggaggaagag

SEQ ID NO: 287 - DNA, 126 bp, Homo sapiens
  chr1:57044386-57044512
  hyper
gggcttcgggcctgggcggcgcaaaggctccccaggaaggctgcgggggccccccggagctgacggcgcggcgcggcgcggcgctgcgcggccccggactgggctgggacgcgcgccgagggacga

SEQ ID NO: 288 - DNA, 53 bp, Homo sapiens
  chr1:57044989-57045042
  hyper
gcgcgctgttgtggcgcgcgtctgagtgcgcgagcgagcgagtgggcagcgcg

SEQ ID NO: 289 - DNA, 44 bp, Homo sapiens
  chr1:59612305-59612349
  hyper
cggagaaacttcagagcggcaggtgccttcgtttcccgttacct

SEQ ID NO: 290 - DNA, 48 bp, Homo sapiens
  chr1:59612436-59612484
  hyper
ggccacaatcaagacacggaaacgacagtcagtcgaggcagcagagag

SEQ ID NO: 291 - DNA, 61 bp, Homo sapiens
  chr1:59612550-59612611
  hyper
cgcgctccccaccagcgcggcgcgggggcgctaggccagggaccgccgggccagggaccgc

SEQ ID NO: 292 - DNA, 50 bp, Homo sapiens
  chr1:59612630-59612680
  hyper
cggacctgccccgggtcgcagcggtttttcccgggcggggctgaggctgc

SEQ ID NO: 293 - DNA, 55 bp, Homo sapiens
  chr1:59762086-59762141
  hyper
cacccatcaggggctgcggagagtccgcctgggtaagctccgcaaggtgagtccc

SEQ ID NO: 294 - DNA, 42 bp, Homo sapiens
  chr1:59762154-59762196
  hyper
tcgcagcctgagcagacgcagcgtagccgatcttgggtccgc

SEQ ID NO: 295 - DNA, 35 bp, Homo sapiens
  chr1:60280305-60280340
  hyper
gctcaggcttgtctcacgttgattggccagagccc

SEQ ID NO: 296 - DNA, 62 bp, Homo sapiens
  chr1:60280812-60280874
  hyper
gcagcctaagctgcccctgtgcgacagcctcatgatctgggtgagtgcgaggaggcgagagg

SEQ ID NO: 297 - DNA, 41 bp, Homo sapiens
  chr1:61516033-61516074
  hyper
ccgctggcccccactccgcttcctcccggcacccgcttcgc

SEQ ID NO: 298 - DNA, 31 bp, Homo sapiens
  chr1:61522826-61522857
  hyper
gcagagaattgttttgcgtgataaatcaact

SEQ ID NO: 299 - DNA, 314 bp, Homo sapiens
  chr1:61547870-61548184
  hyper
gagggggcgggggggccggggagcgagcgggagagcgagcaagcgagcgagcaaggagcgagccacggagagagccggggagcgagcgagccagcctgcgagcgcgagcggccgcggaggctcgggacccggctggccgcgcggcgccgcagccgccccctcccccacaccccctcccccccgcggcggcggcgcgagcgggcggcggctgtgcggtgcggtgcagagcggaggcggaggcgggcgcgcgggcagctcgcgggcacccggccgggccggcgcgggagcgggaaagggtgcgctatgcctttaac

SEQ ID NO: 300 - DNA, 76 bp, Homo sapiens
  chr1:61548948-61549024
  hyper
gctcaccccgcacgctcgggccggctgcagtcctcgggtgcggggagacctcgggtgcctgcgcccaacggcccgc

SEQ ID NO: 301 - DNA, 31 bp, Homo sapiens
  chr1:61549048-61549079
  hyper
ccccccgccgtcttcccgaactcttactttt

SEQ ID NO: 302 - DNA, 31 bp, Homo sapiens
  chr1:61549083-61549114
  hyper
attgtttgtcagccttcggggtccggccgcg

SEQ ID NO: 303 - DNA, 31 bp, Homo sapiens
  chr1:62207659-62207690
  hyper
gactcccacatttacacgttttagaatattt

SEQ ID NO: 304 - DNA, 51 bp, Homo sapiens
  chr1:62207888-62207939
  hyper
ggctgtccccaccacgcgcggtctgatccgccaccccgcccccacagccca

SEQ ID NO: 305 - DNA, 94 bp, Homo sapiens
  chr1:62207948-62208042
  hyper
ggcccttggccatcccgcgcccggtaggaattcacctgcacgtaaacagccagggcaaccgtcctccctccttggagcccgcctcccgcggccc

SEQ ID NO: 306 - DNA, 172 bp, Homo sapiens
  chr1:62208089-62208261
  hyper
gcggggagagtcggggcgaggggagggcctgccaggtgaggcgcggtcaccctgggcctctcacttccgcccaggtgaggcagggccgacaccgagcccgcccgacccgggctcccacctgctcctccagcgcaccaggtaaagcgtgaggtcccggctgtgcagtgcgcgc

SEQ ID NO: 307 - DNA, 34 bp, Homo sapiens
  chr1:62208291-62208325
  hyper
cggccgggggcagctccctcggggcttcccgggc

SEQ ID NO: 308 - DNA, 58 bp, Homo sapiens
  chr1:62208416-62208474
  hyper
cgcggcgaggatggggcgcccgcggcgtgcgtccgcgctgacccgggaggcggggcgg

SEQ ID NO: 309 - DNA, 218 bp, Homo sapiens
  chr1:62208505-62208723
  hyper
accccacggtggtccccgccccgccgcgcagggctcgccgaggccgcgggcagggaggggcgccgccccgcctccccaggcctttcgggcctcgaatctcggcccactggtattcgggggtggcacggatcctattttgcgcccagatcggtgcccctgtttcgctcccagagctgggcggagtctttccctccatcggtggccgtggaaggagggaa

SEQ ID NO: 310 - DNA, 31 bp, Homo sapiens
  chr1:63153559-63153590
  hyper
ttgggaagcggccgaccgcccttccataaac

SEQ ID NO: 311 - DNA, 87 bp, Homo sapiens
  chr1:64239514-64239601
  hyper
aggggaggggagggagcgtgcccgagacgcgggagccgcgaccgctttctgcgaagtcggggagggtgcgggcgttgagaggctgca

SEQ ID NO: 312 - DNA, 26 bp, Homo sapiens
  chr1:64240532-64240558
  hyper
cgcgccccagccggtgttcaggcaag

SEQ ID NO: 313 - DNA, 41 bp, Homo sapiens
  chr1:64240562-64240603
  hyper
tcctgcccccaagttgcgagccggcccggaaggcgcggtcc

SEQ ID NO: 314 - DNA, 14 bp, Homo sapiens
  chr1:65210893-65210907
  hyper
cgcgggcctgggca

SEQ ID NO: 315 - DNA, 108 bp, Homo sapiens
  chr1:65210939-65211047
  hyper
cgcgggcagggcccctcagccgaagcgcacgagggcgccccggacccgatgcccgccgcgctgcaccctgaggaggtcgccgcgcgactgcagcggatgcagcgggag

SEQ ID NO: 316 - DNA, 154 bp, Homo sapiens
  chr1:65211097-65211251
  hyper
ctgccaggtactgggacggtgataggggcgacgcgtcccgaggggcggcggggcggcgctccgtgtccaggctgggatcgggggcgcctcagagcggtcctggggagtgggtcggcgccgagtggtgagagcggcccctcggtttgactgagtt

SEQ ID NO: 317 - DNA, 31 bp, Homo sapiens
  chr1:65211257-65211288
  hyper
gtttctagcctgcagacgccctgccagggag

SEQ ID NO: 318 - DNA, 53 bp, Homo sapiens
  chr1:65211305-65211358
  hyper
ctgaggctctgagtggcgaagcggcttctccaaggtcacgggaatcaggggct

SEQ ID NO: 319 - DNA, 74 bp, Homo sapiens
  chr1:65468339-65468413
  hyper
tggatgcgtcaccatccgaaagtgcgagcctggccggcggcggcggaggcgggggcaccgcgcagttggaagcc

SEQ ID NO: 320 - DNA, 80 bp, Homo sapiens
  chr1:65468580-65468660
  hyper
tgctccttccaggtcccggcggggaagcgatgctttcttggcccgggcttggggccagcgggaaccgggctgtccggccg

SEQ ID NO: 321 - DNA, 20 bp, Homo sapiens
  chr1:65622589-65622609
  hyper
cagggcgagactgtgtctca

SEQ ID NO: 322 - DNA, 40 bp, Homo sapiens
  chr1:65720328-65720368
  hyper
cagggtgagtgtgggcgcggccggtcgggacctgttaccc

SEQ ID NO: 323 - DNA, 31 bp, Homo sapiens
  chr1:65886883-65886914
  hyper
cagagttgaccgcgggcgggtgtcaatggaa

SEQ ID NO: 324 - DNA, 87 bp, Homo sapiens
  chr1:68297963-68298050
  hyper
tcagagatttccttctcgacccacttgtttgtatacaaccacgcccggcaggatgaccaccagatgaccggccgcagcaatgcctcc

SEQ ID NO: 325 - DNA, 64 bp, Homo sapiens
  chr1:68298069-68298133
  hyper
aagtttcactccactgcggcgacgtgaacaagaatcacggcttccttatcgtgagttatgaatg

SEQ ID NO: 326 - DNA, 31 bp, Homo sapiens
  chr1:68298147-68298178
  hyper
tacaggacacacaaagcgagggacgagtgag

SEQ ID NO: 327 - DNA, 38 bp, Homo sapiens
  chr1:68298440-68298478
  hyper
cctgctagacccccagcgcccagcggattccaaggctg

SEQ ID NO: 328 - DNA, 71 bp, Homo sapiens
  chr1:68298481-68298552
  hyper
tcccgccggctggtcccgggaggtagaaagtaggcagaggggcgtggcgtccctgtcgcccccacatgcca

SEQ ID NO: 329 - DNA, 104 bp, Homo sapiens
  chr1:68298693-68298797
  hyper
tagccccagccacagccgtgggggcggcttcccgcaacctcgggcggccgcccgtcgagggcgcgcgcgccgtttctgcctctgggtctcggtgtcccttggcc

SEQ ID NO: 330 - DNA, 64 bp, Homo sapiens
  chr1:68298799-68298863
  hyper
ttcctccccctccccccggtctccggcgcccagcgcccagaccagtccccgccctccagcagga

SEQ ID NO: 331 - DNA, 175 bp, Homo sapiens
  chr1:68298874-68299049
  hyper
ccttccttccttcctccgctccctccctccatctcgcttcccagcacccgggactcggaggcggcccccgaactcgctggccgacgccccgcgccgcgccccgaccccgcggggacccgactcaccacccgcgcccgccgcttggtactcacccgcctgccggtgcgctgccccg

SEQ ID NO: 332 - DNA, 37 bp, Homo sapiens
  chr1:68299073-68299110
  hyper
taagggctcctggagacggctccgacctctcctcctc

SEQ ID NO: 333 - DNA, 119 bp, Homo sapiens
  chr1:68299112-68299231
  hyper
cctcctcttgctcctccgggcgccggctccgcctcgctggggtgggcggggcggcggcggccccgggctccttcctccgcgccgggccctgcctcccgcccggacgccctggctgtgct

SEQ ID NO: 334 - DNA, 52 bp, Homo sapiens
  chr1:68697470-68697522
  hyper
gattacgttgccctcccggagctgattggaagggaaccgagaggaaaagggg

SEQ ID NO: 335 - DNA, 126 bp, Homo sapiens
  chr1:68698098-68698224
  hyper
tcagaggtgctggagcgcggcgaggatgggaccgggacggaaggcgcccgcacggattcccccggcgcagccggctcgggttcccccaatgcccggagctgtgattgtggccgctccgccgcctgt

SEQ ID NO: 336 - DNA, 34 bp, Homo sapiens
  chr1:68698243-68698277
  hyper
gaagcggatcacatgacgccgcctccctcccttt

SEQ ID NO: 337 - DNA, 31 bp, Homo sapiens
  chr1:75597369-75597400
  hyper
tcaaggcctggctccacgggatctagacccc

SEQ ID NO: 338 - DNA, 69 bp, Homo sapiens
  chr1:78354048-78354117
  hyper
ctcgcgcacctagggccgggagacagacaaattctggcggaaagttggcagccacggtccccctcccct

SEQ ID NO: 339 - DNA, 97 bp, Homo sapiens
  chr1:85666111-85666208
  hyper
tcttgactgtcactgccggcggcctgaggaaggaggggccttcctggcggtctcctttgccactgcgtatcacagaggaccccgctggatccctgaa

SEQ ID NO: 340 - DNA, 61 bp, Homo sapiens
  chr1:85666212-85666273
  hyper
cttcccgaggagcagccgtggtccttgcagcctggaggctggaggccggtgggtgcagccg

SEQ ID NO: 341 - DNA, 156 bp, Homo sapiens
  chr1:85666851-85667007
  hyper
tcgtagtagtcggcgtcgtagtcgtcttcgtccttgtcgtcttcctcctcctctccgctgtcctcggagccctccggggagtgcggaggggcgtgagcgagcccatggctctggggggcggcctcctgcccgccgcgcggccgaggcccgagcgcc

SEQ ID NO: 342 - DNA, 51 bp, Homo sapiens
  chr1:85667112-85667163
  hyper
cgtgggagggtgtctgcggcaccccaggcgtctcccgcggctgccgaagag

SEQ ID NO: 343 - DNA, 155 bp, Homo sapiens
  chr1:85773928-85774083
  hyper
gcagatcctgggaagacgccctttactcagtaaggagggcccaggcgtccaaagcccaccagggggcagcggcggcattcttagccccacttctccgcgctcaaaggccggctgagaaaacgcgagtgactacccgagggcgctgttactccaca

SEQ ID NO: 344 - DNA, 48 bp, Homo sapiens
  chr1:85774089-85774137
  hyper
ctgcaaaagctaaggtcggcaaacatggatattcggatttccattgtt

SEQ ID NO: 345 - DNA, 78 bp, Homo sapiens
  chr1:85930019-85930097
  hyper
ctgccccctggagggacgcccagcctccacccgccctaccggagcggcacccctcgcggccctcgctccctgggaaac

SEQ ID NO: 346 - DNA, 31 bp, Homo sapiens
  chr1:85930218-85930249
  hyper
gaaggctgccggcagccgggaggtgtgaaca

SEQ ID NO: 347 - DNA, 189 bp, Homo sapiens
  chr1:85930279-85930468
  hyper
cacacacacacacactcgccccccgacgggaagttgtgaactactagcccgagggccaatggcgcgactccccaggcaacacggcggccggcggcgggggagggcctggcgcgcgccccggccgcgcccctcgagtcggcagttacctccttcctccggctcggcgccccgggtcgggtgatgagggcc

SEQ ID NO: 348 - DNA, 49 bp, Homo sapiens
  chr1:85930496-85930545
  hyper
ccacgaagacgcagtccggaaggctctcgtcggccggcagctccaccac

SEQ ID NO: 349 - DNA, 157 bp, Homo sapiens
  chr1:85930555-85930712
  hyper
agcttgctgcccagcacgcccacgtagagctggtgctgccgttccgcgcgggcgacgtccacctcctcgcccttggcgcttctcagcgcgtgctggccgagcgactcgggtagcgcccgcaccacggcgtgggtggcccggccgaaggcggcggggt

SEQ ID NO: 350 - DNA, 56 bp, Homo sapiens
  chr1:85930890-85930946
  hyper
agcatgcccagagctccgggcgccggcccgcgcgcatcccgcgcgcccactccggc

SEQ ID NO: 351 - DNA, 31 bp, Homo sapiens
  chr1:86045945-86045976
  hyper
gcatcaccaaacaaaacgacttttgttcctc

SEQ ID NO: 352 - DNA, 67 bp, Homo sapiens
  chr1:86046413-86046480
  hyper
tataaaaggcgggctccggggcgcctgggcagaccgcgagcgagagcgcccccgagcagcgcccgcg

SEQ ID NO: 353 - DNA, 42 bp, Homo sapiens
  chr1:86046491-86046533
  hyper
ttctccgccgggacctcgagcgaaagacgcccgcccgccgcc

SEQ ID NO: 354 - DNA, 31 bp, Homo sapiens
  chr1:86046539-86046570
  hyper
tcgcctccctgcccaccgggcccaccgcgcc

SEQ ID NO: 355 - DNA, 31 bp, Homo sapiens
  chr1:86046585-86046616
  hyper
ctgcgcacggcctgtccgctgcacaccagct

SEQ ID NO: 356 - DNA, 71 bp, Homo sapiens
  chr1:86046830-86046901
  hyper
atcgtttgcgggtagccgtttctttaagcactctccccctccccccgaagacgtgtcgggacctcttggtg

SEQ ID NO: 357 - DNA, 84 bp, Homo sapiens
  chr1:86047064-86047148
  hyper
cgctgcctgccactgccccctggaggcgcccaagtgcgcgccgggagtcgggctggtccgggacggctgcggctgctgtaaggt

SEQ ID NO: 358 - DNA, 147 bp, Homo sapiens
  chr1:90309277-90309424
  hyper
ggagctcgcccaagccgcgtccccagagagcgccctgagagaacagggtggccgcttggtccaggtgcgcggggtcgggtctgggtccagggagcgggtcgggaagtctgcggcacggagcactgctagtgtcggatctgcatctcc

SEQ ID NO: 359 - DNA, 104 bp, Homo sapiens
  chr1:90309434-90309538
  hyper
tgcagcttcacttgcccgccccccaccactggcttctcacccggggtctctgccaaactctggctgctgccgccctgggttcgggccggcggaaggccctgggc

SEQ ID NO: 360 - DNA, 31 bp, Homo sapiens
  chr1:90309542-90309573
  hyper
gctgcggagccgcctgcgaggactccactag

SEQ ID NO: 361 - DNA, 31 bp, Homo sapiens
  chr1:92350626-92350657
  hyper
gctcacagcaactttacggggcaagtactac

SEQ ID NO: 362 - DNA, 53 bp, Homo sapiens
  chr1:92350671-92350724
  hyper
agctagggaaatggaacggttttcttcttccagcttttcgtgaggacaccaaa

SEQ ID NO: 363 - DNA, 31 bp, Homo sapiens
  chr1:92351055-92351086
  hyper
aacaaaccattcccaccgaagctgtcacgcg

SEQ ID NO: 364 - DNA, 66 bp, Homo sapiens
  chr1:92351378-92351444
  hyper
tgcagagcccacagcccgggcgggctgcagcgccgcggggctgggccggcacgtacctcggaggcg

SEQ ID NO: 365 - DNA, 34 bp, Homo sapiens
  chr1:92351624-92351658
  hyper
gccggggcgcgagagccgccgactgccctccttc

SEQ ID NO: 366 - DNA, 40 bp, Homo sapiens
  chr1:92546224-92546264
  hyper
cggcgccggctgaaggcgacggtgtcggagcagctcagcc

SEQ ID NO: 367 - DNA, 56 bp, Homo sapiens
  chr1:92949566-92949622
  hyper
ggatcggtttaggggccggggatgcccagtggtcgaggacccggaaggggcaagga

SEQ ID NO: 368 - DNA, 129 bp, Homo sapiens
  chr1:92950216-92950345
  hyper
tcacctaataccaggtcgaaatctgagcgcagcgggagggcgtggctgcgcctgccgctaggctccagccggctccgggggcggtaccccacagtcgaggtggtctggagtaaacgaatctgccttcct

SEQ ID NO: 369 - DNA, 54 bp, Homo sapiens
  chr1:92950410-92950464
  hyper
tcggctggttcagaaacgagggtgctgggaactctgggccggggcaggacctgc

SEQ ID NO: 370 - DNA, 31 bp, Homo sapiens
  chr1:92950635-92950666
  hyper
attgtgtccccttctccggaggaatgggaat

SEQ ID NO: 371 - DNA, 31 bp, Homo sapiens
  chr1:92950667-92950698
  hyper
gacctgggagaaaagacgcctgggacgtgtc

SEQ ID NO: 372 - DNA, 387 bp, Homo sapiens
  chr1:92950921-92951308
  hyper
ctgcagcttggacccacgttggctgggagcgggacagatgggggcggggtaactgtcagcgccggagctgggtctgggctggcgccaccagagaccaggcggacgcggaggccgcctccccacccgggctgtaagcccacgcctctctcgcaccccggcccgctttgctggttcctgtggggagcgacagagtttggaggagataggggccccggggcctgggccgagcgcgtgggaaggcaaccccgcgctgcagctggcgcgggaggtggggcggcccctccgcgcgctcaggcctctcctcaccgtccgggcccaggaaggagggagccgagggcgctaagggggcgtcctcccgagcgcagctgccgccgcctccccaccaga

SEQ ID NO: 373 - DNA, 54 bp, Homo sapiens
  chr1:92951325-92951379
  hyper
gatttggctcccctgccgaaccaccagaccgcctgctgcgcgcccccagctcca

SEQ ID NO: 374 - DNA, 272 bp, Homo sapiens
  chr1:92951381-92951653
  hyper
tttccagtcacactgcgcgggtcgcgccctaacccagctgccggagctctctgggctcccgcacggcggtccgcagcaggtgggaaaccgcccgcgccctctgatcgcccccgcagtgccagtgctctgcgagtccccgcggccgcccccaccagggcaggaggcgcagaacaggctcggcggacctacctgcggagtcacggcgcgggcaccgcgctaggagagttttcaaacggaatcttgctttcgggagagaccgctctatctctctg

SEQ ID NO: 375 - DNA, 31 bp, Homo sapiens
  chr1:92951664-92951695
  hyper
aaaaaaattctccttccgagctcagccccca

SEQ ID NO: 376 - DNA, 46 bp, Homo sapiens
  chr1:92951703-92951749
  hyper
agcttcacttcctgagcgttactgagtcgctcgcatagccctccca

SEQ ID NO: 377 - DNA, 105 bp, Homo sapiens
  chr1:92951750-92951855
  hyper
acctgctcccaacccccgtcgggcggccgggcgcgctcctttgcgcaagtggccaggcggtggggggcctggcctttccagcccgtcccgcgcgccccttagtag

SEQ ID NO: 378 - DNA, 59 bp, Homo sapiens
  chr1:92951864-92951923
  hyper
ttctctccctgtgggtcggcaggggatgggggaaattggaggtccggacacttaggcac

SEQ ID NO: 379 - DNA, 36 bp, Homo sapiens
  chr1:92951957-92951993
  hyper
gctccagggagacttccgcagcgagagaagccacag

SEQ ID NO: 380 - DNA, 115 bp, Homo sapiens
  chr1:92951999-92952114
  hyper
gacacagattgactggcgagagaggggtggggggcgccccgctccgaggaccctccccgcccctcaggcctcggtcacccgccccccccacccccgaccccgccgcctcctaggg

SEQ ID NO: 381 - DNA, 89 bp, Homo sapiens
  chr1:92952479-92952568
  hyper
actaatttccggtggtcggagctgcaaaattaaaggccgcgcgggggcagcgccggcggctgctaggctgactccgccctgccggggca

SEQ ID NO: 382 - DNA, 107 bp, Homo sapiens
  chr1:93250728-93250835
  hyper
caggttaggggccgggcgggccggccgagaaaaggagaaggcgaagggattggacggagtgcagaggaggcggggaaatcgctctcgccctccgcctctctttcaaa

SEQ ID NO: 383 - DNA, 151 bp, Homo sapiens
  chr1:93250907-93251058
  hyper
agaagacacaccccctcgggggcccgaagcgaccccgagcttaggactgcaggcctcgcgctgccgcaccgacgcggagcctgactttcagggccctggcacgcggtgctgacgcgcatgcttcggaaggcagccccgagctcccccagag

SEQ ID NO: 384 - DNA, 88 bp, Homo sapiens
  chr1:93913453-93913541
  hyper
cctgcaggaggagactcgaccagcgagaggggccagcgagggtgaccaggtgcccgcttggggaccccgccggcggtggccaggctag

SEQ ID NO: 385 - DNA, 378 bp, Homo sapiens
  chr1:93913688-93914066
  hyper
cactcactggggagcccggcggtggcggcacctttcgaggtagacccgctgagctgctagcccgccggccagcgagtgagaggtcggacagactgtggagccgacagactgaaggacagcggcaccgccagacggccagaaagttccgccatgagctggggcacggagctgtgggtgagtcggggagaggggcgccccgcacggaccccggcccctgagaagcgcgggttgggcgggcgccgcggaccctcggcggtgaaagcgcgctccgccgtcctcggtccggcgctggcggagggtgagggtcccgctcgtctttgtgtgcagactcctcttcccttctcggccgggggtctagggggccgctagtccgtgctc

SEQ ID NO: 386 - DNA, 63 bp, Homo sapiens
  chr1:93914095-93914158
  hyper
cggcgcccgggacggccgggggagcagcccgcgggctcctgcgtgcgccgtgatcccctcttg

SEQ ID NO: 387 - DNA, 31 bp, Homo sapiens
  chr1:93914232-93914263
  hyper
tctctcctcccggaggcgggggagggggccc

SEQ ID NO: 388 - DNA, 47 bp, Homo sapiens
  chr1:93914301-93914348
  hyper
accggccgcgattcctcgcccgggccaggtccgcggggctagggcgt

SEQ ID NO: 389 - DNA, 61 bp, Homo sapiens
  chr1:93914404-93914465
  hyper
ggctttgttcggagcccggcctcgggccagccaggcccagcccacacgcacatttctctct

SEQ ID NO: 390 - DNA, 71 bp, Homo sapiens
  chr1:93914735-93914806
  hyper
gtgtctggccaaggtacgggcggagggtaataggtcggagaatttgctcctggcgccggcgcggaagggtc

SEQ ID NO: 391 - DNA, 59 bp, Homo sapiens
  chr1:93914820-93914879
  hyper
agtgatttctcaggtgcggagggcagtgatttctcaggtgcggccgggagaactggggg

SEQ ID NO: 392 - DNA, 69 bp, Homo sapiens
  chr1:94702466-94702535
  hyper
atagtgatcaggagcacggattccggagcaaaagcgcctgggtttaggtcctgacgctgccaaccacta

SEQ ID NO: 393 - DNA, 54 bp, Homo sapiens
  chr1:94702548-94702602
  hyper
ggcaggtttttaacctcggtttccccgtgtgaaccgagtcgaacaatcatggag

SEQ ID NO: 394 - DNA, 197 bp, Homo sapiens
  chr1:94702824-94703021
  hyper
tagcgcagcctgccaccgcttccactcggggccgccccgcgggcctcccggaccctggacggcaattcgcgggcgctcgcgcgggcaaccccagcccggagccacgaccgccgcggccggagcaagcgccacctcctcacactcaccacggcgctccatctcgcgtgccggacgcggacgcccgccccacacctacg

SEQ ID NO: 395 - DNA, 31 bp, Homo sapiens
  chr1:94703446-94703477
  hyper
agacacttctgtggatcgcctttttcctccc

SEQ ID NO: 396 - DNA, 38 bp, Homo sapiens
  chr1:94703490-94703528
  hyper
agggcctggggaagggcgccacacgtctgaatgaagaa

SEQ ID NO: 397 - DNA, 68 bp, Homo sapiens
  chr1:94713017-94713085
  hyper
cctgccggaccctggacggcaactagccggcgcccgcgcgggcgaccccagcccggagccaccaccgc

SEQ ID NO: 398 - DNA, 50 bp, Homo sapiens
  chr1:94713212-94713262
  hyper
ccccacggcccgcagacgcccggccaagtggcagccgcagccacagacac

SEQ ID NO: 399 - DNA, 38 bp, Homo sapiens
  chr1:94713266-94713304
  hyper
accaccaccaccacagcggccgccgcctttgcagctac

SEQ ID NO: 400 - DNA, 121 bp, Homo sapiens
  chr1:94884614-94884735
  hyper
gtctaagtcacttggacgaggtttggctcgattcccgactaactgctattgaaagtcgcgagggtggcttctatgaaactattcccggtccacttggcaggattgccgtctaaagtggtga

SEQ ID NO: 401 - DNA, 102 bp, Homo sapiens
  chr1:95007082-95007184
  hyper
tgccactcacctgaagcgccggccacctgggcgaagacccagccgagcaggagcgtccgagcgacggcggtctcggggcgcgggacccggggccaggcaggg

SEQ ID NO: 402 - DNA, 79 bp, Homo sapiens
  chr1:95007290-95007369
  hyper
gggggtgcggggagctcgcagtcttggggagccggtgccccgcgcgctataaagggccggcggcgcgctctcccgcgcc

SEQ ID NO: 403 - DNA, 138 bp, Homo sapiens
  chr1:95007378-95007516
  hyper
ccccggcgcccgcccccgccgctcctcccgactccccgcccccggcccgggtcacttgccgtcgcggtgggcggcccccggcgagtccacacccctgccccgcctcctcccggtaggaaactccgggaccctgcaagg

SEQ ID NO: 404 - DNA, 31 bp, Homo sapiens
  chr1:95007666-95007697
  hyper
ggcaggaaagggagggcgccttggaagaatt

SEQ ID NO: 405 - DNA, 137 bp, Homo sapiens
  chr1:95285586-95285723
  hyper
tgctcagggcagaggccgaccacccgcccaaggtcgtggcggcgccggctcagctttagtcgtcaaagtgcacatcctgggagccgctgcctcgaggtggttgaggcgagagggcagggaagcgtctgagcctcttc

SEQ ID NO: 406 - DNA, 273 bp, Homo sapiens
  chr1:95285814-95286087
  hyper
cagtcgccgggccaggcgcagaggcgaacgggaggcggcgctgcaccgtgcccgcccctccccggcccggccccggctccagccccagccccagccccagccccggccccggccccggctcgcgggcgctgcgtctccgcgtacaggaggcggcggcggctcccagtcaccggcccccgccggcgagcgcacgatgcactgcctgggcgccgagtacctggtaagcgctcgcagcctcggccctcgggggaggagccccggggaagggtcgag

SEQ ID NO: 407 - DNA, 31 bp, Homo sapiens
  chr1:95391394-95391425
  hyper
gttctgtgcacagttccgcgccgattggctg

SEQ ID NO: 408 - DNA, 31 bp, Homo sapiens
  chr1:95391602-95391633
  hyper
gctccaaactataagccgcctcagcaaacaa

SEQ ID NO: 409 - DNA, 112 bp, Homo sapiens
  chr1:95391846-95391958
  hyper
agactgtgatgggtcccggaccggcttccgttcctcggggcccctggggtcggcgggacattaggcggtctctctccccgtggggaggcgcggagtccgccagcacccgggg

SEQ ID NO: 410 - DNA, 60 bp, Homo sapiens
  chr1:95392181-95392241
  hyper
cgggaacaaagccaggcgggtgcccgggagccggccccgcaagcccggggactggacgcg

SEQ ID NO: 411 - DNA, 31 bp, Homo sapiens
  chr1:95392488-95392519
  hyper
ggggtctctcgcacttcgcttccccgctcct

SEQ ID NO: 412 - DNA, 31 bp, Homo sapiens
  chr1:95428543-95428574
  hyper
tttcagttcctgttatcgtgctttgaggtgc

SEQ ID NO: 413 - DNA, 31 bp, Homo sapiens
  chr1:95428593-95428624
  hyper
aggggatccaaggctacgttgaaaagccttt

SEQ ID NO: 414 - DNA, 31 bp, Homo sapiens
  chr1:95582867-95582898
  hyper
cgcccggagcgggagccggagcccgagcggc

SEQ ID NO: 415 - DNA, 41 bp, Homo sapiens
  chr1:95583056-95583097
  hyper
ggccagcgccagccctcgggccggcccggatgagcagactc

SEQ ID NO: 416 - DNA, 138 bp, Homo sapiens
  chr1:95583267-95583405
  hyper
gggtgccgcggcttcccgcccctggcctagcgcggccgagagctcctgcgcctggaggctgggtgggcgtccggcgcgcgggaggcggcccggggctcccgggcgggctccggcaggtgtgtgcggaaggctcagcat

SEQ ID NO: 417 - DNA, 148 bp, Homo sapiens
  chr1:95583420-95583568
  hyper
ggccacggcgtcgctccgggagcaaatggtgtcccggggcccgcggcccccgcgccgcccgggcgccccgcattcctctcgcgtttctcgggctgcacgattccggctgccctgtctgcctggcggtgcctctcgggtctgagcttaa

SEQ ID NO: 418 - DNA, 20 bp, Homo sapiens
  chr1:98386546-98386566
  hyper
gccaagtgacagcagccgga

SEQ ID NO: 419 - DNA, 31 bp, Homo sapiens
  chr1:99127080-99127111
  hyper
ttccgcccctccagcccgccccaggccaggt

SEQ ID NO: 420 - DNA, 37 bp, Homo sapiens
  chr1:99127233-99127270
  hyper
gggggagccgggctggcggcggcggtggcggccggct

SEQ ID NO: 421 - DNA, 53 bp, Homo sapiens
  chr1:99127286-99127339
  hyper
gatggagggcgagcgccgggcatcgcaggcgccctcctcgggcctcccggccg

SEQ ID NO: 422 - DNA, 95 bp, Homo sapiens
  chr1:99127365-99127460
  hyper
ggcggcgccccctttccgggcagcagtggctcttccgccctgctgcaggcggaggtgctggatctggacgaggacgaggacgacctggaggtgtt

SEQ ID NO: 423 - DNA, 31 bp, Homo sapiens
  chr1:99127771-99127802
  hyper
cacagacatcttcctcgcggcagctcccgaa

SEQ ID NO: 424 - DNA, 41 bp, Homo sapiens
  chr1:100316317-100316358
  hyper
tacagcatttttatttcggtcttattcgttgtgctcaaagg

SEQ ID NO: 425 - DNA, 42 bp, Homo sapiens
  chr1:100437130-100437172
  hyper
gggattacaggcgtgagccaccgcacccggcccccaatatga

SEQ ID NO: 426 - DNA, 53 bp, Homo sapiens
  chr1:101701802-101701855
  hyper
cgaggatctggggtggcggggggagtacaggaacctcccggttcattctccct

SEQ ID NO: 427 - DNA, 74 bp, Homo sapiens
  chr1:101702007-101702081
  hyper
gatcctcctagggctgcggggggtgtgggaccagggcggtgcgctacgagactccgggccgtcctctgcctcct

SEQ ID NO: 428 - DNA, 55 bp, Homo sapiens
  chr1:101702344-101702399
  hyper
ctcagcagttcagatccgggggcccccagctgacagagggcgtggggggttaagg

SEQ ID NO: 429 - DNA, 80 bp, Homo sapiens
  chr1:101702430-101702510
  hyper
accacccagccttggcgcggcgctgggtgacttcgcgtagcaggcagggaactggccgcggcgagcgggactggccattg

SEQ ID NO: 430 - DNA, 31 bp, Homo sapiens
  chr1:101702528-101702559
  hyper
ggaggggaccccgactcgagtaagtttgcga

SEQ ID NO: 431 - DNA, 157 bp, Homo sapiens
  chr1:101702601-101702758
  hyper
cgagccgtacagatcccgggctctccgaacgcaacttcgccctgcttgagcgaggtagggggcggcgaatggcgggggtcgcgggcgcggggagcccggttgtggtagggcttaggtgtcagaaacgaatttttaagtcgaacgaggcaaacaaaaa

SEQ ID NO: 432 - DNA, 35 bp, Homo sapiens
  chr1:101702761-101702796
  hyper
agaaaacatgcatctccgggcgctgaaaatttgca

SEQ ID NO: 433 - DNA, 31 bp, Homo sapiens
  chr1:101702806-101702837
  hyper
actaaggagcccatctcgatcagattgttct

SEQ ID NO: 434 - DNA, 31 bp, Homo sapiens
  chr1:101702879-101702910
  hyper
ccaactgtggaacctacgggtgtaggggcag

SEQ ID NO: 435 - DNA, 31 bp, Homo sapiens
  chr1:101702911-101702942
  hyper
gaaaattgcagttggtcggaggaataggagg

SEQ ID NO: 436 - DNA, 42 bp, Homo sapiens
  chr1:101703554-101703596
  hyper
ggtggggtgggggggcgcggggggaggcggggagaataagaa

SEQ ID NO: 437 - DNA, 44 bp, Homo sapiens
  chr1:101703598-101703642
  hyper
agaaagaaaaggcagtcgcttcacggaggcgctaagctttcctg

SEQ ID NO: 438 - DNA, 58 bp, Homo sapiens
  chr1:101775149-101775207
  hyper
gttgcaggtggagcagcggcggctgcatcagcgtctcaaattgcgaaaacattttggg

SEQ ID NO: 439 - DNA, 31 bp, Homo sapiens
  chr1:101775215-101775246
  hyper
tttctttgtagcatttcgtggagcccctttc

SEQ ID NO: 440 - DNA, 177 bp, Homo sapiens
  chr1:101775251-101775428
  hyper
atatacactagccttccgacttccctttgttcttttttcacacgtcaggttttatcgctgacaagctccaacgcgtcaaaggcgttagatctgagggctgcagcagccttcgcggttccgcattgagctccttcctgcagccctctgcggaggtcacggccacgtgtgggcagggaa

SEQ ID NO: 441 - DNA, 53 bp, Homo sapiens
  chr1:101775435-101775488
  hyper
tacccacttcctcattcggacccgtcacctttagccggcgaccaccttttgat

SEQ ID NO: 442 - DNA, 72 bp, Homo sapiens
  chr1:107600099-107600171
  hyper
cagctagagctctcccgcgccggcttggagcaggagctggaggccggagtgggcgggcgcttccgctgcagc

SEQ ID NO: 443 - DNA, 31 bp, Homo sapiens
  chr1:107683591-107683622
  hyper
atcctctcttcctctccgcccacccttactc

SEQ ID NO: 444 - DNA, 279 bp, Homo sapiens
  chr1:107683787-107684066
  hyper
gccggcgctgggttctcggtcctcggggtcctctcccgccggcggccgggcgcgatcggaatccccgggctgcggcggtggcggcggctcgggtcctcacgcccacccctcccgctccgcccgctcccgcctggggaggaggctccgcgggagctgccgccctccgcccgtacgccgcccgcgggctccgctgctgcggccgccgcccgaggcggaccaggctggctgcgcagggccgccgccccgcgccgtcggctcggctcccgcccggcgcaaggg

SEQ ID NO: 445 - DNA, 300 bp, Homo sapiens
  chr1:107684195-107684495
  hyper
gcgggagggaaggctccgggtgggcgaggaactttgtaaagcgccccgaggaggcagcgcgcggagccctacgcgcacacacagcggcacacgctcacacccacacacaagtcttcccgggggtgcgccccgggccggtgatgcgtcctcttgttgtgtccggagcccaggcgtggggtctgagcctccatccgccgactgacaggggccccgcgctctccctctctcacgcacacctggccacacacatcgctcaggcggcttgtcgttattttttctttctttcgccaattatatttg

SEQ ID NO: 446 - DNA, 31 bp, Homo sapiens
  chr1:107842875-107842906
  hyper
ggctcgtcacatgccacgttttctttaaaaa

SEQ ID NO: 447 - DNA, 35 bp, Homo sapiens
  chr1:108506549-108506584
  hyper
ctccagccccaggagccgaccggcaccacagcacc

SEQ ID NO: 448 - DNA, 31 bp, Homo sapiens
  chr1:108506594-108506625
  hyper
actgcaggaaggaaagcggaatctctagtga

SEQ ID NO: 449 - DNA, 53 bp, Homo sapiens
  chr1:108506626-108506679
  hyper
acttctcatttcctgtcgctgctgagagaggctggactcgctccttctcacat

SEQ ID NO: 450 - DNA, 80 bp, Homo sapiens
  chr1:108506683-108506763
  hyper
taggaagagctgtaaacgggagcttgccggctggccaccagctcaggggccctgggggcggcctccgggttctgctccct

SEQ ID NO: 451 - DNA, 56 bp, Homo sapiens
  chr1:108506785-108506841
  hyper
actcctggacagataacgggaccaaacgcccttcacttcctcgagtcctcatgtat

SEQ ID NO: 452 - DNA, 31 bp, Homo sapiens
  chr1:108506862-108506893
  hyper
aaacatgagtacaagacgcaaagcaaaagaa

SEQ ID NO: 453 - DNA, 49 bp, Homo sapiens
  chr1:108506906-108506955
  hyper
aattaccccatcacctcgtttcgtccctccccttcgttattatagaaga

SEQ ID NO: 454 - DNA, 43 bp, Homo sapiens
  chr1:108506961-108507004
  hyper
tcaaattccctttgtcgcgccacacacacgcagagtaggtgaa

SEQ ID NO: 455 - DNA, 59 bp, Homo sapiens
  chr1:108507017-108507076
  hyper
caacttatttctttcccgcctcacagaaagcctttacgaaatcctcacaccatctccgg

SEQ ID NO: 456 - DNA, 15 bp, Homo sapiens
  chr1:108507148-108507163
  hyper
cgaagtggtcccaaa

SEQ ID NO: 457 - DNA, 89 bp, Homo sapiens
  chr1:108507177-108507266
  hyper
agcagggcaagctcagcgcacctagacgtttgcatttacacaaagaaattagccgcatgattaatgggagctgccggctggaggcgggg

SEQ ID NO: 458 - DNA, 112 bp, Homo sapiens
  chr1:108507494-108507606
  hyper
cgacggctccgggacgcggctgggccggggcgggcggcaaggatgcggccgccgccgccgccgccgcggttcctccgcgccccgccgacgccaacagccgccggccctttcc

SEQ ID NO: 459 - DNA, 323 bp, Homo sapiens
  chr1:108507657-108507980
  hyper
cgctaggctcggctccggtcccggcccgggtgcgccgcgacccggccgccgctgcagcgagtcccgcgcgctctccgtgcgccccggccggctcggcggcggctgccgcgcacaggcttccgactccagcgcccggcccgccactgagcatgcccagcacgccggccggtctcgctgcggtccgcaagtccccagacgcgcgggtgggagcgcgccggcggccggggctggggtctgtggccgagggcggggcgcgggggaggggccggcggaggggggcggcggccagaaaggggatcccgcgcccccgcctgcagccttgc

SEQ ID NO: 460 - DNA, 31 bp, Homo sapiens
  chr1:109420435-109420466
  hyper
atctatagaataccttcgaataaaaaaaaat

SEQ ID NO: 461 - DNA, 62 bp, Homo sapiens
  chr1:109632944-109633006
  hyper
ctcatttcatttgcaacgttcagacgcagtctgactagatttccatccggagtaaggaagag

SEQ ID NO: 462 - DNA, 31 bp, Homo sapiens
  chr1:109633007-109633038
  hyper
agctcaagggcagtcacggaggccgcaggtg

SEQ ID NO: 463 - DNA, 71 bp, Homo sapiens
  chr1:109940218-109940289
  hyper
ttgttggccagcttggcgacgaagtcccggacccggccgcactcctcgtcctcgcccggcgcgctgcgacg

SEQ ID NO: 464 - DNA, 137 bp, Homo sapiens
  chr1:109940368-109940505
  hyper
cgcggcagcggcgcagcgggcggcggcggcgcgtccagccggtcctggctgagggtcgacggcggcagcagctgcaggaggaggaggaggccgaggccatggggccagcgcgagaggccgtccgcagctccccaggg

SEQ ID NO: 465 - DNA, 45 bp, Homo sapiens
  chr1:109940574-109940619
  hyper
gcgcgcgccacacccccgagccgagcgcggcgctccttggatacg

SEQ ID NO: 466 - DNA, 31 bp, Homo sapiens
  chr1:109940635-109940666
  hyper
cgccccataggctggccgcctgtccctcttc

SEQ ID NO: 467 - DNA, 31 bp, Homo sapiens
  chr1:109940704-109940735
  hyper
tcgggggtcctggattcggatgctaagatgc

SEQ ID NO: 468 - DNA, 31 bp, Homo sapiens
  chr1:109940805-109940836
  hyper
cggcttgtggagttcacgtaggagcttctca

SEQ ID NO: 469 - DNA, 31 bp, Homo sapiens
  chr1:109941101-109941132
  hyper
tgcaagaaggtgaatgcgaactgatgtgggc

SEQ ID NO: 470 - DNA, 31 bp, Homo sapiens
  chr1:110052254-110052285
  hyper
tcgctgcctccaggtccgcaggcctggcgcg

SEQ ID NO: 471 - DNA, 98 bp, Homo sapiens
  chr1:110230510-110230608
  hyper
gggtactgggacatccgcggggtgagcgagggtccgctggacggtgggacgagggcgcaggggagggaagtgcgaagcagctgcgggacggactctag

SEQ ID NO: 472 - DNA, 37 bp, Homo sapiens
  chr1:110230682-110230719
  hyper
cgggtagaggaggcaacgggtacgtgcagtgtaaact

SEQ ID NO: 473 - DNA, 148 bp, Homo sapiens
  chr1:110453159-110453307
  hyper
cggtccgcagagggcgcggggaaggcagggtggggacgcggtggagcccgcgctcgtttgctgaaggcttggaagtgcagcgcagaagacagagggtgactaggaagacgcgcgagcggggctggccggccggcgggtgggggagggg

SEQ ID NO: 474 - DNA, 239 bp, Homo sapiens
  chr1:110453530-110453769
  hyper
ccgcatcccaggacagcggtgcggccctcggccggggcgcccactccgcagcagccagcgagcgagcgagcgagcgagggcggccgacgcgcccggccgggacccagctgcccgtatgaccgcgccgggcgccgccgggcgctgccctcccacggtaagcgacggccgcggcgctgggcccgggacgggctggggcgggggctcggcggccaggcggccgggagcggcccctcggagcc

SEQ ID NO: 475 - DNA, 160 bp, Homo sapiens
  chr1:110453792-110453952
  hyper
actggcccggcgttcccgccgcggacgaaccgcctttgcgcacggactgggccctggcgccagggcggaggccggtggcggccctgcagctgcaccgggactgccaggcttccctgggaaacggagggctgctcaccccattgcacggaggggaacactg

SEQ ID NO: 476 - DNA, 31 bp, Homo sapiens
  chr1:110627497-110627528
  hyper
attctgataaaacatacgtgctggttccctt

SEQ ID NO: 477 - DNA, 92 bp, Homo sapiens
  chr1:110627538-110627630
  hyper
gaatgattcttcaaggcgaatgactcgaaatggagatttcttctaacaccgcgtgatcaccgacaacttttgcaggacgggatgaaactcct

SEQ ID NO: 478 - DNA, 31 bp, Homo sapiens
  chr1:110627635-110627666
  hyper
tttccagtcagatgtgcgagtgggctctctt

SEQ ID NO: 479 - DNA, 31 bp, Homo sapiens
  chr1:111216724-111216755
  hyper
atgccccgggccggcccggagctctcggggt

SEQ ID NO: 480 - DNA, 31 bp, Homo sapiens
  chr1:111216773-111216804
  hyper
cctggcgctggaagtcgcggcggggcaaggg

SEQ ID NO: 481 - DNA, 440 bp, Homo sapiens
  chr1:111217194-111217634
  hyper
gccacagccgccttgaggcggggcccctccaccatcggccacctccggctccagcaggtggtccccgggcaccacggtcatgtcgggcggcagctcgcggcctgcggcgggctccgcgtagccgtggttcaccagcgtgtgggcaccgccgctgctcgctgggcgctgaggagggtgggcgcggtggcgggctgagggcggcggcggcgagcgcagaaggctgaggcgctcgtccatgcggcggggaagaggcggcagcggtgaggccaggtcgctcctcctcgcgctccccgccctttcgccgcctccgcccccgagccgagcccaccgcctgttgcagccaaagccgcgatgctctgtctgggtctggcgcggtcagccgggctcccgcacggggacgcctcctccctccttctcgcgctctccgccccctcccctgc

SEQ ID NO: 482 - DNA, 61 bp, Homo sapiens
  chr1:111217655-111217716
  hyper
gtccccttaggattcccgcccaccgcgcgggcgcgcgtcccgctctcgggggcagccgccg

SEQ ID NO: 483 - DNA, 73 bp, Homo sapiens
  chr1:111217732-111217805
  hyper
agccctcaaggcccctcggtgtcagcgaaagagccctcatgttgtacctcggcgccccgcgggaatgcccacc

SEQ ID NO: 484 - DNA, 55 bp, Homo sapiens
  chr1:111217821-111217876
  hyper
cggggagtcaggctgccggcccgggcccctaggctccgcccgcttctggtcagcg

SEQ ID NO: 485 - DNA, 6 bp, Homo sapiens
  chr1:111217885-111217891
  hyper
cccggc

SEQ ID NO: 486 - DNA, 27 bp, Homo sapiens
  chr1:111217923-111217950
  hyper
cggcccgtgggccgggagagctcccgc

SEQ ID NO: 487 - DNA, 218 bp, Homo sapiens
  chr1:111506090-111506308
  hyper
gcgccgcggagacaagcgcttcccgcctgggtggcgcactctgcgggctccaactcctctcaactacacagcgtccggaaacgacggccgactccacatccctaagacggacagaggggcagccgtggggaggattcgaaaccggtacttaccaacgcgaggcgttgcctgaattttcctctgcgggtttcaggaagaccctccgtaggttatttgac

SEQ ID NO: 488 - DNA, 68 bp, Homo sapiens
  chr1:111506338-111506406
  hyper
ccagaaaagtgggaagcgtggggccgagtttcccaatggggcgagaaccagagcgagggaatgttggg

SEQ ID NO: 489 - DNA, 84 bp, Homo sapiens
  chr1:111506421-111506505
  hyper
gcaactgtgaggggttcgaccttaacggagggcgacagcgggctctcgagagggtgtatccccaggcttcgggacgaggtcgcg

SEQ ID NO: 490 - DNA, 31 bp, Homo sapiens
  chr1:112533519-112533550
  hyper
tgggtccccactgctccgtgcctcgtcgacc

SEQ ID NO: 491 - DNA, 36 bp, Homo sapiens
  chr1:112938561-112938597
  hyper
ggaaagttgcagaccccgagccgggaggggcgcgag

SEQ ID NO: 492 - DNA, 43 bp, Homo sapiens
  chr1:113249255-113249298
  hyper
cccaatggtcacatcccgcccctattcccgccatacctccctc

SEQ ID NO: 493 - DNA, 43 bp, Homo sapiens
  chr1:113497970-113498013
  hyper
tccatgagtagaagggcgctgcggcggacgctggcagccacag

SEQ ID NO: 494 - DNA, 56 bp, Homo sapiens
  chr1:113498017-113498073
  hyper
aatgacaaagagcccccgtcagcaccactcccaggagtctgcgggctgccccgtcc

SEQ ID NO: 495 - DNA, 34 bp, Homo sapiens
  chr1:113498154-113498188
  hyper
caggtggggcaaggatcggcgggccaagaaggtt

SEQ ID NO: 496 - DNA, 80 bp, Homo sapiens
  chr1:113499269-113499349
  hyper
agcatttgaatggatgcgggtgccgctggcacccgggaagacgctgggggccggcgctgtagagccgggcatgggctggg

SEQ ID NO: 497 - DNA, 31 bp, Homo sapiens
  chr1:113499352-113499383
  hyper
tgtttggattccaatccgggcctgacaccag

SEQ ID NO: 498 - DNA, 229 bp, Homo sapiens
  chr1:113932572-113932801
  hyper
aaaggccccggaacctcggccggctcaggactccgcacgttgtcttccaatctaagcacaccggcccctctctgcgccccgcacaggctcagaggctccgcccgcgtctccgcctaactcgccggccacgcccccacttcggggagctcggtccctctcggattcgagttttcctcggctccagccgccgcgcagagggcctctcccggccctgcgacctacagcccct

SEQ ID NO: 499 - DNA, 31 bp, Homo sapiens
  chr1:113932872-113932903
  hyper
cagtcattctagtgcccgcctcctccactcg

SEQ ID NO: 500 - DNA, 80 bp, Homo sapiens
  chr1:113932989-113933069
  hyper
ggggctcgttcccaagcgcccagcctgtgacggcagcgcgccgggcgccgcgcggcgggagggggcggggctctggatga

SEQ ID NO: 501 - DNA, 162 bp, Homo sapiens
  chr1:113933116-113933278
  hyper
gcggctggtttgaaagcggcagtttcctggcagcttgggcaggcgttggtctccgcgctacagctccgcagcggccacgatcgatcccgcgacgggtctacgcgcgcttctgcgcgccccccacggatttttcccgttcccggctcttcccccttcacctcc

SEQ ID NO: 502 - DNA, 94 bp, Homo sapiens
  chr1:113933395-113933489
  hyper
ttcttcagcctaacccgcggtggccctcgcggagtccggtcagccccggggagcgcagccgggaggggcgtccaaggggcgtctcgcgtctggg

SEQ ID NO: 503 - DNA, 165 bp, Homo sapiens
  chr1:113933515-113933680
  hyper
gtcgcggggtgggggccggagcggcgaggccccccttaccgggctgcgcgggccgcccagggcccccgggctgagacggggccggagcggcgccccggccgcccgcgcggggtctcccccatggtgcagcggggttcgggatgtcgaagacgctgaagaagaaga

SEQ ID NO: 504 - DNA, 136 bp, Homo sapiens
  chr1:113933692-113933828
  hyper
gcaaggtgcaggagtgcgccgtgtcctgggccgggcccccgggcgacttcggcgcggagatccgcggtggcgcggagcgtggcgagttcccctacctggggcggctccgcgaggagcccggcgggggcacctgctg

SEQ ID NO: 505 - DNA, 80 bp, Homo sapiens
  chr1:113933829-113933909
  hyper
gtcgtctcgggcaaggcgcccagcccaggcgatgtgctgctggaggtaaacgggacgcctgtcagcgggctcaccaaccg

SEQ ID NO: 506 - DNA, 99 bp, Homo sapiens
  chr1:113933912-113934011
  hyper
caccctggctgtcatccgccacttccgcgagcccatccgtctcaagactgtgaaaccaggtacgccggccctgcgtatctgtctcggggtgttggggag

SEQ ID NO: 507 - DNA, 71 bp, Homo sapiens
  chr1:113934012-113934083
  hyper
ggggcttcagggtgggcgtcctgggagcggcggcacctccccaccgcgtattgtcccgggtaatcttagac

SEQ ID NO: 508 - DNA, 286 bp, Homo sapiens
  chr1:116184426-116184712
  hyper
gacgaggtgagggggacgccggccgagccccgccctccgctgcaggtgggccggccccgcggcggggccggcagcgctagctgttcttggctcgcggccgcgccgggctcgcagggctgggctcgggctgcggggcggcgccgggacaggaagcggaaagcagcagtgcagcggcggcggcggcggggctctgcctctccaggagcccagcgcaggccgcagagccggggccgctgtgagccgagaccgcgggccgcggagctcgggcggccggcgcggaggtgag

SEQ ID NO: 509 - DNA, 75 bp, Homo sapiens
  chr1:116184713-116184788
  hyper
cccgcgagaggccgagcgctgcgcggcggcggtccccggggcagaccgttggctgggagacgcccccacctcgga

SEQ ID NO: 510 - DNA, 108 bp, Homo sapiens
  chr1:116184804-116184912
  hyper
gccctcctcccgcattcgccccgccggacttcgaccccgggtggccggctcccgcctcgggccgggggctccctcccctcctccggagcgctccgggtagtgcttcct

SEQ ID NO: 511 - DNA, 411 bp, Homo sapiens
  chr1:116184919-116185330
  hyper
cactcttctccccatgcgttgcgcccctcctggccctgccgtgcgatctccgccgcaccccactccttggggtcccggggttccctgctcacacctcggacgtccctttctccccgggctggcctttggagtgcgccccttcggtgcgcgtgccggggcggcgggcaggccggcagggagtggccgagcgttggaggcaccgggcggctgcagcagccgtgcagggcgggagccgggcgcgcaccggggttcccacccctggcggggctcgacccgggcgccgcctggcccttcgccaggaaccgggacagagctggtctgtgtgcacacctcgctcacaaaaaattgagccggccctggaggcctggggggcgagtccggttgcgcctcggagagcgcaacaggcaggta

SEQ ID NO: 512 - DNA, 57 bp, Homo sapiens
  chr1:116185332-116185389
  hyper
agtttactttcaaaaacgccggggtggagcagaggcgcctggcgggtctctgcccaa

SEQ ID NO: 513 - DNA, 53 bp, Homo sapiens
  chr1:116185400-116185453
  hyper
tggaggaaatctcaccgcgccggggcagccttcgccaccggcaggacctcatt

SEQ ID NO: 514 - DNA, 31 bp, Homo sapiens
  chr1:116185470-116185501
  hyper
aactgccccaagcatcgcgcctagagaagtg

SEQ ID NO: 515 - DNA, 65 bp, Homo sapiens
  chr1:116185508-116185573
  hyper
ttataaaaatttaaacgcgtccgtggtggcggcagcagtggggcggagccgcggcctggctgctg

SEQ ID NO: 516 - DNA, 31 bp, Homo sapiens
  chr1:117209808-117209839
  hyper
cactcctgggaattcccgtcacctcctaccg

SEQ ID NO: 517 - DNA, 56 bp, Homo sapiens
  chr1:117210091-117210147
  hyper
gccaggggaggggtctcgggcccgacccggagctcagccggcgcgggcccgctccc

SEQ ID NO: 518 - DNA, 46 bp, Homo sapiens
  chr1:117452333-117452379
  hyper
gccaacttttaaaggtcggaggaaagtttctcgtggggtgggggcc

SEQ ID NO: 519 - DNA, 42 bp, Homo sapiens
  chr1:117452804-117452846
  hyper
agtcgctcccgccgggcgagcatggggcgcctggcctcgagg

SEQ ID NO: 520 - DNA, 31 bp, Homo sapiens
  chr1:117452852-117452883
  hyper
ctgctggcgctcctgtcgttgggtgagtgtg

SEQ ID NO: 521 - DNA, 199 bp, Homo sapiens
  chr1:117452972-117453171
  hyper
gtgcccgggctgctcccgggaaacccggccggggtgcgcgggttgttcggcccggcggggagcggccgcggggccgcccggagcctggcgcgaatccgctcgggccccgcgcgcggggtgcaagtggccgctccgccaggccgagcctcgcccccaacatgtgccggggggagtggcccggggccgtctttcccccagg

SEQ ID NO: 522 - DNA, 88 bp, Homo sapiens
  chr1:117453172-117453260
  hyper
ctccctacctgttggccgccgggagcccggctcaccttgaactcccggcccggaaggtgctgcggtcccggcccgggtcctcggctcg

SEQ ID NO: 523 - DNA, 128 bp, Homo sapiens
  chr1:117453293-117453421
  hyper
catagccgccgccggccgggtcgctcttcacccaacccgcgcggagttgcctttccagggaagcgagagaatcctccaacttccttccacgaaggtcacagggtggcccggagcgttacaatggaaat

SEQ ID NO: 524 - DNA, 31 bp, Homo sapiens
  chr1:119536346-119536377
  hyper
aagcatgcatacacttcgtacacccacacgc

SEQ ID NO: 525 - DNA, 15 bp, Homo sapiens
  chr1:120190434-120190449
  hyper
tcagcctcctcctcc

SEQ ID NO: 526 - DNA, 180 bp, Homo sapiens
  chr1:120190519-120190699
  hyper
cggggccctgcgccccaggggagcggacaacggtccactttacgaggcacaacttcgcccagccgttccgccaccgcactcgaacacacaccccatccccgcagcggtcgggtctggtcccgatcagccccatccccgggaggcggttgagcccagccacagccacgctcctacctgcga

SEQ ID NO: 527 - DNA, 99 bp, Homo sapiens
  chr1:120190713-120190812
  hyper
cgaggagctagggcaccgagcgccccggcccgagccccgcaccgcagcgcgtctgcccttgtgcggcggcggcggctgcagcggccgctgggtggcccg

SEQ ID NO: 528 - DNA, 17 bp, Homo sapiens
  chr1:120190871-120190888
  hyper
cccggctgactcctcac

SEQ ID NO: 529 - DNA, 31 bp, Homo sapiens
  chr1:147775592-147775623
  hyper
tctggtgataccagaacgagagttgactgtg

SEQ ID NO: 530 - DNA, 45 bp, Homo sapiens
  chr1:150947648-150947693
  hyper
acccccaactgctgtgcggcccccggtccccgccagggtgggcac

SEQ ID NO: 531 - DNA, 59 bp, Homo sapiens
  chr1:150947696-150947755
  hyper
cccacttccagccccacggggcgcgggcggaggagggtgcagcccggggatcctgccca

SEQ ID NO: 532 - DNA, 240 bp, Homo sapiens
  chr1:151512608-151512848
  hyper
tttgtgtaaatctatgcgagcaccgatggggcatgtcccagacccattggctccgcccacctcacctcctcgcctatcgttagttctctgcgaaaccgcgaactgggggcgcggcctatcttcagccccgcccctgatgggcctatacaagggggcggttccgcgcgcgcccgcccagttggagccagacagcggggtggacaagtggcgtgtgtgctgcgaccccgagggaagatgaac

SEQ ID NO: 533 - DNA, 210 bp, Homo sapiens
  chr1:151512881-151513091
  hyper
cacccagaggaccaggcggcggtaagaaaaagcgctctcgctgtcttctccgttttgtattcccggtttctaagtccgccccttccgtgccccgcgccgtgttggctgacatcacctggtgcccggctcgcgcggtcagccctgcgcggcgcttctctctttttattcttttgcctgcgacgggcagtgggagtcgcggggtgaagactc

SEQ ID NO: 534 - DNA, 47 bp, Homo sapiens
  chr1:151513226-151513273
  hyper
agagaatgagctcaagcgactgggtccctgagcgcctttggacgttg

SEQ ID NO: 535 - DNA, 76 bp, Homo sapiens
  chr1:151693821-151693897
  hyper
aatcagtcccccaatccgggaaaggcgatcctttagagacccaccccccaagcccccgccccggagctcacccctc

SEQ ID NO: 536 - DNA, 53 bp, Homo sapiens
  chr1:151694320-151694373
  hyper
ggccagagaaatgggccgaaattactgccagacacatccgaccttagtaaagg

SEQ ID NO: 537 - DNA, 34 bp, Homo sapiens
  chr1:153652398-153652432
  hyper
cactcttctttctcctcgccgttcttcattctac

SEQ ID NO: 538 - DNA, 129 bp, Homo sapiens
  chr1:153936614-153936743
  hyper
tccaggtgggtggggacgtggtgggaccggaatgcggggtgctgaagccgcgcccagggaagagcccccagcgcattccaggatatctgcgtaccgcgcctgcgggcgtctggccggttctcccacctg

SEQ ID NO: 539 - DNA, 38 bp, Homo sapiens
  chr1:153936753-153936791
  hyper
cagctcccgccaccctcgccggtcggtttgctgtttgc

SEQ ID NO: 540 - DNA, 54 bp, Homo sapiens
  chr1:153940531-153940585
  hyper
ctgcagcagaaagggcgcggctacctacttcttaaattccgtttgtggaccctc

SEQ ID NO: 541 - DNA, 40 bp, Homo sapiens
  chr1:153940599-153940639
  hyper
ctactcccagatacagcggccctaccgtggctcctggcaa

SEQ ID NO: 542 - DNA, 31 bp, Homo sapiens
  chr1:153940657-153940688
  hyper
agtgtaaggctgggggcggggtttggctggc

SEQ ID NO: 543 - DNA, 131 bp, Homo sapiens
  chr1:153958680-153958811
  hyper
aacttgaagaggtggtcgtaggctttggccatggcggacaccgggggagccgggggaggggtggggagcgcccggcactggtaggcgggactggacggttggcaaacagagcggcacggagcccaggccag

SEQ ID NO: 544 - DNA, 87 bp, Homo sapiens
  chr1:153958816-153958903
  hyper
agttttcctccctctccgcccaggctccgggaaagaggagaggcggcacccctccgggctccaccccctgcccgcccacccttttga

SEQ ID NO: 545 - DNA, 31 bp, Homo sapiens
  chr1:154297718-154297749
  hyper
ccctgcagaggatgctcgttttgcagagaag

SEQ ID NO: 546 - DNA, 168 bp, Homo sapiens
  chr1:154297758-154297926
  hyper
ctctattcccttcttccgaattaaaaataccccctcagagcgatctagcctcccgaattgttttttcttttaagatgcggatggacgtacgtgtgggggcatcccagcccagccacgccgaggctcggaagggctaagaccctcccactgccccgcacaaagatggct

SEQ ID NO: 547 - DNA, 114 bp, Homo sapiens
  chr1:154298038-154298152
  hyper
cgggccgaggccccgggggagcggggccgcagctgggggggcgggagcccgtggggagccgagccgagcgccccccgccccagcccccggcatgggcagtacggggccgccggg

SEQ ID NO: 548 - DNA, 240 bp, Homo sapiens
  chr1:154298253-154298493
  hyper
cgcggggctggaggggccggggagcgggtgtagactggggagcaccgggggccaagatttgggagctgcggccagacggggcggggatggcggccgactggagacgaggggctgtcgggttcccggggacggggcagagcgggggtctgcgtacaggatgggaggatggggtgccgaaggggcgcgtggagagcaggagagcggcgcgagtgccaaggagaagctcgtgcagccttggcc

SEQ ID NO: 549 - DNA, 31 bp, Homo sapiens
  chr1:154816590-154816621
  hyper
cacagatctgggcagacgccctcaccctcac

SEQ ID NO: 550 - DNA, 183 bp, Homo sapiens
  chr1:154972114-154972297
  hyper
tgggcggcgggtttttcgagggaagcggaggcagcggaggatgggggggagcagcggagaagaggtgggcgcctggcgcatgctgacgctccgcttgcagctcagccccccacattccgaaacaggcccccagacccactcacgcaggaccccgcccaggcaaagcctcgcctttcttaacac

SEQ ID NO: 551 - DNA, 43 bp, Homo sapiens
  chr1:155099555-155099598
  hyper
tattcaagagcctgttcgcacggtgtacgcgtgtgttgttaca

SEQ ID NO: 552 - DNA, 90 bp, Homo sapiens
  chr1:155099599-155099689
  hyper
atactcaggttattagcgctctttgacttatctaaaataagaacggccccctctcgagcccagggtcccgcgtgtcgctcctgcgggcag

SEQ ID NO: 553 - DNA, 31 bp, Homo sapiens
  chr1:155099827-155099858
  hyper
acaaaaacaaacagccgcgtgtgtgtgggga

SEQ ID NO: 554 - DNA, 71 bp, Homo sapiens
  chr1:155099899-155099970
  hyper
aggagagtgtgggaacgcgggcgcccgagcctgggcatgcgaggctcagaaaggtgcggggcatgtcaaca

SEQ ID NO: 555 - DNA, 44 bp, Homo sapiens
  chr1:155100351-155100395
  hyper
agatctgtgagcccagcgctgactgcgccgcggagaaagccagt

SEQ ID NO: 556 - DNA, 59 bp, Homo sapiens
  chr1:155100404-155100463
  hyper
gacccataggagacccgcgtccccgctcggcctggccaggccccgcgctatggagttcc

SEQ ID NO: 557 - DNA, 49 bp, Homo sapiens
  chr1:155100484-155100533
  hyper
tgtgctgcagtctggccgctgctgatcgccacaccgtcttctggaacag

SEQ ID NO: 558 - DNA, 40 bp, Homo sapiens
  chr1:155100537-155100577
  hyper
aatcccaagtaagcctcgagactcccgctggcagcctggg

SEQ ID NO: 559 - DNA, 45 bp, Homo sapiens
  chr1:155147169-155147214
  hyper
agggggaggggacttccggtggggagggggcgagtaggcggggct

SEQ ID NO: 560 - DNA, 78 bp, Homo sapiens
  chr1:155830323-155830401
  hyper
ccctgtttccctgggccgccttttcaaaaagggggactgaccagcgttgatgctggcgggggcgcgatccaggccgga

SEQ ID NO: 561 - DNA, 26 bp, Homo sapiens
  chr1:155892962-155892988
  hyper
tccagcctgggcgacagaaaaaaaaa

SEQ ID NO: 562 - DNA, 65 bp, Homo sapiens
  chr1:156036260-156036325
  hyper
ggagctaggatgggggcgagctgcacggatcgagagcgccccctcacttccgcacaatgctctgc

SEQ ID NO: 563 - DNA, 31 bp, Homo sapiens
  chr1:156084628-156084659
  hyper
agcagtctctgtccttcgacccgagccccgc

SEQ ID NO: 564 - DNA, 53 bp, Homo sapiens
  chr1:156390085-156390138
  hyper
ctcccgcccgtgaggccggctttccccgggcccctctgcgcagtgtatggggt

SEQ ID NO: 565 - DNA, 68 bp, Homo sapiens
  chr1:156390432-156390500
  hyper
aaggcgtggaaaggacgcgatgacccgtggcgtcgaagtcggggagttgaccccgatccagacccaaa

SEQ ID NO: 566 - DNA, 63 bp, Homo sapiens
  chr1:156390506-156390569
  hyper
ctggtgccccatttcccgctctcccattcgggccaggagcaggagttccgctggtcccaggtg

SEQ ID NO: 567 - DNA, 189 bp, Homo sapiens
  chr1:156390691-156390880
  hyper
agagccctgccttcggcggagcccgagcctggcgcgggatggaaatggggagccgcggtgccggcccggccacgtcgccaactcagaaaggcgttggaagcgaagcggagcccttgtgggggaaagagccggattcaagaggccgactaaaaggggaaatgggcagccaaaccccggaggtaaaaaccc

SEQ ID NO: 568 - DNA, 53 bp, Homo sapiens
  chr1:156391036-156391089
  hyper
gtacccatgagaggggcggaggggaggaaagcagagggcgacagggcaggtga

SEQ ID NO: 569 - DNA, 39 bp, Homo sapiens
  chr1:156391099-156391138
  hyper
aggccctgcagagccccggataaacggctttgttcaaag

SEQ ID NO: 570 - DNA, 59 bp, Homo sapiens
  chr1:156391156-156391215
  hyper
gggttgtgaaaatggccgggggttcgaggcgagcggtgctctaggggtgggaaaggggt

SEQ ID NO: 571 - DNA, 121 bp, Homo sapiens
  chr1:156391242-156391363
  hyper
cgaagagggtgggggctcggccggcccctcgtggcggacgcgcgggcacgccggattccgaggcgctcgcccacctcgtgctccacgctggccaggccacttacatcgagcccagggtgcc

SEQ ID NO: 572 - DNA, 50 bp, Homo sapiens
  chr1:156611684-156611734
  hyper
ccctactccaagccctcggcttctcatccgctgaacgatgtcctacttcg

SEQ ID NO: 573 - DNA, 31 bp, Homo sapiens
  chr1:156626474-156626505
  hyper
ggatggagacccaggccggaactccatccct

SEQ ID NO: 574 - DNA, 39 bp, Homo sapiens
  chr1:156626930-156626969
  hyper
ctcactctctctcactcgcctaaccgccttcctcattaa

SEQ ID NO: 575 - DNA, 35 bp, Homo sapiens
  chr1:156626983-156627018
  hyper
ccttggttttctcaagcgtgcattccctcactcat

SEQ ID NO: 576 - DNA, 31 bp, Homo sapiens
  chr1:156647116-156647147
  hyper
cgcagagcttttaggacggaagagaaaagag

SEQ ID NO: 577 - DNA, 31 bp, Homo sapiens
  chr1:156716424-156716455
  hyper
ccagaggcagtggcctcgccagcctctccca

SEQ ID NO: 578 - DNA, 48 bp, Homo sapiens
  chr1:156716482-156716530
  hyper
tgagccaggggtgggtcgtgggggaaggtggggcgggtggggactaca

SEQ ID NO: 579 - DNA, 34 bp, Homo sapiens
  chr1:156716556-156716590
  hyper
cagcagccaggcttcccgccggacagaggccagg

SEQ ID NO: 580 - DNA, 40 bp, Homo sapiens
  chr1:156863443-156863483
  hyper
gccccccgcccctcggcgcccctcccggccctgcgatcag

SEQ ID NO: 581 - DNA, 34 bp, Homo sapiens
  chr1:158150718-158150752
  hyper
ggcagaagcagcaaaccgccggcaagcccagcga

SEQ ID NO: 582 - DNA, 31 bp, Homo sapiens
  chr1:159915517-159915548
  hyper
gggcgggacccctgagcggcctgggagttgt

SEQ ID NO: 583 - DNA, 62 bp, Homo sapiens
  chr1:159915632-159915694
  hyper
gtgggccgcttcccgccgccagcaagaggggcagcagggtccggctcgcgctccagggctgc

SEQ ID NO: 584 - DNA, 37 bp, Homo sapiens
  chr1:159915773-159915810
  hyper
gggcgcgccacagaggcggcagcgagggttgaaatct

SEQ ID NO: 585 - DNA, 31 bp, Homo sapiens
  chr1:159915818-159915849
  hyper
gggtaggagaaccaggcggggagcatgactc

SEQ ID NO: 586 - DNA, 31 bp, Homo sapiens
  chr1:160175619-160175650
  hyper
cccgcccctccctccccgctcaggcttcgga

SEQ ID NO: 587 - DNA, 100 bp, Homo sapiens
  chr1:161171824-161171924
  hyper
ggagtagggaaggaagcgccgcgcgtttccaagatacgcaggcgggctcggcgagagagcacgaagtatctgccccacgcaggaacggcaattttccctt

SEQ ID NO: 588 - DNA, 57 bp, Homo sapiens
  chr1:161275639-161275696
  hyper
cgatcccccgcccggcccgctaaccgctatttcttatccttgcgagactcccccagc

SEQ ID NO: 589 - DNA, 35 bp, Homo sapiens
  chr1:161275896-161275931
  hyper
cctgccgcccgcgcttcgacgcgtcctttcctggc

SEQ ID NO: 590 - DNA, 60 bp, Homo sapiens
  chr1:161275965-161276025
  hyper
aagagagactgctgtacgtttggcctcgccggaaccccttgcaccgcggacacagcttcc

SEQ ID NO: 591 - DNA, 31 bp, Homo sapiens
  chr1:161276046-161276077
  hyper
ccactggagtagtctccgcccagatggggga

SEQ ID NO: 592 - DNA, 31 bp, Homo sapiens
  chr1:161276092-161276123
  hyper
gaggggagctaggctccgccccttacctgag

SEQ ID NO: 593 - DNA, 113 bp, Homo sapiens
  chr1:161410312-161410425
  hyper
agggtccccactcctacgcttcccaccgggcgcagggccccgtgtgtcgcagaaagcctcttccgacaaccactttgagccggcagctcgttgggcgccgtgcagggccagag

SEQ ID NO: 594 - DNA, 44 bp, Homo sapiens
  chr1:161509888-161509932
  hyper
ctcagggctatgagccgcgccctgaagcacggaaagctaattgt

SEQ ID NO: 595 - DNA, 31 bp, Homo sapiens
  chr1:161509953-161509984
  hyper
tcaatttttttggagacgtgagtgctgagca

SEQ ID NO: 596 - DNA, 35 bp, Homo sapiens
  chr1:161510140-161510175
  hyper
ttgactgaaaaaactgcgtgcgatgctatccgctg

SEQ ID NO: 597 - DNA, 31 bp, Homo sapiens
  chr1:161510177-161510208
  hyper
agcgctggggccttggcgctcaaaaccagcc

SEQ ID NO: 598 - DNA, 31 bp, Homo sapiens
  chr1:161510230-161510261
  hyper
ctggtagcagacctccgcgttgtgtggttcc

SEQ ID NO: 599 - DNA, 157 bp, Homo sapiens
  chr1:161582233-161582390
  hyper
gcggaggaaaatcccccggcggtgctcaactgcggctttctctctcggctgtgagccggctccgccctccggcttccagagcaagtggcttctgcgttcaccgccccccgccgtttgtggggcggggccgattcataagaatcggttctcaccaatg

SEQ ID NO: 600 - DNA, 48 bp, Homo sapiens
  chr1:161582426-161582474
  hyper
aaagacactgctagaacggtcgggaaagtcatacgctttgcttatctt

SEQ ID NO: 601 - DNA, 38 bp, Homo sapiens
  chr1:161582484-161582522
  hyper
ttctaaaattccaaaccggggacgcgttggtggtgtag

SEQ ID NO: 602 - DNA, 135 bp, Homo sapiens
  chr1:161582538-161582673
  hyper
ctttcaagcagttaacgcgggttcgattcccgggtaacgaaacgtttttgtctttccttctacgaaaaacttttctgagccggagcctccagcgcgctgtgtattcgttttacgcctcaacgaaactgcagcaat

SEQ ID NO: 603 - DNA, 135 bp, Homo sapiens
  chr1:162039283-162039418
  hyper
agggcacctcagatcccggcagtctggggccggggcgaagttgccggcgtcgcgcggccgggggcgcgggcagggccgggcgcgactctcccggggactttcacctgctcggctggcagcgcgggcagcgcgggg

SEQ ID NO: 604 - DNA, 117 bp, Homo sapiens
  chr1:162039485-162039602
  hyper
aggagccgctcgctggcggctgatccagcgtctccgtgacaggcaccctgctccgccgccaccgccaccgccaccgccaccgtcgccttttcttcttcgtcccgggcggtgcgttcc

SEQ ID NO: 605 - DNA, 82 bp, Homo sapiens
  chr1:162039725-162039807
  hyper
agccggcaggaattgcgcgaccacagcgccgctcgcgtcgcccgcatcagctcagcccgctgccgctcggccctcggcaccg

SEQ ID NO: 606 - DNA, 81 bp, Homo sapiens
  chr1:162039811-162039892
  hyper
gggtccggccgccgcgcggccagggctccccctgcccagcgctcccaggccccgccacgcgtcgccgcgcccagctccagt

SEQ ID NO: 607 - DNA, 55 bp, Homo sapiens
  chr1:162039917-162039972
  hyper
cccttcctgcagccgccgcctccgaaggagcgggtccgccgcgggtaaccatgcc

SEQ ID NO: 608 - DNA, 82 bp, Homo sapiens
  chr1:162039983-162040065
  hyper
agtacaaccttgtggacgatgggcacgacctgcggatccccttgcacaacgaggacgccttccagcacggcatctgctttga

SEQ ID NO: 609 - DNA, 48 bp, Homo sapiens
  chr1:162530851-162530899
  hyper
gagagcgcgccaggcccgccctgaaagtttctccgcaggaaaatccac

SEQ ID NO: 610 - DNA, 42 bp, Homo sapiens
  chr1:166135600-166135642
  hyper
agctcgcacctaggagcggggagccgccgggcatccttgggg

SEQ ID NO: 611 - DNA, 42 bp, Homo sapiens
  chr1:167028535-167028577
  hyper
agaaaactaatgtttccgctgcagtggcgacaccttgtggtc

SEQ ID NO: 612 - DNA, 44 bp, Homo sapiens
  chr1:167190357-167190401
  hyper
gagggggaaagaggctcggagcggccaggcggagggggaagaca

SEQ ID NO: 613 - DNA, 47 bp, Homo sapiens
  chr1:167423948-167423995
  hyper
ccgagtgagatgaaagcgcttttccgatccaccgaatcagtcccact

SEQ ID NO: 614 - DNA, 31 bp, Homo sapiens
  chr1:167599107-167599138
  hyper
cacaaaagaaggaaatcgaaaagagaggaaa

SEQ ID NO: 615 - DNA, 55 bp, Homo sapiens
  chr1:167599354-167599409
  hyper
tatctgtttagatttgcgtctaaatttaaaccctgatcgtcggcctccctccccg

SEQ ID NO: 616 - DNA, 169 bp, Homo sapiens
  chr1:167599448-167599617
  hyper
cctcctcctccttcctcgttctctcgcgcagggcccccgcggccggggcagtcccgcagccgagcgcagccgggcgcgcgccaccgcccactcgccctgtgcccgccgcagcccgaaactggccacggccgggagcggaggggacagcggggatcgtgagctccggccc

SEQ ID NO: 617 - DNA, 83 bp, Homo sapiens
  chr1:167599661-167599744
  hyper
tggaggtaaaggaccccggagggagacgcggggctgagcggtgagcggtgtatcgggcgccccttccccgggcggctgcccct

SEQ ID NO: 618 - DNA, 31 bp, Homo sapiens
  chr1:167599846-167599877
  hyper
tcccacctaggacacccgggttgggaggctg

SEQ ID NO: 619 - DNA, 81 bp, Homo sapiens
  chr1:168311896-168311977
  hyper
ctggtcccacccctttcgtcctggtgatggggtgggacggcaggcgccagcctccgtttttctgcccgtgggtatgtgtgg

SEQ ID NO: 620 - DNA, 67 bp, Homo sapiens
  chr1:168311987-168312054
  hyper
taaatcagagccaagcgcgtgacccagaactctgcacaatcacccacgcccacggcaaagcagatga

SEQ ID NO: 621 - DNA, 47 bp, Homo sapiens
  chr1:168312074-168312121
  hyper
tttatctagggaactgcgtcatcctcctcggtcggacaccaggtggc

SEQ ID NO: 622 - DNA, 40 bp, Homo sapiens
  chr1:168312139-168312179
  hyper
cagtcaccccaccctccgtccaggccgtcttctgacgcag

SEQ ID NO: 623 - DNA, 48 bp, Homo sapiens
  chr1:169076041-169076089
  hyper
gcggcagctgctgacccgccatcgccatggcccgcgggaaagccaagg

SEQ ID NO: 624 - DNA, 76 bp, Homo sapiens
  chr1:169076134-169076210
  hyper
agtttctgggcaggaccggtggcagttggtgtaagtacggggtccgcagctcccggccgccgcgtctgatctttcc

SEQ ID NO: 625 - DNA, 82 bp, Homo sapiens
  chr1:169076243-169076325
  hyper
cggttccgcacccaccgcgctggccggggtggcgggggcgagggtggtggacgctgctgggtcgcgccggcctgggcttgca

SEQ ID NO: 626 - DNA, 31 bp, Homo sapiens
  chr1:169454464-169454495
  hyper
caaaatattgccccctcgcccccagcaggaa

SEQ ID NO: 627 - DNA, 112 bp, Homo sapiens
  chr1:169454503-169454615
  hyper
ccagtctgggcagtcacgctaagccacattacaacacgatcagcatactgcctgacgcacaaggcacggggcctctggacgcgtgttctgagcccttcgcaggagactcgtc

SEQ ID NO: 628 - DNA, 31 bp, Homo sapiens
  chr1:169455341-169455372
  hyper
cacgccaggcctctgacgtcccagggctcaa

SEQ ID NO: 629 - DNA, 39 bp, Homo sapiens
  chr1:171751070-171751109
  hyper
aggggagtcttgaaaacgcagcttcggcagtaggaacat

SEQ ID NO: 630 - DNA, 31 bp, Homo sapiens
  chr1:171751129-171751160
  hyper
ccagggagtttggctccgttgactattggga

SEQ ID NO: 631 - DNA, 31 bp, Homo sapiens
  chr1:171751207-171751238
  hyper
cctacctggaactgtgcggggtgctacataa

SEQ ID NO: 632 - DNA, 52 bp, Homo sapiens
  chr1:171751253-171751305
  hyper
ggaaaaggtgaggagcgcgggttggtagcccttcgtacgtgctccggaaggt

SEQ ID NO: 633 - DNA, 31 bp, Homo sapiens
  chr1:173991621-173991652
  hyper
agtcaccggccaccaacgcccggagggagac

SEQ ID NO: 634 - DNA, 104 bp, Homo sapiens
  chr1:178062639-178062743
  hyper
ttctgtttaaatttcccgcacccttttacctccccgccttctcaaacggtctttactttgagcagcagagacccggaccgctcaatacccggctatccctggga

SEQ ID NO: 635 - DNA, 346 bp, Homo sapiens
  chr1:178062745-178063091
  hyper
gtacttggaaagtaggcgggacaggccggatgaataattcggtgtccgacttttcctgcctgcggcgcagtccctccccggcttcgttactcgagtgcacacgcggccgggctctcggccctcgattgcttcagcctatcaccctgggatgccgcctgccgctgccgccgccgccgccgccgccaccgccaccgccaccgccaccgccaccgccgtggctgccgggtttgtgggatccgccgcggagcaggagccagagctgtggccggagctgtggcctgagagtcagggggcgggcaggctcattccagaagtgggggccgaggacaggcgggctagaacccgg

SEQ ID NO: 636 - DNA, 126 bp, Homo sapiens
  chr1:178063111-178063237
  hyper
cctcaggctgagggaacgggcactcggagcttctgaggcggcggcggcgggagccggtcagagggggcggcccctggcggcgacgcccccaagcccagccctgcccggccccgctccatccccagc

SEQ ID NO: 637 - DNA, 200 bp, Homo sapiens
  chr1:178063273-178063473
  hyper
ctgaagaaggcggctccgaggaggtgggagggcgagcctcccctcccgggttcttctgcgtcctctcccgggagggacccacacacacctgagcccggacccacccttggtcggggccacgctggatcctcctcccggcctgggtcccgcccgccgactgcaggtgggctgcatcgcccgagcctcgggcagtgggcgac

SEQ ID NO: 638 - DNA, 124 bp, Homo sapiens
  chr1:178063567-178063691
  hyper
gagccgcgcgccagcccgccccgaagccgccgcctcgtccccctcccgcctcggggcaccatggagctctctccgtcgtccggaggagccgcggaggcgctgtcctggccggagatgttcccgg

SEQ ID NO: 639 - DNA, 57 bp, Homo sapiens
  chr1:178063716-178063773
  hyper
cccggaggacctggacgcggttgtcccagtcagtggagccgtcgccggtggcatgtt

SEQ ID NO: 640 - DNA, 31 bp, Homo sapiens
  chr1:178694819-178694850
  hyper
ggcgccgtcctgaagccgggggcgctgcgac

SEQ ID NO: 641 - DNA, 58 bp, Homo sapiens
  chr1:182360259-182360317
  hyper
aaggcccccgggaccccgaggcgggagccggccgcccaaacaacgctcaccgttacac

SEQ ID NO: 642 - DNA, 43 bp, Homo sapiens
  chr1:182360916-182360959
  hyper
ctcgactctgcagagccgccagcagccccgcaccctttatccg

SEQ ID NO: 643 - DNA, 31 bp, Homo sapiens
  chr1:182584115-182584146
  hyper
ccaagtgacaactgctcggaaacagacagga

SEQ ID NO: 644 - DNA, 146 bp, Homo sapiens
  chr1:182584162-182584308
  hyper
agagcagcaaatatccgcggctcgccgccccgggctctgtggcaccatcagcagcttgcgcaggacacagacgtcggctcacgcgccgcagccctcggccccggaagagccgcggccgcggagcagcgaacgcgtgcctgccaggg

SEQ ID NO: 645 - DNA, 28 bp, Homo sapiens
  chr1:182584311-182584339
  hyper
agcagtcaccaggaacgcggcgttttgg

SEQ ID NO: 646 - DNA, 13 bp, Homo sapiens
  chr1:182584403-182584416
  hyper
cggcctgcggctc

SEQ ID NO: 647 - DNA, 102 bp, Homo sapiens
  chr1:182584456-182584558
  hyper
tggccctctcaggctgcggagaaagggcgggaggccgcggggctctccaggactcagtggtttcggagaaactcgacttcccaggctcggagggccagtttg

SEQ ID NO: 648 - DNA, 52 bp, Homo sapiens
  chr1:182584561-182584613
  hyper
ttgttatagaacaaaacgtgggcggcataaagtgctccgaagtggagatcac

SEQ ID NO: 649 - DNA, 117 bp, Homo sapiens
  chr1:182992919-182993036
  hyper
gctggcggcggccgccgcggcgggctgtgcccaggcagccatggacgagtgcacggacgagggcgggcggccgcagcgctgcatgcccgagttcgtcaacgccgccttcaacgtgac

SEQ ID NO: 650 - DNA, 31 bp, Homo sapiens
  chr1:184355380-184355411
  hyper
atgcagtggtggatggcgatctctctggacc

SEQ ID NO: 651 - DNA, 174 bp, Homo sapiens
  chr1:184355550-184355724
  hyper
tgcaggcgccgcagctcgggtcagtatggaggcggatcggtggcagagcccgggcctctgggctgcgcccgcccgttcagcctggcccgggaggggagcggccgcgcggtgggccaaagacgcccggccttccctccgtctgcttccagcaggcacagccgggaggctgggctc

SEQ ID NO: 652 - DNA, 31 bp, Homo sapiens
  chr1:184355746-184355777
  hyper
tagagctgggcccacccggctgccccccgag

SEQ ID NO: 653 - DNA, 74 bp, Homo sapiens
  chr1:184355814-184355888
  hyper
gcccgggaaggccggacgggacgcagtcttcccgccggggtcttccctccggctggccggccgctgcagggcgc

SEQ ID NO: 654 - DNA, 71 bp, Homo sapiens
  chr1:184355957-184356028
  hyper
cgcctccttcccgccccgcagccctagcagcccccaacccgctccccagcgcgctgcgccccggcggcctc

SEQ ID NO: 655 - DNA, 141 bp, Homo sapiens
  chr1:184356073-184356214
  hyper
aggctcggggaggggccggcggtgggggagtgtctgctgcccccgcccctcgagtgagtgactgagcgaggagctcccctccctcgctcgctcctcgcaagctcccgctcgctccctgcccactcccggggggacgttccg

SEQ ID NO: 656 - DNA, 97 bp, Homo sapiens
  chr1:184356590-184356687
  hyper
cagggagggaggcctgcggggtgtctgccgcacggaagggatgggagccgcggtcgtggcgctgcctgcgcggggcccgggccggggctgctgctgg

SEQ ID NO: 657 - DNA, 236 bp, Homo sapiens
  chr1:200708631-200708867
  hyper
gcggcctcgctcacacgcgggctcgcggggcgggtggctcggaggggcgcgggcacggggcggacctcgcgcggacggacggacggagacggcgccgccacattcctatgcccgggagcggcggcggcggcggcggcggctcccgcgggaggcggcaggcgcgcggcgcggacagctgagcttctcctccgtcggcgcccgggcggacatcgcccgggccccgatggtttgagctt

SEQ ID NO: 658 - DNA, 31 bp, Homo sapiens
  chr1:201050380-201050411
  hyper
agtcagttcacaagctcgctgctctggcttt

SEQ ID NO: 659 - DNA, 88 bp, Homo sapiens
  chr1:201083265-201083353
  hyper
ccaggaagccagagaacgccaccggggcacacaggtcgcctctgctgagtctgtaggttcggtctgggctgagcgccagcagcaatct

SEQ ID NO: 660 - DNA, 59 bp, Homo sapiens
  chr1:201083369-201083428
  hyper
ctctgggttcctttctcgaggagtaagcgtgctcccaaagaagtcgctagtatctgagg

SEQ ID NO: 661 - DNA, 122 bp, Homo sapiens
  chr1:201083442-201083564
  hyper
gcagtggcatggtaaccgagggctcaaagtcgggctcgcatcccggggactcgcagagactggactgcgcctgcggcaaggaaggacggagcagagccacctgaggccgagcgggagccaga

SEQ ID NO: 662 - DNA, 31 bp, Homo sapiens
  chr1:201083641-201083672
  hyper
cccctcgcttcacccacggagctcctaggtc

SEQ ID NO: 663 - DNA, 31 bp, Homo sapiens
  chr1:201122936-201122967
  hyper
ggccgtgcactgtggtcgtgaccaggtgctg

SEQ ID NO: 664 - DNA, 55 bp, Homo sapiens
  chr1:201368672-201368727
  hyper
ggacggatcgcgggaccgaacgacggacgcccggggccggcgtggggctggtcgg

SEQ ID NO: 665 - DNA, 234 bp, Homo sapiens
  chr1:201437932-201438166
  hyper
ggaaagctccaggctgcggcgggcgcggcgcccctctcggccccgcagcgcaggattctggcgccccgggctggcaggccgtgcgcgctgcccacctgcgccctgactgctccgcgcacccacaccgcggccctcagcacccggctgccggtgaggtggtgtcggtgcccccagcgcgctccgcgcccaccgccccgcttcagccggcacccgctcctccgctctaccccagct

SEQ ID NO: 666 - DNA, 31 bp, Homo sapiens
  chr1:201507612-201507643
  hyper
gagcacctactatttgcggggcacttgcggg

SEQ ID NO: 667 - DNA, 123 bp, Homo sapiens
  chr1:201858058-201858181
  hyper
ggccggcttggtcctgcggtcccttctctgggaggcccgaccccggccgcgcccagcccccaccatgccacccgcggggctccgccgggccgcgccgctcaccgcaatcgctctgttggtgct

SEQ ID NO: 668 - DNA, 74 bp, Homo sapiens
  chr1:201858200-201858274
  hyper
gggatggggagagatgcggcaggagtgggatgggggcggaggaaggggagggaccgatccgaggggcttgggct

SEQ ID NO: 669 - DNA, 56 bp, Homo sapiens
  chr1:201977861-201977917
  hyper
ttttttttttttgagacgcagtgattacaggtgtgagccaccggatcctacatttc

SEQ ID NO: 670 - DNA, 31 bp, Homo sapiens
  chr1:201977931-201977962
  hyper
ctagatatgggctgggcgcagtagctcatgc

SEQ ID NO: 671 - DNA, 45 bp, Homo sapiens
  chr1:202612530-202612575
  hyper
gcggccctcgctcccgcgctcgctcgctctcgagtctctccctct

SEQ ID NO: 672 - DNA, 31 bp, Homo sapiens
  chr1:202612864-202612895
  hyper
aggggtttaaactggcgcggtcctacagaag

SEQ ID NO: 673 - DNA, 91 bp, Homo sapiens
  chr1:202612931-202613022
  hyper
ccctacgggactcccccgattctgccgaggagtccccgccagctccgtgcactcctgcaacactccccaccccacccgccagctccgagtt

SEQ ID NO: 674 - DNA, 52 bp, Homo sapiens
  chr1:202830112-202830164
  hyper
cctctttgtccaggaccgcagcgggagaaatacggggcgggccctagatccc

SEQ ID NO: 675 - DNA, 31 bp, Homo sapiens
  chr1:202935961-202935992
  hyper
gagcccacagccaggccgagcagagtgacca

SEQ ID NO: 676 - DNA, 31 bp, Homo sapiens
  chr1:203143408-203143439
  hyper
ggcaagatggtgatagcgtgtggcttgtgca

SEQ ID NO: 677 - DNA, 88 bp, Homo sapiens
  chr1:203242475-203242563
  hyper
gtcaccattgctcacccgtctgacttactctgggtgtgtgtggacgggcgtgcatgtgaccgcgtctgtgcaccggggctgtgctgtg

SEQ ID NO: 678 - DNA, 31 bp, Homo sapiens
  chr1:203561334-203561365
  hyper
tccagtgctgcctgatcgggctccccctcct

SEQ ID NO: 679 - DNA, 34 bp, Homo sapiens
  chr1:204042321-204042355
  hyper
aacccgggcccagaaccggcgagcccaggtctga

SEQ ID NO: 680 - DNA, 122 bp, Homo sapiens
  chr1:204042532-204042654
  hyper
ggcagagggcagagagcggcctggctcggcggagagggcgccgcccggccggaaccaagctcgccgcccgggacggcgggccccgtggggcgcggacccagggtggccgtgggtccgcagcg

SEQ ID NO: 681 - DNA, 34 bp, Homo sapiens
  chr1:204042806-204042840
  hyper
ccccgagccccgagcccggcgcctggctgagtag

SEQ ID NO: 682 - DNA, 39 bp, Homo sapiens
  chr1:204042895-204042934
  hyper
tgaagtttgacacttgcgcccctacgtttctgggcaccc

SEQ ID NO: 683 - DNA, 5 bp, Homo sapiens
  chr1:204043069-204043074
  hyper
agcct

SEQ ID NO: 684 - DNA, 43 bp, Homo sapiens
  chr1:204043133-204043176
  hyper
cgcgcgcgcgcgcgttcaccacgcgggtcgagcttagggtgca

SEQ ID NO: 685 - DNA, 31 bp, Homo sapiens
  chr1:204043325-204043356
  hyper
tcctccaccatggttgcgtggggtgctgggg

SEQ ID NO: 686 - DNA, 88 bp, Homo sapiens
  chr1:204043483-204043571
  hyper
tgctacccccacctcccgccctgggatatcgtaggtgagccttttcatcccgattccgctgcaaacgctgatcgcgcctaggggtagg

SEQ ID NO: 687 - DNA, 31 bp, Homo sapiens
  chr1:204043837-204043868
  hyper
gtgagccgggcctgggcgggaagtgaatttt

SEQ ID NO: 688 - DNA, 113 bp, Homo sapiens
  chr1:204043907-204044020
  hyper
ctggagcggcggctcccgccctggagggcccgcggcagctgcaaagactccgctggcgctcttggcagccgcctcggtgacagaggcttggaggaagccgaagagttttcctg

SEQ ID NO: 689 - DNA, 66 bp, Homo sapiens
  chr1:204044034-204044100
  hyper
actctctgggaatttccgggcaggacgcctcggcgctggcgctggcgctggcgctggtgaaggggt

SEQ ID NO: 690 - DNA, 89 bp, Homo sapiens
  chr1:204347105-204347194
  hyper
tgacgggcaattagcgcggtgagtaattacgatgcctctcctgccgggactgttaacgggcagcgctgggtctccgttcctcctggctc

SEQ ID NO: 691 - DNA, 57 bp, Homo sapiens
  chr1:204347196-204347253
  hyper
ctgccctccagcctggcggagcccggagagcagaagctggagcggggaggatccctc

SEQ ID NO: 692 - DNA, 54 bp, Homo sapiens
  chr1:204347293-204347347
  hyper
tctccgctcccagctccgatcttgcacttgaaccaccggcggggccgggggcgg

SEQ ID NO: 693 - DNA, 31 bp, Homo sapiens
  chr1:204347367-204347398
  hyper
aggtaattcacagccccgagaactcgccggc

SEQ ID NO: 694 - DNA, 31 bp, Homo sapiens
  chr1:204487762-204487793
  hyper
tggtcagcctactccacgtgttttctttcca

SEQ ID NO: 695 - DNA, 86 bp, Homo sapiens
  chr1:205399678-205399764
  hyper
tgagacaggagaaagccgcccatcaccgtggagaaccaggaatggcagaccacgcggacgccaacagtttacgcagctccccagct

SEQ ID NO: 696 - DNA, 54 bp, Homo sapiens
  chr1:205399774-205399828
  hyper
tggccaaaggaagagccggtcttccacacgcacacctccgcgcccacactgccc

SEQ ID NO: 697 - DNA, 163 bp, Homo sapiens
  chr1:205399831-205399994
  hyper
gagcttcccactcagccgggggacccccaagcagccggcgaggcgcactgcgcacgcgcactcaggccgcggctccagccgccctccctccgcagtggggcgccccgcccccgcgccgctcagttttaaactcgcagcagacggaactcgacttaaaaataac

SEQ ID NO: 698 - DNA, 31 bp, Homo sapiens
  chr1:205400013-205400044
  hyper
taaatatgtgagtgacgcgtggggctgtttt

SEQ ID NO: 699 - DNA, 82 bp, Homo sapiens
  chr1:205400052-205400134
  hyper
acttcccctcacccctcgctccctaccccagctcaattcggctgaggctgagatgatgggagagcgccgtctgcaggatgct

SEQ ID NO: 700 - DNA, 48 bp, Homo sapiens
  chr1:205400163-205400211
  hyper
gtcctagagagcccagcgagcttgggggtggggcggaggacccccagc

SEQ ID NO: 701 - DNA, 39 bp, Homo sapiens
  chr1:205426039-205426078
  hyper
cgtgcccggcccaccccgccctccgcgccccccgacggc

SEQ ID NO: 702 - DNA, 31 bp, Homo sapiens
  chr1:205426080-205426111
  hyper
cggtcagccggcattccggagcagcgcgtcg

SEQ ID NO: 703 - DNA, 31 bp, Homo sapiens
  chr1:205743848-205743879
  hyper
agaaggacccaacaaccgacagcaaatcccc

SEQ ID NO: 704 - DNA, 298 bp, Homo sapiens
  chr1:207627694-207627992
  hyper
gccctcccagagctgccggacgctcgcgggtctcggaacgcatcccgccgcgggggcttcggccgtggcatgggcgccgcgggcctgctcggggttttcttggctctcgtcgcaccgggggtcctcggtgagctgggagggggagcacggaggtggggacgcgtcccgggcagggaaagtttctgtgccgcgatgcaaagcagggggccaaaagcgagacggtgggggcagtgctcgacgcgtgtccgcctcccgctagctttgagggaccactgcaataaaccgcctggtcctgatt

SEQ ID NO: 705 - DNA, 31 bp, Homo sapiens
  chr1:207627993-207628024
  hyper
tccccactggcccctccgggagctgggacct

SEQ ID NO: 706 - DNA, 47 bp, Homo sapiens
  chr1:207628037-207628084
  hyper
ctgcgccacagaggggcgctgtctggtcggcccggtgtggctggcgg

SEQ ID NO: 707 - DNA, 94 bp, Homo sapiens
  chr1:207628102-207628196
  hyper
ctcctgccgggctccccgcccccaggattctgcaggtgctcatcgctctctggccggcggtcagcgctaccgctcgccacgggaaacctaccca

SEQ ID NO: 708 - DNA, 31 bp, Homo sapiens
  chr1:208084210-208084241
  hyper
gctgtgggcggcagtgcgtgggttgggcagg

SEQ ID NO: 709 - DNA, 306 bp, Homo sapiens
  chr1:208416771-208417077
  hyper
ggctccagtgagcctgcgatcgcgcgcacgccgcgctccagcccgcgaaagtggccgagcccacgcggggactcgcccgccgcggccaagccgggtcttctggggccgggaccccaaagaggcgggcgcgggagaagccgccacgggtgtgcgcgcctgtggggagagggcggagggcgctgccgactccgagcgcccggcccagccgccgcttacccagctcggcgacgtcggtctgtccttccgtccccgctcggtctacctcggccgccgccggctgctgagggcggcgcgaggcccctctcc

SEQ ID NO: 710 - DNA, 31 bp, Homo sapiens
  chr1:208417126-208417157
  hyper
aattcattaaaatccacgtcaagccaccaga

SEQ ID NO: 711 - DNA, 42 bp, Homo sapiens
  chr1:208417260-208417302
  hyper
agggggcacccggaggcgccgagggggcgtgtgggggcggcc

SEQ ID NO: 712 - DNA, 31 bp, Homo sapiens
  chr1:208418635-208418666
  hyper
cacggctttccggaagcggcctgcaagctgg

SEQ ID NO: 713 - DNA, 31 bp, Homo sapiens
  chr1:208418805-208418836
  hyper
acaacaaaaatcactgcgaatacctaaaagc

SEQ ID NO: 714 - DNA, 37 bp, Homo sapiens
  chr1:210405962-210405999
  hyper
gcagcctgaggagcggcggcggcggcctgagcagagg

SEQ ID NO: 715 - DNA, 31 bp, Homo sapiens
  chr1:210407058-210407089
  hyper
ggccctagcaactttccgagtgcccagctgt

SEQ ID NO: 716 - DNA, 31 bp, Homo sapiens
  chr1:210502487-210502518
  hyper
gatgctgaattttctgcgtcagtttactctg

SEQ ID NO: 717 - DNA, 341 bp, Homo sapiens
  chr1:212003415-212003756
  hyper
aggggcagagaagaggcgaccgcagcgcggggagccggtggagcctgcagcggtttccgcggatgtggaagggtcgtggcggcgggcgcggcccgcgcgccgggctcacctcggcgggcgcggacggcgggcggctgcggagagcgggggcgggtgtcccccgccgaggggtcgcggtcatggacgcggtggcggcccaagcggcccgaggcgctgcgcgagcgggcgcgctggcgccctactcccctcgcggctgcctgcggacagagggacggcggggactcagaggccggacctgtcacccgggcgggtcccggggaggcgggcggatgccccgcgcc

SEQ ID NO: 718 - DNA, 62 bp, Homo sapiens
  chr1:212003805-212003867
  hyper
cgcctccccgggccacgcgacgacgacacccccttccccgcccccagcgcctcccctggccc

SEQ ID NO: 719 - DNA, 196 bp, Homo sapiens
  chr1:212003876-212004072
  hyper
gccgctctggggcctgcgaccgcggagccggaggttacctcgggctggccgggccccagccggggctttgggagtcagaggagccggaagaatgcatggccggcggcggggccggcggaagaaggcggtggcggggccctgccccgctccggctgtggcgcggcccgcgcccgttccccggcggcgccgagactcg

SEQ ID NO: 720 - DNA, 42 bp, Homo sapiens
  chr1:212004141-212004183
  hyper
gggactgcggcggagccgctcccacagcgccctctaatgaaa

SEQ ID NO: 721 - DNA, 123 bp, Homo sapiens
  chr1:212873600-212873723
  hyper
ggtcggtgttttttcccggtcccatcgcggcatcttcctgcgcctcagccacgccctgcgtccgccccccggcgcgggggtcacagtcccgggggactttctccgcggcgatcagtcatccgg

SEQ ID NO: 722 - DNA, 82 bp, Homo sapiens
  chr1:212873750-212873832
  hyper
cgaagccgcggctctggggtgaagacgccggcttcaccgagtcccaccgcgcaccccgagccacgggcgccccagggactct

SEQ ID NO: 723 - DNA, 45 bp, Homo sapiens
  chr1:212873837-212873882
  hyper
gagtgcctgcccttcccgtctcgggtccgccgggctgtgggaggg

SEQ ID NO: 724 - DNA, 49 bp, Homo sapiens
  chr1:212874012-212874061
  hyper
tttggggatctggacccgccatgccacggttaaacggcccagatcattt

SEQ ID NO: 725 - DNA, 31 bp, Homo sapiens
  chr1:212874068-212874099
  hyper
tcaagatttatctgctcgtgccaagctgggg

SEQ ID NO: 726 - DNA, 51 bp, Homo sapiens
  chr1:212874215-212874266
  hyper
tgcatgctgtgagcaccgggaaagataaccgcgattcgggatgggcgggtg

SEQ ID NO: 727 - DNA, 31 bp, Homo sapiens
  chr1:214387628-214387659
  hyper
ttctccttcctcaaagcgagctccagagtag

SEQ ID NO: 728 - DNA, 41 bp, Homo sapiens
  chr1:214724404-214724445
  hyper
gtcccggggcgccaatcgcaagttggcgttgccagcgtctg

SEQ ID NO: 729 - DNA, 114 bp, Homo sapiens
  chr1:214724447-214724561
  hyper
caagtcatctgcagggcgcccggagcgccaaggcggcctccaacctcgggcccaactcccggcttggacggggcttacctgcttacatggcccccgtggcgccccggagtcccg

SEQ ID NO: 730 - DNA, 52 bp, Homo sapiens
  chr1:214725017-214725069
  hyper
tgcgagtgggaggggacggagcaggcgccggcggccacggctcccccacccc

SEQ ID NO: 731 - DNA, 54 bp, Homo sapiens
  chr1:214725080-214725134
  hyper
ccgcggccctgggggccgggaggcggagggagcgctgggcgcgcggccgggggc

SEQ ID NO: 732 - DNA, 31 bp, Homo sapiens
  chr1:214725530-214725561
  hyper
aggaacttgctcaccccgacctacattcaga

SEQ ID NO: 733 - DNA, 149 bp, Homo sapiens
  chr1:215740889-215741038
  hyper
agccccgtgcaccccccgccctccggccgccgccgccccgctggccctgcagccgtcgccgctgcctcgggctacagccccgggctcggcggtcccggctggggaaggagggcggcgagcgcgtccggagccgccggagatggcgggag

SEQ ID NO: 734 - DNA, 27 bp, Homo sapiens
  chr1:215744974-215745001
  hyper
tttttttttttttttccgagacggagt

SEQ ID NO: 735 - DNA, 129 bp, Homo sapiens
  chr1:219347093-219347222
  hyper
aaagctcctcagagagcgggccagcagcgctgcgcatgcgcgctcccgggcgtgctcccgcgcgtgcctgcgtatttgcgtgcgcggccccgcgcggcaacgcaggggcggaaccgcatgactggcagt

SEQ ID NO: 736 - DNA, 31 bp, Homo sapiens
  chr1:219347229-219347260
  hyper
gcgatggcggctgcgtcggggtcggttctgc

SEQ ID NO: 737 - DNA, 49 bp, Homo sapiens
  chr1:219347343-219347392
  hyper
ctggttttctacagctcgggaaacatcctcccctcggttaccccagtat

SEQ ID NO: 738 - DNA, 34 bp, Homo sapiens
  chr1:219347393-219347427
  hyper
gcccaagtggaggtgtcgccgggcccaaataggg

SEQ ID NO: 739 - DNA, 87 bp, Homo sapiens
  chr1:219347429-219347516
  hyper
cagtgggtggctcccccgtcgccagccccggctgtagatgcacgggcagcgccacctgcccccagcctcccccgttagtcttcctct

SEQ ID NO: 740 - DNA, 45 bp, Homo sapiens
  chr1:220863575-220863620
  hyper
gcctggtaggccagttcggagcggagccaacgctatcccgggccc

SEQ ID NO: 741 - DNA, 40 bp, Homo sapiens
  chr1:220863639-220863679
  hyper
ggcccccccaatcccccgccccgtccgggctggggcggag

SEQ ID NO: 742 - DNA, 65 bp, Homo sapiens
  chr1:221914260-221914325
  hyper
atgcacatagcaaagacgccaaaccccacgccaagagacgctcacctaaacgaactttaagagct

SEQ ID NO: 743 - DNA, 75 bp, Homo sapiens
  chr1:221914334-221914409
  hyper
aatgccatctatcatccgtctacacacgaccgtcaccattctcatccgtctacacacgaccgtcaccattctctg

SEQ ID NO: 744 - DNA, 74 bp, Homo sapiens
  chr1:221914416-221914490
  hyper
accaaagtgtcacaggcggaatccacactcacgcgcgcacacggggcacgcacccatcacgtcggcagatctcc

SEQ ID NO: 745 - DNA, 93 bp, Homo sapiens
  chr1:223307233-223307326
  hyper
cggccggagagtcgagcggggcgcggggagctgcaagcgtccctgagctgagctccgctgggaagttcctatcgcttgcgcagtagagtgcat

SEQ ID NO: 746 - DNA, 38 bp, Homo sapiens
  chr1:223674887-223674925
  hyper
agaggacctacttagccgggacacggagctccatgacc

SEQ ID NO: 747 - DNA, 46 bp, Homo sapiens
  chr1:223899910-223899956
  hyper
ccctctgctaactccccgggtgttttccggacggccacaactatcc

SEQ ID NO: 748 - DNA, 339 bp, Homo sapiens
  chr1:223899974-223900313
  hyper
gctgcaaaggtggcctcgggttccggtgggagccccaactctggaccgcgattcgcgagcctccccggcgccgggccgcgccatcccgggagctgtccgcagatggcagcaccggccccgggtcgcggcgttcccggcgctcggcaggccgcaggatggcctggtcccgggccgggagcccagcaggccgggagcggctgaggccacaccccgcgggccgggccgcttccctccggtgaatcatcgctcgcagcggcggcgcccgcagtggccgcagcagcgcgccgggccctggccgcgccccagccgagcgcagcgcggagtcgccccgacctttct

SEQ ID NO: 749 - DNA, 102 bp, Homo sapiens
  chr1:223900421-223900523
  hyper
acctcaaccaggactacgaggcgctgcggaacgagtgcctggaggccgggacgctcttccaggacccgtccttcccggccatcccctcggccctgggcttca

SEQ ID NO: 750 - DNA, 63 bp, Homo sapiens
  chr1:223900623-223900686
  hyper
agggcggggtgcaggccggcccgcggcgcgctggggcggggggcagcccgggtgctgcagtgg

SEQ ID NO: 751 - DNA, 140 bp, Homo sapiens
  chr1:223936579-223936719
  hyper
tccaagtgcaagaaagcgcagccctgagcctcccaccccaggcctcggccgctgcgctagtgcgtccggcggtcccgcccggcagtaggacagagggagcgagggagtccgggaggaagggagagcgggtgcggccagtc

SEQ ID NO: 752 - DNA, 62 bp, Homo sapiens
  chr1:223936995-223937057
  hyper
cgggcgccgggtgcgccgcgctgccacctggtggccgcagtggccggcgccaggggccctgg

SEQ ID NO: 753 - DNA, 31 bp, Homo sapiens
  chr1:223937167-223937198
  hyper
ctttctcttttgatctcgtaaaagtattcgt

SEQ ID NO: 754 - DNA, 31 bp, Homo sapiens
  chr1:224481115-224481146
  hyper
cttcctgagatagtctcgcttatgaagttat

SEQ ID NO: 755 - DNA, 35 bp, Homo sapiens
  chr1:224622765-224622800
  hyper
agccgccctccgaagccgggcgtgcatgggatggc

SEQ ID NO: 756 - DNA, 97 bp, Homo sapiens
  chr1:224691179-224691276
  hyper
gcaggaggagggctgtcgctgctgtctgcaaccccaccgggcctcccagagccgaggtgacagcctgggcctcggggaagcccgtgtctcatgggcg

SEQ ID NO: 757 - DNA, 31 bp, Homo sapiens
  chr1:224691399-224691430
  hyper
caggagaggcagcaggcgacttccctattga

SEQ ID NO: 758 - DNA, 31 bp, Homo sapiens
  chr1:225841440-225841471
  hyper
gaatcggggggcatcccggtcagcccaactg

SEQ ID NO: 759 - DNA, 51 bp, Homo sapiens
  chr1:225998106-225998157
  hyper
ctcgcagggaattccgcgtcccagactgtgggcggacgccgcagggaggga

SEQ ID NO: 760 - DNA, 40 bp, Homo sapiens
  chr1:226297511-226297551
  hyper
cctgcccagggaatcccgggagatgcgaatatcgaagaac

SEQ ID NO: 761 - DNA, 47 bp, Homo sapiens
  chr1:226411600-226411647
  hyper
tgcgccccccaaaggcgcggccgccccgtcggcgtcgcagcgccgca

SEQ ID NO: 762 - DNA, 35 bp, Homo sapiens
  chr1:226814314-226814349
  hyper
caccttgtaatgcacccgaccgtccagaagggggc

SEQ ID NO: 763 - DNA, 15 bp, Homo sapiens
  chr1:226924814-226924829
  hyper
tgccaccacctgctg

SEQ ID NO: 764 - DNA, 169 bp, Homo sapiens
  chr1:226924900-226925069
  hyper
cgctgctactattcagcctgcgccggccgctccgccagcccccggggctccggggctcctcgggggacagcgactcggctggggggaagaggaaagaggcgcctctcccggggctgaaaacgctgccggggctcagcactgccctcctcgggggcgggggcgtctcgct

SEQ ID NO: 765 - DNA, 220 bp, Homo sapiens
  chr1:226925156-226925376
  hyper
catagtactgggtcccgcgctgcccgccgccgcggctcccgctcctgctccgccgccggcgcctcctcctcccggcgctcccggctcagccccggaggcccggcagccgcggctccgcgcgcagatggggcggcatggcctgggcagcgggctgggggcacgaccgcgggctcagcccccgcccaaagctccataaacaaccgtgcggctgtggagatac

SEQ ID NO: 766 - DNA, 225 bp, Homo sapiens
  chr1:226925389-226925614
  hyper
aggaccctggagggcgcgcggggggagttgggggtcgcctgcagaacccagagagagccccgggaacacaatctatccgggacccagcgccaccggacatctcacctatggggacggcgaggctcggcgagggcatgccccggctgcctcggtcgccagcgcggtttcgggtgtgcttccccgccccccacctcgccccaggctgcgatgcgctttatgaggtcc

SEQ ID NO: 767 - DNA, 37 bp, Homo sapiens
  chr1:226925621-226925658
  hyper
tcccaatcctaatactcgtctcgcggaccggcgagaa

SEQ ID NO: 768 - DNA, 34 bp, Homo sapiens
  chr1:227058122-227058156
  hyper
ggtcgtcgcttagttccgacgtcgggatgaccct

SEQ ID NO: 769 - DNA, 97 bp, Homo sapiens
  chr1:227505581-227505678
  hyper
tcagtcctattttcaacggattccggtgaaaactcttcattttcctcccggcttcaccctagggcctgaccggcggcgcggccgggggtggaaggcg

SEQ ID NO: 770 - DNA, 43 bp, Homo sapiens
  chr1:227505825-227505868
  hyper
ccgcgccggaggctcccgacgccccaggcgggggggtgcttct

SEQ ID NO: 771 - DNA, 46 bp, Homo sapiens
  chr1:227505884-227505930
  hyper
caagcagcagcagctgcggcggcggcgcgggcggctctggcagcta

SEQ ID NO: 772 - DNA, 38 bp, Homo sapiens
  chr1:227505973-227506011
  hyper
acagcgaggagggaggcggcccggcgcaggaggagggg

SEQ ID NO: 773 - DNA, 23 bp, Homo sapiens
  chr1:227506042-227506065
  hyper
cggcagcccggctcccaaccact

SEQ ID NO: 774 - DNA, 55 bp, Homo sapiens
  chr1:227506076-227506131
  hyper
ccttccagccctcccccgccttccctctcctctcgcgctcgcgccctgggctcag

SEQ ID NO: 775 - DNA, 244 bp, Homo sapiens
  chr1:227506132-227506376
  hyper
gaggctcctccagtcccgccgcacagaggcggaggcttgcggacgagtctggatccaatatggcggcctggccccccggccccggcacacgcgcgcgcacacgccctccactccccgcccccgccctgcccgagcctcagccccagccggcggccaagccgggcggggtccggccggcgcgcccagcggaggcccccaagggggcgcgggctcggggcccgagtggctgcgccagcccgagggg

SEQ ID NO: 776 - DNA, 31 bp, Homo sapiens
  chr1:228444739-228444770
  hyper
ccatgccctcacttcccggtttcataccctt

SEQ ID NO: 777 - DNA, 31 bp, Homo sapiens
  chr1:228870692-228870723
  hyper
atgagaaaaaatcacacgatcagctgcagtt

SEQ ID NO: 778 - DNA, 31 bp, Homo sapiens
  chr1:228870878-228870909
  hyper
agaaagcggaacctcccgggccagtcgcgcg

SEQ ID NO: 779 - DNA, 48 bp, Homo sapiens
  chr1:228871131-228871179
  hyper
gccgctcggccagacccgcctcttttccctccccgccagcccgcccgc

SEQ ID NO: 780 - DNA, 46 bp, Homo sapiens
  chr1:228871325-228871371
  hyper
gcctttgtctactggccgtgcggcccggaaccgccactctccaggg

SEQ ID NO: 781 - DNA, 52 bp, Homo sapiens
  chr1:232765434-232765486
  hyper
tacaagccggaccctgcgccgcgaccctcgcacccccgcgcccctcgcaccc

SEQ ID NO: 782 - DNA, 42 bp, Homo sapiens
  chr1:232765494-232765536
  hyper
cgtcagccccccaaagcgccccgaagggcatccccttcccct

SEQ ID NO: 783 - DNA, 82 bp, Homo sapiens
  chr1:232765595-232765677
  hyper
cggattccccgacacgaaccttcgcaacgccgtccgccggaacctgctacagcctgtgcgcgccgggcggcgcgtacccggg

SEQ ID NO: 784 - DNA, 96 bp, Homo sapiens
  chr1:232765940-232766036
  hyper
gcgggctcccattggtcgctgcctgcaggccccctcggccccgccccacgattgggcgcggacgccgtcagtctcaccgtccgcccggctccgggc

SEQ ID NO: 785 - DNA, 31 bp, Homo sapiens
  chr1:232766315-232766346
  hyper
ccaacttgggacagacgcggcggccgggcgg

SEQ ID NO: 786 - DNA, 15 bp, Homo sapiens
  chr1:233749715-233749730
  hyper
gaaggaagaaaaaca

SEQ ID NO: 787 - DNA, 28 bp, Homo sapiens
  chr1:233749768-233749796
  hyper
cggaggagcggggcgggcgggcgcgcgg

SEQ ID NO: 788 - DNA, 96 bp, Homo sapiens
  chr1:233749825-233749921
  hyper
cgggcgggggcgggggcggcggggccagaagaggcggcgggccgcgctccggccggtctgcggcgttggccttggcggcggcggtggagaagatgc

SEQ ID NO: 789 - DNA, 86 bp, Homo sapiens
  chr1:233750270-233750356
  hyper
aggtagggtatcctgcgcgccccctggccgccccggccacctcgcccacaacccacacaccccggccccggcgccccgggcccctc

SEQ ID NO: 790 - DNA, 148 bp, Homo sapiens
  chr1:233750411-233750559
  hyper
cccctcactgtcctcccgaccctccgaccttccccttactggcgtccccggcctctgcctgggtgactcgggagggcaagccctgcggagccggaagccagagaggtgactccagacgtgacttggttgttgccgtccgtaactctgg

SEQ ID NO: 791 - DNA, 26 bp, Homo sapiens
  chr1:234828213-234828239
  hyper
gccgccatgcccggcttatttttttc

SEQ ID NO: 792 - DNA, 51 bp, Homo sapiens
  chr1:234828256-234828307
  hyper
ctcccccaagttaatacgatcaatgcaattccagttcgaagcctagcaaga

SEQ ID NO: 793 - DNA, 36 bp, Homo sapiens
  chr1:235257346-235257382
  hyper
agaaggcgctgagaggcgggccgagcagcatgagtt

SEQ ID NO: 794 - DNA, 31 bp, Homo sapiens
  chr1:243418478-243418509
  hyper
ccggggccctcagctccgctgggcaataacg

SEQ ID NO: 795 - DNA, 58 bp, Homo sapiens
  chr1:244013023-244013081
  hyper
gacggtaccgctaggccgggaacacccctcccccggcccgctgcgcaccgccgccccc

SEQ ID NO: 796 - DNA, 195 bp, Homo sapiens
  chr1:246887363-246887558
  hyper
gcagggctagaagatgcgctgcccggggcggccagagccctgcagaacaaaccgccgcacggaattaggggccgccgtccgcgcctgccaggcttggaagcggactcgcccccagggccaccgccctaggaaacctcccgtcggaagcctcccaagcaagccgctcacccgcggctcccgcgcgaggcggcgtgg

SEQ ID NO: 797 - DNA, 62 bp, Homo sapiens
  chr2:45821-45883
  hyper
ctctggcccagggggcgcggccgggacactggagggcgccgcggaccgcgcggctggggctg

SEQ ID NO: 798 - DNA, 43 bp, Homo sapiens
  chr2:46407-46450
  hyper
ggggttccgggtccagcggagacgcgctcgagtggtagagcca

SEQ ID NO: 799 - DNA, 49 bp, Homo sapiens
  chr2:46558-46607
  hyper
gaaactccccagttcccgcccctcccgacctcatcgcccacaccgactg

SEQ ID NO: 800 - DNA, 31 bp, Homo sapiens
  chr2:46629-46660
  hyper
gtgccccggccctggccgcgtccccgcatcc

SEQ ID NO: 801 - DNA, 57 bp, Homo sapiens
  chr2:46739-46796
  hyper
gccctcacctcgcgtccggggtcccggccctcacctcctgcccggtgccgtccccgc

SEQ ID NO: 802 - DNA, 73 bp, Homo sapiens
  chr2:46810-46883
  hyper
cggcggcgctgccaaccgcctggaggacgctggggcgagcaggctctgaacccccactcgctcagccccagat

SEQ ID NO: 803 - DNA, 31 bp, Homo sapiens
  chr2:46981-47012
  hyper
cttaaagtgacctcatcgtgtttggaaactt

SEQ ID NO: 804 - DNA, 31 bp, Homo sapiens
  chr2:288831-288862
  hyper
tcttcgtcagtccccccgcctcacctcgctc

SEQ ID NO: 805 - DNA, 116 bp, Homo sapiens
  chr2:3465148-3465264
  hyper
ggggccgctgcctttgcgcttctgcgtctacgtcaggctggacgcacaaggagactcggcgtcctgttcatcctcggtagcaagcgaccgtgacgcagcctcgcactactgcaagc

SEQ ID NO: 806 - DNA, 38 bp, Homo sapiens
  chr2:7005629-7005667
  hyper
cagcagcgccgccaggcgggggtcgggggcgtctgcgt

SEQ ID NO: 807 - DNA, 182 bp, Homo sapiens
  chr2:7005741-7005923
  hyper
ggagccatggccccagcgcagaccccgcgccgcccgagcagcggccccgacagtggcccgcgcaggagccggcgggcgaaggccatgggcgcctcagcgacgccgccctcggccccgcctcggaaacgaaacctggcgggagccaggcgccggcgggaaacgaaacccggagggagccaggc

SEQ ID NO: 808 - DNA, 263 bp, Homo sapiens
  chr2:7005935-7006198
  hyper
cgaaagcgaagcgttgcggggaaacgaaagccggaggcccaggcggggcaggagccctggggctggggcgcccttccggcctctcctcctcgccgcgagatgtgcgcgataaacggccggcgctcgggagcagacgcttggccccggggccccaggtgcgcggctccgcgggcctgcgcggtccccaggcgccggctcccggggctgacaccgaatgaggccccgcgccgtcggccccaaggtagctccgtgtgcgttctgcg

SEQ ID NO: 809 - DNA, 42 bp, Homo sapiens
  chr2:8818538-8818580
  hyper
caggatcaaagccattcggcgagaaaccgaaataatccaaag

SEQ ID NO: 810 - DNA, 442 bp, Homo sapiens
  chr2:8818828-8819270
  hyper
ccttttcttttcttctcggtcctctttccttccccaaatcactcgaaacttaagacgtgcagcgtctgcaggtgcgcgcgggccggcggccgggcctgggcgagcctgggactgccgggcctcgcaggcattgatcagctgggcgcgcgcgctgagtgacggcgcggttgccatggcagccgcctgagcggcgccgcgaggacaaggctgcagggcggcgtgaatgggcggcgtcacgcgcctggcgccagagagtctgctccggggctccggctccggccccgccgcggcctggcccgcgcgccgccgccgccgccaccgccgccgccaattcatcacctgtcagggatcactcgcggggtcacgggcggaatggacacagctgtgagaacaaaacccgggaaagaaaggcgaacgctccccattgcgccagatgtgcagg

SEQ ID NO: 811 - DNA, 31 bp, Homo sapiens
  chr2:8821591-8821622
  hyper
cctcacgctctccctccgatgggttgcagtg

SEQ ID NO: 812 - DNA, 31 bp, Homo sapiens
  chr2:8821625-8821656
  hyper
tgtggcttcccccctgcggtgctgaactcgc

SEQ ID NO: 813 - DNA, 277 bp, Homo sapiens
  chr2:8821975-8822252
  hyper
caccccagctgggctcgcgccccgcccaccccgcggggattggctgcgaacgcggaagaaccaagcccacgccccgcgcccgcgcccaccaatggaagcgcccgctcgtcttgatagacgtgccaccttccgccaatggggacgaagggaagctccagcgtgtggccccggcgagtgcggataaaagccgccccgccgggctcgggcttcattctgagccgagcccggtgccaagcgcagctagctcagcaggcggcagcggcggcctgagcttcag

SEQ ID NO: 814 - DNA, 146 bp, Homo sapiens
  chr2:8822253-8822399
  hyper
gcagccagctccctcccggtctcgccttccctcgcggtcagcatgaaagccttcagtcccgtgaggtccgttaggaaaaacagcctgtcggaccacagcctgggcatctcccggagcaaaacccctgtggacgacccgatgagcct

SEQ ID NO: 815 - DNA, 61 bp, Homo sapiens
  chr2:8822479-8822540
  hyper
tggaaatcctgcagcacgtcatcgactacatcttggacctgcagatcgccctggactcgca

SEQ ID NO: 816 - DNA, 31 bp, Homo sapiens
  chr2:8822640-8822671
  hyper
caggtaagacctgctccggggtccccgcccc

SEQ ID NO: 817 - DNA, 44 bp, Homo sapiens
  chr2:8825799-8825843
  hyper
acgccggccgcacgctcgccccccagccacggggacccgcgcgt

SEQ ID NO: 818 - DNA, 31 bp, Homo sapiens
  chr2:9143657-9143688
  hyper
cctcggggtacctggtcgatgggcagctgca

SEQ ID NO: 819 - DNA, 45 bp, Homo sapiens
  chr2:9144127-9144172
  hyper
gcagccaatcagagagcgccggccgcgccacgcccctcccccgtg

SEQ ID NO: 820 - DNA, 34 bp, Homo sapiens
  chr2:9346367-9346401
  hyper
ctgtctcctaggcctgcgacgatgcaatgactgc

SEQ ID NO: 821 - DNA, 39 bp, Homo sapiens
  chr2:9346514-9346553
  hyper
tcctcatgggccggcgcggcccgccgttcaagtggggag

SEQ ID NO: 822 - DNA, 111 bp, Homo sapiens
  chr2:9346710-9346821
  hyper
gaacgccgagacaatgcggcgcgcggcggccaggaacggctcggcgggccggggcgcgcgccgccttccttcctgcgggatccgcttcccggcggcgcggcagcggcgagc

SEQ ID NO: 823 - DNA, 388 bp, Homo sapiens
  chr2:9346877-9347265
  hyper
gcccccggcccggacccgcccctctccgcgggaggcgtcggggcccgcggctgggtggcgggtagttcccgccggctgtgcgcgcccgcctcggggctcgctctgagaggacgcggcggcagcggactcggagccctcggcgcgcaggcgggcggaccggccgagctgcgcggggctgcgcgccgcccctgctccgccgccaggccccgcgcggctcccgcgcccggcgctcccctttgtccgcgggccggagcggcggcggcagcggcggtgtccgagcggcggtcggagcctgctgcggcagttgaggcggcggcgcccctgcggctgtgcgccagcgccctcgcgccgaggcgatgccggaccagatctccgtgtcggaattcgt

SEQ ID NO: 824 - DNA, 66 bp, Homo sapiens
  chr2:9347472-9347538
  hyper
ccgggccaaccctgcccgagacagaagccctttgttcccgcctaggtggctcggaggagatgggtg

SEQ ID NO: 825 - DNA, 37 bp, Homo sapiens
  chr2:9347559-9347596
  hyper
aagacctcccctctctcggcctcgtggccctcgcggg

SEQ ID NO: 826 - DNA, 213 bp, Homo sapiens
  chr2:9347603-9347816
  hyper
ggcctggtcttttccccgcagcgcggccaactttgtccagagtcggggtccgcggcgagcgggggatcccgctgcccgccgccgcccgccgccgcccggggtctttggtacccggtgcggaccttatcaacttgttcttgaagtggaccggcgggggcagctccgcgctccgagctccccgccgcagcccccgagcgccgcagggcccccacc

SEQ ID NO: 827 - DNA, 80 bp, Homo sapiens
  chr2:10092150-10092230
  hyper
tgccgtgctctttgttcggtcggagcctcgggaggagagaccctgtcctcggggaaactcgacaccggaggggccaccct

SEQ ID NO: 828 - DNA, 47 bp, Homo sapiens
  chr2:10092315-10092362
  hyper
gtcggggcgcagccaacgcccccgggcctccccgcccccctctcctg

SEQ ID NO: 829 - DNA, 40 bp, Homo sapiens
  chr2:10092377-10092417
  hyper
gagcctggtggggctcgcgccgcgtcgggacaggtggact

SEQ ID NO: 830 - DNA, 41 bp, Homo sapiens
  chr2:10092428-10092469
  hyper
tctgtggtctcaggctcgtcactcggcgacctgctggaacc

SEQ ID NO: 831 - DNA, 54 bp, Homo sapiens
  chr2:10151689-10151743
  hyper
acgggcgggtcaggtggacagtattggcgtgcgtacgggcgggtcagatggaca

SEQ ID NO: 832 - DNA, 25 bp, Homo sapiens
  chr2:10151850-10151875
  hyper
gggtcaggtggacaggcgtgcgtac

SEQ ID NO: 833 - DNA, 56 bp, Homo sapiens
  chr2:10152417-10152473
  hyper
tgtgcgtatgagtgtgcgtatgggcgagtcaggtgggcagacgtgcatatgagtgt

SEQ ID NO: 834 - DNA, 80 bp, Homo sapiens
  chr2:10152482-10152562
  hyper
tgattcaggtggacacgcgtgggtatgggtggctcacgtggacaggcgtgcgtgtcagcgtgtcacgtggacaggcgtgt

SEQ ID NO: 835 - DNA, 71 bp, Homo sapiens
  chr2:10183603-10183674
  hyper
gcggtgtattttggttcgcctccgcgccccgccccgccagccgctccctccgcggccgccccgcccctccc

SEQ ID NO: 836 - DNA, 39 bp, Homo sapiens
  chr2:10183763-10183802
  hyper
gcccgcagcccacgtgcggccgctgctgcgcccgagctc

SEQ ID NO: 837 - DNA, 43 bp, Homo sapiens
  chr2:10183844-10183887
  hyper
tgcacacgccggacttcgcaggcccagacgacgcgcgcgcagt

SEQ ID NO: 838 - DNA, 236 bp, Homo sapiens
  chr2:10183982-10184218
  hyper
ggggcgtgcagggcttcgctgcggccgcgccggtaggggcctgggcgggctccggagccgggcggggcggcggccgcgacgggcgcgcccgggtcggcgggggcgaggagggggcgtgttccccgcgcagctttgtcttgcgcttcctgggcggccccgccccgctggccccgcggctatttccagccatgacgtcaccccggtcctgtgagccggacggccgttgggcgggggag

SEQ ID NO: 839 - DNA, 31 bp, Homo sapiens
  chr2:10184236-10184267
  hyper
cacgcggccttgggggcggggcaagagctgc

SEQ ID NO: 840 - DNA, 69 bp, Homo sapiens
  chr2:10220785-10220854
  hyper
tgttcatttatggaaacgctccccagacgacgctcgccgggcccgtgggaggccgcgggagcttggggg

SEQ ID NO: 841 - DNA, 76 bp, Homo sapiens
  chr2:10220864-10220940
  hyper
agcctgagccccctagcgatgcgcggggtgggcgggggaaagaccctgagggctgcgcgcgctgcgttcgcgaggt

SEQ ID NO: 842 - DNA, 44 bp, Homo sapiens
  chr2:10220958-10221002
  hyper
cgacctttcagtgtccgccaggcctgagacgccccgggagggaa

SEQ ID NO: 843 - DNA, 37 bp, Homo sapiens
  chr2:10589000-10589037
  hyper
gacctggaagtgatcccggtgccgctctgctcccacc

SEQ ID NO: 844 - DNA, 31 bp, Homo sapiens
  chr2:10589038-10589069
  hyper
gctagggagcagaggcgcgggagggaagggg

SEQ ID NO: 845 - DNA, 73 bp, Homo sapiens
  chr2:10589095-10589168
  hyper
gggcagggctggcagccgcctccacgcccccgcgctggaagcctcgtctttgtaacatcgaggtatcctgtaa

SEQ ID NO: 846 - DNA, 31 bp, Homo sapiens
  chr2:10589171-10589202
  hyper
gatgggtcctggcctgcggaggtagtttccc

SEQ ID NO: 847 - DNA, 85 bp, Homo sapiens
  chr2:10589213-10589298
  hyper
gggactcagccaggagcgtgaggggacccggatcctgagtctccaagccgcccactaccctctgctttaccggatggaactcatc

SEQ ID NO: 848 - DNA, 31 bp, Homo sapiens
  chr2:14774643-14774674
  hyper
tggtaccgctaccgcccgctggtggccgagc

SEQ ID NO: 849 - DNA, 31 bp, Homo sapiens
  chr2:16079904-16079935
  hyper
agacctgcggagtggccgcactccaggtccg

SEQ ID NO: 850 - DNA, 31 bp, Homo sapiens
  chr2:16079966-16079997
  hyper
agtctccgcgaggtgtcgccttcggccgaag

SEQ ID NO: 851 - DNA, 38 bp, Homo sapiens
  chr2:16080353-16080391
  hyper
gggtgctgcattgcaccgctccgcgcgcagctggttct

SEQ ID NO: 852 - DNA, 31 bp, Homo sapiens
  chr2:16080605-16080636
  hyper
ttctctccccgccccccgggtgtgtcagatt

SEQ ID NO: 853 - DNA, 93 bp, Homo sapiens
  chr2:16080681-16080774
  hyper
agtcatctgtctggacgcgctgggtggatgcggggggctcctgggaactgtgttggagccgagcaagcgctagccaggcgcaagcgcgcacag

SEQ ID NO: 854 - DNA, 16 bp, Homo sapiens
  chr2:19551499-19551515
  hyper
cgcggtccctagggca

SEQ ID NO: 855 - DNA, 49 bp, Homo sapiens
  chr2:19551540-19551589
  hyper
acacttttgcaggctccgggggtgggggcaggggcgggaggaggaggtg

SEQ ID NO: 856 - DNA, 60 bp, Homo sapiens
  chr2:19551596-19551656
  hyper
ccagtgctaaggacttcgttgcctctcctctctccactcactctccgcagtcagagttac

SEQ ID NO: 857 - DNA, 25 bp, Homo sapiens
  chr2:19556980-19557005
  hyper
cgccgccggtcgctgctagtcccct

SEQ ID NO: 858 - DNA, 98 bp, Homo sapiens
  chr2:20212144-20212242
  hyper
cgtccctcccgccgcccgcctgtacctgcaccgcgggcgcggccaggctcgctggtcccggaagcgggcgcgccgtcgggagccgcaggagaggggcg

SEQ ID NO: 859 - DNA, 77 bp, Homo sapiens
  chr2:20212297-20212374
  hyper
gccacggggtcgggggcggcggagggcagcagcagcagcggccagagcagcaggaggagtcccgggaggcggcgcgc

SEQ ID NO: 860 - DNA, 41 bp, Homo sapiens
  chr2:20424155-20424196
  hyper
gggtctgcagggggggcgttgtggccgcggtcactgcatcc

SEQ ID NO: 861 - DNA, 255 bp, Homo sapiens
  chr2:20424604-20424859
  hyper
gagccagagcgccgcgcgcctcatgctgcccggaccggcggcgggagagcggcaggctgcgcgggtcgcggctgcgggccggcttcgcgggttccgctgctcgatgctctcttgggcgcctgcccagcgcgccgctgtcccaggcgagggctgcagggtccgccggctggagtccgctctctactgccggattcctctccgctcggctcggattcggcccgcacctctcccgccgagctccgccttataataaac

SEQ ID NO: 862 - DNA, 31 bp, Homo sapiens
  chr2:20424862-20424893
  hyper
caggcccttccttagccgttgcaaaaactgg

SEQ ID NO: 863 - DNA, 42 bp, Homo sapiens
  chr2:20646412-20646454
  hyper
ccctcccccacaggcccgaccacccgccgggagtttgccagg

SEQ ID NO: 864 - DNA, 71 bp, Homo sapiens
  chr2:20646463-20646534
  hyper
aattctgaatgggagtcgccaacgccccactgagtgaagcctgtctcggaaccgctcgcccagaccctgga

SEQ ID NO: 865 - DNA, 235 bp, Homo sapiens
  chr2:20646538-20646773
  hyper
ccagacagccagctcccggaccccgcgcgcaaacgctgcggcgaaggaggggacccgggtaccgccagagccccgcagcggcagcagcagcgcggactccccggtcgctgcctctcccagcccggcggcctgggccgtcaatcaagctggccctgccccgccctcgggctgcagggggcggccaatcagagctaagctccgcagcgatgagctcagccggctggtttcccattgg

SEQ ID NO: 866 - DNA, 15 bp, Homo sapiens
  chr2:20646843-20646858
  hyper
cgcagtctggttgga

SEQ ID NO: 867 - DNA, 103 bp, Homo sapiens
  chr2:20646863-20646966
  hyper
tgtcttgtatgctcagcgaggcccggagagacccgggagagagctaggccgagtccaccgcccgagtctgctgcccgagcccgcgttacgcacaaagccgccg

SEQ ID NO: 868 - DNA, 35 bp, Homo sapiens
  chr2:20646981-20647016
  hyper
tgagcagagcgaccaccgcccgggagcagcgcggc

SEQ ID NO: 869 - DNA, 84 bp, Homo sapiens
  chr2:20647037-20647121
  hyper
gcccccgcgcccccaccgcccccgccgcggcagccgaagcgcagcgagagaacgcgccaccgcggggcccgggtgcagctagcg

SEQ ID NO: 870 - DNA, 31 bp, Homo sapiens
  chr2:20647341-20647372
  hyper
tcgagaactatgtggccgacattgaggtgga

SEQ ID NO: 871 - DNA, 60 bp, Homo sapiens
  chr2:20647388-20647448
  hyper
ctggcgctgtgggacacggcgggccaggaggactacgaccgcctgcggccgctctcctac

SEQ ID NO: 872 - DNA, 46 bp, Homo sapiens
  chr2:20647497-20647543
  hyper
cgctggagaacatccccgagaagtgggtccccgaggtgaagcactt

SEQ ID NO: 873 - DNA, 72 bp, Homo sapiens
  chr2:21022608-21022680
  hyper
ccaggccaagtggctccgaactcgcgagctgtcggaacagtattatttttgctgctacgggccatctggccc

SEQ ID NO: 874 - DNA, 111 bp, Homo sapiens
  chr2:21022682-21022793
  hyper
ggcaacaggggctctgcgaggaaccatagagaagaaggggcgccagatcccgcgtgcctgcccacccgtccttcctttgggcagtcaccctgagctcggcaagctgtacct

SEQ ID NO: 875 - DNA, 146 bp, Homo sapiens
  chr2:21022801-21022947
  hyper
cacctggaaggctgcccgctctccctgagggtcctgggaaggcggcacgagaccggaagtgcccccctcaggtgacgtcacagtaccgcgccggagctgatccgggaagccgatgtcagcctggcgcgcggcgcacagctggctgg

SEQ ID NO: 876 - DNA, 31 bp, Homo sapiens
  chr2:21022954-21022985
  hyper
cttactggcttggagccggtggtccagatca

SEQ ID NO: 877 - DNA, 31 bp, Homo sapiens
  chr2:21022990-21023021
  hyper
acctcttggagggtgtcggggttttcctttc

SEQ ID NO: 878 - DNA, 31 bp, Homo sapiens
  chr2:21023025-21023056
  hyper
tcatttgaattttatccgccttttattttct

SEQ ID NO: 879 - DNA, 80 bp, Homo sapiens
  chr2:25265054-25265134
  hyper
ccgcccgggcccctgtcggccgccgccagtccccgccccgactgtgaatgaaaggcgggcgccgccgagggctggctggg

SEQ ID NO: 880 - DNA, 100 bp, Homo sapiens
  chr2:26522024-26522124
  hyper
cctagaacgttgtatacggctgataggaccaggtccaccgctgcagcaggctgtgagaggggaaggcacgttcctggctaagcagcgtccaaaactcccg

SEQ ID NO: 881 - DNA, 31 bp, Homo sapiens
  chr2:26749880-26749911
  hyper
ttagccactgttccagcgtgttcaaatcctt

SEQ ID NO: 882 - DNA, 31 bp, Homo sapiens
  chr2:27069031-27069062
  hyper
tttctcaaggtcaagtcggcagaaactgaag

SEQ ID NO: 883 - DNA, 31 bp, Homo sapiens
  chr2:27165797-27165828
  hyper
gctgatttctgttccccgtctttgattacca

SEQ ID NO: 884 - DNA, 216 bp, Homo sapiens
  chr2:27308892-27309108
  hyper
ccgcccgacgtgtctacgtcggctgaagagacagcgggggcggcgggctcctggggtctcgcctgagacggggcacctagccctgggcgagcgccgcacccgggcccgcagcggcaccgcgcccagagcggcctctccccacgcccggggcgcgccggctcagggaggctcggggccgcccatgcagacttttggcctggcgcgatcccccaagaa

SEQ ID NO: 885 - DNA, 6 bp, Homo sapiens
  chr2:27309136-27309142
  hyper
cgatcc

SEQ ID NO: 886 - DNA, 45 bp, Homo sapiens
  chr2:27309206-27309251
  hyper
cgggcgccgcccaccgccatactaaacgatcgaggaataaagaca

SEQ ID NO: 887 - DNA, 57 bp, Homo sapiens
  chr2:27309260-27309317
  hyper
tctaaaaaaaactaaacgaaccgttctgctacggtacggggtcgggggctgccgggc

SEQ ID NO: 888 - DNA, 56 bp, Homo sapiens
  chr2:27473248-27473304
  hyper
aatgcctcctttaagccggctgcaccggggccctgaccgggcgggagggctgctgg

SEQ ID NO: 889 - DNA, 77 bp, Homo sapiens
  chr2:27473306-27473383
  hyper
ggtggtgcttatcacccgggcttcctcttgaccctgccggctgggccctgggccttggccttcgcctcttaaacgtg

SEQ ID NO: 890 - DNA, 56 bp, Homo sapiens
  chr2:27484951-27485007
  hyper
ggcaggtggacggtggcggcaggcgcgggggccggcggggcgcgttggcggttctc

SEQ ID NO: 891 - DNA, 69 bp, Homo sapiens
  chr2:27485047-27485116
  hyper
tcatttcacacctcgccgcccccggccccgtctgtgcggagccgggaatacccccgctgcccagaccgc

SEQ ID NO: 892 - DNA, 98 bp, Homo sapiens
  chr2:27485132-27485230
  hyper
ccgccccctcgcttcccggcggccgcccgccccccaggggcccgcaagacccgcgcggagcccggcccatcctcgggccccggcgcccacagctggcc

SEQ ID NO: 893 - DNA, 37 bp, Homo sapiens
  chr2:27712735-27712772
  hyper
tctccttgaccaatcccgtcgccgcatgcaaactcaa

SEQ ID NO: 894 - DNA, 143 bp, Homo sapiens
  chr2:27805948-27806091
  hyper
gggtgaaattgttaggcgtggagagggagtgatgtcttccagactcggtgctgtacccgccgtgagtttcttggtttgaccgttatgctttagaggtagcgctgtcgagcccggaacacgcggtccctcgcttttgtcccatg

SEQ ID NO: 895 - DNA, 31 bp, Homo sapiens
  chr2:27806100-27806131
  hyper
ttttatcagaggccatcgtaggccccaccct

SEQ ID NO: 896 - DNA, 140 bp, Homo sapiens
  chr2:29338529-29338669
  hyper
aggtgggccgggggcgcgcggggcccccccgggccgcgggctggccggcggcggggttggggccggggtgggcggccctgggggcccgcggggaggtcagtggccccgggagggtcgcgcagaggcgctgggggctgtgg

SEQ ID NO: 897 - DNA, 31 bp, Homo sapiens
  chr2:29339031-29339062
  hyper
ttaattctgaaccatccgcacctgggagggg

SEQ ID NO: 898 - DNA, 31 bp, Homo sapiens
  chr2:30369485-30369516
  hyper
gactgactacattggccgcctcgagagaagg

SEQ ID NO: 899 - DNA, 48 bp, Homo sapiens
  chr2:30453837-30453885
  hyper
tgctcttgtttcccctcgctgatcgcaaggctgcgggcgaggattcca

SEQ ID NO: 900 - DNA, 122 bp, Homo sapiens
  chr2:30454013-30454135
  hyper
ggcgcagagcagccgccgagctgtcatgtcccgagcggcccccgcgccctccttgcgcccacctccgccgcgctggagttcggggtgtgcgtggagggggctgtgagcgggaagcggcgcgg

SEQ ID NO: 901 - DNA, 53 bp, Homo sapiens
  chr2:30454240-30454293
  hyper
gagcgcgcccccgagccgccgcccgccggagctgcgagcgctgaagccattca

SEQ ID NO: 902 - DNA, 31 bp, Homo sapiens
  chr2:30454307-30454338
  hyper
ttattccaggagtgggcgagggagggcgggg

SEQ ID NO: 903 - DNA, 37 bp, Homo sapiens
  chr2:30454340-30454377
  hyper
tctcggggccaagccccgcccccgcccctataaatac

SEQ ID NO: 904 - DNA, 119 bp, Homo sapiens
  chr2:30454474-30454593
  hyper
gcggacggcgagcgcccggtgtccgcactcggccgcctgccgtgcccgtctgcgcccgtgtcatcctcactcgggacgcagggaccgtttttaaatcacaggggcgtgtgtcagcctgc

SEQ ID NO: 905 - DNA, 58 bp, Homo sapiens
  chr2:30454626-30454684
  hyper
actggtgagtaccctgcgcctgcggcgggcgtctgtctcgcggcggtggctgcgggcc

SEQ ID NO: 906 - DNA, 63 bp, Homo sapiens
  chr2:30455402-30455465
  hyper
tgggttagaggagaagcggccgggggcgagcgccggcagccccggagcgcgctctcaggtgcg

SEQ ID NO: 907 - DNA, 73 bp, Homo sapiens
  chr2:30455595-30455668
  hyper
gcgccacagccccgagcgaggaagagccgcccctacgtcagactcttcaccctgcgtgcgctcttctggctcc

SEQ ID NO: 908 - DNA, 31 bp, Homo sapiens
  chr2:31360230-31360261
  hyper
tttttacaggctctttcgtggtgttctgggc

SEQ ID NO: 909 - DNA, 31 bp, Homo sapiens
  chr2:31360724-31360755
  hyper
cctcgccctggtttcccgggagcccgcaaac

SEQ ID NO: 910 - DNA, 49 bp, Homo sapiens
  chr2:31360816-31360865
  hyper
cgcctaccttaggggtctgcacttcaggtcccgtcggcacctccaactt

SEQ ID NO: 911 - DNA, 287 bp, Homo sapiens
  chr2:31360879-31361166
  hyper
agaagaacagcagcaccgtgatccagagcaccccgaagactggcagaaccagccgacgagtcaggcgccgcatggtcccctttgccgcttcctctccgcggcgctacgtcccgggggcaccccccggcggtcagggttggcggggcaggagtcctggcgagcgcctcgctctggggagctctagacccaggatccggttggaggggcggcaggatcctgcaaggcgcccttcccgcttcgaagagaagcgagcctgggtggggggtgcagggcgacccgaaacgtgg

SEQ ID NO: 912 - DNA, 53 bp, Homo sapiens
  chr2:31361295-31361348
  hyper
gatagggaaactgactcgagcagcgagagggaggaatccgaggctgtgccaag

SEQ ID NO: 913 - DNA, 36 bp, Homo sapiens
  chr2:31361399-31361435
  hyper
gacagacaggccgactcggagcgagcccaggtggga

SEQ ID NO: 914 - DNA, 65 bp, Homo sapiens
  chr2:31361542-31361607
  hyper
gtgggttggggcaaggcggggcggggcgggagcggtgcactcgggatgcccgccacccccagctg

SEQ ID NO: 915 - DNA, 48 bp, Homo sapiens
  chr2:31361610-31361658
  hyper
gctgggacccaagggccggccctcgccaggcggcgctgtgcctgggag

SEQ ID NO: 916 - DNA, 31 bp, Homo sapiens
  chr2:31456681-31456712
  hyper
gcaactgaaggagaggcgattcaaagcaggg

SEQ ID NO: 917 - DNA, 71 bp, Homo sapiens
  chr2:31456871-31456942
  hyper
ctgcccacaaacatggcggcgccctgcgcggcttcccgtcgccgcaaccgtggggccggccctgccttgcc

SEQ ID NO: 918 - DNA, 66 bp, Homo sapiens
  chr2:31456948-31457014
  hyper
aggggacttcctctgcgcgccggcttcctgcccagctggcatttaaaccaccgcctggggctgcag

SEQ ID NO: 919 - DNA, 31 bp, Homo sapiens
  chr2:37980872-37980903
  hyper
tatcattcccccagatcgtgtgtagagtttc

SEQ ID NO: 920 - DNA, 31 bp, Homo sapiens
  chr2:42067664-42067695
  hyper
tgcgcatggcactgtgcgaaccttaaacata

SEQ ID NO: 921 - DNA, 277 bp, Homo sapiens
  chr2:42274632-42274909
  hyper
cagtcccaggagggagcgctgagatcactcggatctccgcaccccggacttagctgctcgtcccctccggagcccgctacccgccggcctcgcccctttatctttcccccactccgcccggccggctccgttatccacctcccaatcccgttatccggccgccccggccccgttatccgccctcgcgttgggcgcggagcccccgcgcgcctcctggccgccgccgccccctcccccgctcccagacggagctcgggggaccgcgggctgggcggga

SEQ ID NO: 922 - DNA, 70 bp, Homo sapiens
  chr2:42274911-42274981
  hyper
gcgggctgggcaggaccggagccgcctccgcgccgcttcccaggcccggacggccgcgggaggaggtccc

SEQ ID NO: 923 - DNA, 35 bp, Homo sapiens
  chr2:42275167-42275202
  hyper
tgtcaggccgatgtgtcgcccgcgaggggccgggg

SEQ ID NO: 924 - DNA, 58 bp, Homo sapiens
  chr2:42275208-42275266
  hyper
ccgccggggccatgcgcgcgggctgggcagggggccggcggggcgcagagcggagccg

SEQ ID NO: 925 - DNA, 405 bp, Homo sapiens
  chr2:42275281-42275686
  hyper
cgcccggggccggggccggggagccgcgcggggccggccggccggggggaggggagcgatgcggcgccggcgggcggcagtggccgcgggtttctgcgcctccttcctgctgggctccgtcctcaacgtgctcttcgctccgggctcggagcctccgaggccaggccagtcccctgagccttcgccggccccgggtccgggccgtcgcgggggccgcggggagctggcccggcagatccgggcgcgctacgaggaggtgcagcgctattcccgcgggggccccgggcccggggcgggccggccggagcggcggcgcctgatggacctggctccgggcgggcccggcctgccgcgcccccggcccccttgggcccggcccctgtccgacggcgccccaggctggcc

SEQ ID NO: 926 - DNA, 31 bp, Homo sapiens
  chr2:42796455-42796486
  hyper
cccacgaatggggcttcgtgggagctgggaa

SEQ ID NO: 927 - DNA, 31 bp, Homo sapiens
  chr2:43019556-43019587
  hyper
aggcgagggcagggggcggccatgggggtgc

SEQ ID NO: 928 - DNA, 50 bp, Homo sapiens
  chr2:43019597-43019647
  hyper
tgagcttgttgcagaccgggggctggaaggagccccggttctccttcacc

SEQ ID NO: 929 - DNA, 183 bp, Homo sapiens
  chr2:43019649-43019832
  hyper
ggccctcactcccaggcggcgctccatgactgtcccgggcgcctcctcgcagcgctgtcctcccgccgtcggaggcccgcagctccgcccagccgcctttttaaccagaatcccaagctcacgaggcggagcaaacccccgcgaccccgtggtgggggcttggggcccgcggactttgccccc

SEQ ID NO: 930 - DNA, 258 bp, Homo sapiens
  chr2:43019837-43020095
  hyper
gactttggtctgagcccgccgccctccgcgccactccaggccctggcgagcgcggcggcggcagcgctggggaacggcgtcccgcgccctctgcttctccgcggggcaggggctcggtccccgccaccgtctccggggcgccccacacactggcgcctgcggtggggcctgctcccggcggaggacaaagaatccagacccttcctggacgcttgtccccagacgttccttccctctacgccccgaggggaatcccag

SEQ ID NO: 931 - DNA, 70 bp, Homo sapiens
  chr2:43020113-43020183
  hyper
ctacagtgaggagatcgcgggttggaagtcccagcacctgagaacacggtgctggcgctgggctcaagat

SEQ ID NO: 932 - DNA, 84 bp, Homo sapiens
  chr2:43020240-43020324
  hyper
tcacccagcgggaagccgcacggcggtccccgcaggtcccgattcaaggtgagccccagacctgctgcgtgcggccggcagact

SEQ ID NO: 933 - DNA, 31 bp, Homo sapiens
  chr2:43037886-43037917
  hyper
caagcaggaagcagctcgcagtggactctca

SEQ ID NO: 934 - DNA, 31 bp, Homo sapiens
  chr2:43037935-43037966
  hyper
acttgttgccaccgcgcgacatccagccgct

SEQ ID NO: 935 - DNA, 46 bp, Homo sapiens
  chr2:46524184-46524230
  hyper
gagcccggctcccggccgcccctcggccctgcgcaggctgcctctc

SEQ ID NO: 936 - DNA, 56 bp, Homo sapiens
  chr2:46524317-46524373
  hyper
gcgcgggggcaggaggcgggccagggtcagggcagaggctgcggccgcgcgtcccc

SEQ ID NO: 937 - DNA, 122 bp, Homo sapiens
  chr2:46524519-46524641
  hyper
agtgggctgccggccgcgggagctttacactcgcgagcggaccgccacacgggtccggtgcccgctgcgcttccgccccagcgctcctgaggcggccgtacaatcctcggcagtgtcctgag

SEQ ID NO: 938 - DNA, 48 bp, Homo sapiens
  chr2:46524645-46524693
  hyper
tatggtcagctcagcccggcctccgactccttccgactcccagcattc

SEQ ID NO: 939 - DNA, 60 bp, Homo sapiens
  chr2:46525000-46525060
  hyper
agggagcccaggtgctcggcgtctgaacgtctcaaagggccacagcgacaatgacagctg

SEQ ID NO: 940 - DNA, 97 bp, Homo sapiens
  chr2:46525065-46525162
  hyper
gagaagaaaaggtaagcgggcgtccgggccgatcagggggccggtccgaggccagggccgggctgcgcggggcaggcgcgaccgagagtggttggga

SEQ ID NO: 941 - DNA, 45 bp, Homo sapiens
  chr2:46525166-46525211
  hyper
agtgctgagaggtcttcggagctcgaggctcggtttggagggctg

SEQ ID NO: 942 - DNA, 43 bp, Homo sapiens
  chr2:46525215-46525258
  hyper
ggggagagcatgtgcccggtttgggggcgcggatcagcagctt

SEQ ID NO: 943 - DNA, 111 bp, Homo sapiens
  chr2:46525259-46525370
  hyper
gcagtggagacttctgcggctcggaggagtcggggatttgcgcgcacggcgaggccaggaggccgagggagatggcctggaggtcggaggtgcttccgcggtgcctttgaa

SEQ ID NO: 944 - DNA, 31 bp, Homo sapiens
  chr2:46525425-46525456
  hyper
tgtgggtgcatgtcctcgactttctctggtc

SEQ ID NO: 945 - DNA, 54 bp, Homo sapiens
  chr2:46525462-46525516
  hyper
tttggggcagcatccacgtctctatttttctctggattcgcggagtccttccaa

SEQ ID NO: 946 - DNA, 88 bp, Homo sapiens
  chr2:46525604-46525692
  hyper
ccaggacccttcagagcgccccgctgccgggctccagaccccaccgaaggttggagaacccacttcctcgtgccgcaccttgactctg

SEQ ID NO: 947 - DNA, 48 bp, Homo sapiens
  chr2:46526457-46526505
  hyper
gctcccctttcctggccgtagtcccccctttctcgtcaccgtcgcgcc

SEQ ID NO: 948 - DNA, 46 bp, Homo sapiens
  chr2:47167941-47167987
  hyper
gcggcaggccagctcccgggaggctcgccgtcggggttggggcctg

SEQ ID NO: 949 - DNA, 31 bp, Homo sapiens
  chr2:47596551-47596582
  hyper
tgcccggccggctcctcgtgtcccactcccg

SEQ ID NO: 950 - DNA, 16 bp, Homo sapiens
  chr2:47596832-47596848
  hyper
tttccagcgtggagac

SEQ ID NO: 951 - DNA, 41 bp, Homo sapiens
  chr2:47796907-47796948
  hyper
agagagagagagagaacgggggccggcggagaagagggcga

SEQ ID NO: 952 - DNA, 68 bp, Homo sapiens
  chr2:47797117-47797185
  hyper
ccggggaagtcccagcgcgggcgcagcgcgtcggcgcggacgccggcggccagcgcggcctcgtagtg

SEQ ID NO: 953 - DNA, 31 bp, Homo sapiens
  chr2:47798114-47798145
  hyper
cggagtcactggcgcccggggcggggtgttg

SEQ ID NO: 954 - DNA, 31 bp, Homo sapiens
  chr2:48009755-48009786
  hyper
aatcttgagaatacaacgtgaaggtgaactg

SEQ ID NO: 955 - DNA, 31 bp, Homo sapiens
  chr2:48339288-48339319
  hyper
ttgttcaactcttggccggactatcgcagcc

SEQ ID NO: 956 - DNA, 42 bp, Homo sapiens
  chr2:54682462-54682504
  hyper
caaaaatttgaggaaacgtccagtttccgtttcagggaatgc

SEQ ID NO: 957 - DNA, 59 bp, Homo sapiens
  chr2:54683031-54683090
  hyper
cccctattgtcctgctcgggtagcggcagcagcagtgcccaccccgccccggccagcct

SEQ ID NO: 958 - DNA, 56 bp, Homo sapiens
  chr2:54683116-54683172
  hyper
aggtccgggctggacccgggaagagcctcagctggagaggacgtggacgcgcccga

SEQ ID NO: 959 - DNA, 1 bp, Homo sapiens
  chr2:58776939-58776940
  hyper
a

SEQ ID NO: 960 - DNA, 31 bp, Homo sapiens
  chr2:58777010-58777041
  hyper
catggaaaagaaaggacgtaaatagggcctt

SEQ ID NO: 961 - DNA, 31 bp, Homo sapiens
  chr2:60783806-60783837
  hyper
agcagcgacgattccccgacatatatttaat

SEQ ID NO: 962 - DNA, 37 bp, Homo sapiens
  chr2:60783864-60783901
  hyper
aatgggaagtgccctccgctcccgcccctcccccagc

SEQ ID NO: 963 - DNA, 52 bp, Homo sapiens
  chr2:61990959-61991011
  hyper
aggcgaagacagggctcgctgacgcccccggtcgcccgcgcctcttcccaca

SEQ ID NO: 964 - DNA, 53 bp, Homo sapiens
  chr2:61991090-61991143
  hyper
ctcagaaggaggaaaacggtcaccttctgaaagaaacacgaactcctctttcc

SEQ ID NO: 965 - DNA, 83 bp, Homo sapiens
  chr2:61991157-61991240
  hyper
tctcattcacctgagcgcggcgtttctatcctgagatgttgggaggaggttcgaggtgggcggggtgacggttttctcttgga

SEQ ID NO: 966 - DNA, 31 bp, Homo sapiens
  chr2:61991256-61991287
  hyper
tcctgctacccctgcccgctcacacaggcga

SEQ ID NO: 967 - DNA, 69 bp, Homo sapiens
  chr2:61991312-61991381
  hyper
ccgtttctatgggtgacgacgtatggcaacgcgtctaagggaacgtcggcgagtcgactattgtgttcc

SEQ ID NO: 968 - DNA, 233 bp, Homo sapiens
  chr2:61991553-61991786
  hyper
aggtctctaaactgggcggagcaagggaagtgatgtgtggcctccggaaggacgcgcgtaaatcctcacccataagtaacgagtcgccgtggtcaaacaaggccctcctacgataccaatcgcgtggcgggtgtggtactgccgaacccgaggaatgagaaaggaggcccggcagaaagttcggatcagctgccggccgttcccggcgtagcctagggcggggagggattgac

SEQ ID NO: 969 - DNA, 228 bp, Homo sapiens
  chr2:62732952-62733180
  hyper
acgcggagaccaggcccggccgggggcgggaggccgccagcgcctcagctccctgtccggcccggcccctcctccaaggcgctctcccgcactgcggagaactggctgaaggcgacatcgccattttaggtacgggcaaattctggacgctccaaaatccacgccaagccctcggcaggccacaccccctgcaccgggcctcggtcactcacccggaccctcattgga

SEQ ID NO: 970 - DNA, 37 bp, Homo sapiens
  chr2:62733230-62733267
  hyper
ccagccgctggcgcaccggatccggcagctccatgcc

SEQ ID NO: 971 - DNA, 257 bp, Homo sapiens
  chr2:62733282-62733539
  hyper
ctcaccccctcagacacgggctagtctgcgggcgctccgaggctccgtggttcccacggcaaccgggcggcgcgaggccggcgggacccgggagcgcgcggggctgcccggctgggctgggtctcgtccggagcccgcgcaacctggaagggaccggcgcgctcagagcgcgttccaggcccagggagccgcgcgcctcggccgtgtacaaaacggcagatcccttagttctgctttgagctcgaccatcctaaaaa

SEQ ID NO: 972 - DNA, 31 bp, Homo sapiens
  chr2:62733559-62733590
  hyper
agctggggttggactgcgatacaaggagccc

SEQ ID NO: 973 - DNA, 15 bp, Homo sapiens
  chr2:64682188-64682203
  hyper
ggggcctgccctcct

SEQ ID NO: 974 - DNA, 31 bp, Homo sapiens
  chr2:66661598-66661629
  hyper
tgggggagtccagacccgaagtgacaaaatg

SEQ ID NO: 975 - DNA, 37 bp, Homo sapiens
  chr2:66661767-66661804
  hyper
ccctccttttcctccacgatcccgctttgacttttct

SEQ ID NO: 976 - DNA, 77 bp, Homo sapiens
  chr2:66661824-66661901
  hyper
agaattcagtactttgcgcatcaccccctgccccgaaaaacactggcagaccccaataatttcgaggaaagtcatga

SEQ ID NO: 977 - DNA, 31 bp, Homo sapiens
  chr2:69614637-69614668
  hyper
acctggcagggaatgacggaaagagaaggat

SEQ ID NO: 978 - DNA, 70 bp, Homo sapiens
  chr2:69968733-69968803
  hyper
tcactttctacttttccggccacgggctcggcacgacctgccgttgggagacgaacggtttcccgaggtg

SEQ ID NO: 979 - DNA, 189 bp, Homo sapiens
  chr2:70313328-70313517
  hyper
tgcattctagagctttcgggccgaccccaatttctcgttggcgacgaatgctaaccacgtgtcgccattttgtgttcaggaaacatggcggccgccccaagggtaaggaacaggggaggcggagtagcgccacgttagccgctttccctgagagattgtgaagcacgttgcgcacggggccctttctgg

SEQ ID NO: 980 - DNA, 64 bp, Homo sapiens
  chr2:70313557-70313621
  hyper
acaactcataggccagcgtcttgagcgacacttcctcagcgggaagaaccggcaaaaaaggcct

SEQ ID NO: 981 - DNA, 31 bp, Homo sapiens
  chr2:70351210-70351241
  hyper
gggcgccttgggaagacgaaattgagtatgt

SEQ ID NO: 982 - DNA, 91 bp, Homo sapiens
  chr2:70351300-70351391
  hyper
gaggagcttggggctcgcgctgcgggggaggaagcgccttccgcggtcgctggggggaagtggttaggaggaagcacgggcagtggagggg

SEQ ID NO: 983 - DNA, 53 bp, Homo sapiens
  chr2:70351408-70351461
  hyper
tctgggaaagcaggcacggatgcggggacatttccgcccgtcaccctggcaaa

SEQ ID NO: 984 - DNA, 31 bp, Homo sapiens
  chr2:70369300-70369331
  hyper
tggatcccaggtggggcgggtgtaggcccgg

SEQ ID NO: 985 - DNA, 31 bp, Homo sapiens
  chr2:70418190-70418221
  hyper
acgcgcggcaagtggccgcccacctgagctc

SEQ ID NO: 986 - DNA, 73 bp, Homo sapiens
  chr2:70485549-70485622
  hyper
cattcacacttcagggcggctttcagctctggtcggaataggactgtgcattcccaggcgtggagaggtgccc

SEQ ID NO: 987 - DNA, 34 bp, Homo sapiens
  chr2:72375617-72375651
  hyper
gctcgagccccagagccgccgcagcacccccgag

SEQ ID NO: 988 - DNA, 50 bp, Homo sapiens
  chr2:72375662-72375712
  hyper
gggcgaggcggcgaggcgggcgctgcggcccgagcgcgggtgcggagccg

SEQ ID NO: 989 - DNA, 112 bp, Homo sapiens
  chr2:72376557-72376669
  hyper
cagcggaggtcctggccggactgccccctcgactggcaggcgcccaaagccctcgaaactgtgccttagggtcccgagcttccaacccccgggatcccgctggctcttatct

SEQ ID NO: 990 - DNA, 138 bp, Homo sapiens
  chr2:73052643-73052781
  hyper
ccctctcgttccccagcgccggaccagcctcggagggagaacgaaggctgctcctgccccgagggaggcagcgggagggtcctgagtcactgggctgtagggcgccgggaagggaccccgcgtcggggctgcgaaggg

SEQ ID NO: 991 - DNA, 443 bp, Homo sapiens
  chr2:73052797-73053240
  hyper
gtatgcagggtctctccgaagggaggggccggcgccggacctggggacagccggccggaggcccgacccagaggagcctgccccgtcccgcccgttcccgcccctctgtggtcccggcacccggggtacctgagcgtgggcccgatgcaggccgtgtcagtgctctcgatctctcgcaggatccgctcgtgctctgccgctgtctccaggctctccgcctccgccatcttaccccgctccatagactgggggcgccccgcagcgcgtcccctccgtcggctcggctcaccttttccctgccccacaatgccgctcccaccacaggctccacagccgccccagcctctggctacccgcaggccgacccctccctcaggctcgacacgcccccttgcgtcaccgcgtccgtcggcgttctgcgtaatgtccgctgggatttgtag

SEQ ID NO: 992 - DNA, 31 bp, Homo sapiens
  chr2:73053272-73053303
  hyper
attcatacatggaatccgcaaatactagttg

SEQ ID NO: 993 - DNA, 39 bp, Homo sapiens
  chr2:73053314-73053353
  hyper
aagcaaaaacagttaacgacagtgcgtaaacagtgatga

SEQ ID NO: 994 - DNA, 31 bp, Homo sapiens
  chr2:73114324-73114355
  hyper
gttgtcccacttggcacggactgggctaccg

SEQ ID NO: 995 - DNA, 97 bp, Homo sapiens
  chr2:73114405-73114502
  hyper
aaccagcacccctgggcgctcgcggcccgaagcctgaggttcccgccccgccccggcagggcggccccgccgacacccgtagcggtcccgccccccg

SEQ ID NO: 996 - DNA, 38 bp, Homo sapiens
  chr2:73114709-73114747
  hyper
tggaggccgagctgggcgccgagcggtctggcctgcgc

SEQ ID NO: 997 - DNA, 41 bp, Homo sapiens
  chr2:73511942-73511983
  hyper
ggtggttctgtgaatccggaagggggcgggcgcaggcgcta

SEQ ID NO: 998 - DNA, 39 bp, Homo sapiens
  chr2:73512060-73512099
  hyper
cagatgcttggtctccgcggagaccgcctgggatgatcc

SEQ ID NO: 999 - DNA, 120 bp, Homo sapiens
  chr2:73512107-73512227
  hyper
cattcctagggaacccgcggaactgctgctggaccccatccggagacccaattctgctcttaaagagccgcctaggaacacgtgtacccatcacaaatcccatcccggacctagaggagg

SEQ ID NO: 1000 - DNA, 37 bp, Homo sapiens
  chr2:73520647-73520684
  hyper
cctcgcctctccaaagcgctgccgggctcccccagcc

SEQ ID NO: 1001 - DNA, 102 bp, Homo sapiens
  chr2:73520696-73520798
  hyper
acttatatagctgcggcggcgctggctccgggcttccgactccccgggccactgccattttgggaggccccggccctgccgccgtgacgtaaatgcccaaac

SEQ ID NO: 1002 - DNA, 69 bp, Homo sapiens
  chr2:73520882-73520951
  hyper
gcgccgctgcgtgcgcgcgcgctccccaggcgtggagcgctggggccgcggatgcgccagtctggggcg

SEQ ID NO: 1003 - DNA, 37 bp, Homo sapiens
  chr2:74776039-74776076
  hyper
ggccatcgcgcgccgccgtccccgggcccccggaccc

SEQ ID NO: 1004 - DNA, 31 bp, Homo sapiens
  chr2:74776507-74776538
  hyper
gcgttgaccctcttttcgctggggaagccca

SEQ ID NO: 1005 - DNA, 59 bp, Homo sapiens
  chr2:74780964-74781023
  hyper
ctactcattccctctgcggttagcgtgactccccctaccttggccgagcaggaccctaa

SEQ ID NO: 1006 - DNA, 77 bp, Homo sapiens
  chr2:74781910-74781987
  hyper
ttttttgcagagtcagcgctttgggaccaaggtagtctggcgcatggatgccgaaccttatccgggctagtagtggg

SEQ ID NO: 1007 - DNA, 83 bp, Homo sapiens
  chr2:74782004-74782087
  hyper
agggagaggtgggcagcgggctggagagcggcgccgggagttggagagcctgtgactttcccgtgaagttgctttgcacactc

SEQ ID NO: 1008 - DNA, 53 bp, Homo sapiens
  chr2:74782218-74782271
  hyper
cgtcgggacccgggccgcctgcgcacgccactccctctcgagcactctctctc

SEQ ID NO: 1009 - DNA, 58 bp, Homo sapiens
  chr2:74782284-74782342
  hyper
ggaggaagacctgggccgtgctctacccggccagtccccacggcgtagcgcggctcga

SEQ ID NO: 1010 - DNA, 84 bp, Homo sapiens
  chr2:85829250-85829334
  hyper
tcaacaccttatccagcgctcccgttgggtctctgagcgtccaaagtttgggctgagcccacggcagaacgtgaacaccctctg

SEQ ID NO: 1011 - DNA, 31 bp, Homo sapiens
  chr2:85829368-85829399
  hyper
ccggcgtgctgagagacgcaggcggaccgta

SEQ ID NO: 1012 - DNA, 89 bp, Homo sapiens
  chr2:85842677-85842766
  hyper
tgtcagcccccaagccgcggagactgtgggaaacgacctcacggtggtggtttcgaggcacaaatctggggccgaatgacagcttcttt

SEQ ID NO: 1013 - DNA, 31 bp, Homo sapiens
  chr2:86850367-86850398
  hyper
gcactgacccaggtggcggggtcggccctcc

SEQ ID NO: 1014 - DNA, 31 bp, Homo sapiens
  chr2:95825322-95825353
  hyper
aggaccaggccccgcccgccaccccgcgcca

SEQ ID NO: 1015 - DNA, 42 bp, Homo sapiens
  chr2:95825489-95825531
  hyper
cgccagccccgcctcccgaggccgtcccgagcttgcgcagac

SEQ ID NO: 1016 - DNA, 44 bp, Homo sapiens
  chr2:95825584-95825628
  hyper
ggcgaagctggagaggcggggctcgcgggcgcctgtaggacctc

SEQ ID NO: 1017 - DNA, 31 bp, Homo sapiens
  chr2:96987293-96987324
  hyper
caaccgctgccctgtccgaaagtgcgtctcc

SEQ ID NO: 1018 - DNA, 56 bp, Homo sapiens
  chr2:97171201-97171257
  hyper
gtgatttctcctgactcgcagactgacctgctggagctggccggcctaagagaagg

SEQ ID NO: 1019 - DNA, 31 bp, Homo sapiens
  chr2:97171276-97171307
  hyper
gcctgggtaggtcttacggtagccttctttc

SEQ ID NO: 1020 - DNA, 46 bp, Homo sapiens
  chr2:97171366-97171412
  hyper
tacctatgtccagccccgcccccaaagactccggttccactggcct

SEQ ID NO: 1021 - DNA, 37 bp, Homo sapiens
  chr2:97175301-97175338
  hyper
actgccacccggtggccggcagcggaactgaccacag

SEQ ID NO: 1022 - DNA, 49 bp, Homo sapiens
  chr2:97193014-97193063
  hyper
aggcaggggaaggcctcgggagggacacgacggtccggcagcagagcct

SEQ ID NO: 1023 - DNA, 15 bp, Homo sapiens
  chr2:97193251-97193266
  hyper
cggtttgagccagct

SEQ ID NO: 1024 - DNA, 78 bp, Homo sapiens
  chr2:97193269-97193347
  hyper
ctttttgagtcagatccggcggcagggccagaaaagcgctttctgaaaccccagcgcggtcctcggtgggggtggaat

SEQ ID NO: 1025 - DNA, 57 bp, Homo sapiens
  chr2:97193348-97193405
  hyper
gggtggggtggggggcgcggccgcgccgctgggcgccctccccgccctcccccctcc

SEQ ID NO: 1026 - DNA, 244 bp, Homo sapiens
  chr2:97193408-97193652
  hyper
cccccagtcctccctccgctgcccgccccccaagcccggtgtcgccccctccgccccctgccgcatccccggagccagtgcccacaggggccaggcagcccgcaggggtcgctcacggctggtgtaggggcttggtccaccacgctagtacttcgggcaccaaaatagaaaaagaataacgcttggaaagaatctgatgtttccgaaggagcatcgaaaatcgccgttacgggaaaagtaaaac

SEQ ID NO: 1027 - DNA, 42 bp, Homo sapiens
  chr2:97203490-97203532
  hyper
cgcccgggctggggtcgcgtcaccctccgcccagcgccggcg

SEQ ID NO: 1028 - DNA, 31 bp, Homo sapiens
  chr2:97304170-97304201
  hyper
acggatgaagctccggcgcctctgtccggaa

SEQ ID NO: 1029 - DNA, 31 bp, Homo sapiens
  chr2:97405566-97405597
  hyper
accacctcaccctgggcgcctcaccctggta

SEQ ID NO: 1030 - DNA, 174 bp, Homo sapiens
  chr2:97482862-97483036
  hyper
cgggcggctgcgggagcgggtgctggagctggcgcgcggcggcggcgacccctacagcgatctcagcaagggcgtgctgcgctgccggaccgtggaggacgtgctcacgcccctcgaagactgcttcatgctggacgccagcaccgtgctggacttcggcgtcctggccagcat

SEQ ID NO: 1031 - DNA, 45 bp, Homo sapiens
  chr2:97483116-97483161
  hyper
tggccttcgtggatcccgaagactgcacgccgctcagcaccatca

SEQ ID NO: 1032 - DNA, 157 bp, Homo sapiens
  chr2:97535759-97535916
  hyper
tccgcgcccctaggctcgggctccccgcgccaccacggcgggcgccggctctttctccagcgcggccgcggctctccgcccccttccccttgacgtcaggctgggggggtcgagcggaggccgggggcgggccgcgaaggctcgctcaggagggggc

SEQ ID NO: 1033 - DNA, 31 bp, Homo sapiens
  chr2:98964553-98964584
  hyper
ggtgggagcttctttgcgttctttggggtag

SEQ ID NO: 1034 - DNA, 39 bp, Homo sapiens
  chr2:98964752-98964791
  hyper
tagctgggactttggccgtgactacgtgtgcacttgcct

SEQ ID NO: 1035 - DNA, 31 bp, Homo sapiens
  chr2:101033529-101033560
  hyper
catctacaattacaaacgcaaattctcagcc

SEQ ID NO: 1036 - DNA, 61 bp, Homo sapiens
  chr2:101033571-101033632
  hyper
aagtaaattgtaggctcgcacaatatcaataattccgcgggtcacagcatcccgcacaagg

SEQ ID NO: 1037 - DNA, 140 bp, Homo sapiens
  chr2:101033731-101033871
  hyper
cgccaggacaaaacccgcgggttccccggtttttccgtgcgccccgcggcggggagaggggcccaggcgctgaaacccacccgcctgcgcgtccccgagctcaccctactggagcggcgctcgtccgggtccttaggctc

SEQ ID NO: 1038 - DNA, 424 bp, Homo sapiens
  chr2:101033873-101034297
  hyper
cccctggccctgggggcgccgcgcgggtcgggcttcgccgggcctgtgggcgaagcgcgcggggtcctgggagctcgggaggcccgccccaccttgccccgaggcctccgcgccgcggcccgtcgggtcccgggatgtggcggcggcggcagcggaagtaaggaagacgcccggcgcgctagaccggctttgggggccagaacgccggcaccgcctcacgcggccccctcgcgcctatccggccgtgcgcgccgcctgcccgcgcgcgtccccgccgccgtccccggccgtgcgcgttccagcgggtcgcggggagtggggaggggcgcggccgcgggaccccaggcccggatcccgagtctccctttctgccgctgcaaaagcgttctttctgaccgagacctgcggccggaacaagtcccgc

SEQ ID NO: 1039 - DNA, 31 bp, Homo sapiens
  chr2:101435683-101435714
  hyper
aaggagaggagggcagcggaggaggggaggg

SEQ ID NO: 1040 - DNA, 133 bp, Homo sapiens
  chr2:101435724-101435857
  hyper
tggagctccaagtgcccgctcctggccgcagccccacaccccacgtgcccctgccggggaggggggcaattagccggttcctttccatccttgacccattttccggaccagctacgttcgccttaggacaggc

SEQ ID NO: 1041 - DNA, 80 bp, Homo sapiens
  chr2:101435864-101435944
  hyper
attcctccccagcagtcgctgctgtcctccgccgaccaccgctcgcccgcatcttccccgacccccgcctcccacctgcc

SEQ ID NO: 1042 - DNA, 31 bp, Homo sapiens
  chr2:101436642-101436673
  hyper
ggagccgagggacccgcgcggctgcggccca

SEQ ID NO: 1043 - DNA, 93 bp, Homo sapiens
  chr2:101767138-101767231
  hyper
cgcgcgcccccagccacgacaccacctggagcctccggcgcctccagatggccgagtccgggctggctcggcgcaccccgctgtcacctggcc

SEQ ID NO: 1044 - DNA, 64 bp, Homo sapiens
  chr2:101767298-101767362
  hyper
ccttcgattcccaagtcgagtccggcctccagctcaccgggccaggcggcgaagacacctgcct

SEQ ID NO: 1045 - DNA, 274 bp, Homo sapiens
  chr2:101767367-101767641
  hyper
ggaaaacgcacgcgcccgggagccccctctaccaccacctcgacgggagcccgcgggagaaacgcagaaaaaaggaaaacaagcccgcggcagggccgtccgggccccgcgtctcccaagaaatcgcctctggcgacgcagcccgggactgggggccgcgggcccggcggggtgcgaggccccgggcccggccgccgcgcccgccccggcgagccccttaccggtgaggcggccgcccccctcgccgtgcccgcggcgccgctgcaggatgaag

SEQ ID NO: 1046 - DNA, 182 bp, Homo sapiens
  chr2:101767661-101767843
  hyper
cacccagagcttcagcgcgttcttcagcagcacctcctcgggcttgagccacatcgcggcggtccggccgcgcccgccggccccagctcacatctccccggccgccggtcgctgtgagccgagcccgctcgagaggcgacggcggcgcgcggggaccacagcccggccggtgcccagcgctc

SEQ ID NO: 1047 - DNA, 158 bp, Homo sapiens
  chr2:101924526-101924684
  hyper
ctgaagaccccagcctcggctgccgcgaagtccccctcccgtcctcgcgccccggcctgctcacccgcgtgagacatgggcaaggtgatgttcccgtagcgctcctcattgtagaggacgacggccgaggcgttcctccgcgccgccaccagcacctt

SEQ ID NO: 1048 - DNA, 383 bp, Homo sapiens
  chr2:101924690-101925073
  hyper
gaaggtgcagcccccacgagccaccagggcgacccagggcgcggcccctcggccgccgggctcgggcacgaagaagcgcgtgtcgggcgcgcagccctcgaggtctccgccgggcgcccacgggacgcccaccaggccatgcgcgccctccttgggcgagctgtcgccgaagcggccactctccgagacgctccacaccgtcaggttggtctgcgggtccacgtactcgatgtttaccacggccgagaaccactcgagagcccggccccgggccccgggcacgcacagggccagggcgagcaacgccagagccaacacgccgcgagccccgacgctggcttcgcgccgccgccacgccatggcagcaccgctgagctgactag

SEQ ID NO: 1049 - DNA, 31 bp, Homo sapiens
  chr2:101925074-101925105
  hyper
gggagtcagggtcacgcgcgagtgcggtgca

SEQ ID NO: 1050 - DNA, 300 bp, Homo sapiens
  chr2:101925108-101925408
  hyper
gaagagcagagagaagcggacacccaccgccgccctggaagactgaggcggggtcggggccgctgcgcacgcgcacctggcggagtggacgaagggcgtgatcggccctggctccgcccccgtccgaccggccgcgttgtgcgcaggcgtaagctccgcggagcctcggaccgcgatccgtcccgggatctcaggcgcctgtgggccgaggcggggcgcgcagcctgtaccacagcttgcgccacggcggaccctgtggccaggggccaagtttgcgcaataggacgtctagcaccccca

SEQ ID NO: 1051 - DNA, 47 bp, Homo sapiens
  chr2:102313749-102313796
  hyper
caccccagctcctccccggggaaatcccagcccgcttcctccccgct

SEQ ID NO: 1052 - DNA, 174 bp, Homo sapiens
  chr2:102313837-102314011
  hyper
gccgcaccctgggcgccgggcgtcgtgtcgggaccgctgcccgcgctgcccgccggcgcggccattgttcgagccccacccctgatgaatattcacgccgcgcgggcgcctcggcccgcgccctacccggcagggctcggggtgtgagtgcgtttccgccggtttttcctgcct

SEQ ID NO: 1053 - DNA, 44 bp, Homo sapiens
  chr2:102314200-102314244
  hyper
gctccgggcccgtcctcgaggcgcgcggcgcggggcgcgggcgc

SEQ ID NO: 1054 - DNA, 31 bp, Homo sapiens
  chr2:103235664-103235695
  hyper
ggggaggagggaagggcgcgactcgtgggtc

SEQ ID NO: 1055 - DNA, 53 bp, Homo sapiens
  chr2:103235944-103235997
  hyper
gcttgggcgccgcgcccgccccgcccccgcccgcgggccgccctgggcagggc

SEQ ID NO: 1056 - DNA, 76 bp, Homo sapiens
  chr2:103236062-103236138
  hyper
gggctgctgagggtacgcgcagcggcctctcgtcgccctgcacgtgcctcgccaggcagtgcgcctgctcgcagcg

SEQ ID NO: 1057 - DNA, 41 bp, Homo sapiens
  chr2:103236273-103236314
  hyper
ccgccggtccccttggcggcaaccggcggcacccatggaac

SEQ ID NO: 1058 - DNA, 47 bp, Homo sapiens
  chr2:103236321-103236368
  hyper
caactggaggagcctgcgggcgccactgcctccgatgctgttgctgc

SEQ ID NO: 1059 - DNA, 37 bp, Homo sapiens
  chr2:103236615-103236652
  hyper
ggggaatgggagggggcgatctcggggggacacctgg

SEQ ID NO: 1060 - DNA, 73 bp, Homo sapiens
  chr2:110371159-110371232
  hyper
gaaccggggtccggccgcgcccaggctccgcagaggctcctctcccgccccaggcgcccggccgccgcggaag

SEQ ID NO: 1061 - DNA, 104 bp, Homo sapiens
  chr2:110371251-110371355
  hyper
cggggccggagggggcgcgggtcacaatcccgggccggaccagggggccggtgggtcgagggcgggaagtcccgcgggggccggggagcgcggggctggggccc

SEQ ID NO: 1062 - DNA, 180 bp, Homo sapiens
  chr2:110371427-110371607
  hyper
agcggctgtatcagcccggccccgagcggctggtcccggcgacggcggcgggaaggccggagggcagaagcaacgggcggggcgcgaggctaggctgcctccgcgacggggaagggacaggggcggggccgagctggaggcctccgggggcggggttggggcggacgccctgtggtgcgc

SEQ ID NO: 1063 - DNA, 87 bp, Homo sapiens
  chr2:110371615-110371702
  hyper
ttttgcctgcgccaagcgagcccctcacaggagctaccctcgacgcctgaggactgagcgtcagcgttggggcgggctgaaggagag

SEQ ID NO: 1064 - DNA, 103 bp, Homo sapiens
  chr2:110371814-110371917
  hyper
ggtgtggccgagacagcggggagcggaagtgggcgtggcctggtggcgtgggcgcggggcgggggtgcggggggcgtgtccgcccgggcgcggcccagtgagg

SEQ ID NO: 1065 - DNA, 31 bp, Homo sapiens
  chr2:111880645-111880676
  hyper
agagatgtgcacctcacggtgtgcacctcag

SEQ ID NO: 1066 - DNA, 54 bp, Homo sapiens
  chr2:111880677-111880731
  hyper
gaagttctgtctgattcggtgcggcgtgcggtacgggagcgggagggagggagc

SEQ ID NO: 1067 - DNA, 31 bp, Homo sapiens
  chr2:112655268-112655299
  hyper
tacctttaagaaactacgtatataaattaag

SEQ ID NO: 1068 - DNA, 31 bp, Homo sapiens
  chr2:118981666-118981697
  hyper
cccccagcagagagtccgagagaaaagtgct

SEQ ID NO: 1069 - DNA, 93 bp, Homo sapiens
  chr2:120301686-120301779
  hyper
actacaagaaagtgggcgtcgtgagtgatgcctgtcaggtgaagccccgcccactggctcgggcggctccgccccgtccgtcttctctcccgc

SEQ ID NO: 1070 - DNA, 53 bp, Homo sapiens
  chr2:120301887-120301940
  hyper
gcccggcaaactgctccgagctcccaggaatcacccgccgcctccggtcgtgg

SEQ ID NO: 1071 - DNA, 72 bp, Homo sapiens
  chr2:120302113-120302185
  hyper
gtggcccagggtcggccgctggggcgccgcagcctagctgctgaggcgaccgagccccgggtggtgtccagc

SEQ ID NO: 1072 - DNA, 129 bp, Homo sapiens
  chr2:120770808-120770937
  hyper
gcgccgcagtacagtccgctgcgctcctagccgagtggacccttcctcgcccgcgcctgcggtagcggccttgtccccggggaggcgggcgggggccgcacccagaccctagggcggccggcccctctc

SEQ ID NO: 1073 - DNA, 92 bp, Homo sapiens
  chr2:120771018-120771110
  hyper
ataccgcgcgacgggccggggcggagggcccggggcagccgggttaatgtttgccgagcggacgcgctccccgagccgcgggtacccctcgc

SEQ ID NO: 1074 - DNA, 31 bp, Homo sapiens
  chr2:121438058-121438089
  hyper
ctgttcctcctgaacccgtgtgtgtgtgtgt

SEQ ID NO: 1075 - DNA, 36 bp, Homo sapiens
  chr2:127413346-127413382
  hyper
ccgcccagctatccagcggccgcgcagccagccaag

SEQ ID NO: 1076 - DNA, 31 bp, Homo sapiens
  chr2:127413403-127413434
  hyper
atttggtcaccatccccgacagtgctgggcc

SEQ ID NO: 1077 - DNA, 31 bp, Homo sapiens
  chr2:127413488-127413519
  hyper
ccacaacctctgtatccggtagtggcagatg

SEQ ID NO: 1078 - DNA, 31 bp, Homo sapiens
  chr2:127414331-127414362
  hyper
tgcccagggacttgctcgctccgctgggcgc

SEQ ID NO: 1079 - DNA, 31 bp, Homo sapiens
  chr2:127534738-127534769
  hyper
cggcgcccggggtctgcgggtaggcaggcgg

SEQ ID NO: 1080 - DNA, 31 bp, Homo sapiens
  chr2:127534811-127534842
  hyper
agggaggggctcatatcggctggcacagcca

SEQ ID NO: 1081 - DNA, 37 bp, Homo sapiens
  chr2:127534849-127534886
  hyper
taccgaaacttggggacgtgcccgaccatgcctcctc

SEQ ID NO: 1082 - DNA, 176 bp, Homo sapiens
  chr2:127535023-127535199
  hyper
tgaggagtggaaggaacgggatgactaggagccttttaagaccgagtattcgaggttctttccggccccgcggagccaggaggtgccagccgagatgcgcgtgccgcgcgcgccctccagtgcccggttcccgcttctgcacggtcctcgctgggcaagggcgtcccaagaaagga

SEQ ID NO: 1083 - DNA, 82 bp, Homo sapiens
  chr2:127864221-127864303
  hyper
gtggggagacagaggacgcaaacctaagagggcacccagagcgccggggaacgcagcctggggacctcgaagcccctcgaaa

SEQ ID NO: 1084 - DNA, 59 bp, Homo sapiens
  chr2:127865203-127865262
  hyper
ataccctaggcgcctccgggacatctccacatctttgcctacggcgcctagcccagtac

SEQ ID NO: 1085 - DNA, 31 bp, Homo sapiens
  chr2:128165991-128166022
  hyper
acagggccctggaaacgcgggtctgccggga

SEQ ID NO: 1086 - DNA, 31 bp, Homo sapiens
  chr2:129063668-129063699
  hyper
ctcatctgcaaaacagcgcccctgacagtga

SEQ ID NO: 1087 - DNA, 35 bp, Homo sapiens
  chr2:131114432-131114467
  hyper
gcacacttcgtaggggcgttcgtcactgcctataa

SEQ ID NO: 1088 - DNA, 31 bp, Homo sapiens
  chr2:132767742-132767773
  hyper
gctgccgcagcggtgacgaaaagccacaggg

SEQ ID NO: 1089 - DNA, 182 bp, Homo sapiens
  chr2:133173852-133174034
  hyper
ccagggcagcggtggacgtgggggcagtgcgggcgagaggaagtttgtctttctcccagctcgggagggtcgccagcttccccggggctgcacctccttgggacgcttgtcgggttggagcgccgcagctgcctctgcggctgccgcctgggtgacggagggtggggcgggggtgggtcgct

SEQ ID NO: 1090 - DNA, 85 bp, Homo sapiens
  chr2:133174237-133174322
  hyper
aggaagaggagtgctgcgaggcggagtgcgccctcggcgaagaggggcagaggcggagcgccaggtgctgcggtctcactcccag

SEQ ID NO: 1091 - DNA, 58 bp, Homo sapiens
  chr2:133174324-133174382
  hyper
agccaggagtttagaacgttcttcctccgccctctccccgcctcgccccagccacata

SEQ ID NO: 1092 - DNA, 34 bp, Homo sapiens
  chr2:136288365-136288399
  hyper
ttttcattggctgaagcggcggcatgggtacctc

SEQ ID NO: 1093 - DNA, 43 bp, Homo sapiens
  chr2:136288411-136288454
  hyper
attccagccaagcaccgcgacaagtgaacggaggagaagttat

SEQ ID NO: 1094 - DNA, 43 bp, Homo sapiens
  chr2:136874156-136874199
  hyper
cacctcctcccccaagcgggcgctcctccggtgtgtgggtctc

SEQ ID NO: 1095 - DNA, 173 bp, Homo sapiens
  chr2:136874870-136875043
  hyper
actgcaggacccactcgcggccgtggggaagaggcgcgcttcggacggcgggaaggttttccccctcaaacccaaagcgcgcgggcggatcaactcctagctgctgccaccactcgatcccctcagaggatcggcgcggtgggtccacccgcctctcccgccctctgcctact

SEQ ID NO: 1096 - DNA, 85 bp, Homo sapiens
  chr2:136875077-136875162
  hyper
cagagtttaacaaacacgcacccagtgtcaagaacagtcaccaggcgcttaaccccgaagttaaagcgggcgcaatctcctcctg

SEQ ID NO: 1097 - DNA, 132 bp, Homo sapiens
  chr2:136875163-136875295
  hyper
gaactcagcccaggcacgccgccctccgcctctaaattcagacaatgtaactcgctccaagacatccccgcttccccaaggaagagaccggtggtctgagtcccgaggcagcgcgcacgccttctctgcact

SEQ ID NO: 1098 - DNA, 52 bp, Homo sapiens
  chr2:136875472-136875524
  hyper
tcaagaaaactcctttcggtgacccttttttggagtacgggtacctccaatg

SEQ ID NO: 1099 - DNA, 159 bp, Homo sapiens
  chr2:136875620-136875779
  hyper
tcccctccatggtaaccgctggttctccagatgcggtggctactggagcactcaggccctcggcgtcactttgctacctgctgccgcagccaacaaactgaagtttctggccgcggccggacttttataaaaacacgctccgagcgcggcgcatgcgcc

SEQ ID NO: 1100 - DNA, 57 bp, Homo sapiens
  chr2:136875880-136875937
  hyper
gggaccctgctgtttgcgggtggtcggtagtgagtccggagccggacaggacctccc

SEQ ID NO: 1101 - DNA, 88 bp, Homo sapiens
  chr2:136875948-136876036
  hyper
ctaagtttgagggaagcgggatgcgcctgaagacaggtgggaagcgcgggctaggaacgcgtctctctgtggcgcgtccatccttgct

SEQ ID NO: 1102 - DNA, 31 bp, Homo sapiens
  chr2:136876374-136876405
  hyper
tagcggtaaccaattcgcgaatagtgcttta

SEQ ID NO: 1103 - DNA, 31 bp, Homo sapiens
  chr2:136876427-136876458
  hyper
tataagagtaatttagcgaccagtacttttt

SEQ ID NO: 1104 - DNA, 31 bp, Homo sapiens
  chr2:136876494-136876525
  hyper
ttcattctcacaacaccgtgtgggtattacc

SEQ ID NO: 1105 - DNA, 136 bp, Homo sapiens
  chr2:136876530-136876666
  hyper
agagatgcatttagtccgatatttatagaaggacgaactgcgtgccacgcactgttctaggcgttggggatccagcgtgaaccagacaaggcccgcattcggagaaaccagcaaataagcccggagagatgaaatg

SEQ ID NO: 1106 - DNA, 158 bp, Homo sapiens
  chr2:136876869-136877027
  hyper
cagtgctttccccctcgcgccacttccctccggcgcggagactgggtggggcgggggagcgagtgtggggcggggccgagaaactgcgtccgcaggcggggtggccgctgcggagatagctgggaccgaggcgcgtgcgtcgcgacacggaccccaga

SEQ ID NO: 1107 - DNA, 34 bp, Homo sapiens
  chr2:145090079-145090113
  hyper
gcccctcccccgcggccgccgcggatgccgccgc

SEQ ID NO: 1108 - DNA, 31 bp, Homo sapiens
  chr2:145273327-145273358
  hyper
acacacgcacacacacgcgtacacacacaca

SEQ ID NO: 1109 - DNA, 31 bp, Homo sapiens
  chr2:145273403-145273434
  hyper
ctaatcaaaattctctcgtctttgtgttttg

SEQ ID NO: 1110 - DNA, 84 bp, Homo sapiens
  chr2:145273440-145273524
  hyper
ccagcacctcacactgcgcccccagccgccccctccccgcgccgcgcagctctggggcaggccgggggcgcgcacaattgtctt

SEQ ID NO: 1111 - DNA, 214 bp, Homo sapiens
  chr2:145273537-145273751
  hyper
ttgctccaagtgggcccgggcggtccccgcgaggcgcgggctggggctgcggaggccgggaggccgggtgggcgctgcgtcccagcgcctgcctcgggagcgtctacgcggccccgcgccgggtgatcgggctgagagcgaggggagcgagaagtttcctttccgagtctgggctggcgctcgttcgcttgtttgttttcgggggttggtttct

SEQ ID NO: 1112 - DNA, 53 bp, Homo sapiens
  chr2:145273759-145273812
  hyper
aaactcagttatcctccgtcagctcccccacccccccccggcaccctcgctag

SEQ ID NO: 1113 - DNA, 31 bp, Homo sapiens
  chr2:145273968-145273999
  hyper
ctggctgtctccaaaacggacctaccaaact

SEQ ID NO: 1114 - DNA, 42 bp, Homo sapiens
  chr2:145274018-145274060
  hyper
tcccacctctgatctgcgtgtgcccctcgaacccccatctcc

SEQ ID NO: 1115 - DNA, 100 bp, Homo sapiens
  chr2:145274079-145274179
  hyper
gactcagcctggataacgggctcctccagaccatgtagaaactgccgggaaaagtctcgctgcgccctgcgactccttcagtccccggcctgggggcaga

SEQ ID NO: 1116 - DNA, 326 bp, Homo sapiens
  chr2:145274184-145274510
  hyper
ctggagaggagtcatccgtccccgagccatcatcgaccccaccggaccccgcgcggggccggccgactccctcccaccccggggtctgggcgcgatgggccgggccccgctgcccgcggaccgttacttggcgcaccgagaagcggccgggcgactccggcaagaaactttaagcctcgctgaggcgcagacccggttcccctctcctgccttcgcagtctctctgccacccccgcccccgccccgggatcctgcgcgatccagcgcctgggcccccgccctgccccaggcggacgctcccgaagcccggccggagacccggcggg

SEQ ID NO: 1117 - DNA, 197 bp, Homo sapiens
  chr2:145274576-145274773
  hyper
cggggctgggggcgcggggccccggccggacccccgcgctcggacccccgggtgcctgacgctcactttgcccggcacttccccaacaccccccggtccagccgccgcgcgcgccgggctccggcgccggccgcggagggaggctcgccctagagccctgggcgccgccgccgccgccgcctcggttccttttccct

SEQ ID NO: 1118 - DNA, 395 bp, Homo sapiens
  chr2:145274781-145275176
  hyper
ccttctccctgggtctcgagccgcgtagtggcccggaaaagtttggttcgggctgcttcttaccgtttttcctcctgggattggcttgtttgcgcctcttgcaccgggggccatccgccatgatcggctgcttcattgataagagcggatcagatggcagttcgcatggactcggcgccctgcttcggcagcacgcaggctcgatctagcaaccaaacacagcgacaatgtgggcatcgcccgcgcccattgaaacgcgcgcgggccgcccaggggagccgggccagggccccggcgagcacccatccgcgccccccaacgccaaagcgaaacttcggcggccccctccccgccccccacccccagccttggccccgaggcgctttgtgtttgtt

SEQ ID NO: 1119 - DNA, 31 bp, Homo sapiens
  chr2:145275181-145275212
  hyper
ttggtgtgttgcacccgcgaggggatcagag

SEQ ID NO: 1120 - DNA, 154 bp, Homo sapiens
  chr2:145275237-145275391
  hyper
agtcataactcctgaccgtatgagggaatgcacacggcggtacagtaagaccgcttgactcagggctaggcggaccctttccttcgaaaagtcctcagcccccggctcgggaacttggggtgaggcgaggttttcttttcgttctcatcttttc

SEQ ID NO: 1121 - DNA, 59 bp, Homo sapiens
  chr2:145275423-145275482
  hyper
caaacaaacaaacaacgcgaaacagcccctggatgaagcacactcgggcaaattgataa

SEQ ID NO: 1122 - DNA, 68 bp, Homo sapiens
  chr2:145275488-145275556
  hyper
ttataggaagcccactcgcccagcgccccctcccctccccttttggagtttatcgaggcactgtctct

SEQ ID NO: 1123 - DNA, 31 bp, Homo sapiens
  chr2:145275645-145275676
  hyper
ttaccccaccccccctcgccactttgacaat

SEQ ID NO: 1124 - DNA, 78 bp, Homo sapiens
  chr2:145275782-145275860
  hyper
gaaagtccaaccactacggcaatacttttaagctctactaaatgatcgtatcctttctggcttcgaaacttttgtacc

SEQ ID NO: 1125 - DNA, 86 bp, Homo sapiens
  chr2:145281722-145281808
  hyper
tgtccccaattttccgcgcgctctgccactcccccccccacacaccccgccccaacccccgccgccagcttcggtccctgcatttg

SEQ ID NO: 1126 - DNA, 169 bp, Homo sapiens
  chr2:145281809-145281978
  hyper
tctccaggaagggccccgctgcacaggcggaggagcgcgtcgcgggggggggcggtgttcggccccctcccaccagaccgccctcccccagacctgtccccgcccgggatcctgcgacccccgcccgccgcccggtcagctgacctggctcgctcgcctgctccccgcc

SEQ ID NO: 1127 - DNA, 27 bp, Homo sapiens
  chr2:145282041-145282068
  hyper
gggaggtgatgccgggggctgattacc

SEQ ID NO: 1128 - DNA, 31 bp, Homo sapiens
  chr2:145282087-145282118
  hyper
gaaaagcctcctccacgcgactgtcaatctc

SEQ ID NO: 1129 - DNA, 317 bp, Homo sapiens
  chr2:148601815-148602132
  hyper
cggacgccgaggcctcgcggtatcgagcctccgtccgccccgcctcctcgccctccactccgccccgccctcgctctctcacccctcccccgctcccgcctcgcttccccgacaatctcctcgcgctcccggcccggcacgcgcgctgcgcccggccgccgctgccgccgccgccgccgccgccgctgccgccgagcgttcctccgctgcgcctggcttccagcttcgggccggaaccggaagtttggggggcggagcccggcggaggccaggagaccgaaaacgcggccgagcccggagcccggagctggagccag

SEQ ID NO: 1130 - DNA, 277 bp, Homo sapiens
  chr2:148602136-148602413
  hyper
tggaccagaacttggccgccgcctgcaccgccgccgccgctgccgcccgccgccccttccccgcgccgcagccgcctcgccgccaccgccgcgagctcggccgccagtggtcctcggactttaggtgtctgggttgaaggtcggtccggacatcggacccagtcagttcccagactgtccgggcggcagcggacgccgctgccgccgccgcctcttcgtcgcctcagcctggcgttttgttccgagagacgggagaggcgagcggagctgacagtga

SEQ ID NO: 1131 - DNA, 38 bp, Homo sapiens
  chr2:148602727-148602765
  hyper
gctgctgcaaagttggcgtttgccgtctttcttatctc

SEQ ID NO: 1132 - DNA, 36 bp, Homo sapiens
  chr2:148602775-148602811
  hyper
ggtaggtgcagggagcgcggcgcggtggggctgctc

SEQ ID NO: 1133 - DNA, 54 bp, Homo sapiens
  chr2:148602889-148602943
  hyper
cactccctgcgcccctcggctgccaccgccccccccccccgcccccaggtctga

SEQ ID NO: 1134 - DNA, 39 bp, Homo sapiens
  chr2:150186116-150186155
  hyper
gtggggaggctggttccgagtttccgggcatatccgtgg

SEQ ID NO: 1135 - DNA, 64 bp, Homo sapiens
  chr2:151342427-151342491
  hyper
actggaaggtcaaaggcgaatagtgttgcccgcggccttggaggcaagccgagtgggggatgca

SEQ ID NO: 1136 - DNA, 35 bp, Homo sapiens
  chr2:151342512-151342547
  hyper
tgtggtgaaggggaaacggacgtgatcactgggat

SEQ ID NO: 1137 - DNA, 146 bp, Homo sapiens
  chr2:151342556-151342702
  hyper
gaaaaagggaaaagctcggtacaggtgggcaccgaggcaccgcgggcggccggcagcgcgaagaggaggttcagctgctgcccggcccctgcgccaccagcgcattcctgggtgtaggcgtcacgggcgccgcggctgcctgcgct

SEQ ID NO: 1138 - DNA, 59 bp, Homo sapiens
  chr2:151342747-151342806
  hyper
ctctgggattttctcccgcctcccatcacccccgcggcgctccccgcctccccgccaac

SEQ ID NO: 1139 - DNA, 54 bp, Homo sapiens
  chr2:151343469-151343523
  hyper
ccccactcaccccacccggctctcacagatctgctgacccgaatctcccaaccc

SEQ ID NO: 1140 - DNA, 31 bp, Homo sapiens
  chr2:151343526-151343557
  hyper
gttatgcacacaggaacgaacaagtttcagg

SEQ ID NO: 1141 - DNA, 77 bp, Homo sapiens
  chr2:151343682-151343759
  hyper
tttttttaagggaaaacggatgaaagcggggaggcccacctcgggactgggatcccactggccgaccccctcgtgga

SEQ ID NO: 1142 - DNA, 91 bp, Homo sapiens
  chr2:151344275-151344366
  hyper
ttatggagcctgggagcgagcgctgttggcgttgcatgccgaaaatgtaagcagtgcgccctctagggtgcccattcgggatctattttag

SEQ ID NO: 1143 - DNA, 55 bp, Homo sapiens
  chr2:152118687-152118742
  hyper
tgatactggggggctacgcttttcctaacatcaatcatctcgtagttgcagagag

SEQ ID NO: 1144 - DNA, 31 bp, Homo sapiens
  chr2:153192136-153192167
  hyper
tggattcgcagcagaccgatttcagggcgca

SEQ ID NO: 1145 - DNA, 31 bp, Homo sapiens
  chr2:153192302-153192333
  hyper
cccctccccttcaccccgtgccgggagcgag

SEQ ID NO: 1146 - DNA, 31 bp, Homo sapiens
  chr2:153192342-153192373
  hyper
ccgagggggaggctcccgctttcccctttgt

SEQ ID NO: 1147 - DNA, 31 bp, Homo sapiens
  chr2:157188948-157188979
  hyper
aaagcataaaagaaggcgaactgcatgggct

SEQ ID NO: 1148 - DNA, 56 bp, Homo sapiens
  chr2:157189364-157189420
  hyper
acgtcacgagcagggccgattttaaggtgggaaccgctctgcgttcaccttggtag

SEQ ID NO: 1149 - DNA, 96 bp, Homo sapiens
  chr2:157189481-157189577
  hyper
acctctcccaggtctgcgcagcccgcagcgtcgcgacacttcactttccccgaagcccctgcgcccgcgcagcggctcggccgctcacatgtgggg

SEQ ID NO: 1150 - DNA, 108 bp, Homo sapiens
  chr2:157292330-157292438
  hyper
ccagcgtgccggcggacgagtgtctcctctcccgcaggcagatggccagggcggcccgcatgggcgagggcacaggaaatcggacaccgccaccgtcttccccagcct

SEQ ID NO: 1151 - DNA, 177 bp, Homo sapiens
  chr2:157292445-157292622
  hyper
ctcaggctttccagtccgccagcccgctggcaaggcggggcggaggtctggagtccggcatcgccgaggcacaaagcaggaactgcagccaggggcgagggcccttgcgtgtggcgctgcgcgaccccacccggcggcaggacccgcgtccccgtctagtcacgttcattgggccac

SEQ ID NO: 1152 - DNA, 31 bp, Homo sapiens
  chr2:158484973-158485004
  hyper
cgaaggtcagtttgctcggagcaccccctgt

SEQ ID NO: 1153 - DNA, 31 bp, Homo sapiens
  chr2:158485185-158485216
  hyper
aggccccagagcagagcgaggcagccggggc

SEQ ID NO: 1154 - DNA, 75 bp, Homo sapiens
  chr2:158485223-158485298
  hyper
cccgctttgaagttcccgggccgcgggaggggagcgcggcaccgacacccttttgaagtgcgcggttggctctag

SEQ ID NO: 1155 - DNA, 31 bp, Homo sapiens
  chr2:158485822-158485853
  hyper
tgcctctggggaagggcgccctctctgttca

SEQ ID NO: 1156 - DNA, 31 bp, Homo sapiens
  chr2:158485859-158485890
  hyper
gaaatgaccagttgtccgactgccttctgga

SEQ ID NO: 1157 - DNA, 31 bp, Homo sapiens
  chr2:159313053-159313084
  hyper
ctgttcctacctttgacgccagggacaaacc

SEQ ID NO: 1158 - DNA, 199 bp, Homo sapiens
  chr2:159313328-159313527
  hyper
ccagccctctccttcccgccaatggggtggcgggagctggcccggggacggcggcgtgctgacgttcccgggagcccggggctggccgggcgggagggctggcagcggggcgggcggcggcggcggcctctgggcagtagagggggctccggggctgagtccgcgtcgacgccggccgcggaggcggcaccatgggcaa

SEQ ID NO: 1159 - DNA, 147 bp, Homo sapiens
  chr2:159313580-159313727
  hyper
ctccgggggcgggggccggtgggggagggaggggcgggcagccgcgccgccgcggcacttttttaattttttcgggtgccgcagcggcgacccctcggcgccgatgtccctgatccctggagcgacgacggccgctgcctaagctgg

SEQ ID NO: 1160 - DNA, 163 bp, Homo sapiens
  chr2:159313730-159313893
  hyper
gtaagtgtgtgggctcgcgggagggcgcggagactcctgcccacgagaccctcggccctcgccccgaacacgcgccagggccaggacctgcgcgccgggggccgggggcctccctcccgctgccgcgtccccagcgcctcgcggccgccgcggctttcctgcc

SEQ ID NO: 1161 - DNA, 103 bp, Homo sapiens
  chr2:159314097-159314200
  hyper
ctcgcggcggcttccccgctgcctgccgccgcgcgccccaagtcgccctcgacaccactgggcgcccgccctcctcagcactcggggccggctgtctgtcctt

SEQ ID NO: 1162 - DNA, 248 bp, Homo sapiens
  chr2:159314217-159314465
  hyper
accttggtcccctccccgtcttcccacgcccctgctgcccgcgcggtcttgcgtttgtccccgaagtcctgtactccttgccggtcctgcccacccctctgcctagtgcgcccctctctaccggccgcggatcctcacgctccacccctcccggctccccagcgccgagcctcgccgctgccctcctgcgccgccgcttcctcctctccctgccaggagttgaagcggagctgcggcacctccctggc

SEQ ID NO: 1163 - DNA, 66 bp, Homo sapiens
  chr2:159314657-159314723
  hyper
gggggacgcgcgctgccggctcctgggctggcgacagattgtgcaggaatgcgaggaatgcaccag

SEQ ID NO: 1164 - DNA, 71 bp, Homo sapiens
  chr2:159314726-159314797
  hyper
cagagtccacacagcccgccgcggctgccctagcgccttccctccccagctctcgccgcgcagccagaggt

SEQ ID NO: 1165 - DNA, 113 bp, Homo sapiens
  chr2:159825049-159825162
  hyper
gagaggaaggtgccttcgggaacacgcgcaagggcggggattcgcgctgccaatgaggccccggtgtgggccgagcaaggcggggggacgggccggagcggaggctttgctgt

SEQ ID NO: 1166 - DNA, 149 bp, Homo sapiens
  chr2:159825248-159825397
  hyper
ctgggtgtggggaaccgcgctgaggagctggaaactttcccggcaggtaactcccgcagcccggactccgccgcgggcctgcgagcgccccgggcatggccagctgccagtgtgcggagaggtcgagagggacccggggtggagagggt

SEQ ID NO: 1167 - DNA, 242 bp, Homo sapiens
  chr2:159825399-159825641
  hyper
tgggagaagggaaaggcgtgtgggaaagtttctggagcgccccctcctccgccgggcacacccgggagctttccgggaataggcacagacatgttgggcgccccgggccttggtctctcggcggctttggggagtccgcaccttccttgcgcggttcccccgcgccggaccgagccggcctcccctggaaccggtgtggtgggaaccgggaacgcttggggcacgctcgagttctgggacca

SEQ ID NO: 1168 - DNA, 64 bp, Homo sapiens
  chr2:159826350-159826414
  hyper
tgccagctccagatccgcgtgcctccagtgttgggaccgttctcagtggcgttgttccctgctg

SEQ ID NO: 1169 - DNA, 31 bp, Homo sapiens
  chr2:160142448-160142479
  hyper
ttttccaaacaaactccggctcccagccctc

SEQ ID NO: 1170 - DNA, 31 bp, Homo sapiens
  chr2:160142591-160142622
  hyper
cttggggtagggggggcggtgtgggcgttcc

SEQ ID NO: 1171 - DNA, 45 bp, Homo sapiens
  chr2:160142703-160142748
  hyper
tcattcaaagcaaacccgaaaggtgtccagcgctcccaaaataaa

SEQ ID NO: 1172 - DNA, 31 bp, Homo sapiens
  chr2:160142757-160142788
  hyper
ttacaccccccatgcacgaaagaccaggaat

SEQ ID NO: 1173 - DNA, 31 bp, Homo sapiens
  chr2:160142924-160142955
  hyper
aagggtgcacgaaccacgcctcgccgcactc

SEQ ID NO: 1174 - DNA, 58 bp, Homo sapiens
  chr2:160472575-160472633
  hyper
cgaggataaacagcggcggagggcgagagggcggcggggcgagcgcctccacgcagca

SEQ ID NO: 1175 - DNA, 31 bp, Homo sapiens
  chr2:160654434-160654465
  hyper
ggccacctcccctccccgagggcaggcgggt

SEQ ID NO: 1176 - DNA, 31 bp, Homo sapiens
  chr2:160760684-160760715
  hyper
caaggtgaccaagggccgaaggaaaagcgag

SEQ ID NO: 1177 - DNA, 26 bp, Homo sapiens
  chr2:160760872-160760898
  hyper
tcctcccacatccaccgcgccctcct

SEQ ID NO: 1178 - DNA, 31 bp, Homo sapiens
  chr2:160760980-160761011
  hyper
ccaacagcaaagcagccgtgacctgccccag

SEQ ID NO: 1179 - DNA, 153 bp, Homo sapiens
  chr2:160761037-160761190
  hyper
ggcagcagagctgtggcgtcgaggcacccagcggactgcggggctggcgtgcccgcggttacctgcgcggccagagggctccgcgagatcgaagaaccagaagagcagcatgaggagccccgccgggcggcgaggggtcgcccagcctgtcct

SEQ ID NO: 1180 - DNA, 134 bp, Homo sapiens
  chr2:160761232-160761366
  hyper
cacgcggctcccgccccgcctgctgagcgcggcctgccccgcccgcacctctgtctaggcctctgggggcgccccggccccgcccccgccgccctcggccaatcagacgtgcgtctcctcggccccggggcgga

SEQ ID NO: 1181 - DNA, 43 bp, Homo sapiens
  chr2:161349351-161349394
  hyper
gggaggctccgcgccacggcgaggggagcgaagagttacagct

SEQ ID NO: 1182 - DNA, 75 bp, Homo sapiens
  chr2:161560564-161560639
  hyper
aggaaatgggaaactccgccttcgcaagagcttgagtcgtctccgtgacctctgtggcctcgttgaaaggctttc

SEQ ID NO: 1183 - DNA, 31 bp, Homo sapiens
  chr2:161560642-161560673
  hyper
gaattgaatgacaacacggaggctgagggta

SEQ ID NO: 1184 - DNA, 31 bp, Homo sapiens
  chr2:161560675-161560706
  hyper
attgcaaatcagagaacgtgggtatgaatgg

SEQ ID NO: 1185 - DNA, 64 bp, Homo sapiens
  chr2:165477629-165477693
  hyper
tgtctgcagcacagccgcgggtcccgtccggaaggggcaggagcgctcgcgcgtgcagccaggg

SEQ ID NO: 1186 - DNA, 53 bp, Homo sapiens
  chr2:165697708-165697761
  hyper
ccctgcggggcgctgcgcgggctccagctcccaggcggcgcgtcactgctggg

SEQ ID NO: 1187 - DNA, 36 bp, Homo sapiens
  chr2:165697973-165698009
  hyper
gtggcgctgcagcccccgccccgtggggtttactgg

SEQ ID NO: 1188 - DNA, 37 bp, Homo sapiens
  chr2:165698273-165698310
  hyper
ctactcttcccttccccggcccgcgctcttgccgctc

SEQ ID NO: 1189 - DNA, 129 bp, Homo sapiens
  chr2:165698490-165698619
  hyper
tccgggagctcgccgccgcctctgcagcacggccgcacataagtggggaccagctcggcggcattggagcgagggaagcagcgagccggagagaggaacggggcgggggtgggccgggagcaagttgga

SEQ ID NO: 1190 - DNA, 46 bp, Homo sapiens
  chr2:165698623-165698669
  hyper
ccttcccccagggcttcgggtctttggggtccggctggggaagctg

SEQ ID NO: 1191 - DNA, 31 bp, Homo sapiens
  chr2:165873601-165873632
  hyper
caaaaattaaatcacacgttgtttgtatctc

SEQ ID NO: 1192 - DNA, 31 bp, Homo sapiens
  chr2:169312447-169312478
  hyper
agccctgaaaccccagcggggcaggagccag

SEQ ID NO: 1193 - DNA, 109 bp, Homo sapiens
  chr2:169312527-169312636
  hyper
gtcgactttaggtcgtcgccctaagcgcaaagcgaaagagcggtgagagcaggggcgggcgacactccccggagcggtgcccctgcgcccagggcgcagcgactgcgcc

SEQ ID NO: 1194 - DNA, 154 bp, Homo sapiens
  chr2:169312793-169312947
  hyper
gagccttcgagagcagcggccgcggaggaggcggcggcggcgggcgggagcagcggcggcggcggcacaggctcggggccagccgggcgcgcatccccgggcgccctgcgcggtggagagcttggcgggctgcgggtgccgcaggacaggagtg

SEQ ID NO: 1195 - DNA, 31 bp, Homo sapiens
  chr2:169313095-169313126
  hyper
ctgtatcttcatggtgcggctcatcttcgag

SEQ ID NO: 1196 - DNA, 59 bp, Homo sapiens
  chr2:169313239-169313298
  hyper
tcccaacctttgtgttcggggaggggttgctgacccccctgccccgctggctttctggg

SEQ ID NO: 1197 - DNA, 77 bp, Homo sapiens
  chr2:169313306-169313383
  hyper
agggtctggcttgccacggatttcctcccgggcgccggggaggagccgcggagcgttagggtcgccccctgccctcc

SEQ ID NO: 1198 - DNA, 44 bp, Homo sapiens
  chr2:169313388-169313432
  hyper
ggccctgctctcctcccggcaagggcaggcgaacaaaggtgagc

SEQ ID NO: 1199 - DNA, 49 bp, Homo sapiens
  chr2:169313660-169313709
  hyper
cttcctggcttctggtcgctgtttggtttttatccgtgaaactatcagg

SEQ ID NO: 1200 - DNA, 31 bp, Homo sapiens
  chr2:169313768-169313799
  hyper
agaggatgtgacaggacgggtccacatcctg

SEQ ID NO: 1201 - DNA, 49 bp, Homo sapiens
  chr2:171627263-171627312
  hyper
aatccgagggtgtgtgcgcccagtttccggcgccgcgggacacccacaa

SEQ ID NO: 1202 - DNA, 34 bp, Homo sapiens
  chr2:171627346-171627380
  hyper
cgccccgcccccccggacccgcctcccagccccg

SEQ ID NO: 1203 - DNA, 208 bp, Homo sapiens
  chr2:171627473-171627681
  hyper
gggctgcccctgcccccgcccccgcccccgccacctcccccgccgtcgcccaattcccccagcccccaccctcggctgctgcccgagcttcctccacgcgccgtgcagtctccacggcgacgctgcgttcccgactcggagcccccagctccgcgcgagcagctagccgggctggctctcggtgtgtgcccttcggatggtctgctga

SEQ ID NO: 1204 - DNA, 73 bp, Homo sapiens
  chr2:171627823-171627896
  hyper
ttctggctctgggccccgggccccgtggctgccaggggccgccgggaagggaggatgcgcgccactggggtgc

SEQ ID NO: 1205 - DNA, 48 bp, Homo sapiens
  chr2:171627930-171627978
  hyper
ggaagaggtgaggaagcgccgttcgtgtctacacgggtgtggagataa

SEQ ID NO: 1206 - DNA, 31 bp, Homo sapiens
  chr2:171673093-171673124
  hyper
tttccctcctctcacccgacagcctgcctat

SEQ ID NO: 1207 - DNA, 42 bp, Homo sapiens
  chr2:171673129-171673171
  hyper
aaggaaaaaaaaaaagcgtgttgagtacgttctggattactc

SEQ ID NO: 1208 - DNA, 62 bp, Homo sapiens
  chr2:171673178-171673240
  hyper
cttttttttttccttccgggcgcaaaaccgtgagctggatttataatcgccctataaagctc

SEQ ID NO: 1209 - DNA, 51 bp, Homo sapiens
  chr2:171673659-171673710
  hyper
cggccacccaacctcccgaaatgagtgcttcctgcccgccctagtccctgc

SEQ ID NO: 1210 - DNA, 76 bp, Homo sapiens
  chr2:172289936-172290012
  hyper
agcatgcccaagtccacgtgggagatacagcggccccacccttaagggacttagagcatggcggtgggacacatgt

SEQ ID NO: 1211 - DNA, 128 bp, Homo sapiens
  chr2:173037342-173037470
  hyper
ccgcggcccgctgggtcgcactgtggccttaggaatgtgggccggggcggggcggcttgggagcgcgctgcagccaacgccgcgttcagccccgggcgcaactgcagccgtgccgggggcctccgggg

SEQ ID NO: 1212 - DNA, 80 bp, Homo sapiens
  chr2:173037601-173037681
  hyper
gctgccgggagttaggcgcccgggcctgggtcgcccccacagacggctcggacggcacgaacgagcggaccccaaggata

SEQ ID NO: 1213 - DNA, 51 bp, Homo sapiens
  chr2:173292961-173293012
  hyper
taaacaaagtgctttccgccggttcttccctccgggcgtgtttgctgggac

SEQ ID NO: 1214 - DNA, 46 bp, Homo sapiens
  chr2:173940455-173940501
  hyper
gcaggccagggaggcccgagcgccttccccacgccccgctcgcccg

SEQ ID NO: 1215 - DNA, 106 bp, Homo sapiens
  chr2:173940629-173940735
  hyper
tgggagccgcgcgggccgctgtcgtcccaacccccgccgccctcgtcgcgcgcggggcctccgcgcccccggctgctgctcacgccccgcccgggagccaggtagg

SEQ ID NO: 1216 - DNA, 31 bp, Homo sapiens
  chr2:174349950-174349981
  hyper
tggaaagagaaatatgcgttgtagagagttc

SEQ ID NO: 1217 - DNA, 52 bp, Homo sapiens
  chr2:174349995-174350047
  hyper
tcaattggtataaatacgggcttcatgacctcaaattcgcagggtttatttc

SEQ ID NO: 1218 - DNA, 31 bp, Homo sapiens
  chr2:174350101-174350132
  hyper
tctgtttagattctggcgtctgaggtctttg

SEQ ID NO: 1219 - DNA, 31 bp, Homo sapiens
  chr2:174350137-174350168
  hyper
ttgaatgctgatagggcgataatgcatctaa

SEQ ID NO: 1220 - DNA, 31 bp, Homo sapiens
  chr2:175320206-175320237
  hyper
gatgtggccagaactccgtgaggaaggttaa

SEQ ID NO: 1221 - DNA, 31 bp, Homo sapiens
  chr2:175546697-175546728
  hyper
taacaaaggctcacagcgactgggtcagctg

SEQ ID NO: 1222 - DNA, 31 bp, Homo sapiens
  chr2:175546731-175546762
  hyper
tcccttacactcacaacgctaacagttcttt

SEQ ID NO: 1223 - DNA, 31 bp, Homo sapiens
  chr2:175546788-175546819
  hyper
gaaaaaggtaggggacgcgagactgaagtga

SEQ ID NO: 1224 - DNA, 62 bp, Homo sapiens
  chr2:175546899-175546961
  hyper
gagatgtctctaaggtcgacgcagacccctaacgcgcgcgtctacgccgacctggggcgagc

SEQ ID NO: 1225 - DNA, 158 bp, Homo sapiens
  chr2:175547470-175547628
  hyper
cgggtcgcgccagaggcgacgcgtcccttaccgcgcagcggctccggacgactccgcagccccgcgccgcgctgggcattttttctgggaaacttctcccggggtccgcagggctgagccgggcgggcaggaaaagcgctcagcgccgggaggctgcg

SEQ ID NO: 1226 - DNA, 103 bp, Homo sapiens
  chr2:175547790-175547893
  hyper
cggcccgcagaggatcgcggcggggcgggatggtcggggctggagtccgcagtttcctcagtcccgctcccctgcgcggcgaggggaccgaggcaagaggaca

SEQ ID NO: 1227 - DNA, 103 bp, Homo sapiens
  chr2:178937428-178937531
  hyper
tcctgttccggaaacccgagctatcgctgctcctgttctggctgccgccgctgctgctggaactgctgctgtaaccggatgagtggaccgctgtgacagggag

SEQ ID NO: 1228 - DNA, 31 bp, Homo sapiens
  chr2:179278427-179278458
  hyper
ccgctccctctgaattcgccgggcagggata

SEQ ID NO: 1229 - DNA, 44 bp, Homo sapiens
  chr2:179278637-179278681
  hyper
cggccctgctccctgacgtcagcgccgccgcggtgatttaacag

SEQ ID NO: 1230 - DNA, 52 bp, Homo sapiens
  chr2:179278709-179278761
  hyper
gcacaaaaagcaggaacgagtagcggtggctgaagaacgagcaggagcttga

SEQ ID NO: 1231 - DNA, 86 bp, Homo sapiens
  chr2:180129610-180129696
  hyper
gcgagtgggactctggcgctccggacggaccctgccgtccccacccctagccgaggcccaggctccccaggcgggaggcagtcttg

SEQ ID NO: 1232 - DNA, 31 bp, Homo sapiens
  chr2:182321356-182321387
  hyper
ggcaactgagtgggtgcgtgaaaagggggga

SEQ ID NO: 1233 - DNA, 36 bp, Homo sapiens
  chr2:182321396-182321432
  hyper
accagctggagcaatccgaatcggttaaagtgaatc

SEQ ID NO: 1234 - DNA, 38 bp, Homo sapiens
  chr2:182321472-182321510
  hyper
cagccacagcctaaaccgcctgccgttcagcctgagag

SEQ ID NO: 1235 - DNA, 42 bp, Homo sapiens
  chr2:182321513-182321555
  hyper
gctgctagcctgctcacgcatgcagcccgggctgcagaggaa

SEQ ID NO: 1236 - DNA, 31 bp, Homo sapiens
  chr2:182321606-182321637
  hyper
aagagaatagccataacgtctttgtcactaa

SEQ ID NO: 1237 - DNA, 34 bp, Homo sapiens
  chr2:182321640-182321674
  hyper
gttccccaggggccttcggcgagtctttttgttt

SEQ ID NO: 1238 - DNA, 92 bp, Homo sapiens
  chr2:182321745-182321837
  hyper
agtgtttaactatcaacgaaagaactggacggctccccgccgcagtcccactccccgagtttgtggctggcatttgggccacgccgggctgg

SEQ ID NO: 1239 - DNA, 153 bp, Homo sapiens
  chr2:182322038-182322191
  hyper
cgtaggcagagacggagcccggccctgcgcctccgcaccacgcccgggaccccacccagcggcccgtacccggagaagcagcgcgagcacccgaagctcccggctggcggcagaaaccgggagtggggccgggcgagtgcgcggcatcccagg

SEQ ID NO: 1240 - DNA, 268 bp, Homo sapiens
  chr2:182322399-182322667
  hyper
cgcgaacccggcccccgaagggccgccgtccgggagacggtgatgctgttgctgtgcctgggggtcccgaccggccgcccctacaacgtggacactgagagcgcgctgctttaccagggcccccacaacacgctgttcggctactcggtcgtgctgcacagccacggggcgaaccgatggtgagtagagttggactgatgcgccctcagcagctcagagcggcgtgagaatggcgccctagggattccctgcccgattcaaactttcc

SEQ ID NO: 1241 - DNA, 48 bp, Homo sapiens
  chr2:182322677-182322725
  hyper
ggaggcaggagggaaacgctgcgagagccagctcgctggaaatctgcc

SEQ ID NO: 1242 - DNA, 310 bp, Homo sapiens
  chr2:182322732-182323042
  hyper
ctaacttatcttggggcggcagcgccccgggtgcgttatggtgcaaggtcttggagcttcgagtcgggggtggtgggcggaggaggaggtggggaagctgccctgctgcggactgcacatctgtggcgacagggagctcagtgggcagcacagctcacgtctgagcgcacgtgcacgtgtctcgctttaggctcctagtgggtgcgcccactgccaactggctcgccaacgcttcagtgatcaatcccggggcgatttacagatgcaggatcggaaagaatcccggccagacgtgcgaacagctccagct

SEQ ID NO: 1243 - DNA, 31 bp, Homo sapiens
  chr2:182323064-182323095
  hyper
ggagttagtgacctcccgaccccccatgtgg

SEQ ID NO: 1244 - DNA, 31 bp, Homo sapiens
  chr2:182323112-182323143
  hyper
gtcctggaaagattcacgttgcctgttactt

SEQ ID NO: 1245 - DNA, 31 bp, Homo sapiens
  chr2:182756672-182756703
  hyper
gcccgcttcagctccccggggccccctgccc

SEQ ID NO: 1246 - DNA, 74 bp, Homo sapiens
  chr2:182757522-182757596
  hyper
agcttcctcctctaagcgattagaaatggaagtgctgtgaccgctgattatttggtgaccgtgttgactttaca

SEQ ID NO: 1247 - DNA, 36 bp, Homo sapiens
  chr2:182757600-182757636
  hyper
ggacttgagctactcacgcatcgtgttagcatcaga

SEQ ID NO: 1248 - DNA, 58 bp, Homo sapiens
  chr2:182818944-182819002
  hyper
agggacccctccccccgcgccccactacccgctaaccgcctcccgccacacacacaca

SEQ ID NO: 1249 - DNA, 31 bp, Homo sapiens
  chr2:182819013-182819044
  hyper
acacacacaccccgcgcgcgcgcacacacac

SEQ ID NO: 1250 - DNA, 52 bp, Homo sapiens
  chr2:182819047-182819099
  hyper
ccccaccccaccaccccgacctccacatacattcccccgaccccctccagca

SEQ ID NO: 1251 - DNA, 75 bp, Homo sapiens
  chr2:182819101-182819176
  hyper
gaagtctaagagcaccgcgaagtaatttaaattttcgagggaaagcacagcgccatctgtcggacatcatgccaa

SEQ ID NO: 1252 - DNA, 31 bp, Homo sapiens
  chr2:182819185-182819216
  hyper
ttaagttcctacctgacggttactttatact

SEQ ID NO: 1253 - DNA, 49 bp, Homo sapiens
  chr2:182819250-182819299
  hyper
acagtgaaaaatgtaccgagaccttggagagccacgaaccaagaaactt

SEQ ID NO: 1254 - DNA, 31 bp, Homo sapiens
  chr2:183902296-183902327
  hyper
tcactgctgccatctccgtaagaatatggaa

SEQ ID NO: 1255 - DNA, 31 bp, Homo sapiens
  chr2:183902341-183902372
  hyper
tacccacctagaatttcgcccacccaccacc

SEQ ID NO: 1256 - DNA, 15 bp, Homo sapiens
  chr2:183902386-183902401
  hyper
ggccccatcatgggg

SEQ ID NO: 1257 - DNA, 44 bp, Homo sapiens
  chr2:183902442-183902486
  hyper
cgcccccaccccgtgcgaggcccagcgcccgatcccgccgccgg

SEQ ID NO: 1258 - DNA, 121 bp, Homo sapiens
  chr2:183902679-183902800
  hyper
cccgcccgcctccgccgcggcctccccggcccgtgcgcaccttcttgatgttgtagaggcgggtgagcatgccgacgccccggtcgttgaggatggtgagcttctccgccagcttctgctg

SEQ ID NO: 1259 - DNA, 31 bp, Homo sapiens
  chr2:183902804-183902835
  hyper
ggctgcagcactgagcgcgacatggtggtgc

SEQ ID NO: 1260 - DNA, 31 bp, Homo sapiens
  chr2:183902865-183902896
  hyper
gcccagtcacgggcccgcggccttcgcagca

SEQ ID NO: 1261 - DNA, 58 bp, Homo sapiens
  chr2:183902905-183902963
  hyper
gggcctcctcccctcccgcccgcgacctccgccttaggagagcgcgcccatggccctc

SEQ ID NO: 1262 - DNA, 45 bp, Homo sapiens
  chr2:183902964-183903009
  hyper
cgccccaatcccgcgccggcgacagagcgagccgcggcggactcc

SEQ ID NO: 1263 - DNA, 178 bp, Homo sapiens
  chr2:183903037-183903215
  hyper
cgccccggcagcctcctgccttccgcccgccgcccttccgcccccacccccggcgctctccgccccagcccccaacgagccgccttccccggctgctccactaggtgtggcggcggcggcggcggcggcggcgtctccggcggctgagaacgaggccgcttcccgcagccccggacgg

SEQ ID NO: 1264 - DNA, 190 bp, Homo sapiens
  chr2:183903236-183903426
  hyper
agcgccggcgcccccgcgaggccggacggggaactgcggccgacgggccctcggcatggcctcgccgccgccgctctggccctggccctggcccggaccgcccactacgcctgatgccgggatgggagtcccaagcggggactgagtggggtcgcgttgtgtgctctttccacttcgccccacaccccac

SEQ ID NO: 1265 - DNA, 39 bp, Homo sapiens
  chr2:187454989-187455028
  hyper
cgggcactgggcgcctcgctggggcggggggaggtggct

SEQ ID NO: 1266 - DNA, 61 bp, Homo sapiens
  chr2:187455150-187455211
  hyper
gcgccttcaacctagacgtggacagtcctgccgagtactctggccccgagggaagttactt

SEQ ID NO: 1267 - DNA, 58 bp, Homo sapiens
  chr2:187455216-187455274
  hyper
tcgccgtggatttcttcgtgcccagcgcgtcttcgtaagtggccgcacttggaactgg

SEQ ID NO: 1268 - DNA, 125 bp, Homo sapiens
  chr2:190445656-190445781
  hyper
tccccgcgcccttgcccggaggagtcgcccaccccgggcgcaagcgtccaaccggccgcagacaccctgcgcggcttgcggggaccttcgcctcgacgcgttccactccccgggttttcctgctc

SEQ ID NO: 1269 - DNA, 35 bp, Homo sapiens
  chr2:190445796-190445831
  hyper
gggcaacctcggggggcggccgtggggctgggaaa

SEQ ID NO: 1270 - DNA, 40 bp, Homo sapiens
  chr2:191513081-191513121
  hyper
ggttcttccagcgccgcgcacctgccgccccttcctccat

SEQ ID NO: 1271 - DNA, 36 bp, Homo sapiens
  chr2:192109886-192109922
  hyper
cccgggtgcggagggtcgggccgcaaacccgcaagg

SEQ ID NO: 1272 - DNA, 117 bp, Homo sapiens
  chr2:192110380-192110497
  hyper
cctgcccttccctctgcgtccgtcgtcggcccccgaggcgcctgctccgcgcctttgtgcccgcggtccctggccccgtcgcaccctgcgggcgggggtcagcgggctctgccgctc

SEQ ID NO: 1273 - DNA, 31 bp, Homo sapiens
  chr2:198174652-198174683
  hyper
gcagaccgtagcccaccgcctgtgagtggag

SEQ ID NO: 1274 - DNA, 31 bp, Homo sapiens
  chr2:200604746-200604777
  hyper
gccgccagaagaacttcgagggtggaaaaca

SEQ ID NO: 1275 - DNA, 31 bp, Homo sapiens
  chr2:200604795-200604826
  hyper
aattaatttcaattaccgcaccttttttcac

SEQ ID NO: 1276 - DNA, 40 bp, Homo sapiens
  chr2:201171094-201171134
  hyper
gaggtttggggaaaggcgaggaagtcggtctggagcaagc

SEQ ID NO: 1277 - DNA, 134 bp, Homo sapiens
  chr2:201171184-201171318
  hyper
aaggagctagggagggcgtgtggagggacgagatctgtgtcagaacgtgcgtgtgagcggatacaaaacccgagagaggcgtgagcagcgctgtgtttgcgagcgggagcgaggggcgccggctggggtgtgtg

SEQ ID NO: 1278 - DNA, 103 bp, Homo sapiens
  chr2:201171396-201171499
  hyper
cgtggggcggccgagccggagttgtgtcagtgaaggaatccagtccgggggccgagctggctgcgccctccgctgcaagcgccggcagcgcggggcgagctcc

SEQ ID NO: 1279 - DNA, 405 bp, Homo sapiens
  chr2:201171603-201172008
  hyper
cggctccggcccgggacggaggagccggcgctcgacacagaggtaagcccaggaccccctccacgccgggccggctggggatgcagggcgcgggcggacgcggaggggcctgcgcggccgggacggagactcggctgggccgagcattccgcagcccgggccgcccagcctccgccgcctcccggagcgctgggtgtggcccgcgctcggcgccgaggcgggctggtggcgcggaccggacgcgaaggtcgccgtccttcctttctccagccggcgcgggcaagcgggaggaggcgccggctgggacgcacagtggcgctccccgggcgagcgtgtggccgccgcgctccgacgtgtacccgcccgccccggatctgaatcgcccgcggccgccgtccctcgcct

SEQ ID NO: 1280 - DNA, 226 bp, Homo sapiens
  chr2:201172122-201172348
  hyper
gccctcggatcccagccgggtgcgggggccgcggccccactgaaccccgcgcccctggcgcccagcgggagtgggatgcgttggcgtccgcgctgcgcgggtgggctggggtggccggagcagacgcggagcgccctggccgcgggacgaagcggtcgcgccgccgcatttgggcggggggaccccggagtccgcgggctgcggaccccagcgggagacggggttg

SEQ ID NO: 1281 - DNA, 31 bp, Homo sapiens
  chr2:201172568-201172599
  hyper
gagacctgacacttttcgtgaaagattcttt

SEQ ID NO: 1282 - DNA, 82 bp, Homo sapiens
  chr2:204399881-204399963
  hyper
ctcgcgctcctccagccgctgcctccgcctcctccccaggcgcggcgctccctcgccagagacgcagcgactgccagcagct

SEQ ID NO: 1283 - DNA, 89 bp, Homo sapiens
  chr2:205409781-205409870
  hyper
gttcctaacaggccctcggggcactcctgcatctccgcacccggcagcctcgccccttgggtgtttttggtgggcgtgactagaagcac

SEQ ID NO: 1284 - DNA, 31 bp, Homo sapiens
  chr2:205409904-205409935
  hyper
cccctcctgtgaagggcgcagctctgcagtc

SEQ ID NO: 1285 - DNA, 700 bp, Homo sapiens
  chr2:205410072-205410772
  hyper
gacgagacgaggctcccgggctccagttactggcccgcagggccggggcacgtcgtcgcccagcgtgcggcggggcccgggagcgccgcggcccctttaagagccgggcccaggccgtcgccgggaccgcaggagcccagagcgcgggcgccgcagaggagttgggagccggcgcaaaagtttcctcccaactctggccccgtgcgccgccgccgccgccgcccactccagcccccggcttggggccggccctgccaacgccgccagggccagggccagggccaggaccagcgacagggcagggccggcagtttcgctttggtgggcgcggagcagccgcctgggccgggcaggagtaggagcgggaggaggaggaggaggagccggtgccgcggagctgccgcgtcccgggccgccgggcacctgggaggtaacccctttccgcggccgcccctccccgattcccgccacctgccgcctggccaggtggaaggggcgctgccgcgagcctccgggcctcagggtgttccggggagcggcgccccgggtctctgggcccacccgccccgggcgtcctccgagagtgggggctgcgcccgcggggtcagacacctgttcggcccggcccggcgtggtcgccgggggccaggatgaaagtgaccgtgtgcttcggcaggacgggcatcgtggtgccctgcaa

SEQ ID NO: 1286 - DNA, 106 bp, Homo sapiens
  chr2:205410817-205410923
  hyper
gcggtacctgaagacccgggagaaggtgagcgcggcgcggaggagtggggcgcggctgcagccaaggcacctgccaggtgcgacccggtggcgacactcaggggat

SEQ ID NO: 1287 - DNA, 31 bp, Homo sapiens
  chr2:206166172-206166203
  hyper
tttttctctgtacagacggtctgtctgataa

SEQ ID NO: 1288 - DNA, 49 bp, Homo sapiens
  chr2:206750498-206750547
  hyper
catggcgggagaacagcgccctcgtgtggactgccgggttcttggtgct

SEQ ID NO: 1289 - DNA, 31 bp, Homo sapiens
  chr2:208395299-208395330
  hyper
ctcgtccggcccccgccgcccgcctcgcccc

SEQ ID NO: 1290 - DNA, 150 bp, Homo sapiens
  chr2:208633393-208633543
  hyper
cccggcccaccagctgcgctaggagcagcagcaacagcgagggcggcgcggatgggtcaggccgagccatcgccccctccctcccctcgcctccagcagcccgcgagggacgcacacaggcagaggaatccgggccggggcttctccctc

SEQ ID NO: 1291 - DNA, 50 bp, Homo sapiens
  chr2:208633755-208633805
  hyper
ctccctgttggagaggcgtcaacagttcggtccccgcgagctgtctccaa

SEQ ID NO: 1292 - DNA, 36 bp, Homo sapiens
  chr2:208633821-208633857
  hyper
cctttcctttcctccccgctccgcctcctgtaacca

SEQ ID NO: 1293 - DNA, 86 bp, Homo sapiens
  chr2:209118760-209118846
  hyper
gacagcccagtttatccggtttaaagtacagtgctgagtgtactcggtgggacaaaggccaattttaggcccgcaggcactttcca

SEQ ID NO: 1294 - DNA, 37 bp, Homo sapiens
  chr2:209118862-209118899
  hyper
gcacaatttatctctgcgtgtgcgagggcgtgccccc

SEQ ID NO: 1295 - DNA, 31 bp, Homo sapiens
  chr2:216826037-216826068
  hyper
ctgggcaggtcaaactcggatgtaggtatct

SEQ ID NO: 1296 - DNA, 31 bp, Homo sapiens
  chr2:218802244-218802275
  hyper
ttctgggagtctcagccggtgattagggccc

SEQ ID NO: 1297 - DNA, 41 bp, Homo sapiens
  chr2:219261656-219261697
  hyper
tccctgtggcaggatgcggtgaagggcgctgcccgtgacgc

SEQ ID NO: 1298 - DNA, 31 bp, Homo sapiens
  chr2:219263996-219264027
  hyper
gagagttagaatttcacgtcctacagaccgg

SEQ ID NO: 1299 - DNA, 140 bp, Homo sapiens
  chr2:219264032-219264172
  hyper
cctcgccctggggctgcggggggcggcgaccgtcccattcaagagcgtgattctgaggtttgcacagctgtttcgggccagcagagccttcgctggctcttgacgtccttgcgaggtgatctctgcgaccaccagacagg

SEQ ID NO: 1300 - DNA, 237 bp, Homo sapiens
  chr2:219264205-219264442
  hyper
atctccaagtcctcaacgaggaaaccgagaagcctctagtcccgggtcttcagaaaacgcagaggtggagccgcgccgcactcgggcactccccggcgtgggcgctcccggcgggcgggccttggccgagggcgctcggcggcctggaacggtgagccgggtgccgggcctgccacgcagccgcagagactcagccccgccggcgggcggcaggaagggaggcgacgccccctggag

SEQ ID NO: 1301 - DNA, 79 bp, Homo sapiens
  chr2:219724230-219724309
  hyper
agcccttccttgcccccgactccaggcggccgcgagcggcggggggctccaagtccgagagaggcgaggcgagggggcg

SEQ ID NO: 1302 - DNA, 36 bp, Homo sapiens
  chr2:219735641-219735677
  hyper
ggcatgtcacagctcccgctgcgggctgagtggggc

SEQ ID NO: 1303 - DNA, 46 bp, Homo sapiens
  chr2:219735784-219735830
  hyper
catctgcaggaaggcacggcggctggccgggcggcaggccgagttg

SEQ ID NO: 1304 - DNA, 31 bp, Homo sapiens
  chr2:219736006-219736037
  hyper
tccctgctgtgggacccgaggagaggagaac

SEQ ID NO: 1305 - DNA, 31 bp, Homo sapiens
  chr2:219736150-219736181
  hyper
ccaggccccagctgaccgccccagcccgcgc

SEQ ID NO: 1306 - DNA, 31 bp, Homo sapiens
  chr2:219736284-219736315
  hyper
gcgagctgctgcagtgcggctgccaggcgcc

SEQ ID NO: 1307 - DNA, 196 bp, Homo sapiens
  chr2:219736318-219736514
  hyper
cgggcgggcccctccccggccctccggcctgcccggcacccccggaccccctggccccgcgggctccccggaaggcagcgccgcctgggagtggggaggctgcggcgacgacgtggacttcggggacgagaagtcgaggctctttatggacgcgcggcacaagcggggacgcggagacatccgcgcgttggtgcaa

SEQ ID NO: 1308 - DNA, 31 bp, Homo sapiens
  chr2:219757765-219757796
  hyper
cccgacttctgcgagcgcgagccgcgcctgg

SEQ ID NO: 1309 - DNA, 235 bp, Homo sapiens
  chr2:219757800-219758035
  hyper
ggcgggcaccgtgggccgcctgtgcaacaagagcagcgccggctcggatggctgcggcagcatgtgctgcggccgcggccacaacatcctgcgccagacgcgcagcgagcgctgccactgccgcttccactggtgctgtttcgtggtctgcgaagagtgccgcatcaccgagtgggtcagcgtctgcaagtgagcggcccggggtcccctgggccctgatcgaggtcccctcctg

SEQ ID NO: 1310 - DNA, 51 bp, Homo sapiens
  chr2:219758041-219758092
  hyper
ggccctctgaggcttacggtcttggcaaggcagcatcgccttggctcttgg

SEQ ID NO: 1311 - DNA, 100 bp, Homo sapiens
  chr2:219824276-219824376
  hyper
catcaggagtgcaactcgggagcggattggccgcgtgaggcggggcacggcgcgacgaaaaaaggggcccaaggggtggggctgacgctgcagctggcgc

SEQ ID NO: 1312 - DNA, 31 bp, Homo sapiens
  chr2:219924976-219925007
  hyper
gatcttgccttcatagcgtccgctggcgccc

SEQ ID NO: 1313 - DNA, 31 bp, Homo sapiens
  chr2:220408153-220408184
  hyper
tcctccacccaggtgacgctgagcaggctca

SEQ ID NO: 1314 - DNA, 31 bp, Homo sapiens
  chr2:220408748-220408779
  hyper
cgtcaggagcagaggccggagctgtccatca

SEQ ID NO: 1315 - DNA, 43 bp, Homo sapiens
  chr2:220492469-220492512
  hyper
accgcggggcggggcacgccgggcagggcgggggacccgggct

SEQ ID NO: 1316 - DNA, 94 bp, Homo sapiens
  chr2:222437144-222437238
  hyper
ttcaccgagcagggcccgccccagggttccgccccctccgggctccacggggcgcgcggtctcccggggctctagggggcgagcacggccggtc

SEQ ID NO: 1317 - DNA, 41 bp, Homo sapiens
  chr2:222437313-222437354
  hyper
ggactttggaaaagctcggaattgaccgaggggagccagag

SEQ ID NO: 1318 - DNA, 40 bp, Homo sapiens
  chr2:222437650-222437690
  hyper
cctacttggtccccaacgtccagtccgcagcagggctccg

SEQ ID NO: 1319 - DNA, 102 bp, Homo sapiens
  chr2:222438668-222438770
  hyper
ctcctaacaaaccttccgggggttgcctgagtggctgctctcggaaaagcggatcctaaataaagcgggagggttatagggcgacgtcgaggagaggacagg

SEQ ID NO: 1320 - DNA, 55 bp, Homo sapiens
  chr2:223158944-223158999
  hyper
tccttcctctccaagtcggcctcctcctcttcacctttcccgaatttacttctca

SEQ ID NO: 1321 - DNA, 31 bp, Homo sapiens
  chr2:223161525-223161556
  hyper
ccagggcgcgtgcacacgtacacacacacac

SEQ ID NO: 1322 - DNA, 95 bp, Homo sapiens
  chr2:224809097-224809192
  hyper
aggtcccaggctagtgcgacaccgcaggtcggggttccctggttggaggagcgcggtgggctgggaggggcgcgttggtgcgcactggaacaggg

SEQ ID NO: 1323 - DNA, 31 bp, Homo sapiens
  chr2:225381703-225381734
  hyper
tactgtcataactaatcgtgttttacttctc

SEQ ID NO: 1324 - DNA, 52 bp, Homo sapiens
  chr2:225906312-225906364
  hyper
gaaaaatatcagaaaccgctggagacctaatgacccacgtctcctccagcct

SEQ ID NO: 1325 - DNA, 31 bp, Homo sapiens
  chr2:225906403-225906434
  hyper
gtgggtttttaccctgcggtgggagggctgt

SEQ ID NO: 1326 - DNA, 101 bp, Homo sapiens
  chr2:225906438-225906539
  hyper
agtacatctatttctgcgatagttaacgtcggggggccccagctctaaccagggcgaggaccacggactgcatccctctctctcagcgcactggtctgttt

SEQ ID NO: 1327 - DNA, 42 bp, Homo sapiens
  chr2:225906542-225906584
  hyper
ggagggtgagagggacgcgcagacctccggactcaggggttc

SEQ ID NO: 1328 - DNA, 94 bp, Homo sapiens
  chr2:225906594-225906688
  hyper
atccccccaccccacccggggtctctggcactcgtatcacttagcaccagtgtgactggcggtgcattccggccccctcgcgccccattaaagc

SEQ ID NO: 1329 - DNA, 87 bp, Homo sapiens
  chr2:225906691-225906778
  hyper
tgcacatcctctcccacgctgcgcttctgctacccacgcagctgctcctctgagcgtcccgcgtgcacaaacgcgcccccggtcctt

SEQ ID NO: 1330 - DNA, 458 bp, Homo sapiens
  chr2:225906790-225907248
  hyper
cgctgcctcgctgaggtggcgccgggggagcccgcagaggcggcgggggagggagtgcggaggagaggacccgtgagctgcggggacctgggcccgccgagcttttggggaagctgggctccgttccccccgggcgcctggggcgcgcgggaaggcgcggaggacgcgccgcactcacccgctgctgctgccggctgctgactgccaccgcggcggcggacgcggcgctgtgccggagctcggccgcctgcccaggtctcaacaggctccgggtgaacctgcgggtccgctcaccggccatcgccggtcacgccaatcgcgccgcgggcccggggcgcgcctcccgccggtcttccccgcgccaaccttctctatccacccgccgttcaggaagcggaactcggagccttcccccccctcttcctcgctcaactcgcaagaggcgggtttttctctct

SEQ ID NO: 1331 - DNA, 85 bp, Homo sapiens
  chr2:225907276-225907361
  hyper
ctcctctgaagcttctcgaagactttccaaactctgcgctcccccgggcgcgcgcggccaactcggctggcggccgggccctgca

SEQ ID NO: 1332 - DNA, 94 bp, Homo sapiens
  chr2:225907439-225907533
  hyper
cggccggggctgtccacgccgcccgggggaactgcaggctgcgggggagggcggggggcggccgccgaggggctccgggcggggcctgtccaag

SEQ ID NO: 1333 - DNA, 62 bp, Homo sapiens
  chr2:231902080-231902142
  hyper
ccctcttcctcccacccgggcccgcgatgcgggctgcgcccaggggcgcgtgcacacagagg

SEQ ID NO: 1334 - DNA, 128 bp, Homo sapiens
  chr2:231902159-231902287
  hyper
ggggtccggctgggctcggccctcgggggcgtgtcctctgtgccggggcgccaccgccccgagaggcgggcagcgggtgcgcccgggccgcggcggccgcagagggcgggcggcggccagcatggagc

SEQ ID NO: 1335 - DNA, 48 bp, Homo sapiens
  chr2:231902294-231902342
  hyper
ggaggcgctggcggcccggcttgcgcgccctgccgagccgcccttcca

SEQ ID NO: 1336 - DNA, 100 bp, Homo sapiens
  chr2:231902439-231902539
  hyper
cgggcggtgttcccgccggagccaggcgcggccaagccgggcggcgcggcggcagagggcgcggggcccggggcggcgcgcggggcgcagagggcggcga

SEQ ID NO: 1337 - DNA, 110 bp, Homo sapiens
  chr2:231902829-231902939
  hyper
tactgccccggcctcccggcctcctgcctggccgtccaggcggccgcctgcagggccctgcaagccgccggagccgggcaaccaggtgagactgcgcggggcccggctgg

SEQ ID NO: 1338 - DNA, 53 bp, Homo sapiens
  chr2:232479319-232479372
  hyper
ttgtgcgcaaagttgacggtcaccgggcccgcgcgcttcggcatctcgcgaag

SEQ ID NO: 1339 - DNA, 52 bp, Homo sapiens
  chr2:232526937-232526989
  hyper
gcagtgccggcgagcccggctccggcccttgagagtccgctccaggccgctc

SEQ ID NO: 1340 - DNA, 39 bp, Homo sapiens
  chr2:232539452-232539491
  hyper
gcctcgaccatttgtacggaacaccgtgttctgtctgct

SEQ ID NO: 1341 - DNA, 58 bp, Homo sapiens
  chr2:234699502-234699560
  hyper
ttataacaggaggtgacgggtatgaagagagcagccaaatgggcgtttgagatctggc

SEQ ID NO: 1342 - DNA, 185 bp, Homo sapiens
  chr2:235860166-235860351
  hyper
ccaaggtgtagtaaagcgtctccgaacgcggcgcgaccctcgcccacgcccgctcgcggggggaccgcaccgccccaggggtcctcgctaggggttcccggagaaggggtgggagatgggggtgcgggggggcacaggagcgcgggccagcacccagacctgctcggtaccggggacccagaccc

SEQ ID NO: 1343 - DNA, 134 bp, Homo sapiens
  chr2:235860416-235860550
  hyper
gcccagactggatacccgcctggacccggagccgcggcaccacccccagcccgccccacgctcgccagcctcagacggccgcgccccgccccgcccctctcccgaagccccgccccggcgcgggaccaccccct

SEQ ID NO: 1344 - DNA, 130 bp, Homo sapiens
  chr2:235860594-235860724
  hyper
cccccgcccccgcccccgcccccgcccaggcgcgggaccaccctccgcccgccgaggcgggggcccagcgcgcccggcactctcggcggtccgggcccctcgccactaccgccgccgccgccgccgtgag

SEQ ID NO: 1345 - DNA, 224 bp, Homo sapiens
  chr2:235861073-235861297
  hyper
gttccgggcgccgagccgcagccctccgcgtgcgctcgggccgccccccaaccccggctctggccacttcccggcgggcggccctgcggggtggcctccctgggcaaccggacgcgtcctcgggcgcaaatcggggggcgcgctcggctcacgggggccgtgggggccacgggagggcgtggaggggtcggggcgcccccctcgagcggcgctggggaggaggg

SEQ ID NO: 1346 - DNA, 61 bp, Homo sapiens
  chr2:236402445-236402506
  hyper
ccagtgtgaacaccccgcgcacccccctggcccggcccgccgggggcgcggactacaagtc

SEQ ID NO: 1347 - DNA, 107 bp, Homo sapiens
  chr2:236402571-236402678
  hyper
gaagcgccgaggaggacgcagcgccggcggccggagggcggcaagcgcgcgggcaggcggggcgcgggcgcgggcgcgggcgagggcgaaggcgggggcggggccga

SEQ ID NO: 1348 - DNA, 40 bp, Homo sapiens
  chr2:236402950-236402990
  hyper
ctttaatggctgctccgcggagcagcgcctagggctggaa

SEQ ID NO: 1349 - DNA, 59 bp, Homo sapiens
  chr2:236403138-236403197
  hyper
gccatgaactgagcccgcgggccagccccgcgcctgctccgcccgcgcctttcttctcg

SEQ ID NO: 1350 - DNA, 62 bp, Homo sapiens
  chr2:236403226-236403288
  hyper
ggctccccgggggctgcggcgccccgggctcggcggcccgcgggccccggggcgcggggcgg

SEQ ID NO: 1351 - DNA, 41 bp, Homo sapiens
  chr2:236403741-236403782
  hyper
ctgcgggaaagtggctcggtgcctccgcgtcctgggctgcc

SEQ ID NO: 1352 - DNA, 104 bp, Homo sapiens
  chr2:236404012-236404116
  hyper
agagccagccctagccgcgggagcatcgtgtccaggtgcccctgtgcaaacgctggaaccggtagtgtgctttgtaccaaccaaaagtccggggttggattaga

SEQ ID NO: 1353 - DNA, 31 bp, Homo sapiens
  chr2:236404126-236404157
  hyper
taccaggagggcagggcgtcctccagcggaa

SEQ ID NO: 1354 - DNA, 31 bp, Homo sapiens
  chr2:237436059-237436090
  hyper
tccttcccaatatgggcgccttttttctaga

SEQ ID NO: 1355 - DNA, 31 bp, Homo sapiens
  chr2:237436091-237436122
  hyper
aagaaaattttagttccgtttcttcttccag

SEQ ID NO: 1356 - DNA, 31 bp, Homo sapiens
  chr2:237436126-237436157
  hyper
gagacctttcactaaacgacacattactgcc

SEQ ID NO: 1357 - DNA, 31 bp, Homo sapiens
  chr2:238200161-238200192
  hyper
ctctggatgaagcctccgcatctggtttcca

SEQ ID NO: 1358 - DNA, 50 bp, Homo sapiens
  chr2:238384222-238384272
  hyper
ctctgtcgccccctcccggagcggaggagtcacggcgggaaacagcccga

SEQ ID NO: 1359 - DNA, 31 bp, Homo sapiens
  chr2:238791402-238791433
  hyper
ggccctggagagaacacgaaggcacaaatag

SEQ ID NO: 1360 - DNA, 52 bp, Homo sapiens
  chr2:238876149-238876201
  hyper
ggctgcctgccttgtacggaggaagcggggcgtccagcgcctggccaaggtc

SEQ ID NO: 1361 - DNA, 79 bp, Homo sapiens
  chr2:239148239-239148318
  hyper
agcgcgctcccggacccgcccgcccgccccgcagccccacggcgcctgcccggccgccgcacctcggcgcccgccagca

SEQ ID NO: 1362 - DNA, 31 bp, Homo sapiens
  chr2:239148419-239148450
  hyper
cgcacggcctcccgcccgcttgctcgcccat

SEQ ID NO: 1363 - DNA, 40 bp, Homo sapiens
  chr2:239148489-239148529
  hyper
gccgtcctcatcctcacggcccacacggtcccggccaggc

SEQ ID NO: 1364 - DNA, 193 bp, Homo sapiens
  chr2:239148533-239148726
  hyper
cgggtggcgccatgcccgctccgccggggacgcggcaggggctaggagcagcggggacggggagcggcggggaccggagtgccggcgccctccgctgccccgcggccgcccagcagcagcccagccgtccgcgctcctcgcggcttccggcccgccgcggtcccgccccttttatagccgcttatttgcatct

SEQ ID NO: 1365 - DNA, 252 bp, Homo sapiens
  chr2:239148736-239148988
  hyper
attggccgcgcgggcccggggcggccgaccgcgaggcgcgctgcagccaatcggggcagcgcgctttgtccggcccagcggctctggcggtcgggcagctggctgagctaggcggggcccccagcccggccttccctagacccccgcgggggcggcaccggggcggcgaccccgggtagctgcggccctgcccgcgcttgtttctctccgtctgctgctctaggaccactgatctgccgcgcgtgcgagcag

SEQ ID NO: 1366 - DNA, 31 bp, Homo sapiens
  chr2:239149126-239149157
  hyper
agccacagtcaagtccgcggtctctggacct

SEQ ID NO: 1367 - DNA, 138 bp, Homo sapiens
  chr2:239149158-239149296
  hyper
gaggggtttcaggtcccggctggggtggctgccaagccccggggaggcagggtccattgggcagcggtggcggggcggcccctgagtttcttccggactcgtccagacgccgggccggacccccgacgccgccctccg

SEQ ID NO: 1368 - DNA, 31 bp, Homo sapiens
  chr2:240294440-240294471
  hyper
caacaggaaacctttgcgtggttgctgtcca

SEQ ID NO: 1369 - DNA, 31 bp, Homo sapiens
  chr2:240965329-240965360
  hyper
agaaaacaaaagcacacgctccaagtccatc

SEQ ID NO: 1370 - DNA, 37 bp, Homo sapiens
  chr2:241374578-241374615
  hyper
ggaggcgccgggagagcgttctcggggcgcgctgcca

SEQ ID NO: 1371 - DNA, 68 bp, Homo sapiens
  chr2:241375297-241375365
  hyper
ggcgcgggcgggtggccgggggcgccgccggccccgccatggagctccgggcccgaggctggtggctg

SEQ ID NO: 1372 - DNA, 223 bp, Homo sapiens
  chr2:241375406-241375629
  hyper
cccggccagcaagagccggagctgcggcgaggtccgccagatctacggagccaagggcttcagcctgagcgacgtgccccaggcggagatctcgggtgagtgagggcgcggcgccgggaacccgggcctggccgggctttgggctccggaccctggtcttcccgacgcggctactcgcccccggcgcgggatcctgccgcctgcgccccgccgcccgggcccc

SEQ ID NO: 1373 - DNA, 31 bp, Homo sapiens
  chr2:241902830-241902861
  hyper
catggggtgagcaaagcgcatggggaccaag

SEQ ID NO: 1374 - DNA, 52 bp, Homo sapiens
  chr2:241938220-241938272
  hyper
cgccagcgccccgtcccgcccgcacacctccgcgatgcggcacggcgtcgcc

SEQ ID NO: 1375 - DNA, 40 bp, Homo sapiens
  chr2:242448318-242448358
  hyper
gtcgtctccgacgttacggcggccgcgcggccctctccct

SEQ ID NO: 1376 - DNA, 108 bp, Homo sapiens
  chr2:242498018-242498126
  hyper
gccgctccggcctggtcgccttctccgggcgcatccagggaactcgctcggtcctccttaagcggggaagctcggaaagcgtctccccgactccgcccccagggttgc

SEQ ID NO: 1377 - DNA, 118 bp, Homo sapiens
  chr2:242498147-242498265
  hyper
cccaagcccagcctctcgccagctgggagtcgcgcgctgcccacctcgctgcccaggcccccgacgccgcggcaggagccccccaagagcgcgggaagccccgtggacctggcgctcc

SEQ ID NO: 1378 - DNA, 105 bp, Homo sapiens
  chr2:242498764-242498869
  hyper
ggcgccggctacggcccttcccgagggccacgcccagcccggcgccccgcgcgccccgttccccgcgccgcctccctccacccggctgagcgcttgtgcccgcag

SEQ ID NO: 1379 - DNA, 56 bp, Homo sapiens
  chr2:242549739-242549795
  hyper
cttgcgcctgcgggaccgggagggccgcgctcgccccccagcgccagggtcacgcc

SEQ ID NO: 1380 - DNA, 77 bp, Homo sapiens
  chr2:242550006-242550083
  hyper
cctgcttccccagccacggggtcttctcccggcccctcatctacttggcagacgcctctcaccggcagcctctgcct

SEQ ID NO: 1381 - DNA, 31 bp, Homo sapiens
  chr3:5020396-5020427
  hyper
cggtccctccccaaggcgggcaattcctgga

SEQ ID NO: 1382 - DNA, 31 bp, Homo sapiens
  chr3:8543387-8543418
  hyper
gagggggacagcctcgcgctgggattggctg

SEQ ID NO: 1383 - DNA, 69 bp, Homo sapiens
  chr3:8811110-8811179
  hyper
ggatgggtacaggaggcgagcgaggagcgcctcccaggctgcgcgcgcggacagcgtctggatgcggcg

SEQ ID NO: 1384 - DNA, 65 bp, Homo sapiens
  chr3:9811684-9811749
  hyper
gtggaggtggagcctgcggcggagggacccgggattgggaggcgaggcaccgctccaaggctggg

SEQ ID NO: 1385 - DNA, 53 bp, Homo sapiens
  chr3:9812388-9812441
  hyper
gagcctgcaactaggacggcaggcaagaggccaaaggtcggtttgctcaaggc

SEQ ID NO: 1386 - DNA, 31 bp, Homo sapiens
  chr3:9812449-9812480
  hyper
ggaagaaatttggtgccgagtggaaagaggg

SEQ ID NO: 1387 - DNA, 31 bp, Homo sapiens
  chr3:9851550-9851581
  hyper
ccaaggcaatagcaaacggggcggggcttgg

SEQ ID NO: 1388 - DNA, 31 bp, Homo sapiens
  chr3:9851988-9852019
  hyper
tggtcccaggcacccacgcccagggcgcctc

SEQ ID NO: 1389 - DNA, 67 bp, Homo sapiens
  chr3:9904594-9904661
  hyper
cgcctggccccgtccccgaggccagaaaagaggagacccgaggccgtcagaccgcctgtcaagggct

SEQ ID NO: 1390 - DNA, 56 bp, Homo sapiens
  chr3:9904670-9904726
  hyper
cctggcaccttcccctcgctccccgtctgacccccagaggccgtgctgtccaggct

SEQ ID NO: 1391 - DNA, 69 bp, Homo sapiens
  chr3:9993763-9993832
  hyper
cggcctgggggcagggcgaggccgttgcggggcagcctcggagctggtccatctcgggttacctctcct

SEQ ID NO: 1392 - DNA, 97 bp, Homo sapiens
  chr3:9993835-9993932
  hyper
cctcctcctcctcctccgtctcctctctccctggctccgcgccttcccgcagtgtcctggatgggggtgggcgccgtgcaggcctggtcgcctgcgc

SEQ ID NO: 1393 - DNA, 165 bp, Homo sapiens
  chr3:9993964-9994129
  hyper
cggggtcccgccatcgccccctccctgggccagctcctcacctgcgcgccgcagcccccgtgttcaccttgcgcgcgtccctgcagccgatcgccgcgccgcatcctccgagatgctcagactcggctaacagagcccggcgctgccgatcgcgagcccgcccac

SEQ ID NO: 1394 - DNA, 31 bp, Homo sapiens
  chr3:10052428-10052459
  hyper
ttagggggagaggacccgagttagtgccccc

SEQ ID NO: 1395 - DNA, 31 bp, Homo sapiens
  chr3:11258023-11258054
  hyper
cattattcacagcagccgaagagtggaagca

SEQ ID NO: 1396 - DNA, 185 bp, Homo sapiens
  chr3:12329084-12329269
  hyper
gcatccccctaaacttcggatccctcctcggaaatgggaccctctctgggccgcctcccagcggtggtggcgaggagcaaacgacaccaggtagcctgccgcggggcagagagtggacgcgggaaagccggtggctcccgccgtgggccctactgtgcgcgggcggcggccgagcccgggccgct

SEQ ID NO: 1397 - DNA, 31 bp, Homo sapiens
  chr3:12524521-12524552
  hyper
gacccactgaatgctgcgacatgatctcact

SEQ ID NO: 1398 - DNA, 31 bp, Homo sapiens
  chr3:13008871-13008902
  hyper
gcgccgcgccctcacccgctgtcaagctcta

SEQ ID NO: 1399 - DNA, 54 bp, Homo sapiens
  chr3:13460979-13461033
  hyper
gcagcctgaggggaagcgccggcctgcctcgtctcacttcgcctctgtaaagcg

SEQ ID NO: 1400 - DNA, 31 bp, Homo sapiens
  chr3:16553593-16553624
  hyper
cccaaacagcttgcttcgtaacccctctctg

SEQ ID NO: 1401 - DNA, 57 bp, Homo sapiens
  chr3:16553951-16554008
  hyper
gtttgttttaagcccccgaagaaactcactgacaccacccagcgtccctagggatca

SEQ ID NO: 1402 - DNA, 90 bp, Homo sapiens
  chr3:16554051-16554141
  hyper
gacagacagcagggagcgtgcctggttctacaaccttggcctccacgcggttcttgctgccaaaggcagcgacaccggaggtgaagggca

SEQ ID NO: 1403 - DNA, 102 bp, Homo sapiens
  chr3:16554151-16554253
  hyper
cctaggactggggtgcgcgtgcctgacaacggggcttcccgaaatacacaaccacctcctcctcgcccagacccatatccatcctggcgtcccttgagtcta

SEQ ID NO: 1404 - DNA, 124 bp, Homo sapiens
  chr3:16554289-16554413
  hyper
cagaagaggagatccccgttttcagtgctggggactctcggcacccgcgtccctgtgcttctggtggttccggcgcttcctcggagcgcgcggcatgtctgctcctacacgtccagcacctctg

SEQ ID NO: 1405 - DNA, 142 bp, Homo sapiens
  chr3:16554428-16554570
  hyper
cacctcccagggcacacgcagaggggcagtcaggcaccgcctccaccctgccccacccaggccgcgcgcaccccggaaacctggactccgcgaccagctccctcctgttcttttccgaggaccccagcggcagtgtgtcctg

SEQ ID NO: 1406 - DNA, 249 bp, Homo sapiens
  chr3:16554589-16554838
  hyper
agctcccccacctctgcgtccttcctaggcgcttctgagcctgcagagcctacgacccccaacaggctgctccgaagtgcctctccctacatcgctccaggaatgactcccctacacccgttccccgcaaaaaaaagttggcccaagatccaggcgtcccaaggatcagcccaggtccccatccgacgcgggccagggggtgctgctctggcagctccggagccccggcaaagagcaacctgcagggag

SEQ ID NO: 1407 - DNA, 61 bp, Homo sapiens
  chr3:16555196-16555257
  hyper
cggctccagccccgacgcgcccccgccgccgccgccgcgcgtccgccggctacacttcctc

SEQ ID NO: 1408 - DNA, 155 bp, Homo sapiens
  chr3:16555271-16555426
  hyper
tgtgcaaaatatgctacgctgcatcttcagggaaagcctcgcggcccctgacagcagccgctggagcggtgggcccgcccagctctccccgcgccccctcggagttccgcccggtcacctccacgcggccgagctgcaagcgaccctggcagcct

SEQ ID NO: 1409 - DNA, 31 bp, Homo sapiens
  chr3:16555435-16555466
  hyper
ggggtcaggggctcatcgatcctccctccca

SEQ ID NO: 1410 - DNA, 31 bp, Homo sapiens
  chr3:16555487-16555518
  hyper
gtgctgtcaggaagagcgcctgggagacaag

SEQ ID NO: 1411 - DNA, 310 bp, Homo sapiens
  chr3:16925655-16925965
  hyper
atggtgggtcagggggcgaccgaggagggaccacgcggcctgtagggggcagcgccgagctcgggaggagacagcagccggcgggtggggtgggtctgggctgccccctccgggagctgccccggggccgcacggcgattgtcatacccggccgcccctgcccgccgtgggcttcctctcggcgccgcgggccttaacggggctctgaggggacgtgacagagctcggcacgcggcagcctctggggagttagggtccggagagacccacgcgtcgccccccgcccgcccggggccgggagatcctcggg

SEQ ID NO: 1412 - DNA, 144 bp, Homo sapiens
  chr3:16925998-16926142
  hyper
ggccgccacttcccctcgcccttcgccggaggtgggcgccttttcctgcgtggcgggtgctccgaccccagttgctctgagccccggggaagcgcgccccgagcccctgacgtgggcgccccgttacctcggggtgggtgcctg

SEQ ID NO: 1413 - DNA, 61 bp, Homo sapiens
  chr3:16926801-16926862
  hyper
cgtctgtaccctcccccgggagagcaagccgggcggcctgccccgccggagcagcatcatc

SEQ ID NO: 1414 - DNA, 31 bp, Homo sapiens
  chr3:17571374-17571405
  hyper
aagatgtctcagataacgggttaactatgca

SEQ ID NO: 1415 - DNA, 31 bp, Homo sapiens
  chr3:23654182-23654213
  hyper
aataagacttctcaagcgcagtttagaataa

SEQ ID NO: 1416 - DNA, 65 bp, Homo sapiens
  chr3:23986745-23986810
  hyper
cgcgggtcacatggtcgcggctgccctccccgtcagccgccctcgccgccgcggtgcgctggctg

SEQ ID NO: 1417 - DNA, 59 bp, Homo sapiens
  chr3:24536767-24536826
  hyper
ggaaatggcctcctggcgcacaccccgccgccgccgccagccatcgccaccgccccggg

SEQ ID NO: 1418 - DNA, 31 bp, Homo sapiens
  chr3:24536986-24537017
  hyper
cccctcctcctaatcccggccgtgccctccc

SEQ ID NO: 1419 - DNA, 54 bp, Homo sapiens
  chr3:24563200-24563254
  hyper
ggtcgcggccgccggtcgccgggagcccggagccgggacgcgagggttgggggt

SEQ ID NO: 1420 - DNA, 76 bp, Homo sapiens
  chr3:32433864-32433940
  hyper
gggcaaagttccttttcgtctttcttcctcttctctgggccgcgccgcttcgaacccgagccgggggtggaagagt

SEQ ID NO: 1421 - DNA, 35 bp, Homo sapiens
  chr3:32612741-32612776
  hyper
caagatagaaatgggtcgcccggctggtaaagagg

SEQ ID NO: 1422 - DNA, 31 bp, Homo sapiens
  chr3:37033964-37033995
  hyper
actcagggcctacaccgcggataaagaccag

SEQ ID NO: 1423 - DNA, 31 bp, Homo sapiens
  chr3:37034011-37034042
  hyper
gccacaaaagcctggtcgtccaaggcaagag

SEQ ID NO: 1424 - DNA, 49 bp, Homo sapiens
  chr3:37034049-37034098
  hyper
tttaaagtccctggctcggttaaaaagctggttgcgtagattcctgtca

SEQ ID NO: 1425 - DNA, 55 bp, Homo sapiens
  chr3:37034125-37034180
  hyper
tctggagataagtcaacgccttgcaggacgcttacatgctcgggcagtacctctc

SEQ ID NO: 1426 - DNA, 31 bp, Homo sapiens
  chr3:37034213-37034244
  hyper
ccccctcaccccagccgcgacccttcaaggc

SEQ ID NO: 1427 - DNA, 232 bp, Homo sapiens
  chr3:37034290-37034522
  hyper
ggagtgaaggaggccacgggcaagtcgccctgacgcagacgctccaccagggccgcgcgctcgccgtccgccacataccgctcgtagtattcgtgctcagcctcgtagtggcgcctgacgtcgcgttcgcgggtagctacgatgaggcggcgacagaccaggcacagggccccatcgccctccggaggctccaccaccaaataacgctgggtccactcgggccggaaaacta

SEQ ID NO: 1428 - DNA, 31 bp, Homo sapiens
  chr3:37902232-37902263
  hyper
tctcccacgctctggccgtcgtcctaggcct

SEQ ID NO: 1429 - DNA, 140 bp, Homo sapiens
  chr3:37903575-37903715
  hyper
aggcagcggctgcgagcgcccccccgcgccgcgcccccgcgccccccgcgccgcgcccccgcgcgcttggcttgcggggggccgggcctgcgggcggccgccgcgccgcgcacccatggacggcccggccatcatcaccc

SEQ ID NO: 1430 - DNA, 138 bp, Homo sapiens
  chr3:37903721-37903859
  hyper
ccaaccccaaggaggacgagggccggttgccgggcgcgggcgagaaaggtgaggaggggcgcaggcggccgcgggctgggggcgagcgcacaccccgcgccgctggagttcactgccgggcgccggcatgggcctggg

SEQ ID NO: 1431 - DNA, 92 bp, Homo sapiens
  chr3:37903861-37903953
  hyper
aggggtgcacagggcccggagggtgcgtgggtgtggggtgcgcccggaggagagcgaggctgccagagtgcgtgtgccgactgagccagtgt

SEQ ID NO: 1432 - DNA, 98 bp, Homo sapiens
  chr3:37903954-37904052
  hyper
agtgtgcaggggctggcggagagactgggagcgagtgtgtgtgcatctaaccgggaggttgtgagtttgtgtgcgcgcacgcccgcagagaagttgtg

SEQ ID NO: 1433 - DNA, 240 bp, Homo sapiens
  chr3:38035773-38036013
  hyper
cgcagggggcgtccagcgacctgcactactgggtcgggaagcaggcgggtgcggaagcgcagggcgctgcggaggccttccagcagcgcctacaggacgagctggggggccagaccgtgctgcaccgcgaggcgcagggccacgagtccgactgcttctgcagctacttccgcccgggaatcatgtgagtgcgggggcgaccggggcaggagggagccgtggaggcggtgccttggctgg

SEQ ID NO: 1434 - DNA, 57 bp, Homo sapiens
  chr3:38036017-38036074
  hyper
gtcttgggatggccatcgtccacatccctgaatggggcaagccgggaggggttgggt

SEQ ID NO: 1435 - DNA, 46 bp, Homo sapiens
  chr3:38206258-38206304
  hyper
ttcagatctaaagctgcgaatggacagaacccgcccagtgcagggt

SEQ ID NO: 1436 - DNA, 30 bp, Homo sapiens
  chr3:38495144-38495174
  hyper
gtcaggagcccattcccgccacctccgtcc

SEQ ID NO: 1437 - DNA, 52 bp, Homo sapiens
  chr3:38495213-38495265
  hyper
cgtcctcccacagggcgcgggatgggggcggggcctccgtgttgttgtttct

SEQ ID NO: 1438 - DNA, 102 bp, Homo sapiens
  chr3:38495678-38495780
  hyper
ggaagcgcgcagggaacgagaccgaaggaaggagcgggaaggagagcgcagccgccgcctggccctgcgcgccccgggagcgccgtgcggccctgcccgcgg

SEQ ID NO: 1439 - DNA, 150 bp, Homo sapiens
  chr3:38496020-38496170
  hyper
tgggcgcccggctcgccgaacttgggggcacgatcttgtctgtgcagtcatctgcgggattctggttcctagaggcgcccctgcgatgggggccgggacgcggagcctcagggtcggagttcgggctacgcgggcgcgtggaacccaggg

SEQ ID NO: 1440 - DNA, 31 bp, Homo sapiens
  chr3:38496255-38496286
  hyper
cagcagcagcagcatgcggggagggttgcat

SEQ ID NO: 1441 - DNA, 53 bp, Homo sapiens
  chr3:38496294-38496347
  hyper
gagtcactaagtgtagcgaagcgaagggggcggcttcacgcagcccaaagtcc

SEQ ID NO: 1442 - DNA, 71 bp, Homo sapiens
  chr3:38496417-38496488
  hyper
ctccctctttccctgccgttggccccgggatgcggagtgtggtcgcttcgcgggaccgctttgtttgggca

SEQ ID NO: 1443 - DNA, 356 bp, Homo sapiens
  chr3:38496526-38496882
  hyper
caggtccctcttccttcgggcctccaggaggcacgtggcggggtgggtgaccagcgctcagctcgcccgcggctgcgggcgtgtggctggaggtgttcggccagcgcatgtgtgtttgggggtatgtgggcgcgggcgtaaacaagcggagttccgcctggaaagcttgtttctcctacggtccaagcaccgatttccctctctcagtggtgccggggtgcgcctaaccccggcgggcgcgccgggacgtcccctggccagtcctgggaaacgtggggagctgggcattgaagctctggcgagaaggtcggggcggctggtacccggccgccgggtcctgcgcgtctttgttccca

SEQ ID NO: 1444 - DNA, 82 bp, Homo sapiens
  chr3:38496886-38496968
  hyper
ccattacacatgcagcgcgggtcccccgccgccctcggtggcagccgcctggagtctgggaaaccctcgaggggcggggccg

SEQ ID NO: 1445 - DNA, 31 bp, Homo sapiens
  chr3:38497012-38497043
  hyper
ggggatttgggatctgcgtcccattcccacc

SEQ ID NO: 1446 - DNA, 116 bp, Homo sapiens
  chr3:38497048-38497164
  hyper
tctaccttctcctgtgcgtcgtcgtgaggcttagtttacaccgaaagcgagtgagttctgtagggtagtagcgcgcgcgcgcgcagcctgagtccggaaaccgaagggcaaagacc

SEQ ID NO: 1447 - DNA, 90 bp, Homo sapiens
  chr3:38497165-38497255
  hyper
gctggcacctgagtaccgtatggaagagggcgttgcagctctcctggagccgcttcttggaggcgaagtggtggtcgtgttggactttct

SEQ ID NO: 1448 - DNA, 43 bp, Homo sapiens
  chr3:39148466-39148509
  hyper
agcccttacgaccctacgactggcaggacgcgcgccgacgggc

SEQ ID NO: 1449 - DNA, 37 bp, Homo sapiens
  chr3:40350852-40350889
  hyper
ctgagcgtcgacccctcggcgccgccactgcacagcg

SEQ ID NO: 1450 - DNA, 31 bp, Homo sapiens
  chr3:40547427-40547458
  hyper
acactggcgctgacggcgggggtaggaaacc

SEQ ID NO: 1451 - DNA, 31 bp, Homo sapiens
  chr3:40547550-40547581
  hyper
gcaggtggaatttccacgctttatctgcgcc

SEQ ID NO: 1452 - DNA, 31 bp, Homo sapiens
  chr3:42696340-42696371
  hyper
gaatgcggcgctgtggcgctgctctcggtgg

SEQ ID NO: 1453 - DNA, 41 bp, Homo sapiens
  chr3:42696420-42696461
  hyper
tcttgctaggcaccggcgaaggggggcgctcccctgcgccc

SEQ ID NO: 1454 - DNA, 71 bp, Homo sapiens
  chr3:42814257-42814328
  hyper
ggggaactgggagatgcggaagtgcacgccgtcgggtcgcatctttcagtgcggtgcgagagggcccagtg

SEQ ID NO: 1455 - DNA, 110 bp, Homo sapiens
  chr3:42814331-42814441
  hyper
gaggcccagcaaacagcgcttgtcaggcggacctgagttcgagttctgactgtgccatctacgctatgactttggggcaggcgacccaccctctgcgcctcattaaccca

SEQ ID NO: 1456 - DNA, 31 bp, Homo sapiens
  chr3:42814445-42814476
  hyper
ctgcatggaaaataagcgtctgcctgggtta

SEQ ID NO: 1457 - DNA, 416 bp, Homo sapiens
  chr3:42814490-42814906
  hyper
gtgaagattcaaaggacgaaggggaagagtcctcgctgggcgcccagcacgcggtgagcgcccggccagtggcagcgcgctcgggctggggttgcgctcgggctcggttccgcgcccccggcagctgcgggctttcccagctccggcccgggcccttccgctctccccggcacttacagcggtctctctccacttctcccttctaggaccgcggcggctaggtcacctcctccggacgccgacacgcgctgccctggcaaccgtcaccagggaaacaagcgacgtcacttgcgcgttttcaacgctactctacgggggccgagggggcgccaagagttctgaaagtgacagaggcgctgatggcgcgctgggctggatccaagcgagcacgatctcgagtgcgctggagattttaa

SEQ ID NO: 1458 - DNA, 85 bp, Homo sapiens
  chr3:42814931-42815016
  hyper
agttttgtggaccaaacgttctgcacagagatgcccattccgctctcctgttggggagttaaaaagcgaacgatctcaccatgaa

SEQ ID NO: 1459 - DNA, 34 bp, Homo sapiens
  chr3:42845261-42845295
  hyper
tttgtaatctctaacccgccgactcggcaggaga

SEQ ID NO: 1460 - DNA, 40 bp, Homo sapiens
  chr3:43147124-43147164
  hyper
cgcgcctccctcagctcgcttcacacgtcacccctcagtt

SEQ ID NO: 1461 - DNA, 104 bp, Homo sapiens
  chr3:43147168-43147272
  hyper
aaactctcctggatcccgaaggcgtcctagaacctccccctcaccccggggcccagcaccgcgtcgtcccctccagggggccgagggttcgacacctccacttc

SEQ ID NO: 1462 - DNA, 164 bp, Homo sapiens
  chr3:43147273-43147437
  hyper
agtcccaggcgggtgtcggagtccgctccagccccaagcgcgcgcgcgtcttacctgaagcctggactccgcgggacgaagccacctccgccgacgcgtccaggaggccccacggcggcgccgctttcccaccccgccgccgcccccagcgccagcttctggcc

SEQ ID NO: 1463 - DNA, 110 bp, Homo sapiens
  chr3:43147463-43147573
  hyper
cagcacaggtttggccgcgccgccgggttcgcagcgaccgccacctccaggctcgcaggtgtccgccgtgcgcctgcccggcgggcgagcccggcgcggagcctgtgcgc

SEQ ID NO: 1464 - DNA, 135 bp, Homo sapiens
  chr3:43147591-43147726
  hyper
tcggttgccctggccccggccacaaccttggctcgcggaatcctgggaggtgtagttttgcgtacgaggacagcccgcgccgccaccagcctgcggaatgttgggagtgataatttgcgccgagaggctgagttt

SEQ ID NO: 1465 - DNA, 31 bp, Homo sapiens
  chr3:43662925-43662956
  hyper
tgatccccggactgcccgggaagcaagaacc

SEQ ID NO: 1466 - DNA, 43 bp, Homo sapiens
  chr3:43663333-43663376
  hyper
tgtggctgcaaggggccgggctctgctgcggacagctgggggg

SEQ ID NO: 1467 - DNA, 57 bp, Homo sapiens
  chr3:43663491-43663548
  hyper
ggccaggccagtggggcgggcgccgccgagcgctgggcgtggcggacgcggcggggc

SEQ ID NO: 1468 - DNA, 31 bp, Homo sapiens
  chr3:43811143-43811174
  hyper
gtatcctggtagggttcgttccctccccagc

SEQ ID NO: 1469 - DNA, 31 bp, Homo sapiens
  chr3:44379883-44379914
  hyper
ctagaggcagggcaccgcggaaggttgaatc

SEQ ID NO: 1470 - DNA, 42 bp, Homo sapiens
  chr3:44518641-44518683
  hyper
ttaaaaagcaagagcacgctctcatttcgtaatatatattta

SEQ ID NO: 1471 - DNA, 44 bp, Homo sapiens
  chr3:44666868-44666912
  hyper
cggtgctcctgtctaacggactctgctggcgctttgagaagagc

SEQ ID NO: 1472 - DNA, 36 bp, Homo sapiens
  chr3:48470349-48470385
  hyper
cccaacccccagaccccgaggcgaggaccccatcac

SEQ ID NO: 1473 - DNA, 55 bp, Homo sapiens
  chr3:48470476-48470531
  hyper
ccaatcgcgttccaggcggagtcgccagagtttcccttcgcgcggagaagtgtgg

SEQ ID NO: 1474 - DNA, 31 bp, Homo sapiens
  chr3:48470537-48470568
  hyper
ctctcaaaaccaaagccgcccaccactcacc

SEQ ID NO: 1475 - DNA, 72 bp, Homo sapiens
  chr3:48471201-48471273
  hyper
ttgccaggagccgaggcggggggtcgcgctccgcacccgcaggtgctggtggaacagcgtcccggcctcttc

SEQ ID NO: 1476 - DNA, 73 bp, Homo sapiens
  chr3:49907057-49907130
  hyper
gaccccgccaggacctcgagccctcgctgcgcccccgcgcactctgcatcccgcacctcgagccagggaaaca

SEQ ID NO: 1477 - DNA, 56 bp, Homo sapiens
  chr3:50192567-50192623
  hyper
gcgcaggacctgggtacgccgcgaggaaccgtgcagcccagcgcggccgcccggcc

SEQ ID NO: 1478 - DNA, 39 bp, Homo sapiens
  chr3:50192965-50193004
  hyper
ccgggcgcccaggccccgccgctgcggaagaggtgagtg

SEQ ID NO: 1479 - DNA, 48 bp, Homo sapiens
  chr3:50193032-50193080
  hyper
cggccgggccaccccgcgacccctctgggacccgcggcactgcaactc

SEQ ID NO: 1480 - DNA, 31 bp, Homo sapiens
  chr3:50374390-50374421
  hyper
gaaaccaagggggccccggcacccagcatct

SEQ ID NO: 1481 - DNA, 31 bp, Homo sapiens
  chr3:50374463-50374494
  hyper
tccccggccaggacccgcggggagccacgta

SEQ ID NO: 1482 - DNA, 91 bp, Homo sapiens
  chr3:50375341-50375432
  hyper
cgtgtcccgctccaccgcgggttcccagcccaggtcccggggcccgcaacagtccaggcagacgagcgcgcggcagcggtagtggcaggtg

SEQ ID NO: 1483 - DNA, 55 bp, Homo sapiens
  chr3:50375442-50375497
  hyper
ctgcagagaggcctggcggtgaggcggaggagctccaggtcggggaaatgtcccg

SEQ ID NO: 1484 - DNA, 49 bp, Homo sapiens
  chr3:50387961-50388010
  hyper
agaacgtccctcttcccgcccagtcccgcgagcccgggtggcacctgat

SEQ ID NO: 1485 - DNA, 44 bp, Homo sapiens
  chr3:50402611-50402655
  hyper
cagcctgcgggcagcccggaaaggcggggcgttgagtttgcccc

SEQ ID NO: 1486 - DNA, 267 bp, Homo sapiens
  chr3:50605016-50605283
  hyper
ccctccctgcaagccccgagccgctggccaggcccgctactgcgcaccagccgcatccgcgagcgctggctctgccggcctgagctagggtgggtagggccgggacccacggcggaggtggggccgggccgagcagcctcgggggatccccgaagctacagcgccttgcctccctgcacgctccgcgcccccggcctccgattggctgtcgggcctagagcccgcccagaattggaccgttcgcttgtcgctcgggtctggctccac

SEQ ID NO: 1487 - DNA, 80 bp, Homo sapiens
  chr3:50605292-50605372
  hyper
gagcctagaacctggtcgcagtttttagagactaccctcaccccgtggcctgcgccgaagttgggcggaggacagtgggt

SEQ ID NO: 1488 - DNA, 41 bp, Homo sapiens
  chr3:52001296-52001337
  hyper
cccaaacttcgcggcccgccgtgccccgcccggcccgcgcc

SEQ ID NO: 1489 - DNA, 31 bp, Homo sapiens
  chr3:52477535-52477566
  hyper
cctgaggtaggtcctccgggcttggctaggg

SEQ ID NO: 1490 - DNA, 105 bp, Homo sapiens
  chr3:53195773-53195878
  hyper
tgtgttctccccctgcgcgcctctccgagacccgatccttctgtccctcgccacccgatccgtccgtcccttgccctccgcgtgctccatcgccccacccccacc

SEQ ID NO: 1491 - DNA, 48 bp, Homo sapiens
  chr3:53195952-53196000
  hyper
cccctgccagtccagccgcctctccgctctaccgcggggcccaggcca

SEQ ID NO: 1492 - DNA, 38 bp, Homo sapiens
  chr3:53528138-53528176
  hyper
ttgacgaggatgagctcggagaccgcagcagctaccgc

SEQ ID NO: 1493 - DNA, 62 bp, Homo sapiens
  chr3:53528338-53528400
  hyper
cgccgcctgcctcctccgggtcccggggggagagcgcaccgtgcggcgcggagggggttaac

SEQ ID NO: 1494 - DNA, 68 bp, Homo sapiens
  chr3:53528642-53528710
  hyper
cggcgtgcggcgcggcgcggcgggcgcggagcgagcgggcgggcgagcgcctccgtccccggatgtga

SEQ ID NO: 1495 - DNA, 56 bp, Homo sapiens
  chr3:57112602-57112658
  hyper
gaccttaaccccttggcgtcctccaccctggtgtcctatctcgggattttctggct

SEQ ID NO: 1496 - DNA, 89 bp, Homo sapiens
  chr3:57112783-57112872
  hyper
accagcagcgcccgacgcgacgctgacctgcgggtgccccgcggggctggagaagaaagttgagcgaaaggggcgcgtcccaggacagg

SEQ ID NO: 1497 - DNA, 238 bp, Homo sapiens
  chr3:57112979-57113217
  hyper
tggcactgcccacctgcgctgcgcccagtgcgcccccgtgcgctgggcataccccagaccagggagcgctcagggcccgccggggacgccgagacctagcagggtaactcggaggtgggagtgggggtccagctcggggaccagggcaaaggagggactagaccggaagacggtctcactccgggagacctagcgggggtgtcccgccaaaggggtgtctagccggggagggtctagc

SEQ ID NO: 1498 - DNA, 31 bp, Homo sapiens
  chr3:57113349-57113380
  hyper
ggcggggaggccgggccggccacgtgggcgg

SEQ ID NO: 1499 - DNA, 35 bp, Homo sapiens
  chr3:57113437-57113472
  hyper
ggccacgcccggccaccgctcgacaccccagctcc

SEQ ID NO: 1500 - DNA, 127 bp, Homo sapiens
  chr3:57198836-57198963
  hyper
acacgcagccctgggacgaaggaggtcccgggccaagaacaaagggtggggcgcccggcccagccccgccgcccctcacgcccgccctctgaatgggaccccggccggcggccgcacctcattagca

SEQ ID NO: 1501 - DNA, 54 bp, Homo sapiens
  chr3:57199029-57199083
  hyper
ggaaaccaggaggatgcgcgggaggagtgagacccaggccggccgcggaccccg

SEQ ID NO: 1502 - DNA, 54 bp, Homo sapiens
  chr3:57199094-57199148
  hyper
caggttggcgcgggctcgcctccccgcgagcacctgtgcgcgctgcgtcccccg

SEQ ID NO: 1503 - DNA, 31 bp, Homo sapiens
  chr3:57261347-57261378
  hyper
ggggattaagactggacgcttcgagcggagt

SEQ ID NO: 1504 - DNA, 31 bp, Homo sapiens
  chr3:61548182-61548213
  hyper
gagaaaaggattgctccgctggcttggatga

SEQ ID NO: 1505 - DNA, 55 bp, Homo sapiens
  chr3:61548795-61548850
  hyper
ggacgcggggagggggcgggggcggtttcggcggccggggcggtttcggcggccg

SEQ ID NO: 1506 - DNA, 31 bp, Homo sapiens
  chr3:61656125-61656156
  hyper
ttaaattatgtcacagcgcattgcagacttg

SEQ ID NO: 1507 - DNA, 48 bp, Homo sapiens
  chr3:61656168-61656216
  hyper
aaaatggtattgtctgcgcccttattgatcagcgcgacatcttttact

SEQ ID NO: 1508 - DNA, 47 bp, Homo sapiens
  chr3:64671587-64671634
  hyper
ccaccccaattcaaagcgtccggggtaggctccgccttctcccccgc

SEQ ID NO: 1509 - DNA, 31 bp, Homo sapiens
  chr3:64673805-64673836
  hyper
cgagacgaacggggaccgcctccttccagac

SEQ ID NO: 1510 - DNA, 64 bp, Homo sapiens
  chr3:66024207-66024271
  hyper
agctttgtttgcattccggtgcctctgggtccacgttccggcgcccgcccgtgctctcccggac

SEQ ID NO: 1511 - DNA, 62 bp, Homo sapiens
  chr3:66024415-66024477
  hyper
ccttccagccagttgccgggagccctgaagacgcggtggcggggcggcggggagcagggcgg

SEQ ID NO: 1512 - DNA, 64 bp, Homo sapiens
  chr3:66024641-66024705
  hyper
aagggagagattccaacgtgcttcccgatgggtcctaaaaccgacctgccgggagaaggcaact

SEQ ID NO: 1513 - DNA, 67 bp, Homo sapiens
  chr3:66024996-66025063
  hyper
cccagcccggctggttcgccgccccccttgccgcaggtcccactgaaacccccgagacccgccccgg

SEQ ID NO: 1514 - DNA, 280 bp, Homo sapiens
  chr3:66550413-66550693
  hyper
cgcacgcctactcccccggacctccacgcagaatctcccttccgccactccaacctgacagtcttccaacacgcacaagcacgcacaactccacacacacaacccagtccgcaccccctccctgagtacgaacccccgccgctccatccccaagtgacagagccccggggcgcagagagggcggaaagggcggcactcacaggctccgcgtccaggagggcaggtccccgggcaacgcagccagcccgcgcccaccgcagtccagcgagtccccagcgca

SEQ ID NO: 1515 - DNA, 68 bp, Homo sapiens
  chr3:66550698-66550766
  hyper
aggcggccgcgcagggcgcccgcgggccggccgcggcggtcaccggctccagccgaagcaaaagcagc

SEQ ID NO: 1516 - DNA, 69 bp, Homo sapiens
  chr3:66550867-66550936
  hyper
actgtgaggacccgaacggccgcagacgcgggcgggcccgcggggcgctccgctcggctctagactccg

SEQ ID NO: 1517 - DNA, 80 bp, Homo sapiens
  chr3:66551011-66551091
  hyper
gccgctccggagcacccggcgggggccgcaaaccccgcgcccatccgggccggccggcccgcccgcgctagctgcgaact

SEQ ID NO: 1518 - DNA, 356 bp, Homo sapiens
  chr3:66551117-66551473
  hyper
gcctgcgctcttcgtccgcccggggcacgccgagtgccgctaccgacaccggccgagggcagtgctgccgctgcgcctggaagacaggcgttcagccccgcagcccgagctcggtgccggcaggcatcttcctctgggctcggagcgcaaagccgtagacctcgggctggacggcgcggccggccccgcgctgggaggccccagtgcgcctcgctgtccccacgccgcggccagagagcgcgcgcgcgcgcgcagcctcgggttccgcacggctcctccgcgcagcaagagtcccgccgacctcgcagccgaacaatcagccgcttgctgttcgcctccccgcggcccagccccgg

SEQ ID NO: 1519 - DNA, 126 bp, Homo sapiens
  chr3:66551524-66551650
  hyper
ctccgcgctccgcggccgcctgctggcccacgttggatgctttgcaacagcgccccgccacgcctccccgcctgctgctcattggctgccggagtccaccgtggccagcctcgagggccattggag

SEQ ID NO: 1520 - DNA, 31 bp, Homo sapiens
  chr3:66551712-66551743
  hyper
cccaaggtgtgaagggcgggagactgggagg

SEQ ID NO: 1521 - DNA, 76 bp, Homo sapiens
  chr3:66551785-66551861
  hyper
ggttgttgttggagaacgggaacgcgggctggggaaaggaggcgtgaagatacgccctctgcgtcaagaaggggag

SEQ ID NO: 1522 - DNA, 37 bp, Homo sapiens
  chr3:66551865-66551902
  hyper
agttaagagggtaaaacgcccccgttttggggctgtc

SEQ ID NO: 1523 - DNA, 31 bp, Homo sapiens
  chr3:69788413-69788444
  hyper
acaggagttgcactagcggtgtccaccacgt

SEQ ID NO: 1524 - DNA, 148 bp, Homo sapiens
  chr3:69788530-69788678
  hyper
aactacagatcccaggcggcgctcggccgccagcccctcccgcccgggtgcgagtgtaaactccccgcgctggggcgggcggccgcgagccggcgagcgggcagagctcggcactgcgccggggcgcacggctcgggggacccaggcc

SEQ ID NO: 1525 - DNA, 49 bp, Homo sapiens
  chr3:71114104-71114153
  hyper
ctgacaagacgcgccgcgccgcgcccacccgccccgccctgctccacca

SEQ ID NO: 1526 - DNA, 133 bp, Homo sapiens
  chr3:71631263-71631396
  hyper
atgggaggggggcatgcgactttgtttccgggagcggagctccccagagcccgtgtgtgtcactgccagtctcccgggaccaaggcggagctcacaacaggtggggaggggggctcgtcgagggccaaaaaga

SEQ ID NO: 1527 - DNA, 103 bp, Homo sapiens
  chr3:71631398-71631501
  hyper
aaggaatctaagtttccgagcgcgacgttgtctgaaaaggagggaggcgggaggcgggggcgagggaaggcggaggcagcaaatgaccgcgaccccgcggcaa

SEQ ID NO: 1528 - DNA, 110 bp, Homo sapiens
  chr3:71631789-71631899
  hyper
tggtgggagagagatccgggcgcggcgactcctcgcagcgcatccggctcccgcacccacccgtggatctggccacggctgttgcggactcgtctcgggaaagcggaggc

SEQ ID NO: 1529 - DNA, 49 bp, Homo sapiens
  chr3:72149904-72149953
  hyper
tgtttaggatcaaactcgcctctgtaccacctaccggagggactctggg

SEQ ID NO: 1530 - DNA, 63 bp, Homo sapiens
  chr3:72149958-72150021
  hyper
agttctggggacaagcgcgtgcccctgcctccgaatgagctccttttacgtgtgagtcctggg

SEQ ID NO: 1531 - DNA, 69 bp, Homo sapiens
  chr3:72150030-72150099
  hyper
acagccaccacaagccgcggatgcttccccagcgggccccgcgaagggaaactccgtgcaggggcaaag

SEQ ID NO: 1532 - DNA, 31 bp, Homo sapiens
  chr3:72496832-72496863
  hyper
cctgtcaggcccctgtcgcgggagggaacag

SEQ ID NO: 1533 - DNA, 31 bp, Homo sapiens
  chr3:72896942-72896973
  hyper
acgggttgggaagtcacggagatgtcagcgc

SEQ ID NO: 1534 - DNA, 31 bp, Homo sapiens
  chr3:72937967-72937998
  hyper
ttgtcaaaagccatcacggtgcaagaatgtt

SEQ ID NO: 1535 - DNA, 31 bp, Homo sapiens
  chr3:74663813-74663844
  hyper
cgtgcctccgccactccggctccggctccgg

SEQ ID NO: 1536 - DNA, 102 bp, Homo sapiens
  chr3:97690940-97691042
  hyper
tagcaggccacgtgtgcgactctctgtaaccaaggcttccgcgaccctacccctagatccgggccccacccaccctgccccagtctccggggaggtgggacg

SEQ ID NO: 1537 - DNA, 93 bp, Homo sapiens
  chr3:98311893-98311986
  hyper
atcttggtcttcatgtcgcccggcctccttcgcagctcgcccaggtcggtcacaggcggggccatgaagctgctgcagcggtgggccagctca

SEQ ID NO: 1538 - DNA, 31 bp, Homo sapiens
  chr3:101475323-101475354
  hyper
cagacccccttcagtccgtgcctgtagctgg

SEQ ID NO: 1539 - DNA, 81 bp, Homo sapiens
  chr3:107148892-107148973
  hyper
cacatccccggggcatcgcaggacacctgctgccccctatcggtggtgagaacaataacccgaacccggttggaatcaact

SEQ ID NO: 1540 - DNA, 68 bp, Homo sapiens
  chr3:107148995-107149063
  hyper
gaatattccaggactacgcagtagccagacgactctctaagaacatgggtttccgcagtcagctccga

SEQ ID NO: 1541 - DNA, 31 bp, Homo sapiens
  chr3:107245009-107245040
  hyper
cacagttctccagtgtcggggggtggtagag

SEQ ID NO: 1542 - DNA, 31 bp, Homo sapiens
  chr3:110790314-110790345
  hyper
gaacgaggggcggggccgactaacctattcc

SEQ ID NO: 1543 - DNA, 79 bp, Homo sapiens
  chr3:113557397-113557476
  hyper
aggaatgagagcgaaactccgtctcaaaaaaaaaaaaaaaaagtttccgagcaattcaccttttcgcacattggggcag

SEQ ID NO: 1544 - DNA, 31 bp, Homo sapiens
  chr3:119298885-119298916
  hyper
gtacgagaatgtgacccgtgaaagttcagag

SEQ ID NO: 1545 - DNA, 31 bp, Homo sapiens
  chr3:120068919-120068950
  hyper
ttgggagatatggaggcggttgcatgatttg

SEQ ID NO: 1546 - DNA, 37 bp, Homo sapiens
  chr3:121741106-121741143
  hyper
cctgcggcgctccccacggctccgcctcccgccccgc

SEQ ID NO: 1547 - DNA, 31 bp, Homo sapiens
  chr3:121741346-121741377
  hyper
tagggtgtgtttcctgcgttatatttccatt

SEQ ID NO: 1548 - DNA, 45 bp, Homo sapiens
  chr3:122296693-122296738
  hyper
gagtatggtgaggagcgcgggggacgggtgcgggaaggggacagc

SEQ ID NO: 1549 - DNA, 99 bp, Homo sapiens
  chr3:122514391-122514490
  hyper
cgcggagcgccagcccgcgctgtctctcctccgggagcaggcgcctgcccgcgctccaggcctgccagccgcctcccttggccccggcataggggttgt

SEQ ID NO: 1550 - DNA, 31 bp, Homo sapiens
  chr3:122514524-122514555
  hyper
tgacttaggaaccctccgtccccaaagcgac

SEQ ID NO: 1551 - DNA, 70 bp, Homo sapiens
  chr3:122785819-122785889
  hyper
agcgagcacttcttcccggccgcctctccccagctgctgcgcatgctttggcagacgtggcaccgggaac

SEQ ID NO: 1552 - DNA, 89 bp, Homo sapiens
  chr3:123752027-123752116
  hyper
ggaggagctggggaggcggctgctgcggcggcggcggcggcgggagccagagggggagctagagagcgagcgagcgaaggagggaggta

SEQ ID NO: 1553 - DNA, 58 bp, Homo sapiens
  chr3:124605379-124605437
  hyper
catccccccagcagcccgcccgctcccggccggccacaaggaccgctttgtgcccgcc

SEQ ID NO: 1554 - DNA, 61 bp, Homo sapiens
  chr3:124605739-124605800
  hyper
acaaagtttctctgggcgccgtgggcggcgcggcttacctgcgagccggggcaggagcgcg

SEQ ID NO: 1555 - DNA, 50 bp, Homo sapiens
  chr3:124605853-124605903
  hyper
gcgcctccctcagcggcggcgcggtcgctgcactccgcgggggccggcgg

SEQ ID NO: 1556 - DNA, 31 bp, Homo sapiens
  chr3:125635404-125635435
  hyper
gtcttcagtccaggcccggcttccgcacggt

SEQ ID NO: 1557 - DNA, 31 bp, Homo sapiens
  chr3:125677241-125677272
  hyper
gcagcgagacagtgaccggcgcttggaggcc

SEQ ID NO: 1558 - DNA, 92 bp, Homo sapiens
  chr3:126195082-126195174
  hyper
cacctacgagggcgagcggcggggcacgggaccgacaggggacggggtgaggctcccaacgctgagcgattccttctcgttcccgctggcgt

SEQ ID NO: 1559 - DNA, 128 bp, Homo sapiens
  chr3:126195273-126195401
  hyper
gtccgagctgattaagcgtgcgcggtcacccaggggtgaggaaacagggacggcgagctcgagtcactcggcagccggcagatccaggattcgaacctgtccaacaggccggacgcctacccccagct

SEQ ID NO: 1560 - DNA, 50 bp, Homo sapiens
  chr3:127794526-127794576
  hyper
gggaggggcagcgcggcgggggcggagcctgggcccgaaacgccacgggc

SEQ ID NO: 1561 - DNA, 15 bp, Homo sapiens
  chr3:128216698-128216713
  hyper
cgggattagctcatc

SEQ ID NO: 1562 - DNA, 31 bp, Homo sapiens
  chr3:133646341-133646372
  hyper
cagccgccgggccctccgagtaggggaaggc

SEQ ID NO: 1563 - DNA, 115 bp, Homo sapiens
  chr3:133646379-133646494
  hyper
cgtgcgtgcggtgggcgcggggagccccgcaggcccgagggcgccccggcggggaagcgggctatcggaggcgcgctgagccgggtggtggagtcccgcccggctggctgtgggg

SEQ ID NO: 1564 - DNA, 66 bp, Homo sapiens
  chr3:133748885-133748951
  hyper
ccgccgccgccgccgccgccccctcagacaggtgtgacgccgcagcgacccgcgaggcttgactgc

SEQ ID NO: 1565 - DNA, 31 bp, Homo sapiens
  chr3:133969928-133969959
  hyper
gctggagccaccggccgcgcctgcagctcag

SEQ ID NO: 1566 - DNA, 64 bp, Homo sapiens
  chr3:134092502-134092566
  hyper
cgccccaccacgagcccgggcggacctggagcaccggtggccgctggtacgcctggggcgagcc

SEQ ID NO: 1567 - DNA, 43 bp, Homo sapiens
  chr3:134092642-134092685
  hyper
tttccaaatactctaacgctgacgtcaccgggctggacagcag

SEQ ID NO: 1568 - DNA, 31 bp, Homo sapiens
  chr3:134092698-134092729
  hyper
taagtgagggccaattcgtggctccagagag

SEQ ID NO: 1569 - DNA, 31 bp, Homo sapiens
  chr3:134092795-134092826
  hyper
cctaaccaaatcagcccgcaggaccctgcaa

SEQ ID NO: 1570 - DNA, 361 bp, Homo sapiens
  chr3:134092992-134093353
  hyper
cgctccctgggcagagcggcccttgccaggcactgcggctgcctcgaaagggcgcactgcgccccgaggacgctcgatcctcgaggctccgactcccggaaaaggccgggttgcgccgagactccagctttggctggggcacgtttctgtggcctcgcgcgctctcccgagcgccgagcggccttccttaccgctgcggcccgagggtgcccagcgcagtcagacaccacaacctccggctcggcccagctcagctcggcggcgaagatgtgttctcggccgtggcgccgacgctctggctgttcgcgccccagcgcgcagccccagggtcggcccgcgccggaggcggctgctatgccag

SEQ ID NO: 1571 - DNA, 188 bp, Homo sapiens
  chr3:134093363-134093551
  hyper
gtttcaggttccccctcgggatcaaagcgaaccacaaataacctctcagcgcaccgccctcctccgccctccgccttctcccgctccctcctcccggcccccgccttcctccggggaggcggcgctgctggccgagcgccggcccggcccccgagctccgttcctccgcgcccagcgccctccaggcc

SEQ ID NO: 1572 - DNA, 128 bp, Homo sapiens
  chr3:134093626-134093754
  hyper
cgcctccactcccagtcgccgacccgctctcacccttcatccctaaacccatcgacgggacgacagcaagggctgtaccacgcgtgtcctggggttgctgcgggaggggactccggctgtgtgtgtgt

SEQ ID NO: 1573 - DNA, 36 bp, Homo sapiens
  chr3:135684722-135684758
  hyper
gagccttcagctccctcgtcccggcccgagggggtg

SEQ ID NO: 1574 - DNA, 36 bp, Homo sapiens
  chr3:135684954-135684990
  hyper
ttgcctgccccaggggcgcccgcggaggagggtagg

SEQ ID NO: 1575 - DNA, 54 bp, Homo sapiens
  chr3:136751477-136751531
  hyper
ggtcaactgcaggctacggttgatttggttgggtcccagcggagccttagcgtc

SEQ ID NO: 1576 - DNA, 52 bp, Homo sapiens
  chr3:136751539-136751591
  hyper
caaaataacaaatgtccgtcgtgcagggcactttcttcgggaaggactcctg

SEQ ID NO: 1577 - DNA, 31 bp, Homo sapiens
  chr3:137834285-137834316
  hyper
ttcccggaatgctcaccgcccgccgttcccg

SEQ ID NO: 1578 - DNA, 50 bp, Homo sapiens
  chr3:138048436-138048486
  hyper
agccccctccccaccccggagccggccagggggcgcgcgcagaggccgga

SEQ ID NO: 1579 - DNA, 46 bp, Homo sapiens
  chr3:138067287-138067333
  hyper
ggggccggggtgcacgcgggggcgacagggtcgaggcacccggccc

SEQ ID NO: 1580 - DNA, 95 bp, Homo sapiens
  chr3:138312853-138312948
  hyper
tggaggcagttttgtccgatccccaaacccttacgcagggatttttaattggcgcgaccctgtcccagatggctcctccccgacaagggtcagtc

SEQ ID NO: 1581 - DNA, 31 bp, Homo sapiens
  chr3:138313152-138313183
  hyper
tcgagcccgagcgcgtcgagggccagcccct

SEQ ID NO: 1582 - DNA, 50 bp, Homo sapiens
  chr3:138313376-138313426
  hyper
ttatttgcccggaagacgtcagaaatacttgtggccgtgggtgaaagtga

SEQ ID NO: 1583 - DNA, 87 bp, Homo sapiens
  chr3:142837869-142837956
  hyper
ccccaattccagaggacgtcaatcacagtggacgcagcaccgcgagcggaaatgcggagagcatcggggctccgcatgtggggcaca

SEQ ID NO: 1584 - DNA, 94 bp, Homo sapiens
  chr3:142837958-142838052
  hyper
gaaacaagagcagccccggccagaggtccagtaaagcggaaagacggtcccgcccgcacacccctccggaaaactgaagcgtctcctctgaccc

SEQ ID NO: 1585 - DNA, 157 bp, Homo sapiens
  chr3:142838099-142838256
  hyper
gacccactagagagggcgggcagggtgtcggaagccagagaacggcgctccgcgtcctcccaccgctccagggcgcagaggtgtcctcagtgcccggagaggttggcagtgtcggccccgagggaagcgtggagcggacggccgacaggggatttct

SEQ ID NO: 1586 - DNA, 32 bp, Homo sapiens
  chr3:142838286-142838318
  hyper
agcaaaaacatggggccgagtccggcagctgc

SEQ ID NO: 1587 - DNA, 167 bp, Homo sapiens
  chr3:142838479-142838646
  hyper
cgacggtgggagccggctcggcgttgggggcgggggcggggccggcgaagggggagggctgcgcggcggaggggaggagccgcggcgacagacggcggcgcgcaccaaccgggcgccggctggcaggagccgcgcagaggctggtccgagcgcgttgcgggcgcccg

SEQ ID NO: 1588 - DNA, 196 bp, Homo sapiens
  chr3:142838876-142839072
  hyper
cgctgtccgcccgggcatcctcccggtgatggaagcagccgccgccgccgctgcggggtcgcgctgtgccccatccaccgctgccagagaggtgggaaaattcgccgcacggaggccgaaagcgagaggggctgcgccgctatgccgggagctgagtcccatataagccgcccccagccatcgcccccagccggct

SEQ ID NO: 1589 - DNA, 228 bp, Homo sapiens
  chr3:142839204-142839432
  hyper
cgcagggcgcccgctgcccggaaactgcccagggataagtcggccgactccccagacccctcgaaggtgcggggacccccagcggaagcgagagggagcgaaatcgaggaacgagtgacagccggacagtccgccgggcggtgatccggggccgctcccgggcgcgccctcggctccaggtgagcggaggaaccgggcagaaccgagggtgggcgttacttaggagga

SEQ ID NO: 1590 - DNA, 75 bp, Homo sapiens
  chr3:142839439-142839514
  hyper
gggagggagattggggcgcatccgctcactccgcttcccctcgcaggtcctacccggagccgctgccatgggaga

SEQ ID NO: 1591 - DNA, 40 bp, Homo sapiens
  chr3:142839648-142839688
  hyper
tgtgcctgtgatgagccgcagcccgcagcgagctctgccc

SEQ ID NO: 1592 - DNA, 67 bp, Homo sapiens
  chr3:142839783-142839850
  hyper
cgcgtcccctctcggaatgaaggtgttccgtaggaaggcgctggtgttgtgcgcgggctatgcactg

SEQ ID NO: 1593 - DNA, 15 bp, Homo sapiens
  chr3:142839886-142839901
  hyper
aagtggcacaaggag

SEQ ID NO: 1594 - DNA, 25 bp, Homo sapiens
  chr3:142839944-142839969
  hyper
cgggggcagccggaggcagctgggg

SEQ ID NO: 1595 - DNA, 40 bp, Homo sapiens
  chr3:145878854-145878894
  hyper
cgggtccgccctgagccgccgattgcgggcgggagccggc

SEQ ID NO: 1596 - DNA, 44 bp, Homo sapiens
  chr3:145879058-145879102
  hyper
acccgccgccgctgcgcgcccggtgcggtcgcctcagctcgccc

SEQ ID NO: 1597 - DNA, 36 bp, Homo sapiens
  chr3:148710030-148710066
  hyper
ttggcttcacttgttgcgaggcgtccgggccactcc

SEQ ID NO: 1598 - DNA, 31 bp, Homo sapiens
  chr3:148710176-148710207
  hyper
taacccagagttcagccgtctttaggaagat

SEQ ID NO: 1599 - DNA, 53 bp, Homo sapiens
  chr3:150321029-150321082
  hyper
tactgctcccctcccccgaccttggctgatcgcgcctgcgcagtggggagcag

SEQ ID NO: 1600 - DNA, 31 bp, Homo sapiens
  chr3:150505713-150505744
  hyper
ctggtgcagctgcaggcggtgccaccactag

SEQ ID NO: 1601 - DNA, 39 bp, Homo sapiens
  chr3:150803687-150803726
  hyper
gccgccagccccagcccgctagccgcggaccaacaggta

SEQ ID NO: 1602 - DNA, 78 bp, Homo sapiens
  chr3:156799360-156799438
  hyper
gaattcaggtacatctcgattgctcgtggtaataaaggagacattaggcgtggataacaagaccgcaaatggtgagta

SEQ ID NO: 1603 - DNA, 31 bp, Homo sapiens
  chr3:156799497-156799528
  hyper
ctttggttaccatggtcgcgtggtgtctgat

SEQ ID NO: 1604 - DNA, 83 bp, Homo sapiens
  chr3:157815888-157815971
  hyper
gtcttggcggctgctgcggccgccactaccgaggcggcggaagccgaatccgcggccagcgtggcgagcggcagtccgaaggg

SEQ ID NO: 1605 - DNA, 31 bp, Homo sapiens
  chr3:159943735-159943766
  hyper
gtccacgcaggtacccgcgcggccaggcgcg

SEQ ID NO: 1606 - DNA, 159 bp, Homo sapiens
  chr3:160472595-160472754
  hyper
gccccggggcccccatcggaagcttcgtgccttcccgtggaaaggtcgcgagcagggaaggccttcgtggccactgagtcccctactccaggggcggcggccgctctccgaaagagcggcccttctcgtccctcccgaggttatcgtcagagtgcactt

SEQ ID NO: 1607 - DNA, 268 bp, Homo sapiens
  chr3:160472764-160473032
  hyper
acagaggtcattctgtcgagtcccccctttctgctgttctcgggagggagaaggctgctggacccaggctcgctccccgcctctcgggagatccgggaaggcctctattgctgaacgccgagacagcggccagcggcccgatcgtctccctaccgctttgcaagccgggagaagtgcgtcccttctcgcttgccttatggctggcgaagcggggaccgcactatagtgcagccgccgaaggggggaacgctcacgtatggctctcggc

SEQ ID NO: 1608 - DNA, 62 bp, Homo sapiens
  chr3:160473172-160473234
  hyper
cttggctgtcctggaccgcatggggctgcgagcccgcaccggcggccgcggaacttgctcag

SEQ ID NO: 1609 - DNA, 96 bp, Homo sapiens
  chr3:160473309-160473405
  hyper
gcggggggcggagcgcgcgcgagccgggacgcgaggagggagcgcgcgagtgaagccgagctgagccgagccgatccgagccgggaggtgcctggg

SEQ ID NO: 1610 - DNA, 216 bp, Homo sapiens
  chr3:160473409-160473625
  hyper
gcaggcagagcccagccggccgcctgcggctcagtaccgaccgtgccgcgtcgccgggctctgcgtacccctgtctctgcccaggctcccgcaaaacttttattctctggggcccccggggtgtgtgaaggaattggaaccttccgccatctccgcgctccccttcggcggcgaccgaggggacctgcgtccctcgtccgccgggctctggagccc

SEQ ID NO: 1611 - DNA, 31 bp, Homo sapiens
  chr3:160473642-160473673
  hyper
tcgctctccggagtctcgagggggcaccccc

SEQ ID NO: 1612 - DNA, 34 bp, Homo sapiens
  chr3:160473774-160473808
  hyper
ccagcggctgctgctgcggcggctgctgctaccg

SEQ ID NO: 1613 - DNA, 91 bp, Homo sapiens
  chr3:160473982-160474073
  hyper
ccctcgggcactgctccgcctccctcccggcgggctgtccccgcagtgctcccggacccggcgagccttcggggcgcgcgtcgctggtggt

SEQ ID NO: 1614 - DNA, 31 bp, Homo sapiens
  chr3:160822406-160822437
  hyper
cctgtagccctagccccgtgggatttccttc

SEQ ID NO: 1615 - DNA, 35 bp, Homo sapiens
  chr3:164924699-164924734
  hyper
cgttcgcgcctcccagcgaccggccagttgccagc

SEQ ID NO: 1616 - DNA, 76 bp, Homo sapiens
  chr3:164924742-164924818
  hyper
agaatgagcttggagccgcagggcttaatcccgcgcggctcagagatgggtttctggactcgcgaagcagctgcaa

SEQ ID NO: 1617 - DNA, 31 bp, Homo sapiens
  chr3:168754776-168754807
  hyper
gggatttgtccaaagacgcagccagtaaaga

SEQ ID NO: 1618 - DNA, 57 bp, Homo sapiens
  chr3:169376003-169376060
  hyper
gaaaatgcctagacagcggcttccagcggaagaagggttaaccgtcactccaaaaaa

SEQ ID NO: 1619 - DNA, 31 bp, Homo sapiens
  chr3:169376183-169376214
  hyper
tgtgtgcctgccctccgcgcaagagtgctcc

SEQ ID NO: 1620 - DNA, 31 bp, Homo sapiens
  chr3:169376453-169376484
  hyper
cccagtcccacccccacgtccatcttgggcc

SEQ ID NO: 1621 - DNA, 47 bp, Homo sapiens
  chr3:169376485-169376532
  hyper
cttcctcagcaccagacggttttgagatgaagcgtgggagggctcag

SEQ ID NO: 1622 - DNA, 43 bp, Homo sapiens
  chr3:169376700-169376743
  hyper
tcttgtccttctagcccggggaggagggcgtccccccttcctg

SEQ ID NO: 1623 - DNA, 31 bp, Homo sapiens
  chr3:169376749-169376780
  hyper
gtcacaactgcagcctcggataacctggccc

SEQ ID NO: 1624 - DNA, 65 bp, Homo sapiens
  chr3:169386972-169387037
  hyper
accaggtgctaagctcgcggtcccccaccagccgctctggccgccctctccgggctcggcgcggc

SEQ ID NO: 1625 - DNA, 51 bp, Homo sapiens
  chr3:169482234-169482285
  hyper
gcccattcattttggccgactttggaggtgccttcacgtctcctgccaatt

SEQ ID NO: 1626 - DNA, 161 bp, Homo sapiens
  chr3:169482322-169482483
  hyper
cacaagcccccattgccggcgaggggtgacggatgcgcacgatcggcgttccccccaccaacaggaaagcgaactgcatgtgtgagccgagtcctgggtgcacgtcccacagctcagggaatcgcgccgcgcgcggggactcgctccgttcctcttcctgc

SEQ ID NO: 1627 - DNA, 57 bp, Homo sapiens
  chr3:169482613-169482670
  hyper
ggctgggcaggcgacccgccgcaggtccccgggaggggcgaacgggccagcagctga

SEQ ID NO: 1628 - DNA, 117 bp, Homo sapiens
  chr3:169482679-169482796
  hyper
tttgctctagaatgaacggtggaaggcggcaggccgaggcttttccgcccgctgaaagtcagcgagaaaaacagcgcgcggggagcaaaagcacggcgcctacgcccttctcagtta

SEQ ID NO: 1629 - DNA, 31 bp, Homo sapiens
  chr3:169483115-169483146
  hyper
cagacgcggttcacctcgactaccttaaaaa

SEQ ID NO: 1630 - DNA, 31 bp, Homo sapiens
  chr3:170074249-170074280
  hyper
agttcaatatgctaatcggctaccctgggaa

SEQ ID NO: 1631 - DNA, 50 bp, Homo sapiens
  chr3:170074283-170074333
  hyper
ggaagaccaccctacacgcctcagagggtcacagccggaaagctcttgag

SEQ ID NO: 1632 - DNA, 36 bp, Homo sapiens
  chr3:170074334-170074370
  hyper
cctatcttccctacctcgtctcgtccctctccaaaa

SEQ ID NO: 1633 - DNA, 31 bp, Homo sapiens
  chr3:170819237-170819268
  hyper
atcagtctgggtatgtcgctgacagccactg

SEQ ID NO: 1634 - DNA, 80 bp, Homo sapiens
  chr3:170878636-170878716
  hyper
aaggacagtggctacccgaatgggcttctcaaaggtgtgaagtaacgaactgaataacgcaagtccgaaaataccactta

SEQ ID NO: 1635 - DNA, 62 bp, Homo sapiens
  chr3:170878774-170878836
  hyper
ccttctacccattctacgtgttacatatgtaagaaaacaagctcttacgatagagaccataa

SEQ ID NO: 1636 - DNA, 89 bp, Homo sapiens
  chr3:171527743-171527832
  hyper
ggttggtacgggatgccggtcccatcgcccccaccagcccagtcatgccaccgcgcacccgaaccaagggcgcccggatgacctgggga

SEQ ID NO: 1637 - DNA, 54 bp, Homo sapiens
  chr3:171528189-171528243
  hyper
tgcagggcgaaggggccgctagcacctgcgcgttggcggcggactctcagggct

SEQ ID NO: 1638 - DNA, 100 bp, Homo sapiens
  chr3:171528335-171528435
  hyper
ccgcccggattcgccccggattcgcaggggtggagcgaggcggtgccaggtcccggggcgtcgcggtgccggctggaggccccagcggggcaggtctcgc

SEQ ID NO: 1639 - DNA, 73 bp, Homo sapiens
  chr3:171528475-171528548
  hyper
ccaaagtttcataactcgaccgcatcaccctagggaatgctcgctattaggaccattatcaggtcctctcgag

SEQ ID NO: 1640 - DNA, 31 bp, Homo sapiens
  chr3:171758578-171758609
  hyper
cctcgggctgtgcccgcgaactttcccagag

SEQ ID NO: 1641 - DNA, 62 bp, Homo sapiens
  chr3:174158580-174158642
  hyper
ttgaacactgctgcccgcggctcttcttcccacttggctcgacaaacgcgtcttttattatg

SEQ ID NO: 1642 - DNA, 88 bp, Homo sapiens
  chr3:174158754-174158842
  hyper
acggctgctgaaaatccggcctggcccggcagccgtaccgcagacgagcccgcgcccgcgccgctcaggtaatcggagtccttttctt

SEQ ID NO: 1643 - DNA, 163 bp, Homo sapiens
  chr3:174158852-174159015
  hyper
tgccaaaacaagctccgcgctctgaggcggcgcggcctcggccgagcggtccgtgtctccttgctcctccgtcctacccaagctggcgcgactgagctgtgggccgcacccctgcgcggggcccggggcgccgacccggcgtgaagtacgggggccgaggggc

SEQ ID NO: 1644 - DNA, 97 bp, Homo sapiens
  chr3:174159124-174159221
  hyper
gcccccgcccacctcccgaagccgcttgtcttaggagaggagcgtagcagctccgagtccccgcttctgacacgttcacacacgtatgcagtgcacg

SEQ ID NO: 1645 - DNA, 31 bp, Homo sapiens
  chr3:176915777-176915808
  hyper
ccgcgtgtccggggggcggcccggcggcgtt

SEQ ID NO: 1646 - DNA, 31 bp, Homo sapiens
  chr3:177077212-177077243
  hyper
gcttccttccagatcccggcctttaactgca

SEQ ID NO: 1647 - DNA, 43 bp, Homo sapiens
  chr3:178789081-178789124
  hyper
tgtgcatgcatacacacgaacccacacacgcacctcaacccgg

SEQ ID NO: 1648 - DNA, 132 bp, Homo sapiens
  chr3:179168906-179169038
  hyper
cgtggggccagttcccgcgtggcagctgggcgcgacacaggcgcgccctcctcgtccctcccgggcagcgtcggccgcccgagcccggggagacccgccccgccccgcgccgtcacccgggccccgttccgc

SEQ ID NO: 1649 - DNA, 36 bp, Homo sapiens
  chr3:181419955-181419991
  hyper
ctctgtactcgaccccgcgagcggctctcgccttcc

SEQ ID NO: 1650 - DNA, 38 bp, Homo sapiens
  chr3:181420143-181420181
  hyper
ccctccaaaaaagaaacgggatgcgaaaacaaattttt

SEQ ID NO: 1651 - DNA, 31 bp, Homo sapiens
  chr3:181420214-181420245
  hyper
taaaaaactaaagaggcgatactacaatttt

SEQ ID NO: 1652 - DNA, 31 bp, Homo sapiens
  chr3:181433615-181433646
  hyper
ctaagttagctcatcccgttggtttgcatct

SEQ ID NO: 1653 - DNA, 31 bp, Homo sapiens
  chr3:181438166-181438197
  hyper
tgtattaaataaggagcggtgaattcttccc

SEQ ID NO: 1654 - DNA, 31 bp, Homo sapiens
  chr3:182972270-182972301
  hyper
ggccgccgcccaggtgcggcaggtaggctcg

SEQ ID NO: 1655 - DNA, 101 bp, Homo sapiens
  chr3:183165243-183165344
  hyper
gccgagaccacaccccgcgggcacgagcccgattggcagattgtagccgagtggtttcaacggtgacgccccccacccgaatgcctcgctgggattggctc

SEQ ID NO: 1656 - DNA, 31 bp, Homo sapiens
  chr3:183165349-183165380
  hyper
ttggttcagacctggacggtggccagaggag

SEQ ID NO: 1657 - DNA, 31 bp, Homo sapiens
  chr3:183602889-183602920
  hyper
gaggatggggccagagcgaagagggacaact

SEQ ID NO: 1658 - DNA, 31 bp, Homo sapiens
  chr3:183676020-183676051
  hyper
tgtgtatattgcatgacgctgaggtctgggt

SEQ ID NO: 1659 - DNA, 31 bp, Homo sapiens
  chr3:183676074-183676105
  hyper
tactaagcatagtacccggcttttccctctt

SEQ ID NO: 1660 - DNA, 31 bp, Homo sapiens
  chr3:183736077-183736108
  hyper
ctaacccgttgagagtcgtcaggccggccag

SEQ ID NO: 1661 - DNA, 31 bp, Homo sapiens
  chr3:183851914-183851945
  hyper
ggtccccctaggcgggcgccggagcacgacg

SEQ ID NO: 1662 - DNA, 31 bp, Homo sapiens
  chr3:184097687-184097718
  hyper
cacccgcgatccgggccgctgctgctgggtc

SEQ ID NO: 1663 - DNA, 45 bp, Homo sapiens
  chr3:184097867-184097912
  hyper
cagcgcccgcccgcccgcgctcctcccggccgctcctcccgcccc

SEQ ID NO: 1664 - DNA, 71 bp, Homo sapiens
  chr3:184098371-184098442
  hyper
gcgggggcagaagggcgcggtgcctgggacccgggacccgcgggcagcccccggggcggcacacggcgcga

SEQ ID NO: 1665 - DNA, 31 bp, Homo sapiens
  chr3:184279244-184279275
  hyper
ctggttggcacctcctcggactcagtttagg

SEQ ID NO: 1666 - DNA, 31 bp, Homo sapiens
  chr3:184279783-184279814
  hyper
gtccgtccagattcccgcgggaccgacctgt

SEQ ID NO: 1667 - DNA, 38 bp, Homo sapiens
  chr3:184279916-184279954
  hyper
agcctgccccggagcccgccgagcgcaccctctctcgg

SEQ ID NO: 1668 - DNA, 76 bp, Homo sapiens
  chr3:184280002-184280078
  hyper
gctcctagagctgccacggccatggccagagcccgcccgccgccgccgccgtcgccgccgccggggcttctgccgc

SEQ ID NO: 1669 - DNA, 39 bp, Homo sapiens
  chr3:184280191-184280230
  hyper
ggctgcgggctagcagcgtgggtccgacccggattgagc

SEQ ID NO: 1670 - DNA, 31 bp, Homo sapiens
  chr3:185541178-185541209
  hyper
gtgtctcgggacaaggcgaggagggtgcgag

SEQ ID NO: 1671 - DNA, 123 bp, Homo sapiens
  chr3:185541309-185541432
  hyper
aagctgcagggctggcgcggccccgctgctctcccggcccccacctctccattccgctaatccggggcccgaaggctccaccgggctcccctccctgccctctcctcccggtggccccgagaa

SEQ ID NO: 1672 - DNA, 38 bp, Homo sapiens
  chr3:185541794-185541832
  hyper
gcgggaggcggggggacgggcggcggaaagcccccagc

SEQ ID NO: 1673 - DNA, 31 bp, Homo sapiens
  chr3:185541901-185541932
  hyper
agaggggactgaggttcgggaaaggaccgag

SEQ ID NO: 1674 - DNA, 43 bp, Homo sapiens
  chr3:185542333-185542376
  hyper
gggcgccccaaggctgcggccccgagggcgagggcagagtcca

SEQ ID NO: 1675 - DNA, 190 bp, Homo sapiens
  chr3:185542380-185542570
  hyper
tgtggggggaggggagcgggccgtcccaggagcgggccggcggcgagagttgagggtctggtgcgtggaagtgagcgtgcgggcgcgggagccgccgccgggcgccgcccgccggactcggcctccctcccggcgccgtcccggcctgagcggggcgaggcggggggagggggccgcgctgagtgctcac

SEQ ID NO: 1676 - DNA, 101 bp, Homo sapiens
  chr3:185543411-185543512
  hyper
cgcggagaggggtgtgcgcaaggtggaccggatgtgagtgcgctgctgccagggcaagcgggaaggtgtgtcccggaggtgagaggcgagggcaggctggg

SEQ ID NO: 1677 - DNA, 31 bp, Homo sapiens
  chr3:186078732-186078763
  hyper
aggcagcggcgcagcgcgggagagcgcgccc

SEQ ID NO: 1678 - DNA, 65 bp, Homo sapiens
  chr3:186079203-186079268
  hyper
tattctctgaggtgtccgtgttcgcttcagcttccctttaagtcgccctgcgcaggggctttgtg

SEQ ID NO: 1679 - DNA, 53 bp, Homo sapiens
  chr3:186079278-186079331
  hyper
aaagtcctagaaccccgcgggacggtcggaggctttggcggccagacattagg

SEQ ID NO: 1680 - DNA, 31 bp, Homo sapiens
  chr3:186079334-186079365
  hyper
agcatctcctgcttctcggactgcctggagc

SEQ ID NO: 1681 - DNA, 31 bp, Homo sapiens
  chr3:186079400-186079431
  hyper
gaagaagaaggaaatccgaccagttgcttta

SEQ ID NO: 1682 - DNA, 42 bp, Homo sapiens
  chr3:186079436-186079478
  hyper
ctgcctggagcaaggccgcctcccacccgcacagctttgagg

SEQ ID NO: 1683 - DNA, 85 bp, Homo sapiens
  chr3:186079481-186079566
  hyper
gagggggcctctcagtcgcagagagagccgagccccaccctgtgcgttccccaagcctgcacccctcgagcggggcatcccttcc

SEQ ID NO: 1684 - DNA, 192 bp, Homo sapiens
  chr3:186079578-186079770
  hyper
tggcaggtggaactgtcggggtgggcgccgtggctttggctgcagccccttccctggccgcgggaccggctcccgctttgccctcctttaccaagttgctgcaccgggtgctccctgagccggggaccccctccgccgcgccggccgccgtcttacctcaccaggcaacacttggttgcgcggtggcccggg

SEQ ID NO: 1685 - DNA, 76 bp, Homo sapiens
  chr3:186079818-186079894
  hyper
cgagagacagaagggggaccgaagctggcctctgggcgtcttcccgcctgcgcagccctctcgggggagggggatg

SEQ ID NO: 1686 - DNA, 31 bp, Homo sapiens
  chr3:186079895-186079926
  hyper
agccccagtgggtgccgcggagaccaggctg

SEQ ID NO: 1687 - DNA, 54 bp, Homo sapiens
  chr3:186079928-186079982
  hyper
aggctgtggttggtagcgccggggtcttcaccctgtgctcggagttcagcagct

SEQ ID NO: 1688 - DNA, 74 bp, Homo sapiens
  chr3:186079983-186080057
  hyper
caaagctgtctatctccgtggcccgctactacggcactgcggctctgtgccctgcccctcgcagcctggcaagt

SEQ ID NO: 1689 - DNA, 162 bp, Homo sapiens
  chr3:186080060-186080222
  hyper
gctgccactctcactgcggagccctgcccccgggcgcagagcccgcccccgccacacacaccggcgcgcgcgcgtacacacacggcacacacagacacgcgcttccacacatgcacacgcgtgcgcacacacgaatgtggatccgctcgatgggaacctgac

SEQ ID NO: 1690 - DNA, 68 bp, Homo sapiens
  chr3:186080227-186080295
  hyper
ttggtgcaactagggcgcgggcatcattaggacgctttttactgacagggcttcggtttgggaggagg

SEQ ID NO: 1691 - DNA, 58 bp, Homo sapiens
  chr3:186857095-186857153
  hyper
caggtctgcgtgtcaccgacccgaacccgctccgtcgtcctgacgcccccggcctagc

SEQ ID NO: 1692 - DNA, 192 bp, Homo sapiens
  chr3:186857228-186857420
  hyper
cggttgcctcgctgggcgcagcaattcaaccgccgcgcgccggatgctaagaccgcgatttccccggatgctagggcggtgatttcccccgtgacaggccccgccccggccccgcccaggcccgggcggtcccgccccactgagctgtggctcggggagccgtgggtccgactcctgcgtgtgatgtgtcac

SEQ ID NO: 1693 - DNA, 170 bp, Homo sapiens
  chr3:187455315-187455485
  hyper
caaacaccagccctgcgcgccggggcaagcctaggcagacttcgctaccccaccccgaccactccgtacctgtcttccagggactgcccgcccctgggcgatccacctcgaagccccccgcaaggcgcgacggaggctttgtggtatgaccgtggcggcccttaatttag

SEQ ID NO: 1694 - DNA, 31 bp, Homo sapiens
  chr3:187455499-187455530
  hyper
aacttttggtgcacctcggtagctaacattg

SEQ ID NO: 1695 - DNA, 34 bp, Homo sapiens
  chr3:187455554-187455588
  hyper
tttttttttcctgttacgccgtcaatgcagcagg

SEQ ID NO: 1696 - DNA, 31 bp, Homo sapiens
  chr3:187455660-187455691
  hyper
acactttgcctattgccggctccaacaagaa

SEQ ID NO: 1697 - DNA, 31 bp, Homo sapiens
  chr3:187455695-187455726
  hyper
ctttccaggaagctgccggccccggcagccg

SEQ ID NO: 1698 - DNA, 52 bp, Homo sapiens
  chr3:187455761-187455813
  hyper
gattcacccagggaggcggggccgctggggaaggctcgcggggaatacagca

SEQ ID NO: 1699 - DNA, 40 bp, Homo sapiens
  chr3:187455816-187455856
  hyper
tttcccctaaatccctcgtccgcgccgagtgcagggctct

SEQ ID NO: 1700 - DNA, 31 bp, Homo sapiens
  chr3:187456058-187456089
  hyper
taggggaatgtttgagcgagacttcaaggtc

SEQ ID NO: 1701 - DNA, 31 bp, Homo sapiens
  chr3:187456114-187456145
  hyper
gggtctccatcataggcgccccaggcaaggt

SEQ ID NO: 1702 - DNA, 74 bp, Homo sapiens
  chr3:187456158-187456232
  hyper
aacagaaagccccttccgcctacgttggcaagaacgggaacccagctccacttggtttccgcccaaagtcttta

SEQ ID NO: 1703 - DNA, 359 bp, Homo sapiens
  chr3:187456234-187456593
  hyper
acaggagctgccaagccgtaaggatttccgaatccgatttccccgaaaccgtagagacacagcttggactcggcaaaggccggggccccgacccctgcgcgcgcactggcactctccaaagttgcctcgccttcctgtggccctcccgggaattataacccccgggtgccatgtcctaattggtctcggtagcaggctccggggtgcgctttcgggggctaggggacagcgaaagactcagccacaaaggccgcagtctggtcctaaaactagccagtggcgtcacactgcgccgctcatcccttctgcggcaagcggaagggtcagagtcggtctgcaaagaacgagcctttggcctc

SEQ ID NO: 1704 - DNA, 35 bp, Homo sapiens
  chr3:187456608-187456643
  hyper
ggctttctcaccccttcgcccggtgggataaaggt

SEQ ID NO: 1705 - DNA, 31 bp, Homo sapiens
  chr3:187456764-187456795
  hyper
ttttaccgctgcctaacgctagagagagccc

SEQ ID NO: 1706 - DNA, 46 bp, Homo sapiens
  chr3:187456797-187456843
  hyper
catcaaggtttgaaaccgtcaacccctttctcgcccctcccctcct

SEQ ID NO: 1707 - DNA, 71 bp, Homo sapiens
  chr3:187457038-187457109
  hyper
ataaggctgcaactgccgtagtgaaccccgcatcaggggccctgccgtggggctcccggtctcagcagtgt

SEQ ID NO: 1708 - DNA, 57 bp, Homo sapiens
  chr3:187457111-187457168
  hyper
cagccaactagctgcacggctgcagacaccaccgtggtccggcggcagggggtgagg

SEQ ID NO: 1709 - DNA, 31 bp, Homo sapiens
  chr3:187457623-187457654
  hyper
aatgcctttaaaaatccgatctggaaagaag

SEQ ID NO: 1710 - DNA, 239 bp, Homo sapiens
  chr3:187457740-187457979
  hyper
aactcgttcccagattcgtttccagtccgaacagaggcgcgtttctccgacgcggcctccgacggctcccgcagtgggaggggccgaactcgatccccgccgacccgggcgggggcgacggcgctgtctccccctgcagagcgcgcctgctgccgctaggggccgccagcatgcggacgcgcgtttgccatcttaagtcacgagctcggagaaagaaaactttacggaggaactgttgt

SEQ ID NO: 1711 - DNA, 39 bp, Homo sapiens
  chr3:187458016-187458055
  hyper
ctcacacacacacacccggtttctcgccaggctactatg

SEQ ID NO: 1712 - DNA, 31 bp, Homo sapiens
  chr3:187461986-187462017
  hyper
aatacaaacaccgcagcggccagaaatcccg

SEQ ID NO: 1713 - DNA, 174 bp, Homo sapiens
  chr3:187462563-187462737
  hyper
agaggagggagggaagcggaggccaggagcgacggagcaaggaaagcagtttgcaagcgagaaaagagggaaaaaacacagccgcacgaatccagagagatcacaagccgtacgcaagcagcagcagaaagagcgagagcgcgagcgcgcgtcctctccgcggtctggggccag

SEQ ID NO: 1714 - DNA, 73 bp, Homo sapiens
  chr3:187462739-187462812
  hyper
agcccccagactagcccgaatcaccccccaagcactgtctcgtcctctctgctccggccgccccctaattccc

SEQ ID NO: 1715 - DNA, 70 bp, Homo sapiens
  chr3:187463099-187463169
  hyper
taatgatcatgagcagcggcggcggcagcggcaccagcggcaacagcggcggcggcggcagtagcagcag

SEQ ID NO: 1716 - DNA, 81 bp, Homo sapiens
  chr3:192635695-192635776
  hyper
ctgggcctcctcccctcgcaggctcccaggctttggccccggctcgtgggcgggttggcgggcgggcgtctgggcgggcag

SEQ ID NO: 1717 - DNA, 31 bp, Homo sapiens
  chr3:192635875-192635906
  hyper
cccgccccgatgctgcgcgtccctgccctgc

SEQ ID NO: 1718 - DNA, 59 bp, Homo sapiens
  chr3:192635921-192635980
  hyper
cagcggcaacggcggtcgtagagccaactggagcctcccccgggcgaggaaagtgaagt

SEQ ID NO: 1719 - DNA, 60 bp, Homo sapiens
  chr3:192636007-192636067
  hyper
gaaatcaacaagctgccggctccggtgttacggagccagcaccagcgtctccatttaaag

SEQ ID NO: 1720 - DNA, 31 bp, Homo sapiens
  chr3:193721400-193721431
  hyper
ctcaggagtttccttccggctgcctggcctc

SEQ ID NO: 1721 - DNA, 31 bp, Homo sapiens
  chr3:193721460-193721491
  hyper
tctgttctgacttaggcgtttccctagggtg

SEQ ID NO: 1722 - DNA, 41 bp, Homo sapiens
  chr3:193721503-193721544
  hyper
ctgggttgggcctgggcgtgtggctccgtgatcgtaagtcc

SEQ ID NO: 1723 - DNA, 31 bp, Homo sapiens
  chr3:193721576-193721607
  hyper
agcagggcagggaggccgcagtggggcctgg

SEQ ID NO: 1724 - DNA, 31 bp, Homo sapiens
  chr3:193852179-193852210
  hyper
gcgtagtgagggggagcggcccggccgcccg

SEQ ID NO: 1725 - DNA, 70 bp, Homo sapiens
  chr3:193852643-193852713
  hyper
acacacaccccccacacgcagcgcgcgccaatgagcccgggccaggcgcagggggcggggttttcccagg

SEQ ID NO: 1726 - DNA, 31 bp, Homo sapiens
  chr3:193853961-193853992
  hyper
taacagcggaatcccccgtctacctctctcc

SEQ ID NO: 1727 - DNA, 31 bp, Homo sapiens
  chr3:193854340-193854371
  hyper
ttctgtcttgaaaccccgggatggcagattc

SEQ ID NO: 1728 - DNA, 31 bp, Homo sapiens
  chr3:193854613-193854644
  hyper
cccaggcgggagggcccggccttattcgctg

SEQ ID NO: 1729 - DNA, 37 bp, Homo sapiens
  chr3:194208175-194208212
  hyper
ttcctttagccaccctcgcccccgccaaaacaaacag

SEQ ID NO: 1730 - DNA, 24 bp, Homo sapiens
  chr3:194208233-194208257
  hyper
atgaccacggactctgcgccccgg

SEQ ID NO: 1731 - DNA, 110 bp, Homo sapiens
  chr3:194353931-194354041
  hyper
gcgcctcccccatggcgcggctgggcgcgcggcgcggggccggggacctgggcgcagcctccctcgccgcgggcaagccccgagcgccgccgccccgcgtgcccttctct

SEQ ID NO: 1732 - DNA, 42 bp, Homo sapiens
  chr3:194354210-194354252
  hyper
ccccagcggcgggagccgggagctgcgcgcgcacaaagactg

SEQ ID NO: 1733 - DNA, 42 bp, Homo sapiens
  chr3:194354405-194354447
  hyper
caacagcaattagttgcgctgctgaagcgcatgggtgctggg

SEQ ID NO: 1734 - DNA, 42 bp, Homo sapiens
  chr3:194354461-194354503
  hyper
ggggcgtggtcctgatcgccgacagggcgcagtaaaaagggt

SEQ ID NO: 1735 - DNA, 24 bp, Homo sapiens
  chr3:194408744-194408768
  hyper
gccctgacgccacctccgccaccg

SEQ ID NO: 1736 - DNA, 31 bp, Homo sapiens
  chr3:194408960-194408991
  hyper
ccagcgttcccccgaccgctttcccctacct

SEQ ID NO: 1737 - DNA, 68 bp, Homo sapiens
  chr3:194409016-194409084
  hyper
cttttggctctgttgcgcgtggggatgcggggagatttgagaggggaaaaccccgccaggagggagag

SEQ ID NO: 1738 - DNA, 31 bp, Homo sapiens
  chr3:194409088-194409119
  hyper
gcacccctctgggatgcgggtgagggaaggt

SEQ ID NO: 1739 - DNA, 31 bp, Homo sapiens
  chr3:194602924-194602955
  hyper
cctgctctggggaaggcgctgcctcagggca

SEQ ID NO: 1740 - DNA, 80 bp, Homo sapiens
  chr3:194980431-194980511
  hyper
gcaccagggcggcccccggagccggcctctggcggcctcgggtcttttgccaaattccccaccggcgccaggataccgag

SEQ ID NO: 1741 - DNA, 31 bp, Homo sapiens
  chr3:195809081-195809112
  hyper
ggggcggggatgcgcgcgcagcgggcggggc

SEQ ID NO: 1742 - DNA, 37 bp, Homo sapiens
  chr3:197222651-197222688
  hyper
actttcctaggctggccgggctcggctggggcatgga

SEQ ID NO: 1743 - DNA, 31 bp, Homo sapiens
  chr3:197222713-197222744
  hyper
cacttacagggccccccgtccctttcctttt

SEQ ID NO: 1744 - DNA, 39 bp, Homo sapiens
  chr4:667539-667578
  hyper
gagctgattccactatcggggtcacgctcggtggaggac

SEQ ID NO: 1745 - DNA, 55 bp, Homo sapiens
  chr4:667711-667766
  hyper
gctccgtaggccacaccgaggaacagggcggagtagcggccgagctgcgaaagag

SEQ ID NO: 1746 - DNA, 31 bp, Homo sapiens
  chr4:699369-699400
  hyper
gtcgctctcctgaccacgcccctcatggccc

SEQ ID NO: 1747 - DNA, 31 bp, Homo sapiens
  chr4:781538-781569
  hyper
tcaatacgcctccccacgccacactcctcca

SEQ ID NO: 1748 - DNA, 134 bp, Homo sapiens
  chr4:819436-819570
  hyper
gaagcgaggaggaggccgggcgcgggccgggaccgcgggggccgcttcagcaccgcggcagtggacagcgcccgccccggaccccgcgcgcgcggagcccgggagagaaacgggggctgcggggagaagccggg

SEQ ID NO: 1749 - DNA, 45 bp, Homo sapiens
  chr4:819689-819734
  hyper
cggggagaaggggggccgggaaggagaaaccggggccggcgggag

SEQ ID NO: 1750 - DNA, 31 bp, Homo sapiens
  chr4:966932-966963
  hyper
ctcaggctcccgcccacggggcagaggcagg

SEQ ID NO: 1751 - DNA, 31 bp, Homo sapiens
  chr4:966986-967017
  hyper
cccgggcgctcaccgtcgcacaggaagccgg

SEQ ID NO: 1752 - DNA, 34 bp, Homo sapiens
  chr4:967208-967242
  hyper
ccggggcgcggggagccgccgcccagccaggcgc

SEQ ID NO: 1753 - DNA, 31 bp, Homo sapiens
  chr4:1004428-1004459
  hyper
cgggatgtgggcaggccgtgaggtttgtgtt

SEQ ID NO: 1754 - DNA, 31 bp, Homo sapiens
  chr4:1004480-1004511
  hyper
aggggaggccatggggcggctggaggtgcgg

SEQ ID NO: 1755 - DNA, 51 bp, Homo sapiens
  chr4:1004572-1004623
  hyper
gccgcgaagagctgggcgctgtcttctccacgcctccgtttcttcatctgc

SEQ ID NO: 1756 - DNA, 31 bp, Homo sapiens
  chr4:1036591-1036622
  hyper
acacacaacccacccccgcacactgacacac

SEQ ID NO: 1757 - DNA, 31 bp, Homo sapiens
  chr4:1310814-1310845
  hyper
cacctgcaggcccacccggtcccacactcca

SEQ ID NO: 1758 - DNA, 42 bp, Homo sapiens
  chr4:1332423-1332465
  hyper
gggggccaggctggcacgcatcgccatcgggacagggctgtg

SEQ ID NO: 1759 - DNA, 233 bp, Homo sapiens
  chr4:1332482-1332715
  hyper
gggggccaggctggcacgcatcgccatcgggacagggctgtgtgggacgggcagggcggggggccaggctggcacgcgtcgccatcgggacagggctgtgtggggcgggcagggcagcggggccaggctggcacacgtcgccattgggacagggctgtcctctcgccccaccctgccttagcttcgttcgaaatggatgaaggggtgggaaggacaggcgaggtggccccggg

SEQ ID NO: 1760 - DNA, 20 bp, Homo sapiens
  chr4:1794935-1794955
  hyper
ggggaccgggcgggagcggg

SEQ ID NO: 1761 - DNA, 84 bp, Homo sapiens
  chr4:1794972-1795056
  hyper
cgcggaccgtcccccactggctgcggcgcgcggggcagcccaggctcagtgcgcggtggcggcggcgtcgcgggcagctggcgc

SEQ ID NO: 1762 - DNA, 172 bp, Homo sapiens
  chr4:1795075-1795247
  hyper
ggtcgcacggacgcaccggcgggccgccggccggagggacggggcgggagctgggcccgcggacagcgagccggagcgggagccgcgcgtagcgagccgggctccggcgctcgccaggtccgtgcttggggccgggcaggctcgcggaggggtccaacggtgctcgcggagg

SEQ ID NO: 1763 - DNA, 31 bp, Homo sapiens
  chr4:1795283-1795314
  hyper
ctgcagcgggccgggccggggcgcgggcttc

SEQ ID NO: 1764 - DNA, 35 bp, Homo sapiens
  chr4:1795555-1795590
  hyper
gtagtctcccgagcggcgcccgcctcccgccggtg

SEQ ID NO: 1765 - DNA, 660 bp, Homo sapiens
  chr4:1795964-1796624
  hyper
agctaccctccaagtgcgaggccaccacggggagccaggctgggggttggcgtccgcagccccgatcccctgcgactccctagccctggcctgtcgggagggcgcggggggccccatttccacgattcccgctgttgttattcgggttctgcgcagacggaaagttcccattgttggcgtccccctcccccgggccccagtttgtggccagcttcggccaaggcgagagaccggacttctaagggtgggtgtgcgcgtcagcgaagcccggcccctgcccgcccgaagaggcagcagcctccagcgtccccgctgccgaccctgcccctgcctgggggccgagggcgcttccccgtgggtgcgcgccgagctccaggcaagcgaggggcgcgtgtcccagcgtcgcgggccctagactgggctggcggtccaggtcccgcgggacgtcgagggtctgaagggaggtcccaaggggcgaggggaggggaaggggcgcccggccggacctgcacacgcgccgcggttcctcgtgggccgggccgagagctccggtgccgccgccgcgtacacccgcagccggctccggacgggcgaggggggcgcgcacagctcagcccggcggccgcgcggagggaggccttggcccggtgagctcgcgcc

SEQ ID NO: 1766 - DNA, 124 bp, Homo sapiens
  chr4:1796721-1796845
  hyper
gcgaccgcgggcgcggcgggccggggagggcgcctggagggccgaggcagatggcgtccgccccgcccgcgcccccgcgcccctttctccgtcggcggctgcagcctcccggaacaatgtcatt

SEQ ID NO: 1767 - DNA, 165 bp, Homo sapiens
  chr4:1796851-1797016
  hyper
atgaatgaaagtggcccggcgcttgaatgtgcgtgtcattcagcggcgtgacaggggccgtcgggaggtcagcgcgcgcttttagcgtctgctcgggcggccccgcttccaggggtgccggaggggcggccgcggggggagcttggctttcgcattctcattcag

SEQ ID NO: 1768 - DNA, 31 bp, Homo sapiens
  chr4:1797019-1797050
  hyper
aagatattactccctacggcccgggaatgtc

SEQ ID NO: 1769 - DNA, 31 bp, Homo sapiens
  chr4:1797114-1797145
  hyper
cggggcctcccccagtcgctcctggaacgcc

SEQ ID NO: 1770 - DNA, 49 bp, Homo sapiens
  chr4:2418949-2418998
  hyper
ccaagatctcagggcccgggcctccccgctgcgccggccccagggtgcc

SEQ ID NO: 1771 - DNA, 100 bp, Homo sapiens
  chr4:2419163-2419263
  hyper
gaggcacggggcgcgccgcccggaccccgaccccgcggcgctaggagaggcgcgggcgccggctggagagccgcacctcccgccccgccgaggctgctgg

SEQ ID NO: 1772 - DNA, 59 bp, Homo sapiens
  chr4:2419276-2419335
  hyper
cgccccaagggccgggcggaggacctgtcccggattccagaggacgtgggtggggaagg

SEQ ID NO: 1773 - DNA, 78 bp, Homo sapiens
  chr4:2419346-2419424
  hyper
ggacaagggaggggacgcgaactgggccgaggtgtgggtcagtcctggttcgggaagggaggccgttggcagggccat

SEQ ID NO: 1774 - DNA, 31 bp, Homo sapiens
  chr4:2419565-2419596
  hyper
gggggtgggggcaggacgggaatgagggggc

SEQ ID NO: 1775 - DNA, 129 bp, Homo sapiens
  chr4:2419603-2419732
  hyper
gtgcagggaggggagacggagaagtagtagggggtctgctccgggcccgcgggctggggaccacgaagtgtaggagggcaccgtccaggaccgggatgaggagggagaggggcccgttgtggccctgga

SEQ ID NO: 1776 - DNA, 34 bp, Homo sapiens
  chr4:2419869-2419903
  hyper
gtggagggaaggatgtcggcggtgggggaagagg

SEQ ID NO: 1777 - DNA, 31 bp, Homo sapiens
  chr4:2760070-2760101
  hyper
agccaccacgccaggccgccatgtgtatttt

SEQ ID NO: 1778 - DNA, 31 bp, Homo sapiens
  chr4:3573649-3573680
  hyper
agtagggaaataaaaacgcacagcaccatct

SEQ ID NO: 1779 - DNA, 39 bp, Homo sapiens
  chr4:6223660-6223699
  hyper
cgggggcggggctgcccggagcctcggccccgcccaccc

SEQ ID NO: 1780 - DNA, 37 bp, Homo sapiens
  chr4:6271358-6271395
  hyper
ttcgctgtgggcgagccggacccgccttctggcccct

SEQ ID NO: 1781 - DNA, 39 bp, Homo sapiens
  chr4:6271572-6271611
  hyper
cctcgtgcagaaggccgcgctagccggctcttcagcagc

SEQ ID NO: 1782 - DNA, 52 bp, Homo sapiens
  chr4:6271619-6271671
  hyper
attgctcccccgcggccgcagatctcccgtttgcgccgcgttcagctgctcc

SEQ ID NO: 1783 - DNA, 248 bp, Homo sapiens
  chr4:6271702-6271950
  hyper
agggcgtcgcagcgccgcgtgcggcccactcacgggccggtgagtacttcggcgctggggcagtggcgcggtggctgtgggcagcgcgcaggaggcgggcaagagccctgaggcactgtcctcttcgggcctcagtttccccttccgagctgatgggtggctggccccaaagtcccgacaaggtccccgaagttggagggccgggggtcccgcccgctctgcaacgcgcaaggcgacccctgttccgg

SEQ ID NO: 1784 - DNA, 39 bp, Homo sapiens
  chr4:6271974-6272013
  hyper
gcgccccggtcccccgcgcgctgtcgcctggagccccgc

SEQ ID NO: 1785 - DNA, 31 bp, Homo sapiens
  chr4:6272024-6272055
  hyper
cagcaggcccgagaggcggagcggccggcgg

SEQ ID NO: 1786 - DNA, 31 bp, Homo sapiens
  chr4:6272150-6272181
  hyper
cgcccggccgttggaacgcgcctgggccccc

SEQ ID NO: 1787 - DNA, 123 bp, Homo sapiens
  chr4:6717791-6717914
  hyper
aaacaaaggtggatgcgcgtgaacagacgccctcgcaggccgccggaagcaaaggcgtgagcgcgcgtgcgtgcgtgtgcgggtgcgtgagcgtgagcgcgcggaggccggaagcgagcgctg

SEQ ID NO: 1788 - DNA, 31 bp, Homo sapiens
  chr4:6989299-6989330
  hyper
tgtgtctgtgtttccacgtattttcttctgg

SEQ ID NO: 1789 - DNA, 31 bp, Homo sapiens
  chr4:7940409-7940440
  hyper
tcttccactctccaggcgctgagagctacaa

SEQ ID NO: 1790 - DNA, 31 bp, Homo sapiens
  chr4:7940595-7940626
  hyper
gccccccggggcccgccggccaggggagagg

SEQ ID NO: 1791 - DNA, 40 bp, Homo sapiens
  chr4:7940749-7940789
  hyper
acccccattacactcgcgtcccaggcggggtcgacccaga

SEQ ID NO: 1792 - DNA, 119 bp, Homo sapiens
  chr4:7941594-7941713
  hyper
caggcgcacacggccccgcccgccgcccgccgtcccgcccccagcggagccgggcgcccagggcccgccccccggccaatgggaagcgagctgcgcggagtgggcggggcctgagggaa

SEQ ID NO: 1793 - DNA, 120 bp, Homo sapiens
  chr4:8159728-8159848
  hyper
cgcggctgggctccagcgctgtgggatttttccagccccgcacagaggctgtcagatcccggagggtgggtgcggcgggaaaggcaggggtgcgacgcgcaggggcgaggggctggagac

SEQ ID NO: 1794 - DNA, 39 bp, Homo sapiens
  chr4:8160029-8160068
  hyper
aggtctgctggggccccggcccttcgcccggaccccagg

SEQ ID NO: 1795 - DNA, 200 bp, Homo sapiens
  chr4:8160071-8160271
  hyper
ccgcgcggaccctgaccgctttctgcagcctggaacaacccggacccccgtgagaagcaaagaaggggcgccttccagacatcctggcgcagccacgccggccggcgcgctgggaaaggatccccggcccgcgccactgagctacgcgctccgggcgcagggcagagggctgcgctctggcccctcggggctgcaaaatc

SEQ ID NO: 1796 - DNA, 76 bp, Homo sapiens
  chr4:8160278-8160354
  hyper
aaaagttgggtggagccgctgggtgattttccccggcgttgcaggtgcagcctccgaatgccacccagcccttgcg

SEQ ID NO: 1797 - DNA, 85 bp, Homo sapiens
  chr4:8160485-8160570
  hyper
cgcccgcgctatcctccgcccgcccgccggctccgcgcccgctccttgcgcacacgccaggcagcgccgccgcagccccacggcg

SEQ ID NO: 1798 - DNA, 31 bp, Homo sapiens
  chr4:8201330-8201361
  hyper
gctggcagtgccaatccgcagtgattgaggg

SEQ ID NO: 1799 - DNA, 35 bp, Homo sapiens
  chr4:8594317-8594352
  hyper
acggggcggggcactccgcccggggcaggcagggg

SEQ ID NO: 1800 - DNA, 31 bp, Homo sapiens
  chr4:8594372-8594403
  hyper
cctcctcctcccccagcggcatcctctctct

SEQ ID NO: 1801 - DNA, 106 bp, Homo sapiens
  chr4:9534313-9534419
  hyper
gggaggctcagtggccggccccgggttgaagttggtaactgagcggcaactccggcgggcgcggagttacagctcgtgacggcctccgagacgccagctgcccctt

SEQ ID NO: 1802 - DNA, 57 bp, Homo sapiens
  chr4:10090132-10090189
  hyper
atttactgggctctgacgacgagtctgcagatgtggggagggcgatgtctaagttct

SEQ ID NO: 1803 - DNA, 47 bp, Homo sapiens
  chr4:10090202-10090249
  hyper
agcattaggcagcctgcggctctgagcagtcacgggagcaggcagac

SEQ ID NO: 1804 - DNA, 31 bp, Homo sapiens
  chr4:10090276-10090307
  hyper
ccagttcttacctggccgtcagcactggctg

SEQ ID NO: 1805 - DNA, 31 bp, Homo sapiens
  chr4:10577054-10577085
  hyper
ggtcttccctgactaccggtgtcaagcaaaa

SEQ ID NO: 1806 - DNA, 31 bp, Homo sapiens
  chr4:13544371-13544402
  hyper
tcagccgctgtgtcaacgctgtgttgtcgag

SEQ ID NO: 1807 - DNA, 31 bp, Homo sapiens
  chr4:15780069-15780100
  hyper
ggacaaaccctgctgccggctctctaggaga

SEQ ID NO: 1808 - DNA, 31 bp, Homo sapiens
  chr4:15780159-15780190
  hyper
ggtcgtcccgaggtggcgccagcagtggagc

SEQ ID NO: 1809 - DNA, 53 bp, Homo sapiens
  chr4:15780308-15780361
  hyper
ggacagcagggccccgcgcgcagggaagccgcccggatcgcccggaaccgggc

SEQ ID NO: 1810 - DNA, 34 bp, Homo sapiens
  chr4:15780585-15780619
  hyper
ggctgcagcccaccctcggcgcgctcagcccgct

SEQ ID NO: 1811 - DNA, 31 bp, Homo sapiens
  chr4:22516749-22516780
  hyper
gaagcagaaggactggcgcttgcaatcaagc

SEQ ID NO: 1812 - DNA, 118 bp, Homo sapiens
  chr4:22517213-22517331
  hyper
cacaccaccttgccctcggcggcgcccgccgccctgccagcccctcggggccgcccatcgtgcttgcagccggcgggcagcgccgcggcgccgccgccgccgccgcctcccagcagcg

SEQ ID NO: 1813 - DNA, 94 bp, Homo sapiens
  chr4:22517554-22517648
  hyper
gctcctttgtccgctgcggctgcgctgggcctctagggagccgggggtcacggccgcatgggtcccagcgccgctctaccgcccggcgcgagca

SEQ ID NO: 1814 - DNA, 40 bp, Homo sapiens
  chr4:22517719-22517759
  hyper
gcggctcctccccgcccgccgccggcggccgcccccgccc

SEQ ID NO: 1815 - DNA, 31 bp, Homo sapiens
  chr4:24914463-24914494
  hyper
ctctcagtccggtcgccgttcatggcctcct

SEQ ID NO: 1816 - DNA, 79 bp, Homo sapiens
  chr4:26030404-26030483
  hyper
ggcctgggtgattttacgtgcggatgcagaggaggggcagcgtcggggcggcggagtccgacctcgggggattcaccct

SEQ ID NO: 1817 - DNA, 175 bp, Homo sapiens
  chr4:37455285-37455460
  hyper
ttcccgtgatggcaggcggttggcgcggtcgtttgtgctcagaggccaacaagcgcgtggattttctgcttcagtgcgcccgggactgccaccccggccccggggatgtcggacatcgtactccagggtttcgagccctagccccgccgcatcctcggggcgtgcaggtaaaggg

SEQ ID NO: 1818 - DNA, 31 bp, Homo sapiens
  chr4:37688563-37688594
  hyper
ggtcgctgggactaggcgggcgtgggaagag

SEQ ID NO: 1819 - DNA, 55 bp, Homo sapiens
  chr4:37688595-37688650
  hyper
aagagggagcgcgccccgagaagcactggacagtcagaagcggccagcactggag

SEQ ID NO: 1820 - DNA, 31 bp, Homo sapiens
  chr4:38098758-38098789
  hyper
ttgtgcagtgggaaaacgttgtatatgcact

SEQ ID NO: 1821 - DNA, 31 bp, Homo sapiens
  chr4:38732941-38732972
  hyper
agggaggcccaggcacgcggagcttctagtt

SEQ ID NO: 1822 - DNA, 31 bp, Homo sapiens
  chr4:38868923-38868954
  hyper
gccaaagctaatacatcggagttttaaccca

SEQ ID NO: 1823 - DNA, 31 bp, Homo sapiens
  chr4:38868972-38869003
  hyper
ctggaaagtgggttttcgttgtttgtttggg

SEQ ID NO: 1824 - DNA, 57 bp, Homo sapiens
  chr4:38869019-38869076
  hyper
tctatcacactcccaccgacagggcaagggagtgctgcttaacgcagaatcaggaga

SEQ ID NO: 1825 - DNA, 31 bp, Homo sapiens
  chr4:38869082-38869113
  hyper
tttagctgaatttgagcgacctcttcccagt

SEQ ID NO: 1826 - DNA, 31 bp, Homo sapiens
  chr4:38869203-38869234
  hyper
cgcgctctggctttccgcgctggcacagggg

SEQ ID NO: 1827 - DNA, 53 bp, Homo sapiens
  chr4:38869245-38869298
  hyper
aagtttccaggagactcgcccagcgcgggcccggccctcgcagcgtgggggtg

SEQ ID NO: 1828 - DNA, 43 bp, Homo sapiens
  chr4:38869437-38869480
  hyper
tactcggccgcctgagcggtaagagccccgggcactcggtccc

SEQ ID NO: 1829 - DNA, 51 bp, Homo sapiens
  chr4:38869487-38869538
  hyper
ttccccggggggcgggcgagcgcgggggcggctgcccgggggtggtgggaa

SEQ ID NO: 1830 - DNA, 31 bp, Homo sapiens
  chr4:39047336-39047367
  hyper
tactgtcgttttttatcgcttcatttcattt

SEQ ID NO: 1831 - DNA, 31 bp, Homo sapiens
  chr4:39047372-39047403
  hyper
aatattcttcagtagtcgacaagttcacaga

SEQ ID NO: 1832 - DNA, 62 bp, Homo sapiens
  chr4:39529829-39529891
  hyper
actccctggtccctggcgagagaggcgggacccccacgccctcctggcgctctttgcagaga

SEQ ID NO: 1833 - DNA, 51 bp, Homo sapiens
  chr4:39529893-39529944
  hyper
ttcctcaggcccaatccgggatttgggatgtctgtgcgtgctgtggagcag

SEQ ID NO: 1834 - DNA, 54 bp, Homo sapiens
  chr4:40631724-40631778
  hyper
attccacagtggaaagcgggagcggcgacccgaaggcagcgaagttctctcggg

SEQ ID NO: 1835 - DNA, 31 bp, Homo sapiens
  chr4:41003481-41003512
  hyper
aattcttcaagtaacacgcagggagaaaaat

SEQ ID NO: 1836 - DNA, 31 bp, Homo sapiens
  chr4:41168397-41168428
  hyper
tctatgggcaaaataacgagacctcatctct

SEQ ID NO: 1837 - DNA, 37 bp, Homo sapiens
  chr4:41216264-41216301
  hyper
agtggccgcggagccccggggccgggagcagaggaga

SEQ ID NO: 1838 - DNA, 69 bp, Homo sapiens
  chr4:41216334-41216403
  hyper
cgctgctgccgctacccgggtgtttccccagcactctcgtgctgccccggaatccggggcaaaggcaag

SEQ ID NO: 1839 - DNA, 119 bp, Homo sapiens
  chr4:41218382-41218501
  hyper
caggtcggtctcttcccgacggagaggaaaacccgcggtggagtccgcggcggcgggggggggggggggggggggggcggggcggcgcgcgcaggcgcagaggccgccaggttgggccg

SEQ ID NO: 1840 - DNA, 31 bp, Homo sapiens
  chr4:41218544-41218575
  hyper
aacgggtcccgctgccgcgctcacccaggaa

SEQ ID NO: 1841 - DNA, 44 bp, Homo sapiens
  chr4:41362780-41362824
  hyper
cggggagcgcgctcctgcggcggcgacggcggcggccgtcctca

SEQ ID NO: 1842 - DNA, 115 bp, Homo sapiens
  chr4:41362836-41362951
  hyper
agaggacgcggggctgcgcaaatggcttgtcccgctctcggtctggaagctcttcagcccctgcagcccgagccgccccccgagcccgccttctccgaggcgcagaagtggattg

SEQ ID NO: 1843 - DNA, 31 bp, Homo sapiens
  chr4:41991960-41991991
  hyper
gaagtctgcatacctccgtttaccctaactt

SEQ ID NO: 1844 - DNA, 50 bp, Homo sapiens
  chr4:42153259-42153309
  hyper
aaagggaaaaagcagacggaaaaagtgaagtagtacgagggcgtcccagc

SEQ ID NO: 1845 - DNA, 29 bp, Homo sapiens
  chr4:42153881-42153910
  hyper
ggcccggccgggcccgggggggtaggagc

SEQ ID NO: 1846 - DNA, 128 bp, Homo sapiens
  chr4:42154869-42154997
  hyper
ggggtcctgctttccccgagcatcgcggcctctgagctcatgcggaacataaaagctcgcaaggcgtagaactttttcacgttttcatttgtttcccgtaggggccccgagaacgtgcatgacaccat

SEQ ID NO: 1847 - DNA, 31 bp, Homo sapiens
  chr4:42155012-42155043
  hyper
ataaagatgagaaaaccgaggctctgagagg

SEQ ID NO: 1848 - DNA, 31 bp, Homo sapiens
  chr4:42155056-42155087
  hyper
cccaaagtcagacactcgggagtgtgcggct

SEQ ID NO: 1849 - DNA, 31 bp, Homo sapiens
  chr4:42658119-42658150
  hyper
ttacttgcttctaccccggagcatctgttgc

SEQ ID NO: 1850 - DNA, 92 bp, Homo sapiens
  chr4:52710792-52710884
  hyper
tccttagagggatggccgggccctaggccgcgccccacgcccggggggcgcgacttctcccaggcgtgctgggagggcgcttgaggggtttc

SEQ ID NO: 1851 - DNA, 176 bp, Homo sapiens
  chr4:52710910-52711086
  hyper
gtatgaaggggaaaggcggtcccgccgaattctgggacttgtagtcgcggccgcgcccggccgcggttgggttgggtgcacgtgggtaactgtggaaacgggtcccggcatgcagcgcgcccttggagccttcctgctcggccaactcgtgctttattccccggccagctcctgcg

SEQ ID NO: 1852 - DNA, 35 bp, Homo sapiens
  chr4:56412389-56412424
  hyper
gaatcggccgcagctccgggcgccctcaagccgcc

SEQ ID NO: 1853 - DNA, 31 bp, Homo sapiens
  chr4:56659938-56659969
  hyper
ctccccgggtatgctgcgggccctctccatc

SEQ ID NO: 1854 - DNA, 39 bp, Homo sapiens
  chr4:57521708-57521747
  hyper
gagaaagcgtgtatcccgggctgccggggagagtggaaa

SEQ ID NO: 1855 - DNA, 83 bp, Homo sapiens
  chr4:57521929-57522012
  hyper
cggcgggaggcgcggacgaacaggaccgcccagccgcgagaaggctcagcccaggcaggggtcggggcgcgctgggcgcgtgt

SEQ ID NO: 1856 - DNA, 73 bp, Homo sapiens
  chr4:57522035-57522108
  hyper
tcggaaaggcctgcctcggccgcgatgaggcacagcgtggtggaatccgggtgcttgtcgaccttgttgaagt

SEQ ID NO: 1857 - DNA, 254 bp, Homo sapiens
  chr4:57522128-57522382
  hyper
tggtcctctgtggggccgctcgcggtctccgccgacatggtccctgcgcgctgcggggcagggagaagcggcggcggtgagcgaggcgtggagcgggcgggacgcagcgaaggaaggcggtcgcggcgccgccgggcagccccagccccaggccgccccctccagcggtgccacggccgcgcaagtccccggtggctgcacgctgagcgggggcttacggctgccccccacccgggcctccctccctggactga

SEQ ID NO: 1858 - DNA, 31 bp, Homo sapiens
  chr4:57522419-57522450
  hyper
cgcctcccgcgccccccgggaccccttgcag

SEQ ID NO: 1859 - DNA, 102 bp, Homo sapiens
  chr4:57522452-57522554
  hyper
actgtatccctgcctgcgacgggggcgagatagatgattccgcgggccctcaccgacctccggctctaaggaaggagtgaaggaagcgcgggggtgattttg

SEQ ID NO: 1860 - DNA, 31 bp, Homo sapiens
  chr4:57522563-57522594
  hyper
cttaaaaacttcctcccgaaagggggacctc

SEQ ID NO: 1861 - DNA, 114 bp, Homo sapiens
  chr4:57522602-57522716
  hyper
acagacttgacagatcgcgagggtgggttcgcccgagtccgcgactagccggcctccggcctccccggtaggcggccttctgtctccgcagtgggttggcgctttggggccctc

SEQ ID NO: 1862 - DNA, 31 bp, Homo sapiens
  chr4:57522745-57522776
  hyper
ctccaaaaaagttccccgcaagacaagttac

SEQ ID NO: 1863 - DNA, 37 bp, Homo sapiens
  chr4:57522778-57522815
  hyper
ctcaaagttggggagacggaggcggtgcttttaatgt

SEQ ID NO: 1864 - DNA, 31 bp, Homo sapiens
  chr4:57687842-57687873
  hyper
ggctgtcttgcccctgcggtctgttacctgc

SEQ ID NO: 1865 - DNA, 48 bp, Homo sapiens
  chr4:74904202-74904250
  hyper
ggggaccccagggcgccgggacccacctgctgcgcgccggctggcggc

SEQ ID NO: 1866 - DNA, 31 bp, Homo sapiens
  chr4:74964664-74964695
  hyper
gagcggggctgtcggcgcggggcgcccaccc

SEQ ID NO: 1867 - DNA, 31 bp, Homo sapiens
  chr4:75230456-75230487
  hyper
aggttagtaagtcacacgcacagctctccaa

SEQ ID NO: 1868 - DNA, 31 bp, Homo sapiens
  chr4:77172533-77172564
  hyper
cttgctatctctttatcgctcctcctgcctt

SEQ ID NO: 1869 - DNA, 60 bp, Homo sapiens
  chr4:77172571-77172631
  hyper
tctttccttcagtaaacgttttttgaaacgatgatgagcaaaaaacgcctgatccagtct

SEQ ID NO: 1870 - DNA, 55 bp, Homo sapiens
  chr4:77172887-77172942
  hyper
gctagggccaccatggcggaccgcaggcggcggctccggccggggacgttggccc

SEQ ID NO: 1871 - DNA, 53 bp, Homo sapiens
  chr4:77173102-77173155
  hyper
tacgtacaacataatacgctgagataaccaacgcttggcgctgctctttgcaa

SEQ ID NO: 1872 - DNA, 79 bp, Homo sapiens
  chr4:77227313-77227392
  hyper
cccgcaccgcgcccgccgtcctccgggccacccatcccacccgaacgcgccaccgctctagcccgcgctccagcccgcg

SEQ ID NO: 1873 - DNA, 78 bp, Homo sapiens
  chr4:77227425-77227503
  hyper
agttccaggaagctctcggcctctagctgaccgcgttgctgctgagcttccctggggagaaggcgccgaggtgcccgg

SEQ ID NO: 1874 - DNA, 43 bp, Homo sapiens
  chr4:77227513-77227556
  hyper
ggcagggctgggcctcgcgggcagcaggcggaagaaggaaggg

SEQ ID NO: 1875 - DNA, 176 bp, Homo sapiens
  chr4:77227594-77227770
  hyper
cacttgggttcttcacgcgggacacacgtggaacgccgacccctgcgcccctggccgctggcaactggcaaggccgggaacagaaagtgtagggacagaagagcgctggagtcttccccgggagggagcccggggctgcagcccaggggcggggagcggggcggggctgggaaagt

SEQ ID NO: 1876 - DNA, 139 bp, Homo sapiens
  chr4:77227806-77227945
  hyper
tgcccggcgcagaaaccgtaaaaggctggagcgggcggggtaggtgtggctctgtgtgcgtgacctgagccccggtcccagtccctgtagtctcctgcggccgcggcctctcagccatgggcgccgtctggtccgccct

SEQ ID NO: 1877 - DNA, 61 bp, Homo sapiens
  chr4:77227950-77228011
  hyper
ttggagggggtctggccggagcacttttcgtttggctgctgcggggcggccctggcgacac

SEQ ID NO: 1878 - DNA, 31 bp, Homo sapiens
  chr4:77228079-77228110
  hyper
atcagagtggcagcagcggactgagccctgg

SEQ ID NO: 1879 - DNA, 55 bp, Homo sapiens
  chr4:77610433-77610488
  hyper
cattgaaatgcaaatccggtcctgagctcccgggccaatccgggaggcttcctgt

SEQ ID NO: 1880 - DNA, 112 bp, Homo sapiens
  chr4:77818484-77818596
  hyper
accggcggcctctgtccgggactgcccttcgatccgccgcccttcccgggcgccctacgggagtcgctgcccgggagtccattgcaagctgcgtcggcggctctggctgctg

SEQ ID NO: 1881 - DNA, 155 bp, Homo sapiens
  chr4:77818599-77818754
  hyper
ctgctggctcctcctccggctccttctcgcgccgccgccgcctgggctgctgctggggcggctccccccggcgcgcgcctcgcggggagcagggcgcagctccccctgcactgggggcggccgcgggcggctcgcggggtcgctgcagcccctcc

SEQ ID NO: 1882 - DNA, 28 bp, Homo sapiens
  chr4:77819131-77819159
  hyper
ggaggccagcgctgcccgcagcccgtga

SEQ ID NO: 1883 - DNA, 29 bp, Homo sapiens
  chr4:78979218-78979247
  hyper
tattgcctcatcattccgaaggtgagaga

SEQ ID NO: 1884 - DNA, 15 bp, Homo sapiens
  chr4:78979306-78979321
  hyper
cgtgcagtttaaaaa

SEQ ID NO: 1885 - DNA, 31 bp, Homo sapiens
  chr4:78979328-78979359
  hyper
aggttttatggtatttcggtgaggtggaagt

SEQ ID NO: 1886 - DNA, 53 bp, Homo sapiens
  chr4:78979945-78979998
  hyper
ccgtgagactagttgtcgccatgatatcaaatgcaatccgggctcagccaaat

SEQ ID NO: 1887 - DNA, 282 bp, Homo sapiens
  chr4:78980026-78980308
  hyper
tggggtcatgggatgccgggcctggggacgcgaggcgctgtgagctccctcctgctccgaggagccagggaagtcgccccgccagtgcttagggagggggaagggagccggcgggctgggaggaagacggcttaatccacagcgcctggctctcggcttcccctcccggctccattcattattcatccagctgcgggaagaagagttcacctgcccagccgcaaaccagagccgcggctgggcggcggcggcgggcgcagggcgggccgccttctccgccct

SEQ ID NO: 1888 - DNA, 42 bp, Homo sapiens
  chr4:82965289-82965331
  hyper
gcgccaggatcctgcccgcagcccgcccgccagccggggccg

SEQ ID NO: 1889 - DNA, 44 bp, Homo sapiens
  chr4:84292569-84292613
  hyper
tctgcctctgtgatcacgtgatattctcccgctgtgtcttcaca

SEQ ID NO: 1890 - DNA, 2 bp, Homo sapiens
  chr4:84292653-84292655
  hyper
ta

SEQ ID NO: 1891 - DNA, 31 bp, Homo sapiens
  chr4:84456994-84457025
  hyper
caaacaagacctcaagcgtcccagatacgtc

SEQ ID NO: 1892 - DNA, 62 bp, Homo sapiens
  chr4:84457106-84457168
  hyper
tgggggaggcggggcgcggggaagaacggagaccgcccaggaggctgcggcactcctgggct

SEQ ID NO: 1893 - DNA, 31 bp, Homo sapiens
  chr4:84457174-84457205
  hyper
tgccagggagctcccccgttgggtgacggag

SEQ ID NO: 1894 - DNA, 15 bp, Homo sapiens
  chr4:85503895-85503910
  hyper
cctcctcccgcccca

SEQ ID NO: 1895 - DNA, 33 bp, Homo sapiens
  chr4:85503985-85504018
  hyper
cgtcacctcacggggaggcggggctgtgggaac

SEQ ID NO: 1896 - DNA, 166 bp, Homo sapiens
  chr4:85504057-85504223
  hyper
cctggtgcgggaggcccgggcagggagaagtgtgcggggccgggacaagccggctccgagtccggctccggggggcggggcgggaggggcctgcgcggcggcgggagcccagagccgcgctaaagcgggtcaagcgtcctccttttctccccgccccttctcctcc

SEQ ID NO: 1897 - DNA, 40 bp, Homo sapiens
  chr4:85504224-85504264
  hyper
cctacctgggcctctgcgtggagacgcgcacctggcaacc

SEQ ID NO: 1898 - DNA, 150 bp, Homo sapiens
  chr4:85886792-85886942
  hyper
tggctccttccataatcgaagggcttccagcgtagggcgtagggggagaggcccgaagccctggagacagcgcccgagggatggaggccgcgctcggctgcgctcaggtccgggtggctccgggagctgagaccccgcaggatgcagcgg

SEQ ID NO: 1899 - DNA, 173 bp, Homo sapiens
  chr4:85887144-85887317
  hyper
aggccgcccaccctggcggcggcggcggctcccggccaaggcggaccctggggaggacagcagctgggccgcggcctgtccctagggggagcgggcgcagggccgcgagtgggcagcgcctccgccccgcacgaacaaagcggccaggcgcgccgggccgaggcagcaccgcc

SEQ ID NO: 1900 - DNA, 98 bp, Homo sapiens
  chr4:85887394-85887492
  hyper
cccaggagacgggaccgcggcgggccggggctccgcgccgagggcgcacgggctacggggaaggggcgaccggcgcgacgtccgcggcggggcccggg

SEQ ID NO: 1901 - DNA, 92 bp, Homo sapiens
  chr4:85887500-85887592
  hyper
gccgcgggccgggggccggggcccgagctcgattctgcggccgcgaggtatgggaaccggtccgccgggccaggcagcggtgctaggcagca

SEQ ID NO: 1902 - DNA, 68 bp, Homo sapiens
  chr4:85887625-85887693
  hyper
gcccccgtccctgctccgccgcgtcctcgtcctcgctgggtccccgccgccgccgcctcagcctcggc

SEQ ID NO: 1903 - DNA, 35 bp, Homo sapiens
  chr4:85888137-85888172
  hyper
acccctgcccctctccgcggcgctcaccctcctca

SEQ ID NO: 1904 - DNA, 31 bp, Homo sapiens
  chr4:85888431-85888462
  hyper
gtcagtgaccttgagtcggttgcctaagatt

SEQ ID NO: 1905 - DNA, 31 bp, Homo sapiens
  chr4:87281208-87281239
  hyper
aacctaccagaggagacggacagagggcttg

SEQ ID NO: 1906 - DNA, 49 bp, Homo sapiens
  chr4:87281246-87281295
  hyper
gggttgctatggcaaccgaaaggagcacacatgacgtcaaagcccagag

SEQ ID NO: 1907 - DNA, 31 bp, Homo sapiens
  chr4:87281320-87281351
  hyper
aaacagaaagaggaagcgtctatgtgcagct

SEQ ID NO: 1908 - DNA, 31 bp, Homo sapiens
  chr4:87281352-87281383
  hyper
cagctactgtgttttccggtgaaatgaggac

SEQ ID NO: 1909 - DNA, 34 bp, Homo sapiens
  chr4:87281392-87281426
  hyper
gtaaaggaataaggttcgtcggcagccaacatca

SEQ ID NO: 1910 - DNA, 121 bp, Homo sapiens
  chr4:87813157-87813278
  hyper
actcagcaccactcccgcgtccccgcccttgcacgccgattcggggcgagtcccctacccttccccggacggacgcgcagggcccgggaggaactggttcccgggacgggtgggggcctcg

SEQ ID NO: 1911 - DNA, 43 bp, Homo sapiens
  chr4:87813291-87813334
  hyper
cccgcggagaagggaacggcctcagcctcggctccttcccaca

SEQ ID NO: 1912 - DNA, 112 bp, Homo sapiens
  chr4:87813338-87813450
  hyper
ggccccaccctgcctccgactcgccaggaatgcgctgtgtgcgcggggcttccagggtggcgggtccccgcgagccggcgccggcggcctggttacccgggctccaggggct

SEQ ID NO: 1913 - DNA, 104 bp, Homo sapiens
  chr4:87813504-87813608
  hyper
ggccgcgcacacgcctcggggccgcgccgcaggcacacgcctccttcccgctcgccgcgggcgccgagtctggggctcctcgcgtcacacgggagcctcaacaa

SEQ ID NO: 1914 - DNA, 114 bp, Homo sapiens
  chr4:87813617-87813731
  hyper
tggggccctccccacccgccagggaggggacgccgggcccgggagacgcgccccgcggggtccgctctctggtaaccgggccggggcaggccgcgctctcggaatccagccaac

SEQ ID NO: 1915 - DNA, 31 bp, Homo sapiens
  chr4:87813756-87813787
  hyper
cctttcctgggaaggacgctttccaatgtag

SEQ ID NO: 1916 - DNA, 130 bp, Homo sapiens
  chr4:87856810-87856940
  hyper
cttctctcctgcaccccgggacccttccctgtgcctgtcgtggagagagatgagggcttcccgccgcgtctcgctgagagcaggagggaggcgtgtgtcggtggtccgtagcctccggggaggagttgga

SEQ ID NO: 1917 - DNA, 31 bp, Homo sapiens
  chr4:87856964-87856995
  hyper
gggacagagggagaggcgtctttagtatggg

SEQ ID NO: 1918 - DNA, 95 bp, Homo sapiens
  chr4:87857014-87857109
  hyper
taatgcttttttccctcgggtgtcccatcctctgtggccgtcgcaaccccaccctccgacggtgcgagcgccggagccagcgaatgagaggggag

SEQ ID NO: 1919 - DNA, 41 bp, Homo sapiens
  chr4:87857176-87857217
  hyper
gggcctgcgggcggttcgataccgtccggctagttttctct

SEQ ID NO: 1920 - DNA, 31 bp, Homo sapiens
  chr4:87857252-87857283
  hyper
gttatgcagatcatcccgggaaggcacttgg

SEQ ID NO: 1921 - DNA, 31 bp, Homo sapiens
  chr4:88886999-88887030
  hyper
tggggccaggccaagtcgcccatgggcaggg

SEQ ID NO: 1922 - DNA, 65 bp, Homo sapiens
  chr4:88887071-88887136
  hyper
gtccagggcagtgtgacgcttgcacacagagcgtggtggccgagccaaggcgctgacctggggtg

SEQ ID NO: 1923 - DNA, 68 bp, Homo sapiens
  chr4:89299894-89299962
  hyper
cttgaagttcaggcagcgagagttgacatggggccagggctgcgcccctggggcgggttgaagacagg

SEQ ID NO: 1924 - DNA, 52 bp, Homo sapiens
  chr4:89299975-89300027
  hyper
tattcaggaaatcatcgcgcacccagtcaccagcgttcgggagcctgtcgca

SEQ ID NO: 1925 - DNA, 45 bp, Homo sapiens
  chr4:89300139-89300184
  hyper
gctgagctactgcaggcggccagcggggagcgccactctctgctg

SEQ ID NO: 1926 - DNA, 35 bp, Homo sapiens
  chr4:89300193-89300228
  hyper
aaccacagggtcctctcgtgcggagacaacagcag

SEQ ID NO: 1927 - DNA, 35 bp, Homo sapiens
  chr4:91049203-91049238
  hyper
cccgcgactcccagtgcgccgcgtggccatttcct

SEQ ID NO: 1928 - DNA, 31 bp, Homo sapiens
  chr4:91760070-91760101
  hyper
gcttctcctgttcaatcgtttctttggaagg

SEQ ID NO: 1929 - DNA, 31 bp, Homo sapiens
  chr4:94749724-94749755
  hyper
acacaagaacttttctcggggtgtaaaaact

SEQ ID NO: 1930 - DNA, 84 bp, Homo sapiens
  chr4:100867971-100868055
  hyper
gaccaacctcctgggccggggcgtccgagctgactcggtggtccgcgcacggcgccagcaggctcgaagcggacctgcccggga

SEQ ID NO: 1931 - DNA, 31 bp, Homo sapiens
  chr4:100868171-100868202
  hyper
ccaggaggacagggtccgggaaggggacact

SEQ ID NO: 1932 - DNA, 31 bp, Homo sapiens
  chr4:102711756-102711787
  hyper
ttataagaaaccaaagcggccttttgagaag

SEQ ID NO: 1933 - DNA, 39 bp, Homo sapiens
  chr4:102712156-102712195
  hyper
ggctctgcggagaccacgggccatcgttagacaactgca

SEQ ID NO: 1934 - DNA, 54 bp, Homo sapiens
  chr4:106067335-106067389
  hyper
gaggaggtgggtgcgcgcgggggcgtgtgcgcgggacctcgaagtggtggtgga

SEQ ID NO: 1935 - DNA, 72 bp, Homo sapiens
  chr4:106067416-106067488
  hyper
gaaatcttagatgtcacgtctttgtccaggcacccgtgccatcccaacctcccacctcgcccccaaccttcg

SEQ ID NO: 1936 - DNA, 15 bp, Homo sapiens
  chr4:106816366-106816381
  hyper
ctcccaggctggggc

SEQ ID NO: 1937 - DNA, 35 bp, Homo sapiens
  chr4:108745754-108745789
  hyper
caggccctcagcctttcggccgggagccaaactgc

SEQ ID NO: 1938 - DNA, 102 bp, Homo sapiens
  chr4:108745894-108745996
  hyper
tgcgccaggagagccacggcagcaggaacgggcactgctgccaccgggccgacgggtgagtcactgtttggaaatggagtgggcgggcgagggtgtgagaga

SEQ ID NO: 1939 - DNA, 31 bp, Homo sapiens
  chr4:108745998-108746029
  hyper
gaatgatgtcaagagcgcgctgggcgcaggg

SEQ ID NO: 1940 - DNA, 78 bp, Homo sapiens
  chr4:108746295-108746373
  hyper
gacgcccggggctggtcgcggcggctgcggcagcgggctccatcccctggcaaatccccttcccgggagcaagtgcct

SEQ ID NO: 1941 - DNA, 130 bp, Homo sapiens
  chr4:108746437-108746567
  hyper
aggatgggctggggagcggagagtcctccgaagcgcgggaggggaaaggtggattgcgaagcggggacgtggctctaatccggcccccaccctccccgcccagggcatgcttcctcgattttgtggtctg

SEQ ID NO: 1942 - DNA, 49 bp, Homo sapiens
  chr4:108746616-108746665
  hyper
catttgcaacccatttcgggtaccccggtcctggcgttggaagggcaca

SEQ ID NO: 1943 - DNA, 31 bp, Homo sapiens
  chr4:108746679-108746710
  hyper
ttgtccagaaccactccggaggtcagggctg

SEQ ID NO: 1944 - DNA, 101 bp, Homo sapiens
  chr4:110343713-110343814
  hyper
gagcacatctacacatcgtccaccagatggcggtggaagcccaccgacattgtagactacgtaggaagagcgtccagatggaaaagcgggttggggctttc

SEQ ID NO: 1945 - DNA, 2 bp, Homo sapiens
  chr4:110343854-110343856
  hyper
tt

SEQ ID NO: 1946 - DNA, 31 bp, Homo sapiens
  chr4:111117164-111117195
  hyper
gtcattttcagtcccacgagggctgagacct

SEQ ID NO: 1947 - DNA, 31 bp, Homo sapiens
  chr4:111531890-111531921
  hyper
tgcgaggtctcaggtccgagggccaggtcgg

SEQ ID NO: 1948 - DNA, 31 bp, Homo sapiens
  chr4:111554319-111554350
  hyper
atctccagcctagcctcgggcccaggacatt

SEQ ID NO: 1949 - DNA, 31 bp, Homo sapiens
  chr4:111554368-111554399
  hyper
ctccctccagagttgccgcaaaagtgcccag

SEQ ID NO: 1950 - DNA, 31 bp, Homo sapiens
  chr4:111562880-111562911
  hyper
ctgttgtcatctttggcgacgcagaaggaca

SEQ ID NO: 1951 - DNA, 238 bp, Homo sapiens
  chr4:113437621-113437859
  hyper
gctcctgttggagctccgggctgcggccggagctggcgaagccgcagcggccgcagaggctcaagctgcggctgttgtcgccgccgctgtccattgtgattggtggctcgcgctcggctggagcgtgccgctaatttattaatgaatggaggtcgcgaggcgcagctggccaatcagggcgccctggactccgggaggcctgcgagccacgcgcaccggagcccgctccctttcagca

SEQ ID NO: 1952 - DNA, 169 bp, Homo sapiens
  chr4:114900654-114900823
  hyper
acctccgcagaaactccgggcagcaattccttttccccgctgctagggagcctgaaggccaaagccgggtccctagccccgcggccggtccgcgcggagcccgcttggtctttgcgtagttggcgcacccggcgcaggcgctgcaaactgcgtgcgttttctcagctaa

SEQ ID NO: 1953 - DNA, 31 bp, Homo sapiens
  chr4:114900827-114900858
  hyper
tttagctttggcactccgagttcttttgcct

SEQ ID NO: 1954 - DNA, 55 bp, Homo sapiens
  chr4:114900874-114900929
  hyper
ccagtgaatcacagaacggtactttcttcctgagctcccccgggaagagggggtg

SEQ ID NO: 1955 - DNA, 52 bp, Homo sapiens
  chr4:114900937-114900989
  hyper
ggactgtttagaggctcgatctttcctttttcttttccgggaggtggatggc

SEQ ID NO: 1956 - DNA, 132 bp, Homo sapiens
  chr4:120549977-120550109
  hyper
ggccagcctcctgccccgccccgccccgcgcggttctacgggcgcccaggtgtggtgggcggggccaggcgcagctgctgcgccccccccacccggggtccggcagtgttccgctctcgcaggctcttcagt

SEQ ID NO: 1957 - DNA, 37 bp, Homo sapiens
  chr4:120550111-120550148
  hyper
cctggttcccaggaggcggcggcggcggcggcagcgg

SEQ ID NO: 1958 - DNA, 31 bp, Homo sapiens
  chr4:120550280-120550311
  hyper
ccagggagggaaggtcgcgatgtgggaagtt

SEQ ID NO: 1959 - DNA, 31 bp, Homo sapiens
  chr4:120970718-120970749
  hyper
atgtacatgcgaatatcgtcatcatccttca

SEQ ID NO: 1960 - DNA, 31 bp, Homo sapiens
  chr4:123747655-123747686
  hyper
cgtggtttgggtggtgcgggggttgggcggg

SEQ ID NO: 1961 - DNA, 61 bp, Homo sapiens
  chr4:123747876-123747937
  hyper
ccgagcgagtagggggcggcgcgcaggagggaggagaactgggggcgcgggaggctggtgg

SEQ ID NO: 1962 - DNA, 95 bp, Homo sapiens
  chr4:123747951-123748046
  hyper
gatgtagaagatgtgacgccgcggcccggcgggtgccagattagcggacgcggtgcccgcggttgcaacgggatcccgggcgctgcagcttggga

SEQ ID NO: 1963 - DNA, 55 bp, Homo sapiens
  chr4:123748223-123748278
  hyper
gggccgtgccccggagcgggtcggaggccggggccggggccgggggacggcggct

SEQ ID NO: 1964 - DNA, 253 bp, Homo sapiens
  chr4:123748321-123748574
  hyper
cagggaccatggcagccgggagcatcaccacgctgcccgccttgcccgaggatggcggcagcggcgccttcccgcccggccacttcaaggaccccaagcggctgtactgcaaaaacgggggcttcttcctgcgcatccaccccgacggccgagttgacggggtccgggagaagagcgaccctcacagtgagtgccgacccgctctctccgcctcatttccatttcgtgggttctcgcccgctctctcccctcc

SEQ ID NO: 1965 - DNA, 138 bp, Homo sapiens
  chr4:123748575-123748713
  hyper
gcctgcaccctcctcccggatcttcactgcgaccctagcgctccgtgtggtttctggccgcgcggccctcggcggtttcgggttcaccactcaccccctcctttccgggctgcggcgtaggcccgggtgtcccctggg

SEQ ID NO: 1966 - DNA, 195 bp, Homo sapiens
  chr4:123748736-123748931
  hyper
tgtaaaccagtacccccggcccggagccgcggcgcgccggggcctcgcggactggctgtcttcccgcggacaacctgtcgcgtcggggatgcccgcggccccgccatgcagctctggccgcttctatctgctgcgtgctgtcccggggacaaagacaggaaggaccgcagcagaacgaaacggtctttactggaa

SEQ ID NO: 1967 - DNA, 46 bp, Homo sapiens
  chr4:123748947-123748993
  hyper
tcctgcccttaaattccgactcgggacgacccgaggcatatggcac

SEQ ID NO: 1968 - DNA, 39 bp, Homo sapiens
  chr4:123749009-123749048
  hyper
ctgttttatatttttccgaattgacgaaagctgaaagag

SEQ ID NO: 1969 - DNA, 68 bp, Homo sapiens
  chr4:124318322-124318390
  hyper
taaagtctgaaacgatcgaatttgtgaaacacagagccgttaatgcctttatgcgaagaggggctagc

SEQ ID NO: 1970 - DNA, 137 bp, Homo sapiens
  chr4:124318595-124318732
  hyper
tggttcgcggctgacacgccgactgtgcgccggcctgtcaatcaccgggagcagcaacagggagcacatggcaacgggctgcgggcgagctggccagcggcccgcccggggtcccagcccttcgaagaaagggacat

SEQ ID NO: 1971 - DNA, 151 bp, Homo sapiens
  chr4:124319151-124319302
  hyper
tctcgaacgcccgtgacgtggatttttcgctcgtcaggaagccgccatcccttccttcgttccttgcgaggagcgactagaacccgagttctctgagcacaccgtgccgtcagctggcccgtcacgcactcgactccgccactcccctact

SEQ ID NO: 1972 - DNA, 66 bp, Homo sapiens
  chr4:124319559-124319625
  hyper
gccgcctcgccctccccgccgcggttgatgcggcacgtgcacgccgccgcccgcaccaggacctgg

SEQ ID NO: 1973 - DNA, 69 bp, Homo sapiens
  chr4:124319632-124319701
  hyper
cgcacggcttggcccccggccaccgcttcggcctaggtgagtgtgtgcggcggccgccctcggcccgct

SEQ ID NO: 1974 - DNA, 96 bp, Homo sapiens
  chr4:125633238-125633334
  hyper
cacctcagagaggccacgagcgaaggtgcagcctccacaccgaggtctgcccttccagaggctgggagcgcctctgcaccccgccccgcaccgaga

SEQ ID NO: 1975 - DNA, 133 bp, Homo sapiens
  chr4:125633807-125633940
  hyper
gctttcccagcagaatcggtcgtgctcgccccagcccccaccggccaaccgccgccgccgccgccgtcagggcagtaactgtctcaggcagcccccggccggccggctccgccccgcccgcccagcccagacc

SEQ ID NO: 1976 - DNA, 60 bp, Homo sapiens
  chr4:125634007-125634067
  hyper
cttcccctcccccaccgcgctctcccgcagcatcccgtgcctgggcgtgtgcggccgcct

SEQ ID NO: 1977 - DNA, 54 bp, Homo sapiens
  chr4:128703234-128703288
  hyper
ccgatcctccccgccccgccttcccgcttctcccgcccccggatagctcagcag

SEQ ID NO: 1978 - DNA, 78 bp, Homo sapiens
  chr4:128703294-128703372
  hyper
ttttccagatctttctcgaacccgcagcttcttgggcagccgttgcccgagtgctgacggaagcggccgaagtccggg

SEQ ID NO: 1979 - DNA, 103 bp, Homo sapiens
  chr4:140097253-140097356
  hyper
cgcccctagaccatcccgtcgcgcggtccctgaggaccagcttcgcgaggatccagaaggcggtcactggacgtgcctgttacgagcccgtttttgttttgct

SEQ ID NO: 1980 - DNA, 124 bp, Homo sapiens
  chr4:141071487-141071611
  hyper
ggcttgcttccacctgcgagtgtatcacaaaccaggcgcgcgcacccgagccctccctccaccagggcggaaaccagagaacacaacccaaacaccgaaagtttctggtcgcaaactctactca

SEQ ID NO: 1981 - DNA, 43 bp, Homo sapiens
  chr4:141071615-141071658
  hyper
gccgtgtccagagacccggcactgggaacggcactggcttttg

SEQ ID NO: 1982 - DNA, 68 bp, Homo sapiens
  chr4:141071934-141072002
  hyper
ggttggagaaagggaccggagctacagtcgagatgcgggaccggccccgcctccggctacaatcagaa

SEQ ID NO: 1983 - DNA, 145 bp, Homo sapiens
  chr4:141072010-141072155
  hyper
gtgtgtcagtggttttcggtttcctgtttgtaaagcgagaacctcccccgactcgaactgtcgttcttcctcaaaaccaaccgagacggccccttcttcgcgctcggggcaggctcagccgcagggggagcggagaggagggacg

SEQ ID NO: 1984 - DNA, 164 bp, Homo sapiens
  chr4:141072156-141072320
  hyper
gggggcatggggggcgcggcggggcggggacagccgcgatgaagcgggcagggccacggggcgcagcacccctcccagcccagcggccccggggtctgagctgggccgcgaggcggacaaagcgcctcccgctccctcccccacggccacgttccaaaagggag

SEQ ID NO: 1985 - DNA, 175 bp, Homo sapiens
  chr4:141072547-141072722
  hyper
tggggagcgagcactgcggcgtcgcctcccctcccccaagccgactctttgtcaccgagcgccggcccgagcccccggcgaaagcccacggcagcactggcaccaccccggcgccggggactcacagaccgggaacgtgtgcgatttctaaaccgcacgacgggagggccgcccc

SEQ ID NO: 1986 - DNA, 31 bp, Homo sapiens
  chr4:141073195-141073226
  hyper
tggtggggcctcttggcgcaaaccctgggta

SEQ ID NO: 1987 - DNA, 87 bp, Homo sapiens
  chr4:141073274-141073361
  hyper
cagccgctccacctgccgggctagccccgagtcgcgagcaaagagcggagcgcacccgcgccccgcatccgcgcgcgctcccgcgag

SEQ ID NO: 1988 - DNA, 49 bp, Homo sapiens
  chr4:141073451-141073500
  hyper
agctggggagaggaggcgagaggctctccttccccgcttcccccctagg

SEQ ID NO: 1989 - DNA, 40 bp, Homo sapiens
  chr4:141073590-141073630
  hyper
gacgggtctggggaggcgaggcggcgcggctagaggtggg

SEQ ID NO: 1990 - DNA, 52 bp, Homo sapiens
  chr4:141073755-141073807
  hyper
ctccgcccctcgcagtcgtgactggcttctcccctctcgccccctcctcccc

SEQ ID NO: 1991 - DNA, 37 bp, Homo sapiens
  chr4:141073823-141073860
  hyper
acagattaacaggtagcgacgacggcagctttttccc

SEQ ID NO: 1992 - DNA, 103 bp, Homo sapiens
  chr4:141073988-141074091
  hyper
aagcccgctgcccgtgcgccctcaccatgatcagcgtgtggttcctctgctccgccgaggcagcctccgcatcttgctggggtttgctcgggtgctgctgttt

SEQ ID NO: 1993 - DNA, 42 bp, Homo sapiens
  chr4:141074134-141074176
  hyper
cgctggtagaggctcacggtgtcccggcgctccagctccagc

SEQ ID NO: 1994 - DNA, 181 bp, Homo sapiens
  chr4:141074191-141074372
  hyper
tgctggtacctgttctcgcagttgacgtggtgccgacggcagccctcgatgcgctggcggagccgctccaccacggtgctgtgcttgggaacggccgccgaaccgccgccggggcccccggagccgccgcatccaccggctgccgggtgattgctactcggagcagcgggagtactattgg

SEQ ID NO: 1995 - DNA, 31 bp, Homo sapiens
  chr4:141074619-141074650
  hyper
gacggggcgaaaaaaacggggggggagattt

SEQ ID NO: 1996 - DNA, 37 bp, Homo sapiens
  chr4:141074696-141074733
  hyper
gaagaaaaggggggaacgttatcggaataccatcaga

SEQ ID NO: 1997 - DNA, 31 bp, Homo sapiens
  chr4:141074879-141074910
  hyper
ttttctccctacataccgaaaaacacacccc

SEQ ID NO: 1998 - DNA, 74 bp, Homo sapiens
  chr4:141074924-141074998
  hyper
gcatatgcctccagtgcggacacgcgcgacacacactcactccacaccgcatcggaaaacggcaagcttgctta

SEQ ID NO: 1999 - DNA, 36 bp, Homo sapiens
  chr4:141075021-141075057
  hyper
gttttggtgtttatgccgccccgtgttctcaaagta

SEQ ID NO: 2000 - DNA, 161 bp, Homo sapiens
  chr4:141075080-141075241
  hyper
acaggaacctagatatcgaatcctcgggctgggggaagtaaacacatggacagtccgaggcgactgcaaaagtagatcggtgaagtcctttgcaaaacgccgcgcagagagcagcacctaacgctcggctgggctgccgctgccgccgctgctcctgccac

SEQ ID NO: 2001 - DNA, 68 bp, Homo sapiens
  chr4:141075245-141075313
  hyper
acaatgatcaactgctcgccgccgccgccgccgccgcctcctcctcctcctctcgctcctccacctcc

SEQ ID NO: 2002 - DNA, 75 bp, Homo sapiens
  chr4:141075316-141075391
  hyper
tcctcctccatgccagcggagtgatatcaggacgcgcgagctcagtaaacacggcagcggcggcggctggaggcc

SEQ ID NO: 2003 - DNA, 31 bp, Homo sapiens
  chr4:142557475-142557506
  hyper
ttctctgcaggtgtcccggcaggtagaggag

SEQ ID NO: 2004 - DNA, 79 bp, Homo sapiens
  chr4:142557742-142557821
  hyper
ccaggggttgggactccgggtggcaggcgcccgggggaatcccagctgactcgctcactgccttcgaagtccggcgccc

SEQ ID NO: 2005 - DNA, 100 bp, Homo sapiens
  chr4:142557826-142557926
  hyper
gagggaactgggtggccgcaccctcccggctgcggtggctgtcgccccccaccctgcagccaggactcgatggaggtacagagctcggcttctttgcctt

SEQ ID NO: 2006 - DNA, 93 bp, Homo sapiens
  chr4:142557988-142558081
  hyper
cccctcccagctccagcgttaccctccggtctatcctactggccgagctgccccgccttctcatggggaaaacttagccgcaacttcaatttt

SEQ ID NO: 2007 - DNA, 147 bp, Homo sapiens
  chr4:144257017-144257164
  hyper
aagtaaagaaaaccctcgaaactcctgatctcgagcacagcacaagctccgagctggcaccgggctgagtcaagatggcaagccccggactgaacattcgaatgtccctcagtcttccccgcgcccaagccccggtgcctctgccct

SEQ ID NO: 2008 - DNA, 76 bp, Homo sapiens
  chr4:144257423-144257499
  hyper
ggaggaagaaggagcccggcggccgggagagggagggagggatcgggatctggggccgagccgctcaggacctgcc

SEQ ID NO: 2009 - DNA, 190 bp, Homo sapiens
  chr4:144257936-144258126
  hyper
agcgctgtgtctgtttcggaaagcgctctggggaggtcttgtccctagggggcggagcgcaaaggacagaagctccggcaccgagtcggggcagagtcccgctgagtccgagcgctgctgaggcagctggcgagacggcacgtctggaggcgaggcgggcgcactgaaaggaggccggcgcgcccgcggc

SEQ ID NO: 2010 - DNA, 250 bp, Homo sapiens
  chr4:144258374-144258624
  hyper
ctccgcaagtcccccccggagaaaaagttgaagcgttatgtaagtagagctgcgggcaccactccgcgggcctcggcgtccacacccctccccagtcggctcgccggcggctgcagctggccgcgcgcggggctggttcttaaacgaatgccggtctctttccccttggcccctacccctggcgggctcgggacagggtgccttgcactccctcacgcccaggcatccacttggccggacaactttcttc

SEQ ID NO: 2011 - DNA, 41 bp, Homo sapiens
  chr4:144258634-144258675
  hyper
cagacagcctgctttgcgggcctgttcgccccataaaagga

SEQ ID NO: 2012 - DNA, 31 bp, Homo sapiens
  chr4:146102129-146102160
  hyper
atggaggtggctttaacggcttaagcagaaa

SEQ ID NO: 2013 - DNA, 34 bp, Homo sapiens
  chr4:146402703-146402737
  hyper
gttaggaaagcctgaacgccgccacactgttttt

SEQ ID NO: 2014 - DNA, 52 bp, Homo sapiens
  chr4:146402905-146402957
  hyper
tgagcgtgtgagcgggcgggcgggcaggcgagtgcgccgggtattggcagct

SEQ ID NO: 2015 - DNA, 165 bp, Homo sapiens
  chr4:146403046-146403211
  hyper
gaaaggagaggccgagcggctcaacccgggccgaggctcggggagcggagagtggcgcagcgcccggccgtccggacccgggccgcgagaccccgctcgcccggccactcgtgctcccacacggacgggcgcgccgccaacccggtaaaacgaaacagacccgaa

SEQ ID NO: 2016 - DNA, 117 bp, Homo sapiens
  chr4:146403592-146403709
  hyper
cgtgctgccgccgggccgaggcccgttcgcgtggcccgcggacccattgtgtcccccgcgccggcggggcgacccctgcgggagctggaggacgaccgctggcgctgctctccaagg

SEQ ID NO: 2017 - DNA, 35 bp, Homo sapiens
  chr4:146403852-146403887
  hyper
ttcaaaggtttggcggcggcgcgtaattttttccc

SEQ ID NO: 2018 - DNA, 34 bp, Homo sapiens
  chr4:148538934-148538968
  hyper
gcagcagaagacacagcgccggtccaggaggcgg

SEQ ID NO: 2019 - DNA, 31 bp, Homo sapiens
  chr4:149364622-149364653
  hyper
actgttttctaaggatcggttgtctgcatga

SEQ ID NO: 2020 - DNA, 70 bp, Homo sapiens
  chr4:149365596-149365666
  hyper
ctgccttgcccggggccgcccctgcgctctccggaccccctctcgccgctgtcagcgcaaagtgactgtc

SEQ ID NO: 2021 - DNA, 42 bp, Homo sapiens
  chr4:149365807-149365849
  hyper
tcccggcagtggcagtcgccctgctgacggtgggtagagcaa

SEQ ID NO: 2022 - DNA, 96 bp, Homo sapiens
  chr4:149365995-149366091
  hyper
cggcgtccctgggagccgggaagtccggcaggaggatcccgcgcccgccgctccgcagcgccactctccgcgccccctccccgggccctgggtggc

SEQ ID NO: 2023 - DNA, 164 bp, Homo sapiens
  chr4:149366094-149366258
  hyper
tgacagctccggcggccgagcgcgtgtgtgagggggcggtcgcagggggagcctgcgcccccctccccgggtcacgccctcacgagcgggaggaggcggcaccgcgtccggccacccgcgggtgggaaacgggcaggggcgccggcagccgccctcccactacg

SEQ ID NO: 2024 - DNA, 76 bp, Homo sapiens
  chr4:150999618-150999694
  hyper
aacggcgcgcgctgcccggcgggcgggatccgggcgcggccgaggcggcggcgctgcaccccgggcctgggcccgc

SEQ ID NO: 2025 - DNA, 129 bp, Homo sapiens
  chr4:152246267-152246396
  hyper
tgagagttaaagaagccggtcccatcccggcgcgtgaaggagctgccgctgtgtggggcaggacccgagcggccccagagcgcgcagctctgggtccccgccgccccgtcccccgcgcctctcacctgc

SEQ ID NO: 2026 - DNA, 91 bp, Homo sapiens
  chr4:152246862-152246953
  hyper
ctcagggaggggttatcggcccctaaggccgccccacagccacacacgctggaaacaccagctcgacccaaacaaacgtgtgcaaaataaa

SEQ ID NO: 2027 - DNA, 49 bp, Homo sapiens
  chr4:152329808-152329857
  hyper
gaaagcagagctgggccggggcgccggtggccgccgtcaaacctttggg

SEQ ID NO: 2028 - DNA, 41 bp, Homo sapiens
  chr4:152329871-152329912
  hyper
aaacgcccgtgacgtgcggcgttgtccgactccttccacta

SEQ ID NO: 2029 - DNA, 31 bp, Homo sapiens
  chr4:152330027-152330058
  hyper
cgcgagtgctacactgcgcccagctcaagtt

SEQ ID NO: 2030 - DNA, 120 bp, Homo sapiens
  chr4:152330090-152330210
  hyper
ccttcaccttggaaaccggcgcgggccgtgcggcgcggcactgcctaagtccccggcgcacctggcggcggcgtgtcccagcggcagaggcggggccggcggcggcgggggcggggccgg

SEQ ID NO: 2031 - DNA, 38 bp, Homo sapiens
  chr4:152330252-152330290
  hyper
cgcccctgccccgccccggcccccgcccccgcccccgc

SEQ ID NO: 2032 - DNA, 226 bp, Homo sapiens
  chr4:152330321-152330547
  hyper
ggaggcagtgacccacgcgcctcagcccgcggctgacgcaccttcgaaaagttgcgctccgaccttctcacgacctacattcttcccgggcactcctgagtttgagccgggcctggaggacctgggccaagactttcgagcggcggccgcccgaggtgcgaggagccagcccggctttcctcactgggtcccgcgcaggcgtccccgggaccgcagagcaaacttt

SEQ ID NO: 2033 - DNA, 31 bp, Homo sapiens
  chr4:152330794-152330825
  hyper
aggtcgctgcgtcgggcgggggcgcaggggg

SEQ ID NO: 2034 - DNA, 31 bp, Homo sapiens
  chr4:154048774-154048805
  hyper
gtgaggggtgagaatacgaggcattatttgg

SEQ ID NO: 2035 - DNA, 133 bp, Homo sapiens
  chr4:154073407-154073540
  hyper
ccgggaaaccaccccccgcagaggcaggtgcggctggctgggcctcgcggggaagggctctctgggcggagtcggggcactcggggcctggggcgtggtcgccgggctgccgtgcgctcgggatcagtctttt

SEQ ID NO: 2036 - DNA, 38 bp, Homo sapiens
  chr4:154387225-154387263
  hyper
agtgcgcgctgcggggcgggcccgcggccatgtgctcc

SEQ ID NO: 2037 - DNA, 123 bp, Homo sapiens
  chr4:154387494-154387617
  hyper
gccagcgagctagcggcgagcgcggcgagcaacggagaggagcgcgagcagcagcatggcggggctccgacgcccgcagcccggctgctactgccgcaccgcggcggccgtgaacctcctgct

SEQ ID NO: 2038 - DNA, 67 bp, Homo sapiens
  chr4:154387667-154387734
  hyper
gacaaggtcagccttgcgccgctgggctcgctctgcctctccaccccgcccccgctctttcttttag

SEQ ID NO: 2039 - DNA, 83 bp, Homo sapiens
  chr4:154388113-154388196
  hyper
ccccccacccccagcacgagcaccccgagcctgcctgcacgctgtcgccttcgcgtccgaggggccgccggctcacaccccac

SEQ ID NO: 2040 - DNA, 31 bp, Homo sapiens
  chr4:154709168-154709199
  hyper
ctatttttttttaaaccgccgttcagttctt

SEQ ID NO: 2041 - DNA, 151 bp, Homo sapiens
  chr4:159690016-159690167
  hyper
cctcccgccggggttacgtgagcccggggcgggcggccgccgggccaatggccgccgccggggccgccgcgctcctcccgcgccgccgccgccgccgtggggctgcgggctcctcccgcaggagataactgtcagcgcgcgaggcggtggc

SEQ ID NO: 2042 - DNA, 195 bp, Homo sapiens
  chr4:159690191-159690386
  hyper
cagccggcggctccggcgccgagcagagttactcagtcgcagcggccccgcgctcccgcaaggctgggcggccgcgccgccgcgatggccccgccaccgcggccgccgcccccggctgcgcgctgagccgccggccccccgagcgccacggccggagctgcggcggcggcatcatggccccgaccctgctccaga

SEQ ID NO: 2043 - DNA, 48 bp, Homo sapiens
  chr4:159690395-159690443
  hyper
acaaaaggggcagcagcggcagctccgcggcggcgtctgcccagggca

SEQ ID NO: 2044 - DNA, 109 bp, Homo sapiens
  chr4:159690446-159690555
  hyper
ctcctaaggaaggacccgcctttaggtgagggggcgccggggggcaattctggcgcgggacccgagttggcttcggtgctcgccggggaggggacgggtaggggaaagg

SEQ ID NO: 2045 - DNA, 125 bp, Homo sapiens
  chr4:159690556-159690681
  hyper
aagggactgtccaggacggcgctgcctatcgccggcacctggtcccgggcttgtcagcgtggacgcgcctgatccgagtgtggctccggaccctccgtgacccttcctcccgctctttctccaca

SEQ ID NO: 2046 - DNA, 39 bp, Homo sapiens
  chr4:159690715-159690754
  hyper
tgttccttggggttcccgggcgtgcgctgtgcttggctg

SEQ ID NO: 2047 - DNA, 31 bp, Homo sapiens
  chr4:169552966-169552997
  hyper
gcaagctgggaataagcgagatctgaaagac

SEQ ID NO: 2048 - DNA, 74 bp, Homo sapiens
  chr4:170192273-170192347
  hyper
gccacagcgccttccccgggagcgggcgcggcacctctcggagccacccgccgccgcgccggcctcccgcgctg

SEQ ID NO: 2049 - DNA, 41 bp, Homo sapiens
  chr4:170192664-170192705
  hyper
gggaggggctgggtccgcggaggcggcgggagcagccctgg

SEQ ID NO: 2050 - DNA, 47 bp, Homo sapiens
  chr4:170948485-170948532
  hyper
ccggcctttttactcccgtaccgccctcttcccggtgggttgctgcg

SEQ ID NO: 2051 - DNA, 31 bp, Homo sapiens
  chr4:172735202-172735233
  hyper
gttccaatgtcaaaagcggacacttttcttc

SEQ ID NO: 2052 - DNA, 31 bp, Homo sapiens
  chr4:176986728-176986759
  hyper
ctagaaagtgcagactcgctataaaatgtgt

SEQ ID NO: 2053 - DNA, 15 bp, Homo sapiens
  chr4:176986855-176986870
  hyper
cgccttcaacacact

SEQ ID NO: 2054 - DNA, 89 bp, Homo sapiens
  chr4:176987071-176987160
  hyper
tcggagcccgcgggcccggccgccccgcccccgggcgccctgagcgagcaggcggggagggcggggagggtccgcgcgttggtggtgct

SEQ ID NO: 2055 - DNA, 31 bp, Homo sapiens
  chr4:178363968-178363999
  hyper
tggggatcccaggcctcggaggtctgcaata

SEQ ID NO: 2056 - DNA, 47 bp, Homo sapiens
  chr4:178364002-178364049
  hyper
atgagtgtaggtgaagcgtgtttgcttaggaccggattgattttaga

SEQ ID NO: 2057 - DNA, 44 bp, Homo sapiens
  chr4:178364051-178364095
  hyper
ttttttccattcatagcgtccgtcattttcgcaccacagctttt

SEQ ID NO: 2058 - DNA, 31 bp, Homo sapiens
  chr4:184328289-184328320
  hyper
ggcccgcgccccttccgcgcagtctccttcc

SEQ ID NO: 2059 - DNA, 34 bp, Homo sapiens
  chr4:184328355-184328389
  hyper
ccacagaagcggcaagcgacgtcctcaaccgcaa

SEQ ID NO: 2060 - DNA, 70 bp, Homo sapiens
  chr4:185961213-185961283
  hyper
aagggaaaaggaagtgcgagtgagcgcgtgcacacacacacaaacacacatgcacgcgccttctaatgag

SEQ ID NO: 2061 - DNA, 34 bp, Homo sapiens
  chr4:186130482-186130516
  hyper
gctcaggaattaccagcgccgctgacacctgcag

SEQ ID NO: 2062 - DNA, 31 bp, Homo sapiens
  chr4:186130520-186130551
  hyper
attttccatgaacagacggcatcctgtagag

SEQ ID NO: 2063 - DNA, 31 bp, Homo sapiens
  chr4:187066081-187066112
  hyper
ggcgcgggcgcgggcgcgggcgcgggcgcgg

SEQ ID NO: 2064 - DNA, 125 bp, Homo sapiens
  chr4:187645567-187645692
  hyper
cgcgacctttttctgccgagttagaccccaggccctccccgccgcgggcgcctggcctcccccgctgacaccccggacgcccaggcctgtgggacaaaaggcagtcgcggcgtcccgcgggcttc

SEQ ID NO: 2065 - DNA, 42 bp, Homo sapiens
  chr4:187646284-187646326
  hyper
ctccatcatccaaagacgtgtttgtcccggccataattgctc

SEQ ID NO: 2066 - DNA, 31 bp, Homo sapiens
  chr4:187647107-187647138
  hyper
ggtccaggttcgcctccgcacagaaccctgc

SEQ ID NO: 2067 - DNA, 59 bp, Homo sapiens
  chr4:187647575-187647634
  hyper
gatatgtgttaagagccgggtttgaagtaccaactttgcctccccgggatcttcagcat

SEQ ID NO: 2068 - DNA, 261 bp, Homo sapiens
  chr4:187647865-187648126
  hyper
ccctcccccttggaggcggtgggggaggggaggtgacgtcagcgccccgcctcgccccccgccccgggcgcggacgggattctccggctgggcgcgccaccccgacagtggcagcagcggccgtggaggctgcgggggtcccggcctctgcggtctctctggccggccgcagctgtggcgcgggtgaaacgcccgccctcctccttcggctgcgtctcccgggcgccggcgagcgcgggcgttcctcgcactcagcgcctg

SEQ ID NO: 2069 - DNA, 31 bp, Homo sapiens
  chr4:187855389-187855420
  hyper
ctgcagctggaatgttcgtttcatgctccgt

SEQ ID NO: 2070 - DNA, 31 bp, Homo sapiens
  chr5:472704-472735
  hyper
gaacctgggggggaaacggggcaggtactgg

SEQ ID NO: 2071 - DNA, 36 bp, Homo sapiens
  chr5:693797-693833
  hyper
cggaccccgatctctccgccccgcaggacgcgcgtt

SEQ ID NO: 2072 - DNA, 101 bp, Homo sapiens
  chr5:1004891-1004992
  hyper
cgagcgccaaggcctcgcggggagaatagccacggggggagacggggcccgcgctgcccccacgaacgctgttggtggggaccccacggctgcgcccgctg

SEQ ID NO: 2073 - DNA, 154 bp, Homo sapiens
  chr5:1061581-1061735
  hyper
cacccgccgcacccgccgtgcgggatccctgagtctcacccgccgcacccgccgcacctgccgcatccgccatgcgggacccctgcgtctcacccaccgcacccgccgtgcgggatccctgtgtctcacccgccgcacccggctcatgggagtt

SEQ ID NO: 2074 - DNA, 37 bp, Homo sapiens
  chr5:1064051-1064088
  hyper
ggccacggtgaagatacgcatccggcacttcctccac

SEQ ID NO: 2075 - DNA, 143 bp, Homo sapiens
  chr5:1064116-1064259
  hyper
gggcctcagaggagcccgtcccggcccgcagcacgtggggtggccgtgctccggctggcgtgtccccgtcgcacgccccaccttgtgctggcgcagcaggaagggcagcagcatgagcatgccgccgtcgtgcacgatccacc

SEQ ID NO: 2076 - DNA, 220 bp, Homo sapiens
  chr5:1064261-1064481
  hyper
acgtcgatgtggcccccgccgaagcgctcctggttttgcggaaacgagtcgacgttcttggccaccagcagagcctggtgcgcggcggtggtgtcgcggacggtgtctgcggagagaggcggccgtccgcaggtcatctgaggccagggtgcggaaggggcctccccggggactcacagccagtgcaggggcgggcacggcgaggcgaggggggtcccca

SEQ ID NO: 2077 - DNA, 31 bp, Homo sapiens
  chr5:1064568-1064599
  hyper
aatcccccagcccctgcggggctctgggaga

SEQ ID NO: 2078 - DNA, 270 bp, Homo sapiens
  chr5:1064616-1064886
  hyper
gacactttcagatggccgctcccagggccagggccttcgacagcctcagagcacacaccctcgggtcggtggcctcaaggcccatcgggacctgacagcgcacaggcctggggacgttgaggggacagcgaggagacagaggggacggcgaggagacagtgaagggatagcgaggagacggtgaagggacagtgaggggacggtgaggggacagcgaggagacggtgaagggacagcgaggggacggcgaggagacggtgaagggacagc

SEQ ID NO: 2079 - DNA, 97 bp, Homo sapiens
  chr5:1065012-1065109
  hyper
gaccgcgaggggacggcgaggagatggtgaggggacagtgaggggacggcgaagagatggtgaggggacggttaggggacagcgaggggatggcaaa

SEQ ID NO: 2080 - DNA, 138 bp, Homo sapiens
  chr5:1111380-1111518
  hyper
gaaacctccagattcccggaacgggggacgggaacacggaggacgcggcctgagcaaggccccggtggctgccccctccccagccagggcgcagtccttcctgttccgcctctggggggtgggcggctcctccagggt

SEQ ID NO: 2081 - DNA, 132 bp, Homo sapiens
  chr5:1111655-1111787
  hyper
ggaccacccaggggcccgggctccctccggaggcgcgctccagcccctccccgtttccatggctaccagcagcggcgtccacacctctgcccccggtcccacccgagctgaccgtaccgggagccctggcag

SEQ ID NO: 2082 - DNA, 31 bp, Homo sapiens
  chr5:1111873-1111904
  hyper
gcgcctcctgtacccccggccccgccgcccg

SEQ ID NO: 2083 - DNA, 31 bp, Homo sapiens
  chr5:1111996-1112027
  hyper
tcgggctcggggccctcgggggtgcccggag

SEQ ID NO: 2084 - DNA, 68 bp, Homo sapiens
  chr5:1112174-1112242
  hyper
gacttggaggcaggggcggggtccgaccgagccgccccgccccgcccgggccacgtgacttcacctgc

SEQ ID NO: 2085 - DNA, 35 bp, Homo sapiens
  chr5:1112256-1112291
  hyper
cacgaaaagttggcccgcggcgacttcctgcaggg

SEQ ID NO: 2086 - DNA, 98 bp, Homo sapiens
  chr5:1112303-1112401
  hyper
gctgcgtctgtctgaccgccgcgacccgggacgcggggctttcgctgcctgcgctcccgaccatcgcagagcccgcgaatccccgctcagtctcctgc

SEQ ID NO: 2087 - DNA, 31 bp, Homo sapiens
  chr5:1295157-1295188
  hyper
gcctgaaactcgcgccgcgaggagagggcgg

SEQ ID NO: 2088 - DNA, 31 bp, Homo sapiens
  chr5:1800854-1800885
  hyper
tcaactctaagcaaaacgggcctttttagag

SEQ ID NO: 2089 - DNA, 31 bp, Homo sapiens
  chr5:1800896-1800927
  hyper
atgctgtaaaatcagtcggtgtactaggctt

SEQ ID NO: 2090 - DNA, 81 bp, Homo sapiens
  chr5:1800933-1801014
  hyper
agaaatccccaatatacgtttcctctgcggctccccgtaaccacacacaggaacgcttgccttgaacgaggagaatgcact

SEQ ID NO: 2091 - DNA, 31 bp, Homo sapiens
  chr5:5140314-5140345
  hyper
ggtcctctgacccccccgccctcacctcctc

SEQ ID NO: 2092 - DNA, 31 bp, Homo sapiens
  chr5:9544613-9544644
  hyper
cagctcccccaacccccggcccccaaaatga

SEQ ID NO: 2093 - DNA, 34 bp, Homo sapiens
  chr5:9546284-9546318
  hyper
cctgccccgcccccgccgccgcgccgcctcctcc

SEQ ID NO: 2094 - DNA, 31 bp, Homo sapiens
  chr5:10563415-10563446
  hyper
ccccgcccatccccggcgccaggactgacgg

SEQ ID NO: 2095 - DNA, 43 bp, Homo sapiens
  chr5:10563473-10563516
  hyper
ctgtgggcctggactgcggctgtcgcccgcggccctgctcttt

SEQ ID NO: 2096 - DNA, 47 bp, Homo sapiens
  chr5:10564408-10564455
  hyper
gacttttttctttgagcgcagccgcctggtgccggtttccgccgagc

SEQ ID NO: 2097 - DNA, 188 bp, Homo sapiens
  chr5:10564470-10564658
  hyper
acggcttctctggggacgcagaagcgagaagcggggacctcggcgcgcgccccgcgtcccgctcttcctgcccgcgccccggcccccggcccgcgccccggccgccggcatggtgctgctggccgggaccgggccggagggcggcggggcgcgctgcatgaccccaccaccgccgtccccaccccggg

SEQ ID NO: 2098 - DNA, 175 bp, Homo sapiens
  chr5:10564800-10564975
  hyper
cgtcccggagggcgtcccggaaagcgtcccggagacggcgaccctcctgcgcgccgcctgcgccaacaacgtggggctgctgcggacgctggtgcggcgcggggtgagcgtcgaggaggcgcaggagactgaccgcaacggcagggtaagcgggcgtccccgcaggatttgagcc

SEQ ID NO: 2099 - DNA, 228 bp, Homo sapiens
  chr5:10564999-10565227
  hyper
tccccaccacatccccgcgcctcccagctcctggctccggaccggtccctcggtcactcagccgccgcccagagcgccttttccccgctgtttgggagcgcggtgccctgggtggcttccccgtctcaggctgggggacgcggtgcggggagggagcagtcgaggtgtcagcgcggcagaaacgccagtccggcgtcctcaccgcatccccttctcgtttaccggtcc

SEQ ID NO: 2100 - DNA, 48 bp, Homo sapiens
  chr5:10565262-10565310
  hyper
cgtgctgcaatccaggatgggcttcttgcggcccggtcccctcctgac

SEQ ID NO: 2101 - DNA, 105 bp, Homo sapiens
  chr5:10565366-10565471
  hyper
agcccctcctgcccagcgccccatttggcccctgggcccctcgcgccgcccttgtcctaacacgctggggcgcagatcggctcctccagccgcaatgatttggaa

SEQ ID NO: 2102 - DNA, 150 bp, Homo sapiens
  chr5:10565472-10565622
  hyper
caacagtttcttccctcgccgggacagcttggtcccctaccccacctccgctgagctttgtggcccgcgccgcgaccagccaacgtgatctctgactggtctgtccgcaggtcaccttcgcgagccaatgccagccggggctccccagag

SEQ ID NO: 2103 - DNA, 31 bp, Homo sapiens
  chr5:14108524-14108555
  hyper
ctcgtgatttttcctacgtaacacttctcct

SEQ ID NO: 2104 - DNA, 132 bp, Homo sapiens
  chr5:14143001-14143133
  hyper
ccactagggaggcacccgccccggcccgcgtcaccccgccttgcgggctagacgacgaaacgcctcggcgctcaggggaccgcgcaccggtgcaggagccagcgccccggttgggggcgcaatgccgggcct

SEQ ID NO: 2105 - DNA, 45 bp, Homo sapiens
  chr5:14143190-14143235
  hyper
ccccggggaagcagaccgaaccaaaccgaacgttcctgcagcctc

SEQ ID NO: 2106 - DNA, 166 bp, Homo sapiens
  chr5:14143456-14143622
  hyper
atcaagatggaggctcgcggcagccgccggcgcccgtgatcccggaggtctcgccggccacgggcccccgccctcgcgactgcgcgtccgggaggcgcgtgctgctgcccgcgctccggccggcgcccgggaggccgtggctccgcgcctccgcccctcggccagc

SEQ ID NO: 2107 - DNA, 49 bp, Homo sapiens
  chr5:14143766-14143815
  hyper
agcgggcggcacgcggcgctaggggcgcggggcccgaggcgggcgcggc

SEQ ID NO: 2108 - DNA, 166 bp, Homo sapiens
  chr5:14143872-14144038
  hyper
gtcctccggccccgccgcggcggccagcgcggctggctcgggctgcgggggcggtgccggcgagggggcagaggaggcggccaaggacctggccgacatcgcggccttcttccgatccggtgagtgcaactgcggccggcccgcccagcggcgctgccccaagcgc

SEQ ID NO: 2109 - DNA, 113 bp, Homo sapiens
  chr5:14144296-14144409
  hyper
gcttcgcgggttggggcgccggctctttgtctctttcgctggaggaccgaggaggcggcggcggagatggcgtgggcggaggctcttaccccggaggccgagcggactgagcc

SEQ ID NO: 2110 - DNA, 46 bp, Homo sapiens
  chr5:14144999-14145045
  hyper
caggaggaggaggaggcggcggcggcggcggcggcctcggggccgg

SEQ ID NO: 2111 - DNA, 129 bp, Homo sapiens
  chr5:16616954-16617083
  hyper
ctcctcctgctgctgccgctctgcgggggatgcctggggcggtggcggcgacggcggcgcctgctcctcggcggcaggagccgggcatccctcctcggcgtgctccggaggcgccgggctcgccatctt

SEQ ID NO: 2112 - DNA, 140 bp, Homo sapiens
  chr5:16935547-16935687
  hyper
cctgcacccgggcagtcgagcgggcggatcgccccgcccgcgccccggcgcgcgccgcctcacctggcgcgggtgtcccagggcgccccgagagccagccacccacgcaaacggaaacgcaccttcgctacctcccggag

SEQ ID NO: 2113 - DNA, 31 bp, Homo sapiens
  chr5:16936072-16936103
  hyper
cttctcaccttttgttcgcccaaacccaagt

SEQ ID NO: 2114 - DNA, 46 bp, Homo sapiens
  chr5:16936151-16936197
  hyper
gttcctcactactgggcgcagcgctcgcaagcggagaacagctggt

SEQ ID NO: 2115 - DNA, 50 bp, Homo sapiens
  chr5:16936251-16936301
  hyper
ccctccctctgcgctccggccgggggccctcggggcgggcaggaggacag

SEQ ID NO: 2116 - DNA, 171 bp, Homo sapiens
  chr5:16936429-16936600
  hyper
gccggccccgccctcccgcagccggccccgccctcccgctcgcggccccgcccccaggagcttggccctccgccaaccacaccgtctggccccgcccgggcggagcgccccgcccccttcccgaccaggccccgcccactctaagcccgaagcagccgcaggctcgttagc

SEQ ID NO: 2117 - DNA, 48 bp, Homo sapiens
  chr5:16936737-16936785
  hyper
tcatgtttagcagacccgggaaccggctcaacacggatctcattaatg

SEQ ID NO: 2118 - DNA, 31 bp, Homo sapiens
  chr5:16936791-16936822
  hyper
ggtagactagcaatctcgggaaggaagcgcg

SEQ ID NO: 2119 - DNA, 83 bp, Homo sapiens
  chr5:17216814-17216897
  hyper
gaggggcgacgtctctcgccccaccagctggacctcggcgaccgcgcctcccccgaagctgcagccttcggggctgagccccg

SEQ ID NO: 2120 - DNA, 73 bp, Homo sapiens
  chr5:17216976-17217049
  hyper
gggctcaccccaacctcgctgccagccgaggtagcggaatcgtagtcgacgtcgggagcgggctggactgggg

SEQ ID NO: 2121 - DNA, 62 bp, Homo sapiens
  chr5:17217076-17217138
  hyper
gtgtcattcatcacctcgaggcagctccctaagtctgagcgagagcccgagcacttcttatc

SEQ ID NO: 2122 - DNA, 79 bp, Homo sapiens
  chr5:17217991-17218070
  hyper
cgccccgcagcccccgggctctcccttcatgcagcgggcagcagggatgtgggcccggattggacggcaagggcctggg

SEQ ID NO: 2123 - DNA, 50 bp, Homo sapiens
  chr5:17218072-17218122
  hyper
ccctctgtgagggctccgtcgcacttcggggatcccgggtgatggggggc

SEQ ID NO: 2124 - DNA, 35 bp, Homo sapiens
  chr5:17218127-17218162
  hyper
agtgggaggcttcagccgctcgcatggtggagggg

SEQ ID NO: 2125 - DNA, 168 bp, Homo sapiens
  chr5:17218209-17218377
  hyper
tcggggagaggagctgcgggtgacgggaggaattgccgaatgcgaaaccccctcagtgcgttgagtcccggggagacggttctgtgggctgaagggagcgcttccgtcatcggagcccttaccagcctgggagaaagcgctcggggcgaggggcgcagcagccaaaga

SEQ ID NO: 2126 - DNA, 68 bp, Homo sapiens
  chr5:17218384-17218452
  hyper
tgggggtggggtggggcgggagtccggggagaaagaagatggggaatctggcccgatcagaaggaagt

SEQ ID NO: 2127 - DNA, 76 bp, Homo sapiens
  chr5:17218795-17218871
  hyper
cagcttttgcccaaagcgctaaagctgaaacccggcgcccggttcctgctccccccgcccccgtcccccctccatt

SEQ ID NO: 2128 - DNA, 31 bp, Homo sapiens
  chr5:29296868-29296899
  hyper
ggaactctagctggcccgcaagtgcgtgggc

SEQ ID NO: 2129 - DNA, 605 bp, Homo sapiens
  chr5:34656173-34656778
  hyper
gccgggacgcgcgggccggggagatgcgccgggggctggagggcggagagcaccccccgcaggtcccggccagagcccggggccgggtcacctgactcgcggaatttggggccgcgaggggtggaatgggaggggaatggttagcgcctcccttcccgctcccactggatccaggtcggcgggggccggcgcccggcggccacgtggtggtgctgccgctgcccccgccccgccggcctagcccgggagctcggcgcccactgacccccgcagcgggggaggaggagggactgcggcgcaggaagccgagcaggaagcgagcccggcggccgcgttttcctggggaagcggcgggcggggtggagcagccagctgggtccggggagcgccgccgccgcctcgatggggtgagtgcgcggcacggagttgggaggctcccggcgcggggtcccgggctcgtgtccccgcctttgtgtctggagctcgggcgcgggaggcgctggggacggcgcccgggcggagcggctgagcgggctgcagccggggtcccgccacctctccctggtccaccgccggcagcccactgtctgcggagagcagatctg

SEQ ID NO: 2130 - DNA, 134 bp, Homo sapiens
  chr5:34656803-34656937
  hyper
ggagatgagggtagagcgggaagacccggccaagttaggagaagggttcttcccgggtcctccgcgactcgcaggccggctggggcggggcgcggggcaggggccgcggcggagggagcgcgggtgggaatgaa

SEQ ID NO: 2131 - DNA, 39 bp, Homo sapiens
  chr5:34656981-34657020
  hyper
cctgtttcgccccgcgcggcgcctcgctgcccccgcgtc

SEQ ID NO: 2132 - DNA, 31 bp, Homo sapiens
  chr5:34657023-34657054
  hyper
gctgctgagcccaatccgcctcccggctgaa

SEQ ID NO: 2133 - DNA, 70 bp, Homo sapiens
  chr5:34657063-34657133
  hyper
ggtggggagggaggtgcgagcgggagactccgggtggctcccaggacgcggggtccgctattgttcctcc

SEQ ID NO: 2134 - DNA, 31 bp, Homo sapiens
  chr5:34657158-34657189
  hyper
ggcccaagggcgggggcgagacccctctggg

SEQ ID NO: 2135 - DNA, 50 bp, Homo sapiens
  chr5:34657202-34657252
  hyper
cctaccttgttttccccgccgcagctcggggagaacggatgctggagttg

SEQ ID NO: 2136 - DNA, 65 bp, Homo sapiens
  chr5:34657277-34657342
  hyper
tcgggagtaaggaggacgtggagccaccagaaaggcgcccgccatctcccgcgacccctgcctgg

SEQ ID NO: 2137 - DNA, 87 bp, Homo sapiens
  chr5:34657348-34657435
  hyper
gtggggggtggggtgtcgtcctcaaccaccttcgctgccttcttgggcaggttggtgtcggtttagtttctgcggtttgcagggttg

SEQ ID NO: 2138 - DNA, 193 bp, Homo sapiens
  chr5:36690191-36690384
  hyper
agttctgttagctgaacgggcctggaggaagcgtggcgggaaggctggatccccgccgcaggggctgcggggctgtggctgcctgcgggctgggcagggccgggcgcacgccctccttccgggtggccgcgggccccgaccccaggctgccgtcagtcgagcggcctccgcagcggccgcgcttccccttctc

SEQ ID NO: 2139 - DNA, 77 bp, Homo sapiens
  chr5:36690539-36690616
  hyper
cgtcctagagggaaagcgggagatgagaaatctacgagatccgcgaggcggcgtccggggagcgagcctcatagtgg

SEQ ID NO: 2140 - DNA, 94 bp, Homo sapiens
  chr5:40680533-40680627
  hyper
gctgaccctgggggctcgtgaggctgccaccgctgctgccgctacaggtgagatggcgttgggctgacgttggggtcaacgggtagagaacgca

SEQ ID NO: 2141 - DNA, 107 bp, Homo sapiens
  chr5:40681120-40681227
  hyper
ccgcctccttgagccccgaccggctgaacagcccagtgaccatcccggcggtgatgttcatcttcggggtggtgggcaacctggtggccatcgtggtgctgtgcaag

SEQ ID NO: 2142 - DNA, 124 bp, Homo sapiens
  chr5:40681261-40681385
  hyper
cgctggtatgtgggctggctgtcaccgacctgttgggcactttgttggtgagcccggtgaccatcgccacgtacatgaagggccaatggcccgggggccagccgctgtgcgagtacagcacctt

SEQ ID NO: 2143 - DNA, 65 bp, Homo sapiens
  chr5:40681393-40681458
  hyper
tcttcttcagcctgtccggcctcagcatcatctgcgccatgagtgtcgagcgctacctggccatc

SEQ ID NO: 2144 - DNA, 124 bp, Homo sapiens
  chr5:40681468-40681592
  hyper
atttctacagccactacgtggacaagcgattggcgggcctcacgctctttgcagtctatgcgtccaacgtgctcttttgcgcgctgcccaacatgggtctcggtagctcgcggctgcagtaccc

SEQ ID NO: 2145 - DNA, 170 bp, Homo sapiens
  chr5:40681669-40681839
  hyper
gctccttcctcattctcgccaccgtcctctgcaacgtgcttgtgtgcggcgcgctgctccgcatgcaccgccagttcatgcgccgcacctcgctgggcaccgagcagcaccacgcggccgcggccgcctcggttgcctcccggggccaccccgctgcctccccagccttg

SEQ ID NO: 2146 - DNA, 31 bp, Homo sapiens
  chr5:42949384-42949415
  hyper
cagcgagaaaagaaaacgaaatgaaactgac

SEQ ID NO: 2147 - DNA, 31 bp, Homo sapiens
  chr5:42950136-42950167
  hyper
ccgagatcggctccccgcgtcctgagcatgc

SEQ ID NO: 2148 - DNA, 31 bp, Homo sapiens
  chr5:42991931-42991962
  hyper
tgacttgaggagggagcgtgggagtaatgtc

SEQ ID NO: 2149 - DNA, 71 bp, Homo sapiens
  chr5:42992017-42992088
  hyper
agaaagttccacccaacggccagtcgatccgtcgcagcgactctcttttccctgaacggagggtttatggc

SEQ ID NO: 2150 - DNA, 63 bp, Homo sapiens
  chr5:42992098-42992161
  hyper
acttgtttctcagagccggggctgactgccggctgcatctttgaatggcgaccaaaaaagaca

SEQ ID NO: 2151 - DNA, 61 bp, Homo sapiens
  chr5:42992164-42992225
  hyper
atttgtctggcaaagtcgctggcgttcgcctggtgcccgcgcttgccgggtcctagagcag

SEQ ID NO: 2152 - DNA, 15 bp, Homo sapiens
  chr5:42992226-42992241
  hyper
cagattttcacacca

SEQ ID NO: 2153 - DNA, 152 bp, Homo sapiens
  chr5:42992375-42992527
  hyper
cgtcccattctccatccgaggccttctagtcccggtgtcactgtcgcagcacctggcgttcgttagctctttcaccagcggcgcggagcgggcggttttgctgtcacggcacatgtggcacggagtttctcggtggccgaaaccctcttttt

SEQ ID NO: 2154 - DNA, 59 bp, Homo sapiens
  chr5:42992538-42992597
  hyper
agtttcttggtgacagcgctgttggttgcgccataaggaatgttgtccttgacaacccg

SEQ ID NO: 2155 - DNA, 230 bp, Homo sapiens
  chr5:42992782-42993012
  hyper
cgctgggctaggggagcccgccgctcctccaagccggtgacaggggagctgcccgggcgccgtctcttcccagcgccgccgcagaacccgcagaacagctcgacctccagaaccctgtgctgtggcggcggggctggcgtgtctgtcgcaggaccccgcagattcgtctgtcgttggcttgttggtcctaacaagtttcgatttcagggtgcctgcgtttctttttcttt

SEQ ID NO: 2156 - DNA, 34 bp, Homo sapiens
  chr5:42993332-42993366
  hyper
tctatcccctggttcaagtcggggaatagccaaa

SEQ ID NO: 2157 - DNA, 75 bp, Homo sapiens
  chr5:42993853-42993928
  hyper
cctcaagtttctaagtcgtggcaagttccggcttcctactagtacggcttgctttagctgcgcaggagatgttca

SEQ ID NO: 2158 - DNA, 31 bp, Homo sapiens
  chr5:42994106-42994137
  hyper
tctggtttacgaagctcggtttgacgatagc

SEQ ID NO: 2159 - DNA, 239 bp, Homo sapiens
  chr5:42994610-42994849
  hyper
gctggggagccaagctcggtctccgcttcggtggtttcaggtcccgggttctgtctggcggctctgcttctaatgcggagctggcggttttgcagcaacgcttttgccagtagcgcccactgagcggtttttcagttgctgcaccgttcttagcgcccaacggaacgtttcccgtacgcggagtccataagttgtctgtgtcgtcactttctcggttctggcaccgctagtatctccta

SEQ ID NO: 2160 - DNA, 46 bp, Homo sapiens
  chr5:42994903-42994949
  hyper
tgccaactagtacttccgtaataccgttagccggctcttttcctgt

SEQ ID NO: 2161 - DNA, 31 bp, Homo sapiens
  chr5:43008289-43008320
  hyper
cctgtggcagaaaaaccgagcccaagccctt

SEQ ID NO: 2162 - DNA, 165 bp, Homo sapiens
  chr5:43008723-43008888
  hyper
ctaggattacaggcgtgagccacagcgccccgccgaaacgttctgttgtgttcagcgcttccagcggtgcagcagccgagaaaacactgagtctccgctattggcgaaagtgctgatgcgaaactgctggctcgacataggcacagagccgcggaagagaaccct

SEQ ID NO: 2163 - DNA, 38 bp, Homo sapiens
  chr5:43008898-43008936
  hyper
caccagctctgctccccgactcacgggagaaagctagt

SEQ ID NO: 2164 - DNA, 130 bp, Homo sapiens
  chr5:43018046-43018176
  hyper
tgatcactggctgcaccgctgatggcgcccaaaagaacgcgcatttgtctttggcaacagcgctgggtttcgcctcgtgcccgcgcctgaagggtcctagcgccgccagattctcacactcgcgggtcca

SEQ ID NO: 2165 - DNA, 196 bp, Homo sapiens
  chr5:43018326-43018522
  hyper
cgtcctccagtgccggggtcatggtcgcagcacccggcgttcccgttggctcttttgccgctgcgcggagccggcggtttttctgtcacagcacttgtacggagtttctcggcggccgaacgtctctttttttctcagagacgacggtttcttggtgacagtaccgttggttgcgccgtaacgaatgttctccttg

SEQ ID NO: 2166 - DNA, 70 bp, Homo sapiens
  chr5:43018523-43018593
  hyper
cagccccaccagctggcgtcactcgcaggctccagacgccgccatttcgccaagccgaggtctcttggtt

SEQ ID NO: 2167 - DNA, 103 bp, Homo sapiens
  chr5:43018595-43018698
  hyper
ggcactgcttctggctcggtgcctgtattttctcggtgcctacagcgcccaggtcgccgatctgagggcttcggagtaccggccgggcgcggtggctcacgcc

SEQ ID NO: 2168 - DNA, 63 bp, Homo sapiens
  chr5:43019237-43019300
  hyper
aatagaccagctactgcgatttttaagtcgtagtaaaaaaggtttaaccgtgactgctttttt

SEQ ID NO: 2169 - DNA, 31 bp, Homo sapiens
  chr5:43019316-43019347
  hyper
tttttgtttttgttttcgtaggaaatgtaga

SEQ ID NO: 2170 - DNA, 40 bp, Homo sapiens
  chr5:43019485-43019525
  hyper
tcttttgctctgagaacgatgttaccgatgtgtttgcttt

SEQ ID NO: 2171 - DNA, 31 bp, Homo sapiens
  chr5:43019593-43019624
  hyper
ttctactaattttgagcgtctcagcttcctg

SEQ ID NO: 2172 - DNA, 45 bp, Homo sapiens
  chr5:43019635-43019680
  hyper
acattctctcaggatccggggagccgagctcggtctcagtctccc

SEQ ID NO: 2173 - DNA, 131 bp, Homo sapiens
  chr5:43019708-43019839
  hyper
ggctctccttcgtatgcggagctgatggttttgcatcagcgcttttgccagtagagccgactagcgttttctcagttacggcaccgttcttagcgcccagtgtgacgtttcccattcgccaggtccttatg

SEQ ID NO: 2174 - DNA, 31 bp, Homo sapiens
  chr5:43019856-43019887
  hyper
ttcttggttctcgcaccgctagtatctgcta

SEQ ID NO: 2175 - DNA, 147 bp, Homo sapiens
  chr5:43040829-43040976
  hyper
gttgtgacagaaaaagcgccggctaatggtaccacacaattactagtgcgaacagcggctcggtgcaatcaccgttctgcacggcaaaacggggttcaggaagttcctaggagatactagcggttgtaggagcgaaaaagtgacagc

SEQ ID NO: 2176 - DNA, 48 bp, Homo sapiens
  chr5:43040980-43041028
  hyper
agaacctaaggaccccgcgaacgggaaatgtcacgttgggtgcagcaa

SEQ ID NO: 2177 - DNA, 31 bp, Homo sapiens
  chr5:43603562-43603593
  hyper
tggggtgtccgcaggccgcaggcttaggtgg

SEQ ID NO: 2178 - DNA, 31 bp, Homo sapiens
  chr5:49736690-49736721
  hyper
gcttaggtgacacaaacgtagctaatgggag

SEQ ID NO: 2179 - DNA, 59 bp, Homo sapiens
  chr5:49736745-49736804
  hyper
ccttaccagcatccccgcgcctctccccgccacccttgcccggcgcgccggcgatgccc

SEQ ID NO: 2180 - DNA, 108 bp, Homo sapiens
  chr5:49736869-49736977
  hyper
acacctggggcactgccgtccgccgagcttgggcgcgcggcagcgagaaggcactggaggaggagcagccggggcgtacgcgccctggcctccagcaggccggggagg

SEQ ID NO: 2181 - DNA, 61 bp, Homo sapiens
  chr5:49737195-49737256
  hyper
ttatgcagccctcagccggctgctggcgttcccggatgtgcggtggcggtgctacttcccg

SEQ ID NO: 2182 - DNA, 58 bp, Homo sapiens
  chr5:52083829-52083887
  hyper
gtttgcttctacagcccgtggactttagcctaaacacggacccgcgaagctggcttta

SEQ ID NO: 2183 - DNA, 64 bp, Homo sapiens
  chr5:52084038-52084102
  hyper
ctctcccgctcctgggcgccgctgccactggggcagaggactgggaaccgcggcagcgggataa

SEQ ID NO: 2184 - DNA, 31 bp, Homo sapiens
  chr5:52084103-52084134
  hyper
tggcccagccagagagcgcagctcccgcgcc

SEQ ID NO: 2185 - DNA, 115 bp, Homo sapiens
  chr5:52284794-52284909
  hyper
ggctgcggaggggccacgttctcccggggactggggcatctcctgcgtgctggcgacaggctgcgggggcggagtggtgccagggcgggcgctcgcccgtcggatatgcccaccc

SEQ ID NO: 2186 - DNA, 31 bp, Homo sapiens
  chr5:52285095-52285126
  hyper
gcggaatcaggaggggcgggctggggcgggc

SEQ ID NO: 2187 - DNA, 35 bp, Homo sapiens
  chr5:52285155-52285190
  hyper
ttttccctgctctcaccgggcgggggagagaagcc

SEQ ID NO: 2188 - DNA, 40 bp, Homo sapiens
  chr5:52285205-52285245
  hyper
agagtgtgcaggttctcgtatccctcggccaagggtatcc

SEQ ID NO: 2189 - DNA, 75 bp, Homo sapiens
  chr5:52285752-52285827
  hyper
ggctcagacaggtgccgcgcctgccagagaccagggaaatccggaatccattgctgatggcggcctgcagctccc

SEQ ID NO: 2190 - DNA, 45 bp, Homo sapiens
  chr5:52778601-52778646
  hyper
accccctccccatccccgccgggtctccttcgctagccacctcgc

SEQ ID NO: 2191 - DNA, 31 bp, Homo sapiens
  chr5:52778710-52778741
  hyper
tgggaactgctggctccgtcaagcgaagaac

SEQ ID NO: 2192 - DNA, 44 bp, Homo sapiens
  chr5:52778785-52778829
  hyper
gtgctgcagcaccggccggctgagcacctcgtggaccgaggagg

SEQ ID NO: 2193 - DNA, 108 bp, Homo sapiens
  chr5:54469035-54469143
  hyper
ccggcggggcggcagtcggcgcgggaatccccctcgccggcttcttattggccggcgccgcggtgtcgtcagagcccgggtgggattccccggcgcgcgccgcggccc

SEQ ID NO: 2194 - DNA, 54 bp, Homo sapiens
  chr5:54529890-54529944
  hyper
gatcctgagttccaaacgaaagtcgggctagaattctgtcgacacgggaaaagt

SEQ ID NO: 2195 - DNA, 42 bp, Homo sapiens
  chr5:54530055-54530097
  hyper
agagcctcagaagggccgtttgtgctgcggaatagattggag

SEQ ID NO: 2196 - DNA, 31 bp, Homo sapiens
  chr5:57755374-57755405
  hyper
gtgaggagcccacctcgcgctgggatcggac

SEQ ID NO: 2197 - DNA, 31 bp, Homo sapiens
  chr5:57755425-57755456
  hyper
gcgggcgagggaccccgcgggcttgcccggc

SEQ ID NO: 2198 - DNA, 51 bp, Homo sapiens
  chr5:57755844-57755895
  hyper
agccggccgtggtcctcgcacccttgcctctggtgccgactagcacccaac

SEQ ID NO: 2199 - DNA, 111 bp, Homo sapiens
  chr5:57755954-57756065
  hyper
gaagggggcggagactcgatacgcgacatcacgtcacggcctatgccccgccccacggccggccgagcgcgcgtggccgggaagcaagtcttgtcccgccacccgggtctc

SEQ ID NO: 2200 - DNA, 38 bp, Homo sapiens
  chr5:57756488-57756526
  hyper
cgtgggggtgaaaggccgggattcgtggagccgggcat

SEQ ID NO: 2201 - DNA, 31 bp, Homo sapiens
  chr5:57756573-57756604
  hyper
gggccgatcggccaaccgtgccaggatccca

SEQ ID NO: 2202 - DNA, 31 bp, Homo sapiens
  chr5:59506983-59507014
  hyper
aacgaaaccgtcattccggaaacacagctcc

SEQ ID NO: 2203 - DNA, 31 bp, Homo sapiens
  chr5:60626140-60626171
  hyper
ccagaaaaatactggacggatatacaaaaac

SEQ ID NO: 2204 - DNA, 31 bp, Homo sapiens
  chr5:60840110-60840141
  hyper
actgatgatgttggttcgggagaggtttggt

SEQ ID NO: 2205 - DNA, 31 bp, Homo sapiens
  chr5:68485209-68485240
  hyper
cacatccgacgcttaacgaaagctattccaa

SEQ ID NO: 2206 - DNA, 31 bp, Homo sapiens
  chr5:72113362-72113393
  hyper
agtctgttatcttaatcgctaatcaggatgg

SEQ ID NO: 2207 - DNA, 31 bp, Homo sapiens
  chr5:72921422-72921453
  hyper
cagcttgcaaagctctcggccagggaacatg

SEQ ID NO: 2208 - DNA, 48 bp, Homo sapiens
  chr5:72921497-72921545
  hyper
cctattgtaatagacccgggccgtattatgtcacgggtgtggtggctt

SEQ ID NO: 2209 - DNA, 220 bp, Homo sapiens
  chr5:72921556-72921776
  hyper
cagcctgagcctccctcgggcctggcacaactcctttcgcgagcgggcagcccagcgcctccctcgggaggcgccaaggcgtgggggcgcccggggcgcaactggcactcctgtggcccgccaggtccgcgccagcctccgcgcctccgatctccggaggccaacggccgcagccccgcagcgggagggggctggcggagacagcgcggtaggggcagct

SEQ ID NO: 2210 - DNA, 54 bp, Homo sapiens
  chr5:72921779-72921833
  hyper
ggtttcctcctggagccggtgtcgggcgcggccggcgggcgggcctcgccatgt

SEQ ID NO: 2211 - DNA, 142 bp, Homo sapiens
  chr5:72921840-72921982
  hyper
ccgccgcgagccgggccgggaggtgggcaggcggggatccagtggcagcggggaggcgcggggggagcggggggagcgggggcggcacccgctgctggcgcagccagccgggcccgggcgcgcggccgcggctccaccccct

SEQ ID NO: 2212 - DNA, 258 bp, Homo sapiens
  chr5:72921983-72922241
  hyper
aaccttggcttcagcccggccgccgccaggcgttggcatcgccggggagagccttccggactccgggcggcggctggctgggggcgcgttccgaggcgccctcaggcagggcgcgggggcagagcctcgcctgggttctggaggctgcggggccatcgctccaggtaaatgctctttgggactccatcgtctgcgtttccctgcagctctgggcggaaaagtttgtccacctgagttcgcatccgcagggccactttc

SEQ ID NO: 2213 - DNA, 153 bp, Homo sapiens
  chr5:72922244-72922397
  hyper
agggtccccagggatgcgagggtcagcagaggtgaccggggaaccgctgcaggcgctgcggcgcgagggctgggcgccgcctcccgctccctcgggagcggcaacaagtggagagggcggcgcagcctcgtgcggcggcggcagctgcggagc

SEQ ID NO: 2214 - DNA, 158 bp, Homo sapiens
  chr5:72922408-72922566
  hyper
cgggcgcactgagagccgggggctgggcgggtgaaagccccgccagtgtccttcgggagacagggaaataaacagcactcctgcggtggagaagggagaacgtcgagagttggtgtccgcccttcccatccatgcttcagctccgggactgagggtgc

SEQ ID NO: 2215 - DNA, 41 bp, Homo sapiens
  chr5:73843884-73843925
  hyper
ttgaggaagggacatccgctcccgcccgccagcttcatgaa

SEQ ID NO: 2216 - DNA, 40 bp, Homo sapiens
  chr5:73844038-73844078
  hyper
ctaagcaagaaggcaccggtgcagccgctggtgcccagag

SEQ ID NO: 2217 - DNA, 118 bp, Homo sapiens
  chr5:73935723-73935841
  hyper
gccggggaggatgcaacgtgggccaaccatcccgcgcgctcggccctggaggctgcggggagcgacgcagcgcgacattcacccccaggaaagcgctgctttccgcagaggagagagg

SEQ ID NO: 2218 - DNA, 144 bp, Homo sapiens
  chr5:73935843-73935987
  hyper
gactgtatccttagctcggctcctcgcttccccagcggctcgccccagacattgcaccgcggaggggaggccggtcgacctctccggcgatgcccggcttctgcctgctgtgggagggcagcggcgggcaccgtgatctccgca

SEQ ID NO: 2219 - DNA, 516 bp, Homo sapiens
  chr5:73936032-73936548
  hyper
cggagcacgctcacccctcgcgaacacacccctgcagccgaagcagcccctgaagcccgcagcgcctgcaacaggtccggggcagtgggggaaacttacagcagtggcgactggccgcaacgcacaactgagttctagcgacggtcacgggcaaggaggcgacgaaccggtcgtctcagcccagggaagcggtggcgaatgccccggagaaaggagggccagccggggagaggactgcgccccgaacgatggctcgcggaccggctaccgatggcgttcgcctccgtctgtcgtccccacgccgcggacccggtgtccaggacccgcagagcgtctccggagcgcgtcacggtagggcagagcaagcctgccactgcaggcgccgcggaaggaggcgggctgtgcgctcgggggagggagctagaaagcgccttgtgtgccggcggccgccaggcgtctggaccgggtctccgcagcgccaccgccgcaccgcctcctctccggctgccagagcag

SEQ ID NO: 2220 - DNA, 95 bp, Homo sapiens
  chr5:73936773-73936868
  hyper
gtgcagagagacaaagcggacgcactgtctcagccgctggcagctgcaaccccgggaaccgagaataaaataagttttcccgggttcgagtgtct

SEQ ID NO: 2221 - DNA, 42 bp, Homo sapiens
  chr5:73937017-73937059
  hyper
ggacaggccctgggcacgcatagacagcgccttgggtaggac

SEQ ID NO: 2222 - DNA, 185 bp, Homo sapiens
  chr5:74161899-74162084
  hyper
gcgggtctggtgctggcgggggcgcggggcccggcgcggccgtctcggcctcacccagcggtccgcgccggggagagggagcgcactcacctcagacgcgccccgggagccgctggaagagcccgggaaaggaggcggagccgcgcgaatgaatggagccggcggctgctcgctggcgacctccg

SEQ ID NO: 2223 - DNA, 43 bp, Homo sapiens
  chr5:74162219-74162262
  hyper
cagcgcctccagccttcgcttccgctccgcgcccgcgcccacc

SEQ ID NO: 2224 - DNA, 49 bp, Homo sapiens
  chr5:74348350-74348399
  hyper
ccacctcgcaggcagacgatcccggcccgctctgcggcacaaaaaactt

SEQ ID NO: 2225 - DNA, 82 bp, Homo sapiens
  chr5:74348509-74348591
  hyper
ccctggcgcagaagccgcggtagcagtcctttcaggcgccccgcgtccctgtcccgaagcccaggggcgggggctcgggcag

SEQ ID NO: 2226 - DNA, 34 bp, Homo sapiens
  chr5:74348705-74348739
  hyper
cgcgggccaggctgggcggcgctgggctctgaag

SEQ ID NO: 2227 - DNA, 53 bp, Homo sapiens
  chr5:74348751-74348804
  hyper
gggatgcccctgctcccggcaagggcgcgcccacgagccgcttcttggcactt

SEQ ID NO: 2228 - DNA, 75 bp, Homo sapiens
  chr5:74348819-74348894
  hyper
aaagcccggcgccggcgcgctcgcgactccagcctggcggctccactccgcccgcgagcccaggaagccggctcc

SEQ ID NO: 2229 - DNA, 104 bp, Homo sapiens
  chr5:74348906-74349010
  hyper
cgttatccaggacacgctccgcgcccgccgcccgctgccctttccccccgctggcctcggggaacttccccgcgtctggccgcaggcggcggctgccgcgggga

SEQ ID NO: 2230 - DNA, 97 bp, Homo sapiens
  chr5:74349197-74349294
  hyper
gcgccgaagttttccccggcgggaaaacgaaagtcgtgaggagcagagggtcggggcgtcccggcggagacgaggctgagaccgggttaacatctcc

SEQ ID NO: 2231 - DNA, 76 bp, Homo sapiens
  chr5:74349502-74349578
  hyper
gtgggagagcgctgagcggcccccgtgacgtgcggagaaagtaggagcgcctccgcgctcccgcagagggagctcc

SEQ ID NO: 2232 - DNA, 79 bp, Homo sapiens
  chr5:74349615-74349694
  hyper
caaagttctcaggcgcgcgcggtgatctcggctctccgccgctgcccggagcgtcatccacgttcggttccctcccaca

SEQ ID NO: 2233 - DNA, 187 bp, Homo sapiens
  chr5:74349726-74349913
  hyper
gtaacttgcccaaagtcgctcacaaggcagtgacgaagcaaactcacatccgcggctccttttttctccttgaacgccgggctctgcggaggctcaggccctgcaggaatcgcccaaccagacagaaggcagctcgctctcatgggtgagacgaggagtgtcccacgcagccgcgagaaatattatc

SEQ ID NO: 2234 - DNA, 31 bp, Homo sapiens
  chr5:75566956-75566987
  hyper
agaaataaaaattaaacgattccattttgtg

SEQ ID NO: 2235 - DNA, 39 bp, Homo sapiens
  chr5:76114546-76114585
  hyper
gaaaggcaagggagaccgacgacccgcttctctaggagt

SEQ ID NO: 2236 - DNA, 69 bp, Homo sapiens
  chr5:76114591-76114660
  hyper
agattaaaggtagttcgcggtatagcctaggcagggattaacccgtggtcccagcgctcctgctatttg

SEQ ID NO: 2237 - DNA, 390 bp, Homo sapiens
  chr5:76114667-76115057
  hyper
aagcagacacctcatgcgctcaaccccgcccgcaggcggctcccgcagtctaagggacctggcgcgagtccgggaagcggagggcgcagctgcgcagggaagggggccgggggcgggaccagggcgcgcgttccggtcccggggcgtggcctcccgcaggtgagtacgctgctccttcggtttccctgaaacctaacccgccctggggaggcgcgcagcagaggctccgattcggggcaggtgagaggctgactttctctcggtgcgtccagtggagctctgagtttcgaatcggcggcggcggattccccgcgcgcccggcgtcggggcttccaggaggatgcggagccccagcgcggcgtggctgctgggggccgccatcctgctagc

SEQ ID NO: 2238 - DNA, 31 bp, Homo sapiens
  chr5:76383183-76383214
  hyper
cagggttttaagatgacgcaatagctgagtg

SEQ ID NO: 2239 - DNA, 31 bp, Homo sapiens
  chr5:77148201-77148232
  hyper
gcaattatggcttaaacgggtgaatttggga

SEQ ID NO: 2240 - DNA, 41 bp, Homo sapiens
  chr5:77148408-77148449
  hyper
cgcctgaatgggcagcgcgccaacttcgctgctccaggagg

SEQ ID NO: 2241 - DNA, 95 bp, Homo sapiens
  chr5:77148497-77148592
  hyper
tggaaggctgtggtaacggtgggcggaggcgggaccatggcgcatgctccgcgacgtcccgggccgcgggcggaatcccccggctaacctccttg

SEQ ID NO: 2242 - DNA, 81 bp, Homo sapiens
  chr5:77148602-77148683
  hyper
tgggtgggatgggggtcggtgggggaagttgcatggggtgttatacccgcccggttacaggccgctgccctgtagcataac

SEQ ID NO: 2243 - DNA, 45 bp, Homo sapiens
  chr5:77591515-77591560
  hyper
ccagagtagctctctccgggtgctggcacccgagaaaacctcttt

SEQ ID NO: 2244 - DNA, 31 bp, Homo sapiens
  chr5:77944026-77944057
  hyper
gaggagacgctgttcccggcacaactttttt

SEQ ID NO: 2245 - DNA, 31 bp, Homo sapiens
  chr5:78807882-78807913
  hyper
cagttggctctgggtccgaaggaaggtgtag

SEQ ID NO: 2246 - DNA, 47 bp, Homo sapiens
  chr5:79551151-79551198
  hyper
ggctgagttttcccttcgcccagacctgcgcccggtagtttggaagt

SEQ ID NO: 2247 - DNA, 51 bp, Homo sapiens
  chr5:79551392-79551443
  hyper
tgctcggcgcaagaggcgacacgcccctggagcagtcgggatcctccgccc

SEQ ID NO: 2248 - DNA, 178 bp, Homo sapiens
  chr5:79784026-79784204
  hyper
ccgtaccctccctttgcgggctcccgcggtcttccttgctagggacctgggagcgcgccgcgcagaaccgggcggctgggcttggagcccgctctgcactcggggcgcgcccgcgatcgcctggcaaggaccttggtttgccgggtgggctctaagggacaggcgttaggggaggtcg

SEQ ID NO: 2249 - DNA, 41 bp, Homo sapiens
  chr5:87437222-87437263
  hyper
ttccccggcagctgctcgggcgggggcgaaggagggaaggg

SEQ ID NO: 2250 - DNA, 31 bp, Homo sapiens
  chr5:87955349-87955380
  hyper
aaaacagtaatcagaccgaaagtagttgagg

SEQ ID NO: 2251 - DNA, 31 bp, Homo sapiens
  chr5:87955398-87955429
  hyper
tgttaataatatccttcgaaatttacctgtg

SEQ ID NO: 2252 - DNA, 50 bp, Homo sapiens
  chr5:87955459-87955509
  hyper
tggaattgaaagtaaacggcctctgtaatgcaaatcgaccagcagcaaga

SEQ ID NO: 2253 - DNA, 31 bp, Homo sapiens
  chr5:87955516-87955547
  hyper
tacctttggagtcccacgacttcacctgagc

SEQ ID NO: 2254 - DNA, 31 bp, Homo sapiens
  chr5:87955899-87955930
  hyper
cattagctgcgcacagcgtgacttcccgcta

SEQ ID NO: 2255 - DNA, 31 bp, Homo sapiens
  chr5:87963057-87963088
  hyper
agtgagcagcagcatccgtcccttcacaggc

SEQ ID NO: 2256 - DNA, 44 bp, Homo sapiens
  chr5:87963148-87963192
  hyper
agatgtataaagccaacggcaatttccagcgcaggttaaggagg

SEQ ID NO: 2257 - DNA, 34 bp, Homo sapiens
  chr5:88178897-88178931
  hyper
ttcaaacatgcagccacggcgacccacacagaac

SEQ ID NO: 2258 - DNA, 189 bp, Homo sapiens
  chr5:88178940-88179129
  hyper
caatccaatagcagcccgaagatgtctgggtgtacgcgtgtgctcaagtgtctgtgactgcgagcagagcgagcagagagctggagacgatgtgtgcgtgtgtgcgcgcgcgcgaggggagcgcgcgcgagggggggggcgcggggccgcgcattcgcgcgcgccgaggccgctcggaagaggaggagg

SEQ ID NO: 2259 - DNA, 62 bp, Homo sapiens
  chr5:88179187-88179249
  hyper
tcagcggccggtcggattaaaagtaaccagactcgtccagaaaactgcgtccaggaaggaag

SEQ ID NO: 2260 - DNA, 67 bp, Homo sapiens
  chr5:88179362-88179429
  hyper
ggggtggtagggaagacggagcacgaatggttggggttctaagcagcacgtccgatgaaatgtcttt

SEQ ID NO: 2261 - DNA, 94 bp, Homo sapiens
  chr5:88180077-88180171
  hyper
tcccccttttggacacgcgttagccacttctctcttccaccggtcggtgcgctcctccgttactcacgcgtaaaaaccacggtccaggatgtct

SEQ ID NO: 2262 - DNA, 34 bp, Homo sapiens
  chr5:88185212-88185246
  hyper
ccccttttctcccggccgacggagctgaaggggc

SEQ ID NO: 2263 - DNA, 36 bp, Homo sapiens
  chr5:88185527-88185563
  hyper
ggggaatggaggagggcgcaacggctgtgggtggac

SEQ ID NO: 2264 - DNA, 31 bp, Homo sapiens
  chr5:92917347-92917378
  hyper
ttcaggattcaggaatcggggtctcggtctc

SEQ ID NO: 2265 - DNA, 46 bp, Homo sapiens
  chr5:94619387-94619433
  hyper
ctttgctaaaccagagcgagatgttttctttcgactgtttcatcta

SEQ ID NO: 2266 - DNA, 96 bp, Homo sapiens
  chr5:98107031-98107127
  hyper
gttctagctccctccccgatttttctttgtacaatataaagtcgtttgtaacttgcagctcacgggcttgaggagtggctgcggtataagcgacta

SEQ ID NO: 2267 - DNA, 43 bp, Homo sapiens
  chr5:98108683-98108726
  hyper
agctgccagcgaattccggcggcagttcgcgggtaccttccca

SEQ ID NO: 2268 - DNA, 82 bp, Homo sapiens
  chr5:98108759-98108841
  hyper
ttcagatttccaacaccgccccgagcttgctttaccagacaccctcaaacgactcggaacgcggttccgcagatgtgattgg

SEQ ID NO: 2269 - DNA, 49 bp, Homo sapiens
  chr5:98108843-98108892
  hyper
gaaaggggacctgccgcgcggcgctctgtaaaagcgcctgcttcctcca

SEQ ID NO: 2270 - DNA, 43 bp, Homo sapiens
  chr5:98109212-98109255
  hyper
gattggcaggctgagtcgggctgacgtgcggtcacaaccaatg

SEQ ID NO: 2271 - DNA, 34 bp, Homo sapiens
  chr5:98109257-98109291
  hyper
gaggaagggagggacacggcgggggattatggcg

SEQ ID NO: 2272 - DNA, 80 bp, Homo sapiens
  chr5:98109331-98109411
  hyper
cgggactgagattgatcgaccgcgggggctgccgcgcagagatatccgggccgccggtgggtggtcgctagggctgggcc

SEQ ID NO: 2273 - DNA, 83 bp, Homo sapiens
  chr5:98109412-98109495
  hyper
gcctcttggaggtccacgcccgccgagcccacgctggctggggccggggtgccggcgcgctcgggactcgtctcagcagtcgc

SEQ ID NO: 2274 - DNA, 59 bp, Homo sapiens
  chr5:98109601-98109660
  hyper
tgcgcgctgcttgctgcggcggtggtggcgccccatctgctacacgggcctgaagaagg

SEQ ID NO: 2275 - DNA, 31 bp, Homo sapiens
  chr5:98109926-98109957
  hyper
cgaggggagccagccccggggcctagggctt

SEQ ID NO: 2276 - DNA, 131 bp, Homo sapiens
  chr5:98110030-98110161
  hyper
tcccgagcccctgacacgcacctctgtcgggctccgggccacagtaacgcagccacccaccgggcggccgccgggcgcagagacgagccttctctccaccctccccgccttcggctcggaccgctgacaaa

SEQ ID NO: 2277 - DNA, 39 bp, Homo sapiens
  chr5:98110337-98110376
  hyper
ctggagttgggggtggcggcgaggcgaaggaagtacacc

SEQ ID NO: 2278 - DNA, 119 bp, Homo sapiens
  chr5:98110406-98110525
  hyper
acctgggagttaatctcgaagtaacgtcaacttttttgagcagggatttctttcgttttggcaaaagctgcgtttgttcagcgatcagcctcccgggaaaagctcgtgttttgtgacta

SEQ ID NO: 2279 - DNA, 31 bp, Homo sapiens
  chr5:100236254-100236285
  hyper
ggagcctagctgccctcgcattgttcctggc

SEQ ID NO: 2280 - DNA, 63 bp, Homo sapiens
  chr5:100236322-100236385
  hyper
accaaggcagtcaggacgctacagggcacgggtgtaagcgcgacgttcgcggccagccctctg

SEQ ID NO: 2281 - DNA, 31 bp, Homo sapiens
  chr5:100236388-100236419
  hyper
tgccccactgtaattgcgggttttgattaag

SEQ ID NO: 2282 - DNA, 31 bp, Homo sapiens
  chr5:100236420-100236451
  hyper
aggaggagccagttgccgactgagctttgaa

SEQ ID NO: 2283 - DNA, 112 bp, Homo sapiens
  chr5:100236551-100236663
  hyper
ctcattctttccccctcgccgccggcgctctggcagcaggggataaccccggtgcgcgcctctcttcctgtttggtttactcaagcgcctgccccaacgccttctcagtcaa

SEQ ID NO: 2284 - DNA, 122 bp, Homo sapiens
  chr5:100236681-100236803
  hyper
cagcttgaaaaggatgcgggcaaaagcccagcccgactagctcaaccgccgcgccagtgcccgcctcctcttccttaacgcctagggctgcgcccaccagccggcaacgtccaggaaagggc

SEQ ID NO: 2285 - DNA, 163 bp, Homo sapiens
  chr5:100236805-100236968
  hyper
caggagaaatgacacccgtgcaatgcggagtgtcccggctccgcttccccgcagggactcgaggtgcgctccttttcctggccacggtttagggaggctcggagatggacacctcggcagtatctggcgaccctcttctcactcgctccgcccactcctgctc

SEQ ID NO: 2286 - DNA, 53 bp, Homo sapiens
  chr5:100236982-100237035
  hyper
caagggcccgaaccctcggagtcctagtgagccttggccgctttgtctgggat

SEQ ID NO: 2287 - DNA, 99 bp, Homo sapiens
  chr5:100237040-100237139
  hyper
ttatcctcctagcccacggcccgggagggaacaaagagcctcgaccctcaagctctagcctctgcctctcatcggagccccatgcgcccattcatcacc

SEQ ID NO: 2288 - DNA, 31 bp, Homo sapiens
  chr5:100237177-100237208
  hyper
ctgcaagggatgcccacgcccctgcccaaag

SEQ ID NO: 2289 - DNA, 41 bp, Homo sapiens
  chr5:100238531-100238572
  hyper
aagctttgcatttacccgatgagttgcgtctcctggtgctc

SEQ ID NO: 2290 - DNA, 296 bp, Homo sapiens
  chr5:100238616-100238912
  hyper
gacttattgtgcagatcgtccacctcttcctaatggagcgcatcttgggtgcccgagaaagtcctggttgccccagctcccgcaccttctcttgatataaaggctccgttttggggagatagtcgcgggggtgaaatctgtaaaatgcgaggagagcttggagccgggatcccgggatcagatcactggggtcttctgtggccgagctccctctggtcctcgaacgctgcccagcgacctctcgccctgtttgcgccagctctgccagggtcgctccgcgccgcctccctggggct

SEQ ID NO: 2291 - DNA, 59 bp, Homo sapiens
  chr5:100238938-100238997
  hyper
tgtgcattggaggtggcggcagcttctgcagctgggttcgggggcgtcactggcccttc

SEQ ID NO: 2292 - DNA, 119 bp, Homo sapiens
  chr5:100239000-100239119
  hyper
cttgctaggagataaacgctgcgcaaagccaatcaccaggctgagggggcggaggctgcttggagagtaacgtccccggctctgcctgctctgtgccgggagaggaagctcacagtgct

SEQ ID NO: 2293 - DNA, 16 bp, Homo sapiens
  chr5:100239134-100239150
  hyper
cgcgcacatacacata

SEQ ID NO: 2294 - DNA, 37 bp, Homo sapiens
  chr5:100239170-100239207
  hyper
tacatatgcacacacacgtacacgcagaatcacacac

SEQ ID NO: 2295 - DNA, 82 bp, Homo sapiens
  chr5:100239251-100239333
  hyper
tccaagatagtctatccgcatctaggtgagagggcacctcgcctggggacagattacaaaagcgtcccgccagaggaatgct

SEQ ID NO: 2296 - DNA, 112 bp, Homo sapiens
  chr5:100239364-100239476
  hyper
agtaccttctttcaatcgcttttgctaaacacacaccctcacacgcaaaaacacgccctccaaggtggagtgaaacggggtgcgggggtggggacggcggtggaaggaagaa

SEQ ID NO: 2297 - DNA, 63 bp, Homo sapiens
  chr5:100239512-100239575
  hyper
acatgaacctgttagccgatgggcccactctgcatgggtggtggacgacgaccctggctcagg

SEQ ID NO: 2298 - DNA, 31 bp, Homo sapiens
  chr5:100239617-100239648
  hyper
tttatggatatttatgcgcctccctttcatt

SEQ ID NO: 2299 - DNA, 31 bp, Homo sapiens
  chr5:100239651-100239682
  hyper
atttggaaactcctcacgcagaagtcaagga

SEQ ID NO: 2300 - DNA, 31 bp, Homo sapiens
  chr5:100239693-100239724
  hyper
cacttaaacttcattgcggagaaacagagtt

SEQ ID NO: 2301 - DNA, 53 bp, Homo sapiens
  chr5:100239746-100239799
  hyper
ggacctctcttttaaacgcaagtacacccacacacattcggataccaaggaag

SEQ ID NO: 2302 - DNA, 31 bp, Homo sapiens
  chr5:100239902-100239933
  hyper
ccgtcccaccatttttcgtacttgtattggg

SEQ ID NO: 2303 - DNA, 31 bp, Homo sapiens
  chr5:100239948-100239979
  hyper
tcaagagttctgtgttcgattgttcactctg

SEQ ID NO: 2304 - DNA, 31 bp, Homo sapiens
  chr5:100239987-100240018
  hyper
tccaccatcctccagtcgttgccctcattgg

SEQ ID NO: 2305 - DNA, 67 bp, Homo sapiens
  chr5:100240031-100240098
  hyper
tactctgctagtaccacgccttggttccggtctttactgttggctggtaggtcgggaggcacctcta

SEQ ID NO: 2306 - DNA, 34 bp, Homo sapiens
  chr5:100240255-100240289
  hyper
ttccaatcttccctcccgccggaagtaagaaggg

SEQ ID NO: 2307 - DNA, 50 bp, Homo sapiens
  chr5:102090423-102090473
  hyper
gggtccttccttctctcgggaaacgttcttctggcgcgaagctgggcgga

SEQ ID NO: 2308 - DNA, 31 bp, Homo sapiens
  chr5:107006663-107006694
  hyper
ggcaggccggtcaccccgggagagggaggtg

SEQ ID NO: 2309 - DNA, 44 bp, Homo sapiens
  chr5:107006932-107006976
  hyper
gctgatagagggcttcgcgcttgtggtcccgggagtctgagaac

SEQ ID NO: 2310 - DNA, 31 bp, Homo sapiens
  chr5:107007962-107007993
  hyper
gacttgcgtggaaagccgacagcggcggcga

SEQ ID NO: 2311 - DNA, 50 bp, Homo sapiens
  chr5:107008015-107008065
  hyper
gagcgcgaggccgcacgcgtgaacgtggacgtgggcggggggatggggct

SEQ ID NO: 2312 - DNA, 55 bp, Homo sapiens
  chr5:107008368-107008423
  hyper
ctccacgagaaagaggcgttttcctaatctcccttccccacgcctcctaccccct

SEQ ID NO: 2313 - DNA, 74 bp, Homo sapiens
  chr5:108064126-108064200
  hyper
aggtggggcaggagcacggagaagtctcgaagaagtggaggaagcacgcactggctgccgcgggaaaagctcag

SEQ ID NO: 2314 - DNA, 31 bp, Homo sapiens
  chr5:108313516-108313547
  hyper
tcagacacttgtgaagcgactcctgtttctc

SEQ ID NO: 2315 - DNA, 63 bp, Homo sapiens
  chr5:110559714-110559777
  hyper
ggtctccctccagctccggtccccgcgggagggcgcgtgggatgatgcgcgggtccttgtgcc

SEQ ID NO: 2316 - DNA, 62 bp, Homo sapiens
  chr5:110559969-110560031
  hyper
ctccgggttccccctcgcgccctctcgcagaggctcgcccccttccccgcccaccgtccctg

SEQ ID NO: 2317 - DNA, 61 bp, Homo sapiens
  chr5:110560057-110560118
  hyper
gtgcgcgcgtgaaggacgccgcctctctctcgctcctgcgttcgcaggcggcggctggcgg

SEQ ID NO: 2318 - DNA, 248 bp, Homo sapiens
  chr5:110560138-110560386
  hyper
cggcggcggcggcggcggcggcttccggagtcccgctgcgaagatgctcaaagtcacggtgccctcctgctccgcctcgtcctgctcttcggtcaccgccagtgcggccccggggaccgcgagcctcgtcccggattactggatcgacggctccaacagggatgcgctgagcgatttcttcgaggtggagtcggagctgggacggtaaggcgcgggctccggctggggaagcccgcggcgtgcactgg

SEQ ID NO: 2319 - DNA, 62 bp, Homo sapiens
  chr5:110560512-110560574
  hyper
tcccaccccaccagagcgcctaggccggtgcagctgtaggatcagcccgactccctcccacc

SEQ ID NO: 2320 - DNA, 31 bp, Homo sapiens
  chr5:112629938-112629969
  hyper
agggctgtggggaggtcgaggggagggggat

SEQ ID NO: 2321 - DNA, 20 bp, Homo sapiens
  chr5:113562586-113562606
  hyper
gactccgtctcaaaaaaaaa

SEQ ID NO: 2322 - DNA, 31 bp, Homo sapiens
  chr5:114879309-114879340
  hyper
aacggatacacaaccacgaagagtatgttcc

SEQ ID NO: 2323 - DNA, 31 bp, Homo sapiens
  chr5:115911930-115911961
  hyper
agctgtcagcaggggccgctatccccacctt

SEQ ID NO: 2324 - DNA, 90 bp, Homo sapiens
  chr5:118604722-118604812
  hyper
tgagtgtgagtgggtgcgtttgaacaacttgtttaggtgggtgtgcgtacgagtgtgtgcaggagcgcacagcctcggaaactccgcgaa

SEQ ID NO: 2325 - DNA, 135 bp, Homo sapiens
  chr5:122371730-122371865
  hyper
gccagcgtggagaccacgcagcgggcgggcggctgcaagccctgggctccgagcgcctctcctgtgcgggtcccgcccccctccccgcattcctctcgttctgctcccgagcccaggccacgctgaaggaagtac

SEQ ID NO: 2326 - DNA, 49 bp, Homo sapiens
  chr5:122372131-122372180
  hyper
gtcccagtatccaaagcgcccccagggccccgcccgcaacaggggaagt

SEQ ID NO: 2327 - DNA, 31 bp, Homo sapiens
  chr5:122372774-122372805
  hyper
ccggtgtgattgctgccgccttgggagcagc

SEQ ID NO: 2328 - DNA, 31 bp, Homo sapiens
  chr5:124084142-124084173
  hyper
ttctatgcataaaactcgcacattcccctgc

SEQ ID NO: 2329 - DNA, 39 bp, Homo sapiens
  chr5:124084200-124084239
  hyper
agacacaccacgcaaccgtacttacggtctgtattggat

SEQ ID NO: 2330 - DNA, 31 bp, Homo sapiens
  chr5:124084838-124084869
  hyper
aatctcaaacaggctgcgaggagaggatgtc

SEQ ID NO: 2331 - DNA, 12 bp, Homo sapiens
  chr5:126339398-126339410
  hyper
gccagaggagta

SEQ ID NO: 2332 - DNA, 56 bp, Homo sapiens
  chr5:127537199-127537255
  hyper
cggcccgcggctcccccgtgtggcctgagtaggtagtgatgcgaataacatgcttt

SEQ ID NO: 2333 - DNA, 52 bp, Homo sapiens
  chr5:127537257-127537309
  hyper
gaagtcagaaggctggcgtctcttcctccggagctcacggaggagtctctct

SEQ ID NO: 2334 - DNA, 31 bp, Homo sapiens
  chr5:131133197-131133228
  hyper
cgtacccgtggggccgcggccaaggctggac

SEQ ID NO: 2335 - DNA, 81 bp, Homo sapiens
  chr5:131133234-131133315
  hyper
cccaggaccccaggaccgcccttagaaggctgcgccggcccgcgagaggtctgggatctggacagcgcgggggctggctca

SEQ ID NO: 2336 - DNA, 73 bp, Homo sapiens
  chr5:131133322-131133395
  hyper
tggtgaaggaaactgccgggacccctgccacagccatggctccccgcaaagacgacctcgagcaggcactgcg

SEQ ID NO: 2337 - DNA, 31 bp, Homo sapiens
  chr5:131563040-131563071
  hyper
ttgggagggtgcagaacgggcttagccaata

SEQ ID NO: 2338 - DNA, 312 bp, Homo sapiens
  chr5:131563078-131563390
  hyper
gcccctcagggccaggcggacgccgcgcccccgctcccaacagccggcagcccggggtcaggccgccacttcccgggagcctgacagggaagagcggccaagttcccagccccgcccgacagccgagggaactgcacgaagggcgccgctgacctcaccaccctgagctcgggaaggcttgcgggcggcggcacaagaacccagacgggtgcagaaacagggcggagggtgcagggtggcggcccggactgcgctgctggcggctagcggcgcgacccccggccccggatccggccccggcccctaactctc

SEQ ID NO: 2339 - DNA, 43 bp, Homo sapiens
  chr5:131563475-131563518
  hyper
cgctcacctggacactcgcagctcccggcgtttccagaacctc

SEQ ID NO: 2340 - DNA, 40 bp, Homo sapiens
  chr5:131563665-131563705
  hyper
ctccgccggggttcgccgtcctctgcgacccctgggaacg

SEQ ID NO: 2341 - DNA, 129 bp, Homo sapiens
  chr5:131563707-131563836
  hyper
caggctacccggcctcgcgggagccggagccggagccggagccggagctggccgcccgcgcccttcatgccgcccgcagcccaccgcacgtactccgcgcccgcctggctttggcgcccccacctgcgg

SEQ ID NO: 2342 - DNA, 45 bp, Homo sapiens
  chr5:132072697-132072742
  hyper
ctccgctgcctccctgcgcttgctccgaggcgcaaaggcctcacc

SEQ ID NO: 2343 - DNA, 81 bp, Homo sapiens
  chr5:132072753-132072834
  hyper
atccaaagagccccaccgtggccacccccagacgccccgctcagcaggaagggctgcgagccagagcgcatcctccagcac

SEQ ID NO: 2344 - DNA, 45 bp, Homo sapiens
  chr5:132072835-132072880
  hyper
gcgcctttttgataagcggcgcaggccccacgggatgcagcagcg

SEQ ID NO: 2345 - DNA, 80 bp, Homo sapiens
  chr5:135468431-135468511
  hyper
caagacacccctccctcggtcccgcagcggtcactccgcctctggcgcgcatgcgccgaccccagcgggcgtcctcccgg

SEQ ID NO: 2346 - DNA, 31 bp, Homo sapiens
  chr5:135468535-135468566
  hyper
ccgggtcctgggcgagcgggcgccgtgcgcg

SEQ ID NO: 2347 - DNA, 40 bp, Homo sapiens
  chr5:137801266-137801306
  hyper
agccgcggcgcgtccacgcccgcccgcgcccagggcgagt

SEQ ID NO: 2348 - DNA, 55 bp, Homo sapiens
  chr5:137801307-137801362
  hyper
ggggtcgccgcctgcacgcttctcagtgttccccgcgccccgcatgtaacccggc

SEQ ID NO: 2349 - DNA, 80 bp, Homo sapiens
  chr5:138088595-138088675
  hyper
cagaagactgtgactccgggacacctgtgacactcttgaggggagcgtgcccagtacccctggtcgcgtctctgggattc

SEQ ID NO: 2350 - DNA, 52 bp, Homo sapiens
  chr5:138089783-138089835
  hyper
gtaggtgggccacacccgtgtggacttttggcgtgaccgtccacttggactc

SEQ ID NO: 2351 - DNA, 31 bp, Homo sapiens
  chr5:138089858-138089889
  hyper
tttcttgtcggttggacgcacttagctttca

SEQ ID NO: 2352 - DNA, 31 bp, Homo sapiens
  chr5:138299453-138299484
  hyper
gcagcacccaggctcccggttttccgtgggg

SEQ ID NO: 2353 - DNA, 78 bp, Homo sapiens
  chr5:139017027-139017105
  hyper
cgcccctcccccgcaccgtccgcccgcgccgcgcggcgatcgatcgccattgattgtccctgacgagctgctccactt

SEQ ID NO: 2354 - DNA, 167 bp, Homo sapiens
  chr5:139017117-139017284
  hyper
caggaggggggatctccgccgccctggcggtgtcatttccacacactccctgggctgccgccagcgcgggcgcctcgaagagccggcctggatcgcccggagctcgggctggaccgcccacaccgcgcgaggaagcccccgatggcgtggcccgaccccagtctgcc

SEQ ID NO: 2355 - DNA, 31 bp, Homo sapiens
  chr5:139017454-139017485
  hyper
caggccaactttgccgcggcccaaacagatg

SEQ ID NO: 2356 - DNA, 31 bp, Homo sapiens
  chr5:139017554-139017585
  hyper
ggcacagacaccacctcgccccccaccctca

SEQ ID NO: 2357 - DNA, 31 bp, Homo sapiens
  chr5:139017711-139017742
  hyper
ccacccaggatgctaccgtctttctgagcac

SEQ ID NO: 2358 - DNA, 31 bp, Homo sapiens
  chr5:139039950-139039981
  hyper
tttcctggccaggatccggccagggcagatt

SEQ ID NO: 2359 - DNA, 31 bp, Homo sapiens
  chr5:139039984-139040015
  hyper
ggagcctggtattgcccggcctgggcaagga

SEQ ID NO: 2360 - DNA, 73 bp, Homo sapiens
  chr5:139089042-139089115
  hyper
ctgacagctgccgagccgagccgggccggatggaaaacccgggctgtgcagggcccggcggggcgctgagggg

SEQ ID NO: 2361 - DNA, 37 bp, Homo sapiens
  chr5:139175355-139175392
  hyper
ctcctcctccagctcacggctccgctccctccctcct

SEQ ID NO: 2362 - DNA, 31 bp, Homo sapiens
  chr5:139175996-139176027
  hyper
ccggcagccaccttcacgaggctgcagcttt

SEQ ID NO: 2363 - DNA, 31 bp, Homo sapiens
  chr5:139537078-139537109
  hyper
tcaactgactggagaacgacaatggccccat

SEQ ID NO: 2364 - DNA, 92 bp, Homo sapiens
  chr5:139725996-139726088
  hyper
ggagctcaggagattccgccgggcaccgtctgccgcccgcctctgcgtgcaagcctggccgggacccaggcgcagctcgctcttcttgagtg

SEQ ID NO: 2365 - DNA, 55 bp, Homo sapiens
  chr5:139726093-139726148
  hyper
tcttgctcactcagcccgcccgcgcggccgcccgaccccgcgcgcctaggtcagg

SEQ ID NO: 2366 - DNA, 31 bp, Homo sapiens
  chr5:140613723-140613754
  hyper
tcacaaaaatgcaactcggaaaataggcata

SEQ ID NO: 2367 - DNA, 15 bp, Homo sapiens
  chr5:140864511-140864526
  hyper
gcctattggctgagc

SEQ ID NO: 2368 - DNA, 103 bp, Homo sapiens
  chr5:140904507-140904610
  hyper
cctcatttgcttgacccgggtactggaaactgggcaaggtccattacgccacctgttgaccgtgtgcagccctcatcccacatgtcagcgggactccaccttc

SEQ ID NO: 2369 - DNA, 31 bp, Homo sapiens
  chr5:141255433-141255464
  hyper
acacccacctactcccgcgccccccaccccc

SEQ ID NO: 2370 - DNA, 78 bp, Homo sapiens
  chr5:141255468-141255546
  hyper
aacacagctagacctccggcttgtcataaaaactttctgggcggccccttccctggcagctcccgagggttgacccag

SEQ ID NO: 2371 - DNA, 61 bp, Homo sapiens
  chr5:141255565-141255626
  hyper
gcggcgtcttcctgcacgaagcgacccaagcagccccagtccgcaccgccttggtcagcgg

SEQ ID NO: 2372 - DNA, 78 bp, Homo sapiens
  chr5:141255705-141255783
  hyper
ggggtggcgggggggacggcggcagtttcttgggctctggcggccccacccccaccccggcagcgcccagcctccagg

SEQ ID NO: 2373 - DNA, 326 bp, Homo sapiens
  chr5:141255788-141256114
  hyper
aaggcaaggctagggcgcggcgtggtgagaacgcgcttcggctagtggggggagcccttgcgccccccgcacccaggccaccgcggggaatccctcctccccggcatctccggcctcggcctagggtcccccgcaagccggagccggcgcgagcggcgcagcgggcgccaggagggggcggggagggagccggcgccggaatcacaaagccgcgaacccggctaggcggggacattctcataaaaccgaccctctcgtggcgagcagagggggttttttgccctacgctcaatcctccaaggcctcagtgccgcccccagtctttc

SEQ ID NO: 2374 - DNA, 31 bp, Homo sapiens
  chr5:141256118-141256149
  hyper
cagaagaaatagtagccgaccactgttgggg

SEQ ID NO: 2375 - DNA, 102 bp, Homo sapiens
  chr5:141256184-141256286
  hyper
ctggggggaaggggtgcgagaccacctcgcctacaaattctgctcctatgcctgccgcgatctccgttctggctccagggcctgcccgcgcacacactggcc

SEQ ID NO: 2376 - DNA, 60 bp, Homo sapiens
  chr5:141256295-141256355
  hyper
gaccaggcggagggggcgctcaggtgtgagacgaacccaggtgtgcgggacccaccaagg

SEQ ID NO: 2377 - DNA, 75 bp, Homo sapiens
  chr5:141256530-141256605
  hyper
accagccggttcggcccgggagtgggggttggggaggcgccgactgggaagccggcaggccggcccagccttccc

SEQ ID NO: 2378 - DNA, 31 bp, Homo sapiens
  chr5:141257327-141257358
  hyper
cgcgagaagctggaagcggctgagtgagccg

SEQ ID NO: 2379 - DNA, 31 bp, Homo sapiens
  chr5:141257407-141257438
  hyper
tgcttgctccgtcctccgggagacccccacc

SEQ ID NO: 2380 - DNA, 45 bp, Homo sapiens
  chr5:141257587-141257632
  hyper
cgcggacctgggaggacggaatccctcagccgcatcccctgctat

SEQ ID NO: 2381 - DNA, 35 bp, Homo sapiens
  chr5:141257648-141257683
  hyper
ccacctcagccccctcgcgccgagctcgtgttggg

SEQ ID NO: 2382 - DNA, 43 bp, Homo sapiens
  chr5:141257815-141257858
  hyper
cccgctgtccatgagccgccgccggccccggcctgggctgcgg

SEQ ID NO: 2383 - DNA, 66 bp, Homo sapiens
  chr5:141257915-141257981
  hyper
tctgggcgcagcagcccggcggctttgcgtccgcgccgcgctcccgctccccgagtgtgtgaggcg

SEQ ID NO: 2384 - DNA, 34 bp, Homo sapiens
  chr5:141257996-141258030
  hyper
gcggcggcggcggcggcggcggagccagcagaga

SEQ ID NO: 2385 - DNA, 52 bp, Homo sapiens
  chr5:141703953-141704005
  hyper
ctggcaccgtgggcaccgagctgggaggtgggcgagccgcccagagcgaggg

SEQ ID NO: 2386 - DNA, 113 bp, Homo sapiens
  chr5:141704447-141704560
  hyper
gtgtaaatcctgaagccggggcaggttagccgccgctgtactcgcagacgccggtcggaggaaccggcaaggctccctgcgctccacagcgccagctccgcgctgtcagctca

SEQ ID NO: 2387 - DNA, 55 bp, Homo sapiens
  chr5:141704618-141704673
  hyper
atgggagggaagggagcgccagtgcgcacgcgtgccgttcgcgattctatgaatg

SEQ ID NO: 2388 - DNA, 39 bp, Homo sapiens
  chr5:141736298-141736337
  hyper
ggaaccctcgggaggacgcccctccgccccctgcccacc

SEQ ID NO: 2389 - DNA, 148 bp, Homo sapiens
  chr5:141736379-141736527
  hyper
tggtgcgccgccgccgcggccgtctcctcccgtcgggcggggtggggggtggtgagggacgcgatccaggtcgtggcctggcggcggctccggccacagcccccgcattccggccgcgcgcccccggaggtgacgccttgaggaagct

SEQ ID NO: 2390 - DNA, 41 bp, Homo sapiens
  chr5:141736531-141736572
  hyper
ttttttgggggggagccgcagggaaccgttgggagaggggc

SEQ ID NO: 2391 - DNA, 36 bp, Homo sapiens
  chr5:141736579-141736615
  hyper
gtgtccctttaagagccggagcgctgcctccgcctc

SEQ ID NO: 2392 - DNA, 31 bp, Homo sapiens
  chr5:142092798-142092829
  hyper
ctgatggcagaggaggcgacagcgcagctga

SEQ ID NO: 2393 - DNA, 49 bp, Homo sapiens
  chr5:142781826-142781875
  hyper
acaatatttcctaaaacgaaaacgctccctcaagcgacattatccccca

SEQ ID NO: 2394 - DNA, 73 bp, Homo sapiens
  chr5:142781965-142782038
  hyper
agtctgcaaccccaaacgtcaaactagcacttgtaaaaatcgcagcacaaaaccattacggttacagggggtc

SEQ ID NO: 2395 - DNA, 72 bp, Homo sapiens
  chr5:142782056-142782128
  hyper
cttagaaacctcaggcgcgaattaacaacaaacgctaaagagcaagcccttgcggggcgggggtggagaaga

SEQ ID NO: 2396 - DNA, 31 bp, Homo sapiens
  chr5:142782141-142782172
  hyper
ggttaaaagagaagtacgtccagacctgttg

SEQ ID NO: 2397 - DNA, 212 bp, Homo sapiens
  chr5:142782221-142782433
  hyper
cgcagtctccaagttgcgggctgtcagccccccgcgtgtgcaccctcacgcgccccgcacgccctcctcaagccaggcgccgccggggcctccccggagcccgggctcgcgctcgggcgcgccggggtggcgtgcaaatattcgggcgagtaaaattcagacgcggcttagcgttcaccacgaaaacgggtgtcgggcgacccccttggagg

SEQ ID NO: 2398 - DNA, 31 bp, Homo sapiens
  chr5:142784013-142784044
  hyper
gccgccgccgcgctctcgcactgggagagaa

SEQ ID NO: 2399 - DNA, 167 bp, Homo sapiens
  chr5:142784568-142784735
  hyper
caaggggaagggaactcgtggtccgtcctgagaaaggagagggccgtggggcgaggggtgcccgtgcgggaagcccccgccccagctcccttccccagctcgccgcgtcgggaaggcttggacgatgccgggaccgagcctcctaccttgtgcggcacagattatga

SEQ ID NO: 2400 - DNA, 331 bp, Homo sapiens
  chr5:142784780-142785111
  hyper
ggggaggtaacttttgcgcccccacaggtgacatcgcttgccagctcctgacacgggcgggggctgccgcagctccacctaatcctgctcgggcgctcggccacagccactctctcacctcccgccgcgctcagactgacggcggctccccctgctctgacatcttgaagacgattggggaagcgcgtcccggaagccgcccgccgccatcttggtagggtacagtgtcgccagcccgtccccgcggccaccatcttggcaaaggttcgcgatcgcgggtagcctaagccgtccttccttggttctcaagggtaaacggttccctgtgcat

SEQ ID NO: 2401 - DNA, 100 bp, Homo sapiens
  chr5:142785142-142785242
  hyper
cagcaagcctcttgtccggagacgatctacgggggccgcctccagaggattctggagccgccatcttggcaaaggaagagatactcgccacctcggaaaa

SEQ ID NO: 2402 - DNA, 7 bp, Homo sapiens
  chr5:145208532-145208539
  hyper
tgggact

SEQ ID NO: 2403 - DNA, 31 bp, Homo sapiens
  chr5:145208545-145208576
  hyper
gtgtgccaccatgccccggctaattttgggg

SEQ ID NO: 2404 - DNA, 144 bp, Homo sapiens
  chr5:145214534-145214678
  hyper
aacgtgatgccaagcacggccccttttcccgctccctgtaaagggagtcttcgaggaaatccctctcgacccacacatccctgaagcaaagcccgcagctggaaagagacactggcggtgccagcttccgcgtggatgaaggag

SEQ ID NO: 2405 - DNA, 102 bp, Homo sapiens
  chr5:145214681-145214783
  hyper
agagaggggcaagcagcggaggcagcgcgggatacggaaggtggaagcggggcggtacctttcggagaaagctggcgaccacctgctcgaaggggtacttgt

SEQ ID NO: 2406 - DNA, 104 bp, Homo sapiens
  chr5:145214862-145214966
  hyper
gagctgcccagggctccgcagaggcccggaggcgcccacactcggacagccacatgggcgtggcctttttcctccgcttttcaaactttcgaaactttattggc

SEQ ID NO: 2407 - DNA, 31 bp, Homo sapiens
  chr5:145215369-145215400
  hyper
ctcgggaataagaaccgcgttttagtgcacc

SEQ ID NO: 2408 - DNA, 31 bp, Homo sapiens
  chr5:148724796-148724827
  hyper
tcaagtaagctccatgcgggcacagctatga

SEQ ID NO: 2409 - DNA, 31 bp, Homo sapiens
  chr5:148724872-148724903
  hyper
gttactactaggacctcgcctacccgcggaa

SEQ ID NO: 2410 - DNA, 311 bp, Homo sapiens
  chr5:151150429-151150740
  hyper
ccgccagtgcctgaaacgccaggaggaggggacgagttgccttttaaaggcgtagcgacgagaataagcccccacccgcggcaattcgaggctgaacaatagtggtgcagctcgggacgtggtgcgagggcccacactccactggagcacgcgcggaccaccgtgcctcagctgccacaaagggagcctcgccacacgcccgcggccgcctcgcagcgcccgccaagaagcgcctggcggaagggcgcactctcaggccttccaccggcgaccttccggcgggagcctgcgggcggcgcaggaacgaccct

SEQ ID NO: 2411 - DNA, 84 bp, Homo sapiens
  chr5:152871129-152871213
  hyper
gctgtctgccatgctgcgctggtggtctccactcccccgatcctggaacttcctcgcctgccttttctccgttccttccttgcc

SEQ ID NO: 2412 - DNA, 31 bp, Homo sapiens
  chr5:156887145-156887176
  hyper
ccgggtgactcctccccggggactctcccac

SEQ ID NO: 2413 - DNA, 46 bp, Homo sapiens
  chr5:157001812-157001858
  hyper
tcttagctggaaacatcgagtcagaccccttcgcttcacagaaggg

SEQ ID NO: 2414 - DNA, 39 bp, Homo sapiens
  chr5:157002028-157002067
  hyper
agggctcctgccagctcggggatccgaagtgtgtggctg

SEQ ID NO: 2415 - DNA, 31 bp, Homo sapiens
  chr5:157002098-157002129
  hyper
gctaccacagtctgccgcgggcattttatgt

SEQ ID NO: 2416 - DNA, 220 bp, Homo sapiens
  chr5:157002342-157002562
  hyper
cagaggaaggagaaggcgagaagggaaggctagccagtgagcggaccggctgttttctggctgcgccgggtttccccgacctctgccacctcccagggcgcagaacgtgggaacaaagcccgggctcccaggctggggacggcgggggcgcaggccccgcggagttgcgggaggcgcaggggtcgcggtcccagcgctccggacccgcaaggctactccc

SEQ ID NO: 2417 - DNA, 147 bp, Homo sapiens
  chr5:157002646-157002793
  hyper
ggggctgcagggcaaacgccagcaagcagagccgggcggcgcctgcgccccctggcatggtggcggcggcccttagcgctcggcgctcacacgccctcagccatacctgcccactgcccggcggtggaggcgcgtctggaacccccc

SEQ ID NO: 2418 - DNA, 31 bp, Homo sapiens
  chr5:157002977-157003008
  hyper
cggggaagggagaatccgagccccccaggag

SEQ ID NO: 2419 - DNA, 55 bp, Homo sapiens
  chr5:157003010-157003065
  hyper
gggatttgtggtggacgcggcctgtagagggtcggggactcgggcttctaggagt

SEQ ID NO: 2420 - DNA, 38 bp, Homo sapiens
  chr5:157003066-157003104
  hyper
aaactggacccctctccgcacagcggcccgtttactgt

SEQ ID NO: 2421 - DNA, 31 bp, Homo sapiens
  chr5:158478417-158478448
  hyper
ccctcccccccgctcccgcagccccccaccc

SEQ ID NO: 2422 - DNA, 116 bp, Homo sapiens
  chr5:158526149-158526265
  hyper
acagctccaggtcctccggccgcaggcgacgaaggcagagcggctggagagcgcggagccccggcggagagcggagcgcagcggctgcggactcaccccgccgcccggccccgcgg

SEQ ID NO: 2423 - DNA, 63 bp, Homo sapiens
  chr5:158526309-158526372
  hyper
cgctcgcggctcacctcggccgcggtccccgcgcagtacccacctctgcgccgccgtgttggc

SEQ ID NO: 2424 - DNA, 89 bp, Homo sapiens
  chr5:158527742-158527831
  hyper
tcccagggctgatgccgcgtcctgctccgccgttctgggacgtcggggacaaaagtggaggagacgggagagcccgggcagaaaaagca

SEQ ID NO: 2425 - DNA, 76 bp, Homo sapiens
  chr5:158533564-158533640
  hyper
agggcccaagggcaggcgtgcagaccgctacgactttggctttagggagacgccttcggggcgcagggcccgcccg

SEQ ID NO: 2426 - DNA, 31 bp, Homo sapiens
  chr5:159228213-159228244
  hyper
ttttgcctgacagggacgatgtcattaccgc

SEQ ID NO: 2427 - DNA, 35 bp, Homo sapiens
  chr5:159546856-159546891
  hyper
ccacttctttcaaaggcggccgaggggaggagtaa

SEQ ID NO: 2428 - DNA, 52 bp, Homo sapiens
  chr5:159826415-159826467
  hyper
ttctttctagccactgcgtatgcaagatcatgataggcgcaggtgtctgggg

SEQ ID NO: 2429 - DNA, 56 bp, Homo sapiens
  chr5:159826533-159826589
  hyper
ttggtggctgggcagacgctccaggggcaaacgcctgggatcgtggctttgtcact

SEQ ID NO: 2430 - DNA, 31 bp, Homo sapiens
  chr5:162931521-162931552
  hyper
aaaaaggtttaggagtcggggaaaggcccta

SEQ ID NO: 2431 - DNA, 44 bp, Homo sapiens
  chr5:162931557-162931601
  hyper
atccagacagtggtcacgtttgtggacgacgtttagagcttgct

SEQ ID NO: 2432 - DNA, 56 bp, Homo sapiens
  chr5:162931616-162931672
  hyper
gaacccttggactgttcggtgcaaagttggcaaatcctacacggcctgtgccaggg

SEQ ID NO: 2433 - DNA, 31 bp, Homo sapiens
  chr5:162931780-162931811
  hyper
ttaaaaggtggtagaacgcccagccttacac

SEQ ID NO: 2434 - DNA, 149 bp, Homo sapiens
  chr5:167718507-167718656
  hyper
cccctggcaggggcagcgtaagggtggccggcggctgggactgtcccacgagggggcgcgtctcgggccctaggacccgccctcgaggcgctgcgcgcggggaggggacccgggaacccaggcgcccggcgctccgcctcccgtttccg

SEQ ID NO: 2435 - DNA, 66 bp, Homo sapiens
  chr5:167718665-167718731
  hyper
ggttacctgcaccgcccgagccgcacctggcggaggcagaagtcacaaacccggcgagctcagagc

SEQ ID NO: 2436 - DNA, 31 bp, Homo sapiens
  chr5:167718951-167718982
  hyper
gcgggcggcgccgggtcggggctgcagggcc

SEQ ID NO: 2437 - DNA, 72 bp, Homo sapiens
  chr5:167719031-167719103
  hyper
tgcgggcgccaccccccggatcatggtgcctcggcggccgcccgggctaagagcggccggctggagccgctg

SEQ ID NO: 2438 - DNA, 35 bp, Homo sapiens
  chr5:167719147-167719182
  hyper
gcttgggaagatgccccggccggagctgcccctgc

SEQ ID NO: 2439 - DNA, 31 bp, Homo sapiens
  chr5:167719298-167719329
  hyper
cgtgcccccacacccccgcctgggcccccac

SEQ ID NO: 2440 - DNA, 72 bp, Homo sapiens
  chr5:169063980-169064052
  hyper
gttcagtccctaggcacggcaatcaggaaactctctgcacttgcggtggtggtctggcgagccccaggtggg

SEQ ID NO: 2441 - DNA, 31 bp, Homo sapiens
  chr5:169064054-169064085
  hyper
ctggcctctgctccctcgcctggggaggaga

SEQ ID NO: 2442 - DNA, 65 bp, Homo sapiens
  chr5:169064096-169064161
  hyper
tggtccccaagttttgcgtgaagtggggtggggtggcgtgtcttagcctacggggcaccagcctt

SEQ ID NO: 2443 - DNA, 76 bp, Homo sapiens
  chr5:169064164-169064240
  hyper
gtgtgcccctgcccaacgggagggaggagggagcggggagccccggcgagggaggagagggcgggccctgagagga

SEQ ID NO: 2444 - DNA, 460 bp, Homo sapiens
  chr5:169064254-169064714
  hyper
aggaagtggggccctgcggcgcccagccaccccctgacggcttccccacgggaggacgcgaggccccggcccagccatggccccctggcgcaaagctgacaaggagcggcacggcgtgggtaggtgcgggccccagggcgcggcagggagcgggacaggtggcgggagagccgcgagcaggaggatgctgcggggccggcggcgcggggtgggcagggcgcgctgcctgcaggtcagagggcgcagcctgcggcggggcctcggggcgggaaagccgaggctcggggagaggacggcgggaccccaccccgcaggctaagcacagccctcgccctctcgcctgctgagggaaccttagacatttccgagatagggtcaagacctgcgcttgacaactcagttcttcgcgccaaactcggcgtccccaggagtgccccagctcgccgcgtgggagacttgg

SEQ ID NO: 2445 - DNA, 31 bp, Homo sapiens
  chr5:169064774-169064805
  hyper
tccaccccctccaaagcgacacccatttgcc

SEQ ID NO: 2446 - DNA, 31 bp, Homo sapiens
  chr5:170745323-170745354
  hyper
gtgattatccagcatgcgaagctgccttgca

SEQ ID NO: 2447 - DNA, 31 bp, Homo sapiens
  chr5:171533959-171533990
  hyper
actgtcttccttaggacgctcttccacagaa

SEQ ID NO: 2448 - DNA, 31 bp, Homo sapiens
  chr5:172043001-172043032
  hyper
aagaaattatccaaaacgaaacacaaagata

SEQ ID NO: 2449 - DNA, 31 bp, Homo sapiens
  chr5:172068482-172068513
  hyper
tctcctccgggggacccgctgggtgactctg

SEQ ID NO: 2450 - DNA, 75 bp, Homo sapiens
  chr5:172197240-172197315
  hyper
tgagccccatgggggtcgactgtttgctgcacagctccgggcaggaagccgaaaacgcttcgtatcctcctggga

SEQ ID NO: 2451 - DNA, 31 bp, Homo sapiens
  chr5:172359606-172359637
  hyper
caggcggctgcaccgacgcactttcttctga

SEQ ID NO: 2452 - DNA, 65 bp, Homo sapiens
  chr5:172385727-172385792
  hyper
ggtcggcgaacgaaacgcggagctcgggagcgacccggcggggccaggcacgggcagaagggcca

SEQ ID NO: 2453 - DNA, 50 bp, Homo sapiens
  chr5:172385794-172385844
  hyper
agggccacaggtgggcgcggagcggccggagtgggcggggactggatgag

SEQ ID NO: 2454 - DNA, 72 bp, Homo sapiens
  chr5:172385853-172385925
  hyper
gtctaggagagaggggcggggcggcggccacaaacccgcaggcacgccgccggccgccgtttagtcccagag

SEQ ID NO: 2455 - DNA, 45 bp, Homo sapiens
  chr5:172386282-172386327
  hyper
ttgtactcactggcatcgccctcccggggccgccaggaatgaggc

SEQ ID NO: 2456 - DNA, 51 bp, Homo sapiens
  chr5:172386395-172386446
  hyper
gtctttctgcgcttgcgcggcacggaaactcacttccggccctgcgcactc

SEQ ID NO: 2457 - DNA, 31 bp, Homo sapiens
  chr5:172721108-172721139
  hyper
catggccgccaggtggcgatgtggaatagga

SEQ ID NO: 2458 - DNA, 37 bp, Homo sapiens
  chr5:175792655-175792692
  hyper
ctacttcggccgcggccgagagcggcgctgggaccgg

SEQ ID NO: 2459 - DNA, 31 bp, Homo sapiens
  chr5:176008080-176008111
  hyper
ggaacggggctgggcacgtaggtccacagtg

SEQ ID NO: 2460 - DNA, 45 bp, Homo sapiens
  chr5:176074861-176074906
  hyper
ggtagctacagaggcccggattgctgggggcgggtcctagcgaca

SEQ ID NO: 2461 - DNA, 31 bp, Homo sapiens
  chr5:176813625-176813656
  hyper
ggtggcaaatggggagcgtgaccccagtaag

SEQ ID NO: 2462 - DNA, 31 bp, Homo sapiens
  chr5:177804050-177804081
  hyper
gacaaatgcgatgccccgcagcctgtttcat

SEQ ID NO: 2463 - DNA, 31 bp, Homo sapiens
  chr5:178287035-178287066
  hyper
cagacgtcggaggagccgggtcacgaggctg

SEQ ID NO: 2464 - DNA, 152 bp, Homo sapiens
  chr5:178287096-178287248
  hyper
ggcgcggcccgggaacgcgggatcctggggaggtgagcggcatggctggctgtgccgggaggaggcggcgcctggcgccagggcgacctgaggccgcggggctccgagggcctctgtgggcgcgggggggcacccccgcgtctgtcaccggc

SEQ ID NO: 2465 - DNA, 31 bp, Homo sapiens
  chr5:178287336-178287367
  hyper
tgaacgcggggccaggcgtttcctcccgggc

SEQ ID NO: 2466 - DNA, 199 bp, Homo sapiens
  chr5:178287401-178287600
  hyper
cggggcgccgggaccccgagcgcagggcagaggcagccgggcccggtttctgagtcagtccccaggacggccactcctcctgcctcgggacacccagcgctttcctcttcaaagccgttttccgtggagtcgggagacgattcgttggcgggagagagaggaaccggctgggaaaggcttgaggcggagggaagtcgtc

SEQ ID NO: 2467 - DNA, 31 bp, Homo sapiens
  chr5:178423618-178423649
  hyper
cctgagcctgacattgcgaaggactgcataa

SEQ ID NO: 2468 - DNA, 31 bp, Homo sapiens
  chr5:178423673-178423704
  hyper
ccttccctgttcaggacgagcctgacagctc

SEQ ID NO: 2469 - DNA, 31 bp, Homo sapiens
  chr5:178423764-178423795
  hyper
acagaccatcaggaagcgggggcagcagctg

SEQ ID NO: 2470 - DNA, 34 bp, Homo sapiens
  chr5:178423799-178423833
  hyper
actggcagggggtcctcgccgtgtaggagggagg

SEQ ID NO: 2471 - DNA, 55 bp, Homo sapiens
  chr5:179234472-179234527
  hyper
gtgaccagcccagaaccgtaccggcttcccggggcaggggcggcccgagagcgcc

SEQ ID NO: 2472 - DNA, 95 bp, Homo sapiens
  chr5:179246494-179246589
  hyper
ctcaccctgctcagaccgggccatagccgggggctggggcaggaaagccggccctcggcgggggccacgtggctctcaggcgcctgggctgctga

SEQ ID NO: 2473 - DNA, 50 bp, Homo sapiens
  chr5:180257864-180257914
  hyper
aaggttagagggaaggcgcagggagggagagacggcgggtgggggttgaa

SEQ ID NO: 2474 - DNA, 31 bp, Homo sapiens
  chr5:180258943-180258974
  hyper
caggctctgctccctgcgttcctctctcctt

SEQ ID NO: 2475 - DNA, 38 bp, Homo sapiens
  chr5:180480351-180480389
  hyper
ggccggtgctgaaccccggggccgcggaggcgcctccc

SEQ ID NO: 2476 - DNA, 42 bp, Homo sapiens
  chr5:180673931-180673973
  hyper
ggctgtgccctgtcctcgcccagctcccggcataggcatgcg

SEQ ID NO: 2477 - DNA, 83 bp, Homo sapiens
  chr5:180674032-180674115
  hyper
gtcagcaaagggagcccggccctttctagcggggggacgtcctgcagccgctggaggaggctgagtcacgcttttcccaccag

SEQ ID NO: 2478 - DNA, 47 bp, Homo sapiens
  chr5:180674116-180674163
  hyper
agtctacctgtgcctgcgcccgccggacctgccggcctcttccttct

SEQ ID NO: 2479 - DNA, 31 bp, Homo sapiens
  chr5:180674175-180674206
  hyper
ctcttctccagcctcacggaggtgggaagct

SEQ ID NO: 2480 - DNA, 44 bp, Homo sapiens
  chr5:180674226-180674270
  hyper
cttttggggaagaccccgaggctggcccacgccctgctggcagg

SEQ ID NO: 2481 - DNA, 31 bp, Homo sapiens
  chr6:391097-391128
  hyper
gtaagcatgtcagacacgcagagacagtatt

SEQ ID NO: 2482 - DNA, 94 bp, Homo sapiens
  chr6:391172-391266
  hyper
ttctttttagtgagtgcgatgttctctaaacaccgcggagaggcagggttcccggtgatggccttgccgagggtgctcccgcaacctccacctc

SEQ ID NO: 2483 - DNA, 120 bp, Homo sapiens
  chr6:391273-391393
  hyper
ctttggaccattcctccgtcttccgttacacgctctgcaaagcgaagtccccttcgcaccagattcccgctactacacgccccccatttcccgccctggccacatcgctgcagtttagtg

SEQ ID NO: 2484 - DNA, 242 bp, Homo sapiens
  chr6:391402-391644
  hyper
cctcctgaggtcctggcgcaaaggcgagattcgcatttcgcacctcgcccttcgcgggaaacggccccagtgacagtccccgaagcggcgcgcgcccggctggaggtgcgctctccgggcgcggcgcgcggagggtcgccaagggcgcgggaaccccaccccggccgcggcagcccccagccttcacgccggccctgaggctcgcccgcccggccggccccggctctcggcttgcaaagtcc

SEQ ID NO: 2485 - DNA, 72 bp, Homo sapiens
  chr6:391647-391719
  hyper
tccccagtccaacccccggcccccacaggcctcggcgccccgccccgccccaggccccgccccagagagttc

SEQ ID NO: 2486 - DNA, 112 bp, Homo sapiens
  chr6:391726-391838
  hyper
ttcctctttcccacctcgcactctcagtttcaccgctcgatcttgggacccaccgctgccctcagctccgagtccagggcgaggtaagggctggagtcgggcaggaggaggg

SEQ ID NO: 2487 - DNA, 51 bp, Homo sapiens
  chr6:391848-391899
  hyper
gataccagagaggacccggagcgcgaaccagaggttcgacctccagggcag

SEQ ID NO: 2488 - DNA, 24 bp, Homo sapiens
  chr6:392409-392433
  hyper
gctctcccgggcctgctccggggt

SEQ ID NO: 2489 - DNA, 371 bp, Homo sapiens
  chr6:392587-392958
  hyper
cggagggtggaggaacccggggctgcgcccctggaacgcccggccgcaggcgaggtcctccgcgcgtggaggccgccaggggagtggaaactgacagagtcgcggggaaggggcgagaagcgggttgggagtgagcgaaggcaagcgagagctgcgagtgagtgcggaaggagggccaggaggggtggcggctgggtggggagagagggtgcaagacgagcggcgcgtgtcgggagcctttgggctgcgggtgcgttacaggagagcaggcgggtaggagccttcgcgggggccgagctcggaaggcggacggctgtgcccgcccaggggatgcgcccgggccggccgcgaaggtgccttcttccgggggc

SEQ ID NO: 2490 - DNA, 348 bp, Homo sapiens
  chr6:393124-393472
  hyper
gggcgcgggcgcggacggcacgcggggcatgaacctggagggcggcggccgaggcggagagttcggcatgagcgcggtgagctgcggcaacgggaagctccgccagtggctgatcgaccagatcgacagcggcaagtaccccgggctggtgtgggagaacgaggagaagagcatcttccgcatcccctggaagcacgcgggcaagcaggactacaaccgcgaggaggacgccgcgctcttcaaggtctccggcctcgggagccggcgggggcgcgccggggagggcccagagacagagcccggggtccccggcgccgcctccgaggcgagcccaggggaccgcgcggg

SEQ ID NO: 2491 - DNA, 55 bp, Homo sapiens
  chr6:710878-710933
  hyper
gagggctgggaggggacgcaggcacagggtgagggtggcccgtctccagggagaa

SEQ ID NO: 2492 - DNA, 156 bp, Homo sapiens
  chr6:711029-711185
  hyper
cggcctggtgcagggacgctcacttccagtggcatttcccgtcttacacgatgagcttcatccacgttctccataaccccctccccgccacgggaagcgtcagccacctggaacagccctattctgctcggttgtaaaaagcgtcaggcgcttttg

SEQ ID NO: 2493 - DNA, 66 bp, Homo sapiens
  chr6:711244-711310
  hyper
acacgccctagcccaccggggaagccactggccacgagggagcgaggcgcacgggtgtcttccctc

SEQ ID NO: 2494 - DNA, 73 bp, Homo sapiens
  chr6:1312177-1312250
  hyper
gcctccgcctggtgcgcgcccgttggggagctggggaactggggagccgccaccacctcggccacctcgttcc

SEQ ID NO: 2495 - DNA, 20 bp, Homo sapiens
  chr6:1312298-1312318
  hyper
cagggttatattgggccggc

SEQ ID NO: 2496 - DNA, 31 bp, Homo sapiens
  chr6:1314051-1314082
  hyper
cctgtactgccccctgcggctgcccgcagcc

SEQ ID NO: 2497 - DNA, 31 bp, Homo sapiens
  chr6:1317074-1317105
  hyper
gcgcgggaggagggttcggggctcactgtgc

SEQ ID NO: 2498 - DNA, 53 bp, Homo sapiens
  chr6:1317109-1317162
  hyper
gcccccaggcctggccgcgcccaagtggccccccgcgccgagggcagggctcg

SEQ ID NO: 2499 - DNA, 46 bp, Homo sapiens
  chr6:1439137-1439183
  hyper
caaacttcccactggccgggccccttatccccgtgtgccaggctcc

SEQ ID NO: 2500 - DNA, 31 bp, Homo sapiens
  chr6:1439254-1439285
  hyper
gccctctggtgtgcagcgtctgcctgatccc

SEQ ID NO: 2501 - DNA, 45 bp, Homo sapiens
  chr6:1439294-1439339
  hyper
ccacctttacctttcccgccacatgtaccccgtcctcttattcca

SEQ ID NO: 2502 - DNA, 31 bp, Homo sapiens
  chr6:2999296-2999327
  hyper
accattttcctttaaacgaactttttctgtg

SEQ ID NO: 2503 - DNA, 58 bp, Homo sapiens
  chr6:3162904-3162962
  hyper
tcctctcccctaatcccgaggctggcgctgcagagtgagcgagcgcaggatcgctaag

SEQ ID NO: 2504 - DNA, 56 bp, Homo sapiens
  chr6:3456149-3456205
  hyper
acgttctggacgaggccggcgcggatgccgtagtcccatgcgcggcagtcacagtt

SEQ ID NO: 2505 - DNA, 94 bp, Homo sapiens
  chr6:3456210-3456304
  hyper
cgttgtcccccttgtccggaggggatggcaggggtggtgtgtcgcctccgtccgcgccgctgctgttgctccggttgcccgcagcctcccaggg

SEQ ID NO: 2506 - DNA, 36 bp, Homo sapiens
  chr6:3456338-3456374
  hyper
cagttgcccatgtccccgccccggcctgtggtggtg

SEQ ID NO: 2507 - DNA, 206 bp, Homo sapiens
  chr6:3456446-3456652
  hyper
gagaactggctgaagccgatgaacagcgccgggatccaggtgagcagcacgagggtcttctgatagcccccgcccaggcccccgaggaagggcagcaccgacccgtcatagtccagcaacaagaggctcggggccgcagccgcggagcagcagctcgggtgcgggccgcctccaggatgcagtgggggcagcggctggatctccgc

SEQ ID NO: 2508 - DNA, 277 bp, Homo sapiens
  chr6:3456740-3457017
  hyper
ggctgccgcccaggcccgccgcccgccgcctcgcgccgccggtctatggccatggcccgggcccgcggctcccgcagaggcgcatagagcgcggcggaggctccgcgggcgccccgggcacagcgcgccgggccaggcgcctgcagccgctgccgccgaggagggcccgcggctcgagagagagcgctcggcggctccgggtgcgtcaggccgcccccatgtcacccgccggaccccgcgccccgggcgctgcggccccgctcgggcgccgggcaga

SEQ ID NO: 2509 - DNA, 188 bp, Homo sapiens
  chr6:3457076-3457264
  hyper
cgccggctgccgagcccgccgctctccgctgctccgcgccggacgcggcaggaggaggagccggcgccgcgcccggcccgcgcccttgccggcggttcagggccctgcgggcggcggtgcgggcaaaggctgctgctcccggggtggccgcgctgtatttctccgacttcgggcgcctcccggaagcc

SEQ ID NO: 2510 - DNA, 67 bp, Homo sapiens
  chr6:3457536-3457603
  hyper
tcccctgcccgttgcccgtttcgcgccgggcggggcgggggaggaggagacgcgcgtagcaggggtc

SEQ ID NO: 2511 - DNA, 31 bp, Homo sapiens
  chr6:3457811-3457842
  hyper
cgggaacaaccctctgcgctttttccaggag

SEQ ID NO: 2512 - DNA, 77 bp, Homo sapiens
  chr6:4776193-4776270
  hyper
gttccctgccccatctcgggtccgtcgctgcccgtcctggtgtgcacaaccgcgctgcgcctcgaacctcgaggtcc

SEQ ID NO: 2513 - DNA, 232 bp, Homo sapiens
  chr6:7541474-7541706
  hyper
ccagtaagtctccaatcgagaggcccctccattccagctatttccgcccggggaccgaggaaatcctcaaaagccgggccacgcattcccagcccgagaggccccagcgcagagcgcagcagcccccgcgagcgcaggtcctccccgcggtggcttcgcccagggcgcttgggtctcggggaccccgcccccgccccgcccggtgttactcaggcctcggtggcgcagggcg

SEQ ID NO: 2514 - DNA, 90 bp, Homo sapiens
  chr6:7541771-7541861
  hyper
ggcggggaaggcgcggcggccgcaccccaccctgggaagaaaccggccaggtgtggcctaggcgcccagtgccagcggggaggagactcg

SEQ ID NO: 2515 - DNA, 463 bp, Homo sapiens
  chr6:7541958-7542421
  hyper
gcccgtcgccgtctccgcgctcgcagcggcctcgggagggcccaggtagcgagcagcgacctcgcgagccttccgcactcccgcccggttccccggccgtccgcctatccttggccccctccgctttctccgcgccggcccgcctcgcttatgcctcggcgctgagccgctctcccgattgcccgccgacatgagctgcaacggaggctcccacccgcggatcaacactctgggccgcatgatccgcgccgagtctggcccggacctgcgctacgaggtgaccagcggcggcgggggcaccagcaggatgtactattctcggcgcggcgtgatcaccgaccagaactcggacggctactggtgggtacctgcccggagagcgcgggctgcggggctcgcgggacagggagggaccgtcctcctctggacgactgggagactcgggtcccgaaggtggaaaggt

SEQ ID NO: 2516 - DNA, 267 bp, Homo sapiens
  chr6:7542422-7542689
  hyper
tttttgccccaggtcccgaaagaacttcccggccgcgctgggagcaggaccgggtgtcctgacgcgtgcggggacaggttggcccctgtcctgcgaacagggactcggtcgtacctttctcccctcccgcgagcccgggcgggtggtcagagggggcgtcgggcccgcgcggggctgtcccctgcctgctggacacggctgcagccgcctttgtcccagcccgcgaatgggaggtcaggcgaggtggggctgcgaccacaaaaccca

SEQ ID NO: 2517 - DNA, 39 bp, Homo sapiens
  chr6:7542711-7542750
  hyper
taaaagaggaaaggagcggggccccggtcctgtctggtg

SEQ ID NO: 2518 - DNA, 107 bp, Homo sapiens
  chr6:7542946-7543053
  hyper
ccgccggggcggctgccgggcccgggtctcgaagttcggccgggacgtgcctgttaccttcggtcgtccgcgccgcagcccccgcgggcgagcgcacctggggccct

SEQ ID NO: 2519 - DNA, 74 bp, Homo sapiens
  chr6:7543074-7543148
  hyper
tcctttttaaaaacaccggatgaaagaccccagtgtgccttggatcgcagagcgccggccgcatgtctgctttg

SEQ ID NO: 2520 - DNA, 64 bp, Homo sapiens
  chr6:7543174-7543238
  hyper
ggggggtgggagaggacgacgctgggggcccgccctggcctaggcgccccgggaagaccccccg

SEQ ID NO: 2521 - DNA, 31 bp, Homo sapiens
  chr6:10412627-10412658
  hyper
cgagggagaggagccccgggtggggagaggg

SEQ ID NO: 2522 - DNA, 71 bp, Homo sapiens
  chr6:10413259-10413330
  hyper
ctggctgggccactcccgcctgacgcccccccagatgacacgactagctctcccggcgtgctgcctttgcc

SEQ ID NO: 2523 - DNA, 31 bp, Homo sapiens
  chr6:10723050-10723081
  hyper
ccgagctcacgtggtccggcttgtgcaagtc

SEQ ID NO: 2524 - DNA, 113 bp, Homo sapiens
  chr6:13574017-13574130
  hyper
ggtgctggtggcaagccggaatccaagaaaaggaaagactccgattttaagggaacggggacatgcggagccacgtgagtcactgggtcccagagccacggaaggctctcagc

SEQ ID NO: 2525 - DNA, 31 bp, Homo sapiens
  chr6:13574133-13574164
  hyper
gcagtcagagtgcactcgtcattgcgttcga

SEQ ID NO: 2526 - DNA, 52 bp, Homo sapiens
  chr6:14117385-14117437
  hyper
tataatttaaacaggacggtactgactgataacctcccggggaaggcaggga

SEQ ID NO: 2527 - DNA, 31 bp, Homo sapiens
  chr6:14117462-14117493
  hyper
tccatggaaatctaacgcgcctttgattatc

SEQ ID NO: 2528 - DNA, 45 bp, Homo sapiens
  chr6:14117633-14117678
  hyper
tcccggcttccttttgcgggtcaacggcagcgtcacgcgcgcgag

SEQ ID NO: 2529 - DNA, 74 bp, Homo sapiens
  chr6:14211102-14211176
  hyper
cgcctgcttcctacccgcgccgccgcccactgccccgtacaggggtcgcagccgtggagcgtgggaatgggaca

SEQ ID NO: 2530 - DNA, 53 bp, Homo sapiens
  chr6:14211178-14211231
  hyper
cccattttacagctctcgttcatcccgcctgcggcaggcggctcctgacaggg

SEQ ID NO: 2531 - DNA, 45 bp, Homo sapiens
  chr6:16763512-16763557
  hyper
aaggtgaaggttagtacgtaagagcataaccgggtaaaatgtccc

SEQ ID NO: 2532 - DNA, 58 bp, Homo sapiens
  chr6:16763561-16763619
  hyper
cccctatcctcacccccgcccccaacaccctgcttggcaaagacgacttcagaaagga

SEQ ID NO: 2533 - DNA, 31 bp, Homo sapiens
  chr6:16763634-16763665
  hyper
ctttatatagaaaagacgtatgctttgtgct

SEQ ID NO: 2534 - DNA, 15 bp, Homo sapiens
  chr6:17393824-17393839
  hyper
cgactctcccctgga

SEQ ID NO: 2535 - DNA, 91 bp, Homo sapiens
  chr6:17393973-17394064
  hyper
gcaggtaatcctgcagcggtcggggcccggcgaggcggggaggggtcggggtgcaggtgcggggggcgcctggcggcgggcgctggcaagt

SEQ ID NO: 2536 - DNA, 45 bp, Homo sapiens
  chr6:17394074-17394119
  hyper
gggtggggtagggaagcggccgggacgctgcggctgtggcagcag

SEQ ID NO: 2537 - DNA, 31 bp, Homo sapiens
  chr6:17394159-17394190
  hyper
cgcggcgacccgggcgcggggcgcgggcgcg

SEQ ID NO: 2538 - DNA, 165 bp, Homo sapiens
  chr6:17394196-17394361
  hyper
ctcccatctgggtcagcggagcggcgcgccctgcccccgcctccccagctccggcgtcctggccgctcggaaggcggggtgcgggcaggagctgcccggggttggcgggcggccgcggcctccccaccccagcgccgccgcccgcccggccgctctaactttggg

SEQ ID NO: 2539 - DNA, 31 bp, Homo sapiens
  chr6:17987164-17987195
  hyper
gcgacaaacttgaagccgtcctcctaacaat

SEQ ID NO: 2540 - DNA, 76 bp, Homo sapiens
  chr6:17987215-17987291
  hyper
tcctggctcaaacttgcgggaccccgcgaggctggatcctcccagccgccctctcggaacccgctttacctttctc

SEQ ID NO: 2541 - DNA, 57 bp, Homo sapiens
  chr6:17987309-17987366
  hyper
gaggagggtgcaggaccgtttgattcccttccatctccaccacgcacttggtgttca

SEQ ID NO: 2542 - DNA, 31 bp, Homo sapiens
  chr6:17987686-17987717
  hyper
tccgacatgttggctgcgctcgcccggccgc

SEQ ID NO: 2543 - DNA, 155 bp, Homo sapiens
  chr6:18263770-18263925
  hyper
agacctacaaacttcccgtcaaatgatgaaatgttaacgaacgtttagagcggacgagaagtcggctgcactccaatacatctctaccacgctaacaaatactttaaaaaccggaatacacaaagtcaattctacgccatcgctcaaaacaaaag

SEQ ID NO: 2544 - DNA, 54 bp, Homo sapiens
  chr6:18263932-18263986
  hyper
attgtgcacacattctcgctgaaaatcactccgacttcacgcctctaaacacca

SEQ ID NO: 2545 - DNA, 59 bp, Homo sapiens
  chr6:18264016-18264075
  hyper
aaatacaaaaaaacttcggtctgaaaaattcatcagttgggatgcgactccccccacct

SEQ ID NO: 2546 - DNA, 249 bp, Homo sapiens
  chr6:18264081-18264330
  hyper
tcctcctcctcctcctcgtcgtcctcgtcctcttcctcctcgctctcctctctgggaccgggcatttcgggttctttctcggacgcgggctgggtgggggttccctccccctccgcagcaggggccgaggcggacatgctgtgaacctgcatgcgggaagaaagccggacgtctcggtcctcctactcccgcaggcaggaccgggcggccaccctgaatgatgctacccttcccgcgggacacctgccc

SEQ ID NO: 2547 - DNA, 418 bp, Homo sapiens
  chr6:18264337-18264755
  hyper
tgcctcctcccatagccgggaccgcagcgctcagtccccaggggcggcttccctcccgctccgccgccgccgtccagggattcccgaggcgggaaaccgcgcccgctgccccgcgtgcgcgcgcgcccgcccggcctgcgctgttcccggcccggcccgagctgccggccctccacgtcccctcccccgccccaggccgccgtccaaatggccgcgtccctcccccgtcggccgcggcaggggcgaccgggcctccggcgtcccgaagcagcccttaccgcggatttcggccgccgcgggcctggcacgcgagggcacgaggaggttctgggaggcggcggcggccgacgccgaggagaaggcgcgcgggccgctgtctggcgtgacgctcgcgccgcgcgctcggctccccagaatc

SEQ ID NO: 2548 - DNA, 482 bp, Homo sapiens
  chr6:18264758-18265240
  hyper
aagattttcaaaatggcggttcgggaaggagagcgggaatgcggcgaccaatcagggccgcgagctgggagttggcgggcgcggggcgggggaggcggggcggccgggtgcctccgcgggaagctcgggcgggcgggaccgcgaggggtcgcctcggccgcgggcggagggatgcgcgcgcggggctctccccggctgcgcctggagtgtggtcggcgctcgggccccggagtgcgggcgggctgtgtcccgcggggcgggcgggagcgggaggcgaggcggcctggcagcgcggaacggaaggacgctagggggcctgcgtgtttattgtttccacggtcgcttcctggaaaagatgatgagcagtcccgggccgcggaggggcgcggcgggcgcggtaaagaagtttagagatctccgaagtcgctatcgacagtgttactctgaggcggaggagaattaatcagcggtctcatcaatgc

SEQ ID NO: 2549 - DNA, 49 bp, Homo sapiens
  chr6:19805001-19805050
  hyper
tgtcagggcgaccgcccggccggcgccagcggagcgggggaggcgggct

SEQ ID NO: 2550 - DNA, 484 bp, Homo sapiens
  chr6:20212303-20212787
  hyper
cgcccgccccgtgcacgcgatcgctggggagctggggtcgctgcgctcccggcctgcagttacctggtccagcgggatgcccaggagctcgctgagcgggtgcaggtaggtggagcccgtggtgcggtaggaaaggctggacggctgcggctctgctgccatcctgcatcttcgggaggtggctgcccctgtcccagcccgcaacaccccctgctcggcgtcctcccgcccgggtgctcttgggtggttgccccgagaggcgcacggccgcctggttcgcgggggagcgaacgggaggccggggaatgcgaaccggcgcaaactctcgaggcgcaaactctcgaggcgcaaacttggctttggcgctggcgctgcagccacgggcgccgtaggagggccgggcccaaggcgccccgcttcccgctcccttcctctccgcgcccattggcccggccgctcgggacggccccgagaggagggaagg

SEQ ID NO: 2551 - DNA, 89 bp, Homo sapiens
  chr6:20212792-20212881
  hyper
ggaaaagtggggactccgagcccggcccccaagcgccgcccggcccgcccagcctggcctgcaccgaggccgaccgggagagggaaagc

SEQ ID NO: 2552 - DNA, 66 bp, Homo sapiens
  chr6:20213040-20213106
  hyper
gtttcgccgccgcagtcgaagcggctgagtggctgcgtttccctttcaagccgtagagggttcctc

SEQ ID NO: 2553 - DNA, 31 bp, Homo sapiens
  chr6:20401054-20401085
  hyper
tgggataggtttgagtcgttgtgtttgcttc

SEQ ID NO: 2554 - DNA, 112 bp, Homo sapiens
  chr6:20401120-20401232
  hyper
agtgctgatgcctgggcgtgcctgcgttcgttgggggcacgacgtcatcgtgggaagcgtgtactttttcggattactgcttggcggattagaaacccgtagatcagttcta

SEQ ID NO: 2555 - DNA, 31 bp, Homo sapiens
  chr6:20401287-20401318
  hyper
gattcaaaccaatatccgttgtaagacaaaa

SEQ ID NO: 2556 - DNA, 31 bp, Homo sapiens
  chr6:20401348-20401379
  hyper
ctaataatgaaggtaccgggaatgatctgga

SEQ ID NO: 2557 - DNA, 31 bp, Homo sapiens
  chr6:21332629-21332660
  hyper
agaattgaaagtactgcgtattaaacagctt

SEQ ID NO: 2558 - DNA, 31 bp, Homo sapiens
  chr6:21588775-21588806
  hyper
acccccccaacctatccgcgaccggttgcaa

SEQ ID NO: 2559 - DNA, 31 bp, Homo sapiens
  chr6:21594474-21594505
  hyper
gacagcaaactgcagcgcggtgagagagcga

SEQ ID NO: 2560 - DNA, 38 bp, Homo sapiens
  chr6:21594537-21594575
  hyper
aactataactcctctgcgagaggcggagaactccttcc

SEQ ID NO: 2561 - DNA, 567 bp, Homo sapiens
  chr6:21594597-21595164
  hyper
tctctttacccacctccgcccctgcgaggagttgaggggccagttcggccgccgcgcgcgtcttcccgttcggcgtgtgcttggcccggggaaccgggagggcccggcgatcgcgcggcggccgccgcgagggtgtgagcgcgcgtgggcgcccgccgagccgaggccatggtgcagcaaaccaacaatgccgagaacacggaagcgctgctggccggcgagagctcggactcgggcgccggcctcgagctgggaatcgcctcctcccccacgcccggctccaccgcctccacgggcggcaaggccgacgacccgagctggtgcaagaccccgagtgggcacatcaagcgacccatgaacgccttcatggtgtggtcgcagatcgagcggcgcaagatcatggagcagtcgcccgacatgcacaacgccgagatctccaagcggctgggcaaacgctggaagctgctcaaagacagcgacaagatccctttcattcgagaggcggagcggctgcgcctcaagcacatggctgactaccccgactacaagtaccggcccaggaagaag

SEQ ID NO: 2562 - DNA, 31 bp, Homo sapiens
  chr6:21595200-21595231
  hyper
gccgcctcctccaagccgggggagaagggag

SEQ ID NO: 2563 - DNA, 372 bp, Homo sapiens
  chr6:21595234-21595606
  hyper
aggtcggtggcagtggcgggggcggccatgggggcggcggcggcggcgggagcagcaacgcggggggaggaggcggcggtgcgagtggcggcggcgccaactccaaaccggcgcagaaaaagagctgcggctccaaagtggcgggcggcgcgggcggtggggttagcaaaccgcacgccaagctcatcctggcaggcggcggcggcggcgggaaagcagcggctgccgccgccgcctccttcgccgccgaacaggcgggggccgccgccctgctgcccctgggcgccgccgccgaccaccactcgctgtacaaggcgcggactcccagcgcctcggcctccgcctcctcggcagcctcggcctccgcagcgc

SEQ ID NO: 2564 - DNA, 37 bp, Homo sapiens
  chr6:21595890-21595927
  hyper
tcgcacgcgtcctcctcggcctcgtcccactcctcct

SEQ ID NO: 2565 - DNA, 136 bp, Homo sapiens
  chr6:21596019-21596155
  hyper
ctgggcagcttcagttcgtcgtcggcgctcgaccgggacctggattttaacttcgagcccggctccggctcgcacttcgagttcccggactactgcacgcccgaggtgagcgagatgatctcgggagactggctcg

SEQ ID NO: 2566 - DNA, 31 bp, Homo sapiens
  chr6:22146871-22146902
  hyper
tgcatctccgtgggcacgcaagcttcccctg

SEQ ID NO: 2567 - DNA, 38 bp, Homo sapiens
  chr6:22146906-22146944
  hyper
cctgagctgctcctgccgtctcccgcctgggcttcgcc

SEQ ID NO: 2568 - DNA, 100 bp, Homo sapiens
  chr6:22146954-22147054
  hyper
cgatcccggaatcgtgcgtctgcgccctgcgaaagaaggacctgctggcggagctccggccggggtctcctgcctcgcagctgggcgaggggacttggag

SEQ ID NO: 2569 - DNA, 102 bp, Homo sapiens
  chr6:24494727-24494829
  hyper
gctacaactgaagaagcgtgatcacggccttggcatttagggcaggcaccagcgcatctatggaccgcgcacaaattccggggatgccgaatttgggggatg

SEQ ID NO: 2570 - DNA, 31 bp, Homo sapiens
  chr6:24494841-24494872
  hyper
agtgggtctctagcagcgattgggggctcag

SEQ ID NO: 2571 - DNA, 31 bp, Homo sapiens
  chr6:24911397-24911428
  hyper
tgctgggaggggagggcgggtggagacagct

SEQ ID NO: 2572 - DNA, 46 bp, Homo sapiens
  chr6:25280012-25280058
  hyper
acagggcaaccatgaccgaggagagctctgacgttcccagggagtt

SEQ ID NO: 2573 - DNA, 53 bp, Homo sapiens
  chr6:25280127-25280180
  hyper
cccacctctgctttcccgcaggtctcgagaagtcttggcgccccttagggcag

SEQ ID NO: 2574 - DNA, 57 bp, Homo sapiens
  chr6:26022084-26022141
  hyper
aggtgtttttggagaacgtgatccgtgacgctgtcacctatacggagcacgccaagc

SEQ ID NO: 2575 - DNA, 36 bp, Homo sapiens
  chr6:26172133-26172169
  hyper
ccctcgccaaaaacgccggccccctcatagggccgt

SEQ ID NO: 2576 - DNA, 8 bp, Homo sapiens
  chr6:26172268-26172276
  hyper
cgtcggcc

SEQ ID NO: 2577 - DNA, 11 bp, Homo sapiens
  chr6:26199886-26199897
  hyper
gcaaggagagc

SEQ ID NO: 2578 - DNA, 31 bp, Homo sapiens
  chr6:26234071-26234102
  hyper
caggaagtcacctcaacgctaaagtaaacta

SEQ ID NO: 2579 - DNA, 55 bp, Homo sapiens
  chr6:26234144-26234199
  hyper
cagggccacttttaagcgccgcgctttaacagaaatcggccggccaatcacacac

SEQ ID NO: 2580 - DNA, 70 bp, Homo sapiens
  chr6:26234323-26234393
  hyper
tgacccccaaccagcacgactaggatagaccgtggccgcacaacaccgcagcacccgcacccctctccac

SEQ ID NO: 2581 - DNA, 31 bp, Homo sapiens
  chr6:26234443-26234474
  hyper
tggctctgaaaagagccgtttaaaattttca

SEQ ID NO: 2582 - DNA, 10 bp, Homo sapiens
  chr6:26250128-26250138
  hyper
ttaggcagac

SEQ ID NO: 2583 - DNA, 249 bp, Homo sapiens
  chr6:26271370-26271619
  hyper
gtcttgaagtcctgagcgatttctcgcaccaggcgttggaaaggcaacttgcggatcagcagctcagtcgacttctgatagcggcgaatctcgcgcagagccacggtgccgggacggtagcgatgaggtttcttcacgccgccggtggccggcgcgcttttccgagccgccttagtggccagctgcttgcgcggcgctttgccaccggtggacttgcgtgcagtctgcttggtgcgggccatctcagac

SEQ ID NO: 2584 - DNA, 65 bp, Homo sapiens
  chr6:26271936-26272001
  hyper
gttgtggggccagattcggaggaccacgttttgagaagtttatcttgtgccgttttcttgagtca

SEQ ID NO: 2585 - DNA, 49 bp, Homo sapiens
  chr6:26272660-26272709
  hyper
ggcgtagttgcccttgcggaggaggcggtgcactcggcccacagaaaac

SEQ ID NO: 2586 - DNA, 46 bp, Homo sapiens
  chr6:26273524-26273570
  hyper
gccaaacacgcggtgtcggagggcaccaaggcggtcaccaagtaca

SEQ ID NO: 2587 - DNA, 31 bp, Homo sapiens
  chr6:26322240-26322271
  hyper
agctgctctctggaagcgcagatctgtttta

SEQ ID NO: 2588 - DNA, 29 bp, Homo sapiens
  chr6:26322274-26322303
  hyper
gtcctgagcaatttctcgcaccagacgct

SEQ ID NO: 2589 - DNA, 39 bp, Homo sapiens
  chr6:26322362-26322401
  hyper
agtgccacagtaccaggcctgtaacgatgaggtttcttc

SEQ ID NO: 2590 - DNA, 211 bp, Homo sapiens
  chr6:26322412-26322623
  hyper
agtgggagcactcttgcgagaggcttttgtagccagttgcttcccgggtgctttgccaccggtcgatttgccggtcgatttgcgggcagtcggctttctacgagccgtggtatagagacctccttacttaccccgcttctcctttggctggagctcggcgagcgagaggcggcgctgggctggcgttggagagcgacggcaggacggctgc

SEQ ID NO: 2591 - DNA, 50 bp, Homo sapiens
  chr6:26327805-26327855
  hyper
ttttggtatctgtagtcgtggccgagtggttaaggcgatggactagaaat

SEQ ID NO: 2592 - DNA, 31 bp, Homo sapiens
  chr6:26328309-26328340
  hyper
cgcggtaatcccaaaacgtttttttctatag

SEQ ID NO: 2593 - DNA, 154 bp, Homo sapiens
  chr6:26331617-26331771
  hyper
tatgtaatgtactccccgccatacagttatctgagccagcgagctaaaaactgttgaccccgacgtgatttgaacacgcaaccttctgatctggagtcagacgcgctaccgttgcgccacgaggtctccgggacacctacgttttatttacctg

SEQ ID NO: 2594 - DNA, 31 bp, Homo sapiens
  chr6:26331780-26331811
  hyper
ttcatgaaaataatttcggtactggtgaaga

SEQ ID NO: 2595 - DNA, 47 bp, Homo sapiens
  chr6:26331843-26331890
  hyper
ctagctgcttccctctcggtaaaattgctgtccgcccaatcactgat

SEQ ID NO: 2596 - DNA, 31 bp, Homo sapiens
  chr6:26332133-26332164
  hyper
aggtgagttttaaattcgtttccaaagttca

SEQ ID NO: 2597 - DNA, 37 bp, Homo sapiens
  chr6:26332171-26332208
  hyper
tcacaaccagtgtttccgttaacgaattcacgcgggg

SEQ ID NO: 2598 - DNA, 53 bp, Homo sapiens
  chr6:26332287-26332340
  hyper
agttgatttcacaccccgataattcttcaaaatcagatcgctggacctgaaac

SEQ ID NO: 2599 - DNA, 56 bp, Homo sapiens
  chr6:26551002-26551058
  hyper
cttgctccggcctcccgcgccagcgctaacacctagtcctctttagtggagttccg

SEQ ID NO: 2600 - DNA, 45 bp, Homo sapiens
  chr6:26551083-26551128
  hyper
cggtggtctcctcccagatggcgaatttccgcggcttcttcatct

SEQ ID NO: 2601 - DNA, 31 bp, Homo sapiens
  chr6:26555187-26555218
  hyper
gaaacttactgggcctcgcctccagagactt

SEQ ID NO: 2602 - DNA, 48 bp, Homo sapiens
  chr6:26577791-26577839
  hyper
ttcccctctccatccccgacccgagctgacgttcgaccagcaaaccac

SEQ ID NO: 2603 - DNA, 31 bp, Homo sapiens
  chr6:26987993-26988024
  hyper
gcgtccgggggagaagcggccccaggactaa

SEQ ID NO: 2604 - DNA, 43 bp, Homo sapiens
  chr6:27100412-27100455
  hyper
ggaatagctctccttgcggctgcgcttgcgcttcttgccgtct

SEQ ID NO: 2605 - DNA, 31 bp, Homo sapiens
  chr6:27100498-27100529
  hyper
gggcgggagcagacttcgctggctctggcat

SEQ ID NO: 2606 - DNA, 46 bp, Homo sapiens
  chr6:27100685-27100731
  hyper
ctgcccaatcaggattcgcaaatccagaagacgcactactattggt

SEQ ID NO: 2607 - DNA, 391 bp, Homo sapiens
  chr6:27100746-27101137
  hyper
gccctaaccaacaacacgtcttctttttcgcgcccaatagtgtttataaaaagcgccgcctttcccgttcactttgtggttgctcgtagtgagttgcgctcgctatgtctggacgtggcaagcagggaggcaaagcccgcgctaaggccaagactcgctcttctagggccggtctccagttccccgtgggccgagtgcaccgcctgctccgcaaaggcaactatgccgagcgggtcggggccggcgcgccggtgtatctggcagcggtgctggagtacctgaccgccgagatcctggaactggcgggcaacgcggcccgcgacaacaagaagacccgcatcatcccgcgtcatctccaactggccatccgcaacgacgaggagctcaacaa

SEQ ID NO: 2608 - DNA, 30 bp, Homo sapiens
  chr6:27107238-27107268
  hyper
tctatgaggagacccgcggagtgttgaagg

SEQ ID NO: 2609 - DNA, 46 bp, Homo sapiens
  chr6:27440465-27440511
  hyper
gtgactcacacccctgcgagctcggataacacgaagacacacctgt

SEQ ID NO: 2610 - DNA, 62 bp, Homo sapiens
  chr6:27471333-27471395
  hyper
tcgacaccaccacaatcgaaagaccaggctgtcctgacagaccccgtcgttttggcttaggc

SEQ ID NO: 2611 - DNA, 50 bp, Homo sapiens
  chr6:27777840-27777890
  hyper
gctctgaaggcatggcgcgtacgaagcagactgctcgcaagtccaccggc

SEQ ID NO: 2612 - DNA, 31 bp, Homo sapiens
  chr6:27777994-27778025
  hyper
tctccgcgagattcgccgctaccagaagtcc

SEQ ID NO: 2613 - DNA, 87 bp, Homo sapiens
  chr6:27782435-27782522
  hyper
acgggaaactgaagcccggcccgagaagagcgggtcttggccttggcgcgagctttgcctccctgcttaccacgcccagacatggca

SEQ ID NO: 2614 - DNA, 49 bp, Homo sapiens
  chr6:35464207-35464256
  hyper
ccgggcccgaggcctgcgtggagctgaggccgggcgggctccgggagcg

SEQ ID NO: 2615 - DNA, 31 bp, Homo sapiens
  chr6:35464287-35464318
  hyper
ccgggactgggcgccccggatatgagctcca

SEQ ID NO: 2616 - DNA, 38 bp, Homo sapiens
  chr6:35464330-35464368
  hyper
ggccctccacactgtgcggcccccggatccccgccccg

SEQ ID NO: 2617 - DNA, 31 bp, Homo sapiens
  chr6:35465519-35465550
  hyper
ggcgcggggaggggacgcgggagcgcccggg

SEQ ID NO: 2618 - DNA, 31 bp, Homo sapiens
  chr6:35523457-35523488
  hyper
tgcttagaccctatgtcgactttcatacatg

SEQ ID NO: 2619 - DNA, 31 bp, Homo sapiens
  chr6:37446156-37446187
  hyper
catgcacgtaccttctcggggaaatcaggtt

SEQ ID NO: 2620 - DNA, 145 bp, Homo sapiens
  chr6:41337023-41337168
  hyper
aaggcaacaggtgggacggggagccagggagtggaaacgccggaggtcctcaggctggggatcccggagtcctcgctcagattccgattccggagaaggccaattccgggaccctatccatgtcccattccgggcaccttcctca

SEQ ID NO: 2621 - DNA, 14 bp, Homo sapiens
  chr6:42072647-42072661
  hyper
ggggccgggggctc

SEQ ID NO: 2622 - DNA, 52 bp, Homo sapiens
  chr6:42109901-42109953
  hyper
gcccggcggctgctctcggccagtccgcaggttccaacgtgtccctcccctc

SEQ ID NO: 2623 - DNA, 31 bp, Homo sapiens
  chr6:42989813-42989844
  hyper
agaattcagcagattccgtagactttgtttt

SEQ ID NO: 2624 - DNA, 31 bp, Homo sapiens
  chr6:43081635-43081666
  hyper
gtatatatagagcctccgcccctctctttaa

SEQ ID NO: 2625 - DNA, 44 bp, Homo sapiens
  chr6:43081717-43081761
  hyper
ttaccctgagcagccccggggcctgtggccggggactcagtctg

SEQ ID NO: 2626 - DNA, 70 bp, Homo sapiens
  chr6:43138367-43138437
  hyper
gatgaatgaagatcctcgagccagcccggtgggaaagtttcgtcgcctacaaaagcgagggaaagggaag

SEQ ID NO: 2627 - DNA, 71 bp, Homo sapiens
  chr6:43138465-43138536
  hyper
gctgagaggctggggcgcgacgagtctggacaccgggcggggacccaagctctctccgctcagccaataac

SEQ ID NO: 2628 - DNA, 39 bp, Homo sapiens
  chr6:43244221-43244260
  hyper
gggtgggacacggacacgcacccacgcgcacacggccgc

SEQ ID NO: 2629 - DNA, 39 bp, Homo sapiens
  chr6:43478198-43478237
  hyper
ggcaaggagctgggagcgataggccgctcttcccttggg

SEQ ID NO: 2630 - DNA, 46 bp, Homo sapiens
  chr6:43969982-43970028
  hyper
tggccgccttctcccccgccgcccgcgcccacgccctcccccgcgg

SEQ ID NO: 2631 - DNA, 67 bp, Homo sapiens
  chr6:44094339-44094406
  hyper
tttataaattcagtcccgtccgtctcttacggtggcaaagttcatttatcgtcggctgtggaaagca

SEQ ID NO: 2632 - DNA, 58 bp, Homo sapiens
  chr6:44095870-44095928
  hyper
ttttttctgctgctcccgggggcgagtacacccgaagccggtccggggtaagggctcg

SEQ ID NO: 2633 - DNA, 41 bp, Homo sapiens
  chr6:44096003-44096044
  hyper
cggcgggctggagaggcggccggccccgggagcgtgtcctc

SEQ ID NO: 2634 - DNA, 61 bp, Homo sapiens
  chr6:46816791-46816852
  hyper
actgactgcctcccgccggcttcctgaggccggaccgcagcggggacgcctcctctcaggc

SEQ ID NO: 2635 - DNA, 39 bp, Homo sapiens
  chr6:47276364-47276403
  hyper
cctagccacaggtaaacgagggatcggaaagactgtaga

SEQ ID NO: 2636 - DNA, 124 bp, Homo sapiens
  chr6:47276439-47276563
  hyper
ccccccattccagtgccggcgcgctggctggctggaagccggcgctttggaggcgccggagagtgggtctaagggtgatatttcggcatacagaacctgagaccccacccgagccaagagggaa

SEQ ID NO: 2637 - DNA, 328 bp, Homo sapiens
  chr6:47276576-47276904
  hyper
gggattgaggagggggcggcttgcgccctgctcgggaatgcaccgcgcgacagcacccggaggtctccggtgtccggcgcgcaccggtaccactgtcttccactgcggtagcatcccgacatgacattgcagctgcaacaaagcgccggcctcggccggccgtgggagccccacaccgcggcgaggccccacaccacgcagaggggcagtggccgatgggtggggggctgtggctgcgggcgtggggagcgcgaggtaggccgagtagggggaaaagccctcaaatgcgcagaagctgggcggctacctctagcgtctcctccagcaa

SEQ ID NO: 2638 - DNA, 36 bp, Homo sapiens
  chr6:47277325-47277361
  hyper
atccaccgccgcctcccgggccgggagcccatctac

SEQ ID NO: 2639 - DNA, 31 bp, Homo sapiens
  chr6:50691162-50691193
  hyper
ctttgtcagtactcttcggattccagatgga

SEQ ID NO: 2640 - DNA, 31 bp, Homo sapiens
  chr6:50814235-50814266
  hyper
tcccaaaacaaaatagcgaaagacaggagga

SEQ ID NO: 2641 - DNA, 63 bp, Homo sapiens
  chr6:52227722-52227785
  hyper
gcagctggctaatgggcggatgctggggcttggctggatgggaacgccgcggtggggtgtcgg

SEQ ID NO: 2642 - DNA, 31 bp, Homo sapiens
  chr6:52227799-52227830
  hyper
gctggaacgctgggaacgtctgtctaggcta

SEQ ID NO: 2643 - DNA, 41 bp, Homo sapiens
  chr6:52535727-52535768
  hyper
gacggagcaacgggtccggctgccgccgggatgttgcagca

SEQ ID NO: 2644 - DNA, 74 bp, Homo sapiens
  chr6:53212601-53212675
  hyper
acaattgtggatggggcggggggaaccgccaagtgcaagaacacggaacggttgcaagacgcagttcagcaaga

SEQ ID NO: 2645 - DNA, 69 bp, Homo sapiens
  chr6:53212684-53212753
  hyper
gctctaggcattgctccgtcgacccgaggtggtggggtgggagagtcttaccggcgtggaaacagtaaa

SEQ ID NO: 2646 - DNA, 244 bp, Homo sapiens
  chr6:53212978-53213222
  hyper
tcaataaaaactgaagcggtcccgagctagcaggcttccctccgaggggcggacggaaggtccgcagggttaacggaagcggagagaacaggacaaaaaggaaaggccggagagtccccccagcggcgcccggtgcccgcagaccctcgcacaggctcttcgaactcacccgggtttcgccgactccaaagaaagcgcgctccctccgagagcgctcccccggctctcccgccgcgcgctccgg

SEQ ID NO: 2647 - DNA, 31 bp, Homo sapiens
  chr6:53213229-53213260
  hyper
ggcgggaggacccaggcggacagatccatcc

SEQ ID NO: 2648 - DNA, 576 bp, Homo sapiens
  chr6:53213394-53213970
  hyper
ccgcacccctttccccgcgcccgaggagccgggctgtaccccggagccggcggagctggaggccgcgggcggagcgcgggttgccccggcagctctttctcggcaccaggtccgagacctaacggcagttctctctgaccgcttcccggccgcgcgctcgcgcgggtgtcatggccgagcggcggcccccgacgaagtttcccggagctgacggctttaccttttagcccaaggggcggcagcagctttgagcagcagcaaggcggcggcggcggagggagcgcgggtggcagccggcgcagaggcggatgtagaaggagacaccggtggctaggacccgcgcgatgggaagaggaaggcgccggctatctacaatcagaacgtgggctgaccgtgacgtcacaatggcgcggccagccaatcgggacccgaaggatgaatcaagcgctatgatgtcatgcggcccgggagccaatcgcgggacaatagaactttcgtgatcgtaaattccagaatccgatgcggtggagagcctaggccggggttggcccctcggttccacgtgtctctgggaaa

SEQ ID NO: 2649 - DNA, 31 bp, Homo sapiens
  chr6:56820670-56820701
  hyper
ctttgtcccctccccacgtttcttcataacc

SEQ ID NO: 2650 - DNA, 79 bp, Homo sapiens
  chr6:56820743-56820822
  hyper
tgatgcaatgccagcacggaaggtatagcgagagcgctgcagtgtgcctttctgcggacggccacggccacctggccag

SEQ ID NO: 2651 - DNA, 31 bp, Homo sapiens
  chr6:64283109-64283140
  hyper
gtggcccggggtggggcgagggctgcgcgtg

SEQ ID NO: 2652 - DNA, 31 bp, Homo sapiens
  chr6:70577589-70577620
  hyper
ggagctgggggacaggcgggtgccacaggag

SEQ ID NO: 2653 - DNA, 57 bp, Homo sapiens
  chr6:71666008-71666065
  hyper
gagagaagtaggggcgcggggtgagcgggggcactggcctgcgcgtgtccacgtcga

SEQ ID NO: 2654 - DNA, 15 bp, Homo sapiens
  chr6:72129834-72129849
  hyper
ctgcggccccggctg

SEQ ID NO: 2655 - DNA, 48 bp, Homo sapiens
  chr6:73329783-73329831
  hyper
aaggccaagattttgacgtttaaagcgggcacacgagtcattttaagt

SEQ ID NO: 2656 - DNA, 59 bp, Homo sapiens
  chr6:73329891-73329950
  hyper
caacagcaccccctcccgccccctccgccttcagtcagggtcccgcgcagctctaggat

SEQ ID NO: 2657 - DNA, 78 bp, Homo sapiens
  chr6:73329953-73330031
  hyper
agagcttactccagggcgctctctgcatctgcctcgaatagcaccgcacggagcaacctctctcgcacctccacagtg

SEQ ID NO: 2658 - DNA, 31 bp, Homo sapiens
  chr6:73331123-73331154
  hyper
cctggtccttgcctcgcggacttggcagccg

SEQ ID NO: 2659 - DNA, 78 bp, Homo sapiens
  chr6:73331174-73331252
  hyper
tgaactgctgaggactcgcccgtgtgcggggacccgagtgccacttcccggagcgttaccttgcgctccagcctccag

SEQ ID NO: 2660 - DNA, 96 bp, Homo sapiens
  chr6:73331273-73331369
  hyper
agggcagggctgttcccgctctcaccccttgcggaaggatggcaggatccggcgcagcgacgtagcagcgggagggcacagcgacctgcatctcca

SEQ ID NO: 2661 - DNA, 79 bp, Homo sapiens
  chr6:73331421-73331500
  hyper
cctgccagaaccaaaccgaactcgcgcctcggagaggggcttctggggccgtttcgctgcagggcgtggggagtggaga

SEQ ID NO: 2662 - DNA, 79 bp, Homo sapiens
  chr6:73331516-73331595
  hyper
tggggctgggtgtgcgcgcgtgggagcgcgcctcggagcgccccgcactcccccactctatccccgggggcagtttggg

SEQ ID NO: 2663 - DNA, 31 bp, Homo sapiens
  chr6:73331597-73331628
  hyper
ggagggagtggtagtcgcgggaatgagggag

SEQ ID NO: 2664 - DNA, 59 bp, Homo sapiens
  chr6:73331635-73331694
  hyper
aaccctctcaaagtgacgccccaaacaggtccggatttagaattcgaagctaaaggctg

SEQ ID NO: 2665 - DNA, 104 bp, Homo sapiens
  chr6:73331696-73331800
  hyper
agaaattgggactcctcggcctcctctgcagcccctcctttcccgccccgaagcccgggcggtttgctggctgcctgcttccccgcccccggctcagaggtctc

SEQ ID NO: 2666 - DNA, 214 bp, Homo sapiens
  chr6:73331933-73332147
  hyper
cgggaggagaggagggcggcgccgccgggctctgggtgaagagcggcgcagcggcggcggcggcgggcggggggcgcttgggcagcggcatgaaggatgtggagtccggccggggcagggtgctgctgaactcggcagccgccaggggcgacggcctgctactgctgggcacccgcgcggccacgctcggtggcggcggcggtggcctgaggga

SEQ ID NO: 2667 - DNA, 80 bp, Homo sapiens
  chr6:73332277-73332357
  hyper
agaccccgcggctgggcgttcatctaccacgctttcgtgtgagtacccgcgccccctgctatgcccgctgcaggggacca

SEQ ID NO: 2668 - DNA, 104 bp, Homo sapiens
  chr6:73332361-73332465
  hyper
ccctggccccctggggcgtgctccgcgctcgcgcccttgggcccccgcgcgcgtgcacacgtggtggcttttatttcttcgcacgtgttcgtggtcttccttct

SEQ ID NO: 2669 - DNA, 90 bp, Homo sapiens
  chr6:73332508-73332598
  hyper
gcttgaaccttttccccgaggacacccaatgaactgcccggtagcttcaggctcccggggcgagagccaggcagacgcgggacttaggct

SEQ ID NO: 2670 - DNA, 48 bp, Homo sapiens
  chr6:73332617-73332665
  hyper
attaggtcccaagatacgtaaacttcaaccgaacggggcgcccgggag

SEQ ID NO: 2671 - DNA, 31 bp, Homo sapiens
  chr6:73332904-73332935
  hyper
gtagcccttcctgccacggagaaggtggcca

SEQ ID NO: 2672 - DNA, 175 bp, Homo sapiens
  chr6:73332946-73333121
  hyper
aggccagcaggccaggcgaagcaacgctcccgcgctgcagggggcggggaggcagcggggaacctggggcgcaggaacgcgggcggaggtgcgatagcagaagcgcaaatgggtcgcctctgacagagatcgggcagtgggttaagtccccgtttgtggcgcggagtcaaagagt

SEQ ID NO: 2673 - DNA, 35 bp, Homo sapiens
  chr6:73972873-73972908
  hyper
gtcccggctcgcgccgcggccgcgcgaggcgcgct

SEQ ID NO: 2674 - DNA, 51 bp, Homo sapiens
  chr6:73972917-73972968
  hyper
gtggcggcgaccccgccggaagcgcgcggctgcggcgcgggaagcaaccca

SEQ ID NO: 2675 - DNA, 31 bp, Homo sapiens
  chr6:73973061-73973092
  hyper
agggtgggaggagggacgagccagtggcaat

SEQ ID NO: 2676 - DNA, 31 bp, Homo sapiens
  chr6:74019357-74019388
  hyper
atgaagatcaggactccgtattctgagactg

SEQ ID NO: 2677 - DNA, 174 bp, Homo sapiens
  chr6:74019425-74019599
  hyper
ggccgacagcatttcgcgtttctggcctgggaaagtaagggtgcgctaaggcacgagtagtacagctcctcccgccaccgcagagcccgccggcgggaagagaccagacaccgacggagaagcgaagttcaggacgcgaaggaaagggccacttcgggtcggggtcaacccaga

SEQ ID NO: 2678 - DNA, 269 bp, Homo sapiens
  chr6:74019614-74019883
  hyper
gtctaggtggattaacgcgccaccgcgagaagtgggcacgggaccacatgcggctggcaagacgtcccagggctcaagctccaggctcggtcaccaaacaacggtgataacatccacaacgccacgtaaaccatctttgggccttgatcgttttccaataaccgactgaactgagggcgtgaccaaacgacaagaaccggaggagaggacccggagaacggagcagcatcccgccgcccgcctccaggaaagcccgaggcactgtagca

SEQ ID NO: 2679 - DNA, 59 bp, Homo sapiens
  chr6:74020035-74020094
  hyper
ggatgctctccgttaccgcctctgccatttggttgccctccctgcggtccaagggcctg

SEQ ID NO: 2680 - DNA, 60 bp, Homo sapiens
  chr6:74020105-74020165
  hyper
agggctgccaggccagcgctttccaggggctccagcctacagcgccgccacctggggctg

SEQ ID NO: 2681 - DNA, 89 bp, Homo sapiens
  chr6:74161232-74161321
  hyper
cgccaagcagctcaccttcacgtgctcatagtagctcccggtgttcagcagcccgacgcctctgaacgcggagtcgcacttcagtctga

SEQ ID NO: 2682 - DNA, 37 bp, Homo sapiens
  chr6:74161339-74161376
  hyper
cccctttcaccatccccgccgccgtggagatatcatc

SEQ ID NO: 2683 - DNA, 111 bp, Homo sapiens
  chr6:74161387-74161498
  hyper
tcaacttctccaaaaccgcccggagcttcgaggccccaggcgccgcatccctccgtacgagaatgggggccgagaccggcaggccggggctgggcacgtcccagggcccgg

SEQ ID NO: 2684 - DNA, 113 bp, Homo sapiens
  chr6:74161684-74161797
  hyper
cgggcggcctctcctgggtgtccggggcgctctttttctgccgggatcccgacttcctggcggggccgaactttcccgccttaggcagggcggcctcgggggcagccggagac

SEQ ID NO: 2685 - DNA, 138 bp, Homo sapiens
  chr6:74161830-74161968
  hyper
cgtgcggaagccttgggggcagtggctccggcctcggaagctctctgcatggcctttccgtgccaaggctgcatggctggcgctttctgttccccgaaagaagaatccgtttcaggaaaaggccgcaagaggaagagc

SEQ ID NO: 2686 - DNA, 31 bp, Homo sapiens
  chr6:75918552-75918583
  hyper
ctcctagtgtgataaacggtaaagaacgggt

SEQ ID NO: 2687 - DNA, 87 bp, Homo sapiens
  chr6:76458863-76458950
  hyper
gcggccccggcgcccccgccccttcgggcgctccgtagccgtgacgtgcacgccgcagtgccggggactcggcggggcgccggccgg

SEQ ID NO: 2688 - DNA, 34 bp, Homo sapiens
  chr6:76459158-76459192
  hyper
cactgcggggcgtcggcgccggggtctcgcgttc

SEQ ID NO: 2689 - DNA, 31 bp, Homo sapiens
  chr6:80246695-80246726
  hyper
ggtcttccttctcctcgcggtccctacatcc

SEQ ID NO: 2690 - DNA, 79 bp, Homo sapiens
  chr6:80246771-80246850
  hyper
cgcaggcccccatccacgaacgccccttcactagctaccagacgcttcaacccagcctcacctcgcacctccacctccc

SEQ ID NO: 2691 - DNA, 44 bp, Homo sapiens
  chr6:80246893-80246937
  hyper
ggctcttcagcagagccgatgcggcgtcccgcctccttgccttc

SEQ ID NO: 2692 - DNA, 47 bp, Homo sapiens
  chr6:80247011-80247058
  hyper
gctgccgggcgggtgccgaggttgccgagatgcgggaggtttgaaca

SEQ ID NO: 2693 - DNA, 118 bp, Homo sapiens
  chr6:80247059-80247177
  hyper
aaggatgggacagaggcgaggatcggggctcctgggtggcagcggcggtaacctgggctccagggtaacggaggcggaggcctagactgcactacgaagagaccgcagccaatcatga

SEQ ID NO: 2694 - DNA, 42 bp, Homo sapiens
  chr6:80340980-80341022
  hyper
cttccccttcagcctgcggccgggcggcgctgggcttttatc

SEQ ID NO: 2695 - DNA, 144 bp, Homo sapiens
  chr6:80341182-80341326
  hyper
tcatccgcgtgttcatcgcctcttcctcgggcttcgtggcggtgagcgcggtgggggcgggcagtaggttggggtcgcggggcgcgggtcctgcgggaggcgcgcggcgctcgtcactgcgcgtccttgcgctcagccggtccg

SEQ ID NO: 2696 - DNA, 58 bp, Homo sapiens
  chr6:80341368-80341426
  hyper
acaacaatgaagagggcggggaggaaaggtgggtgggggaccccggcctcacccaaat

SEQ ID NO: 2697 - DNA, 31 bp, Homo sapiens
  chr6:80341526-80341557
  hyper
ggttgttcaagagcttcggggatcccccttc

SEQ ID NO: 2698 - DNA, 31 bp, Homo sapiens
  chr6:82461817-82461848
  hyper
tcgtcctcagacatggcgaagtacccttcac

SEQ ID NO: 2699 - DNA, 104 bp, Homo sapiens
  chr6:82461998-82462102
  hyper
gatagttccctgaccccgggcctcctcggagactccctcccccggcccttacagtccccagccgcgcaccgcgccccgcagagcagccccgcaccaaaagtatc

SEQ ID NO: 2700 - DNA, 138 bp, Homo sapiens
  chr6:82462104-82462242
  hyper
tgatgcatctggaaagcgcaagcgagagtcccgtctgtgtcacctggaggcggccgccccttctaggagcgcagcgagcgagagcgaaaccgagaggcggcaacacttccaggagctgcgagcgcgctcagacagcaa

SEQ ID NO: 2701 - DNA, 89 bp, Homo sapiens
  chr6:82462323-82462412
  hyper
ccagctgcggtggtcccgaactggcggctcttgctgccacacacgctcgtgtctctggagctttagcagttgtgcggggaaaatgtctt

SEQ ID NO: 2702 - DNA, 257 bp, Homo sapiens
  chr6:82462413-82462670
  hyper
agtactttttttataccgggcttctctgcgcttccggggcccagagcggcacgttcgccacaccctcctcatctgcatagggcgccgccccctctgccctcccccgcccgcagggcacgcagctgactagcccagcagttagtgcgggacgactgccggtgagcgtgaggtcctgggctgtatgtgcggatactgtgtgcgcccgtagatgcgtgtatttatacatacatttaatttatgtacgccccctcccacaa

SEQ ID NO: 2703 - DNA, 35 bp, Homo sapiens
  chr6:82462926-82462961
  hyper
gcacgcaaatcagtcacggcgcgtgagtgggaagg

SEQ ID NO: 2704 - DNA, 209 bp, Homo sapiens
  chr6:82462965-82463174
  hyper
gttgataactgggtttcgattctcgaaacctcgggaagcgcgccggggagctctgggcgagcccgagaaggcgcgggggcggcaccacgggcctcgggcgtgcgcggctcctgcgcacgagtggctccaaggggccagtacttcgcgggggtcagggcgcgtcacggagcagacgcgggcgagcagccaatggccgaggactgggcggg

SEQ ID NO: 2705 - DNA, 44 bp, Homo sapiens
  chr6:82463433-82463477
  hyper
ggcagagctaattctacgcacgctcactcgcgccaccaccactc

SEQ ID NO: 2706 - DNA, 31 bp, Homo sapiens
  chr6:82463480-82463511
  hyper
gctagaaagctgtggccgtctcttcggcagc

SEQ ID NO: 2707 - DNA, 62 bp, Homo sapiens
  chr6:82463517-82463579
  hyper
cctccatcaactaacccggagcagctttcccagcgcctagacgctgccgggggctgaggtgg

SEQ ID NO: 2708 - DNA, 31 bp, Homo sapiens
  chr6:82463621-82463652
  hyper
cctgctcagccctgcccgcccagactgggag

SEQ ID NO: 2709 - DNA, 42 bp, Homo sapiens
  chr6:82463769-82463811
  hyper
caacgccgccccctcccggtgccctgccgagctgcgtcccaa

SEQ ID NO: 2710 - DNA, 34 bp, Homo sapiens
  chr6:83903707-83903741
  hyper
gcactgcggcctctctcgccgcagcgtctggctc

SEQ ID NO: 2711 - DNA, 31 bp, Homo sapiens
  chr6:84743240-84743271
  hyper
gacccactgcagagcccgggatggcaaagaa

SEQ ID NO: 2712 - DNA, 50 bp, Homo sapiens
  chr6:84744191-84744241
  hyper
gccccaccccgcaacccgcccccgctccccccgcccgccccgcgccccgt

SEQ ID NO: 2713 - DNA, 31 bp, Homo sapiens
  chr6:87861981-87862012
  hyper
cgctctccgccatccccgggcctcgcgcttt

SEQ ID NO: 2714 - DNA, 31 bp, Homo sapiens
  chr6:87862013-87862044
  hyper
acctcgcgtgctggggcgagggcggggctgc

SEQ ID NO: 2715 - DNA, 68 bp, Homo sapiens
  chr6:88875941-88876009
  hyper
tcactgggtcctcccgcgagccccgcctggcccggcgtggggccgcccgtctccgccagcccgggcgc

SEQ ID NO: 2716 - DNA, 89 bp, Homo sapiens
  chr6:88876148-88876237
  hyper
gcggcacagaccccgccgagggaactgcgcggggagggacctgagcgcagcgcccgtagccccaaactttgcttggggcgggggacccg

SEQ ID NO: 2717 - DNA, 31 bp, Homo sapiens
  chr6:88876350-88876381
  hyper
gacctcgctgtgctcccggataccctcacac

SEQ ID NO: 2718 - DNA, 80 bp, Homo sapiens
  chr6:88876396-88876476
  hyper
aaggggctggtgcatgcgccgcccacgacctcggggccattaatcacacgctcccgggcagcgcgcatcgccaacacctt

SEQ ID NO: 2719 - DNA, 14 bp, Homo sapiens
  chr6:88876630-88876644
  hyper
ggggccgggctgag

SEQ ID NO: 2720 - DNA, 106 bp, Homo sapiens
  chr6:88876835-88876941
  hyper
gtaggcggctggctccgcgcctcccggcccggcgcgccccctccccggccacccggggccccgctcctcgcaccttttcgctggaggaggacgccccactccaggg

SEQ ID NO: 2721 - DNA, 50 bp, Homo sapiens
  chr6:88877174-88877224
  hyper
ccctcccctccgcccccggggccctgcagggtgtgcggcggcggtcgtgg

SEQ ID NO: 2722 - DNA, 60 bp, Homo sapiens
  chr6:90121107-90121167
  hyper
acgaccctgccagtcacgccgccgccggctgcctttttttagccacgacatctgaccctg

SEQ ID NO: 2723 - DNA, 84 bp, Homo sapiens
  chr6:90121251-90121335
  hyper
gcttggggtgaggggcgcgggaggcaccggctctgaaaggggcagaagcgcgcgctcctccagcccagacgcttactccctcct

SEQ ID NO: 2724 - DNA, 42 bp, Homo sapiens
  chr6:90121390-90121432
  hyper
tttggcagctcgaggtcgggcttttggcgtccctccccaccc

SEQ ID NO: 2725 - DNA, 297 bp, Homo sapiens
  chr6:91004760-91005057
  hyper
ctgcagcactagacagcgaaggtgaaaaccaggaacgccgcgtctcgccgcccgcgggcccgccgggagactgcgggtccgtctcgcgggtggggcgccccggtccctctcgtttcctggaggccacaggtcacggcgacggcggtgaccgggagagcaggctgcgaggcgcgcctcatcgggccacagacaaaccaccccggcagcggccgcgccggaacttccctcaagttaccaaactcgcctacgcgcgggagagtgctggggatgccccatgcgcccgcgaccccagaagcc

SEQ ID NO: 2726 - DNA, 105 bp, Homo sapiens
  chr6:91005073-91005178
  hyper
ttcacacactcactcccggccctgcacgcttcccctcacggtccgagttcctgcaaatgcttggccagaccgaggtcgccgagatgctcgctccagtctctcccc

SEQ ID NO: 2727 - DNA, 106 bp, Homo sapiens
  chr6:91005208-91005314
  hyper
cgcccgccgccgtctccagcggcgccgggctcccgaacacccgccgggtgagcgaagcacagcggggccacggagcgcctcgacgcggggacggggagggcagtgt

SEQ ID NO: 2728 - DNA, 31 bp, Homo sapiens
  chr6:91320685-91320716
  hyper
gactgctcaaggtcaccgagctaagtgccag

SEQ ID NO: 2729 - DNA, 103 bp, Homo sapiens
  chr6:91321002-91321105
  hyper
gcatcccccatccctccgctccccgtctcgctcaagctcttcctgcgccacgggcaggtctcccagcctcgccatcgcggggcgtccccgtcccggcccacac

SEQ ID NO: 2730 - DNA, 109 bp, Homo sapiens
  chr6:91321110-91321219
  hyper
tcctctccagccacaccggcgcgccccgagggttgcaggcgggggctgcaccgggttgaagcccagtcaaccacacgtcccagggcttaggcgccgggcggggacaacg

SEQ ID NO: 2731 - DNA, 34 bp, Homo sapiens
  chr6:99962858-99962892
  hyper
cggagctcctaatacacgacgcttccagaaaagt

SEQ ID NO: 2732 - DNA, 31 bp, Homo sapiens
  chr6:99962894-99962925
  hyper
ttagacaggcttcctccggtcaccaacacac

SEQ ID NO: 2733 - DNA, 43 bp, Homo sapiens
  chr6:106959905-106959948
  hyper
ccgcgggaggactaggcgaggcccctaacggagcccccagtgt

SEQ ID NO: 2734 - DNA, 45 bp, Homo sapiens
  chr6:106960068-106960113
  hyper
ggcagactgcacagcccgccccaagggtcacgcccaccctgctaa

SEQ ID NO: 2735 - DNA, 40 bp, Homo sapiens
  chr6:106960148-106960188
  hyper
agggggcacaagtggacgagccggtcgtgattactcccag

SEQ ID NO: 2736 - DNA, 406 bp, Homo sapiens
  chr6:106960498-106960904
  hyper
agcaaacagccacccccggcttcgtcccccacgaagaggaagggcaggagccgtgccctcgaggccgtgcccgccccgcccgccagcggcccccgggctcccgccaaggagtccccacccaagagggtgcccgatcccagcccagtcaccaagggcactgcggccgagagcggggaggaggcggcgcgggccatcccccgcgagctcccggtcaagagcagctcgctgctgccggagatcaagcccgagcacaagaggggcccgctccccaaccacttcaacggccgggcagagggaggtcgaagcagagagctgggcagagcggccggagcgcctggagcttctgacgccgacggcttgaagcccaggaaccatttcggcgtgggcaggtcgacagtgaccacta

SEQ ID NO: 2737 - DNA, 115 bp, Homo sapiens
  chr6:106960908-106961023
  hyper
gaccctgtaagtagccgcgcaagtcccggccgagttgctgtccgcacacgtgctgggggtccgctctgagaggctcggggtatctgcattgtggaagaaacgtctggtcactgaa

SEQ ID NO: 2738 - DNA, 31 bp, Homo sapiens
  chr6:107810277-107810308
  hyper
ctccatggagggcaggcgctagctgggaagt

SEQ ID NO: 2739 - DNA, 31 bp, Homo sapiens
  chr6:108435948-108435979
  hyper
tccagaataatcctggcggtttagtcatcat

SEQ ID NO: 2740 - DNA, 96 bp, Homo sapiens
  chr6:108882163-108882259
  hyper
tcctgttcctgggaggcgggcgcggcaggactgggaggtggcggcagcgggcgaggactcgccgaggacggggctccggcccgggataaccaactc

SEQ ID NO: 2741 - DNA, 74 bp, Homo sapiens
  chr6:108882273-108882347
  hyper
ttggtgcttccccaggcggcggcggcggcgcccgggagccggagccttcgcggcgtccacgtccctcccccgct

SEQ ID NO: 2742 - DNA, 112 bp, Homo sapiens
  chr6:109777315-109777427
  hyper
ctggaccgcgcaccctcggcctgggctccttgccggtgcttgcgcgtgcaaggctagctctttccccgccgcaaggcgaggaccacccgcccccgccgcggtcccaggtccg

SEQ ID NO: 2743 - DNA, 40 bp, Homo sapiens
  chr6:109777566-109777606
  hyper
ccaggatggatccaagcgcagagtgcgcctcctgtgacag

SEQ ID NO: 2744 - DNA, 31 bp, Homo sapiens
  chr6:114180217-114180248
  hyper
ggtggcccggcgactccgcccctcctcgcct

SEQ ID NO: 2745 - DNA, 95 bp, Homo sapiens
  chr6:116691811-116691906
  hyper
agccaaagaggcctggcgggcgggggtgcgggtggagtccgggccgggtggcgtggaaggccgagcacagctgcgagcggcgagtcccgggagag

SEQ ID NO: 2746 - DNA, 151 bp, Homo sapiens
  chr6:117803612-117803763
  hyper
gaaggcaaggaaggagcgcagcagggcgcgccagatacgtggaggggagcgcgggcggcgcctcgctcgcctccggcttcgccgtcggtcactgcctgggaacgcgacttcctcctctaggggccgacgtgcggggcggggcggggccggg

SEQ ID NO: 2747 - DNA, 31 bp, Homo sapiens
  chr6:117803795-117803826
  hyper
ccgccccaatgggattcggtgcggggcagcg

SEQ ID NO: 2748 - DNA, 108 bp, Homo sapiens
  chr6:117804001-117804109
  hyper
ctggctttgctgctcgcggtctccgccccgctccggctgcaggcggaggagctgggtgagtggagcgcgtccggctggcggcgggacccgaggcgccaggggcgggct

SEQ ID NO: 2749 - DNA, 113 bp, Homo sapiens
  chr6:117804130-117804243
  hyper
gccgggccgagggctacggggcgggccgggcctggggggacggagcgcgggaggaagtcgggctcgccgcctgccatccgcggagtccggctctacccgcggggctgggggtg

SEQ ID NO: 2750 - DNA, 31 bp, Homo sapiens
  chr6:117804250-117804281
  hyper
ttactgcattccttgtcgctcccccaccaaa

SEQ ID NO: 2751 - DNA, 222 bp, Homo sapiens
  chr6:117804487-117804709
  hyper
cggcgctgggccctgccctccctgccgtcgctcctcccgcgcggaattggaatcccggcgtgtgcgttcggggctcgtgcggaatggccggggcacgtttgccgaggttggccttggacgctggcgagcaggcggtgctgccacctcctctcgagtgtcctgctggcgccgcaagttggaatcgtgtggcttcctgtgtatttgagccggtagactctcaac

SEQ ID NO: 2752 - DNA, 31 bp, Homo sapiens
  chr6:117804754-117804785
  hyper
ctaattaacccacaaccgagtttaccctctg

SEQ ID NO: 2753 - DNA, 68 bp, Homo sapiens
  chr6:123110666-123110734
  hyper
acagcaggagaaagtgcgtgggggcagctgcccccggcagaggctcgggctagcggggcccctgacgc

SEQ ID NO: 2754 - DNA, 50 bp, Homo sapiens
  chr6:125474808-125474858
  hyper
gggagtgggtgccttccgccggctgtacagagcgccggcaggtggcgccc

SEQ ID NO: 2755 - DNA, 31 bp, Homo sapiens
  chr6:128840107-128840138
  hyper
agggcctccacaacaacgtgagaaactgtca

SEQ ID NO: 2756 - DNA, 51 bp, Homo sapiens
  chr6:128840643-128840694
  hyper
cgcggggccagcctggcggtggttttgcccgaggagcgggctcccacgcgc

SEQ ID NO: 2757 - DNA, 40 bp, Homo sapiens
  chr6:128840870-128840910
  hyper
ggagaaaaggggactccgggagggacggggaagtagttag

SEQ ID NO: 2758 - DNA, 31 bp, Homo sapiens
  chr6:128841154-128841185
  hyper
aggtccccacactctccggctagaccgtgcc

SEQ ID NO: 2759 - DNA, 31 bp, Homo sapiens
  chr6:128841229-128841260
  hyper
cgcgtcccacctggcacgaactctggggaca

SEQ ID NO: 2760 - DNA, 93 bp, Homo sapiens
  chr6:128841274-128841367
  hyper
ctgtgttccccacccccggacagagagagctccccacgatccttgtccccagccctagcggggacctggctcacccctcgtgagcccaggact

SEQ ID NO: 2761 - DNA, 50 bp, Homo sapiens
  chr6:128841390-128841440
  hyper
cccggccactcacctgcggagaactggccttgggccgatcccaggagagg

SEQ ID NO: 2762 - DNA, 64 bp, Homo sapiens
  chr6:128841544-128841608
  hyper
gccggggggatcgccgcgaaatccacgacggaggagcgggccgggcctcgcggggtgaggacgg

SEQ ID NO: 2763 - DNA, 31 bp, Homo sapiens
  chr6:128842219-128842250
  hyper
gacaccccacccccatcgaaaacttgtccct

SEQ ID NO: 2764 - DNA, 31 bp, Homo sapiens
  chr6:128842301-128842332
  hyper
cagcgtgaacagctggcgtgtctcctttctg

SEQ ID NO: 2765 - DNA, 31 bp, Homo sapiens
  chr6:130342613-130342644
  hyper
gagatttgagattgatcgctccctgaattgg

SEQ ID NO: 2766 - DNA, 31 bp, Homo sapiens
  chr6:131602927-131602958
  hyper
agggactgacttgcagcgtgctgtttaagtt

SEQ ID NO: 2767 - DNA, 31 bp, Homo sapiens
  chr6:132271776-132271807
  hyper
tctgggctgcagggggcgggctggcagcagc

SEQ ID NO: 2768 - DNA, 63 bp, Homo sapiens
  chr6:132271810-132271873
  hyper
agaaagaaactcagtccgagcggtttctttttccagcgggcgggtgggcgtgagggaggaggc

SEQ ID NO: 2769 - DNA, 31 bp, Homo sapiens
  chr6:133146627-133146658
  hyper
gcagtaaaaataaaaccgataagaagtgagc

SEQ ID NO: 2770 - DNA, 31 bp, Homo sapiens
  chr6:133146679-133146710
  hyper
tattgcagtaaaactgcgaaggtgtttctcc

SEQ ID NO: 2771 - DNA, 31 bp, Homo sapiens
  chr6:133146717-133146748
  hyper
gcaatgggcaacaacacgaccttttgtgagt

SEQ ID NO: 2772 - DNA, 49 bp, Homo sapiens
  chr6:133146772-133146821
  hyper
ccaatacatcccagtacgggacacttttaaagtccgtgttcaaagttta

SEQ ID NO: 2773 - DNA, 53 bp, Homo sapiens
  chr6:134499726-134499779
  hyper
tcatactccctggtggcgaagtggtccgagtagcctcccgaactgtttgtaaa

SEQ ID NO: 2774 - DNA, 31 bp, Homo sapiens
  chr6:134499811-134499842
  hyper
gaacttgctccatatacgcgtatacgcggct

SEQ ID NO: 2775 - DNA, 31 bp, Homo sapiens
  chr6:136870741-136870772
  hyper
cctgaccaccaaatcccgggctgcagagcca

SEQ ID NO: 2776 - DNA, 204 bp, Homo sapiens
  chr6:136870810-136871014
  hyper
aaaactctgagaactccgacaagtcaacgaaagtctgatcccgtcaagcccgcactcgcaaacccccaccgtgctgcactgggccccggccctcccgagctcggtcccctcggacgacggtcgtcgccactgcgggcaccagattggggggcgggccgctcaccccgcggtcctgccccacaccgaccccgctgaggagccccc

SEQ ID NO: 2777 - DNA, 56 bp, Homo sapiens
  chr6:136871047-136871103
  hyper
gtgcccagaaactgctcgtcctgccagtcgcacctggccgacgactctctggccac

SEQ ID NO: 2778 - DNA, 199 bp, Homo sapiens
  chr6:136871106-136871305
  hyper
tttggtctgggggatacgatttcccattcaactgaattagacccgaggccgcggcggggagggcagcggccggggtctctccgtttcctcccccggctcgcctccacctgttgcgggaaagtcgcggtggagcgcccgagggcggccgcaaccccggccggggccgagccgggctggccgagccgcggcggcgaagggc

SEQ ID NO: 2779 - DNA, 128 bp, Homo sapiens
  chr6:136871798-136871926
  hyper
ctcagtccggagcttccggtcgccgcggccgaccagctgagggctcccggagatatggagcggggtcagcgaggcctggtggcgcctcctggagtctgggacgagcggcggtccgaggagcagcccag

SEQ ID NO: 2780 - DNA, 66 bp, Homo sapiens
  chr6:138428362-138428428
  hyper
tagactgcaaccagccgcggccggccagcgcgatgatgtcgaaggcgatggcgctgagtaggagca

SEQ ID NO: 2781 - DNA, 44 bp, Homo sapiens
  chr6:138428546-138428590
  hyper
agcagagagtggcctgcgagcgcgggcgccgccacaaaagcgaa

SEQ ID NO: 2782 - DNA, 31 bp, Homo sapiens
  chr6:138428797-138428828
  hyper
cctggcctctccaggcgcgtgttttgtcttc

SEQ ID NO: 2783 - DNA, 43 bp, Homo sapiens
  chr6:138428877-138428920
  hyper
atctgacccctgatgtcgcatcgtggggcggtggtcagcagtg

SEQ ID NO: 2784 - DNA, 31 bp, Homo sapiens
  chr6:138482424-138482455
  hyper
ggctttggattcaggacgtgtttggagtcta

SEQ ID NO: 2785 - DNA, 43 bp, Homo sapiens
  chr6:138482591-138482634
  hyper
ggcacagtgtgtgcaacgctgcatcgcccgagcctggcacagg

SEQ ID NO: 2786 - DNA, 44 bp, Homo sapiens
  chr6:138482649-138482693
  hyper
gctgttagtgactgaacgcaagaattttccggttagcagacgac

SEQ ID NO: 2787 - DNA, 133 bp, Homo sapiens
  chr6:138482735-138482868
  hyper
ggtgtccgggctgggccgctccgactccgcccgcggccaccgtcggctcagggggtgcgaagaccgcggcgaggcccctccccgcctgcctcccgccgcccgccgcggaccaggcgctccctcccggcggctg

SEQ ID NO: 2788 - DNA, 187 bp, Homo sapiens
  chr6:138482902-138483089
  hyper
cgctaagcgcggcgcccgcggggcctgcctcggcggtcaggtcagcggcctccagcctcactctccggccccagcccgcagccgccgccgagcggagcgcacctgacccaggcgggcggggcggggcggcgggcggggcgcggggctgacgtggcccgcggcatggagcgggcgtgattcatcagca

SEQ ID NO: 2789 - DNA, 43 bp, Homo sapiens
  chr6:138483409-138483452
  hyper
gccgttctggcgattgcgagagtcgcctcgggaaattgatgtg

SEQ ID NO: 2790 - DNA, 31 bp, Homo sapiens
  chr6:138483455-138483486
  hyper
tttgagagtcttggctcgggcgtggacatca

SEQ ID NO: 2791 - DNA, 48 bp, Homo sapiens
  chr6:138483675-138483723
  hyper
gttaaaccaacaaccccgatgtcgaatccttggcgagtggaaccagga

SEQ ID NO: 2792 - DNA, 175 bp, Homo sapiens
  chr6:139013360-139013535
  hyper
ccaattcccaccctccgcgcccactctctcgaggtagccaagaccctccaggagtccgaaagtcacagagcgctctgcgcccctgccacctgcccagcctcccgctggggtccggcagtccccactggagaccccgacatcgcggggctccgcggcccccgcgccgacccagggc

SEQ ID NO: 2793 - DNA, 71 bp, Homo sapiens
  chr6:139013607-139013678
  hyper
ctcacggattttcactcggcggtggtccaggcgcgcagcggcggcttgcagggcgtcgaggcggcggtgca

SEQ ID NO: 2794 - DNA, 122 bp, Homo sapiens
  chr6:139013722-139013844
  hyper
tcgccgaagatgtccccggcgcagcgcgacaggtcggccagctgcgccagcaggcagcccagggcatgcgagctgacctgctccagcgagcggaagagtggcgcgcccgcagccccggcccc

SEQ ID NO: 2795 - DNA, 31 bp, Homo sapiens
  chr6:143266116-143266147
  hyper
aaatgcccagagccagcgccttcgctgcgct

SEQ ID NO: 2796 - DNA, 86 bp, Homo sapiens
  chr6:143999273-143999359
  hyper
gctggacctggccctgcgaccccagtcatgggccagacctcggtgtccacgctgtccccgcagcccggcagcggtgagtccggggc

SEQ ID NO: 2797 - DNA, 69 bp, Homo sapiens
  chr6:144606892-144606961
  hyper
gagcccttggccagctcggggtgcggcggtggcgaccggcaggcgaggaggcccgcgggcagcaggtaa

SEQ ID NO: 2798 - DNA, 31 bp, Homo sapiens
  chr6:144606966-144606997
  hyper
tgcattattgaagcctcgggctggtaatgtg

SEQ ID NO: 2799 - DNA, 38 bp, Homo sapiens
  chr6:144607005-144607043
  hyper
ccccgagggaatggggcgggggccgggaggaggatggc

SEQ ID NO: 2800 - DNA, 31 bp, Homo sapiens
  chr6:144607217-144607248
  hyper
ccgtactagttgtgaacgatccaaacttatc

SEQ ID NO: 2801 - DNA, 104 bp, Homo sapiens
  chr6:144607276-144607380
  hyper
ccctaatcttcctccccgccggggtgacagagtcgccctccgtgcatcgcgcggtgcagggcgctgggccagtgatttgcaagaggggacgtggcctcttagga

SEQ ID NO: 2802 - DNA, 31 bp, Homo sapiens
  chr6:146136665-146136696
  hyper
tggatgtccacgcccccgctaccaccaccaa

SEQ ID NO: 2803 - DNA, 395 bp, Homo sapiens
  chr6:146864539-146864934
  hyper
gcccccagtgaacctccggggcccataaaggctccaggccggctccccggaggcccaccagcgggcgtctgggcctccctccgcgccgcgaccgccaggaggcgccgcccgggagaggaagtccagctgggcccggccgggcttcggaggcgccgcccgggagaggaagtccagttgggcccggccgggcttcagaggcgcagggcgggagccgcctcgcgcagggtcctccccaagccggcgccaggccctgccctcgtccggccctgccctcgtctggccccgcccgggccgcgagcactggcgggttctgggtcctgtgaccggtcaggcggcgtcagcgggcgcggcggagggctggccggcctcgggggagtttccgcggccgccggggg

SEQ ID NO: 2804 - DNA, 31 bp, Homo sapiens
  chr6:147828940-147828971
  hyper
gacgagggggaggggccgggcagaaaggagg

SEQ ID NO: 2805 - DNA, 51 bp, Homo sapiens
  chr6:150039629-150039680
  hyper
ttttattcttgcttagcgttctttccccgaacaagccggtgagcttccagc

SEQ ID NO: 2806 - DNA, 74 bp, Homo sapiens
  chr6:150039682-150039756
  hyper
ctgtattttctgaatccggcagataagaaatgcttgagccaggaccgattgattagcagcggtttagagatctt

SEQ ID NO: 2807 - DNA, 62 bp, Homo sapiens
  chr6:150071939-150072001
  hyper
ttaaatcgaaatatagcgtccccgttttgttgggagactacaagggccgcagtctataataa

SEQ ID NO: 2808 - DNA, 31 bp, Homo sapiens
  chr6:150072014-150072045
  hyper
aatttatagcattattcgctactatgcagta

SEQ ID NO: 2809 - DNA, 31 bp, Homo sapiens
  chr6:150072105-150072136
  hyper
gtcttatttctcaactcgatttgtaatttcc

SEQ ID NO: 2810 - DNA, 88 bp, Homo sapiens
  chr6:150185521-150185609
  hyper
agccccgcccccccgcgcggccccgcccccgcgcgtctcgcgccggctcctccagggctgggagagcaggccccggggagggcagcct

SEQ ID NO: 2811 - DNA, 31 bp, Homo sapiens
  chr6:150185610-150185641
  hyper
agaacaactttgctcccgcgccgctgcccag

SEQ ID NO: 2812 - DNA, 135 bp, Homo sapiens
  chr6:150311892-150312027
  hyper
ttttgtggatttcaaccgctaaagcctttcctcaaagttcattgcgaggggtttcagttccgcccggcagcatccctcagggttctgcgcgctcccgtggcaccgtctgcgcccgagctccggtcccgtcccgat

SEQ ID NO: 2813 - DNA, 38 bp, Homo sapiens
  chr6:150463671-150463709
  hyper
aatgtgtgtttggagccgtggggcggggctggagggga

SEQ ID NO: 2814 - DNA, 108 bp, Homo sapiens
  chr6:152622887-152622995
  hyper
tctgaatctgcaagatcgaaggctggtccctgaaatcagccacggagagggaacatggagccactcgccaggctccagtcaaagagcaaagccgcggggacccactgg

SEQ ID NO: 2815 - DNA, 37 bp, Homo sapiens
  chr6:152623008-152623045
  hyper
ccacagaggggtgggccgaaggcgtggggaggagctc

SEQ ID NO: 2816 - DNA, 88 bp, Homo sapiens
  chr6:152623053-152623141
  hyper
ggtcctctgtcccttccgccagcccctcgacctcggtcaccgtcagcagcatggtggcgtgcttggctttcatcgtcagcatcttgca

SEQ ID NO: 2817 - DNA, 92 bp, Homo sapiens
  chr6:152623142-152623234
  hyper
ttggaattcaaagaagcgatctgctcctggtagcccttaattttctgcgccagctcctgaggaaacatttcccccaccggggtgtcagagca

SEQ ID NO: 2818 - DNA, 279 bp, Homo sapiens
  chr6:152623244-152623523
  hyper
gaaacagaagtagtagcgttcatcttcctgcagggcgagccaatgagcgcgcagagccgcgcgggcccgggaggcaggatgtgtaggcggcgagtcctcctgcatctcgctaccgagccagaccgcaggctgcgcggcgcggcgcaggcacagccaaagtgcccgagcccgcgtccccgcgtcggtacaaaaggagaaatgaggggatgaggccgaatgagtggtttctaatcgcgagaggccccatatggaatcatgaacttccgcaacattaggaac

SEQ ID NO: 2819 - DNA, 87 bp, Homo sapiens
  chr6:154830720-154830807
  hyper
tctccctctacctgtccgacagccctgtcacgcctgcggacggctctgggcaggcggcatggacgaggtcccgcgggagtcacccac

SEQ ID NO: 2820 - DNA, 130 bp, Homo sapiens
  chr6:154830817-154830947
  hyper
cttgtgcctctgcactcgggcccccgggtcgccgggcaccgcaccggggccaggcagggagagcgccccccggcccgagtgccgagtcccgagatcggcatccccagccctcaaccgccacagaaaggcc

SEQ ID NO: 2821 - DNA, 153 bp, Homo sapiens
  chr6:154830966-154831119
  hyper
aagatagggctcccctcggcttgccacaatccgcaccctggaaaggaagagctcggagcaggtacgagagataggagcgcacaggccactcggcagaagtttgcattgtcaccgggctgtgccctcaccgcttctcgccgggaggaagggcca

SEQ ID NO: 2822 - DNA, 80 bp, Homo sapiens
  chr6:154831125-154831205
  hyper
ctcttccccagctcctcgtccgccccatccccgaggctggaggactccggacccccccaaggcccgcgcacctctagtcc

SEQ ID NO: 2823 - DNA, 132 bp, Homo sapiens
  chr6:154831222-154831354
  hyper
gggctccacttggtcacgggttccatggtaaaccgcttcgcctctcgctgggctggagagtcgcagataaagtgctgctgcctgcgctccggtgccccttcccgggagggcgcgcccgcggctgctcccctg

SEQ ID NO: 2824 - DNA, 48 bp, Homo sapiens
  chr6:154831462-154831510
  hyper
cagctcctccttcccccgccgccgccgggatcccgggcacagctgctg

SEQ ID NO: 2825 - DNA, 91 bp, Homo sapiens
  chr6:154831530-154831621
  hyper
caggcacgccgggctgcgaccccagacccctggcctcggctcggcacgggagcctcccggcccgcgaccacttcctcggatctctcgaggc

SEQ ID NO: 2826 - DNA, 163 bp, Homo sapiens
  chr6:154831742-154831905
  hyper
gccgccctggcagggccgagcgcagagcgtgcgcgctcgggttgcaaagtttcagctccggttgctgcaaaccgaataaaagagagggcggggccgagggtctagggaaactcgtgggagggggcgggtccgcccgaagcggcggactcgggttactttccct

SEQ ID NO: 2827 - DNA, 43 bp, Homo sapiens
  chr6:154831918-154831961
  hyper
cggctcacacccgcagcgtcccgggccccgctttccttttcaa

SEQ ID NO: 2828 - DNA, 59 bp, Homo sapiens
  chr6:157802883-157802942
  hyper
ttaacctgggtgtcctcggcaaagttgtcgccgagccgggagcccgtgtaggggccgcg

SEQ ID NO: 2829 - DNA, 36 bp, Homo sapiens
  chr6:158244129-158244165
  hyper
caggaggcgaggaggccgggccgcggccgagggccc

SEQ ID NO: 2830 - DNA, 71 bp, Homo sapiens
  chr6:158244316-158244387
  hyper
agactcggggccgaggcggaggagcggccgccgcgccggggcccagccggagccgccgccctcgcccttgc

SEQ ID NO: 2831 - DNA, 31 bp, Homo sapiens
  chr6:158244423-158244454
  hyper
cgggagacgagccggccgtcccgggccgggg

SEQ ID NO: 2832 - DNA, 51 bp, Homo sapiens
  chr6:158244503-158244554
  hyper
gccggtcgctcaggcccggggcggcgcggagagggtcggggccggggccgc

SEQ ID NO: 2833 - DNA, 31 bp, Homo sapiens
  chr6:158430624-158430655
  hyper
gaagcaaagacattctcgtgtaggaaaactt

SEQ ID NO: 2834 - DNA, 31 bp, Homo sapiens
  chr6:158430659-158430690
  hyper
gaaatgcaactaaaagcgtgggagacaggaa

SEQ ID NO: 2835 - DNA, 45 bp, Homo sapiens
  chr6:160389821-160389866
  hyper
tgggaagcacccgccacgatccagcagggcgcggtgggaggggaa

SEQ ID NO: 2836 - DNA, 36 bp, Homo sapiens
  chr6:163836503-163836539
  hyper
cgcacaaaggaggtgccgggccgggcttgcggcggg

SEQ ID NO: 2837 - DNA, 76 bp, Homo sapiens
  chr6:163836603-163836679
  hyper
tggcgtccaagttggcgcgttgcggagggctgcggggtgagccctgcggcccctctagcttcggcggtcacatttc

SEQ ID NO: 2838 - DNA, 31 bp, Homo sapiens
  chr6:163836944-163836975
  hyper
tagtttaaagaaattccgtaggagaccgaaa

SEQ ID NO: 2839 - DNA, 31 bp, Homo sapiens
  chr6:163837031-163837062
  hyper
cttttgtttggggaagcgagaactgttaggg

SEQ ID NO: 2840 - DNA, 31 bp, Homo sapiens
  chr6:163837117-163837148
  hyper
cgatgacagatcggagcgcagcctgagttag

SEQ ID NO: 2841 - DNA, 31 bp, Homo sapiens
  chr6:163837419-163837450
  hyper
agtctgtttcgaaaatcgactggccaggagt

SEQ ID NO: 2842 - DNA, 31 bp, Homo sapiens
  chr6:166822698-166822729
  hyper
tctgagttggagtggtcgtgatgctgcttca

SEQ ID NO: 2843 - DNA, 31 bp, Homo sapiens
  chr6:167764747-167764778
  hyper
ctgaccacgattcctccgcacaccagctaca

SEQ ID NO: 2844 - DNA, 31 bp, Homo sapiens
  chr6:167764844-167764875
  hyper
ctcagctccctgagggcgcaacccacctggt

SEQ ID NO: 2845 - DNA, 201 bp, Homo sapiens
  chr6:167764951-167765152
  hyper
aaaggtgaatctgaccgcgttgaccgcgttacttcagagatgcgctgtgagctgctttgtgccgcgaaatgacctgtttacccgacagcgccctctgcagcccagcgccggaacgggctttttcatgatgttcctgcgttgtgtttacagcctccctgcgaggggttcgcacgcacaggcggacctcgttttgttgcgcct

SEQ ID NO: 2846 - DNA, 31 bp, Homo sapiens
  chr6:168226996-168227027
  hyper
cgtctggacccagcaccgcccgtctggaacc

SEQ ID NO: 2847 - DNA, 58 bp, Homo sapiens
  chr6:168227058-168227116
  hyper
catttggacccagcaccgcccgtccccgcccgtccggaccgaacgcagcaccgcccat

SEQ ID NO: 2848 - DNA, 44 bp, Homo sapiens
  chr6:168227132-168227176
  hyper
catttagacctagcaccgcccgtccgaaccgaacatagcaccgc

SEQ ID NO: 2849 - DNA, 31 bp, Homo sapiens
  chr6:168227196-168227227
  hyper
cgtccagatccagcaccgcccatttggatcc

SEQ ID NO: 2850 - DNA, 70 bp, Homo sapiens
  chr6:168227398-168227468
  hyper
cggaaccctagcaccgcgcggggcccgccctccgacacctccctccctggcggccgcggcagcagcacct

SEQ ID NO: 2851 - DNA, 34 bp, Homo sapiens
  chr6:168227909-168227943
  hyper
cgaccgaggtgagcaccgccgggcgcggggcctg

SEQ ID NO: 2852 - DNA, 85 bp, Homo sapiens
  chr6:168228221-168228306
  hyper
ccccgcgagcgcggcgcggccccggcctcatccccggcggcgcggggggcgcggcggcgcgcggggccggcgccctccacctgca

SEQ ID NO: 2853 - DNA, 34 bp, Homo sapiens
  chr6:168228538-168228572
  hyper
tctgcccggagggaggcgccggccccaggctggc

SEQ ID NO: 2854 - DNA, 31 bp, Homo sapiens
  chr6:170605113-170605144
  hyper
ctgctggggctgtcccgcgccccatctccat

SEQ ID NO: 2855 - DNA, 102 bp, Homo sapiens
  chr7:362169-362271
  hyper
ccgccttccaggagctcggtgcacctgctgtcccgcaggtgaggccgaggctgcacggccgcgccacgccaccaggtggcagcagagcgccagggatgggcc

SEQ ID NO: 2856 - DNA, 104 bp, Homo sapiens
  chr7:557734-557838
  hyper
gacgcccaaatccagccggcggccgggagaagaagcctccagggaaagcgagggttaaacttccacctcgcgcagctctccgtgccctgcggagaccaccctca

SEQ ID NO: 2857 - DNA, 55 bp, Homo sapiens
  chr7:557848-557903
  hyper
cccccactcccctccccgatttttaaggagagtcgggggtcgctggggagcctga

SEQ ID NO: 2858 - DNA, 31 bp, Homo sapiens
  chr7:557943-557974
  hyper
atcacagcaaagctcccggggatggggatgg

SEQ ID NO: 2859 - DNA, 15 bp, Homo sapiens
  chr7:557975-557990
  hyper
gatggggatgggggg

SEQ ID NO: 2860 - DNA, 37 bp, Homo sapiens
  chr7:558726-558763
  hyper
ccatcccttagggagcgcggcccggaggagggtggcg

SEQ ID NO: 2861 - DNA, 43 bp, Homo sapiens
  chr7:559053-559096
  hyper
ggagggagtctggggccgccgccgccgccgccgccacaccgat

SEQ ID NO: 2862 - DNA, 31 bp, Homo sapiens
  chr7:559250-559281
  hyper
ctccggcgccgcgctccgccctccgctcgcc

SEQ ID NO: 2863 - DNA, 57 bp, Homo sapiens
  chr7:559287-559344
  hyper
gggcagcgcccgcggccgagccgcctggcagccaccacccgccgcccggggcctcgc

SEQ ID NO: 2864 - DNA, 73 bp, Homo sapiens
  chr7:559418-559491
  hyper
gaggaggaggagtaggcgcaggcccggctcgccggagttgggcgggctccgcagggcgcgcgtgtggagccgg

SEQ ID NO: 2865 - DNA, 37 bp, Homo sapiens
  chr7:822391-822428
  hyper
aactcgatcttcctggcgtggccgcctcccgtcacgc

SEQ ID NO: 2866 - DNA, 31 bp, Homo sapiens
  chr7:932818-932849
  hyper
gtgttgggcgcgggcgcggtggtgtgtgcag

SEQ ID NO: 2867 - DNA, 37 bp, Homo sapiens
  chr7:932916-932953
  hyper
caggtgagtgttgggcgcgggcgcggtggtgtgtgca

SEQ ID NO: 2868 - DNA, 57 bp, Homo sapiens
  chr7:932991-933048
  hyper
gagtgttgggtgtgggcgtggtgtgtgcaggtgagtgttgggcgtgggcgcggtggt

SEQ ID NO: 2869 - DNA, 62 bp, Homo sapiens
  chr7:1007912-1007974
  hyper
cccacaggcagagggacgagggcagcctgtttcccagagcctgaggtcggccagattggtgg

SEQ ID NO: 2870 - DNA, 65 bp, Homo sapiens
  chr7:1007997-1008062
  hyper
cagccactgccagggtcgccagagaggacgtgacctggacctccccaccccgtctcctgccacca

SEQ ID NO: 2871 - DNA, 31 bp, Homo sapiens
  chr7:1069676-1069707
  hyper
gtgtgtgctcagtcaccggtttcatgggagg

SEQ ID NO: 2872 - DNA, 37 bp, Homo sapiens
  chr7:1083967-1084004
  hyper
cacagggaatctcgcacgagttcgtcaaatggctggt

SEQ ID NO: 2873 - DNA, 71 bp, Homo sapiens
  chr7:1084018-1084089
  hyper
ccagcactgcctccaccgccaccgccccccaacctcactggtccgagcggttccccgcggtctagccgcga

SEQ ID NO: 2874 - DNA, 47 bp, Homo sapiens
  chr7:1084187-1084234
  hyper
gtgtgtacacagggcccgggcggcgtgcgcgccgtgagccccgccgc

SEQ ID NO: 2875 - DNA, 46 bp, Homo sapiens
  chr7:1126661-1126707
  hyper
ctcatggggcggccatcggttcccgaagcggcgagtgaaaattcaa

SEQ ID NO: 2876 - DNA, 38 bp, Homo sapiens
  chr7:1498584-1498622
  hyper
tcacgtctgactcagccggcgggcgggggatgccatgg

SEQ ID NO: 2877 - DNA, 269 bp, Homo sapiens
  chr7:1498624-1498893
  hyper
ctggcccagctgcattcggtgtccgggcacactgaggccactgaggacagcctcggggggctgcacggtgggctgtgcctgcccagtcccacgcctcggctccccatcccccagccgcccgggcctcagtttccccgcccgtgtcagcgcgcagccgaacagcagaagaatcaaagggcgccaggcaggacttacatgaggtcgggccggtggcggtgcaggatggcgcagaaagccaggccgtcgcggaacgacgtggtcatgttgca

SEQ ID NO: 2878 - DNA, 329 bp, Homo sapiens
  chr7:1498940-1499269
  hyper
gcagcgccctgatggccgccatgtgggcggcgcgcccgccgcgcggcggaaccgccctccgacaccttcccgcggctgtgccgcgaccgcccggccggcgggacagacgctgggaccgctacggaaccgccagacccacggcgcccagccccagctgagccggactgagggcgacgagtgccgggtccctaagagaagccgagcccggccccgcccccgccggccccgcctccttgtaggccccgcccccagccgccaagtcctgcctccggataggccccgtcctcacacctcccagccccggcataggctcccgcccaggcaggccc

SEQ ID NO: 2879 - DNA, 31 bp, Homo sapiens
  chr7:1499562-1499593
  hyper
ccccgccgctgagggccgagacccccaaccg

SEQ ID NO: 2880 - DNA, 109 bp, Homo sapiens
  chr7:2195817-2195926
  hyper
cgtgtggcgaggggagcgggcgcacggtttcacggcgcgtgtggcgaggggagcgggcgcatggtttcacggcgcgtgtggcgaggggagcgggcgcatggtttcacgg

SEQ ID NO: 2881 - DNA, 31 bp, Homo sapiens
  chr7:2250419-2250450
  hyper
gcaggagactaggggtcgacccccacagcga

SEQ ID NO: 2882 - DNA, 51 bp, Homo sapiens
  chr7:2517233-2517284
  hyper
tctccatgggtgctgccgctggggcctgtgcccggacgtcctggtaggagg

SEQ ID NO: 2883 - DNA, 31 bp, Homo sapiens
  chr7:2517507-2517538
  hyper
ctggggcccagcaagccgcaggtccctccta

SEQ ID NO: 2884 - DNA, 67 bp, Homo sapiens
  chr7:2524319-2524386
  hyper
acagccgctgcctgcacgtagacatgaagcacctggaacatccgaattcagacgtgagcatcaaaaa

SEQ ID NO: 2885 - DNA, 8 bp, Homo sapiens
  chr7:2524389-2524397
  hyper
cctggggc

SEQ ID NO: 2886 - DNA, 31 bp, Homo sapiens
  chr7:2555343-2555374
  hyper
ttacagagtcaagtaacgtcccaagacccac

SEQ ID NO: 2887 - DNA, 31 bp, Homo sapiens
  chr7:2555390-2555421
  hyper
aagaccacacagtgggcgaggggtctgggca

SEQ ID NO: 2888 - DNA, 31 bp, Homo sapiens
  chr7:2671600-2671631
  hyper
ggcgggcgcgggcggccgagcggagccgagc

SEQ ID NO: 2889 - DNA, 31 bp, Homo sapiens
  chr7:2728271-2728302
  hyper
ggaatccagggccaagcgcccgaaagaaggc

SEQ ID NO: 2890 - DNA, 79 bp, Homo sapiens
  chr7:3083126-3083205
  hyper
ggatacccccagcatcgcgggaccagcgggagccactcccatcccccgacgccccccccgccaccgtgtcatctcactg

SEQ ID NO: 2891 - DNA, 31 bp, Homo sapiens
  chr7:3083208-3083239
  hyper
ccccccatctcctccccgtgccctcttctct

SEQ ID NO: 2892 - DNA, 164 bp, Homo sapiens
  chr7:3083330-3083494
  hyper
cgcggggcgcctcctccacgcaggcctccggcttcctccaggcgaccaggccctccgtccccccgggcccggagccgtcctccgaggggcgccgcccgcccaggggctgcagggccgggagggggctgcgggcggcgcgggcaggagtccgaaggccagaggag

SEQ ID NO: 2893 - DNA, 78 bp, Homo sapiens
  chr7:3083524-3083602
  hyper
cataggctgggaggggcgggggagggaaatgcaaaacccgacaggaaatgagactaaaaaatgcgaaaggttagaaaa

SEQ ID NO: 2894 - DNA, 37 bp, Homo sapiens
  chr7:3083609-3083646
  hyper
gaagagagggagggggcggagtcggtgcttcgggagg

SEQ ID NO: 2895 - DNA, 51 bp, Homo sapiens
  chr7:4770078-4770129
  hyper
gttcctggaggagggacgcaggcccagtggagagggcgtggtttgcaggca

SEQ ID NO: 2896 - DNA, 31 bp, Homo sapiens
  chr7:4814425-4814456
  hyper
atcgctaccctaggcccgtccctccccaccc

SEQ ID NO: 2897 - DNA, 31 bp, Homo sapiens
  chr7:5125290-5125321
  hyper
taggaccgggggacatcgcaggcaacataaa

SEQ ID NO: 2898 - DNA, 55 bp, Homo sapiens
  chr7:5461074-5461129
  hyper
cctccgggcggccaggcggagctgcgcgaggcggcgcacacggcgtcttggcggg

SEQ ID NO: 2899 - DNA, 31 bp, Homo sapiens
  chr7:5461384-5461415
  hyper
ctgcctcggcggctgccgggtcctcccgaaa

SEQ ID NO: 2900 - DNA, 74 bp, Homo sapiens
  chr7:5462237-5462311
  hyper
ccgggtgcccgcccggcgccctgcactccgcgcccagccccccgagcaggagaccccctcggctgcaaaacccc

SEQ ID NO: 2901 - DNA, 31 bp, Homo sapiens
  chr7:5464743-5464774
  hyper
ttgtacttttattttgcgctttcagcaaaat

SEQ ID NO: 2902 - DNA, 154 bp, Homo sapiens
  chr7:5464777-5464931
  hyper
ttctgggttgagtagccgtgagctgcccgcggccgacctacctgaccgggggcgcagggagtgcggaccacgccagcaggactgtcctgggggcccccgcaccctctctctgcagccccccgagcccggctaggcattacgtaccctggaaagg

SEQ ID NO: 2903 - DNA, 31 bp, Homo sapiens
  chr7:5465101-5465132
  hyper
aggggggaaaaatgagcgagttagtgcccat

SEQ ID NO: 2904 - DNA, 31 bp, Homo sapiens
  chr7:5465309-5465340
  hyper
ttggaagctgtagctccgctggggaggaggg

SEQ ID NO: 2905 - DNA, 157 bp, Homo sapiens
  chr7:5465358-5465515
  hyper
aaggaacaaaaatagccggagccgaggggaacaagccacggtgtccgcgtttggagctgggcgtgcgggtctcagtggcggcctcggcattcggggcggcgggaggcgcccggtgcatccccgggacggccaggagcaaagacggagaggagagggg

SEQ ID NO: 2906 - DNA, 123 bp, Homo sapiens
  chr7:5465558-5465681
  hyper
aggggactgcaggaatcgaataaacgcagtcgagctgcgcggggctgctggaagcccaggcgggggaagggggccgtgtgtgggggcgcagagcgcccttgagccttacgcagaggtcttgtg

SEQ ID NO: 2907 - DNA, 46 bp, Homo sapiens
  chr7:5465687-5465733
  hyper
tagttaagccctcccacgcccgaggccccatcgcttcctctccacc

SEQ ID NO: 2908 - DNA, 41 bp, Homo sapiens
  chr7:5465761-5465802
  hyper
gatcctaattccccaccgcattaccccgccctggatttggg

SEQ ID NO: 2909 - DNA, 31 bp, Homo sapiens
  chr7:5465827-5465858
  hyper
gctcaaggaaaaaatacgtatatcttgagag

SEQ ID NO: 2910 - DNA, 60 bp, Homo sapiens
  chr7:5465933-5465993
  hyper
caccccctggatgctccgagacgccgtaattgtgacggcggggtacgtgtgccataaatc

SEQ ID NO: 2911 - DNA, 248 bp, Homo sapiens
  chr7:5466027-5466275
  hyper
ctggatttgccaatggcgtttgcatttttcaagtgtgcgcctcggcggtgtgacgaacccagccggtatttcattagggccgcggttcggggcagaggaggtcccctccccgcctgggctttgtgcgcccagcccccttgcaccggcccttccatacctgcccccggcacccactccatatttgcgcggccctgcagccaccggagtccggccggggagcagggcctggggacgcggtggtggtggtg

SEQ ID NO: 2912 - DNA, 49 bp, Homo sapiens
  chr7:5466775-5466824
  hyper
ggccaaaaactgtggacgcaattgagtgaaagtgcgtgtgtgtgtgtgt

SEQ ID NO: 2913 - DNA, 71 bp, Homo sapiens
  chr7:5594637-5594708
  hyper
gtctcagcttggggtgcgggggccgactctgcccgggctgggtggatagttgttatcgggagctcccaggc

SEQ ID NO: 2914 - DNA, 35 bp, Homo sapiens
  chr7:5594774-5594809
  hyper
gagataagccaggccccgtgcgagtccagcgcgga

SEQ ID NO: 2915 - DNA, 45 bp, Homo sapiens
  chr7:5594849-5594894
  hyper
cgcccctcggccggcccggcccacttggcccgagttcctctccat

SEQ ID NO: 2916 - DNA, 31 bp, Homo sapiens
  chr7:5635711-5635742
  hyper
cttggggtccttatctcgtttctatgtcagc

SEQ ID NO: 2917 - DNA, 34 bp, Homo sapiens
  chr7:6966950-6966984
  hyper
acgatgtgtcaaacagcgtcgcttctcccagtga

SEQ ID NO: 2918 - DNA, 68 bp, Homo sapiens
  chr7:6966987-6967055
  hyper
ggttctcctttgcctccgtctctttccccgattgatttttccaaatggggagtcgtggcttggtcctg

SEQ ID NO: 2919 - DNA, 78 bp, Homo sapiens
  chr7:7464015-7464093
  hyper
ttgcttggccatttgacggcactggttttgtcataaggcagcaccgtaggtacctaagaagtgcgttgacctgtgata

SEQ ID NO: 2920 - DNA, 34 bp, Homo sapiens
  chr7:7605663-7605697
  hyper
tggcgatatagccagactccgtctcaaaaaaaac

SEQ ID NO: 2921 - DNA, 31 bp, Homo sapiens
  chr7:7605729-7605760
  hyper
cctgattaaaaactttcgatgactctaacat

SEQ ID NO: 2922 - DNA, 77 bp, Homo sapiens
  chr7:8301293-8301370
  hyper
acaagtcaaccctggacgcaagtccctgcccaccagggagctcggggtcctggggccggagccgccgggaaggcgag

SEQ ID NO: 2923 - DNA, 6 bp, Homo sapiens
  chr7:8301429-8301435
  hyper
cggagc

SEQ ID NO: 2924 - DNA, 57 bp, Homo sapiens
  chr7:8301667-8301724
  hyper
gctgcttcctgcagcccgcccggcgcgcccccgccccgaccccggagggcaggtacc

SEQ ID NO: 2925 - DNA, 149 bp, Homo sapiens
  chr7:8301735-8301884
  hyper
gcccccaggagcctcccggccgcggtcggagcgtccctccggatcactcatccgacgtcagcgtcagccgaaggcgagggaaaggggcggggggagcgcaggaaccggcccttcctgcggcggccgccaccagccggaatagcaaccgg

SEQ ID NO: 2926 - DNA, 77 bp, Homo sapiens
  chr7:8476667-8476744
  hyper
gtctttgcccctttatcgcctgaccgtagcagccgcggacgccagagggcgctgcgcatcagcgtcctcgcccacag

SEQ ID NO: 2927 - DNA, 163 bp, Homo sapiens
  chr7:12726347-12726510
  hyper
ggccggaagtcccatccgacctcgcgggcagccagcgctaggccgattcgaactcgaccttgttttggcgttgctaggagacgcggctcctgcgcgccccctacaggccggcgcccgggcggcgcgcgggcagggggcggggactgtcgcgtggagctgccgg

SEQ ID NO: 2928 - DNA, 31 bp, Homo sapiens
  chr7:12726536-12726567
  hyper
cgcggcgcccgccaggcgcccagtcctctgc

SEQ ID NO: 2929 - DNA, 85 bp, Homo sapiens
  chr7:12726641-12726726
  hyper
gaagaagagggaaggacggttagtcaggtgagccgcggcggggtgggcggccggggcggccacgccctgccgagggagaagagcc

SEQ ID NO: 2930 - DNA, 253 bp, Homo sapiens
  chr7:12726796-12727049
  hyper
caggtgggatctctagcgcctcaggggcccgcgcggcaacagccggcaccctcgggcccgcggacaaagggttaacgcgttggcagtgactgcgggccccggatgtgagagccttggcttgacgccctggctgcgctgcaggtgcgccgggccgaacggagccggcagcctggcggcgacctgaccgcccgaggctccccttcacctgcagcggctgctcggctccctctgggaacgccgccttttctaactt

SEQ ID NO: 2931 - DNA, 129 bp, Homo sapiens
  chr7:12727051-12727180
  hyper
gggcaacaggtggtgccggtggaccgagagagagctcagctccgccgcgctgggagcggcagttaccctcaccaattagggagcgggggcgggagttgcatggcttccctgatgcgggtgaccaatggg

SEQ ID NO: 2932 - DNA, 77 bp, Homo sapiens
  chr7:12727184-12727261
  hyper
gggatcatgagtggaccgggaggagtgggcgtggtcggagtctgagtccaaggtttctcgtgcggcaactgccagag

SEQ ID NO: 2933 - DNA, 39 bp, Homo sapiens
  chr7:12727283-12727322
  hyper
agggtgcttatccctgcgtagaaacgcctgccaatgctt

SEQ ID NO: 2934 - DNA, 44 bp, Homo sapiens
  chr7:12727331-12727375
  hyper
gacccagactccagatcgggaggtgagaacgttgttattttgca

SEQ ID NO: 2935 - DNA, 31 bp, Homo sapiens
  chr7:12727416-12727447
  hyper
atgtggaattagattccgaagataggactat

SEQ ID NO: 2936 - DNA, 94 bp, Homo sapiens
  chr7:17338150-17338244
  hyper
atggaatccagatgggcgggggcaagcaggacggggcggggctacgcgggatctgggcggggcggggccggtgaggggtcgggggtgctcctgc

SEQ ID NO: 2937 - DNA, 136 bp, Homo sapiens
  chr7:17338602-17338738
  hyper
gtgtagacggcacctgcgccgccttgctcgcgggtctccgcccctcgcccaccctcactgcgccaggcccaggcagctcacctgtactggcgcgggctgcggaagcctgcgtgagccgaggcgttgaggcgcggcg

SEQ ID NO: 2938 - DNA, 31 bp, Homo sapiens
  chr7:17339051-17339082
  hyper
ggattaggtccattcccggcactgcccgtgg

SEQ ID NO: 2939 - DNA, 70 bp, Homo sapiens
  chr7:20837556-20837626
  hyper
ccgagagacagcctgccgtcccaggtccagcccgcgcctctgcgcacctcccggcacccggcgcaggtcg

SEQ ID NO: 2940 - DNA, 101 bp, Homo sapiens
  chr7:20837650-20837751
  hyper
cgcctgctcgccggcccgcaaggcccgggctgcggcggccgcgggcgcgggaggcggaggcgcaggcgccgggctccgtggcagcccggcccagccccgcc

SEQ ID NO: 2941 - DNA, 31 bp, Homo sapiens
  chr7:20837801-20837832
  hyper
gctccgccgccagctccgtgctctgcccggc

SEQ ID NO: 2942 - DNA, 116 bp, Homo sapiens
  chr7:20838168-20838284
  hyper
cggccgcgggagggcccgcctcgccccgggccgccgacctgacacctgctgggcagcctgcgcggcctggggcgaaggccagcgggcggcggggtgggaagcgccagcgcaggggc

SEQ ID NO: 2943 - DNA, 31 bp, Homo sapiens
  chr7:22396516-22396547
  hyper
tcagccgcggccgcagcgacgccggcggctg

SEQ ID NO: 2944 - DNA, 31 bp, Homo sapiens
  chr7:22894198-22894229
  hyper
ctgccgtccacgcattcggcctacaggcagc

SEQ ID NO: 2945 - DNA, 57 bp, Homo sapiens
  chr7:22894264-22894321
  hyper
aggatcaaattccaaccgcaggcggaggcgccgagccccggacggtctctgggttct

SEQ ID NO: 2946 - DNA, 160 bp, Homo sapiens
  chr7:23052933-23053093
  hyper
gctgtctgaacctctccgccctgcaggggaccaaagaccgactcgggccaacgctgctctccagggggcgagggcggggggtcgacagtgaccattgtggccaccagaccggacggacagtggcggcctcgccgaagtagagggcgcgagtgggagagga

SEQ ID NO: 2947 - DNA, 210 bp, Homo sapiens
  chr7:23053095-23053305
  hyper
cagaggccagagcatccgccgcggcagggaggggacggggggctcccgccccaggcccacccggcagaggggcggccggtggggccgaggcggcggcacccgggtcacagcaggaggctggactgctcctcgccgggaaggaaagacccgagtcgcgcgcacaaagctgccgccctccaggcagcgggcaggctgcgcccaacttcgggg

SEQ ID NO: 2948 - DNA, 31 bp, Homo sapiens
  chr7:23053448-23053479
  hyper
cgccgccgcctcgccccggctcctccctgac

SEQ ID NO: 2949 - DNA, 72 bp, Homo sapiens
  chr7:23053720-23053792
  hyper
ggagagccaccactgccgccagcctctctgacaggcacgaccagggacccgtcctcaagcagccaaccacca

SEQ ID NO: 2950 - DNA, 27 bp, Homo sapiens
  chr7:23053819-23053846
  hyper
cgtcctccggggcgggatcagaacaac

SEQ ID NO: 2951 - DNA, 81 bp, Homo sapiens
  chr7:23053957-23054038
  hyper
ttgactgtaaggtttgcggtggccgctaggcgatgacaatcagcgaaggtctcttagattctgagccgttagggcttatgg

SEQ ID NO: 2952 - DNA, 31 bp, Homo sapiens
  chr7:23054048-23054079
  hyper
aaaaaataaaccttaccggatgatgtgaagg

SEQ ID NO: 2953 - DNA, 139 bp, Homo sapiens
  chr7:23508249-23508388
  hyper
ggcctcctgaggccctcgaagggcccccgaggcccggacgcggctccaggcggagggagaagccgaccccctcgagcggcgtgggcatttaactcgcagatggttggggagcagggtccgctggcgggcccactacttg

SEQ ID NO: 2954 - DNA, 96 bp, Homo sapiens
  chr7:23508428-23508524
  hyper
ggggccaccaacaccacgaggcccgcaagagggacgcggcccaccctctcaccgccctggacacgctccacagggcagactcggggcagggggctc

SEQ ID NO: 2955 - DNA, 400 bp, Homo sapiens
  chr7:23508609-23509009
  hyper
ggaagacagggagtggcgagaaagggtcggggacggcaggggagaccacgaacgggagaactggcagaggcgcagctcggcacaggctgaaccaggcgcgaaggacggcgaggcgcccgcaccacgtctgaattgattaaaagggaagccgaaaggcacggggctcccatggggaccccaacgcagccttccccctgggcgtcctgctccgcccggcaccgtccctcgccctggcggagccatacccggaggccgcagccccgcgccagggcccggagagcggcgggcggccggtgcgtggcggcgactcccttccaggcgaccagccgcccccgcccacctgcccctatcgctcgtcggaccaggggaggtggaacggggaaaccgggcacacactctc

SEQ ID NO: 2956 - DNA, 31 bp, Homo sapiens
  chr7:23509018-23509049
  hyper
agggtggggaggaagcgcggggccgcctgtg

SEQ ID NO: 2957 - DNA, 125 bp, Homo sapiens
  chr7:23509128-23509253
  hyper
gcagcacagacagcgccgtaaataacgaccgaggaaagcaggaaggaacgaggcacaggcgggcattctagctcggcccccgaggcccagcgtgccggggcctggagcacgcgcctgggcccggg

SEQ ID NO: 2958 - DNA, 194 bp, Homo sapiens
  chr7:23509309-23509503
  hyper
gggctttcttgacagcgcgttcgccctcacccagcaaaccccggccggggaagcagagccgcgggccggagtgggagccggagctgaggagagccccggcccccacgcgcgtgggtgtgggcgctcaggcctcacccccgctcccccagcgcgccgggcctggggcccgcggagccacccggtgggcctgggcg

SEQ ID NO: 2959 - DNA, 64 bp, Homo sapiens
  chr7:23509545-23509609
  hyper
cgggcccacctgaaagcgcctcgatggccttgagggcccagctctcgtccgggcagtccacgaa

SEQ ID NO: 2960 - DNA, 102 bp, Homo sapiens
  chr7:23509623-23509725
  hyper
tcaccaggaagggtcccgacaccgggatcttggcgtccttgaagatactttctaggtccgagggggcggcgttctcgctgaggtttccgatatacagtttgt

SEQ ID NO: 2961 - DNA, 31 bp, Homo sapiens
  chr7:23509743-23509774
  hyper
gtttaaaaaaaaataacgagaaaaaacgaaa

SEQ ID NO: 2962 - DNA, 108 bp, Homo sapiens
  chr7:23510877-23510985
  hyper
cccgcagcgtcctgggcgggtgtctgggcgacacctcctccgcctccgcctgcgctcgcggtggctctcggcttcgcgtttgccattggttgcgcgattcagaaaagg

SEQ ID NO: 2963 - DNA, 37 bp, Homo sapiens
  chr7:23510987-23511024
  hyper
ccaggataaatgaggccgggggcgggcttggccactg

SEQ ID NO: 2964 - DNA, 313 bp, Homo sapiens
  chr7:23513518-23513831
  hyper
tcctctggctctgccccgagaaagagggcgggatcctcacggctcacagtggggagggtctttcgtcggccgccggctcgcctcggagggcctggaccactggaccgcccttccccggggccctgccgcgggaccgcgggcttctggctcctcctggggctgcgtccgtatgcgcggagcgtgtggccgggccgtcgccgcgccaccccacctgagtccgccggccagcgcggggacgcaccgggcagcgtgtgtttggcgaccctcccgcacctctggtctcagttgcgtgtgtgcacgaggggttccatag

SEQ ID NO: 2965 - DNA, 238 bp, Homo sapiens
  chr7:23513895-23514133
  hyper
gggccgcgagactggcgcgcaaaagcggctccaaggcggggctcccgcgctccccggggccggcttgccgagtccaagttgagcaaccggcgtcgagagagacaccgcccctgctgcgggcgggggcctctcctcgcttccgattggctgacggggggaacctatcgccgtcggccgcctccgccagagcggtttgctggttttcattcattggccccggagccgcccctggatttcc

SEQ ID NO: 2966 - DNA, 60 bp, Homo sapiens
  chr7:26192666-26192726
  hyper
cgctggcggatgtgcgagcgaggtaggtgcagagcgggaagcgagcgaagtgcggcgtct

SEQ ID NO: 2967 - DNA, 124 bp, Homo sapiens
  chr7:26415773-26415897
  hyper
ggccgcctgttggttgcggcgcctccgcggcccgcgcgcatcccccgcgctgcgtcccgcacacgcgcgctcccgccgcgtcccgcccgggccgctccgctggcggcggcgactgggctgcagg

SEQ ID NO: 2968 - DNA, 38 bp, Homo sapiens
  chr7:26415986-26416024
  hyper
gtggtggggcggggggcggcgggcggtgaatgggaaca

SEQ ID NO: 2969 - DNA, 50 bp, Homo sapiens
  chr7:26416148-26416198
  hyper
ataagcagaaagccctcgtgcagaggggatccgggcggtgcacttggtgt

SEQ ID NO: 2970 - DNA, 41 bp, Homo sapiens
  chr7:26416307-26416348
  hyper
tggttgaggggcggccgcgccggggccggggctggactcca

SEQ ID NO: 2971 - DNA, 160 bp, Homo sapiens
  chr7:26416358-26416518
  hyper
tgcagacgctcgcgcccggccggaggaggggctacaccgtgctgccccggccccatggggcccggcccccgagggtccccgcgagcggacgcggtggggccgggcaaactctacgtgccctaaattttgtcatctgcacacgcatcgcacacattagtta

SEQ ID NO: 2972 - DNA, 226 bp, Homo sapiens
  chr7:27135265-27135491
  hyper
gacacccccaggttcccggaagtctggtaggtagccggctgggggtggcgatggtggtggtggtggtggtggtggggcgaaccgatctgcacccccctgcccactaggaagcggtcgtcgccgccgcaactgttggcgctgaccgcgcacgactggaaagttgtaatcctatggtccgaggggtaggctcgggctgagcaggtccccgagtcgccactgctaagta

SEQ ID NO: 2973 - DNA, 41 bp, Homo sapiens
  chr7:27135539-27135580
  hyper
gagtgacctggtcctgcgaagcccggcgtgactgtgccaac

SEQ ID NO: 2974 - DNA, 112 bp, Homo sapiens
  chr7:27135586-27135698
  hyper
acttcctccatggggccggagaagaaaaatgatatgaatgtacagtgcgcaagagggggggcgggagggcggaggacgctggaggaggggcacgtgacggtgtcagccaatg

SEQ ID NO: 2975 - DNA, 64 bp, Homo sapiens
  chr7:27135706-27135770
  hyper
tcctgcaaaagtttgccggcttccgcagtgatggatcaccgttttagtggcatttaaatccccg

SEQ ID NO: 2976 - DNA, 180 bp, Homo sapiens
  chr7:27135979-27136159
  hyper
cgttcaatgaaagatgaactggcgagaggtgagaagggaagagggctcccggctctctcggggcgggaatcagtgggccagagctcgccgggtggccgcaagtacgccggcccagcccgcagcgcgcccagccggaaggcggggaatccggctgacaccgcgccccgggttcccaggcca

SEQ ID NO: 2977 - DNA, 161 bp, Homo sapiens
  chr7:27136174-27136335
  hyper
ggctgggctgggagaccgtggggctgtgaggagcgcatagaaccgtggtggagggcgaggctgggccaccggctcttcaagctcggaatggagggggaagagcgcagagggctggctgggaggaactcgggtgggcgtgaaggagacgagggcaagaaaag

SEQ ID NO: 2978 - DNA, 57 bp, Homo sapiens
  chr7:27136346-27136403
  hyper
cttccaggagggtcttcgaaaccctctccccacagcccctctcgtcattagcatggc

SEQ ID NO: 2979 - DNA, 132 bp, Homo sapiens
  chr7:27136407-27136539
  hyper
aggagtttctgtaattcgacttggaggggcggatgagccctggaaactcagagctcgccggaaaaggccgggggcggccgggctcttcttccccaccttccctctctcgtcgctctccgcccctttctcttt

SEQ ID NO: 2980 - DNA, 209 bp, Homo sapiens
  chr7:27136540-27136749
  hyper
ccactcagttttgcaccgggagccctccgggatgcggagctactcgaccgccggatttttaggggtaggaggcgggggagagagatgacgctggcggacgtggccagcgcgggggccgggcggtgcgctgcaggccatctgccggcgccctgagacccaggagcctccgcgctcccgcgtgggcctcacagggccggtccacagctcca

SEQ ID NO: 2981 - DNA, 36 bp, Homo sapiens
  chr7:27136754-27136790
  hyper
gtagctgaactcccttcgttgcgttcctctttttct

SEQ ID NO: 2982 - DNA, 31 bp, Homo sapiens
  chr7:27136834-27136865
  hyper
tcctcattctgctgcacgtctagagtgggtg

SEQ ID NO: 2983 - DNA, 31 bp, Homo sapiens
  chr7:27190625-27190656
  hyper
aataaataatcggcccgcggcagccgcagtc

SEQ ID NO: 2984 - DNA, 55 bp, Homo sapiens
  chr7:27240996-27241051
  hyper
gaaccaagcagcgacccgtcttgtagctgccatgttttgtcgaggggttctgggg

SEQ ID NO: 2985 - DNA, 58 bp, Homo sapiens
  chr7:27241115-27241173
  hyper
ctagaagaggaacaagcgttcaaagtgaaagtgggcacattaccggaatagtgctggg

SEQ ID NO: 2986 - DNA, 31 bp, Homo sapiens
  chr7:27288912-27288943
  hyper
tttgcaggagggaaaacggaggctccaggtc

SEQ ID NO: 2987 - DNA, 79 bp, Homo sapiens
  chr7:27289788-27289867
  hyper
cattattccccaactgcggaaacaccagccaccatatgtccgccggagaataagcgtgagtgtcgcggtggacagttgc

SEQ ID NO: 2988 - DNA, 51 bp, Homo sapiens
  chr7:29234146-29234197
  hyper
agcccaggagagggtgcgggagctggcggggcggctcggagctgccaggac

SEQ ID NO: 2989 - DNA, 31 bp, Homo sapiens
  chr7:29724331-29724362
  hyper
cggcccacgtgcagccgcgggaggaccgagc

SEQ ID NO: 2990 - DNA, 115 bp, Homo sapiens
  chr7:29724384-29724499
  hyper
gtacctccaaacatgcgcggtgagaggtgagctggtaaggagccgatcaccaggagcggcccgccggggctccagcccaccggccggtgccggccgccgccgccatcctcagggc

SEQ ID NO: 2991 - DNA, 120 bp, Homo sapiens
  chr7:29724581-29724701
  hyper
cgacgccacgcccccccgaggaaacagctgcggggccgccgcggcgccgccgggctggtgagcgctgggcacctgggccgggaacctccccgcggcggcggcctccggcccccggctctg

SEQ ID NO: 2992 - DNA, 55 bp, Homo sapiens
  chr7:29725076-29725131
  hyper
ctccagcaggaaggggcgactcaggtggcggtgcgactgccgctggtttcggttc

SEQ ID NO: 2993 - DNA, 40 bp, Homo sapiens
  chr7:30067984-30068024
  hyper
atgcgcgagcgcgtcccgggcccggcgagtcgagggttca

SEQ ID NO: 2994 - DNA, 117 bp, Homo sapiens
  chr7:32767519-32767636
  hyper
cctgtgaaattaatctcgcagggggagcgaagccacggttgcgggggagcgaagccacggttgccgggaagcgcgggccacccctccctccctctcattcttcgtcctcccctcgcg

SEQ ID NO: 2995 - DNA, 58 bp, Homo sapiens
  chr7:32767753-32767811
  hyper
agccggaggatggcggcggtaacagcggccgccggagaggaggcggtggggaggcccg

SEQ ID NO: 2996 - DNA, 109 bp, Homo sapiens
  chr7:32768219-32768328
  hyper
cgcacgcgcgcgtactcggctcggatctaccttccagtagcagcggagtggccaatgggaccgggaccagggctgggggccggggggccgccgccgcggggaggttccc

SEQ ID NO: 2997 - DNA, 46 bp, Homo sapiens
  chr7:32768342-32768388
  hyper
gcgctcaccagcccagcgcctcgggcggcgccgcggtggccccggc

SEQ ID NO: 2998 - DNA, 43 bp, Homo sapiens
  chr7:32768552-32768595
  hyper
ggagccccggcgggccgcgcctggtgatcggctccttaccagc

SEQ ID NO: 2999 - DNA, 60 bp, Homo sapiens
  chr7:32982309-32982369
  hyper
tgaggactagaagtcccgtcgcaggcactaggttcctcacaggcccgcacccctgcctgg

SEQ ID NO: 3000 - DNA, 107 bp, Homo sapiens
  chr7:32982429-32982536
  hyper
cagaaaacgggcggcgcgcggactgcggcccagacggctgctcgagactcacaaggactccaggcgcttgagctgctgcagctgctgggcgtcgtgccgccgccgct

SEQ ID NO: 3001 - DNA, 150 bp, Homo sapiens
  chr7:32982554-32982704
  hyper
gcagttcctgatccagcggctcccgcggccaccacgcgcccccagccctcgcatcctcgcgccccggccaggacgacatcgcggcacctgcggcgcggctctggctgcggccaagagggcacttcctccgtgcggcgccccttcccgccg

SEQ ID NO: 3002 - DNA, 31 bp, Homo sapiens
  chr7:32982897-32982928
  hyper
ggagcttcagggttcccgccaggccacactc

SEQ ID NO: 3003 - DNA, 35 bp, Homo sapiens
  chr7:32982936-32982971
  hyper
gcccctttgaggttcccgaccgaggcaaggggtct

SEQ ID NO: 3004 - DNA, 93 bp, Homo sapiens
  chr7:32996716-32996809
  hyper
gggaaaattggatccacggccacgtaggagcccctcacggcaccaaacccggtgtctccagggacgggcggagaccagcgggtgggcttgggc

SEQ ID NO: 3005 - DNA, 83 bp, Homo sapiens
  chr7:32996812-32996895
  hyper
acgcgcttttctcttccgactttgggccaaagccttgtccggagatcacagtgtctcgctcggggacacgccctctctaggcc

SEQ ID NO: 3006 - DNA, 93 bp, Homo sapiens
  chr7:32996917-32997010
  hyper
tcccagcccccctccccgctgcggcacgcacattcccaatgccgggcggggcagggcgcagcaggcccgccctcggcgcgcggccaggctggg

SEQ ID NO: 3007 - DNA, 67 bp, Homo sapiens
  chr7:32997011-32997078
  hyper
tcctcccctggagctgcggccgggagggcgggcggccggggagacggggtggcggctgcagcccggg

SEQ ID NO: 3008 - DNA, 350 bp, Homo sapiens
  chr7:32997194-32997544
  hyper
cggggctggaggcccccgccgccaccgctgctcctgctgctgctctgggtgaccgggcaggcagcgcccgtggcgggcctgggctccgacgcggagctgcagatcgagcggcgcttcgtgcccgacgagtgcccgcgcaccgtgcgcagcggcgacttcgtgcgctaccactacgtggggacgttccccgacggccagaagttcgactccaggtaccgcgcccttggcgcccggcgcggcctcagcggatgcgcgtccctctctccggacaggcctttccctcctgccggacctcccctagctccgccccgtgcagccgcgctcctcccttcttccgctgcccagatcct

SEQ ID NO: 3009 - DNA, 35 bp, Homo sapiens
  chr7:35839939-35839974
  hyper
gcaatgggggctacagcggccgacctctggggctg

SEQ ID NO: 3010 - DNA, 44 bp, Homo sapiens
  chr7:35839983-35840027
  hyper
actagagtgtgatggcgcgagggaagggtcggggaaacagggcc

SEQ ID NO: 3011 - DNA, 49 bp, Homo sapiens
  chr7:35840029-35840078
  hyper
acctcacttttcaccccgaaagtcaagatagccacggaaacagggatga

SEQ ID NO: 3012 - DNA, 31 bp, Homo sapiens
  chr7:36192381-36192412
  hyper
taagccccctaagtcccgcctctgcgctccc

SEQ ID NO: 3013 - DNA, 67 bp, Homo sapiens
  chr7:36192422-36192489
  hyper
cccgcgctcatggccccgcccccgcttttcctaccccatcgcgccctggccccgctcccacactcta

SEQ ID NO: 3014 - DNA, 85 bp, Homo sapiens
  chr7:36192637-36192722
  hyper
tcttgagccttgatgccgccccctcttccatggccccgcctctcccactccaggcccgcccttgcgctctcgggttcctctctcc

SEQ ID NO: 3015 - DNA, 411 bp, Homo sapiens
  chr7:36192725-36193136
  hyper
cactggtgccaggcctcgccccgcgccagggcccctcccccacgtgccctcgggagtcccggggaggagttgccgcgcggaggaggcgtggccgcggtgcctgcggaggcgcgagcggcgcggcgcggcgcggccgggactttggctttgacaccgactgcgagcgggagccgtgcggctggtgctgggtctggactggctctggcggatccccgcccgagttgggcgcaggactttttgccggggtaaacgcaactgcggcggcgccgccgcaagccccggtgcagcctcggcggcgggtttcgccgccgctgccgccgcctccgagcagccctgcggcttctattcactctgggagagcgatgctaagtttctcccatagaaagagccgggacacgcagaccgaagcgg

SEQ ID NO: 3016 - DNA, 132 bp, Homo sapiens
  chr7:36193160-36193292
  hyper
cagtgacccacacccgcgcggacgcctaggctggaggcagggggcccgtgctgtcccgggctgggctcaggcttccgagccgcaggtggaagaggaaccggcgccccgcagagcggccgagaggtggggcgc

SEQ ID NO: 3017 - DNA, 31 bp, Homo sapiens
  chr7:36406484-36406515
  hyper
ccccgcacccccgccgcggccagcccttccc

SEQ ID NO: 3018 - DNA, 87 bp, Homo sapiens
  chr7:37487145-37487232
  hyper
caaatggccccctaggcgggagagggtcactgggcggggagttcctggctgtgcggtcacacacacacacaccgactcacacacaca

SEQ ID NO: 3019 - DNA, 7 bp, Homo sapiens
  chr7:37487257-37487264
  hyper
acactca

SEQ ID NO: 3020 - DNA, 96 bp, Homo sapiens
  chr7:37487335-37487431
  hyper
cacacacacacacacacgccgcctcgcgcgcgctcgcggcacagcaccgacttcccaaccccaaacacacgcgcgcacccccgggacagctgagtt

SEQ ID NO: 3021 - DNA, 16 bp, Homo sapiens
  chr7:37487437-37487453
  hyper
ttcctcttcctcaaag

SEQ ID NO: 3022 - DNA, 71 bp, Homo sapiens
  chr7:37487755-37487826
  hyper
gggggattccctcccatccccgagtgcaggagaagacgccgagtctgagccgcagccgcttctctagctct

SEQ ID NO: 3023 - DNA, 116 bp, Homo sapiens
  chr7:37487849-37487965
  hyper
ccagccccacatcccccgtccccagtaaccccgcgccagcgtcgcaaccctcccgcgccccccctcccgcagaccctggtcgaaatgtctcggcgggctcccgggccccgggccct

SEQ ID NO: 3024 - DNA, 368 bp, Homo sapiens
  chr7:37487984-37488352
  hyper
cgcacctccagcgccccctccctccgctcccactcccactcccgccatccccggagctcagacttccccaactgcagagcgccccgacgcgcccgcagccctcaccctgccgagcgcggcggccacccccgcccgagccgcggcgcccccagggaggaaacaaaagtgtctccgcggcgcccggagtcccccggagcaggacgcctcctcccggccccagtcccggccccctcccctgccgcgccgaggtcagcgagtcggggcgcggcgccagcccaggaaactttacgaacctgcttggggtcgcaggacagcagcggcaagggttcccggcgatcagagctccggcgacccgccaccattgaagg

SEQ ID NO: 3025 - DNA, 54 bp, Homo sapiens
  chr7:37488353-37488407
  hyper
gaactggaggctctgtcgcccagcgtggggccgcggcggcgtgggtggctctgc

SEQ ID NO: 3026 - DNA, 101 bp, Homo sapiens
  chr7:37488411-37488512
  hyper
atcctgtgcccatcctcgcccgctcccgctcgccccagcacacgcacttacactctgggtcggccggctgctgcaccgccggctgccgctgctctcacttc

SEQ ID NO: 3027 - DNA, 138 bp, Homo sapiens
  chr7:37488547-37488685
  hyper
gcatctgcaaggcatccggagatcagccgcgaactctcctcccgagcggacgctgcggagttgcagccgccgcccccggcacctgcgccaggacactcgtggtctgcgcgttcgccttgcgcccgcaccctgcctggt

SEQ ID NO: 3028 - DNA, 31 bp, Homo sapiens
  chr7:37488704-37488735
  hyper
cctagggggatgcccacgactttttgaagtc

SEQ ID NO: 3029 - DNA, 109 bp, Homo sapiens
  chr7:37488800-37488909
  hyper
gtgcagagcatgacttcgatgagctcacacacggcgtttggaggcactaattaactccgtcaccctcatagcgccatctccgggaggccaaaagcgagtagcatctttt

SEQ ID NO: 3030 - DNA, 100 bp, Homo sapiens
  chr7:37488919-37489019
  hyper
tttaatttttggcaaccggttccggatattaaggggaaacttcggtgggctgtttgaacgctactttaagacgtgtttgttttgacgctgtgcctctacc

SEQ ID NO: 3031 - DNA, 34 bp, Homo sapiens
  chr7:37489049-37489083
  hyper
aagtttcctccctctccgtcgacatctatgtatt

SEQ ID NO: 3032 - DNA, 52 bp, Homo sapiens
  chr7:39453969-39454021
  hyper
accgagggcaaatgaacgtgggaggatccgaggcgctcgctgaaggggctct

SEQ ID NO: 3033 - DNA, 96 bp, Homo sapiens
  chr7:47294095-47294191
  hyper
cggagtagcggcgctccggaccggcggaacacggcgtcctcggctcagcttcggaagcgcccccgccccgcccggcgagcccgggaatggcgcgcg

SEQ ID NO: 3034 - DNA, 68 bp, Homo sapiens
  chr7:47621698-47621766
  hyper
gggctccgagtagcgcgcgggcgggcccgtcctcctggctggctgccggcgcccgcggcagggccccc

SEQ ID NO: 3035 - DNA, 134 bp, Homo sapiens
  chr7:48128031-48128165
  hyper
gctctcaccagagtgcgcgttcgggaagcagggagaggaccaggaaagacgcctgagacggagagtgggcaccggccgggggcaggcaggtccggcccctgggggtcagagtgcagcgccggtttgaggcagtt

SEQ ID NO: 3036 - DNA, 31 bp, Homo sapiens
  chr7:48128168-48128199
  hyper
ccacttagctgcgactcgaagtgaatgagtc

SEQ ID NO: 3037 - DNA, 31 bp, Homo sapiens
  chr7:50343195-50343226
  hyper
acttttcccaccccctcgggtgggcactcgc

SEQ ID NO: 3038 - DNA, 106 bp, Homo sapiens
  chr7:50343383-50343489
  hyper
gaccgaccagcggccccgggtgcagggtggcgggcccggcggcgcgcgtccccctccccctcctggcggcccgcacgtgtcgcccgcgccgcgcccccacgggtta

SEQ ID NO: 3039 - DNA, 282 bp, Homo sapiens
  chr7:50343974-50344256
  hyper
ggctgcggggcaggtcgagcagggaccgccagcgtgcgtcaccccaaagtttgcggggtggcagggcgcgcgctctggccacccgccgctctgggcggcagctggtggcaacgcaagggcgcggcgggggcggccggcgcggagggggccaggtacggggcccgcgggcggcgctgtgcgcgcggggcagccggtcggccgggagcgcgaaagcctggtctgagccggctgggggcggggagtgtggcggagaaatggggaacaatgcgagtgagcaacttc

SEQ ID NO: 3040 - DNA, 31 bp, Homo sapiens
  chr7:50344276-50344307
  hyper
agctgggaagagctccgcggccaagttagca

SEQ ID NO: 3041 - DNA, 219 bp, Homo sapiens
  chr7:50344313-50344532
  hyper
tctaacaagtgactgcgcggcccgcgcccggggcggtgactgcggcaagccccctgggtccccgcgcggcgcatcccagcctgggcgggacgctcggccgcggcgaggcgggcaagcctggcagggcagagggagccccggctccgaggttgctcttcgcacccgaggatcagtcttggccccaaagcgcgacgcacaaatccacgtgagtgttttcaa

SEQ ID NO: 3042 - DNA, 66 bp, Homo sapiens
  chr7:50344585-50344651
  hyper
acacagtaaagaaaagcggtaaggttggtagaccctggtgtcgctcaggtccgcctctcttttctg

SEQ ID NO: 3043 - DNA, 31 bp, Homo sapiens
  chr7:50344665-50344696
  hyper
gttcacttctgtcaagcgtctgttgctctgc

SEQ ID NO: 3044 - DNA, 31 bp, Homo sapiens
  chr7:50344707-50344738
  hyper
aggtgcaggaccaggccgacatgggacactt

SEQ ID NO: 3045 - DNA, 76 bp, Homo sapiens
  chr7:50860407-50860483
  hyper
gtcccggacgcccggacgcccgggcgcgcgcgccgcggccccgccgcgcagtcggagcacccggggctgcagggac

SEQ ID NO: 3046 - DNA, 81 bp, Homo sapiens
  chr7:50860669-50860750
  hyper
gcctccgccgcgcgcccgcagccccagtcccgcctccgagcaccgcccgctgcgggcccggggcgccggagcccccggccc

SEQ ID NO: 3047 - DNA, 128 bp, Homo sapiens
  chr7:50860758-50860886
  hyper
cgcccttccgcccgccgcgcctccgcggggcccggcgtccccggccgcggccgcccagcgctcagacaatgacggcgcggggacccgcctggccgtcccgggccccgcggggacgccaaccacaaagt

SEQ ID NO: 3048 - DNA, 31 bp, Homo sapiens
  chr7:50861356-50861387
  hyper
ccgcgggccggacggccggggggccagaagc

SEQ ID NO: 3049 - DNA, 75 bp, Homo sapiens
  chr7:51384164-51384239
  hyper
cactaccaccagcacccgctggggcggcagagagggcgccctgcccgggagcgcgcggtgcggacgcgggcgtcc

SEQ ID NO: 3050 - DNA, 73 bp, Homo sapiens
  chr7:51384667-51384740
  hyper
gcccgcggcgagcgtccggggaaggaatcctccggcacctgggccctgcaccgacacccgcgggtgcggcaga

SEQ ID NO: 3051 - DNA, 51 bp, Homo sapiens
  chr7:55087083-55087134
  hyper
gcgccgcccccggatcgcgccccggaccccgcagcccgcccaaccgcgcac

SEQ ID NO: 3052 - DNA, 40 bp, Homo sapiens
  chr7:55593335-55593375
  hyper
tccaaggttcatcttacgtggtactcgatcatctaggcag

SEQ ID NO: 3053 - DNA, 31 bp, Homo sapiens
  chr7:55593380-55593411
  hyper
atgctaccaaacctctcgagaacaaaggttc

SEQ ID NO: 3054 - DNA, 31 bp, Homo sapiens
  chr7:55593420-55593451
  hyper
aatccttacatgtgtacggtatttagttttc

SEQ ID NO: 3055 - DNA, 61 bp, Homo sapiens
  chr7:63767735-63767796
  hyper
gcatgtctagctaggcgcgcaccgccgtgtccccagggcttcgcaccgcccccagacttgc

SEQ ID NO: 3056 - DNA, 21 bp, Homo sapiens
  chr7:64973893-64973914
  hyper
cctccgcgcgcagtgccgccc

SEQ ID NO: 3057 - DNA, 12 bp, Homo sapiens
  chr7:64974273-64974285
  hyper
gggctaaaagcc

SEQ ID NO: 3058 - DNA, 39 bp, Homo sapiens
  chr7:65541036-65541075
  hyper
cgaagcttccggacgacgaggaaccgcccaacatggcct

SEQ ID NO: 3059 - DNA, 138 bp, Homo sapiens
  chr7:66094048-66094186
  hyper
gggatggtggtagtcacggggcgggagccagacagccgtcgtcaggacggtgccatgtccagctctgacgccgaagacgactttctggagccggccacgccgacggccacgcaggcggggcacgcgctgcccctgctg

SEQ ID NO: 3060 - DNA, 31 bp, Homo sapiens
  chr7:68161974-68162005
  hyper
gggctggagtagcccccgtacacccggagtt

SEQ ID NO: 3061 - DNA, 31 bp, Homo sapiens
  chr7:75924332-75924363
  hyper
agatgaggggagggaccgtccaatgaaggac

SEQ ID NO: 3062 - DNA, 82 bp, Homo sapiens
  chr7:76145380-76145462
  hyper
catctgtgcacaaggccggtggttcccgtcgtcgccactcggggtcgccggtgagccgcagccaggccgcctcacggccagt

SEQ ID NO: 3063 - DNA, 36 bp, Homo sapiens
  chr7:76145483-76145519
  hyper
ctgccccttctgcctccgaggcggtagcagatgcca

SEQ ID NO: 3064 - DNA, 31 bp, Homo sapiens
  chr7:80548345-80548376
  hyper
gctcaatcaagcacctcggagtgaatggaaa

SEQ ID NO: 3065 - DNA, 60 bp, Homo sapiens
  chr7:80548576-80548636
  hyper
ccgacccttagagctcgcggctggccagacgcaagaatgcgcggccgcaggctggagccc

SEQ ID NO: 3066 - DNA, 61 bp, Homo sapiens
  chr7:89783801-89783862
  hyper
cacctctgggcagcagcggcagccgagactcacggtcaagctaaggcgaagagtgggtgag

SEQ ID NO: 3067 - DNA, 36 bp, Homo sapiens
  chr7:89783891-89783927
  hyper
ctcctcgagtccgcccgcgtgtccctgcaaggctgg

SEQ ID NO: 3068 - DNA, 43 bp, Homo sapiens
  chr7:89874390-89874433
  hyper
cgcaagcctgcaaactcgccctgccgggcgcggagtgcaatta

SEQ ID NO: 3069 - DNA, 71 bp, Homo sapiens
  chr7:89874463-89874534
  hyper
ccgtagcctctggccccgccccctagcaacgcgctggcttgtgttaacaaccggcccgggatcagaggtct

SEQ ID NO: 3070 - DNA, 41 bp, Homo sapiens
  chr7:89874660-89874701
  hyper
gcctctttgggcccagcggctgcgggcgcactgtaggacag

SEQ ID NO: 3071 - DNA, 89 bp, Homo sapiens
  chr7:89874708-89874797
  hyper
cccccactctccaccccgccgccaccggccatgtggacagaggaagccggggcgaccgccgaggcccaggaatccggcatcaggaacaa

SEQ ID NO: 3072 - DNA, 64 bp, Homo sapiens
  chr7:89874804-89874868
  hyper
agttccagtcaaatcccggtggttggggtggtgacggaggacgatgaggcgcaggtatgagcag

SEQ ID NO: 3073 - DNA, 36 bp, Homo sapiens
  chr7:89874894-89874930
  hyper
ggtgggagtgaagtctcgagacggggtccagacctg

SEQ ID NO: 3074 - DNA, 50 bp, Homo sapiens
  chr7:89874962-89875012
  hyper
gaagatgggggaagccgcgggatggagattccaagcgcagagctaatcct

SEQ ID NO: 3075 - DNA, 31 bp, Homo sapiens
  chr7:90893323-90893354
  hyper
tgctgttggtaaccagcgttaagagcaggat

SEQ ID NO: 3076 - DNA, 40 bp, Homo sapiens
  chr7:90893373-90893413
  hyper
taaaataaaagaaaagcgaagtcccgcggtcctctgactc

SEQ ID NO: 3077 - DNA, 39 bp, Homo sapiens
  chr7:90893437-90893476
  hyper
tgggaccattctcctacgtatcctcgcctttttcttctg

SEQ ID NO: 3078 - DNA, 31 bp, Homo sapiens
  chr7:90893487-90893518
  hyper
gcaaccaagcctgtcccgcttcagagcaatc

SEQ ID NO: 3079 - DNA, 144 bp, Homo sapiens
  chr7:92219763-92219907
  hyper
tctgtggaggacaggccggctccagagatcgctgcagttggcggagcgcctgcaggagtccggtcgttcattaggcacccaagagcaggcgacgctgcgcttctgcaccggagccccaccaaggcagctcgcttcagtttggcc

SEQ ID NO: 3080 - DNA, 385 bp, Homo sapiens
  chr7:92462331-92462716
  hyper
ctgaggattcccggctcggccctccccgcgcgcgcgaggccccagatggcgagggcgcagctccctggctcacctgaccacgttggggtgctcgaaggtctccaggtgcctcagcaccgccacctcgcggatggtggagagcggcatgccctcctcgccggtctgcacccgcacgcgcttcaacgccacgaaacggcctccgttcttcaagtcgcgggccttgaacaccttcccataggcgccctccccgatctccgccacgcattcgtactgctggtcagcgcggcacaggccgtccttctccatgccgcctggacgccgcccgccgcggcgccgctggggcgggcggggggtgcgctcaactagctggcggccgccgctcgcc

SEQ ID NO: 3081 - DNA, 140 bp, Homo sapiens
  chr7:92462810-92462950
  hyper
atggagagacctccccgcggggctggcgtaaccctggtgccgccgccgcgaaactccgcctgcagagtcgccgccgccgccgccgccggaggagcgagccgatccctcctcttccctcctcgaagcgaagtcctcaacac

SEQ ID NO: 3082 - DNA, 31 bp, Homo sapiens
  chr7:92462963-92462994
  hyper
tagcctctgcccaagcgcgtctcagtccaga

SEQ ID NO: 3083 - DNA, 31 bp, Homo sapiens
  chr7:92463001-92463032
  hyper
cacctaaaggaggagacgggaggataagaag

SEQ ID NO: 3084 - DNA, 31 bp, Homo sapiens
  chr7:92463048-92463079
  hyper
gcccagaagccttcctcggggttcctccaga

SEQ ID NO: 3085 - DNA, 78 bp, Homo sapiens
  chr7:92463082-92463160
  hyper
ccctcctcctcctttacgaagcctccatcgctaccctccgcgcgctcctgccctctcccaagccgcttaatccttcct

SEQ ID NO: 3086 - DNA, 31 bp, Homo sapiens
  chr7:92463161-92463192
  hyper
gttcctccgagaaaagcgaagttacttttct

SEQ ID NO: 3087 - DNA, 138 bp, Homo sapiens
  chr7:92463195-92463333
  hyper
cctgcagggctgaagccgtcttcgcgcggagaggttgcaggggcccctcggggatgagcgagcggcgcgggacgcagtggaacgggagggggcgtgccgagcagcccagagtgtgccgggagcgcgggggaggggagg

SEQ ID NO: 3088 - DNA, 46 bp, Homo sapiens
  chr7:95064140-95064186
  hyper
ccccgagcctggggaccgccgaggaggggcgcgcgggagtcccacc

SEQ ID NO: 3089 - DNA, 48 bp, Homo sapiens
  chr7:95064192-95064240
  hyper
agtgccagaagcctctcgcccaggagcgccagcgcgatccccagcaag

SEQ ID NO: 3090 - DNA, 97 bp, Homo sapiens
  chr7:95064295-95064392
  hyper
gcctggccagcagctccgtgggcggtgccatcttcccggctcgatggtgccggccgcgctccgccccgtcctccgcctaggccgagtccctgcgtcg

SEQ ID NO: 3091 - DNA, 31 bp, Homo sapiens
  chr7:95064547-95064578
  hyper
aaaccctctagcagcccgcatacctttctcg

SEQ ID NO: 3092 - DNA, 31 bp, Homo sapiens
  chr7:96625840-96625871
  hyper
tcataaaaaagaaatacgaggtgtgtgtgtg

SEQ ID NO: 3093 - DNA, 44 bp, Homo sapiens
  chr7:96636763-96636807
  hyper
aaggagattacgcagacgctgggagcacacgggcagagtggacc

SEQ ID NO: 3094 - DNA, 74 bp, Homo sapiens
  chr7:96639370-96639444
  hyper
gaacaccctagggaaacgtctgaacaaggaaaagaggatccgggacctgcttgtatctgcgaaaaggagccaaa

SEQ ID NO: 3095 - DNA, 31 bp, Homo sapiens
  chr7:96639467-96639498
  hyper
aagtgtggcaagaagccgactaggctcattc

SEQ ID NO: 3096 - DNA, 31 bp, Homo sapiens
  chr7:96642747-96642778
  hyper
tgcctttgcaaatgtccgcatacctgtggtt

SEQ ID NO: 3097 - DNA, 31 bp, Homo sapiens
  chr7:96647219-96647250
  hyper
atccttgggctcgggacggcagggagttaaa

SEQ ID NO: 3098 - DNA, 52 bp, Homo sapiens
  chr7:98030098-98030150
  hyper
gggccctgggcttacccggtaggtgctctccgtgagccggttcacctcctcg

SEQ ID NO: 3099 - DNA, 35 bp, Homo sapiens
  chr7:98030419-98030454
  hyper
gcggccccacctgaggcgggcggggcagacggggg

SEQ ID NO: 3100 - DNA, 74 bp, Homo sapiens
  chr7:98030480-98030554
  hyper
gcgtacccacctgaggcggcctggtgagcggggcccggccggggtgggcggggaggaggcggggccaggcagct

SEQ ID NO: 3101 - DNA, 39 bp, Homo sapiens
  chr7:98030571-98030610
  hyper
agggaagcgggccccccgagtgggcggggtcaccccacc

SEQ ID NO: 3102 - DNA, 29 bp, Homo sapiens
  chr7:98971520-98971549
  hyper
ccaccgcgaccggccgaggtaaggttttc

SEQ ID NO: 3103 - DNA, 41 bp, Homo sapiens
  chr7:98971559-98971600
  hyper
cttccatctgcctggccgccaggccacgtatccactgaaga

SEQ ID NO: 3104 - DNA, 31 bp, Homo sapiens
  chr7:98990958-98990989
  hyper
gctgagcagctagcctcgctctgcatttccg

SEQ ID NO: 3105 - DNA, 31 bp, Homo sapiens
  chr7:99070937-99070968
  hyper
tcacgtgattgtgaagcggcattttggattt

SEQ ID NO: 3106 - DNA, 31 bp, Homo sapiens
  chr7:99155750-99155781
  hyper
ggacctactgagatttcgatcccacaactta

SEQ ID NO: 3107 - DNA, 15 bp, Homo sapiens
  chr7:99155798-99155813
  hyper
caggccccgcaatcc

SEQ ID NO: 3108 - DNA, 20 bp, Homo sapiens
  chr7:99155931-99155951
  hyper
cgggccgcctccttgcaggg

SEQ ID NO: 3109 - DNA, 101 bp, Homo sapiens
  chr7:99155954-99156055
  hyper
ctcaaggatgggctggcgtcagggaggggcccagggggcgctttcccaacactggtcgcagtcattgttggtataacggctagagacgcccagtgagttag

SEQ ID NO: 3110 - DNA, 246 bp, Homo sapiens
  chr7:99156057-99156303
  hyper
tggagggcagtgggaccggaaaaagacgtggaaaagctgcgaaaacgagccttcgaatcatggacgcgcgggcccagctcctcctccgagttcctcatccggggccgtcactcacatccggggccctcactcacatccgggaccctcatccggggctctcacccacatccgggaccctcatgcctgggcggaggagggggggccctcattcgggaccctgcactccgtcgccggaagtgccaccga

SEQ ID NO: 3111 - DNA, 156 bp, Homo sapiens
  chr7:99156403-99156559
  hyper
cccctcggtgagtacccggaagccgttttggggtcgcagcggggtggcagcttgttttgccttcacgggagtagaaggaggcggcgtccggccgcggccgacggtagttcgcttccccgagagtgcgcggaggcccgggtgcgaggagggcctgtt

SEQ ID NO: 3112 - DNA, 78 bp, Homo sapiens
  chr7:99156570-99156648
  hyper
ctggttcattcacctcgcggaccgagggccccgccgtcaggagccggcgaccgtgccctggtgcgagctggtctgtat

SEQ ID NO: 3113 - DNA, 223 bp, Homo sapiens
  chr7:99156692-99156915
  hyper
agtgggaggagggcagcgccgggcaaggccttctgaggaccgagctgggagccgggcaggggcccagggcgagggtggtgggagggggacggcaccctcatgcgtccttgggcctgaaggacgccgctcaaacctgttcgaaccgcagctcttacctgcgttgctctcaggattccgggaaaaggccggtctagctggtctgagttagcgaagggcctgaccc

SEQ ID NO: 3114 - DNA, 65 bp, Homo sapiens
  chr7:99156917-99156982
  hyper
aaagtggagttttattcgccaagcccgtgtagtaaatcggagtgggctgacggtgttaccaagac

SEQ ID NO: 3115 - DNA, 31 bp, Homo sapiens
  chr7:99869133-99869164
  hyper
ttccttcatccattcacggatccgtcactgc

SEQ ID NO: 3116 - DNA, 31 bp, Homo sapiens
  chr7:100064074-100064105
  hyper
agccctaaatggcaggcgcgacccctgagtc

SEQ ID NO: 3117 - DNA, 45 bp, Homo sapiens
  chr7:100424501-100424546
  hyper
aggggtagtcagaggccggcccctccactccgaggcccagatgtt

SEQ ID NO: 3118 - DNA, 326 bp, Homo sapiens
  chr7:100424625-100424951
  hyper
ccagcagagcagcacccggagctccatggcgccgcctcactcgggtaggatccgaactgagtttggggggccctcgcccccccaggtctgactctccctgggcgggtggacgccgatactccgcgcgggactcctcgtcggggccctcagcgcgggcccatgcgagcgtgcggggcaccgggcggcggcgccaagtgtggccccgcgtctgtgccgcgcgcgcgggcggcgggcccggagcgtgctggcagtggccgcgccgggcgggcgcgcagcaagacgtggctggagttggggtccctccggggcctcggggtcccgccccg

SEQ ID NO: 3119 - DNA, 89 bp, Homo sapiens
  chr7:100424995-100425084
  hyper
tggagtggctctgctcgcgccgccgggccgagtgctctcctcgcgggcggggatggtgggagcccgagcggggacggagcgggagggag

SEQ ID NO: 3120 - DNA, 148 bp, Homo sapiens
  chr7:100425173-100425321
  hyper
aggggcgcgcggggggcgggggcagctctcccaacgcgggggctccgcgagtgagccccgggcgcgctgattggagctcacgctactgaataattcatgagggaagcggagaggggcaccgagtggagcaggtcgggaagttgagaga

SEQ ID NO: 3121 - DNA, 31 bp, Homo sapiens
  chr7:100425327-100425358
  hyper
ggagaagggggaggggcggcgggtgaggaac

SEQ ID NO: 3122 - DNA, 31 bp, Homo sapiens
  chr7:100609077-100609108
  hyper
ccctaaagtgtagccccgcctccttgatggg

SEQ ID NO: 3123 - DNA, 31 bp, Homo sapiens
  chr7:100816641-100816672
  hyper
gtgccaccttgacccccgggtgctgtctctt

SEQ ID NO: 3124 - DNA, 31 bp, Homo sapiens
  chr7:101447356-101447387
  hyper
atttgttccagggagcgcgagggaggcagtt

SEQ ID NO: 3125 - DNA, 61 bp, Homo sapiens
  chr7:101447435-101447496
  hyper
ggtgcaaacaagtgcccgctttgaagtgctgaataacaaactctgccgggagtggaaaggc

SEQ ID NO: 3126 - DNA, 40 bp, Homo sapiens
  chr7:101447515-101447555
  hyper
gagttggtgtcaaatgcgcaagacacggggcagaggggaa

SEQ ID NO: 3127 - DNA, 31 bp, Homo sapiens
  chr7:101707444-101707475
  hyper
taaccgtctctagatccgtcctggtttagct

SEQ ID NO: 3128 - DNA, 31 bp, Homo sapiens
  chr7:101707501-101707532
  hyper
gagagtgtgtgtgaaacggagttttgctgtg

SEQ ID NO: 3129 - DNA, 31 bp, Homo sapiens
  chr7:105162871-105162902
  hyper
caccagcggcagagagcgatttcaccaagca

SEQ ID NO: 3130 - DNA, 31 bp, Homo sapiens
  chr7:105162924-105162955
  hyper
aggaagtctaaggcagcgattgcctcctttg

SEQ ID NO: 3131 - DNA, 45 bp, Homo sapiens
  chr7:105162984-105163029
  hyper
agttgtggccctttcacgttgcaccgaccacgcagttgacaataa

SEQ ID NO: 3132 - DNA, 63 bp, Homo sapiens
  chr7:105516544-105516607
  hyper
aaagtagccttttaaacggacaacaccgtggggctgcgagcccaccccgcgggctgccacggg

SEQ ID NO: 3133 - DNA, 31 bp, Homo sapiens
  chr7:105516703-105516734
  hyper
gaagcatggaggacaccgggggccactctct

SEQ ID NO: 3134 - DNA, 31 bp, Homo sapiens
  chr7:105752146-105752177
  hyper
ccagggagctagacctcgagtgggcaccggc

SEQ ID NO: 3135 - DNA, 31 bp, Homo sapiens
  chr7:106684934-106684965
  hyper
cgggcgcgcagccctgcggtggtctgacagg

SEQ ID NO: 3136 - DNA, 104 bp, Homo sapiens
  chr7:106685213-106685317
  hyper
ccgccggggcccagtgcgccgcgctcgcagccggtagcgcgccagcgccgtaggcgctcgctcggcagccgcggggccctaggccgtgccggggagggggcgag

SEQ ID NO: 3137 - DNA, 129 bp, Homo sapiens
  chr7:107300981-107301110
  hyper
cccacagggcctggcccgcccctgacctcgcaacccttgagattagtaacgggatgagtgaggatccgggtggcccctgcgtggcagccagtaagagtctcagccttcccggttcgggaaaggggaaga

SEQ ID NO: 3138 - DNA, 74 bp, Homo sapiens
  chr7:107531846-107531920
  hyper
gcaccacccctggccccgcctctgcactggctcagcccggccctgggctccgaggtggccgctcatcctgcagc

SEQ ID NO: 3139 - DNA, 125 bp, Homo sapiens
  chr7:107643453-107643578
  hyper
tcaaagagagaagaggcgcccttccatttcctgtcgctcccacggaagcggggggtgggctggaaagtggggaaaatcgtgcagccactttgttctcctcacccggcgacgcgagctctcgccct

SEQ ID NO: 3140 - DNA, 165 bp, Homo sapiens
  chr7:108095385-108095550
  hyper
aagggaaggagagaggcggggtgcgaaagaaacgccaccgctcggcgccctccctcggtgcccgcggcgcaggggccacccgccagcgtacgggggacgaagatgtggccgcgggcgcgggcgggaggggaggcgatccggggaaggaagcggcctgttcgccag

SEQ ID NO: 3141 - DNA, 62 bp, Homo sapiens
  chr7:108095895-108095957
  hyper
caggcagcccccagcccggtgcgccggccccgacaagtcccagccctcggaggcagggcggg

SEQ ID NO: 3142 - DNA, 123 bp, Homo sapiens
  chr7:108096116-108096239
  hyper
ggtcagcacaggtgtacgcacttccgaacaaagcccacgcccagacgtgtccgcaggggcccgaacaggcacacgcccgtgcgctcccggcccggcccccgcgctcctcgccccgccggcact

SEQ ID NO: 3143 - DNA, 39 bp, Homo sapiens
  chr7:108096265-108096304
  hyper
tccaagcccgggaagccgccgtgccgggcccgcaggctc

SEQ ID NO: 3144 - DNA, 79 bp, Homo sapiens
  chr7:108096306-108096385
  hyper
catgcccaactgcccacgagcaagagctctgggcagggcttcccggaaagcgtggggtgcgggcgcggagcagaagttg

SEQ ID NO: 3145 - DNA, 34 bp, Homo sapiens
  chr7:108096397-108096431
  hyper
agggggtggtgggtgccggcgctgctggatttca

SEQ ID NO: 3146 - DNA, 71 bp, Homo sapiens
  chr7:116592939-116593010
  hyper
cttcaggcctactagccggcgacaggagcgcacctcctcccttctcctagctgtcccgggtttattcattc

SEQ ID NO: 3147 - DNA, 31 bp, Homo sapiens
  chr7:116593040-116593071
  hyper
gtagggtttaagacctcggaccccagaatac

SEQ ID NO: 3148 - DNA, 31 bp, Homo sapiens
  chr7:116593096-116593127
  hyper
accttaaggtaaactacgcagctgctgtgag

SEQ ID NO: 3149 - DNA, 31 bp, Homo sapiens
  chr7:120497419-120497450
  hyper
ggcggcggggcgggggcgggggcgggggcga

SEQ ID NO: 3150 - DNA, 120 bp, Homo sapiens
  chr7:120497835-120497955
  hyper
cagcgggcaggaaaggcgacagacgcgtggccacttaccgtcggcgctgggcccggtgccccacgcccgcctggggatagtcggggacgcacggcgggggctcatcggggcagggaactt

SEQ ID NO: 3151 - DNA, 54 bp, Homo sapiens
  chr7:120498179-120498233
  hyper
ctgcacaaactctcagcgcatgctcgagccgctggctgccggggttgggtccta

SEQ ID NO: 3152 - DNA, 31 bp, Homo sapiens
  chr7:120498245-120498276
  hyper
tgtccctctcacccagcgagagtccccaaag

SEQ ID NO: 3153 - DNA, 60 bp, Homo sapiens
  chr7:121950008-121950068
  hyper
aaccatattcaagacacggttcgactgtttccttgacactacccacgaagtttaaagcat

SEQ ID NO: 3154 - DNA, 31 bp, Homo sapiens
  chr7:121950101-121950132
  hyper
cccatgaaataaaagtcgataatagaaatta

SEQ ID NO: 3155 - DNA, 31 bp, Homo sapiens
  chr7:121950136-121950167
  hyper
aacacagagcaaagaacgagcttagtgaaat

SEQ ID NO: 3156 - DNA, 69 bp, Homo sapiens
  chr7:122525942-122526011
  hyper
aaaatacggtgtcctgcgtttcgcagaaggacgggaggcgtcccagagctctcccgggagaaaaaccca

SEQ ID NO: 3157 - DNA, 74 bp, Homo sapiens
  chr7:122526016-122526090
  hyper
aagtggtggtaggaggcgcccggtcccgcaactcaccttctgctgcctccgggccatgtcggtgggctgcttgg

SEQ ID NO: 3158 - DNA, 130 bp, Homo sapiens
  chr7:122526342-122526472
  hyper
cttccagcccctcgtccgactcctcttcgctggaagacgggtccagcatggtgctcggggatccccgccgctcggcccgcggtccccaagcgcctcacccccggcggctgcgcccgcgggtctgagggag

SEQ ID NO: 3159 - DNA, 137 bp, Homo sapiens
  chr7:122526609-122526746
  hyper
gggggagagggggagccgccgggactgaataggcggagttagcgttgggggtgagcttgggcgcctcaggaattgctccgccagccccgggcgcgccgacccagcggttccccagagcccgccggcagaggcggagc

SEQ ID NO: 3160 - DNA, 62 bp, Homo sapiens
  chr7:123174505-123174567
  hyper
cgtcggaccaggaggccgcagtcaaaatctgttctcctacctgtgtacgaaaccaaactatt

SEQ ID NO: 3161 - DNA, 66 bp, Homo sapiens
  chr7:123174597-123174663
  hyper
acgcagcttccatactcgccgcgttctcagctgttggtcgtatcctagcaacggccctggcaccac

SEQ ID NO: 3162 - DNA, 46 bp, Homo sapiens
  chr7:127744069-127744115
  hyper
agccgaggaaaggaagcgacttggccaaggtcggagagctcattct

SEQ ID NO: 3163 - DNA, 247 bp, Homo sapiens
  chr7:127744304-127744551
  hyper
cgcggttcctgggctgcgtgcgcgccccttggagctgaaaggagcgccaggatcgggggcgctgcaccgggctgggcccctcaacgctcgcagaccgggccgggctgcagctggagatggcagcaatcccgggaggtctccgggcctcttcagggtgcgtccaggaggcgggttccgtgcgacgcggcgcagcccacccccacgagaccgcttaacttcgcgggggcagcctcgggcgctcggagac

SEQ ID NO: 3164 - DNA, 31 bp, Homo sapiens
  chr7:129425083-129425114
  hyper
gatatggttttggccacgggccatgtttcac

SEQ ID NO: 3165 - DNA, 79 bp, Homo sapiens
  chr7:129425133-129425212
  hyper
atttagctgaataattcggaccccaaaccaaacaaaacgctcttatttccgtttggggattcttcggagttgggatttt

SEQ ID NO: 3166 - DNA, 31 bp, Homo sapiens
  chr7:129425285-129425316
  hyper
tgagcctcagtttcttcgtctgtaaattggg

SEQ ID NO: 3167 - DNA, 97 bp, Homo sapiens
  chr7:134001928-134002025
  hyper
agcgctgaaagtaactcggccgccagggtcacaacaaacttgctggcagcggcggcactagaactacagagctgtgactgctcgttggaggtgttct

SEQ ID NO: 3168 - DNA, 37 bp, Homo sapiens
  chr7:134142979-134143016
  hyper
ccggctaggcacttctcggggacgctgtgtggtgttg

SEQ ID NO: 3169 - DNA, 57 bp, Homo sapiens
  chr7:134143164-134143221
  hyper
gggtccgggcaaactcgcgccacctaattctctgccctctaccggcttgagatgctt

SEQ ID NO: 3170 - DNA, 36 bp, Homo sapiens
  chr7:134143227-134143263
  hyper
cagggagggcaagaatcgaaacgattgagaccaact

SEQ ID NO: 3171 - DNA, 321 bp, Homo sapiens
  chr7:134143265-134143586
  hyper
ttacaagtgaggcaaccgggctacaggtgcctcgagggaaaggaggctgggtctgcgctcccacaccttgccgacggctccacgtccctgtctgcgcccgaggtccaccggtctgtgaagcccactttccccgcctccctctcgcgttgtgccgcttggggcgcccgctaggacccaaaatgcggactggtgggccgcccatcaagggttgcccgcggtagggcgggggctcccgtgagctgctcccaaaccccactcgcaggatgctgccctgacgcccagggccaacccggggagccaaggcccccggtctctgcaagg

SEQ ID NO: 3172 - DNA, 52 bp, Homo sapiens
  chr7:134143700-134143752
  hyper
cggagagtgtgaggcgagccccgggcccgcgcccccacgagcacctaccttc

SEQ ID NO: 3173 - DNA, 308 bp, Homo sapiens
  chr7:134143767-134144075
  hyper
aggatgggcatcttggcgccgttgttgagcaggagacggcttgccatggctgctgcgctccccagacccccgcccagtacggtgcggccttggccgcggcgcgtacctttaaatagcccgtgaggtcggcagaaagggcgcctgcggttggcgcgccgctgcgcgaaggagccttctgattggttgcgctgggggtgccgcggcggccttccccaagggtcggcggggatgcttcttccgcctggtcctagtggcagcggattctttccgcccccaacgctcgcccgcgccccgcgtggcagaaagga

SEQ ID NO: 3174 - DNA, 43 bp, Homo sapiens
  chr7:134144089-134144132
  hyper
gtatctggtgggaaagcgaatgctttagcgaaaataacaggca

SEQ ID NO: 3175 - DNA, 38 bp, Homo sapiens
  chr7:139478236-139478274
  hyper
tcgcccatctcacagccggttggcgctcgcggaggtag

SEQ ID NO: 3176 - DNA, 77 bp, Homo sapiens
  chr7:139478356-139478433
  hyper
acgaggtcagaggcaccgaagccctgccgtgcacgccgcggaaatgcagcccccggggtggtcgctgggttcctgcc

SEQ ID NO: 3177 - DNA, 31 bp, Homo sapiens
  chr7:140098302-140098333
  hyper
ctcacccctggcggtgcgaccagggtttccg

SEQ ID NO: 3178 - DNA, 69 bp, Homo sapiens
  chr7:140098372-140098441
  hyper
gttgtagtcccgccacgcggcctcacctgccggcgcggaggagggcgaggagggcggaggctgggagcc

SEQ ID NO: 3179 - DNA, 31 bp, Homo sapiens
  chr7:140098443-140098474
  hyper
cagaactctgctgctgcggacctggccagta

SEQ ID NO: 3180 - DNA, 31 bp, Homo sapiens
  chr7:148936685-148936716
  hyper
gcacagtgaggaagagcggctggagccggtc

SEQ ID NO: 3181 - DNA, 91 bp, Homo sapiens
  chr7:149411636-149411727
  hyper
ccctggcacatgggacgcgctgagtggtggctgcgggaatgaatgagtgataagcggcgcgtacccgcgggcttgcacgcccacagccgcc

SEQ ID NO: 3182 - DNA, 161 bp, Homo sapiens
  chr7:149411834-149411995
  hyper
cgcttccgagccggcgccgcggcgccttctgggaagtgtagtccgcgtctgcgccggccggccgggccgccgaagccgggggctccgggcggaaacggcaccacccaccaagggatgcgaggcgctcggggcgggctcaacgaggccgggggcgggcccgg

SEQ ID NO: 3183 - DNA, 241 bp, Homo sapiens
  chr7:149412024-149412265
  hyper
cccaggcccccggccccgccttctcctgcgcggacctgggccgccgccgacgagggtcgcgtgcgcccgcgccagggcccgcgccggaaaccgaggagtggcggggaggctgagcccggggatggcgcgccaggtaaggcaggcggacgcgcggacccctcggcgcagtgcggccccgaaggcggtagggcgagaaagagctgggacccccccgcaacttcgggatcggctgggtgaggct

SEQ ID NO: 3184 - DNA, 53 bp, Homo sapiens
  chr7:149412273-149412326
  hyper
ctgatgctcaggggttcgtgccgggaagttcaggtcctcggacaacctctctc

SEQ ID NO: 3185 - DNA, 43 bp, Homo sapiens
  chr7:150102885-150102928
  hyper
ggcgcgggtgtcgctgcgggagagttaccgtatttgcgttgag

SEQ ID NO: 3186 - DNA, 134 bp, Homo sapiens
  chr7:150784072-150784206
  hyper
atatctacgccatctacgacctgatcgagcgcatcgaggatttggcgctgcagaaccagatccgggagcacgtcatctccatcgagggtgagcggagccgggggctgcgggagccggggcgcagtggcctctcc

SEQ ID NO: 3187 - DNA, 31 bp, Homo sapiens
  chr7:150784460-150784491
  hyper
cagagggcttcagctgcggggaggtggggtc

SEQ ID NO: 3188 - DNA, 148 bp, Homo sapiens
  chr7:150784689-150784837
  hyper
ctgggctgaggctcagcgaccgcgtgggaggcgccggcaggtccatccgcgctttggccgggtcatgagcctgacggggatccgcggctcctcggtctggaggcagctgctgggcagccgggtgctgaccgaccgccagggacaccgc

SEQ ID NO: 3189 - DNA, 34 bp, Homo sapiens
  chr7:150869803-150869837
  hyper
cgcacaactgcgggcacggcgaaggaggtgcggg

SEQ ID NO: 3190 - DNA, 48 bp, Homo sapiens
  chr7:150948762-150948810
  hyper
cgcacttggggcaggccgtgcgcctgtcgggggcgagggcggccgccc

SEQ ID NO: 3191 - DNA, 35 bp, Homo sapiens
  chr7:151038573-151038608
  hyper
gctggcaaactgagcccgggcgggaagtcctggaa

SEQ ID NO: 3192 - DNA, 65 bp, Homo sapiens
  chr7:151038609-151038674
  hyper
actgagcctggggtggcgttggacaccaactcccaggtcctcgccccacacggccacatcctcgc

SEQ ID NO: 3193 - DNA, 282 bp, Homo sapiens
  chr7:151038681-151038963
  hyper
cgcctccgcttagctccgccccgtcgcggctccgccccgcggtaaccacgcccacacaaccgtatccccgcccacagctggcttcgccttggccccgcccacaaccctctttccaagcggcggcggcggcggcggcgcgaaggcgacagcggcggcgggggcggggctggcctcacccggaatgaaaacaaacggcggccgctgccgcatccgggcactctgctggtcgcggcgggagtggcgtggcgcaggtgaggacacggcggccgagtgtcctcgacc

SEQ ID NO: 3194 - DNA, 65 bp, Homo sapiens
  chr7:151217152-151217217
  hyper
ctaccgcgctgttgggcgccggctaggtttgaaggcttcaaacttccaaccggttaggggcgggc

SEQ ID NO: 3195 - DNA, 60 bp, Homo sapiens
  chr7:151572768-151572828
  hyper
ccccgctacgtggaggcgaggaacagtggccgcgggctaccggggcgccttccgaaaaga

SEQ ID NO: 3196 - DNA, 121 bp, Homo sapiens
  chr7:151573023-151573144
  hyper
cggcagaggagacccccgctccaggcccagaaacgcccggagagaaactggagcggagggggtgcattggaagacgcagctacacagctccccccaacccccgccccgctgctttccccac

SEQ ID NO: 3197 - DNA, 57 bp, Homo sapiens
  chr7:151722644-151722701
  hyper
tagggaggactcagcgcgcggcggccggtgacgtcagggcagcgagaggtttcgtca

SEQ ID NO: 3198 - DNA, 211 bp, Homo sapiens
  chr7:151722792-151723003
  hyper
ctgggcctgaggaggcgcggccgccactgcgcccagcgcctgcgcgacgcctggctgctgggccccggggcagttcagcccgcgccgctcctgcgggtcggactggggctgtggcgggagagaagatgccgcagcccgagtcccagaaggcggcgatcctgggctgcgggcaaggcggtgagtaccctctaggcggcggcctcccggcgtc

SEQ ID NO: 3199 - DNA, 40 bp, Homo sapiens
  chr7:151723103-151723143
  hyper
ccgcacgccccctgggcgaggctcgtgtctccgggagacg

SEQ ID NO: 3200 - DNA, 39 bp, Homo sapiens
  chr7:151723167-151723206
  hyper
cgtctcctgaggcttgttcgcgggcgtgggggcgaggac

SEQ ID NO: 3201 - DNA, 31 bp, Homo sapiens
  chr7:152160442-152160473
  hyper
acctggagaagggattcgctgctgcttattt

SEQ ID NO: 3202 - DNA, 31 bp, Homo sapiens
  chr7:155244946-155244977
  hyper
gtcaattaaagatgctcgtgctaaagaaacg

SEQ ID NO: 3203 - DNA, 103 bp, Homo sapiens
  chr7:155580714-155580817
  hyper
ctgtttcccccaccctcgggcctggaccgtcaatgccggctccgctcacaccatctgtgtccacgcagagggtcgggccgtgggagccgcgagtgtctggccc

SEQ ID NO: 3204 - DNA, 106 bp, Homo sapiens
  chr7:155580820-155580926
  hyper
cttctgttcttaacctcgcaatgtattcaggtttccccaggcggagcgctcagcatatcgacagctaaaaatccaaccaaggccgggcgcggtggttcacgcctgt

SEQ ID NO: 3205 - DNA, 31 bp, Homo sapiens
  chr7:155602345-155602376
  hyper
ccttttgtgttgggaacgggaatagccactg

SEQ ID NO: 3206 - DNA, 43 bp, Homo sapiens
  chr7:155602473-155602516
  hyper
tggccgggcgcggggccgctgggccctgcgtcccccggcaggg

SEQ ID NO: 3207 - DNA, 41 bp, Homo sapiens
  chr7:156792491-156792532
  hyper
cgccccggcccgcgggcgataaggccgcgcctttgttcctg

SEQ ID NO: 3208 - DNA, 71 bp, Homo sapiens
  chr7:156792594-156792665
  hyper
cggggcgcgcattgtccgcacggtgtgtactcggggaggggcgccaggtgcgcgggcggaatgtagggtcg

SEQ ID NO: 3209 - DNA, 67 bp, Homo sapiens
  chr7:156792763-156792830
  hyper
gagcccgggggcggagcggggcgcggggggcggagcgggggaggcgcgaacccggggacccccgcgc

SEQ ID NO: 3210 - DNA, 35 bp, Homo sapiens
  chr7:156794450-156794485
  hyper
attacaggcgtaagccactgcgcccagcctgattt

SEQ ID NO: 3211 - DNA, 221 bp, Homo sapiens
  chr7:156802133-156802354
  hyper
gagaaggcaaggcctgcgcatggccattttaataattcgctgcccgtctcatgcctgggggtccgggcgagtcctcgcaggccccgggcagagccgaggcggcttcgcagctcttcccccgctcgctgggagccaagcgcagagaggggcaggcggtgccggtggaggatgcgcgaggccctcccgccacgcgcatccacgggggccgcagggtactcaca

SEQ ID NO: 3212 - DNA, 48 bp, Homo sapiens
  chr7:156803445-156803493
  hyper
gccattggccgaggggcgcacctgtcaccgtcccggccgcccgccgcc

SEQ ID NO: 3213 - DNA, 44 bp, Homo sapiens
  chr7:156803889-156803933
  hyper
aagccctccctgctctcgggcctccagggcgcagcaggggaggg

SEQ ID NO: 3214 - DNA, 31 bp, Homo sapiens
  chr7:156808857-156808888
  hyper
gtagcattggcctgggcgcccaggcactcct

SEQ ID NO: 3215 - DNA, 55 bp, Homo sapiens
  chr7:156809168-156809223
  hyper
tatggctgaatagtggcgcactaatgtccaagtccatgttcgataatggcaggaa

SEQ ID NO: 3216 - DNA, 72 bp, Homo sapiens
  chr7:157129175-157129247
  hyper
cgccttcgctggccgccgcttggtttgttcttcttctccttcggggacttctccgcccgcgcccgcgcccgc

SEQ ID NO: 3217 - DNA, 31 bp, Homo sapiens
  chr7:157156193-157156224
  hyper
atggctgttttaaaagcgggactagacatcc

SEQ ID NO: 3218 - DNA, 69 bp, Homo sapiens
  chr7:157156240-157156309
  hyper
gggagagaggaggttgcgggactcaggtcactgtgcatgtggcgtgcttgcccccgttgtgtgtgatca

SEQ ID NO: 3219 - DNA, 77 bp, Homo sapiens
  chr8:356767-356844
  hyper
cgcccccacgcctccacgcccggcactctggacgcgcgcggacggaggggcagtgcctactacgcaggcgcacgctg

SEQ ID NO: 3220 - DNA, 31 bp, Homo sapiens
  chr8:6638106-6638137
  hyper
tatctggcaggtggttcggagacaggtggtg

SEQ ID NO: 3221 - DNA, 31 bp, Homo sapiens
  chr8:8313040-8313071
  hyper
acttaatttaatcctacgttaaccttgaaag

SEQ ID NO: 3222 - DNA, 80 bp, Homo sapiens
  chr8:8750283-8750363
  hyper
gcgcaggaccaggacgcgcaggctgcccagcgccgaccccagcccctcgggtacctcctccaggccgttgttccccaggt

SEQ ID NO: 3223 - DNA, 73 bp, Homo sapiens
  chr8:8750475-8750548
  hyper
ctggcgcaggttgctccgcagcttcctggcacgcagggcggcgtcccgccacagcctcgcggtcttcaggttg

SEQ ID NO: 3224 - DNA, 105 bp, Homo sapiens
  chr8:8750554-8750659
  hyper
tccatcccagccatggcggggccccgggccgacagcctcacgcggacgcgggagcccgcagctacatgccgcgccgcgccccgggccctccggctcctgcccctg

SEQ ID NO: 3225 - DNA, 31 bp, Homo sapiens
  chr8:8820809-8820840
  hyper
ttggaaaggaaccaggcgggctgaggaactg

SEQ ID NO: 3226 - DNA, 31 bp, Homo sapiens
  chr8:10058671-10058702
  hyper
tttactccagccccaccgtgaccctcctctc

SEQ ID NO: 3227 - DNA, 58 bp, Homo sapiens
  chr8:10058735-10058793
  hyper
gtagaaacacttgatacgtcagtccagatccctcaggagcatgcggtatgggttgggt

SEQ ID NO: 3228 - DNA, 56 bp, Homo sapiens
  chr8:10058801-10058857
  hyper
ggttaataacatgacccgatgagattgtacttcttgatgaccggcagttctgagag

SEQ ID NO: 3229 - DNA, 56 bp, Homo sapiens
  chr8:10873286-10873342
  hyper
ggggaaggagggaaaccgagaggaattgagggtgggctcggcgtatctagagcagt

SEQ ID NO: 3230 - DNA, 41 bp, Homo sapiens
  chr8:10873483-10873524
  hyper
ggcagcagggctcagacgatccggctcggtttggtcagcag

SEQ ID NO: 3231 - DNA, 164 bp, Homo sapiens
  chr8:10873572-10873736
  hyper
gcgcccccacaagccccgagctcgccagtccttccccgcggcgctccgctctgtggccccctcgcatcccaccgtgggggtgcagctcccctggcacagcccgacggtgggagagggcggccagctggactaaaagccccgtccccgggcgggaccttcctccc

SEQ ID NO: 3232 - DNA, 185 bp, Homo sapiens
  chr8:10873798-10873983
  hyper
ggagggtctgggctccgcgccgcgaggcagcgcgacggctgcgggcgacttggcgtgcggtgctgaggaccctgggggagtgtgcgccgcggggacgccggggactcggggtcctagtgccaccggacgcagcgggagtagcgcaggtctgggggcggggtctctcgaggcgcagacaacaagct

SEQ ID NO: 3233 - DNA, 50 bp, Homo sapiens
  chr8:10873992-10874042
  hyper
gccctctgcttcaaagcgggtagcgccttcgcccacgccttccctcccac

SEQ ID NO: 3234 - DNA, 114 bp, Homo sapiens
  chr8:10874047-10874161
  hyper
ctgcctggctgccacccggaagtccccgtccgcgccccgacagcgccgccctccggctggctgcagcgcgggccctcggtagggggcgttccaaggccccgcctcctcgtcact

SEQ ID NO: 3235 - DNA, 56 bp, Homo sapiens
  chr8:10874172-10874228
  hyper
cgacgccccaggcccccggccccgcctccgcctctgcctccgcggccagcactggg

SEQ ID NO: 3236 - DNA, 35 bp, Homo sapiens
  chr8:11058961-11058996
  hyper
gaagcgggggagcaaacgaacgaggggggagtggg

SEQ ID NO: 3237 - DNA, 56 bp, Homo sapiens
  chr8:11665927-11665983
  hyper
gtattcgagtagagggcgagcccgtcccgcccctcgtcgggcgcttcccagatctg

SEQ ID NO: 3238 - DNA, 31 bp, Homo sapiens
  chr8:11665992-11666023
  hyper
atggaggaaaaactccgcggggtccgcgatt

SEQ ID NO: 3239 - DNA, 31 bp, Homo sapiens
  chr8:11726003-11726034
  hyper
ctgcctgccgagttggcgggggtggggtggt

SEQ ID NO: 3240 - DNA, 31 bp, Homo sapiens
  chr8:11726134-11726165
  hyper
tttgttgttcagagaacgtacccacaaaaca

SEQ ID NO: 3241 - DNA, 26 bp, Homo sapiens
  chr8:17354230-17354256
  hyper
tggaaagtaaacggggggaccaaaac

SEQ ID NO: 3242 - DNA, 31 bp, Homo sapiens
  chr8:17354563-17354594
  hyper
tggctacacagaggggcgcccacgtgcccag

SEQ ID NO: 3243 - DNA, 31 bp, Homo sapiens
  chr8:17354605-17354636
  hyper
cagcgcggccggcgggcgctcctcttcgcgg

SEQ ID NO: 3244 - DNA, 38 bp, Homo sapiens
  chr8:17434663-17434701
  hyper
cggcgtcccaggagcccgcccctcgcccgccgcctccc

SEQ ID NO: 3245 - DNA, 225 bp, Homo sapiens
  chr8:17658206-17658431
  hyper
attccacccgctttctcggccccgcttgcttctgctgagaaggggccctgcgagaaggctgggaccgccgggcccgggtgggcggcgtaaggagtccacagtcaagcccctcggtcactttcaaggtgacagcgacgagatccgcatccgtcccttccgcaggctctgcgctggcccacgtgagacccgcctccgctccgccggcgctgccgccccctttagccc

SEQ ID NO: 3246 - DNA, 65 bp, Homo sapiens
  chr8:17658492-17658557
  hyper
ccctgggcggcgcgctcgcctgtcccctccccaccccggccgccgggcagcgggaacagattcca

SEQ ID NO: 3247 - DNA, 229 bp, Homo sapiens
  chr8:17658569-17658798
  hyper
ccgcagctccttcaagcgctccgggagcaaagacgcagaggcggggagggctggcgccctttgcaccactggcggggtcgccgagaacccgccccggaggtctcgggggcggcgtctgcacctgggggcgcgcggcgcggcaccaccccacgcctgcggcggctaccaggcgggacccggagccccggcctccccgcctccccgcctccggggccgccagggggtggag

SEQ ID NO: 3248 - DNA, 76 bp, Homo sapiens
  chr8:17658915-17658991
  hyper
ccgccgtcccaggggacggccctcggggaacctgaatgacgtgcgaggccgtacctcggggcgctggactccgctc

SEQ ID NO: 3249 - DNA, 247 bp, Homo sapiens
  chr8:17659016-17659263
  hyper
tctcgggtcccaatcccgacgctccgcgcgctcccggactaagtgcggacgcgccccacgccccccggcgccagcccgggacagcgctgcacctgttgccacgtgcgacgcggcgctcagcggctgccactgccgccggcgcacctggctgcaccgcgcgtcccgggaccacgctcgtccccgcaggagcccggggctccgccgcacccagcgctagggcccaggccgggccgcggtaggtggggga

SEQ ID NO: 3250 - DNA, 53 bp, Homo sapiens
  chr8:17659281-17659334
  hyper
ctggccacctgcaggccgaggggcctcgcaccgcggggcgtatagaaggtggg

SEQ ID NO: 3251 - DNA, 80 bp, Homo sapiens
  chr8:17659339-17659419
  hyper
tgcagaattatcagggcggaagcttgcaaggaaggagtcgtgattgtctcttagaagggctgattcgcagtctgtattat

SEQ ID NO: 3252 - DNA, 31 bp, Homo sapiens
  chr8:18870815-18870846
  hyper
ctgaggttttcaaagccgaggtatgaactaa

SEQ ID NO: 3253 - DNA, 31 bp, Homo sapiens
  chr8:19125227-19125258
  hyper
aagcgggtctcctttccgactgtagccctca

SEQ ID NO: 3254 - DNA, 37 bp, Homo sapiens
  chr8:19125261-19125298
  hyper
gacttctgtgtattcccggagccggtggcttccagag

SEQ ID NO: 3255 - DNA, 31 bp, Homo sapiens
  chr8:19171306-19171337
  hyper
ccaccctgcccaggggcgcccagcactggta

SEQ ID NO: 3256 - DNA, 113 bp, Homo sapiens
  chr8:19171391-19171504
  hyper
gggaagggaatttcctcggaggttgcatgggtgcatgggaggcgcaggggccagagcgggcgggcggaagcctcacccccgcctccaccccttcgcggcgcccggggcgggct

SEQ ID NO: 3257 - DNA, 31 bp, Homo sapiens
  chr8:19171537-19171568
  hyper
gcgggtgtccggtgtccggtgtccggtgtcc

SEQ ID NO: 3258 - DNA, 31 bp, Homo sapiens
  chr8:19171660-19171691
  hyper
cggggctgaggaccttcggggaagttctgga

SEQ ID NO: 3259 - DNA, 31 bp, Homo sapiens
  chr8:19266668-19266699
  hyper
ttcagctgccctggcacggtccactcacagg

SEQ ID NO: 3260 - DNA, 31 bp, Homo sapiens
  chr8:19797405-19797436
  hyper
gcagtcacctctctgccggaggggccctgga

SEQ ID NO: 3261 - DNA, 125 bp, Homo sapiens
  chr8:21906318-21906443
  hyper
aatgggttatctgaagcggggcgggggatccgaccaccgaacacccctggaaacgagcctgcccgtccccggccgggcgtggccacggcaggtgcaggcgcggcccgcagcgctggggcccccag

SEQ ID NO: 3262 - DNA, 64 bp, Homo sapiens
  chr8:21988227-21988291
  hyper
ccgagactccgtgctgcgccgcggggagggccgggccggggctagggagcgggtgcccccggag

SEQ ID NO: 3263 - DNA, 122 bp, Homo sapiens
  chr8:21988552-21988674
  hyper
ctcctccagcaccctgcgggaaacaggagcccgtgattcggcggccgcgcctgggcctgccccctcccgggccccgggggcttccgccaacgccccggcgatgccaccggctgcgcacgggg

SEQ ID NO: 3264 - DNA, 31 bp, Homo sapiens
  chr8:22613836-22613867
  hyper
cagagacccttaaccccggacagccccagct

SEQ ID NO: 3265 - DNA, 31 bp, Homo sapiens
  chr8:22857229-22857260
  hyper
tcgccgcgggcccgggcgcgtagcggcggcg

SEQ ID NO: 3266 - DNA, 6 bp, Homo sapiens
  chr8:23020932-23020938
  hyper
cgaacg

SEQ ID NO: 3267 - DNA, 53 bp, Homo sapiens
  chr8:23386070-23386123
  hyper
tgtttgcaaacccacccgccacggggacggattttccccgagacactgtcacc

SEQ ID NO: 3268 - DNA, 31 bp, Homo sapiens
  chr8:23386137-23386168
  hyper
tgggcataccccactgcggcccctccccaat

SEQ ID NO: 3269 - DNA, 31 bp, Homo sapiens
  chr8:23386169-23386200
  hyper
acctcccctgcccctcgcggaccagcccatc

SEQ ID NO: 3270 - DNA, 154 bp, Homo sapiens
  chr8:25041969-25042123
  hyper
agccgggtggggagggcgggagaaaggcaaagtgccgccagcgtcaaagtcccgccggcccaggaagccgctccagggaagcgcgcgaggcggagccgcagtcggcccccgcccggcagagcgcagagagcggcgcgggcgggagaggccgggc

SEQ ID NO: 3271 - DNA, 31 bp, Homo sapiens
  chr8:25042558-25042589
  hyper
accctggccgggggctcggcccggctgcgca

SEQ ID NO: 3272 - DNA, 63 bp, Homo sapiens
  chr8:25042770-25042833
  hyper
gctgctcttttggggccgcagctctgtggctcgccccggtgcgcccagcgtgggtttcacctg

SEQ ID NO: 3273 - DNA, 36 bp, Homo sapiens
  chr8:25042834-25042870
  hyper
gagtaggtgaccagcccgggtcggcacatggactgg

SEQ ID NO: 3274 - DNA, 54 bp, Homo sapiens
  chr8:25042883-25042937
  hyper
agtgctttctgccccccgctttcgtaggttcttctcagacgccccttaagtgag

SEQ ID NO: 3275 - DNA, 31 bp, Homo sapiens
  chr8:25042939-25042970
  hyper
gttgagggtggaaagccgccctgcccccttt

SEQ ID NO: 3276 - DNA, 31 bp, Homo sapiens
  chr8:26371958-26371989
  hyper
ccggtggaagggtcctcggagaacaagacca

SEQ ID NO: 3277 - DNA, 44 bp, Homo sapiens
  chr8:26372258-26372302
  hyper
ctgagcccggcgcgcccgccttcatgccccgccctggacctcgc

SEQ ID NO: 3278 - DNA, 65 bp, Homo sapiens
  chr8:26435019-26435084
  hyper
gccgcggcggcctccgcggattggcgcgcaggcgggcagggaccggggcgcgcgcaggcgagtgc

SEQ ID NO: 3279 - DNA, 62 bp, Homo sapiens
  chr8:26435403-26435465
  hyper
gaaagggagtggctggcggcgcatgcgccacggtggccgacttgaaccgaggcttttattgc

SEQ ID NO: 3280 - DNA, 31 bp, Homo sapiens
  chr8:27348567-27348598
  hyper
gcagagggcggagtcccgttaagggggtgtg

SEQ ID NO: 3281 - DNA, 31 bp, Homo sapiens
  chr8:27348741-27348772
  hyper
ccgtcttcgaccttgacggggtgctggcgct

SEQ ID NO: 3282 - DNA, 76 bp, Homo sapiens
  chr8:27491096-27491172
  hyper
gatcaaggagctctcccggtgagcccccccattgcggccgcagcgcgggcagggaggacgccgcgggagcccgggt

SEQ ID NO: 3283 - DNA, 38 bp, Homo sapiens
  chr8:27491478-27491516
  hyper
ggggcgcggcgctaggcgcccggcggggcttccccagg

SEQ ID NO: 3284 - DNA, 31 bp, Homo sapiens
  chr8:27694968-27694999
  hyper
tcctctgcatctcacacgctcagcagggttc

SEQ ID NO: 3285 - DNA, 31 bp, Homo sapiens
  chr8:28242820-28242851
  hyper
agttccaaagtgaaggcgctgagccctgcac

SEQ ID NO: 3286 - DNA, 31 bp, Homo sapiens
  chr8:28242854-28242885
  hyper
caggcagggaagaaaacgctgccttggaaat

SEQ ID NO: 3287 - DNA, 41 bp, Homo sapiens
  chr8:28560084-28560125
  hyper
cgcaccaccccacccccgcccttccccgcaacctggatttt

SEQ ID NO: 3288 - DNA, 55 bp, Homo sapiens
  chr8:28560156-28560211
  hyper
tcaagtcctcttggttcgactcctttggtggaggaggaagcgcagaacaccacaa

SEQ ID NO: 3289 - DNA, 31 bp, Homo sapiens
  chr8:30241644-30241675
  hyper
ccggcaaactaaaagtcgcacacatcccagg

SEQ ID NO: 3290 - DNA, 134 bp, Homo sapiens
  chr8:30241764-30241898
  hyper
ccgacctccctgccctcggcctcccgggccctcgccctccgaccagccgctgagtcgggggctggggtcgccgcttccgcccgcggcccgctgcccctccccggcgcgcgccatccggccgccggcccctcctc

SEQ ID NO: 3291 - DNA, 60 bp, Homo sapiens
  chr8:30241907-30241967
  hyper
gctccgtcccgcgccccgtccctccgggctgcagccggcagcccacgtccagggagggcg

SEQ ID NO: 3292 - DNA, 31 bp, Homo sapiens
  chr8:30241968-30241999
  hyper
agggaggaggagaggcgcggagaggagggag

SEQ ID NO: 3293 - DNA, 57 bp, Homo sapiens
  chr8:30242004-30242061
  hyper
aggggagggaggaaggcgagagaaagggagctgcttccatcccggacttcccagagc

SEQ ID NO: 3294 - DNA, 31 bp, Homo sapiens
  chr8:30242177-30242208
  hyper
cgtcccctccttccagcggctgcagccccca

SEQ ID NO: 3295 - DNA, 254 bp, Homo sapiens
  chr8:30242285-30242539
  hyper
ttcctcccctggctcccgccctccctctccaggtcgccctcccggggcccgattgtctcggtgccccgctcccggcccgcgccctgccccgtctctcccttgcacttcctgagtcgcccgccgccgccgtcgcagactcgccgcgggagccccagcccaacccgagcccgacagccactgccccggctccagctccagccccacagcccgcggcgcccgcccgagggagccccggcgcccggggaaggctccag

SEQ ID NO: 3296 - DNA, 114 bp, Homo sapiens
  chr8:30242550-30242664
  hyper
gccctcgcccagccccgcgccccagccctgcccggcccggcgaggaaggaccgggaagatgaacaacggcggcaaagccgagaaggagaacaccccgagcgaggccaaccttca

SEQ ID NO: 3297 - DNA, 161 bp, Homo sapiens
  chr8:30242666-30242827
  hyper
aggaggaggtactgggcggctcggtgtggtggcgggggcgacgcgggacccagtgcgggcggccggcggggcgcgggcccggggcgcggcggtggaagaaggttcaggcatggcccgtgccccggacgcagccccacagtgtggcccggggagggtggatc

SEQ ID NO: 3298 - DNA, 309 bp, Homo sapiens
  chr8:37553217-37553526
  hyper
ctgcgattgggcgggcgcggcgatccctttgaagtgtggctgccgatcgcggctatttgacgtgcggctcgaggaaggcgaaggtttttgtgttgctagccggggccagcggcggtggcggcggcggcggaggcgtcggtggaggaggggaggcggcgaggaggcgcagctcccgctgcaccgcgatcgacgctgcggagcgagcccacccgccccgggagctcgcctccccggtgctcccccgccctccccgcccccccagcggcgctgcctcctccaaatgagcgattcgcccgctggatctaaccc

SEQ ID NO: 3299 - DNA, 43 bp, Homo sapiens
  chr8:37553607-37553650
  hyper
accggcggaccccctgcgccaggcgaaccggctcccgatcagg

SEQ ID NO: 3300 - DNA, 223 bp, Homo sapiens
  chr8:37553677-37553900
  hyper
ggtcacctcctgcacccggagtacctgcagccgctgtcctccactcccgtcagccccattgaggtcagtccccggccgctgcccccgggcgccggccccattcctcccaccgcgaccgggaccctgacccagctcccagcgccccggggctcggtgcgacacccaagtctggtcacgctggcgggctgagtgaggaggggaagaaaaccgagggatcagagcc

SEQ ID NO: 3301 - DNA, 31 bp, Homo sapiens
  chr8:37553908-37553939
  hyper
cttccccaggcttccccgtggaagggtctcc

SEQ ID NO: 3302 - DNA, 130 bp, Homo sapiens
  chr8:37554054-37554184
  hyper
tctgctgggtcttccccgccccccacgccgggctgttttctttgaagccctggctgcccgggtcccacttcgcctctgtcccatccggtgagggcgcacggcgccctggcgctcccgatcccggatcttt

SEQ ID NO: 3303 - DNA, 50 bp, Homo sapiens
  chr8:37888915-37888965
  hyper
ggaagctgagctggcacgggtgggggggccagcctcgggctgccctcagg

SEQ ID NO: 3304 - DNA, 44 bp, Homo sapiens
  chr8:38089776-38089820
  hyper
cttctggtgcctgcggcgctgatcgttgccgagtggaaggagtg

SEQ ID NO: 3305 - DNA, 72 bp, Homo sapiens
  chr8:38324235-38324307
  hyper
agggaagttaataatgcggctgcggtgtacccgtgtggggtgaaacggaaccagatgcggctgctacatctg

SEQ ID NO: 3306 - DNA, 279 bp, Homo sapiens
  chr8:38325348-38325627
  hyper
caggaggtgaaaggggcgggcggcgagcggagggaggcgccggccccggctgggctgcggcgggcaaagcgcgcagccgggaggctccggcgccgggggccgctcgggacgccaagcccgccccagatccgggggcgccgcggctcttacctcgctcggcgtggaggttccgcctcgggagagtccgccgtggcttgtgcgagcgggcgtgtgcccgcgtccccggctccggcccgccgcccccgggctctgttcgggtcctggcggggtcgcaagagc

SEQ ID NO: 3307 - DNA, 42 bp, Homo sapiens
  chr8:38325770-38325812
  hyper
cccccctcctccagaacgcagcggcggcgcctcactttcctt

SEQ ID NO: 3308 - DNA, 107 bp, Homo sapiens
  chr8:38325943-38326050
  hyper
aagcagcggcgcgctcgcggccggggaaggcgaggtcgccgcaatgcgctacgaggggtctcggtcccgtccggacgtggccgcccagctcccggcacacccgggtt

SEQ ID NO: 3309 - DNA, 66 bp, Homo sapiens
  chr8:38326240-38326306
  hyper
ttgtagttccccagccgcggccccaaaggacggggagcgggccgagctgtccggcgctctgccctt

SEQ ID NO: 3310 - DNA, 125 bp, Homo sapiens
  chr8:38645088-38645213
  hyper
ggagccgcgctcatggcgttcagcccgtggcagatcctgtcccccgtgcagtgggcgaaatggacgtggtctgcggtacgcggcggggccgccggcgaggacgaggctggcgggcccgagggcga

SEQ ID NO: 3311 - DNA, 31 bp, Homo sapiens
  chr8:41686094-41686125
  hyper
gtggggattcccataccgaggcctcttcagt

SEQ ID NO: 3312 - DNA, 95 bp, Homo sapiens
  chr8:41686169-41686264
  hyper
tttgattgttctggttcgcactacaatgaccgggctggagagggggcgctcgtaatgaaacaggaactgctcctcgcgcccgctccagagtcctt

SEQ ID NO: 3313 - DNA, 31 bp, Homo sapiens
  chr8:41686271-41686302
  hyper
ttggggagagggcatacggggagctacattt

SEQ ID NO: 3314 - DNA, 31 bp, Homo sapiens
  chr8:41686308-41686339
  hyper
cctgaagattttccacgcgaaagtgctgggg

SEQ ID NO: 3315 - DNA, 139 bp, Homo sapiens
  chr8:41686346-41686485
  hyper
tgggcctgggaggctgcgccttcttcccgcgaatcccgaaaactgcgcggcaaaggcgggttccgcagaagtcgcgcgtgacccggggcgccgccctcctcggggcccattcggatctgccgcccgtcctctccagagc

SEQ ID NO: 3316 - DNA, 46 bp, Homo sapiens
  chr8:41686543-41686589
  hyper
aataaatcctagtctcgcgtctagaccggtccgtgagggtcccctg

SEQ ID NO: 3317 - DNA, 31 bp, Homo sapiens
  chr8:41686590-41686621
  hyper
tcaccggacaccctgccgcaatctctgctgt

SEQ ID NO: 3318 - DNA, 34 bp, Homo sapiens
  chr8:42807055-42807089
  hyper
cgtggcgacagcgagactccgtctcaaaaaaaaa

SEQ ID NO: 3319 - DNA, 292 bp, Homo sapiens
  chr8:48649724-48650016
  hyper
ggctgtagcttctttgcgctcctatgtcccaagaaactgcagcgggcacccggcggctctggctgcgccagggcagggcgcgctccgctccgggccgtcgggtctgaggtatgggtcgttgctgagtctctcccgccccggccgcgcgttaccggcagtctgctgtcccggcggccggcaggaagggcgggctgggcagctgcttgaagaactgccggaggccggccaggtcccgcgtgagctgctccacgcgctggtgcagcttctcgttctcagccgacagctccaccaa

SEQ ID NO: 3320 - DNA, 37 bp, Homo sapiens
  chr8:48650189-48650226
  hyper
gcggcggctccggcgacgtgggcggggtgggctgccc

SEQ ID NO: 3321 - DNA, 48 bp, Homo sapiens
  chr8:48650239-48650287
  hyper
ctcaccacggtctgtgcgcacgcggccacctgcgcgggcaacagcgag

SEQ ID NO: 3322 - DNA, 31 bp, Homo sapiens
  chr8:48650303-48650334
  hyper
cgccccagtcgggctcgcgcttgagcaggcg

SEQ ID NO: 3323 - DNA, 107 bp, Homo sapiens
  chr8:48650382-48650489
  hyper
aagctccaggggccccgcgccgcccgccttgtgattgctgttgaagaggtcggcgaagagctcgtcgtggcacagctccagggtgggcacggcggccatggagtcga

SEQ ID NO: 3324 - DNA, 205 bp, Homo sapiens
  chr8:48650554-48650759
  hyper
cctagggcccctggctcggccccgcggcccggcttgcccgcccggcccggttcgtagaagggcgcaggctccgcaggccagggcgcgccgcgcgccgggccgtccaggctgaagagcgcggcgctcatggcggcgtcgggccgggctctgcgtccaagcgaggctgtcacctcgctgggcccagccccgccgccttttctagccc

SEQ ID NO: 3325 - DNA, 71 bp, Homo sapiens
  chr8:48650937-48651008
  hyper
ttgcaggagggtgcccgcgctgctgctccctccccggcccgggccggcctgcgctgcgctgctgggaatga

SEQ ID NO: 3326 - DNA, 38 bp, Homo sapiens
  chr8:48651054-48651092
  hyper
gggcttggaacctcctcgctcctcggggttgggagtga

SEQ ID NO: 3327 - DNA, 144 bp, Homo sapiens
  chr8:48651107-48651251
  hyper
ttggccgcagcgcgcgcgtcccaggccggctcctgtcgccggagggcggggggtggagacccgtgggagaggacccgcgcgtccaaggacgccccccgaccgtgggcacgcgcgtgaggccctcgccccgcgcctccaccgtgg

SEQ ID NO: 3328 - DNA, 194 bp, Homo sapiens
  chr8:48651254-48651448
  hyper
cagatgcgggaagaggcgtgggggaccagacgtggggacagcggcggcctggcaggcggggagggctgcccgcaccgcactcgggcgcctcggggaatccgggccggttctcgctgctctcctcggaggtcccgggtccggccggccctgggggtcgaggcccagagacgcggctgctgcgtcctggccgaaag

SEQ ID NO: 3329 - DNA, 20 bp, Homo sapiens
  chr8:48920488-48920508
  hyper
atttatttttttgaggcgga

SEQ ID NO: 3330 - DNA, 31 bp, Homo sapiens
  chr8:54754897-54754928
  hyper
tggcggtctggctggacgacaagaacctaca

SEQ ID NO: 3331 - DNA, 31 bp, Homo sapiens
  chr8:54754959-54754990
  hyper
aacttccagatacaaacgactgattttaaca

SEQ ID NO: 3332 - DNA, 59 bp, Homo sapiens
  chr8:56791950-56792009
  hyper
attattaagaactcagcgagaccccgagcatcacctcggcatatcgcatcctttctcta

SEQ ID NO: 3333 - DNA, 31 bp, Homo sapiens
  chr8:57906851-57906882
  hyper
aggacggggaactgggcggtgaggggaagaa

SEQ ID NO: 3334 - DNA, 31 bp, Homo sapiens
  chr8:57906901-57906932
  hyper
ctgttgacatctttgtcgtgccctaaatgct

SEQ ID NO: 3335 - DNA, 45 bp, Homo sapiens
  chr8:58906980-58907025
  hyper
gggggcgggatggaggcggggcggggtgtacgaggggcgtgtaca

SEQ ID NO: 3336 - DNA, 42 bp, Homo sapiens
  chr8:60030597-60030639
  hyper
cagcagcccaggccagcgccccacctccgggtcaccggcatg

SEQ ID NO: 3337 - DNA, 31 bp, Homo sapiens
  chr8:60032428-60032459
  hyper
ccccacccctatctccgcgacccccactcct

SEQ ID NO: 3338 - DNA, 31 bp, Homo sapiens
  chr8:62626392-62626423
  hyper
ttgagttgctctgaaacgctgctggttaggc

SEQ ID NO: 3339 - DNA, 31 bp, Homo sapiens
  chr8:62626692-62626723
  hyper
taaaggaggagcgtcgcgggggatggaggcg

SEQ ID NO: 3340 - DNA, 70 bp, Homo sapiens
  chr8:62627198-62627268
  hyper
cttcccggcctcgccccgcccccggaaggctgagtgacggcgcctgggacccaatcgcaagggcccttac

SEQ ID NO: 3341 - DNA, 40 bp, Homo sapiens
  chr8:62627303-62627343
  hyper
ctcacttagggctgttcgggcgctacgcagctgcctgtga

SEQ ID NO: 3342 - DNA, 39 bp, Homo sapiens
  chr8:63998843-63998882
  hyper
actgatgttcaaacaccgaggaaacgatgtcaaagttag

SEQ ID NO: 3343 - DNA, 118 bp, Homo sapiens
  chr8:67024904-67025022
  hyper
gatgtcttagtagatgcggtggaaccagctctgtctacagaaccccgggcttcagtggcgtcttcctaacccggcttgcctgccgggggcgttccgagaccctcggggccttcccttc

SEQ ID NO: 3344 - DNA, 34 bp, Homo sapiens
  chr8:67025251-67025285
  hyper
acgctactccttcagtcgccgttggattactgtg

SEQ ID NO: 3345 - DNA, 31 bp, Homo sapiens
  chr8:67025402-67025433
  hyper
ggttgagggcctttcccgggtcagtcaggct

SEQ ID NO: 3346 - DNA, 31 bp, Homo sapiens
  chr8:67417700-67417731
  hyper
ttgggcggctccagaccgcgcggccgcccac

SEQ ID NO: 3347 - DNA, 31 bp, Homo sapiens
  chr8:67417787-67417818
  hyper
cccgcacctccctgggcgcagagacccactc

SEQ ID NO: 3348 - DNA, 31 bp, Homo sapiens
  chr8:67417831-67417862
  hyper
gcccaggtcagggcagcgttggcggtggctg

SEQ ID NO: 3349 - DNA, 69 bp, Homo sapiens
  chr8:75233657-75233726
  hyper
ggctccagtccgacgccgcccccgtcctccctcctcttttgccgccgccaccgccgccttcctcctcct

SEQ ID NO: 3350 - DNA, 31 bp, Homo sapiens
  chr8:76319656-76319687
  hyper
accgcctggctgccccgcggaggcccgggag

SEQ ID NO: 3351 - DNA, 212 bp, Homo sapiens
  chr8:79428418-79428630
  hyper
atcaatccacaacctcgcggggcagcgatcgtcgagcgccgtttccaggctgccttccctggggtcgggagcggccccgctccccccgtggctggcgcggaatgtggtgatccgtcccggggcggggatgacttcatgcagccggagctccgcggcgggagcggaggctgctgctggcaggtggggcgcgggccggcgcgagctgaccgagc

SEQ ID NO: 3352 - DNA, 41 bp, Homo sapiens
  chr8:79428637-79428678
  hyper
gggcgcggcgggactgcggcccgtggcggcgtgcgcgggga

SEQ ID NO: 3353 - DNA, 88 bp, Homo sapiens
  chr8:79428679-79428767
  hyper
ctgcgctgactaggtccggggaaggtaagcagcccggcaccggtgcgccctggccgcactgcgtggagctttccgcttggttaataat

SEQ ID NO: 3354 - DNA, 31 bp, Homo sapiens
  chr8:79428787-79428818
  hyper
aagaaggggagaaccccgctgcattctgcaa

SEQ ID NO: 3355 - DNA, 31 bp, Homo sapiens
  chr8:79428839-79428870
  hyper
ggatggaaatgttgggcggccaagtgcagag

SEQ ID NO: 3356 - DNA, 85 bp, Homo sapiens
  chr8:79428890-79428975
  hyper
gggcaaacaaagaaggcgttcttgcctctatactcttttgaacgtgatctaccatttcagtgccagattcgcgtagacagtgaag

SEQ ID NO: 3357 - DNA, 42 bp, Homo sapiens
  chr8:80803676-80803718
  hyper
cctgagaaatgacggacgcttgaacctcgggcccgggaagac

SEQ ID NO: 3358 - DNA, 77 bp, Homo sapiens
  chr8:81490276-81490353
  hyper
gccggcgcctcccctccgggggcctggctcgcagcccgtggggacgagggcctgcacgtccccgggggactgagggc

SEQ ID NO: 3359 - DNA, 104 bp, Homo sapiens
  chr8:81490360-81490464
  hyper
ggtgaggatgggaaggcgggtgccgcttccgagggctcctctcgccaagggagagagccctagacccgttcccggggcgctgctcttcccgggctggggtgggc

SEQ ID NO: 3360 - DNA, 31 bp, Homo sapiens
  chr8:81490557-81490588
  hyper
gccctctccggctcccgcgactccctccccc

SEQ ID NO: 3361 - DNA, 31 bp, Homo sapiens
  chr8:81490592-81490623
  hyper
agctggggcaggaattcggctggagaatctg

SEQ ID NO: 3362 - DNA, 31 bp, Homo sapiens
  chr8:81490949-81490980
  hyper
tcttcccctcctcccccgctcctcttcccgg

SEQ ID NO: 3363 - DNA, 31 bp, Homo sapiens
  chr8:81785309-81785340
  hyper
gattgacaagaaacaccgctttctggtttca

SEQ ID NO: 3364 - DNA, 474 bp, Homo sapiens
  chr8:81785543-81786017
  hyper
tgaggaaagcgggagccgccgcctgggagagacgcaggggcccaaggcgcaggcaaatcaacagttcctcgcgctgccccgcgcggccgcccgcgccgcctgacacacccctcctggccgggtctctccccggcgccgctgaccgtcctcggccaggcgccttgccccggggcccgggcccgtccccctccccgggctggcgggtcccacgcgcgccaccgcgcccaacacgcaccttcaacgcgccccgggccgggcccctggggactgcgtggccgggtccgaggggcacgaaacgctcctcgccgtcctcgtcgtcttcgtcgccgtccaccacctcgacgaccacctcctcgtcctcctcttcctcgtcgtcatcctcctcctccgcgccccctcggggcttctcctccacacgcccgagccccctccgccgcctgctcccgccctcctcgtcctcgtcttcctccccta

SEQ ID NO: 3365 - DNA, 157 bp, Homo sapiens
  chr8:81786172-81786329
  hyper
agggcggcttccttggcgggcgcgggcgccggcccggcaggctgcagcgcggcgcccccccggcggctgcccaggctggagcgcttggctagacgccgcgcctgcatgcctgagcgcggggttgcgggccgcggcgcggggccggagagtttgtcac

SEQ ID NO: 3366 - DNA, 257 bp, Homo sapiens
  chr8:81786400-81786657
  hyper
ccgccggccaggacccgcggctgccactggctgcagaggcgcgggcgccgccttcgctggaccggccggcggggacgccggcggccggcggctacggcggggcggcgcggcggccgcgggcgggggtgggtgtgagcgagcggcgcgctgccgcctccgccgccgccgccgccgcccgggagccgcgggccgcgctgcgctccatgcggccggcggccgagcccgcgcgcgcctctcccggccggctgcgcccgcgc

SEQ ID NO: 3367 - DNA, 31 bp, Homo sapiens
  chr8:81786799-81786830
  hyper
tcttacccacagtctccgaaagtctggcgct

SEQ ID NO: 3368 - DNA, 141 bp, Homo sapiens
  chr8:82192694-82192835
  hyper
cccgcctcccattggccgcatagcgccgcccagcgcgggccgccgttataaagcagccgccggcgccgggtgcctcacagcacgctgccacgccgacgcagacccctctctgcacgccagcccgcccgcacccaccatggc

SEQ ID NO: 3369 - DNA, 31 bp, Homo sapiens
  chr8:82192847-82192878
  hyper
gctggaaggaagatggcgcctggtggacagc

SEQ ID NO: 3370 - DNA, 124 bp, Homo sapiens
  chr8:82192903-82193027
  hyper
agctaggtgaggcacccggcctggcagcgcctgcaacgtggcgtgttgtgcggtcgtctgtccctaggtccccgtcagcgtgccagattctggggcaggagatgctcggcggcctacccccatc

SEQ ID NO: 3371 - DNA, 264 bp, Homo sapiens
  chr8:82193032-82193296
  hyper
ccatcttccccaccacgcggccgttgggtgcagcgcgcgcagcaccacgcgggcaggcggcgaggagcagggagcgtgcgcgcctcttgcccgcccgcgggccgcaagattccggaggtggtccaccccgtggtccacctacctctgcttctttcccttcgcccaaacggcagcccttccgcattgcttcctgtcctttagcgcgcgcacccgtcacctcacgctgcacttctttcgaccccctccaggcgaccctgtatttcc

SEQ ID NO: 3372 - DNA, 138 bp, Homo sapiens
  chr8:82193378-82193516
  hyper
ccctttccctccctgtcgcatcttttgttccctgtggcgcgcaggtcaccctccgttttcttcatggggacgcggtgctggcgcgcagtttcccgcagaaatcctgtggaggggtctgagtggcgctacagcttcagc

SEQ ID NO: 3373 - DNA, 71 bp, Homo sapiens
  chr8:82193520-82193591
  hyper
attcctctgtcagccccgtctcccccaggtcctctgctcgcccttaccagttgagccgaaccctttggatt

SEQ ID NO: 3374 - DNA, 49 bp, Homo sapiens
  chr8:82193601-82193650
  hyper
ggaacaccagggcccccgagaagcgtggcgctggcggtgccgacctgct

SEQ ID NO: 3375 - DNA, 82 bp, Homo sapiens
  chr8:82193658-82193740
  hyper
tgccgggccggggcgccgcagtgggcgggtggcctgtgggaggagcgcaatgaggcctgggggtggccgtgtgttgccatcc

SEQ ID NO: 3376 - DNA, 90 bp, Homo sapiens
  chr8:87527031-87527121
  hyper
gggctcagctccgggccgcaaggccccgcctgggcctggcgctcgcgcacctggggctggggataggctgggatccgccctccttccctg

SEQ ID NO: 3377 - DNA, 31 bp, Homo sapiens
  chr8:91657492-91657523
  hyper
ttgcagaccacatgggcgatgaaggtgccga

SEQ ID NO: 3378 - DNA, 31 bp, Homo sapiens
  chr8:91996904-91996935
  hyper
atgtaactgtcctttccgtagctttgactaa

SEQ ID NO: 3379 - DNA, 136 bp, Homo sapiens
  chr8:93978346-93978482
  hyper
ctcccaaagggtgaggcggaaaagaggcgaggctctgcccccaggggcgggaccaggcctcagcctgctctcggattggtcggcctttctcccgtctgtacgccggtccaggacgcaaaggcgctggccctgaggc

SEQ ID NO: 3380 - DNA, 121 bp, Homo sapiens
  chr8:95654216-95654337
  hyper
gatcagttggaactgacggaggactgcaaagaagaaactaaaatagacgtcgaaagcctgtcctcggcgtcgcagctggaccaagccctccgacaggtgacaaccccgggtcacgccaccc

SEQ ID NO: 3381 - DNA, 56 bp, Homo sapiens
  chr8:95654442-95654498
  hyper
agcccagcctgagggccggggcgcaccgtttgggcgggggtcgctgcttctcttca

SEQ ID NO: 3382 - DNA, 48 bp, Homo sapiens
  chr8:95654507-95654555
  hyper
ccccagggtttgggaccgacattcactagttttcgagttgcttcctga

SEQ ID NO: 3383 - DNA, 49 bp, Homo sapiens
  chr8:96145957-96146006
  hyper
cccgcgcgctcgcgcccggagtgtggacgggggcgcgcccgtgcgcgcg

SEQ ID NO: 3384 - DNA, 370 bp, Homo sapiens
  chr8:96146109-96146479
  hyper
ggatcgcgccggctgcgcggggctgcggacagcacacaccctggaaggccccggcggggaacgggcagagtccgcgccctgcgtccgcgaccaggaggatcggaccttcgccttcgctgtcgccgccgccgccgcccgcggccgtcggggtaggtgaagcccgggtgggtggtccgccggctcctgacgggccgggaggggagacgcgaaactttccgggcgcttcctcccgcggtcccggagccgtcgcagcgccgggaggtgtcgtcgtcgcgggcggtggcggccgacgccatgttggggtctgtgagaaacggggcgctcccggccgctcccctcgcgccggggccggcccgcgggccagttgccg

SEQ ID NO: 3385 - DNA, 109 bp, Homo sapiens
  chr8:96146633-96146742
  hyper
ttgtggggcctgaggacgggggtcctggacacggccgggggcgtctcagggtcgcgacaaatttctggccgaaaagtttgcagggtctgcgtgtcggggaccttatgac

SEQ ID NO: 3386 - DNA, 66 bp, Homo sapiens
  chr8:96146758-96146824
  hyper
tatgtcacttgggagacgaaaatggccccgcagaacttgctctgatagaagcgatggtttatttat

SEQ ID NO: 3387 - DNA, 95 bp, Homo sapiens
  chr8:97157802-97157897
  hyper
cccggtgctcttcggccgccccgggaggaaaagggcggggagtgggggcaggtcggccgggcagtccagcttgcccggcccagggcctgaccacc

SEQ ID NO: 3388 - DNA, 45 bp, Homo sapiens
  chr8:97158021-97158066
  hyper
ggcctaccgggttttccccccaaaaggcttcgtaaccactaatgt

SEQ ID NO: 3389 - DNA, 31 bp, Homo sapiens
  chr8:97158076-97158107
  hyper
gtctcaagcctgggccgcgtttcccctagac

SEQ ID NO: 3390 - DNA, 43 bp, Homo sapiens
  chr8:97158112-97158155
  hyper
ctgggctgggctggctcgttctcgttgacgtctcaaatgtcac

SEQ ID NO: 3391 - DNA, 42 bp, Homo sapiens
  chr8:97657754-97657796
  hyper
tccagcatcgctcattcgggggcgtgacgggaggacctggct

SEQ ID NO: 3392 - DNA, 140 bp, Homo sapiens
  chr8:97657816-97657956
  hyper
cctgtggctgccccttcggtgacagtggagtcaccgagcctagaaatggggaagctgtgacgtgggggtggtggagggtgctgcgggacagcagcgagcacggccctcagccgtccttcccaacacggtttcacttcccc

SEQ ID NO: 3393 - DNA, 31 bp, Homo sapiens
  chr8:97657965-97657996
  hyper
gggctcagccccaagccgcccccttcatccc

SEQ ID NO: 3394 - DNA, 62 bp, Homo sapiens
  chr8:97658049-97658111
  hyper
cttttggggttcctttcgcattttaccgtgtactttcgcttttgatgcgtctagtttctgct

SEQ ID NO: 3395 - DNA, 42 bp, Homo sapiens
  chr8:99955001-99955043
  hyper
gttggagagagaggaccgcaggcatcccgcagctgaggctca

SEQ ID NO: 3396 - DNA, 31 bp, Homo sapiens
  chr8:101962306-101962337
  hyper
aaatgagagaacaggtcgccacattttaaac

SEQ ID NO: 3397 - DNA, 31 bp, Homo sapiens
  chr8:101962361-101962392
  hyper
aggtactggctcaatacgtaaactatttaac

SEQ ID NO: 3398 - DNA, 31 bp, Homo sapiens
  chr8:104311507-104311538
  hyper
cagtgtgtgttggggcgcgggtaattcgtaa

SEQ ID NO: 3399 - DNA, 31 bp, Homo sapiens
  chr8:107669717-107669748
  hyper
ctctgctctgacctggcgggaggctgggtgt

SEQ ID NO: 3400 - DNA, 71 bp, Homo sapiens
  chr8:107670116-107670187
  hyper
gtcaggtctgatgggccggtgggcgcgctagtggtggccgccaccgccgaaaccgtcgacctcctgggccc

SEQ ID NO: 3401 - DNA, 31 bp, Homo sapiens
  chr8:107670602-107670633
  hyper
ggaagactttcagctgcgtgccagctcttcc

SEQ ID NO: 3402 - DNA, 15 bp, Homo sapiens
  chr8:109799888-109799903
  hyper
cgggagttgtaggcc

SEQ ID NO: 3403 - DNA, 31 bp, Homo sapiens
  chr8:119123497-119123528
  hyper
tgggttgcacaatgcacgggagagagcgggg

SEQ ID NO: 3404 - DNA, 31 bp, Homo sapiens
  chr8:119123674-119123705
  hyper
ggattcctctcggcagcgtggaaaatgagcc

SEQ ID NO: 3405 - DNA, 65 bp, Homo sapiens
  chr8:120220352-120220417
  hyper
tagaaggtaaaaatagcgatcaggggtatgggggtgcgcatggagacgcccgcggagcgctggcg

SEQ ID NO: 3406 - DNA, 20 bp, Homo sapiens
  chr8:120220585-120220605
  hyper
cctcctcccgcgcggcgcgc

SEQ ID NO: 3407 - DNA, 31 bp, Homo sapiens
  chr8:120221021-120221052
  hyper
ctcctagcacctgttacgcgggcacctgctc

SEQ ID NO: 3408 - DNA, 37 bp, Homo sapiens
  chr8:120221198-120221235
  hyper
gcgagctcctggctctcggcctcgcctgttgctaacc

SEQ ID NO: 3409 - DNA, 62 bp, Homo sapiens
  chr8:124173214-124173276
  hyper
gcgccctgctggagtccggaacgagggtggtcagggtcgcctccccacggggtcgcagatga

SEQ ID NO: 3410 - DNA, 45 bp, Homo sapiens
  chr8:127569471-127569516
  hyper
ctggcccctgaggcggcggctgcggctccacgtcctcatcgtcat

SEQ ID NO: 3411 - DNA, 31 bp, Homo sapiens
  chr8:127570026-127570057
  hyper
ggaaagagaaactttacgccaatcccccccc

SEQ ID NO: 3412 - DNA, 84 bp, Homo sapiens
  chr8:127570211-127570295
  hyper
ctcctcccggctcgcccgcccttcccccgcgcccgccctcaggctcgggttacctgcacaaactcacccgcggagaggtgaagg

SEQ ID NO: 3413 - DNA, 31 bp, Homo sapiens
  chr8:127570537-127570568
  hyper
ctcctcagccagctctcgggggaggtggggc

SEQ ID NO: 3414 - DNA, 163 bp, Homo sapiens
  chr8:127570640-127570803
  hyper
accggagctggagggacgggattgtagatccggctccgggctcccgggcgggagcgcagcccgtggcatttaaagagacaggcgctcactccccgagctcgggtctttttcacattgcgccgagcggccgggagccccgcccccgccccgcccactcgggcct

SEQ ID NO: 3415 - DNA, 37 bp, Homo sapiens
  chr8:133687474-133687511
  hyper
cttcctccccttcccacggccccgcccattttacaga

SEQ ID NO: 3416 - DNA, 54 bp, Homo sapiens
  chr8:134308717-134308771
  hyper
cctccccccacacacacgcttacactcacacatgcacaccgccctgtgtgtgct

SEQ ID NO: 3417 - DNA, 105 bp, Homo sapiens
  chr8:134308781-134308886
  hyper
agcgccaccagcctctcggatccacacccgttcccgacccagtctgcaagccagacacacccacgcccccctctccagcctccttgccagcgccactcacctcta

SEQ ID NO: 3418 - DNA, 44 bp, Homo sapiens
  chr8:134308893-134308937
  hyper
ctcatctacacactcgcgcgcaatctctccgttcccagacacag

SEQ ID NO: 3419 - DNA, 133 bp, Homo sapiens
  chr8:134308982-134309115
  hyper
gtcccttctgcacccacgtccagcgcgcacccctgccagcggcgccagctgggattcggagacgacgccaggaaacgctatcctggtattttttcggaccgtctcatcgcccccttcccgacctccagaaccc

SEQ ID NO: 3420 - DNA, 133 bp, Homo sapiens
  chr8:134309262-134309395
  hyper
cttactcctggagtacgcggggctacaaagggcggtcctggcgctccagcggcaccgcacgggcggcccctttctgctccgcgtcgcgcctgggagaagagggcgcgggcttacctaacgcgagggagaaagg

SEQ ID NO: 3421 - DNA, 31 bp, Homo sapiens
  chr8:134581318-134581349
  hyper
ccatcacttctagcaacgcttcctgtttttc

SEQ ID NO: 3422 - DNA, 103 bp, Homo sapiens
  chr8:134583262-134583365
  hyper
ttcagctctcttgtcccgggtgtcaacttcacccccagatccggagcagcgcgctctgacggcgtccccggggccgatagccacctcccggatctgcgcctgc

SEQ ID NO: 3423 - DNA, 76 bp, Homo sapiens
  chr8:134583478-134583554
  hyper
gagcccggccacccagcgaggtctcctcccacgggcggccccagcggaggagatcccagcccggcgccgggtgcaa

SEQ ID NO: 3424 - DNA, 31 bp, Homo sapiens
  chr8:135703767-135703798
  hyper
tgcaaggtgaggaggacgggtaagcaagcac

SEQ ID NO: 3425 - DNA, 38 bp, Homo sapiens
  chr8:141400091-141400129
  hyper
aacagctaaagcaaaacgataaagatgaaggccaggcg

SEQ ID NO: 3426 - DNA, 82 bp, Homo sapiens
  chr8:141644413-141644495
  hyper
ccccacaatttggggccggtctgcagcaacgagggcagcatcgggaatgcgagcctcctcgcccggccgggtaaacataagc

SEQ ID NO: 3427 - DNA, 31 bp, Homo sapiens
  chr8:142010383-142010414
  hyper
agggctccagggctcccgccaagaagcccac

SEQ ID NO: 3428 - DNA, 48 bp, Homo sapiens
  chr8:142010549-142010597
  hyper
gcctccctctcgcgtccgggcgaaccctgccgacgtccctgcgatttc

SEQ ID NO: 3429 - DNA, 39 bp, Homo sapiens
  chr8:142010629-142010668
  hyper
tttcaggcattgggtccgctccggcggaggccggcccgt

SEQ ID NO: 3430 - DNA, 109 bp, Homo sapiens
  chr8:142010702-142010811
  hyper
agagccccggcctcctcgtcttcctcaggcccctcggcctctccgcgcgcccggccttttcgaaagccgccccccccttcctcctcacgtctcccggactccccacgtc

SEQ ID NO: 3431 - DNA, 38 bp, Homo sapiens
  chr8:142011006-142011044
  hyper
gcccccaacctcctcacggccaccggcctcccctcctc

SEQ ID NO: 3432 - DNA, 14 bp, Homo sapiens
  chr8:142011048-142011062
  hyper
aacccgggccgggg

SEQ ID NO: 3433 - DNA, 31 bp, Homo sapiens
  chr8:142011161-142011192
  hyper
ctgcacagaaggagcccgcccagcccccgac

SEQ ID NO: 3434 - DNA, 397 bp, Homo sapiens
  chr8:142011193-142011590
  hyper
cgcgccccgcgcccggcgccccgcactcactcggaccgcggctcggcgccgtgaagcgaaggcagacgacgacggggcggcgctgggcgacagcagccgcgcttcctcccacgcctcacgccgcgggctcacagtggtccgggaccggcggcggcggcggcggcgcgggctcgcgccctcgaggccgtgctgcgtcggcgcgggcccgcgcgcgtgcgcggcagccggctgaggcgcgcgtcctctctcggcagcgcacgcccgacccggtctcagtccggagttcccgcctctcggggggactgggcatgcgcgccgcccccgcgcatgcccagcgcgccgctaggctctgctcgcgtaatttgtcctgtagtgaccgcgccggggtttcggggtg

SEQ ID NO: 3435 - DNA, 73 bp, Homo sapiens
  chr8:142011606-142011679
  hyper
gggcgtggcggccggacgaggaaagccctggtctcgggggtggccggggtcgccccgccgagcggacatcctg

SEQ ID NO: 3436 - DNA, 44 bp, Homo sapiens
  chr8:142011876-142011920
  hyper
tctccaggcaccacaccgaccctaacgagcggttcctgggccct

SEQ ID NO: 3437 - DNA, 182 bp, Homo sapiens
  chr8:142012050-142012232
  hyper
aggttacctaaatgaacgccagcagggaacgagccctgcaatccctcccgagggctacagacctgagacgggctccaggaaaaggagggaaggctcgccccgacaccgacccgggcttccgcggtgtgagccagtttcagcgaggagctagttggttatgaccggaacgtgccgtaggtggg

SEQ ID NO: 3438 - DNA, 37 bp, Homo sapiens
  chr8:142012264-142012301
  hyper
gattgaaaaatgcagacggctgcgtggggcttgctta

SEQ ID NO: 3439 - DNA, 31 bp, Homo sapiens
  chr8:142202197-142202228
  hyper
actgcccatatatttacgttttctggtgagc

SEQ ID NO: 3440 - DNA, 50 bp, Homo sapiens
  chr8:142297707-142297757
  hyper
aaaaggatcttctgtgcggcatcttttcagtctagcgagagaatgcttta

SEQ ID NO: 3441 - DNA, 42 bp, Homo sapiens
  chr8:143429132-143429174
  hyper
caagtccagaaggacacgccatcacctcgccacactgcatcc

SEQ ID NO: 3442 - DNA, 31 bp, Homo sapiens
  chr8:143577913-143577944
  hyper
ccctgggtgttttacacgtaagagttgcaaa

SEQ ID NO: 3443 - DNA, 31 bp, Homo sapiens
  chr8:144328305-144328336
  hyper
cgcctagctaggggcccgcggcctggagagg

SEQ ID NO: 3444 - DNA, 41 bp, Homo sapiens
  chr8:144373097-144373138
  hyper
gcgtcctgcagggaggcggggggcagcgcctggggcgctcc

SEQ ID NO: 3445 - DNA, 96 bp, Homo sapiens
  chr8:144373147-144373243
  hyper
gccccaaggaagcccacgctcgggacccgcgtgctgccacagccccgggggcctggagggtcccgtgagccgagcgggacccgggacaagcgcggg

SEQ ID NO: 3446 - DNA, 31 bp, Homo sapiens
  chr8:144509087-144509118
  hyper
gggtcctgtactttctcggccagggaaaggc

SEQ ID NO: 3447 - DNA, 191 bp, Homo sapiens
  chr8:144636577-144636768
  hyper
gtacgtgtatgcacacgcgcacaaacatgcacaaaacacggacgtgcatgcacacgcgcacatgtacacaacacgcacgtgcatacacatacgcacaatacgcacgtgtgtgctcacgtgcacaaacgcacacaacacgcacgtgcatacacgcgcgcaaacgcacacaacacgcacgtgcatacacgcgc

SEQ ID NO: 3448 - DNA, 101 bp, Homo sapiens
  chr8:144636785-144636886
  hyper
ctcaggtgcataaacgcgcgcaaacgcacaacacacacgtgcatacacacgtgcacaaacacgctcaacacgcacgtgcaagcacccgcatacaaacaggc

SEQ ID NO: 3449 - DNA, 31 bp, Homo sapiens
  chr8:144640707-144640738
  hyper
ctgctgccccagcgttcgcccagaaggcccc

SEQ ID NO: 3450 - DNA, 31 bp, Homo sapiens
  chr8:144681190-144681221
  hyper
acagcgaggatgcccccgtgcggtgcaggcc

SEQ ID NO: 3451 - DNA, 54 bp, Homo sapiens
  chr8:144691795-144691849
  hyper
gccctccaataggactcgcctccccgtccccaccctcgccgattggttactggg

SEQ ID NO: 3452 - DNA, 35 bp, Homo sapiens
  chr8:145149553-145149588
  hyper
tgtcacgcgctgcctgcggccgagacccctgcccg

SEQ ID NO: 3453 - DNA, 62 bp, Homo sapiens
  chr8:145687373-145687435
  hyper
agaagggagaggtaagcggaagacaagcgattcagatcgggaagtaccgtggatcagaaaac

SEQ ID NO: 3454 - DNA, 31 bp, Homo sapiens
  chr8:145697428-145697459
  hyper
ggtgggacagagctcacgccccagtgggaga

SEQ ID NO: 3455 - DNA, 31 bp, Homo sapiens
  chr8:145697478-145697509
  hyper
gacttggatgtgagcccggtgtgcaccccac

SEQ ID NO: 3456 - DNA, 65 bp, Homo sapiens
  chr8:145697521-145697586
  hyper
gccctcctgaggaccccggcatagttcctagggcgctgcagtcgctgttccgggagatgggggcc

SEQ ID NO: 3457 - DNA, 31 bp, Homo sapiens
  chr8:145909601-145909632
  hyper
atggctacagagcctgcgcccagggcggttt

SEQ ID NO: 3458 - DNA, 31 bp, Homo sapiens
  chr8:145909821-145909852
  hyper
gttgtaccaggaggcacgagaagcctcacca

SEQ ID NO: 3459 - DNA, 113 bp, Homo sapiens
  chr8:145909879-145909992
  hyper
gaggtctggttaaacccgtacagcactgagggggagggggcccggctgcgtttccgaagctgcgcagcgcccacagcagctgctggtgggaagcggctcggaacacacccaca

SEQ ID NO: 3460 - DNA, 37 bp, Homo sapiens
  chr8:145910219-145910256
  hyper
ggccgcagagcccacccgcaggcggccatgaccccac

SEQ ID NO: 3461 - DNA, 49 bp, Homo sapiens
  chr8:145910266-145910315
  hyper
ccatgtccgctccctgcgccccggggacaaagcccgaggctgcaccgca

SEQ ID NO: 3462 - DNA, 96 bp, Homo sapiens
  chr8:145911309-145911405
  hyper
cagggggcactgcctcgcgaggccgcatcacgcatgcgctggcgcgcggcatgccgggagccggagtcccgcggagggcgcgcgcggcatgctggg

SEQ ID NO: 3463 - DNA, 31 bp, Homo sapiens
  chr8:145911410-145911441
  hyper
cctggccccgccccgtcgccgcgccagaggc

SEQ ID NO: 3464 - DNA, 66 bp, Homo sapiens
  chr8:146052021-146052087
  hyper
gtccctcctggacccccgccccgttcttcccgtggggaggggcgcgtcaggcggacctggcaccct

SEQ ID NO: 3465 - DNA, 31 bp, Homo sapiens
  chr8:146052175-146052206
  hyper
gccgtccgggggaggcgcgcaggctctgccg

SEQ ID NO: 3466 - DNA, 37 bp, Homo sapiens
  chr8:146078070-146078107
  hyper
gcgcggcttggaaggccgggttcgcaccctgactccg

SEQ ID NO: 3467 - DNA, 31 bp, Homo sapiens
  chr8:146278303-146278334
  hyper
ggaagggtggaatccacgggtgcgaatccac

SEQ ID NO: 3468 - DNA, 31 bp, Homo sapiens
  chr9:73486-73517
  hyper
cccctctccagcaggtcggcgccccgcgccc

SEQ ID NO: 3469 - DNA, 31 bp, Homo sapiens
  chr9:757052-757083
  hyper
aattttgcaggttgttcgtggcaaatctttt

SEQ ID NO: 3470 - DNA, 46 bp, Homo sapiens
  chr9:2622859-2622905
  hyper
tcccccggcgcggggccgcctctccggcgtgcggggtaggggagcg

SEQ ID NO: 3471 - DNA, 31 bp, Homo sapiens
  chr9:4298072-4298103
  hyper
caaaacaaactagtgccggcttcctgttgtg

SEQ ID NO: 3472 - DNA, 280 bp, Homo sapiens
  chr9:6412570-6412850
  hyper
ataggcctggagctgccgcctccgccaggcgacgggaaaccctcggaagtgggtttccgcgcgaaagtagcattgcggccaggcgggaaacgtgttcgcgaagcaggagggcccccggggcctttcccgggcgacccgacccgccaggccgcgtggcgggagctttcctgttgagcgcggtggagcgcacacatttccttcagttctttctcggaagtttaggccgcacccacccgcgccccctttccaggattatacaagtgcacgccagggtttctta

SEQ ID NO: 3473 - DNA, 31 bp, Homo sapiens
  chr9:6412869-6412900
  hyper
accaaagaaccatatccgctaagcctgagga

SEQ ID NO: 3474 - DNA, 55 bp, Homo sapiens
  chr9:6412929-6412984
  hyper
gcctcaaaacggcaaccgatgtggtagccgcgcaatcttccgaaacccaaaggct

SEQ ID NO: 3475 - DNA, 53 bp, Homo sapiens
  chr9:12775773-12775826
  hyper
acccgagagtctagtgcgctctctccgtggggaggagccggttcccagggaaa

SEQ ID NO: 3476 - DNA, 31 bp, Homo sapiens
  chr9:12776574-12776605
  hyper
gttccaaggccactgtcgagcagattctcca

SEQ ID NO: 3477 - DNA, 155 bp, Homo sapiens
  chr9:13279298-13279453
  hyper
agcgccgagcccagggcgcccgcgcaccttccccgccggcgcgcgcgcagggcgcgggggcgcgcctcggcctctgggccggggctcaagcgccgcttacccggctcgcggcgcccgcccagggccgcgacgcgagggggcggaggactggggag

SEQ ID NO: 3478 - DNA, 31 bp, Homo sapiens
  chr9:13279546-13279577
  hyper
acgcacagacactcacgcgtgactgagaaac

SEQ ID NO: 3479 - DNA, 173 bp, Homo sapiens
  chr9:13279597-13279770
  hyper
cgccagcctagcgctccgccgcgccccctcccccagcgcgcgccgcacttgcgccgaccggggctgccgcggaggcggtggcggggcccaggctgctggggctgccgtgacgcctgcgaccggcggggcggcgggcgcgccttggccaatcaggggacgcggccgagcaggcc

SEQ ID NO: 3480 - DNA, 58 bp, Homo sapiens
  chr9:14313170-14313228
  hyper
cgggcacttgaggggccgcacggggcctcgcacttacaggtcccggccctgcccaccc

SEQ ID NO: 3481 - DNA, 105 bp, Homo sapiens
  chr9:14313927-14314032
  hyper
gctttttcaaaaaaggcggggaggggggcgcgggagggcgcaggagggcgagcgggcgggcgggagggagagcggggagaatgtgtcaccgcgctgggaaagttc

SEQ ID NO: 3482 - DNA, 135 bp, Homo sapiens
  chr9:14314038-14314173
  hyper
acagccccaagcactgcggcaggatcccggagtggtgatcgcaggcgaaactttgccgcgagccgaccatgtgtgtgcgcgaggggcagcgtgagcgagtgcgcgcgggtggcggggcgcgcgcgggagagggcc

SEQ ID NO: 3483 - DNA, 86 bp, Homo sapiens
  chr9:14314196-14314282
  hyper
gggagaagggagaggccggggtgagggagggggcgcgagcgctgatctctggggcggaagaggctcgcggcgcgtggtccccggca

SEQ ID NO: 3484 - DNA, 31 bp, Homo sapiens
  chr9:14314538-14314569
  hyper
aagttgaaaaattcaccggttccaccctctg

SEQ ID NO: 3485 - DNA, 39 bp, Homo sapiens
  chr9:14315070-14315109
  hyper
gggaaaagggggaggccgagcaggcggggacctgagcga

SEQ ID NO: 3486 - DNA, 411 bp, Homo sapiens
  chr9:14315263-14315674
  hyper
gcggcgcgcggcgcttcgccgcggtttgccgccctccccgggggtgccccgtgcacgtggcctcgctctgagcgggaggaccgggccgagccgccgccgccgcctcttgctccctccacctcctccccgcgcccggcttcgctctcctcctcctcctcctgcagccccgctggctggctcccaatccccaccccccggggcccggggcgccggcggaaagcgtctccctacccgcccgggtgcaggcggggcggggccgcggcgcgcccggggctgcggggcgggccggcgggcgcgcgcgcgccgctgcagccctccagaggctgcgggccctgagccgctcggcgcccgcgccggctccccaccgcggcgctgccccgcccccaccccgtcgcccgtgcaggctccgag

SEQ ID NO: 3487 - DNA, 31 bp, Homo sapiens
  chr9:14315779-14315810
  hyper
ttggggtggatggggacgagggggaagcaaa

SEQ ID NO: 3488 - DNA, 43 bp, Homo sapiens
  chr9:14322292-14322335
  hyper
atggtgtgtgtgtgtgcgcccgcgtgtgcgtgtgtgcatgtat

SEQ ID NO: 3489 - DNA, 181 bp, Homo sapiens
  chr9:14322352-14322533
  hyper
tttattgttgttttagcggggctgctccaggagtggggctgcgccggtcagatgcagccggcacggccccggggtcgcgcgatcgccccttccccgccctcggattggcctggcccgcggcggggctgccccggaaccgccacccagcagcgcacccttccgcgcccggcccgcgctcctc

SEQ ID NO: 3490 - DNA, 383 bp, Homo sapiens
  chr9:14322614-14322997
  hyper
gggaagcgcggctcttcgcttccgcctggcggcgggaaggaaaccgaaaggaggagccgggggcgggcgcgccgcgatgcatattcatcagggcgcccgggacccgggaggcgggagcgggcccgagtgggtgtggcggcctgcgccgcgcggcgcccctctcgagcgtgggtgggtgcgtgggtagcggtggggctctggtctttgtgcggccgcatggggccggagagcggcgagggcgtgaccgtctcgggggctgctgcccaggctccgcgcgcctttgtgcttcccgaccgtgtgtctgcggcgcgccgcgggcaaggggcccctcgccggccttctggagcaggaacccggccgaaaacgccgcggaaagactctaa

SEQ ID NO: 3491 - DNA, 31 bp, Homo sapiens
  chr9:14323107-14323138
  hyper
gaaatgttcctggctgcgcagcgttatcatt

SEQ ID NO: 3492 - DNA, 31 bp, Homo sapiens
  chr9:15306090-15306121
  hyper
accgcctcctccagatcgtccactattgcat

SEQ ID NO: 3493 - DNA, 31 bp, Homo sapiens
  chr9:15306648-15306679
  hyper
ggtgagattcccaggtcgagggatgattcca

SEQ ID NO: 3494 - DNA, 113 bp, Homo sapiens
  chr9:15306719-15306832
  hyper
cttcgtaaagcccaggcgtcgctgggccggcccggaacagctcagagctgcgggtcctatggtcccgcgccctcacgcccatccaagtgctggcaggacgtgggtcctccatc

SEQ ID NO: 3495 - DNA, 31 bp, Homo sapiens
  chr9:15306895-15306926
  hyper
accctcctagctccagcggggacagacctac

SEQ ID NO: 3496 - DNA, 134 bp, Homo sapiens
  chr9:15306998-15307132
  hyper
cgtcctagccgggctcactcttctctcccggactcctgtccagggcttcaggggccgggcccgcaatccccatcggatcgtacctcgtccgcttccagctccgctcggctgcctaagagcgccatattcctcct

SEQ ID NO: 3497 - DNA, 31 bp, Homo sapiens
  chr9:15423708-15423739
  hyper
tactggctgccttcatcggccttttcattat

SEQ ID NO: 3498 - DNA, 72 bp, Homo sapiens
  chr9:20620968-20621040
  hyper
tttcacgcgcgtgggcgcgcacactccacacccccaaatatacccgcccgcccggcccggcttggccccagg

SEQ ID NO: 3499 - DNA, 170 bp, Homo sapiens
  chr9:20621047-20621217
  hyper
ggccccgcatctacatcggacaggattgtaacggaatgttatccccagtcgggaagggggtcggggaaaagagggagaacacactcagccacgacaagcacgacaacaaatgcatcggaaacaaatcagaaggcgatgccggggcggtttcccggcgtgggaggggaggt

SEQ ID NO: 3500 - DNA, 34 bp, Homo sapiens
  chr9:20621272-20621306
  hyper
cgcggcgacaggcacacgccgaggaagtctttgt

SEQ ID NO: 3501 - DNA, 276 bp, Homo sapiens
  chr9:20621639-20621915
  hyper
gcggcgggcggacagccgccgagcctcggctcgcgctcagcacctcccggcgctggggcaaagttgcgtgcggccccgccgctgtcagccccgcacacttcggctcacacacgcgcgccgcggagaacgcaccatcgtagcggccgcggcgctttgcggaggtgcggccgccgaggctgctcgccgcgtccccggactgtgcccgcagctcccggcggcggcggctgaaatatggctgagttattattcgcctccttccaccgtgtgtgtgtgtgt

SEQ ID NO: 3502 - DNA, 31 bp, Homo sapiens
  chr9:20622091-20622122
  hyper
gaggctgagggagaggcggcagctccctgca

SEQ ID NO: 3503 - DNA, 70 bp, Homo sapiens
  chr9:20622136-20622206
  hyper
ttctctaattggaaccgcggagcgctggcgctgtctgggctgcggcggcgcagggcgaggaaggaaagtg

SEQ ID NO: 3504 - DNA, 41 bp, Homo sapiens
  chr9:20622217-20622258
  hyper
ttattattatttttgcgcgtacttaccgagctagccatgcc

SEQ ID NO: 3505 - DNA, 42 bp, Homo sapiens
  chr9:21031411-21031453
  hyper
aaggggtgcctgggcacggtagcgctgcgccttgctggcggg

SEQ ID NO: 3506 - DNA, 31 bp, Homo sapiens
  chr9:21802621-21802652
  hyper
gcccgcccctggtctccgcactgctcactcc

SEQ ID NO: 3507 - DNA, 64 bp, Homo sapiens
  chr9:26956460-26956524
  hyper
agaagttaaggcacccgcgagccgggcaactgccctccttccgcgccggcggaggtgagaatcc

SEQ ID NO: 3508 - DNA, 40 bp, Homo sapiens
  chr9:29780379-29780419
  hyper
ggccatcgctattgtacggaggctgcgaaggccccatgat

SEQ ID NO: 3509 - DNA, 39 bp, Homo sapiens
  chr9:34647224-34647263
  hyper
gtgtcctggggccatccgagccaacggagaggtaagcct

SEQ ID NO: 3510 - DNA, 34 bp, Homo sapiens
  chr9:35072283-35072317
  hyper
tggtcccggtgcgcgccgccgcagcaagcgaacg

SEQ ID NO: 3511 - DNA, 167 bp, Homo sapiens
  chr9:35161858-35162025
  hyper
aggaggaaggggaccccgcctcctacgtgctcgcgggggggggcggggtcggtggactgggcgtgagttaattggctggggggcggggcaccacgggttggctccgcccaggcgctcgcgcggatcccgggtggaatgacgggagggagtcccggcagctcctacct

SEQ ID NO: 3512 - DNA, 156 bp, Homo sapiens
  chr9:35162052-35162208
  hyper
ccagtccccagcctgccggccggtactcaccgctacccggagttcgctcagacggtgagatttggggcgggtccgaggcagcggcgggacgctacctgcgaccgggaccatgaggagctgccagacccgtggggccggtaacgagagcagtcgcgg

SEQ ID NO: 3513 - DNA, 31 bp, Homo sapiens
  chr9:35162294-35162325
  hyper
cgtgcgcggtgagtgcgcggactgaggcggg

SEQ ID NO: 3514 - DNA, 31 bp, Homo sapiens
  chr9:35162482-35162513
  hyper
aagctcctgcaagggacgattagctctccat

SEQ ID NO: 3515 - DNA, 90 bp, Homo sapiens
  chr9:35489688-35489778
  hyper
tctactgggaagccagcgttgagaaccgccgcctcaggcgaagctgggactcacacccaccggccctggaggcccgcggaaggtttccct

SEQ ID NO: 3516 - DNA, 36 bp, Homo sapiens
  chr9:35489784-35489820
  hyper
cagcacccgggagccgcgcgtcgccaggcaccaccc

SEQ ID NO: 3517 - DNA, 47 bp, Homo sapiens
  chr9:35490106-35490153
  hyper
cgagacacgccgccgccgccgccgccgccggcgcggaaggacgaggc

SEQ ID NO: 3518 - DNA, 46 bp, Homo sapiens
  chr9:35617217-35617263
  hyper
acgcagttggctgctccgacttgaccgctgtcgaggggagcatcca

SEQ ID NO: 3519 - DNA, 31 bp, Homo sapiens
  chr9:35700411-35700442
  hyper
tgagactatgagacagcgtagaactctgtgt

SEQ ID NO: 3520 - DNA, 54 bp, Homo sapiens
  chr9:36257375-36257429
  hyper
ggtttggcttcaactgcggcgctcctacagttgggttaacgagttacctatact

SEQ ID NO: 3521 - DNA, 43 bp, Homo sapiens
  chr9:36258085-36258128
  hyper
tcatcagggcccaccccgagccacacggcggagccctgaattg

SEQ ID NO: 3522 - DNA, 62 bp, Homo sapiens
  chr9:36258154-36258216
  hyper
cctgcaggacattgggcgagagccgggtccagtgtgggcctcggggcgcggtggggtggaaa

SEQ ID NO: 3523 - DNA, 41 bp, Homo sapiens
  chr9:36258271-36258312
  hyper
gggcaggatgctctcccggagtcccacgccgccgcgcggct

SEQ ID NO: 3524 - DNA, 47 bp, Homo sapiens
  chr9:36258567-36258614
  hyper
ccgtcccccaccttcccggcggtattttgaggcgcaggcagggtgct

SEQ ID NO: 3525 - DNA, 31 bp, Homo sapiens
  chr9:36258987-36259018
  hyper
aactcccagccagtcccgaggcctagggaca

SEQ ID NO: 3526 - DNA, 31 bp, Homo sapiens
  chr9:37026621-37026652
  hyper
aaggggctgcccagggcggatagggagcctc

SEQ ID NO: 3527 - DNA, 56 bp, Homo sapiens
  chr9:37026766-37026822
  hyper
atggtgctagcgcacccgggctaggagcgggtgcccaactccggctggcttccctc

SEQ ID NO: 3528 - DNA, 120 bp, Homo sapiens
  chr9:37026830-37026950
  hyper
gctcaagcagcagctccgggcccagcccggggtagctgcggccaaggcgcccgcggcttcgggggcatagcgtaggggcccgcctccgggacagccagcagcccccggccccaggaagga

SEQ ID NO: 3529 - DNA, 224 bp, Homo sapiens
  chr9:37027047-37027271
  hyper
ttctgaggtccctcctcgacccctcggtctccgccagatcctttctttctctgcttctccgagtctctggggctcggacttgccccctccgcctctctccaactggctctccgacgtctcggacgaagttgcaaagaacttcctctccggcagcgcggggtcctggcgggtttggagatgcttccgcccctgacgctggggccgcgactccggagtccccggga

SEQ ID NO: 3530 - DNA, 115 bp, Homo sapiens
  chr9:37027324-37027439
  hyper
cgctgctcgcccatcgctgggaccaggaacggggacaccagcgacggactcttcctcgccggggtgtctacctcgtgccaaccaactcttcgagccccgccgccctccctcgtgg

SEQ ID NO: 3531 - DNA, 339 bp, Homo sapiens
  chr9:37027531-37027870
  hyper
tcccagccaccaaggccgccggggctgccggggctgagatggagccgcagtcggctctgactgcctgcgttgccgccgccgccgccgtcgctagccctccgcctgctcggcgcgcacagtgcgccaccgcgccgccccggagccgctttcaggacccgctgcgtgtggacagcgccgcccggggctcagctccctccgggcgggggcggggcgggggctaacctgccaatcacgctccaccaagccaatcagagtggcgtcagccggccctggcccgaaacaccgccccattggctaagcagcccacaggctccgcctgattagcggacacctgggcaa

SEQ ID NO: 3532 - DNA, 31 bp, Homo sapiens
  chr9:37028479-37028510
  hyper
ctggggcgcaccagggcgcacctgggtggag

SEQ ID NO: 3533 - DNA, 42 bp, Homo sapiens
  chr9:37034149-37034191
  hyper
aataattcaagccttccgctcccccgccgagctggggtagct

SEQ ID NO: 3534 - DNA, 305 bp, Homo sapiens
  chr9:37034196-37034501
  hyper
ctgagctgaaactaaacgttttaggtggaaaaaaagcgtccgaaggcaccgtgaaatgattaaggaactaaagagcttctcgccatgtgagatcatgtcctgttctcgccaacatcacaagatgtccccagacacgccgcgcccccagcgcgccgccccacactgccggcccggagcgaggaaagggtaggcgctgcgcggccgggcctgctcagcgcgccagacgtggcggacccggcccggccggagtagagcgggaagccgggagagcagcagtgctgctgccgcgccgccccagactttta

SEQ ID NO: 3535 - DNA, 156 bp, Homo sapiens
  chr9:37034521-37034677
  hyper
ggaaggcttcagcctgcgccgggcgctagccagcgcacctacgggaaggggcagaccgaagcggagcccgggagcccgggtcttccagccgcaccttctattaagacatgcgcttgggggtcgcggccctctgcgctgtgcgcggggcctgtgaca

SEQ ID NO: 3536 - DNA, 84 bp, Homo sapiens
  chr9:37034678-37034762
  hyper
ctccatgtgcaaaccccgctgcttagacgagcgcaggccgggtttttgtttttgaagaaattaactgctcggccaagcaggtgc

SEQ ID NO: 3537 - DNA, 77 bp, Homo sapiens
  chr9:37034787-37034864
  hyper
cagtgttgccaggcaccgaggcgacgttccggtttactccgattcacccctagggcggcgcccgaccccagggttcc

SEQ ID NO: 3538 - DNA, 47 bp, Homo sapiens
  chr9:37036567-37036614
  hyper
tggtcgtcaaaacctcgcgggcccggaggcgccgctgctgggtcaga

SEQ ID NO: 3539 - DNA, 31 bp, Homo sapiens
  chr9:37036615-37036646
  hyper
tcgcagagcccccctcgcggggtaccgaggc

SEQ ID NO: 3540 - DNA, 31 bp, Homo sapiens
  chr9:37036669-37036700
  hyper
cctctcccctgtgagtcggtctccccttgcg

SEQ ID NO: 3541 - DNA, 31 bp, Homo sapiens
  chr9:37998734-37998765
  hyper
ctgccctgcctgtcctcgaaatcctattttg

SEQ ID NO: 3542 - DNA, 34 bp, Homo sapiens
  chr9:38067950-38067984
  hyper
tcctccgcggctgaggcggcgcacttgttgagca

SEQ ID NO: 3543 - DNA, 96 bp, Homo sapiens
  chr9:38067990-38068086
  hyper
tgcctccgcaggccgtcgggctccaggtgcggccgcccgcgcaggcgccccccagggggtccccggccccaccgcccgcggcgctctccactttga

SEQ ID NO: 3544 - DNA, 106 bp, Homo sapiens
  chr9:38068491-38068597
  hyper
cggcggaggaggcctgcggcacggcctgggggggctgcgaaggccgctcgcctcggcgccgctgctcgcggtagtctggccgcggcggctgcggggggctcttggt

SEQ ID NO: 3545 - DNA, 76 bp, Homo sapiens
  chr9:38068628-38068704
  hyper
agccacttggccatggcgagaggccgcctagggccgcggcgcgggagcccggtccgccgccgcggccattcggggg

SEQ ID NO: 3546 - DNA, 75 bp, Homo sapiens
  chr9:38068832-38068907
  hyper
ctgcaacacctccctccgcctagcgccgcccaagctaggaatctcgcgcccctcgtgggcgcgtctcatggggtc

SEQ ID NO: 3547 - DNA, 31 bp, Homo sapiens
  chr9:66455724-66455755
  hyper
tgaaagttgtagagtgcgcccctcactgtgg

SEQ ID NO: 3548 - DNA, 98 bp, Homo sapiens
  chr9:66458085-66458183
  hyper
gcgcagttgggaagcacggagacaaaagggggaaagaaggagggagcgggaagccaaaagcctacggtaccgctattaccaggcggaatcccatccaa

SEQ ID NO: 3549 - DNA, 43 bp, Homo sapiens
  chr9:66458245-66458288
  hyper
ggtggtgtggcctagacgccagcagcggcgcctggctgcccca

SEQ ID NO: 3550 - DNA, 31 bp, Homo sapiens
  chr9:66458397-66458428
  hyper
tgtctccctctacacccgaggaccgccggcc

SEQ ID NO: 3551 - DNA, 87 bp, Homo sapiens
  chr9:66458469-66458556
  hyper
aggaccaatgtggcaccgccctgctgttgttggggggcgccgccggaggcctctgtcccctgcgcaggcttccggctctaggggcgg

SEQ ID NO: 3552 - DNA, 21 bp, Homo sapiens
  chr9:66494098-66494119
  hyper
agtcggcggagcatggtctgg

SEQ ID NO: 3553 - DNA, 35 bp, Homo sapiens
  chr9:66494122-66494157
  hyper
gctgctggaatgcttgcgctcgaggcctgagggac

SEQ ID NO: 3554 - DNA, 65 bp, Homo sapiens
  chr9:66494170-66494235
  hyper
cacctgccctgctctgcgcctctccacgcctgcgccggcgccccctccgcgcctgcgccccctcc

SEQ ID NO: 3555 - DNA, 23 bp, Homo sapiens
  chr9:70152212-70152235
  hyper
caaaaagccgtggcagcgagggg

SEQ ID NO: 3556 - DNA, 43 bp, Homo sapiens
  chr9:71736562-71736605
  hyper
cagcgccccggagagccgccttcgccctcgcccagcgcccgac

SEQ ID NO: 3557 - DNA, 63 bp, Homo sapiens
  chr9:71737160-71737223
  hyper
gggtgggggcaggagccggtgccttggagtgacgcgggcggagcgcggcgctggttattggaa

SEQ ID NO: 3558 - DNA, 63 bp, Homo sapiens
  chr9:71737230-71737293
  hyper
gggctgcttgagtgcccgctgagcctccgccgcggggcttgaaaactccgcactccagaaagc

SEQ ID NO: 3559 - DNA, 41 bp, Homo sapiens
  chr9:71788700-71788741
  hyper
cctacaggatgcccccgcgacctcaccggggaaacaccgcg

SEQ ID NO: 3560 - DNA, 31 bp, Homo sapiens
  chr9:71788789-71788820
  hyper
gcagcacttcccagagcgcgcgcgctcggag

SEQ ID NO: 3561 - DNA, 49 bp, Homo sapiens
  chr9:71788827-71788876
  hyper
tgcttgctccagtgcacgccgcggagcgaaccatcgggctggcgggggt

SEQ ID NO: 3562 - DNA, 271 bp, Homo sapiens
  chr9:71788930-71789201
  hyper
cgccgccgccgcctcccgcccccggccaggagtcgcgcgtgacgcggttcgccgcaggagcctcgaaggcgcggcgccggcgagcccttccccggcaggcgcgtgggtggtagcggccaatttgacagtttcccgggccgggcggccagcgcggaggcgccacgctcgggtcgggggcgggctgacgccgccgccgccgcgggaggagggacaaaggggtgggtccccgcgggtcggcaccccggcggttgggctgcgggtcagagcactg

SEQ ID NO: 3563 - DNA, 30 bp, Homo sapiens
  chr9:71789230-71789260
  hyper
ggagcagaagcagaagcggggtccggagct

SEQ ID NO: 3564 - DNA, 31 bp, Homo sapiens
  chr9:71789650-71789681
  hyper
ctcgtgtctgttgtgtcgcttgcatgtcttt

SEQ ID NO: 3565 - DNA, 62 bp, Homo sapiens
  chr9:71789695-71789757
  hyper
tatttcaaaccacactcggtattgatgcaaagttacaggcttgtgtacgtgagagaaactga

SEQ ID NO: 3566 - DNA, 31 bp, Homo sapiens
  chr9:71789785-71789816
  hyper
ccctttcaatcagctgcgtctgtaatagaag

SEQ ID NO: 3567 - DNA, 31 bp, Homo sapiens
  chr9:71881715-71881746
  hyper
aataactagatgcagccgggtgctgtggctc

SEQ ID NO: 3568 - DNA, 89 bp, Homo sapiens
  chr9:71939770-71939859
  hyper
ggcgggtggggacagacgctgagactctcggtggccggcgctgacgtgtcctggccgtgaggtgcctcccacctcgagggacttactta

SEQ ID NO: 3569 - DNA, 164 bp, Homo sapiens
  chr9:71939917-71940081
  hyper
gaccctgaggctgtggcgcacttgccccggcacagcgcgagcacggagtgcgcgtgggtgagagtgagggtgcgcccagggccagcgggaggcggacccgccaggcggcaggtgggtgcggccggctggagccagggcagcggcagcggcggcagcaagtggtt

SEQ ID NO: 3570 - DNA, 58 bp, Homo sapiens
  chr9:71940141-71940199
  hyper
tgctgcgccttcggctcggctccgctccgcgtcctctgcccgccgcagccggccgcac

SEQ ID NO: 3571 - DNA, 29 bp, Homo sapiens
  chr9:71940263-71940292
  hyper
cgtggctgggctttcgggtgggccgcagg

SEQ ID NO: 3572 - DNA, 69 bp, Homo sapiens
  chr9:71940315-71940384
  hyper
gccgccgctcaggagccgccgctgcccccgctgcggccgcgctggccccggggcgcgctgcagcccccg

SEQ ID NO: 3573 - DNA, 31 bp, Homo sapiens
  chr9:72374873-72374904
  hyper
gttcgggcgcgcctccgcgtgagccgggccg

SEQ ID NO: 3574 - DNA, 31 bp, Homo sapiens
  chr9:72874087-72874118
  hyper
aggaagaattcggccccgcagctgccgctgt

SEQ ID NO: 3575 - DNA, 72 bp, Homo sapiens
  chr9:73027930-73028002
  hyper
gatcctgtctctcctccgggctgtgggaaggactcgacccagattcggtggtcacgtcgctgtcggatccca

SEQ ID NO: 3576 - DNA, 130 bp, Homo sapiens
  chr9:73028375-73028505
  hyper
gcggcgcggcacggcgcggcggccaagggggcgggggcgcggggcgcttccgactcgcaggagcgccgaggcgacctcagcccctcatctttacgtaaccggcagcgcctccgcacgcagcatccacggc

SEQ ID NO: 3577 - DNA, 75 bp, Homo sapiens
  chr9:73028534-73028609
  hyper
ccgccgcccctgccccgcgccggccgcgatcccccgacgggcgcgccggcccctctgagccggctcccttggaaa

SEQ ID NO: 3578 - DNA, 40 bp, Homo sapiens
  chr9:73028998-73029038
  hyper
ctagaactgaggcgtgcggccaatccgactgttccgtttc

SEQ ID NO: 3579 - DNA, 31 bp, Homo sapiens
  chr9:73035699-73035730
  hyper
ccgagaagtgcgtgcccgctcttccctctct

SEQ ID NO: 3580 - DNA, 36 bp, Homo sapiens
  chr9:74382902-74382938
  hyper
aaagtttaaggctgttcgcaccgactttgaaaggtc

SEQ ID NO: 3581 - DNA, 59 bp, Homo sapiens
  chr9:74639986-74640045
  hyper
aactctggtgtgagaccgaatgatgaaagccgtccaggggattccgatgctgctcaggg

SEQ ID NO: 3582 - DNA, 47 bp, Homo sapiens
  chr9:74640069-74640116
  hyper
gagctgcaggggacagcgccctctggaggccacgtgatcacagcagc

SEQ ID NO: 3583 - DNA, 31 bp, Homo sapiens
  chr9:74640148-74640179
  hyper
caagagtctaggtttccgagtcctgttgtcc

SEQ ID NO: 3584 - DNA, 31 bp, Homo sapiens
  chr9:77501916-77501947
  hyper
gtccagacaaaataggcgagaccaagaaatt

SEQ ID NO: 3585 - DNA, 65 bp, Homo sapiens
  chr9:77502361-77502426
  hyper
cgaactcctctccctccggcccggagcggaatcagagctgcctcctctcccggggtgtttcccac

SEQ ID NO: 3586 - DNA, 31 bp, Homo sapiens
  chr9:78505087-78505118
  hyper
gtgtggtagcttctcccgggagcagaaagtg

SEQ ID NO: 3587 - DNA, 118 bp, Homo sapiens
  chr9:78505445-78505563
  hyper
ggaggcgctaggacctcgtcagcgcctggctgcggccgctttcaagagggcggaggagggagaggaggagggcgatgtgggaaaggaggggtgttaaggggggcgggggaagtcattt

SEQ ID NO: 3588 - DNA, 219 bp, Homo sapiens
  chr9:78505589-78505808
  hyper
ccactcagaatcctcgcgcgctgctcggagccggagggagcgctgggagcgagcaagcgagcgtttggagcccgggccagcagagggggcgcccggtcgctgcctgtaccgctcccgctggtcatctccgccgcgctcgggggccccgggaggagcgagaccgagtcggagagtccgggagccaagccgggcgaaacccaactgcggaggacgcccgcc

SEQ ID NO: 3589 - DNA, 87 bp, Homo sapiens
  chr9:80646055-80646142
  hyper
gtccctgcggagctgccgctcgatctcgtcgttgatccgccgggcttccttggcctcctcgctcaggcagcacgccatgatggactc

SEQ ID NO: 3590 - DNA, 164 bp, Homo sapiens
  chr9:80646151-80646315
  hyper
tcttccaaagtgcctccgctgcagccccgccggcaccccctgctcacagcgcgcacacacaccctcccgccctcgctcccccgaggcagcggtggccgccgagcccccgccgcccgggcgcgcgtccgggacgagctccgggaaccgccgcgggggcggcggcc

SEQ ID NO: 3591 - DNA, 401 bp, Homo sapiens
  chr9:80646445-80646846
  hyper
cctcgctcagacgcccgcgcctccttccccgggaacaggcggcccgcctcgccccccgagccgccgccgccgccgccgcctgcgaggctcccctacgccgtgcgcctggcggcgagagctcattcaccggggtgtccccgcagcgagcggccgccgacggctccccgcgcccggcgcgcccgctcctcgccgccgcctgacacggctcccgggcgccctcggccctgtccgcgcccaccgcccggctcgcgcgcagacccggttcccgtcccgcccggcaaccgcgcgctcctccgcctccgcctccgcccccgcccccgccagacgcccaccccctgccccgattgccaggcgcggagcggctgctcagtgcgagccctccccctcgccacacacacaca

SEQ ID NO: 3592 - DNA, 73 bp, Homo sapiens
  chr9:80646862-80646935
  hyper
aactggagcacagatccgggagggaggaggcggcggcgaaaggaggaggaggaagaggcggaggggatgggcg

SEQ ID NO: 3593 - DNA, 413 bp, Homo sapiens
  chr9:80647103-80647516
  hyper
cggcagagtccgcgggcgcagcagtcacggccgcccccggccgaagtcggggccagacccggccgccgacgcgcagcccgagccggcggccgccgttgcgtgccagggccgcagccgacctgcggctgccgtccggccgggcgtggtgagacaggaatatggcggcctctgcctgcctcagcccaccggcccgggagcgcggccgcggcccctgctgaagtcgcgggaggcggccccgcggagccccgcacgcgctccctgcggcgccggcgctggcgtccgccgctcccgggctgtgcctgtctgctccacggggtcgctcctcagccgtttctgtgtttcccgttcctatttctaaaacgccattcggttagaaactctcacgtcacctctgacaccggtgcagtcttaga

SEQ ID NO: 3594 - DNA, 73 bp, Homo sapiens
  chr9:82185463-82185536
  hyper
gccacccccacctttccgccatctctcgggcccgcgtggcaccctgctctgtttttaacggggataaacttga

SEQ ID NO: 3595 - DNA, 322 bp, Homo sapiens
  chr9:82185537-82185859
  hyper
ttgcttctccaaagagcgggaaaaagaggcgcagtcttggtactgatctgggggagggaacgtcccagggcgcgcaggggcgttttctacccgtgccccgtcggcctgctctgttcagtaccgaccgtgttcggggttcacgtggcccagtcggcaaagtttctttggaggtccagcgtctctgattcccggatcttcagccccacccggagcccccacggttactgccccccgcgacccccgatggagcgtcgggatgcgctttctctccgagtgcctccgggggtggagggagggaggcctgtttcggaactaaatggca

SEQ ID NO: 3596 - DNA, 72 bp, Homo sapiens
  chr9:82185989-82186061
  hyper
attatgccggctccagcggcgcgtaaaattgatgtgaaccgaacgaagtaagatcagcgtgatcctccccct

SEQ ID NO: 3597 - DNA, 98 bp, Homo sapiens
  chr9:84302221-84302319
  hyper
actcgcatggcgcggccggacacgcacctgtgatactgcgcctgcaggaactggaattcctctttaatccggtccagggactccgggatagtgaactt

SEQ ID NO: 3598 - DNA, 80 bp, Homo sapiens
  chr9:84302327-84302407
  hyper
ggcctgcagcctggtgcggcgtctgggggcgaccagcgagggggaccgagggacgggaatgcgggcggatgaataaagca

SEQ ID NO: 3599 - DNA, 31 bp, Homo sapiens
  chr9:84302412-84302443
  hyper
tcagagaaggcaagaacgggtgggacataaa

SEQ ID NO: 3600 - DNA, 31 bp, Homo sapiens
  chr9:84302451-84302482
  hyper
tagaagtggctgaaaacgaggccccaaactc

SEQ ID NO: 3601 - DNA, 55 bp, Homo sapiens
  chr9:84302509-84302564
  hyper
gaaagcggaccctccccgggccccggcttctaaagaggctcggaagctcttccca

SEQ ID NO: 3602 - DNA, 44 bp, Homo sapiens
  chr9:84302565-84302609
  hyper
tctccagggcggattgcgctaagtgcgcccgggtcaccaggcca

SEQ ID NO: 3603 - DNA, 217 bp, Homo sapiens
  chr9:84302640-84302857
  hyper
gaccaggccagattgtcggtgtcgccgccccttcccccacggcggcgataatgaccccggggaccagaggagaaaaacaactcctttacgctccccattcccagagtcgccggggccacctccagacgcaccggaaccggggccgcattgacatgtaaataggcgagaggagaaacaaaggggggggcgccctgcccccactcggggaaggtagagg

SEQ ID NO: 3604 - DNA, 54 bp, Homo sapiens
  chr9:84302879-84302933
  hyper
ccccagccttccccagcgcccctgtccgctcggtatagacgtcaagtaggaagg

SEQ ID NO: 3605 - DNA, 53 bp, Homo sapiens
  chr9:84303002-84303055
  hyper
ctccccagccttacaccgctgagggcgagaaggtccgccgggcctcagaagcc

SEQ ID NO: 3606 - DNA, 59 bp, Homo sapiens
  chr9:84303106-84303165
  hyper
ccaccaccacccagccgcgcctcaccgggtgccggctctgcgggaacatcgctctggcg

SEQ ID NO: 3607 - DNA, 167 bp, Homo sapiens
  chr9:84303313-84303480
  hyper
gcgcccgcagctgctccggctcccgctcccgtcggtgcgggctccggccctcagggccacattagtgggcgccccaggcccagctgcttcaagaacctgcgcggagacgtcgggcgctcggggactgtgcgcgggggcagcgctccaacccccggcctcagctgccc

SEQ ID NO: 3608 - DNA, 64 bp, Homo sapiens
  chr9:84303614-84303678
  hyper
gctttccccgaggcggcggcgggcgaggtgcaggtggcgcggcggcccccgctaaccccacaca

SEQ ID NO: 3609 - DNA, 161 bp, Homo sapiens
  chr9:84303730-84303891
  hyper
ggtgctcgcaggctcccgggacgcaaaggggagcgaggttgaagacgcagcggaggctcctggccggggagcgacggatgacgaggcggggaaagtgcggagggcgcgccgggaggcggctcggcacgccccgtgcgaccagcactcggtgttctccgcgg

SEQ ID NO: 3610 - DNA, 64 bp, Homo sapiens
  chr9:84304432-84304496
  hyper
gccgcccgcgcctctcgcgccgcttacattaacacgcggtttcacactccggagctaaccagcg

SEQ ID NO: 3611 - DNA, 46 bp, Homo sapiens
  chr9:84304529-84304575
  hyper
gcgagcgcggagccggcgggggacgtgagcccgggaggttgggggg

SEQ ID NO: 3612 - DNA, 50 bp, Homo sapiens
  chr9:84304579-84304629
  hyper
gggggggcagaaggcccgcatcagccaatcgcgtgcgctgcaaccaacgt

SEQ ID NO: 3613 - DNA, 31 bp, Homo sapiens
  chr9:85834937-85834968
  hyper
cagaacaaagaatccacgcttgtaaagcaat

SEQ ID NO: 3614 - DNA, 55 bp, Homo sapiens
  chr9:86886705-86886760
  hyper
tagcgggggagaccctcgctttctggataaactattttcccgggccggacactga

SEQ ID NO: 3615 - DNA, 225 bp, Homo sapiens
  chr9:88713661-88713886
  hyper
ttgtgtggatcctccacgttggcaaaggtggaaacacaggtatgcgagaaaaccccgagcatccacgagaacgggatgcagccgcgctctggacgcgcggcgggaggacccggagcccaagctccggggtcaccagccacgaggcccagcggcaacgtggaccccagggcggccggagcgcgcctggggctggaggggaggaagaggcggcgggagccgagagac

SEQ ID NO: 3616 - DNA, 62 bp, Homo sapiens
  chr9:90691227-90691289
  hyper
gctccagcagcctccacgcctagagggctgcgcgtccgggatcgcagcgccttagcgtctcc

SEQ ID NO: 3617 - DNA, 31 bp, Homo sapiens
  chr9:91002683-91002714
  hyper
cttgtaggtgaggctccggggctccagctaa

SEQ ID NO: 3618 - DNA, 96 bp, Homo sapiens
  chr9:91002725-91002821
  hyper
tgggctgggctttgtgcggggaggcagcaagcggggtgagccggcgacgacgccggcctctacgcagtgcggtggtgaagacgtctcttccaggga

SEQ ID NO: 3619 - DNA, 54 bp, Homo sapiens
  chr9:91002840-91002894
  hyper
tccttttaaagggctcgcgtcccgcggccctgaaccggcgcgctggagcagtaa

SEQ ID NO: 3620 - DNA, 51 bp, Homo sapiens
  chr9:91002941-91002992
  hyper
agtttcctcagtcttcgcggtgtgcaccactcaggacgacttgcggcttac

SEQ ID NO: 3621 - DNA, 31 bp, Homo sapiens
  chr9:92762428-92762459
  hyper
ctaaggcgctgagcagcgttaggcactcaaa

SEQ ID NO: 3622 - DNA, 31 bp, Homo sapiens
  chr9:92859700-92859731
  hyper
acactagggatggaaccgagaggccactcag

SEQ ID NO: 3623 - DNA, 222 bp, Homo sapiens
  chr9:93955658-93955880
  hyper
ggtcaaaagaattctgcgagttagagcgcagattaagttgctagcgacgggcattgaaggttttagaaccgagaaaatgagccggtggcggggagcgcgtcctcagcggccaggcccggcacggggctcgggcactcggggacacacggtggtcgtcgctgtgtctcagcaggaccctgtgcgctggagagcttggggccgcgagtcgcgcagcaaggaggc

SEQ ID NO: 3624 - DNA, 31 bp, Homo sapiens
  chr9:93955893-93955924
  hyper
atttttagcctctgaacgttttccaaaataa

SEQ ID NO: 3625 - DNA, 67 bp, Homo sapiens
  chr9:93955928-93955995
  hyper
caaaaggaaatacacacgcacacatggacctaacacacaaaacgtccttctgcgggaagccagcact

SEQ ID NO: 3626 - DNA, 68 bp, Homo sapiens
  chr9:93956158-93956226
  hyper
gcagcgtcccccagcccgggacccgcaggaatgcgaggggcaagacagatcgccggaggagcaggggt

SEQ ID NO: 3627 - DNA, 86 bp, Homo sapiens
  chr9:93956242-93956328
  hyper
accactcactggctttcggtgaagccagaatgttagcagcgagtcgcggtcgggggccttggggttgcacacgcttgctccaagca

SEQ ID NO: 3628 - DNA, 31 bp, Homo sapiens
  chr9:93956429-93956460
  hyper
ttacaaccccccaccccgccactgctgtcac

SEQ ID NO: 3629 - DNA, 39 bp, Homo sapiens
  chr9:94662836-94662875
  hyper
aaagcagccaaggaggcgggaaaacgacaagcttctgga

SEQ ID NO: 3630 - DNA, 31 bp, Homo sapiens
  chr9:95946018-95946049
  hyper
agggcaggaaaggacacgctgagccccacca

SEQ ID NO: 3631 - DNA, 31 bp, Homo sapiens
  chr9:95946308-95946339
  hyper
gcccgcaggtggccgcgcgcgcctgccagtc

SEQ ID NO: 3632 - DNA, 31 bp, Homo sapiens
  chr9:95946873-95946904
  hyper
cagggctgggcagggcgcgagatccctctgc

SEQ ID NO: 3633 - DNA, 78 bp, Homo sapiens
  chr9:96721389-96721467
  hyper
gtgggcagtttgtttccgctcccacttgcagcgggtctgcatcttaattggcaaaacgaagttggggccgcggtggag

SEQ ID NO: 3634 - DNA, 113 bp, Homo sapiens
  chr9:97767418-97767531
  hyper
ctgtgtcctcttcccccgcagccgctgcagagggagcgtcgcgccggggcggagtgcgggcttgcgcggcaagtgcgcgccgaggtgagtgcgggcggcgcggtccctgcgcc

SEQ ID NO: 3635 - DNA, 92 bp, Homo sapiens
  chr9:97767681-97767773
  hyper
gttccgcgggcgggcgcgggtggcctcccgaggtgcggggaagaccaggtcgcgaggccgggggtctctgctttctcgcgctgggggatggc

SEQ ID NO: 3636 - DNA, 31 bp, Homo sapiens
  chr9:97811372-97811403
  hyper
cttacttgttaaattccgagatgagaatcta

SEQ ID NO: 3637 - DNA, 47 bp, Homo sapiens
  chr9:98268139-98268186
  hyper
ccgcctccgcagccccgcgctgcgcccgcccccggccctccccagcg

SEQ ID NO: 3638 - DNA, 117 bp, Homo sapiens
  chr9:98273073-98273190
  hyper
aggagcagggagaaggcggagctccggtggccacgtgaccccgcgccaggaggcccggtgcgcgcgcgcgcccggctcccggactccccgcgcccgcgcggccggggcagagtaggt

SEQ ID NO: 3639 - DNA, 59 bp, Homo sapiens
  chr9:98273462-98273521
  hyper
cggtccacgcggctcccgcagggggcccgtccgccggctctccccgcccccttccttcc

SEQ ID NO: 3640 - DNA, 31 bp, Homo sapiens
  chr9:98273570-98273601
  hyper
ccttcctccctcgccccgctccctccctcaa

SEQ ID NO: 3641 - DNA, 56 bp, Homo sapiens
  chr9:98273637-98273693
  hyper
agcctctcctcctccccggcttcagggggaggcccttcccccgaccccctaacccg

SEQ ID NO: 3642 - DNA, 31 bp, Homo sapiens
  chr9:98784884-98784915
  hyper
ctggggtggaaggacccgcagcgccagccgg

SEQ ID NO: 3643 - DNA, 31 bp, Homo sapiens
  chr9:99145683-99145714
  hyper
gcgccgctgaagcgcacggaggacaggggca

SEQ ID NO: 3644 - DNA, 71 bp, Homo sapiens
  chr9:99381369-99381440
  hyper
tttaagggggtgggggcgaaggcatttcggcccggccccggaggccccgggcagcccggtgggaggtgggc

SEQ ID NO: 3645 - DNA, 118 bp, Homo sapiens
  chr9:99381549-99381667
  hyper
ttgctgcgtggagctgcggatcttcttcacacccggcgaggtcgacgagcagcgccgcgagcaggggggcgcggcggcccagctcgaccgccgctcgcttttccgcttcatggaggcg

SEQ ID NO: 3646 - DNA, 156 bp, Homo sapiens
  chr9:99381730-99381886
  hyper
gccagccccgcgcgggcgctcggggcggcgggcgcagagcggcgctgcggggacggcgggcgccggcagagcccggcgggaggcggtcgcgcaggagccggaggaggagcccggcccacagcgcctgccccgctgcctcccgcggccgccgcagga

SEQ ID NO: 3647 - DNA, 81 bp, Homo sapiens
  chr9:99381944-99382025
  hyper
cccaggtgcccgcagccggctggcgcggccgaggcgacggggctgcagctggcggccggagctgcccggggtaaccgtgcg

SEQ ID NO: 3648 - DNA, 92 bp, Homo sapiens
  chr9:99382036-99382128
  hyper
gccgcggccgctgctgcgtaggcgccggggcacagcaggacgcggctcgtggggaccccaggagggctgttccgtggcgcttcattcacaaa

SEQ ID NO: 3649 - DNA, 38 bp, Homo sapiens
  chr9:99382132-99382170
  hyper
ggcccacaaccctcctcggggcccgcagactgaggcct

SEQ ID NO: 3650 - DNA, 64 bp, Homo sapiens
  chr9:99382245-99382309
  hyper
aaactctgagggcttccgccaatcagagataaagtgtgctagcgaccttcgccagccccccaac

SEQ ID NO: 3651 - DNA, 37 bp, Homo sapiens
  chr9:99416949-99416986
  hyper
gaagcgggcactgggccgcccacgctgggaaactcac

SEQ ID NO: 3652 - DNA, 31 bp, Homo sapiens
  chr9:99417008-99417039
  hyper
ttggccagatcctctacgtattccttgcaga

SEQ ID NO: 3653 - DNA, 31 bp, Homo sapiens
  chr9:99417052-99417083
  hyper
atgctgaaagccaaaacggcagaaagggcaa

SEQ ID NO: 3654 - DNA, 38 bp, Homo sapiens
  chr9:99417086-99417124
  hyper
agtaaagcagcaccctcgggccccgaaggatccctgta

SEQ ID NO: 3655 - DNA, 31 bp, Homo sapiens
  chr9:99417159-99417190
  hyper
gcggggccgggaccggcggctcgggcgcccg

SEQ ID NO: 3656 - DNA, 174 bp, Homo sapiens
  chr9:99417396-99417570
  hyper
cgctcccggaacagcgcgccgaacggtacccgctgcccgcgggcgtccagcaccggcagctcggccacggcggccgccaggggctgcccgctgtcggggccgctcggggccgggaccagggcggcggcgccgctaacctgccgcgtgaccggggccggcgcggccatgacgcgg

SEQ ID NO: 3657 - DNA, 84 bp, Homo sapiens
  chr9:99417663-99417747
  hyper
ggggcctggcaagtcacggtttccgcggcgcggcgcgggcctgggagctgtcggagtgaaccccacgggcggttctgactcagc

SEQ ID NO: 3658 - DNA, 40 bp, Homo sapiens
  chr9:99417766-99417806
  hyper
gagagaaagtaaggtccgtccacggcgagcaagcattatt

SEQ ID NO: 3659 - DNA, 100 bp, Homo sapiens
  chr9:99801183-99801283
  hyper
ccctggggtctccaaccgccctcccccgttccccacctcgaggctggcagagctccgggcagaagctctcactcccagaagcgcccgcctcctctcagtg

SEQ ID NO: 3660 - DNA, 87 bp, Homo sapiens
  chr9:99801470-99801557
  hyper
gcccccaccgccttcccgcgctgcgattggctgtgccggccactgggcggggccccgggcgcttagagcccgcgcgtgacgcagccc

SEQ ID NO: 3661 - DNA, 40 bp, Homo sapiens
  chr9:100565761-100565801
  hyper
gcttcctccccaggcccggcccagcgcgggggcggggcaa

SEQ ID NO: 3662 - DNA, 220 bp, Homo sapiens
  chr9:100565845-100566065
  hyper
gccccgtccccgctcccgggccttgtgaaatcgcgcgcgctggcggccgtcgtagaccgtgcagctctccttgggtggctgcgagtgccttggccgtgggccctgtgcgcggccagccccggcggcgggagggcgataattgcccagagacgcagcacttacctgggccggttgtgcaaggcgcgcggggggaggccccgggcggcggctctcacgcctc

SEQ ID NO: 3663 - DNA, 18 bp, Homo sapiens
  chr9:100610200-100610218
  hyper
cggcgaaacctagagaga

SEQ ID NO: 3664 - DNA, 31 bp, Homo sapiens
  chr9:100610580-100610611
  hyper
gaaggggagtaatcatcggctcttttgagat

SEQ ID NO: 3665 - DNA, 31 bp, Homo sapiens
  chr9:100611632-100611663
  hyper
ctttatcaccttgactcggtggaagagaaag

SEQ ID NO: 3666 - DNA, 31 bp, Homo sapiens
  chr9:102586643-102586674
  hyper
gcacccactgaaggggcgggtgggggattgc

SEQ ID NO: 3667 - DNA, 31 bp, Homo sapiens
  chr9:110251503-110251534
  hyper
tgaaccccaaagtcaacgaagagaagaaacg

SEQ ID NO: 3668 - DNA, 149 bp, Homo sapiens
  chr9:110251783-110251932
  hyper
cggggcggtgggcgggcggtgccgccaggtgagactggctgccgtggcgcggagctgcgaactggtcggcggcgcaaggcgcggactccggtgagttgtgtggagcgcgcgcggccatgggcgcgggccacgggcgggtgggagggtgg

SEQ ID NO: 3669 - DNA, 38 bp, Homo sapiens
  chr9:110251947-110251985
  hyper
ggggagggtcactcggcggctcccggtgccgccgccgc

SEQ ID NO: 3670 - DNA, 31 bp, Homo sapiens
  chr9:110252105-110252136
  hyper
gccttctcccatgccccgcccctccctttct

SEQ ID NO: 3671 - DNA, 41 bp, Homo sapiens
  chr9:110252232-110252273
  hyper
gcgggcggggctgggccgggccgtgacgccagccaggcagc

SEQ ID NO: 3672 - DNA, 493 bp, Homo sapiens
  chr9:112082580-112083073
  hyper
gccgaggaggaggcggcggcggccgggcccccccgtggccccccatcgcgctcgtcccccagcccggcggccccgcgccccgccgcgccccgcgcgtagcgctgcatggagcggcggccaaaggtccggcgcaggaaccgcagcatcctggctgggggcgccccctgcctccgccccctgcgctgccgctgccgctgccgctgccgctgcgccgccgcccgggagcgtcccgcgacgccgtcagtgccctcggccgcccgcgccgcctctcgcgggctacggcccggggcaagcccgcgccgaggccgaggccgcgctctagccgcctgcggggcgcgccggcccggccagcgccggctgcgagtggccgcaggcgggagggcgcgctcggggccgtcccgccgccgccgccgccgcgcgctctcccgggccggcggcctgcgcgggctgccgaggggctgctccggacgggcggctgcgggctgccaggggg

SEQ ID NO: 3673 - DNA, 249 bp, Homo sapiens
  chr9:112083164-112083413
  hyper
cgcgctcgctcccactcgccgcgccgcgcccggggcccgaggaggccccgccgagcgcccgctcccaaggcgccttttcctgcgcccgcagcccccgcctcccacctgggaggctgcacctccagccgccgccgccgccgccgccgccgctgccgccgggactgcagcacgccctcctccctcggggctgcgccgggtaattgcaagccgggtctgtgctgccccctgccggcccgagcgccccctgct

SEQ ID NO: 3674 - DNA, 79 bp, Homo sapiens
  chr9:112083423-112083502
  hyper
tgctcacgtgtgtacacgtaggtgagcacacacgtgtttccggcgcccagagccctggaggcgccgagtgcccctttgc

SEQ ID NO: 3675 - DNA, 31 bp, Homo sapiens
  chr9:112259824-112259855
  hyper
gaatttttaaggcaaccgcaacttctcagta

SEQ ID NO: 3676 - DNA, 31 bp, Homo sapiens
  chr9:112260063-112260094
  hyper
cgctggcagccgctctcggctagctccccgc

SEQ ID NO: 3677 - DNA, 47 bp, Homo sapiens
  chr9:112260102-112260149
  hyper
tgccccctcggagccccgagccggggtcgcggcggcacggggtcctc

SEQ ID NO: 3678 - DNA, 31 bp, Homo sapiens
  chr9:112260276-112260307
  hyper
ccgcgccctcccgccccggccccgccaggtg

SEQ ID NO: 3679 - DNA, 144 bp, Homo sapiens
  chr9:112260453-112260597
  hyper
ccccgcaccctgcccccggcccgctggggtcgcacgggcccgtacctgcagcatccgggggcgcggagcgcccaggtaggtcgcgcgtgcgggcggcgcggaagctcgctcgcggcgcgacctggccgccgtctgagcatgccc

SEQ ID NO: 3680 - DNA, 31 bp, Homo sapiens
  chr9:114360504-114360535
  hyper
atgatgaaggctgccccgagctgggggttca

SEQ ID NO: 3681 - DNA, 31 bp, Homo sapiens
  chr9:114360546-114360577
  hyper
ttggactgaactctgccgaatcacttgggac

SEQ ID NO: 3682 - DNA, 31 bp, Homo sapiens
  chr9:114360731-114360762
  hyper
ggtctgatctgcagcccggggttgttccttc

SEQ ID NO: 3683 - DNA, 31 bp, Homo sapiens
  chr9:114361169-114361200
  hyper
cagaacctactcctctcgtctctgaacttcg

SEQ ID NO: 3684 - DNA, 143 bp, Homo sapiens
  chr9:114361585-114361728
  hyper
ctggccagccccctcccgggtgcaggaagctaccgggtgtcccgggttgtaaccaagctttcctattccctccggcgcgcggctccaagctctccaaggaactgcgggggcgggaggcgtcgggacgtcggctcccaagatcc

SEQ ID NO: 3685 - DNA, 55 bp, Homo sapiens
  chr9:116639070-116639125
  hyper
cccctgaccctctctgcgctcggggtccccgatgaccccccgggaggtctttccc

SEQ ID NO: 3686 - DNA, 31 bp, Homo sapiens
  chr9:116860420-116860451
  hyper
aggtcttcccagagcccgtctggccaaaggt

SEQ ID NO: 3687 - DNA, 31 bp, Homo sapiens
  chr9:116916213-116916244
  hyper
cctacctcccctctctcggcttgggactttt

SEQ ID NO: 3688 - DNA, 31 bp, Homo sapiens
  chr9:123690902-123690933
  hyper
gtccccatctcccactcgtcctttggggcgc

SEQ ID NO: 3689 - DNA, 31 bp, Homo sapiens
  chr9:124041370-124041401
  hyper
tacagtagagtgtgaccgggcagattagggg

SEQ ID NO: 3690 - DNA, 144 bp, Homo sapiens
  chr9:124461190-124461334
  hyper
gcggcagggaggtgagcggggcggccggccctggcggtccccgggggtctccgcccctccgcagccccgccccctcgtcccggtactccccctcgccccggcgcccggggggctcgggcagcctcggccgcggtcggcgcggct

SEQ ID NO: 3691 - DNA, 31 bp, Homo sapiens
  chr9:124622035-124622066
  hyper
acctgtgtccaggccacggccaggcaatagc

SEQ ID NO: 3692 - DNA, 31 bp, Homo sapiens
  chr9:124622092-124622123
  hyper
gttcaccagctgatcccgtacacccttctcc

SEQ ID NO: 3693 - DNA, 71 bp, Homo sapiens
  chr9:124622146-124622217
  hyper
ggatgaggagctcctccgctgagttcccggatagcttctctgagcttctctccctccgagccaggcatcct

SEQ ID NO: 3694 - DNA, 31 bp, Homo sapiens
  chr9:125587779-125587810
  hyper
aagtagggtgaagaaacgccttttaagtaaa

SEQ ID NO: 3695 - DNA, 31 bp, Homo sapiens
  chr9:127061459-127061490
  hyper
atgtgtgcatgggtctcgcaggggtgacctg

SEQ ID NO: 3696 - DNA, 94 bp, Homo sapiens
  chr9:127534415-127534509
  hyper
tccggaagcaaaatcccgaattttgcagcggctcccggccgaatccacccgctgcggccaccaggtggcgcgcggccaccggtcactaggcccg

SEQ ID NO: 3697 - DNA, 31 bp, Homo sapiens
  chr9:128024544-128024575
  hyper
ccagagacgagaggcccggcaggtagggaac

SEQ ID NO: 3698 - DNA, 31 bp, Homo sapiens
  chr9:128138375-128138406
  hyper
tcacagatgaggaagccgaggctcagacatg

SEQ ID NO: 3699 - DNA, 31 bp, Homo sapiens
  chr9:129385814-129385845
  hyper
tgtagcagatttttcccggcccagagttacc

SEQ ID NO: 3700 - DNA, 31 bp, Homo sapiens
  chr9:129413244-129413275
  hyper
ttctgataaagataaacggaattgtttatta

SEQ ID NO: 3701 - DNA, 83 bp, Homo sapiens
  chr9:129485525-129485608
  hyper
tgggtctggttcccaccgctccctccctccccgcacagtctgagacccccttccccgggccgccccgtcgatcccaggtgatg

SEQ ID NO: 3702 - DNA, 86 bp, Homo sapiens
  chr9:129485614-129485700
  hyper
gccttcagggagcccgcgcgggcgggctaggctcgggcggaaatgaagaggataagatctgcgagcagagccgcctgacaccgtga

SEQ ID NO: 3703 - DNA, 63 bp, Homo sapiens
  chr9:130159224-130159287
  hyper
cacctgtaccttggaccgctccgccctaggggcggttccagcgcgcttcgctaatcggttcta

SEQ ID NO: 3704 - DNA, 141 bp, Homo sapiens
  chr9:130159302-130159443
  hyper
gctttaatgtgaagggcgggtcctagctgattcgctagccccgccttgcgttcctattggctgctcctgctctgcggttccgatcccgcccagcaccgtcccccaccccccgccgcccattggctgcgagaggccggtgcg

SEQ ID NO: 3705 - DNA, 190 bp, Homo sapiens
  chr9:130330785-130330975
  hyper
gacccctgccccagctcggccaggggtcgtgggctgggggtccgccaagcccgggctccgaaggggttccgggagagaaggagttccgagtccccttgagccgggaaaggtggcgctcagaagagcgcgggaaggggcgcccaggctcagagggaacgagctcggacgcggggcacgctccctggcagct

SEQ ID NO: 3706 - DNA, 58 bp, Homo sapiens
  chr9:130331058-130331116
  hyper
ggcaggcccctgggcgcgcgtggcgcggcgcgaccctcacctgcgatgtgctggcgcc

SEQ ID NO: 3707 - DNA, 36 bp, Homo sapiens
  chr9:130331223-130331259
  hyper
ctggcgccatggagcccggcccgccctgcttccccc

SEQ ID NO: 3708 - DNA, 159 bp, Homo sapiens
  chr9:130374195-130374354
  hyper
gaggaaagacaggacccgagcggggtttcaggcagatggagcgcgtcggtagcctgtggccagggatcccagcaccgacgggaaagaggaggcctgggtaccctgcgccccgggcgcgcgcggcgcgtgaggtgagggggagggcgcggctccgcacca

SEQ ID NO: 3709 - DNA, 37 bp, Homo sapiens
  chr9:130374656-130374693
  hyper
cggagccgggagactcgcgcagcgccatggcccccat

SEQ ID NO: 3710 - DNA, 164 bp, Homo sapiens
  chr9:130639866-130640030
  hyper
ggcgcccccccagacacgcgcgggcacgcactgacctggggaggggtgcgggtgggcgccggggccagtgcgtgccctgcccgtcctcgcggcggccggcaaaggcgactatttataaggctgtcagcgcgcggcatgccgggagccggcgttcccgaaggcag

SEQ ID NO: 3711 - DNA, 40 bp, Homo sapiens
  chr9:130661050-130661090
  hyper
cctggaggatccctctcggctggaacgggtcagaggccat

SEQ ID NO: 3712 - DNA, 55 bp, Homo sapiens
  chr9:130661091-130661146
  hyper
gagtgtgtgcccaggacgtggctcggcacaggcaccagggcgggggtctaggggt

SEQ ID NO: 3713 - DNA, 31 bp, Homo sapiens
  chr9:130674858-130674889
  hyper
acgcactcggcactgtcgatctcagcaccca

SEQ ID NO: 3714 - DNA, 31 bp, Homo sapiens
  chr9:130865695-130865726
  hyper
tgaatggttttctaaccggcacctcccggct

SEQ ID NO: 3715 - DNA, 75 bp, Homo sapiens
  chr9:131709400-131709475
  hyper
tcccacttgtattggacgtagaaggcctgcactgcgagggccacggcgcaccacgagtatcggtcccatacggtt

SEQ ID NO: 3716 - DNA, 38 bp, Homo sapiens
  chr9:131709587-131709625
  hyper
tagacctggggcttcacggaggccggggcgactacgga

SEQ ID NO: 3717 - DNA, 48 bp, Homo sapiens
  chr9:131842859-131842907
  hyper
ctggtctcagtttactcgtaactgaaagtgggtcggttcaaaccccct

SEQ ID NO: 3718 - DNA, 74 bp, Homo sapiens
  chr9:131842915-131842989
  hyper
ggttgcctctcctcttcgagcacgcgctatcggacgcgcaggtccccaagaccgcggatcggcagggggtacca

SEQ ID NO: 3719 - DNA, 101 bp, Homo sapiens
  chr9:131842992-131843093
  hyper
aagccttcattcagggcgcaggtcccagccgaaccaaagctcccaccaaagttcaacacgcccccaaagccagcgcctgattggcccgccctgcccacaag

SEQ ID NO: 3720 - DNA, 68 bp, Homo sapiens
  chr9:131940268-131940336
  hyper
ggagctgtggatcttgcgcagggagatgctgatcaggctctgggcgtccagggcgcactccatgctcc

SEQ ID NO: 3721 - DNA, 94 bp, Homo sapiens
  chr9:131940343-131940437
  hyper
acggcggcggagcagccgccgccgctgctgctgttaacgcttctgctgtttctgcctccagccggccgccggggcgcgccgggcaggggtaacg

SEQ ID NO: 3722 - DNA, 100 bp, Homo sapiens
  chr9:131940695-131940795
  hyper
ctattcaaataccgaacggaccccgggcctccaacgccgctgctgcctcgaatgttctcctggggctgccgcgccgcgcgggactcggagccgccggggc

SEQ ID NO: 3723 - DNA, 73 bp, Homo sapiens
  chr9:131940902-131940975
  hyper
cggctcctcccctttccgcacggctgggcctcacctgcggcaggtgcgcgccgctcatcgctcccccagcggc

SEQ ID NO: 3724 - DNA, 35 bp, Homo sapiens
  chr9:131965488-131965523
  hyper
ctctcaaacatcaccccgggcgctttaaaacgctt

SEQ ID NO: 3725 - DNA, 31 bp, Homo sapiens
  chr9:131997502-131997533
  hyper
acgagggtatggtcctcgagggcaggaactg

SEQ ID NO: 3726 - DNA, 69 bp, Homo sapiens
  chr9:132145664-132145733
  hyper
gcccgggcctggtgggcgaaaggactcaaacgccagagctctctgaccctcggccgccagggttcaagg

SEQ ID NO: 3727 - DNA, 31 bp, Homo sapiens
  chr9:132176733-132176764
  hyper
tgaaacagtccacacccgtcccaaagttgag

SEQ ID NO: 3728 - DNA, 31 bp, Homo sapiens
  chr9:132176777-132176808
  hyper
tttcataaacaaaacccgccctccagcagcg

SEQ ID NO: 3729 - DNA, 35 bp, Homo sapiens
  chr9:132222863-132222898
  hyper
ggcgcgggcctctgtgcgccgcgagagggaggccg

SEQ ID NO: 3730 - DNA, 158 bp, Homo sapiens
  chr9:132244498-132244656
  hyper
tcctcaggttcccccgcgctcctcccggaccccaccccgaggcagctttctcacaacgggatcctccccgggcggcgtggggacgcctcccgaccccgaggcccggcaggagagccgccaccgcggccgggtggtctccgcgtcgcatggcccctgcc

SEQ ID NO: 3731 - DNA, 31 bp, Homo sapiens
  chr9:132244674-132244705
  hyper
agctacataattaattcgcccataaataact

SEQ ID NO: 3732 - DNA, 101 bp, Homo sapiens
  chr9:132244759-132244860
  hyper
taggggcgtggggggtcgggggccgcggggctgtgcgtgccggggcgcacggttttgctccgcgggcctctctcgctccctcgcgccggctttttcccttt

SEQ ID NO: 3733 - DNA, 41 bp, Homo sapiens
  chr9:132244872-132244913
  hyper
tttttctttcctggagcggagcccggcgccaggagtctgga

SEQ ID NO: 3734 - DNA, 158 bp, Homo sapiens
  chr9:132245128-132245286
  hyper
ggccgggcttcagagccgcagtaaatgaggcccggggcgggcgggggtggacacggcctcggggccacggcctcccccgccgagcaaggcattcctttccgctgaactgggcgcccgggcccgcgccgcgccctgcacgcctcgcgcccggcgatcgg

SEQ ID NO: 3735 - DNA, 78 bp, Homo sapiens
  chr9:132245407-132245485
  hyper
ctgagcccctgagggtcgtcgctaacgggggtcgctcagcagggccggcctccgctgcctgcccggggtgtctaatca

SEQ ID NO: 3736 - DNA, 57 bp, Homo sapiens
  chr9:132250697-132250754
  hyper
ggtgaagcccgctcctcgccggcgaaaagcggggccgggctccggggcctgggtccg

SEQ ID NO: 3737 - DNA, 41 bp, Homo sapiens
  chr9:132258285-132258326
  hyper
gggcggaaagggttaacgggctccgccgcattgggctgtcc

SEQ ID NO: 3738 - DNA, 80 bp, Homo sapiens
  chr9:132258337-132258417
  hyper
agccagccaatgagcgcgcgccgcgatgaggtaatgccgggaccacgcggagtgggcggggctgacggggaccccgcaga

SEQ ID NO: 3739 - DNA, 44 bp, Homo sapiens
  chr9:132258503-132258547
  hyper
cgcccgaactgaaagtcggctgcagggccgcgggcctcccttag

SEQ ID NO: 3740 - DNA, 56 bp, Homo sapiens
  chr9:132258618-132258674
  hyper
aagcagagtgggtgatcgctaaagaccctaccagctgtggacgtccttggatccca

SEQ ID NO: 3741 - DNA, 188 bp, Homo sapiens
  chr9:132258690-132258878
  hyper
ttccctgcccttggcccgaactttaacggtcccagccccggcttcccctcaggcggtgcccagtgccaggacctaggagtccctcgggccacggggagagagcctcaccggcccagccacgccctccatgtgaccccgacccatcccttgggtgtcgcacctggcgcgcccaccgaggccactaagct

SEQ ID NO: 3742 - DNA, 39 bp, Homo sapiens
  chr9:132258891-132258930
  hyper
cagcagcaggacctgccggcgtggcggtcagaagtcaac

SEQ ID NO: 3743 - DNA, 78 bp, Homo sapiens
  chr9:132331031-132331109
  hyper
ggaaaggagagggcagcgggcgggggcgcctggccgcgcggggtcggccgcgggtcgatacggcggcaggatgaatgg

SEQ ID NO: 3744 - DNA, 44 bp, Homo sapiens
  chr9:132331472-132331516
  hyper
aagggccgggggctacgcggggccggggccggggccggggccgg

SEQ ID NO: 3745 - DNA, 42 bp, Homo sapiens
  chr9:132382285-132382327
  hyper
agggaccaccccccaccggaaatgactcgggcccgccccccg

SEQ ID NO: 3746 - DNA, 31 bp, Homo sapiens
  chr9:132387302-132387333
  hyper
tgagctgaaggtctgacgtgcaatgtcccac

SEQ ID NO: 3747 - DNA, 35 bp, Homo sapiens
  chr9:132459654-132459689
  hyper
agcagctgggcggcggcggcgcgggcagcgcgggg

SEQ ID NO: 3748 - DNA, 31 bp, Homo sapiens
  chr9:132804331-132804362
  hyper
cccaggaatccggggacggcaggaaaagagc

SEQ ID NO: 3749 - DNA, 31 bp, Homo sapiens
  chr9:132804366-132804397
  hyper
tccacagccagcccctcgcctttccggggac

SEQ ID NO: 3750 - DNA, 34 bp, Homo sapiens
  chr9:132804583-132804617
  hyper
tcccctccagaccagacgtcgcagtgcccacatc

SEQ ID NO: 3751 - DNA, 39 bp, Homo sapiens
  chr9:132804622-132804661
  hyper
caggattgagctaccccgaaagaacaagtgcgcccggag

SEQ ID NO: 3752 - DNA, 4 bp, Homo sapiens
  chr9:132804693-132804697
  hyper
cgaa

SEQ ID NO: 3753 - DNA, 31 bp, Homo sapiens
  chr9:133319784-133319815
  hyper
ttttctcatccttactcggctaccagaggct

SEQ ID NO: 3754 - DNA, 31 bp, Homo sapiens
  chr9:133710180-133710211
  hyper
ccttaatcacaggacgcgcgttgagtagaaa

SEQ ID NO: 3755 - DNA, 127 bp, Homo sapiens
  chr9:133710244-133710371
  hyper
tatgcattttcaccagcgttctcgggtcagagggtttgcctggcaccgcgtactgggaaactcgccaaaagcggtgcaggttggagacgccccaggccgcggtggagttgcgcgcggcttctaaagt

SEQ ID NO: 3756 - DNA, 459 bp, Homo sapiens
  chr9:133710381-133710840
  hyper
aggcctgcaccctccccgccggggctgggacggcgcttccaggcggagaaagacctccgcgggccgcgcgcggccttccccctgcgaggatcgccattggcccgggttggctttggaaagcggcggtggctttgggccgggctcggcctcgggaacgccaggggcccctgggtgcggacgggcgcggccaggagggggttaaggcgcaggcggcggcggggcgggggcgggcctggcgggcgccctctccgggccctttgttaacaggcgcgtcccggccaggcggagacgcggccgcggccatgggcgggcgcgggcgcgcggggcggcggtgagggcggctggcggggccgggggcgccgggggggcgcgcgggccgagccgggcctgagccgggcccgcggaccgagctgggagaggggttccggcccccgacgtgctggcgcgggaaaatgttgg

SEQ ID NO: 3757 - DNA, 160 bp, Homo sapiens
  chr9:133710872-133711032
  hyper
aagaaggggctgtcctcgtcctccagctgttatctggaaggtaagcccgggccgcacgggttgggctgagtagccgcgcgccctcccgctgctgctgggcccttcctaggcctcgccgcccgcgcgctcccgcctgcgccctccccgggtcttgtctttt

SEQ ID NO: 3758 - DNA, 31 bp, Homo sapiens
  chr9:133711152-133711183
  hyper
tctctttctctttctcgcgatggcccctagg

SEQ ID NO: 3759 - DNA, 102 bp, Homo sapiens
  chr9:133711196-133711298
  hyper
gcgtggcccccagccccggcaccagccccggtagagccacgccggatggtgacggcggcgtccggggccccacagtgcgggctcccccgaaaaagtttgaga

SEQ ID NO: 3760 - DNA, 31 bp, Homo sapiens
  chr9:133971401-133971432
  hyper
tgaaatgactggtgtacggtgcaaagtgcct

SEQ ID NO: 3761 - DNA, 6 bp, Homo sapiens
  chr9:133972628-133972634
  hyper
tcattt

SEQ ID NO: 3762 - DNA, 44 bp, Homo sapiens
  chr9:134151975-134152019
  hyper
ctgacttcctgccctccggccttccgcacgcgctccctccgggc

SEQ ID NO: 3763 - DNA, 75 bp, Homo sapiens
  chr9:134152263-134152338
  hyper
ccgccgtgcagggtcccggggctgcgctccggccgccgccgcctgcttcgccgcggccgccgaggacctggtggg

SEQ ID NO: 3764 - DNA, 298 bp, Homo sapiens
  chr9:135036697-135036995
  hyper
cttggcccccctccctcgtgccgatggggcagcccccacacccatgggcgctggcaccccggcaggcccccgggttttggaagaggaagctgcagcccggctgcgcctgaccggagccggctgaggatgcgctctgggcgcagggacccgctggcccccgggccgggaggcgatgtttaggcagcgaccccccagaggctgccggggccaccctggccacgggcccgccgggacgcccctgctcgccgcgcccctccccgggccgtggcgcgtcccccgagccgcgcaatatttcctt

SEQ ID NO: 3765 - DNA, 39 bp, Homo sapiens
  chr9:135036998-135037037
  hyper
gcacctttaagaagaccgttgctccgtggtgggatggtg

SEQ ID NO: 3766 - DNA, 113 bp, Homo sapiens
  chr9:135037133-135037246
  hyper
cggcattaacttggagcggagtgcaggggggcagtgaagcgcccgccatctggcccgcgccgcgccggggggatgccccggctccccgacgagacgccgcgaagcccacccgg

SEQ ID NO: 3767 - DNA, 31 bp, Homo sapiens
  chr9:135077790-135077821
  hyper
ggggcaggtgggctgccggtggctctgagag

SEQ ID NO: 3768 - DNA, 31 bp, Homo sapiens
  chr9:135117938-135117969
  hyper
tgcctacaattccagtcgctgacttggtcct

SEQ ID NO: 3769 - DNA, 34 bp, Homo sapiens
  chr9:135395348-135395382
  hyper
ggactaacgaacgagtgaacgtagagttgagatc

SEQ ID NO: 3770 - DNA, 31 bp, Homo sapiens
  chr9:135395479-135395510
  hyper
atccactctgctacaccgcaacagtgtctgg

SEQ ID NO: 3771 - DNA, 36 bp, Homo sapiens
  chr9:135461625-135461661
  hyper
accccgtcactgcaaacgccacgcacaatgaaactc

SEQ ID NO: 3772 - DNA, 31 bp, Homo sapiens
  chr9:136856334-136856365
  hyper
tcccggtaaggattccgcgacccccggagaa

SEQ ID NO: 3773 - DNA, 31 bp, Homo sapiens
  chr9:136856910-136856941
  hyper
tcccccatcccaggccgcgcagaccgcggaa

SEQ ID NO: 3774 - DNA, 46 bp, Homo sapiens
  chr9:137255488-137255534
  hyper
cgcacctgtgcggcaccgggtgtggctggcacggtttggctgctgt

SEQ ID NO: 3775 - DNA, 31 bp, Homo sapiens
  chr9:137255548-137255579
  hyper
cctgtgctggccagtgcgtctcccagtcctt

SEQ ID NO: 3776 - DNA, 65 bp, Homo sapiens
  chr9:137255589-137255654
  hyper
tgtgggaggcccaggccgccctgagcatggggaccccagggccggaggtgcgacctgagcatggg

SEQ ID NO: 3777 - DNA, 31 bp, Homo sapiens
  chr9:137295660-137295691
  hyper
gtccccttgacattggcgaggtccccggggt

SEQ ID NO: 3778 - DNA, 31 bp, Homo sapiens
  chr9:137442506-137442537
  hyper
gccacctcccaccccacgtcttgttgacttc

SEQ ID NO: 3779 - DNA, 94 bp, Homo sapiens
  chr9:138372194-138372288
  hyper
gccggcctggagactgcggttcacgccctgcgccaggcggagcttccgggagggtggccgctctcccgggccccaagctcgctagtcctcggat

SEQ ID NO: 3780 - DNA, 31 bp, Homo sapiens
  chr9:138613913-138613944
  hyper
gcccatcacatgtgaacggtgtcttgtgggg

SEQ ID NO: 3781 - DNA, 235 bp, Homo sapiens
  chr9:138986453-138986688
  hyper
tccccaggctggggcccgagtgggggaggcgcgggaggcggtgacgacccacgaacgggcccacctggaccgggagggcgaggcgcgggcccggctgggccaggcagctgcgcagatgcgccgggaggggtgggtacctccgccctggccccgggccagtcctgccccggcttccccacccggagggctggatcggccagtcgggtccctggggaggccgcgcgggtccccagaa

SEQ ID NO: 3782 - DNA, 464 bp, Homo sapiens
  chr9:138986692-138987156
  hyper
agggaaacccagcaggcggcggggagcgccccgggacgcccggagccggggtctccccgaacgcgcggcgcggcgtcccggcccggggtcgcgggcgcctccgccgggaccccccggccccgcccggcccccctccgcgggctcccgaggccggttcccgcgcgcacgcccgggccggcgcggaactcggccgcacccgccccgcgcggccggcactgcggcagggggctcgcgccaagttgggcggccgcggagtttgcgggaagtgcgggcccggcccgtgggacgaccccgcccggcggcgtaacccgggggcggccgcgcgcgccaagttggcggtacctgcgggcgcccggcccggtccggcctgggcagctgcggcgcgccgcccgcggcaggaagtgcttggcgtcccggcgctccggctcccatggactttctccgacctcgcccagcaccggcgg

SEQ ID NO: 3783 - DNA, 32 bp, Homo sapiens
  chr9:138987167-138987199
  hyper
cgggggcggggcggcggcgggggaggtgcccg

SEQ ID NO: 3784 - DNA, 143 bp, Homo sapiens
  chr9:138987368-138987511
  hyper
tcgcgcgtcctccttccggagctgccggcggtcgaccctgcgcgggacacccggcgggagccggacgccgcggcgcagaggacggagctcggcggccgggtcgggaaaggacctggagcgccgccctccgccctccccgggcc

SEQ ID NO: 3785 - DNA, 35 bp, Homo sapiens
  chr9:138987585-138987620
  hyper
ccgcggcagtcgcgtccgcacggtgcagcctccgg

SEQ ID NO: 3786 - DNA, 51 bp, Homo sapiens
  chr9:138987676-138987727
  hyper
gtgaaagacgaggatacgggagcgcccttgggcgaacgtctgcggggctcc

SEQ ID NO: 3787 - DNA, 31 bp, Homo sapiens
  chr9:139029042-139029073
  hyper
ccagggctgtttactgcggggcctggccctc

SEQ ID NO: 3788 - DNA, 31 bp, Homo sapiens
  chr9:139294770-139294801
  hyper
gggggccgcctccgcgcgctctggaggggcg

SEQ ID NO: 3789 - DNA, 59 bp, Homo sapiens
  chr9:139334258-139334317
  hyper
gcggagtcagcccggccgggacccagcaaccgccgccgcggggccgcgcccggtccccg

SEQ ID NO: 3790 - DNA, 52 bp, Homo sapiens
  chr9:139440853-139440905
  hyper
ggggagggcgaggccgcggacagccgtgtgcaccgtgcgctgggccgggcgg

SEQ ID NO: 3791 - DNA, 31 bp, Homo sapiens
  chr9:139519835-139519866
  hyper
gggtgctggccaagaacgctctgatccaaag

SEQ ID NO: 3792 - DNA, 35 bp, Homo sapiens
  chr9:139519905-139519940
  hyper
gctggggaaaaatgggcggccggggcaggggcaga

SEQ ID NO: 3793 - DNA, 31 bp, Homo sapiens
  chr9:139580673-139580704
  hyper
actgcccctggaaccacggggaagggggcct

SEQ ID NO: 3794 - DNA, 97 bp, Homo sapiens
  chr9:139581778-139581875
  hyper
gcgccgcggccagacacggccacagctccatggcccggcccggcgcccgacggcgccgccagctcgctcccgctcccgctcccgcttctcccccgcg

SEQ ID NO: 3795 - DNA, 31 bp, Homo sapiens
  chr9:139838240-139838271
  hyper
acgcggggccgcggggcgggcccccagccag

SEQ ID NO: 3796 - DNA, 41 bp, Homo sapiens
  chr9:139872822-139872863
  hyper
ctgtcctcgggaggggcgtggccagacgggggtgctgggtg

SEQ ID NO: 3797 - DNA, 60 bp, Homo sapiens
  chr9:139940158-139940218
  hyper
ggcctgtttattccatcgtgggcgaggcggggcccccgccaccagcggaccaggcctgca

SEQ ID NO: 3798 - DNA, 34 bp, Homo sapiens
  chr9:139948372-139948406
  hyper
cacagcagtaggaggccggcgaggcccgcggcgg

SEQ ID NO: 3799 - DNA, 55 bp, Homo sapiens
  chr9:139948416-139948471
  hyper
cggcggcagcagtgaccgcaccttcccggccatgggcgggcgggcgcgcgggagg

SEQ ID NO: 3800 - DNA, 105 bp, Homo sapiens
  chr9:140024587-140024692
  hyper
ctggccgcgtggtcaccggcaagaagcccagggcctcacccgggcgcggcgtcgcgggggccgagggaaggaccggaccctcccgaggtcgcggacccggccggc

SEQ ID NO: 3801 - DNA, 31 bp, Homo sapiens
  chr9:140024723-140024754
  hyper
gctaagctggccgcgccgcatctcaccgtcg

SEQ ID NO: 3802 - DNA, 31 bp, Homo sapiens
  chr9:140025041-140025072
  hyper
ccccctgccccttgggcgattctgctgcgtc

SEQ ID NO: 3803 - DNA, 31 bp, Homo sapiens
  chr9:140195120-140195151
  hyper
aaactgcaaaacaagccggtttgggggatgg

SEQ ID NO: 3804 - DNA, 31 bp, Homo sapiens
  chr9:140195188-140195219
  hyper
gggcttccaaaactcacggatttgagggaga

SEQ ID NO: 3805 - DNA, 31 bp, Homo sapiens
  chr9:140195551-140195582
  hyper
cctcggggctgctcctcggctgcagccggca

SEQ ID NO: 3806 - DNA, 31 bp, Homo sapiens
  chr9:140195701-140195732
  hyper
cggtatctcgggattccgaacttgctggttg

SEQ ID NO: 3807 - DNA, 122 bp, Homo sapiens
  chr9:140195922-140196044
  hyper
gccacgggccttctggcggggcctgcgagccgggcgcgcaccgaggtagttggcgggaaggtacagcagagacgacgcgggcgcagggccggggtccggggtcccggcgggcatcaccggcc

SEQ ID NO: 3808 - DNA, 31 bp, Homo sapiens
  chr9:140196190-140196221
  hyper
ggttgccgtcgatgaccgactggtgcagcgc

SEQ ID NO: 3809 - DNA, 31 bp, Homo sapiens
  chr9:140445801-140445832
  hyper
gggagcacagacagcccgggccctcccggct

SEQ ID NO: 3810 - DNA, 191 bp, Homo sapiens
  chr9:140445936-140446127
  hyper
ctcgagtccagggcccgcgtcctccccgacctcccgacgccacctcacggcctcagggggactgggctcccgggaaaccgccggccacctggcggacgaacacaggcagtggcgggcagtggagacgccagggaccaccgcgctgagagcgatcactcatccgccagccccgccccgcgagccccgccccg

SEQ ID NO: 3811 - DNA, 197 bp, Homo sapiens
  chr9:140446278-140446475
  hyper
cctaccagattggggccgctattggacgcggcggccgcggccaatcggagccgctcttgctgcgacgcagcggtcggaagcggagcaaggtcgaggccgggttggcgccggagccggggccgcttggagctcgtgtggggtctccggtccaggtgagtctgtcggattggggcgggcgccgcgcgcggccaggggcg

SEQ ID NO: 3812 - DNA, 69 bp, Homo sapiens
  chr9:140473436-140473505
  hyper
ggaagccaggctcccacgccccctgtcggccggctgaccgcggcgggcttcaggcgtcagacgcgctgc

SEQ ID NO: 3813 - DNA, 31 bp, Homo sapiens
  chr9:140473528-140473559
  hyper
aaggcttcgggaaatccgctcctccacaaag

SEQ ID NO: 3814 - DNA, 80 bp, Homo sapiens
  chr10:735607-735687
  hyper
ggaggaggcggcggcgcgggcgcgggaggcgggcggcgggcgcgcagggacctccctcccctcggcgcctcctcagcgcg

SEQ ID NO: 3815 - DNA, 31 bp, Homo sapiens
  chr10:1627517-1627548
  hyper
gagttgggaactgcatcggacaaacctgttt

SEQ ID NO: 3816 - DNA, 67 bp, Homo sapiens
  chr10:1779927-1779994
  hyper
tgcgtctgggagagaccgggggagcctccaggagggaccctgcccgggaggacgaggcctcctgccg

SEQ ID NO: 3817 - DNA, 31 bp, Homo sapiens
  chr10:1780119-1780150
  hyper
tcagaaatgcagagaccgcacttcctcagaa

SEQ ID NO: 3818 - DNA, 74 bp, Homo sapiens
  chr10:3239421-3239495
  hyper
gaacaggcaatgaggccgaggccaggggcgtcccctcgcttccttccaaggcttccttccgggacctctcatct

SEQ ID NO: 3819 - DNA, 31 bp, Homo sapiens
  chr10:3239563-3239594
  hyper
gcaaggagttacaggccgagggctgagtggt

SEQ ID NO: 3820 - DNA, 83 bp, Homo sapiens
  chr10:5708184-5708267
  hyper
gcgctcggtgggtttgcggttgcgaaaccccacacctggcgagccgcacggactgcaaccccgcagtgcgctggcctgggaca

SEQ ID NO: 3821 - DNA, 56 bp, Homo sapiens
  chr10:5708425-5708481
  hyper
gccggcgccgctgcctcgctctgacctccgcggcgcccgcacgtacccacgtcgcc

SEQ ID NO: 3822 - DNA, 66 bp, Homo sapiens
  chr10:5708499-5708565
  hyper
cgcccggggctccatgcggctcaccggcggccgcgcggcgactctgggcgccgggacctgggccgg

SEQ ID NO: 3823 - DNA, 66 bp, Homo sapiens
  chr10:5708679-5708745
  hyper
ccctgggtccggactccgctgtcgctgcccaccccgcttcgcccgtcgcgccgaggagtgtgtgtg

SEQ ID NO: 3824 - DNA, 37 bp, Homo sapiens
  chr10:6018650-6018687
  hyper
ccgagatcagagctccgcgacccgctttcttctcgaa

SEQ ID NO: 3825 - DNA, 31 bp, Homo sapiens
  chr10:6019532-6019563
  hyper
ctgggacctgccgccccgccagtcgcattcg

SEQ ID NO: 3826 - DNA, 201 bp, Homo sapiens
  chr10:7450516-7450717
  hyper
ctgcccccgccagccccggggaccgtgcgcggcctccgtgtggcccccgcccacgaggtccctcgggcaggaaccgccgcgcgacctctgttcagcggccgcgtcctggccacgggcgacccctgtcgggaaccctgttcccggctaagctgcgttcccgcattccggtggctctcacccgagctcgcgtttgctggcttt

SEQ ID NO: 3827 - DNA, 43 bp, Homo sapiens
  chr10:7450725-7450768
  hyper
ctcctctgcctgaccccgattttgtctccgaactccactccca

SEQ ID NO: 3828 - DNA, 264 bp, Homo sapiens
  chr10:7450786-7451050
  hyper
acgccgacctttcccccgcacttcgccgcccactcacatcccccggcgactgcccggcctccatgcccgccaagacaagaagatgcccctctccgatgcgccgagagggttcctaagccgagcaagggacaatttcttccccaaacgctgtccccatcccccaccttccctagagcgcgaaacccaaaagtaaggaaggcaacccctcgcctcgaccctacgtgcttgtctcccagagccgcgcgctcccgcccttctgcccca

SEQ ID NO: 3829 - DNA, 65 bp, Homo sapiens
  chr10:7451074-7451139
  hyper
ggtcttctccaagcttcggtcccggtcccccacctcccaccccagagcggcgtggaggaaagcag

SEQ ID NO: 3830 - DNA, 89 bp, Homo sapiens
  chr10:7451144-7451233
  hyper
cactattaagtgcagcgcgccccctgcacacacgaaatccggctggcgtctgcagcccgattgcacccaatacccgggacagttagtcc

SEQ ID NO: 3831 - DNA, 93 bp, Homo sapiens
  chr10:7451235-7451328
  hyper
ttaataagcacctcctcgccccacctactcggggatctacccgcgcaggatccagcacacacaaggcgagagctagctcgtctcctagaaaga

SEQ ID NO: 3832 - DNA, 94 bp, Homo sapiens
  chr10:7451353-7451447
  hyper
catgtactttacaccacgtgtccgcagtttgtcacgtcaaatcatggcagggtctggttccaagacgcacacacacattcggggtggttctctt

SEQ ID NO: 3833 - DNA, 37 bp, Homo sapiens
  chr10:7451455-7451492
  hyper
acacccaaaaaaactgcgcacacgcaggcctgcacac

SEQ ID NO: 3834 - DNA, 58 bp, Homo sapiens
  chr10:7451493-7451551
  hyper
aatccacaggcacacacgacagttgcgtttcggtgccctggtccgggccaggggcact

SEQ ID NO: 3835 - DNA, 45 bp, Homo sapiens
  chr10:7451586-7451631
  hyper
acacagactctaaccacggaaaaaaaaaaccggacagcccattcc

SEQ ID NO: 3836 - DNA, 39 bp, Homo sapiens
  chr10:7451637-7451676
  hyper
ttttccccacttaattcgctaaagcgcttcctggggtag

SEQ ID NO: 3837 - DNA, 136 bp, Homo sapiens
  chr10:7451753-7451889
  hyper
aaaagccaccttagcccgccatattgaaactggcacggtttctaaagactccttccccgcagttgtggcgcttccaagaaaacacgagtacggatcaggctctggatgagtgtccggccaccgagaatcagccact

SEQ ID NO: 3838 - DNA, 86 bp, Homo sapiens
  chr10:7451917-7452003
  hyper
tccagccccttcccaccgcccctggtcaaaatcaataaatacatctcgcagttcctacagttgcattttggcggatttctgcaaaa

SEQ ID NO: 3839 - DNA, 35 bp, Homo sapiens
  chr10:7452011-7452046
  hyper
cacatacacatacccacgcacgcatattaaaaaat

SEQ ID NO: 3840 - DNA, 49 bp, Homo sapiens
  chr10:7452072-7452121
  hyper
aattttgaaagggggtcgaataagaggagacaaccggaaagcccctaag

SEQ ID NO: 3841 - DNA, 41 bp, Homo sapiens
  chr10:7452154-7452195
  hyper
acaaaaagaccatcctcgctggagcacgctccaaaactact

SEQ ID NO: 3842 - DNA, 82 bp, Homo sapiens
  chr10:7452225-7452307
  hyper
aatgtttccaagggagcgattccgaatgtctgcacgatttttacccccatgccggtctccgattccccgtcctcaccatctt

SEQ ID NO: 3843 - DNA, 308 bp, Homo sapiens
  chr10:7452330-7452638
  hyper
aaggggagaccccagcgcggaggagacgcgggagcgcggggtaggtagcagcggcggctgcgtcgctaaaatgagtgcagaaacgaggaaggtgggcggcgggaggggacaggctgcgcccggggaaggaggacactttgcaactccggacggactcccgcacggctcggcttttccgagcccggagacgcaggcgaaggggacccgggaagcaaaaatgacaacctggagcgcacagaggagtttgaagcttcgctcaagtgcagtcgctttcttctcctgcccttctctttcgctcccctgcaccc

SEQ ID NO: 3844 - DNA, 31 bp, Homo sapiens
  chr10:7452641-7452672
  hyper
ccagccttcccccacccgccacctccaaccc

SEQ ID NO: 3845 - DNA, 101 bp, Homo sapiens
  chr10:7452728-7452829
  hyper
aaaagcccctgaccagcgcactcaacctgcgggccgaagggctgctctccggccagcctgggcgccggggacagcagccggcgcggcgtcctacctggtga

SEQ ID NO: 3846 - DNA, 109 bp, Homo sapiens
  chr10:7452874-7452983
  hyper
gggagggcaccggcctcgctcgcttgctcgctcgcccgcccttgcccgctcgctccccgcccgccgcctccctcgcgcgcccgctccggtcctccggctcccactacag

SEQ ID NO: 3847 - DNA, 31 bp, Homo sapiens
  chr10:7452995-7453026
  hyper
tggcatcctctctgtgcgcatgctcggcgct

SEQ ID NO: 3848 - DNA, 57 bp, Homo sapiens
  chr10:7453081-7453138
  hyper
gtgcgtgcgcgtgcagcgaactccttcaacgaccttttccagcgcttgcaaaatttc

SEQ ID NO: 3849 - DNA, 144 bp, Homo sapiens
  chr10:7453139-7453283
  hyper
taagccaattagcctgcgggacgtgatcggctccttccccagccagctccgcgccattccctgcgcctaagcaggcgggcacccccaggaccctgggaccttccacgcccacgcggcctcctccccaccgcgctccccttcctc

SEQ ID NO: 3850 - DNA, 31 bp, Homo sapiens
  chr10:7453490-7453521
  hyper
agggcaatcttggccccgcccgccccacccc

SEQ ID NO: 3851 - DNA, 49 bp, Homo sapiens
  chr10:8090493-8090542
  hyper
taagatgtccaaagcccgggagacccagggacgccggctgggctgcctc

SEQ ID NO: 3852 - DNA, 31 bp, Homo sapiens
  chr10:8090544-8090575
  hyper
ccccttcttttcctcccgtggcacccacctg

SEQ ID NO: 3853 - DNA, 7 bp, Homo sapiens
  chr10:11207022-11207029
  hyper
ggagagg

SEQ ID NO: 3854 - DNA, 39 bp, Homo sapiens
  chr10:11207082-11207121
  hyper
ggtagggctgataaggcgctgatgcgttgatggcagcct

SEQ ID NO: 3855 - DNA, 31 bp, Homo sapiens
  chr10:11207143-11207174
  hyper
acttgcagctgcctcccgagcctccaagatg

SEQ ID NO: 3856 - DNA, 42 bp, Homo sapiens
  chr10:11207214-11207256
  hyper
ctcccccggctctgctcgacagcagcacgcagtgagagcctc

SEQ ID NO: 3857 - DNA, 59 bp, Homo sapiens
  chr10:11207271-11207330
  hyper
caactcatggtgcctccgctttgttttagttcatcaaatttctacgactcattaggcac

SEQ ID NO: 3858 - DNA, 39 bp, Homo sapiens
  chr10:11207343-11207382
  hyper
ttcttcctcctccttccgcctccccgctcccccaccccc

SEQ ID NO: 3859 - DNA, 36 bp, Homo sapiens
  chr10:11207391-11207427
  hyper
tcttcctgtccctcatcgtgccgccctaactctggc

SEQ ID NO: 3860 - DNA, 31 bp, Homo sapiens
  chr10:11652859-11652890
  hyper
aacacctgcgaggaaccgttttcacgcatta

SEQ ID NO: 3861 - DNA, 19 bp, Homo sapiens
  chr10:11909253-11909272
  hyper
actccgtctcaaaaaaaaa

SEQ ID NO: 3862 - DNA, 245 bp, Homo sapiens
  chr10:12390765-12391010
  hyper
gccagaaggggccaagcgtgagccagggcaaccaggccggccaggcccgccggccgctccagcccagcaccagggcgcccgcgcggctgccaaacacccccgggagttttgctcgcaaagggaccacgaggcagctgctggcgcgtcctgcgcgtacccgcccagaggctccccggcttgctcctcgcgggtctgtcccgaaactgacgtgaaaccgatttggtgcaatgcgaatgagctcccgc

SEQ ID NO: 3863 - DNA, 31 bp, Homo sapiens
  chr10:12392296-12392327
  hyper
tggcgagacgtggtcacgagaagatcagcct

SEQ ID NO: 3864 - DNA, 31 bp, Homo sapiens
  chr10:13341451-13341482
  hyper
aactcagtggcaatgccgtagtccagcaggg

SEQ ID NO: 3865 - DNA, 67 bp, Homo sapiens
  chr10:13341505-13341572
  hyper
ctggccagctcctgcccgggagggcaccgtcctctcccctccggagaggtcccggtcactgcctgcc

SEQ ID NO: 3866 - DNA, 55 bp, Homo sapiens
  chr10:13515865-13515920
  hyper
acttggggttgatactcgtcattgctgttacactcagggccgatacctgtgatca

SEQ ID NO: 3867 - DNA, 110 bp, Homo sapiens
  chr10:13570122-13570232
  hyper
caggtccgagggtccacgctcggcctgatggccaggcaggtccgcggccgccccagccctgccccggaggcgccccgaggagggctcgggccccccggtgtcattgtttg

SEQ ID NO: 3868 - DNA, 31 bp, Homo sapiens
  chr10:13570237-13570268
  hyper
ttcctgagctgccctccgacttgtttacgtt

SEQ ID NO: 3869 - DNA, 72 bp, Homo sapiens
  chr10:14646261-14646333
  hyper
cggctccctcccagctcgctcccggcgcccgcggcggcgcccagcggcccgactgctcggcggcggcccgag

SEQ ID NO: 3870 - DNA, 101 bp, Homo sapiens
  chr10:14646653-14646754
  hyper
cgggaaagtgggaaggcggccgcgtgggtcacagccacaaagctccggggcgctcactctccttttttctcactccctcgttccctcgctctctccctcta

SEQ ID NO: 3871 - DNA, 31 bp, Homo sapiens
  chr10:16536238-16536269
  hyper
attacactttgtaattcggagccaacttctg

SEQ ID NO: 3872 - DNA, 65 bp, Homo sapiens
  chr10:17270206-17270271
  hyper
gcaagaaaaaccttcccggtgcaatcgtgatctgggaggcccacgtatggcgcctctccaaaggc

SEQ ID NO: 3873 - DNA, 59 bp, Homo sapiens
  chr10:17270283-17270342
  hyper
ttgctaacaaaaagtccgcacattcgagcaaagacaggctttagcgagttattaaaaac

SEQ ID NO: 3874 - DNA, 176 bp, Homo sapiens
  chr10:17270665-17270841
  hyper
ctccgccaaggcaagtcgatggacagaggcgcgggccggagcagcccccctttccaagcgggcggcgcgcgaggctgcggcgaggcctgagccctgcgttcctgcgctgtgcgcgcccccaccccgcgttccaatctcaggcgctctttgtttctttctccgcgacttcagatctg

SEQ ID NO: 3875 - DNA, 169 bp, Homo sapiens
  chr10:17270851-17271020
  hyper
tactctttcctcttcccgctcctttgcccgcgggtctccccgcctgaccgcagccccgagaccgccgcgcacctcctcccacgcccctttggcgtggtgccaccggacccctctggttcagtcccaggcggacccccccctcaccgcgcgaccccgcctttttcagcac

SEQ ID NO: 3876 - DNA, 31 bp, Homo sapiens
  chr10:17271034-17271065
  hyper
agctcagactatcatccggaaagcccccaaa

SEQ ID NO: 3877 - DNA, 31 bp, Homo sapiens
  chr10:17271073-17271104
  hyper
cccagcgctgaagtaacgggaccatgcccag

SEQ ID NO: 3878 - DNA, 80 bp, Homo sapiens
  chr10:17271134-17271214
  hyper
gcgcccccaccccacccgcccaccctccccgcttctcgctaggtccctattggctggcgcgctccgcggctgggatggca

SEQ ID NO: 3879 - DNA, 57 bp, Homo sapiens
  chr10:21462128-21462185
  hyper
cggtggattagacacccgtgggtccggcttgccgcgctgagccggagctctccagca

SEQ ID NO: 3880 - DNA, 41 bp, Homo sapiens
  chr10:21462188-21462229
  hyper
attattcttagcaatgcggcagcggccgccccatgacatat

SEQ ID NO: 3881 - DNA, 67 bp, Homo sapiens
  chr10:21462502-21462569
  hyper
catcacaatcgccaagcgtggtctctgacactcccgctggcgtcttcgttcgcgcgccctccccccg

SEQ ID NO: 3882 - DNA, 154 bp, Homo sapiens
  chr10:21805906-21806060
  hyper
aggcagtccttggcgccgccgcgcttgcgcttgcagcggtagctcaggctccccgggcctccggcgcccgccgctgccttgggctggggcccggccgccgatacctggtaataggcggcggcggcggcggcggcggcggcggcagcagcggcgg

SEQ ID NO: 3883 - DNA, 31 bp, Homo sapiens
  chr10:21816421-21816452
  hyper
ggtcagactcagccagcgaggggttcccagc

SEQ ID NO: 3884 - DNA, 161 bp, Homo sapiens
  chr10:22518010-22518171
  hyper
tgaaatacatgcatttcggtggccccgttacatttcacgcgtcacgaagccgagcaagaccagcccgggccgccttccccgtgtacgcgcgggcctccggggacgcgcagagctggagcggcgggcgcgcgcggcaaacgggcccgcgcggcctctgcgcg

SEQ ID NO: 3885 - DNA, 34 bp, Homo sapiens
  chr10:22518187-22518221
  hyper
ctggcgaggcctagaccgccgtgaagaccccggg

SEQ ID NO: 3886 - DNA, 31 bp, Homo sapiens
  chr10:22518232-22518263
  hyper
cgcgctcacctgcagccgggagaggacagcg

SEQ ID NO: 3887 - DNA, 45 bp, Homo sapiens
  chr10:22518362-22518407
  hyper
ccaccccttcttatcccggaggcctgaactcgatttctgcaaaac

SEQ ID NO: 3888 - DNA, 31 bp, Homo sapiens
  chr10:22518420-22518451
  hyper
ctcataaaaggagagcgcgtccctgggtggg

SEQ ID NO: 3889 - DNA, 42 bp, Homo sapiens
  chr10:22540629-22540671
  hyper
cacctgtttaaaatcacgccacagcaacgaatcactgcaaaa

SEQ ID NO: 3890 - DNA, 15 bp, Homo sapiens
  chr10:22540691-22540706
  hyper
aaaaagagaaagtat

SEQ ID NO: 3891 - DNA, 98 bp, Homo sapiens
  chr10:22540740-22540838
  hyper
cgggcgacgctcggctgatgggaccgggccgcgcaagcctcggatgcagccgggtggggggcaccaggcgctaggcgaaggagcgcaggaccaaagga

SEQ ID NO: 3892 - DNA, 200 bp, Homo sapiens
  chr10:22540892-22541092
  hyper
aacaaacaaacaaactcgatacttagcctcacgatccttgccaccccctccctgctccgccacccacacacaaaataaagtgagccgggcgggggagtgcgcgccctgaaagggaacaagaagcaaggcgcctgtgacacaaaatggagaaagaggaaccgggagtggaaaggaagaaggaaaaccgagtaaaggaggtt

SEQ ID NO: 3893 - DNA, 111 bp, Homo sapiens
  chr10:22541099-22541210
  hyper
agaacaggaaaggggccgaggggtagagaacacccgaaggaaagcgcaggaggccctcgtgagagggcaagggggaaaagatcgacgaagtaagagcgaaaagaggaaagg

SEQ ID NO: 3894 - DNA, 113 bp, Homo sapiens
  chr10:22541214-22541327
  hyper
aaagactttctagatgcggagtctccattttcagcagcgccatattcgcttttcctctcgccgcttttggctgggttttgtgtgcggcggtggacaggcgccagcacatttct

SEQ ID NO: 3895 - DNA, 49 bp, Homo sapiens
  chr10:22541390-22541439
  hyper
gctcttggcccaggcccgggcgcggccccctccccggcctggcggttcc

SEQ ID NO: 3896 - DNA, 361 bp, Homo sapiens
  chr10:22541440-22541801
  hyper
gcgcagcgccagccccgcgctcctctaggctgcaaagggggcctccgactcgggcccggcccggaggggacacctcactcggggccccgcggcagcccccaggggacgcgggccctctagtttcgcccacggtgtggctgggcatgcgtgccaaggggatgcgtaaccgagaaccgaaaaagacgaacttaaccttcggggaggaggagagggcgcacgctgcgggtaccggggcttgggggcgctcctggaggtgacggggtcacctccacctgcgcggggccactctctgggagccggcgatcgatgcccgccgcggcgcctggcccaggcccccaggcctctcgcggctcccggaaaa

SEQ ID NO: 3897 - DNA, 31 bp, Homo sapiens
  chr10:22605455-22605486
  hyper
tggacgcccaggcggacgaggccgtgttagg

SEQ ID NO: 3898 - DNA, 165 bp, Homo sapiens
  chr10:25012545-25012710
  hyper
gccccgcccgcccgcccggcgtgagccggaccccgcagccggacgatcccgcgctgcccgccgccgccgccgccgccgccgccgcgctccgaggccgccgcccccggccggccgctcccaggcaccgccgcgacctgccccggccggccccgggctctcggccgc

SEQ ID NO: 3899 - DNA, 50 bp, Homo sapiens
  chr10:25305302-25305352
  hyper
aaaatcctagtagagacggcaaagcgcagctggtgcgcaggcgtcaccca

SEQ ID NO: 3900 - DNA, 58 bp, Homo sapiens
  chr10:26727104-26727162
  hyper
aactccggccgggacgcgcgtgttgccagtccagccctgcaccgcgtcccctgagggc

SEQ ID NO: 3901 - DNA, 46 bp, Homo sapiens
  chr10:26727229-26727275
  hyper
aaacactttgggagaccgttgcaacataaagcggcctctcagtctt

SEQ ID NO: 3902 - DNA, 87 bp, Homo sapiens
  chr10:26727301-26727388
  hyper
cccttagtccctcttgcgtcgaggctgcaaaatggttccattcgccaggagacgctcctgagagaagggcgcgcgcggcacaggtag

SEQ ID NO: 3903 - DNA, 43 bp, Homo sapiens
  chr10:26727517-26727560
  hyper
aaagcagcccctaactcggagtcctttacgcatatgtttgtct

SEQ ID NO: 3904 - DNA, 73 bp, Homo sapiens
  chr10:26727581-26727654
  hyper
ggccttccttgcacctcggagcaaagcagctcggatagcgccacacgtctgcgcgctgcgtgggaagggcagg

SEQ ID NO: 3905 - DNA, 159 bp, Homo sapiens
  chr10:26727657-26727816
  hyper
gacagcacttcctccccggggcagcgacctggagcccgggtgcggcagtctgcaccgcgcgtcgctttcccggccggagtctcgccgccttcccgcgccccgcagcgccccgcagagcagtcgaggtaagtggcgctcccagtcccgggagccctggga

SEQ ID NO: 3906 - DNA, 137 bp, Homo sapiens
  chr10:26727867-26728004
  hyper
cgggtccgacgccgggggcagctccaggatctggcctcgtgaacgcgtgcccccaggcgtggccctcgagcgcagcgggtccccagggtcccctccgctgatctccactctggacccggctcgcgagggtgggggtg

SEQ ID NO: 3907 - DNA, 66 bp, Homo sapiens
  chr10:28966235-28966301
  hyper
agccgggcgccccagccgggcgccccagacgccggcgccgctcggagccgccgggcaggtccccca

SEQ ID NO: 3908 - DNA, 97 bp, Homo sapiens
  chr10:28966597-28966694
  hyper
caagggagccagtggccgccgacgggggaccgggaaacttttctgggctcctgggcgcgccctgtagccgcgctccatgctccggcagcggcccgaa

SEQ ID NO: 3909 - DNA, 31 bp, Homo sapiens
  chr10:29737771-29737802
  hyper
aacaaaaattaaaaagcgtgtgcatgcaggc

SEQ ID NO: 3910 - DNA, 40 bp, Homo sapiens
  chr10:29738054-29738094
  hyper
cctaggactgtgaagccggaggcggcgctggagttggagc

SEQ ID NO: 3911 - DNA, 31 bp, Homo sapiens
  chr10:29738102-29738133
  hyper
ctgctgtgagcaacagcgccacctgctggcc

SEQ ID NO: 3912 - DNA, 56 bp, Homo sapiens
  chr10:30025021-30025077
  hyper
aaacaggggccagtgcgcggggaccacgctgggacgactctcgggggaagcaccag

SEQ ID NO: 3913 - DNA, 49 bp, Homo sapiens
  chr10:30025084-30025133
  hyper
cccacgccccaggacacgaactcgcgcccggagccgaccccctccacgg

SEQ ID NO: 3914 - DNA, 39 bp, Homo sapiens
  chr10:30025276-30025315
  hyper
agggtggtggcagtcacgcccccccggtcccagggctgg

SEQ ID NO: 3915 - DNA, 50 bp, Homo sapiens
  chr10:30025320-30025370
  hyper
tgcttgggctagcccccgctgcagccccggagatgcggggctttaggatc

SEQ ID NO: 3916 - DNA, 51 bp, Homo sapiens
  chr10:30025375-30025426
  hyper
ggctggaggccagggccgccctatcgctctcccggccgggggtgtggctgt

SEQ ID NO: 3917 - DNA, 31 bp, Homo sapiens
  chr10:31388316-31388347
  hyper
gtcccctattatggtccgtgtgtgtgtcagt

SEQ ID NO: 3918 - DNA, 66 bp, Homo sapiens
  chr10:31422908-31422974
  hyper
cgcagcctgaggagggcgttaagcaaggggcttcggagaaattagaaccagcgttctaaattaagg

SEQ ID NO: 3919 - DNA, 70 bp, Homo sapiens
  chr10:31423106-31423176
  hyper
ccctgcattggaaatgcggcagccgggggtgccggcagcttgagagaaaagtctgcgtggagggggggtg

SEQ ID NO: 3920 - DNA, 87 bp, Homo sapiens
  chr10:31608554-31608641
  hyper
gccacttttctggtcccgggtggagcggctgttgcttctttccgcacttttccccactcttgtgcccttcggcgcctccctctcccc

SEQ ID NO: 3921 - DNA, 485 bp, Homo sapiens
  chr10:31608645-31609130
  hyper
tcctggccccctcagcgcgattctccctcagcgcccaggcccccgggagccgcggaacaaacttgtgcccggcgctgaccgtgcaaagtggcttccgcgcgccgcggccccggccggcgccgtcgctgtcgctcgggccccgcgactcgggccgggctgtgggcgcgcggcaggcgggctgcggcggcggcgggacggggcggccgcgggttgcgtggggtttgtgcgcgcgtgtgcgcgggcgccggctgtgcgcgccgcgggcggacagggttcggccggcggcggtaaagttgggacccgcgggccgggcgcgctcgcgtaacggggattagaggcgcgggggcgcgggtccctaagcgcccctcctccctggcgcctcccgctgcccggcccagagccccggcctggggactccgcggcgagccccgcgagtggggtccacgtttggcggggcgcggcggggcggcgcggggaacaaggca

SEQ ID NO: 3922 - DNA, 323 bp, Homo sapiens
  chr10:31609132-31609455
  hyper
aaaggtacccacttaacgccgccgggagccgcgcggatgggggcgagctgggcggcgggtgtgtttgcggagttgttacctgggcttagagaccgggaagcaccacagacagatccccctcccggggcagacgaggtctctgcgccgggatgggccggtgtgcgtgcgcctcgcgcttttctctttcggtttttggggaagttgttacctgggccggacgcacggagcgctgaagccggataatggggcttggatggcgctctgggtctcgggtggaaggagggtgggggagggggcggacggaccgacggacgcgcggggct

SEQ ID NO: 3923 - DNA, 39 bp, Homo sapiens
  chr10:31609544-31609583
  hyper
aaaaagagagacagcccgagggatcgagacctgaacatg

SEQ ID NO: 3924 - DNA, 123 bp, Homo sapiens
  chr10:31609585-31609708
  hyper
gtggtggttgcacagtcgccttttccagtttggagagacgttgtaagttgattgtatttctggttatctcggggcgatgctatgctttctctccctctcgtgcagcagcgaaatgtctgctga

SEQ ID NO: 3925 - DNA, 345 bp, Homo sapiens
  chr10:31609719-31610064
  hyper
tggacagttcctgtggcgagaggggcgagacttgtccgcccgggggcggcgggagcgcagggagagcagcccccgcctgcgccgccccggtacctgtttgtataataatgggcggcaacggccctgccgccggccgcagcccaggctatataaggaattacacgtacatttcggaccgaggggctcgctttggttcctgcgttatttttaaaacgacttttaagagaggggcaataaatgcgtctataatgggaccgctgcagcgtcgagaaaacgaggaaatacgtgtttaggagaaaactctctcgtgctcccccagccccaccccccgcgcctgggctccct

SEQ ID NO: 3926 - DNA, 37 bp, Homo sapiens
  chr10:31610069-31610106
  hyper
cctcccctctgggatgcgaaacgcgaggttttgtaac

SEQ ID NO: 3927 - DNA, 31 bp, Homo sapiens
  chr10:33623013-33623044
  hyper
acagcccaaggatcaacgtcaggagggagcc

SEQ ID NO: 3928 - DNA, 187 bp, Homo sapiens
  chr10:33623181-33623368
  hyper
gcgggcagctgggagccggggcgccgctgtcacccgcgcctctgcctgtcacttaccgttgcgaaaagcgccggccggggcgaggacgagggcgagcacggcgcagaggagcggcagccccctctccattctcccttctccgggtccgcaggcagacgcgggagaacgaggacgtggggggaaatgc

SEQ ID NO: 3929 - DNA, 175 bp, Homo sapiens
  chr10:33623372-33623547
  hyper
aagaggagaatctaagcgatccgaagagccccaactccgcctagagctgtacaatcctcagcccgtcttggagaaaagaaagcagcgaggcaatgcctggatccgagaggaacgcttctctttttgtgtctcaagtcgcctgcatcctgtcatttagctccggcttcctctccct

SEQ ID NO: 3930 - DNA, 31 bp, Homo sapiens
  chr10:33623567-33623598
  hyper
tccaggagccactgcccgggccatgtctcaa

SEQ ID NO: 3931 - DNA, 48 bp, Homo sapiens
  chr10:33623944-33623992
  hyper
ggaacaactttccctccgagtgctctccccgtccgtctgtctgtcttt

SEQ ID NO: 3932 - DNA, 79 bp, Homo sapiens
  chr10:33624762-33624841
  hyper
ggggaggggtgctcttcgctgcgccctctcagtgtccgctcccggccacagacaacgtgcacgccggccctggagctcc

SEQ ID NO: 3933 - DNA, 63 bp, Homo sapiens
  chr10:35102969-35103032
  hyper
actcccaagtcaggcccggccccgcagcccagccacatggaaccagcccgggataggtaggag

SEQ ID NO: 3934 - DNA, 31 bp, Homo sapiens
  chr10:35103047-35103078
  hyper
gaaaacttttcattccgcgactcttccaagg

SEQ ID NO: 3935 - DNA, 37 bp, Homo sapiens
  chr10:35103108-35103145
  hyper
cagctcagtaaatgctcgcaagcgagtgccaagtgcc

SEQ ID NO: 3936 - DNA, 92 bp, Homo sapiens
  chr10:35103157-35103249
  hyper
cccgggaacgcctccccgaccccaagccggcgactccccaaaccctgcagcccccggacgcgacgggccgcccctgccggcccctaccagca

SEQ ID NO: 3937 - DNA, 109 bp, Homo sapiens
  chr10:35103256-35103365
  hyper
tggaggaaaagccccccgccgctgttccgcccccgcccgagtaagggagaggaggcagaaggctcgcaacccgcctctgtcggaagggcagtcacgaaactctcctcac

SEQ ID NO: 3938 - DNA, 110 bp, Homo sapiens
  chr10:35103368-35103478
  hyper
aaaagttcccagtccccggcctgtgcccccggggcctgggagccgggaaaggcctggggctggatttcccggcctgcgccccccgcgcgctggctcggggcttggctggg

SEQ ID NO: 3939 - DNA, 31 bp, Homo sapiens
  chr10:35103534-35103565
  hyper
cccgcgctaccgaggccggagctcccgggcg

SEQ ID NO: 3940 - DNA, 250 bp, Homo sapiens
  chr10:35103598-35103848
  hyper
ggtgtcccagaggctgcgccccggcccgcgcagagaactttggcgcccgcagtccggggcggggggcgcccgcgaggcccgaccggccgcactttccctttccccgcctccctgcgcctctcctcccccttccaggaagcgccatattgatcccggcgccgtccccgccgccgccccctccccgcccgcgcccccggcccctcaccttggcgatggccttccggtagcgggtcaccgcctgctggatgag

SEQ ID NO: 3941 - DNA, 83 bp, Homo sapiens
  chr10:35104102-35104185
  hyper
cgccctcgcctcgcctcgcttcgcccggggcttgcctcgcctctccccgccgcggcgcccgcagcctccggccacctgttcgg

SEQ ID NO: 3942 - DNA, 116 bp, Homo sapiens
  chr10:35104309-35104425
  hyper
cagggcacacaacaccgcgcacatgcggcagggggaggcgcggccggctacccgcgcggggcggagcgcaggaccgcagctcgcgcccccgccaccgccctcgggggccgacctcc

SEQ ID NO: 3943 - DNA, 49 bp, Homo sapiens
  chr10:35104440-35104489
  hyper
cctccctccctccctccgggggcgcgggacccctcgccccagtgccagc

SEQ ID NO: 3944 - DNA, 79 bp, Homo sapiens
  chr10:35104562-35104641
  hyper
gcaccctgcagggctgcgtcgcccctcctcggggacgccccttccacgcctccagaagtctccacggagccccccttcc

SEQ ID NO: 3945 - DNA, 235 bp, Homo sapiens
  chr10:35104655-35104890
  hyper
ttttaatcccattcctcgaactggagggttttgggtgcaggcgctcccggggaaagcagtttgtgctcagtgcggtgagtcccctcctcaccgccccggaggctccagcccgagcctctccgcccgcggggactcgagcctgcagcttgctcggctgggtttctgccctgcccgctccctagctctgctgcagggccggcagcggcagttctgcctgaaacgcaagaattaatag

SEQ ID NO: 3946 - DNA, 43 bp, Homo sapiens
  chr10:35929746-35929789
  hyper
gcgtccccgccgccaccgcccctgccgccgccgcggtgcgggg

SEQ ID NO: 3947 - DNA, 31 bp, Homo sapiens
  chr10:43697736-43697767
  hyper
gttagaggagagctcccgtctgccccctgtg

SEQ ID NO: 3948 - DNA, 31 bp, Homo sapiens
  chr10:43697914-43697945
  hyper
tctcggaagatgcccgcgcggcctctgcccc

SEQ ID NO: 3949 - DNA, 95 bp, Homo sapiens
  chr10:43697991-43698086
  hyper
ctccaatcccccagaacgcaccacaggccaagcccctcctgcgccagccaagactccgcgccagcccacaccagccccactcagaccgctggacc

SEQ ID NO: 3950 - DNA, 125 bp, Homo sapiens
  chr10:43698114-43698239
  hyper
cgcaactctgcagctttcttcgcccacgccgcacagcctccaaaccagcggattccgcccacgttgccagcctaggccccccaccacccgctcccaccacgcccctaacccggacccaacccaca

SEQ ID NO: 3951 - DNA, 36 bp, Homo sapiens
  chr10:43698257-43698293
  hyper
ccccagcctggtgtggcgtcacgccccaactcagac

SEQ ID NO: 3952 - DNA, 31 bp, Homo sapiens
  chr10:43761945-43761976
  hyper
ctgcccgcagtgcccacgcccgcccgccgcg

SEQ ID NO: 3953 - DNA, 31 bp, Homo sapiens
  chr10:43932786-43932817
  hyper
cgctgggggtggggaccgtggggctgggatt

SEQ ID NO: 3954 - DNA, 55 bp, Homo sapiens
  chr10:44069623-44069678
  hyper
cccctgcaataacgcccgtcacaggcgaggaaaaggccggcgtggccaaccacga

SEQ ID NO: 3955 - DNA, 31 bp, Homo sapiens
  chr10:44069989-44070020
  hyper
cccacgtggaaccccacgcctgcaggggcca

SEQ ID NO: 3956 - DNA, 31 bp, Homo sapiens
  chr10:44420042-44420073
  hyper
gactcagggaaaacctcgggactgtgtccag

SEQ ID NO: 3957 - DNA, 51 bp, Homo sapiens
  chr10:49514478-49514529
  hyper
ctcccgctccaggccacgcccctcacccacagccctcggaggctctctccg

SEQ ID NO: 3958 - DNA, 95 bp, Homo sapiens
  chr10:64028002-64028097
  hyper
cctgcaaaaagacaggcgtccaaagcctggggagggcagcggacaggtgcgcccgcaaacgcgcgcctggaccccggcaccgccttcccaatccg

SEQ ID NO: 3959 - DNA, 27 bp, Homo sapiens
  chr10:64565472-64565499
  hyper
ggactgccactattaccgggtgctgga

SEQ ID NO: 3960 - DNA, 124 bp, Homo sapiens
  chr10:64574943-64575067
  hyper
gcatcgccaaggaaaccggcgtcgccggtgcccccgcgggcctccctcggcagtccgggggctgcttcccgccgttgcgcgccctcctccaccacccactcgctgcctccgccggccggagccc

SEQ ID NO: 3961 - DNA, 77 bp, Homo sapiens
  chr10:64575127-64575204
  hyper
cgcaagaagggagcgctccgagattttcccggggtcggctctgcccaggagggagctaccgacgctttcccctggcg

SEQ ID NO: 3962 - DNA, 31 bp, Homo sapiens
  chr10:70748568-70748599
  hyper
gccaggcagtagaggccgctatggcgaacgt

SEQ ID NO: 3963 - DNA, 51 bp, Homo sapiens
  chr10:70749020-70749071
  hyper
gcgagcccggccaggccggcccctgttggcaaatggcgagggatggggagg

SEQ ID NO: 3964 - DNA, 31 bp, Homo sapiens
  chr10:70749138-70749169
  hyper
actgagtcccaaagagcgtctgtggtcttca

SEQ ID NO: 3965 - DNA, 31 bp, Homo sapiens
  chr10:71389918-71389949
  hyper
ggtgcaattcctcaggcggcctacagagggc

SEQ ID NO: 3966 - DNA, 82 bp, Homo sapiens
  chr10:71390036-71390118
  hyper
ggacgccgccgaggcccggagtcgcgcctgcaggtgagtcgccgcgccggggagggagcgcatccctcgctgcagcccgggc

SEQ ID NO: 3967 - DNA, 66 bp, Homo sapiens
  chr10:71561653-71561719
  hyper
gattgctcatccgatccgtgccgccgcagggagtgtgtcaagttacagaggcgccggaatcggccc

SEQ ID NO: 3968 - DNA, 99 bp, Homo sapiens
  chr10:72972598-72972697
  hyper
gcccccacggaaggcacgggctggcgctgccgggcgccggggaggacggcgaggaggaggcggcggcggcggagacggcggcggcgagactggggccag

SEQ ID NO: 3969 - DNA, 49 bp, Homo sapiens
  chr10:72973131-72973180
  hyper
gacgcccggctctccgcgcgcctggcatccgccccgaaaaagaacattg

SEQ ID NO: 3970 - DNA, 31 bp, Homo sapiens
  chr10:74032649-74032680
  hyper
agatttcctgtggccccgcctgaatgatgaa

SEQ ID NO: 3971 - DNA, 76 bp, Homo sapiens
  chr10:74032778-74032854
  hyper
gctgggtgctaggacccggggggcgcccgggcagggaggtccggctgcgctgcctgcagtccgcggggagggcgga

SEQ ID NO: 3972 - DNA, 81 bp, Homo sapiens
  chr10:74057922-74058003
  hyper
ggccaatgaggagcctcgtgggggtgctctcggctgccatggcaacggaggggccgcccgcttccccgcggggcgaggccg

SEQ ID NO: 3973 - DNA, 31 bp, Homo sapiens
  chr10:74070291-74070322
  hyper
tgctctgccccttgctcgccctcccccgtct

SEQ ID NO: 3974 - DNA, 99 bp, Homo sapiens
  chr10:74114946-74115045
  hyper
gtcacgtggtagccgtcgggatgagactggggccttcggagtgcctgttattcccagacggtttactaagtggtgatctatatacgtaatgtaactaca

SEQ ID NO: 3975 - DNA, 36 bp, Homo sapiens
  chr10:75408168-75408204
  hyper
agcatggctgctggttcgacccgtgccagttcctgg

SEQ ID NO: 3976 - DNA, 216 bp, Homo sapiens
  chr10:77159486-77159702
  hyper
agccggagctggagcccgatgaaccgccgcagtccgagcccagagccttgcctcccgggcccccatccggatgctggttcacatccacattaatcccgccgccgcagctaatccggccgtgtgccagccccgtgggtcccccttcggccgaggcgcccccggtgcccttgccaccgccgcccacgtcggtgtctttcttgtcgtccttgccctccg

SEQ ID NO: 3977 - DNA, 90 bp, Homo sapiens
  chr10:77159867-77159957
  hyper
ctccaccgccgcctcccggctccttcttatccgagccgggtttggagtacggcttgaaactcgacttgtcctccacgccgatgtcgctca

SEQ ID NO: 3978 - DNA, 98 bp, Homo sapiens
  chr10:77160052-77160150
  hyper
gaggagggcgaggggtcgggcttcccgatctgcgaacatgtttgcgccaacagcgccagcgggctcttcttggcatcgagctgcggggtcagacgatg

SEQ ID NO: 3979 - DNA, 63 bp, Homo sapiens
  chr10:77160291-77160354
  hyper
cactcacaaacattctcgccgttgggaaaggcagcagattgctccccccgcccaaccaccacc

SEQ ID NO: 3980 - DNA, 56 bp, Homo sapiens
  chr10:77160571-77160627
  hyper
gacctccgcctgccttcggtgccgagtgaaggggcctgggtcggggtaggggcttt

SEQ ID NO: 3981 - DNA, 36 bp, Homo sapiens
  chr10:77161230-77161266
  hyper
gcgggctcggggctgcgcgctcgccccgggagcagg

SEQ ID NO: 3982 - DNA, 31 bp, Homo sapiens
  chr10:77161729-77161760
  hyper
gatttcgctgggaggacgagatggacattta

SEQ ID NO: 3983 - DNA, 35 bp, Homo sapiens
  chr10:77162330-77162365
  hyper
aattgtcaatgttcctcgaccgcaatcaatcagtt

SEQ ID NO: 3984 - DNA, 31 bp, Homo sapiens
  chr10:77162374-77162405
  hyper
ctcttgtcaatcctcccgtgatttatgtcag

SEQ ID NO: 3985 - DNA, 37 bp, Homo sapiens
  chr10:77162410-77162447
  hyper
gttgctgattacaaggcgggtgcgacttgaagggaaa

SEQ ID NO: 3986 - DNA, 31 bp, Homo sapiens
  chr10:77162451-77162482
  hyper
gagagggagagagagacggagaggaaggagg

SEQ ID NO: 3987 - DNA, 74 bp, Homo sapiens
  chr10:77169380-77169454
  hyper
cctcaggagggaggggcgggcccggcggcacttccgttgggggtggggctgcgggctgccgcgccggtcccgcc

SEQ ID NO: 3988 - DNA, 58 bp, Homo sapiens
  chr10:79470897-79470955
  hyper
gctaaggagaggtctacgttttattttttaagaaggcagagctcgagggggccttgaa

SEQ ID NO: 3989 - DNA, 74 bp, Homo sapiens
  chr10:79606675-79606749
  hyper
gaaatgacacaaagcccggttctgggtggtagcccgcagagcccacctccacaagtgctcggcagaatcaggag

SEQ ID NO: 3990 - DNA, 221 bp, Homo sapiens
  chr10:79685703-79685924
  hyper
tggacctggtggcccccggggaccctgtcgtcgaggcacctgagagtgaaggccttcagcggggggcattgttcacagcgaacggcgggactgggggaggcggcgggacttcgggatccgcgcaccgccgcctccccaactgggccagaggagcgagtccaccgaggccatcgccaggtggagcggcggccccggcgaggtaccctcggccagcaggaggg

SEQ ID NO: 3991 - DNA, 46 bp, Homo sapiens
  chr10:79686267-79686313
  hyper
tggggctccatggtggcgggccgcgccgccccgccccgccggacgc

SEQ ID NO: 3992 - DNA, 42 bp, Homo sapiens
  chr10:79686574-79686616
  hyper
gggcgcgccccgaggccgggctccagccgggcatgctccccc

SEQ ID NO: 3993 - DNA, 63 bp, Homo sapiens
  chr10:79686617-79686680
  hyper
ccccctcagcctccgcgcgcgccgcccgccccgcgagaaaactcgccccgaaagccgggccgc

SEQ ID NO: 3994 - DNA, 86 bp, Homo sapiens
  chr10:79686714-79686800
  hyper
agaaagtcgcctgggccgtgtttcccaggctcccgacagctccggcccggctcggaggccgcctcggcccccgtgcaccccggccc

SEQ ID NO: 3995 - DNA, 89 bp, Homo sapiens
  chr10:79686955-79687044
  hyper
cccgctaggcggggacgcggcgccggctggttcccggtcccccgaggcccaggcgcagccgggggtgggggacacggagtcaggcctgg

SEQ ID NO: 3996 - DNA, 38 bp, Homo sapiens
  chr10:80733745-80733783
  hyper
gcccgccgccacctcccggcgaccgggcagtagcagcc

SEQ ID NO: 3997 - DNA, 34 bp, Homo sapiens
  chr10:80827232-80827266
  hyper
aatccgaagcgggctccgccggctcccggccgaa

SEQ ID NO: 3998 - DNA, 121 bp, Homo sapiens
  chr10:80828531-80828652
  hyper
gaaaggggaaagagagcgcagagcgcgagccaagccgagcgccggcagcggcggcggcgcggcgcggcgctccactccggcctgactccgcaccggcttttgcgggcggccggcggcgcgg

SEQ ID NO: 3999 - DNA, 65 bp, Homo sapiens
  chr10:81074798-81074863
  hyper
ccacggctttccagtgcggagagtcgagatgctccctgcagcccaggccccgggcacctcctgca

SEQ ID NO: 4000 - DNA, 31 bp, Homo sapiens
  chr10:81074873-81074904
  hyper
ggctcagcacctgaggcgggtttcctgggtc

SEQ ID NO: 4001 - DNA, 53 bp, Homo sapiens
  chr10:82213690-82213743
  hyper
tacaagtgcccggccccgggccaggcccggcctgcgccgcgcacccactggga

SEQ ID NO: 4002 - DNA, 43 bp, Homo sapiens
  chr10:86088146-86088189
  hyper
aggtcagtggagggggcggggcccgaagcggaggcggagcttg

SEQ ID NO: 4003 - DNA, 31 bp, Homo sapiens
  chr10:88515315-88515346
  hyper
cctctttcctcacatacgggtcatcgaatac

SEQ ID NO: 4004 - DNA, 189 bp, Homo sapiens
  chr10:88515510-88515699
  hyper
agtcctgttgggccctcgccgctccttatcttatgccgctggaattcgcgggctcgcaggtcacaggagcccgggcgcgccgggcctggcgctcccgaatcgatgagggaagccgctctccccggcagatcctcccggccggggagcctccatcaccctgcctgcgcctcggcacgctggcaaggagcc

SEQ ID NO: 4005 - DNA, 31 bp, Homo sapiens
  chr10:89419678-89419709
  hyper
ccgtccctgcgtccttcggtctctgctcccg

SEQ ID NO: 4006 - DNA, 56 bp, Homo sapiens
  chr10:90750729-90750785
  hyper
gggcgcgggacgcgtgcgggattgcggcggcagcggcgcacgcgggcacctgggag

SEQ ID NO: 4007 - DNA, 31 bp, Homo sapiens
  chr10:91295738-91295769
  hyper
atttagcgcggggatccgctctaagtactgt

SEQ ID NO: 4008 - DNA, 31 bp, Homo sapiens
  chr10:92981133-92981164
  hyper
ttatagaggaggaagccgagacccaggctca

SEQ ID NO: 4009 - DNA, 37 bp, Homo sapiens
  chr10:92981240-92981277
  hyper
ctttctgttacacgcacgaatacggtttcccaagagg

SEQ ID NO: 4010 - DNA, 196 bp, Homo sapiens
  chr10:94449965-94450161
  hyper
atccatccagccttctcgcaccactccgccgccgcgctggccgctgcctacggacccggcggcttcgggggccctctgtaccccttcccgcggacggtgaacgactacacgcacgccctgctccgccacgaccccctgggtaaggcggccgggcgagggtgggggcgaggaagcgccacccggcaggtggcagcgc

SEQ ID NO: 4011 - DNA, 104 bp, Homo sapiens
  chr10:94450388-94450492
  hyper
cccttagcgggagggacggggaaaggggcgtcgaggcgcccctggccggcccccgtggggcagggatcgcagccgggcccgggtggctacggggctggacctgg

SEQ ID NO: 4012 - DNA, 52 bp, Homo sapiens
  chr10:94450674-94450726
  hyper
aaattcaggaaacactcgacttctgatagccgggatccgtttttctgatatt

SEQ ID NO: 4013 - DNA, 31 bp, Homo sapiens
  chr10:94451194-94451225
  hyper
tctccattattacggcgcgggctctagctca

SEQ ID NO: 4014 - DNA, 36 bp, Homo sapiens
  chr10:94451381-94451417
  hyper
gagcgggaccctcagccgggccgggcctgggggcta

SEQ ID NO: 4015 - DNA, 56 bp, Homo sapiens
  chr10:94451448-94451504
  hyper
ggttactgctgggaccgcgcaggaggaagcaaagagtttttcgagctagaccaaca

SEQ ID NO: 4016 - DNA, 84 bp, Homo sapiens
  chr10:94607698-94607782
  hyper
gtggacttcttgcaggcggggacatgaatccacctggagcggtcttcatggtcaactgggatctttattcgttcctaaaataaa

SEQ ID NO: 4017 - DNA, 31 bp, Homo sapiens
  chr10:94607794-94607825
  hyper
atgcaattttgcttttcgtgagtgcatgttt

SEQ ID NO: 4018 - DNA, 31 bp, Homo sapiens
  chr10:94607828-94607859
  hyper
tttctctgactccccacgacccagagtacat

SEQ ID NO: 4019 - DNA, 40 bp, Homo sapiens
  chr10:95326152-95326192
  hyper
aggccctgcgggggctcgaggaattcgctaagtgagtttt

SEQ ID NO: 4020 - DNA, 61 bp, Homo sapiens
  chr10:96122755-96122816
  hyper
cttccgtagacaggttcgggctcgcgccctctcgcggtgactgtctcgcggccctggaccg

SEQ ID NO: 4021 - DNA, 31 bp, Homo sapiens
  chr10:96161936-96161967
  hyper
tggaaggacttacccacgctaacacctccca

SEQ ID NO: 4022 - DNA, 31 bp, Homo sapiens
  chr10:96162214-96162245
  hyper
ccctcaagcaactgtccgacccagcgggtgg

SEQ ID NO: 4023 - DNA, 35 bp, Homo sapiens
  chr10:96162262-96162297
  hyper
acgttgcggcggctgtcgccgcggccccagcaccc

SEQ ID NO: 4024 - DNA, 154 bp, Homo sapiens
  chr10:96162305-96162459
  hyper
tctctggccaagcctgcgcctgtagtccttctttgcctcctggggcggccgccacccacccccagatggtgggtccggaggatgccggagcctgctcgggaagaaaccccaagttgctcccggtgcctgcgccggaccccgtgggccaggacag

SEQ ID NO: 4025 - DNA, 138 bp, Homo sapiens
  chr10:96162567-96162705
  hyper
tcggcagctccttcagcgttacctcgcggcggccggggagcagctggagccggggctctgctactgtccgctccccgctggccaggccggcgccccgccgccctcggcagccccacgatcggacgcctgcctgctggg

SEQ ID NO: 4026 - DNA, 34 bp, Homo sapiens
  chr10:96162849-96162883
  hyper
ccgggagtcgcgccgccgccgcccctacggccgc

SEQ ID NO: 4027 - DNA, 59 bp, Homo sapiens
  chr10:96162906-96162965
  hyper
cgaggacgcggacggcgcgggaagcccgtccgattgggcctctccgcttgaggacccgc

SEQ ID NO: 4028 - DNA, 51 bp, Homo sapiens
  chr10:96162989-96163040
  hyper
cggacgcccaggagcccgagggcgcgggcagcgactcgggggacagccccg

SEQ ID NO: 4029 - DNA, 100 bp, Homo sapiens
  chr10:96163043-96163143
  hyper
gcagctgcagcagtagcgaggactcagagcagcggggagtcggcgccgggggtcccgaggagggcgcgccccctgccacctcggccgagaggactaatgg

SEQ ID NO: 4030 - DNA, 112 bp, Homo sapiens
  chr10:96163250-96163362
  hyper
cgccggtgcccttgcccgccgcggagcagggtcctgcgggggcttcggcccgggctcgacggagtggcggcttcgcggacttcttcaccaggtacagcgcaggctgcatggg

SEQ ID NO: 4031 - DNA, 67 bp, Homo sapiens
  chr10:96163378-96163445
  hyper
gggccggggccggagccggggtcttggtgggagtcggagccggagccggagccggagcggagagctt

SEQ ID NO: 4032 - DNA, 31 bp, Homo sapiens
  chr10:96163506-96163537
  hyper
ggaagaggaactgggtcggctttgtgtttct

SEQ ID NO: 4033 - DNA, 59 bp, Homo sapiens
  chr10:97321333-97321392
  hyper
gcgaagaagtgtccggcgcccggctcctggcattgtgagcccgccggcctccgccggta

SEQ ID NO: 4034 - DNA, 41 bp, Homo sapiens
  chr10:98956366-98956407
  hyper
accaccctgtcctcagcgtcgtttggcggggacagatgcat

SEQ ID NO: 4035 - DNA, 23 bp, Homo sapiens
  chr10:99042885-99042908
  hyper
cacccgcccggctgttactatgt

SEQ ID NO: 4036 - DNA, 35 bp, Homo sapiens
  chr10:99093444-99093479
  hyper
ttttctccgacggcctcgccgcggctggtaacttc

SEQ ID NO: 4037 - DNA, 97 bp, Homo sapiens
  chr10:99447291-99447388
  hyper
ttcctgccccagggtgcggcgaaagctggccctgccgggtacacgtgacggatgccccttctcctgggcccgaggccagcgcgcgcggcactgactg

SEQ ID NO: 4038 - DNA, 31 bp, Homo sapiens
  chr10:100993943-100993974
  hyper
ccgcaccaacaggaaccgaaacggcctcggc

SEQ ID NO: 4039 - DNA, 31 bp, Homo sapiens
  chr10:101300724-101300755
  hyper
ccaggcgggcccggggcggtcagagccagct

SEQ ID NO: 4040 - DNA, 31 bp, Homo sapiens
  chr10:102132967-102132998
  hyper
ctctggctcagccctgcgggtgagtgtttaa

SEQ ID NO: 4041 - DNA, 53 bp, Homo sapiens
  chr10:102133790-102133843
  hyper
gcaaagcgttcaggaacgttcgaggctgacgcaaccggcgcaggaaggtggtg

SEQ ID NO: 4042 - DNA, 43 bp, Homo sapiens
  chr10:102430816-102430859
  hyper
cccaaagtggagggagcgggggaggcggcgggggagcgggcgc

SEQ ID NO: 4043 - DNA, 31 bp, Homo sapiens
  chr10:102484026-102484057
  hyper
tgtacctgcagatgccgcggccgccgcgccc

SEQ ID NO: 4044 - DNA, 31 bp, Homo sapiens
  chr10:102746537-102746568
  hyper
ggcgtagcccgcggaacgtggtcggcttgtt

SEQ ID NO: 4045 - DNA, 43 bp, Homo sapiens
  chr10:102802795-102802838
  hyper
ccaatatcgaaacccacgaattccctagcgccagccctttgac

SEQ ID NO: 4046 - DNA, 31 bp, Homo sapiens
  chr10:102802860-102802891
  hyper
gttttcgaggaatcacgcgaggactctcctc

SEQ ID NO: 4047 - DNA, 31 bp, Homo sapiens
  chr10:102802970-102803001
  hyper
cctctctccacccttgcgcctaacagtccag

SEQ ID NO: 4048 - DNA, 31 bp, Homo sapiens
  chr10:102827419-102827450
  hyper
ctccaaagaagtgttgcgcagccgtgctggt

SEQ ID NO: 4049 - DNA, 58 bp, Homo sapiens
  chr10:102973586-102973644
  hyper
taacctttcccatgccgcggagggtgcgaggaccggaactttgcgagccgagaaagtt

SEQ ID NO: 4050 - DNA, 68 bp, Homo sapiens
  chr10:102997328-102997396
  hyper
cctcgtggccttagcccggactgtgagtctcgagcggcttccgagaggcagctcgggtgtcttcgcag

SEQ ID NO: 4051 - DNA, 31 bp, Homo sapiens
  chr10:102997553-102997584
  hyper
gtttgagaaagggagtcgcctgtgttgggac

SEQ ID NO: 4052 - DNA, 31 bp, Homo sapiens
  chr10:103599573-103599604
  hyper
gcacctgcgggggcatcggttcatggtttgg

SEQ ID NO: 4053 - DNA, 31 bp, Homo sapiens
  chr10:103600756-103600787
  hyper
acgcggcctttcccctcggaaccgcactgcc

SEQ ID NO: 4054 - DNA, 38 bp, Homo sapiens
  chr10:104181704-104181742
  hyper
ctgcgggcaactgagtcgccgggcgcttggggctttgg

SEQ ID NO: 4055 - DNA, 117 bp, Homo sapiens
  chr10:104181762-104181879
  hyper
cagcgcctgtcgctcgcgcactgtgactgggtggacgggctggcgctgcgcggcctcgctgatcgctgcccggccctggaggagctggatctcaccgcctgccgccagctcaaggac

SEQ ID NO: 4056 - DNA, 31 bp, Homo sapiens
  chr10:104409284-104409315
  hyper
gaaagccttcctttcccggctggcctggcat

SEQ ID NO: 4057 - DNA, 31 bp, Homo sapiens
  chr10:105315201-105315232
  hyper
caccccagcccgagaccgcctggggaggccg

SEQ ID NO: 4058 - DNA, 104 bp, Homo sapiens
  chr10:105615412-105615516
  hyper
cctggggaggggccggcggctccccttcgccgctctccggctcgggctccggggggatcggcgctggcggaggctgtgggcgcaggaggcggaggcagggcctg

SEQ ID NO: 4059 - DNA, 71 bp, Homo sapiens
  chr10:105615629-105615700
  hyper
ggcaggggcgggccgacgagcccccacccgagcccagcgcgcagccagcggcctggcgcagcaccgggcta

SEQ ID NO: 4060 - DNA, 31 bp, Homo sapiens
  chr10:105991884-105991915
  hyper
tggggcaggaggttccgcgagacccagatcg

SEQ ID NO: 4061 - DNA, 205 bp, Homo sapiens
  chr10:105992056-105992261
  hyper
gggtcggttacctttccgccgccgcggggctgcgggccgcgacgccgctgctgtgtacacccgtatcccggagaccgtaagccccgcgcccattggctctgcgctttggcccgctcccttctgagccgagcagattggtggaaggtctgccgctctcggccaatgggtgagcggcaagccaagcgaggggcgggccccttgctgt

SEQ ID NO: 4062 - DNA, 40 bp, Homo sapiens
  chr10:111643944-111643984
  hyper
taagatgttaaggggtcgcttgtagcgggagggaagagct

SEQ ID NO: 4063 - DNA, 145 bp, Homo sapiens
  chr10:111767171-111767316
  hyper
cagccccagcagccagcgtgggcggccgaggctgactcaaagcggcggctcagcctcgggagtaggagtagggggctcgctcatttagggcgggagacatttccgaggcgcccctcctccccttcgcggtcgggtttctatcggg

SEQ ID NO: 4064 - DNA, 40 bp, Homo sapiens
  chr10:111767322-111767362
  hyper
tccccctctggccctccggggacgccgcggattcgagctg

SEQ ID NO: 4065 - DNA, 31 bp, Homo sapiens
  chr10:111767389-111767420
  hyper
cgccaggcagccgccccgaaccaggccctcc

SEQ ID NO: 4066 - DNA, 93 bp, Homo sapiens
  chr10:112431949-112432042
  hyper
tctgccacgagggaggcgatgcctggcgccgcgggtgggggcagtggtgagacttcggcccctggtggccggagaggtcgcagcacttgtcag

SEQ ID NO: 4067 - DNA, 284 bp, Homo sapiens
  chr10:112432155-112432439
  hyper
aaggggaggctcccctcgccgagtgtcacccgggaccctgcgtccccgctctgcagagaccttctctccgggctgctgccgtcctccctcgcccggcggagcttccgtgatcgtcagccaaagcccccggggcggtgcgccgcaggcggtcttcccgggtgttcgcggaagctgcgcgctcgcgcccccacggttctccagcgacccctgaagatgcttccgtccgcggataggggacgtttcagacctggggtgggcacagcggtccccggtgagatggtctt

SEQ ID NO: 4068 - DNA, 78 bp, Homo sapiens
  chr10:112836635-112836713
  hyper
aggtccagcgctaggcgcgggcgctagactggcggaggggtggtgcgaggggcgggggagggtcggcttcccacgtgg

SEQ ID NO: 4069 - DNA, 41 bp, Homo sapiens
  chr10:114571158-114571199
  hyper
taaggtgagtgcagaccgggcgcggtggctcacgcctgtaa

SEQ ID NO: 4070 - DNA, 56 bp, Homo sapiens
  chr10:114708956-114709012
  hyper
attttggtcagtctttcggggatttcatttcagacccccttcgagaaacactgtag

SEQ ID NO: 4071 - DNA, 31 bp, Homo sapiens
  chr10:114709044-114709075
  hyper
gttttattttccctgacggtgttaacgccca

SEQ ID NO: 4072 - DNA, 34 bp, Homo sapiens
  chr10:114709863-114709897
  hyper
tccctcctccctctcccggcgcccgaaaggatca

SEQ ID NO: 4073 - DNA, 31 bp, Homo sapiens
  chr10:114710140-114710171
  hyper
gcacctcctgtatcttcggcttccccccccc

SEQ ID NO: 4074 - DNA, 56 bp, Homo sapiens
  chr10:114710659-114710715
  hyper
gtcaatgaatcagaaacgaatcaaaacagctcctccgattccgaggtaggaaaagc

SEQ ID NO: 4075 - DNA, 31 bp, Homo sapiens
  chr10:114710919-114710950
  hyper
cgtggcgtttgcccctcgccctccccacctc

SEQ ID NO: 4076 - DNA, 47 bp, Homo sapiens
  chr10:114711333-114711380
  hyper
cccaacggatcgctctcgcccaccgcccgaaccgtaagtgcctccgc

SEQ ID NO: 4077 - DNA, 80 bp, Homo sapiens
  chr10:115804799-115804879
  hyper
cgggcgtgcgggtaagcggcggccctcgcgcctcgtggccctgcgcgagcagaaggcgctcaagacgctgggcatcatca

SEQ ID NO: 4078 - DNA, 31 bp, Homo sapiens
  chr10:115804906-115804937
  hyper
ccttcttcctggccaacgtggtgaaggcctt

SEQ ID NO: 4079 - DNA, 42 bp, Homo sapiens
  chr10:115999483-115999525
  hyper
gttcgcattgtctgcgcgcacctgagcgcggccttcctggca

SEQ ID NO: 4080 - DNA, 31 bp, Homo sapiens
  chr10:116527399-116527430
  hyper
cactgcagctttaaatcgtgctgcctcaagc

SEQ ID NO: 4081 - DNA, 31 bp, Homo sapiens
  chr10:116527433-116527464
  hyper
ggatttcttccatagccgagctgcaaaatgg

SEQ ID NO: 4082 - DNA, 137 bp, Homo sapiens
  chr10:116527508-116527645
  hyper
gcccttccacagctcccggcagggcagccagcgcgagcccatcccccacgcctcccagcccagacgcgcggcgggcacaggtgagcggggcgccgactttggcccttaggctcgcccacatccggggatcaaggtca

SEQ ID NO: 4083 - DNA, 38 bp, Homo sapiens
  chr10:116527656-116527694
  hyper
ttccttcccctgcccccggcccccggcagccccgagcc

SEQ ID NO: 4084 - DNA, 484 bp, Homo sapiens
  chr10:116527747-116528231
  hyper
agcccccccgccctcccgcacctgttcggcccgccggggtcagtggacggtgcccacctggtccccactcacctctggcggacatggtgcaggcagcgggagccggagctggaaggcgttggacagccccgcagggcgcggggaagaaggcagccccggagcgcccgcccggccccggccccctccggctcccggtgcggggacgccgcccgcaggacacctggccgcccgctccgcgcagcaaggccgacgggcggggacgcagcggccgcagggacccgccgggcgcggcagcgctgacacccgcggccgcgctgggcggggcgcgcctcccccgccccgagccgccggggcccacccgggtccagcagccgctctgccgcggcgccgggcggggctctgtccccgaggaacgagggtctgcgtcctcccctctccccgcccgtcttcttaataagaagaaaaataacgtgggtgctccgaa

SEQ ID NO: 4085 - DNA, 158 bp, Homo sapiens
  chr10:118764376-118764534
  hyper
ggaggacgcttctctgcgggtgacggagctactgcggtgaccacggcggccgccacgtctcccgcccggcttccaactgccctggccccagcgccctggggccgtccccgcccacgggccgcggctgcccacacctggcgcccgcgtgctgcctacct

SEQ ID NO: 4086 - DNA, 35 bp, Homo sapiens
  chr10:118764558-118764593
  hyper
tgcagctgcttctcttcgtccgagctgttcatttt

SEQ ID NO: 4087 - DNA, 118 bp, Homo sapiens
  chr10:118764979-118765097
  hyper
cgagttcagagaaaaccggctgtgggttcgcagcgtgtgtgggaactccactttggacgcttcccgggggtcgctcccaaagaaccacagaggtagagcgggacgcaatgagccatga

SEQ ID NO: 4088 - DNA, 31 bp, Homo sapiens
  chr10:118765127-118765158
  hyper
agtagactctgggggcgcggttgcaaaacct

SEQ ID NO: 4089 - DNA, 49 bp, Homo sapiens
  chr10:119256305-119256354
  hyper
gcttggagactcatcgcgtttggcttactcctgacgcagacttgcactg

SEQ ID NO: 4090 - DNA, 31 bp, Homo sapiens
  chr10:119306398-119306429
  hyper
ttccgggagagcaagacggaccggcctgcgg

SEQ ID NO: 4091 - DNA, 31 bp, Homo sapiens
  chr10:119306846-119306877
  hyper
ctttccgtgtaacccacggtctttcagaagc

SEQ ID NO: 4092 - DNA, 31 bp, Homo sapiens
  chr10:119306988-119307019
  hyper
acctgtgagagtcccccgcacggaggatgca

SEQ ID NO: 4093 - DNA, 31 bp, Homo sapiens
  chr10:121301493-121301524
  hyper
ggctggcccaaagtgacggccaaggcgaatc

SEQ ID NO: 4094 - DNA, 45 bp, Homo sapiens
  chr10:121301668-121301713
  hyper
gatgcccgggtccagccgtgctcccccgggcgctcggcatccttc

SEQ ID NO: 4095 - DNA, 31 bp, Homo sapiens
  chr10:121301808-121301839
  hyper
gtttggagatttggggcgctcctttttctcc

SEQ ID NO: 4096 - DNA, 31 bp, Homo sapiens
  chr10:121301848-121301879
  hyper
actaaaaagaaaactgcggctgttcctcttt

SEQ ID NO: 4097 - DNA, 44 bp, Homo sapiens
  chr10:121356078-121356122
  hyper
acagaggaaaaggcaccgaaccctgctctcgggctctctccccc

SEQ ID NO: 4098 - DNA, 219 bp, Homo sapiens
  chr10:122708494-122708713
  hyper
gatgatcctaaagggacgcagtggtcccgcccatcgccgcctctacagggagggagccgcggccccgagctggccacgcgatggcgctgtgcacccggccgcggagcccctgcacgtccggctcccgctcgcgctctcggctcgagctccggactccaggctcggagcaggggttcgggctacggttcccggctccgagggaccgcggggctctctgcc

SEQ ID NO: 4099 - DNA, 31 bp, Homo sapiens
  chr10:122709344-122709375
  hyper
cccttcccttgttctgcgcctgtcctgtgag

SEQ ID NO: 4100 - DNA, 89 bp, Homo sapiens
  chr10:123356981-123357070
  hyper
ccctacgggatgtcaccggccccaccccagcggccccctcccgaaaaaggggtctccgcagggcctggatggtacggaagttcccagga

SEQ ID NO: 4101 - DNA, 34 bp, Homo sapiens
  chr10:123357527-123357561
  hyper
gtcgggatggagaaagcgacgagcccggggttgc

SEQ ID NO: 4102 - DNA, 130 bp, Homo sapiens
  chr10:123357918-123358048
  hyper
gcacccgccgcccgcccgctcggctctccaccgcgctctcctccagccgccgcccgcgccgccgccgccgcccccgcctcctcgcggcgggtcacgcccccactgaaacccgagccgtttcctggacggc

SEQ ID NO: 4103 - DNA, 94 bp, Homo sapiens
  chr10:123358138-123358232
  hyper
ccgggaggcgagggctcggccgcgatgcggccgtagggatgcagcgacagcctccgaataaggcctggtcccgcgccccgcgccacctcctccc

SEQ ID NO: 4104 - DNA, 31 bp, Homo sapiens
  chr10:123922644-123922675
  hyper
agctgcctccaggacccggggcctgaaggag

SEQ ID NO: 4105 - DNA, 43 bp, Homo sapiens
  chr10:124133757-124133800
  hyper
cagggagagagaagagcgaaaaattggcgcgcagagctgtaaa

SEQ ID NO: 4106 - DNA, 31 bp, Homo sapiens
  chr10:124133805-124133836
  hyper
tttctccaggtcacaccgcagcctgtaaatt

SEQ ID NO: 4107 - DNA, 107 bp, Homo sapiens
  chr10:124133979-124134086
  hyper
tggtggtcaaaaactacgaataccaggaagcaccgcggcgcggcggcccagagctccgcgcgcaggcctccccggcgcgccgaggccgccgccgctggaaccaggaa

SEQ ID NO: 4108 - DNA, 134 bp, Homo sapiens
  chr10:124134303-124134437
  hyper
gctccgggccgaggccgcggtaaagtttagcttgaagaacgcggccgcgctggagcaggggtggtggacggggccaggcgcgaggtggcggcggctgcggggctgccgggctgctggagcgcggttcccgctgt

SEQ ID NO: 4109 - DNA, 148 bp, Homo sapiens
  chr10:124134524-124134672
  hyper
cacagcacctggaggccgccgggccggctcacctgccctggcttggggcagcgggagggggcggcgtcttcttcccgtgggtccccgattgttttcccgacgtcagccctcagcggcgcccggcgggggagggcgggaggcccgcggc

SEQ ID NO: 4110 - DNA, 88 bp, Homo sapiens
  chr10:124134743-124134831
  hyper
gctgcccggggattcccggtggcgccggtcggagcgcctccctccagggctgtgcccgcggggcgcgcgtccccgggcatcctttcct

SEQ ID NO: 4111 - DNA, 37 bp, Homo sapiens
  chr10:124134847-124134884
  hyper
tggcttcaggacttgccgaggccgaagccggctccgc

SEQ ID NO: 4112 - DNA, 31 bp, Homo sapiens
  chr10:125727316-125727347
  hyper
gcaaactgcaggtctccggggagccgctccg

SEQ ID NO: 4113 - DNA, 53 bp, Homo sapiens
  chr10:125851866-125851919
  hyper
ctcgccgcaccaaggccggccagagacgccgccaccgccgggaagcgccggca

SEQ ID NO: 4114 - DNA, 31 bp, Homo sapiens
  chr10:125852100-125852131
  hyper
tcccacgggcttaggcgcgggagagctctgg

SEQ ID NO: 4115 - DNA, 65 bp, Homo sapiens
  chr10:125852356-125852421
  hyper
ccgtcggtcggtcccccgcctgcggctcccagagctgggcggtgcaggggcgccccgattccgac

SEQ ID NO: 4116 - DNA, 122 bp, Homo sapiens
  chr10:125852540-125852662
  hyper
cggccgcgtcctctctgcgagggagggggcgtgtgtcgccgctgggtaacccttcccgcggggtcctcaagcgcgcagggcgcccggagcgcggccaggaccaatggcgaagggactcctcc

SEQ ID NO: 4117 - DNA, 31 bp, Homo sapiens
  chr10:126847189-126847220
  hyper
gaaggattgtttaccccggacagggcaagga

SEQ ID NO: 4118 - DNA, 31 bp, Homo sapiens
  chr10:126847583-126847614
  hyper
cgccgctgggcctcccgcgggagaaaggccc

SEQ ID NO: 4119 - DNA, 53 bp, Homo sapiens
  chr10:126847634-126847687
  hyper
gcgcctctgcccaactcgcccggggcgctgggggcagcgcgagggagagaaag

SEQ ID NO: 4120 - DNA, 126 bp, Homo sapiens
  chr10:126847692-126847818
  hyper
cgcttcccctcggccgcgcggggccgtccggcgccgcggagggctgggaggaggaggaaccgcggcggcccggctgtccctgcgccgcaccgggtccctgccgcccggggcgcgccctagccagcc

SEQ ID NO: 4121 - DNA, 38 bp, Homo sapiens
  chr10:126847830-126847868
  hyper
ctttttctttttgattcgccccacccgaaaagtgcggc

SEQ ID NO: 4122 - DNA, 123 bp, Homo sapiens
  chr10:126847900-126848023
  hyper
cgggctcccggcggcggcgggcgaggaggaagtggtgcccgcgggagcgcggccgggcagaggaaatgcccggcccgcccggcccccgcccgcgcccgccgcccggcccgcccaggccccccg

SEQ ID NO: 4123 - DNA, 146 bp, Homo sapiens
  chr10:126848387-126848533
  hyper
cggcctgggtcgccggcggcccccgggcgcgcacccaccgggctcagggagcaggagccgggggcgcccagggaaccgtcgccgagacgccgccgccgccgccgccgctgccctccggacgccgccgcgctcggggtttctttttt

SEQ ID NO: 4124 - DNA, 40 bp, Homo sapiens
  chr10:126848551-126848591
  hyper
tgggaaggaaggtgaccgcctacttcgcattcatcaactc

SEQ ID NO: 4125 - DNA, 94 bp, Homo sapiens
  chr10:126848631-126848725
  hyper
cgggcgcaatcggtggcgggggcgggcggggacccccgagccagcgtccacccccgggcgccgaggggggacacgaggccgggggcacggacca

SEQ ID NO: 4126 - DNA, 94 bp, Homo sapiens
  chr10:126849002-126849096
  hyper
cggccccccctcagcgcggcatggctcccggttcggtccctcgctcctcgggccgccgccggctcctccgggccgctcccgagccaccttaaaa

SEQ ID NO: 4127 - DNA, 82 bp, Homo sapiens
  chr10:126849497-126849579
  hyper
ggaaggagaaggaaaacggagagaaaaggaaaggaaagaagcggcgctggccgcagctcccggtacccgctggctgcgcagg

SEQ ID NO: 4128 - DNA, 39 bp, Homo sapiens
  chr10:126849762-126849801
  hyper
gaaagtgcacacaagcgcggcgggcgggagggccagggg

SEQ ID NO: 4129 - DNA, 31 bp, Homo sapiens
  chr10:126849863-126849894
  hyper
cctcggtggcaggggccgaggtcctgtcgcg

SEQ ID NO: 4130 - DNA, 161 bp, Homo sapiens
  chr10:126849984-126850145
  hyper
gagccccgggtggccccggtcccatggggccccgcccagccagcggcgccaaccagcccccttcccggcccccgggctccaacttcctcctggtgccccgcaccggccgcttctgccttctcaggcccgcggggtcaggcgcgggccggccacagggggca

SEQ ID NO: 4131 - DNA, 60 bp, Homo sapiens
  chr10:126850345-126850405
  hyper
tgttgggtcggagccccgggtctcgaggagggaggcgcgctgcggcgtgggggcccgcga

SEQ ID NO: 4132 - DNA, 31 bp, Homo sapiens
  chr10:127585010-127585041
  hyper
cctcgctcagtgtccccggcgacgcgcgggt

SEQ ID NO: 4133 - DNA, 58 bp, Homo sapiens
  chr10:128593607-128593665
  hyper
tccgagctggggacctcgcaccaccaggctccggcctaagcccgcgccttgcaagccg

SEQ ID NO: 4134 - DNA, 31 bp, Homo sapiens
  chr10:128593701-128593732
  hyper
cccgcccccctaagggcgcacccctctcacg

SEQ ID NO: 4135 - DNA, 50 bp, Homo sapiens
  chr10:129706050-129706100
  hyper
tgccaggatgctgccccgcagccgggcgggcgcccgcgccttcccaggga

SEQ ID NO: 4136 - DNA, 31 bp, Homo sapiens
  chr10:130009066-130009097
  hyper
ggcacccctggggccccggggatctctgacg

SEQ ID NO: 4137 - DNA, 55 bp, Homo sapiens
  chr10:134122159-134122214
  hyper
cgctctcgggcacccccgtgccatcctcgcgacccccgtccggcctgagaccgcg

SEQ ID NO: 4138 - DNA, 41 bp, Homo sapiens
  chr10:134210376-134210417
  hyper
ccgggctcgtggctctcgggtcctcccgagccaggggacac

SEQ ID NO: 4139 - DNA, 116 bp, Homo sapiens
  chr10:134210546-134210662
  hyper
cccgggagcggagcccgcggccgcgcgcccccggcccggctcggctcggctgtggcggccgccccagcggagctttgtgacgtcaggcggccgcggggcggcgtcacgcgcggggc

SEQ ID NO: 4140 - DNA, 135 bp, Homo sapiens
  chr10:134210747-134210882
  hyper
ctgccggctgccggtgcgggtggagcaggtcgtcaacggcgcgctggtggtcacggtgagctgcggcgagcggagcttcgcggggatcctgctggactgcacgaaaaagtgagcgggggcgcgggccgggacacc

SEQ ID NO: 4141 - DNA, 99 bp, Homo sapiens
  chr10:134211033-134211132
  hyper
aagtggttctcaaagtcgtcgcgacttttcggggcgggcgccgggccggggcgggccggggcggggggcgcggggccggggtcccggaactccacacat

SEQ ID NO: 4142 - DNA, 31 bp, Homo sapiens
  chr10:134211207-134211238
  hyper
aggggagggtcagatgcgccgtggccttgcc

SEQ ID NO: 4143 - DNA, 68 bp, Homo sapiens
  chr10:134211254-134211322
  hyper
ggtgggggtgccctgtcgaaggccacgggcccctggctgctgggagtgactccgcggctgaggtttgg

SEQ ID NO: 4144 - DNA, 58 bp, Homo sapiens
  chr10:134350648-134350706
  hyper
gaagctgcacggtccacgctccgtctgcgcggagagccgggcgcgcgtggcccggccc

SEQ ID NO: 4145 - DNA, 52 bp, Homo sapiens
  chr10:134351008-134351060
  hyper
ccgccggtcgcaagagcgccccgcgtaggccccgccccgaaaggaggccccg

SEQ ID NO: 4146 - DNA, 44 bp, Homo sapiens
  chr10:134351257-134351301
  hyper
ggccccgccccgggctcggctccgcggggcgggacttgccctca

SEQ ID NO: 4147 - DNA, 160 bp, Homo sapiens
  chr10:134351391-134351551
  hyper
cggggccgcggagcagcgagcgagcgagcgagcgcgaggccggagccccggccaggcccggccgacccgccgagcccgcgatgcgccccggggccgccccccggcgcagctgacgccccgcggccccgcgaagaccccggccggccggtcccggaggaag

SEQ ID NO: 4148 - DNA, 77 bp, Homo sapiens
  chr10:134351702-134351779
  hyper
ccaagcccggaacccccgaccctgaccccggggtcccgaactgcaagccttggaccctggaccgtgaacctccagac

SEQ ID NO: 4149 - DNA, 50 bp, Homo sapiens
  chr10:134545672-134545722
  hyper
cctcatgctggacagacgtgggtcttactgttctgcgctgtttgtctgcc

SEQ ID NO: 4150 - DNA, 31 bp, Homo sapiens
  chr10:134564784-134564815
  hyper
tttcccccactggggtcgggtcaggccttgg

SEQ ID NO: 4151 - DNA, 74 bp, Homo sapiens
  chr10:134650410-134650484
  hyper
tgccaagcctgtgtggcgaaaaacggccatcaggggatgcatttaggacgcaaggacgtcgctgtgctgttccc

SEQ ID NO: 4152 - DNA, 47 bp, Homo sapiens
  chr10:134650486-134650533
  hyper
catttccaggagacctcgtggcagagccacggcgggggctttgtacc

SEQ ID NO: 4153 - DNA, 79 bp, Homo sapiens
  chr10:134973645-134973724
  hyper
tggggcccaggtggggcgcagaccccgtggctccccgcggaggccacacgcctggctccgcccccggtgcctcccccag

SEQ ID NO: 4154 - DNA, 37 bp, Homo sapiens
  chr10:135051089-135051126
  hyper
taccttcctgcagcctcggcccgcggggtggggggtt

SEQ ID NO: 4155 - DNA, 31 bp, Homo sapiens
  chr10:135075092-135075123
  hyper
agccccgccctgtagtcggacactggagtcc

SEQ ID NO: 4156 - DNA, 31 bp, Homo sapiens
  chr11:320543-320574
  hyper
attccctggggccatacgcaccttcacggag

SEQ ID NO: 4157 - DNA, 80 bp, Homo sapiens
  chr11:327112-327192
  hyper
ctgcctcagtgccccacggacagggggtgcgatctgagcagaatgaggtgacgtcactgggtcagcggctcctgtggcat

SEQ ID NO: 4158 - DNA, 31 bp, Homo sapiens
  chr11:327277-327308
  hyper
gaggaagtgggagtcacgtgaggctcgtctt

SEQ ID NO: 4159 - DNA, 66 bp, Homo sapiens
  chr11:417263-417329
  hyper
ggctctgggaggactgcgacctccactcaccttcgcgggtctgatggcgaccgccactcacctgct

SEQ ID NO: 4160 - DNA, 116 bp, Homo sapiens
  chr11:417386-417502
  hyper
gcagcggcaacagccccggcggcggcgtagccccggcagcggcagcaggtgcggccccgccccgcagtcagggcgggggcggaccccagcgtcccgctctgcgcccaaggctggcg

SEQ ID NO: 4161 - DNA, 31 bp, Homo sapiens
  chr11:450246-450277
  hyper
gcccagcatgccccgcgcggactacaagccc

SEQ ID NO: 4162 - DNA, 54 bp, Homo sapiens
  chr11:485972-486026
  hyper
tcaccgtgcgcgcaggcgagcgtaagcagtgcacgggcgcgcgtgctcaccgtg

SEQ ID NO: 4163 - DNA, 89 bp, Homo sapiens
  chr11:486035-486124
  hyper
gagtgtaaacagtgcacgggcgtgtgtgttcaccgtgtgcgcaggcgagtgtaaacacagctggtgccctggtgcgtgtgtgctgtgag

SEQ ID NO: 4164 - DNA, 31 bp, Homo sapiens
  chr11:568368-568399
  hyper
ggccgtcgccggctctcggcccaacttcagc

SEQ ID NO: 4165 - DNA, 47 bp, Homo sapiens
  chr11:575193-575240
  hyper
taaacacagacacccacgatgagacgtgaacacgctcctcagtgagc

SEQ ID NO: 4166 - DNA, 114 bp, Homo sapiens
  chr11:575264-575378
  hyper
ccagccatgccagcccgcgctcaggcctcccccgtcttccccgtctctccggcgtcggttctcaagctcgtccttccccgcctcatttctccaaaagtccgcagcaaatcctgg

SEQ ID NO: 4167 - DNA, 199 bp, Homo sapiens
  chr11:575603-575802
  hyper
cgtcccgaggcccacacggcttctgcgcggcatcctcaggacgacctggagccaaatccacacgggacggcacagcagcgtcctgccgagcccgcctcgtccgccagcgcgcacgattcaccgcgcctgctgcgggacgggcggacgcggggctgggctggaatagccggctcacggagggctccggcagtgtttgttc

SEQ ID NO: 4168 - DNA, 53 bp, Homo sapiens
  chr11:581817-581870
  hyper
tgtgcccccaccttgccggccctggggaagccgttagccgtttggcaggtgct

SEQ ID NO: 4169 - DNA, 3 bp, Homo sapiens
  chr11:615793-615796
  hyper
cgc

SEQ ID NO: 4170 - DNA, 36 bp, Homo sapiens
  chr11:706175-706211
  hyper
cgccgagcgtcccacccgcccgcgggagacctggcg

SEQ ID NO: 4171 - DNA, 31 bp, Homo sapiens
  chr11:706385-706416
  hyper
cgcggcgtcgcagggcgcggggcacttggag

SEQ ID NO: 4172 - DNA, 35 bp, Homo sapiens
  chr11:832780-832815
  hyper
ccccagggctgcagctcgcccggcctccgcagtgc

SEQ ID NO: 4173 - DNA, 31 bp, Homo sapiens
  chr11:1139541-1139572
  hyper
tccaatttgttgtctacggaattggctgcag

SEQ ID NO: 4174 - DNA, 31 bp, Homo sapiens
  chr11:1357329-1357360
  hyper
gggtggggagggaggtcgcaagcaatgccat

SEQ ID NO: 4175 - DNA, 94 bp, Homo sapiens
  chr11:1357369-1357463
  hyper
caaaactcctgcataacgaagcccaggtttctgtgttttcgtgggtgttcccgggcaccttcgggcaggtggccccaggcgatgttgtgtgtct

SEQ ID NO: 4176 - DNA, 31 bp, Homo sapiens
  chr11:1357946-1357977
  hyper
ggcggggcgtggagggcgggggggcggggcg

SEQ ID NO: 4177 - DNA, 62 bp, Homo sapiens
  chr11:1592746-1592808
  hyper
gcccccgcgggggtgacgttcgggacgtcgggggctcgcgcagatccgcgctggatctcagg

SEQ ID NO: 4178 - DNA, 82 bp, Homo sapiens
  chr11:1592947-1593029
  hyper
gcctccctgtccctggcgtcctggacggccgtggccgctcattccggggccgcctcctcctcccgggcgcccaccgggtgcc

SEQ ID NO: 4179 - DNA, 31 bp, Homo sapiens
  chr11:1593214-1593245
  hyper
cgggggcccgcgcagccggggcaggggccgg

SEQ ID NO: 4180 - DNA, 118 bp, Homo sapiens
  chr11:1594038-1594156
  hyper
cggatccccctgcactcgggcggacctgggaccctcagaggcgagccggctgcctcgggtcacacatccgcgaactccgggggcgggctccccaggacgccgccgaccccccacgacc

SEQ ID NO: 4181 - DNA, 66 bp, Homo sapiens
  chr11:1674133-1674199
  hyper
ctccgcgctggagaaccgggccgggctgcgcggaagccctggagggccagccgggtggagggagct

SEQ ID NO: 4182 - DNA, 31 bp, Homo sapiens
  chr11:2466003-2466034
  hyper
aagccagggggtgaggcggaggcagggccag

SEQ ID NO: 4183 - DNA, 48 bp, Homo sapiens
  chr11:2466078-2466126
  hyper
agggacgccctgtgcgcgccggaccggcgggggcggggcgtgcaggcg

SEQ ID NO: 4184 - DNA, 47 bp, Homo sapiens
  chr11:2466440-2466487
  hyper
tggagctggcggagggcggcccggcgggcggcgcgctctacgcgccc

SEQ ID NO: 4185 - DNA, 31 bp, Homo sapiens
  chr11:2466495-2466526
  hyper
cggcgccccaggtcccgcgccccctgcgtcc

SEQ ID NO: 4186 - DNA, 49 bp, Homo sapiens
  chr11:2905410-2905459
  hyper
agacccgagagggggccgggagagggcgcggggcgcgggccggccgggg

SEQ ID NO: 4187 - DNA, 45 bp, Homo sapiens
  chr11:2905685-2905730
  hyper
attcagcctcccaccccgcccgcgcgaagccgctggagggcacaa

SEQ ID NO: 4188 - DNA, 144 bp, Homo sapiens
  chr11:2906271-2906415
  hyper
ggggcggggtggacgccggggccgggaccgggacactaggcagctgctccggcgcctcctcgaggccgtcgagggactcagcggccggctcgaggggcgggctgacagccaccgcgaccgcgacgggccgcggcgccagcagca

SEQ ID NO: 4189 - DNA, 35 bp, Homo sapiens
  chr11:2906692-2906727
  hyper
tgtgctgcggagggacgcgtcggacatggcccggg

SEQ ID NO: 4190 - DNA, 116 bp, Homo sapiens
  chr11:2906936-2907052
  hyper
tgcctgctggctagctcgctcgctcaggcctggccggcacccctcgagcacagcgcacttggcctgtggaacgcccagcccgcctgcgccccctttatacgcgcgggccccacccc

SEQ ID NO: 4191 - DNA, 45 bp, Homo sapiens
  chr11:2950217-2950262
  hyper
gcgtcctcggcgggtgcggcgggtgcggtgcgttcctggcggctg

SEQ ID NO: 4192 - DNA, 31 bp, Homo sapiens
  chr11:2950787-2950818
  hyper
ccgggcccgcaccgtcgcgtccgcgctctgg

SEQ ID NO: 4193 - DNA, 31 bp, Homo sapiens
  chr11:3112953-3112984
  hyper
cagccaaggagataccgcggcccccagcttg

SEQ ID NO: 4194 - DNA, 79 bp, Homo sapiens
  chr11:3186115-3186194
  hyper
ccaccaagtggggagccgagctgggcgcgccgcttcccactcgcgggccccacccgccccaacccgccaggcgccgacc

SEQ ID NO: 4195 - DNA, 98 bp, Homo sapiens
  chr11:3186352-3186450
  hyper
tcgctccggccctgcccggcggggccctccggatccttcccagcccgccatccccccgccgccctgccgccccccgggccgccgcgctcctacctcct

SEQ ID NO: 4196 - DNA, 122 bp, Homo sapiens
  chr11:3186581-3186703
  hyper
ggaggcccagggagcccggaggcgggaggaggaggcgcggcggccgcaaaacccgggccgaatcgccgcgcggagcgggcgcccaggggctgccccccaccggctgccgcttctcctcatcc

SEQ ID NO: 4197 - DNA, 243 bp, Homo sapiens
  chr11:3444552-3444795
  hyper
gaggaggggattggagcgtggctcaagttcgggaggcgttacctgcggagagtttgaggcaggcccaggagcgagcccacggtctgccgacgcggagccagggacgggccccaggatccggagcttcaggcggggccgagtccgggtttggggcccgggagtcggggccggttagggcgagggtccccgggatcgtccggtcaggccttgggccaacgtaggcactctcgcagttcctccgcc

SEQ ID NO: 4198 - DNA, 27 bp, Homo sapiens
  chr11:3602557-3602584
  hyper
ccgcggacacgccgggccctggcctgc

SEQ ID NO: 4199 - DNA, 31 bp, Homo sapiens
  chr11:3663275-3663306
  hyper
cccaagtctccgcccccgactccccacaccc

SEQ ID NO: 4200 - DNA, 82 bp, Homo sapiens
  chr11:3663322-3663404
  hyper
agtctggggacctttccgagactgtaaaggcggggccgcagtttggctccgcctgagaggggagggccgggggcggaggacc

SEQ ID NO: 4201 - DNA, 31 bp, Homo sapiens
  chr11:3887889-3887920
  hyper
tgcgatccgcctgcctcggcctctcaagata

SEQ ID NO: 4202 - DNA, 47 bp, Homo sapiens
  chr11:6495353-6495400
  hyper
ggtgctgctagggagccggcgggccggcgagccggatcccggatctc

SEQ ID NO: 4203 - DNA, 31 bp, Homo sapiens
  chr11:6502786-6502817
  hyper
taagtgagaactaagtcgtttcgaggccaga

SEQ ID NO: 4204 - DNA, 31 bp, Homo sapiens
  chr11:7534832-7534863
  hyper
gcgccgggtacccacccgggcctccccgcaa

SEQ ID NO: 4205 - DNA, 41 bp, Homo sapiens
  chr11:8615429-8615470
  hyper
ggccccaggagacactcggaggggtccgcgggctcggcccg

SEQ ID NO: 4206 - DNA, 105 bp, Homo sapiens
  chr11:8615506-8615611
  hyper
gagatacccagaggcccgtttttccaccgcgttgccatagcaacggcctggccggctgcgccccgggccgcccgccccatcccgcgggcccgccctgagccagtg

SEQ ID NO: 4207 - DNA, 85 bp, Homo sapiens
  chr11:8615614-8615699
  hyper
ccagggaccactcaccgcggccggcggactggcgggtctccgacaggtgcgcacactcggcgcaggctgtcgctgagcccggaat

SEQ ID NO: 4208 - DNA, 204 bp, Homo sapiens
  chr11:8892170-8892374
  hyper
gagccagctcccaggacgtcccgagatcgggtctccgctcggcaccaggcagctcttcaccgccggactctggccgcgaggttccccacccccaaccgcgcggcccccgccgggccggaaagcagagccggcggctactgaccgcccgggagggcggaccccaccagccccgctcctctgcgcctgcggcggcccccacgcgcg

SEQ ID NO: 4209 - DNA, 161 bp, Homo sapiens
  chr11:8892431-8892592
  hyper
gctgggagggcaggggcgggaccgggcgcgcacgcgggaaccggggccacccggcccggaggcgcttacctctgcgttccccagccgggccgggcgcggcgcctggatggggtctcgccgggagccgcgcggcccggaggaggagccgctcctgcagagag

SEQ ID NO: 4210 - DNA, 31 bp, Homo sapiens
  chr11:9596557-9596588
  hyper
gcatgcagggagactacgcttggacttggga

SEQ ID NO: 4211 - DNA, 88 bp, Homo sapiens
  chr11:9596679-9596767
  hyper
cagcatttgtttttatcgtgggtttgcggtgcccagagtttggccggcctccgtgtgattaggaacatcctaccgtagataaggtatc

SEQ ID NO: 4212 - DNA, 74 bp, Homo sapiens
  chr11:9685558-9685632
  hyper
gggcgcggcactggaccggcgccggcagcagggcggggcctggcgggggcggggcctggcgggtcaggtgactg

SEQ ID NO: 4213 - DNA, 101 bp, Homo sapiens
  chr11:9685634-9685735
  hyper
cggcgggctgtggctgcggaggttgaggggcgtccgaggcgcggaggggctggctgggcaggaggggttggcggggcagcagggccgcggccatggggagc

SEQ ID NO: 4214 - DNA, 61 bp, Homo sapiens
  chr11:9685751-9685812
  hyper
tcaaagccatctggcacgccttcaccgcactcgaccaggaccacagcggcaaggtctccaa

SEQ ID NO: 4215 - DNA, 146 bp, Homo sapiens
  chr11:9685848-9685994
  hyper
cccacccgaccctccccggcgcgctctgtacttcccttgggtggaagcgggacctggcgggccgtgaccgcagggcggggcgggtcggaatgcgcccggtaggcccgcttggggcggagtgggtctgagaccgggatttggtgttt

SEQ ID NO: 4216 - DNA, 44 bp, Homo sapiens
  chr11:9685997-9686041
  hyper
gcctcccccttgccttcgggccatgccctcggttggatgtgtta

SEQ ID NO: 4217 - DNA, 18 bp, Homo sapiens
  chr11:9863100-9863118
  hyper
agagtcttgctctgtccg

SEQ ID NO: 4218 - DNA, 31 bp, Homo sapiens
  chr11:10324218-10324249
  hyper
caagggcacttgcttcgcgatcctcctggca

SEQ ID NO: 4219 - DNA, 70 bp, Homo sapiens
  chr11:10324257-10324327
  hyper
gctcaagtttcccccacggaatcacgagcttttgtaaagggcagcgaggaggcagcgaggtggcagcgag

SEQ ID NO: 4220 - DNA, 121 bp, Homo sapiens
  chr11:12132015-12132136
  hyper
cagcggcggtgacagccggccccacgggggcggggcgggctccgtgctgtcctgtcattggccgcgccgctgtcgggggcgttccccagcccggtccaccgcgcggcgcagaaccgcaggc

SEQ ID NO: 4221 - DNA, 56 bp, Homo sapiens
  chr11:12132188-12132244
  hyper
agtggcccgcggggcccgatcgctgcgcccgcggccagggccgaggcaggcctgac

SEQ ID NO: 4222 - DNA, 34 bp, Homo sapiens
  chr11:12132269-12132303
  hyper
ttcggtaaggcgggggcggcgctggcctcagggt

SEQ ID NO: 4223 - DNA, 39 bp, Homo sapiens
  chr11:12695572-12695611
  hyper
cgtcgcgcgcaactcccgcctcggcgcctgccccctgga

SEQ ID NO: 4224 - DNA, 37 bp, Homo sapiens
  chr11:12695622-12695659
  hyper
cttccagagttcttcgcgcgagcgcagggacttccaa

SEQ ID NO: 4225 - DNA, 65 bp, Homo sapiens
  chr11:12695675-12695740
  hyper
ccgccccgccccgccccgccccggctcgggacaaagcccggagcccgcgccgggagacggagggc

SEQ ID NO: 4226 - DNA, 260 bp, Homo sapiens
  chr11:12695856-12696116
  hyper
cggcggcggcaggccccgcctccagccccgggcggcaggccgcatgacgtcaccgaggccccacccctccggagcgagttcggtcctggcgttcatttcattcctgtcctcattccgaacattcttagcatcgctcgcgccgcgccgcgccgcctgagccgagccgagcctctgctgccgccgccgcggccccgccgcccgccgcgggcgcccaccaagcactttgcagactcgcttccaccctgcgggccattccgcgc

SEQ ID NO: 4227 - DNA, 36 bp, Homo sapiens
  chr11:12696120-12696156
  hyper
gggcccgggcccggggcggccgcgtccaggcacagg

SEQ ID NO: 4228 - DNA, 86 bp, Homo sapiens
  chr11:12696404-12696490
  hyper
gctggggtgcggggggcgcacggggcagcggggggccggcggcgcgtccctcgcgggccgctctttctttgcgggctctgctttgt

SEQ ID NO: 4229 - DNA, 84 bp, Homo sapiens
  chr11:12696669-12696753
  hyper
cgcgcgccccctctcccgccgcctgcacgcgcacacacgcacacaccctcgggcgccttggacggggtgcgctggggagccaga

SEQ ID NO: 4230 - DNA, 90 bp, Homo sapiens
  chr11:12696869-12696959
  hyper
ctgcgcagacttgtgccgctggcggggggttcgctccttcttctcaaagatgaaaaagggcacggtcgtctttgccgcttctccaggact

SEQ ID NO: 4231 - DNA, 42 bp, Homo sapiens
  chr11:13298518-13298560
  hyper
ggaaatgcaatggaatcgctccgcgctcgagtattctctttg

SEQ ID NO: 4232 - DNA, 61 bp, Homo sapiens
  chr11:13298715-13298776
  hyper
agggtctggcactcaacgttcctaaaattggtttcctagatggagccggagggagagaggg

SEQ ID NO: 4233 - DNA, 31 bp, Homo sapiens
  chr11:13298792-13298823
  hyper
ttttcgtcggaatgcccggaggggagaagaa

SEQ ID NO: 4234 - DNA, 45 bp, Homo sapiens
  chr11:14666247-14666292
  hyper
gctcgcgcacccgctgcggctccggcactgcgttctggtgctgct

SEQ ID NO: 4235 - DNA, 31 bp, Homo sapiens
  chr11:15671675-15671706
  hyper
tcccagaggcctgccgcgctcggcctgcagt

SEQ ID NO: 4236 - DNA, 31 bp, Homo sapiens
  chr11:15671896-15671927
  hyper
aggacccgggaggcagcgcctggatggagct

SEQ ID NO: 4237 - DNA, 55 bp, Homo sapiens
  chr11:16626686-16626741
  hyper
cagcggaccgcggccccggctgcagaggaacggcgggtggcggggccccggcagg

SEQ ID NO: 4238 - DNA, 31 bp, Homo sapiens
  chr11:16760933-16760964
  hyper
gtggtgaggtctaagacgttgagacctagaa

SEQ ID NO: 4239 - DNA, 31 bp, Homo sapiens
  chr11:17035598-17035629
  hyper
gaaacgccagaaaagtcgggtcaaacttggg

SEQ ID NO: 4240 - DNA, 83 bp, Homo sapiens
  chr11:17035645-17035728
  hyper
cccccacccgccggcccggcgcccacctgagcggatcatgtggcccgagttgacgggctccccggtgcgcggatgcagccagg

SEQ ID NO: 4241 - DNA, 35 bp, Homo sapiens
  chr11:17035837-17035872
  hyper
gcgtccccgggtcctcgcgccgcacttgatgaaga

SEQ ID NO: 4242 - DNA, 105 bp, Homo sapiens
  chr11:17035880-17035985
  hyper
ccatcccggcacaccccgtaggaccaatgctcaggtaaagtgtcccgcccgaccgtcgccgccgccatgttcgccgagcgcggagccgccgcggggtggggggga

SEQ ID NO: 4243 - DNA, 55 bp, Homo sapiens
  chr11:17036137-17036192
  hyper
gctccggccaacccagcgcagtgcccgcggcctttgtccccgagccttccccgcc

SEQ ID NO: 4244 - DNA, 88 bp, Homo sapiens
  chr11:17036267-17036355
  hyper
ggggccgctggcgggcgcgcctgggcagcttcggggcgcgcggttggacccgaccaactccgaaaacggcgagcgcccgaacgctcag

SEQ ID NO: 4245 - DNA, 31 bp, Homo sapiens
  chr11:17498406-17498437
  hyper
cgccgcccggcccggccgtcaggcccccgcc

SEQ ID NO: 4246 - DNA, 39 bp, Homo sapiens
  chr11:18610705-18610744
  hyper
tcaggaggagccttgccggagaagcggagataggacagc

SEQ ID NO: 4247 - DNA, 31 bp, Homo sapiens
  chr11:18720185-18720216
  hyper
ttctccgagcagcagccgggggcctggccgg

SEQ ID NO: 4248 - DNA, 31 bp, Homo sapiens
  chr11:19093002-19093033
  hyper
tggtgtgtgtgcctgcgcgcaagagggaata

SEQ ID NO: 4249 - DNA, 69 bp, Homo sapiens
  chr11:19093070-19093139
  hyper
atgaatccaagtgagacgaatgccctgtgaagtttgggaaccggtctctactcactgtctacttaccca

SEQ ID NO: 4250 - DNA, 90 bp, Homo sapiens
  chr11:20689750-20689840
  hyper
gcaagtgagaagggcacgttcttattagtgaagaggattctgaaacgttggaattggtttccaggaaacgagggacggctgttctgaggt

SEQ ID NO: 4251 - DNA, 65 bp, Homo sapiens
  chr11:27493262-27493327
  hyper
tagcggaactcctgcccgctgagcgagggccctcatgagaagggaaggtcgcgtggacaggctgc

SEQ ID NO: 4252 - DNA, 31 bp, Homo sapiens
  chr11:27493380-27493411
  hyper
tgagttgggggtgtgcgcggtggggtgggag

SEQ ID NO: 4253 - DNA, 125 bp, Homo sapiens
  chr11:27493422-27493547
  hyper
ccaaaaagtctgggaacgaaagctactgctggctcgaacccggactagcaaagtgcggaaagcccgtggcacaggagtgggtgccaggcagcccgcacgcaggtgaccggcggaccccctcccca

SEQ ID NO: 4254 - DNA, 194 bp, Homo sapiens
  chr11:27493755-27493949
  hyper
gcgccgcgcagagaggcggcgccgcgccgctgggcccggccgagccgagcagccccagggcgaggaagcagagcagccctagcgggcccggcattgctgcggccgcctcccgcgccggcctctcccgcggcgctgctcgctccgctgccctccgatgtcccccgccgcccccgggcagccggcctgcgggctgg

SEQ ID NO: 4255 - DNA, 323 bp, Homo sapiens
  chr11:27494047-27494370
  hyper
cgctgctccatggacgcgcagaggcagccccgctcctccggcggctcacgccagccgggccggcccggcgcagcggcgggggccgcgctctgccatcgcaccggtctccctgtccctggcctctcaatgcagcggctcttcaaggttgcagagcgcagccttcagccatgccggccactcgccccagcccccgccgtggctctcgcacaaacacccagactctggctcgctgtctcccagccgcggctcaatctcttcccgtccttttcccttctagggttgcacgctctggttcccaaacccccggccgctggcttatgcaa

SEQ ID NO: 4256 - DNA, 130 bp, Homo sapiens
  chr11:27494388-27494518
  hyper
aaagtatcccttctcccggagcgccattggcccggggaggtctcgagctcattactatgcagagaggagagccgccattggccaagaggaggaccagaggggcgtgtttctcgggcgtgagtgacaaggt

SEQ ID NO: 4257 - DNA, 94 bp, Homo sapiens
  chr11:32851552-32851646
  hyper
ccttcccaggtttgcgcgcgggggccatccagaccctgcggagagcgaggcccggagcgtcgccgaggtttgagggcgccggagaccgagggcc

SEQ ID NO: 4258 - DNA, 108 bp, Homo sapiens
  chr11:35966092-35966200
  hyper
gacgcctggtcgcgcgcggctgcgttagcctcctctgggcctcttcccgagtctctggcgtgcactccgtgcctcagtttccccacctgcaccgcggagggagtagca

SEQ ID NO: 4259 - DNA, 31 bp, Homo sapiens
  chr11:35966248-35966279
  hyper
tgagttgaagcaaggccggatctgggaattc

SEQ ID NO: 4260 - DNA, 31 bp, Homo sapiens
  chr11:43600671-43600702
  hyper
cctatccaatgaaaaccgctgccaggggggc

SEQ ID NO: 4261 - DNA, 129 bp, Homo sapiens
  chr11:44087989-44088118
  hyper
cctggaaacctggagccgtctctcgcgagacgtcctccgccctgtagaaggccgtttcggttcttcgtgcgcggtagccgccccacttgcgggattccaaggcctcatcgagtgcgggtatctggctgt

SEQ ID NO: 4262 - DNA, 124 bp, Homo sapiens
  chr11:44748160-44748284
  hyper
cctggaataaacacttcgggtccagcatgcccctctccccactcccgcaacgatcttccgaattcagacgcagagagggcccgcgagcagagcgggaggtggtcggaggcggaggaaggggaga

SEQ ID NO: 4263 - DNA, 31 bp, Homo sapiens
  chr11:44748311-44748342
  hyper
cagacaaggcctggacgcggggttggaggag

SEQ ID NO: 4264 - DNA, 31 bp, Homo sapiens
  chr11:44748379-44748410
  hyper
gaggagacgcgcttctcggcagcaacggcgt

SEQ ID NO: 4265 - DNA, 98 bp, Homo sapiens
  chr11:44748501-44748599
  hyper
gcgggcgtgcagctgccgccggcgtcgcggggctccaggctgcggggcggacgtagcgccgagcgatccaccgcggagccgcgcgaggccgcccgagc

SEQ ID NO: 4266 - DNA, 37 bp, Homo sapiens
  chr11:44748666-44748703
  hyper
ccgagccccgagcgagcgccgccgcctcgcgctgcgg

SEQ ID NO: 4267 - DNA, 49 bp, Homo sapiens
  chr11:44748794-44748843
  hyper
gccggcgggatttggcgcggggtccggcagccgccgctggaaggtatgg

SEQ ID NO: 4268 - DNA, 105 bp, Homo sapiens
  chr11:44748849-44748954
  hyper
gcacctccgtgccctccgcacgccgccgccgcgcccccggggacctggggacccccccgcgcgccgccccgggggtgctgctggacgcggcggggaattggggtg

SEQ ID NO: 4269 - DNA, 35 bp, Homo sapiens
  chr11:44749131-44749166
  hyper
gggggcttctggagaacggcgcggggtggcaggtg

SEQ ID NO: 4270 - DNA, 45 bp, Homo sapiens
  chr11:45307445-45307490
  hyper
tctgctgtcccctccccgccaagctttgtcgcgcaaagatccacg

SEQ ID NO: 4271 - DNA, 171 bp, Homo sapiens
  chr11:45307754-45307925
  hyper
ccatggtgcccgctcccggcgaggggctgggtcccgcagccgctcaccttccccgggccgggcccgcctccaggcagctcccgggatccgggcgagccagcagctctcccgccgccagaggggcggggacggagggagggaggacggctgcgaggacgtcagaggaggctg

SEQ ID NO: 4272 - DNA, 52 bp, Homo sapiens
  chr11:45684298-45684350
  hyper
gaggtagccatgagcccgggcacctagccagaaggtccgtgggagaagcagc

SEQ ID NO: 4273 - DNA, 31 bp, Homo sapiens
  chr11:45684364-45684395
  hyper
cacagcagcagctgagcggcatccaatggca

SEQ ID NO: 4274 - DNA, 46 bp, Homo sapiens
  chr11:46141116-46141162
  hyper
acttagaaatcactctcggcacatctgcacccgacaaccggcctgt

SEQ ID NO: 4275 - DNA, 63 bp, Homo sapiens
  chr11:46264957-46265020
  hyper
gagttgagtcctgctgcggggcgccgggaaccgggccgacgcgcatgcgcgggctgcggcccc

SEQ ID NO: 4276 - DNA, 45 bp, Homo sapiens
  chr11:46299546-46299591
  hyper
ccccggacctgccccccgcccgtttgccagcgctcaggcaggagc

SEQ ID NO: 4277 - DNA, 49 bp, Homo sapiens
  chr11:46413560-46413609
  hyper
agggggcgctgccctccggggggtgggggtgtccgcgttgtcatgggga

SEQ ID NO: 4278 - DNA, 31 bp, Homo sapiens
  chr11:47208544-47208575
  hyper
ggcctgagacgaacacgcggtgggggtggga

SEQ ID NO: 4279 - DNA, 37 bp, Homo sapiens
  chr11:47661386-47661423
  hyper
atctcaaaaacaaacaaacaaacgaacaaacaaaaaa

SEQ ID NO: 4280 - DNA, 51 bp, Homo sapiens
  chr11:48002695-48002746
  hyper
cgacttgcggggaccccggccggcctcgcacgccggcgatcgatccctttt

SEQ ID NO: 4281 - DNA, 34 bp, Homo sapiens
  chr11:57194275-57194309
  hyper
agggctagtttagtcacgacgcaggccattctac

SEQ ID NO: 4282 - DNA, 339 bp, Homo sapiens
  chr11:57194324-57194663
  hyper
caactcccatgaccctcgcctaggactcgcaaacctggtccccgccgcccttcctcgcatcaacttctaccaggaaagcctccgggggccgctccccgccagcctccgcaccccgctccagcctgcggcctgccctccccgcagaggagcccgaggggccaggccgcgctcggcgccccatggcgcccgaaaggggacccttcgccctacccgcctgctccgcgccggggctctccgcgccctttccgcacgggccaggttcgcattcgcgcctctcgcagcccctcccagtcccctgctcgcctccgccccctcctgcccgcccggaaggggctgggg

SEQ ID NO: 4283 - DNA, 80 bp, Homo sapiens
  chr11:57334770-57334850
  hyper
tttcaggcaggaaaagcgaaattgaaaccagttttgggggagccggctcatcttcaccacgcgaacggctcaagcagagg

SEQ ID NO: 4284 - DNA, 31 bp, Homo sapiens
  chr11:57434948-57434979
  hyper
cgtcggtaattggctgcgctggaagcctgtc

SEQ ID NO: 4285 - DNA, 31 bp, Homo sapiens
  chr11:59323956-59323987
  hyper
caagtccctgttcgggcggatgctgttttag

SEQ ID NO: 4286 - DNA, 31 bp, Homo sapiens
  chr11:59324157-59324188
  hyper
ttttccaacctttatacgttgctttgtctta

SEQ ID NO: 4287 - DNA, 239 bp, Homo sapiens
  chr11:59333338-59333577
  hyper
ccggtccttgttacggtttaaaaagctggacaaagcccgtgcgccgaacgctttcgaggacttctttggccaagagggggcccgggctgtcaccattcccggcaagcccgcgaccaagcaggcagcggaggcggcgcaggccgagagctcccgcccctctgacagtgagagaagggtcgcagcgcccacggctgcctagaacccgaaagaagaggagcggggtgcggggacacagggtt

SEQ ID NO: 4288 - DNA, 41 bp, Homo sapiens
  chr11:59333581-59333622
  hyper
aagaaagtgagctatgcgcagtgctccggaagagcttgtct

SEQ ID NO: 4289 - DNA, 39 bp, Homo sapiens
  chr11:59333634-59333673
  hyper
caagtgagggcagaggcgtaacttcgtactgggcagttt

SEQ ID NO: 4290 - DNA, 31 bp, Homo sapiens
  chr11:59333706-59333737
  hyper
tcccaggggaaaatgacgataaggtttccct

SEQ ID NO: 4291 - DNA, 36 bp, Homo sapiens
  chr11:59523185-59523221
  hyper
aggctggaggggggcccgagccggaggcttgccctc

SEQ ID NO: 4292 - DNA, 31 bp, Homo sapiens
  chr11:59523285-59523316
  hyper
gtgcccggtgattcatcgctaggcaatgatt

SEQ ID NO: 4293 - DNA, 50 bp, Homo sapiens
  chr11:60692120-60692170
  hyper
gccggtcgcacaacagcggcccctcgggggccctacggcccctggctctg

SEQ ID NO: 4294 - DNA, 140 bp, Homo sapiens
  chr11:60718693-60718833
  hyper
gagcagcaggctgagcgcgaccgcgcggtagcggcccaggtacacgtcggccagccagccgcccacgggcgccagcaggtaggaggcgcccaggaataccagcgcggcgcgcgtcgcctgctcgccggtccagttgaagt

SEQ ID NO: 4295 - DNA, 15 bp, Homo sapiens
  chr11:60718838-60718853
  hyper
ctgttgaggtacagc

SEQ ID NO: 4296 - DNA, 145 bp, Homo sapiens
  chr11:60718976-60719121
  hyper
cgctccccgggcacgcggggctgctcccgggcgcgcggcgcgggcatcctggctccgggctgggccccccgcggctcttctctcctctcctctccccgcctcagagccctgcactcctgcccccgggcctcggccctctccccca

SEQ ID NO: 4297 - DNA, 31 bp, Homo sapiens
  chr11:60719132-60719163
  hyper
ggccctcctttctcaccgctttggcccaccc

SEQ ID NO: 4298 - DNA, 31 bp, Homo sapiens
  chr11:60719206-60719237
  hyper
ccctccgctcactacccggactctaccacct

SEQ ID NO: 4299 - DNA, 31 bp, Homo sapiens
  chr11:61160872-61160903
  hyper
gaaccttcttattttccgttcttttctgccc

SEQ ID NO: 4300 - DNA, 99 bp, Homo sapiens
  chr11:61348493-61348592
  hyper
cgccgccgccgaacagcgccgagccgcctccctccggcctgcgcgccgcgtgtgcgcgccggagcgtgtgtgtgtgtacgaggccgtgtgtatgtgtgt

SEQ ID NO: 4301 - DNA, 37 bp, Homo sapiens
  chr11:61355114-61355151
  hyper
ggggcgggggacgaggcgtctccgctcttaatagctg

SEQ ID NO: 4302 - DNA, 31 bp, Homo sapiens
  chr11:61447551-61447582
  hyper
acgctaaaactggtcacgagggacctaaagg

SEQ ID NO: 4303 - DNA, 31 bp, Homo sapiens
  chr11:61447670-61447701
  hyper
tgagccaggcgcccaccgcccccacgcgcag

SEQ ID NO: 4304 - DNA, 104 bp, Homo sapiens
  chr11:61447817-61447921
  hyper
gggtttacgtaaaggacgcagcgtcccccggggggcggaggcggccttcgcgccggcgccggcgccctgcggaagcggcgttagtgaatcggggccttggggag

SEQ ID NO: 4305 - DNA, 31 bp, Homo sapiens
  chr11:61447927-61447958
  hyper
atggaggtggcggtcgcggcggcgggccgag

SEQ ID NO: 4306 - DNA, 82 bp, Homo sapiens
  chr11:61519847-61519929
  hyper
gacccgggaaggccccgcgcccctcaagcctgggacggtctcgcgtcccccgacccgggacggccccgcgccccgcaagcct

SEQ ID NO: 4307 - DNA, 240 bp, Homo sapiens
  chr11:61520127-61520367
  hyper
actgtcgcgcgggccgcgccggcgatgccgcgcccccgggccgggctgtagcggggccgcggctggagtgtgcgccgggcaggcgggacatggaggtggtggacgagacggaggcgctgcagcgcttcttcgaaggtgagagaccgcgggctggcggcggcgaccctctggcgctgggaacccccggctgatctccccgggaactggggctcctcgctgtgtttccgcctcctctggctg

SEQ ID NO: 4308 - DNA, 149 bp, Homo sapiens
  chr11:62313645-62313794
  hyper
agcgcggaaggacagccgagggggcgcacggtgcggggtcgcggaggcgcggaggcgctgggggccgcggtggcgatctcggaaatttcccctccagtaaacatgggatacgaacggagcagcccccgagccaccgccccatgcaggga

SEQ ID NO: 4309 - DNA, 201 bp, Homo sapiens
  chr11:62313806-62314007
  hyper
cagaggccaccaggcccggaacggggcgccctgccttgcagtggagccaacagtccgccctccggagaaataaagagtggagcaaagcacttcggagcgattttccaactttaaccaacttgcgccccaactccagaggcagaactccgctcccagagagcgacgcgtcgccgccccgggtggccccgcttgctccaaact

SEQ ID NO: 4310 - DNA, 91 bp, Homo sapiens
  chr11:62314023-62314114
  hyper
tgacacccccaacaacgcgccctgccggagcaccgcaacccacctccccgcgacccgcccttggtgccccggaccccgatggcgccacggt

SEQ ID NO: 4311 - DNA, 56 bp, Homo sapiens
  chr11:62369473-62369529
  hyper
ggcttaactctgtcctcgctggagccctgcagctcctcctcgcgccccaaagactc

SEQ ID NO: 4312 - DNA, 48 bp, Homo sapiens
  chr11:62369579-62369627
  hyper
ttgcataaatggtctacgctcccttaccctttccgcacgcctcttttc

SEQ ID NO: 4313 - DNA, 47 bp, Homo sapiens
  chr11:62369635-62369682
  hyper
ccaccccacagagccccggaggcgcccggcagcgccccacaaaagca

SEQ ID NO: 4314 - DNA, 50 bp, Homo sapiens
  chr11:62369883-62369933
  hyper
ccagggaagggcagggcggggcggggccacgccgccgggccagtcggtcc

SEQ ID NO: 4315 - DNA, 15 bp, Homo sapiens
  chr11:64108286-64108301
  hyper
cggagcctgatgctc

SEQ ID NO: 4316 - DNA, 31 bp, Homo sapiens
  chr11:64108305-64108336
  hyper
ggcggggcctgagggacggtgggcgaggcct

SEQ ID NO: 4317 - DNA, 45 bp, Homo sapiens
  chr11:64511955-64512000
  hyper
tgccaaatgggggtacgcgggggagggccccgctggaaggtggct

SEQ ID NO: 4318 - DNA, 82 bp, Homo sapiens
  chr11:64512002-64512084
  hyper
gaaaagctgggtgcaccgtggaggtcctccgccctccggggatccagcgcgccttagctctcgtggccgctgccccctctcc

SEQ ID NO: 4319 - DNA, 31 bp, Homo sapiens
  chr11:64513474-64513505
  hyper
ggagccaagaaggcgccgagcatcctctgct

SEQ ID NO: 4320 - DNA, 31 bp, Homo sapiens
  chr11:64698944-64698975
  hyper
ccactctgacagagcacgtgagtacctctgg

SEQ ID NO: 4321 - DNA, 31 bp, Homo sapiens
  chr11:64698988-64699019
  hyper
ctctcacctctgcaggcgtgactcctgtctc

SEQ ID NO: 4322 - DNA, 31 bp, Homo sapiens
  chr11:64699020-64699051
  hyper
tctcccacaggtgatccgggggctgctcaaa

SEQ ID NO: 4323 - DNA, 55 bp, Homo sapiens
  chr11:64699088-64699143
  hyper
gaagggctttgatgcccgccagagggaggctgggagggctcggcctctagaaggc

SEQ ID NO: 4324 - DNA, 31 bp, Homo sapiens
  chr11:64759021-64759052
  hyper
cattcatttattcattcgtttgccaccttca

SEQ ID NO: 4325 - DNA, 31 bp, Homo sapiens
  chr11:65082127-65082158
  hyper
ccacccggccctcagccgccagaaccaggac

SEQ ID NO: 4326 - DNA, 74 bp, Homo sapiens
  chr11:65121846-65121920
  hyper
tttcccaaaacaattccgtgagggctgttagccctgcttggtagacgaagaagccgatgcggtctagggtcacg

SEQ ID NO: 4327 - DNA, 31 bp, Homo sapiens
  chr11:65185466-65185497
  hyper
tgagtgctcaggaggacgggggaccaaggcc

SEQ ID NO: 4328 - DNA, 78 bp, Homo sapiens
  chr11:65185520-65185598
  hyper
gcactctagcatggcacggaacaggggacagtcccaggacatccggatgcagggggctgacaccgcaaagttctttcc

SEQ ID NO: 4329 - DNA, 31 bp, Homo sapiens
  chr11:65276133-65276164
  hyper
aggcagaaaagtaggccggaagtcatttcca

SEQ ID NO: 4330 - DNA, 71 bp, Homo sapiens
  chr11:65405604-65405675
  hyper
gcagcgggaccccagcgcgggcggcggcggctgggcgggagccccagaggtactggcgggagcaggggacg

SEQ ID NO: 4331 - DNA, 31 bp, Homo sapiens
  chr11:65405743-65405774
  hyper
agtggggtcctcgccacgttcgccgccagca

SEQ ID NO: 4332 - DNA, 45 bp, Homo sapiens
  chr11:66139090-66139135
  hyper
aaaggggcagagaagccgcacctgcacctgcgctggggcggaggg

SEQ ID NO: 4333 - DNA, 31 bp, Homo sapiens
  chr11:66176412-66176443
  hyper
ggcgcgcgccggtcttcgcagtggctcattc

SEQ ID NO: 4334 - DNA, 68 bp, Homo sapiens
  chr11:66176499-66176567
  hyper
agggagagggaggccccgggtgacgtccgcgctcttctcgcagctagtctcccgcggcctcccaattc

SEQ ID NO: 4335 - DNA, 61 bp, Homo sapiens
  chr11:66176660-66176721
  hyper
gcctgggagctgcccccgcccccgagccgcgagccccgcgccgggccggggagtccccggc

SEQ ID NO: 4336 - DNA, 31 bp, Homo sapiens
  chr11:66725361-66725392
  hyper
tgagccacatccagtacgatggggacaactt

SEQ ID NO: 4337 - DNA, 67 bp, Homo sapiens
  chr11:66725533-66725600
  hyper
gggctgcagccgggggcgggtccgggggcgggtccagccggccgagcccccgcgcgagggggagggg

SEQ ID NO: 4338 - DNA, 137 bp, Homo sapiens
  chr11:66726098-66726235
  hyper
gcccctggcgcaccaccgcctactcccttgtctccggagcctcacgtgggccgccggaccctagccgacgcccgcaataggcggaagtggccgggctgtggctcgcagttattggctgtcggcgggggtggggacgt

SEQ ID NO: 4339 - DNA, 61 bp, Homo sapiens
  chr11:66886094-66886155
  hyper
agaccctgctttgaggcgggtatcggttgccctggcccaggcctcccggccctcaggttgt

SEQ ID NO: 4340 - DNA, 31 bp, Homo sapiens
  chr11:67183097-67183128
  hyper
ctgggcatgccccaggcgtttctatataaag

SEQ ID NO: 4341 - DNA, 37 bp, Homo sapiens
  chr11:67183230-67183267
  hyper
ccaggtaccccagctccggccccgccccggggagagc

SEQ ID NO: 4342 - DNA, 95 bp, Homo sapiens
  chr11:67210850-67210945
  hyper
tagccccggccctgccgcgctcaccgggggcaccgggggcgcagggggctgcggcaccggcttcgggcggctccggatcccggcctctgggaagc

SEQ ID NO: 4343 - DNA, 42 bp, Homo sapiens
  chr11:67210962-67211004
  hyper
aagtgacagagggacccggagcgggggcggggcaggggctcg

SEQ ID NO: 4344 - DNA, 106 bp, Homo sapiens
  chr11:67232108-67232214
  hyper
gaagaactggaagccccggtggcccttgaccgcgcagtagatgaagatcacgtgatagactgcggggcggggcctgtcagcgcagaagccccgcccctccccgcaa

SEQ ID NO: 4345 - DNA, 45 bp, Homo sapiens
  chr11:67275124-67275169
  hyper
ctcctggcactgagcccgacggcgacgggacgcttcctgcagcaa

SEQ ID NO: 4346 - DNA, 31 bp, Homo sapiens
  chr11:67777601-67777632
  hyper
tgtggctctagcctggcgccctctgggcgtt

SEQ ID NO: 4347 - DNA, 111 bp, Homo sapiens
  chr11:68080103-68080214
  hyper
gagccgcgcgaggagccgccgccgccgcgccatggagcccgagtgagcgcggcgcgggcccgtccggccgccggacaacatggaggcagcgccgcccgggccgccgtggcc

SEQ ID NO: 4348 - DNA, 131 bp, Homo sapiens
  chr11:68080740-68080871
  hyper
agttctgagcccgggcgcggggcggcctggccggtggcgctgctcctgtgagccgcgtggctgtgggtttccaagcggactgacacctgccaggtgcccgggcgacccgaatgccccgtgtggccgccggg

SEQ ID NO: 4349 - DNA, 31 bp, Homo sapiens
  chr11:68801618-68801649
  hyper
gctcaagactgtctggcggccttctccttgc

SEQ ID NO: 4350 - DNA, 140 bp, Homo sapiens
  chr11:69453762-69453902
  hyper
cccgcgggttcctggacggctctttacgctcgctaaccgggcttgcaattttgcgctcgtccctgagccgggaaatcaacgaagttcctagtcgagatctgcccggtccgcctagtaacagcgccgcgcccccattggct

SEQ ID NO: 4351 - DNA, 35 bp, Homo sapiens
  chr11:69453914-69453949
  hyper
agtttcctctgtcttgcgcccgggatgggggggtg

SEQ ID NO: 4352 - DNA, 31 bp, Homo sapiens
  chr11:70016124-70016155
  hyper
ccccagaggcagctcccgggtgggatgatcc

SEQ ID NO: 4353 - DNA, 44 bp, Homo sapiens
  chr11:70117684-70117728
  hyper
aaaacacttctaccagcgtttaacgaatccggttccttttagtg

SEQ ID NO: 4354 - DNA, 44 bp, Homo sapiens
  chr11:70117744-70117788
  hyper
caagaattcagggagccgtcagttcttcccgggagctgactgca

SEQ ID NO: 4355 - DNA, 31 bp, Homo sapiens
  chr11:71752006-71752037
  hyper
gactcctaaagccaaacgtatctacaggttt

SEQ ID NO: 4356 - DNA, 31 bp, Homo sapiens
  chr11:72854185-72854216
  hyper
caaacatcactgactccgctgagagggagcc

SEQ ID NO: 4357 - DNA, 59 bp, Homo sapiens
  chr11:74851767-74851826
  hyper
ggcagtgtggccccagcgcaagggcatcagctttgggggccaaacgcacctggtctcaa

SEQ ID NO: 4358 - DNA, 430 bp, Homo sapiens
  chr11:75062272-75062702
  hyper
cggttgccagtgtgtgcgccagcatgcctgtgccacgggttagtgtgcccgtgcgtgtattgtgtgtcaacctgcccccgtgcgtctctgcggctgccggccaatgctgggtgtcagcgagctgtgtgtccgggccaggagctgcggcccacatggggcggcccggccctcgccctttgggtccccccgcccacggccctgccggggagaccacacaggagacctcgggtggaggagagctggtactagatcccgcggtggccgcgaacgcagaaccaggacgcaatcggagcccccgcccgtgtcctcgccgaggtcgcccccacgcgccccccgccgggcggccgccctgcactcaccgggtccctttgtcgcccatggtccgcgacggtcgcagggaggtccgcggcgtcagcgcccaggctggaaa

SEQ ID NO: 4359 - DNA, 70 bp, Homo sapiens
  chr11:75062708-75062778
  hyper
agccagcaggaggagcgcgggccagcccgctcccggctccctgctccgcctcctccgctctcccggccgc

SEQ ID NO: 4360 - DNA, 181 bp, Homo sapiens
  chr11:75062806-75062987
  hyper
ccgccgcccgccgcgtcgagcagcgcagcgcccgggccgcggccaggggcgtggaaccgcgcggggtgtgtgcgtgtgtgtatgtgtgtgtgtgtgcgcgtctgcgtgtgcgcgcgccgcccagcgaggcagggcagcgcggcgggacgcgtcagggccccaaggtcggcgtttgtggtgg

SEQ ID NO: 4361 - DNA, 15 bp, Homo sapiens
  chr11:75095705-75095720
  hyper
cgccccctagcggcg

SEQ ID NO: 4362 - DNA, 31 bp, Homo sapiens
  chr11:75237128-75237159
  hyper
gccgcaggagccaatccgagggtgggagcgg

SEQ ID NO: 4363 - DNA, 31 bp, Homo sapiens
  chr11:75863222-75863253
  hyper
ggaagcagttgggacccggagaagttagtct

SEQ ID NO: 4364 - DNA, 163 bp, Homo sapiens
  chr11:75863300-75863463
  hyper
caggacctttgagtcacgtctctgcctgacctcagccctgcgggccccgttcccgccattccttcctgcctctcacgttgactgggctccccctgtcggtcggcactggctgaacagccatggagtggcgctttggggaaaccacgggcgaccaggaaagatc

SEQ ID NO: 4365 - DNA, 31 bp, Homo sapiens
  chr11:75863555-75863586
  hyper
ggagtagagaagagcacggctcctgtgaagg

SEQ ID NO: 4366 - DNA, 96 bp, Homo sapiens
  chr11:75863590-75863686
  hyper
agaggctggagctgggcgatgggccaccgcgcggaggaggcgcgggcggtggtccgagttcctcaagggatctacagacggcgcccctcctaccca

SEQ ID NO: 4367 - DNA, 244 bp, Homo sapiens
  chr11:76382020-76382264
  hyper
ggggttgcagaggaagcgccgtgggagcgaggcccatcccagcggccgccgcacgtgcagttcgcggccccgcggggtccggaggggggcgcggtggctctaggagccgcaggtccacagaggaaatccggcctggccccgatttcccagctgctggcgccgccgcacttaacgcgggggcaaacaggcgaggtgacggcggggctgaatgcggaaggaaatgacccttcgctggccctggggc

SEQ ID NO: 4368 - DNA, 31 bp, Homo sapiens
  chr11:76466226-76466257
  hyper
actaaaaatacaaaaacgtctctactaaaaa

SEQ ID NO: 4369 - DNA, 263 bp, Homo sapiens
  chr11:76494602-76494865
  hyper
gacgcctagggctgggcgggagtggggaacgccgacccaggggagaggtcttgcgggagacaaaggctacgcccaggggccgtgtgggtctttgtgcggacacgtgcatctcacgtttgtgggtctttgtggatttgcggtcggggacgcgccgctgtcggtgcctttgtgtgtccgtggctttgcgcggctgctttgcgcccgtgtccacgtttgcgggcctgcgcttggctgtgggcgtcggtgggcgcatcgcgtgtctc

SEQ ID NO: 4370 - DNA, 71 bp, Homo sapiens
  chr11:76494906-76494977
  hyper
gtccgcagagggtgtgcgcaccgagagcccaacgccgccccacccccccgctcccccgccgtcccctcggg

SEQ ID NO: 4371 - DNA, 31 bp, Homo sapiens
  chr11:76510329-76510360
  hyper
aacctgccctgcaccccgcagccctggcctc

SEQ ID NO: 4372 - DNA, 31 bp, Homo sapiens
  chr11:76682667-76682698
  hyper
atatgaaaaactcaaacggtcagaagattga

SEQ ID NO: 4373 - DNA, 112 bp, Homo sapiens
  chr11:77184394-77184506
  hyper
ggggcctttgttggcccgacgggagcgggcctcgcggggcgccgcccgcctcaccttacctggcgcctcctcccgcccaggcgcccggccccgcaacgcgaaataaatgggc

SEQ ID NO: 4374 - DNA, 167 bp, Homo sapiens
  chr11:77184508-77184675
  hyper
agacccccactccacccgtccccacccccgcgccccagccctggcagcccgggacgcgaggggtactgggcggtaggcccgctctcaccttccgcgctcgctcagctcctctcggctcctcctcctcctcccggcggtgggtgccgcctagccgggagtgagggcgc

SEQ ID NO: 4375 - DNA, 31 bp, Homo sapiens
  chr11:77184749-77184780
  hyper
caggacaggggaactgcgagggaagggatga

SEQ ID NO: 4376 - DNA, 31 bp, Homo sapiens
  chr11:77184829-77184860
  hyper
actgaggggcgaggtgcgaagggctcagatg

SEQ ID NO: 4377 - DNA, 31 bp, Homo sapiens
  chr11:77184910-77184941
  hyper
ggggctcacgaaagcgcggggctccgtggaa

SEQ ID NO: 4378 - DNA, 31 bp, Homo sapiens
  chr11:77184952-77184983
  hyper
agtccaagggggaaggcgtctgtgggggagg

SEQ ID NO: 4379 - DNA, 133 bp, Homo sapiens
  chr11:77185040-77185173
  hyper
ggaagccgtgagggggcgtctactgtgcagccaccaccttcggctccggctgcagccgcgggagggcagcctcccccgcccacagccgcgctattgtacgccgcccggcaggcctgaccgcctagttcactgg

SEQ ID NO: 4380 - DNA, 126 bp, Homo sapiens
  chr11:77185324-77185450
  hyper
gcggggagggcctgaccgacccgtgggagcgaggccaaaccctggcccgcatgagggcgaacgcctgggattacgtcatcggcgcgtgacgccagaggctggggaatcacccgcttgctgcgtgac

SEQ ID NO: 4381 - DNA, 47 bp, Homo sapiens
  chr11:77185470-77185517
  hyper
ttctcggtccgctgtccgtggcgggttgtttccgtgcagcctttcta

SEQ ID NO: 4382 - DNA, 31 bp, Homo sapiens
  chr11:77185623-77185654
  hyper
accgcatctatgagctcgttgtcaagggctg

SEQ ID NO: 4383 - DNA, 83 bp, Homo sapiens
  chr11:77300372-77300455
  hyper
cgcccactaactcacccgccccctgcgccgcgtctcccctctcaatttcagtcgcccattgataaaaacgaggtggctatgtg

SEQ ID NO: 4384 - DNA, 162 bp, Homo sapiens
  chr11:86511242-86511404
  hyper
ccagacccggggatgcgcggtgttcaaagggtgacggcgcgcgggtcccgggcaggagagcccgccagagccggtgctgcctggcgccgagaggcccggactggcgactgctgccgcgccaccggggcccacctgcgcagggacgctcggcctcaggccctc

SEQ ID NO: 4385 - DNA, 363 bp, Homo sapiens
  chr11:86511408-86511771
  hyper
ctgctccaccctgctccggccgcaggcgagcggcgaggggaggggggcacggtttatgtgcagtggggcgggcggcgtccgcgcggcttccccgaggccggaggcggggcgggcgggcctcgggtggcgcggggggcggacccgccagctgcctgcgctgctcgccagcttgctcgcactcggctgtgcggcggggcaggcatgggagccgcgcgctctctcccggcgcccacacctgtctgagcggcgcagcgagccgcggcccgggcgggctgctcggcgcgggtgagtgcgggcaccgactggggcatccgcccgggcgcgggagaggcgaggcgccgggaggagcgggacaaagggccg

SEQ ID NO: 4386 - DNA, 34 bp, Homo sapiens
  chr11:86511868-86511902
  hyper
aggagctctggggagacggcgggggctgcaggtc

SEQ ID NO: 4387 - DNA, 31 bp, Homo sapiens
  chr11:86511916-86511947
  hyper
agtgtcacccatgaaacggatggggaaagaa

SEQ ID NO: 4388 - DNA, 62 bp, Homo sapiens
  chr11:86511979-86512041
  hyper
gggaagcagagagagccggctctcggcaagctgtccttcggcgggggcgatggctacacccc

SEQ ID NO: 4389 - DNA, 158 bp, Homo sapiens
  chr11:86665885-86666043
  hyper
gttgtcagctgcagctcggcgtccgtctgcagctcgtgcccaaccaggttgggcatcttggtcacgttgtagccgaggttctggcacatggagatgcggatggggtcgcagcgccgctcttcctcgtccccgaagccccgcgccggccccaggagcag

SEQ ID NO: 4390 - DNA, 52 bp, Homo sapiens
  chr11:86666228-86666280
  hyper
ggacgggagtgtgatgcggcgacgagggggcagcggccggctctccagcagc

SEQ ID NO: 4391 - DNA, 31 bp, Homo sapiens
  chr11:86666306-86666337
  hyper
cgtcccgggccgaggccgagggacaggctgc

SEQ ID NO: 4392 - DNA, 196 bp, Homo sapiens
  chr11:86666339-86666535
  hyper
gggtcatggctgcaggcggcgagcccacaagccggcgccggccgcgtccgttcggcgtctccgcgaggccagccagcagccagcgctgcgcagctctcaccgccggagccctgcgcggcgctggaggctcgcggcgcggcggcggggcgggacggacagcgggcctctccaatggccgggcgcggtgggcagctag

SEQ ID NO: 4393 - DNA, 31 bp, Homo sapiens
  chr11:92931155-92931186
  hyper
gcgcagtgggacagcccggctcggcgggcac

SEQ ID NO: 4394 - DNA, 51 bp, Homo sapiens
  chr11:94884635-94884686
  hyper
aggctcggacagccggcggactcctcgcaaggtgatcggatacttccgaga

SEQ ID NO: 4395 - DNA, 34 bp, Homo sapiens
  chr11:95523018-95523052
  hyper
caactcccaacttccgcgacgcaggaagcgccca

SEQ ID NO: 4396 - DNA, 127 bp, Homo sapiens
  chr11:101981891-101982018
  hyper
tcccgacaggtaacctcgttgcccctctccccgtttccccgtcgggcgggcctcagaccgggggggcgctcgggagccgcggccgccagctctggtcaggggaggggggttgcgggaactctagctg

SEQ ID NO: 4397 - DNA, 31 bp, Homo sapiens
  chr11:101982173-101982204
  hyper
ttcctttctttcttcccggggttcccgagag

SEQ ID NO: 4398 - DNA, 31 bp, Homo sapiens
  chr11:101982240-101982271
  hyper
gggggtggggaaaagtcgggcctgggccgcg

SEQ ID NO: 4399 - DNA, 31 bp, Homo sapiens
  chr11:101982559-101982590
  hyper
tttcccctccccctcccgtaagcatttattt

SEQ ID NO: 4400 - DNA, 31 bp, Homo sapiens
  chr11:104034340-104034371
  hyper
cctctcagtcccattccggaaatggagctct

SEQ ID NO: 4401 - DNA, 97 bp, Homo sapiens
  chr11:104034583-104034680
  hyper
ggttgcagaagtgtcccgacagctgcaaaagtttgcgcagattagagtgtagacaaagatgagccggtgcatttgggatcagcgactagagacagcg

SEQ ID NO: 4402 - DNA, 109 bp, Homo sapiens
  chr11:104034694-104034803
  hyper
agccgggttctgctcccgggaccgacgccgcgccgccctgcgctctcgccgcctgcgctcgccctgcgctggcccgggtcgctgtgctaatcgccgagctctccccaaa

SEQ ID NO: 4403 - DNA, 48 bp, Homo sapiens
  chr11:104034808-104034856
  hyper
tgcatgctgaactttccgagcgcgtgtgggtgccgcacttccttgtgg

SEQ ID NO: 4404 - DNA, 240 bp, Homo sapiens
  chr11:104034861-104035101
  hyper
agctgataaatggtgacgggacaaacaacaggttgacgtttgtttgttcgccccctccggtggccggcagctgcagcacaggctgcagggggcgggcagcgccgaatctagcggggcaggcgagcggagcagcagcgttctccagccccggccgcggcccctgagaggcgcgcactcgggctcagagcggcggcgcgagcacctcagctccccagtttcccaggccgggcctaaacctgc

SEQ ID NO: 4405 - DNA, 185 bp, Homo sapiens
  chr11:107799620-107799805
  hyper
tctggcccttccctctcgaaagtgcaaacactccattctcgcttcccctttgcccctcctcttccagggacgacttcctcctccgcaatttctcacttctttctttggcgcccatttcctgcgccccctttccatctttcctttcccgcctgaaccggggtcgtcctcgccgccccctcttcccc

SEQ ID NO: 4406 - DNA, 74 bp, Homo sapiens
  chr11:108368606-108368680
  hyper
cactccttgtaacgcccgggcgccgtccattcgcaacatcagtccctgcacattaaatgcggaagggcccttca

SEQ ID NO: 4407 - DNA, 59 bp, Homo sapiens
  chr11:108368878-108368937
  hyper
ggctggacactacctgcgggagagcgagtgaggttctggccctccgagttgaccgcctg

SEQ ID NO: 4408 - DNA, 53 bp, Homo sapiens
  chr11:108368986-108369039
  hyper
ccccacaccaggctccgcggcgcgctgaccagcacctccggggcccccgcggc

SEQ ID NO: 4409 - DNA, 141 bp, Homo sapiens
  chr11:108369108-108369249
  hyper
actgcggtccagctccgcggcggcgaggaggggccggcagcgccgcggaccgggcggggactggggcccaccgcggggcgggtctttcgggcgggaaagattgcggcgcaggctccctttcccgcccgctgtcccgcctcg

SEQ ID NO: 4410 - DNA, 78 bp, Homo sapiens
  chr11:108463552-108463630
  hyper
tatttgacaaattcctcgagctcctacccttggggtggggacctttcgcctcccgtgaggtgccggctctcccgtgct

SEQ ID NO: 4411 - DNA, 113 bp, Homo sapiens
  chr11:108463827-108463940
  hyper
tggcccagcagacacccggcacagcacagcgtcactgcgcggcccccgcagcgcacggacccccccaccctgcccgaccccagacccgcagccgagcccgtctggtatgtggt

SEQ ID NO: 4412 - DNA, 31 bp, Homo sapiens
  chr11:108464144-108464175
  hyper
ctgatcctgtccttctcggccctctgtaact

SEQ ID NO: 4413 - DNA, 71 bp, Homo sapiens
  chr11:108464201-108464272
  hyper
atcttcctggcctcttcgtcatttaagaaactgaaatcaaacgccggaggaactttcgtcattttctttac

SEQ ID NO: 4414 - DNA, 31 bp, Homo sapiens
  chr11:108464285-108464316
  hyper
cacttaagctccttggcgcctcctgttagga

SEQ ID NO: 4415 - DNA, 31 bp, Homo sapiens
  chr11:108464333-108464364
  hyper
tacaagaccagtttcacgaacttgatcccac

SEQ ID NO: 4416 - DNA, 31 bp, Homo sapiens
  chr11:111945412-111945443
  hyper
agagagatctgcctgtcggtctgggctgggg

SEQ ID NO: 4417 - DNA, 31 bp, Homo sapiens
  chr11:112046231-112046262
  hyper
tccaggcagttctgtgcgtgttcactgttta

SEQ ID NO: 4418 - DNA, 31 bp, Homo sapiens
  chr11:113746651-113746682
  hyper
gttaaaactgttcccccgccgtgggaaactg

SEQ ID NO: 4419 - DNA, 38 bp, Homo sapiens
  chr11:115373018-115373056
  hyper
gaccacagctttccaccgccccccggcttttttttttt

SEQ ID NO: 4420 - DNA, 31 bp, Homo sapiens
  chr11:116064587-116064618
  hyper
agctcctgcaaagttccggtcggagcttgga

SEQ ID NO: 4421 - DNA, 262 bp, Homo sapiens
  chr11:117186648-117186910
  hyper
gccctgggccagcccccgggtccgggctgtggagagcggtcaggggagatccgcagagcacgggagcaggggagaggctgggatccggagcccgctacatcggcacggcggcggccagcctgggcagcgggcgcgggctcccggcggggctgggaggggcgggcatggcgggccggtggcggcttccctggtccccccggcgggcggcggcgcgggcaggggcaagggctccgggctcctgcggctgcgttggctgctcagg

SEQ ID NO: 4422 - DNA, 38 bp, Homo sapiens
  chr11:117187036-117187074
  hyper
cccatggcaggcaatccggcttccggggctggagaggg

SEQ ID NO: 4423 - DNA, 61 bp, Homo sapiens
  chr11:117187076-117187137
  hyper
ctgggatgccctctgccgaggtggagtccgccctgcaaggccctggcgggaagggccagac

SEQ ID NO: 4424 - DNA, 35 bp, Homo sapiens
  chr11:117747145-117747180
  hyper
tgcccaggcggggaccgcggcgcagctgaccgcgg

SEQ ID NO: 4425 - DNA, 54 bp, Homo sapiens
  chr11:118023498-118023552
  hyper
gccgccggtcggggctcgggaaagttagcgggcagagagcgagaggagggggag

SEQ ID NO: 4426 - DNA, 31 bp, Homo sapiens
  chr11:118023556-118023587
  hyper
ggagcggagggggaggcgcgctcgcccgctg

SEQ ID NO: 4427 - DNA, 34 bp, Homo sapiens
  chr11:118662850-118662884
  hyper
gtgcgccgggagaggacggcgggggaccggactg

SEQ ID NO: 4428 - DNA, 31 bp, Homo sapiens
  chr11:118662982-118663013
  hyper
tgaggggggattactccggagagcacggagc

SEQ ID NO: 4429 - DNA, 46 bp, Homo sapiens
  chr11:119209336-119209382
  hyper
gcagaggtatgtgtggcgcaggcagcccctacgtggttcagttggc

SEQ ID NO: 4430 - DNA, 34 bp, Homo sapiens
  chr11:119587837-119587871
  hyper
agcactgagaggtgggcgccgaggactgatgctc

SEQ ID NO: 4431 - DNA, 51 bp, Homo sapiens
  chr11:119587875-119587926
  hyper
cctcttccatcatcaccgccccttcaggactggccacgaggcccatcatct

SEQ ID NO: 4432 - DNA, 136 bp, Homo sapiens
  chr11:119587931-119588067
  hyper
ctgggagggtggggaacggtgctgtggtcagggcagaggcaggccgggagcagggggctgtcgcacacgttcccccaaaggcctatccatcacgccagtggagaccatcagagtgctctgccggcccaggacactg

SEQ ID NO: 4433 - DNA, 31 bp, Homo sapiens
  chr11:119598324-119598355
  hyper
ggctggtcccagcctccgtccccaccccacc

SEQ ID NO: 4434 - DNA, 104 bp, Homo sapiens
  chr11:119598366-119598470
  hyper
gccaccagggccaccccggggtcgggcgcgaggttaacccctcggctgccggcagcccgcacctcgaggaaggacacgcggggcaccctcgggaaagtgggtca

SEQ ID NO: 4435 - DNA, 31 bp, Homo sapiens
  chr11:119598481-119598512
  hyper
ggatggcaggaagcccgcggtgtctcctcca

SEQ ID NO: 4436 - DNA, 15 bp, Homo sapiens
  chr11:119598929-119598944
  hyper
tttgtaaagaactga

SEQ ID NO: 4437 - DNA, 69 bp, Homo sapiens
  chr11:119599011-119599080
  hyper
cggcttctcaacctctttctccgccgtgccacctcccaccccctttacccaagccgtgacccaactttt

SEQ ID NO: 4438 - DNA, 57 bp, Homo sapiens
  chr11:119599093-119599150
  hyper
ctccccacaatccagtcgtgcccgccatccggctcccagccccggggaggcattgga

SEQ ID NO: 4439 - DNA, 166 bp, Homo sapiens
  chr11:119599159-119599325
  hyper
ggacagcagaggtgagcgctcttacctgggaggaagaatgcggtcaagccgagagcgagtccccaccagcgtccagcggcgcccgcaagccccatccgagccatcgggggccgggggtccggcgagaggggcggcgagggcagcgctcctcgcgcagcagaaacca

SEQ ID NO: 4440 - DNA, 58 bp, Homo sapiens
  chr11:119600031-119600089
  hyper
agcgcacgcgccttcccgaccgaagcagaggcggatcgcgagcgcgggctgcggggtc

SEQ ID NO: 4441 - DNA, 53 bp, Homo sapiens
  chr11:119612151-119612204
  hyper
ggcgggacgggcacggcgccacctagcggtcgtgggccgcggagagagcgtcc

SEQ ID NO: 4442 - DNA, 31 bp, Homo sapiens
  chr11:119884358-119884389
  hyper
ctgttttgcctgttgccggaggctggggggt

SEQ ID NO: 4443 - DNA, 31 bp, Homo sapiens
  chr11:120039886-120039917
  hyper
ggcgggacatggtgagcgacccgaggggcgc

SEQ ID NO: 4444 - DNA, 31 bp, Homo sapiens
  chr11:120206517-120206548
  hyper
aggtgagcggggcctgcggaggcagcgaggg

SEQ ID NO: 4445 - DNA, 31 bp, Homo sapiens
  chr11:120435791-120435822
  hyper
ggccgaggcagtgatgcggggcagcgtggga

SEQ ID NO: 4446 - DNA, 31 bp, Homo sapiens
  chr11:122626283-122626314
  hyper
ctgggttgtaccaaagcggctctcagccctg

SEQ ID NO: 4447 - DNA, 31 bp, Homo sapiens
  chr11:123084067-123084098
  hyper
cctgtagatatggatccggtagggaagcaaa

SEQ ID NO: 4448 - DNA, 85 bp, Homo sapiens
  chr11:123172481-123172566
  hyper
ggggcaggcggcagcacgggaagaggccagcaggtggcgcggtcgcccaacccggccgccccccgggcgccgagggaagcgggtc

SEQ ID NO: 4449 - DNA, 105 bp, Homo sapiens
  chr11:123172598-123172703
  hyper
tcccaggcagcaggggcggcggcggcctggctggctgcgctgcagagcggagagcaggagcggcgtgggaggaattcggagcactttcgccgcctgcctcctttt

SEQ ID NO: 4450 - DNA, 31 bp, Homo sapiens
  chr11:123172725-123172756
  hyper
gccctctccctccacacgcctttgggcctta

SEQ ID NO: 4451 - DNA, 31 bp, Homo sapiens
  chr11:123228946-123228977
  hyper
gaggggaggagagagacggagagaggagaga

SEQ ID NO: 4452 - DNA, 38 bp, Homo sapiens
  chr11:123228995-123229033
  hyper
agagagggaccaagaccggcgagcgggagacaggagcg

SEQ ID NO: 4453 - DNA, 80 bp, Homo sapiens
  chr11:123229184-123229264
  hyper
gagttccgcttcctcccgccccagcggctcccgccccgcctgggcgcagccggccgtcccggctccgagggtgcagcgcg

SEQ ID NO: 4454 - DNA, 31 bp, Homo sapiens
  chr11:123300895-123300926
  hyper
atagcccccctcaccccgcccccagcccccg

SEQ ID NO: 4455 - DNA, 31 bp, Homo sapiens
  chr11:123300946-123300977
  hyper
tttttatccagtgtctcgcttcctctctctc

SEQ ID NO: 4456 - DNA, 15 bp, Homo sapiens
  chr11:123301013-123301028
  hyper
cactgcctcttcctc

SEQ ID NO: 4457 - DNA, 214 bp, Homo sapiens
  chr11:123301082-123301296
  hyper
cgcaaaccgctgagagtttgctgcaccgccccctggggcccctggctgccgagtcccgctaaggcaaagacgccagcaagcgaggaagcgcagcggaagaaaaacaagcgggcgcgcgaggggagccccaggagggctgccgagtggctggcaggcggctcccgcccctcccgggtggcctcgccggcggctgacggcccggaggacgcgcgct

SEQ ID NO: 4458 - DNA, 31 bp, Homo sapiens
  chr11:123326582-123326613
  hyper
aaacactcaaccaggccgggtggggtggctc

SEQ ID NO: 4459 - DNA, 51 bp, Homo sapiens
  chr11:124616947-124616998
  hyper
taggaggagtcttccacggccccgccccgcccctgtcggtcccgccctccc

SEQ ID NO: 4460 - DNA, 31 bp, Homo sapiens
  chr11:124617129-124617160
  hyper
gggtgcacaaggcctccgcttgcaacttgaa

SEQ ID NO: 4461 - DNA, 43 bp, Homo sapiens
  chr11:124746303-124746346
  hyper
cgccgccctctactggcgccggaaacagcgcaaagagctcagc

SEQ ID NO: 4462 - DNA, 61 bp, Homo sapiens
  chr11:125757372-125757433
  hyper
atcccgggcatgctcccgccggcggagaaggcccagacaaaatgtgcgccaatcaggatac

SEQ ID NO: 4463 - DNA, 45 bp, Homo sapiens
  chr11:125932493-125932538
  hyper
gcctccagacctcctgcgctgcagccggctcggaaagccaccccc

SEQ ID NO: 4464 - DNA, 10 bp, Homo sapiens
  chr11:125932539-125932549
  hyper
ggtcatcccc

SEQ ID NO: 4465 - DNA, 186 bp, Homo sapiens
  chr11:125932556-125932742
  hyper
cgcgcggcggcggctacggtggcggcggctgcgatccgaacgggcccctccatgcaccgcgcagggcagaggagggagcggcgcctcgcacgccggggctggggcgctgggcagggcgggcgggcgtggggtcccgggtctcctcgcacctagccgcgcgagccgggctcccgggctcaggggagg

SEQ ID NO: 4466 - DNA, 125 bp, Homo sapiens
  chr11:125932778-125932903
  hyper
cggctgcgctcctccccgccggggagcgcgggcacgtaactcggagggtgctgggccggcccggagcacgcgagcagcgggaggagggaccggggaatgactgacggaggcgggccgtagaggcc

SEQ ID NO: 4467 - DNA, 88 bp, Homo sapiens
  chr11:125932904-125932992
  hyper
ctgtgccccgccggcccgcacccggccggagtgtgcgcgcgcagcctgccagatcagcggcgggggcacgggccgtaccaagtgacgg

SEQ ID NO: 4468 - DNA, 31 bp, Homo sapiens
  chr11:125933297-125933328
  hyper
gccccgcccctcgccccgccccgcccctcgc

SEQ ID NO: 4469 - DNA, 66 bp, Homo sapiens
  chr11:128392687-128392753
  hyper
ggcatgtggatgaaggcgagcgtgcaggcaggcgcaggggattcgtgagcccgtgtcctcaaaggg

SEQ ID NO: 4470 - DNA, 102 bp, Homo sapiens
  chr11:128562835-128562937
  hyper
ggctgggtagggaggacggtccagagcgcgggcctccgggtctcaccccgggaaaagtctgggtctgctctgcgctgttgcgtgctgcgctcctgggacctg

SEQ ID NO: 4471 - DNA, 37 bp, Homo sapiens
  chr11:128562940-128562977
  hyper
actgtcctagagggaacgtcccgcggtagtgtcagtt

SEQ ID NO: 4472 - DNA, 205 bp, Homo sapiens
  chr11:128562980-128563185
  hyper
tggggaccaggaagggcgactcttgcctgggagtcagtgcttgggccgtcgggtccgggtaagcgctgggggtttggctcgagaagatgcggataggtggcctagggcgccgcggatctccgccctctgcgggcaccgggagcccagggtcgaggcgcgccgccccgaggggccccttctcctaacaatgcgcccggaatggagt

SEQ ID NO: 4473 - DNA, 59 bp, Homo sapiens
  chr11:128563336-128563395
  hyper
cggttttcgtccgagtcttccccggcagtaggcgctgggttacccgcagccctagccaa

SEQ ID NO: 4474 - DNA, 31 bp, Homo sapiens
  chr11:128563425-128563456
  hyper
ccaaaaagtttgtctccggctggaaaaagca

SEQ ID NO: 4475 - DNA, 39 bp, Homo sapiens
  chr11:128563497-128563536
  hyper
tcaggagggccaccttcggccaaccgcctcaggaaaagc

SEQ ID NO: 4476 - DNA, 36 bp, Homo sapiens
  chr11:128563886-128563922
  hyper
gataggacttcctccccgattcgcaaagtgaagtca

SEQ ID NO: 4477 - DNA, 31 bp, Homo sapiens
  chr11:128563939-128563970
  hyper
aaaaaaaagtttcatccggttaactgtctct

SEQ ID NO: 4478 - DNA, 362 bp, Homo sapiens
  chr11:128564034-128564396
  hyper
cagggagggcccagggcgccagggaggccgcgccgggctaatccgaaggggctgcgaggtcaggctgtaaccgggtcaatgtgtggaatattggggggctcggctgcagacttggccaaatggacgggactattaaggtaagcggcggggcaacggacgcgggcggcggggaccggccggggaggcgaagcggcgggcgggtaggtgcggggcccgcgtcccggaagacgtggcctctctcccttccctccgcgccccggcttcgcgccggctcctccggcgctcgggtggcgagtcctactcgcgggccagccggccaggcgcccgcattgagggcgaccctcccccgaaatcccagcccc

SEQ ID NO: 4479 - DNA, 4 bp, Homo sapiens
  chr11:128564539-128564543
  hyper
gctc

SEQ ID NO: 4480 - DNA, 38 bp, Homo sapiens
  chr11:128564602-128564640
  hyper
cgggggctgcagtcgcccgggctcgggtccctgcctgg

SEQ ID NO: 4481 - DNA, 82 bp, Homo sapiens
  chr11:128564650-128564732
  hyper
ggtgggtaagtggcctcgttgcacgagggtaggggtgcaagtgagtgtgtcgggggatctatctgagcgggctcctccagat

SEQ ID NO: 4482 - DNA, 60 bp, Homo sapiens
  chr11:128564816-128564876
  hyper
cgcgggactcctgggccggcctcgccgcctctccggcggggaaccttccccagcccccgt

SEQ ID NO: 4483 - DNA, 46 bp, Homo sapiens
  chr11:128564991-128565037
  hyper
cgcctccgttgcaggggccggctgtgagcccgcgccccgcgcccgc

SEQ ID NO: 4484 - DNA, 37 bp, Homo sapiens
  chr11:128565041-128565078
  hyper
ccattcccaccccagccgccgccgccaagcctgggtc

SEQ ID NO: 4485 - DNA, 72 bp, Homo sapiens
  chr11:129148498-129148570
  hyper
gtcgtccaacatgcagcggcaacttcagtcaatcggaaagacgaggggggaactccacgggagcctaaggga

SEQ ID NO: 4486 - DNA, 145 bp, Homo sapiens
  chr11:129148572-129148717
  hyper
agagacctctggccccgcggggcccacgcacacctgggggcgggacccgcgatgtcgcccgcgggcagcggagggaaacgctcccgcggctcctccgggagcgccggtgtccctggagcccccactcggccgctcccaggagtcg

SEQ ID NO: 4487 - DNA, 83 bp, Homo sapiens
  chr11:129148740-129148823
  hyper
ggggcggagagcgctgcggcaggccagaacgccgtccgaacgcccggctcgcggaggccgcggggagcgcggggcgcgggcgc

SEQ ID NO: 4488 - DNA, 111 bp, Homo sapiens
  chr11:129148827-129148938
  hyper
ggcggtgggcccgcagcgccgtccgccccgggaggccggggagatggggccgggggcggggggacaaccgagaggctcctccgggagcatgcgatccggaaccctcactct

SEQ ID NO: 4489 - DNA, 35 bp, Homo sapiens
  chr11:129149096-129149131
  hyper
cgtgtctgccctccgcgggccgggcccgacgccct

SEQ ID NO: 4490 - DNA, 253 bp, Homo sapiens
  chr11:129149291-129149544
  hyper
tccaagtccccacctccggcacgcaccgcgctcgccctcccgcggcggagtcggcccccggggacgcgggtcctcgggctccagagcctctcaccctgacgccttcgggccgcccccgcagcgcccccgcccagctggccggcgcgtgcccccgccggagcccgccgcccgcccagcctccgcctcctccgctccgcctcctcctgcacccgcgacgcccgcagcggggagaagaggcgcgccgccgcggccg

SEQ ID NO: 4491 - DNA, 145 bp, Homo sapiens
  chr11:129149553-129149698
  hyper
gcacgcgcgaggagggcgggcggcgggcggagcgcgcgcgcggccgagggggcgggggcgcgccgaagcctcgcctgctgttgtcccgggagcgcacgtgcgctgcggtggggcgccgaggggcgttcggcgggtgcccctaggg

SEQ ID NO: 4492 - DNA, 35 bp, Homo sapiens
  chr11:129149893-129149928
  hyper
ccagaacactgtcaccgcgccgcggaggagagggg

SEQ ID NO: 4493 - DNA, 71 bp, Homo sapiens
  chr11:129765559-129765630
  hyper
cgggcgggtcctggagcggctcgggagagcggagggtcggcgagggtgcctgcgcgcggctgggcctgggg

SEQ ID NO: 4494 - DNA, 31 bp, Homo sapiens
  chr11:129765636-129765667
  hyper
gttccagcctgcttgcgcgtctcacctgatt

SEQ ID NO: 4495 - DNA, 80 bp, Homo sapiens
  chr11:129765696-129765776
  hyper
ctgtctttgcctgaccgcgaatcaaagttccatagcccgtgagcgaaggcacgtctattagctgacgtttgcagagagca

SEQ ID NO: 4496 - DNA, 31 bp, Homo sapiens
  chr11:130064639-130064670
  hyper
ctatggggcgtgtgaacgtgtgtgtgtgtga

SEQ ID NO: 4497 - DNA, 42 bp, Homo sapiens
  chr11:130066273-130066315
  hyper
tctacctgctggagcccggcgtgcctgcgggcacctgcccca

SEQ ID NO: 4498 - DNA, 31 bp, Homo sapiens
  chr11:130083143-130083174
  hyper
cacggtggcgatgttgcgccgttccagggcg

SEQ ID NO: 4499 - DNA, 53 bp, Homo sapiens
  chr11:131558064-131558117
  hyper
gggcacccgcgccccccgagccgcgaggctgcctccaccgagctggagaacag

SEQ ID NO: 4500 - DNA, 31 bp, Homo sapiens
  chr11:133906585-133906616
  hyper
cgagcagatcaattgccgctgataacattta

SEQ ID NO: 4501 - DNA, 31 bp, Homo sapiens
  chr11:134201565-134201596
  hyper
actctgcaccgctccacgacactggggaccc

SEQ ID NO: 4502 - DNA, 38 bp, Homo sapiens
  chr11:134201762-134201800
  hyper
cggccagccccgcccccgcttgcgcgaggcctagggct

SEQ ID NO: 4503 - DNA, 73 bp, Homo sapiens
  chr12:568902-568975
  hyper
tcggtcacccagagtccgcatcatcactcgccccctcctcatcccacccgttcccagtcgggggaggcaccag

SEQ ID NO: 4504 - DNA, 50 bp, Homo sapiens
  chr12:694939-694989
  hyper
aaaggaatagctcagacggagtttgtgattaattacgggaatgggtgcca

SEQ ID NO: 4505 - DNA, 47 bp, Homo sapiens
  chr12:695005-695052
  hyper
ggtggaagagcaggagcgcctccatccaggggcgtggaggaggctct

SEQ ID NO: 4506 - DNA, 31 bp, Homo sapiens
  chr12:695118-695149
  hyper
aatcacagaagctctgcgctgggaaccagta

SEQ ID NO: 4507 - DNA, 100 bp, Homo sapiens
  chr12:1059278-1059378
  hyper
agaccttcccagattccgcccgggccgaggcagcggtggacctggtggttctcgcggcctctcaccaccgccgcgcacatccagtcgtcaccggatggcg

SEQ ID NO: 4508 - DNA, 31 bp, Homo sapiens
  chr12:1639403-1639434
  hyper
ggctggtgggcaggagcgagccggggccggc

SEQ ID NO: 4509 - DNA, 31 bp, Homo sapiens
  chr12:1714947-1714978
  hyper
tgtcagcactgagggccgaagtgggcgtgga

SEQ ID NO: 4510 - DNA, 67 bp, Homo sapiens
  chr12:1762160-1762227
  hyper
tgtgaccacacagtgtcgctatcttctcagttctagccgaatagctctggcccgcaccttggttcaa

SEQ ID NO: 4511 - DNA, 42 bp, Homo sapiens
  chr12:1906280-1906322
  hyper
acggctgcggcctcggcggggtgggctcgacacacagggtca

SEQ ID NO: 4512 - DNA, 94 bp, Homo sapiens
  chr12:1906341-1906435
  hyper
cccatcccggctgtcccggtccccagccgtcctgcccgcctcagaccgtccgcctcctgcgtgtctcctccactgaggacggcgggggaagacc

SEQ ID NO: 4513 - DNA, 96 bp, Homo sapiens
  chr12:1906476-1906572
  hyper
cggctgtggagccgtttcccgggggttccggggccctgcccgcacttccgccttgccgagggcgggaggagtgtggcgggacgggcggcgccgccc

SEQ ID NO: 4514 - DNA, 68 bp, Homo sapiens
  chr12:3067871-3067939
  hyper
cacatggacttcaaaccgagtgccctttctcccatgtggtttactcgtagtggcggttttacagatgc

SEQ ID NO: 4515 - DNA, 185 bp, Homo sapiens
  chr12:3067944-3068129
  hyper
gggcaggagagaaaaacggaaagagctaaagccggggagggcaagcgagggggcactggcagcggatctgggaatggagcccgcgagttcctgcttcctggttccccggagcaagtgtcctttggtgggagccgcaggaagggagcagcccttcctgcgcgccgggagcccgccccttccccggc

SEQ ID NO: 4516 - DNA, 53 bp, Homo sapiens
  chr12:3068384-3068437
  hyper
cctcggccccctcccccgccgcccgccccggcccggcccggccccgccccgcc

SEQ ID NO: 4517 - DNA, 36 bp, Homo sapiens
  chr12:3068769-3068805
  hyper
ccgccttggacctctgcgctccgacgcgctccgtcc

SEQ ID NO: 4518 - DNA, 41 bp, Homo sapiens
  chr12:3068911-3068952
  hyper
caggaatagggatccccgtgttttcccgtcagtcccattct

SEQ ID NO: 4519 - DNA, 93 bp, Homo sapiens
  chr12:3068955-3069048
  hyper
aaaactcctccctccgcgcgctccgctccgctccgctgggcgcaccggggccggtcggcgcggggtgggcttggccccgcggccccgccttca

SEQ ID NO: 4520 - DNA, 233 bp, Homo sapiens
  chr12:3069124-3069357
  hyper
cggccggaagagttggcgctcggggcggactccttggaactggcttagcgcacccatcccaccttcccgcaccctgggaccggtaaggctggggcgcggggacttggtaggactttgccggagggcaggagtctgcgcggtgcgtgcggagctccctcccgggacgagactgggaagagcgaggcacgtggaggcggcgcgactgaggctgctggaggcgaagcggctccagg

SEQ ID NO: 4521 - DNA, 60 bp, Homo sapiens
  chr12:3069388-3069448
  hyper
tgggggaaagggaggccggtgtggaaaggaccggagaggcagaaccgagagcatcggcaa

SEQ ID NO: 4522 - DNA, 31 bp, Homo sapiens
  chr12:3129486-3129517
  hyper
tgttctggaagcctctcggtcctgcagggcc

SEQ ID NO: 4523 - DNA, 75 bp, Homo sapiens
  chr12:3129530-3129605
  hyper
agaatccagtcttgctcggcggttccatgcagagtgctgagtggcccgagttgtaccaggcgagcccctccccac

SEQ ID NO: 4524 - DNA, 65 bp, Homo sapiens
  chr12:3186011-3186076
  hyper
cgcgctgtcagcatctcgcacagtccgcccgaaacaccagggaaggggttcgtaggtgtgggggt

SEQ ID NO: 4525 - DNA, 31 bp, Homo sapiens
  chr12:3186086-3186117
  hyper
ggccaggcagcctggcgcgagggagagagcc

SEQ ID NO: 4526 - DNA, 40 bp, Homo sapiens
  chr12:3186500-3186540
  hyper
ccccgccccgcaggctcgccattcccgggcaggccccgcc

SEQ ID NO: 4527 - DNA, 268 bp, Homo sapiens
  chr12:3186576-3186844
  hyper
cggagcgcgagcagagcggagacccccaggtcctgcgggcgcggtgagtgcggcccgggcggcgggcggcgaggcgggtctcgagagcgtgcggagtcgcgcggccttgagccggcgccgggcgggctgggcacccccaggccgagacccgagaagggggagcggccgggggcgcccacgggaggcagtgtgggcagggcggcggtgggacgagaggacgaggaacagagtaggcgccgtgcgggaagcgggccgggaaggggagggt

SEQ ID NO: 4528 - DNA, 71 bp, Homo sapiens
  chr12:3186910-3186981
  hyper
cagaaagggagtaacccggggccggcaagggtttccgactgtgtgaccccgtgcaccgcttgggacagtcc

SEQ ID NO: 4529 - DNA, 31 bp, Homo sapiens
  chr12:3186998-3187029
  hyper
agggccagggggccttcgggcagggctggga

SEQ ID NO: 4530 - DNA, 31 bp, Homo sapiens
  chr12:3474950-3474981
  hyper
agaaggcggactcaggcgtgtggttaaggac

SEQ ID NO: 4531 - DNA, 31 bp, Homo sapiens
  chr12:4377793-4377824
  hyper
aggggaaatgaaggtgcgtgggctcactctg

SEQ ID NO: 4532 - DNA, 69 bp, Homo sapiens
  chr12:4377855-4377924
  hyper
agattctgcatgagcacggatgccacgagggtatccagcgagtgggaagggagtcgccctacatgtttt

SEQ ID NO: 4533 - DNA, 31 bp, Homo sapiens
  chr12:4378029-4378060
  hyper
tacatgtaatagccatcgtattaaccaaccc

SEQ ID NO: 4534 - DNA, 70 bp, Homo sapiens
  chr12:4378070-4378140
  hyper
gagatggtgaatggggcgggggagcagggaggaatatgtcgcgcatgaaaaactccgggtgtaaaagtca

SEQ ID NO: 4535 - DNA, 54 bp, Homo sapiens
  chr12:4378141-4378195
  hyper
tgcagaactcactccccgaggaaccgaaaaagacattcacgactctcaagtgga

SEQ ID NO: 4536 - DNA, 80 bp, Homo sapiens
  chr12:4378201-4378281
  hyper
atagaaagtcaagtggcgggggtcgcgaccagtgatcgggatttcagtctgatctcagtacccagcggaacaggaccata

SEQ ID NO: 4537 - DNA, 49 bp, Homo sapiens
  chr12:4378287-4378336
  hyper
agaaatgagctttttccggagcaaagagcggccccgatttcaaagtaga

SEQ ID NO: 4538 - DNA, 191 bp, Homo sapiens
  chr12:4378350-4378541
  hyper
tgggggtggaagatggcgaggggcggggggcggggagggaggcgggtcgcggcgctggctccggggtccgcggcacggcctcctctgccgcgctgcccagggcccggaccctgcccggcgctgcgcccaccgcgagggtgccagacccgccgcgccgccgccgcgctctcccagccgcggccccctccccc

SEQ ID NO: 4539 - DNA, 211 bp, Homo sapiens
  chr12:4378560-4378771
  hyper
ccagccccttcccccacgtgtggatgacgtcaaaattccgcgaaaaagccgcgtggtggctccccgagcggaggcgcgattccgccgcccagcggccccctcccgggggcgcctggagggggagaagggcggaggcggccggttccttctcctcccgggaggcaggaccccccgacgccgaccgccggacgccccccgccccaaagcttat

SEQ ID NO: 4540 - DNA, 44 bp, Homo sapiens
  chr12:4378801-4378845
  hyper
tttccagagctattttcggccgcgtgaggcgtgtcctaagctga

SEQ ID NO: 4541 - DNA, 56 bp, Homo sapiens
  chr12:4378853-4378909
  hyper
ggaagagggggaagttcgggtcttttaattttttttttttccgaagggaggggagt

SEQ ID NO: 4542 - DNA, 304 bp, Homo sapiens
  chr12:4378915-4379219
  hyper
ctaggtgggtgacagacggcaggcgctcgccttcttaactcacgcctgtcgcatctgccgcctcagtaatccagccccgtccaagccgaaattcgccgaagggagtgcggatgcacaggcctggcggactctgcccccctccagaacgcagcggcccagcgccccggcgggcgcggctgcgaccagagggtcccggaagcgagtgaacacctgcaatcgcactgcccgtccccacccaccctgctcccccgtgctctccgcttcccgacgttttcctcttctccttgtccgcatttttctactt

SEQ ID NO: 4543 - DNA, 99 bp, Homo sapiens
  chr12:4379250-4379349
  hyper
ctcctatgtgtcccctcggatttatgtgtcccctcgcattttgccagtcgggttttcggttttgattgaccgtccatccctccacggagaaacacaaac

SEQ ID NO: 4544 - DNA, 31 bp, Homo sapiens
  chr12:4379356-4379387
  hyper
cactctttgggggagccgaggggaaggcagt

SEQ ID NO: 4545 - DNA, 111 bp, Homo sapiens
  chr12:4379406-4379517
  hyper
gaactcagtcactacccgctccccacctggcctaggcgcccctgcgcggagaaggcgggactcgaactcgcgctgctcccgggccttgagccgaccgcggaatcacctggc

SEQ ID NO: 4546 - DNA, 35 bp, Homo sapiens
  chr12:4379700-4379735
  hyper
agtccaataaaactggcgttcgctaaagtttatca

SEQ ID NO: 4547 - DNA, 31 bp, Homo sapiens
  chr12:4379759-4379790
  hyper
tatgtatttttttttccgtgaagggtgaaaa

SEQ ID NO: 4548 - DNA, 34 bp, Homo sapiens
  chr12:4379808-4379842
  hyper
acaatctaccccctcccgccgccccccacccccg

SEQ ID NO: 4549 - DNA, 47 bp, Homo sapiens
  chr12:4379873-4379920
  hyper
agagcacaggctcttgcgctttttcttgaaaccgaagtctacactga

SEQ ID NO: 4550 - DNA, 86 bp, Homo sapiens
  chr12:4380199-4380285
  hyper
ggggaacttcaagaggcgagcctgccacgcgggaagcgcccgaacttgcgggtctccatgaatgcagagggcgccgggaagggggg

SEQ ID NO: 4551 - DNA, 46 bp, Homo sapiens
  chr12:4380397-4380443
  hyper
gccctcggctcactcccgagacgtgaggactcgccacccaggcatt

SEQ ID NO: 4552 - DNA, 138 bp, Homo sapiens
  chr12:4380462-4380600
  hyper
ccccgggacgaccacccgcttcttcctcgcccccgctgcccccacttcgggagacccagagctctggatgcctttccccggagaagggggggtgtgcggagtcggggtggaagagaccttgctcgcagagctatatca

SEQ ID NO: 4553 - DNA, 55 bp, Homo sapiens
  chr12:4380609-4380664
  hyper
cagaggctgggagccccggcggcctctgtcccttgcctgtcgggttagatttata

SEQ ID NO: 4554 - DNA, 31 bp, Homo sapiens
  chr12:4380692-4380723
  hyper
ttctctcgcctctccccgctgcaactttctt

SEQ ID NO: 4555 - DNA, 54 bp, Homo sapiens
  chr12:4380787-4380841
  hyper
agtgaatgtccttatccggggtgactcaaaagcttaagtcgggaagcccaacgt

SEQ ID NO: 4556 - DNA, 81 bp, Homo sapiens
  chr12:4380849-4380930
  hyper
ccaataggtgattgttcggggccgactgtgtgcgggtgtacacggtattcggcccgggtgtcatccgcggcgctggactgt

SEQ ID NO: 4557 - DNA, 82 bp, Homo sapiens
  chr12:4381418-4381500
  hyper
gcacctctagtttattcgctcccctcctccgccttgcagggaacctagtgtacggctcacccagcccgcgccccaccccgcc

SEQ ID NO: 4558 - DNA, 87 bp, Homo sapiens
  chr12:4381924-4382011
  hyper
ggggtggtggtgtttgcgcagggggagcgagggggagccggacctaatccctcactcgccccctccccctcccgggccatttcctag

SEQ ID NO: 4559 - DNA, 31 bp, Homo sapiens
  chr12:4382204-4382235
  hyper
cacgatggtttctgctcgaggatcacattct

SEQ ID NO: 4560 - DNA, 37 bp, Homo sapiens
  chr12:4382899-4382936
  hyper
ctgcccagccagcttgcgtcaccgcttcagagcggag

SEQ ID NO: 4561 - DNA, 49 bp, Homo sapiens
  chr12:4382995-4383044
  hyper
gccccgaggctctgctcgcccaccacccaatcctcgcctcccttctgct

SEQ ID NO: 4562 - DNA, 98 bp, Homo sapiens
  chr12:4383288-4383386
  hyper
agaacctgctcaccatcgaggagcgctaccttccgcagtgctcctacttcaagtgcgtgcagaaggacatccaaccctacatgcgcagaatggtggcc

SEQ ID NO: 4563 - DNA, 86 bp, Homo sapiens
  chr12:4383391-4383477
  hyper
gatgctggaggtaggtcggggggtggcgctcgccaggagccaggacccctccggatgctcgggtccccggccggagccctaaacct

SEQ ID NO: 4564 - DNA, 85 bp, Homo sapiens
  chr12:4383478-4383563
  hyper
ggagagggcaatccccgcgccggcctcccggctcctgtgcgggagtttaccgcgcgccttctggcgagacgcgtggctttatttc

SEQ ID NO: 4565 - DNA, 68 bp, Homo sapiens
  chr12:4383602-4383670
  hyper
gaaaatctgggagaagcgaggctgtcctgggcgggggtaggggagcatcccgcgcgcgtgttcctgca

SEQ ID NO: 4566 - DNA, 31 bp, Homo sapiens
  chr12:4383890-4383921
  hyper
gggagaaggagagaaacggggaattcgggag

SEQ ID NO: 4567 - DNA, 58 bp, Homo sapiens
  chr12:4383929-4383987
  hyper
gtcccattgaagaaacgcgtgtttcaggggaacccaaaagaaccgcttcttgcccctc

SEQ ID NO: 4568 - DNA, 122 bp, Homo sapiens
  chr12:4384411-4384533
  hyper
ccttcaagtttcctcccgggatccaaagccccaggggtcggaatacagacctttctggcacccgaaacctctgtttcgggaagcctggctcttctttggggttttcacgccaaaagggcttt

SEQ ID NO: 4569 - DNA, 48 bp, Homo sapiens
  chr12:5540931-5540979
  hyper
aacatgtaacctgttacgatacatttaacgtttcgttttttcctggat

SEQ ID NO: 4570 - DNA, 31 bp, Homo sapiens
  chr12:6189830-6189861
  hyper
gaaaggcacagctgcccgctgagaggctgtt

SEQ ID NO: 4571 - DNA, 132 bp, Homo sapiens
  chr12:6309397-6309529
  hyper
gggcgggggcggggggcggggggggtgcggcccgggcggggccggtggggcgggaggcgtggccggcggggggagtgggggcggcttttcccggcacatgcgcaccgcagcgggtcgcgcgccctaaggagt

SEQ ID NO: 4572 - DNA, 95 bp, Homo sapiens
  chr12:6309534-6309629
  hyper
tttttaaaagtgcagccggagaccagcctacagccgcctgcatctgtatccagcgccaggtcccgccagtcccagctgcgcgcgccccccagtcc

SEQ ID NO: 4573 - DNA, 31 bp, Homo sapiens
  chr12:6309653-6309684
  hyper
ttagccctcaccatgccggtcaaaggaggca

SEQ ID NO: 4574 - DNA, 31 bp, Homo sapiens
  chr12:6309693-6309724
  hyper
tcaaatacctgctgttcggatttaacttcat

SEQ ID NO: 4575 - DNA, 310 bp, Homo sapiens
  chr12:6309725-6310035
  hyper
ttctgggtgagtgagcgcgactgccgcgcgctcctctcagggcccacctgttcgcgggccccggacactggccgcggccgcgagtgccggcagctggcactgcccgcaccgggcaggcaccgggcgggaagagagagcgccctgcggctgccagctggctccaaggccgggtccagagccgggcgggacggccgcgacgggcgcattcgggtgggggctcatcaccgcccagccggcgtggggagccgggccctcttgagatgaggcgtgcgggagggtcctgagcactttagctcgcctaggatttgag

SEQ ID NO: 4576 - DNA, 31 bp, Homo sapiens
  chr12:6310054-6310085
  hyper
ccagctcaagtccctccgagtgccagagagg

SEQ ID NO: 4577 - DNA, 77 bp, Homo sapiens
  chr12:6310144-6310221
  hyper
cagtatggcttgtgaccgggtggggtctcccaggtagtagggggcgccaggaagggagggtgcgggcacggcgagag

SEQ ID NO: 4578 - DNA, 42 bp, Homo sapiens
  chr12:6387949-6387991
  hyper
aggggcggagggggcgcggtaagcccacggagggctgactca

SEQ ID NO: 4579 - DNA, 64 bp, Homo sapiens
  chr12:6388070-6388134
  hyper
cgcagccggggtgccccgccccgccccgtccgcgccctcctcggagcgccgagctggctttgag

SEQ ID NO: 4580 - DNA, 35 bp, Homo sapiens
  chr12:6419603-6419638
  hyper
cgcctcgcgggggtctggcccggagtggagggcgc

SEQ ID NO: 4581 - DNA, 42 bp, Homo sapiens
  chr12:6419741-6419783
  hyper
ggtggctgcgtgagggcgggggctgctcggtccccagggccc

SEQ ID NO: 4582 - DNA, 31 bp, Homo sapiens
  chr12:6493330-6493361
  hyper
cccacttcctgagctccgccatgggagccct

SEQ ID NO: 4583 - DNA, 31 bp, Homo sapiens
  chr12:6493590-6493621
  hyper
gggctcctggcagcatcgcagccccaggcgg

SEQ ID NO: 4584 - DNA, 9 bp, Homo sapiens
  chr12:6664370-6664379
  hyper
cgttgtgag

SEQ ID NO: 4585 - DNA, 113 bp, Homo sapiens
  chr12:6664409-6664522
  hyper
tcccaatccctacctccgcttgtactcgtcccgctcccgcttcactttggccagcacgttgtagagagcgcggatctcgggcgtgatggtgtcgatctggacgcccaccccat

SEQ ID NO: 4586 - DNA, 31 bp, Homo sapiens
  chr12:8088825-8088856
  hyper
gtggagcctgaaagggcgacaagcccccagc

SEQ ID NO: 4587 - DNA, 31 bp, Homo sapiens
  chr12:8088886-8088917
  hyper
caatcttgtgatctctcggaattctgtgtta

SEQ ID NO: 4588 - DNA, 78 bp, Homo sapiens
  chr12:10875353-10875431
  hyper
gggtgggagatgtagcgcgagctgcccacacgtgctccgcggccggctgggcccgccccactacggcagcccctgccc

SEQ ID NO: 4589 - DNA, 245 bp, Homo sapiens
  chr12:10875432-10875677
  hyper
ccctggcctgactcaccgagaacttttttctccgcgtcttcgctgccggcggcggtggctaaagaggcggcggccgcggtgcccgtggctgcgggggccgcgtccccaccggggtttcctgcgacgtgggcggcgggcgccggggccgcggcctggggcgcaccgctgcccaccgggctcttgggcgcggggtcctggggagccgcggcggccgcctccgtcggagcctgcgggagggtggtggt

SEQ ID NO: 4590 - DNA, 35 bp, Homo sapiens
  chr12:10875678-10875713
  hyper
gtggtggtggtggcctcgcccgcctcactcatgcc

SEQ ID NO: 4591 - DNA, 69 bp, Homo sapiens
  chr12:10875714-10875783
  hyper
cctcctcctctgctctcgctcaggcgcctcggtggcggttggtcggcggttagcgcggctggtggtcgc

SEQ ID NO: 4592 - DNA, 153 bp, Homo sapiens
  chr12:10875800-10875953
  hyper
ctcggggaggccggggcggatctcgcggcgcaggcggcggcggccgaggtggggtcgcgcggcggaggcggctcgagcttcgtgctgcgcgctctctcttgggctcctcgctcgatcttactgccccaaaaatggccccgcacaagtttttct

SEQ ID NO: 4593 - DNA, 45 bp, Homo sapiens
  chr12:11801642-11801687
  hyper
atcaaccggccaatgacggtttcagagaagcggtcctggggaggg

SEQ ID NO: 4594 - DNA, 31 bp, Homo sapiens
  chr12:12419471-12419502
  hyper
tctctccccctccccacgaccaggcctctcc

SEQ ID NO: 4595 - DNA, 52 bp, Homo sapiens
  chr12:12419643-12419695
  hyper
aggaggctcctcaggacggcccccatcttcccttctcgcgttctcttctctc

SEQ ID NO: 4596 - DNA, 49 bp, Homo sapiens
  chr12:12420197-12420246
  hyper
cgcttcggccctccccgcggagggcgtgaggcggcgttgaacaacattg

SEQ ID NO: 4597 - DNA, 31 bp, Homo sapiens
  chr12:12848340-12848371
  hyper
ggccaggaggctccatcggaaggaggcagac

SEQ ID NO: 4598 - DNA, 49 bp, Homo sapiens
  chr12:12848389-12848438
  hyper
tacctttaagatgttgcggggccaaatccaatgccggtgcaggtgtccc

SEQ ID NO: 4599 - DNA, 35 bp, Homo sapiens
  chr12:13069192-13069227
  hyper
tctcctttgacctaaacgggcgatgatgaaataaa

SEQ ID NO: 4600 - DNA, 15 bp, Homo sapiens
  chr12:13069248-13069263
  hyper
cttgcattgtgagat

SEQ ID NO: 4601 - DNA, 15 bp, Homo sapiens
  chr12:13069316-13069331
  hyper
cggccatgccccatg

SEQ ID NO: 4602 - DNA, 127 bp, Homo sapiens
  chr12:13153040-13153167
  hyper
cccaacatgttgtagccgagacgctcccgacgcacgggaggacgtgaggtggcgggggcgacggagcaccacgggcagcgaccaccggcggcagggcggcagggcggcagggcggcagggcggcagg

SEQ ID NO: 4603 - DNA, 38 bp, Homo sapiens
  chr12:13153354-13153392
  hyper
gggcgggtcagtgatgcgaagggcgggcagcagggcag

SEQ ID NO: 4604 - DNA, 94 bp, Homo sapiens
  chr12:13154240-13154334
  hyper
ggggatctgggacaggcggggccccgaggccgagcctggcgctgcccagcggccggtgcaggcctcaagctgggccgggcggaggggaaccggc

SEQ ID NO: 4605 - DNA, 31 bp, Homo sapiens
  chr12:15941608-15941639
  hyper
aattcgagggggtaaacgggggtgggaccct

SEQ ID NO: 4606 - DNA, 77 bp, Homo sapiens
  chr12:15941666-15941743
  hyper
ccctccccatttgaggcgggttggcagagcagcgcacaaatcccaagtctaacgtaataagccgagatcgggatact

SEQ ID NO: 4607 - DNA, 113 bp, Homo sapiens
  chr12:15941833-15941946
  hyper
tccctgcccagcctcccggagccctgggcgcgggtctgcacgggccccacagcttgcccggacccggcgagcggacgcctccggccgcagcgccctaccgcacctggctgcca

SEQ ID NO: 4608 - DNA, 391 bp, Homo sapiens
  chr12:15941963-15942354
  hyper
tcaaagtgaagggaggcggacgcggctcctggcaccgctccgattccagcacacaaaggcggatttttaaaatcgagaaagtcaaagccgccggaccccgggaccggcgcctttcgccaaggggctcttacctcggatccgccctcggggccacggctttccccggagacgccgcgagcccagacgaggtgggaggggaccgggagaaagccccccaatctgattcgcgcccagccagtcgtccgcgagccgcggagccgccttctgcacccagctaaagagcagcgatctccgaggcgagcacagcgccggcctcgcgccgggcgagaccgcctcgctagctgctgcctgtgaagtctggagccgcccgcccgctcgcagccagtgccaa

SEQ ID NO: 4609 - DNA, 184 bp, Homo sapiens
  chr12:15942443-15942627
  hyper
gctatccgggtcttgccggcagccgagccgcagagttctggtcgactccagcgcttgaggcgaagtggccggtgaggccgggtgggcgggagagggaccggaggaaaggagacggggcgctgcgccaagttatcaaggccgcgatcaaagtcggaccaaggcagcgagtcgacagcaggtttcc

SEQ ID NO: 4610 - DNA, 79 bp, Homo sapiens
  chr12:19282572-19282651
  hyper
gcggcggggcgggcaccgcccgagggggtagggcgcgcgcgggggcgcgccgggccggggaggcgcgctcgctccgcgc

SEQ ID NO: 4611 - DNA, 184 bp, Homo sapiens
  chr12:19282815-19282999
  hyper
tcatcaagtaaagagccggggacggcacgggggcccgcgggggcgggagggcaggaggcgggcggctggcgacacgggggagagcccgggtctgtgctcctgcagcccctcggctcgcccccgcgtcccctctcacgctccgtgtctgccccttctctcacccctgcagcgaggaggccaagag

SEQ ID NO: 4612 - DNA, 100 bp, Homo sapiens
  chr12:19283279-19283379
  hyper
catcagcacttggagacggcgccctcttcctgcgccttctccccccatcccagcctagacgaccctcgcgaccctagagtggcgacgctcccctccctga

SEQ ID NO: 4613 - DNA, 101 bp, Homo sapiens
  chr12:19283482-19283583
  hyper
cccctccctgcagccccggaccccgatcgcccgccgggataacgtaaccacatcctccccctcctcccaggagcgctgcctcctgccgtgcagcttcctcc

SEQ ID NO: 4614 - DNA, 138 bp, Homo sapiens
  chr12:19283697-19283835
  hyper
gcgttccctcctgccacgggaggagcagccggagccggaggaggcgttcgcagcctcagttgctggcgatccggatctaaagtccccgccagccgcacggaggttgcacagactgccaggaggcggtgggcgtgcgag

SEQ ID NO: 4615 - DNA, 31 bp, Homo sapiens
  chr12:19283883-19283914
  hyper
ggggaagcggctctctcgggtggctttggga

SEQ ID NO: 4616 - DNA, 31 bp, Homo sapiens
  chr12:19283942-19283973
  hyper
gctggaaaaggctcctcgtagtttctgtact

SEQ ID NO: 4617 - DNA, 31 bp, Homo sapiens
  chr12:19283992-19284023
  hyper
attctttgtttacattcgtgacttgtttgtc

SEQ ID NO: 4618 - DNA, 31 bp, Homo sapiens
  chr12:21810552-21810583
  hyper
ctcagagctaaaggccgcggaggacagatgt

SEQ ID NO: 4619 - DNA, 31 bp, Homo sapiens
  chr12:21810584-21810615
  hyper
cttcttcctccttcccgcgtctccccataca

SEQ ID NO: 4620 - DNA, 31 bp, Homo sapiens
  chr12:21810774-21810805
  hyper
aggagggaggagggggcggggccccacaacc

SEQ ID NO: 4621 - DNA, 122 bp, Homo sapiens
  chr12:25101374-25101496
  hyper
ttaacagtgaaaagatcgttctccctcccctctccacccgggtcaactcttccagccgctccctcctgcatcacgaacacacgctgcaggaaagcgcatttacagcccgggacatccccaga

SEQ ID NO: 4622 - DNA, 183 bp, Homo sapiens
  chr12:25101591-25101774
  hyper
agcagactttcacctccgttcccaaaagcgaatgtgaaaaagtccgagaaggcacgtcctgcgagtggaggttaaaccgaaatctgaacagaatgcacggtccccgcaaactacgattgataaagaagatactgagacgtttgcgggggatataagccatggttgtctcgccttcctcccctc

SEQ ID NO: 4623 - DNA, 67 bp, Homo sapiens
  chr12:25101785-25101852
  hyper
tgtttcttggagaaatcgccggttcgattcacgcacacatttttgtaaaacacggacaaaaccataa

SEQ ID NO: 4624 - DNA, 142 bp, Homo sapiens
  chr12:25101855-25101997
  hyper
gttaccttcattgttccgtcggccacgagggaagctcgagctgagcggagggcagatcccaagggtcgtagcccctggccgtgtggaccgggtctgcggctgcagagcgcggtcccggctgcagcaagacctggggcagtgc

SEQ ID NO: 4625 - DNA, 77 bp, Homo sapiens
  chr12:25102009-25102086
  hyper
cgagtacacgtggcgggctggattgcagaccggccctctcgcggcggagactcgcgacctagcggattgcatcagca

SEQ ID NO: 4626 - DNA, 112 bp, Homo sapiens
  chr12:25102098-25102210
  hyper
ggctgctcccccaggccgcccccagatggtggagtctctcccagcccgaagattcggagccagcgcccagacccgagcctcactcactgctcactcccggggtgcagggcag

SEQ ID NO: 4627 - DNA, 39 bp, Homo sapiens
  chr12:25404450-25404489
  hyper
ggggacttagggagaccgggcggacgatttcccacaccg

SEQ ID NO: 4628 - DNA, 47 bp, Homo sapiens
  chr12:25404551-25404598
  hyper
caggcccaaacaaacacgacagaccctttcaacgctaatcttctcgg

SEQ ID NO: 4629 - DNA, 31 bp, Homo sapiens
  chr12:26808252-26808283
  hyper
aaatggcagagaaggccgggggtggtggctc

SEQ ID NO: 4630 - DNA, 31 bp, Homo sapiens
  chr12:27485803-27485834
  hyper
agtagctgctgccggccgggctgcggggcgg

SEQ ID NO: 4631 - DNA, 61 bp, Homo sapiens
  chr12:33049526-33049587
  hyper
cgcggccgctgctccccgccagcttcagcttggcctcggagggcagcgccaggctggagct

SEQ ID NO: 4632 - DNA, 20 bp, Homo sapiens
  chr12:33049603-33049623
  hyper
atctgctggcccaggacggt

SEQ ID NO: 4633 - DNA, 12 bp, Homo sapiens
  chr12:33049652-33049664
  hyper
cgggggctgcca

SEQ ID NO: 4634 - DNA, 38 bp, Homo sapiens
  chr12:33049721-33049759
  hyper
gccacggagctgggggcgctggcgcgagccccgccccg

SEQ ID NO: 4635 - DNA, 31 bp, Homo sapiens
  chr12:33049889-33049920
  hyper
cagtcgggcccgggggcgggggcgggggcgg

SEQ ID NO: 4636 - DNA, 166 bp, Homo sapiens
  chr12:33049945-33050111
  hyper
cctggagacttgtacccgcccgcggggaggtggggagaggggcgcggttcgcctggggtcgcgcacgttgtcggagtcccagcggataccgcctgccggggccgcgccccgctctgcccacgccccgcgctggacaggatggatttccgctcgatgcagggagggg

SEQ ID NO: 4637 - DNA, 31 bp, Homo sapiens
  chr12:33050119-33050150
  hyper
caggcaggtgagccctcgagagtcactcctg

SEQ ID NO: 4638 - DNA, 89 bp, Homo sapiens
  chr12:33050156-33050245
  hyper
gactgaggcttgcctccgggatccccgagcgagtagtatgtctggttagtcaggctttgtcgcactgttggaaacgtttcctggttttc

SEQ ID NO: 4639 - DNA, 31 bp, Homo sapiens
  chr12:33050265-33050296
  hyper
gggctatttggtcaggcggaaagggcaatat

SEQ ID NO: 4640 - DNA, 31 bp, Homo sapiens
  chr12:33050304-33050335
  hyper
tgtgccaagaagataacgtgtgaaataaaag

SEQ ID NO: 4641 - DNA, 50 bp, Homo sapiens
  chr12:40618248-40618298
  hyper
aaaggggccatctgggcggtgtcctcttttcccagcgccctgatttctat

SEQ ID NO: 4642 - DNA, 31 bp, Homo sapiens
  chr12:47500470-47500501
  hyper
tgttttccctcctccccgcttctctatcttt

SEQ ID NO: 4643 - DNA, 92 bp, Homo sapiens
  chr12:48206705-48206797
  hyper
gtcacacctccttcagcgctggaatctggggggcgaggcctgcgctcagcccctcgcccggtgggggtggggtgctgcgccagcacctcctc

SEQ ID NO: 4644 - DNA, 31 bp, Homo sapiens
  chr12:48395456-48395487
  hyper
agtgactctgtggctgcggctctggacacgg

SEQ ID NO: 4645 - DNA, 36 bp, Homo sapiens
  chr12:48576834-48576870
  hyper
agtcccatccttcccccgctccggtgatttctatag

SEQ ID NO: 4646 - DNA, 76 bp, Homo sapiens
  chr12:48576883-48576959
  hyper
ttactgcagaaacctccgtagcgccctcctcctgcctctgcaccgtcaggcccggtgggtccggctccagagcgcc

SEQ ID NO: 4647 - DNA, 80 bp, Homo sapiens
  chr12:48576996-48577076
  hyper
gcctctctaccctctccgctttcctgcgcatcgctggaggacagggaggcaggactcgactttagcgccatcctctgaga

SEQ ID NO: 4648 - DNA, 72 bp, Homo sapiens
  chr12:48577359-48577431
  hyper
cacgtcatttacgtgccgtgcgtcgccttggaaacagaggagcatccgcgacacccccgggagacccacccc

SEQ ID NO: 4649 - DNA, 186 bp, Homo sapiens
  chr12:48577434-48577620
  hyper
tgctgctgccacactcgcgggcgctgcccggtaatggcctgggggagtcccgagtccgacgcgccgctggcctcagcctggacgcggacccctccgcgagcgcgtctgtgacccacggaaccggcaggcgctctctgcttgtggcgcccagagggcggcgctgacacgggcgcgatccgggaggcg

SEQ ID NO: 4650 - DNA, 70 bp, Homo sapiens
  chr12:49182446-49182516
  hyper
ggagggaggcaggcggcgggcgacgggggtggcgagcgccggacctaggagtcctcgatcccactgcctc

SEQ ID NO: 4651 - DNA, 54 bp, Homo sapiens
  chr12:49182531-49182585
  hyper
ccaaccccaactccctcgggcaacactgccgagacgacccgtccaaggcttcgg

SEQ ID NO: 4652 - DNA, 56 bp, Homo sapiens
  chr12:49182603-49182659
  hyper
cttgtcgagagccgctcgggtgcgttccaatcctggcgcaccgggagcccgagcgg

SEQ ID NO: 4653 - DNA, 94 bp, Homo sapiens
  chr12:49182688-49182782
  hyper
ctgccggcccggctccgcgcctgccctgggcccccgccccgccgcccccgcgggctccggccggccggccggccgtcccgcggtcctccgagcc

SEQ ID NO: 4654 - DNA, 51 bp, Homo sapiens
  chr12:49183195-49183246
  hyper
tctcccgccctcaccccgggggtccccgagcgcgcccgcaaacccacccct

SEQ ID NO: 4655 - DNA, 31 bp, Homo sapiens
  chr12:49183299-49183330
  hyper
gtcccaggggttgggccggcgccccgcgccc

SEQ ID NO: 4656 - DNA, 59 bp, Homo sapiens
  chr12:49297957-49298016
  hyper
ggggatctctcctgttcgagggctgagatctccggtcccacaaccgcccacaaccaggg

SEQ ID NO: 4657 - DNA, 60 bp, Homo sapiens
  chr12:49351295-49351355
  hyper
atacttcccacctccccgatcgcgcgatagctgcgcggtagctagcggcagttctcgcga

SEQ ID NO: 4658 - DNA, 95 bp, Homo sapiens
  chr12:49371750-49371845
  hyper
cggttaagcatctccccggagtcgctgcccagaaccacagctttccttccgacactcaggatgggggagagaggggacgtcggaggggcccgggg

SEQ ID NO: 4659 - DNA, 31 bp, Homo sapiens
  chr12:49374714-49374745
  hyper
aataagcctgagaggccgagactgactcgcc

SEQ ID NO: 4660 - DNA, 50 bp, Homo sapiens
  chr12:49391054-49391104
  hyper
ctcccgccctcagcttcgcccccgcggcccccgccgggctggtgtaaaag

SEQ ID NO: 4661 - DNA, 15 bp, Homo sapiens
  chr12:49391146-49391161
  hyper
cgtggccccttcacc

SEQ ID NO: 4662 - DNA, 31 bp, Homo sapiens
  chr12:49391190-49391221
  hyper
gggaatcccccaccacgcgtgtcaccccaga

SEQ ID NO: 4663 - DNA, 103 bp, Homo sapiens
  chr12:49736496-49736599
  hyper
gctttgaatgacactgcgcttctatgcccgctccgttcagtgaaatccaaccaatccgcatccgctcaaaaaaggctccaagtcctggcgaacccgaggggag

SEQ ID NO: 4664 - DNA, 49 bp, Homo sapiens
  chr12:49761540-49761589
  hyper
cctggggtctgtggggcgggtgaaacacccgcgtcggagttggggagtt

SEQ ID NO: 4665 - DNA, 31 bp, Homo sapiens
  chr12:49761771-49761802
  hyper
cgaggtccttagcattcgggggcaataatga

SEQ ID NO: 4666 - DNA, 31 bp, Homo sapiens
  chr12:49761811-49761842
  hyper
ataagggagagaagggcgttcttggaattga

SEQ ID NO: 4667 - DNA, 31 bp, Homo sapiens
  chr12:50202841-50202872
  hyper
ttcaggcagccagggccgaggaaggaggaaa

SEQ ID NO: 4668 - DNA, 61 bp, Homo sapiens
  chr12:50202885-50202946
  hyper
ctctgggtaacctgggcgaccaccatctcttcagccaagtcagtcacggagggccccagct

SEQ ID NO: 4669 - DNA, 28 bp, Homo sapiens
  chr12:50297973-50298001
  hyper
gtgaaaccagagccgggcatcagggcct

SEQ ID NO: 4670 - DNA, 31 bp, Homo sapiens
  chr12:50298024-50298055
  hyper
tctgcagctccagctgcgcctctgccttttc

SEQ ID NO: 4671 - DNA, 39 bp, Homo sapiens
  chr12:50339387-50339426
  hyper
tgtgacccacttttaccgacctttcggggagagtagagg

SEQ ID NO: 4672 - DNA, 173 bp, Homo sapiens
  chr12:50339448-50339621
  hyper
caggaaacacatctcacgtcaactgtcagacagcgctgctccgaatcccatcacagtgctccagcagggggcgtcctcaccggccgcggccacagccacggctcaacccggcctagctcccagacaccctccttccaccgcctgttttccaccgtccccgcctgctctttcaa

SEQ ID NO: 4673 - DNA, 31 bp, Homo sapiens
  chr12:50677033-50677064
  hyper
agaagtgaggaaagaacggaggatcagcgtc

SEQ ID NO: 4674 - DNA, 43 bp, Homo sapiens
  chr12:50677370-50677413
  hyper
gcggcctcgggctgagcgtgcgcgccaccggctacgtgcccag

SEQ ID NO: 4675 - DNA, 38 bp, Homo sapiens
  chr12:52345763-52345801
  hyper
ccccagtcagcttccccgatctccgaggcgcagccgcc

SEQ ID NO: 4676 - DNA, 31 bp, Homo sapiens
  chr12:53272442-53272473
  hyper
tgtctgtacctgtctgcgcctatgcacatac

SEQ ID NO: 4677 - DNA, 156 bp, Homo sapiens
  chr12:53342669-53342825
  hyper
aacaacacctgctgtccgtgtccatgcccggttggccaccccgtttctggggggtgagcggggcttggcagggctgcgcggagggcgcgggggtggggcccggggcggagcggcccggggcggagggcgcgggctccgagccgtccacctgtggct

SEQ ID NO: 4678 - DNA, 67 bp, Homo sapiens
  chr12:53607266-53607333
  hyper
ggcgcccccgcacctccgcagatgaggcagatggcgctgagcagccctgtctcggtgtcatccatct

SEQ ID NO: 4679 - DNA, 31 bp, Homo sapiens
  chr12:54120887-54120918
  hyper
acgtcttgcctgggagcgaataagcagattt

SEQ ID NO: 4680 - DNA, 31 bp, Homo sapiens
  chr12:54132551-54132582
  hyper
cctaggcaggtttccccggccaccctcttcc

SEQ ID NO: 4681 - DNA, 31 bp, Homo sapiens
  chr12:54150999-54151030
  hyper
gacgtgctgtctgtctcgggctcagcccggt

SEQ ID NO: 4682 - DNA, 31 bp, Homo sapiens
  chr12:54338495-54338526
  hyper
tggatgtttttgtattcgttttgctttttta

SEQ ID NO: 4683 - DNA, 73 bp, Homo sapiens
  chr12:54338528-54338601
  hyper
cattgcattaaaatatcgtcttgattactgagtttttggcgccccctcccttaaacttcgagcccagtggcct

SEQ ID NO: 4684 - DNA, 31 bp, Homo sapiens
  chr12:54338703-54338734
  hyper
tgtgcctaggcagcctcgggtcctctatctc

SEQ ID NO: 4685 - DNA, 31 bp, Homo sapiens
  chr12:54354881-54354912
  hyper
cagcctttggtccgagcggccgccctcctgc

SEQ ID NO: 4686 - DNA, 15 bp, Homo sapiens
  chr12:54384649-54384664
  hyper
ggtgtccccaggtgt

SEQ ID NO: 4687 - DNA, 126 bp, Homo sapiens
  chr12:54399540-54399666
  hyper
gaggactttagggtgcgcgccgcgggcaagccgtcgtgggagcctcggagcgtgcatccgcgttcgcggagatgttccaagcccagaaatgcgcctgaatggggggagatcgcggcagttgctttg

SEQ ID NO: 4688 - DNA, 31 bp, Homo sapiens
  chr12:54402986-54403017
  hyper
ggggggaggggagtttcgggggtactgggcg

SEQ ID NO: 4689 - DNA, 31 bp, Homo sapiens
  chr12:54446878-54446909
  hyper
gggtagcaggggaaggcgagacttctgaact

SEQ ID NO: 4690 - DNA, 31 bp, Homo sapiens
  chr12:54446927-54446958
  hyper
tcctgtctctcttcagcgggggctcaacccc

SEQ ID NO: 4691 - DNA, 31 bp, Homo sapiens
  chr12:54446959-54446990
  hyper
agacctccagaaatgacgtcagaatcatttg

SEQ ID NO: 4692 - DNA, 81 bp, Homo sapiens
  chr12:54812068-54812149
  hyper
ccagtgccagggtccccgcactcgcccccagttctcggatcccctcgcctgaacagagattgggggcggagggaggagtag

SEQ ID NO: 4693 - DNA, 31 bp, Homo sapiens
  chr12:56121857-56121888
  hyper
ccaggatggccattctcggtggaaacaagcc

SEQ ID NO: 4694 - DNA, 42 bp, Homo sapiens
  chr12:56390555-56390597
  hyper
tatcattcctggaatacgagaactaagcgattgactttgctt

SEQ ID NO: 4695 - DNA, 31 bp, Homo sapiens
  chr12:56390676-56390707
  hyper
cacagccggggaaaaccggactggatcccga

SEQ ID NO: 4696 - DNA, 31 bp, Homo sapiens
  chr12:56472731-56472762
  hyper
aaggctcaactgttttcgaagtcttcaggct

SEQ ID NO: 4697 - DNA, 43 bp, Homo sapiens
  chr12:56472776-56472819
  hyper
aaacaactaggctctccgggcgagatcccgaataccagtttaa

SEQ ID NO: 4698 - DNA, 40 bp, Homo sapiens
  chr12:56521402-56521442
  hyper
ggtaggggattagggacgggatagacggggttagttttca

SEQ ID NO: 4699 - DNA, 35 bp, Homo sapiens
  chr12:56521445-56521480
  hyper
actttcattccaaatacgatcgtatcctttccttt

SEQ ID NO: 4700 - DNA, 31 bp, Homo sapiens
  chr12:56958137-56958168
  hyper
tgagctcatgtccctacgcttttttttcttt

SEQ ID NO: 4701 - DNA, 31 bp, Homo sapiens
  chr12:57521846-57521877
  hyper
ccagaccactgagtcccggacgcccccggag

SEQ ID NO: 4702 - DNA, 31 bp, Homo sapiens
  chr12:57619210-57619241
  hyper
ggcttgggggctccctcgggggcgcactggc

SEQ ID NO: 4703 - DNA, 31 bp, Homo sapiens
  chr12:57998765-57998796
  hyper
ctccccgctccgtgcccggccgatcatcttt

SEQ ID NO: 4704 - DNA, 90 bp, Homo sapiens
  chr12:58166514-58166604
  hyper
accccggcccagatcccgaatctgagtcggaatcggtgttcccgcgggaggtcgggctctttgcagactcttactcggagaagagccagt

SEQ ID NO: 4705 - DNA, 191 bp, Homo sapiens
  chr12:58166618-58166809
  hyper
catgtgctgaccatcacgcagaactttgggtcccgcctcggggtggcggcgcgcgtgtgggacgcggtgaggaatgggctgcgccgggtgagggtccgtgggaggtccagatcccggactccgcctctcccatatggagccatcctcacgactgtctttttctctgtcttttctcccgtaggccctgagcc

SEQ ID NO: 4706 - DNA, 31 bp, Homo sapiens
  chr12:59313599-59313630
  hyper
gagggaaactgaggcccggacagttcttttt

SEQ ID NO: 4707 - DNA, 42 bp, Homo sapiens
  chr12:59314238-59314280
  hyper
gttgcagcttgagcagcgtcggctcgccgaagccccttcttg

SEQ ID NO: 4708 - DNA, 158 bp, Homo sapiens
  chr12:64237614-64237772
  hyper
ggcacaggccggagcgcggtccgctcccgcgagcctggccccgcctggcggagccccgaggagccaccgcccgcagatcgctagccgggcgcccgcgaggcgcgagccgtgtgcgcaccctcaactttgctgccgccgggggcgcggctcccgcgtgc

SEQ ID NO: 4709 - DNA, 52 bp, Homo sapiens
  chr12:64237892-64237944
  hyper
ctggagacctaaactccgccggggctgtgcccagggcgcgtctgagcgtcgc

SEQ ID NO: 4710 - DNA, 111 bp, Homo sapiens
  chr12:64238194-64238305
  hyper
gtctcgaacaatggtgcggagcgccggcgcgagccccgcgcccgcccagcggccgtagaggaagtggccgggctcccggcgaggtgggcagggagacgtcccccgccactc

SEQ ID NO: 4711 - DNA, 31 bp, Homo sapiens
  chr12:64799098-64799129
  hyper
cctgtaaccagaaaaacgagtactttttgaa

SEQ ID NO: 4712 - DNA, 79 bp, Homo sapiens
  chr12:64799131-64799210
  hyper
tgctaattagttgtggcgggcgggggttgggggagagttacgttttattaaaccgacttgtcagcgtggtgttaaaagg

SEQ ID NO: 4713 - DNA, 31 bp, Homo sapiens
  chr12:64845174-64845205
  hyper
ggcctgttgtgctgtccgtgggcagaaggga

SEQ ID NO: 4714 - DNA, 52 bp, Homo sapiens
  chr12:64845222-64845274
  hyper
tccttattgggaatagcggcttgagattttgactgcacgaatattgcaggac

SEQ ID NO: 4715 - DNA, 50 bp, Homo sapiens
  chr12:64845320-64845370
  hyper
gttagatactccaatacggccgttttccaaaataccgagagggaattaaa

SEQ ID NO: 4716 - DNA, 36 bp, Homo sapiens
  chr12:64845434-64845470
  hyper
aaagtctgaattactgcgagacgataatctggctcc

SEQ ID NO: 4717 - DNA, 63 bp, Homo sapiens
  chr12:64845507-64845570
  hyper
tccctcccagctctgccggccgtctgtgcctgccccccacgtgtcccacgttctgcacacctg

SEQ ID NO: 4718 - DNA, 72 bp, Homo sapiens
  chr12:65174375-65174447
  hyper
gtggcagtctccttctcgcccggtccggagcggaggggagcggctcaggtgccggctcgggggaggcccggg

SEQ ID NO: 4719 - DNA, 31 bp, Homo sapiens
  chr12:65219732-65219763
  hyper
cccaaagggtgggatgcggcactgcctttcc

SEQ ID NO: 4720 - DNA, 31 bp, Homo sapiens
  chr12:65220111-65220142
  hyper
actatgagaaggcaatcggcatgatgcccag

SEQ ID NO: 4721 - DNA, 31 bp, Homo sapiens
  chr12:65220343-65220374
  hyper
gggctggaaacactcccgtggccgttgttat

SEQ ID NO: 4722 - DNA, 62 bp, Homo sapiens
  chr12:66217796-66217858
  hyper
ggtaaaggccaagccccgaaacgtggctccgggacagtcacgttcccgcgccttcccaggac

SEQ ID NO: 4723 - DNA, 31 bp, Homo sapiens
  chr12:66218712-66218743
  hyper
tctcttccttctccctcgcttccctcctcct

SEQ ID NO: 4724 - DNA, 55 bp, Homo sapiens
  chr12:66219296-66219351
  hyper
agcggcgcagaccccacgagtgcgccgcgcggccccggggcgccagcaaccctcc

SEQ ID NO: 4725 - DNA, 40 bp, Homo sapiens
  chr12:69241506-69241546
  hyper
acaggcgtgagccaccgcgcccagccgtatctcctttcaa

SEQ ID NO: 4726 - DNA, 87 bp, Homo sapiens
  chr12:69326967-69327054
  hyper
gccgggtgttatagcccggtcagagggcgggcgcgcccgggccccgcccccggacgtccctccggcccactccggagccgcgcgggt

SEQ ID NO: 4727 - DNA, 54 bp, Homo sapiens
  chr12:70761006-70761060
  hyper
gggagccccagggctccggtcttttcaggtgggtttacgcgcggcgaccagtgg

SEQ ID NO: 4728 - DNA, 31 bp, Homo sapiens
  chr12:71834658-71834689
  hyper
tttctttcttttttaacggcgtgattaaaat

SEQ ID NO: 4729 - DNA, 31 bp, Homo sapiens
  chr12:72234434-72234465
  hyper
aactgaagtgactcatcgaacactaatggtt

SEQ ID NO: 4730 - DNA, 96 bp, Homo sapiens
  chr12:75728067-75728163
  hyper
aataaaaatctatacacggaagctgcgtctaagaaacgaatatatagtgctttgcactcgactggcccattgtcagcatcccgcacttgttcttta

SEQ ID NO: 4731 - DNA, 31 bp, Homo sapiens
  chr12:75728194-75728225
  hyper
gtattacaatccagacgcgctctgcagatta

SEQ ID NO: 4732 - DNA, 31 bp, Homo sapiens
  chr12:75728264-75728295
  hyper
tccctccaccagagggcgactcagagctttc

SEQ ID NO: 4733 - DNA, 106 bp, Homo sapiens
  chr12:75728335-75728441
  hyper
ctgttcttccccacagcgacactgacaagttgatccagccgcgctgggctcgagcctgtgcggcaggatggagccaagggagagcgtggtgcgggggcgtggggaa

SEQ ID NO: 4734 - DNA, 31 bp, Homo sapiens
  chr12:75728472-75728503
  hyper
cagtcagggcatcctccgcatcctccacatc

SEQ ID NO: 4735 - DNA, 43 bp, Homo sapiens
  chr12:77272815-77272858
  hyper
ggtgccttttaaagagcgctcggtgggcgcggcctgtgtccgc

SEQ ID NO: 4736 - DNA, 62 bp, Homo sapiens
  chr12:77718708-77718770
  hyper
gcgggctgctaggtggcggcggcgcggggcggggaggcgcggcccggcggaggagggaagaa

SEQ ID NO: 4737 - DNA, 31 bp, Homo sapiens
  chr12:80083437-80083468
  hyper
cccaggaggaagacaccgggaggcagctgcc

SEQ ID NO: 4738 - DNA, 78 bp, Homo sapiens
  chr12:80084656-80084734
  hyper
aggagcttgtaggggacgaggcgtagggctgggatccggctcccaggtgtgccgaagctggcgcgcgctcttccgccg

SEQ ID NO: 4739 - DNA, 72 bp, Homo sapiens
  chr12:80084905-80084977
  hyper
gcgcggtgggaagggtcgtggccgctgacgccccgcccccggcgctcaggtgcgcggcgtcgcgtccggccc

SEQ ID NO: 4740 - DNA, 109 bp, Homo sapiens
  chr12:80084980-80085089
  hyper
gctgcagcctgccctgcgccagccgtcctctgccccgctcccgccgcagaccacagcgcgcccgccgcgctccgcccgcggcctgcgagttagacggcacattcctggg

SEQ ID NO: 4741 - DNA, 31 bp, Homo sapiens
  chr12:81471436-81471467
  hyper
tcctgcaggtcagaggcgatgccacctccac

SEQ ID NO: 4742 - DNA, 15 bp, Homo sapiens
  chr12:83080925-83080940
  hyper
agctggtcccagagc

SEQ ID NO: 4743 - DNA, 38 bp, Homo sapiens
  chr12:83080990-83081028
  hyper
cgagtcccactcctcacctaggacgccccaaactgcca

SEQ ID NO: 4744 - DNA, 192 bp, Homo sapiens
  chr12:83081030-83081222
  hyper
ggttagggtggggatcgcgacccgcgcgaaagaccagccctgcgcttccgccgggggacgcggagcccaaacgccgctcaccgcttgcgggcgccgggcatggggagtgtggtgtgagcccgcacccggggaggacgcaggagctgcggagacgggcgcgaggaggaggagaggagtcgtggattggaagga

SEQ ID NO: 4745 - DNA, 31 bp, Homo sapiens
  chr12:85673226-85673257
  hyper
cgcgtccacactccgccgcattccagagaaa

SEQ ID NO: 4746 - DNA, 50 bp, Homo sapiens
  chr12:88973444-88973494
  hyper
caaactaggcagacaccgccgagagccaagtttcccgggcaggcgggcag

SEQ ID NO: 4747 - DNA, 31 bp, Homo sapiens
  chr12:88973579-88973610
  hyper
tgcccggcgcccacctcggggctacacaaat

SEQ ID NO: 4748 - DNA, 31 bp, Homo sapiens
  chr12:88973625-88973656
  hyper
agctagtgagggtggcgcgtggggtgctgtt

SEQ ID NO: 4749 - DNA, 67 bp, Homo sapiens
  chr12:88973660-88973727
  hyper
aatctcctggaatccacgggaaaaccgtctcctatgcaaagacatgccttcccgtgataacttaaca

SEQ ID NO: 4750 - DNA, 47 bp, Homo sapiens
  chr12:88973744-88973791
  hyper
caatctttccaccagacgggaattacggtttccgactgacagctcaa

SEQ ID NO: 4751 - DNA, 69 bp, Homo sapiens
  chr12:88973850-88973919
  hyper
ttctccctggctcacccggctcggctcgggatcacacaccacgccggcctcccccgcatcctcttgtct

SEQ ID NO: 4752 - DNA, 31 bp, Homo sapiens
  chr12:88974648-88974679
  hyper
aggagtccgggaggttcggagcaaagaattc

SEQ ID NO: 4753 - DNA, 31 bp, Homo sapiens
  chr12:88974697-88974728
  hyper
aaataaagtttaattgcgatctgtagttagg

SEQ ID NO: 4754 - DNA, 31 bp, Homo sapiens
  chr12:89747141-89747172
  hyper
gccccaccaccaccatcgcctgctgggaggt

SEQ ID NO: 4755 - DNA, 31 bp, Homo sapiens
  chr12:89747207-89747238
  hyper
cttctgacgggggagccggtctggcggggct

SEQ ID NO: 4756 - DNA, 34 bp, Homo sapiens
  chr12:89747338-89747372
  hyper
gctcggcaggggggctcgacgattggttacagtt

SEQ ID NO: 4757 - DNA, 66 bp, Homo sapiens
  chr12:89747400-89747466
  hyper
cccagccctctcctgccgccgcctcctccctttgtccagcgccgggcactccggggagcaccagcc

SEQ ID NO: 4758 - DNA, 42 bp, Homo sapiens
  chr12:89747549-89747591
  hyper
cgggtgcggggctcagcgagggactcccgggtccatagagat

SEQ ID NO: 4759 - DNA, 56 bp, Homo sapiens
  chr12:90101464-90101520
  hyper
agcagcgcacagggtgcgagcactcccagcgctgcgagtcccgcagaaaactggtg

SEQ ID NO: 4760 - DNA, 31 bp, Homo sapiens
  chr12:91503092-91503123
  hyper
ggtgttcattgaccaccgaattagactactg

SEQ ID NO: 4761 - DNA, 37 bp, Homo sapiens
  chr12:94541896-94541933
  hyper
ctccacacctgtcagccgctctcgcagcagccctgtg

SEQ ID NO: 4762 - DNA, 169 bp, Homo sapiens
  chr12:94542775-94542944
  hyper
cgcgccccccgcgccccgcagcgccactgcccctgctcgcctatctgctggcactggcggctcccggccggggcgcggacgagcccgtgtggcggtcggagcaagccatcggagccatcgcggcgagccaggaggacggcgtgtttgtggcgagcggcagctgcctgga

SEQ ID NO: 4763 - DNA, 103 bp, Homo sapiens
  chr12:94542961-94543064
  hyper
tggagcacagcctctcgcgcctgtaccgggaccaagcgggcaactgcacagagccggtctcgctggcgccccccgcgcggccccggcccgggagcagcttcag

SEQ ID NO: 4764 - DNA, 416 bp, Homo sapiens
  chr12:94543068-94543484
  hyper
ctgctgctgccctaccgcgagggggcggccggcctcggggggctgctgctcaccggctggaccttcgaccggggcgcctgcgaggtgcggcccctgggcaacctgagccgcaactccctgcgcaacggcaccgaggtggtgtcgtgccacccgcagggctcgacggccggcgtggtgtaccgcgcgggccggaacaaccgctggtacctggcggtggccgccacctacgtgctgcctgagccggagacggcgagccgctgcaaccccgcggcatccgaccacgacacggccatcgcgctcaaggacacggaggggcgcagcctggccacgcaggagctggggcgcctcaagctgtgcgagggcgcgggcagcctgcacttcgtggacgcctttctctggaacggcagcatctactt

SEQ ID NO: 4765 - DNA, 144 bp, Homo sapiens
  chr12:94543491-94543635
  hyper
tacccctacaactacacgagcggcgctgccaccggctggcccagcatggcgcgcatcgcgcagagcaccgaggtgctgttccagggccaggcatccctcgactgcggccacggccaccccgacggccgccgcctgctcctctcc

SEQ ID NO: 4766 - DNA, 99 bp, Homo sapiens
  chr12:94543642-94543741
  hyper
tagtggaggccctggacgtctgggcgggagtgttcagcgcggccgctggagagggccaggagcggcgctcccccaccaccacggcgctctgcctcttca

SEQ ID NO: 4767 - DNA, 172 bp, Homo sapiens
  chr12:94543745-94543917
  hyper
gagtgagatccaggcgcgcgccaagagggtcagctgggacttcaagacggccgagagccactgcgtaagtcctgcccccggggcgccgcggagagcgctgctgccggggagccgccgccgccgccgaggcagaacgagctgggggcgagcggcggggcgggggtacagccgg

SEQ ID NO: 4768 - DNA, 77 bp, Homo sapiens
  chr12:94543936-94544013
  hyper
aggttcacaccgcgggcggccgtccgaaggctcctctcggacggtccccgagacctggagcacggcctgaggtcccc

SEQ ID NO: 4769 - DNA, 31 bp, Homo sapiens
  chr12:96883068-96883099
  hyper
tggtcgtcatcattatcgttattaagtggcc

SEQ ID NO: 4770 - DNA, 100 bp, Homo sapiens
  chr12:96883140-96883240
  hyper
ttttggctctaatattcgccagcgctctgctcagaacattctctgttcgcatttcatacagcggtgccagcgcacaaccaggcaacgccctcaggagcat

SEQ ID NO: 4771 - DNA, 327 bp, Homo sapiens
  chr12:96883251-96883578
  hyper
ggacctggttctttctcgctctgccctccaggggccgctgtgtttctcggaatgcgcgcgggatgcccggttgccacgagaccgtcgccaggcaaccgcgtgtacacatactccaggcgggccggggcgcgtcaatatggcggcgcagggctccccctcgagctctccgtcagacgactctaccacctcggggtctctgccagaactgccgccgacctccaccgcgacttcgaggtcgcccccagagtcgaaggggagctcccggagctcgctgcttcagtggacctgccccgaggactcattgcccctagccgtgttttatgggcc

SEQ ID NO: 4772 - DNA, 31 bp, Homo sapiens
  chr12:100967340-100967371
  hyper
cgagcgcccacgggtcgcgtgcttcccggca

SEQ ID NO: 4773 - DNA, 69 bp, Homo sapiens
  chr12:100967379-100967448
  hyper
gcggggcctcagaccacgcccccgccttatgattggtcccttcgaaacaggcggcggccagcggctact

SEQ ID NO: 4774 - DNA, 61 bp, Homo sapiens
  chr12:100967582-100967643
  hyper
tcttctcttttcctggcgaacttttacgcgctgtctcggggcctccgcgcctcagcctgag

SEQ ID NO: 4775 - DNA, 151 bp, Homo sapiens
  chr12:100967799-100967950
  hyper
cctgtccacccaagtgcggagagaggggcgacaggtgtgcggggcggttggggctgctggtgtgggcgagctcagctggggaggagggatccagccgctactcgccctgctttaaatccagagcggtatcagagcccgaaggtactgtggg

SEQ ID NO: 4776 - DNA, 31 bp, Homo sapiens
  chr12:100967961-100967992
  hyper
caccctcatccctaagcgcctggcacttaga

SEQ ID NO: 4777 - DNA, 31 bp, Homo sapiens
  chr12:104322902-104322933
  hyper
tacaaagctgcaatcccgttctcatgtgcag

SEQ ID NO: 4778 - DNA, 31 bp, Homo sapiens
  chr12:104322965-104322996
  hyper
tgcatcctcctgcactcgttaaactaagggt

SEQ ID NO: 4779 - DNA, 45 bp, Homo sapiens
  chr12:104323001-104323046
  hyper
ttttctgtgctagacccgcttttacgaccacgctctccacctgat

SEQ ID NO: 4780 - DNA, 129 bp, Homo sapiens
  chr12:104323047-104323176
  hyper
cacagaaagggttctacgaccgtcaggtcaccgccgcctttgtactttattggggagtcgaaggcctcagcgctgctcgcgatttccctaaggtggtcgggaaggtcccaaccacgttcttctgtaaac

SEQ ID NO: 4781 - DNA, 173 bp, Homo sapiens
  chr12:104323184-104323357
  hyper
gaaggcctggggattccggccgcggaaaggcacagaggaggtgaacgctccggctgcccaagtgacgcacttgtaggcggattcggaaactcgtgctcttgagccggaggcggagcccccagactcagaccgaccccccagaaccgggcggccttgcccgaggcatgaaggct

SEQ ID NO: 4782 - DNA, 31 bp, Homo sapiens
  chr12:104359126-104359157
  hyper
tatatccaaagtaatgcggagagtggtttat

SEQ ID NO: 4783 - DNA, 35 bp, Homo sapiens
  chr12:104609381-104609416
  hyper
tccaatttacctttagcgaccgttctttcctgtta

SEQ ID NO: 4784 - DNA, 54 bp, Homo sapiens
  chr12:104609619-104609673
  hyper
ccaacggagctgcagacgaaaggcaagaacggcgatggccgccgtaggtcaggt

SEQ ID NO: 4785 - DNA, 31 bp, Homo sapiens
  chr12:104850202-104850233
  hyper
cagccctctttaaccccgactcccaagctgg

SEQ ID NO: 4786 - DNA, 106 bp, Homo sapiens
  chr12:104850237-104850343
  hyper
tcctttgaaagaaaaacgaaaccgcccagttctgagcgtcggaaaatgggcactcgctccctgggggtttggggcaacttccccgctacgtcgcccagggatttta

SEQ ID NO: 4787 - DNA, 162 bp, Homo sapiens
  chr12:104850374-104850536
  hyper
ccttaattcttccctccgagacccagcccgctgcttgccacttccctctccaaacgctggcgggggtgggtggcagcaccgaggcgattttcttcgtctttttttcctccgggttttgtcatggaaacgctgacacaacctccagacggcggccgagcccgg

SEQ ID NO: 4788 - DNA, 204 bp, Homo sapiens
  chr12:104850577-104850781
  hyper
cgcacaccgcactccccgggcaacagctggacgcgaccatatcccgggtaggggcggggggagcgcgacgctccgccccggcgctagggtccctccctcctcccggctctccgcaggcgccctcccctcgccgggggccgcgagttgcatttggtaaaacccagccccggaatatatagatcgttggagcgcaatgaagtagcc

SEQ ID NO: 4789 - DNA, 286 bp, Homo sapiens
  chr12:104850787-104851073
  hyper
gagaagggagagggcccgtcggacagccacagcggccagcgcagcggcagcggcggcggcaccaccatcaccgctcgcaccccagccgcccggcccgcgaccaggcagcggcggccgccggcgggatcggaggaggcggcggagcggcgaggaggaggagcaggagcgcgcagccagcgggtccacgcatctcagcacttccagaccaactccggcaccttccacacccctgcccgggctgggggctccgagagcggccgcgaagcgactccgatcctccctctga

SEQ ID NO: 4790 - DNA, 137 bp, Homo sapiens
  chr12:104851077-104851214
  hyper
tgctcagctctgccccgcgcctcccgggctccggtccgcgcggcggggtccctgctcctgcgccccgggcgcgcttcccggacaccccggtccccgcagccaggacaaagccatgaagccagcgctgctggaagtga

SEQ ID NO: 4791 - DNA, 31 bp, Homo sapiens
  chr12:104851218-104851249
  hyper
gatgaacagaatctgccggatggtgctggcc

SEQ ID NO: 4792 - DNA, 85 bp, Homo sapiens
  chr12:104851300-104851385
  hyper
cacccaggtagggggcgcgttagcgtggttttgttggatattttcttctctctcgcgctctagctcgctccgcctgatttctgcc

SEQ ID NO: 4793 - DNA, 46 bp, Homo sapiens
  chr12:104851388-104851434
  hyper
tccaaccctacctctccgccttcggcctcttcggggctcctggctg

SEQ ID NO: 4794 - DNA, 75 bp, Homo sapiens
  chr12:104851447-104851522
  hyper
gctgcccagatctacccgggtcaccgcgtcgggatggggaggagaagggaaggtgtgcttcgccctcttcttcct

SEQ ID NO: 4795 - DNA, 31 bp, Homo sapiens
  chr12:104851541-104851572
  hyper
atgggaccaggaggggcggtagttttttttt

SEQ ID NO: 4796 - DNA, 313 bp, Homo sapiens
  chr12:104851694-104852007
  hyper
ccctccctgctgctgccgaggtcggaggatgaaagagttacccggagccggctgctctgcgcccgggcgagccgcctcttcctggttgccgggccgggggcgaagggtgtacgccccggcgaggttgcgagtccctgcagcaggctgggagcccgggactgggctcccacgtgtcccgggctccgcgcagagctgagcaggtgtggagagtggtcgggtgcccagcgttgcccctccaccacgcgccggccgtttgcccccggggtccgggtccgcagtgaccttgcggctggtgccccggggcctgctccag

SEQ ID NO: 4797 - DNA, 46 bp, Homo sapiens
  chr12:104852015-104852061
  hyper
cctgagctggaaactccgagctcctgggtcacgccttgaccactgc

SEQ ID NO: 4798 - DNA, 190 bp, Homo sapiens
  chr12:104852082-104852272
  hyper
caggtcctgggctgaccgtccgtttgcatcccccacttctgggatccgagcaacgggaatcccccgggcggcgtgggaatgaaccccattcctccggtcccttgtggctcaggcaaagttccacgtccgaaatctggactgggggagggacgaggctcgtcgcttcctaggggtgcgagggaaagtttgg

SEQ ID NO: 4799 - DNA, 95 bp, Homo sapiens
  chr12:104852274-104852369
  hyper
tctggagagggaggggcgccctcgagcgcggcggccgggggtgagcagctcggctgcgaagcccaacaggtagaacgttccgagaagccttccgg

SEQ ID NO: 4800 - DNA, 86 bp, Homo sapiens
  chr12:104852422-104852508
  hyper
cttagcagccccctgccgggccacgttggctcagaaatccattttctacgcctccgagttgcctttctcagcgtagtcacagcaat

SEQ ID NO: 4801 - DNA, 49 bp, Homo sapiens
  chr12:104852736-104852785
  hyper
acagcgcagggacagacggcccctttgccccactcggtctggagcagtt

SEQ ID NO: 4802 - DNA, 31 bp, Homo sapiens
  chr12:105110247-105110278
  hyper
ggcacattgccatgcacgtagtaagtacaga

SEQ ID NO: 4803 - DNA, 31 bp, Homo sapiens
  chr12:106532782-106532813
  hyper
cccctccccgggaggacgcgcagacggggcg

SEQ ID NO: 4804 - DNA, 31 bp, Homo sapiens
  chr12:106533275-106533306
  hyper
attttcttgtaggtgtcgccgcagcctggcg

SEQ ID NO: 4805 - DNA, 35 bp, Homo sapiens
  chr12:106533358-106533393
  hyper
actcacggaccttgcccgcccgaggctggcacccc

SEQ ID NO: 4806 - DNA, 181 bp, Homo sapiens
  chr12:106640991-106641172
  hyper
tgtctaggccagggcccgccaaggaggagcggccggctcccgcctccgggcctgggcaggcagcgctaggggccggtcgggaagcacgaaggagcccggccgtgggtccggaggccgcagtcgatggggacagttgcggggccgggggtacccaccttctgctcgacgccctgcaagccct

SEQ ID NO: 4807 - DNA, 59 bp, Homo sapiens
  chr12:106641197-106641256
  hyper
gaagtcctggtggctgcgccggacctgctggacctcctccaggacgtggtggacgcacc

SEQ ID NO: 4808 - DNA, 55 bp, Homo sapiens
  chr12:106641514-106641569
  hyper
ccggcggcggcttcttcgccacgtcatccgcgccgcccgacgggtgggcaccctt

SEQ ID NO: 4809 - DNA, 44 bp, Homo sapiens
  chr12:107167935-107167979
  hyper
cccagcatgcccttggcgggaattctttccggctggatgactac

SEQ ID NO: 4810 - DNA, 59 bp, Homo sapiens
  chr12:107167981-107168040
  hyper
atcccagcatgccattcggcacgccagtaaattagatggaagagcgggatagccccatt

SEQ ID NO: 4811 - DNA, 190 bp, Homo sapiens
  chr12:107168227-107168417
  hyper
gccttgggcctgactccgcctcggtccgctagccaggcctcgaccgagtcctgggccttgtcaggggcggccgtgaggcgccggttgctgggggagcggtgacgtcgcggggtgaaagttgaggggcggtgacgtcgggccggcccgggcggaggctggcgggttggaggcaggacggagggagggaaag

SEQ ID NO: 4812 - DNA, 126 bp, Homo sapiens
  chr12:107168560-107168686
  hyper
gcgaagcaggggctatcgagcgggtcctgagggattacagcgacaaggtaaagagtcctggccccgggcgtgcggtatcgcacccccgggccgccctccgtgcttgcacatcgcatccttccccac

SEQ ID NO: 4813 - DNA, 92 bp, Homo sapiens
  chr12:107168829-107168921
  hyper
ccagcagcttgacctccggtcctcctctcaagcgtgcaagtcacacccccggaatccgtagatgtgcatctgtgccccgtgccccactcctg

SEQ ID NO: 4814 - DNA, 45 bp, Homo sapiens
  chr12:107486363-107486408
  hyper
actcactgatgaagaccgagtgtttcaggtcgtcagtactctttg

SEQ ID NO: 4815 - DNA, 139 bp, Homo sapiens
  chr12:107486793-107486932
  hyper
tcatagccgacaccttcgcttccaagagaattgcctcacccggggcgtgaggaaagggcggcagagggggaacaggaaaaaatgactccgaggaggggaccggagaaggcgggggcgccggaggcgcagtggaaagatg

SEQ ID NO: 4816 - DNA, 90 bp, Homo sapiens
  chr12:107486933-107487023
  hyper
atggaggttgcctagtcggcggagtccgggtgtgacgccctttaggagcccgcgcccgccgcaaccgcctggaggcgacgcataacttcg

SEQ ID NO: 4817 - DNA, 63 bp, Homo sapiens
  chr12:107487048-107487111
  hyper
gcaagttccaggagctcgagccgccacgacggcccgagccggcacggacggccccaggagatt

SEQ ID NO: 4818 - DNA, 66 bp, Homo sapiens
  chr12:107487645-107487711
  hyper
agcggccaccattggccgaggctcgctgagacccggatgagcacggggatgcggggagcttgcggg

SEQ ID NO: 4819 - DNA, 40 bp, Homo sapiens
  chr12:107487755-107487795
  hyper
ccagagggtaagggggcggggccggcgggcaggagcgcgc

SEQ ID NO: 4820 - DNA, 64 bp, Homo sapiens
  chr12:107487824-107487888
  hyper
gggcctggaaattgtccggtttccttcaggagccagtggtggagtcgggcggagagtgagggga

SEQ ID NO: 4821 - DNA, 31 bp, Homo sapiens
  chr12:107488196-107488227
  hyper
ttgtctacttttccagcgacagtgaactgca

SEQ ID NO: 4822 - DNA, 31 bp, Homo sapiens
  chr12:107711907-107711938
  hyper
ccaacccaccaccctccgggagaatgcgggc

SEQ ID NO: 4823 - DNA, 31 bp, Homo sapiens
  chr12:108306543-108306574
  hyper
cacagggggcagctgccggtggagggtgttt

SEQ ID NO: 4824 - DNA, 131 bp, Homo sapiens
  chr12:111844274-111844405
  hyper
tacccccacccacacacgtgttagggagagcgttggggtaactgaggccgtgggatgggggagagggcatcgctgacgcccccagcccaccctacggtagcctcgccggttgggggcggccctcccctcaa

SEQ ID NO: 4825 - DNA, 31 bp, Homo sapiens
  chr12:111844407-111844438
  hyper
tgtgcctggggaggagcggtcaggggtcacc

SEQ ID NO: 4826 - DNA, 93 bp, Homo sapiens
  chr12:111844495-111844588
  hyper
ttgggtgtgggggcagcgggggaggatgcgccggcccctccccactccccattccgggccatgtggctaagagggtagcgccctgattcagga

SEQ ID NO: 4827 - DNA, 91 bp, Homo sapiens
  chr12:111844599-111844690
  hyper
ccagttcctgcactgccgaggtcgaccgggccaggcccccgcatgctgctgaattgggcggttcaccagggctaggcgtcccagagacagg

SEQ ID NO: 4828 - DNA, 42 bp, Homo sapiens
  chr12:111844727-111844769
  hyper
ttccctgggaatcccccgaccaaaaaacgtctggagtgggtg

SEQ ID NO: 4829 - DNA, 39 bp, Homo sapiens
  chr12:112689850-112689889
  hyper
caggtgtgagccaccacgcccagccggatgcttaactac

SEQ ID NO: 4830 - DNA, 31 bp, Homo sapiens
  chr12:113494534-113494565
  hyper
acccgcgagatcccggcggccgccagccggc

SEQ ID NO: 4831 - DNA, 108 bp, Homo sapiens
  chr12:113494664-113494772
  hyper
cggctccctcccactccggggggagcccaggaggcggcggtgctggagcgcgagccggagccggagccggagacgaagagaggcggtgagaacgcgggtgcttaggga

SEQ ID NO: 4832 - DNA, 37 bp, Homo sapiens
  chr12:113494952-113494989
  hyper
tcccggcgcaccccagcgcacccggcatccccccggc

SEQ ID NO: 4833 - DNA, 31 bp, Homo sapiens
  chr12:113541666-113541697
  hyper
gcacagccagcccaggcggaagtgggacacc

SEQ ID NO: 4834 - DNA, 204 bp, Homo sapiens
  chr12:113796496-113796700
  hyper
tcgggccgttcctgagcggcctggcgggggcgatcccagcgccggggggccgctgggcgcgcgatgggcaggtccctccagcctcccgcagccgctcggtgctcctggacgtctcggcgggccagctgcttatggtggacggacgccaccctgacgccgtggcctgggccaacctcaccaacgccatccgcgagactgggtaag

SEQ ID NO: 4835 - DNA, 159 bp, Homo sapiens
  chr12:113796701-113796860
  hyper
gttggcttatccccacgcggggccatcgggggagggggatgcgtgggcgccggacctcgcctgttcccgggaccggcctcttgccgggtgggaacgcccgtttctctgggggtcagctactcccgaggctgcagcaccgccctgcgggccaagtaccct

SEQ ID NO: 4836 - DNA, 31 bp, Homo sapiens
  chr12:113796863-113796894
  hyper
tgggagctggctactgcggcatccctcacct

SEQ ID NO: 4837 - DNA, 68 bp, Homo sapiens
  chr12:120525284-120525352
  hyper
cttcggttagtgcggtcggtgttgtgaagctcgagctaggcggcctctgcaggcggatcctctagctg

SEQ ID NO: 4838 - DNA, 36 bp, Homo sapiens
  chr12:122214227-122214263
  hyper
attcgccaccagagggcgccccgggccctgggtcgt

SEQ ID NO: 4839 - DNA, 77 bp, Homo sapiens
  chr12:122231545-122231622
  hyper
gagcccgcagcactggcggcggcgcgccgggcactagcggagccaagaggtcgggggcggggcggggccggaaccag

SEQ ID NO: 4840 - DNA, 34 bp, Homo sapiens
  chr12:122237446-122237480
  hyper
cccagggccctccccccgccgaagaacacacaac

SEQ ID NO: 4841 - DNA, 31 bp, Homo sapiens
  chr12:122237491-122237522
  hyper
tgcaagtggatcctctcgtatgctgctatat

SEQ ID NO: 4842 - DNA, 47 bp, Homo sapiens
  chr12:122459558-122459605
  hyper
cgaggaagggtcagcgcgcgtgtccgcacgcccgcccccaccgcgcg

SEQ ID NO: 4843 - DNA, 198 bp, Homo sapiens
  chr12:122459881-122460079
  hyper
gtgcgagtgtctgtgcgcgagtgagtgagcggcgggcgggcgcgagtgtggccgccgcggagcgcgagcaggacccggcgggcgcgctccccagcctccgtctccccgccggaaccatgtcgggcaggtcggttcgagccgagacgaggagccgggccaaagatgatatcaagagggtcatggcggcgatcgagaaag

SEQ ID NO: 4844 - DNA, 31 bp, Homo sapiens
  chr12:122461112-122461143
  hyper
gttgttgaaaactccccgctgcctgatttca

SEQ ID NO: 4845 - DNA, 31 bp, Homo sapiens
  chr12:122461164-122461195
  hyper
gccttcactggggtcccggagggagaggagc

SEQ ID NO: 4846 - DNA, 102 bp, Homo sapiens
  chr12:122461278-122461380
  hyper
tggcaggggatgtttacgtttgggggtgtcgtttctcgagtagcgcctcggtctctaaaagccactgggggcgagcctccggtgtggcggtgtcacaagtta

SEQ ID NO: 4847 - DNA, 31 bp, Homo sapiens
  chr12:122478893-122478924
  hyper
ttctcaagggagaaatcggggagcacacatc

SEQ ID NO: 4848 - DNA, 107 bp, Homo sapiens
  chr12:123380318-123380425
  hyper
tgcctaagcaccagtcgcggttccctggctcccgcaccccgccccaagcgcccccatttctagcccagtcccctcaacacgaccggaggcgccgcggtcgcctccgc

SEQ ID NO: 4849 - DNA, 138 bp, Homo sapiens
  chr12:123380520-123380658
  hyper
tccgtcagctggccctcgtcctccagcagctcgttgagctgcaccagcgacagcccggcgaaccgggcttcgctcccggcgcccgccatccccacgtctcggccgtcgtcgccaccgccgctgcggccaccaggctcc

SEQ ID NO: 4850 - DNA, 85 bp, Homo sapiens
  chr12:123380735-123380820
  hyper
tcaccgcgcgggcgggcggacgtgacgtaagtgtcgcggctcgcttggagtggaatgtgtcagggacagtcgggacttctaaagg

SEQ ID NO: 4851 - DNA, 31 bp, Homo sapiens
  chr12:123414419-123414450
  hyper
gggtcctctgccccaccgggagaagcagggg

SEQ ID NO: 4852 - DNA, 31 bp, Homo sapiens
  chr12:123497425-123497456
  hyper
tgtccacctcttggatcgccactttgtccca

SEQ ID NO: 4853 - DNA, 31 bp, Homo sapiens
  chr12:123754991-123755022
  hyper
agagccagcgtggcaccggtgaccaacgggg

SEQ ID NO: 4854 - DNA, 31 bp, Homo sapiens
  chr12:123755172-123755203
  hyper
ctccccatggctccctcggtcccctgggctc

SEQ ID NO: 4855 - DNA, 133 bp, Homo sapiens
  chr12:123920538-123920671
  hyper
gaaaagaaaaggaaggcgtctccctgccagtaggtgccctcctacgccccgcaggcgccgtgggcccggaaccctcgctcccacactcacctccccgctggccggagggctctgtctccgcagcccctccacc

SEQ ID NO: 4856 - DNA, 31 bp, Homo sapiens
  chr12:123920696-123920727
  hyper
tcttcagctcctccagcgccaggctgccctc

SEQ ID NO: 4857 - DNA, 31 bp, Homo sapiens
  chr12:123920746-123920777
  hyper
atctccaggacgcggacgactttgaactgca

SEQ ID NO: 4858 - DNA, 31 bp, Homo sapiens
  chr12:124156317-124156348
  hyper
gacagacggacaggttcgaagaaagcctgaa

SEQ ID NO: 4859 - DNA, 60 bp, Homo sapiens
  chr12:124779621-124779681
  hyper
gcgggccggggaggtgcggagagggccgggcggcaacgtgcgcctcggggctgggccggc

SEQ ID NO: 4860 - DNA, 63 bp, Homo sapiens
  chr12:124779760-124779823
  hyper
cggcgctggcaggagcgcggcccacggcggcgagcaggctgcaggcccgcggggatccggggc

SEQ ID NO: 4861 - DNA, 31 bp, Homo sapiens
  chr12:124790623-124790654
  hyper
ggtatgggcccatactcggggctctctgggt

SEQ ID NO: 4862 - DNA, 31 bp, Homo sapiens
  chr12:124870576-124870607
  hyper
agacagtgatgggccacgtgtcccctagcgg

SEQ ID NO: 4863 - DNA, 31 bp, Homo sapiens
  chr12:128024229-128024260
  hyper
tcccctccgctttccccgcctctccagccta

SEQ ID NO: 4864 - DNA, 31 bp, Homo sapiens
  chr12:130709678-130709709
  hyper
ccttcaaagctcaacacgccctccatcacac

SEQ ID NO: 4865 - DNA, 38 bp, Homo sapiens
  chr12:132380561-132380599
  hyper
gagggggtgtctgggccgcagggcgccccagggcaggg

SEQ ID NO: 4866 - DNA, 38 bp, Homo sapiens
  chr12:132380827-132380865
  hyper
cgggccggggcacaggcggctgccgctggctggccaag

SEQ ID NO: 4867 - DNA, 51 bp, Homo sapiens
  chr12:132480345-132480396
  hyper
tgtgaacgaatcccaccgcagcttgactgaatgtgccgttcatcctgagtg

SEQ ID NO: 4868 - DNA, 31 bp, Homo sapiens
  chr12:132982486-132982517
  hyper
acagcagaggcagcctcggggcctggggctc

SEQ ID NO: 4869 - DNA, 37 bp, Homo sapiens
  chr12:133136492-133136529
  hyper
ttagtcgggtctgcccgcgccccgcccccgccccgcc

SEQ ID NO: 4870 - DNA, 103 bp, Homo sapiens
  chr12:133706913-133707016
  hyper
cctggtctgtgcgtcacggacgcgctctgggccgaaggcccgcagggtccggcacagagtggcggctgcggcgccggcgacgaatcgccggctctagggtccc

SEQ ID NO: 4871 - DNA, 6 bp, Homo sapiens
  chr13:20176478-20176484
  hyper
cggaga

SEQ ID NO: 4872 - DNA, 31 bp, Homo sapiens
  chr13:20766418-20766449
  hyper
cgcccaaatctctgcccggggatttttctgc

SEQ ID NO: 4873 - DNA, 45 bp, Homo sapiens
  chr13:20766587-20766632
  hyper
ctgcgctagagtaccccgaagggacatcggcgacaccacaaacct

SEQ ID NO: 4874 - DNA, 87 bp, Homo sapiens
  chr13:20766767-20766854
  hyper
tccagaaggcggcccccgccccccggcccaaggacgtgtgttggtccagccccccggttccccgagacccacgcggccgggcaaccg

SEQ ID NO: 4875 - DNA, 108 bp, Homo sapiens
  chr13:20767134-20767242
  hyper
gagactgggaaagttacggagggggcggcgccgcgggcggagcgcgcccggcctctgggtcctcagagcttcccgggtccgcgaacccccgaccgcccccgaaagccc

SEQ ID NO: 4876 - DNA, 179 bp, Homo sapiens
  chr13:21099486-21099665
  hyper
gggatgagaacacagtcgtcgcaggatcgcagccagaattcgtttcattcaacacggtgcctggcacttctatgtggacctgcgggcagacgcggcgacattcaacagagtccaggaaccgcaggccccgcggcctgggcggtcaacctcggaacctcctgcaacgctggctcccggga

SEQ ID NO: 4877 - DNA, 57 bp, Homo sapiens
  chr13:21099698-21099755
  hyper
ccaagcccctccagccgcgcctctccccgagcccgccagcgccgtaggggccgcagg

SEQ ID NO: 4878 - DNA, 31 bp, Homo sapiens
  chr13:21099808-21099839
  hyper
accccgagggccccacgcgagggcaccacgt

SEQ ID NO: 4879 - DNA, 36 bp, Homo sapiens
  chr13:21099858-21099894
  hyper
tccaggggcagcagcgcggctcggagccctttacct

SEQ ID NO: 4880 - DNA, 53 bp, Homo sapiens
  chr13:21099936-21099989
  hyper
tgggccggggacgcggcgccgcgggcgctgggaccaggcgccggcggagctgc

SEQ ID NO: 4881 - DNA, 70 bp, Homo sapiens
  chr13:21635121-21635191
  hyper
cgcgccgcccctgccccgccgggatcccggccgccccggtcgccgcacaacaaagcggcgcagccccgct

SEQ ID NO: 4882 - DNA, 268 bp, Homo sapiens
  chr13:21635206-21635474
  hyper
cggcctccaacttccccggctcctctggaaccggctccgcgggctccgtacggcctggactacgagccgccgggcgggggcggctccgggcgggcgcggaccgtgggggcagggcgcagggctccgtccggacaaacttcctcggccgccccgccgggcgcccttcccggagcctcggcaccacagtaggtgcgcggagccgcagggctcgaccgcttcgcggaaactctcgccaccctccgagctgccgccccgaccccagctccca

SEQ ID NO: 4883 - DNA, 84 bp, Homo sapiens
  chr13:21635478-21635562
  hyper
cctcacctccaggggcgcggtctacaccctcgggggcgtcctggccggcggctcccgggcctctcgcgccgggagaccgggcac

SEQ ID NO: 4884 - DNA, 184 bp, Homo sapiens
  chr13:21635571-21635755
  hyper
gagctgctgctggccccgcagggacgggggagccccgggcggcggcggtggcgtggacggcgactgctccatcttcccggggcgctcacgccgcggttccaaagcgcagacccaagtgggacattcgctacattgttggcattccacgggcgtcacgtgaccccgcctcccgcgtcactctcgg

SEQ ID NO: 4885 - DNA, 143 bp, Homo sapiens
  chr13:21635777-21635920
  hyper
cgcctgcggcccctgctcctccgcggccgctccgcccagccccgcccggccgtgcttcctgcctccggcctcgaccgccacctgcccacggcctccctgctggcctgcggtagctcgccagggcctctcggacctatttgact

SEQ ID NO: 4886 - DNA, 31 bp, Homo sapiens
  chr13:21635942-21635973
  hyper
tgagtatttgccctctcgactgcatttgtat

SEQ ID NO: 4887 - DNA, 31 bp, Homo sapiens
  chr13:21635974-21636005
  hyper
aaaagttggtaactgtcgttaaagccactat

SEQ ID NO: 4888 - DNA, 187 bp, Homo sapiens
  chr13:22245212-22245399
  hyper
ccactctgcgcgccggcgggggctgcgcaggaggagcgctccgcccggctacaacgctccgcgagccggcgcggcaacacctgttcgcggcagcctgggcggcacgcgagctcccggacgcggctctcctcgctcgccgctcgccacccgttctaagccaatggacatctgccgagcctctggagaa

SEQ ID NO: 4889 - DNA, 97 bp, Homo sapiens
  chr13:22247844-22247941
  hyper
ggcgagcgagcgtgtccggggccgcggcggccacccgcagggtgtcggggccgcgccgaccgaagcgagcggcgtgggcggccggcctaggtgtgcc

SEQ ID NO: 4890 - DNA, 117 bp, Homo sapiens
  chr13:24040544-24040661
  hyper
tgcgcagctgcgtctgcgggcggggagccggggcggccgtgggcttcctccgggcgcgggctgacggctgccgcctgtgggcgccccagccctgcagccgagcgggaggggcggacc

SEQ ID NO: 4891 - DNA, 370 bp, Homo sapiens
  chr13:24734819-24735189
  hyper
gtggcctggtggggagcggggctggggcgtggcttggctgagtgtgctgccgcggcgcgggaggagagtgtgcgttgcgctttctcccgcgatcgccctgccggtcgctagctccgagggcgcgcactggatcccaggctcctccgagagtgcggcgacctcggggctccgccggcaccggaggtggctctgagggcagggacgtgttggacacgctgactttgtaggctccgccaagaggcgccgcaggaggtaagacggcttcgggcgcgcggctctgccgggcgggcgcgggcatgggctgttaggtagaatatcgggaggatttgagtcccagtggactgcctcggggcttcgggatgtccagctc

SEQ ID NO: 4892 - DNA, 353 bp, Homo sapiens
  chr13:24735198-24735551
  hyper
tggcctctgcttcccccgccggtggaggctaccgggtgctcacctgttaggtccgtgcgcccgctccctgcccggcggtggctctgcgccctctgggccacccggcaccatcgcttttgggaggacatgcacgtggtgttctcgcaaaaggccgtttccagccggaagcctgcagggaggtcgccttgtaacttcacccgcgctcccagctcgcggggcctggcctacaggggcggccgtgggggtggcagagtctggggagcctggcgcggcggagccctgtaacgctctgctccatcgggtggcgtggctggtgcctccggggacccggagcgatgcggttggagagctta

SEQ ID NO: 4893 - DNA, 103 bp, Homo sapiens
  chr13:24735565-24735668
  hyper
tttctcttggtaccagcggagtctcgtcccaggggaaagattttgggacccggtgcccatcgtctgtggactgcagggaatgcattggcggagttggtttggt

SEQ ID NO: 4894 - DNA, 38 bp, Homo sapiens
  chr13:27744843-27744881
  hyper
ccatcgccttggcaggcggtccccgcacagacagacct

SEQ ID NO: 4895 - DNA, 31 bp, Homo sapiens
  chr13:27744945-27744976
  hyper
tgcttttcaagattaacgtgcattcccagag

SEQ ID NO: 4896 - DNA, 55 bp, Homo sapiens
  chr13:29292807-29292862
  hyper
gagagtactttcccgtcgaactcgaccaaattacgcttgtcggggagtctcaagc

SEQ ID NO: 4897 - DNA, 92 bp, Homo sapiens
  chr13:29293054-29293146
  hyper
ccctgccagcgctaggcgatgactcggccgcagccagctgagcatcgctgtccgccgaggaggcggggtcggctgccgcggcgctgtcactg

SEQ ID NO: 4898 - DNA, 66 bp, Homo sapiens
  chr13:29293161-29293227
  hyper
ctgcgattgggcccagcggtcggtgccccagcggcgattggtccacccggacgtcactctcccctg

SEQ ID NO: 4899 - DNA, 53 bp, Homo sapiens
  chr13:29293228-29293281
  hyper
agagtggctagtggatcgtgcacccaccctcggaggcccggagtggatcccgc

SEQ ID NO: 4900 - DNA, 43 bp, Homo sapiens
  chr13:30982668-30982711
  hyper
ggcaggggaggggcgccgagagccggagcgggcaccgccccct

SEQ ID NO: 4901 - DNA, 31 bp, Homo sapiens
  chr13:33000976-33001007
  hyper
aaagtaagcacagtcacgtaggtataaacag

SEQ ID NO: 4902 - DNA, 49 bp, Homo sapiens
  chr13:33001026-33001075
  hyper
gaggggcatatactggcggggtgggatagctgcccggtcttaaaaggca

SEQ ID NO: 4903 - DNA, 31 bp, Homo sapiens
  chr13:33001096-33001127
  hyper
caggcaggaaggccagcgtcaaggagagaag

SEQ ID NO: 4904 - DNA, 138 bp, Homo sapiens
  chr13:33001234-33001372
  hyper
ccacaggcacaagcccgcgtaattcccagaggttgggtaccggagggccgcttacgcaattcgcaagtgaacgaatttgggcgcccatggcgaggctctgtcagtgacggtcggtggtggcgccgccagccagccccc

SEQ ID NO: 4905 - DNA, 31 bp, Homo sapiens
  chr13:33162267-33162298
  hyper
acatgtctgagatgttcgcatctttagggac

SEQ ID NO: 4906 - DNA, 34 bp, Homo sapiens
  chr13:39612008-39612042
  hyper
gcttccgggagcgggccggcggctggggagcacc

SEQ ID NO: 4907 - DNA, 67 bp, Homo sapiens
  chr13:41364042-41364109
  hyper
ttggctgcggggctccgcgcctcaggggcgccagtgctgggcagcatggagccgcttgtgaatggag

SEQ ID NO: 4908 - DNA, 51 bp, Homo sapiens
  chr13:41364149-41364200
  hyper
gtgaacgtttagggtccggccaagaaagttggaagtcgtctccctgacctg

SEQ ID NO: 4909 - DNA, 84 bp, Homo sapiens
  chr13:42615144-42615228
  hyper
cgttcaggaaatggcccgggatgaggtccccagctgcttcccagccgggttagcgcttcctccgccgcccgggctcctcctcgc

SEQ ID NO: 4910 - DNA, 57 bp, Homo sapiens
  chr13:42615948-42616005
  hyper
tctgaaaagccccgtccgaaatttctggcctcacccatgttccggtcaacgtgttcg

SEQ ID NO: 4911 - DNA, 189 bp, Homo sapiens
  chr13:42621977-42622166
  hyper
ttagacacttcttgtgcgttctgtcgtcttgggctgcgtgtagtctcttgtttctgcgctttctccacgcccttcccagtttcctgttagccgaaggggatcgctctttctgaacgaaaagttctcagagcggagctgaacctcccggaaaatgctcttctcttccgtgtgcgccggatgggggtgggg

SEQ ID NO: 4912 - DNA, 48 bp, Homo sapiens
  chr13:42622257-42622305
  hyper
ctgggggtggggaaaccgacgaggggcagcccccgactgtcttggtgg

SEQ ID NO: 4913 - DNA, 31 bp, Homo sapiens
  chr13:42622367-42622398
  hyper
ggggttcaggaggtggcgggtgcacccaagg

SEQ ID NO: 4914 - DNA, 34 bp, Homo sapiens
  chr13:42622424-42622458
  hyper
attcttccccagggatcggcgttgcccctgctgt

SEQ ID NO: 4915 - DNA, 67 bp, Homo sapiens
  chr13:42622649-42622716
  hyper
gaggcgggcgggggtccgttacctctgcgtcccaccgtggccgccgctccggcgggaaccgagcgga

SEQ ID NO: 4916 - DNA, 101 bp, Homo sapiens
  chr13:43566058-43566159
  hyper
gagtatgtttggggcccgggctcccgccccgaagccaggttgttaaaatactcaccgcctctggcccgcgtgcacgacgctctcccgcgaagggcccttag

SEQ ID NO: 4917 - DNA, 203 bp, Homo sapiens
  chr13:43566176-43566379
  hyper
tctctctggtcttccacggggctcagctccccttgccgcccagaagggtcctggggatcccgggtcgggcgggaggcaggggaggcgccgagcccggagttcaccactctattgcgggtgttcatggttcacagcccgcgggtcccgggccgccgtcgctgcgggagggatgcggctgggacgcttagcgagtctcaagatgg

SEQ ID NO: 4918 - DNA, 136 bp, Homo sapiens
  chr13:43566384-43566520
  hyper
caaagtgcagaggcagcggttttaacagctgagtttcggtttctcagaatcagcagcagactgcgcccgccccagagaacttccccacgtattctccactgaggccccgtccgaccttatcgcgggttaacagccc

SEQ ID NO: 4919 - DNA, 46 bp, Homo sapiens
  chr13:43566530-43566576
  hyper
cttgagctggcttggtcggctacaggtgagacggtttaaagtctca

SEQ ID NO: 4920 - DNA, 50 bp, Homo sapiens
  chr13:43566601-43566651
  hyper
taactgggatcagccacggacacctggtgagcgattagcccgcagagtga

SEQ ID NO: 4921 - DNA, 31 bp, Homo sapiens
  chr13:44544528-44544559
  hyper
atgaggccctgcactacgacaaggagcagct

SEQ ID NO: 4922 - DNA, 31 bp, Homo sapiens
  chr13:44991618-44991649
  hyper
tctgcacacactgggccggcccatttctgca

SEQ ID NO: 4923 - DNA, 31 bp, Homo sapiens
  chr13:44991670-44991701
  hyper
tactcattgctgtgcccgtgacaagcattcc

SEQ ID NO: 4924 - DNA, 31 bp, Homo sapiens
  chr13:44991733-44991764
  hyper
tgcctccagcatcacccgaatggggcctcca

SEQ ID NO: 4925 - DNA, 38 bp, Homo sapiens
  chr13:44991786-44991824
  hyper
tcccctcatcctcacccgaagggcgtccctcagccaca

SEQ ID NO: 4926 - DNA, 31 bp, Homo sapiens
  chr13:45009498-45009529
  hyper
aaacctgggcagacgtcgcagccaatgggag

SEQ ID NO: 4927 - DNA, 31 bp, Homo sapiens
  chr13:45009532-45009563
  hyper
gagttatttatagctccgaattaaaggttca

SEQ ID NO: 4928 - DNA, 58 bp, Homo sapiens
  chr13:45009737-45009795
  hyper
ggacccgtttgtgcaccgtctagaagacccttatccaggatcccgacttctggggccc

SEQ ID NO: 4929 - DNA, 63 bp, Homo sapiens
  chr13:46786040-46786103
  hyper
ccgcccccgcgcctgcgcgtcaagtggctgggctggcttagcggaccccggttgctagggtgt

SEQ ID NO: 4930 - DNA, 31 bp, Homo sapiens
  chr13:46961098-46961129
  hyper
ccgacactgctctgagcgaccctaagatacc

SEQ ID NO: 4931 - DNA, 31 bp, Homo sapiens
  chr13:46961172-46961203
  hyper
ccatccaacctctcccgcggccctcccttcc

SEQ ID NO: 4932 - DNA, 170 bp, Homo sapiens
  chr13:46961213-46961383
  hyper
ccaccctctccaccccgcgccgctcccatctcgcccccggccccgccagcctcacccagccaaacccgagcggtggaacgctgcgctgggtaaacgccgcgcgtcgggtcctccctcgcgcggctccgggcagcgttccgtggccaccgcgctcccggtaacagcagaaa

SEQ ID NO: 4933 - DNA, 92 bp, Homo sapiens
  chr13:46961386-46961478
  hyper
gagggaggagagctaccgaggaggggacagcgacgccccgacgccgccacgccccccgcctcccacacgggggccaccgtagctctctagaa

SEQ ID NO: 4934 - DNA, 151 bp, Homo sapiens
  chr13:46961481-46961632
  hyper
cctcagggaagcaaagcgccgttcccgccgcaggcaccgagacgtcgcccagatggaagaaactctggagatgcgcgctcctacaccggtgccgcggcgcccgggcccagcaccacgcacctatgcgcgcctctgccggtcctcctagaaa

SEQ ID NO: 4935 - DNA, 51 bp, Homo sapiens
  chr13:50070482-50070533
  hyper
gcgcgagtggtgggcacgcttcggtttacctcccccgcgggtgacagccca

SEQ ID NO: 4936 - DNA, 31 bp, Homo sapiens
  chr13:51086771-51086802
  hyper
ctgtctcagcagctctcggggggacctgcag

SEQ ID NO: 4937 - DNA, 31 bp, Homo sapiens
  chr13:51086818-51086849
  hyper
ctctctgcaatttggccgctcctggacttgt

SEQ ID NO: 4938 - DNA, 51 bp, Homo sapiens
  chr13:51086860-51086911
  hyper
ttcaaagagaaaccaccgcttcctccccgagccccacgccagcctcagagg

SEQ ID NO: 4939 - DNA, 31 bp, Homo sapiens
  chr13:52702935-52702966
  hyper
cgggtgagtggcaagacgcttacccgtaccc

SEQ ID NO: 4940 - DNA, 31 bp, Homo sapiens
  chr13:52703086-52703117
  hyper
ctttcccccaccctgccgagctcccgaagcc

SEQ ID NO: 4941 - DNA, 31 bp, Homo sapiens
  chr13:58207770-58207801
  hyper
ccgcccctcccggcaccgtcatcgccctggt

SEQ ID NO: 4942 - DNA, 31 bp, Homo sapiens
  chr13:72440914-72440945
  hyper
tataaggggaaacagacggaggagaagcgag

SEQ ID NO: 4943 - DNA, 31 bp, Homo sapiens
  chr13:74707260-74707291
  hyper
cagttacacatcattacgaccagagacaata

SEQ ID NO: 4944 - DNA, 31 bp, Homo sapiens
  chr13:74707321-74707352
  hyper
ccagcagtgtcatctccgccttaaccccttc

SEQ ID NO: 4945 - DNA, 83 bp, Homo sapiens
  chr13:74707354-74707437
  hyper
ctccactctctccagcgcgcacacacagcccacacggtcccggtgcggagctattcatccaccccgctcgaggccggggggcc

SEQ ID NO: 4946 - DNA, 88 bp, Homo sapiens
  chr13:74707624-74707712
  hyper
ccttctttcttctccacgaatccgaccgacgctacttgctttgcaacagcatcgcccttccccggccccctcccgcttcccagcactt

SEQ ID NO: 4947 - DNA, 185 bp, Homo sapiens
  chr13:74709333-74709518
  hyper
gatgcgcgcctggcctcgccaccccagcgaaggggcccctgcctgcgccagttctgtgggaaagcacgcaaacttggaggactggggcagaggaagcgggatctgcagacccccgcggggcccgggggcggcggggaagggagtccagctccactgccccacgcccagagcggagccccaagaag

SEQ ID NO: 4948 - DNA, 36 bp, Homo sapiens
  chr13:75794020-75794056
  hyper
gacggctgagcgggggcggagcgccatctactggtt

SEQ ID NO: 4949 - DNA, 47 bp, Homo sapiens
  chr13:76054891-76054938
  hyper
ctgctgcgaagatgacgcgaccagccaaaccggttaaggatttgact

SEQ ID NO: 4950 - DNA, 218 bp, Homo sapiens
  chr13:76055017-76055235
  hyper
cacacacacacacacacacacacacggcaagcaagccatctccggtcacaccccagacaccgccgtcctcccgggacgggcgctcctccacgcgtgctccttggacgcgccagctccccctccatcccgggaccgttgtccttttccctccgggtccctgctgtagccggccggccgctcccgccgctcgcccagcccccgaacgccttctctcccac

SEQ ID NO: 4951 - DNA, 86 bp, Homo sapiens
  chr13:76055318-76055404
  hyper
cttaaagtggggtccccgcccctcccgccctgctccccgatcccccaaggccgagcccgcccccgcgcctccgagcccctgtcttg

SEQ ID NO: 4952 - DNA, 76 bp, Homo sapiens
  chr13:76055407-76055483
  hyper
ggctggggtctgtggcgcggaaaacgtggcaggccatctgcgactcggggtcgtcgggctgcgccttgatcaggta

SEQ ID NO: 4953 - DNA, 154 bp, Homo sapiens
  chr13:76055484-76055638
  hyper
gcaaagtaggtgaggtcgtggctgttgtggatgaagcgcgagatatgctgcgccttgtgctcgaagatgaataccgccgggttgggctgcgtggccgacggactagtgccccccgaggccccagcgcccggcgcggggacgcaacgcaggaagg

SEQ ID NO: 4954 - DNA, 82 bp, Homo sapiens
  chr13:76055648-76055730
  hyper
caccaggatcacctctcgggccgccggcgccccgcagccgcccgcctcgggcttctggctgcgcctgcggatctcggccatg

SEQ ID NO: 4955 - DNA, 326 bp, Homo sapiens
  chr13:76055734-76056060
  hyper
agggcagcataggcagcgtggtcctgtggtccaggcacgaccccccaacgtaccacagccggaaccgcttatcgcttggcttcccggggccgggctgagctgagacgcccggctcgggctccagggggtgcgggaacggctcatcctgaatgcagctgggcggctccataactctcgcctcaccagggcaccgcggaggccggccgggcgcaccgcgccccccactcccgcgcagaaggcgccgccgaaactgtgccaactgccgcaccgggctcccgcgcctgcctgggagcggcgcgaccccgaactccgcgcttcagcagccc

SEQ ID NO: 4956 - DNA, 57 bp, Homo sapiens
  chr13:76056064-76056121
  hyper
ccatgcagcacttccacgggcgcggctcggaggctccggcggcgggcaccgaggcaa

SEQ ID NO: 4957 - DNA, 42 bp, Homo sapiens
  chr13:78272093-78272135
  hyper
ggagcgggctccgggccggtggtgaacgcggagctggaggtg

SEQ ID NO: 4958 - DNA, 92 bp, Homo sapiens
  chr13:78272140-78272232
  hyper
gctgcaggagctggtgcgcaagctggagaagcagaacgagcagctgcggagtcgagcggccagcgcggccgccgccccgcacctgctgctgc

SEQ ID NO: 4959 - DNA, 243 bp, Homo sapiens
  chr13:78272373-78272616
  hyper
gcagcggtagtggcagcggcggtggctccagccccgcgttcccgggcaccttctgcctgcctagccccgcgccctccctgctttgcagcctggcgcagccacccgaggcgcccttcgtctacttcaagccggcagcaggcttcttcggcgcgggcggtggcgggccggagccggggggcgcggggacgccgccaggggcagctgcagcgccgccctcgccgccccccacgctgctggacgagg

SEQ ID NO: 4960 - DNA, 31 bp, Homo sapiens
  chr13:80913491-80913522
  hyper
ctatctccttttgggtcgagagaaaaaaaaa

SEQ ID NO: 4961 - DNA, 69 bp, Homo sapiens
  chr13:80913583-80913652
  hyper
gtcccactgctcactccgggcgcgcaggacccagctcccggagctgtaaactttcggtgcagatttgct

SEQ ID NO: 4962 - DNA, 31 bp, Homo sapiens
  chr13:80913704-80913735
  hyper
tttaagtgatttctgccgatccgatccctgg

SEQ ID NO: 4963 - DNA, 110 bp, Homo sapiens
  chr13:80914123-80914233
  hyper
ccgaaccgcagagacccggcgccaggcagggcgacgctcccacccgctccgggctagactgtccacacggagcagaggcgggcactccctccacccggcaccctgccttt

SEQ ID NO: 4964 - DNA, 71 bp, Homo sapiens
  chr13:80914243-80914314
  hyper
ggaagtctcctgcccccgaggcgggcaacctgtgtcccccagccccaccagcgccccgcctagggacagcc

SEQ ID NO: 4965 - DNA, 35 bp, Homo sapiens
  chr13:80914346-80914381
  hyper
gaacaggttagaaatgcgggcgcctgcaaaggcaa

SEQ ID NO: 4966 - DNA, 31 bp, Homo sapiens
  chr13:80914464-80914495
  hyper
caggctagctgtcctccgtcccaacccccta

SEQ ID NO: 4967 - DNA, 134 bp, Homo sapiens
  chr13:80914864-80914998
  hyper
gctttagaccaacttccgagcaatcggcgggagaaaaaaagagaattcggagccagattccccgctgatgaacactccggggttcggagctggagacgactccccttctacaagcgcacgcggagtatttcctc

SEQ ID NO: 4968 - DNA, 31 bp, Homo sapiens
  chr13:80915069-80915100
  hyper
aaagaaaacggccttacggagaacctaaagc

SEQ ID NO: 4969 - DNA, 37 bp, Homo sapiens
  chr13:80915177-80915214
  hyper
ggcgcgggggcctgggcgctgcgcgctccgccggccc

SEQ ID NO: 4970 - DNA, 31 bp, Homo sapiens
  chr13:80915430-80915461
  hyper
cggcagcagtaaatggcgtcatgtggatccg

SEQ ID NO: 4971 - DNA, 48 bp, Homo sapiens
  chr13:80915615-80915663
  hyper
cccaggccggtcctgccgcccgagcgccgtcacgcggggcgcccgcgg

SEQ ID NO: 4972 - DNA, 215 bp, Homo sapiens
  chr13:80916946-80917161
  hyper
caagggaagtggcatgcgttatttccgggcgctggcctacgtcccccgacccctaaggtgagggtggacgaggctacaacggcctgctcccgagcgtcccgggactgcgggcgcaaaacagctgggcctctctggccacagccgctcgccggacgcccgaatccattgagccgacggtgaacgcaggcgccgctgcgctcgcggcccctctggcc

SEQ ID NO: 4973 - DNA, 85 bp, Homo sapiens
  chr13:80917191-80917276
  hyper
aggctgctttcttctccgggacacgacgcggacaggctgggttaccttccaaaacgtgtgtgcattaggccggctggtttaaaat

SEQ ID NO: 4974 - DNA, 31 bp, Homo sapiens
  chr13:80917283-80917314
  hyper
aagatattaatataaacgacacagaagatag

SEQ ID NO: 4975 - DNA, 90 bp, Homo sapiens
  chr13:80917356-80917446
  hyper
caaggctaggcaggaacgtgctgccggtgtgcggccagcaagtctctcgagcagagcaggtgaaagcaacgccgtcgcttcgcctcttca

SEQ ID NO: 4976 - DNA, 31 bp, Homo sapiens
  chr13:90384876-90384907
  hyper
tttcttttttttgagacgggagtctctcttt

SEQ ID NO: 4977 - DNA, 144 bp, Homo sapiens
  chr13:95201518-95201662
  hyper
ggtgttttgctggccccgtggacagaccagacctcctcccatcggagcctcgggtctcacaccagccccccaggcggcgcgcggccccgtctcgccaccgcggcccgggtcgttcgcgtcttccggcgccgagggtgcctctgg

SEQ ID NO: 4978 - DNA, 22 bp, Homo sapiens
  chr13:95202013-95202035
  hyper
cgctttgcgtccaactggcttg

SEQ ID NO: 4979 - DNA, 31 bp, Homo sapiens
  chr13:95358283-95358314
  hyper
cctttattaggaggcccgggtttcccccatt

SEQ ID NO: 4980 - DNA, 61 bp, Homo sapiens
  chr13:96705466-96705527
  hyper
acttggacgcggcgaccgtcccggagccgagctgcgaaagccacagcgctgtggagcctag

SEQ ID NO: 4981 - DNA, 240 bp, Homo sapiens
  chr13:96705577-96705817
  hyper
aaaagcgcgagtccctcggacccggtacccacagtctgtggccgccacgcttcggccggctcttcccgctgcgcggctgcccacttccggtgggaggagctcgagtccgttactgggtgccgggtccagaccggcgcatgcgtgtcccgctccggcgcggtttagtgggtgcggcctggagagcccacgccagccggacactgggccacgtcggagccgccggggcggcgccgggttgct

SEQ ID NO: 4982 - DNA, 120 bp, Homo sapiens
  chr13:96705823-96705943
  hyper
cgtcacagatgctcccgcgggtccgctcccgcgggtccattcccaggactttgggttctcggacagaggccttaggacacggggcgggaagctggctctccagaccgaactagggctctg

SEQ ID NO: 4983 - DNA, 31 bp, Homo sapiens
  chr13:98795068-98795099
  hyper
ccagtggcgctccccgcgctgcattaggtag

SEQ ID NO: 4984 - DNA, 31 bp, Homo sapiens
  chr13:98795195-98795226
  hyper
gcggagcggagcggggcggggcgggcgcagg

SEQ ID NO: 4985 - DNA, 148 bp, Homo sapiens
  chr13:98795358-98795506
  hyper
tcgccggcctcagaggcggcgggtccggcgcgggcgcagcggtgcgggcgctcggctggggcgcggggcggggacgcggccgctgcccgctttgcgccgctcctccctgcgcgagtagcgctggccccggcgtcgaggcggccatggc

SEQ ID NO: 4986 - DNA, 37 bp, Homo sapiens
  chr13:98795538-98795575
  hyper
gctccgccctcccctccgccccgcgccacctttgatg

SEQ ID NO: 4987 - DNA, 52 bp, Homo sapiens
  chr13:98795635-98795687
  hyper
gggtattaatagccggcgccgccgcgccctcggccgccgggggcttgggagc

SEQ ID NO: 4988 - DNA, 57 bp, Homo sapiens
  chr13:98795714-98795771
  hyper
agggagccgccgcagccgccggcgctgtggaggtaggaggcgcgcggtgaacaatga

SEQ ID NO: 4989 - DNA, 31 bp, Homo sapiens
  chr13:99129086-99129117
  hyper
cctcacacactggcctcgctgggactctggc

SEQ ID NO: 4990 - DNA, 115 bp, Homo sapiens
  chr13:99229763-99229878
  hyper
cccctgagggcaggatcggagtcgggggcacctggggaaggagagcgccccgtggggcctcggccggtggcctgtgccaaaaggccgggcagagctgcttcggtgtctgggtgaa

SEQ ID NO: 4991 - DNA, 46 bp, Homo sapiens
  chr13:99229888-99229934
  hyper
aacccaagaaggaaaccgaaagggaagaggccgagagagaggttaa

SEQ ID NO: 4992 - DNA, 42 bp, Homo sapiens
  chr13:99229937-99229979
  hyper
ctagtgctttggttaccgaaaacagcccggctgggactgctg

SEQ ID NO: 4993 - DNA, 31 bp, Homo sapiens
  chr13:99739097-99739128
  hyper
ggggaaggtggggggtcggggccgcctccgc

SEQ ID NO: 4994 - DNA, 94 bp, Homo sapiens
  chr13:99739247-99739341
  hyper
gcgctcgaggggaccccgaagtcaccggcagggtcggagctcggtgcaccacgccccccctctgcgcccggggcctctgcggggacagaggtct

SEQ ID NO: 4995 - DNA, 98 bp, Homo sapiens
  chr13:99739354-99739452
  hyper
tttatttatgtggcaccgatcggaacccgcggccggccaggcggacctggacggagcgtccctgctcggaacctggcgcggggcgccgcgcgctcgtg

SEQ ID NO: 4996 - DNA, 39 bp, Homo sapiens
  chr13:99740139-99740178
  hyper
tgggagaatacctgccgcgcctcccgcccaaatacccag

SEQ ID NO: 4997 - DNA, 38 bp, Homo sapiens
  chr13:100634142-100634180
  hyper
caggcggcggcggaggcggcgggcgcaggagagcggct

SEQ ID NO: 4998 - DNA, 31 bp, Homo sapiens
  chr13:101717570-101717601
  hyper
aatgttcactggaggacggcaggaaagggca

SEQ ID NO: 4999 - DNA, 31 bp, Homo sapiens
  chr13:103258072-103258103
  hyper
tttttcttttttttttcgagacatagagtct

SEQ ID NO: 5000 - DNA, 31 bp, Homo sapiens
  chr13:103450907-103450938
  hyper
ccgggtccccatatttcgctcttctccgggc

SEQ ID NO: 5001 - DNA, 52 bp, Homo sapiens
  chr13:103451012-103451064
  hyper
ccaaacatttacaagacggactctcgaaatgatccaccgataaatgaagaag

SEQ ID NO: 5002 - DNA, 147 bp, Homo sapiens
  chr13:103451071-103451218
  hyper
ggtggacagaagcagccgagccttcggcagggacccgccggccgatcgcagcagccaacgcgactgcaaaggttgccgcccggcgtgcagggcaggcgcgcgggtctccgcgaccccaggacaatcaaagcccgtgccccggcgcgc

SEQ ID NO: 5003 - DNA, 248 bp, Homo sapiens
  chr13:103451315-103451563
  hyper
gagcatcatttgggagcgaatccgtctcaggttccagccaaggtgtagggcgaggggattggcccgtgcgtcgggccaggctcagtaacgccttctccaagtggatggcggggtggacacgcgtcccggcgccccgggctccctgggatatgtagttcgcgacaggacgagcggaaatactgccaggattttaccacctctcgcccatttatttacttctcggtcaccgctttcgggggacagataaa

SEQ ID NO: 5004 - DNA, 112 bp, Homo sapiens
  chr13:103451761-103451873
  hyper
ccagggtaacaggaggcgcctcgccggccgcgcgctggatgctgtgatccaggtccggagccgggttccgccgcggccgcagcgacccgaccccacccgacaggccagaggt

SEQ ID NO: 5005 - DNA, 136 bp, Homo sapiens
  chr13:103452262-103452398
  hyper
gggtccgggaaccagcgcgcagcggccgtcgccttcccctgcacgccagcacccgggtctgggccgccgccaggagtcacgggctcaccgccctggtcagcttggcagtcggacccggagccgcctcctctgcctg

SEQ ID NO: 5006 - DNA, 31 bp, Homo sapiens
  chr13:103452420-103452451
  hyper
gaaaacccagaagagccggtggctccgagcc

SEQ ID NO: 5007 - DNA, 326 bp, Homo sapiens
  chr13:103452750-103453076
  hyper
cggcccttgggctctgcgggctggggactcggggtgcccgcgacacgcgcggaggcgcgggctgggttggccacgggcagggagcgcagccgcgctccttcctctctgcccgcgtcgcctccgcgcgcactggttctgcgcggcggggcttggcctgcgcgactgtctactccgtcccggcggcctcggagcccggccgagcggcgagcttgtcagaggacggtggtggaaacgctcccggcctccccaggggcgcgggctggaggctggcgccaggcgcggaggactcccggtatcttttgacaggctggcgcctcggctctggg

SEQ ID NO: 5008 - DNA, 125 bp, Homo sapiens
  chr13:108518547-108518672
  hyper
ggggcagggtgggggacgaggaggcggagaggagtctgtgtgcctgggcggcgggcgaggactcccccatgctcgccaggagcgcgggccaggagggctcctgctgccgccgctgctgctgctgc

SEQ ID NO: 5009 - DNA, 135 bp, Homo sapiens
  chr13:110434423-110434558
  hyper
aagaagtcaatgctggcgtaggtgttggcagggggcagggcaccgggacccggccccccgcacccgccgccggtgctgccgacgcccacagcgctgatgagacccccgaggcttcgggtccggccccaggagctc

SEQ ID NO: 5010 - DNA, 211 bp, Homo sapiens
  chr13:110434612-110434823
  hyper
ccgggctcctccctcacgtcgatggcgatgtagttgagaccattctggaagccggcagaggtctctctgcgcatgggcgatccaccgctcccaggacaaccgaccaagcccccgggctgacccggggtccacggccggccctgcggtgccaaagggggcgccggctgcaactgtcgtggggaggtgggcggctcgtcgccccctccagggc

SEQ ID NO: 5011 - DNA, 54 bp, Homo sapiens
  chr13:110434872-110434926
  hyper
ggaggccgagttgtggcgcttggggttgtgggcgaaggacggggacacgggggt

SEQ ID NO: 5012 - DNA, 66 bp, Homo sapiens
  chr13:110435192-110435258
  hyper
cattgtccccggtgtccgaggacaacgatgaggcggcgcccgggccctgggcggtggcaacggccg

SEQ ID NO: 5013 - DNA, 82 bp, Homo sapiens
  chr13:110435389-110435471
  hyper
ccgtccaaggagcccacggggtggccgctcggggcgcccggcttaggagacttgggggagctgaagtcgaggttcatgtagt

SEQ ID NO: 5014 - DNA, 31 bp, Homo sapiens
  chr13:110439117-110439148
  hyper
cctttctccccgggccgcgtttcccgccgtc

SEQ ID NO: 5015 - DNA, 317 bp, Homo sapiens
  chr13:111213551-111213868
  hyper
gacgagtgggaaaccccgagaaggaggcatttgctgtccgaggccgggaccctgtgcgcggccgggtgccctgctggaagccccgcgccccccgtccccggcggagccccagggcggtgtggctcatgcggcgccggcctcacctgcggtgtcccagatggagatgttgtaggagcgccactgcttcaggtagaaggcgccgcccaccgtgctgaccgtgtccgggaagcgccgctccatataccgctgcagcagcgacgtcttccccacgttcatgtcccccaggagcacgatcttgctgtcgggcttcctcatct

SEQ ID NO: 5016 - DNA, 150 bp, Homo sapiens
  chr13:111213877-111214027
  hyper
aacccccagcgcccccgcgccctctccccgaggctggccggctcgtgcgccctgggcgcagctggaggagcggaccccggactcgccgggacccggattctcgtgaacgctccgggaccttcgcctccggacgcccgggagctcaagaga

SEQ ID NO: 5017 - DNA, 38 bp, Homo sapiens
  chr13:111214222-111214260
  hyper
atccgagttctccagccgaggctcgggactgctgcagg

SEQ ID NO: 5018 - DNA, 106 bp, Homo sapiens
  chr13:111214274-111214380
  hyper
ttctgagagcaccttccgcccctccgcttctgcacagccggggctgcggtgcgaggagcttggccgcggggcccgaacgaggcgaaggggccggggcccttgggga

SEQ ID NO: 5019 - DNA, 31 bp, Homo sapiens
  chr13:111268136-111268167
  hyper
ccgcctctgctggctcgcgggggggaagcgc

SEQ ID NO: 5020 - DNA, 74 bp, Homo sapiens
  chr13:111268234-111268308
  hyper
cggaggcctcctggaacggcgcggcgacggctgggcgcggcttgggtgatgggagcctccgtgcggggtgacag

SEQ ID NO: 5021 - DNA, 31 bp, Homo sapiens
  chr13:111305635-111305666
  hyper
ccgtctgtccatctcccgggtgctccttccc

SEQ ID NO: 5022 - DNA, 31 bp, Homo sapiens
  chr13:111527013-111527044
  hyper
atcccaaccacggcctcgccccaaccttggc

SEQ ID NO: 5023 - DNA, 72 bp, Homo sapiens
  chr13:111527049-111527121
  hyper
ttccccaagcagagccgcgccagaaccgcccggctcacccccctctccccgcccctgcgcctctctcccggt

SEQ ID NO: 5024 - DNA, 31 bp, Homo sapiens
  chr13:113548353-113548384
  hyper
ccattaggcacgaccccgccccgctgcccgc

SEQ ID NO: 5025 - DNA, 31 bp, Homo sapiens
  chr13:113548669-113548700
  hyper
ggaggcgtcaggacgcgcggacacctgcggg

SEQ ID NO: 5026 - DNA, 41 bp, Homo sapiens
  chr13:113597574-113597615
  hyper
cgcctgtgctgagtcccgacgctgtgcgccccactcccgag

SEQ ID NO: 5027 - DNA, 44 bp, Homo sapiens
  chr13:113597655-113597699
  hyper
gccgcagagcccaggcgcggggagggcggcggctcccagctccc

SEQ ID NO: 5028 - DNA, 63 bp, Homo sapiens
  chr13:113597781-113597844
  hyper
ccggggcgcggcggcccgggctttgagagacgggccgctcttcccggcgcggtgccttccagg

SEQ ID NO: 5029 - DNA, 31 bp, Homo sapiens
  chr13:113807778-113807809
  hyper
cgaggctcacagactgcgctgaccccagcag

SEQ ID NO: 5030 - DNA, 31 bp, Homo sapiens
  chr13:113807976-113808007
  hyper
aggtcaacagggacaccggccccagttccag

SEQ ID NO: 5031 - DNA, 59 bp, Homo sapiens
  chr13:113951224-113951283
  hyper
tgccctttctcccctcgcgggcttcctctttcctcactttctcccgccactactcttcc

SEQ ID NO: 5032 - DNA, 77 bp, Homo sapiens
  chr13:114017867-114017944
  hyper
gggtctccttcgcgtccgacccgccggcccatctcaaagcgggaaaaccggtccctgcggctgccctagctcggagc

SEQ ID NO: 5033 - DNA, 347 bp, Homo sapiens
  chr13:114017991-114018338
  hyper
cgctccgggagcccggactttgcccggcccgtcccagcccaacccacctgcgccctcgggacccacctgcgcccccgggacccacctgtccggctcctggggacgcccccgccctgcagcagccgggaccatttgatcgccctgcgggtgagcgtgaccaggtagctggagaaaaacttctcgtaggcggcgtcgtcgaagtcctcaggccgctcgaatccgtacgggtcgatcctgcaaaaccgagagaaggaggccggcgtccccgaagtttcctctggggggtcgcgggcccgcgcggggaccgcagccgccggggacgcccgcaccccgcgccacacacctgg

SEQ ID NO: 5034 - DNA, 128 bp, Homo sapiens
  chr13:114018340-114018468
  hyper
acccgcgagcgctcggcgggctgcatgcggggagggaggcgcgcaccgagcgaggccagcgggtcccaagttcgcctcccggctccggggcgcttaagtccttccggcgggaccgcgggcgcgtgggg

SEQ ID NO: 5035 - DNA, 31 bp, Homo sapiens
  chr13:114048391-114048422
  hyper
gatgtggcagcagctcgcgggccggggcttc

SEQ ID NO: 5036 - DNA, 31 bp, Homo sapiens
  chr13:114238865-114238896
  hyper
cccgctctcccagggcgcgcagcactggcgg

SEQ ID NO: 5037 - DNA, 95 bp, Homo sapiens
  chr13:114566903-114566998
  hyper
ggacgcgcggtcagagcgcccgggaggccgaggcgagccgcgggcgccgcggggcggaggctccggtcatcccgtcctggcggccctgaaggtca

SEQ ID NO: 5038 - DNA, 43 bp, Homo sapiens
  chr13:114566999-114567042
  hyper
atcgcggcggcggcggcggcggcggctgcggcacctcaagcgc

SEQ ID NO: 5039 - DNA, 89 bp, Homo sapiens
  chr13:114776259-114776348
  hyper
tggggaggagggggccgcgaggggagtagggggctgcgtgacgaggagcctccagcaccgcaacgcccaggaggcgccaggttaggcca

SEQ ID NO: 5040 - DNA, 31 bp, Homo sapiens
  chr13:114776351-114776382
  hyper
gcctggcctgttcagccgcttcccacacctg

SEQ ID NO: 5041 - DNA, 42 bp, Homo sapiens
  chr13:114776458-114776500
  hyper
ggaggggagaggtgagcgggacggggacgctcaggtcctggg

SEQ ID NO: 5042 - DNA, 31 bp, Homo sapiens
  chr13:114976825-114976856
  hyper
ctttctcaagtgcctgcggagtctggtttga

SEQ ID NO: 5043 - DNA, 31 bp, Homo sapiens
  chr14:19403466-19403497
  hyper
tggcagagggcctaggcgcaggtctgctcag

SEQ ID NO: 5044 - DNA, 31 bp, Homo sapiens
  chr14:21342166-21342197
  hyper
aaggcatagaatgtcccgcagaaggcagaag

SEQ ID NO: 5045 - DNA, 31 bp, Homo sapiens
  chr14:21439284-21439315
  hyper
agcacttaaggggccgcgcgggaggagttgc

SEQ ID NO: 5046 - DNA, 151 bp, Homo sapiens
  chr14:21493032-21493183
  hyper
agcctcagcctttgtgcgcagcaaccgagcgcccgctccgtgctggccctttcccccgagcctccagctccaggggacgcggatcaatcacaccgcccgccggcccggctggcgccttccaggccctacggcccctcgcctgcccctcccc

SEQ ID NO: 5047 - DNA, 31 bp, Homo sapiens
  chr14:21553686-21553717
  hyper
tgttacgaagactaaacgtagagcacttggc

SEQ ID NO: 5048 - DNA, 55 bp, Homo sapiens
  chr14:21769029-21769084
  hyper
atattatagatcaattcgtgattatatgtcccaaataacccgtagaaataataac

SEQ ID NO: 5049 - DNA, 63 bp, Homo sapiens
  chr14:21769209-21769272
  hyper
aggcgcgggcagaaggcgggatggcggcagcgcctctccatgcaccagcgcccccagatgcac

SEQ ID NO: 5050 - DNA, 89 bp, Homo sapiens
  chr14:23291856-23291945
  hyper
accctgcataagctggcggccagacaggagtctgggcgagcgccccaacccctgaccacaactgcctccggccccgagatgcttggctg

SEQ ID NO: 5051 - DNA, 80 bp, Homo sapiens
  chr14:23355356-23355436
  hyper
ctgggaggccgcaccacgacctacccgttatcctcgttggaaacaagagcgacttggcccgctcccgggaggtatcactg

SEQ ID NO: 5052 - DNA, 31 bp, Homo sapiens
  chr14:23355453-23355484
  hyper
acagattccatacttgcgatctcaggggaat

SEQ ID NO: 5053 - DNA, 34 bp, Homo sapiens
  chr14:23450538-23450572
  hyper
gtggctcctccagacccgacggctcaatccccga

SEQ ID NO: 5054 - DNA, 187 bp, Homo sapiens
  chr14:23450867-23451054
  hyper
gcggacgggacccctccgggagaatagcctgccggtgctccggccaggggtgggccaaacaggcacggccccgctggcaaggggctcccgtggcgctggtcgtagcccatgctgatgccgctggtgcgattgctgcagggccggctacctccagctccgccagcccccgccccgtccagcagcaggc

SEQ ID NO: 5055 - DNA, 80 bp, Homo sapiens
  chr14:23451068-23451148
  hyper
gacggcttgctcgcgtcgctggccgagctactggcgaagctagagcgggggctgagggccggggccgtgggctccagccg

SEQ ID NO: 5056 - DNA, 62 bp, Homo sapiens
  chr14:23451279-23451341
  hyper
cccgggccggctccaacggctcatccccaggtcccccagtagctcctcggggccctgacttc

SEQ ID NO: 5057 - DNA, 112 bp, Homo sapiens
  chr14:23451349-23451461
  hyper
ccccaacccacttaggcgccccttgcccggcccgggggtcccgtcagacccagaccggctagattcaccctttctgcggccgaacttctccagcaggcgactggctttctct

SEQ ID NO: 5058 - DNA, 35 bp, Homo sapiens
  chr14:23451585-23451620
  hyper
aggcacaggggcttagcgggcggcctggatgccct

SEQ ID NO: 5059 - DNA, 123 bp, Homo sapiens
  chr14:23451828-23451951
  hyper
cttttgtctgcctggccggatctactttcctaggggggcggagcgcggtgtgtgcgagagcgccgggggtgtccgcgcagggatagctggtgtgcgtgcagcggaaggcgctaactgccctgg

SEQ ID NO: 5060 - DNA, 57 bp, Homo sapiens
  chr14:23452130-23452187
  hyper
caggaggcatgttctgcgctagcaccgtgactttgttcccagcgtggggactgtggg

SEQ ID NO: 5061 - DNA, 37 bp, Homo sapiens
  chr14:23452271-23452308
  hyper
taaagaggttcagagacgtgtacgtaaagatagccct

SEQ ID NO: 5062 - DNA, 31 bp, Homo sapiens
  chr14:23775833-23775864
  hyper
gcccagcccagcccaccgtgccctctcagcc

SEQ ID NO: 5063 - DNA, 74 bp, Homo sapiens
  chr14:23776070-23776144
  hyper
gaaacggcccggatcccggcagcggcctgacccgtgagatccctaacctggcaggcgggcggggttggagactg

SEQ ID NO: 5064 - DNA, 78 bp, Homo sapiens
  chr14:23776181-23776259
  hyper
ctgcactagggggaaccgggaatagagatggtgtcggcaggaagcccttggccttgggtttcccgggaggacagtcat

SEQ ID NO: 5065 - DNA, 61 bp, Homo sapiens
  chr14:24837763-24837824
  hyper
gggagtcggggggactcgttggcctgcggaagtgaggctgggggcccgggcaccactttct

SEQ ID NO: 5066 - DNA, 50 bp, Homo sapiens
  chr14:24837856-24837906
  hyper
ggtgctgttggctgtgcgccgcctcccggctgggccgcctgtcactgaac

SEQ ID NO: 5067 - DNA, 31 bp, Homo sapiens
  chr14:26892909-26892940
  hyper
tacaggcatgggctaccgtgacaggccacat

SEQ ID NO: 5068 - DNA, 31 bp, Homo sapiens
  chr14:31028138-31028169
  hyper
acaatgaccccgcgcccggagtttttctgag

SEQ ID NO: 5069 - DNA, 31 bp, Homo sapiens
  chr14:38063820-38063851
  hyper
gctgggaagaggcaagcgcttcctagagccg

SEQ ID NO: 5070 - DNA, 75 bp, Homo sapiens
  chr14:38064382-38064457
  hyper
gccgggggcaggcggctgccgcggagcgcggcgccggggagcgcctccgcgggaagtgagcgggctgcctctgcg

SEQ ID NO: 5071 - DNA, 31 bp, Homo sapiens
  chr14:38065381-38065412
  hyper
gccgggctcctcctcccgccccccttcagcc

SEQ ID NO: 5072 - DNA, 31 bp, Homo sapiens
  chr14:38678113-38678144
  hyper
tgctgcgagggaaccccggaaggagccacta

SEQ ID NO: 5073 - DNA, 31 bp, Homo sapiens
  chr14:39735664-39735695
  hyper
catttgggtaactggccgctaatggaactga

SEQ ID NO: 5074 - DNA, 44 bp, Homo sapiens
  chr14:39735734-39735778
  hyper
agcgaggaaaccagatcgaggttctcttgcgtgggacaggttaa

SEQ ID NO: 5075 - DNA, 31 bp, Homo sapiens
  chr14:50238427-50238458
  hyper
agataagggctgggcacggtggctggctcat

SEQ ID NO: 5076 - DNA, 52 bp, Homo sapiens
  chr14:51561647-51561699
  hyper
tctcctccatggggaccggtctgggaggagacagcgacggctgcagcgggtg

SEQ ID NO: 5077 - DNA, 68 bp, Homo sapiens
  chr14:52327330-52327398
  hyper
gtccctgggctgcagccgctgctacacatactcacaacgctgccgccgcgctccgtgggcaactccta

SEQ ID NO: 5078 - DNA, 204 bp, Homo sapiens
  chr14:52327416-52327620
  hyper
gggctgggctgggctgcgccggagctcgcctgcacagatcagctccggagaggggaaaaccacgctcctcggaccaagcctcgggagctaaggtaaatgaaacgttttccatgttgctcgtttttaattgagaaaaacgaccgtcgcttgtggttttaaggtccgatttctaagggatgatagagacatcgcttcaggactagg

SEQ ID NO: 5079 - DNA, 31 bp, Homo sapiens
  chr14:52455648-52455679
  hyper
ctgtatcagtggggtccgaaaggaggtgagg

SEQ ID NO: 5080 - DNA, 60 bp, Homo sapiens
  chr14:52455722-52455782
  hyper
tactggatgctgtgaccgagggtgagggggagtgagggacgatctcggcttcagatttca

SEQ ID NO: 5081 - DNA, 40 bp, Homo sapiens
  chr14:52455788-52455828
  hyper
ctgaggatatctggaacgatcgcatcgtattaacaattgt

SEQ ID NO: 5082 - DNA, 51 bp, Homo sapiens
  chr14:54420071-54420122
  hyper
ggaagctgcagcagtgcgttgctcgggatggcactacggaatggctcctaa

SEQ ID NO: 5083 - DNA, 31 bp, Homo sapiens
  chr14:54420289-54420320
  hyper
ggcgaggccaacctccgcgcccgccgcccga

SEQ ID NO: 5084 - DNA, 59 bp, Homo sapiens
  chr14:54420477-54420536
  hyper
gccagaggatttggggcgcactgaagggactgcgtctcccagctcgaacccggcttaag

SEQ ID NO: 5085 - DNA, 31 bp, Homo sapiens
  chr14:57734480-57734511
  hyper
gtttagatactgtaaacgctcgaggaaagac

SEQ ID NO: 5086 - DNA, 89 bp, Homo sapiens
  chr14:57858260-57858349
  hyper
agcttaagaagcccttcgggcagggaggttgagcctggggaggatcggacgatacgatatgtccgatatgaatccgagctacaaatgcc

SEQ ID NO: 5087 - DNA, 53 bp, Homo sapiens
  chr14:60794827-60794880
  hyper
ctccaccctgccgccccgcctcgcggctgggagttgcccgggagctgtgaatt

SEQ ID NO: 5088 - DNA, 31 bp, Homo sapiens
  chr14:61736456-61736487
  hyper
ttctgtctatgtccagcggagggcagcagtg

SEQ ID NO: 5089 - DNA, 89 bp, Homo sapiens
  chr14:62161812-62161901
  hyper
tttgggaccaggcaaccgaaatcccttctcagcagcgcctcccaaagccgggcaccgccttccttcggagaaggcgcagagtccccaga

SEQ ID NO: 5090 - DNA, 93 bp, Homo sapiens
  chr14:62162323-62162416
  hyper
aggagaggctcggagccgggcccggaccccggcgattgccgcccgcttctctctagtctcacgaggggtttcccgcctcgcacccccacctct

SEQ ID NO: 5091 - DNA, 203 bp, Homo sapiens
  chr14:62162425-62162628
  hyper
tttccttctcttctccgcgtgtggagggagccagcgcttaggccggagcgagcctgggggccgcccgccgtgaagacatcgcggggaccgattcaccatggagggcgccggcggcgcgaacgacaagaaaaagtaagcccattccctcggcccgccgccttctcccccggcgaccccgcccgcctgcccgccctgggctcctg

SEQ ID NO: 5092 - DNA, 50 bp, Homo sapiens
  chr14:62162756-62162806
  hyper
ggggtgggagacgcctcgaaagtgctttcaggggccggggtctgagccct

SEQ ID NO: 5093 - DNA, 38 bp, Homo sapiens
  chr14:62162926-62162964
  hyper
gaaatgagctgcagctcggtagccgcggtttgcacccg

SEQ ID NO: 5094 - DNA, 31 bp, Homo sapiens
  chr14:64182959-64182990
  hyper
ccagcactttgggaaacgggggtgagaggat

SEQ ID NO: 5095 - DNA, 31 bp, Homo sapiens
  chr14:64320708-64320739
  hyper
tcctgtgtagcattcgcgtttgtggaagcct

SEQ ID NO: 5096 - DNA, 1 bp, Homo sapiens
  chr14:65005599-65005600
  hyper
g

SEQ ID NO: 5097 - DNA, 9 bp, Homo sapiens
  chr14:65005779-65005788
  hyper
tttcaaagt

SEQ ID NO: 5098 - DNA, 31 bp, Homo sapiens
  chr14:65005802-65005833
  hyper
catgagcctccacacccgtccaggagcccat

SEQ ID NO: 5099 - DNA, 31 bp, Homo sapiens
  chr14:65170682-65170713
  hyper
gaaaagcggacacggccggctctggtaggat

SEQ ID NO: 5100 - DNA, 99 bp, Homo sapiens
  chr14:65170904-65171003
  hyper
ggctgcccgggggtgcgcgctcatcaccctgcgggcgttaatcgttaaccgcgcccaggcctcgccgccgccgcagccttaccccggctctggctcgcc

SEQ ID NO: 5101 - DNA, 61 bp, Homo sapiens
  chr14:65171012-65171073
  hyper
aggttgccccggcccccgcagagccgccaattgctggactgcagccgcgagctggagtctc

SEQ ID NO: 5102 - DNA, 66 bp, Homo sapiens
  chr14:65171081-65171147
  hyper
ggaaaaattcctggcccgcccctccctcgctccctcgctccctcgctccctcgctccctcgctccc

SEQ ID NO: 5103 - DNA, 31 bp, Homo sapiens
  chr14:65171882-65171913
  hyper
tcgctgttgggaatctcggctacctgtccgg

SEQ ID NO: 5104 - DNA, 31 bp, Homo sapiens
  chr14:66974386-66974417
  hyper
ctgtcatagtagccaccgttctgccactcat

SEQ ID NO: 5105 - DNA, 31 bp, Homo sapiens
  chr14:66974577-66974608
  hyper
aacgaggtgtcaggctcggcaggggattgct

SEQ ID NO: 5106 - DNA, 54 bp, Homo sapiens
  chr14:66974621-66974675
  hyper
cggccgaggttgcgttcgtgcctcgcgcgcacacgctccgcgttcactcagcca

SEQ ID NO: 5107 - DNA, 75 bp, Homo sapiens
  chr14:66974894-66974969
  hyper
cttgggtctcgcgctccgcagagcgttccgacactctccggcctcgttctgccgcctccgcgcgctctccccgtg

SEQ ID NO: 5108 - DNA, 31 bp, Homo sapiens
  chr14:66975756-66975787
  hyper
cacctgggcggccccacgccagtatctgtgc

SEQ ID NO: 5109 - DNA, 60 bp, Homo sapiens
  chr14:67826024-67826084
  hyper
tgtagggcagaggtggcgacggttcagttatataaatccagtgcccggctcaataagggt

SEQ ID NO: 5110 - DNA, 123 bp, Homo sapiens
  chr14:67826123-67826246
  hyper
gacctccacaaaagcccgccggccgggcgccttttcctaccggctgggatcgcttcgtccagcctgattcactcaggaggaatgcgcgaagaggccgtcaggaagcctcgccctagactcaag

SEQ ID NO: 5111 - DNA, 30 bp, Homo sapiens
  chr14:67878763-67878793
  hyper
cgccgtcctccatgtcgccgcccgcacgcc

SEQ ID NO: 5112 - DNA, 31 bp, Homo sapiens
  chr14:69258877-69258908
  hyper
caagccagcattttgtcgccacctccccccc

SEQ ID NO: 5113 - DNA, 31 bp, Homo sapiens
  chr14:69259342-69259373
  hyper
cctgccaggcaaacttcgcccctcaaaaccc

SEQ ID NO: 5114 - DNA, 31 bp, Homo sapiens
  chr14:69259383-69259414
  hyper
attcacatgtaatccccgccagcaactgttg

SEQ ID NO: 5115 - DNA, 31 bp, Homo sapiens
  chr14:69259419-69259450
  hyper
caaagggtgggaaggacggggccaaattcct

SEQ ID NO: 5116 - DNA, 31 bp, Homo sapiens
  chr14:69259474-69259505
  hyper
gagaaaagaatcatctcgctgcaccactttc

SEQ ID NO: 5117 - DNA, 112 bp, Homo sapiens
  chr14:69444742-69444854
  hyper
cactggccactgtgcccgggtcccatcgccagctccgagcccagctcccgtggcggggcgcgcacccggcacaccgcgcctgcctgggatgcagctccgtggctaagtaggg

SEQ ID NO: 5118 - DNA, 112 bp, Homo sapiens
  chr14:69444880-69444992
  hyper
ccctaagactgaccctcgttctgcagcccctcaactcgaaccgagctgcccacctttcccgggggtcggaggggcaggacgtagcgcaagcccatgtcggggttacagcttc

SEQ ID NO: 5119 - DNA, 102 bp, Homo sapiens
  chr14:69445111-69445213
  hyper
cttctccaggcagatccggaggcggccgccgatctctccggcgctctcccctccgcctaaggggcagcagggtcccgggaggcccgccgctcaggttgaacc

SEQ ID NO: 5120 - DNA, 31 bp, Homo sapiens
  chr14:69445726-69445757
  hyper
tctggctgcatgtaatcgttggtttgctgag

SEQ ID NO: 5121 - DNA, 31 bp, Homo sapiens
  chr14:69445764-69445795
  hyper
atggtccatgatggtgcgcgcgtgctagggt

SEQ ID NO: 5122 - DNA, 31 bp, Homo sapiens
  chr14:69445827-69445858
  hyper
acggctgctgccctggcgtggggagggagta

SEQ ID NO: 5123 - DNA, 156 bp, Homo sapiens
  chr14:69445870-69446026
  hyper
gctgggctggcggggccgggctcgctcccctgcgcccggttccgccgcggcgctgctggcgaaggctgctactggcggcgacagcggcggctgggctcgcggactgcctgcctctgggcgggcgcttggacctaatctccacgcacactgaactag

SEQ ID NO: 5124 - DNA, 44 bp, Homo sapiens
  chr14:69446237-69446281
  hyper
cggtgcccgttcccccgcggctcatgtgacgccagcttaagctg

SEQ ID NO: 5125 - DNA, 31 bp, Homo sapiens
  chr14:69446438-69446469
  hyper
aggacgcgaggaaacccgaagaacattcatt

SEQ ID NO: 5126 - DNA, 51 bp, Homo sapiens
  chr14:69446487-69446538
  hyper
ctgggtctgggcaggtcggcaccctaggaaagggggcggagtggggcaatg

SEQ ID NO: 5127 - DNA, 132 bp, Homo sapiens
  chr14:69446546-69446678
  hyper
tttcttgggaatttcacgactccaccgccgccccccccggccccgccccaccccaccccaccctacaaggcgcgacccggctgatccctgccctgcaggaacccggtttctcgccagcgaactgctctcaga

SEQ ID NO: 5128 - DNA, 31 bp, Homo sapiens
  chr14:69618276-69618307
  hyper
agcagccaagcaggaacgcccaatcagccgt

SEQ ID NO: 5129 - DNA, 49 bp, Homo sapiens
  chr14:69658737-69658786
  hyper
ttttctctcctggattcgtgtgagccgccaccctcgctaccatccctgt

SEQ ID NO: 5130 - DNA, 31 bp, Homo sapiens
  chr14:69658802-69658833
  hyper
ctgctctgggccttgccgggagccacctctt

SEQ ID NO: 5131 - DNA, 105 bp, Homo sapiens
  chr14:70826256-70826361
  hyper
gagagtcttgttcttgcgaaaagcacgcatcaccgcgggtgcaaacatgagtgaactcttccatcggctcagaactccaagcgggcctagcgcagactcccaaat

SEQ ID NO: 5132 - DNA, 31 bp, Homo sapiens
  chr14:70826438-70826469
  hyper
cttagtgaatggtttccgctaggcaaaagca

SEQ ID NO: 5133 - DNA, 54 bp, Homo sapiens
  chr14:70826504-70826558
  hyper
gaaatgtgggcgtcagcgtttttggttccgtaacgtcggcgtgcaattgggatt

SEQ ID NO: 5134 - DNA, 61 bp, Homo sapiens
  chr14:71108797-71108858
  hyper
cggcggcgggcagatcgcggcgcgcaccaggcgccggggcggcggccgaatggagagaaag

SEQ ID NO: 5135 - DNA, 31 bp, Homo sapiens
  chr14:73485669-73485700
  hyper
tggcacataatatatgcgccaaaaatgtgat

SEQ ID NO: 5136 - DNA, 63 bp, Homo sapiens
  chr14:74180609-74180672
  hyper
ccgcctgcagcaggggcgtcgcgtcgtcgtgcagcgggcgaggagcgacggcgggcggcgaag

SEQ ID NO: 5137 - DNA, 47 bp, Homo sapiens
  chr14:74180851-74180898
  hyper
gcgggccagcggaaagcggcttcttggcgggcgcggggactcctctg

SEQ ID NO: 5138 - DNA, 31 bp, Homo sapiens
  chr14:74238785-74238816
  hyper
gtccacgctgtgaacccgagttactcagcca

SEQ ID NO: 5139 - DNA, 31 bp, Homo sapiens
  chr14:74254432-74254463
  hyper
tctgcatgatgtccctcgtcatttctacggg

SEQ ID NO: 5140 - DNA, 55 bp, Homo sapiens
  chr14:75743667-75743722
  hyper
aagtggcccagttccacgaatccccgcctcctgccctccccgctcctgccgggtt

SEQ ID NO: 5141 - DNA, 31 bp, Homo sapiens
  chr14:75743729-75743760
  hyper
taagaatggaggttagcgcacagcctcgcgc

SEQ ID NO: 5142 - DNA, 91 bp, Homo sapiens
  chr14:75743971-75744062
  hyper
ctcctggctcccgggcgcggcggctggaggcaggtctgcggtccggctccccgcgcgccccgaactatccgcccgccggcctcatcctgcc

SEQ ID NO: 5143 - DNA, 37 bp, Homo sapiens
  chr14:76819084-76819121
  hyper
aacttttctatgtcctcggccccggttgctctgagct

SEQ ID NO: 5144 - DNA, 34 bp, Homo sapiens
  chr14:76842686-76842720
  hyper
ttccgcgtgatttccccgccgtctttctctacca

SEQ ID NO: 5145 - DNA, 119 bp, Homo sapiens
  chr14:77493393-77493512
  hyper
ggcctccgccaccccccgggttgggcagccccgtaaccagcccaccgtgcgttccacgccgagacgccaccgacgccgccgctgaagaagaattggggctctgacggttcagctctggg

SEQ ID NO: 5146 - DNA, 232 bp, Homo sapiens
  chr14:77493527-77493759
  hyper
gttggtttggggaagccgtttgggccccccaggccgttgggcagtcgcgcggtgtggctgctgcttcccaggctcaccggcggtggcgggtactcgaagcggctgcgctgttccaccgcagcggcggcggcggcggcggcggcggcggcagcgcttaggccgtagcgctccaggccagacggggccgccagcaccgcaggcttgctggaaccatcaacgtggttgagctgtt

SEQ ID NO: 5147 - DNA, 31 bp, Homo sapiens
  chr14:77499643-77499674
  hyper
cctaaaggagtaatcccggtatttgaaaaaa

SEQ ID NO: 5148 - DNA, 36 bp, Homo sapiens
  chr14:81901991-81902027
  hyper
gttgcaccagaacacacggacgcgcacacacacgca

SEQ ID NO: 5149 - DNA, 55 bp, Homo sapiens
  chr14:81902329-81902384
  hyper
atgaagacatcctgggcgtcccaatctcgaagacacccgtcggccagaagtgtct

SEQ ID NO: 5150 - DNA, 150 bp, Homo sapiens
  chr14:81902633-81902783
  hyper
gcctcctgctgcggggcgtgggtgcagttacctgcgccgcggtccgcagggtccccggcgtccgccgaaaggtcgccgcggcaaagccggcttctctggccgcgggatacccacccggccgcactgctctcgccacgatccctcccggcc

SEQ ID NO: 5151 - DNA, 31 bp, Homo sapiens
  chr14:88459618-88459649
  hyper
ggtcaagggcctctgacgcagctggcggagt

SEQ ID NO: 5152 - DNA, 49 bp, Homo sapiens
  chr14:88789941-88789990
  hyper
ggaagccgcggaggggcggggaacgagcggtgggcgcgccgctacttac

SEQ ID NO: 5153 - DNA, 168 bp, Homo sapiens
  chr14:88789998-88790166
  hyper
ccggccggcgggcgggcgtggaggcggcagcggcgcgcttgctggagttgcagccggagacacgcttggttgcctggaaggcgctgcaggaggcggaggaagggccgctgcggctccgccgcagacctcggcctccgggtcacctcttctcaccgctctcaccctgag

SEQ ID NO: 5154 - DNA, 53 bp, Homo sapiens
  chr14:89020728-89020781
  hyper
tgatccagaattaacccgcaacaatcggccagggcgttcggaatagaagttca

SEQ ID NO: 5155 - DNA, 31 bp, Homo sapiens
  chr14:89020800-89020831
  hyper
ctcaagtatatgagagcgaacctgaaaaaca

SEQ ID NO: 5156 - DNA, 399 bp, Homo sapiens
  chr14:89020844-89021243
  hyper
tgttacgctcccgctacgggtctggccgccgcgccccattctccgggattccggggccgcgggcgcgctccggggtccgggcgagtggacacaccccaccgctcgggccagccgcccgcccctcccgccggccggggaccgcgccctcacctgctcccgctcccgctcccgcatcctcggggccgcgcgccccgctcagcgacccgcctcccggggccccgccgcgcggccgccgcagccgcacccgcacgccagcccgggccgcggcgcgctcatggggctcgcacgcctcacttcctgtctccaaaaacccggctcgcagaccattcccctgggcagagtccggcggtggcgacggcgaggggcgaggcctggaggtgggaccggccggcgaggagc

SEQ ID NO: 5157 - DNA, 31 bp, Homo sapiens
  chr14:89021244-89021275
  hyper
ccgcacaaagaagccccgtgggggcgggggg

SEQ ID NO: 5158 - DNA, 36 bp, Homo sapiens
  chr14:89021377-89021413
  hyper
tccggggaggcggcggcggcccgtgacctcagagag

SEQ ID NO: 5159 - DNA, 62 bp, Homo sapiens
  chr14:89290984-89291046
  hyper
ccagctcttcactccacgcccacctctctcctggagcgctgggccttcgctggccgcaccgg

SEQ ID NO: 5160 - DNA, 31 bp, Homo sapiens
  chr14:89291184-89291215
  hyper
agcctgtgcatcctgacgctgaggctgcggg

SEQ ID NO: 5161 - DNA, 31 bp, Homo sapiens
  chr14:89506987-89507018
  hyper
ggtctaaaagggagaacgacatccttatgac

SEQ ID NO: 5162 - DNA, 42 bp, Homo sapiens
  chr14:89507057-89507099
  hyper
ggatgaggagaggttgcgtaaaggtgccggcctgctgctggc

SEQ ID NO: 5163 - DNA, 45 bp, Homo sapiens
  chr14:89884246-89884291
  hyper
tctcaagtgggttgtgcggaacgccccggccggcctagagagaaa

SEQ ID NO: 5164 - DNA, 30 bp, Homo sapiens
  chr14:90849827-90849857
  hyper
gccctcgcccttgcctcgccccgcccgcga

SEQ ID NO: 5165 - DNA, 38 bp, Homo sapiens
  chr14:90849897-90849935
  hyper
cgcttgacgggcggtggttcccccgagacagaaacttg

SEQ ID NO: 5166 - DNA, 49 bp, Homo sapiens
  chr14:91976435-91976484
  hyper
gccagtggctcccttccgctccccctgttttaaacgtcagaagccgaca

SEQ ID NO: 5167 - DNA, 31 bp, Homo sapiens
  chr14:92302266-92302297
  hyper
gggctggggtctccaccgtccccggtcacgg

SEQ ID NO: 5168 - DNA, 31 bp, Homo sapiens
  chr14:92789107-92789138
  hyper
tcctgcatcttccccccgtggtgggtggcgg

SEQ ID NO: 5169 - DNA, 31 bp, Homo sapiens
  chr14:93214735-93214766
  hyper
atcccagccctgaggtcgagagcctgagaga

SEQ ID NO: 5170 - DNA, 237 bp, Homo sapiens
  chr14:93214771-93215008
  hyper
cgggaggccctggcctcgggcgtggggactgaacccggttctgtgctggggctcgcggttacctgtggcaggcgaccgtggtggcagtggtggcggcggcggcggtgagtgaccgcggtggtggcgccggcgggaccgtgagaactcgcggcggctcgcagcctcacaccaaacacccacgacgtcggcactgctgtgattgctgcgggcgccgccgctcctcgcttaagggccact

SEQ ID NO: 5171 - DNA, 99 bp, Homo sapiens
  chr14:94406083-94406182
  hyper
cgccagcaggagagctcgggcgccaggctcggctggtcgccctgaccgcgggctgcgacgcggatcccaccggcagggggcgccgcgggtcaaccattc

SEQ ID NO: 5172 - DNA, 74 bp, Homo sapiens
  chr14:94492879-94492953
  hyper
cactatggtcagtgatcgtgggggatcgcgaagggggagcgggcagggggcgcggtgggcggggtcgctgccgg

SEQ ID NO: 5173 - DNA, 36 bp, Homo sapiens
  chr14:94492963-94492999
  hyper
cccgcgggacgggggtcggacgcgaggctcagcccc

SEQ ID NO: 5174 - DNA, 31 bp, Homo sapiens
  chr14:94493019-94493050
  hyper
ccgaccccctgaaatacggagtccggacgga

SEQ ID NO: 5175 - DNA, 31 bp, Homo sapiens
  chr14:94493109-94493140
  hyper
ctcggccccgagcccccgcccccagcgtgtc

SEQ ID NO: 5176 - DNA, 36 bp, Homo sapiens
  chr14:94640375-94640411
  hyper
gaggcaaaaggctctgcgcacgcgctgtggggtggg

SEQ ID NO: 5177 - DNA, 35 bp, Homo sapiens
  chr14:94640412-94640447
  hyper
cacacttggttgggggcggacgggggtttaggaga

SEQ ID NO: 5178 - DNA, 31 bp, Homo sapiens
  chr14:95932616-95932647
  hyper
cacctgcctcctgggtcgggggtctgtgctg

SEQ ID NO: 5179 - DNA, 31 bp, Homo sapiens
  chr14:96499773-96499804
  hyper
aacttttaaatgagcacgtagaaacctagta

SEQ ID NO: 5180 - DNA, 31 bp, Homo sapiens
  chr14:96678012-96678043
  hyper
cccgctcctcctttttcggaagccaggcaca

SEQ ID NO: 5181 - DNA, 31 bp, Homo sapiens
  chr14:96678098-96678129
  hyper
ggtctctgggatccttcggttccttcagcta

SEQ ID NO: 5182 - DNA, 31 bp, Homo sapiens
  chr14:99737280-99737311
  hyper
gcgtccggctgctcggcgccccaactccccg

SEQ ID NO: 5183 - DNA, 31 bp, Homo sapiens
  chr14:99737544-99737575
  hyper
cggcgggacattgccccggcatctattctgg

SEQ ID NO: 5184 - DNA, 31 bp, Homo sapiens
  chr14:99740292-99740323
  hyper
caacaccccacctccacgtggtccaaagtct

SEQ ID NO: 5185 - DNA, 58 bp, Homo sapiens
  chr14:99740835-99740893
  hyper
agcaggaagtagctggcgtgggccggcgcgtgccccacggacccgaggagcacttcct

SEQ ID NO: 5186 - DNA, 31 bp, Homo sapiens
  chr14:99741285-99741316
  hyper
gtctcacgttccaagccggatcaatagccgc

SEQ ID NO: 5187 - DNA, 31 bp, Homo sapiens
  chr14:99741326-99741357
  hyper
accttgacctctccctcgaccctgccaggct

SEQ ID NO: 5188 - DNA, 31 bp, Homo sapiens
  chr14:100069925-100069956
  hyper
tgcgagcgggccacctcgtgccacacggcgc

SEQ ID NO: 5189 - DNA, 44 bp, Homo sapiens
  chr14:100070063-100070107
  hyper
tgcagccgctggttcacgtccttgaggccgcggatctccagcag

SEQ ID NO: 5190 - DNA, 41 bp, Homo sapiens
  chr14:100070159-100070200
  hyper
atgaggcccaccttctcgccctcggcgcgccgcagccgccg

SEQ ID NO: 5191 - DNA, 281 bp, Homo sapiens
  chr14:100070244-100070525
  hyper
cctggctcagctcctccgacgccgccgccgccgtcgccgcgggcttagccatggcggggccgtcaccgcggcatcgccctcgccctcgcccggccggcgcttccccgcgccggggctccgctgggccggtccgcgcgcgggcggggggcggccgggggcgcgtgcggcccgccccgcgccgcctggcgcgtcctctcgccgcgcccgccggggccgcccgggagcccgcgcgcctcggggttgacgagcggaggcggctgctgcgtcggcggccgcggtgc

SEQ ID NO: 5192 - DNA, 240 bp, Homo sapiens
  chr14:100070680-100070920
  hyper
ccgccgtccccctgcgcggtgcgcccgcccgtccagtgccctctcagaggcgcgttccggccgcggtcccgccctcccggccgggcgattgggccgctccgggggtgtgcgggaggggcggggcgcgcgcgggggaagctgcggcggtggtacggtccatccgcggggtttccgacccccgcccgcggccggctcccggcggttcaagtttctgcgcccggaggacgcggccttagccaa

SEQ ID NO: 5193 - DNA, 98 bp, Homo sapiens
  chr14:100071075-100071173
  hyper
gataaacaaatacccacgatccgggcgacggcgccccttctccctcccgggggcaccagagttcagggcagtcggagacacagcgaacaataggactg

SEQ ID NO: 5194 - DNA, 79 bp, Homo sapiens
  chr14:100071305-100071384
  hyper
ccagggctgagctaaacgctggcgtccgcgcccctgcagggccagggccttgccagccgcgtcccgcagcgcggtcagt

SEQ ID NO: 5195 - DNA, 31 bp, Homo sapiens
  chr14:100071387-100071418
  hyper
ctctgccccgatggggcgagagctccgggaa

SEQ ID NO: 5196 - DNA, 92 bp, Homo sapiens
  chr14:100071435-100071527
  hyper
gcggcgctcggagccccgctccacctccgctcactcgaccgctaaatccctgggattcgggagataatctgcaattcgcggggtggaaacca

SEQ ID NO: 5197 - DNA, 41 bp, Homo sapiens
  chr14:100071548-100071589
  hyper
cccactggggcctgaacgccggggtccgggggcgccgagcc

SEQ ID NO: 5198 - DNA, 141 bp, Homo sapiens
  chr14:100150247-100150388
  hyper
tgccgttatttggaggcgccgaagcgggcggagccagccagcaggacttcgcgccgccgccgggccagagcgctgaggatcggcgttgccagggacaacgcgttctgggcggagctgctgctggggcggacctgagtctga

SEQ ID NO: 5199 - DNA, 154 bp, Homo sapiens
  chr14:100150582-100150736
  hyper
tgggaggggtcggagtcggcgggggcggagccgagcgggcggggagggtgctgggtcgcgcctggcctggggccgaggcggcgcgcggcgctgacagctgagtcggctcgcggcctcccggccccctcggcgcccggcccgaccctggcctggc

SEQ ID NO: 5200 - DNA, 41 bp, Homo sapiens
  chr14:100772012-100772053
  hyper
gggcggcgttccaaggcgtgactcggcgccagagtggttca

SEQ ID NO: 5201 - DNA, 63 bp, Homo sapiens
  chr14:100772055-100772118
  hyper
gccctccaaggccagccgagtagggggtcggctccgtagccccaaccccgctggatggctgcg

SEQ ID NO: 5202 - DNA, 31 bp, Homo sapiens
  chr14:100773414-100773445
  hyper
gaggctgggatttgggcggagagcagggaac

SEQ ID NO: 5203 - DNA, 31 bp, Homo sapiens
  chr14:100773473-100773504
  hyper
gggcgcagcaggccttcgggccacagctcct

SEQ ID NO: 5204 - DNA, 60 bp, Homo sapiens
  chr14:101033673-101033733
  hyper
ctccccagaagctgtcgcgggattcccccaaaatggctccaagacgcggctgcctggtcc

SEQ ID NO: 5205 - DNA, 71 bp, Homo sapiens
  chr14:101053019-101053090
  hyper
gaggatagtacctgccgcgaggtactgaatgggatggtggtgtccgaggttcgtgcgcgcccacgcgctgc

SEQ ID NO: 5206 - DNA, 31 bp, Homo sapiens
  chr14:101053119-101053150
  hyper
gcctccttccggctcccgggcctttctccgg

SEQ ID NO: 5207 - DNA, 147 bp, Homo sapiens
  chr14:102975680-102975827
  hyper
cccgccacctcctacccgtcccctcccggcctgcacggccagacgtcgggcggcggagggtcgcggggccgagcggggcgtccgcgcgcaggtggccggcgcagcgagggctgcacctgcgtgcgcgtgtgccggaggaggaggggg

SEQ ID NO: 5208 - DNA, 31 bp, Homo sapiens
  chr14:102975895-102975926
  hyper
gtccccgcccctgccgcggaccggagcgcgc

SEQ ID NO: 5209 - DNA, 114 bp, Homo sapiens
  chr14:102975944-102976058
  hyper
gcgggcaaaggtcccacgacggacgcacgggagggagccaccgccgcccgcgcccgccgcagccgcgctctgagccgccgcggccggatcgcagggcggcggtgccgtcgccgg

SEQ ID NO: 5210 - DNA, 94 bp, Homo sapiens
  chr14:103021625-103021719
  hyper
gggggcgccaggcttccgggtcctgcccccgccccgtggggaacagcaggacggcgccgaggccgtttcgctttcctccgcgcccatttgccgg

SEQ ID NO: 5211 - DNA, 43 bp, Homo sapiens
  chr14:103022076-103022119
  hyper
ggtcacagcagcccctcgggcttatagccgggttgttctttcc

SEQ ID NO: 5212 - DNA, 53 bp, Homo sapiens
  chr14:103242510-103242563
  hyper
cttccagcagccaggtcggactatctggggttctggaacgttccatgggtgaa

SEQ ID NO: 5213 - DNA, 31 bp, Homo sapiens
  chr14:103263057-103263088
  hyper
gtgcctctgcttctaccgtgattcctgaggc

SEQ ID NO: 5214 - DNA, 48 bp, Homo sapiens
  chr14:103523057-103523105
  hyper
ggatgagggggcgggacgatcgaacgcggatgtcgagcctagggaggg

SEQ ID NO: 5215 - DNA, 229 bp, Homo sapiens
  chr14:103523110-103523339
  hyper
agggatgaaaagctagcggagggacgagggtgcaaggagcggctggagagagatgggctgcgggcctgggggcgctgccagagcgagaggaggcgaagcccacgagctgggtgggcaggagggcggcagggtctgtccgggcggggatgggcgggcgtggggatgcgcgggctggggcgcgggggtcgcagagccgcaggtccggccctgccggcgcgcacttacccca

SEQ ID NO: 5216 - DNA, 136 bp, Homo sapiens
  chr14:103523340-103523476
  hyper
tcgaggaactcggccacgtacttgtcgcggcgcagggccgagtggctgcactcggtgtacaggcagacgagcacgtcgagcagcgtttccacgctcagggcgctctcgttgcgccagggcccgtccaggagcagct

SEQ ID NO: 5217 - DNA, 252 bp, Homo sapiens
  chr14:103523477-103523729
  hyper
ctccagcttcttgagccgcaccttggccgacatggtgccgcgcggcccgctcccgacgcgccggcctctcaccgccggctcggccagtccgtcagggcgcgccctcgggggctcggcggctgcgagccccggcagcagcggcgcctcctcgccgccccgtccgcgtcgtcgcgccccggcctaggccgacatcttgggctccgtcccgacggcgcagagtctggggcgccgggccccgcgggtccatgggcc

SEQ ID NO: 5218 - DNA, 31 bp, Homo sapiens
  chr14:103523757-103523788
  hyper
cccagctcgggcggcccgcccccgccgccct

SEQ ID NO: 5219 - DNA, 222 bp, Homo sapiens
  chr14:103523852-103524074
  hyper
tagcgctgcgcaagcccggccggcgcccgagcccgaccccagccccgacccggcggcccagccccgcggcccgcagccaaccagggcgcggccagcaccagcgcagccaaccactacggggccggccgccgccgcgctgacctcagcgcgccgccccgccccgcgcccggctccctgctcccggcgggctcgggcctcgccgcttgccgtagggagccggga

SEQ ID NO: 5220 - DNA, 43 bp, Homo sapiens
  chr14:103524178-103524221
  hyper
gagcgcgcctggtgggcgtgtgcgccttcgccctgcggacccg

SEQ ID NO: 5221 - DNA, 309 bp, Homo sapiens
  chr14:103524235-103524544
  hyper
cggggtccgaccgcgcgcgtcgcggatcccggggccgaagacgaccccaagtatcggagaggcagagtcgcgatctcaggccgtcgagccccgtcccgcagtccgcgggcccatgttgcctgcggggcctcggacctgcccggccgaggtgggggtcgagggcggcccggcaggcgcagctctgatggcctcggcgggttgtgggctatttaaaacggcttgtcccagctcgaagcggtcctggaagactcgggccctacccctgactttaccgatgagagactgaggcccagacggtgtggggtcagg

SEQ ID NO: 5222 - DNA, 37 bp, Homo sapiens
  chr14:103541956-103541993
  hyper
cgggggaggctggaggcggcggcgagggggacaggag

SEQ ID NO: 5223 - DNA, 36 bp, Homo sapiens
  chr14:103541998-103542034
  hyper
cccggctcctccgcccgcggccgccgagggacgtgg

SEQ ID NO: 5224 - DNA, 31 bp, Homo sapiens
  chr14:103542258-103542289
  hyper
gtggagcctcttaggacgacatccaaacacc

SEQ ID NO: 5225 - DNA, 38 bp, Homo sapiens
  chr14:103593883-103593921
  hyper
cacctggccgccgtggcgcagttcgagctgtgcgagcg

SEQ ID NO: 5226 - DNA, 36 bp, Homo sapiens
  chr14:103593973-103594009
  hyper
gaccaggggctgggcccgggccggcagggagggtgt

SEQ ID NO: 5227 - DNA, 96 bp, Homo sapiens
  chr14:103594011-103594107
  hyper
tctgtaggaggggtgtcgaggggtgtcgaggtgtgccgccggcagcttttagtgaggtcggtgtttgcagagttttgggtccgagaatgcaggggt

SEQ ID NO: 5228 - DNA, 44 bp, Homo sapiens
  chr14:104582814-104582858
  hyper
gcgtgagggggtagggcgtccctccccccgcgtgggaaatgagg

SEQ ID NO: 5229 - DNA, 215 bp, Homo sapiens
  chr14:104583110-104583325
  hyper
cggccaaggtggagccccgggccctccgtgcgcccgagcacccccggcccagacgagacggttcgggcgtggcccggcggggacccagaacccgggaggccaggtgcgcccaggccaggcgctggaggctggggcgccggatggggcggggcggccgctgagtcagggccacccccgcgcgggcgcgcggagcaggtccccgggccgtggaggat

SEQ ID NO: 5230 - DNA, 99 bp, Homo sapiens
  chr14:104583359-104583458
  hyper
gcccggaaaaaccggtcgggccagcgcggcgcgggcacattccggcgccgggaagggcggctgcgccgcataaaaggcgccgccgcgctggccaccgcc

SEQ ID NO: 5231 - DNA, 15 bp, Homo sapiens
  chr14:105190900-105190915
  hyper
cgcttggatgccttc

SEQ ID NO: 5232 - DNA, 84 bp, Homo sapiens
  chr14:105195821-105195905
  hyper
gggagggaggaggtagcgtcggcgtgggggaggagcgtggcgtcggcgtcgtggggaggagcgtggcgtcggcgtggtggggag

SEQ ID NO: 5233 - DNA, 31 bp, Homo sapiens
  chr14:105269070-105269101
  hyper
cactatcttcctctcccgtcccctccagcca

SEQ ID NO: 5234 - DNA, 57 bp, Homo sapiens
  chr14:105330613-105330670
  hyper
tgcggggccaggtgggcgttgtcgcagccgggaacgcccagccgctccagctgccca

SEQ ID NO: 5235 - DNA, 111 bp, Homo sapiens
  chr14:105330828-105330939
  hyper
ccagggacaccggatacgcctattgtagcacccggcaaggagcgagcagtccgcgggaacttacccaggaaccccgagcgcctccgtagttcccaaccccacccccacccc

SEQ ID NO: 5236 - DNA, 328 bp, Homo sapiens
  chr14:105330980-105331308
  hyper
cgtcgatgcccaccaccatcgcccccagctcagcccagagcgcccggggtcagaggtggagatgtcggacatacgcccagtctggccaggctcgggagggaaaatctgggagcggcctctggaactcaccctgactccttcaccgtccgctcctctttttggcttccggggccaaaggttggggactcgaggcgcggctggagcctacagctcctggagcgtagttaagcgttaacccgctggccctgggccagggcgcggggctgctgtgcgcacccggttccgcccgtcgagctggggccggaccgggaggcgaagcggggggcgc

SEQ ID NO: 5237 - DNA, 85 bp, Homo sapiens
  chr14:105331418-105331503
  hyper
ctcgccaagcctctgccgaccggaccacgcgcggggctaccggggcgggctcacctggcggccgcggacccgccctaacctggtt

SEQ ID NO: 5238 - DNA, 31 bp, Homo sapiens
  chr14:105331549-105331580
  hyper
cgggcgggggcgtgcccggggcggggcgttc

SEQ ID NO: 5239 - DNA, 101 bp, Homo sapiens
  chr14:105331605-105331706
  hyper
gacgtcagggacccgcgcgcgaggccgccggcggccgctctgccgtgggctcggcccgggctgccacgagcgtgcgggcctcgccgggcatgtcctaggcg

SEQ ID NO: 5240 - DNA, 154 bp, Homo sapiens
  chr14:105331744-105331898
  hyper
cgcgagggcagggaccgagccgggccgagctggggaacaagccggggaccaagccggggaccaagccggggactaaggcgagccggagaccgagcccgaacagcaggtaggacgcgccggcccagcgctggccgcggcccgggcctcccatcgc

SEQ ID NO: 5241 - DNA, 31 bp, Homo sapiens
  chr14:105332328-105332359
  hyper
cctgccccgcccggctcgctgcccttccctg

SEQ ID NO: 5242 - DNA, 66 bp, Homo sapiens
  chr14:105332366-105332432
  hyper
cctagccacctttccccgcctcacctctgactgtggcccttccggccggggcggctgaggggacaa

SEQ ID NO: 5243 - DNA, 79 bp, Homo sapiens
  chr14:105332449-105332528
  hyper
ttcttcctcctagcaacgatggccagcccagccccgaggcagccgaaggccgttttggagcgtcgcgggctcccaggcc

SEQ ID NO: 5244 - DNA, 31 bp, Homo sapiens
  chr14:105399680-105399711
  hyper
gcgcctcagctagccccgggtccgcgagaac

SEQ ID NO: 5245 - DNA, 43 bp, Homo sapiens
  chr14:105511966-105512009
  hyper
cacacaaggcagtatcgcgtattttccacgagtgcctgtgcag

SEQ ID NO: 5246 - DNA, 281 bp, Homo sapiens
  chr14:105512039-105512320
  hyper
gatgtgcaaaatgttccgcctgcgaaggttccgcggtggcggggacactgctccggctccgctcccgcccgcccgagcgctcggatggggccgcctctgcactgcgtggccacaggcgcggcccggctgcccacgggcgccctttgcagctgctgccccctggcggccgcgggcggctactagcgggaaagcgaaacccgcccggtccattcaagccccgctgcctggcgccctctagggtcgttcttgggaacgggcggacctttcgtcaacactttgcc

SEQ ID NO: 5247 - DNA, 31 bp, Homo sapiens
  chr14:105512328-105512359
  hyper
cccccattgggggaaccgaggaggaagttaa

SEQ ID NO: 5248 - DNA, 31 bp, Homo sapiens
  chr14:105512364-105512395
  hyper
gatgtgtgtttttgagcgctgctttgtgcca

SEQ ID NO: 5249 - DNA, 31 bp, Homo sapiens
  chr14:105512399-105512430
  hyper
catcttaggtgtgggacgtgtactatctgaa

SEQ ID NO: 5250 - DNA, 48 bp, Homo sapiens
  chr14:105647608-105647656
  hyper
tcccgacaggagccttcgggcgggcgcgtgaccgcggctctgagcatg

SEQ ID NO: 5251 - DNA, 70 bp, Homo sapiens
  chr14:105647694-105647764
  hyper
gggcggccgaggtgggcggggctcgcaggtgccacctgtcgggtgccgcgcgcctcggggcgctggtcgc

SEQ ID NO: 5252 - DNA, 79 bp, Homo sapiens
  chr14:105714362-105714441
  hyper
tcctgacttgcccacccgccggctgtgtgaccttcagcgcgcgactaacctctctgtgcctatttcctcgaggaaaatg

SEQ ID NO: 5253 - DNA, 94 bp, Homo sapiens
  chr14:105781804-105781898
  hyper
cggggcgcgcaggactcggttgtatcctccgtccagcgcgcggtggagatgccctgtcctgcggggcggggtcgtcctcgcgggtacctggttg

SEQ ID NO: 5254 - DNA, 34 bp, Homo sapiens
  chr14:105781903-105781937
  hyper
gtctctcatttagaggcgtcgccaagccagtact

SEQ ID NO: 5255 - DNA, 31 bp, Homo sapiens
  chr14:105781954-105781985
  hyper
gttgatcttgccattgcggaagactggctgt

SEQ ID NO: 5256 - DNA, 31 bp, Homo sapiens
  chr15:20478122-20478153
  hyper
ggaaggctgggcagggcgaggggacaatgca

SEQ ID NO: 5257 - DNA, 31 bp, Homo sapiens
  chr15:20478176-20478207
  hyper
cagcacagccatgctacggccaggtgagacc

SEQ ID NO: 5258 - DNA, 60 bp, Homo sapiens
  chr15:20478212-20478272
  hyper
tgggggcatggaaagccgaattctgctgaaggctcctccaggctacgcagggtgggaagc

SEQ ID NO: 5259 - DNA, 31 bp, Homo sapiens
  chr15:20478294-20478325
  hyper
acaacaagaggaggagcgactgtcctgagtc

SEQ ID NO: 5260 - DNA, 31 bp, Homo sapiens
  chr15:22544585-22544616
  hyper
cacggggtagggagggcgccagctttgctct

SEQ ID NO: 5261 - DNA, 46 bp, Homo sapiens
  chr15:22892152-22892198
  hyper
atttgtccctggttcccgcaggcaatggggccgcaggggccggccg

SEQ ID NO: 5262 - DNA, 45 bp, Homo sapiens
  chr15:22892280-22892325
  hyper
ctcctgccaagtggggcggcgccacacgggcgtcctgggtgtccc

SEQ ID NO: 5263 - DNA, 101 bp, Homo sapiens
  chr15:22892341-22892442
  hyper
agctcaggccaacccccgccctgacccggtggagccccgggacagggtgcggaccccgttccttcgcgctccgaaccggacggacccgcaggaggacccca

SEQ ID NO: 5264 - DNA, 31 bp, Homo sapiens
  chr15:22892733-22892764
  hyper
ggaaactcccagggcccgcccaggaccccca

SEQ ID NO: 5265 - DNA, 54 bp, Homo sapiens
  chr15:22893130-22893184
  hyper
ggcacagctccagtggcgaaggaataccttagtgtttgacgtttttgttggaaa

SEQ ID NO: 5266 - DNA, 43 bp, Homo sapiens
  chr15:22893270-22893313
  hyper
ggagggagcctggtccgcggagccattccgggcattcttggag

SEQ ID NO: 5267 - DNA, 58 bp, Homo sapiens
  chr15:22893326-22893384
  hyper
gctttgttaaggaggcgcgatcgttacggaggcagcactgtttcgcacaagcatctga

SEQ ID NO: 5268 - DNA, 31 bp, Homo sapiens
  chr15:22893392-22893423
  hyper
ttttaaggctgaaatgcgtgagcttaatttg

SEQ ID NO: 5269 - DNA, 361 bp, Homo sapiens
  chr15:22893447-22893808
  hyper
agggtgcaagaataatcgggaaacggggttgatggaacgtgttttaagctgagaggggcgtctggacggtgtcagctccgctattaagtccagtcagggagcggctgctgattgagcccagcgccgcgtggtcgccgctggggactgaggctcgggagcgtttgttttctggcggcggagggcaccgtggctgcgccgggagcggtggtgtttcttgcagtcgtccgtcggactccggaatgaggcgtggtcggagccgcggtgatgcctggtgcagtgcgcacattgctatgcttgacagcttggcggcagagtcccggccaggccgggacccgcgggggccccacgcatgctgcctttt

SEQ ID NO: 5270 - DNA, 46 bp, Homo sapiens
  chr15:29966981-29967027
  hyper
ggcgcggaggaaggggcgggcttccccctgccggcctcccttcctt

SEQ ID NO: 5271 - DNA, 31 bp, Homo sapiens
  chr15:30113644-30113675
  hyper
aaaacccgacctactacgcctcacaggctga

SEQ ID NO: 5272 - DNA, 68 bp, Homo sapiens
  chr15:30113689-30113757
  hyper
agtctcaaagccttatcgctggcgtgcgcataccgcagggagtgacatcagatcgaaactacagggtt

SEQ ID NO: 5273 - DNA, 232 bp, Homo sapiens
  chr15:30113809-30114041
  hyper
gtggcaccccaagccccgacccgctgagagccggcttccagcccccgaaccctcactggagccgagtttctccgcgagggacctgttgcgtgtccccgccctcagcgagccgcagccaggcacaggcgccggcagctatgcacctgcccagtacggcggccgggcgcccgcagccccctccccggccgcccccagtgcggcccgcgccgcccccgcccgaggggctccccgc

SEQ ID NO: 5274 - DNA, 31 bp, Homo sapiens
  chr15:30114043-30114074
  hyper
cccgcggcccgcggcccgcggccccgcgcca

SEQ ID NO: 5275 - DNA, 35 bp, Homo sapiens
  chr15:30114349-30114384
  hyper
cgggggcggccggaagggcccggcccagggggagg

SEQ ID NO: 5276 - DNA, 98 bp, Homo sapiens
  chr15:30114665-30114763
  hyper
ggccacgcaaacctgccggcccggcccactgagcatgcccggcccggcgggggcggggctggacgaggcgaggcgaggcgaggcggggagggggcggg

SEQ ID NO: 5277 - DNA, 59 bp, Homo sapiens
  chr15:31621525-31621584
  hyper
tatcgggtgggggcagcgattggggcgtggctggggttgagatccgctttgggggatga

SEQ ID NO: 5278 - DNA, 141 bp, Homo sapiens
  chr15:32162834-32162975
  hyper
ccccctccccagctgccgctcgcggtcccggtggcctctcctcccccgcctcctcccgcgctccgctccgcccctcgcgcccctccgctccgcccgcggccgcgcacaacgcccgcctcccggctccgcctgctgcctccg

SEQ ID NO: 5279 - DNA, 178 bp, Homo sapiens
  chr15:32162989-32163167
  hyper
tctgacgtcaccggtcgcgttcgcgccccgcccccgccccgcgcggacgtgcgcgcgccgcgcctgtgccccgcccccgcccctccggggccgggcacggagagcgcgtgctcgcggccgcgagccgaggaggggacgtacagcgcccgcgcgcccgcgagcccgctccggctctccc

SEQ ID NO: 5280 - DNA, 31 bp, Homo sapiens
  chr15:37393697-37393728
  hyper
ccagctttgttgtggtcgcccgaggcgcagc

SEQ ID NO: 5281 - DNA, 35 bp, Homo sapiens
  chr15:38365201-38365236
  hyper
cctccccgccggcccgcggccgcagatgggctggc

SEQ ID NO: 5282 - DNA, 31 bp, Homo sapiens
  chr15:38543335-38543366
  hyper
accttaggctccagcccgcaaccccagtagg

SEQ ID NO: 5283 - DNA, 31 bp, Homo sapiens
  chr15:38543406-38543437
  hyper
cttctaacaatgcattcgtgacagctgtcta

SEQ ID NO: 5284 - DNA, 31 bp, Homo sapiens
  chr15:38543603-38543634
  hyper
aatcactccagctttccgagatgaatgccct

SEQ ID NO: 5285 - DNA, 36 bp, Homo sapiens
  chr15:38543654-38543690
  hyper
gtaagaatccaggcagcgaggcgaggtgttaaaaca

SEQ ID NO: 5286 - DNA, 31 bp, Homo sapiens
  chr15:38545321-38545352
  hyper
gctgctgttgctcccccgcctgctgttgctc

SEQ ID NO: 5287 - DNA, 31 bp, Homo sapiens
  chr15:39140581-39140612
  hyper
taggctgctggtgtatcgctaatttcatgac

SEQ ID NO: 5288 - DNA, 36 bp, Homo sapiens
  chr15:39873266-39873302
  hyper
cctccgccttgccagccgctgcgcccgagctggcct

SEQ ID NO: 5289 - DNA, 57 bp, Homo sapiens
  chr15:41046992-41047049
  hyper
ggccagcagaagtcaccgggagcaggcaggcgggcgggcgggcgggggtaaggagag

SEQ ID NO: 5290 - DNA, 31 bp, Homo sapiens
  chr15:41055852-41055883
  hyper
ggcctggagaggcctccgtgaggacgccgtt

SEQ ID NO: 5291 - DNA, 84 bp, Homo sapiens
  chr15:41523077-41523161
  hyper
tagggttcccccccacgcgaagtttctctccgcaatccgtgccacctatcgagtaggattcctagtgttcgattcctgtgagaa

SEQ ID NO: 5292 - DNA, 31 bp, Homo sapiens
  chr15:41952520-41952551
  hyper
cagggaggtgctgctcgcgtctccttttgcg

SEQ ID NO: 5293 - DNA, 77 bp, Homo sapiens
  chr15:42112222-42112299
  hyper
tcaaggatccaaagagcggagatctggagaaacagttctaaagatcccggttaggaggtaagcggagaacttccaga

SEQ ID NO: 5294 - DNA, 31 bp, Homo sapiens
  chr15:42112324-42112355
  hyper
gggacccataactcagcgactgccctggggt

SEQ ID NO: 5295 - DNA, 31 bp, Homo sapiens
  chr15:42112392-42112423
  hyper
aagcaccagtaccttccgttgtcagcaacag

SEQ ID NO: 5296 - DNA, 80 bp, Homo sapiens
  chr15:42868394-42868474
  hyper
aagcagaaggtgagggcgtgagggggaaattgaggccgacacaggtcgcggtttctttctatgctcgacagctgatttaa

SEQ ID NO: 5297 - DNA, 158 bp, Homo sapiens
  chr15:44038551-44038709
  hyper
acgcgcagccaatcagcggctgccacacagcggcccaagccgggtttgggggttgggacctccggctgcaggtccgcctgggccagacgcgcgagcgcaagcagcgggttagtggtcgcgcgcccgacctccgcagtcccagccgagccgcgaccctt

SEQ ID NO: 5298 - DNA, 89 bp, Homo sapiens
  chr15:44068729-44068818
  hyper
tcaccggccgtacctgcggggagagcgaagatgtgaccgttgagcgcaggtgaagcagtgtccccaggatccggcgtccggagcccggg

SEQ ID NO: 5299 - DNA, 44 bp, Homo sapiens
  chr15:44487114-44487158
  hyper
ggtcccgcgggcggggcggggcggcgcggcgctgacctggatgg

SEQ ID NO: 5300 - DNA, 31 bp, Homo sapiens
  chr15:44487214-44487245
  hyper
aggctcctgctgctgccgctcatcaacctgc

SEQ ID NO: 5301 - DNA, 31 bp, Homo sapiens
  chr15:48470239-48470270
  hyper
acctcgccccggttcccggaggaaaagacaa

SEQ ID NO: 5302 - DNA, 31 bp, Homo sapiens
  chr15:48470589-48470620
  hyper
gggagatggtgtgtgccgggtgcggggggtg

SEQ ID NO: 5303 - DNA, 31 bp, Homo sapiens
  chr15:49254968-49254999
  hyper
gggtggggctctcctgcgacggcaaggtggc

SEQ ID NO: 5304 - DNA, 35 bp, Homo sapiens
  chr15:49448551-49448586
  hyper
ggaatttcaagagaaccgagcggaaagggaaatcc

SEQ ID NO: 5305 - DNA, 31 bp, Homo sapiens
  chr15:51812127-51812158
  hyper
acccagccctgaactacgttttaagggcatc

SEQ ID NO: 5306 - DNA, 43 bp, Homo sapiens
  chr15:52029518-52029561
  hyper
ccgggccgcggcggcgcgccctgctcaccgtgacaccgtactt

SEQ ID NO: 5307 - DNA, 50 bp, Homo sapiens
  chr15:52587420-52587470
  hyper
cgaggcgctccagtcccgggagatggggacgcacgcgcgacccctgggca

SEQ ID NO: 5308 - DNA, 54 bp, Homo sapiens
  chr15:52587471-52587525
  hyper
tggggattctaggccccgaggccggagcggcggagggggcggcccctcccacag

SEQ ID NO: 5309 - DNA, 80 bp, Homo sapiens
  chr15:52587536-52587616
  hyper
ccacagggcacccaggcgcagcggagccaggagggggcttacccgcgggcagggacggagcacgccggggccctggaggg

SEQ ID NO: 5310 - DNA, 38 bp, Homo sapiens
  chr15:52587620-52587658
  hyper
cgctcgctcgtgtccccggtccccgtggcccctccgcg

SEQ ID NO: 5311 - DNA, 101 bp, Homo sapiens
  chr15:52587760-52587861
  hyper
gccggctcccccacagcgctcccaggagcccagcggaccctcctacctgcgtgtacagctcggccaccgccatgggcaggaggggccggggccaggccggg

SEQ ID NO: 5312 - DNA, 55 bp, Homo sapiens
  chr15:52588029-52588084
  hyper
ccctccaagcttggcccggctagtcggcgctgccattggccggggccgggcggct

SEQ ID NO: 5313 - DNA, 38 bp, Homo sapiens
  chr15:52820462-52820500
  hyper
ggagctaaaggtgatacggccaccgtttgcaggattca

SEQ ID NO: 5314 - DNA, 35 bp, Homo sapiens
  chr15:52820647-52820682
  hyper
agcaggaggggaggcacgcccgccctgctaaatcc

SEQ ID NO: 5315 - DNA, 152 bp, Homo sapiens
  chr15:52820687-52820839
  hyper
ggccccctttccactccgaagcccgctctgcccccagctcgagcagcgcggcaggggcctgggagacccccgaggcgggccaccttccgccgccttcaccatctcgcccgaaagaggaaggtgccgcagcgggcgaccggctggtagggccg

SEQ ID NO: 5316 - DNA, 31 bp, Homo sapiens
  chr15:52972047-52972078
  hyper
ggcacagagttgtgatcgagccccaagtgga

SEQ ID NO: 5317 - DNA, 49 bp, Homo sapiens
  chr15:55699899-55699948
  hyper
atcatcatcaggctggcgtgctagcggaagtctccgggcattatttaat

SEQ ID NO: 5318 - DNA, 31 bp, Homo sapiens
  chr15:55699958-55699989
  hyper
tctattcctgacatcacgggggctcaaatgt

SEQ ID NO: 5319 - DNA, 45 bp, Homo sapiens
  chr15:56034885-56034930
  hyper
cgcagggcgagagcgggggccgggggtcagcgccaccacggagga

SEQ ID NO: 5320 - DNA, 103 bp, Homo sapiens
  chr15:56285863-56285966
  hyper
ggaggcgctccctcagcgacagcagcgcctcccgcggcgagcgggcactagcggcacccggcagcgcggcgggaaaaggccggcggcgcgcgctcctggggct

SEQ ID NO: 5321 - DNA, 51 bp, Homo sapiens
  chr15:56286050-56286101
  hyper
catggcgtggggagcgcgcgtggcggggcgcgccctcggtcccttcccggg

SEQ ID NO: 5322 - DNA, 41 bp, Homo sapiens
  chr15:56286123-56286164
  hyper
ccggggagccagggagcgccgggaagcgccgggaagccaag

SEQ ID NO: 5323 - DNA, 95 bp, Homo sapiens
  chr15:56286174-56286269
  hyper
cctcagcaacaagtctcgctgagatccgacccagagttcggcctctgactagacgcctgggaatccgtgagcttaatccccgcttaaatcccaaa

SEQ ID NO: 5324 - DNA, 185 bp, Homo sapiens
  chr15:57668692-57668877
  hyper
cgcggcccttgcactccggccgggctctgctggctgcggcgggagctggacgcgggaggaggcggcggcggcggtgagtgagctccgggctggagcggggcggggtgtgcgccggcagccgggtttcggggtgctaggggccgcccagggcggcgggacccccaggggttcgggctcagccaggt

SEQ ID NO: 5325 - DNA, 48 bp, Homo sapiens
  chr15:57668967-57669015
  hyper
ccccgccgagggcaggcgcagaacagatgcgggcgatccctggggaac

SEQ ID NO: 5326 - DNA, 43 bp, Homo sapiens
  chr15:57884056-57884099
  hyper
ccgccccggcccggcccggccccgcccccggccccacccccgg

SEQ ID NO: 5327 - DNA, 49 bp, Homo sapiens
  chr15:59664056-59664105
  hyper
ctggctcttgacagcccgccggccgccaggtgctcgccctacctggcgc

SEQ ID NO: 5328 - DNA, 110 bp, Homo sapiens
  chr15:59664434-59664544
  hyper
ggcagccatagcaacccggccacagaaagtttcgcgacgcagaaaccgacttggaataaagttttccttggcccctcgctcgctctcccccggcccgggtttacggaaag

SEQ ID NO: 5329 - DNA, 80 bp, Homo sapiens
  chr15:59664618-59664698
  hyper
caaggtgggtgcaccacgccggggtttcctgccccgtccccgggtccggcgtcctaggacgcggcgcggccaactcacca

SEQ ID NO: 5330 - DNA, 31 bp, Homo sapiens
  chr15:59664916-59664947
  hyper
ggcggggcgcatgctgcggagggcaagagtc

SEQ ID NO: 5331 - DNA, 15 bp, Homo sapiens
  chr15:61521278-61521293
  hyper
tgcgcaccggggcag

SEQ ID NO: 5332 - DNA, 48 bp, Homo sapiens
  chr15:62683438-62683486
  hyper
gttccttctccggtgccggacactcagacctgccgatcccacgactgc

SEQ ID NO: 5333 - DNA, 80 bp, Homo sapiens
  chr15:62683492-62683572
  hyper
cttggcaatctcgccacgggcgaactgctggccgctgagcgacgggggcagtgccgggccgagagcggggccaggctttg

SEQ ID NO: 5334 - DNA, 56 bp, Homo sapiens
  chr15:62684294-62684350
  hyper
gcggcgacagcagtagcgcccgcggctgcgtgttctgctctcgcagctcgtagagg

SEQ ID NO: 5335 - DNA, 31 bp, Homo sapiens
  chr15:63130478-63130509
  hyper
agggatgcagggattccggtcactgcccctg

SEQ ID NO: 5336 - DNA, 54 bp, Homo sapiens
  chr15:63130537-63130591
  hyper
aacagccagccacaagcgtggtaaaggctgcagtgaagccggcacagcacactc

SEQ ID NO: 5337 - DNA, 31 bp, Homo sapiens
  chr15:63334787-63334818
  hyper
gcccccgcgggaggagcggggagggggcacg

SEQ ID NO: 5338 - DNA, 31 bp, Homo sapiens
  chr15:63341572-63341603
  hyper
tcttggaaaaagttggcgaaatgtcaacagt

SEQ ID NO: 5339 - DNA, 44 bp, Homo sapiens
  chr15:63795900-63795944
  hyper
agctggtagggtgttgcgaggcttaaatgcggtatgggaagtgc

SEQ ID NO: 5340 - DNA, 31 bp, Homo sapiens
  chr15:63795981-63796012
  hyper
tcccttcccttcttatcgcctggtaatgggg

SEQ ID NO: 5341 - DNA, 31 bp, Homo sapiens
  chr15:63796025-63796056
  hyper
cagcaatcccaggctacgtttatctcacttg

SEQ ID NO: 5342 - DNA, 31 bp, Homo sapiens
  chr15:64454727-64454758
  hyper
aaggagagaaaggattcggaatccggcaggc

SEQ ID NO: 5343 - DNA, 31 bp, Homo sapiens
  chr15:66911653-66911684
  hyper
ccaccagatggccccacgccggccactggac

SEQ ID NO: 5344 - DNA, 31 bp, Homo sapiens
  chr15:66994355-66994386
  hyper
aacgcgaggcagaaagcgggccgcgggcgct

SEQ ID NO: 5345 - DNA, 61 bp, Homo sapiens
  chr15:66994944-66995005
  hyper
ctccaagtgcatctagcgcctgggacctgagacggcgttggcctttcgtgcatgcaaatcc

SEQ ID NO: 5346 - DNA, 40 bp, Homo sapiens
  chr15:66995092-66995132
  hyper
caacaagcctgcctttcggatcctgcgggaaaagcccatg

SEQ ID NO: 5347 - DNA, 59 bp, Homo sapiens
  chr15:66995186-66995245
  hyper
cacatttaggggttcgcgcgagcgctttgtgctcatggaccagccgcacaacttttgaa

SEQ ID NO: 5348 - DNA, 132 bp, Homo sapiens
  chr15:66995346-66995478
  hyper
tgtagccgctggccgcgcgcggactgcggctcggcgtgcgcgtgttcccggccgtcccgcctcggcgagctccctcatgttgtcgccctgcggcgccccttcgacgacaggctgtgcgcggtctgcacggcg

SEQ ID NO: 5349 - DNA, 71 bp, Homo sapiens
  chr15:66995599-66995670
  hyper
ttcaggtccaaacgctcggggctggtgcggcgactttggcgaagtcgtgtggtccccgaccgggaggaagg

SEQ ID NO: 5350 - DNA, 74 bp, Homo sapiens
  chr15:66995817-66995891
  hyper
gcgaggcgcccagggcgcggggaggcgccggcgcgcagggggccccccgaggcccatgtcggagccaggggccg

SEQ ID NO: 5351 - DNA, 51 bp, Homo sapiens
  chr15:66996048-66996099
  hyper
gccggcgggcggcgggcggagtcgcgaagcgcgctcgcggctgctgctgct

SEQ ID NO: 5352 - DNA, 31 bp, Homo sapiens
  chr15:67135310-67135341
  hyper
aaagagcattgggctccgggccagagcgccg

SEQ ID NO: 5353 - DNA, 62 bp, Homo sapiens
  chr15:67359190-67359252
  hyper
ggctgtgggtgaggagcgggagcctagtgattgacagattccttcttcgttctttctttgcc

SEQ ID NO: 5354 - DNA, 72 bp, Homo sapiens
  chr15:68177207-68177279
  hyper
accccgcccgccctgccggctccccgtcgcccgccgcgtgtgcagacgcaatcgcaccggaggaattctctg

SEQ ID NO: 5355 - DNA, 31 bp, Homo sapiens
  chr15:68347863-68347894
  hyper
gtgacaaatggggctccgcttgaataatttt

SEQ ID NO: 5356 - DNA, 55 bp, Homo sapiens
  chr15:68347907-68347962
  hyper
gcagttcttaactaacgcgtattatttcgaggctctgaacgcgatcttctctgtg

SEQ ID NO: 5357 - DNA, 31 bp, Homo sapiens
  chr15:69351241-69351272
  hyper
ccaaatcatttggaaacgtggcagaatctgt

SEQ ID NO: 5358 - DNA, 47 bp, Homo sapiens
  chr15:69366699-69366746
  hyper
tcggtttgcaaccctacgaggtcgtggccgctcggggcaggaaagca

SEQ ID NO: 5359 - DNA, 50 bp, Homo sapiens
  chr15:69366759-69366809
  hyper
ccaggatccagcctcccgatcaccgcgctagtcctcgccctgcctgggct

SEQ ID NO: 5360 - DNA, 31 bp, Homo sapiens
  chr15:69453522-69453553
  hyper
ttagcaaggtttacaccggtgtaaaccttgt

SEQ ID NO: 5361 - DNA, 148 bp, Homo sapiens
  chr15:69453587-69453735
  hyper
tttgagcgggcgtgggcgtccgtttcgcattgctgggatgaagaagcagtgtgtccgggttctggggagaggggtctgttcatcggtgtctccgggtgagagagcgatgtatccgttccgctggggccggggccgccttggggggttg

SEQ ID NO: 5362 - DNA, 77 bp, Homo sapiens
  chr15:69453740-69453817
  hyper
ggctgagggtgtgtagcggcgaccagcgtctggccggggtttctgctttgcccggagcggggcggtaacttggcatg

SEQ ID NO: 5363 - DNA, 31 bp, Homo sapiens
  chr15:69453945-69453976
  hyper
gggcagcatcctgaaacgtttttgttcaggt

SEQ ID NO: 5364 - DNA, 69 bp, Homo sapiens
  chr15:69591244-69591313
  hyper
accggcatgggtaggcgcggcgacccgcagggccaggtgcagggcccgcgagtccggggtcgccgcagc

SEQ ID NO: 5365 - DNA, 45 bp, Homo sapiens
  chr15:69591722-69591767
  hyper
cttatccttcctccaccgcccccctcccgccgcccccactttaat

SEQ ID NO: 5366 - DNA, 54 bp, Homo sapiens
  chr15:71055687-71055741
  hyper
ccagacgacgcggggccgggcacgtcctgcctcctcaggcgggacttgaggctc

SEQ ID NO: 5367 - DNA, 101 bp, Homo sapiens
  chr15:71055905-71056006
  hyper
ggcggggctcccctcccgtagccaattgacccgctgccctggcgggggcgtggcaaaccgcgaccaatcggaatgcgggaatggggcgggacttccctttt

SEQ ID NO: 5368 - DNA, 44 bp, Homo sapiens
  chr15:71184310-71184354
  hyper
ctcccctcttaggtgccggggcgggcacccggtgcagggtgggc

SEQ ID NO: 5369 - DNA, 43 bp, Homo sapiens
  chr15:71184362-71184405
  hyper
tgccaccagcctcaggcgctgggagaagcgcaggttcttctgg

SEQ ID NO: 5370 - DNA, 31 bp, Homo sapiens
  chr15:71184965-71184996
  hyper
ctcctcccaatactcccgctctgtttttatg

SEQ ID NO: 5371 - DNA, 130 bp, Homo sapiens
  chr15:71184997-71185127
  hyper
ggctgggaaaatagaacgaggaagtggtgacgcactgggctctcacgaatacaactagaagctgcaacgactgtgtggctctatcgattcgggagaggtccagaccggaaatggtcgtttccatggtaac

SEQ ID NO: 5372 - DNA, 57 bp, Homo sapiens
  chr15:71185143-71185200
  hyper
gggagatgacctctttcgggtctctttgaatctccgctgtagcgtcacctggaaggc

SEQ ID NO: 5373 - DNA, 70 bp, Homo sapiens
  chr15:71185225-71185295
  hyper
ctcctatcatgattcccgggaaatatcgctctgtttctggccgggctgcgaacaacgtaagttgggcctt

SEQ ID NO: 5374 - DNA, 31 bp, Homo sapiens
  chr15:71185319-71185350
  hyper
tactctttctgactggcgtctttgtcctagg

SEQ ID NO: 5375 - DNA, 37 bp, Homo sapiens
  chr15:71185356-71185393
  hyper
gctgtattattaggaccggcaccgctgggtctactca

SEQ ID NO: 5376 - DNA, 31 bp, Homo sapiens
  chr15:71185405-71185436
  hyper
accagggtttgaggttcgtgggctggaccaa

SEQ ID NO: 5377 - DNA, 63 bp, Homo sapiens
  chr15:72564619-72564682
  hyper
gcctccccaggaaagacgctctgggcccgatctatgccgcccggccgccgggcctgagtgaag

SEQ ID NO: 5378 - DNA, 126 bp, Homo sapiens
  chr15:72564700-72564826
  hyper
ggccctcagaacctcccggtccaagcctctcacttcgtccacccctgcggagacggggcgagccccgcacccttcccgtggcccggccgcaccgccctgtgcccgtggtggcggccacacaggcca

SEQ ID NO: 5379 - DNA, 333 bp, Homo sapiens
  chr15:72564845-72565178
  hyper
cgaccccgggccgcgcgcggccgcagccgacgggacgagcggcccgggacgccccgcgggggcggagcggcaggccaaggggcgggggccgggcctggcgggcgaggtcgcgcaccccacgcctcgtcgttccgtcacgggcgcgctcagccactctgcgcacgctcgcgcggtgacacgatggcacgtggcccgctcctgaccaacagcctgacggcctgctcctgggcgcgcctcagcagccgacgccagccttgagacgcctgcgcggcggtcgctagtcgggaaagggtgcggagtggggggtggcgcctgcgccgtgggtaggggagg

SEQ ID NO: 5380 - DNA, 31 bp, Homo sapiens
  chr15:72827182-72827213
  hyper
ttgtacagaatcagagcgtatcaagaatact

SEQ ID NO: 5381 - DNA, 89 bp, Homo sapiens
  chr15:73344007-73344096
  hyper
cgggggaagcgcgcggcgacggcggcccggcttgggagccggaggtcagcggctgcgcggccggccccctcccacgggagccgcgccag

SEQ ID NO: 5382 - DNA, 39 bp, Homo sapiens
  chr15:73611230-73611269
  hyper
cccaaggaagcaccaacgcctggccgcagggggcagttg

SEQ ID NO: 5383 - DNA, 96 bp, Homo sapiens
  chr15:73661191-73661287
  hyper
cagcggccgcctcccccgaagcgccctccggcagcgctcgggctcccgcgccccggaatattcatgaagccgccgcagctcgcgggttgccatagg

SEQ ID NO: 5384 - DNA, 38 bp, Homo sapiens
  chr15:73661349-73661387
  hyper
gggggctggaaaggggcggggggcgggcctggcaaggg

SEQ ID NO: 5385 - DNA, 58 bp, Homo sapiens
  chr15:73976030-73976088
  hyper
aaaatctggacaggcccgacccccatctcctcccaggctggagcggggccctgtaagg

SEQ ID NO: 5386 - DNA, 161 bp, Homo sapiens
  chr15:73976464-73976625
  hyper
ggtgggggatgggcagcgccctgctccgggagccgagggttttccccgccagggtcaggcctgggggcggggcggggcgggggcgggggccaggccgtgtgctctgcccagcgggctggctcaggcctcggtcagcagccgccaccgcggggccaatccgg

SEQ ID NO: 5387 - DNA, 63 bp, Homo sapiens
  chr15:73976661-73976724
  hyper
aggcggattctccggcgcggcccgccccgcccctcggactccccgggccgcccccggccccca

SEQ ID NO: 5388 - DNA, 31 bp, Homo sapiens
  chr15:73976753-73976784
  hyper
tgagccaggctgggccgcgtccctgagtccc

SEQ ID NO: 5389 - DNA, 31 bp, Homo sapiens
  chr15:73976947-73976978
  hyper
tgccctcccccaggtccgggcggcccccctc

SEQ ID NO: 5390 - DNA, 169 bp, Homo sapiens
  chr15:73976983-73977152
  hyper
ggagtcccgggaaccgcgggcgcccctcctgccctgggctgtggggcccgcggagagctgggggctcccggatcctaccccgcccccctttcctcgggttgagaggggcccgggcgccgtcggacctgcagaccccggaagctgcggaccgggccgggtgggtgaatgc

SEQ ID NO: 5391 - DNA, 95 bp, Homo sapiens
  chr15:73977229-73977324
  hyper
ggcgctgggaggttagcggggtctcgggtcctgcagaggaaaacgcccagctccgggaggggagcggcggggagggaaggcgagtggttaggcgt

SEQ ID NO: 5392 - DNA, 31 bp, Homo sapiens
  chr15:73977415-73977446
  hyper
gaaggacaggtagagacggctggcaggggcc

SEQ ID NO: 5393 - DNA, 46 bp, Homo sapiens
  chr15:74219415-74219461
  hyper
ccgtccctgcccctgccggggcgcgtgggctcggacaccgtgcgcg

SEQ ID NO: 5394 - DNA, 31 bp, Homo sapiens
  chr15:74219965-74219996
  hyper
agggcacccccggcttcgagcaggcctaccc

SEQ ID NO: 5395 - DNA, 38 bp, Homo sapiens
  chr15:74220039-74220077
  hyper
cgcctgggctggtacccgccctacgccaacccgccgcc

SEQ ID NO: 5396 - DNA, 85 bp, Homo sapiens
  chr15:74685055-74685140
  hyper
cagccgttccagctcccgctccccacagcaccccaacccgcttcccccaccaccgcattctccccacccccggctggcagctttc

SEQ ID NO: 5397 - DNA, 31 bp, Homo sapiens
  chr15:74685153-74685184
  hyper
tcagaccaaaagccttcgaggcatcccagac

SEQ ID NO: 5398 - DNA, 44 bp, Homo sapiens
  chr15:74725611-74725655
  hyper
cggcggcaaggggtccgcgccccccttgccggcccagcctgcgc

SEQ ID NO: 5399 - DNA, 8 bp, Homo sapiens
  chr15:75018311-75018319
  hyper
cgggggcg

SEQ ID NO: 5400 - DNA, 99 bp, Homo sapiens
  chr15:75640557-75640656
  hyper
cggccgcggggatgtccggtccgtggggcaggcccggttctcgctgcggccaagcggccgattcggccgctcccgccgctcccccgcgccaggccgagc

SEQ ID NO: 5401 - DNA, 37 bp, Homo sapiens
  chr15:75640774-75640811
  hyper
ctggagaaagagacagcgtgtgcggagggggtgctcc

SEQ ID NO: 5402 - DNA, 31 bp, Homo sapiens
  chr15:75745114-75745145
  hyper
acaccaaaacaggccacggcataaattaaca

SEQ ID NO: 5403 - DNA, 31 bp, Homo sapiens
  chr15:75939284-75939315
  hyper
cccacttgcctcttctcgaagattctctacc

SEQ ID NO: 5404 - DNA, 40 bp, Homo sapiens
  chr15:75939488-75939528
  hyper
gctagggtgctgcacccgcagctctcggtatcttaggtca

SEQ ID NO: 5405 - DNA, 31 bp, Homo sapiens
  chr15:75939532-75939563
  hyper
cctggaacgcgcaggccgtttctgttcctcc

SEQ ID NO: 5406 - DNA, 47 bp, Homo sapiens
  chr15:75939697-75939744
  hyper
ccccaccccgatctcccgatcctggctctggcgcggtgctccttgca

SEQ ID NO: 5407 - DNA, 31 bp, Homo sapiens
  chr15:75976253-75976284
  hyper
tgtgctgccacacagccgtcctggcctgtgg

SEQ ID NO: 5408 - DNA, 60 bp, Homo sapiens
  chr15:75976296-75976356
  hyper
gtgtcccactctttggcggcttccgcaccaccaggccacccgctacgggcacatcctaga

SEQ ID NO: 5409 - DNA, 31 bp, Homo sapiens
  chr15:76628326-76628357
  hyper
ggaggggcagcagcagcggcagcagcagcaa

SEQ ID NO: 5410 - DNA, 97 bp, Homo sapiens
  chr15:76628368-76628465
  hyper
ggacccgtcccagtcccgggtgagcgcttttggatctgggttctggctcaacccacgtaatgccccaatctaaagttttctacgtgtgtgtggatag

SEQ ID NO: 5411 - DNA, 61 bp, Homo sapiens
  chr15:76628811-76628872
  hyper
tccagattgccaggcccggggcatgagagaggatccttgtaggtttcggaggtgggggggc

SEQ ID NO: 5412 - DNA, 35 bp, Homo sapiens
  chr15:76628990-76629025
  hyper
acctcccccgcatccccggcagttctggggaagct

SEQ ID NO: 5413 - DNA, 58 bp, Homo sapiens
  chr15:76629162-76629220
  hyper
gggcgcgcgaccctcgtccttctgcccctggccgcacactttgcgcacatctcttttt

SEQ ID NO: 5414 - DNA, 55 bp, Homo sapiens
  chr15:77927287-77927342
  hyper
ctgacgcaggcaaggcgcggccaccacatctctccgcccccgactcacctgctcc

SEQ ID NO: 5415 - DNA, 31 bp, Homo sapiens
  chr15:78112409-78112440
  hyper
cgcggggcccagggttcgagcgcgcagtggg

SEQ ID NO: 5416 - DNA, 88 bp, Homo sapiens
  chr15:79237307-79237395
  hyper
gcagcgtggcccacatcgcagcgctggcggcttggctcttgcgctcagggtccgcggaggtggcggcccagagcgtcaactgggagcg

SEQ ID NO: 5417 - DNA, 58 bp, Homo sapiens
  chr15:79384064-79384122
  hyper
ctgccgcagagggcagcgagctcgccccgacccggagcaagccgcgcctggcccgggc

SEQ ID NO: 5418 - DNA, 60 bp, Homo sapiens
  chr15:80988125-80988185
  hyper
ggctcggctgcatgttcgtgcgctgcgcgccctccagccgctacacgctgctcttctcgc

SEQ ID NO: 5419 - DNA, 173 bp, Homo sapiens
  chr15:80988218-80988391
  hyper
gcttctacattggcctcggctcccgcatcaactgcaacatcttctcctacgactactcgggatacggcgtcagctcgggcaagccctccgagaagaacctctacgccgacatcgacgccgcgtggcaggcgctgcgcacccggtgagcctgccggggtcgccaggcctgactt

SEQ ID NO: 5420 - DNA, 31 bp, Homo sapiens
  chr15:81071386-81071417
  hyper
ccggggacttgctctccgcggtccgccgcgg

SEQ ID NO: 5421 - DNA, 31 bp, Homo sapiens
  chr15:81071672-81071703
  hyper
aaagtggctataaaagcggcctctcggctga

SEQ ID NO: 5422 - DNA, 31 bp, Homo sapiens
  chr15:81071922-81071953
  hyper
aggcgtgacactgtctcggctacagacccag

SEQ ID NO: 5423 - DNA, 31 bp, Homo sapiens
  chr15:81071960-81071991
  hyper
agggcctggctgggggcgtcagggatgagct

SEQ ID NO: 5424 - DNA, 31 bp, Homo sapiens
  chr15:81072283-81072314
  hyper
cccttctgaatggcaccgggggcttgcgccc

SEQ ID NO: 5425 - DNA, 31 bp, Homo sapiens
  chr15:81072354-81072385
  hyper
ggtctcggtgtcctgccgactgggagccagc

SEQ ID NO: 5426 - DNA, 31 bp, Homo sapiens
  chr15:81294106-81294137
  hyper
gcctgagctgcctcccgcgctcctccccgag

SEQ ID NO: 5427 - DNA, 50 bp, Homo sapiens
  chr15:81294176-81294226
  hyper
caactcccagcttccccgtcccgccctccccgctccgagggccgcgccag

SEQ ID NO: 5428 - DNA, 67 bp, Homo sapiens
  chr15:82339903-82339970
  hyper
aaacaatgaggccatgcggccgcagccgcacacgggctgactggggagatctcgtggtgccgcgggg

SEQ ID NO: 5429 - DNA, 4 bp, Homo sapiens
  chr15:83655930-83655934
  hyper
agtg

SEQ ID NO: 5430 - DNA, 65 bp, Homo sapiens
  chr15:85525135-85525200
  hyper
tcaggaagggcatgttcggaggggcggcctcggcacgccacccgcctaagcgcccccttcccacc

SEQ ID NO: 5431 - DNA, 105 bp, Homo sapiens
  chr15:85525286-85525391
  hyper
ccaggcggcgatgacacggcgcccgcggcggcccggaggcgccgggtgggccgtttgctgaccggatcgcggctacccgccagcgtgtccgcggcgccgccgcca

SEQ ID NO: 5432 - DNA, 81 bp, Homo sapiens
  chr15:85525492-85525573
  hyper
ccgcagggccagaagacggccgccttgccccggacccgcggcgccggcctcttggagtcggagcttcgcgacggcagcggc

SEQ ID NO: 5433 - DNA, 268 bp, Homo sapiens
  chr15:89438594-89438862
  hyper
gggaggtgtggggacccgcagggcacccaaagcggtaagggaggaacccggcccgcacacagccccagaagcccagcgacccctaagccacgtaccgtccccaggcagctcctcgacggctagagctctcgggggccgcgagctgtcccggtccaaggcagcagtctgatttcggggaaattaaaagggcagaaaggaagcggcagcagaaaaacccccgcgctcccgccagaccagccccttaaaggaacacgcgcacctttccctc

SEQ ID NO: 5434 - DNA, 31 bp, Homo sapiens
  chr15:90455904-90455935
  hyper
ccacccgatcctgttgcggggttcgagccgg

SEQ ID NO: 5435 - DNA, 135 bp, Homo sapiens
  chr15:90456073-90456208
  hyper
gaccgcccgggcaccccggcacagagccggcgcactgggctgggggcgcggcgcgggaagtgctgcaggacgcgcggggacccgcgattcccagccggcggatccgggaatggcgcggcccggccctcaggcgtt

SEQ ID NO: 5436 - DNA, 74 bp, Homo sapiens
  chr15:90792592-90792666
  hyper
aagtcccatgatacaccggaagaatctggcgtcgaggccggccagctccaaagggcaaacgctgtctcccccac

SEQ ID NO: 5437 - DNA, 75 bp, Homo sapiens
  chr15:90792735-90792810
  hyper
caatgggaactgccctcgtgtccatggcaacggcggcggccacgggcttgctagaggaagcgctgccccggcagc

SEQ ID NO: 5438 - DNA, 31 bp, Homo sapiens
  chr15:93655833-93655864
  hyper
caactgaaactctgcacgcattaaactcaaa

SEQ ID NO: 5439 - DNA, 31 bp, Homo sapiens
  chr15:96873708-96873739
  hyper
ccggcgacgccgctcgcgctaggaccgggct

SEQ ID NO: 5440 - DNA, 71 bp, Homo sapiens
  chr15:96873742-96873813
  hyper
cccgcggccgccatggcggggccgccgcagtccggccaatgacggcgagggggcggcgcgcgcgcgcctgg

SEQ ID NO: 5441 - DNA, 83 bp, Homo sapiens
  chr15:96873909-96873992
  hyper
gctcagtgagctgatcgcggagaagccacttctgccagccccggcgcctataaatcgcattccctcccgcgccccccttttta

SEQ ID NO: 5442 - DNA, 36 bp, Homo sapiens
  chr15:96874394-96874430
  hyper
gctccggcggcagcggcggcccgggcggcccgcagg

SEQ ID NO: 5443 - DNA, 59 bp, Homo sapiens
  chr15:96876487-96876546
  hyper
cgctcggcgcggggcgcgggctccgggttggggcgagccaacgccggggtttctttgtg

SEQ ID NO: 5444 - DNA, 66 bp, Homo sapiens
  chr15:96876660-96876726
  hyper
tgctccctgcctctcccggcttcctctctctttagccggcctctctctctccgccctctccctccg

SEQ ID NO: 5445 - DNA, 87 bp, Homo sapiens
  chr15:96899903-96899990
  hyper
agacatctgcactggccgcagctgaatggccggaaatacacggggcccgaactagtggcttcctaaagaccacgtctcatttatctt

SEQ ID NO: 5446 - DNA, 78 bp, Homo sapiens
  chr15:98503354-98503432
  hyper
tcattcattaaagtcccgatgcggccggcccccaagatctcaaaaggaaatattgccgagttccgtttcccagagcat

SEQ ID NO: 5447 - DNA, 19 bp, Homo sapiens
  chr15:98503857-98503876
  hyper
gcagctgaccaatggccgc

SEQ ID NO: 5448 - DNA, 63 bp, Homo sapiens
  chr15:98504280-98504343
  hyper
accgccgcctggggcccgagcacctgcccccgcgcctcggccagcaccgcggccctggctgtc

SEQ ID NO: 5449 - DNA, 36 bp, Homo sapiens
  chr15:99191461-99191497
  hyper
ggcgggaggggagggcgcgtgcggggtggccggcgc

SEQ ID NO: 5450 - DNA, 97 bp, Homo sapiens
  chr15:99191541-99191638
  hyper
gtgtgcgcgcgggaggcggtggggcgggagatgggggcggcgcctcgcagtctcgcgccccacgcccgggctccgctccgcacgtcttggggaaccg

SEQ ID NO: 5451 - DNA, 49 bp, Homo sapiens
  chr15:99192944-99192993
  hyper
ttcctccgaggggctgcgccctgtttgcgaaacccgagttgccaccgtc

SEQ ID NO: 5452 - DNA, 31 bp, Homo sapiens
  chr15:99193404-99193435
  hyper
gggtgcgagttgccctcgaggggggaggtgc

SEQ ID NO: 5453 - DNA, 39 bp, Homo sapiens
  chr15:99955138-99955177
  hyper
ctggccgtgggagtccgcgggccacgtgcagtctcctca

SEQ ID NO: 5454 - DNA, 61 bp, Homo sapiens
  chr15:100273843-100273904
  hyper
ctaccaggtctacccgcgcgggccctggcttgttttcgcgtctgttcggagtaataaggca

SEQ ID NO: 5455 - DNA, 31 bp, Homo sapiens
  chr15:100273945-100273976
  hyper
ccgcagctttctcgcccgtaaagaggccttt

SEQ ID NO: 5456 - DNA, 33 bp, Homo sapiens
  chr15:100346201-100346234
  hyper
gcagccctttcccaggcggtagcggggacggtg

SEQ ID NO: 5457 - DNA, 120 bp, Homo sapiens
  chr15:101459069-101459189
  hyper
tatgcaaattgcaggtcgttaacgctttagaacgacacatttctgtatcgccccgtgaagagctctacgcacatgaatgttccccgtctgtttaactgttacggccgcagtgtgtgggcc

SEQ ID NO: 5458 - DNA, 104 bp, Homo sapiens
  chr15:101459229-101459333
  hyper
tggagcagagggatagcgaaagcggggctgagcgcagcacggaccgatcccatcgccgcgctcgccccgcgtggaggcagccgggtgcccgaacctgaaggagg

SEQ ID NO: 5459 - DNA, 65 bp, Homo sapiens
  chr15:101459976-101460041
  hyper
cgggaaagctgggaagcggaggcaagagacacgagtcgggagacacgagccggggagcccatagg

SEQ ID NO: 5460 - DNA, 222 bp, Homo sapiens
  chr15:101460043-101460265
  hyper
tcctctgcctttggagcgaacccagtcccttagcggggagcgggcggagtgtgagcgcgcgggtgagcccgtgccggggtgtcggcaagagaccgcccgggagcctctcgctggtccggggcttcctggggttgcggggcggcccagcgaggcttcaccctcctcgatgtctgggtcacgcttcttgcccaggtggtctctggctggcgcagatacaactgc

SEQ ID NO: 5461 - DNA, 134 bp, Homo sapiens
  chr15:101835657-101835791
  hyper
tgtttaaaagttaaggcgaatgtggaaacacccgaggggaactttctcatgcattagcgcacctcgaggtgggaggggaagcggtgactgtcctccctccaccagccgtcgcgggaacccgtggggttcagtga

SEQ ID NO: 5462 - DNA, 55 bp, Homo sapiens
  chr15:101835797-101835852
  hyper
cagcagttcaggtgcccgccccgggcctgggccttggctccgggctacagtgtga

SEQ ID NO: 5463 - DNA, 3 bp, Homo sapiens
  chr15:102029490-102029493
  hyper
cgg

SEQ ID NO: 5464 - DNA, 47 bp, Homo sapiens
  chr16:122247-122294
  hyper
ggctatttttgcggcgcgccgggctaggaatccggggctgggccgcc

SEQ ID NO: 5465 - DNA, 36 bp, Homo sapiens
  chr16:330454-330490
  hyper
ggggcgacccgggtgccggcccgtgcgggcgacacg

SEQ ID NO: 5466 - DNA, 40 bp, Homo sapiens
  chr16:577639-577679
  hyper
ctcccggcctgcctcgcgcaggcaccgccccgagcttccg

SEQ ID NO: 5467 - DNA, 22 bp, Homo sapiens
  chr16:600998-601020
  hyper
ggtgagggtcccctgtcggtga

SEQ ID NO: 5468 - DNA, 51 bp, Homo sapiens
  chr16:717959-718010
  hyper
gggcgccaggaccctgcgctgtccgccgtggccggcgcgtccacacggtgg

SEQ ID NO: 5469 - DNA, 112 bp, Homo sapiens
  chr16:765206-765318
  hyper
tgctcccgccgccgcccggacccgcgccccgccggggcagcggtggtgagagccccgactccccggacgccgcccgccgtgccatggggttcccggccgcggcgctgctctg

SEQ ID NO: 5470 - DNA, 63 bp, Homo sapiens
  chr16:765585-765648
  hyper
gcctcacccaggagcccggcagcgtggggcagctggccctggcctgtgcggagggcgcggttg

SEQ ID NO: 5471 - DNA, 31 bp, Homo sapiens
  chr16:771483-771514
  hyper
ggtctcaaggtctgggcgtggccggggtgag

SEQ ID NO: 5472 - DNA, 31 bp, Homo sapiens
  chr16:1153581-1153612
  hyper
gcgccacccagcccttcgctctgctgtgacc

SEQ ID NO: 5473 - DNA, 59 bp, Homo sapiens
  chr16:1429111-1429170
  hyper
cacagcacattcaaggcgccgcggtcccccggggtcagggacacgcgaggacaagctac

SEQ ID NO: 5474 - DNA, 153 bp, Homo sapiens
  chr16:1660448-1660601
  hyper
ggcgacagccatagtccgacgagcgacctggaccccgcgccaagcccgccccagcctcgatgggactcgcgaggggccgcggggactcggcggcgccgggatcgtgggaggagacgggagggtcccgacgcccgccaccggtcacatcctcgg

SEQ ID NO: 5475 - DNA, 155 bp, Homo sapiens
  chr16:1660659-1660814
  hyper
ctcacctctgccaggccgctgagccgccgcgcgttgccgggacaacggcgcgccaggaacgcggaaatagccgaaggtgagcgaggcggccccgaggactcccgaagcgccccgagcggccggaaagagccgaaggcgatcgggcacgcacgtgc

SEQ ID NO: 5476 - DNA, 31 bp, Homo sapiens
  chr16:1660852-1660883
  hyper
ctctgcaagagagaagcgggacgagcttttt

SEQ ID NO: 5477 - DNA, 53 bp, Homo sapiens
  chr16:1663979-1664032
  hyper
tccccgtgcgggcaggcgagcccgcgcttctcccgtcccggggtggatccggc

SEQ ID NO: 5478 - DNA, 116 bp, Homo sapiens
  chr16:1664480-1664596
  hyper
ggggccgcggcgggctcgggcgggctcgggcgggccgggccgagccgccgagaggggatttggaacaaacaacggcggccatgttgagagcgcgtcggggccgctaaacttcccgg

SEQ ID NO: 5479 - DNA, 31 bp, Homo sapiens
  chr16:1664614-1664645
  hyper
gccgcctcccctctcccggccgcaggatgac

SEQ ID NO: 5480 - DNA, 56 bp, Homo sapiens
  chr16:1877590-1877646
  hyper
ctggcgaagagcttcacggcgtcctgcccggtcagcgcgttcgtgcccaaggagaa

SEQ ID NO: 5481 - DNA, 31 bp, Homo sapiens
  chr16:1877672-1877703
  hyper
tctggctcaaggtcaacggcgaactcagaca

SEQ ID NO: 5482 - DNA, 75 bp, Homo sapiens
  chr16:2033651-2033726
  hyper
gcccaggaccctagcgcgcgccgcaatctgtgcggtcacgcccggcccgcgttgagagagcgcttggcagccagc

SEQ ID NO: 5483 - DNA, 41 bp, Homo sapiens
  chr16:2040846-2040887
  hyper
caacctctgggccagccgcacctcggcgcctgtcttggagg

SEQ ID NO: 5484 - DNA, 47 bp, Homo sapiens
  chr16:2040913-2040960
  hyper
gctttggcctcccctgcggagtggctctgaccagaccgggaggcagg

SEQ ID NO: 5485 - DNA, 24 bp, Homo sapiens
  chr16:2040980-2041004
  hyper
cgcacgtcccgacttgtggcccac

SEQ ID NO: 5486 - DNA, 104 bp, Homo sapiens
  chr16:2041010-2041114
  hyper
ggacaagtgcatgtcccggcttcccccttggctccactctcggagctggagcgggaaaggagcgaagggatgaggttgaggctggaggtcgtttcttggaaaca

SEQ ID NO: 5487 - DNA, 31 bp, Homo sapiens
  chr16:2041157-2041188
  hyper
cctcatgcctgtctcccggaactggtgggca

SEQ ID NO: 5488 - DNA, 31 bp, Homo sapiens
  chr16:2041190-2041221
  hyper
aggcattgaggtttgacggaacctcagaggt

SEQ ID NO: 5489 - DNA, 63 bp, Homo sapiens
  chr16:2041260-2041323
  hyper
tattaataatcagtcacgtgggggctgtcatccctcgggtacccaccacgtgcaggaagctgg

SEQ ID NO: 5490 - DNA, 35 bp, Homo sapiens
  chr16:2041477-2041512
  hyper
ctccccttcgccgttccggctccagcctgggaatc

SEQ ID NO: 5491 - DNA, 14 bp, Homo sapiens
  chr16:2041581-2041595
  hyper
cggtgcagagtacc

SEQ ID NO: 5492 - DNA, 40 bp, Homo sapiens
  chr16:2041810-2041850
  hyper
aataattactaaatacgcgagggttcgggaaagaaagagg

SEQ ID NO: 5493 - DNA, 43 bp, Homo sapiens
  chr16:2041941-2041984
  hyper
gccgcagggccctgagcgccgcgccgcacgcaggtgttctcca

SEQ ID NO: 5494 - DNA, 31 bp, Homo sapiens
  chr16:2301985-2302016
  hyper
ctgcctggggtgagcccggcctcctgcccct

SEQ ID NO: 5495 - DNA, 61 bp, Homo sapiens
  chr16:2302034-2302095
  hyper
ctgcaggtttagtcaccgaaatgggggtgggggcagcagaacccagcggtaagaacaggcc

SEQ ID NO: 5496 - DNA, 31 bp, Homo sapiens
  chr16:2969679-2969710
  hyper
accaccatgcccagctcgaagtactactttt

SEQ ID NO: 5497 - DNA, 31 bp, Homo sapiens
  chr16:3053912-3053943
  hyper
ccaggctagctgagggcggggagcagctgcg

SEQ ID NO: 5498 - DNA, 31 bp, Homo sapiens
  chr16:3071261-3071292
  hyper
caagtgcatggactgcgcgtcttgcagggcg

SEQ ID NO: 5499 - DNA, 73 bp, Homo sapiens
  chr16:3078380-3078453
  hyper
ccttctggcggatggcgcgcagcagctcccgagacagggagtctcgctccagcgagacgcggttgagctgcag

SEQ ID NO: 5500 - DNA, 37 bp, Homo sapiens
  chr16:3086763-3086800
  hyper
gcccccggttccccggcgatcccggttcccctgcccc

SEQ ID NO: 5501 - DNA, 112 bp, Homo sapiens
  chr16:3200662-3200774
  hyper
atacagccgcagggccgcgtggcctaatggataaggcgtctgattccggatcagaagattgagggttcgagtcccttcgtggtcgttgccatgttaacgttttcttccagct

SEQ ID NO: 5502 - DNA, 116 bp, Homo sapiens
  chr16:3200795-3200911
  hyper
gggactgcaccctgggcgactacgacactcgaactgagtgcgccggtcgctctcccctcacccccgtaggaacactgggacctcgccctgcgcctccagtcgcgaagctaaggacc

SEQ ID NO: 5503 - DNA, 55 bp, Homo sapiens
  chr16:3200930-3200985
  hyper
agggcgacttagagaacgccggcagggccctggcggactgcggagcttgaagcca

SEQ ID NO: 5504 - DNA, 31 bp, Homo sapiens
  chr16:3209045-3209076
  hyper
gagcttcacggagtctcggccgcagggaact

SEQ ID NO: 5505 - DNA, 101 bp, Homo sapiens
  chr16:3209093-3209194
  hyper
ctgcaggcgccggggccgatccgacttcccgcttccgtccggcttgcggcccctcgccttgcccggctacaggaaggactcgcctgcgcctcctgactgga

SEQ ID NO: 5506 - DNA, 170 bp, Homo sapiens
  chr16:3209203-3209373
  hyper
ctgggagttctgagtgcgcctaaggcctggcgctgaggcagtggaccccagatccgggacccgaaaggagggcaaacacctccaccgccgcgtctgcctctgcggacgtggccctagatcccgggtggccatggaacttggtctgggcgtgtagttttcctttgagtggg

SEQ ID NO: 5507 - DNA, 57 bp, Homo sapiens
  chr16:3221311-3221368
  hyper
caccacacgcggaactcgctggatcctctccacatccaggccgcgtccactggcttt

SEQ ID NO: 5508 - DNA, 31 bp, Homo sapiens
  chr16:3221394-3221425
  hyper
gattcaaaaggtgttgcggtattggcccaac

SEQ ID NO: 5509 - DNA, 68 bp, Homo sapiens
  chr16:3221494-3221562
  hyper
gagagagaaacagaaacggagcgagtgtgtgtcgctgtgatgccctttgccgtcgctgctcatcccca

SEQ ID NO: 5510 - DNA, 109 bp, Homo sapiens
  chr16:3221591-3221700
  hyper
ctgacagaggaagacacgggggcagagctaacgtctgagtcagggcagaggcgctgggctccatccgagggaggctatgggggcgcctctgggatggagccaaccaccg

SEQ ID NO: 5511 - DNA, 52 bp, Homo sapiens
  chr16:3221786-3221838
  hyper
cgcagacccggtaaccccggcgcaggggaaaatacagcggggagccccaggc

SEQ ID NO: 5512 - DNA, 223 bp, Homo sapiens
  chr16:3221905-3222128
  hyper
ttcaccagggtctccccgcagcgaccccagaattctgccaatcacttggggacggcgatgagctctatccacttcggaatcagccgatttgtgccggattggtggcaggtgtctgaaatgtcagcggaaatacacgcacgggaggctcgttggtctaggggtatgattctcgcttcgggtgcgagaggtcccgggttcaaatcccggacgagccctagaagtg

SEQ ID NO: 5513 - DNA, 31 bp, Homo sapiens
  chr16:3222296-3222327
  hyper
gcctcgagggagtcccgcgcccttctccttc

SEQ ID NO: 5514 - DNA, 31 bp, Homo sapiens
  chr16:3237825-3237856
  hyper
atatatcataccagcacgacattgaaaccac

SEQ ID NO: 5515 - DNA, 31 bp, Homo sapiens
  chr16:3238521-3238552
  hyper
gggagaataccggaagcgggggagaagggag

SEQ ID NO: 5516 - DNA, 31 bp, Homo sapiens
  chr16:3238559-3238590
  hyper
agtgagaggagggaggcggggaagaccgggc

SEQ ID NO: 5517 - DNA, 64 bp, Homo sapiens
  chr16:3766892-3766956
  hyper
gtccccagaacctgcacggcgccgggcactgagcgggcgctcacatgtgcgtccaatgaacgaa

SEQ ID NO: 5518 - DNA, 34 bp, Homo sapiens
  chr16:3781397-3781431
  hyper
agcagggggtcggggtcgacgatggggggcaggg

SEQ ID NO: 5519 - DNA, 46 bp, Homo sapiens
  chr16:3781433-3781479
  hyper
ttgatgacaggcccagcgtgcaggtggatcacgaagaagacctgca

SEQ ID NO: 5520 - DNA, 31 bp, Homo sapiens
  chr16:3781527-3781558
  hyper
gtgagctcagggcaggcgcagccacccagcc

SEQ ID NO: 5521 - DNA, 56 bp, Homo sapiens
  chr16:3931081-3931137
  hyper
gacgccagcccgggcccgcccgtcccgctggggcggcgctgcgtgttcccagctcc

SEQ ID NO: 5522 - DNA, 31 bp, Homo sapiens
  chr16:3931160-3931191
  hyper
cctaggtggcgtcggtcgggaacggtcgggg

SEQ ID NO: 5523 - DNA, 221 bp, Homo sapiens
  chr16:4166050-4166271
  hyper
cgggccggccctgcccgcggcggcgggcgctgggggtgggggcgccccgggctgcgagtgcgcggagcccgtcggcgcggcccgtctagtggggcctgcttccccccgagtgcgccgccgctcccgccgcggccgcagctgtcccgggaccgagcgcgtggaaccacggacgcgggcccctcgccgggcggcggtgcagacgctgccgcagagccgggctc

SEQ ID NO: 5524 - DNA, 119 bp, Homo sapiens
  chr16:4166386-4166505
  hyper
atgtcggaagagctgccgccgccaccatctccggcccctgccccgcccgctgtcactgacagacgcgcgcccgcgccgcccctcgcccagccgcagcgcgcacgcgcggcccgcgctcg

SEQ ID NO: 5525 - DNA, 173 bp, Homo sapiens
  chr16:4166639-4166812
  hyper
cggcgccgcttctaggcggcgggctgtggccgctgtccgcgctccgggcgctgtgggcccgccctccctcggcgtcccagaggccgcgcgccgcccggggtcccgaccctgcggagagacctgaaggcgcctgccgtggaagaagccgctggccgcaacgtttgggaaatcaa

SEQ ID NO: 5526 - DNA, 65 bp, Homo sapiens
  chr16:4166813-4166878
  hyper
atgttgccttcccactcggcacgcctttgggataaatcgaagtttccaaccgttggatttccctc

SEQ ID NO: 5527 - DNA, 83 bp, Homo sapiens
  chr16:4166897-4166980
  hyper
ctgtaagcaatgaatgcgggccccggggcactcggcctgccctggacctgctcacggggcgaccttcacgggcctagcctcca

SEQ ID NO: 5528 - DNA, 31 bp, Homo sapiens
  chr16:4233704-4233735
  hyper
cccgggagctgagtccgcggcgtgaagcggc

SEQ ID NO: 5529 - DNA, 40 bp, Homo sapiens
  chr16:4233745-4233785
  hyper
agcgagggggcagggccggcgctggcggccacggagcttg

SEQ ID NO: 5530 - DNA, 92 bp, Homo sapiens
  chr16:4234086-4234178
  hyper
tgagcggccgcgagatcggtccctgtccgcagggtcgggtagtggccccctcggggacagcgtgtgaggattcgggcgcgaaggacggggtc

SEQ ID NO: 5531 - DNA, 31 bp, Homo sapiens
  chr16:4366576-4366607
  hyper
cgcggtggggggcgtgcggcgaggtgagagg

SEQ ID NO: 5532 - DNA, 48 bp, Homo sapiens
  chr16:5007928-5007976
  hyper
atgtaaacagtactgtcggccagacgcagggtccggggcgggtcggcc

SEQ ID NO: 5533 - DNA, 81 bp, Homo sapiens
  chr16:5007999-5008080
  hyper
cagagctagattagggcggggtcgtcctgtggcctaccattccccgaggctgagggccttggagggcggggccagtgaagg

SEQ ID NO: 5534 - DNA, 37 bp, Homo sapiens
  chr16:5008243-5008280
  hyper
tgggcggggccatggccggggacgtgggcgggaccag

SEQ ID NO: 5535 - DNA, 31 bp, Homo sapiens
  chr16:5008300-5008331
  hyper
aggatctccgctgtcccgggtcctggagctc

SEQ ID NO: 5536 - DNA, 81 bp, Homo sapiens
  chr16:5008529-5008610
  hyper
cattcccaaaggctcccgagggcgagggtgagcaaagctgcggggacctgtgtgtgcatgcgtgtgcgattgcctctacgt

SEQ ID NO: 5537 - DNA, 31 bp, Homo sapiens
  chr16:5121975-5122006
  hyper
cgtgggccgcagcccccgtatgcagtaccac

SEQ ID NO: 5538 - DNA, 31 bp, Homo sapiens
  chr16:7615184-7615215
  hyper
tttcacaatcttgcttcgttttaaatggaga

SEQ ID NO: 5539 - DNA, 65 bp, Homo sapiens
  chr16:8767885-8767950
  hyper
cacctctgactcccagcgccctgtttgtcttccggagcgctggggccaggcggaggaaagtagct

SEQ ID NO: 5540 - DNA, 81 bp, Homo sapiens
  chr16:8767964-8768045
  hyper
ctggcagggccctgagcgccgagatggggagtgaggtggggagggcgggatgctccttcccttctccgcaaaggaacccct

SEQ ID NO: 5541 - DNA, 31 bp, Homo sapiens
  chr16:8768189-8768220
  hyper
ggtccccacaacttgacgggggtcctcagcc

SEQ ID NO: 5542 - DNA, 37 bp, Homo sapiens
  chr16:8768282-8768319
  hyper
cagcccccgtctcccccgcccccggaggctggactct

SEQ ID NO: 5543 - DNA, 138 bp, Homo sapiens
  chr16:8768484-8768622
  hyper
cagcgctgccggaactcggggcgcgcatcccgcaagtcggaacccggcggatcggatcccgcagatcggagacggggcctggaggtgagcgcgaggcgccgggtggcttgggacgggcccttccgaggggagccgaga

SEQ ID NO: 5544 - DNA, 72 bp, Homo sapiens
  chr16:9186866-9186938
  hyper
aaccttgctgcattgccgattcagggaagggccgcctgcgtcagggtgtctgccctgcgttccaagtgtgtt

SEQ ID NO: 5545 - DNA, 56 bp, Homo sapiens
  chr16:9186974-9187030
  hyper
ttgcaacttgagaatcgcggcggtgctctagctagatccaccggaggcgattttga

SEQ ID NO: 5546 - DNA, 31 bp, Homo sapiens
  chr16:9187163-9187194
  hyper
cccggccccctctcagcgaagaattatcatg

SEQ ID NO: 5547 - DNA, 47 bp, Homo sapiens
  chr16:9229668-9229715
  hyper
aagctcactcctgtatcgatggactgaggttacgaatctcttctctg

SEQ ID NO: 5548 - DNA, 82 bp, Homo sapiens
  chr16:9229729-9229811
  hyper
ttagatgaggacactgcggatcaagtattcattgacctcttatcaccggccaggctctgtgccctgccgcaacagacaggat

SEQ ID NO: 5549 - DNA, 31 bp, Homo sapiens
  chr16:10674032-10674063
  hyper
gtctggggacgctgcccgggaatccctcacg

SEQ ID NO: 5550 - DNA, 348 bp, Homo sapiens
  chr16:10674137-10674485
  hyper
ctccccaaacttttcccgcctgcttcggctcaaaaggcgtgggaagctgtcccgggatggcgaagtggaattctggggccggagcgagcgtggcgcagaccagaggtcggcggcatgggtggcacctcggccctcccgttactgtcaccaattccgggggctgctcccggtccagtaagtggaggggtcgcgtccctgctgcccgggcgtacacgatcccggggcccccccgatgtcgccccgcgccctgggtgcgcccacaactcacccggcgctggcggctgcgctggcagctggatcgacggactggctgggggtgcgaggcgaggccgccgggctgttttgaag

SEQ ID NO: 5551 - DNA, 191 bp, Homo sapiens
  chr16:10674486-10674677
  hyper
tctgggctgggactgcgcgccctccctccaccctctaggcggcggggcccctccttccccgatcccgcctcccgggccgtgacgccaggagccgggagagccgagtgggaggggccgccggcgaaaggagggggccctggagggaaaggccgaggccgggagcgccctggcgcccccgcaccaccgttccc

SEQ ID NO: 5552 - DNA, 38 bp, Homo sapiens
  chr16:13877529-13877567
  hyper
cacacagaccaaccctcgtacaacgtgggaggaggtca

SEQ ID NO: 5553 - DNA, 31 bp, Homo sapiens
  chr16:13877603-13877634
  hyper
gttccatctttgagaacggctaccaaatgtt

SEQ ID NO: 5554 - DNA, 43 bp, Homo sapiens
  chr16:13877664-13877707
  hyper
gttttggaaacacacacgtgctgagtgacgcttttgaaaagga

SEQ ID NO: 5555 - DNA, 52 bp, Homo sapiens
  chr16:14396963-14397015
  hyper
gtcagctccctccccccgagaagcaggcagccctggcgcgttggctttagct

SEQ ID NO: 5556 - DNA, 42 bp, Homo sapiens
  chr16:15951327-15951369
  hyper
tgtctggaaagagggccggctgtgcagcgtgaagggtaggga

SEQ ID NO: 5557 - DNA, 31 bp, Homo sapiens
  chr16:16155966-16155997
  hyper
gatacaagccagagggcgctggtgatgaggt

SEQ ID NO: 5558 - DNA, 52 bp, Homo sapiens
  chr16:16156001-16156053
  hyper
tctgtgccttgtgtcccgcttaggaggggatgggcagcgtgttctcacagct

SEQ ID NO: 5559 - DNA, 34 bp, Homo sapiens
  chr16:18813073-18813107
  hyper
gcgcccagggactgcgcgacgccccgcccagcgc

SEQ ID NO: 5560 - DNA, 31 bp, Homo sapiens
  chr16:18813109-18813140
  hyper
tgggaagcggttcaaccgcctctgcaggggg

SEQ ID NO: 5561 - DNA, 51 bp, Homo sapiens
  chr16:18995183-18995234
  hyper
gccttgccggatctcccgggctctgcagcccctctgcggtccctgatgctc

SEQ ID NO: 5562 - DNA, 31 bp, Homo sapiens
  chr16:19097801-19097832
  hyper
cttctcgcccccaggacgtgcgtcctcccac

SEQ ID NO: 5563 - DNA, 48 bp, Homo sapiens
  chr16:20817585-20817633
  hyper
gccagagagggcaggtcgcagacgccggggctgcggggaatagaggcc

SEQ ID NO: 5564 - DNA, 53 bp, Homo sapiens
  chr16:22203688-22203741
  hyper
ggagcaccgcctaagccgccactggcctaaacacaacacgtggtaacttctac

SEQ ID NO: 5565 - DNA, 113 bp, Homo sapiens
  chr16:22203755-22203868
  hyper
gccatgccaaggcttgcggttgaactctggtctcgttctctcagagccgcaaacctcggaccatttgaagctggcggtcctggggcttcctttcctctcgataacatgtttac

SEQ ID NO: 5566 - DNA, 31 bp, Homo sapiens
  chr16:22203912-22203943
  hyper
tgggaaatctgttcttcgagcaggaaaaaca

SEQ ID NO: 5567 - DNA, 60 bp, Homo sapiens
  chr16:23159922-23159982
  hyper
ggggtgcagtgggggcgcggcggcgcgcgggctcaccttgaagtcgcggctgtgctgcgg

SEQ ID NO: 5568 - DNA, 18 bp, Homo sapiens
  chr16:23464688-23464706
  hyper
ccctgacatacattagcg

SEQ ID NO: 5569 - DNA, 23 bp, Homo sapiens
  chr16:23847030-23847053
  hyper
gggcacatctcctgaacgcagcc

SEQ ID NO: 5570 - DNA, 89 bp, Homo sapiens
  chr16:23847310-23847399
  hyper
cggcagcagctgggcgagtgacagccccggctccgcgcgccgcggccgccagagccggcgcaggggaagcgcccgcggccccgggtgca

SEQ ID NO: 5571 - DNA, 108 bp, Homo sapiens
  chr16:23847403-23847511
  hyper
cggccgccgcctcccgcgcctccccggcccgcagcccgcggtcccgcggccccggggccggcacctctcgggctccggctccccgcgcgcaagatggctgacccggct

SEQ ID NO: 5572 - DNA, 22 bp, Homo sapiens
  chr16:23847933-23847955
  hyper
cggcgtcgcgggagcctttgct

SEQ ID NO: 5573 - DNA, 127 bp, Homo sapiens
  chr16:23847956-23848083
  hyper
cacctgactaggagcgcgcggggtctgtgcctgccctggagggcagcgcctcgggtgctctccgacccggggttccctatctctccgcctgcttccgggcgcgaggagccctcgccccccacccctt

SEQ ID NO: 5574 - DNA, 31 bp, Homo sapiens
  chr16:23848113-23848144
  hyper
cttctctatctccctgcgggcatgggacatc

SEQ ID NO: 5575 - DNA, 111 bp, Homo sapiens
  chr16:23848150-23848261
  hyper
cactcctctgtgcctccgggcagcgccctgtgttatctcccattgcccctccccgagggcctgggttcccctttccactcctcggtcacatcactgcgggcccctttcttc

SEQ ID NO: 5576 - DNA, 98 bp, Homo sapiens
  chr16:23848309-23848407
  hyper
tcccagaggacaccaccgccgcggggtcactctcgccctccctctgaatgcgtctttatctcttctcttttcccgagggtgctcggggcatctatggg

SEQ ID NO: 5577 - DNA, 45 bp, Homo sapiens
  chr16:24354627-24354672
  hyper
cacaagcagatgcccacgtgtatgtagttccgaattccctcagta

SEQ ID NO: 5578 - DNA, 40 bp, Homo sapiens
  chr16:27280120-27280160
  hyper
tcccattggtggcctgcggcttattcgcccgtccgttgag

SEQ ID NO: 5579 - DNA, 80 bp, Homo sapiens
  chr16:29606231-29606311
  hyper
cgcgaatagttggtgccgccgctgctcagccgagaccccggggctctgcggctcattaccttccccgacacgacatggcc

SEQ ID NO: 5580 - DNA, 86 bp, Homo sapiens
  chr16:29607009-29607095
  hyper
ctggtgccctggggtgcgagcgcacacaggcgtgcccttggtttcacgtgcgccagttttcccactttctacgggggggagtggaa

SEQ ID NO: 5581 - DNA, 31 bp, Homo sapiens
  chr16:29607096-29607127
  hyper
gtgaaaatagtaagatcgagaggtggatatc

SEQ ID NO: 5582 - DNA, 36 bp, Homo sapiens
  chr16:29691805-29691841
  hyper
tggctgactaaactggcgccccgtaaacccttccac

SEQ ID NO: 5583 - DNA, 31 bp, Homo sapiens
  chr16:29822267-29822298
  hyper
aggtgcttcctgggggcgggggaatgcagcc

SEQ ID NO: 5584 - DNA, 50 bp, Homo sapiens
  chr16:29822622-29822672
  hyper
ggggcagccttactggcggcagcacagatacagggcggggccaaggctgt

SEQ ID NO: 5585 - DNA, 15 bp, Homo sapiens
  chr16:29836030-29836045
  hyper
cgagattgtgccact

SEQ ID NO: 5586 - DNA, 31 bp, Homo sapiens
  chr16:29836136-29836167
  hyper
gtagtgactcatgactcgtttatttattaag

SEQ ID NO: 5587 - DNA, 49 bp, Homo sapiens
  chr16:29910604-29910653
  hyper
ctgcagggggtggggccgagagggccgaaggggccgggtggcctgggtt

SEQ ID NO: 5588 - DNA, 31 bp, Homo sapiens
  chr16:29910742-29910773
  hyper
gggtggggtcgaggatcgagggggtctccac

SEQ ID NO: 5589 - DNA, 63 bp, Homo sapiens
  chr16:29910887-29910950
  hyper
cgtcagatcctggggacgggcggagggaggggcctgggatttatttgacggggagggaggagg

SEQ ID NO: 5590 - DNA, 77 bp, Homo sapiens
  chr16:30786650-30786727
  hyper
gggagagcgtggtggtcgtcgcggagccgcctgtcctgctcccaccgaccccggtctgaccacgtccttggctgtca

SEQ ID NO: 5591 - DNA, 230 bp, Homo sapiens
  chr16:30787246-30787476
  hyper
ccggcggcggcgggcacgctggtggaagcgcgggccgcggcaggggaggacatcgggccgcagagaaagtgccgatggcctggggcagcggtgcgagggtgggaaaaacgcaggatattgcatcatagagacgcggccaccttcgcccctggagagcgccagtctcaggagcgccgcaccggtcacgggtggaggtcagccaggcctccgtaagcgcggtccccttccag

SEQ ID NO: 5592 - DNA, 114 bp, Homo sapiens
  chr16:30797728-30797842
  hyper
gggttaatgacagggccgacacagagcatggacgtgggaagaccgagggaggccgaggcgctgggagcccaggcgccaggcacgccagcctgagacctcgcgatggccccactg

SEQ ID NO: 5593 - DNA, 38 bp, Homo sapiens
  chr16:30797847-30797885
  hyper
ggagggaatgaggagccgcctcccgagagatgtgggga

SEQ ID NO: 5594 - DNA, 93 bp, Homo sapiens
  chr16:30797943-30798036
  hyper
ccccaccgcttggctccggacttctgctcccccggagccgcgacccccgtcccgctgctgatacagagcctgggcatccgcccctgccccggc

SEQ ID NO: 5595 - DNA, 74 bp, Homo sapiens
  chr16:30798318-30798392
  hyper
cccccgggaacccaggcgtccccaactcacggctctggggtctgggaaaagccggaaggcggaatccagcccca

SEQ ID NO: 5596 - DNA, 50 bp, Homo sapiens
  chr16:30798405-30798455
  hyper
cttcagtgccctgcctcgggggacggactgggcgccgaggactctggggt

SEQ ID NO: 5597 - DNA, 83 bp, Homo sapiens
  chr16:30798471-30798554
  hyper
ttccaggctgaggacccggggaccagttcagggtgactgggacggagcaggaagtgaccccagcttcccgggcccctctagcc

SEQ ID NO: 5598 - DNA, 31 bp, Homo sapiens
  chr16:30798582-30798613
  hyper
ttaaccctttgcctcccgcagcctggggaaa

SEQ ID NO: 5599 - DNA, 61 bp, Homo sapiens
  chr16:30816841-30816902
  hyper
cgcggcgacggcctcccggagctgaaggggttattcccactgagacgcggtcgcctccgct

SEQ ID NO: 5600 - DNA, 38 bp, Homo sapiens
  chr16:30817034-30817072
  hyper
agctcagaggcagtgccgaggaccgaaggaggggaagg

SEQ ID NO: 5601 - DNA, 156 bp, Homo sapiens
  chr16:30817082-30817238
  hyper
aggcatccctgactcccgaattccagcaagggagaatcaggcgctggggaggcaaggagagggccgcggctctcctcgggggccgcggggcgcgactcttccaggacctcggctgcttttcccagtaaagcccaggcggcccgaggctggccgagg

SEQ ID NO: 5602 - DNA, 31 bp, Homo sapiens
  chr16:30959909-30959940
  hyper
tggggggagggctgggcggaccaaaggccgg

SEQ ID NO: 5603 - DNA, 31 bp, Homo sapiens
  chr16:30964524-30964555
  hyper
agctggagagtgaccacgagtacccaccagg

SEQ ID NO: 5604 - DNA, 31 bp, Homo sapiens
  chr16:31075213-31075244
  hyper
agtacgccggtgcttgcggaacactgaaggg

SEQ ID NO: 5605 - DNA, 137 bp, Homo sapiens
  chr16:31153836-31153973
  hyper
cagggcagagcgcgtgcggcgggtctccgggcagcggtactgccgccccctggcggccgtacaggcagtggcaccaccagccgcctaacagctccgcctccagcagcgcgcctgggccaagcgcgggttctggaagg

SEQ ID NO: 5606 - DNA, 134 bp, Homo sapiens
  chr16:31153974-31154108
  hyper
aaaaggcagggagcccgcgctgcggcccagacggcccctgcaccgcccggtgccgcccggcccagcgccggtccccagctcacccccgcggccccagcgggccaggcggcagcggctcccgggcaggaagtagt

SEQ ID NO: 5607 - DNA, 44 bp, Homo sapiens
  chr16:31483757-31483801
  hyper
gatggaacgggaggtgcggcgcccgcgggcgcccgggcgcgggg

SEQ ID NO: 5608 - DNA, 110 bp, Homo sapiens
  chr16:50188125-50188235
  hyper
cgggaccccgtggaaacggaggaactacaaccagggagtcgtggggtgagtgctggctctgcggcccgatggcctggccggtgcgaatgcgcagccgggcacacgcccac

SEQ ID NO: 5609 - DNA, 31 bp, Homo sapiens
  chr16:51167898-51167929
  hyper
gaagcagggcagagggcgatttcttattttg

SEQ ID NO: 5610 - DNA, 31 bp, Homo sapiens
  chr16:52579312-52579343
  hyper
gcactagagttgggaacgcagtataaacaaa

SEQ ID NO: 5611 - DNA, 61 bp, Homo sapiens
  chr16:52580659-52580720
  hyper
ggccgggactggggttcgccggggccgggacccgcctcctcgccgccgctagatccaccgt

SEQ ID NO: 5612 - DNA, 94 bp, Homo sapiens
  chr16:54962470-54962564
  hyper
gtggacagaggagccacgcccacgcgcgcccgccccgaaccccgacacccggagaggctcgaccggcgccgacgcggcccgaggcccaggccct

SEQ ID NO: 5613 - DNA, 93 bp, Homo sapiens
  chr16:54963084-54963177
  hyper
agcgcgatcgagaccccgcccctccccgcccctctggcgccgagactcggaggaaagcggggttacgtcaccagggggcggagcccagggagg

SEQ ID NO: 5614 - DNA, 47 bp, Homo sapiens
  chr16:54963207-54963254
  hyper
caggcactgggctgggcggacccaggggctctcggagaatgtagtct

SEQ ID NO: 5615 - DNA, 88 bp, Homo sapiens
  chr16:54964044-54964132
  hyper
gtcggtagaaggaaggcgaggcggagacgtgcagacgtctgaggcctgtctctcgcccacctgctgctgccggcgcagaggggcagtc

SEQ ID NO: 5616 - DNA, 31 bp, Homo sapiens
  chr16:55499095-55499126
  hyper
gctgaagctaatggaccgtgattgtgcatta

SEQ ID NO: 5617 - DNA, 31 bp, Homo sapiens
  chr16:55499157-55499188
  hyper
atgggctgatctaggccgctctgagccctga

SEQ ID NO: 5618 - DNA, 31 bp, Homo sapiens
  chr16:55499203-55499234
  hyper
agtggccaccagatggcgcagcctatctgca

SEQ ID NO: 5619 - DNA, 105 bp, Homo sapiens
  chr16:56642230-56642335
  hyper
gtacactgtgtcctcccgctgcacccagccccttccgcgccgaggcgtccccgaggcgcaagtgggccgccttcagggaactgaccgcccgcggcccgtgtgcag

SEQ ID NO: 5620 - DNA, 77 bp, Homo sapiens
  chr16:56642344-56642421
  hyper
cgcccggcccagtgcgcgcggccgggtgtttcgcctggagccgcaagtgactcagcgcggggcgtgtgcaggcagcg

SEQ ID NO: 5621 - DNA, 39 bp, Homo sapiens
  chr16:57126698-57126737
  hyper
tgcggtgagtggggcccgggcaggcggggcagcttggcg

SEQ ID NO: 5622 - DNA, 38 bp, Homo sapiens
  chr16:57126878-57126916
  hyper
gctccgacccggccacgcgggggcgccccgccggctcc

SEQ ID NO: 5623 - DNA, 31 bp, Homo sapiens
  chr16:57127432-57127463
  hyper
tcgctccacgtccccccgagttcaagaagct

SEQ ID NO: 5624 - DNA, 70 bp, Homo sapiens
  chr16:57318161-57318231
  hyper
agcgccctaggggtacgcgcagcgcgtcggtgacagtgtgagcccgggtggggagcgcaaggttcgcgaa

SEQ ID NO: 5625 - DNA, 31 bp, Homo sapiens
  chr16:57318405-57318436
  hyper
gcaggactgctggtccgcgtgctaactttcg

SEQ ID NO: 5626 - DNA, 87 bp, Homo sapiens
  chr16:57318530-57318617
  hyper
cttttcccccaggctccggatccctgtgtggctccaggcgctgcaggaggcgtcggggctgggagcctggggcgccaggtgcggccg

SEQ ID NO: 5627 - DNA, 109 bp, Homo sapiens
  chr16:58059828-58059937
  hyper
ccccgtgcaggaggcgcgcgctccgggcagcgcccggccccgggcatggacagagggagctgggcgcgcagggagcgccgcgggaccgggcggccggagcgctgagcca

SEQ ID NO: 5628 - DNA, 31 bp, Homo sapiens
  chr16:58060039-58060070
  hyper
tcccgccggctggttccgagctcccggacct

SEQ ID NO: 5629 - DNA, 271 bp, Homo sapiens
  chr16:58060089-58060360
  hyper
gggcttgggaatttgccgaggcgacctaggcggctccggcggggaccgggagcccgaggtccgcggcgcgcctgccgggccaggagccagggagcgtcgcaagtttccaaggcgcgtgcgaggatccggcgtgcagtgttccgagctgggctgggcgccgagagcatgggcagcgacccgagcgcgcccggacggccgggctggacgggcagcctcctcggcgaccgggaggaggcggcgcggccgcgactgctgccgctgctcctggtgc

SEQ ID NO: 5630 - DNA, 198 bp, Homo sapiens
  chr16:58060366-58060564
  hyper
gctgcctgggccttggcgtagcggccgaagacgcggaggtccatgccgaggtaagacccccgccctgccctttggctgcgggctgggggcttggagggagaggcgccacgtccgcaggctgggacttggaggtggagggagcggagacgcgccccctgttctgggccgtggcggggaagcaagcggacttggcagtct

SEQ ID NO: 5631 - DNA, 3 bp, Homo sapiens
  chr16:58060574-58060577
  hyper
agc

SEQ ID NO: 5632 - DNA, 3 bp, Homo sapiens
  chr16:58060638-58060641
  hyper
cgc

SEQ ID NO: 5633 - DNA, 74 bp, Homo sapiens
  chr16:58060664-58060738
  hyper
cactgagcccccaccccgacccccttacattcagcctgtgtcccgggagccgcttccgccgcccccagcccttg

SEQ ID NO: 5634 - DNA, 95 bp, Homo sapiens
  chr16:58060752-58060847
  hyper
ttccctccagggcagccgattcctcgagagcccggctggcgcgcagtggcgctctttgcgagtggggagggggctgctctcggggacagccacag

SEQ ID NO: 5635 - DNA, 270 bp, Homo sapiens
  chr16:58060848-58061118
  hyper
cggagcaagagctgggcggctgggcaactgcgctcctgcccaggtggcctcccgtctgggtgataccgagccgcgcacggcgggccaggatggaggcggggggatgggtgcaaacggctgaggcagcggactcgggttgcgggggcgctttggcgactttctgcgcttttgcgaggaagcctaggcacgcccgggcggggtcctaaggacggaccctgcctcccacagcgcttcctcccaacagcgcccctacgtcgaagccctggattc

SEQ ID NO: 5636 - DNA, 94 bp, Homo sapiens
  chr16:58061206-58061300
  hyper
aggcgcgacatcccggcgtagagccgagtccagccagcgccccagctccatggtgtctcccgagcgaggacaccgaaggcgccagctttcttgc

SEQ ID NO: 5637 - DNA, 31 bp, Homo sapiens
  chr16:58426353-58426384
  hyper
tgatgcgtccccgggcgcgggaaacgagttt

SEQ ID NO: 5638 - DNA, 52 bp, Homo sapiens
  chr16:58497213-58497265
  hyper
gtctaaacaaagactacggcagcgccgtcccctcccccgggaacccgacgcc

SEQ ID NO: 5639 - DNA, 96 bp, Homo sapiens
  chr16:58497784-58497880
  hyper
agcccagccccgagcacgaccccagccccacgcacgaccctagccccgcgagtcccgcaccgactcgctcccgccccatttcgcctccgcgggggc

SEQ ID NO: 5640 - DNA, 31 bp, Homo sapiens
  chr16:61445875-61445906
  hyper
tggaactgaggtctttcgttcagggtaataa

SEQ ID NO: 5641 - DNA, 41 bp, Homo sapiens
  chr16:66460832-66460873
  hyper
tgtcgggctggctgtgcgcaaaggggcgcggctcggccctc

SEQ ID NO: 5642 - DNA, 28 bp, Homo sapiens
  chr16:66638193-66638221
  hyper
gggtggccaagaaagtcgcaagaaaact

SEQ ID NO: 5643 - DNA, 96 bp, Homo sapiens
  chr16:66638268-66638364
  hyper
cggccggggtctttgctgtttagacgcctgggttcccggatcccagacacgcgcacgggcaggaagttagaccggagacagcgagtatagacagcc

SEQ ID NO: 5644 - DNA, 36 bp, Homo sapiens
  chr16:66638416-66638452
  hyper
atcgggaggtctccagcggcccgaaccagggtgaag

SEQ ID NO: 5645 - DNA, 95 bp, Homo sapiens
  chr16:66730082-66730177
  hyper
ggctgcagagtggtcccgggaccccacgagggagagggggcgcgaggagcgggctccggcctgggcaagcgggtacgcggcggaggccccgcagc

SEQ ID NO: 5646 - DNA, 139 bp, Homo sapiens
  chr16:66730190-66730329
  hyper
aggcgtgcggctaggccgccctcgggcacctggggccccgcccggcacctaccacttgggcgaccttgaggcggccgagcgcgccgcgcaggtagtcggggtcgcagcgcaggccggccagcccgcggcgctggctcac

SEQ ID NO: 5647 - DNA, 46 bp, Homo sapiens
  chr16:66730334-66730380
  hyper
cggtggtgggctggtacgggctgctggcgcccgagatcatggaggt

SEQ ID NO: 5648 - DNA, 71 bp, Homo sapiens
  chr16:67184511-67184582
  hyper
acggttgagccccttgcgttgttctcctcctcccggccgtgtcgcaccgccgggaccggcagcctgaaggg

SEQ ID NO: 5649 - DNA, 60 bp, Homo sapiens
  chr16:67204300-67204360
  hyper
cgtccccagccagcgcgcggcctccgcggtgtggctcctagtgcccggggaagaaccctc

SEQ ID NO: 5650 - DNA, 208 bp, Homo sapiens
  chr16:67204371-67204579
  hyper
tcccagcagccctggccgccccgcccccgccgcagctgctgcacccacccccaccctgcccggccctttctgcaccgtcatctcctgccccgccgaggcttgacccgtgagtggggacgcccaaaacgggccagaccgggagccccactcccggctgtgggagggaagggaaaccgagattgggcagaatcagcgccccaccacccgc

SEQ ID NO: 5651 - DNA, 31 bp, Homo sapiens
  chr16:67280007-67280038
  hyper
gtctcaccacccctcccgccagcgctcagag

SEQ ID NO: 5652 - DNA, 38 bp, Homo sapiens
  chr16:67280107-67280145
  hyper
ccaaggggcaagtttacgcaactcgccgcccagctgag

SEQ ID NO: 5653 - DNA, 31 bp, Homo sapiens
  chr16:67280156-67280187
  hyper
gggagggcacccaccccgactctctctcctc

SEQ ID NO: 5654 - DNA, 209 bp, Homo sapiens
  chr16:67465266-67465475
  hyper
cgctgctggccgcgctcgactggctgtgccagcgcctgctgcccccgccggccgcactcgccgtgctggccgccgccggctggatcgcgttgtcccgcctggcgcgcccgcagcgcctgccggtggccactcgcgcggtgctcatcaccggtgagtgcgcgggtcgcggagcgcggggactccaggctcgagggcgggactggacactc

SEQ ID NO: 5655 - DNA, 31 bp, Homo sapiens
  chr16:67465504-67465535
  hyper
aaggcgggctcctcagcgcaagagtgggaga

SEQ ID NO: 5656 - DNA, 68 bp, Homo sapiens
  chr16:67465544-67465612
  hyper
ccctgggtgcagggagcgagccaaatagggagcgccgggcacctccccaagcccgggttcactacctg

SEQ ID NO: 5657 - DNA, 231 bp, Homo sapiens
  chr16:67678708-67678939
  hyper
tggaggggaccagccccggtgggccgcggggatccccaggcaggcagcgtcccctggtgttcgcggcagggactgcggggcggggtggaagccgggggcaaggacccgctggaggcccgccacacccgcgaccctcccggccacgccactgcccaccccgacgtctaccctggcggagaagctcctgggcgacggggcgggcgggcaggtgggactcggcccccctcccac

SEQ ID NO: 5658 - DNA, 151 bp, Homo sapiens
  chr16:67678975-67679126
  hyper
cggggcggggaggggccgggccgggggcggcctggcaggaagcggcgcgcaccttccgccgccggaggagcaggtggctgccgtgcgggtctgggccccaggcttcctgtgtgcgcgctcgtcctctgctgtttcccgccggagctcgttg

SEQ ID NO: 5659 - DNA, 31 bp, Homo sapiens
  chr16:67707950-67707981
  hyper
gtgggtgattggccctcgggtccagccacag

SEQ ID NO: 5660 - DNA, 42 bp, Homo sapiens
  chr16:67969395-67969437
  hyper
agcatctgaagtcaaccgctgcgacgccgtttggagtgaggc

SEQ ID NO: 5661 - DNA, 159 bp, Homo sapiens
  chr16:67969442-67969601
  hyper
tcacaggggcagagttcgaggagaagggacagaagcgctcacccagggctgtgaagggcagacggctgtaggagccatggggatgcacaccgtagagctgcggtccagtcaggtctacgccgcccacgatcagcgatgcacccacgtggccctggtacc

SEQ ID NO: 5662 - DNA, 46 bp, Homo sapiens
  chr16:68118409-68118455
  hyper
agccacccaatttaggcggctccatccctcccgctttcatggatat

SEQ ID NO: 5663 - DNA, 52 bp, Homo sapiens
  chr16:68118476-68118528
  hyper
agagctgtgattggcacgagctcacaacgggctttcccgctcaatctactca

SEQ ID NO: 5664 - DNA, 91 bp, Homo sapiens
  chr16:68118548-68118639
  hyper
cctgcccattggggttcgctgaggcctcaaacgcgcatgctgtcaagggagcagctgcgggggcccgctagtggggacaaaggcgcagcca

SEQ ID NO: 5665 - DNA, 34 bp, Homo sapiens
  chr16:68118802-68118836
  hyper
gggatgaggatgtgggcggcgtccaggtaactct

SEQ ID NO: 5666 - DNA, 50 bp, Homo sapiens
  chr16:68118865-68118915
  hyper
gccatcaggagtaacacgatgcgcccccacatcaccgaacccagaacctc

SEQ ID NO: 5667 - DNA, 43 bp, Homo sapiens
  chr16:68118920-68118963
  hyper
ttcagcaccccttcctcgacatgagctccgcccaatgaggaga

SEQ ID NO: 5668 - DNA, 31 bp, Homo sapiens
  chr16:68118965-68118996
  hyper
ggtcttctgcattggccggtggtggtcccct

SEQ ID NO: 5669 - DNA, 31 bp, Homo sapiens
  chr16:68118999-68119030
  hyper
caattagagaggctaacggccttctctcgtc

SEQ ID NO: 5670 - DNA, 72 bp, Homo sapiens
  chr16:68269812-68269884
  hyper
ccaggtcccgtcccagcgcacccgccgtagccccgaagaggacgaccagtgatccgggccaggggcaggggt

SEQ ID NO: 5671 - DNA, 4 bp, Homo sapiens
  chr16:68269896-68269900
  hyper
cggc

SEQ ID NO: 5672 - DNA, 34 bp, Homo sapiens
  chr16:68269920-68269954
  hyper
gagggggcggcggcggcggcggagtcatggccgc

SEQ ID NO: 5673 - DNA, 57 bp, Homo sapiens
  chr16:68270100-68270157
  hyper
cccgcccgtggcgccccgcggggcggggcggctaccggcccacgccctctccaggcg

SEQ ID NO: 5674 - DNA, 43 bp, Homo sapiens
  chr16:68271017-68271060
  hyper
gaggctcctttatggcgcgtttcccggccgttccttactttcc

SEQ ID NO: 5675 - DNA, 122 bp, Homo sapiens
  chr16:68271198-68271320
  hyper
ccgcaccacgcgctttcggacaaggagggtgctgcggcccggcccctggacaatggagagagcggggcacccgggcgcatcaccagagctcatgcccgggaaaggggcgaggcccgggggga

SEQ ID NO: 5676 - DNA, 48 bp, Homo sapiens
  chr16:68271410-68271458
  hyper
tgggaagtgcttccttcgcccggcgggttcgagcgagtagcactttac

SEQ ID NO: 5677 - DNA, 44 bp, Homo sapiens
  chr16:68271460-68271504
  hyper
tccctacaggtggaggcgggccttggtgcgcggctgtccatctc

SEQ ID NO: 5678 - DNA, 92 bp, Homo sapiens
  chr16:68564223-68564315
  hyper
agcggagaagagaggtcggtgcctccaacccggggccgcggtcgaggggcgcgcgtcgttgctctgggactcactgtcgaccaacccccatt

SEQ ID NO: 5679 - DNA, 21 bp, Homo sapiens
  chr16:68631269-68631290
  hyper
ttttttttttttgagacggag

SEQ ID NO: 5680 - DNA, 29 bp, Homo sapiens
  chr16:68679033-68679062
  hyper
agaaaagccaggagagcgcaggagggcat

SEQ ID NO: 5681 - DNA, 77 bp, Homo sapiens
  chr16:68679362-68679439
  hyper
cgctccctggggggcgggcggggtccgcatggggcagtggcgtcggggagagcgcggggctgcgctccctggggcca

SEQ ID NO: 5682 - DNA, 68 bp, Homo sapiens
  chr16:68771019-68771087
  hyper
aggctagagggtcaccgcgtctatgcgaggccgggtgggcgggccgtcagctccgccctggggagggg

SEQ ID NO: 5683 - DNA, 57 bp, Homo sapiens
  chr16:69139612-69139669
  hyper
ggagccccctagacagcgaactgccccttcgcgtgcagaagtcggggaagagtgctc

SEQ ID NO: 5684 - DNA, 112 bp, Homo sapiens
  chr16:69139770-69139882
  hyper
tctggaaagttaacgacgcttcaggttctaggttgagcccaatgaccgtcttgccttggcagctggtcccagggcgattgcagagccgcgtggccttcggccccactcgggg

SEQ ID NO: 5685 - DNA, 31 bp, Homo sapiens
  chr16:69139917-69139948
  hyper
cttgcgagccggagccgcgtccacccgggac

SEQ ID NO: 5686 - DNA, 317 bp, Homo sapiens
  chr16:69139985-69140302
  hyper
tgggaccgcgcggggtcgggggtgcgcccgcgggggccctcccactctggtcaactttcccggccccagggccgggggaggcgcctctcctggcgggcacgcgccgggtacttaagggcggctcggctgggcaggcggcagtcggagcgcgcggcggcgcggagcggagcgggaggaggggcatggagccgccgcgggcctgctgagctccggagcgcggcagccggcggcacggtgagcgcgggccggccggcacccaggaggggagggccgcgcggggctgcgccgaggccggggcgcgccgggtggcaggggtg

SEQ ID NO: 5687 - DNA, 31 bp, Homo sapiens
  chr16:69140341-69140372
  hyper
ctgcgggcgccgcgtccggcgcggggaggcg

SEQ ID NO: 5688 - DNA, 131 bp, Homo sapiens
  chr16:70719196-70719327
  hyper
ttttttcctgctttggcggtgacagcattgtctgggctccggggccgtgggggaacatggtggtggaagggggcggaggccggtaagaccccggactcgttaaagggccctagagtcggtcctggatccaa

SEQ ID NO: 5689 - DNA, 31 bp, Homo sapiens
  chr16:70719329-70719360
  hyper
cccattcatggtttggcggtctggggcgcag

SEQ ID NO: 5690 - DNA, 69 bp, Homo sapiens
  chr16:70719381-70719450
  hyper
tcgggtcaggaccccacggggccaccgcgggcaccgcacggacaccccgacacacgagcacccacaccc

SEQ ID NO: 5691 - DNA, 43 bp, Homo sapiens
  chr16:70719470-70719513
  hyper
acgggcgcccagcagacgcaggcaggacgcgctcagacaagga

SEQ ID NO: 5692 - DNA, 761 bp, Homo sapiens
  chr16:70719566-70720327
  hyper
cgtccccggggggtcccgcacccgtcgccgcgcgcccggccccgccgcgccccggttaccttcatgtcgttgactatggcctggaagagcccgcccagggcgccgcactccttctccgccgtctccatgctctggctgggccgggccgcggcggcggctaggcgcacggagcgcggggagcagcgcaagggagggggccaggccgcgcgggcgctcgctccgaggccgggccgggcctcccgcctccaggctgcgctcagcggccggccgcgccgcgctccggggtcgcgggcctccggcgggcggcgcgggccatgtcgcagcggggctggcgggcggcgcggggggcgcggcgcgggcagctcgcggcgcagcctcggcgcggggactgacggcggcggtaatccgagccgccgaggatcgggcgtcacgtgggcgcggcggaggggggaccgcgaggagggagggaaggagggcgggccgcgcgggagggggctgtgggaacggccgcgcgggcgcaggcccattcacggccagaaaccagggctttgaaatccgagcccgggcgctgccagactggtccggcgagcggggccgacgggcgcgggcgccaccgagggtcggggggcggcgctgggcggggcccgccctgcccacgcaggagcgggactggcggttgggcctcggcccccgggcaggggctccacgatatcttctggcctttggtctggggcggggggcttctcgcgcttctaaagaca

SEQ ID NO: 5693 - DNA, 42 bp, Homo sapiens
  chr16:70720328-70720370
  hyper
gcagtgggtacagtggcgggatggggtcggtgcatgggctgg

SEQ ID NO: 5694 - DNA, 35 bp, Homo sapiens
  chr16:71659877-71659912
  hyper
cggctgtgggtcgccccgcccgggtttccagcagc

SEQ ID NO: 5695 - DNA, 31 bp, Homo sapiens
  chr16:71660038-71660069
  hyper
gtgcccgccccgcccccgggcttggccacct

SEQ ID NO: 5696 - DNA, 91 bp, Homo sapiens
  chr16:71660104-71660195
  hyper
ctcccgggcggggacacggaacccggccatggaagatccgtcgggggctcgcgagccccgggcccggccgagagagcgggacccgggacgg

SEQ ID NO: 5697 - DNA, 98 bp, Homo sapiens
  chr16:71660445-71660543
  hyper
gagtttgggaaaaaccgcgccaaagccggacgcgggacggagcccggggactgacctgggacgcagccgcgcctcctgggcccgcgccctgggaagcc

SEQ ID NO: 5698 - DNA, 81 bp, Homo sapiens
  chr16:71660612-71660693
  hyper
gggcgctgcgacctccgcgccggggacacctgtggcccaggccggcccgcgaggccctggcgtccccgggttctcgtccta

SEQ ID NO: 5699 - DNA, 31 bp, Homo sapiens
  chr16:71668363-71668394
  hyper
tgccatgggtgtcctgcgggtcccgtggcat

SEQ ID NO: 5700 - DNA, 31 bp, Homo sapiens
  chr16:73091556-73091587
  hyper
cgcagccccgagcccccgggagcccctagtg

SEQ ID NO: 5701 - DNA, 31 bp, Homo sapiens
  chr16:73091687-73091718
  hyper
accccgtggctccgaacgggctcccgcgtcg

SEQ ID NO: 5702 - DNA, 133 bp, Homo sapiens
  chr16:73091751-73091884
  hyper
gcccggccagcggtggcggccgcggcagcagcagtggctgcgaccgcggcgactgctccgggccgggtgcgcgccccgcgcggctgctcagcccggggccccggcgcctctcggggtggggcaaagttggggg

SEQ ID NO: 5703 - DNA, 9 bp, Homo sapiens
  chr16:73091900-73091909
  hyper
cgggggcac

SEQ ID NO: 5704 - DNA, 57 bp, Homo sapiens
  chr16:73092060-73092117
  hyper
ggcgcctccaccctcccgggggtcgccggcggccggcggcggcggcgcggggccggg

SEQ ID NO: 5705 - DNA, 66 bp, Homo sapiens
  chr16:73092480-73092546
  hyper
cggcggcgggagctggcggcgcttttaatcccgaaaagaggcgctcgggccgcggagcccatcaag

SEQ ID NO: 5706 - DNA, 31 bp, Homo sapiens
  chr16:74352095-74352126
  hyper
atacacttctggtctgcggcagttggagaat

SEQ ID NO: 5707 - DNA, 31 bp, Homo sapiens
  chr16:74352162-74352193
  hyper
ccaactcctctgtatgcggttgcttaactac

SEQ ID NO: 5708 - DNA, 41 bp, Homo sapiens
  chr16:75018962-75019003
  hyper
gccgtccccagtatcccgggaccgtgcgccccacacagcca

SEQ ID NO: 5709 - DNA, 39 bp, Homo sapiens
  chr16:75033798-75033837
  hyper
ggggcaccggcgactccgagagggcgcccggcggcggag

SEQ ID NO: 5710 - DNA, 91 bp, Homo sapiens
  chr16:75267941-75268032
  hyper
tgtgcgcgcacacacacgcacacgtggacgcacacacacactagcacacgtggacacacacacacacacaagcacacgtgaacacacacac

SEQ ID NO: 5711 - DNA, 47 bp, Homo sapiens
  chr16:75284494-75284541
  hyper
ccaacatcttccaggccgtaagcccctcaccccgcacccctaggcaa

SEQ ID NO: 5712 - DNA, 31 bp, Homo sapiens
  chr16:75284664-75284695
  hyper
tccacactgcagaacccggccctggccccct

SEQ ID NO: 5713 - DNA, 42 bp, Homo sapiens
  chr16:75285012-75285054
  hyper
cgaggaaactgaggctcggaggcagggcgcagaggcccaagg

SEQ ID NO: 5714 - DNA, 72 bp, Homo sapiens
  chr16:75285278-75285350
  hyper
gtccggcaggaaatgccgctcgcttaaccccttccagcccgctgccgcctccaagcccgtacgcggcccggc

SEQ ID NO: 5715 - DNA, 241 bp, Homo sapiens
  chr16:75285434-75285675
  hyper
cgggccgcgtgccctcggggctccgagcgcgccgcagccgccccggtgccgccgcgcagctgccgcctcggccacccagagccggtccagccgctctccgcctgccgccacggcccagccggcccagcccgatcccagcatgcccggccgcgcgcgcccattggccgccgccgctctccatgcaaataagccgcctgtcgggggcgcgggcgcgcagacagaagcccgcccagtaggggcc

SEQ ID NO: 5716 - DNA, 31 bp, Homo sapiens
  chr16:75285709-75285740
  hyper
gctccaggcccctgcccgaggccaggcttcc

SEQ ID NO: 5717 - DNA, 71 bp, Homo sapiens
  chr16:75299144-75299215
  hyper
tcccatccagccaagccgtcctgggggaggggtggctccggcgactggcagagaccgcgccccaacctggc

SEQ ID NO: 5718 - DNA, 82 bp, Homo sapiens
  chr16:75299750-75299832
  hyper
ggggcctggcgggcagcggcgccagcgggctgggggctcgggtccgcccgcgccgctcagaggccccgcgaggggtcccggc

SEQ ID NO: 5719 - DNA, 31 bp, Homo sapiens
  chr16:75529303-75529334
  hyper
atgaggcgctttcagacgtggctgcggtccc

SEQ ID NO: 5720 - DNA, 41 bp, Homo sapiens
  chr16:79635575-79635616
  hyper
cacactcacactcacccgtccccttacgaaatctgacctct

SEQ ID NO: 5721 - DNA, 104 bp, Homo sapiens
  chr16:79636190-79636294
  hyper
gaaactattgttggagcgagttggtttttacctcaacagcgccacctttcggcaaaggtcagttgaaattgatccgtgtccagttttgtcgatgaagtgaaaag

SEQ ID NO: 5722 - DNA, 69 bp, Homo sapiens
  chr16:80574797-80574866
  hyper
gggaggcatcaggagcgcggtcagggcgaaaaagccgactcgcgagcgcgcaggcgcagccctgacgct

SEQ ID NO: 5723 - DNA, 215 bp, Homo sapiens
  chr16:80574888-80575103
  hyper
tgtctcctagcaacggcgggtagcgttgttgacatcccgggaggctgtgccgccggcctgagcccagagtttcgcggcctccgcgatggtaaatctggggtctccgtccacgccccgccgttccaagcacgccgaccgtcaaggaccttcgcacccagcttctggggcccacccaggcacgggcggtccaggggccgcggcggaggctggtggct

SEQ ID NO: 5724 - DNA, 31 bp, Homo sapiens
  chr16:80837427-80837458
  hyper
ggtgagggaggtggcccggggaccccgggga

SEQ ID NO: 5725 - DNA, 31 bp, Homo sapiens
  chr16:81625940-81625971
  hyper
cattccagaccagggtcgcacaaactctggc

SEQ ID NO: 5726 - DNA, 129 bp, Homo sapiens
  chr16:81779772-81779901
  hyper
gtggcacaaacaaggccggcctgctggataaagggaggtagaaacgctttcagccctccccggtgcttcccggtttataacttcatctactcgtgacacgtgggggtccgccgccgccactggcagggt

SEQ ID NO: 5727 - DNA, 31 bp, Homo sapiens
  chr16:81779905-81779936
  hyper
tgagtgcttgagttttcgcccccagcacagg

SEQ ID NO: 5728 - DNA, 61 bp, Homo sapiens
  chr16:81779952-81780013
  hyper
cagaaaacatctggggcggaaacggaagcatggccgcagcggtgaacgcactgcattctgg

SEQ ID NO: 5729 - DNA, 97 bp, Homo sapiens
  chr16:81813401-81813498
  hyper
ttgtgcccagagctcgcggacgctcggagccacacttccctgtctcacttcggtggttgcgggtggcgggtgggagcgataccgcgggaggcgcagt

SEQ ID NO: 5730 - DNA, 31 bp, Homo sapiens
  chr16:84179010-84179041
  hyper
aaagctgcggggcgttcggtgtcgccgaagt

SEQ ID NO: 5731 - DNA, 91 bp, Homo sapiens
  chr16:84179097-84179188
  hyper
gcgcgcaggagcccggcgtggaggagtctgcgggtgaccacgggagcgcaggccgagggggctgcaaggaaggtgccgactgccccccagg

SEQ ID NO: 5732 - DNA, 31 bp, Homo sapiens
  chr16:84402052-84402083
  hyper
ccggcacctccctgtgcgcagccccgcccca

SEQ ID NO: 5733 - DNA, 37 bp, Homo sapiens
  chr16:84402115-84402152
  hyper
acagctacctggtaaccgggtccggcccaggaggctt

SEQ ID NO: 5734 - DNA, 31 bp, Homo sapiens
  chr16:84652627-84652658
  hyper
ggctcctctgaaagcacgagctgactcattc

SEQ ID NO: 5735 - DNA, 96 bp, Homo sapiens
  chr16:84853441-84853537
  hyper
cccgcctccttcagcccgctgagcctgcggggcggggccgggggcggggccggtgatgctcggtcctaccagcgccgccagcgatctgggggcgtg

SEQ ID NO: 5736 - DNA, 31 bp, Homo sapiens
  chr16:84853834-84853865
  hyper
tgtgctggcaccacaccgagtgctctgcttg

SEQ ID NO: 5737 - DNA, 70 bp, Homo sapiens
  chr16:85202814-85202884
  hyper
ccggagctcgcacatgcggctgccgctccagccgcccgggccccgccgccgccgccgccgccgccgccgc

SEQ ID NO: 5738 - DNA, 94 bp, Homo sapiens
  chr16:85932252-85932346
  hyper
ttcgcgtccccgtccccgtggaataacgcgcggcgggcatcactgcccaatatccagcgctcgtgaaggcggagaccggcggggcagctagttt

SEQ ID NO: 5739 - DNA, 88 bp, Homo sapiens
  chr16:85932356-85932444
  hyper
attctgattaatgggccgcaggcgcacggtctgcaccgtccggctcgttgctagtggctcgctcgggagccgccgcactcccggggct

SEQ ID NO: 5740 - DNA, 77 bp, Homo sapiens
  chr16:87417729-87417806
  hyper
ttgtggagataggggtcgcccctcgcgcccgtgcgtcccgcttccggcgcccgaaactgtgccgcgccggccggtga

SEQ ID NO: 5741 - DNA, 31 bp, Homo sapiens
  chr16:87417849-87417880
  hyper
ccagaaccccaaagggcgcctagaagccctt

SEQ ID NO: 5742 - DNA, 330 bp, Homo sapiens
  chr16:87417882-87418212
  hyper
gtccattgaaacaacgcgcgttccatcgtctccgccttatggtaaccaaaaggcccgagctgcggagctctgcagggaccttcggggatcccgagctccctgcggaagccccggggagggcttggaggggcggcggccggcgcggcccaagagatccggggatgcgcgcccggtctggaaagggaggccctgccatgcggcgccgcccaaagggcgcctgttcctgcagctgctgggagccgcgcacgcctgctccagctgggctccgccgaggccgctgagcggggtcgtctcccaggtccgcgggtggtgaccgcgaaggcgtcctct

SEQ ID NO: 5743 - DNA, 62 bp, Homo sapiens
  chr16:87525617-87525679
  hyper
gtgaggctgcccaggtcggccgggttgttggccttgatctccgagtcgcgcagcgagtggta

SEQ ID NO: 5744 - DNA, 122 bp, Homo sapiens
  chr16:87525991-87526113
  hyper
cgggcgggcgccggggcgggggcggggaccggggccgggcaaggctcccgtcaggggccggcgggcgggcgcgcgcggggcgccgggggggcccggggcggccggggcggccgggggcggcg

SEQ ID NO: 5745 - DNA, 390 bp, Homo sapiens
  chr16:87526239-87526629
  hyper
gcccccatctccccccgcgccgcagggtctgtcactgcgggccgccccccgacggagccgccccggccatgccgtcgccgccgcccgcgcctccgcccaggccggccgttaccccgggccgcgggcgcggcgtcgccgcctggggagcgctgggggccgcggccgcgaaacggacgctggagggggagggacgcgcggcgggaggcgcggagggatccggccgggacttgccggccttgctgctcccgcgcggcggacggatccgggcccgagcgcggcggcggcggcgacggcgacggcgacggcgacggcgacggcggaggaggcgccggccgaggagcggagggatcgtcgcgctcgcggctgacgggcggccgggatcagcagaag

SEQ ID NO: 5746 - DNA, 212 bp, Homo sapiens
  chr16:87526765-87526977
  hyper
cctccctgggggctgtcgatcatgttggggccaccgcctcccgtccctcggcggccgtcaagacgcgattggtccgcggaatcggagaggcggaaaacccgggctggatttctggttgcttttgttcccgcaaatttgcgtggagcattgtttttcggcgaaaacggggcgttcggccttcctgctttatttttgagcggtgtaagagggag

SEQ ID NO: 5747 - DNA, 60 bp, Homo sapiens
  chr16:87527024-87527084
  hyper
ggttccaatcccgggtcggccactgcaaagctgtgtgaccttgggcgagtcacttggcct

SEQ ID NO: 5748 - DNA, 51 bp, Homo sapiens
  chr16:87723333-87723384
  hyper
gagccccgagctgtaccgcaagggcaccactccctccgacctgacccccga

SEQ ID NO: 5749 - DNA, 50 bp, Homo sapiens
  chr16:87723466-87723516
  hyper
ttctcgaggcaggtgtcggtggacgaggagcggggcggggacatccagat

SEQ ID NO: 5750 - DNA, 51 bp, Homo sapiens
  chr16:87723714-87723765
  hyper
gtggacttcccaccaccgggccagcaaccacagccccggaggctccaggct

SEQ ID NO: 5751 - DNA, 31 bp, Homo sapiens
  chr16:87723783-87723814
  hyper
gaagctgagcaactaccggatggagatgaaa

SEQ ID NO: 5752 - DNA, 48 bp, Homo sapiens
  chr16:87723817-87723865
  hyper
ttgctgaggatggagacgcatccccagaaaagacgctacagcaagggc

SEQ ID NO: 5753 - DNA, 164 bp, Homo sapiens
  chr16:87723949-87724113
  hyper
aaggagaacttcaggccggcctcctccgcggagcccgccgtgcagaaactggcgagcctgcggctgggcggggccgagccccggttgctgcgttgggacttgaccttctccccgccccagaaatccttgcctgtcgctctagagtccgacgaggagaatgggga

SEQ ID NO: 5754 - DNA, 31 bp, Homo sapiens
  chr16:87724114-87724145
  hyper
gagctcaagtccagtacggtgagtgggcggc

SEQ ID NO: 5755 - DNA, 45 bp, Homo sapiens
  chr16:88061031-88061076
  hyper
ctcctggtggctgtcccgaacaggcctcaccgcttctccttggat

SEQ ID NO: 5756 - DNA, 46 bp, Homo sapiens
  chr16:88878526-88878572
  hyper
aaagtgcgagtcaaggcgcccttccttgtctcgggctacgcttctg

SEQ ID NO: 5757 - DNA, 213 bp, Homo sapiens
  chr16:88878579-88878792
  hyper
ccaggcagctgtgggccggggccttggcggctggaggaggggcgtgagctggtctcgcccacgcacctggcgcgcgtacgggccgcgccctttctcctttattggccgagatccccacgctgcgcgcgggaggctggcgcgcggggtggagaagggcgtgaggaagcggtccaagtagcaggagggcggtgcagggcccggagggagcagccc

SEQ ID NO: 5758 - DNA, 144 bp, Homo sapiens
  chr16:88878827-88878971
  hyper
ggggcgctggcctctcgcggatgggccctgccgttgaggcggctcttccccgcccggacccgggggagggaggccggaaggtgtggccaggccagggcgcgcatccgcgagggcagaagcccttctgtccgcctgcagaggcca

SEQ ID NO: 5759 - DNA, 35 bp, Homo sapiens
  chr16:88878999-88879034
  hyper
ctgtgaaccccctggccgcccgaggactggtaccc

SEQ ID NO: 5760 - DNA, 31 bp, Homo sapiens
  chr16:88938185-88938216
  hyper
acctgtgagtacaccccgaggagtggggctc

SEQ ID NO: 5761 - DNA, 42 bp, Homo sapiens
  chr16:89007715-89007757
  hyper
gcgcctgtggctccaacgccgcgcgctcgcccgagagtctca

SEQ ID NO: 5762 - DNA, 31 bp, Homo sapiens
  chr16:89189687-89189718
  hyper
accaggtgatgatgggcgctgtgaactctga

SEQ ID NO: 5763 - DNA, 113 bp, Homo sapiens
  chr16:89641241-89641354
  hyper
tgcctgtgctgcctcccgccggcggggccctgagcctcctcgccctgtcggcggcggtcccctctgaccgcagggtcttcttctagagtcctgatcgccgaggctgagcggag

SEQ ID NO: 5764 - DNA, 77 bp, Homo sapiens
  chr16:89641413-89641490
  hyper
cgtggcttttggcgaggtccgtgccctatttttaggcagaaatcggcaaaaagagtggactgcgaggtggtttctgt

SEQ ID NO: 5765 - DNA, 40 bp, Homo sapiens
  chr16:89641697-89641737
  hyper
tccttccagccccagacgagcgcggcgcctgcacacaaca

SEQ ID NO: 5766 - DNA, 64 bp, Homo sapiens
  chr16:89894334-89894398
  hyper
caccccagccaccctgcgacaacccctggaggtcaccttgcccggggctcggggaggccactgc

SEQ ID NO: 5767 - DNA, 66 bp, Homo sapiens
  chr16:89894506-89894572
  hyper
ttttgtgggcatcggccgtctgggtctgcgggggagcgccgggggtgtcaccgcgtgtccgagcgc

SEQ ID NO: 5768 - DNA, 46 bp, Homo sapiens
  chr16:89927370-89927416
  hyper
gctgctggtctggggccgtggtctctgctgccgcctgctggggccg

SEQ ID NO: 5769 - DNA, 52 bp, Homo sapiens
  chr16:89990061-89990113
  hyper
ggtgacctcgggctgtcgaggcgcagctcacgtcagtcgcgaagcctcagcc

SEQ ID NO: 5770 - DNA, 124 bp, Homo sapiens
  chr16:90085455-90085579
  hyper
gccacccaccaaggagcgtgccgggcacggcttcccgggccgggagcgcagagaacaagggggcggagactcggtccgtgtgcccccagccccgcgcggggaccgcgcccgggaggtgcccctg

SEQ ID NO: 5771 - DNA, 72 bp, Homo sapiens
  chr16:90086126-90086198
  hyper
cgcactcacttggcggccgcgcccgctggcgtcctcttgttctcttccaggtacttgcgtgtggggcgccga

SEQ ID NO: 5772 - DNA, 67 bp, Homo sapiens
  chr16:90088769-90088836
  hyper
tggtccttcatcagcacgtctttactgagcacgtgctgtgtgctgttctaggcgctgaaggatagaa

SEQ ID NO: 5773 - DNA, 31 bp, Homo sapiens
  chr16:90088837-90088868
  hyper
tgaagggttcccccctcgtggagcttaggtt

SEQ ID NO: 5774 - DNA, 88 bp, Homo sapiens
  chr16:90088880-90088968
  hyper
aaaacatgccctgcagcgaaaggcttctgggctgccggcgacattttcccaacgttcacaaccgggttccttccggacgcccgtctct

SEQ ID NO: 5775 - DNA, 31 bp, Homo sapiens
  chr16:90089148-90089179
  hyper
gcggggctggggtcctcggcaggggcccgga

SEQ ID NO: 5776 - DNA, 67 bp, Homo sapiens
  chr16:90089184-90089251
  hyper
cggggcagggaggcctcggtacacggagaccctgggaatgggaggcctggagcgctgggtttctgga

SEQ ID NO: 5777 - DNA, 79 bp, Homo sapiens
  chr17:635475-635554
  hyper
caggtcggggaggggcgcgtccgctgacggaacagaagccgggagccgcggcccttcccgcctccgcctgggccccgcg

SEQ ID NO: 5778 - DNA, 138 bp, Homo sapiens
  chr17:635797-635935
  hyper
cggagggttgaaatcgcgcggccgggccggggcgcgccgagccgaacccagccacgcggcgccagcgaggcggccggacccgcagccccgatgctgctgacgctggccgggggcgcgctcttcttcccggggctcttc

SEQ ID NO: 5779 - DNA, 47 bp, Homo sapiens
  chr17:635959-636006
  hyper
cgctcccagcccggatggagccgcaccgactgcgtgatgatcagcac

SEQ ID NO: 5780 - DNA, 138 bp, Homo sapiens
  chr17:636120-636258
  hyper
tccctccgcgtcccggcggcccgagtttccgaagcccctccgcgtcctcccctggcgggagcggggccggggcgggcgggaatggccgatgagcctccggagcccgctccccacatctgcctgcggctggggagagtc

SEQ ID NO: 5781 - DNA, 85 bp, Homo sapiens
  chr17:883201-883286
  hyper
ggtggccagagctctccgcccaggcggggtccgcagctgccggccgcggtgcgcggggtgactgcttgggcgagaagccggaccc

SEQ ID NO: 5782 - DNA, 31 bp, Homo sapiens
  chr17:1011775-1011806
  hyper
ccctcttgcctcagctcggagacaccaagtc

SEQ ID NO: 5783 - DNA, 128 bp, Homo sapiens
  chr17:1011828-1011956
  hyper
ggtggcccctctcttgcggttgccgtggaaacgggggattcctgcccacccgctccagggaggcggcgaggctcgggctgacaggcgcgccaggtgactcctggcacagccgccggagccctgagctg

SEQ ID NO: 5784 - DNA, 31 bp, Homo sapiens
  chr17:1011957-1011988
  hyper
gctggcctggagggggcggccaccactgccc

SEQ ID NO: 5785 - DNA, 31 bp, Homo sapiens
  chr17:1132221-1132252
  hyper
gcccgggggtctcctccgcggcgaggggcga

SEQ ID NO: 5786 - DNA, 31 bp, Homo sapiens
  chr17:1132264-1132295
  hyper
cttggcctcggcctcccgctgctccaggtcg

SEQ ID NO: 5787 - DNA, 84 bp, Homo sapiens
  chr17:1613423-1613507
  hyper
tgccagcggtcccgagcggccgattccggcgtgggcagccgccgcaacccccagtgcagcccccggaacgcgaggaaggaggcg

SEQ ID NO: 5788 - DNA, 31 bp, Homo sapiens
  chr17:1613564-1613595
  hyper
tccgggtcggtcccctcggcgcccgcgctct

SEQ ID NO: 5789 - DNA, 95 bp, Homo sapiens
  chr17:1613634-1613729
  hyper
ccccggctcccctccccgccgcgcctttgggatcagcaggaacttttccccgttcgtccacgcccagtccctcgcctgggcggtgattggagcag

SEQ ID NO: 5790 - DNA, 31 bp, Homo sapiens
  chr17:1613873-1613904
  hyper
tccaagcgtcctgaagcgctggagttgcaga

SEQ ID NO: 5791 - DNA, 105 bp, Homo sapiens
  chr17:1613922-1614027
  hyper
cctcaactgacactcccgggccccacccacgaaccttgacctcttcccggctcccgcgactttcacctgctgagcgtcatcaccacccaccgccacaccctgcaa

SEQ ID NO: 5792 - DNA, 53 bp, Homo sapiens
  chr17:1901565-1901618
  hyper
gcgccccaaggcctcccgcaggccgacccgagccgagcgcgccctttgggcac

SEQ ID NO: 5793 - DNA, 114 bp, Homo sapiens
  chr17:1929077-1929191
  hyper
agtccgctccctgccccgtctcctccctggccagcgccccttctcccagtctcgacggctcttccccgcactgaacagctccagcgaacccggctgccccgcaccccgagtccc

SEQ ID NO: 5794 - DNA, 34 bp, Homo sapiens
  chr17:1929339-1929373
  hyper
tggtccacacagaccccgccggggggttcgcgga

SEQ ID NO: 5795 - DNA, 31 bp, Homo sapiens
  chr17:1945164-1945195
  hyper
ctcaggtatcagcccccgctctgggtgcgcc

SEQ ID NO: 5796 - DNA, 31 bp, Homo sapiens
  chr17:1957013-1957044
  hyper
cagcaaagggagcctccggggggcgcccgag

SEQ ID NO: 5797 - DNA, 116 bp, Homo sapiens
  chr17:1957479-1957595
  hyper
tttctcccagaagagacgtcacccacacaaacctgaccttcacgtggggcgcgggaccttgcggggtcccagccgcaggcgcccctgttgtttccttcgggcgggtgggttggaga

SEQ ID NO: 5798 - DNA, 31 bp, Homo sapiens
  chr17:1959603-1959634
  hyper
atgacttttcctgaagcggacattttactta

SEQ ID NO: 5799 - DNA, 31 bp, Homo sapiens
  chr17:2014997-2015028
  hyper
cgaaaggtccttagagcgggtttcttgggtg

SEQ ID NO: 5800 - DNA, 51 bp, Homo sapiens
  chr17:2302238-2302289
  hyper
gtcgccccgactaggccgccggccccgcagctcccccgccccttgcccgct

SEQ ID NO: 5801 - DNA, 20 bp, Homo sapiens
  chr17:2415865-2415885
  hyper
ctgagcgaaagagcaagact

SEQ ID NO: 5802 - DNA, 302 bp, Homo sapiens
  chr17:2756746-2757048
  hyper
gcctggggagggagctcggggccgccggcgggagtgcgggcggggaccagaaggagcgggcgaggggaggcagggccggggccggggagggcgcctgggagccgggcaggggggtcccgggagcgctgtccgcctcctcctgcgcttcgcccgctccctgtgccccgcgtcctccaccatccgggcggccgaggccggggcgcgggaggcggggccggggcgggtcccggcgcgggcggcgcgtctgagcgggagccgggagccgccggcccgggccgcgccccgagcgagcctcggaaatg

SEQ ID NO: 5803 - DNA, 95 bp, Homo sapiens
  chr17:2757205-2757300
  hyper
gctcaggggccgggtgcggagcgcgcggagccggggctgcggggacgcgggcgggcgaggtcgggcaccgcgggcggcctcgccatgtcccagcc

SEQ ID NO: 5804 - DNA, 31 bp, Homo sapiens
  chr17:3554659-3554690
  hyper
attacaggagccaccacgcctggccaaagtg

SEQ ID NO: 5805 - DNA, 28 bp, Homo sapiens
  chr17:3778890-3778918
  hyper
ctggatactcacacgtgtccaaatgcct

SEQ ID NO: 5806 - DNA, 39 bp, Homo sapiens
  chr17:3778975-3779014
  hyper
tgtgcccagggaactgcgccagaccgtgtaacctcttgt

SEQ ID NO: 5807 - DNA, 31 bp, Homo sapiens
  chr17:3779015-3779046
  hyper
cagacaactttgcctacgctcctgtcactta

SEQ ID NO: 5808 - DNA, 41 bp, Homo sapiens
  chr17:3867425-3867466
  hyper
cgcggcccccgctccccggcccggcccggcccgcgcgctca

SEQ ID NO: 5809 - DNA, 31 bp, Homo sapiens
  chr17:4642753-4642784
  hyper
cggccggagaggaggcgcgagccagctgcac

SEQ ID NO: 5810 - DNA, 43 bp, Homo sapiens
  chr17:4647511-4647554
  hyper
agtcactgaagatccacgtggtggaggccgggaaggagtttga

SEQ ID NO: 5811 - DNA, 40 bp, Homo sapiens
  chr17:4890352-4890392
  hyper
gagatgggaggaggcccgtcgggctcggctatgtgcagtg

SEQ ID NO: 5812 - DNA, 80 bp, Homo sapiens
  chr17:4890400-4890480
  hyper
gttggggtaaggactccgccccagggcgcaggtgcgcagtcctggctaggcagcctgccagggtgcggagcgggagcggg

SEQ ID NO: 5813 - DNA, 37 bp, Homo sapiens
  chr17:4890483-4890520
  hyper
ttgggctgcacttgggcggcgccggatcggacgcttg

SEQ ID NO: 5814 - DNA, 80 bp, Homo sapiens
  chr17:4890522-4890602
  hyper
actctgggcggccccccggcggagtggtggtcccaggagaacctccgaggtgggagggtcccgcccgcatagagggatgt

SEQ ID NO: 5815 - DNA, 31 bp, Homo sapiens
  chr17:4900808-4900839
  hyper
gaattctagaactcggcggggcggggaggag

SEQ ID NO: 5816 - DNA, 31 bp, Homo sapiens
  chr17:4901560-4901591
  hyper
atgtgctgtttgttccgcggaggcgcagaga

SEQ ID NO: 5817 - DNA, 35 bp, Homo sapiens
  chr17:4901644-4901679
  hyper
ggccgccctgagaggccgggcggggacctgtgtga

SEQ ID NO: 5818 - DNA, 31 bp, Homo sapiens
  chr17:6347034-6347065
  hyper
agagaggcaggcattccgctggagagaggga

SEQ ID NO: 5819 - DNA, 266 bp, Homo sapiens
  chr17:6347511-6347777
  hyper
tagcaagggcagtggcgcgagcgggacgcaggatacaaagcccggagccacgaggctggcggcggggcgggggccggagcgatgaatgggcacggccgggccaatccaagcgcagcatttgcagccgcgagagagggagccaatcggatccccggggcggtggcggtggcgggggcggggacggaaccaatcagctgtgaggacggggccgggggcggagccgcgcagagtttcaaatcggctgcggtgggcgaggagcagctgtg

SEQ ID NO: 5820 - DNA, 41 bp, Homo sapiens
  chr17:6347789-6347830
  hyper
tcggccttagtggtgtcgggtgagtgcgggctgggcacaag

SEQ ID NO: 5821 - DNA, 59 bp, Homo sapiens
  chr17:6459171-6459230
  hyper
cggggcggccagcagccggcgcggcacggggctcccctccttcccgagaaggaatctgg

SEQ ID NO: 5822 - DNA, 120 bp, Homo sapiens
  chr17:6459295-6459415
  hyper
tgcaggagcagggggcgcgtcccggtttgcgttggggtgtgggacgaagcggcggccgcgggacatccccttcggtggcgaagcccgggtctgcccggggcctccgcggggtgcagaggg

SEQ ID NO: 5823 - DNA, 81 bp, Homo sapiens
  chr17:6459568-6459649
  hyper
ccgctaccgccccctacgccctcccgggacctccgcccacctgcgcgaggggttcacctgggccggcggcccctcctctag

SEQ ID NO: 5824 - DNA, 9 bp, Homo sapiens
  chr17:6459765-6459774
  hyper
tcgcgcttc

SEQ ID NO: 5825 - DNA, 31 bp, Homo sapiens
  chr17:6459791-6459822
  hyper
cgcctccggccccgaacggactccgagcgcc

SEQ ID NO: 5826 - DNA, 31 bp, Homo sapiens
  chr17:6460088-6460119
  hyper
cccaggggctcagagacgcggagacagcccg

SEQ ID NO: 5827 - DNA, 31 bp, Homo sapiens
  chr17:6460250-6460281
  hyper
ccagagacccagagcccggctccggctccgg

SEQ ID NO: 5828 - DNA, 45 bp, Homo sapiens
  chr17:6926238-6926283
  hyper
gaccccgccctggactcgccatctggagagcgagggaggaaggaa

SEQ ID NO: 5829 - DNA, 15 bp, Homo sapiens
  chr17:7146549-7146564
  hyper
cgaagcccggtttct

SEQ ID NO: 5830 - DNA, 57 bp, Homo sapiens
  chr17:7199819-7199876
  hyper
tccgcgtctccttcgccgccagctgcccgcagcagccgcagtcgcctctcccggtcc

SEQ ID NO: 5831 - DNA, 58 bp, Homo sapiens
  chr17:7254510-7254568
  hyper
acccaggctcggagcgcgaggtccccaggtgggccccaaccgccggatcctgcccttc

SEQ ID NO: 5832 - DNA, 64 bp, Homo sapiens
  chr17:7254941-7255005
  hyper
cggcctgagcgcagggcgctgcggggcgggggctctcgggctggggcgacgtggccagcccagt

SEQ ID NO: 5833 - DNA, 122 bp, Homo sapiens
  chr17:7255020-7255142
  hyper
ggctggccctggggctcgctggccccgcgccgccgcggagagagcgcgcccgggccaccccggctggaaggcatccccggaatgcggcggctcagcacccgccccctcgggaattccccggg

SEQ ID NO: 5834 - DNA, 396 bp, Homo sapiens
  chr17:7255306-7255702
  hyper
caccccgtcccgccagcgtctgccagtccagccagtccgcccagtctctcgcgtccgagactcgcctccagcctcccacctccgcccgggccgcgcgagcctcgcgggggcgggggcggggcgccaaggggcggggctgtctcttaaagggccccgggccgctgcccttaggccacttcctgggggcggagaggacctcagcggctgcggcgacacccagggaaggcggcgcggccgggtcccgaaactcctggctgtttccatcagagccctcggacactcccagcccgggctgagcacgcatcgtcgctccccggcggatacaagggggctccgccatccgctcccgtcagttcggcctccatctcctgggacccgcgccggcagccaggccag

SEQ ID NO: 5835 - DNA, 123 bp, Homo sapiens
  chr17:7255719-7255842
  hyper
gagccctggctggactcgtccacggcggcagcgatctgcccggggtctcggaggccatcccttcagagtcggccctgtgctcgccaccgtcacctgctggttggattccggaaacccactgtc

SEQ ID NO: 5836 - DNA, 137 bp, Homo sapiens
  chr17:7284207-7284344
  hyper
gggggcttctcacagtcggggcgatctggtctggaggagggaggggccgccagtcgccctggggaccgtcaccttgtcccactagggaactcggggtgcggccctcgccggccccgggccagcggccaggtccccgc

SEQ ID NO: 5837 - DNA, 56 bp, Homo sapiens
  chr17:7284471-7284527
  hyper
gagccggcggagcagccgtcgctgggggcgcgtccggggggcgctgggcctgtcct

SEQ ID NO: 5838 - DNA, 31 bp, Homo sapiens
  chr17:7284668-7284699
  hyper
ttctgagtccacctgcgcgtttccaactagg

SEQ ID NO: 5839 - DNA, 31 bp, Homo sapiens
  chr17:7307051-7307082
  hyper
ctgaccgcccccaatccggggggacccaggt

SEQ ID NO: 5840 - DNA, 31 bp, Homo sapiens
  chr17:7461585-7461616
  hyper
agagtcagcaggcacacgggaacccggaacc

SEQ ID NO: 5841 - DNA, 49 bp, Homo sapiens
  chr17:7739846-7739895
  hyper
ccccgtccccgcctgccggcccccaccgagatctcgcccaggagagaga

SEQ ID NO: 5842 - DNA, 31 bp, Homo sapiens
  chr17:7744982-7745013
  hyper
cccacgcacagccgaccgtgtcagacagact

SEQ ID NO: 5843 - DNA, 56 bp, Homo sapiens
  chr17:7748402-7748458
  hyper
accccgtccctctgaccggccttttggttccctgccacacacgtcctgactcccag

SEQ ID NO: 5844 - DNA, 42 bp, Homo sapiens
  chr17:7791234-7791276
  hyper
gacgcctgcccaagttcgggaacctcccgctggggtggggag

SEQ ID NO: 5845 - DNA, 31 bp, Homo sapiens
  chr17:8055128-8055159
  hyper
ttcttcccctactccccgtccaaccacaccc

SEQ ID NO: 5846 - DNA, 31 bp, Homo sapiens
  chr17:8055165-8055196
  hyper
ctgagcattttctgagcgccaggggaaaagg

SEQ ID NO: 5847 - DNA, 56 bp, Homo sapiens
  chr17:8055232-8055288
  hyper
acgggatgttctagtccgaagtgggctgacatcacaggcggcgcagggccagggac

SEQ ID NO: 5848 - DNA, 119 bp, Homo sapiens
  chr17:8055322-8055441
  hyper
aatagggtcctggtaccggggcaaacctggggcccctcgagtaacgagcaagaagaccggggcatgcccgctgagagtcggctgtggggccgggaaagctgggacggggaggtggggac

SEQ ID NO: 5849 - DNA, 120 bp, Homo sapiens
  chr17:8055465-8055585
  hyper
caggagtgcagactcccggtgcaagatttcgaggaggacttcggtccttgggggcagggagagggtgggtagcggtaaggacgacagtgtgccctctgcctgggccgaaagtagcccatc

SEQ ID NO: 5850 - DNA, 162 bp, Homo sapiens
  chr17:8055686-8055848
  hyper
cgccgccgctccagcccgcagccgagtggaagctccaccgggcgggcggggaggcgggttgcataatgccgggcactgccccctcattggcctcttgccgacggagccgcaggccccgcccccgattggctggggatctcttcccggcgcctgattggctag

SEQ ID NO: 5851 - DNA, 31 bp, Homo sapiens
  chr17:8759639-8759670
  hyper
caggcgtggtggctcacgcctataatcccaa

SEQ ID NO: 5852 - DNA, 121 bp, Homo sapiens
  chr17:8901425-8901546
  hyper
agcaaactatttgtatcgtttctccaagcccagcatttactgtgcgagccacctgggggccatttttgttgcccgaggtggtgcgcctgcgccacctggtggactacgggaaagtagcaga

SEQ ID NO: 5853 - DNA, 31 bp, Homo sapiens
  chr17:9548172-9548203
  hyper
gagcccccttccttgccgattaaagcaaggg

SEQ ID NO: 5854 - DNA, 31 bp, Homo sapiens
  chr17:9548355-9548386
  hyper
ccccccaaggggcagacggtctggaaggagg

SEQ ID NO: 5855 - DNA, 110 bp, Homo sapiens
  chr17:9548724-9548834
  hyper
aggggtaggggtggcccggcgctgccctggagggggctggtcgtgccgccggattcccgcgcggggcggggctgccccgcccttggctccgcctccgccccgtccccgca

SEQ ID NO: 5856 - DNA, 333 bp, Homo sapiens
  chr17:9548970-9549303
  hyper
gcggcaggagggggaccgctcgcgccccggccccgccgccgccgctccctgcgccgcctgttcagccgcttcctgctggcgctgggcagccgctcacgccccggggactcaccgccccggccccagccgggacactgtgatggcgacggtgaggggggcttcgcctgcgccccgggcccagttccagcggcccccgggagccccggggaggaacgcccgcccggaccccagccccagctccagctccccgccggcgatggggcgcggccgccgggcgctcagggcttgaagaaccacggcaacacctgtttcatgaacgcggtggtgcagtgt

SEQ ID NO: 5857 - DNA, 31 bp, Homo sapiens
  chr17:13505134-13505165
  hyper
ccccacctgtgagccgcgtggctgggctggg

SEQ ID NO: 5858 - DNA, 58 bp, Homo sapiens
  chr17:16395228-16395286
  hyper
gttcgcgtcgggggcccggcgcggcgccggggctggctctctccgccaggctgccctt

SEQ ID NO: 5859 - DNA, 68 bp, Homo sapiens
  chr17:16439047-16439115
  hyper
gataggggtcttcagccgtgcgcgtgtggagcagggccacggcgcctgcgcagcggaggctgtggacc

SEQ ID NO: 5860 - DNA, 31 bp, Homo sapiens
  chr17:16439118-16439149
  hyper
tttcccaagaacactgcgttcctgggcccgc

SEQ ID NO: 5861 - DNA, 31 bp, Homo sapiens
  chr17:16570443-16570474
  hyper
ccaccggtgggaaaaccggcaggaggctgcg

SEQ ID NO: 5862 - DNA, 31 bp, Homo sapiens
  chr17:17399854-17399885
  hyper
ctcctgctctctgggcgcgggggctgggggg

SEQ ID NO: 5863 - DNA, 207 bp, Homo sapiens
  chr17:19140729-19140936
  hyper
tcaaactgagccagacgcggcggtggcggcggctccgcgggctacggtcgctcccgcctctcgagcgctgccggtggccgcagcggcgcacccacgccggcccggaggagcagaggtgagccacagcccgtggggctccaaggccagagcgagtccccggggcgaggaccctccccctctccagggcgcggacgcccccagagcaca

SEQ ID NO: 5864 - DNA, 69 bp, Homo sapiens
  chr17:19140942-19141011
  hyper
cctacctcaccagccccgccagggcatgcgcccctgccgccccgctggtccctacgccaggctctgggg

SEQ ID NO: 5865 - DNA, 38 bp, Homo sapiens
  chr17:19141020-19141058
  hyper
ctttccaaccaggccccgccccacggactggagcatgg

SEQ ID NO: 5866 - DNA, 112 bp, Homo sapiens
  chr17:19141267-19141379
  hyper
gcccagcctggtctcccgccagcccccgtgcagagcccggtccgggcgccctccgggaatcgggggaggggtccttatctctgtccgggatcccgcccgtctcacctttcct

SEQ ID NO: 5867 - DNA, 46 bp, Homo sapiens
  chr17:19141602-19141648
  hyper
ctctctccctgtggggcggctcccctagagccgagagccgagcgcg

SEQ ID NO: 5868 - DNA, 31 bp, Homo sapiens
  chr17:19265421-19265452
  hyper
tctggggattcagaacgcgggacagtaactc

SEQ ID NO: 5869 - DNA, 31 bp, Homo sapiens
  chr17:19282088-19282119
  hyper
gcgcttctgcccttgtcggtttaggaaactg

SEQ ID NO: 5870 - DNA, 194 bp, Homo sapiens
  chr17:19282131-19282325
  hyper
gtcctgctccccagcccgcagaggggacactgaggcccacggtaggtggtcctctcctcacccgagtctccacacagacaccatggccgagcctctgaaggaggaagacggcgaggacggctctgcggagccccccgggcccgtgaaggccgaacccgcccacaccgctgcctctgtagcggccaagaacctgg

SEQ ID NO: 5871 - DNA, 31 bp, Homo sapiens
  chr17:19391541-19391572
  hyper
attcaacactgctcctcgggctgagcagggc

SEQ ID NO: 5872 - DNA, 31 bp, Homo sapiens
  chr17:19881494-19881525
  hyper
ctgccacgctccagctcgacccctcctgctc

SEQ ID NO: 5873 - DNA, 31 bp, Homo sapiens
  chr17:21189751-21189782
  hyper
ctatggtggctggagccgggtgggctggata

SEQ ID NO: 5874 - DNA, 31 bp, Homo sapiens
  chr17:21189791-21189822
  hyper
tacataagtgggaggccggatccctgaccat

SEQ ID NO: 5875 - DNA, 45 bp, Homo sapiens
  chr17:21189828-21189873
  hyper
accactgtgagtaactcgggaggcactcgacgggggaggtgtctg

SEQ ID NO: 5876 - DNA, 31 bp, Homo sapiens
  chr17:21189883-21189914
  hyper
tgcactgcacagacctcgtggagcttgggaa

SEQ ID NO: 5877 - DNA, 31 bp, Homo sapiens
  chr17:21189933-21189964
  hyper
tccactctggagagctcggggaagggtagga

SEQ ID NO: 5878 - DNA, 31 bp, Homo sapiens
  chr17:26925397-26925428
  hyper
tgtaaatggatgtcaccgacgtagaagactt

SEQ ID NO: 5879 - DNA, 26 bp, Homo sapiens
  chr17:27038906-27038932
  hyper
ggggcctccggcgcctcccaggcccc

SEQ ID NO: 5880 - DNA, 31 bp, Homo sapiens
  chr17:27039015-27039046
  hyper
caccctgcctccagatcgtagccccaattct

SEQ ID NO: 5881 - DNA, 36 bp, Homo sapiens
  chr17:27039072-27039108
  hyper
gccccattcttagccccgccccggccattctctaaa

SEQ ID NO: 5882 - DNA, 50 bp, Homo sapiens
  chr17:29021020-29021070
  hyper
cacttccttgacagttcgctggctggcctccgacccgtagctgatttctt

SEQ ID NO: 5883 - DNA, 31 bp, Homo sapiens
  chr17:29815732-29815763
  hyper
ggaggtggggagtcctcggggccagcccagg

SEQ ID NO: 5884 - DNA, 90 bp, Homo sapiens
  chr17:30813421-30813511
  hyper
gcagcctcagagagggcgggccgcgcgctgccagggcagggactcggccgagagtgcccccgcggccggcagctgcgggcgccgcggcgg

SEQ ID NO: 5885 - DNA, 31 bp, Homo sapiens
  chr17:31203739-31203770
  hyper
ccccctctcgggaaagcgcagcctcgcgccc

SEQ ID NO: 5886 - DNA, 58 bp, Homo sapiens
  chr17:31254913-31254971
  hyper
cctgggaccgccagcccggggcggggcgcaggcagggaccctccgctcccctctccgt

SEQ ID NO: 5887 - DNA, 38 bp, Homo sapiens
  chr17:31255334-31255372
  hyper
ccggggagaggggaggcgggtgccgcagctttgttctt

SEQ ID NO: 5888 - DNA, 31 bp, Homo sapiens
  chr17:31255478-31255509
  hyper
ccggggacagagtgggcgtcctgggtggacg

SEQ ID NO: 5889 - DNA, 31 bp, Homo sapiens
  chr17:31255618-31255649
  hyper
aacttactcttcagtacgcagggaagaatag

SEQ ID NO: 5890 - DNA, 58 bp, Homo sapiens
  chr17:31255654-31255712
  hyper
gaaaaacacaaagaaacgccacgcagactgcagagaaggaccacgaacacacgctccg

SEQ ID NO: 5891 - DNA, 31 bp, Homo sapiens
  chr17:33701111-33701142
  hyper
ccccttccaacccgctcgacttgcccagatc

SEQ ID NO: 5892 - DNA, 96 bp, Homo sapiens
  chr17:33701149-33701245
  hyper
gggcttctctctccatcgccccagaaagtgggtcttggagaccgaggcaagaatttgggcctccgcttctgttccagaccccggaccccttgccaa

SEQ ID NO: 5893 - DNA, 31 bp, Homo sapiens
  chr17:33701256-33701287
  hyper
tgtgcagattgggccgcgcttggttcctggc

SEQ ID NO: 5894 - DNA, 88 bp, Homo sapiens
  chr17:33701288-33701376
  hyper
gggtttatggagcctgcggctgaggcaggctccgcagaccccgagccagagtgggatttaacggcggccggtgcgctgtgcttggtca

SEQ ID NO: 5895 - DNA, 31 bp, Homo sapiens
  chr17:35816364-35816395
  hyper
aagagtttgaactgtacgtggatgggaagcc

SEQ ID NO: 5896 - DNA, 43 bp, Homo sapiens
  chr17:36105000-36105043
  hyper
ttactccccggggtcccggaggctcctccgaaaggagtcagaa

SEQ ID NO: 5897 - DNA, 31 bp, Homo sapiens
  chr17:36105100-36105131
  hyper
ggaagggcccagctttcggctggatgcaaat

SEQ ID NO: 5898 - DNA, 47 bp, Homo sapiens
  chr17:36105136-36105183
  hyper
tggggagggggaaacccggagagagggagagccggaggggcagacct

SEQ ID NO: 5899 - DNA, 66 bp, Homo sapiens
  chr17:36105187-36105253
  hyper
agcagaagacctgggccgggagcggggctttgccagggtccattgtactcacgctggggggctaga

SEQ ID NO: 5900 - DNA, 73 bp, Homo sapiens
  chr17:36105458-36105531
  hyper
cgaagagtagagaccctggatgcgtcccggccgacgcaggtggtgggccaggagagcccgcagggcggaagag

SEQ ID NO: 5901 - DNA, 46 bp, Homo sapiens
  chr17:36762362-36762408
  hyper
cgtgatcccgcagcgcgcggccggggccgggcgcggggcgcgctca

SEQ ID NO: 5902 - DNA, 31 bp, Homo sapiens
  chr17:36762777-36762808
  hyper
gccgccgcctcgcccccgctccgggttgcag

SEQ ID NO: 5903 - DNA, 34 bp, Homo sapiens
  chr17:36886753-36886787
  hyper
agctcccggcccgtcccgccggtgtctggcttgc

SEQ ID NO: 5904 - DNA, 83 bp, Homo sapiens
  chr17:36886817-36886900
  hyper
tccctgccaggacctccgcagccagcaccttctcttgcgacctttttcttaccctctcattcctccctcgccccttcagccct

SEQ ID NO: 5905 - DNA, 31 bp, Homo sapiens
  chr17:36886912-36886943
  hyper
ttcctagatggcctcccgtgtccttcccttt

SEQ ID NO: 5906 - DNA, 31 bp, Homo sapiens
  chr17:36886945-36886976
  hyper
actgattttatttttccgtttccaaaccacc

SEQ ID NO: 5907 - DNA, 38 bp, Homo sapiens
  chr17:36904349-36904387
  hyper
ctcccatcggggcttgcgaagaacggccggcccccatc

SEQ ID NO: 5908 - DNA, 62 bp, Homo sapiens
  chr17:36905150-36905212
  hyper
actccccttgccccctcggcggcaggggcgctggccccgaaaagcggcgcaccaggatccag

SEQ ID NO: 5909 - DNA, 236 bp, Homo sapiens
  chr17:36905241-36905477
  hyper
gaggggagtggaggtgcggggtgaggccgggtggggggcctcgccgcggggggatcgggtagctctggcggaggctgcgcccccggcgtgctcgggcagagaagaacggaggcccgctgaggatgggaactcaggctccgggtctgggacacaataatccggccgaaggcgagcggccacactggactaggaaacgaggcgccgggctgtaaggtgggcccgcgccttttctcctg

SEQ ID NO: 5910 - DNA, 364 bp, Homo sapiens
  chr17:36905561-36905925
  hyper
cgggcgagcgccaagacggctgggcccgactcccactggcgccccggctccacctggcgctggggctccggtccgcagtggctccggcaggagggagagaacgaggagggaggcttggaaacgccgggagtagcggtgaggccgacgccggggaagcgaatcgatactgcgttactggacgcccgtgggcctcatgaggatggtcgattccctcattcgttattcacgatttattagggatggcggccgcgtctgtccctccagagagctcgattatccatccggccagcagcgccattaagcgcactgacggtgggaggctcgagttagaaattaggataggaatcttcgcccagttttggag

SEQ ID NO: 5911 - DNA, 38 bp, Homo sapiens
  chr17:36905928-36905966
  hyper
ctgcctcctcttccctcgttgctcgcagccaaggcagc

SEQ ID NO: 5912 - DNA, 83 bp, Homo sapiens
  chr17:36906153-36906236
  hyper
gggccaagggaagatccggtcacctgctccggagcctgcaggcggagaggcgagtagttcaccggccccggaggaaaggggac

SEQ ID NO: 5913 - DNA, 31 bp, Homo sapiens
  chr17:36906247-36906278
  hyper
tcccaggcaaatgtgtcgccggcatcctgca

SEQ ID NO: 5914 - DNA, 46 bp, Homo sapiens
  chr17:37366089-37366135
  hyper
gcccgcctctccttggcgccccgctcccctccgcctataaatagca

SEQ ID NO: 5915 - DNA, 61 bp, Homo sapiens
  chr17:37366267-37366328
  hyper
ggcgactgagtcatcccggggacccacgggccacgactgtccccgccgccagcgtttctgt

SEQ ID NO: 5916 - DNA, 31 bp, Homo sapiens
  chr17:37366586-37366617
  hyper
cagaccccaccctcctcgggctgctggagga

SEQ ID NO: 5917 - DNA, 31 bp, Homo sapiens
  chr17:37761331-37761362
  hyper
gctgcccccttaccaacgccttgggcctgca

SEQ ID NO: 5918 - DNA, 31 bp, Homo sapiens
  chr17:37761503-37761534
  hyper
agtcccctgggggaagcgaggcccctgggac

SEQ ID NO: 5919 - DNA, 56 bp, Homo sapiens
  chr17:37761543-37761599
  hyper
acaggtaacaggactgcgctgccccaggagagcggcaggaccggtggcccgctccc

SEQ ID NO: 5920 - DNA, 31 bp, Homo sapiens
  chr17:37762909-37762940
  hyper
cgcgctggggtaccgacgcccccccacaacc

SEQ ID NO: 5921 - DNA, 56 bp, Homo sapiens
  chr17:37774744-37774800
  hyper
agttctgtggtatttgcgagtaataaatcattggatgggagcgaggaagctggaga

SEQ ID NO: 5922 - DNA, 75 bp, Homo sapiens
  chr17:37774835-37774910
  hyper
gtctctctggctgatccgggacggcagcgcgcggagaggctcttaaagggccagtggcggcgggaaggggcagcg

SEQ ID NO: 5923 - DNA, 31 bp, Homo sapiens
  chr17:37775053-37775084
  hyper
aaggagagaacctgggcggggaccaggagct

SEQ ID NO: 5924 - DNA, 44 bp, Homo sapiens
  chr17:37793984-37794028
  hyper
ctcatttctaatgacacgttccctcaccccgcatttttgggtta

SEQ ID NO: 5925 - DNA, 80 bp, Homo sapiens
  chr17:37794034-37794114
  hyper
gtctcctggttttcttcgtaccgctctgacagtcggtcaaagtcccgcttcacgttttcctctgtcgcccaacccctcgc

SEQ ID NO: 5926 - DNA, 31 bp, Homo sapiens
  chr17:37844562-37844593
  hyper
gattttacttcctaaacgtacctgtaactat

SEQ ID NO: 5927 - DNA, 31 bp, Homo sapiens
  chr17:37895237-37895268
  hyper
gaggggctctgcagtgcggtggggcctgggg

SEQ ID NO: 5928 - DNA, 62 bp, Homo sapiens
  chr17:37895727-37895789
  hyper
aattataagcctctcccgtgggggcggggcgtggagtactgggcggacgggggctctcccgc

SEQ ID NO: 5929 - DNA, 39 bp, Homo sapiens
  chr17:38210875-38210914
  hyper
gggactcgagggagctcgaaaggccgctcacaacccggc

SEQ ID NO: 5930 - DNA, 40 bp, Homo sapiens
  chr17:38228512-38228552
  hyper
tgccactggtgttccccgcctggcccggcccacagcagcc

SEQ ID NO: 5931 - DNA, 38 bp, Homo sapiens
  chr17:38228860-38228898
  hyper
gacatgcaggcagcctcgctggacgtggagtcagaaga

SEQ ID NO: 5932 - DNA, 62 bp, Homo sapiens
  chr17:38347442-38347504
  hyper
tattttccaccccttccgcccccgccctcctgcctttcgctcctcatcgccttgcactgcca

SEQ ID NO: 5933 - DNA, 31 bp, Homo sapiens
  chr17:38478594-38478625
  hyper
ggaggccagtagatgccggagatgaacctgg

SEQ ID NO: 5934 - DNA, 34 bp, Homo sapiens
  chr17:38478637-38478671
  hyper
gggcaagagtggggcacgccggggctgggtcctc

SEQ ID NO: 5935 - DNA, 31 bp, Homo sapiens
  chr17:38478790-38478821
  hyper
tggagtggctttatcccggccctccccccgg

SEQ ID NO: 5936 - DNA, 31 bp, Homo sapiens
  chr17:38498601-38498632
  hyper
tgcggacttggggagccgctgtactctgcct

SEQ ID NO: 5937 - DNA, 48 bp, Homo sapiens
  chr17:38498897-38498945
  hyper
agtgacgggggcggcgcgcaggacttcccagctcggacctcttgcctt

SEQ ID NO: 5938 - DNA, 47 bp, Homo sapiens
  chr17:39684386-39684433
  hyper
ccgtgaatgctgggcgcgcgaaaggcgacccccggcccaaaacgcac

SEQ ID NO: 5939 - DNA, 157 bp, Homo sapiens
  chr17:40332917-40333074
  hyper
ccaggaaggtgttttgcggggccagcaaccccttcatgaccggcatggccccggggcgtgggttcaaggcgcggcgctggggagctttcagcgcggccgggccggagggggcgcgctgtcggaggggccggggcgccccatgcgccctcctgcctcc

SEQ ID NO: 5940 - DNA, 133 bp, Homo sapiens
  chr17:40333076-40333209
  hyper
ccctccctcttactgccgctgccgctgccgctgcctctgctccgaaccccgtagctctcggctcggctcagcgccgtttcggtcccccccacctccccacgggccaggttcttcccctcgggctcggcccgca

SEQ ID NO: 5941 - DNA, 31 bp, Homo sapiens
  chr17:40429066-40429097
  hyper
ccaccagtcagagctgcgggagggactgctc

SEQ ID NO: 5942 - DNA, 31 bp, Homo sapiens
  chr17:40464189-40464220
  hyper
taaaaagcaggggactcgaggtttggggaaa

SEQ ID NO: 5943 - DNA, 31 bp, Homo sapiens
  chr17:40464301-40464332
  hyper
gcggctgagggcccggcgccaagatgcttct

SEQ ID NO: 5944 - DNA, 31 bp, Homo sapiens
  chr17:40464347-40464378
  hyper
ggggcagtcccagagccgcaacaaccgtccc

SEQ ID NO: 5945 - DNA, 98 bp, Homo sapiens
  chr17:40464426-40464524
  hyper
gttttcagctggctgccggcgactgtgcgaggcggaggtgcagcaagcgggaccggctcgccccggctggacccccgcactgccggctgcagccagtc

SEQ ID NO: 5946 - DNA, 31 bp, Homo sapiens
  chr17:40464542-40464573
  hyper
cttgggctcagggacgcgcgctccctgggcg

SEQ ID NO: 5947 - DNA, 54 bp, Homo sapiens
  chr17:40575291-40575345
  hyper
tgagctccccagctcccgggccaaactccggagtctgatcgctgattggctggc

SEQ ID NO: 5948 - DNA, 31 bp, Homo sapiens
  chr17:40575351-40575382
  hyper
ccagaaagggagggaccggggcagaagggga

SEQ ID NO: 5949 - DNA, 40 bp, Homo sapiens
  chr17:40950713-40950753
  hyper
cttcgcggtgccgccgcgcgggcctcgctgggaacagtag

SEQ ID NO: 5950 - DNA, 49 bp, Homo sapiens
  chr17:40950807-40950856
  hyper
gcagagccgcggttcccgggcacaggggatggacgcgggaggtgagaag

SEQ ID NO: 5951 - DNA, 31 bp, Homo sapiens
  chr17:41723871-41723902
  hyper
ggatagcccagaggaccgcagaggcttgaat

SEQ ID NO: 5952 - DNA, 170 bp, Homo sapiens
  chr17:41910162-41910332
  hyper
actcccgctcgctctccgaaggaacctgtgggagaacaaggagcgcactgggcgcaggagcagcgaccccgggggacctcggagggcggtcccggaggacgcggagcagcagggagcggggggcgcgcggcggggcgggcgcgggaagagggaggcgggggccgaggggc

SEQ ID NO: 5953 - DNA, 147 bp, Homo sapiens
  chr17:41910477-41910624
  hyper
ccgggatgtgtgctccgcgaacgggagccgcgcgagtgcccagagcctgggccgccgctggctccgccttcccggacccctccctgcggctgccgcgccgggcgggggtggcggagcctgaggaggcgcggcgcggggaggaggcgc

SEQ ID NO: 5954 - DNA, 6 bp, Homo sapiens
  chr17:41910672-41910678
  hyper
gcaccg

SEQ ID NO: 5955 - DNA, 130 bp, Homo sapiens
  chr17:41910700-41910830
  hyper
cgctagccggcgtcgtacccgctcccgctctcccgctccctgagtcccctgcctgtgtccccccgcaccctggcacacagccagacttcccttccgcccgcgcaacccaccctccgcgagtggaggggtg

SEQ ID NO: 5956 - DNA, 54 bp, Homo sapiens
  chr17:41910836-41910890
  hyper
tgctcaacagagaattcgattttgcaaacatttattgagcgccctccaggtgcc

SEQ ID NO: 5957 - DNA, 80 bp, Homo sapiens
  chr17:42091881-42091961
  hyper
taaggcactgggatgtcgggcttcctgcgagccgggagtggggaagcaacgaggacagaatgaagcggtgggggaagaag

SEQ ID NO: 5958 - DNA, 50 bp, Homo sapiens
  chr17:42092015-42092065
  hyper
ctcccatgggcaggaccgccctaccagatttggtccgacacccagaccag

SEQ ID NO: 5959 - DNA, 31 bp, Homo sapiens
  chr17:42092093-42092124
  hyper
cccagttcaagggtcccgacttctagccccc

SEQ ID NO: 5960 - DNA, 31 bp, Homo sapiens
  chr17:42092127-42092158
  hyper
ttcttgcccacatcaccgccccctgccgcgt

SEQ ID NO: 5961 - DNA, 139 bp, Homo sapiens
  chr17:42092278-42092417
  hyper
cagctgcaacatccaccgtctcgaacctatcttcgacgccatcttgggaaagggcagtccgctgcggcctcaccccagtcagagaagcaggcgcggggatgggacacgcagcttccgggtcaagcgctttttctttttc

SEQ ID NO: 5962 - DNA, 143 bp, Homo sapiens
  chr17:42287798-42287941
  hyper
ccgactgagccttgagcgccgcctctcgggccttgtacttggcctgcggggatggcccgggcgtcagccttccacccacccccagggggcgcgcgctccccgcgcagcagcccaggcgctcccgccggcgggcagaagcatgg

SEQ ID NO: 5963 - DNA, 59 bp, Homo sapiens
  chr17:42287943-42288002
  hyper
tggtgcagatgtctcccgcctggggctcgcccccgcctggtctgcggcgctcagctgac

SEQ ID NO: 5964 - DNA, 31 bp, Homo sapiens
  chr17:42288062-42288093
  hyper
ctcaggcggccaggggcgaggtggcacggcc

SEQ ID NO: 5965 - DNA, 145 bp, Homo sapiens
  chr17:42402751-42402896
  hyper
ccccgccccggccgcgcgcggcactggaaaccccagcgccttctggacggcgagggtgacgcactggccctcttcctcggtgtcctcaggtgcgtggcggcggcagtgagaatgagttcttcgagatcgccgggagaccacacaa

SEQ ID NO: 5966 - DNA, 89 bp, Homo sapiens
  chr17:42402899-42402988
  hyper
cgacgaagttacttgccgggctacccgccgagacttgaaaacttcgcggcgacttctctcgccggccttagcatcgcccccatttttca

SEQ ID NO: 5967 - DNA, 74 bp, Homo sapiens
  chr17:42907095-42907169
  hyper
ttctgtccgggctccccgaccgtcgcccgacacctccgcggcccaggacacccccgagccgtttccctcccgat

SEQ ID NO: 5968 - DNA, 78 bp, Homo sapiens
  chr17:42907237-42907315
  hyper
gacgcccctccggactcggcgggaacccctcggcggcgcccccctccttctcccgctctggccgcgctcctccccgga

SEQ ID NO: 5969 - DNA, 42 bp, Homo sapiens
  chr17:42907748-42907790
  hyper
ggcgccccagaacgcgcgggaagcgacgcgagcgccaacttt

SEQ ID NO: 5970 - DNA, 31 bp, Homo sapiens
  chr17:43209588-43209619
  hyper
cccaccgccccttgcccgtcactgacccatc

SEQ ID NO: 5971 - DNA, 31 bp, Homo sapiens
  chr17:43278126-43278157
  hyper
ctccctcttcccctcccgctaccgaacttgc

SEQ ID NO: 5972 - DNA, 163 bp, Homo sapiens
  chr17:43298738-43298901
  hyper
gggaacgcagccctggcgccccaacgctgcaccaccgtgggtctccgagccgtgctcgcagtcgctgagatcctcggtgcggagaagatgtgcccctccaatccccaggccgtgatccccttcacccagacccggccaatccctcgcccgaggcgagcgggag

SEQ ID NO: 5973 - DNA, 31 bp, Homo sapiens
  chr17:43324280-43324311
  hyper
gcccgtcggcgtcccccgggccccccactgc

SEQ ID NO: 5974 - DNA, 40 bp, Homo sapiens
  chr17:43324313-43324353
  hyper
gtcacctccgacctctcgctgtagccgctatttctgcagg

SEQ ID NO: 5975 - DNA, 434 bp, Homo sapiens
  chr17:43324812-43325246
  hyper
tcttcactagagttggcggcgagggagcccgcttcgagggggcggaggctttcgtggctggcccagtatccctgcgggaggccggagggggcgagcgggcagctggggttagacacgccgggccagccccgcagcagttctccttccggctgccccgccccatttgcgccagtcctgcctcccacccgggcatctggccccttttcctttcgccctacccagtacttagtgacgccataagtgacctcgccttacatctccgcgcgtgccgcctccgtcaccgcctgccgggtccccatttcttccgggcctgcccccgctcctcgcctgcccctcccctccaccagccagtgtcgccccatctgtctgtcctccgggcacttgtcccgcccctcactgcgtgtccctcccccgcccgccggctctcacctagg

SEQ ID NO: 5976 - DNA, 291 bp, Homo sapiens
  chr17:43325380-43325671
  hyper
tgagagtacgggctgcgcgcacctggggcgggtgcctgggaggaggtggaggaggagacggtcctcagaacgggtcctgggggtcggaggcgagggcgggggttgtaagtggccgggagaggtccctcccgcgggtcccggcgccccccgccccgtcggggacgcacctacttcgtgcagtttgtgcagcgagcgcgccagctcctagttggagaggtcgctgatgcgcgccgcgtggcagaaggcgagccccgcgtgggagcgccccccaacccccgcagcctgggctga

SEQ ID NO: 5977 - DNA, 31 bp, Homo sapiens
  chr17:43339109-43339140
  hyper
gtccctactccaaggcgcgcatgcgtgtccg

SEQ ID NO: 5978 - DNA, 31 bp, Homo sapiens
  chr17:45609731-45609762
  hyper
aagaagctggctgggcgcggtggctcatgcc

SEQ ID NO: 5979 - DNA, 54 bp, Homo sapiens
  chr17:45810487-45810541
  hyper
tgcctagtattagccacgagagggcggggtggggcgaggcggagcagggccgag

SEQ ID NO: 5980 - DNA, 266 bp, Homo sapiens
  chr17:45810545-45810811
  hyper
cggagtgggggggagccggagagcttcataaagccacagcaaagcgctgcgactctagtgacagcggcccgctggagaggaagcccgagagctgccgcgcgcctgccggacgagggcgtagaagccaggcgtcagagcccgggctccggtggggtcccccacccggccctcgggtcccccgccccctgctccctgcccatcccagcccacgcgaccctctcgcgcgcggaggggcgggtcctcgacggctacgggaaggtgccagc

SEQ ID NO: 5981 - DNA, 31 bp, Homo sapiens
  chr17:45810956-45810987
  hyper
acgagcgtcgcgggggcggcagcctggggtc

SEQ ID NO: 5982 - DNA, 76 bp, Homo sapiens
  chr17:46124667-46124743
  hyper
ccctaaatggggtcttcgcatcagctgcgttaaaatcaccccagcaggcaggttatccggccgccactccagggtc

SEQ ID NO: 5983 - DNA, 38 bp, Homo sapiens
  chr17:46124754-46124792
  hyper
ctctccagtgggacctcggaattcgtagcttagcaagc

SEQ ID NO: 5984 - DNA, 31 bp, Homo sapiens
  chr17:46124804-46124835
  hyper
gctgggagtaaactaacgtttgagagtcaca

SEQ ID NO: 5985 - DNA, 45 bp, Homo sapiens
  chr17:46124900-46124945
  hyper
aagcaagactaagctgcgtgggaggccaaacgaggggggtccttt

SEQ ID NO: 5986 - DNA, 15 bp, Homo sapiens
  chr17:46124954-46124969
  hyper
ctaccatgacaaaaa

SEQ ID NO: 5987 - DNA, 109 bp, Homo sapiens
  chr17:46125006-46125115
  hyper
cgccaacgttccgccaacgtcccaccaccctcatgatatccgtccgcggtactgctccagcgaaggtacccttgcctgggccatgaggcgcaaccgtccctcacagctg

SEQ ID NO: 5988 - DNA, 126 bp, Homo sapiens
  chr17:46125117-46125243
  hyper
gtggcttctccaggttcgcaccgaggggaagttggggtaccggtttccgccgccagcacccaagatggcggcacgagcgtcgcaaccacaagaaccacatgcttcgtgtcccgcctcagcattctc

SEQ ID NO: 5989 - DNA, 31 bp, Homo sapiens
  chr17:46655733-46655764
  hyper
ctcgttttcctgtttccgaaagccctcctac

SEQ ID NO: 5990 - DNA, 31 bp, Homo sapiens
  chr17:46670934-46670965
  hyper
ggatccctgtaagagccgctcagagagctgc

SEQ ID NO: 5991 - DNA, 52 bp, Homo sapiens
  chr17:46670998-46671050
  hyper
catttggataacgccccgagaaggagtttacaaagtacgagctcatttgggt

SEQ ID NO: 5992 - DNA, 31 bp, Homo sapiens
  chr17:46671086-46671117
  hyper
ataaccctgtgcttcacgatttatgatgtat

SEQ ID NO: 5993 - DNA, 47 bp, Homo sapiens
  chr17:46671129-46671176
  hyper
gcgatgcactgtacttcgttttgctatgtatgcggccaaatatgggg

SEQ ID NO: 5994 - DNA, 73 bp, Homo sapiens
  chr17:46671185-46671258
  hyper
gaaggggggtggggggcgttagggaatcacgtgcttttgttgaccagtcgtaaattctcgctgatgacctcaa

SEQ ID NO: 5995 - DNA, 70 bp, Homo sapiens
  chr17:46671276-46671346
  hyper
tggttacaaataatgacgatccgagaatcgttagggccgattcaatgcgagcctccgagagagggggaaa

SEQ ID NO: 5996 - DNA, 87 bp, Homo sapiens
  chr17:46671384-46671471
  hyper
ggcctctgagcagagcgcgccacctcccggcgaccgacgggagcgcgggcgtgagaccgccatggcggcgggcggctgcctccctgc

SEQ ID NO: 5997 - DNA, 51 bp, Homo sapiens
  chr17:46671480-46671531
  hyper
gcaggctccctgcagtcgccgggagagaaagaaacccggccaaggctcagc

SEQ ID NO: 5998 - DNA, 51 bp, Homo sapiens
  chr17:46755804-46755855
  hyper
gcaggcacccaggtctcgaggttccaggagagggacgcgctgtgaccacca

SEQ ID NO: 5999 - DNA, 77 bp, Homo sapiens
  chr17:46755921-46755998
  hyper
actcccggagctgggccgggcgccgccttccctcgggcggccggcaggggtcagtgtttggccgcaggtgaacagac

SEQ ID NO: 6000 - DNA, 31 bp, Homo sapiens
  chr17:46829858-46829889
  hyper
ctcctggctgatgaaacggagcaagttgtct

SEQ ID NO: 6001 - DNA, 108 bp, Homo sapiens
  chr17:46829920-46830028
  hyper
ggagagtctctcagcccggtttgggagtaaacccaaaaccgttcattcgtcagggaatgccccaggttggttcacgcgagttttaaaatgaatcggaggtgaaatgga

SEQ ID NO: 6002 - DNA, 101 bp, Homo sapiens
  chr17:46830034-46830135
  hyper
taccctctcttcagcccgaccctcaatctttggcagcgaggggcagttatgggacggggggcgggtgggaagagcgcccagggccccctccgggttctccc

SEQ ID NO: 6003 - DNA, 14 bp, Homo sapiens
  chr17:46830189-46830203
  hyper
cggtagggatgcct

SEQ ID NO: 6004 - DNA, 31 bp, Homo sapiens
  chr17:46830204-46830235
  hyper
ggagtctagggagtggcgggggtgtttcttg

SEQ ID NO: 6005 - DNA, 31 bp, Homo sapiens
  chr17:47307938-47307969
  hyper
gggaattggaggggacgcggtgtcttatcca

SEQ ID NO: 6006 - DNA, 90 bp, Homo sapiens
  chr17:47308576-47308666
  hyper
aggttactgaggattgcgggggttggcgggaggaatgactccctacccccacccccgcccgtaaagttggtggagcgggtggtgacagac

SEQ ID NO: 6007 - DNA, 31 bp, Homo sapiens
  chr17:47440023-47440054
  hyper
aggtaaagtgaagaaacgggccaaagcagaa

SEQ ID NO: 6008 - DNA, 31 bp, Homo sapiens
  chr17:47865437-47865468
  hyper
gttttgcctcctccccgcgacatcaactaac

SEQ ID NO: 6009 - DNA, 42 bp, Homo sapiens
  chr17:47865513-47865555
  hyper
acaggaaacttgatggcggacgctatccgttagttccttttt

SEQ ID NO: 6010 - DNA, 39 bp, Homo sapiens
  chr17:47865561-47865600
  hyper
cccattcccaccccttcgagaccacgatgtttcttaaaa

SEQ ID NO: 6011 - DNA, 84 bp, Homo sapiens
  chr17:47865613-47865697
  hyper
ttacaaaacatccctccgcaactttgagtttatataataaacggaaacgtcctttaaacaatcaggctacgaaggggttaaatc

SEQ ID NO: 6012 - DNA, 58 bp, Homo sapiens
  chr17:47979496-47979554
  hyper
ggctgccctgtggtcacgtccccgccccaccgacggaggtaggcgcccaggtacccag

SEQ ID NO: 6013 - DNA, 159 bp, Homo sapiens
  chr17:48207629-48207788
  hyper
tcattcaacaaacgtccgccgagcagccggggcgccgaggctggaggggacagcggtgaacagaacccccgccccctaactgcgctcaaggccagtgggccagtcgggggctcagacgagtggggaggccctcacgagcctgggcgccatgggcccagc

SEQ ID NO: 6014 - DNA, 44 bp, Homo sapiens
  chr17:48207804-48207848
  hyper
ttgccggaagggagagcgcacccctggcccggcctgggtccagg

SEQ ID NO: 6015 - DNA, 195 bp, Homo sapiens
  chr17:48619095-48619290
  hyper
ttcagagcctagcctccgccggaggagcccactcttcttcccaacttccacgacctcccggtgtagggctctgaaccccgggtcactcaaagccactctcgttctgcaggtctcagcgctccgtcccccaccaacccgttcggcgcgggcgagccgggcaggccgacgctaaaccagatgcgcaccggctcgccg

SEQ ID NO: 6016 - DNA, 510 bp, Homo sapiens
  chr17:48619346-48619856
  hyper
cgcctctctgcccctcccgctcagcagcgtgccagctggcttgaccctccccgcctcggttagcgtcttcccgcaggccggagccttcgcaccgcagccgctgctgcccacgccgagctcagccgggccgcggcccccgcccccgcagaccggcaccaaccccttcctctgagccccgccccgtcccataccggcctgcgcctgcgccggacgctccgcggccccgcctccggacccggggctgggcggggcgccggtgctagtggaacgccgagccagtggcggctggtatcccgcggcggctctggaagctggacgcggaccacggcccgggagctagaaactgaacgcccgcataataaagactggaaccctcgttctcagctctcaccaagtggactttttgcggggtgtggcggccgggtctcgaccacagcgtggatcaccggctgtttaggaaactgcagctgcacaacgtggggtgcaaaactgccccgcttcctttacagc

SEQ ID NO: 6017 - DNA, 48 bp, Homo sapiens
  chr17:48619866-48619914
  hyper
cctcacctccatcccccgtcacccaggcaccttcgcttccagatgctg

SEQ ID NO: 6018 - DNA, 31 bp, Homo sapiens
  chr17:48619916-48619947
  hyper
aggctgtcactcaattcggtcatttcattca

SEQ ID NO: 6019 - DNA, 31 bp, Homo sapiens
  chr17:48712405-48712436
  hyper
cgccgcctgccttcccgcggggccggcaggt

SEQ ID NO: 6020 - DNA, 38 bp, Homo sapiens
  chr17:48997200-48997238
  hyper
catggaaacccttccccgggcgtcgggcaggaccagcc

SEQ ID NO: 6021 - DNA, 31 bp, Homo sapiens
  chr17:49027999-49028030
  hyper
gtaaggctgttgctggcgtttagaggtactt

SEQ ID NO: 6022 - DNA, 31 bp, Homo sapiens
  chr17:49028084-49028115
  hyper
ccactgtcagcaaatccgtgtccacatgcct

SEQ ID NO: 6023 - DNA, 55 bp, Homo sapiens
  chr17:52977560-52977615
  hyper
cgcacacctcccctcccggatctctaggacaaaggcaggtcgagggtaaatattt

SEQ ID NO: 6024 - DNA, 46 bp, Homo sapiens
  chr17:52977653-52977699
  hyper
tgtgggtaccagacaccgacataatcggttacgtccttcccttaat

SEQ ID NO: 6025 - DNA, 62 bp, Homo sapiens
  chr17:52977752-52977814
  hyper
agggcagccaaagaggcgcagagaagaatgacaaggtgcccagcaagcggcaggatcaaagc

SEQ ID NO: 6026 - DNA, 211 bp, Homo sapiens
  chr17:52977850-52978061
  hyper
gcctgctcctcctgcacggggcgaaaagcccacctgggatccgagcgggcggccgcgccactctcgcaggctccatacacccgccactacccgcctgtaccacctgcagccggcagcgcagcctcctcgcgggtcccgcagggcgcgctgcaggtgcgctgggcgtcccgaagccccgccctcgcgtccctgccccgcgcccagctcctca

SEQ ID NO: 6027 - DNA, 31 bp, Homo sapiens
  chr17:52978566-52978597
  hyper
agtgtttgggcctccacgaggagacaccaga

SEQ ID NO: 6028 - DNA, 31 bp, Homo sapiens
  chr17:53342251-53342282
  hyper
caggcgggcggtgccgcgcgtggccccgccc

SEQ ID NO: 6029 - DNA, 38 bp, Homo sapiens
  chr17:53342388-53342426
  hyper
gctggggagcagcggccgccggcgcggggaggggggtg

SEQ ID NO: 6030 - DNA, 153 bp, Homo sapiens
  chr17:56032159-56032312
  hyper
gcactgcggggaggggcgcccacacaaaagggggagcggcgggagaggggactcgggcgaagccggctccgggaggcctcgtctcccttccctgcggcgctggcccgcgccccccggtctaatcgcgcgccccgctcccggccccccagatgc

SEQ ID NO: 6031 - DNA, 63 bp, Homo sapiens
  chr17:56032482-56032545
  hyper
ggtggggccgctgggccggggccgcggccgggattgcgcgcggggcgccggcgaggaccgcgc

SEQ ID NO: 6032 - DNA, 43 bp, Homo sapiens
  chr17:56296379-56296422
  hyper
aaagaagtggggagcccggagaagtggtcgggattgtaagcag

SEQ ID NO: 6033 - DNA, 31 bp, Homo sapiens
  chr17:56296427-56296458
  hyper
ggggacctcagaacaccgagctcaggttgga

SEQ ID NO: 6034 - DNA, 87 bp, Homo sapiens
  chr17:56296472-56296559
  hyper
caaaagcatggggcctcggggctggggcggtgcgactaccggaggcgcaagttgcgcacggggtcccgggagcgatacactgcctcc

SEQ ID NO: 6035 - DNA, 34 bp, Homo sapiens
  chr17:56296611-56296645
  hyper
actgcgccggaaagcgcgccgctctgttttcctg

SEQ ID NO: 6036 - DNA, 31 bp, Homo sapiens
  chr17:56401799-56401830
  hyper
cgtccccgctctacggcggcggcgggaggag

SEQ ID NO: 6037 - DNA, 41 bp, Homo sapiens
  chr17:56402169-56402210
  hyper
acctctcccggggccccgggagcaggcgcccctgctctggc

SEQ ID NO: 6038 - DNA, 93 bp, Homo sapiens
  chr17:56402236-56402329
  hyper
acggcgggagcgggagcgtctcccgctggttgcgcagcgcgatctgcctctgcagccgcagcacctcccgctgggactcgcgcagcagccgat

SEQ ID NO: 6039 - DNA, 60 bp, Homo sapiens
  chr17:56833161-56833221
  hyper
cgcccccgggccgcgcacgtcggtgctcggcggcgcgcacgcctgcgggagccctctcca

SEQ ID NO: 6040 - DNA, 40 bp, Homo sapiens
  chr17:56833222-56833262
  hyper
gcaacctagtgctgatcgctcgtgccggtgcggccgttaa

SEQ ID NO: 6041 - DNA, 458 bp, Homo sapiens
  chr17:56833340-56833798
  hyper
cctggggcatgagcagcgatggccggctgcatccctgaggagaaaacttaccggcgcttcctggagctattcctgggcgagtttcgcggaccgtgcggcggcggcgagccggagccggaacccgaacccgaacccgaacccgaacccgagtccgagcccgagcccgaacctgaactggtagaagctgaggcggccgaggcttcggtagaggaacccggggaggaggcggccacggtagccgcgacggaggagggggaccaggagcaagacccggagcccgaggaggaggcggcggttgagggtgaggaggaggaggagggcgcggcgacggcggcggcagccccggggcactcggccgtgccgccgccgccgccccagctgccgcctttgcccccgctcccgcgaccgctgtcagagcgcatcacccgcgaggaggtggagggcgaaagcctggacct

SEQ ID NO: 6042 - DNA, 68 bp, Homo sapiens
  chr17:56833839-56833907
  hyper
ggctggtggtgggcccgcggtccccaccgcgccggcctcggacgcggctccctcggcccctcaaactg

SEQ ID NO: 6043 - DNA, 86 bp, Homo sapiens
  chr17:56833914-56834000
  hyper
ttctgctcctctcccccgcacccgcgcctgccgccgctgaaagcgcccccgctgctcggacccgggcggtcggctgagagctgccc

SEQ ID NO: 6044 - DNA, 142 bp, Homo sapiens
  chr17:56834019-56834161
  hyper
cgcccgcctcggcccccacgcctcctacccggccttgaagccgctctcctgagccccggcgccctcccgccgggcccgggcccctcatcccctttcacctcggcccccagcttctagctccacttcacgcaacctttccctt

SEQ ID NO: 6045 - DNA, 51 bp, Homo sapiens
  chr17:58498602-58498653
  hyper
cttacaacaacaacaacgacaacaataacaacaagacgtttgctgaacatg

SEQ ID NO: 6046 - DNA, 144 bp, Homo sapiens
  chr17:58498703-58498847
  hyper
caaagctccgggcctccgggctacccctacttgaagccgctatgcccctctcctgtgcccgaggtggccgctgggtggcaggggaggcccgggccgacggcggtcccaccgcactgtcgcgaaggcaggcgaagaacagggcca

SEQ ID NO: 6047 - DNA, 58 bp, Homo sapiens
  chr17:58498854-58498912
  hyper
tggggacaactgggcccgggcccagaggacacgaaggaaggtccgggagaaggaattc

SEQ ID NO: 6048 - DNA, 165 bp, Homo sapiens
  chr17:58498978-58499143
  hyper
ggaccccgccgtgtgccgcccagggacgcgagggggcgctgctgccgcgccaggggcgagggtcccggggcctcctgagcacctcccggccctgcccggccaactcagactacacccggactctgcccaccgcgtttccgccctcggcctcgggtccctggaggg

SEQ ID NO: 6049 - DNA, 136 bp, Homo sapiens
  chr17:59467418-59467554
  hyper
gcccctgcttttcttgcgcctgccggtgctcttctcccgcccgcctggccctgctgtcagcgccccctagtgccgggccggccgcgcatgagggcggtgggacagatcgcccacaactcctcggcttgcttttggg

SEQ ID NO: 6050 - DNA, 39 bp, Homo sapiens
  chr17:59469780-59469819
  hyper
tttttaaccatacccacggtggggcgggtggggggagcc

SEQ ID NO: 6051 - DNA, 42 bp, Homo sapiens
  chr17:59534620-59534662
  hyper
gagtgagcaggagtgtcgtctaacctgcgctggccactatgt

SEQ ID NO: 6052 - DNA, 38 bp, Homo sapiens
  chr17:59535525-59535563
  hyper
tgtgttgttgggggagcggctctcggtggctgccagaa

SEQ ID NO: 6053 - DNA, 44 bp, Homo sapiens
  chr17:60781449-60781493
  hyper
cccggccgcggctggacggagcgcggggccgcagcaaccaggcc

SEQ ID NO: 6054 - DNA, 62 bp, Homo sapiens
  chr17:60781523-60781585
  hyper
gaggccctcgccgaggcggaggctgggacgcgcggggcgggcggcggcggggagccgcgggg

SEQ ID NO: 6055 - DNA, 55 bp, Homo sapiens
  chr17:61043209-61043264
  hyper
acagcagcagccacctcgagagtgacatcacccctgagggcggagcccaactatg

SEQ ID NO: 6056 - DNA, 62 bp, Homo sapiens
  chr17:61043853-61043915
  hyper
cccgccgccgccgagccgagccgaggggcgagagctggcccccgagccgccgctgacaggag

SEQ ID NO: 6057 - DNA, 52 bp, Homo sapiens
  chr17:61043927-61043979
  hyper
ctgcgctcgccggctgcgaggccccgccgcgccgttccggggtgcagactcg

SEQ ID NO: 6058 - DNA, 31 bp, Homo sapiens
  chr17:61044458-61044489
  hyper
agcataaaagtagttgcgaaatgtgccaggt

SEQ ID NO: 6059 - DNA, 76 bp, Homo sapiens
  chr17:61522993-61523069
  hyper
aaggtggcggcagctccgccctcagcgcagttggcaccggcctgacccaccacagggccaccgaggccaccgaagc

SEQ ID NO: 6060 - DNA, 43 bp, Homo sapiens
  chr17:61777944-61777987
  hyper
cgcgcgtaggcgccggcgcccccatccccgcccagagctgtgg

SEQ ID NO: 6061 - DNA, 31 bp, Homo sapiens
  chr17:61777988-61778019
  hyper
gccgcagagacccagccggggcgaccccgga

SEQ ID NO: 6062 - DNA, 5 bp, Homo sapiens
  chr17:61778068-61778073
  hyper
cgccc

SEQ ID NO: 6063 - DNA, 31 bp, Homo sapiens
  chr17:61921252-61921283
  hyper
ttatgagaaacctccccgcagtttaaaaaaa

SEQ ID NO: 6064 - DNA, 31 bp, Homo sapiens
  chr17:63555851-63555882
  hyper
gctgctttccctagcacggaaaagatcaaac

SEQ ID NO: 6065 - DNA, 65 bp, Homo sapiens
  chr17:63555886-63555951
  hyper
aagggtaggggctgaacggggtgcaaccccgggcgagaagccagggaccccggatctgggatggg

SEQ ID NO: 6066 - DNA, 85 bp, Homo sapiens
  chr17:63556317-63556402
  hyper
ggagtctctgcctctccgcaaaaggggccggggcggccacgggcgaggggcccgggccgggaggagggacgcgagggacacgggc

SEQ ID NO: 6067 - DNA, 105 bp, Homo sapiens
  chr17:63556591-63556696
  hyper
cccaaaggcactcccgcgcgcactcacacgccgactcacatccataaccgcgacagcgacgcgacccccggggggtatctgccccctctccgcccccgccactgc

SEQ ID NO: 6068 - DNA, 152 bp, Homo sapiens
  chr17:63556784-63556936
  hyper
gcccggccaagccccccggaacgctgggcgccgggtccgccgctcccctccgcgccggcccctagcgcgccccgaaatagccggcctgccaacttcaaagggccgccccgcacatcaaagcgcgcggtccgcccggccgcctcggcctcggc

SEQ ID NO: 6069 - DNA, 36 bp, Homo sapiens
  chr17:63556996-63557032
  hyper
gcccggccccggcccccggctcggctcgcggcggca

SEQ ID NO: 6070 - DNA, 51 bp, Homo sapiens
  chr17:63557343-63557394
  hyper
cctgaaagggaggtacgcgccggccgcgccccgggccgccccccgcagccc

SEQ ID NO: 6071 - DNA, 31 bp, Homo sapiens
  chr17:63557793-63557824
  hyper
aaagggacagcgccccgcgcccgccccgccc

SEQ ID NO: 6072 - DNA, 31 bp, Homo sapiens
  chr17:64298538-64298569
  hyper
tcctccgcactcggtccggtccgctcagcgc

SEQ ID NO: 6073 - DNA, 57 bp, Homo sapiens
  chr17:65242141-65242198
  hyper
gctcgggggagggtcccgggcggaaagcagggtgcgccagtccgggtccacctggcg

SEQ ID NO: 6074 - DNA, 97 bp, Homo sapiens
  chr17:66434323-66434420
  hyper
ttgccatgcatagctacgggaggaagtggctgagccccggaacctttaactgcacgttctggcagccctgccacccctttggcgatacaaggtcatt

SEQ ID NO: 6075 - DNA, 31 bp, Homo sapiens
  chr17:66434432-66434463
  hyper
cttagaagaggccactcgtccatttccagtt

SEQ ID NO: 6076 - DNA, 34 bp, Homo sapiens
  chr17:67410750-67410784
  hyper
agagccccgtggactccgccggagaactacatta

SEQ ID NO: 6077 - DNA, 31 bp, Homo sapiens
  chr17:70026704-70026735
  hyper
gctcctcgcaatcaaccgctaggggaaggag

SEQ ID NO: 6078 - DNA, 36 bp, Homo sapiens
  chr17:70116990-70117026
  hyper
ccctctcctcccctcccgcctcgtcacccagcccag

SEQ ID NO: 6079 - DNA, 31 bp, Homo sapiens
  chr17:70117038-70117069
  hyper
cctccctccccaaaatcgggtccaatcagct

SEQ ID NO: 6080 - DNA, 31 bp, Homo sapiens
  chr17:70215940-70215971
  hyper
ggggcacatattggtccgtgtgggaaaccca

SEQ ID NO: 6081 - DNA, 31 bp, Homo sapiens
  chr17:71161117-71161148
  hyper
aatgtgccgaggggcccgggctggctgggcc

SEQ ID NO: 6082 - DNA, 72 bp, Homo sapiens
  chr17:71161833-71161905
  hyper
cctgcgggagcgcacccggagatccgagcctgccagaggcaggcggcgggcgcagagcggagaaagaggggc

SEQ ID NO: 6083 - DNA, 35 bp, Homo sapiens
  chr17:71306520-71306555
  hyper
gatggctgctggggttcggacgagagagagatttt

SEQ ID NO: 6084 - DNA, 39 bp, Homo sapiens
  chr17:71306580-71306619
  hyper
ggagggcagggggcttcgcagcgacgggggctcccaagg

SEQ ID NO: 6085 - DNA, 111 bp, Homo sapiens
  chr17:71306651-71306762
  hyper
ggcaaacagtgggcaccgggcacacagtaagggatgtgggagccggtcagattgcaaggggtgggagtcgtggagagagagaagttccagaggcaacgagaaaagaaaagg

SEQ ID NO: 6086 - DNA, 314 bp, Homo sapiens
  chr17:71306966-71307280
  hyper
cctcagccccggctcccgcccagctctccagccctcccggccggggcactcaccggctgacgggatccccgcgggcaggatggctcctgggggacgcgccgggggcagggggcagttttgtaaccccggctgggggcgctccggagagggggcggggccagggacggccgatccgcgcgcacccgccccaagcgggcgattaaatcattaaccgaccgctcccgcctgcgatcccgctgagcgcgctgagctcggggcgcactagcccaggagcggccgtctccccggctccaagggggcgggtggctcgactg

SEQ ID NO: 6087 - DNA, 55 bp, Homo sapiens
  chr17:71307339-71307394
  hyper
cggggcgggagcctggcgggggagggaagggttcgcggggcgggagtaggggaaa

SEQ ID NO: 6088 - DNA, 31 bp, Homo sapiens
  chr17:71307397-71307428
  hyper
ggaccatttgttccttcggccattcccttcc

SEQ ID NO: 6089 - DNA, 212 bp, Homo sapiens
  chr17:71307437-71307649
  hyper
cttccctctggcttcccggccgggtgacattgggtggcgtgtgctgcagtgtgtgtacgagagcgagatgtgtacacgcctctgcccgtacaggcggagaattcggttcttattcatggagaactccgggcgcacacacgcccccctcgcggagatcgcgggccgcgcgccgccgattgctgcgctcctgcccacaccgacacacaccccat

SEQ ID NO: 6090 - DNA, 81 bp, Homo sapiens
  chr17:71307699-71307780
  hyper
cacccttggccagggccgggagttccagcgtggagagaggaaatggagtcccggcaacgctgcgcccggctccctgccacc

SEQ ID NO: 6091 - DNA, 189 bp, Homo sapiens
  chr17:71307781-71307970
  hyper
cctcctccacacatcccgctctgccaggacactaggtgcgcagcttagggtcccaggcaccgcggtgggcgcggtgaaaagcgcgagcgccgagaagtgggggctccgcgcccttctccccgcgccgcggcctcgcatccccagcttcgatcctctctgccccacagggggactcgagacccccaagcc

SEQ ID NO: 6092 - DNA, 38 bp, Homo sapiens
  chr17:71307971-71308009
  hyper
acccagggcacccagcgcgaaggcggctaccacagaca

SEQ ID NO: 6093 - DNA, 76 bp, Homo sapiens
  chr17:71308017-71308093
  hyper
tgcccgtcgcctacctcggtccccggagacccgagctctgggccggctgcgctgtccccttcgtgggctccgcgcg

SEQ ID NO: 6094 - DNA, 44 bp, Homo sapiens
  chr17:71308207-71308251
  hyper
ccgcgcaaccctccccgcgcacccctctgcgctgatgtcacggc

SEQ ID NO: 6095 - DNA, 41 bp, Homo sapiens
  chr17:71308378-71308419
  hyper
ctcccgccccagcctgcgctccggccgcgaacccccactgg

SEQ ID NO: 6096 - DNA, 145 bp, Homo sapiens
  chr17:71308422-71308567
  hyper
ccccagggccaggggcgcgtctccctccgggggcctggcgcgaggctcttttgaggctcttccccattcgagccggggcaagaaaccaagaactccagcccgggtggcgttcctcgttcctgctccctcccggacctgctaacca

SEQ ID NO: 6097 - DNA, 31 bp, Homo sapiens
  chr17:72210147-72210178
  hyper
gagcgggcagggcggcgcgggggaggggtaa

SEQ ID NO: 6098 - DNA, 31 bp, Homo sapiens
  chr17:72427015-72427046
  hyper
gcctcccctccccctcgcgggcgctcagggt

SEQ ID NO: 6099 - DNA, 143 bp, Homo sapiens
  chr17:72427521-72427664
  hyper
cagagccaacgtgtcccggagcgcagaggcccagggggtcgcgctaaacactgtacctcggggaacaaaaccgtgaaggctaattaggacaagtcggagcagggaacggggacgccgggaggggagagcgcgctccgagttgg

SEQ ID NO: 6100 - DNA, 35 bp, Homo sapiens
  chr17:72427812-72427847
  hyper
ggtcccagagaaggaccgtgcgtgcaaaaggcgaa

SEQ ID NO: 6101 - DNA, 66 bp, Homo sapiens
  chr17:72428235-72428301
  hyper
catctccctcaccagccggaaagtacgagtcggctcagcctggaggtgagtcggggcggggagggc

SEQ ID NO: 6102 - DNA, 50 bp, Homo sapiens
  chr17:72428331-72428381
  hyper
cgcacgtacctggagcgcggcgggcgcccgattagcgccctgaatggagg

SEQ ID NO: 6103 - DNA, 66 bp, Homo sapiens
  chr17:72428473-72428539
  hyper
gcgcctggctcagcctcggtcccagggagaggcaggccctgcgtcccggcccgggccccgccatcc

SEQ ID NO: 6104 - DNA, 177 bp, Homo sapiens
  chr17:72449938-72450115
  hyper
attcacctaaaggcaacggtggcttgcctcacccccaactccaccgacggcaggagagggtccgcgggggcccgggcccagggaaggttttacgctccgtccttaacccagcgtcctaacctgacccggctgggagagggggcggggccccggaaccccacccgcagacagcccact

SEQ ID NO: 6105 - DNA, 106 bp, Homo sapiens
  chr17:72450206-72450312
  hyper
cccacgtgcctctcccgcgagggcccggccaccccagctccagccaacccgaggccgcctctcgtgccccaccccaagccccgccccggcccctgcaacccgatcc

SEQ ID NO: 6106 - DNA, 15 bp, Homo sapiens
  chr17:72450330-72450345
  hyper
cgaagccagctgtcc

SEQ ID NO: 6107 - DNA, 154 bp, Homo sapiens
  chr17:72450353-72450507
  hyper
gctgtagcctgggggccgggccgccgcgctccgcccatccccgccctcagagctgggcctcgcagccgctagggattgcgggggccgcatttatccctgtgtctctcaggccccgcagagacgggggtggggtgggtgacgccagggaagcagg

SEQ ID NO: 6108 - DNA, 31 bp, Homo sapiens
  chr17:72450548-72450579
  hyper
gggccatggagtttccgcgggtggaggtagt

SEQ ID NO: 6109 - DNA, 78 bp, Homo sapiens
  chr17:72450589-72450667
  hyper
gcacggggagccctgtcgctgccttacgtctggctctaggccggggttcctcggctccaccagcgacatttgtggccg

SEQ ID NO: 6110 - DNA, 48 bp, Homo sapiens
  chr17:72968520-72968568
  hyper
cttccaggtacaggccgcggggtcccgttccggcgctggccttggcgt

SEQ ID NO: 6111 - DNA, 43 bp, Homo sapiens
  chr17:72983605-72983648
  hyper
gacaccaggagggtcccgccctcggccccgcctccagctttgc

SEQ ID NO: 6112 - DNA, 37 bp, Homo sapiens
  chr17:72983650-72983687
  hyper
acatctcctgattggtcggcggcggcaggccccaccc

SEQ ID NO: 6113 - DNA, 76 bp, Homo sapiens
  chr17:72983764-72983840
  hyper
aggagcagcgcggacccgagccgggcagggggcgcccgccacggcacccgcgcgctcctagcgccccagacccgcc

SEQ ID NO: 6114 - DNA, 63 bp, Homo sapiens
  chr17:72983858-72983921
  hyper
ttgccactgtcccacccgccgtccctgccactccaccctttgtgtcgccgcagcccggtgccc

SEQ ID NO: 6115 - DNA, 417 bp, Homo sapiens
  chr17:72983946-72984363
  hyper
ccggaccctggcaaagcgccaggccccgcgtgggctcccggcgagcggttgatggcgagggggcgcggcgcgggctctgtagcccgagttcccgacgctggaggcccggcccgcctcagccgcattgtcccgggccgcgcgcaccggccctgagctgcgccgccgcagcacccgcccgccgcccgcggggccatgcggagagccgccgggatggaggacttctccgcggaggaagaggagtcctggtacgaccagcaggacctggagcagggtgagcgcgggggcgaccgggacaggaaggcggggagcgcccggtgacccctgtccgcttctccattgttgggcgctatcaccccgggaggggctgggctggaccgggcgcgcccgactcggaggagggacgcgtctggagaaccg

SEQ ID NO: 6116 - DNA, 145 bp, Homo sapiens
  chr17:72984365-72984510
  hyper
acgtggagagagggggcgctgccggagaagacgcggaccggacgggcggagacctgcaaaagtggggggcggggggcggtcttcctattttcccagacgaccgggcatccgtcatccagctcgcccaccccgtcctggaggcagc

SEQ ID NO: 6117 - DNA, 31 bp, Homo sapiens
  chr17:73422367-73422398
  hyper
atgaaagcatacttcacggttttaattagca

SEQ ID NO: 6118 - DNA, 31 bp, Homo sapiens
  chr17:73422420-73422451
  hyper
catgttgtcagccctacgtgttgccatcaac

SEQ ID NO: 6119 - DNA, 171 bp, Homo sapiens
  chr17:73511276-73511447
  hyper
cccagcccaggcccaccggggaacaaagcggcgggagaagccgggcgggccaagcgcccgaggtataaacgcggaggatggaaaaaggggcgcgaggaggacggaaggagcggggagatggaggtgcccgccgaccccgcaagaaaagttagtttgcgcccgcccccaggg

SEQ ID NO: 6120 - DNA, 34 bp, Homo sapiens
  chr17:73521009-73521043
  hyper
gtcggaggggatgggacgtcgcaggcttcccgaa

SEQ ID NO: 6121 - DNA, 44 bp, Homo sapiens
  chr17:73522382-73522426
  hyper
tgtgcctcctaatccccggacgcaggaagcccgcgggagggact

SEQ ID NO: 6122 - DNA, 71 bp, Homo sapiens
  chr17:73522482-73522553
  hyper
cggagacccagtctgccctccatgctgacgggcggggtttgcgctgtgggatttggcgagaagtggaaaat

SEQ ID NO: 6123 - DNA, 172 bp, Homo sapiens
  chr17:73585893-73586065
  hyper
agtgaggggtgcaggacgagtggggaaggggtgtccgggcttcgtcgcggctccctccttgccccgactgcacccgacgggccttccctcgacgagagcggctccagcagtgaggcggagttggagaccctcaatgacgagcccccggtgcgctgggcgcagggctcaggcc

SEQ ID NO: 6124 - DNA, 49 bp, Homo sapiens
  chr17:73586090-73586139
  hyper
cgccgtgctgctaccccgactctccttggagacccgcctgcagcaggag

SEQ ID NO: 6125 - DNA, 46 bp, Homo sapiens
  chr17:73874666-73874712
  hyper
cggcctgggagggacccgggccgttcgcgccgcggcacctccccct

SEQ ID NO: 6126 - DNA, 42 bp, Homo sapiens
  chr17:74137493-74137535
  hyper
aactccctccttctgccgccctctcccgcgccacccaacccc

SEQ ID NO: 6127 - DNA, 68 bp, Homo sapiens
  chr17:74236406-74236474
  hyper
gcgggggccgactgcccgccgcggccggctccgctgcggcgctgcggctctggcggcggggagccccc

SEQ ID NO: 6128 - DNA, 106 bp, Homo sapiens
  chr17:74236843-74236949
  hyper
ctgggaccccaggagacgagcgctgcacccggccgggacgcgtcgcccctccgcgcctgtttatcccggctcggattaccgcgcagggagccgccccctcccgcgg

SEQ ID NO: 6129 - DNA, 70 bp, Homo sapiens
  chr17:74381537-74381607
  hyper
ccgccgcagggaatgacgccggtgctcctgcagccacggctccgggcggggaaggcgagccccacagccg

SEQ ID NO: 6130 - DNA, 31 bp, Homo sapiens
  chr17:74381618-74381649
  hyper
cccgcctgggcagcaccgataaggagctgaa

SEQ ID NO: 6131 - DNA, 57 bp, Homo sapiens
  chr17:75082777-75082834
  hyper
agggccatgtagtagacgcctgtagttttcgcctgtccaggacgccttcacccctgc

SEQ ID NO: 6132 - DNA, 31 bp, Homo sapiens
  chr17:75082860-75082891
  hyper
ctccaagtggtactgacggggatcacccaca

SEQ ID NO: 6133 - DNA, 120 bp, Homo sapiens
  chr17:75369154-75369274
  hyper
gggaggggctgaggccgcgtctctcgccgtcccctgggcgcgggccaggcggggaggaggggggcgctccggtcgtgtgcccaggactgtcccccagcggccactcgggccccagccccc

SEQ ID NO: 6134 - DNA, 54 bp, Homo sapiens
  chr17:75369344-75369398
  hyper
tgatccgcccgggaggcgggggcggggcgggggcgcagcgcgcggggaggggcc

SEQ ID NO: 6135 - DNA, 31 bp, Homo sapiens
  chr17:75370729-75370760
  hyper
agcctgaggtcctccccgctccatggccaga

SEQ ID NO: 6136 - DNA, 31 bp, Homo sapiens
  chr17:75392295-75392326
  hyper
tttctgacactgtgcacggtccacagttgtg

SEQ ID NO: 6137 - DNA, 74 bp, Homo sapiens
  chr17:76349230-76349304
  hyper
tcttcctggcagagggcggcctcgaggcgacgcgcctgcccgcccgccagcccggcggccgccagatctggagg

SEQ ID NO: 6138 - DNA, 31 bp, Homo sapiens
  chr17:76588312-76588343
  hyper
ctccccttcctgccccgcgcttctgttgacc

SEQ ID NO: 6139 - DNA, 51 bp, Homo sapiens
  chr17:76588409-76588460
  hyper
cacatggccctggggtcggggcctctggccgaagggcgctcagcttggtct

SEQ ID NO: 6140 - DNA, 112 bp, Homo sapiens
  chr17:76921137-76921249
  hyper
cgccagccgcagggtgcgggccgcggcgcccatggcgggccggggggctgggcgggcgggggccgccgctggggggtccgggcgctgctcgcggcggcgggctgggggcgcg

SEQ ID NO: 6141 - DNA, 65 bp, Homo sapiens
  chr17:76921271-76921336
  hyper
aggcgggcccctcccgcgcggctcaccctcctcacctgccccgctcggccgcgcaaactttctct

SEQ ID NO: 6142 - DNA, 69 bp, Homo sapiens
  chr17:76921483-76921552
  hyper
ggccgcagttttattgcgctcggaggattttctgctcctcctcccggtggctggcggccaatgcaggct

SEQ ID NO: 6143 - DNA, 45 bp, Homo sapiens
  chr17:76967523-76967568
  hyper
gctcaggtgagtagggcgacatctggtggccggttgttgaaggtc

SEQ ID NO: 6144 - DNA, 81 bp, Homo sapiens
  chr17:77070948-77071029
  hyper
cgcacttcccattggccgagcgcggcgcgggggcgggcccgggcctgcgattgcctctcggcgtgcgcggacagtgtcatg

SEQ ID NO: 6145 - DNA, 63 bp, Homo sapiens
  chr17:77071239-77071302
  hyper
gtttcccggcacgggcgcgccgaggggcggggggccggcgcctgtgtccgctccgtgcacagt

SEQ ID NO: 6146 - DNA, 165 bp, Homo sapiens
  chr17:77071338-77071503
  hyper
ccgccccgccgtcctcgcgccactgccgggcagcggcctccggcccccgtgcgtgacccctgcctatctcagaaatacgggtgcaaacccgagtggccgcggggcccagcgggaatcccgacgccccggccagacccctgcttcccacgtcgctggtctatgcgg

SEQ ID NO: 6147 - DNA, 76 bp, Homo sapiens
  chr17:77771455-77771531
  hyper
tgcacaggtgctggggcgccgcgggccgcgcccgaaccccgagagcctgcggcgcgcccatcggctggcttctccc

SEQ ID NO: 6148 - DNA, 38 bp, Homo sapiens
  chr17:77771550-77771588
  hyper
cccggagccgcacacccgacccccggtctccatggcaa

SEQ ID NO: 6149 - DNA, 38 bp, Homo sapiens
  chr17:77771592-77771630
  hyper
ccccccccccccaagccgggtcccgctaacaaatcaat

SEQ ID NO: 6150 - DNA, 46 bp, Homo sapiens
  chr17:77774930-77774976
  hyper
caaggagaggggcggacgggccccagcggggcgctgggctcctggg

SEQ ID NO: 6151 - DNA, 31 bp, Homo sapiens
  chr17:77778672-77778703
  hyper
ggaaatgtgatgttcacgctgagtttctgta

SEQ ID NO: 6152 - DNA, 114 bp, Homo sapiens
  chr17:77778727-77778841
  hyper
ttactttttggccaaacggatgaaggggtaagccaccgtggaagtcccagcagatacccccaccatcgccccatccatcctgggaggttcggtggccctcgaggcagagacatg

SEQ ID NO: 6153 - DNA, 31 bp, Homo sapiens
  chr17:77779042-77779073
  hyper
ccgagacagcagaagtcgttgaattcaaagc

SEQ ID NO: 6154 - DNA, 154 bp, Homo sapiens
  chr17:77813599-77813753
  hyper
cctccccctcgcggcacgttctcagtgttcacggccccgggacccctgctgggggccacggaagcatccgccgccgctcccagttgcaccgaattgcgtcaccagcgccccgggacgcgcgggccccgccggcagggggcggaatggggcaggg

SEQ ID NO: 6155 - DNA, 31 bp, Homo sapiens
  chr17:77813829-77813860
  hyper
agggcggagagaaggccgaggactgggtgcc

SEQ ID NO: 6156 - DNA, 31 bp, Homo sapiens
  chr17:77813865-77813896
  hyper
gagattgaagaacgcacgaggaaggggaccg

SEQ ID NO: 6157 - DNA, 31 bp, Homo sapiens
  chr17:77813919-77813950
  hyper
tggcgcccaagaacctcggcagaaagggctc

SEQ ID NO: 6158 - DNA, 31 bp, Homo sapiens
  chr17:78009417-78009448
  hyper
cgcaccccgaggacggcggccggaccccggc

SEQ ID NO: 6159 - DNA, 47 bp, Homo sapiens
  chr17:78009471-78009518
  hyper
ggcccacgcgccccacgcgccccgcgcgcccccgccccagctccgcc

SEQ ID NO: 6160 - DNA, 31 bp, Homo sapiens
  chr17:78009923-78009954
  hyper
gctggccctccgctgccgccctctgcaggga

SEQ ID NO: 6161 - DNA, 61 bp, Homo sapiens
  chr17:78010155-78010216
  hyper
ggggtccccaggtgcccggcaggtcccttcgggacctcgagccgcccgctgggcacacgct

SEQ ID NO: 6162 - DNA, 268 bp, Homo sapiens
  chr17:78010235-78010503
  hyper
agaaattgagcgcagccgaggcgggacccgggcgcagagagcgataaaggaaaagcatggtcgtgctctaatcattacagtctaagggacgacacgtcgagacggcgcgcgcctctgcgtgcgtggagatggcacaaaggccgcgccgcccccggcggcccccgccctcgcagcgcgcgtggtcccggcccggccggatgttgacagcgtcgcctagcaacgggaaatggcggaaccgggcggcgcggcgggccggtaagccgggccg

SEQ ID NO: 6163 - DNA, 15 bp, Homo sapiens
  chr17:78010737-78010752
  hyper
tcccctactccaagc

SEQ ID NO: 6164 - DNA, 48 bp, Homo sapiens
  chr17:78010864-78010912
  hyper
cggggctgttggataccgcccctgaccttgctccggggccactcgctg

SEQ ID NO: 6165 - DNA, 31 bp, Homo sapiens
  chr17:78388503-78388534
  hyper
acctggtgaatcctttcggggttcagcaaag

SEQ ID NO: 6166 - DNA, 34 bp, Homo sapiens
  chr17:78388648-78388682
  hyper
cagagcgcagcgcttgcggcggggacagcagagg

SEQ ID NO: 6167 - DNA, 91 bp, Homo sapiens
  chr17:78389460-78389551
  hyper
ggctgaaggcccacgtcgtagaccgggacaccgaggcgtggcagcgagaccccgccttctcgggtctgcagagggtcgggggcgttgacgt

SEQ ID NO: 6168 - DNA, 190 bp, Homo sapiens
  chr17:78428376-78428566
  hyper
ctactgcctccagagccgcttcggggccgaccccggggactcttcccgcctgcggcctcgcgccagcccggccggctcgcctagtgcccggcgcccagaaacgcgtggagctgggagaggccacacaacccacgccggaagcctaaccccgtcggcccccgcggccggcaccggccggaagcccgcgaag

SEQ ID NO: 6169 - DNA, 50 bp, Homo sapiens
  chr17:78428637-78428687
  hyper
gttgctgtggcagccccgccgtgcgtccgcgttcccggagccagcgcggc

SEQ ID NO: 6170 - DNA, 48 bp, Homo sapiens
  chr17:78954935-78954983
  hyper
ccgtgcccccgcccccgcgcccccgcgggtttccgggaccccagtctc

SEQ ID NO: 6171 - DNA, 31 bp, Homo sapiens
  chr17:78955670-78955701
  hyper
gcactttctgggctctcgcccattccttgag

SEQ ID NO: 6172 - DNA, 256 bp, Homo sapiens
  chr17:79008305-79008561
  hyper
gttctcctctctgccccgaggggccggccggggggtcgccgcccgcccggcgggcttacctgcgaagcggcggggtcggggcctctcccacctgtaagcccggcccgcggcgtcctgcgtccgagccgctccccgccccgcagcgccaggccgcgacccggcgggccgcccgccccgaagtgccacttcgcgaagtgccgcctccacgcgcgctgccgccggcgccccccgctctcctccccgcaccttctgctcc

SEQ ID NO: 6173 - DNA, 266 bp, Homo sapiens
  chr17:79008840-79009106
  hyper
gtcgggggcggtgatgcgggcgcaacgggggcgggacgcaggggcggggactgccgcggggcggggcctgaggcggctataaaggtggccgccgccggacgccgggctctgtggttcgggtccgctttcgtctccgtcctgctgccgttaccgccgctgctgccgccgcttgcgtcccccgctccggtctgtggtgcagccgggacccaggaccatgtctctgtctcgctcagaggagatgcaccggctcacggaaaatgtctata

SEQ ID NO: 6174 - DNA, 31 bp, Homo sapiens
  chr17:79009132-79009163
  hyper
gagcccgctccgtgtgcgcctgggtcgcgcg

SEQ ID NO: 6175 - DNA, 138 bp, Homo sapiens
  chr17:79009227-79009365
  hyper
actttgggggtcttcccggcgcggccacccgggacccgggctgctggggtggtgagcccggcgccggccgctcacaggtggccacccccgcccgggcccccccatcccatgcgcgccgcggcccggtcagtccccagc

SEQ ID NO: 6176 - DNA, 101 bp, Homo sapiens
  chr17:79009389-79009490
  hyper
ctccgacggccctgctcggcccccgcgcgctcgccttggcgtcggcgggaacggagccgcgcgccgggccccggaagccctcggaccggtcggggtcgtag

SEQ ID NO: 6177 - DNA, 31 bp, Homo sapiens
  chr17:79197096-79197127
  hyper
gcgaggcagatgtgggcggggcaaggcaggt

SEQ ID NO: 6178 - DNA, 37 bp, Homo sapiens
  chr17:79318212-79318249
  hyper
cccatcttgcctccttcgcctccgccctttgttctaa

SEQ ID NO: 6179 - DNA, 31 bp, Homo sapiens
  chr17:79319123-79319154
  hyper
tgaggccgaggcagggcgcacctcctcctgg

SEQ ID NO: 6180 - DNA, 52 bp, Homo sapiens
  chr17:79319252-79319304
  hyper
caggaacactttgggccggggtctaccccgcgttcggcggctccccgaatcc

SEQ ID NO: 6181 - DNA, 47 bp, Homo sapiens
  chr17:79762707-79762754
  hyper
ccggcgccccaccacccggccgactcggccaccgggcttatgctccg

SEQ ID NO: 6182 - DNA, 31 bp, Homo sapiens
  chr17:79791534-79791565
  hyper
ggcccatgggcgacgcgcggcttctccaggg

SEQ ID NO: 6183 - DNA, 37 bp, Homo sapiens
  chr17:79886040-79886077
  hyper
ccggagcggcgcggggcggggacggcctggcagctcc

SEQ ID NO: 6184 - DNA, 35 bp, Homo sapiens
  chr17:79918401-79918436
  hyper
aggtccagccggagaccgggcgcgtcgggcggggc

SEQ ID NO: 6185 - DNA, 34 bp, Homo sapiens
  chr17:79946603-79946637
  hyper
cacagccatgctcttccgtcgtgtgggtgtcatg

SEQ ID NO: 6186 - DNA, 31 bp, Homo sapiens
  chr17:80010342-80010373
  hyper
ccaggacagggacccccgagcgagggagggg

SEQ ID NO: 6187 - DNA, 79 bp, Homo sapiens
  chr17:80277697-80277776
  hyper
tgcgtgtgtgcagagacgggtgcgcgactccatgcgtgtgtgcagaaacgggtgcatgtggacacgtgtgtgtgcagag

SEQ ID NO: 6188 - DNA, 44 bp, Homo sapiens
  chr17:80332248-80332292
  hyper
actggcagctctgtgccggagccgcctggcggccccaacgcaac

SEQ ID NO: 6189 - DNA, 299 bp, Homo sapiens
  chr17:80655504-80655803
  hyper
gctcctcactcccagccgaggtgttcgcctctgcgcgttcccccttctcctgggttcctgcccccgcctttctttccccggagccgtccaccccctcgccgggcgccggctttcaagcctcaaacttgggggatccccgggctgcctgcctgggagctctgggcgctccggcctcccctcgccctggaacccgctctccggccgctgtcgtggggggtcccctcttccgcacgcgagtcacctgtgctccttcctctcccccggacacgcgggacccctggcctcgggaccggaccctg

SEQ ID NO: 6190 - DNA, 337 bp, Homo sapiens
  chr17:80655901-80656238
  hyper
cctcctgccccgcggccgaacgcgcacttgcggactcgagcccccgccccgggtccccacagcagcggccccaggtcgggaggagcccagcgcccggcccagccgcgggctcccgctgcgcgcagactgcggagaaggatggagactgcgccgcggggcctcgagtggaactgggggtgcaacagggacgccgcagcacgagggccagggccgggcggagaaaggcccgcccgcgaaccgcgctcctcctcagccccgcgcccccggaccgggactcctaccctccccggccacgcgccccggcctcttcccgacccctgcccggtctcgcgtcccc

SEQ ID NO: 6191 - DNA, 140 bp, Homo sapiens
  chr17:80656360-80656500
  hyper
cgccatcctgcaggctcgccaggatctcgcccttgcccacgtcgctgtcgcccaccagcaggaacttgagcagaaagtcgtaggcccggaccgggctgcccagggcgctcatcgtgacggcccggcgcccccacccatgc

SEQ ID NO: 6192 - DNA, 139 bp, Homo sapiens
  chr17:80656563-80656702
  hyper
agtccttgctcgcctccggccccgccccgccgcccagcgctgacagcgcgcatccccgcccggccccgccattggtggaccgcagttgctagggcagctgcgcgctttcactggcttggttgtccgtccatcttactct

SEQ ID NO: 6193 - DNA, 250 bp, Homo sapiens
  chr17:80656731-80656981
  hyper
gcccctcctgaaaggtcgctgtcaccacagccaatggaggcccggagacggggcaggggcggagccagaacaagcaggaggcggggactctgctcccgcagccaatggcggggcggggtgggggcgatcagggggtggggccgggtgtttacactctcgcgtgcgcccgtgagcgccacgaactcgctcccacggtcgtcgggtctgcacgccccgagtcgggaggggcgaggggcggtgcagggtccca

SEQ ID NO: 6194 - DNA, 60 bp, Homo sapiens
  chr17:80657001-80657061
  hyper
cccaccagggagacctcgggtgcctggccgggtggggctcggggtcggtccagttggcgg

SEQ ID NO: 6195 - DNA, 17 bp, Homo sapiens
  chr17:80657193-80657210
  hyper
cctgtgtgtgcacatgc

SEQ ID NO: 6196 - DNA, 36 bp, Homo sapiens
  chr17:80693227-80693263
  hyper
gggccggacctgcgtccgctgcggggcagggatacc

SEQ ID NO: 6197 - DNA, 58 bp, Homo sapiens
  chr17:80693276-80693334
  hyper
gagctcaagccccagcgcgcccgcgaagagctgcgcggactcccggctgcttcccccg

SEQ ID NO: 6198 - DNA, 38 bp, Homo sapiens
  chr17:80693416-80693454
  hyper
cggggtcacgcgccgcgcgctcccgccccgccccgccc

SEQ ID NO: 6199 - DNA, 37 bp, Homo sapiens
  chr17:81009161-81009198
  hyper
gtgcgcaggagcgaggcgggagcgaggcaggtgtgcg

SEQ ID NO: 6200 - DNA, 58 bp, Homo sapiens
  chr17:81036701-81036759
  hyper
gttgtcaaagctggggcgggggttgctactgatacccagagtgcgggggccagggtgc

SEQ ID NO: 6201 - DNA, 41 bp, Homo sapiens
  chr17:81036921-81036962
  hyper
ccggtcaggagggagccgggaactcccgaggcaccaactct

SEQ ID NO: 6202 - DNA, 31 bp, Homo sapiens
  chr17:81037127-81037158
  hyper
gggggtctgcggggggcgaccgcggctcgcg

SEQ ID NO: 6203 - DNA, 50 bp, Homo sapiens
  chr17:81038241-81038291
  hyper
ccagagcgggaagggacggccgcgggagggagcggcggtttcggggatcg

SEQ ID NO: 6204 - DNA, 60 bp, Homo sapiens
  chr18:712015-712075
  hyper
gtacagaggaagccagcgagcgctgtgctctagggtttccactggcgggaacccaacaaa

SEQ ID NO: 6205 - DNA, 36 bp, Homo sapiens
  chr18:712306-712342
  hyper
gcagagctgcagtcggcggggcgggagggacccggg

SEQ ID NO: 6206 - DNA, 72 bp, Homo sapiens
  chr18:712366-712438
  hyper
tccgcgcttaccatggcgtccgcgcttaccatggcgtccgcgcttaccatggcgtccgcgcttaccatggcg

SEQ ID NO: 6207 - DNA, 31 bp, Homo sapiens
  chr18:811589-811620
  hyper
aactttaaacatgttgcggttttcaatcaaa

SEQ ID NO: 6208 - DNA, 80 bp, Homo sapiens
  chr18:811633-811713
  hyper
gaaaggctcatccactcgccccacacacccgctcctctccccgcacagctgctaccggcgtcggccgatacacagacccc

SEQ ID NO: 6209 - DNA, 31 bp, Homo sapiens
  chr18:811720-811751
  hyper
taggacccaaaggggccgcttccctcgcccc

SEQ ID NO: 6210 - DNA, 110 bp, Homo sapiens
  chr18:811862-811972
  hyper
ggacttgggcgggacccggcaggtctggacagggcagagaccgagtcaggggcgagcaggtagcgcggggaacgagacaagcccgccgggcgatccgggggaggggagaa

SEQ ID NO: 6211 - DNA, 199 bp, Homo sapiens
  chr18:811973-812172
  hyper
tttcttcccaacttcccgactcgggcccgcgggggcggggaaccgcggcggcggcggcggcggcggctccgggcgctggggcctagccctgtccgggcagaggtggaaccctccgcccgcggggccccaccgggtccttacctgtcctccggccgcgctctcatgagtcgctgctaccgcagctcgaggtggcggaggg

SEQ ID NO: 6212 - DNA, 31 bp, Homo sapiens
  chr18:812283-812314
  hyper
gttcccgggctccccacgcctcggcctcact

SEQ ID NO: 6213 - DNA, 234 bp, Homo sapiens
  chr18:812346-812580
  hyper
gccccctgacttctagcgggggcgggggctgcgggtacctgcgcgcgccgccgtccgctcaccggaactcgggccacgccggcccggctccggggcccccagccttccggcgcctacgcccccgtcaggtcccctccgcgggctccgggccgctttgctgtggtcaggataggcgaccggtccgtgtcacttctcccgacccaacatggcggcggggtccggggcggattcccg

SEQ ID NO: 6214 - DNA, 88 bp, Homo sapiens
  chr18:812611-812699
  hyper
gaggtgcttccctgcccggagagcaggcccgcggcgtcccttcccacccgcgaacccaccgacgctcggctgccgcggagattgaatg

SEQ ID NO: 6215 - DNA, 51 bp, Homo sapiens
  chr18:2571377-2571428
  hyper
acctaactttaggggtcgtgccagtcttcgtagagacggccacactggccc

SEQ ID NO: 6216 - DNA, 31 bp, Homo sapiens
  chr18:2846817-2846848
  hyper
ttatcccaaaccctttcgcccctccaccccg

SEQ ID NO: 6217 - DNA, 151 bp, Homo sapiens
  chr18:2847044-2847195
  hyper
ggagcactggttggagcgccgcgaagcgcccgagcctcttgccttcgcgggcggcgccctggccgccggcagccttgtggccggtgccccgatccgccgcgctccggacccgggcaggcggggcgcgcccgctgcgcgcgggatgtggcag

SEQ ID NO: 6218 - DNA, 87 bp, Homo sapiens
  chr18:2847587-2847674
  hyper
gggtgcttttctttcccgtcttggtcgggtccaggcgcgcgctctccagaggcgcacccgggcaccctccggcgtctgctcggtgaa

SEQ ID NO: 6219 - DNA, 42 bp, Homo sapiens
  chr18:2847691-2847733
  hyper
gggcgacgggcccccccgaccctcgctcggtctggtgccgca

SEQ ID NO: 6220 - DNA, 82 bp, Homo sapiens
  chr18:2847984-2848066
  hyper
tggggtggggttgctgcgctgggctccagtccctccggtaaatcccttccagatccggtgaaaagcccgcagcggaaaagcg

SEQ ID NO: 6221 - DNA, 36 bp, Homo sapiens
  chr18:3262088-3262124
  hyper
cttccggtgcgccttccggtgcgccttccgctccgc

SEQ ID NO: 6222 - DNA, 43 bp, Homo sapiens
  chr18:3447897-3447940
  hyper
aaccctttccaattctcggttcccatctcggttgcctgagaat

SEQ ID NO: 6223 - DNA, 235 bp, Homo sapiens
  chr18:3448077-3448312
  hyper
ggaggtagggttaaaccgaccgaaggcgtgttttgtggagtggcttcgaaagcggccgaggcagccgaagccgctttcgaagttagcaaacaaagcgtctccccagtaaccgcccggttccagacgaggctcctgccactcaggccgcggagtcgcagcgtcgcccagcccccggctcctcctccctgcgtctctcctccctccgctcccggctccccagcggataggagccacc

SEQ ID NO: 6224 - DNA, 70 bp, Homo sapiens
  chr18:3448323-3448393
  hyper
cagacaacccttcaaacgaaatagcgaggcggccccctctaacgggcggcgggggcgctggccccctccc

SEQ ID NO: 6225 - DNA, 127 bp, Homo sapiens
  chr18:3448402-3448529
  hyper
tctgtcccgcaccgggcgcagcagctgattcatctgcagccaggtccgggaaggaactgtgctcccggcagttgcagggcagcgtccgggcgggtggcttgtccccaggaccgcgctccccccgagc

SEQ ID NO: 6226 - DNA, 36 bp, Homo sapiens
  chr18:3448759-3448795
  hyper
tagttcctgaaacagacgctccgaagtcgagttagt

SEQ ID NO: 6227 - DNA, 31 bp, Homo sapiens
  chr18:3449164-3449195
  hyper
aataagccaacaggaacgggtgtttacttaa

SEQ ID NO: 6228 - DNA, 571 bp, Homo sapiens
  chr18:3449232-3449803
  hyper
tagcagggttccaatccgaagagtagacactgttgaccgaaacagacgagcaggcacggcgtggtcaccccttagctataaaagtggccgctgccggggttcggcgactcggggtgtcaggcggagtcttggtgaggcaggcgcgcgcccggccgtccccgggcagagacgtttaaagagcatgtgagcgtgacaagtgtctgtccgcaacgtgtcagatttcgaaactgccttgcaatccagtccggaactcgcagctttagcccgggggaacagacgttcgtttaggctgtgtctcatcattcccccccgccccacccccgccgacctcccactgtcgctgctggaggaagagccccgggaggagaagggtgcgccgcgccgcgcccgcgtgtcaatggcagccgcgcattctggaagaagttggttcttgtctcgaatacttttcctcccgtgccccgccccttgaatcagaggcggctgtctcgtgcggctagagcagggccagtagagttcggggcagctgtcaaaaacgagacggggaggcttttcttcccgggggtggaggagg

SEQ ID NO: 6229 - DNA, 57 bp, Homo sapiens
  chr18:3449827-3449884
  hyper
catctgttgcagtttccgaaccaaacgcaccctcgccagccccgggaagaaaggccc

SEQ ID NO: 6230 - DNA, 411 bp, Homo sapiens
  chr18:3449885-3450296
  hyper
agggagaaacctggggcgctcggctggtgcccccaccgccgggcgagggatgcgggcggtccgtgcgcggcaggcggaaaggatcgtgtttctggacccggccaccccccgcgtccgcaccgccgcccccgagggacgagtgacagcggccgccgcgctcggtccagtcttcccggctggaaggtgcgggggaggggcggaggagcggcggggcgggagggggacggggcgggcggctgggggcggaggcaggacctcctgtaccttccctcctcgcctctctcactctgacagcgccgaggtgcgccgagcaggagcagggaacaaaggagcggagaggggaggggagagagttgggcgagggagagcccccggccggctgccagaagatcccggcgggaggaagcccaa

SEQ ID NO: 6231 - DNA, 174 bp, Homo sapiens
  chr18:3450306-3450480
  hyper
aattccacccaaggagcgggcgcctgggatcagagcgtcctgtttagcaataacggctggagcacgtcctacaagttacgggagagtcggctgtgaaggagacgttcgcttatcccctgtgtccccgctcctggcccctccagacccccgccttgcctcgcgctgggaggggag

SEQ ID NO: 6232 - DNA, 452 bp, Homo sapiens
  chr18:3450493-3450945
  hyper
ggcaagaaaggtaaggcggccgcgggctgcgcgcaccagaagacgcgagtccggggaaacgtgctggccgggccgcgccgcgcggagtcacttggtggacttttccgcccaggggctctcatgctggagtggcggccgtgctctttgttgaggctgcgtctgaaacggcagcggctgttttcctgctagacacaacacgaggggctgttgtggggcgagcctctccacgctgctggcacgttgtcaagaaacacgctcagcgccttgtttgtgcgcctgcaagtttcattgtctccgccgacaccccacgctcggcccagccgccgcgtggcttctcgctctttctcgcgtgctggggatatggggtccgagtagggaggacccagcccctcgtttttcccgatccggacccaggcggccggggccgcgggaccgccgcggctttgtctgaa

SEQ ID NO: 6233 - DNA, 64 bp, Homo sapiens
  chr18:3450951-3451015
  hyper
actcctaggctccccccgcccccgcccccgccgcccccctactcccagccgggccctagcactg

SEQ ID NO: 6234 - DNA, 70 bp, Homo sapiens
  chr18:3451023-3451093
  hyper
ggatgtggtgtttttacgatcgaaggaatgcgattctggaccccctcatcgccctcgggtgtaaacagct

SEQ ID NO: 6235 - DNA, 31 bp, Homo sapiens
  chr18:3451259-3451290
  hyper
gctgtcattgtttccacgaagtgttctggaa

SEQ ID NO: 6236 - DNA, 100 bp, Homo sapiens
  chr18:3451294-3451394
  hyper
tacaactaaaacttgccgtcagtttggtttaaaaacaaaatacaccggagggggacggggggtggagaaaccacacaaaacaccccgaaaggtcagagtg

SEQ ID NO: 6237 - DNA, 40 bp, Homo sapiens
  chr18:3451458-3451498
  hyper
tgtgggctggaggtggcgtttctgtcgtgatttatgtgga

SEQ ID NO: 6238 - DNA, 77 bp, Homo sapiens
  chr18:3451508-3451585
  hyper
acagaagttaatcactcgggaagcggacgggaggggcggcgctactgcgcatgcccgggagccgcctggagtttgga

SEQ ID NO: 6239 - DNA, 116 bp, Homo sapiens
  chr18:3451589-3451705
  hyper
cacattctttcagacccggcccgctgcggggcgttcctggggggtagcctcaaggccagcggggttccttcggctgcgtttctgtgggaggccctgaaacgcgcggagcttccctc

SEQ ID NO: 6240 - DNA, 193 bp, Homo sapiens
  chr18:3451708-3451901
  hyper
ctccaggctttcccagcgagagtgaaattaaacttgaaactcggatcaactggcagtcgttgttggtagaacgccctaaggacccctccccgcgggacggagggaggactcgggacagggaattggccctgggagaaaacgcgcggggggcgtccgagacgccccgtgaaagccgtgccgacccttgggagga

SEQ ID NO: 6241 - DNA, 56 bp, Homo sapiens
  chr18:3451904-3451960
  hyper
acaggtctagagacacgcgctgtctgttgtggtgggcctcccgggaataagtgagg

SEQ ID NO: 6242 - DNA, 64 bp, Homo sapiens
  chr18:3451971-3452035
  hyper
tcgaggatggttctagcgcagagccgggtgtctgccggggtgggctccccgcattgttcgggct

SEQ ID NO: 6243 - DNA, 43 bp, Homo sapiens
  chr18:3452053-3452096
  hyper
attcctttccatggcccgcctcccaccccgggaatccccagtg

SEQ ID NO: 6244 - DNA, 161 bp, Homo sapiens
  chr18:3452103-3452264
  hyper
tccacggcttttctggcgtccccccgactctcccgcggcactttggcctaccttcccccagcgccgtggtcctccctggcgaccccctctgcgctcctggggtcctcctgcgccccccctcctccaccggcgcgctgcccacagccgcgtgccctctcccc

SEQ ID NO: 6245 - DNA, 31 bp, Homo sapiens
  chr18:6414307-6414338
  hyper
gggacacgcgggcagacgggggcgttagccc

SEQ ID NO: 6246 - DNA, 49 bp, Homo sapiens
  chr18:8705986-8706035
  hyper
agcccccgccgggcgccggggccagagcggcgggcggtgccaaggctgc

SEQ ID NO: 6247 - DNA, 150 bp, Homo sapiens
  chr18:8706036-8706186
  hyper
ctgggaagcaggagggcggcgcgcgtggcgcccgcggagccgctgtcccgggctgggaagcctcccggagccgagccgccgtctgccgctgccaagggccgcaaagccaagcgcggctcccgggcgccacccgcccgcaccgtcggcccc

SEQ ID NO: 6248 - DNA, 44 bp, Homo sapiens
  chr18:8748271-8748315
  hyper
caacactaaatatattcgtatattagtaggtgccaaggcaggag

SEQ ID NO: 6249 - DNA, 31 bp, Homo sapiens
  chr18:9474875-9474906
  hyper
attccgtggatgttcccgacagaggtttatt

SEQ ID NO: 6250 - DNA, 34 bp, Homo sapiens
  chr18:9474912-9474946
  hyper
tatccctacaggcccacggcgctctttcctccaa

SEQ ID NO: 6251 - DNA, 31 bp, Homo sapiens
  chr18:12859860-12859891
  hyper
tcagcaacaagcctggcgcagtggctaacgc

SEQ ID NO: 6252 - DNA, 19 bp, Homo sapiens
  chr18:13312124-13312143
  hyper
tgcccggccaaatctgaaa

SEQ ID NO: 6253 - DNA, 123 bp, Homo sapiens
  chr18:19748905-19749028
  hyper
ctgtgaaggggctaggcgggggttggggggcgggggggcgcagagcacgttcccccttccttctgggggcgtgctgacccaaggtctggagcgcccctcccgccgcggcggcggcgcgggact

SEQ ID NO: 6254 - DNA, 31 bp, Homo sapiens
  chr18:19749057-19749088
  hyper
ctccctccccctccctcgtgtgggtgtgtgt

SEQ ID NO: 6255 - DNA, 45 bp, Homo sapiens
  chr18:19749137-19749182
  hyper
cgctagccaggtcaggcgttctgtggcctccgcccctcccccggg

SEQ ID NO: 6256 - DNA, 31 bp, Homo sapiens
  chr18:19749359-19749390
  hyper
tcctcttcacctccagcgcccagctgctcgc

SEQ ID NO: 6257 - DNA, 46 bp, Homo sapiens
  chr18:19749776-19749822
  hyper
tccgggcgggctgaggcggctcccaggctcccgggacaccgcggac

SEQ ID NO: 6258 - DNA, 72 bp, Homo sapiens
  chr18:19750138-19750210
  hyper
tcccccctccccagcccgttgcgttccccctccttttctctgctctccgctccaccccgctacgtccgattc

SEQ ID NO: 6259 - DNA, 31 bp, Homo sapiens
  chr18:19750578-19750609
  hyper
tggggaaccctcaccccgaggcatttcggga

SEQ ID NO: 6260 - DNA, 75 bp, Homo sapiens
  chr18:20715562-20715637
  hyper
aggggcgagcatggcccgcccgcgggggggctggaccgccgcgcacgccgcccgatccccgcgccctacccagcc

SEQ ID NO: 6261 - DNA, 60 bp, Homo sapiens
  chr18:20716060-20716120
  hyper
ccgctgccgagcggggcggctgcatcgcgctcgccgcgccgggcacgccggctgcggggt

SEQ ID NO: 6262 - DNA, 44 bp, Homo sapiens
  chr18:20716263-20716307
  hyper
tggcagccgccccggccggcgcctctcgccgcctgtgcccaact

SEQ ID NO: 6263 - DNA, 46 bp, Homo sapiens
  chr18:21242240-21242286
  hyper
gtgctggccacccctccggggaggaggcatccgtgggtgcagctgg

SEQ ID NO: 6264 - DNA, 88 bp, Homo sapiens
  chr18:21242502-21242590
  hyper
ccccgccgcttcctcccgggcctcgcccgcagctggaggagagaggaaggaggaggcggcgggcagcgggcagcgcccaccccatccc

SEQ ID NO: 6265 - DNA, 89 bp, Homo sapiens
  chr18:21242592-21242681
  hyper
cccatcccaccccacccgaccccgcgggcccggccgcccgagcccggccccagccctgaccccggagtcccggtcgctcaccttgaagg

SEQ ID NO: 6266 - DNA, 31 bp, Homo sapiens
  chr18:21242718-21242749
  hyper
cggcgcgctttgggcccggggcgccttgtcc

SEQ ID NO: 6267 - DNA, 200 bp, Homo sapiens
  chr18:21242787-21242987
  hyper
gcagaggggcggcctccgacgccgcgcgctcccgccgcccggcccggcagcagccgccgcacacagggccgggccgaaggggcggcgcgggggcgcgcgcgcgcgcacactacacatggggtgtcgcgtggacgcgctccaggacctgccacacacgcgcgtgcacaaacaccccaaactccgcacgcactgtgcacttt

SEQ ID NO: 6268 - DNA, 31 bp, Homo sapiens
  chr18:21269148-21269179
  hyper
tgctctcaaccaaattcgtttacaagcctcc

SEQ ID NO: 6269 - DNA, 139 bp, Homo sapiens
  chr18:21269206-21269345
  hyper
ctggctttgacctgagcggtgagtatccagagaggagaacgatctaattaatttctgtcctggcgcctggagggttcgaagatcccaggctcccgttcccgccgcctgggtgggagcccgggaacgcctctcccattcc

SEQ ID NO: 6270 - DNA, 31 bp, Homo sapiens
  chr18:21269482-21269513
  hyper
gccgcgggcttccagcgcgtggagcaagggg

SEQ ID NO: 6271 - DNA, 31 bp, Homo sapiens
  chr18:21269776-21269807
  hyper
gggctcagccttcacccgacttacttcaacc

SEQ ID NO: 6272 - DNA, 31 bp, Homo sapiens
  chr18:21393784-21393815
  hyper
cgtgagctaccacacccggcctattctgaac

SEQ ID NO: 6273 - DNA, 248 bp, Homo sapiens
  chr18:21594466-21594714
  hyper
ctgcaggaagtggaggcggccgccgctcggggaccggcttggcggggtgagagacacccggaaacggattccgcttcggggcccgcgcgagttgggtgcttcggagggcgcgagaggagcgggcgggtgctgctgagtaatccccgcggcggcggccggacgcccacctcccacgccgcgccgcagccgggccgcggctcctccctccgcggtccttccctcctcttccctcccgtcttctcccctcc

SEQ ID NO: 6274 - DNA, 31 bp, Homo sapiens
  chr18:21851789-21851820
  hyper
cgccagccttccccagcgaggtcgggcagag

SEQ ID NO: 6275 - DNA, 173 bp, Homo sapiens
  chr18:21851936-21852109
  hyper
ggagagcgcgggcgggcggcggcaaggcctgcggcgggcggctccctgcgcgcggcgggcagcgtccgggccgctcctccccttccccagcgccgctggcgggcggaggcgcaggtagggaccgccggggaagcctgcacggccctccgaggagaggtcggggactgctcctt

SEQ ID NO: 6276 - DNA, 51 bp, Homo sapiens
  chr18:21977789-21977840
  hyper
gcggagcgcgaggtggcgccgcccctccccgcagcccgcccctggaacgcg

SEQ ID NO: 6277 - DNA, 31 bp, Homo sapiens
  chr18:22006300-22006331
  hyper
agtcccttcccgggacgcggtggtaaatgac

SEQ ID NO: 6278 - DNA, 131 bp, Homo sapiens
  chr18:22006338-22006469
  hyper
agtctcctggccattccgatggcgccaaggccgcaatgggcaagcaaaagccccccgccccggcgcattcctaggagacagagccgtgagggcctctggctgcaactcgcgagggtcggctttccctgggt

SEQ ID NO: 6279 - DNA, 31 bp, Homo sapiens
  chr18:22006517-22006548
  hyper
aaccccaccccaaacccgggggccaggagcc

SEQ ID NO: 6280 - DNA, 69 bp, Homo sapiens
  chr18:22006774-22006843
  hyper
gctgtctctccaggctcggctccggctcgcctcgccatgccagtcctcctcagccgaggggccctccgc

SEQ ID NO: 6281 - DNA, 42 bp, Homo sapiens
  chr18:22006901-22006943
  hyper
ttttcccggcgcttcccgtcggccgagcgctcttaggccggc

SEQ ID NO: 6282 - DNA, 31 bp, Homo sapiens
  chr18:22653838-22653869
  hyper
aaacatctttccccaccgtaagccaaaaaaa

SEQ ID NO: 6283 - DNA, 45 bp, Homo sapiens
  chr18:24129702-24129747
  hyper
ccaaccgccattcgttcgccctccgggctgcgctgcctcaggcgc

SEQ ID NO: 6284 - DNA, 41 bp, Homo sapiens
  chr18:24129775-24129816
  hyper
aagcagccaaagagctcgccgggtctcgctttcccatagga

SEQ ID NO: 6285 - DNA, 31 bp, Homo sapiens
  chr18:24236253-24236284
  hyper
gctcgcatccttcccccgtcccagcgccgcc

SEQ ID NO: 6286 - DNA, 31 bp, Homo sapiens
  chr18:28681273-28681304
  hyper
acaattcccagaaaggcgagcagttcccttt

SEQ ID NO: 6287 - DNA, 31 bp, Homo sapiens
  chr18:28681776-28681807
  hyper
cacccccacctatccccgttcccctagtttt

SEQ ID NO: 6288 - DNA, 36 bp, Homo sapiens
  chr18:29077880-29077916
  hyper
gtccccaacccaaggacgtcacggtcccaggtgcga

SEQ ID NO: 6289 - DNA, 60 bp, Homo sapiens
  chr18:29078073-29078133
  hyper
acgggaagacagccctcggggcggggagggagagggtggccgggccggggggaggccggg

SEQ ID NO: 6290 - DNA, 63 bp, Homo sapiens
  chr18:29078257-29078320
  hyper
tggtaagtgccgcaagcgggacaggggagccaccgccggggagggcgtcggtaggcgaggtct

SEQ ID NO: 6291 - DNA, 31 bp, Homo sapiens
  chr18:29078423-29078454
  hyper
atccgacctggggcttcggaaaatcctcttg

SEQ ID NO: 6292 - DNA, 37 bp, Homo sapiens
  chr18:29265159-29265196
  hyper
tgcctggccgcaagggcggcagcggcattaccgccgc

SEQ ID NO: 6293 - DNA, 132 bp, Homo sapiens
  chr18:30050220-30050352
  hyper
tggagacggctgtcctcgcccgtctgccccgcgccccagctgggactcaccgttgtccaggcgcgcgatctggggcagccggtaagtgctgaccaggaggtcgagcggcacggccaccgagctccacttcac

SEQ ID NO: 6294 - DNA, 357 bp, Homo sapiens
  chr18:30050357-30050714
  hyper
tgaggctgcagcccagcgagggcgccgggtccatcttccccgaagcctcctgtcccgcgctcccccgccgccgccaccggcaccacccgcgcctcggcggccgccgctgctcgcgctcgcggtctggggcgcgcgggaggcgccgggcagctccggccgcgggcagccgggggggcgcggcgactggggcggcccggagggagggggccggcgcccggctcagctgccgctgcggggcatggctggggcgccccgcgtgccctcacgcccggagaagactcagagcagccgcgcggctgcgggcggcggcggcggcccgggtggctgcggcggctcccgctccgcctcctcctctgg

SEQ ID NO: 6295 - DNA, 46 bp, Homo sapiens
  chr18:30050715-30050761
  hyper
cctgggtctgcagctgcggcggccgcccgctcgcctcctcctcctc

SEQ ID NO: 6296 - DNA, 40 bp, Homo sapiens
  chr18:30050762-30050802
  hyper
tacccctccttccctccgcctcgagcgtgtgaggaggagc

SEQ ID NO: 6297 - DNA, 99 bp, Homo sapiens
  chr18:30050987-30051086
  hyper
gggccgccagcgcccgcggctcggcgcgctccgcaagctttagctctcgctcccccgtccgaccactcgggcgccctgcagtctcgccgggtgctgctg

SEQ ID NO: 6298 - DNA, 31 bp, Homo sapiens
  chr18:30051112-30051143
  hyper
gcccgtccccggagcccgggaattgccgagc

SEQ ID NO: 6299 - DNA, 35 bp, Homo sapiens
  chr18:30051166-30051201
  hyper
tcgtggtgtcgggcaccgtccgcctccactcccat

SEQ ID NO: 6300 - DNA, 31 bp, Homo sapiens
  chr18:30051251-30051282
  hyper
gctccctcttgcttcccggtgacccagactt

SEQ ID NO: 6301 - DNA, 50 bp, Homo sapiens
  chr18:30051291-30051341
  hyper
gagtaccacagcccaacggggctgcggacggcaggcgtggagcacgcctt

SEQ ID NO: 6302 - DNA, 66 bp, Homo sapiens
  chr18:30351008-30351074
  hyper
ccgggaagtggggagccgggggtgccctgaaagctcagaggcgaccgacggcgaaggttccaggtc

SEQ ID NO: 6303 - DNA, 50 bp, Homo sapiens
  chr18:30351620-30351670
  hyper
cgggaggcctggaggccgggagggattcgtgtgcacggtttcccctcccg

SEQ ID NO: 6304 - DNA, 181 bp, Homo sapiens
  chr18:30352102-30352283
  hyper
ccgccgccgcccggctcggagggatcccggcggacctgccccttccactgcggctcactctgccctgcctggcgccggtcctggatcgccggcttcctatttataccggactgggctcctttcgactcactttaccatcccgttccaggtggaccctaccctccctcgcgctccctccgcc

SEQ ID NO: 6305 - DNA, 31 bp, Homo sapiens
  chr18:33077969-33078000
  hyper
ggtgcaatctaaaaggcggagctcggagtag

SEQ ID NO: 6306 - DNA, 35 bp, Homo sapiens
  chr18:33078013-33078048
  hyper
gacgggaagatgtcagcgggcgttgtcctgccact

SEQ ID NO: 6307 - DNA, 61 bp, Homo sapiens
  chr18:33766768-33766829
  hyper
tttaatagagagggcccggccacacccacgtgcgggaagtgcggggcgggatgcagggttg

SEQ ID NO: 6308 - DNA, 44 bp, Homo sapiens
  chr18:33766845-33766889
  hyper
aagtagggcccaggacgcggttgggagggcggggaagctcagct

SEQ ID NO: 6309 - DNA, 64 bp, Homo sapiens
  chr18:33766897-33766961
  hyper
tcccagctgcagggcccgctccgggggaagcccccgagcttcccggttccgaaagtgtgcagcc

SEQ ID NO: 6310 - DNA, 31 bp, Homo sapiens
  chr18:33766964-33766995
  hyper
gagaatttattagcctcgtggatccctaatc

SEQ ID NO: 6311 - DNA, 183 bp, Homo sapiens
  chr18:33767006-33767189
  hyper
ctaccctttggtcagccgcattctaacaaacggcaagcacacgccccgctgggtagcagcaacccgagaacgcccccacccccgcccccgccagacgccggttcccgcttgagagggtgagggtcccgagacccctgcgaggaggagggtcgcggggttccaggatgccgatgccaagcagga

SEQ ID NO: 6312 - DNA, 58 bp, Homo sapiens
  chr18:33767424-33767482
  hyper
gtggcgggggcggagtcgccgggggccggcttcgcgcacttcccgggcccggccggcc

SEQ ID NO: 6313 - DNA, 31 bp, Homo sapiens
  chr18:39172255-39172286
  hyper
ttttgccaccaggacccgggataggccaaga

SEQ ID NO: 6314 - DNA, 54 bp, Homo sapiens
  chr18:42258997-42259051
  hyper
agcctatcacagctcacgtctgggcgcgcagtacccccccgacactgctcctgt

SEQ ID NO: 6315 - DNA, 58 bp, Homo sapiens
  chr18:42259072-42259130
  hyper
tgagcccaggaatacgcgcggagcccgcggcgatccccgcggccgctcagtcttcgcg

SEQ ID NO: 6316 - DNA, 39 bp, Homo sapiens
  chr18:42259996-42260035
  hyper
tgtgcgagtgtgtgtgcgtgcgggcgtgtgtgtgtgaat

SEQ ID NO: 6317 - DNA, 106 bp, Homo sapiens
  chr18:42260145-42260251
  hyper
ggccggccggggcgcccgccgctcgccgccgcctccgcgcgcccgggggccccggcgccccccgagctagggcggccagctcgcggctcgccgtttgacagatgct

SEQ ID NO: 6318 - DNA, 31 bp, Homo sapiens
  chr18:42260319-42260350
  hyper
cgagcgccggggccagcggagccggagccgc

SEQ ID NO: 6319 - DNA, 40 bp, Homo sapiens
  chr18:42260531-42260571
  hyper
cgagggggcgggatgccggtccgggcgaggttgcaggaga

SEQ ID NO: 6320 - DNA, 55 bp, Homo sapiens
  chr18:43547677-43547732
  hyper
aaggaagaaaccctgacgcccatcggggtgtgcacttcggcgtcctcttttgtaa

SEQ ID NO: 6321 - DNA, 31 bp, Homo sapiens
  chr18:43547741-43547772
  hyper
atcacacctgccttttcggatgtcatgagaa

SEQ ID NO: 6322 - DNA, 31 bp, Homo sapiens
  chr18:43547789-43547820
  hyper
gaaaggtgcctggtagcggcaggcatgtcgg

SEQ ID NO: 6323 - DNA, 34 bp, Homo sapiens
  chr18:43924113-43924147
  hyper
cacctaggaaaggaagcggcggctgctgactcag

SEQ ID NO: 6324 - DNA, 31 bp, Homo sapiens
  chr18:45534405-45534436
  hyper
catctcggccgggagtcgggtctctgccagc

SEQ ID NO: 6325 - DNA, 82 bp, Homo sapiens
  chr18:45662552-45662634
  hyper
gcgctccagtgggtgacgccggcccgggcgcccgcgggagtggggacgcacggggtcagtccttttgcgccacccacaccgg

SEQ ID NO: 6326 - DNA, 39 bp, Homo sapiens
  chr18:45663251-45663290
  hyper
gcccgcagcgctctcccggccgcccggaagggcttcctc

SEQ ID NO: 6327 - DNA, 107 bp, Homo sapiens
  chr18:45687996-45688103
  hyper
ccggccacaagcgccccggactccgtgcctgcccgcagcccccttcctgcagcgttcactcggctgcccggcccggcccggcccgggcgccccgccccagccccgcc

SEQ ID NO: 6328 - DNA, 83 bp, Homo sapiens
  chr18:45688153-45688236
  hyper
ctctccctccactctgcgcccccgcggcctctctctcctcctgcgggagccatcgccctcctcccgggcgcccctccccgcgg

SEQ ID NO: 6329 - DNA, 31 bp, Homo sapiens
  chr18:45935490-45935521
  hyper
cccgcccgccgccccgcgacctcccgaactg

SEQ ID NO: 6330 - DNA, 39 bp, Homo sapiens
  chr18:45935602-45935641
  hyper
gcgccgccggccctgcgcgcctcccgcacttggctccgg

SEQ ID NO: 6331 - DNA, 103 bp, Homo sapiens
  chr18:45935847-45935950
  hyper
gtcagccccgcgccccgcgccccgcgcccgcgccgccggctcggggggcgcacagggctaaagggcccggatgtgtgcggtcgcctgtcgctcgcgcccgccc

SEQ ID NO: 6332 - DNA, 141 bp, Homo sapiens
  chr18:45936025-45936166
  hyper
aactgtggcgagtgggcggcgcggcggggggcgcccgggactggcggaggctgcgggcgggagtcaggacccgacgcggaggcggagtgggggggccgggcaccgccaccaaccgctcggggctccgcgtcttttctcttt

SEQ ID NO: 6333 - DNA, 471 bp, Homo sapiens
  chr18:45936197-45936668
  hyper
tttaaagggacagccccggcagaggcgagggggccaggcggccgccgtttctccggtctcctgacgccctctgcggcccggccggacccgcccgcacccccagcgcaggcttgggaccgccgggtatttttaggtccacacccgacccggggcagcggtgcggcagagatgggctctgccgacccggggcagcggtgcggcagagatgggctctgccgccccggcgcacggctatttttacagagtccgatgggggaggaaataaaacaactcggcaactgcttttctacccgaaagtcgggagcaaggagtgggggcgagaagttaagtttcccaaatgctctcggcactccagcgagcgcaccaagacgcctagccagcacctgaaaccgcaagcttgccgcaccccggggcgccgaatctcagcgggcaatcgcgctcggcggcgctgcggcccggagtccccacccc

SEQ ID NO: 6334 - DNA, 31 bp, Homo sapiens
  chr18:45936826-45936857
  hyper
ccgtcccgccgggccccgccccctcggagtc

SEQ ID NO: 6335 - DNA, 44 bp, Homo sapiens
  chr18:45936897-45936941
  hyper
gcggtgctggaagccacgaagggccagtgcgaggggaggaggaa

SEQ ID NO: 6336 - DNA, 52 bp, Homo sapiens
  chr18:45936946-45936998
  hyper
ctggccctggagagggcgtgagcgttctcgggcgaggcgacacttgggcaga

SEQ ID NO: 6337 - DNA, 41 bp, Homo sapiens
  chr18:45937002-45937043
  hyper
ccctccagctacgggccggggaaactcgagctggctttgcc

SEQ ID NO: 6338 - DNA, 62 bp, Homo sapiens
  chr18:45937125-45937187
  hyper
caccctcgcacgtcagcgggtcctctccggggctcctccctcagaagcgggaaagtttgtcg

SEQ ID NO: 6339 - DNA, 274 bp, Homo sapiens
  chr18:46065115-46065389
  hyper
ctgtaagcctggactgcgcctaagcccccagttctcccaccgcagaggcccccacccagggctgcgccagcgccgtggggtcgctgggcggcgggttttggcgtcgctagactgggctgtcttggcagctaaggcgacatcccgagcgtcctggggccaccctgctctccagggcccgccatcctggaaaagaaaggcgaactacattacccagcaggcctccagccgccctctttcctttcaagtctttgcacgtggccggaggggagggcgg

SEQ ID NO: 6340 - DNA, 52 bp, Homo sapiens
  chr18:46065663-46065715
  hyper
gcggccagaggaaccccgaggtgagcatctcctcgcccgtcctcctcttata

SEQ ID NO: 6341 - DNA, 96 bp, Homo sapiens
  chr18:46065718-46065814
  hyper
atctcagcttgctgatcgattcggggacccgggaggagggctgcgtgacgtgggcgtgcttatagataaatccgggaaaaccgccccaaacaatca

SEQ ID NO: 6342 - DNA, 87 bp, Homo sapiens
  chr18:46065840-46065927
  hyper
gggccagcggggtgtccgcacccatctaccatcccctcctccccctcggtggggaactgcactccacagtgtcgccccctccctggg

SEQ ID NO: 6343 - DNA, 55 bp, Homo sapiens
  chr18:46065928-46065983
  hyper
ttgtcccattccctgccgggttccccgccccgcggggtgtcgtggccctggagct

SEQ ID NO: 6344 - DNA, 131 bp, Homo sapiens
  chr18:46066028-46066159
  hyper
ctcgctttggagctgcgcggtgtagccgctgtcatgtgccgggttccgacctgggaggaggaaaagagcgagcgcgattcctctcccttttgttttgaagcccgcatttgctgcatcgagcagttggttta

SEQ ID NO: 6345 - DNA, 234 bp, Homo sapiens
  chr18:46066173-46066407
  hyper
tgcagctgttcagaccgcgctccgccgaggtagggagcccgtctcggggtggcgtttgggggccgggggctgcggcactcggggctgcgggagggaccccgagagtgtgtcgccacgccgcccctcccttccccggtgactgattgtgtctgtggcagcgggcgtgtgtgagtgtgcgcgcccgtccccgcgggctcggggatgtctgtggatggctgtcgtctagacagggcg

SEQ ID NO: 6346 - DNA, 70 bp, Homo sapiens
  chr18:46066469-46066539
  hyper
gaggaagaaaccaaatcggtggacccgttgcggtctcccctttggttattcccaacggttgtggttctgt

SEQ ID NO: 6347 - DNA, 71 bp, Homo sapiens
  chr18:46066545-46066616
  hyper
tttttattattcctgtcgctgcggtgcaatcgggcctggggaatagatacgcccggcggagaggggttcac

SEQ ID NO: 6348 - DNA, 62 bp, Homo sapiens
  chr18:46066632-46066694
  hyper
agccacctctgggtggcgagtgacccgagaggccgtggggtgggctccggctcgggttcatc

SEQ ID NO: 6349 - DNA, 86 bp, Homo sapiens
  chr18:46066771-46066857
  hyper
cgaaggtctggggcctcggagggccgcgtgccggtgcctggatgtggccggagggggcgtccgggacaccgcgcgcctgagccgag

SEQ ID NO: 6350 - DNA, 54 bp, Homo sapiens
  chr18:46066902-46066956
  hyper
gagcccgttatctgggcggcgttggctctgtttggttccgcggagttttcaggg

SEQ ID NO: 6351 - DNA, 82 bp, Homo sapiens
  chr18:46067001-46067083
  hyper
ggggagggctgactggcggcgccgcgtgcgtctccaccccgaggagtgaggcgtcgcctcccccgcccggctgtttgtgtgt

SEQ ID NO: 6352 - DNA, 36 bp, Homo sapiens
  chr18:46067208-46067244
  hyper
gtgtccccgcgcgcgcgcgcccgagttacttggaga

SEQ ID NO: 6353 - DNA, 124 bp, Homo sapiens
  chr18:46067437-46067561
  hyper
cacgctggggtgaccccgcaccgaggcgttctatgggtgtgcgtgcccgcgctcgccgccgctgccttcgcagaccggggagagagtcagcgactgccaaccgcagccccggctcttcagtctg

SEQ ID NO: 6354 - DNA, 153 bp, Homo sapiens
  chr18:46067570-46067723
  hyper
ggagcccaagcccagcgcgccccagcccggcccaggccgccgcccgcccggcgctgtgtctctgcggcccgaggattatcccccagtccaggggcccgcgcgaccaaggaggaagccgctggagccgccggctcggccgcggctagagcctcc

SEQ ID NO: 6355 - DNA, 38 bp, Homo sapiens
  chr18:46186358-46186396
  hyper
agtctgtcacctgtgacgtgtgtcgattgtgtgactgc

SEQ ID NO: 6356 - DNA, 31 bp, Homo sapiens
  chr18:46186410-46186441
  hyper
gagcactggttgccaccgtgactccaccacc

SEQ ID NO: 6357 - DNA, 31 bp, Homo sapiens
  chr18:46476386-46476417
  hyper
cagcctgcagtccaggcggccgggcagcagg

SEQ ID NO: 6358 - DNA, 61 bp, Homo sapiens
  chr18:47339427-47339488
  hyper
ccctgaccaccgaggccgagcggcgggctcctgtgcgcagctgccccgcagcaggcgcccg

SEQ ID NO: 6359 - DNA, 31 bp, Homo sapiens
  chr18:47339536-47339567
  hyper
tggggtcactgttaggcgaagaaaggaatga

SEQ ID NO: 6360 - DNA, 49 bp, Homo sapiens
  chr18:47339605-47339654
  hyper
aaacaggaaattgcaccgaaatcgctgtcgctagcgccttacaagtaag

SEQ ID NO: 6361 - DNA, 97 bp, Homo sapiens
  chr18:47339667-47339764
  hyper
acccaaacaagcctttcgggctgggtttttatcacgtccgctccaaaaccgaggaggttgagtgaacttcaccccacgaccccgactctccgcggcg

SEQ ID NO: 6362 - DNA, 41 bp, Homo sapiens
  chr18:47720920-47720961
  hyper
gggtggccggtcagtgcgggcgttcccggaaccgccaaact

SEQ ID NO: 6363 - DNA, 398 bp, Homo sapiens
  chr18:47720984-47721382
  hyper
actccgaggacagtgacgaggaggacaccgcggaggggggtctcccgtcacctcccgcctccagtagccgagggagaaggcgaccctgagtactaggtggccccgagcgcgccaccccggccccggggcgcctccctcgcggccgcgctcacctggctgtagagctcgcccaccgacatggcccgggccgggcggggctcgggccccggctcctggctgccccgcggctctcagtccgcggctggcccgcctggcgccatgttcccgggctggcctggagtttctcgatcttctcgctcttctccgacctgccccgccggcttcccgcaggcgccgcggccggctcgctcccggcggcgcgacctttactcccgccgcggcggcgcagctacggccgg

SEQ ID NO: 6364 - DNA, 61 bp, Homo sapiens
  chr18:47721459-47721520
  hyper
gcgaggagggaggacccgctcgcgtcagagcggacggcccgtgcgccgccgcgcctctgag

SEQ ID NO: 6365 - DNA, 60 bp, Homo sapiens
  chr18:47721676-47721736
  hyper
ccgcacctgccctgccgcgctccgcttccacccgcaccgggccccgcggagtccggcatg

SEQ ID NO: 6366 - DNA, 31 bp, Homo sapiens
  chr18:47792639-47792670
  hyper
ggccaggcctggagtgcggagagatggagaa

SEQ ID NO: 6367 - DNA, 31 bp, Homo sapiens
  chr18:47792691-47792722
  hyper
tatcctgtgcttaccacgatcaccactttgg

SEQ ID NO: 6368 - DNA, 99 bp, Homo sapiens
  chr18:47792726-47792825
  hyper
ggggcccttaacctcccgctgtacggtgccaaaccgctggctgtacattttcgagtccccttcgggacgggggcggcgtccgccgcgtttcccccaacc

SEQ ID NO: 6369 - DNA, 68 bp, Homo sapiens
  chr18:47792911-47792979
  hyper
cgggtcgggcggaagtcggtctggtcaccatgggggccgcagacgcctgcactcgggacttcctcttc

SEQ ID NO: 6370 - DNA, 31 bp, Homo sapiens
  chr18:52495743-52495774
  hyper
cggccttggacccatccggagccacaggttg

SEQ ID NO: 6371 - DNA, 40 bp, Homo sapiens
  chr18:52495779-52495819
  hyper
gataagtagctgtccccgtgctcatcgccctgtggagcag

SEQ ID NO: 6372 - DNA, 41 bp, Homo sapiens
  chr18:52495821-52495862
  hyper
cctgtctccttgctgacggtggagcccgggagttccagggc

SEQ ID NO: 6373 - DNA, 128 bp, Homo sapiens
  chr18:52495892-52496020
  hyper
ctgacacctgctctcccggcaaggaaacttcgcaggctggtgagttgggaaggcgggctgctgctgctggaacgcgttcccacccacccgggtgctgcagcgccggcctgcgccgtgggaagtgaggc

SEQ ID NO: 6374 - DNA, 31 bp, Homo sapiens
  chr18:53254902-53254933
  hyper
ctctggagtgaaaacacgtccaaagggggag

SEQ ID NO: 6375 - DNA, 80 bp, Homo sapiens
  chr18:53255102-53255182
  hyper
agggggagggaagcggcgggaggggaaggggtgtctcttctgggagcgccgggcgccgggagcccgcggcgcgggaggcg

SEQ ID NO: 6376 - DNA, 102 bp, Homo sapiens
  chr18:53255284-53255386
  hyper
ggggctctccgtgcaccgccggcgccgaggcggcgttcatgtctaaccgccgccgccaccgccgccgcctgctcctgcgcccgctcccgcgcctgctgcctc

SEQ ID NO: 6377 - DNA, 31 bp, Homo sapiens
  chr18:55102712-55102743
  hyper
tccctccctccctccccgtcccctcccctct

SEQ ID NO: 6378 - DNA, 50 bp, Homo sapiens
  chr18:55469741-55469791
  hyper
tcagatacgtttggcccgcaagtccttttcggacacgttggcatctgctc

SEQ ID NO: 6379 - DNA, 56 bp, Homo sapiens
  chr18:55469798-55469854
  hyper
gcgccccagcaggacccggtcaccggggtcttccagaggggcggtagccaccgcac

SEQ ID NO: 6380 - DNA, 55 bp, Homo sapiens
  chr18:55469976-55470031
  hyper
accccacggaactctccgcagcgctgcctgcccagccggccgtgtctcgccgtcc

SEQ ID NO: 6381 - DNA, 58 bp, Homo sapiens
  chr18:55470276-55470334
  hyper
ctcggagcgctcgctgcgcacctggccgctgccgccgcccgcccggccccagccctgg

SEQ ID NO: 6382 - DNA, 37 bp, Homo sapiens
  chr18:55470591-55470628
  hyper
gggctggggctggaggcgggctcggccttctcccctc

SEQ ID NO: 6383 - DNA, 31 bp, Homo sapiens
  chr18:56976091-56976122
  hyper
tcgtcagtgcggggacgcgggcgggagggta

SEQ ID NO: 6384 - DNA, 16 bp, Homo sapiens
  chr18:59001327-59001343
  hyper
aggtggaggacgtggc

SEQ ID NO: 6385 - DNA, 44 bp, Homo sapiens
  chr18:59500716-59500760
  hyper
tgatggttttaattgtcgaaactcctctgcgtttccctctaatg

SEQ ID NO: 6386 - DNA, 51 bp, Homo sapiens
  chr18:59500828-59500879
  hyper
ctaacataactgaacacgagggccgtctgttagtctcgtctgtttgttttt

SEQ ID NO: 6387 - DNA, 40 bp, Homo sapiens
  chr18:59992690-59992730
  hyper
cggcccgacgcctcctcgggagccccgggaagggccgggg

SEQ ID NO: 6388 - DNA, 114 bp, Homo sapiens
  chr18:59992967-59993081
  hyper
ttgagcacctactaagcgcttgcgccgggcggtgccgcgggagacagcgccgtgggcacctcacttgcggcagataaccgttcccgatacgatttctcccgggtggcctccgtc

SEQ ID NO: 6389 - DNA, 69 bp, Homo sapiens
  chr18:60189546-60189615
  hyper
tcggccggccgggtcccgctgcgcacctcccggccgcgcgtccccacctgcgcacggtgcctccagcct

SEQ ID NO: 6390 - DNA, 79 bp, Homo sapiens
  chr18:60189626-60189705
  hyper
cggcccgggatcgcggcgccggggccgcaaaccggggccgcaaaccagcgccgccacccgcgtccggacccagtcccct

SEQ ID NO: 6391 - DNA, 88 bp, Homo sapiens
  chr18:60189824-60189912
  hyper
gagaaacccctgctcccgggacgcgttcactccggccgcgcaggcagcccgggcaccactggcggaggcggggcggcagctggcaagc

SEQ ID NO: 6392 - DNA, 79 bp, Homo sapiens
  chr18:60190084-60190163
  hyper
cgcacggaagccgccgagagggaggcggccggccagcagttgggcgtggcttcctggagaaaggcggccccccaggggg

SEQ ID NO: 6393 - DNA, 188 bp, Homo sapiens
  chr18:60190165-60190353
  hyper
gggagagcgacgtcaccgtcgattcgcggtgctgattggcggaggtgaggtgcgcggagcccgcaagcttctccgcccggcccggctgctccacctcctcacccagccgctccgtcctcaccggctcgcgagggaacagctcaggcaccgccgccccggctcagcgcggacggcggagagagggaggc

SEQ ID NO: 6394 - DNA, 57 bp, Homo sapiens
  chr18:60190443-60190500
  hyper
cgccccgcccccagcccgggaagacgacgccagcgaccccgccggccggccaccgcc

SEQ ID NO: 6395 - DNA, 204 bp, Homo sapiens
  chr18:60190610-60190814
  hyper
ccctcccgcccgcccccgctcgcatgtctgcgccgccctagccgaggatgctgaggatgaagctgccgctgaagccaacgcaccccgcggagccgccgcccgaggcggaggagcccgaggcggacgcgcggccgggcgcgaaggcgccttcgcgccgccgccgcgactgccgccccccgccgccgccgccgccgcccgcgggcc

SEQ ID NO: 6396 - DNA, 518 bp, Homo sapiens
  chr18:60190846-60191364
  hyper
ccccggggactcgggccgcctgttgctggtggagcggcggcgggggcgggtatgccgggcggcggcggggggccctcggcggcgctgcgcgagcaggagcgggtatacgagtggttcgggctggtgctgggctcggcgcagcgcctggagttcatgtgcgggctgctggacctgtgcaacccgctggagctgcgcttccttggctcgtgcctggaggacctggcgcgcaaggactaccactacctgcgcgactcggaggccaaggccaacggcctctcggacccggggccgctggccgacttccgagagcccgcggtgcgctcgcgcctcatcgtctacctggcgctgctgggctcggagaaccgggaggccgctggccgtctgcaccgcctgctaccccaggtggactcggtgctcaaaagcctgcgcgcggcccggggcgagggctcgcggggcggcgcggaggacgagcgcggcgaggacggcgacggcgagcaggacgccgagaaggacggctc

SEQ ID NO: 6397 - DNA, 60 bp, Homo sapiens
  chr18:60191440-60191500
  hyper
ctcttcaccatggcctcgctgcacccggctttctccttccaccagcgggtcaccctgagg

SEQ ID NO: 6398 - DNA, 193 bp, Homo sapiens
  chr18:60191503-60191696
  hyper
cacttggagaggctccgcgccgcgctccgcgggggccccgaggacgcggaggtggaggtagagccgtgcaagtttgccggccccagggcccaggtaaggcgcacggagcctccctggactcgcggtgcgatcgctgccccggcggcctccccggcctcgctctcggacgccccttgcccgagccccagcccgg

SEQ ID NO: 6399 - DNA, 96 bp, Homo sapiens
  chr18:60191978-60192074
  hyper
ctgtgtgagagccagccgcagtgagccccaggcagcgccgtccttccccgcctgcctggccggggctccgcctcccgtctccgggctctgccgggc

SEQ ID NO: 6400 - DNA, 31 bp, Homo sapiens
  chr18:60193831-60193862
  hyper
gctgttctcggcctcccgccgccgccgccgc

SEQ ID NO: 6401 - DNA, 92 bp, Homo sapiens
  chr18:60194121-60194213
  hyper
ccaggctttgggctagcgccggagacttccaggcggactcgagaaccacgtggatgctgcgctgggccgtactgggccgtggcgataaccct

SEQ ID NO: 6402 - DNA, 117 bp, Homo sapiens
  chr18:60382938-60383055
  hyper
cggtacagcgactccccgagctcggcagggaggaccgagcttcggctccggcggccgccgctgcggcagcagcagcagcagcggcggccgcggcggctctggcggcggcggccgggg

SEQ ID NO: 6403 - DNA, 55 bp, Homo sapiens
  chr18:60383085-60383140
  hyper
cggcggccccgagcggcgggaacggcagcggcagcggggcgcgggaagaggcccc

SEQ ID NO: 6404 - DNA, 464 bp, Homo sapiens
  chr18:60383150-60383614
  hyper
ccgccggggccgctgccgggcagagcggggggtgccgggcgcaggaggcggcgcggggcgccccagcccattgccggcggggctgcccccgtacccggggccggcggcggcgccaactccctcctgctgaggagagggcggctgaagaggaatctgtccgcggccgccgcggccgcctcctcgtcgtcgtcgtcctcggccgctgctgcctcgcactcccccggcgctgccggcctccccgcctcctgctcggcctcggcgtcgctgtgcacccggagcctggacaggaagacgctgcttctgaagcaccggcagacgctgcagctgcagccgtcggaccgggactgggtgaggcaccagctccagcgcggctgcgtgcacgtcttcgaccgccacatggcctcgacctacctgcgcccggtgctctgcacactggacaccacggccggcgaggtggccgcccg

SEQ ID NO: 6405 - DNA, 57 bp, Homo sapiens
  chr18:60383661-60383718
  hyper
gccaggggcccggagccgccgccgcccgggagcccgctgaaccgccccccgaggccg

SEQ ID NO: 6406 - DNA, 159 bp, Homo sapiens
  chr18:60384006-60384165
  hyper
acccctacagcagcggcggcggctcctcgtcgtcgtcggaagagctcgaggccgacgcagcctcggccccgacgggggtcccgggccagccccgccgtcccggccaccccgcgcagcccctcccgcttccccagacggcttcctcgcctcagccgcagc

SEQ ID NO: 6407 - DNA, 31 bp, Homo sapiens
  chr18:60985923-60985954
  hyper
ggccaacggcacctctcgccccagctcccac

SEQ ID NO: 6408 - DNA, 31 bp, Homo sapiens
  chr18:60986009-60986040
  hyper
gctttgcattcttggacgagggggtgtcttc

SEQ ID NO: 6409 - DNA, 31 bp, Homo sapiens
  chr18:61604083-61604114
  hyper
aggaaggaactccccccggagttgggggggg

SEQ ID NO: 6410 - DNA, 72 bp, Homo sapiens
  chr18:61604118-61604190
  hyper
cctagggatgcctcaccggccccatctctccacggagctacgggtagcatcgcccatcgctcctacacccca

SEQ ID NO: 6411 - DNA, 80 bp, Homo sapiens
  chr18:67955796-67955876
  hyper
acagggggacagggaccgcagccgccaaatccgcggggccggggaacgaggagactttcctttccgcgttagccggggcc

SEQ ID NO: 6412 - DNA, 31 bp, Homo sapiens
  chr18:67955915-67955946
  hyper
cagggactctgggggccggaggagcggcctc

SEQ ID NO: 6413 - DNA, 60 bp, Homo sapiens
  chr18:67956753-67956813
  hyper
cgcgaggcctgggcagcggcgcggggcctgcgcggctctgcgccccggccgggtccctcc

SEQ ID NO: 6414 - DNA, 93 bp, Homo sapiens
  chr18:67956838-67956931
  hyper
ggctcggggtcggggcgcggcgaggccgcaggcgcgagggcgggcctggggcgcggcgctgggactcggggacgcccccgccccaccgcgagg

SEQ ID NO: 6415 - DNA, 35 bp, Homo sapiens
  chr18:70535605-70535640
  hyper
agccggatcctcgtgccggacggaaggcgtggaag

SEQ ID NO: 6416 - DNA, 42 bp, Homo sapiens
  chr18:71958660-71958702
  hyper
ctccccaggtgtgcacgcgcaggtgtgcggactcgaggagag

SEQ ID NO: 6417 - DNA, 31 bp, Homo sapiens
  chr18:71958753-71958784
  hyper
tgagcgcgcaggtgtgcggacttggggcggt

SEQ ID NO: 6418 - DNA, 62 bp, Homo sapiens
  chr18:72124497-72124559
  hyper
cagccctgcccgcgcccgggccccaccgccgcccgcgccccgagttccgcactcgcgtagct

SEQ ID NO: 6419 - DNA, 61 bp, Homo sapiens
  chr18:74202734-74202795
  hyper
tgctggttaagtcacacgacgagcggaccggagggtccgagggctccgtcctttgttacgc

SEQ ID NO: 6420 - DNA, 62 bp, Homo sapiens
  chr18:74202913-74202975
  hyper
gaacacaaaacccccacgcagcagcccctcgcgaggcgccccaagcccgggtgcccaccgcc

SEQ ID NO: 6421 - DNA, 50 bp, Homo sapiens
  chr18:74203666-74203716
  hyper
ccccagcccagagggccgccctgcgctctcgcccccggcccctggccgcg

SEQ ID NO: 6422 - DNA, 85 bp, Homo sapiens
  chr18:74203722-74203807
  hyper
ccaggtcccccagtagcgccccagcgccgctgctgctcagacacaccgaaataggaatgatttaatccaacgacacctcccaggg

SEQ ID NO: 6423 - DNA, 48 bp, Homo sapiens
  chr18:74204048-74204096
  hyper
tccctgcaggggtctccggggaggtagtgggcacgtgggtccttaacc

SEQ ID NO: 6424 - DNA, 31 bp, Homo sapiens
  chr18:74204103-74204134
  hyper
tgcatcatccccatcccggtgggtacagaag

SEQ ID NO: 6425 - DNA, 31 bp, Homo sapiens
  chr18:74204793-74204824
  hyper
tgcgtgcccatgtagccgaactgactcgaat

SEQ ID NO: 6426 - DNA, 43 bp, Homo sapiens
  chr18:74206781-74206824
  hyper
ttccgcgctcccaccccggcccccaccccgcccctccactgcg

SEQ ID NO: 6427 - DNA, 60 bp, Homo sapiens
  chr18:74207201-74207261
  hyper
ccgaccgcgccagctgcgcccgggcgcgggggacgcgcgagggcgcgcggggcccgccac

SEQ ID NO: 6428 - DNA, 31 bp, Homo sapiens
  chr18:74207277-74207308
  hyper
tcgcgccgcccgcgcgcgccccggacgcgtc

SEQ ID NO: 6429 - DNA, 37 bp, Homo sapiens
  chr18:74207312-74207349
  hyper
ccgcgggggccccggcgcgagccgggctcggggggct

SEQ ID NO: 6430 - DNA, 31 bp, Homo sapiens
  chr18:77159935-77159966
  hyper
ctttcccgaggaggcccggattgaaaacttc

SEQ ID NO: 6431 - DNA, 100 bp, Homo sapiens
  chr18:77159979-77160079
  hyper
cttaaaaaaaaaattccgtcgccctgggcgcagccttaggtacctggtgccgctcgtggggtcccgacgcccctacccccgggtccggaggagcctgcgc

SEQ ID NO: 6432 - DNA, 65 bp, Homo sapiens
  chr18:77160677-77160742
  hyper
ggtcctgggggaagagcgcagcccggacacgggcgtggacgaagtggtcccggacagagggctgg

SEQ ID NO: 6433 - DNA, 31 bp, Homo sapiens
  chr18:77710900-77710931
  hyper
agccagtccaggccctcggcctccatcgcag

SEQ ID NO: 6434 - DNA, 36 bp, Homo sapiens
  chr18:77712072-77712108
  hyper
ccggggtctcgggaaacggagcgccccccgcgggtc

SEQ ID NO: 6435 - DNA, 36 bp, Homo sapiens
  chr18:77724458-77724494
  hyper
ggccgtcccggggcctcggctcggctcggctcggga

SEQ ID NO: 6436 - DNA, 136 bp, Homo sapiens
  chr18:77794467-77794603
  hyper
tgctcgctccgggtcccggcgccgcgccatgtgggctgcggcgggcgggctgtggcgctcccgcgcgggtctccgggccctgttccgtagccgcgatgctgcgctatttccaggctgcgagcggggacttcactgc

SEQ ID NO: 6437 - DNA, 31 bp, Homo sapiens
  chr18:77867027-77867058
  hyper
ctttaggcaggggccccggggggcctgtggg

SEQ ID NO: 6438 - DNA, 67 bp, Homo sapiens
  chr19:290868-290935
  hyper
gcgcccaccccaggggcggaggcgcggacgtcctgccggggtaacccgcggccgcccccacctcccg

SEQ ID NO: 6439 - DNA, 44 bp, Homo sapiens
  chr19:290968-291012
  hyper
gcgggatggaggcgcgcgcgcggcccctccgcacagacttcctg

SEQ ID NO: 6440 - DNA, 31 bp, Homo sapiens
  chr19:452244-452275
  hyper
ttcctgcgtaggtgtgcgtttctccgtttca

SEQ ID NO: 6441 - DNA, 170 bp, Homo sapiens
  chr19:460129-460299
  hyper
cttcccgcacccccaccgcaggccagcgtctcgggccccgtctgtcattcgtgaacagctgtccggggggctccggtggcagagacgccccggccgctcgccgctctcggcctcgcccgcccagtccgagtggggggcggtgcacctgcgcatgcgcgcccctcccccgc

SEQ ID NO: 6442 - DNA, 36 bp, Homo sapiens
  chr19:460568-460604
  hyper
tcggggtgtagccagccgtgcgcgggtttgtggatg

SEQ ID NO: 6443 - DNA, 75 bp, Homo sapiens
  chr19:460631-460706
  hyper
gcggcggcggcgtccccggaccccgccgccccccgcccgccccgcgacccccgcgaccccgcgccccgacagcgg

SEQ ID NO: 6444 - DNA, 92 bp, Homo sapiens
  chr19:460856-460948
  hyper
ccgcggcccaggaagccgcccggggccgcgaacttccactgcggcattcggggcagcaacgcgcagaaggtggtgggcgcctcgggctcggg

SEQ ID NO: 6445 - DNA, 35 bp, Homo sapiens
  chr19:461084-461119
  hyper
gcccggtgatgtcatccgcccggcccagcgcgcag

SEQ ID NO: 6446 - DNA, 68 bp, Homo sapiens
  chr19:461499-461567
  hyper
gtggggaaactgaggcgcggggaggggaaggggcgcggccgagggctcacagacgaagctcaaaccca

SEQ ID NO: 6447 - DNA, 37 bp, Homo sapiens
  chr19:461594-461631
  hyper
ggggcggggctaggagcggagccgggcccctgctctg

SEQ ID NO: 6448 - DNA, 31 bp, Homo sapiens
  chr19:461907-461938
  hyper
tcccctgcacctgccccgccccaagcagggc

SEQ ID NO: 6449 - DNA, 31 bp, Homo sapiens
  chr19:462004-462035
  hyper
ctgcccggagcccgatcgataattcagggga

SEQ ID NO: 6450 - DNA, 41 bp, Homo sapiens
  chr19:507105-507146
  hyper
gggcaggtccagccccgcgcatgctccgtcaggcttctctg

SEQ ID NO: 6451 - DNA, 48 bp, Homo sapiens
  chr19:603684-603732
  hyper
cctggtgttgaacttccgcaccggcattgtgatcgaggacaacacgga

SEQ ID NO: 6452 - DNA, 31 bp, Homo sapiens
  chr19:603815-603846
  hyper
actacatcttccttatcgtggagaagggcat

SEQ ID NO: 6453 - DNA, 99 bp, Homo sapiens
  chr19:603850-603949
  hyper
tccgaggtctacaagacggcacgcgccctgcgcatcgtgcgcttcaccaagatcctcagcctcctgcggctgctgcgcctctcacgcctgatccgctac

SEQ ID NO: 6454 - DNA, 90 bp, Homo sapiens
  chr19:661585-661675
  hyper
ctcctgggcctggccccgctctcccgccatgccccaactctagcactcgctcctcctctgtgacccagagacaggcggcttctcctgact

SEQ ID NO: 6455 - DNA, 31 bp, Homo sapiens
  chr19:661689-661720
  hyper
cctgggtctctactcccggggaactgcactg

SEQ ID NO: 6456 - DNA, 63 bp, Homo sapiens
  chr19:661730-661793
  hyper
gcttggacttctcttacgggtcaaagcgtagcaacagccgggcggctacgtacacagcacagt

SEQ ID NO: 6457 - DNA, 31 bp, Homo sapiens
  chr19:661845-661876
  hyper
acccctccacctcctgcggctgctcccctca

SEQ ID NO: 6458 - DNA, 31 bp, Homo sapiens
  chr19:663759-663790
  hyper
gcaggcattccctcagcgctgcggaatacag

SEQ ID NO: 6459 - DNA, 48 bp, Homo sapiens
  chr19:676321-676369
  hyper
gccccgccccgcgccccgccccgcccgcggcccgcgggacctttatag

SEQ ID NO: 6460 - DNA, 31 bp, Homo sapiens
  chr19:676379-676410
  hyper
ccgcgcgctgggaagtcggtgccgctgccgt

SEQ ID NO: 6461 - DNA, 132 bp, Homo sapiens
  chr19:680399-680531
  hyper
gcgccacctaccgcgacgagtgcgagctgcgcgccgcgcgctgccgcggccacccggacctgagcgtcatgtaccggggccgctgccgcagtacgtgggggcgtggtctgtggaggggcggggcgggaccta

SEQ ID NO: 6462 - DNA, 27 bp, Homo sapiens
  chr19:680552-680579
  hyper
cgaggctgctgccgcagtaggcggggg

SEQ ID NO: 6463 - DNA, 182 bp, Homo sapiens
  chr19:813431-813613
  hyper
aggtgcccggggctggcgtcgtcgggcagccccaggccgcggccctccaggctcttctgcttccactcgctgatgagctgcttggagcgcgaggcgtccagcggcacgtggatggtcatgtggcggcgcgcggggtcgtccagcgagggcgcgctggccctgggcagcgtgtggctgaaggt

SEQ ID NO: 6464 - DNA, 234 bp, Homo sapiens
  chr19:813626-813860
  hyper
ttggccatggggctgcgcggggccagcaggtccacgtccacgctggcgcgcttcaggctgcccagcgaggtcttctcgcgggccacgggccggggcgcgccctccagccgccctgggggccccagctcgtcggtgctcaccgacttattctgctgataaaccgagtcgtggccccgctgcgtcagggcccgcagcgcgtccttggcgggggccggggccgcgggcttctctgca

SEQ ID NO: 6465 - DNA, 31 bp, Homo sapiens
  chr19:814390-814421
  hyper
ccctgggaacccatgccgacccccatcagaa

SEQ ID NO: 6466 - DNA, 133 bp, Homo sapiens
  chr19:814428-814561
  hyper
ctcaccaggtaggcagcgatgcccgccccgatgaggaagccggcatacacgtccacagggtggctgcggtactgcgtgatctgcgtgagcccgcatacgcccgcggcgatggcaaaggcgaagaccaggatgg

SEQ ID NO: 6467 - DNA, 47 bp, Homo sapiens
  chr19:942339-942386
  hyper
cggtggcacccaggggcgtcacccacgagggacgcttgactcaaggt

SEQ ID NO: 6468 - DNA, 37 bp, Homo sapiens
  chr19:1041003-1041040
  hyper
gggtggagcctggtgacgaaagcgttaagcccaaact

SEQ ID NO: 6469 - DNA, 80 bp, Homo sapiens
  chr19:1173280-1173360
  hyper
tcgggccatctcagcccgctaccctccctcccgcctgtccctggaagccgggtttgaatgcgacccgcactcccaccccc

SEQ ID NO: 6470 - DNA, 39 bp, Homo sapiens
  chr19:1173362-1173401
  hyper
cacgctctgcagactccgcccagacggccccggggtcac

SEQ ID NO: 6471 - DNA, 31 bp, Homo sapiens
  chr19:1285674-1285705
  hyper
cgggccacgcggatgccggcggggggcgcgc

SEQ ID NO: 6472 - DNA, 31 bp, Homo sapiens
  chr19:1401652-1401683
  hyper
gggtcggggccccggccgccccctccccaag

SEQ ID NO: 6473 - DNA, 36 bp, Homo sapiens
  chr19:1401687-1401723
  hyper
ctcggtgccccctctgcggagcgggcaccgcagccc

SEQ ID NO: 6474 - DNA, 31 bp, Homo sapiens
  chr19:1444963-1444994
  hyper
gcgcttctcacatccccgcggcctcccccct

SEQ ID NO: 6475 - DNA, 187 bp, Homo sapiens
  chr19:1491115-1491302
  hyper
ctcccattggtcctagcggggggccgggggcggacaccggcgcggggccggagcatcgcggctcaggctgcgggaaagcggtgcgcgtgcagcggggtgggtgccctggtccgcgggcgagctcgagcagccaaccccgggcgcgtcggggccatggacggcctgaggcagcgcgtggagcacttcc

SEQ ID NO: 6476 - DNA, 158 bp, Homo sapiens
  chr19:1491308-1491466
  hyper
aaaggaacctggtcaccgaagtgctgggggcgctggaggccaagaccggggtggagaagcggtatctggctgcaggtgagccgtcggcgctagcccgtttcgccgacgggcacaccgaggccatgggcctgggggtcgcagaccggactccttccccg

SEQ ID NO: 6477 - DNA, 59 bp, Homo sapiens
  chr19:1491666-1491725
  hyper
gtggccccagaggggtcgggatgccagtgtcctgcgcgtttcgccgtcccccttccccc

SEQ ID NO: 6478 - DNA, 315 bp, Homo sapiens
  chr19:1567148-1567463
  hyper
ggggtgcccctgcgggcggccgagggcctgggctgcggcgcggctccccggagcctttccgggctggaggcggcccagacaaaggcggcggcggggccggagcgcgcaggggaggagcgcgggctgcgcccaactttctcccgcggcggctgcaggacaaaggcgcaaaggcagcggccgaggccggagcccacgcggggcgtgtccggtgcggggcgtccggcgcgggctgggctgggctcgggcgacccccttccccggggcggacggtgcggggacccccaggacagcaacccccgacgagggccactcacc

SEQ ID NO: 6479 - DNA, 189 bp, Homo sapiens
  chr19:1567464-1567653
  hyper
tggcgacccacgatctcggcgacgtgctcggagctgggcaccgggacgcactcggtcatgttgacgcttttcttgcggctgccgatcacgctcatctggtcggccagcagcgtcgggggccccagggccgcggggtggggcgcgaagcccgcgaacacgtcggggggcgacggccggggcggcggcggc

SEQ ID NO: 6480 - DNA, 31 bp, Homo sapiens
  chr19:1676084-1676115
  hyper
ttcccggtggggggggcgtcccggtgcggcg

SEQ ID NO: 6481 - DNA, 79 bp, Homo sapiens
  chr19:1748598-1748677
  hyper
ccgctgcagccttgctcgggtcccctagcccggcgcctccgcaaaccaacccaccgcgggccgccgagccccgctccgg

SEQ ID NO: 6482 - DNA, 49 bp, Homo sapiens
  chr19:1748798-1748847
  hyper
ctcagcgccgggatcccgctcagctgcgggggccgcgaaccccgccgct

SEQ ID NO: 6483 - DNA, 46 bp, Homo sapiens
  chr19:1749549-1749595
  hyper
cagggaccaacccctccgctccccggccagccgcggccgcccagcc

SEQ ID NO: 6484 - DNA, 46 bp, Homo sapiens
  chr19:1749824-1749870
  hyper
tcgggcccgccaggggcgaaaccccaaagtcgcgacacccggggtg

SEQ ID NO: 6485 - DNA, 31 bp, Homo sapiens
  chr19:1826719-1826750
  hyper
gctcctgagatttcaacgggctcagggacca

SEQ ID NO: 6486 - DNA, 338 bp, Homo sapiens
  chr19:1856932-1857270
  hyper
aggaggagcaggttgccggggtggggggggcgaccggggcaggggcgcgcagccgctgggaacacagctgccgcacgtagctcggcggcggcggcggggacatccgcagccccagccggccccgctcacgtggtcccactcccgccggggccagggggcccgggccagggtcgcctctccggcctgggtgcctgccagccccgccccgcgcttggagactgaggcgcgcacatgcgcacgtgggtggcggggcagggggtgcacgggctacccacccacgctgcgctgggcgaagcgcctctgcgaaatgccaggccctgcctcgcacacaatccact

SEQ ID NO: 6487 - DNA, 446 bp, Homo sapiens
  chr19:1978215-1978661
  hyper
ctcctgcctcctgcctcgggggtgggctggggaggtcggggctaggtgggccctgcgctggcggtgctgatggtctctgtccccgcaggaaagaatctctatacaaatgaatacgtggctatcaaattggtgagtcggcccctccaccccacccccgctgacgtgccccccagggatttcagggcagcgacccggtcccctggtgactcgctcttgtgcccccaggagccgatcaagtcccgggccccgcagctgcacctggagtaccggttctacaagcagctcagcgccacaggtaccgggcggcccgcgggtggggcgggggctgcgcaggggcagggagggggctgccgccgcacgcccgtgcgtctgtcctccgccgcagagggcgtccctcaggtctactacttcggtccgtgcgggaagtacaacgccatggtgctgga

SEQ ID NO: 6488 - DNA, 202 bp, Homo sapiens
  chr19:1978675-1978877
  hyper
gcctggaggacctgttcgacctgtgcgaccggaccttcacgctcaagacggtgctgatgatcgccatccagctggtgcgcggcgggcggggcggggcggggctcggagggaagagggtggccctggaggggagcgcgtgggacggggaggggcccggccgacaccgccgtgcccccctgcagatcacgcgcatggagtatgt

SEQ ID NO: 6489 - DNA, 161 bp, Homo sapiens
  chr19:1978883-1979044
  hyper
caagagcctaatctaccgggacgtgaagcccgagaacttcctggtgggccgcccggggaccaagcggcagcatgccatccacatcatcgacttcgggctggccaaggagtacatcgaccccgagaccaagaagcacatcccgtaccgcgagcacaagagcc

SEQ ID NO: 6490 - DNA, 31 bp, Homo sapiens
  chr19:1979061-1979092
  hyper
tacatgagcatcaacacgcacctgggcaagg

SEQ ID NO: 6491 - DNA, 58 bp, Homo sapiens
  chr19:2168976-2169034
  hyper
ttattggttgtttgctcggaaagaaccttcaaaggccacagaacgggaccttccccct

SEQ ID NO: 6492 - DNA, 53 bp, Homo sapiens
  chr19:2169048-2169101
  hyper
tgtgggcgggcaggggcggcctccactggccaagggtccggactctctgactc

SEQ ID NO: 6493 - DNA, 68 bp, Homo sapiens
  chr19:2169109-2169177
  hyper
gagtgagtacatgttccgcctgacagcctggcctggagcccggctgtgggcggcggtgagtgggcagc

SEQ ID NO: 6494 - DNA, 55 bp, Homo sapiens
  chr19:2169178-2169233
  hyper
agcagtgagtagcagccggggcggggtgagctgtccccaccgtgactcagaaggt

SEQ ID NO: 6495 - DNA, 31 bp, Homo sapiens
  chr19:2169270-2169301
  hyper
gtaatcccagctcccccggaggcagattaac

SEQ ID NO: 6496 - DNA, 162 bp, Homo sapiens
  chr19:2253250-2253412
  hyper
ctagcaagggaggggtcgcaggagtgcccccggggggcgctcacgagctgagcggtccccagagagggcgcaggggaaaggcggcagaacgctacgaggcaggaggggttgcacaaggttcatccggaagccagaacctactcgcggcgaggggaatgggcc

SEQ ID NO: 6497 - DNA, 40 bp, Homo sapiens
  chr19:2273805-2273845
  hyper
ggggcagcagcacttccggcggggtcgtggcctggagcgc

SEQ ID NO: 6498 - DNA, 84 bp, Homo sapiens
  chr19:2273846-2273930
  hyper
tccgggtctgcaaccccgccgtctgcccggccgcagcgccacctgccggccgcatccgggagcgccacccggaaaatcagggcc

SEQ ID NO: 6499 - DNA, 60 bp, Homo sapiens
  chr19:2273960-2274020
  hyper
gaggaaaggaggaactcgaaaagattgtagacttggcgagcgggccggggggatattcag

SEQ ID NO: 6500 - DNA, 108 bp, Homo sapiens
  chr19:2289767-2289875
  hyper
agcagggacaggaagacgggttgaaatctttagaaaacgcttgagaaactgcaaaaaagacgcatgctgatgaaaaacagtcctgcggttgggcgtctacaaaaaaag

SEQ ID NO: 6501 - DNA, 42 bp, Homo sapiens
  chr19:2289879-2289921
  hyper
agttctgcctggggagcgccgtgcagccgtccccttcccctc

SEQ ID NO: 6502 - DNA, 31 bp, Homo sapiens
  chr19:2289965-2289996
  hyper
aggggaggggagggtccgccctggggacccc

SEQ ID NO: 6503 - DNA, 121 bp, Homo sapiens
  chr19:2290007-2290128
  hyper
tcatgttgaacttgcgcgcgcctccctggcccgccgcggcggccggcccatccaccttgcggaaggagtactccaccgagaagttgtttttgtgctgcccgcggccgcggctccacacgaa

SEQ ID NO: 6504 - DNA, 37 bp, Homo sapiens
  chr19:2290234-2290271
  hyper
gtctcgttgtgggcctcgcccggggtccggttggcgg

SEQ ID NO: 6505 - DNA, 31 bp, Homo sapiens
  chr19:2329160-2329191
  hyper
ttaggcggaacgggcacggtgctaagctaac

SEQ ID NO: 6506 - DNA, 31 bp, Homo sapiens
  chr19:2431505-2431536
  hyper
gaggctgccccccagccgcaagtgggcacag

SEQ ID NO: 6507 - DNA, 53 bp, Homo sapiens
  chr19:2462944-2462997
  hyper
cgcgggagagaaatcccggaccctgggactatgcagcccgtgagggccccagt

SEQ ID NO: 6508 - DNA, 31 bp, Homo sapiens
  chr19:2488866-2488897
  hyper
tgggggtggagaggggcgctgacccaggccc

SEQ ID NO: 6509 - DNA, 45 bp, Homo sapiens
  chr19:2579150-2579195
  hyper
gatgggtgcccccggccgggcaggtccagacgccaaggtctgcac

SEQ ID NO: 6510 - DNA, 31 bp, Homo sapiens
  chr19:2579204-2579235
  hyper
ccggacacacctgactcggaccatgtggcta

SEQ ID NO: 6511 - DNA, 35 bp, Homo sapiens
  chr19:2579328-2579363
  hyper
ctcagggtggccagggcgggcgggcaggagggcag

SEQ ID NO: 6512 - DNA, 31 bp, Homo sapiens
  chr19:2579371-2579402
  hyper
cacccacccagacctgcgccctggccatcag

SEQ ID NO: 6513 - DNA, 34 bp, Homo sapiens
  chr19:2579725-2579759
  hyper
ttgccaaacgtgcagacgacgggcctgacatccc

SEQ ID NO: 6514 - DNA, 43 bp, Homo sapiens
  chr19:2944613-2944656
  hyper
cccagaaactacccctcgagcccctgaccgcttttgctgtcac

SEQ ID NO: 6515 - DNA, 126 bp, Homo sapiens
  chr19:2944666-2944792
  hyper
ccccagccctacccctcggccgctgtgaccacgtccccggggcccaggcgctcgtcgtgcgccgccccgcgcgtccctcagctttctccggctgcgaactcgggcggaagccggttcctgccgccc

SEQ ID NO: 6516 - DNA, 194 bp, Homo sapiens
  chr19:2944798-2944992
  hyper
gccctgggcccgggctcggctcccgcccggcactcaccatgtcccgcccgctcctgggctctccagggttagcgccccgcggtccagcgaccggcgcaggtgagcacgacaggacacctgagccgctcggggtaggcggggaagcgcgcaaggcagaggggaactcggcttaccgtcctcggggtctgattgga

SEQ ID NO: 6517 - DNA, 31 bp, Homo sapiens
  chr19:2945126-2945157
  hyper
acagttccctaggccccgcccctgcctgtcc

SEQ ID NO: 6518 - DNA, 50 bp, Homo sapiens
  chr19:2945185-2945235
  hyper
ggctcgtcgagaacacgcgtggctgaccctctagccgggcagccgcggat

SEQ ID NO: 6519 - DNA, 79 bp, Homo sapiens
  chr19:2945370-2945449
  hyper
gagtcctgcgtgggggcgggacccgcgtgcgtgacgtcaccgtgctgtcccgcgtgggcgcggacgcctggggtccaga

SEQ ID NO: 6520 - DNA, 62 bp, Homo sapiens
  chr19:2950417-2950479
  hyper
gcctcctccctggggcgcggtgccaggacttcgccattaaacgagcccgccccctgcacttt

SEQ ID NO: 6521 - DNA, 39 bp, Homo sapiens
  chr19:2950537-2950576
  hyper
tgcttggcctctgccacgaagatacggggccaggtccag

SEQ ID NO: 6522 - DNA, 75 bp, Homo sapiens
  chr19:2950579-2950654
  hyper
tacaaggaggagaaaccgctctcacgggaggcgctgcggccactgagggagacggccgccgcgggtcacagacgg

SEQ ID NO: 6523 - DNA, 31 bp, Homo sapiens
  chr19:2950849-2950880
  hyper
agaatcgcgctgtgggcgtggcttgtactgg

SEQ ID NO: 6524 - DNA, 95 bp, Homo sapiens
  chr19:2950907-2951002
  hyper
gaccgaggtcccgggacgaggttgggggcgtggtctttcgcgcaatcctccaacgcccaattaccctgataaacaataaacgctaaaataagtaa

SEQ ID NO: 6525 - DNA, 31 bp, Homo sapiens
  chr19:2951019-2951050
  hyper
cagccaacacattcctcgtgataacatactc

SEQ ID NO: 6526 - DNA, 31 bp, Homo sapiens
  chr19:2977420-2977451
  hyper
ccacgtgcagctactgcgccttcattgatct

SEQ ID NO: 6527 - DNA, 60 bp, Homo sapiens
  chr19:2977453-2977513
  hyper
ttcgcggtccaggtggcggctgggtggggcctgggcgggacggggcggggacaaggcggg

SEQ ID NO: 6528 - DNA, 88 bp, Homo sapiens
  chr19:3094303-3094391
  hyper
ggcccctcccattggccgcaccgtctgcccgtcgcgggctgcgctcccagcctgctaggttgtccggcgctgtcgctcggttgcggcg

SEQ ID NO: 6529 - DNA, 53 bp, Homo sapiens
  chr19:3094776-3094829
  hyper
tgctgctcggtgagtgcggcccccgggcctgccggctgcgggccctgccctgc

SEQ ID NO: 6530 - DNA, 20 bp, Homo sapiens
  chr19:3094930-3094950
  hyper
gccttccctgcctgtccggg

SEQ ID NO: 6531 - DNA, 199 bp, Homo sapiens
  chr19:3361101-3361300
  hyper
ttcggggtcccccatccgcttggcccgagggggtcctggctggaggttcgggcgcgaggtggcgccgggacgcgatcactcggcacgcagacgtcgctcgccaggggttgcgcttgcgcggggacctgccccgagaggggcggggcggcaggggttccccctccctgagaggccgtggaagtcccgaggggtgggtggt

SEQ ID NO: 6532 - DNA, 37 bp, Homo sapiens
  chr19:3361306-3361343
  hyper
agcacaggggttaggacgggcccgggaggtggctaag

SEQ ID NO: 6533 - DNA, 55 bp, Homo sapiens
  chr19:3367361-3367416
  hyper
ttctggattctggagccgccgccgggaggagcgggaggcccggcgctccgggtct

SEQ ID NO: 6534 - DNA, 31 bp, Homo sapiens
  chr19:3404294-3404325
  hyper
acacatttgacattggcgggaccgggagggg

SEQ ID NO: 6535 - DNA, 58 bp, Homo sapiens
  chr19:3573236-3573294
  hyper
ctgccatcgggcagcccgggcgctactcacctccgcccgcgtccgtgttccaggtccg

SEQ ID NO: 6536 - DNA, 144 bp, Homo sapiens
  chr19:4053896-4054040
  hyper
cgggaggggtcgtgagcggcggatgctggggcagagagcaggacggcgcctcccccgcggcgggcagctcacctggtgaagcggaccttgcagatgttgcactcgtagggcttctcgcccgtgtgggtgcggatgtgtcgcggc

SEQ ID NO: 6537 - DNA, 83 bp, Homo sapiens
  chr19:4054304-4054387
  hyper
ggcccgtccccgtcctcgccctcggccgctcccgacaggaagcccggagagtcgcccggctcgggggccgcctccgacagcga

SEQ ID NO: 6538 - DNA, 53 bp, Homo sapiens
  chr19:4054418-4054471
  hyper
tggccgttctgcgtggcggccggcggggccaccggcggcggaaagagaccccc

SEQ ID NO: 6539 - DNA, 174 bp, Homo sapiens
  chr19:4054879-4055053
  hyper
ggggatctccagcaggcgggcggcgctgaggatgtcacccacgttggctgtgctgacggtgagcgtggccgtgtaggcgaagtccatgagcgcggtgagcgcctcggcgctgacgaagtcgatctcgtacacgttctgctggtccaccacggcgcccgacgtgaacagcttctt

SEQ ID NO: 6540 - DNA, 47 bp, Homo sapiens
  chr19:4064372-4064419
  hyper
acagaggccccggccccgccgataggtgctctcggggccccatggcg

SEQ ID NO: 6541 - DNA, 59 bp, Homo sapiens
  chr19:4064871-4064930
  hyper
gcgccgactgggtgtccgggcccgggtggacagcaacctcccgccgcggcccaccgtgc

SEQ ID NO: 6542 - DNA, 31 bp, Homo sapiens
  chr19:4064938-4064969
  hyper
cagccagcccgggcagcgcctcccagaaccc

SEQ ID NO: 6543 - DNA, 137 bp, Homo sapiens
  chr19:4432849-4432986
  hyper
cagccctggcaacacacgtgcccggccaaggctcacttctgggcaggtgcgtaggtgctaccctgtcttacacccgccctcatgaggccacctatccccgaagctggccatgccccaagcctcggtggcaatgagct

SEQ ID NO: 6544 - DNA, 21 bp, Homo sapiens
  chr19:4946174-4946195
  hyper
tctccacgaagcactcactcc

SEQ ID NO: 6545 - DNA, 45 bp, Homo sapiens
  chr19:5536815-5536860
  hyper
cagcactgtcactgcacggctgtgcgatcccgggacatctctgcc

SEQ ID NO: 6546 - DNA, 31 bp, Homo sapiens
  chr19:5804011-5804042
  hyper
acgggggctccaagaacgcaggcggcgcggg

SEQ ID NO: 6547 - DNA, 43 bp, Homo sapiens
  chr19:5804851-5804894
  hyper
tctcccgaaggggagccgtcggagtccccggggccgggggaga

SEQ ID NO: 6548 - DNA, 567 bp, Homo sapiens
  chr19:6110323-6110890
  hyper
ccccccggcccccgaacggggtccccgccgccccccacactccccggccgggctgggcccggggcggtcgcatcggtcacctggagttcgggccgggagttcgggcagcggctcccgcggcggcggcagcggctgctgcgtgttggtccccgttggtaagtaacagtctccacggctacagtctctatggcggcggcggtggcggcggcggccgctcctcctccggctcccgccgccagccagcctcgcgcagcccgcccgcccgacggggcggggcgttgttaccggcaacggttaccaggctccgcgccccaccttcctaacggcccgcccacgctcgcctccaacgggcccccaagagggcggggcgcgagaccctacggcgttccattggctgtctgcagagtctgtcggaaggaggaggcgttcccccttgaaaaagagtgcgagactcggccaatggccgcgaagaggggcgggtcttggcgggaggcgcgcgcggctcagagggttggcgaaccggtcgcgcgcgcggcgccgtgggttggtggcgcgttttgggaaagt

SEQ ID NO: 6549 - DNA, 31 bp, Homo sapiens
  chr19:6110900-6110931
  hyper
gggacccaagggactccgtttaccccacagg

SEQ ID NO: 6550 - DNA, 31 bp, Homo sapiens
  chr19:6393961-6393992
  hyper
gcatgcacacatcccccgaatcatggcagta

SEQ ID NO: 6551 - DNA, 31 bp, Homo sapiens
  chr19:6459633-6459664
  hyper
ccgcatggcgcccgcccgggggggaggggag

SEQ ID NO: 6552 - DNA, 155 bp, Homo sapiens
  chr19:6464134-6464289
  hyper
caggtgcgcccacagcgcggccccgcccccttcttgactccgccctctcagcgaggctcaggtgcacaagccggaagtgcgctctcccaggtgagtgactaaactttccgggtcacgtgacagggcggagccggtggggtcggacccacagaacg

SEQ ID NO: 6553 - DNA, 31 bp, Homo sapiens
  chr19:6464304-6464335
  hyper
gttcgagggagggacacggaccaggaacctg

SEQ ID NO: 6554 - DNA, 76 bp, Homo sapiens
  chr19:6464627-6464703
  hyper
cgcaggtgcccctggccggagatgcggtaggaggggcgagcgcgagaagccccttcctcggcgctgccaacccgcc

SEQ ID NO: 6555 - DNA, 35 bp, Homo sapiens
  chr19:6590244-6590279
  hyper
tccacctctcatcccacggcgcgcactggtgattt

SEQ ID NO: 6556 - DNA, 234 bp, Homo sapiens
  chr19:6590324-6590558
  hyper
agcaggtctgaaccagcggggaacgtgaagtcgagaccttcaaaagaacttcttcgtttcccgaatcgttttcctggatgtcactgggcgcgagagcaccgcgcgcagcggactctctacgctgcaaaggcgcccggcgcggtccccaaagggacccctcccccacccggagcgagtggctggggccatcccgtcctaggaggccccaggaagcccccacgcccagccttgtga

SEQ ID NO: 6557 - DNA, 48 bp, Homo sapiens
  chr19:6590571-6590619
  hyper
ctctgagtcagcctgccgggggaacaccagagccgagtcatcttccat

SEQ ID NO: 6558 - DNA, 31 bp, Homo sapiens
  chr19:6590668-6590699
  hyper
gcagggctgcctgtctcgtagcccctacacc

SEQ ID NO: 6559 - DNA, 31 bp, Homo sapiens
  chr19:6590784-6590815
  hyper
tctcattctgtcttttcggtcacgcgcctct

SEQ ID NO: 6560 - DNA, 239 bp, Homo sapiens
  chr19:6590846-6591085
  hyper
ctcaccccaagtgactcgagcggcagctgctgctgagcctgtgcgaagcgctggatgcacaccacgaggcagatcaccaagcccgcgaccaatgggaccaaagcagcccgcaggacgcacccatagggcctgcgccgcaccgagcagcccgaaccctcctccggcatcgccgcggcgatcacctccgctagcgcaggaggggcgatgggggcgcggagcgctgccgagaaggaaggaag

SEQ ID NO: 6561 - DNA, 44 bp, Homo sapiens
  chr19:6591087-6591131
  hyper
aactgcagccccctcccggggctcctgggcgtctacttgcttca

SEQ ID NO: 6562 - DNA, 31 bp, Homo sapiens
  chr19:6591154-6591185
  hyper
cctctctggggatgtccggccggtcgagggg

SEQ ID NO: 6563 - DNA, 34 bp, Homo sapiens
  chr19:6862816-6862850
  hyper
ggatatagacttcaaacgccgtcagacagacacc

SEQ ID NO: 6564 - DNA, 60 bp, Homo sapiens
  chr19:6862980-6863040
  hyper
gcgcaatctcccagagcgctggcattgcaggcgtgagccaacgtccgcagccaaacacgt

SEQ ID NO: 6565 - DNA, 31 bp, Homo sapiens
  chr19:7098895-7098926
  hyper
actgaagcggcgaaatcggagaaaactgaag

SEQ ID NO: 6566 - DNA, 75 bp, Homo sapiens
  chr19:7293558-7293633
  hyper
ccggggcaaggttcctcgggctcaggtcgggcacgcagggcgcggaggcgcgagcccgggcgggcaaaggccaag

SEQ ID NO: 6567 - DNA, 193 bp, Homo sapiens
  chr19:7293748-7293941
  hyper
gggtcctctccccatcgcggcgctccccgcccacgcccgcgcccccagactcaccctctccggggtacaggtggcccgcggcgcccagtagcagcgcggccaccgccaccagcagcggcgcggccgccgccccccgccggcccccggtggccatggctgcgggagcgcggggtctcctcggatcagagcgcgc

SEQ ID NO: 6568 - DNA, 31 bp, Homo sapiens
  chr19:7294068-7294099
  hyper
ccccgggaagggcgcgcgcggcttcgccagc

SEQ ID NO: 6569 - DNA, 54 bp, Homo sapiens
  chr19:7294178-7294232
  hyper
cggggcccggagctccgcgctgcgcccgggactgtctctcggctctcggccccg

SEQ ID NO: 6570 - DNA, 31 bp, Homo sapiens
  chr19:7294289-7294320
  hyper
ctagctgactggcgggcgggcacctgggctg

SEQ ID NO: 6571 - DNA, 185 bp, Homo sapiens
  chr19:7294496-7294681
  hyper
ccgcccggccccgccccgccccgcccgcctccccgcctccctgtgccgggccccgcgcgggaggccctgggcgcgccgggaccgagggcgcgccccagatccgcgcgccctacagccccgagtctcctccagtttcagacccccggaggcgccccacaggcccgacgcagcggcacagatccttt

SEQ ID NO: 6572 - DNA, 99 bp, Homo sapiens
  chr19:7294866-7294965
  hyper
gtccgggcctggccagcgacactcgtcccagagcgcgtgggcgcccccagatgtcccgcccgcgagtgcgccccggcccaggggcgagacccaagccag

SEQ ID NO: 6573 - DNA, 50 bp, Homo sapiens
  chr19:7294966-7295016
  hyper
cccctggggacagccacgtgcccgcgtgcccagtgcgctccctgtgttca

SEQ ID NO: 6574 - DNA, 87 bp, Homo sapiens
  chr19:7295034-7295121
  hyper
tggaaaaatgtgcagacgcttctgaaagggcaaagacgacgccaaagaagacgccggagacctcgaatagggcgcaggtggacatct

SEQ ID NO: 6575 - DNA, 81 bp, Homo sapiens
  chr19:7459680-7459761
  hyper
tctccctctggatccccgcaacccagctgtcccctcagagcccccggccctactgacagccaggctcgcattgctctcctt

SEQ ID NO: 6576 - DNA, 137 bp, Homo sapiens
  chr19:7459763-7459900
  hyper
aaaagccccccaaccccgctgacccgcccctcaaaagtcgccctcaccctcgccgcgagcaccctcccacttcggtgcccgcgcccctctcaaggccgagccgacgccccctcaccacggctcggggagcagcagcc

SEQ ID NO: 6577 - DNA, 90 bp, Homo sapiens
  chr19:7460065-7460155
  hyper
gcatcggaggcggctgcgagagtggcagaggagctggcggagagcggcctgcgggcgatcgggccgaggtgaggacggcggcggggcggt

SEQ ID NO: 6578 - DNA, 123 bp, Homo sapiens
  chr19:7460171-7460294
  hyper
ctcaggagggggccctcggtctcttcagggggtggcctggggcgcgggacccccggggctgcctcgggcctcccgccggctcctgggggacttctccaggcaggcgaacgggtgctggggtgc

SEQ ID NO: 6579 - DNA, 66 bp, Homo sapiens
  chr19:7460310-7460376
  hyper
gcatggaggctctaggcggcgattgcagggtgcagaggtgcagacgatgcccgcccgctccgtccg

SEQ ID NO: 6580 - DNA, 31 bp, Homo sapiens
  chr19:7460385-7460416
  hyper
cagtcctggggtgctacggcttactctcctc

SEQ ID NO: 6581 - DNA, 45 bp, Homo sapiens
  chr19:7460445-7460490
  hyper
cccagcctctgctcctcgttcaggagcgcccggggcaggaccagg

SEQ ID NO: 6582 - DNA, 50 bp, Homo sapiens
  chr19:7460506-7460556
  hyper
ccacaatacccagcaccgtcgtatttcaggcctcccgggagaaccctcac

SEQ ID NO: 6583 - DNA, 31 bp, Homo sapiens
  chr19:7553841-7553872
  hyper
ggtcccggcccctgtacgactccagcgccga

SEQ ID NO: 6584 - DNA, 61 bp, Homo sapiens
  chr19:7580808-7580869
  hyper
gatggggccagggctgcgtgcgggcggggcacggtgcagacaaaggcgcggccgcgcggtc

SEQ ID NO: 6585 - DNA, 31 bp, Homo sapiens
  chr19:7588102-7588133
  hyper
agggattgcccccaggcgattaactcagttt

SEQ ID NO: 6586 - DNA, 63 bp, Homo sapiens
  chr19:7615962-7616025
  hyper
cttgggtcacatcaaacgccggtacccgcaggtgcggcctgttgtgggcggggcagagaggcg

SEQ ID NO: 6587 - DNA, 130 bp, Homo sapiens
  chr19:7660714-7660844
  hyper
cgggcccgacgcagcgtcgccagcgcaagcggccgcacctggctcagcagcggcggcggcggcggcggcggcagcggcggtagcagcagcgggcccggctggggcgcgagcgcggcgcagcccagcccag

SEQ ID NO: 6588 - DNA, 52 bp, Homo sapiens
  chr19:7660882-7660934
  hyper
gccgccatggtggaggcggcgccccccgggcccgggccgctgcggaggacct

SEQ ID NO: 6589 - DNA, 64 bp, Homo sapiens
  chr19:7661304-7661368
  hyper
ctccaggtgagccgggcggggtctgcgggccgggtggggtctccccgtgcggacctctcgttcc

SEQ ID NO: 6590 - DNA, 31 bp, Homo sapiens
  chr19:7762517-7762548
  hyper
gcaggtccttggaccccgcctatgccccagg

SEQ ID NO: 6591 - DNA, 81 bp, Homo sapiens
  chr19:7990125-7990206
  hyper
cggccctctgagaccccggcgcagggccggctagggggcgccgcgcccctcacaccaacgcgtagtcgaactgcccgcgct

SEQ ID NO: 6592 - DNA, 115 bp, Homo sapiens
  chr19:7990893-7991008
  hyper
gctctctcagggacccgcgccggctgcgcgttcggcctctccccggcggcggcggcggcggcccgggctccggctcagcccaccccacccgcccctggagcggcggagaccgagg

SEQ ID NO: 6593 - DNA, 82 bp, Homo sapiens
  chr19:7991079-7991161
  hyper
gcggggctgcagggggcggaggctgcgcagggagcggcgcgcgagccagcgaccccgcccgggcctgcgggaggacggaacc

SEQ ID NO: 6594 - DNA, 83 bp, Homo sapiens
  chr19:8067287-8067370
  hyper
actctccagagcctagcgggggcccaggacacagcagcggagcagggagagtcgttcagaggagggagcgagcctcacttccc

SEQ ID NO: 6595 - DNA, 31 bp, Homo sapiens
  chr19:8067371-8067402
  hyper
cccacaggctggcttccgttggtcttcccct

SEQ ID NO: 6596 - DNA, 31 bp, Homo sapiens
  chr19:8213983-8214014
  hyper
gagggataccaagcttcgccgacggggaggg

SEQ ID NO: 6597 - DNA, 190 bp, Homo sapiens
  chr19:8274531-8274721
  hyper
ggcttcccatcatggccgtctccccgagctatccgcgctcccccacgagggccggggcgcaacgggtgcccgaggacgcggctgtgaaacgggctggagcgagtaggggcgatcctggcctcgtgacgcgggggaatccggatgtgtgagccgggggagcgccccgtttccccgacgtgccagggctggg

SEQ ID NO: 6598 - DNA, 31 bp, Homo sapiens
  chr19:8579004-8579035
  hyper
tgcgagttcgcgctcacgtcagcgccatttt

SEQ ID NO: 6599 - DNA, 74 bp, Homo sapiens
  chr19:8579158-8579232
  hyper
tccccgggcagtcagcgcgcacttcagcagactccgtgcacggagatccgggatgacctcgctgtcctagtctt

SEQ ID NO: 6600 - DNA, 31 bp, Homo sapiens
  chr19:9267730-9267761
  hyper
gttgcatctgaagtgacggcacaggacaaga

SEQ ID NO: 6601 - DNA, 31 bp, Homo sapiens
  chr19:9879693-9879724
  hyper
gcgtcacctaaggcttcgattgcagacagcg

SEQ ID NO: 6602 - DNA, 31 bp, Homo sapiens
  chr19:9896567-9896598
  hyper
cccgtctgcctccctccgggtggctaagccg

SEQ ID NO: 6603 - DNA, 31 bp, Homo sapiens
  chr19:10120919-10120950
  hyper
tagagcctctctgagtcgtggaccctgggtc

SEQ ID NO: 6604 - DNA, 62 bp, Homo sapiens
  chr19:10197476-10197538
  hyper
ggcggggggggggcggcggaggccaaaaccaagggtcaagttcgggccgggagaacggtgcc

SEQ ID NO: 6605 - DNA, 49 bp, Homo sapiens
  chr19:10197545-10197594
  hyper
gggggagggatgatcccgtttccccttcccccaccggaacccccctgtc

SEQ ID NO: 6606 - DNA, 44 bp, Homo sapiens
  chr19:10197599-10197643
  hyper
cccagctggagaagagcgtccggcgcctccgggagaagtttcat

SEQ ID NO: 6607 - DNA, 188 bp, Homo sapiens
  chr19:10197649-10197837
  hyper
gtatcctccaagaaggcgggggctctgatgaggaaattcggcagcgaccacacgggagtggggcgctccatcgtgtacggtgaggctgcaggggtcccgggcctggtgcggggaccgcgcgtgggagcgccgagggggcgtggtctagggagaggcgttgagatcacctcccccggaggtcccagcct

SEQ ID NO: 6608 - DNA, 72 bp, Homo sapiens
  chr19:10207019-10207091
  hyper
cctcgtggcggccgacgcgcatgcgcagcgccgccagctcgctggcgttggcggcctcgggcgtcgcccgcg

SEQ ID NO: 6609 - DNA, 38 bp, Homo sapiens
  chr19:10363216-10363254
  hyper
atcgctccaggtctcccggagcccgtgctgcgcaaagt

SEQ ID NO: 6610 - DNA, 39 bp, Homo sapiens
  chr19:10380737-10380776
  hyper
gagtcttggggtcacacgcacaggcggtggccaagcaaa

SEQ ID NO: 6611 - DNA, 76 bp, Homo sapiens
  chr19:10381114-10381190
  hyper
gggtgtagagagaggacgccgatttccccggacgtggtgagaccgcgcttcgtcactcccacggttagcggtcgcc

SEQ ID NO: 6612 - DNA, 103 bp, Homo sapiens
  chr19:10397587-10397690
  hyper
ctctccagggtggagtcgaggaggcggggctgcgggcctccttatctctagagccggccctggctctctggcgcggggccccttagtccgggctttttgccat

SEQ ID NO: 6613 - DNA, 56 bp, Homo sapiens
  chr19:10397738-10397794
  hyper
cccgggagttgggagcgcgctgggacgccggactaagcgggcgcaaagccccaagg

SEQ ID NO: 6614 - DNA, 31 bp, Homo sapiens
  chr19:10397797-10397828
  hyper
gccctctcgcgccctccgggacctcagtgcc

SEQ ID NO: 6615 - DNA, 40 bp, Homo sapiens
  chr19:10397952-10397992
  hyper
aagacgctcagagggccgggttgggtgtcttaccagctgc

SEQ ID NO: 6616 - DNA, 45 bp, Homo sapiens
  chr19:10398074-10398119
  hyper
cgcctacagtgagggacaggggctcggtcccggctggggtgaggg

SEQ ID NO: 6617 - DNA, 50 bp, Homo sapiens
  chr19:10398142-10398192
  hyper
aagggtagttgacagtcgctctatagggagcgcccgcggacctcactcag

SEQ ID NO: 6618 - DNA, 58 bp, Homo sapiens
  chr19:10398198-10398256
  hyper
ccccttgccttagaaccgccccacagcgtgattttggagcctccggtcttaaagggca

SEQ ID NO: 6619 - DNA, 67 bp, Homo sapiens
  chr19:10398385-10398452
  hyper
acgtgaccttgacctacgagtttgctgctggaccccgcgacttctggcagcccgtgatctgccacgc

SEQ ID NO: 6620 - DNA, 31 bp, Homo sapiens
  chr19:10426144-10426175
  hyper
cggtctacgaacaccacgttcaccctgggga

SEQ ID NO: 6621 - DNA, 50 bp, Homo sapiens
  chr19:10529657-10529707
  hyper
gctcggcgttcgcccacgccgggagccccctctggcggggagaaaagtgg

SEQ ID NO: 6622 - DNA, 45 bp, Homo sapiens
  chr19:10529915-10529960
  hyper
ggtgggacacgcgggcgcgtgcactccccccgcccagcagccatc

SEQ ID NO: 6623 - DNA, 31 bp, Homo sapiens
  chr19:10529970-10530001
  hyper
ttgagggggatgggggcgcactcggatcccg

SEQ ID NO: 6624 - DNA, 68 bp, Homo sapiens
  chr19:10530026-10530094
  hyper
gcggcgctgggggaggcgggagcgtgagtcacggcgactcccgatttaggtgccggaaggggggctct

SEQ ID NO: 6625 - DNA, 31 bp, Homo sapiens
  chr19:10530117-10530148
  hyper
ggctcgcctgtttactcgcctgaaaagggca

SEQ ID NO: 6626 - DNA, 31 bp, Homo sapiens
  chr19:10691748-10691779
  hyper
cctggcacccaatagtcgctcaatcatgaaa

SEQ ID NO: 6627 - DNA, 110 bp, Homo sapiens
  chr19:10691799-10691909
  hyper
tggctgcaatactggccgtgatcagcagatggtgagcgagcgcttatttcaaaacgggctgcgattctcttaagtccccacgtggggcgggtttgcgactcccctgtgca

SEQ ID NO: 6628 - DNA, 73 bp, Homo sapiens
  chr19:10691924-10691997
  hyper
gtcccctaaatgcttacggccagtgagctcgaagagcacgcggtcattgaggcccagccgcagctctggcatt

SEQ ID NO: 6629 - DNA, 58 bp, Homo sapiens
  chr19:10692012-10692070
  hyper
ttgagcttgatggtaccgacgatttcgctcagaaggacgctgccgttggcattgacct

SEQ ID NO: 6630 - DNA, 31 bp, Homo sapiens
  chr19:10762204-10762235
  hyper
catttcttttttgagacggtctagctgtgcc

SEQ ID NO: 6631 - DNA, 31 bp, Homo sapiens
  chr19:10762250-10762281
  hyper
tgcagtgactccatcacggctcactgcagcc

SEQ ID NO: 6632 - DNA, 54 bp, Homo sapiens
  chr19:10812676-10812730
  hyper
cctcataatctgctaacggtgagctgaggagagagccgacgttctagggccctt

SEQ ID NO: 6633 - DNA, 67 bp, Homo sapiens
  chr19:10812780-10812847
  hyper
gtttcccttaggacagcggcggtttccagatggtgtcgctggtgtctctgtccgaggtgacggagga

SEQ ID NO: 6634 - DNA, 201 bp, Homo sapiens
  chr19:11200921-11201122
  hyper
agggcgactggagacccggatgtccagcctggaggtcaccgcgggctcaggggtcccgatccgctttgcgcgaccccagggcgccactgccatcctgagttgggtgcagtcccgggattccgccgcgtgctccgggacgggggccaccccctcccgcccctgcccccgcccctttggcccgccccccgaattccattgggt

SEQ ID NO: 6635 - DNA, 89 bp, Homo sapiens
  chr19:11201126-11201215
  hyper
tccaacaggccaccctcgagccactccccttgtccaatgtgaggcggtggaggcggaggcgggcgtcgggaggacggggcttgtgtacg

SEQ ID NO: 6636 - DNA, 31 bp, Homo sapiens
  chr19:11201271-11201302
  hyper
tgcaggggaggcctggcgttcctccgcggtt

SEQ ID NO: 6637 - DNA, 31 bp, Homo sapiens
  chr19:11225129-11225160
  hyper
catcatcagatgcctgcgggtgaaggtgggc

SEQ ID NO: 6638 - DNA, 70 bp, Homo sapiens
  chr19:11253287-11253357
  hyper
tcagagggagaacaaacgggggcgggggtgggatgggggcggggccggaggccaccggcctcaggctgtc

SEQ ID NO: 6639 - DNA, 172 bp, Homo sapiens
  chr19:11308101-11308273
  hyper
gtgcacactcgatccccgaaccagacttgaacccctacccagccccgggtcccactcgccttgcgcgctccggccgctgccttccctgggtcccgccgcccgagcgtcttcgcgcgcgccgcagcctgggcgcccggccctcggaggtggctccgcccgcaccacgccccct

SEQ ID NO: 6640 - DNA, 43 bp, Homo sapiens
  chr19:11373071-11373114
  hyper
cctgttgatcttgtgcgcgaaggcgcggcgctcggaggcagcc

SEQ ID NO: 6641 - DNA, 31 bp, Homo sapiens
  chr19:11399747-11399778
  hyper
aaacactcactccccacgctcctctccattc

SEQ ID NO: 6642 - DNA, 175 bp, Homo sapiens
  chr19:11465992-11466167
  hyper
ggttccttcctacaatcgatgctaacacgccccgcctccaagatcacggaggccccgccccacggggctatgcaaatgagacgcccggaggccccgcccctccctccacctcggagtctgcgcggcgcggccaggcccggccgaccgcgtctcggtcttcgcgtctgccagcctg

SEQ ID NO: 6643 - DNA, 31 bp, Homo sapiens
  chr19:11466333-11466364
  hyper
tccctctgggtccagcgcggggaggggcggg

SEQ ID NO: 6644 - DNA, 31 bp, Homo sapiens
  chr19:11466379-11466410
  hyper
agctgggggaggggaccgggctgggggaggg

SEQ ID NO: 6645 - DNA, 39 bp, Homo sapiens
  chr19:12146543-12146582
  hyper
agcgcccctgattggacgaagcgccgggccccgccccct

SEQ ID NO: 6646 - DNA, 154 bp, Homo sapiens
  chr19:12806991-12807145
  hyper
accactgggtagggcgcgcgtacgcggcgtagcgcgcgtagcctccaggtgacatggtcagacacgaggtcgcggagcgcgtggcacacccgcgacaggacgtggagcacgaggcgggcgtccaggtaggagcagatctcgagcagcagctccg

SEQ ID NO: 6647 - DNA, 96 bp, Homo sapiens
  chr19:12807176-12807272
  hyper
ggccgaaaccctggacgcggcccgaggctccgaagcgctcggggacgcggcgggtgtggatagctgcgaggggcgcgagaacgccagcccggattt

SEQ ID NO: 6648 - DNA, 69 bp, Homo sapiens
  chr19:12885825-12885894
  hyper
cgccacagcagctctgcgagggactggcttctgctcacctgagaccggagggggcgtggcctcacctca

SEQ ID NO: 6649 - DNA, 81 bp, Homo sapiens
  chr19:12885899-12885980
  hyper
gcccaacaaaccctgcgcgtccaggccagggtggtatcgcgagtcacctgggccccacaggcaccacgtgaccaggccaat

SEQ ID NO: 6650 - DNA, 31 bp, Homo sapiens
  chr19:12897558-12897589
  hyper
ggcccaatctccaccccgtgctcaaacaccc

SEQ ID NO: 6651 - DNA, 50 bp, Homo sapiens
  chr19:12899528-12899578
  hyper
ctgcccaaccccccaacgctgcccgctgcgcccccgcggggcccagccag

SEQ ID NO: 6652 - DNA, 122 bp, Homo sapiens
  chr19:12912809-12912931
  hyper
gcgtgggtaatgcgcccgccgcagactccgcgcacgactccgcctgggagcgcgttgggggccgttggagtccagcatggcgcggaccccgggggcgctgctgctggcgcctctgctactcc

SEQ ID NO: 6653 - DNA, 94 bp, Homo sapiens
  chr19:13094455-13094549
  hyper
ccctgcgcgcgggccgcgcgtgccaagaggatgccatggttacgtcaggcgcgtgcccgtcgcgcgcgccgccgtcccgcgcgctcttgcaggg

SEQ ID NO: 6654 - DNA, 31 bp, Homo sapiens
  chr19:13094556-13094587
  hyper
aggccagcagggggcgcgcggcagtagcctc

SEQ ID NO: 6655 - DNA, 135 bp, Homo sapiens
  chr19:13106027-13106162
  hyper
catgtgtggcggggtccgagtcccgctgcgtgtcagcgtgtgtctgcgctggaacgcgggccagcacgtgtcagggcggccgcgtcggtgtgcgcccccgcgcgcgcgtgtgcgtgtgttcgtgtgtgtgtgtgc

SEQ ID NO: 6656 - DNA, 128 bp, Homo sapiens
  chr19:13106342-13106470
  hyper
agggtgaccggccgagcggcggcggcatggagtagacgcgcggcggcagcggcggcggcggcggacgcgagaggcagcggcgagcgcggcggcggcggcggcagcggcggccccggagccggcggggc

SEQ ID NO: 6657 - DNA, 125 bp, Homo sapiens
  chr19:13106528-13106653
  hyper
ggcgggcgcagcgcggcggaggccggaggagccgagccggagcccgagcccgagcgcggccgccgcctgccgggcctcccctcgccgcggccggccgccgcgctcccgcccgggcgcccagctat

SEQ ID NO: 6658 - DNA, 97 bp, Homo sapiens
  chr19:13106773-13106870
  hyper
ggggggccgagagcccgcgggccgccgaggggtgcaggctgtgccgcggggagcccaggcacgcgtgcgggcgtcaccgtgcgcgtgcgaccctggc

SEQ ID NO: 6659 - DNA, 31 bp, Homo sapiens
  chr19:13107273-13107304
  hyper
aggcctcacatgggagcggggctaagaaaat

SEQ ID NO: 6660 - DNA, 31 bp, Homo sapiens
  chr19:13207359-13207390
  hyper
ggggcagtggatcctgcgggagtctcccggg

SEQ ID NO: 6661 - DNA, 41 bp, Homo sapiens
  chr19:13208429-13208470
  hyper
ctcctcgccccatccccgtccgggtacgggggcgcggcagg

SEQ ID NO: 6662 - DNA, 31 bp, Homo sapiens
  chr19:13208827-13208858
  hyper
gactgccttatacacccgcccccgcgctggc

SEQ ID NO: 6663 - DNA, 50 bp, Homo sapiens
  chr19:13213712-13213762
  hyper
ccccggaggaaaccagcgggcggggacctagcagcgcgggcctcccggcc

SEQ ID NO: 6664 - DNA, 20 bp, Homo sapiens
  chr19:13213789-13213809
  hyper
cggtccgccacccctcaggg

SEQ ID NO: 6665 - DNA, 82 bp, Homo sapiens
  chr19:13263792-13263874
  hyper
gcgtccttcggttgggcggggtgtctcagtgacgtcactgggggtataaaagggcctgggtggcgggcgcctgggcagagcg

SEQ ID NO: 6666 - DNA, 69 bp, Homo sapiens
  chr19:13264168-13264237
  hyper
cccgaggtgtcgttgccggccgccctcccctctgaccctcgcctgcacccgccccgagaagccgagtcc

SEQ ID NO: 6667 - DNA, 31 bp, Homo sapiens
  chr19:13264554-13264585
  hyper
cctgaactgcagccccgcggcccctccgacg

SEQ ID NO: 6668 - DNA, 136 bp, Homo sapiens
  chr19:13266907-13267043
  hyper
gggagggggccttgccgcgcatcctgtcgcaggaaccgccgggcccttccttccgcgggaagcggcttggccgacccccgcccccgcccgggcctcttgggggtttccggtgcccggccaccgtggggctggggac

SEQ ID NO: 6669 - DNA, 63 bp, Homo sapiens
  chr19:13274018-13274081
  hyper
cggcccagcgggaaggcggaggcgggggtcgcgcccaggtcccgggggcgtcagaggcaatgg

SEQ ID NO: 6670 - DNA, 63 bp, Homo sapiens
  chr19:13954424-13954487
  hyper
ggcaccctcccccacccgctgggacctctgggaaactccccgggctcccggagtagctctggg

SEQ ID NO: 6671 - DNA, 74 bp, Homo sapiens
  chr19:13961396-13961470
  hyper
tcaccgcggcgtgatgcggacgggcgcggcgcccagcagcctggccggcggcccgatctcggctggcctcggcg

SEQ ID NO: 6672 - DNA, 31 bp, Homo sapiens
  chr19:13961694-13961725
  hyper
gcagctgagatgatcacgcagtgacactgcg

SEQ ID NO: 6673 - DNA, 55 bp, Homo sapiens
  chr19:13983739-13983794
  hyper
gggagggcgagttagccgggatcgggcttgaggggccctacgaaattcggtttgg

SEQ ID NO: 6674 - DNA, 31 bp, Homo sapiens
  chr19:14074199-14074230
  hyper
tcccgcacagccttcccggcacatgagccca

SEQ ID NO: 6675 - DNA, 31 bp, Homo sapiens
  chr19:14205671-14205702
  hyper
aaaccctctgagcccacgccttgtatgcaag

SEQ ID NO: 6676 - DNA, 49 bp, Homo sapiens
  chr19:14316560-14316609
  hyper
ggcgctccgtgggggccgcccctcccaggcccctcgccagtgggggtga

SEQ ID NO: 6677 - DNA, 58 bp, Homo sapiens
  chr19:14607123-14607181
  hyper
gtggaccgttccgccccgcctaagccgcggctggctgtaccaccggagggctgaggag

SEQ ID NO: 6678 - DNA, 314 bp, Homo sapiens
  chr19:15288400-15288714
  hyper
gcaggcggggtcgcagcggctgttgttgaagaggcgccagcactgcagcgcctcgcattgccgccaggggtcgcccacgctcagcgagcagtcgccgccgtcccagccgcagcctgggctgttgcactcgcggtcgcagcgctggtccccgcgcttggcctggcaggcggcgcgcgggcaccgcggctcctccgagacctcgggtgccgcggcgggcgcctcgcagcgcggcccggtccagccctgcgcgcaagcgcagcggaagaagggcgcgagcggcgcggggcggcaggagcccccgtggagacaggggg

SEQ ID NO: 6679 - DNA, 31 bp, Homo sapiens
  chr19:15288801-15288832
  hyper
agcgcggcccgcggggcgtctgctggcatgg

SEQ ID NO: 6680 - DNA, 57 bp, Homo sapiens
  chr19:15306338-15306395
  hyper
gactgaactcaacaagcggctgactcagtccttagcgtcacccgcaagatccccccc

SEQ ID NO: 6681 - DNA, 31 bp, Homo sapiens
  chr19:15306560-15306591
  hyper
ggatagctggtcccaccgccaggcagggcgc

SEQ ID NO: 6682 - DNA, 95 bp, Homo sapiens
  chr19:15310945-15311040
  hyper
gccccttcccctccccgcgcaggggcggggtcccagggcctccgggtccccgcggccagaggagagaggcgggctgcgggcgggggagggggcgc

SEQ ID NO: 6683 - DNA, 31 bp, Homo sapiens
  chr19:15311095-15311126
  hyper
cctgggaagttttctccgagttcagagctcc

SEQ ID NO: 6684 - DNA, 81 bp, Homo sapiens
  chr19:15311152-15311233
  hyper
cccgcctggcccagcccgcccggggtgtcgggggcggggtgggggggcttttgtgcgagaggtccccggcctagaagtacc

SEQ ID NO: 6685 - DNA, 162 bp, Homo sapiens
  chr19:16186890-16187052
  hyper
taaaagggacagaggacgagctggataaatattccgaggacctgaaggacgcgcaggagaagctggagctcacggagaagaaggcctccgacgtacgtgtgcagggatgcgggagcccgcggcggggccaggccggagccccggggccgggaaggcggggag

SEQ ID NO: 6686 - DNA, 31 bp, Homo sapiens
  chr19:16187105-16187136
  hyper
ttctccaaataagtcccgaaaaggggcactt

SEQ ID NO: 6687 - DNA, 31 bp, Homo sapiens
  chr19:16187138-16187169
  hyper
cagcagctgtggccagcggtgccgacgtcag

SEQ ID NO: 6688 - DNA, 343 bp, Homo sapiens
  chr19:16187276-16187619
  hyper
caaaggcttggggggccggggcgcggctgtgcagctctcgccggagccgagcccagccgagcgtccgccgctgcccgtgcgcctctgcgcctccgcgccatggccggcctcaactccctggaggcggtgaaacgcaagatccaggccctgcagcagcaggcggacgaggcggaagaccgcgcgcagggcctgcagcgggagctggacggcgagcgcgagcggcgcgagaaagtgagcgccccggcctcgggccccgcacccgcagcctcctcccccgcgcgccctcctttcttcccggcttcccgcgctgcccgcccgcgcgcagtcctcgggccgccttttt

SEQ ID NO: 6689 - DNA, 15 bp, Homo sapiens
  chr19:16187640-16187655
  hyper
cgacccacatccctg

SEQ ID NO: 6690 - DNA, 240 bp, Homo sapiens
  chr19:16187798-16188038
  hyper
tggagaagtggagcggcgggagggggcgtatcgtgcaggctccgactccggggctggcgccggggtcccgggccgaggggaacccgcgaccggacttgtgggggagaatgaggatgaaaacgtggagcttccattgtctagggtttgaccggccgacagggatttcgacgggggaccggggatctggggagggggtcgcactttctcgcctctttcgcggcttcccggcttctgcttgct

SEQ ID NO: 6691 - DNA, 94 bp, Homo sapiens
  chr19:16188179-16188273
  hyper
tctctccagaaggccccgggaacgctggcgcggggccctgaacccacgatcgtttgagcgcctgctgtgcgcctccgccgcgagtcgcagggcc

SEQ ID NO: 6692 - DNA, 37 bp, Homo sapiens
  chr19:16222616-16222653
  hyper
tggagccaataaggggcgggctcggtgctgatggacg

SEQ ID NO: 6693 - DNA, 99 bp, Homo sapiens
  chr19:17355756-17355855
  hyper
ggtgtagctgaggttgcggcggatgcttcgcttgaaaaagctcttgcagccctcgcaggtgaagacaccgtaatgcttgccgctcgacttgtccccgca

SEQ ID NO: 6694 - DNA, 271 bp, Homo sapiens
  chr19:17392542-17392813
  hyper
aggacactaaagctctcgaaccccgatgtggacccccgtgcggcgcggggcagcctggctgggaaccctgctcggccctggagaggggccccccgagccgaggggaggagcggcgcatgcccacaagccccccgcgggaagtaggaaatcgaccgaccaggcggtgcgcttcggacccagccagggcatgtgctcggaggcccgcctggctcgcaggttgcgggatgcgctgcgggaggaggagccgtggtgagggcggggccgggggcgg

SEQ ID NO: 6695 - DNA, 48 bp, Homo sapiens
  chr19:17392819-17392867
  hyper
agtgggggtctttggccggggtccactctgaccgcggtgtttgcaggg

SEQ ID NO: 6696 - DNA, 58 bp, Homo sapiens
  chr19:17392868-17392926
  hyper
agtagaggagctgctgcgctgcggcgcggaccctaatttggtgctagaggacggcgca

SEQ ID NO: 6697 - DNA, 88 bp, Homo sapiens
  chr19:17393042-17393130
  hyper
cggggtctccccaagccgaagtctgggaatccgggaaggggcgccccatcatcccgggccaggcctcggggctcgagggtggggttta

SEQ ID NO: 6698 - DNA, 31 bp, Homo sapiens
  chr19:17531153-17531184
  hyper
ctttggcaagagcttcgcgcagaaatctggc

SEQ ID NO: 6699 - DNA, 31 bp, Homo sapiens
  chr19:17958427-17958458
  hyper
taggggctgggaactccgccccccaatccct

SEQ ID NO: 6700 - DNA, 187 bp, Homo sapiens
  chr19:17958474-17958661
  hyper
tccccacccccaaccccgcagcccccgtcgcgcatgcgcaatgactcctccaggtccgcaaggcaggcatctcccggccttagtcaaagccgaagcccagagaagcgagcgatcggaggatgcgagtctcggctcacgtctgcctcgcagctttcctccgaggcctggaaggcgagctagcctttgc

SEQ ID NO: 6701 - DNA, 142 bp, Homo sapiens
  chr19:17958679-17958821
  hyper
cagcccagccatcccccgccaccaccatcctcccccagtgtctgggccgagccctgcggcatcgccagctcttacctagcgggcagggaccctggactttcgaagggcgggcagagccgggaggcagcgagaggaaagtccc

SEQ ID NO: 6702 - DNA, 31 bp, Homo sapiens
  chr19:18059917-18059948
  hyper
atgtggggtgtacccccgggccccgtcatcc

SEQ ID NO: 6703 - DNA, 41 bp, Homo sapiens
  chr19:18062521-18062562
  hyper
ctgggaccttccagcccggtcaacgtcgccagctgcccgaa

SEQ ID NO: 6704 - DNA, 31 bp, Homo sapiens
  chr19:18119199-18119230
  hyper
ccaggccgtggcgggccgggtgctgctggag

SEQ ID NO: 6705 - DNA, 41 bp, Homo sapiens
  chr19:18271956-18271997
  hyper
cccccgaggcctcggccgaggcgcgccgggccctgcggggt

SEQ ID NO: 6706 - DNA, 92 bp, Homo sapiens
  chr19:18335422-18335514
  hyper
ctgcttcgaacaagtccgggtgacgctcgggccgggtcgggcatgttcggtcacgtccggctacatgagggctagttcgggcatctccgact

SEQ ID NO: 6707 - DNA, 71 bp, Homo sapiens
  chr19:18335607-18335678
  hyper
taacccttccctggcccgtctggggtgcgccgtgggcgctgtggtgcaatgggagacgctcttaggggcgg

SEQ ID NO: 6708 - DNA, 54 bp, Homo sapiens
  chr19:18336349-18336403
  hyper
ttcggcgcggaccaagcgcaggatgccagccacagtcggcgcccacaagcccca

SEQ ID NO: 6709 - DNA, 31 bp, Homo sapiens
  chr19:18714846-18714877
  hyper
aacagagtgggaggcacggccaggcctgccc

SEQ ID NO: 6710 - DNA, 34 bp, Homo sapiens
  chr19:18715008-18715042
  hyper
cccgcctggcctgggccggcgtggctcacttgcc

SEQ ID NO: 6711 - DNA, 15 bp, Homo sapiens
  chr19:18715066-18715081
  hyper
gctgggcgggggaca

SEQ ID NO: 6712 - DNA, 31 bp, Homo sapiens
  chr19:18811453-18811484
  hyper
atgccagctggtcattcgcccggaaatctct

SEQ ID NO: 6713 - DNA, 31 bp, Homo sapiens
  chr19:18880083-18880114
  hyper
cttttctgcctagggccggctcaggcagaca

SEQ ID NO: 6714 - DNA, 28 bp, Homo sapiens
  chr19:19651027-19651055
  hyper
cgtcctggttcaacgtggaccaccccgg

SEQ ID NO: 6715 - DNA, 31 bp, Homo sapiens
  chr19:19651126-19651157
  hyper
cgctggcgctggaagcgcgcaccacggactg

SEQ ID NO: 6716 - DNA, 31 bp, Homo sapiens
  chr19:21664417-21664448
  hyper
attaagtaaggccaggcgtggtggccgattc

SEQ ID NO: 6717 - DNA, 31 bp, Homo sapiens
  chr19:30730220-30730251
  hyper
cttttgatggagaaagcgaggcttatccatg

SEQ ID NO: 6718 - DNA, 39 bp, Homo sapiens
  chr19:33555230-33555269
  hyper
aaaataaatatgagaccgccaacacgcctgggatggtct

SEQ ID NO: 6719 - DNA, 69 bp, Homo sapiens
  chr19:33555490-33555559
  hyper
cacctgcccgggacgccggggacatcgccgcccccactcctccccgccagcctccgtccggccagcgcc

SEQ ID NO: 6720 - DNA, 35 bp, Homo sapiens
  chr19:33555747-33555782
  hyper
gcgtcggtcatgctagcggcgcgggcgcggagggc

SEQ ID NO: 6721 - DNA, 86 bp, Homo sapiens
  chr19:33555883-33555969
  hyper
gcggcccttctagccccgcctgaggccgagcactggagccctggagacgcgccccgccccgtcgcgggccccgaacccgcgcccct

SEQ ID NO: 6722 - DNA, 82 bp, Homo sapiens
  chr19:33685229-33685311
  hyper
aggactgacagacccacggacgctctaccggcggcacccggccgggcgggctgggcgcagcgcggggcggcccggggacgcc

SEQ ID NO: 6723 - DNA, 65 bp, Homo sapiens
  chr19:33685330-33685395
  hyper
gccgcggggcatgggcgcgccgggggtccccgggcccaggccggccgcggcggggctcccggggc

SEQ ID NO: 6724 - DNA, 86 bp, Homo sapiens
  chr19:33685952-33686038
  hyper
gcgcagccccggctcccgccccgctcggagtagcgcccggagcccgggctgagcgctggcaggaggcccttcgtgcaggcggcagc

SEQ ID NO: 6725 - DNA, 71 bp, Homo sapiens
  chr19:33792586-33792657
  hyper
ccggcggcaccgagcgcgggcgcggggtgcgggctgggcacgggcgtgggcggcggcgtggggtgaccggg

SEQ ID NO: 6726 - DNA, 461 bp, Homo sapiens
  chr19:33792664-33793125
  hyper
tgcatggtggtctggccgcagtgcgcgatctggaactgcaggtgcggggcggccaggtgcgcgggcggcgggtgcgggtgcgggtgcgagggcggcggcggcggcggcggctggtaagggaagaggccggccagcgccagctgcttggcttcatcctcctcgcggggctcctgcttgatcaccagcggccgcagcgccggcgccccgacgcgctcgtacaggggctccagcctgccgtccaggtagccggcggccgcgcagccgtagccgggcgggggcccgtgcgctcccccgggcatgacggcgccgccggggcccgcgggcgcgcccgggtagtcaaagtcgccgccgccgccgccgcccgtggggcccacggccgccttggccttctcctgctgccggctgtgctggaacaggtcggccaggaactcgtcgttgaaggcggccgggtcgatgtaggc

SEQ ID NO: 6727 - DNA, 44 bp, Homo sapiens
  chr19:33793282-33793326
  hyper
ggccgcggctccgcctcgtagaagtcggccgactccatggggga

SEQ ID NO: 6728 - DNA, 298 bp, Homo sapiens
  chr19:33793356-33793654
  hyper
gcggcctccagcctgcgcggggcgtcgccgccgcccacccggagaccctgctcgcccgcgcccgcgcacctccgggtcgcgaatggcccggcccgcgccggcccagcttttatacccggcaggccgcgtcgccccctagagtccgaggcggcctctgtccccgggctgcggcggcgcggcgcctgctgggtcctagcgcgcggccggcatggggcggcgaaccagcgcggcacagcgccgcgctccccaggcaggccgcggcgcaacgcccaccgcctccagcgcgcccagcagagcc

SEQ ID NO: 6729 - DNA, 38 bp, Homo sapiens
  chr19:33793669-33793707
  hyper
agctccgcccccggcccggccgtcgcccccgcgcccac

SEQ ID NO: 6730 - DNA, 132 bp, Homo sapiens
  chr19:33793732-33793864
  hyper
tcctgcctgccctaggcgcccgtatccagccacggccgggagcccaggagtatcccgaggctgcacggggtaggggtggggggcggagggcgagtcttggtcttgagctgctggggcgcggattctctttca

SEQ ID NO: 6731 - DNA, 132 bp, Homo sapiens
  chr19:33793869-33794001
  hyper
agaaccaggcctgtcccggacccgcgtcccggggaggctgcagcgcagagcagcggggctggggccggtggggggccgtttgggacgcgcggagaggtcctgagcgcggtggctctgcgtctcctagctctg

SEQ ID NO: 6732 - DNA, 98 bp, Homo sapiens
  chr19:33794010-33794108
  hyper
ctacccctgtgattccgcgcagaggtacctctcggaggacgccggggtcccatgggcggcgccgcgcagggcgctaggaccccgcggggagcggaggc

SEQ ID NO: 6733 - DNA, 31 bp, Homo sapiens
  chr19:35490572-35490603
  hyper
gaaaagcccttaccaccgagttagtgggact

SEQ ID NO: 6734 - DNA, 31 bp, Homo sapiens
  chr19:35490607-35490638
  hyper
gcactggggtgatgagcgcaaggtctcagca

SEQ ID NO: 6735 - DNA, 42 bp, Homo sapiens
  chr19:35738943-35738985
  hyper
accggtcccaagccccgcgccttcgctcggcccctttaagag

SEQ ID NO: 6736 - DNA, 40 bp, Homo sapiens
  chr19:36123861-36123901
  hyper
tcctgcgtccagccttcgtcccccacgtgctacagagagc

SEQ ID NO: 6737 - DNA, 31 bp, Homo sapiens
  chr19:36123966-36123997
  hyper
acaccctgacagattccgctctctcctctgc

SEQ ID NO: 6738 - DNA, 82 bp, Homo sapiens
  chr19:36427252-36427334
  hyper
gtgcgcgcggagcctgcgcctttaagcgccggtgcgcgcgctgccctgggttgccggcgaggaggccgcgggagcgcctgga

SEQ ID NO: 6739 - DNA, 69 bp, Homo sapiens
  chr19:36427553-36427622
  hyper
cctcccagtcagcctccgccgcagcccaggaagccagccgggacgccgccgccccggaccccgcgccct

SEQ ID NO: 6740 - DNA, 31 bp, Homo sapiens
  chr19:36544541-36544572
  hyper
acagatcttttacagtcgaagctaattctga

SEQ ID NO: 6741 - DNA, 31 bp, Homo sapiens
  chr19:36909232-36909263
  hyper
cggccacaacaaccttcgctcatacaatagt

SEQ ID NO: 6742 - DNA, 135 bp, Homo sapiens
  chr19:36909623-36909758
  hyper
cgctcgctggtgcagcccctgctctgcgtgaacccggagccggagctaggtccgtcccagcgaggctgcgcttcgagtcccttagcgcctggggacggcgcggcagggcctggaggggagcggggacagatggct

SEQ ID NO: 6743 - DNA, 49 bp, Homo sapiens
  chr19:36909886-36909935
  hyper
tgttgggatttgagaccgtgtgactccggagattcggggaagccagttc

SEQ ID NO: 6744 - DNA, 58 bp, Homo sapiens
  chr19:38398220-38398278
  hyper
ggggagcggtggattcgcgtcccggctgtgccactcgggagccgcgatctgggaaaac

SEQ ID NO: 6745 - DNA, 31 bp, Homo sapiens
  chr19:38417473-38417504
  hyper
taggcaatgtatgtagcgtctgctgcatgca

SEQ ID NO: 6746 - DNA, 52 bp, Homo sapiens
  chr19:38853183-38853235
  hyper
ggccactcgttccggacgcagtcagaactcggtctgcgcgggaccagagtgg

SEQ ID NO: 6747 - DNA, 31 bp, Homo sapiens
  chr19:38943562-38943593
  hyper
acttcgagcctccctccgaggacttgcagca

SEQ ID NO: 6748 - DNA, 31 bp, Homo sapiens
  chr19:39139549-39139580
  hyper
taatgggagagaggttcgtttaggaaaatga

SEQ ID NO: 6749 - DNA, 31 bp, Homo sapiens
  chr19:39139586-39139617
  hyper
cattagaaagggaatgcgtaatggatagact

SEQ ID NO: 6750 - DNA, 85 bp, Homo sapiens
  chr19:39139648-39139733
  hyper
cctggaggtgcagtcccgggactggagagcgtgtgtgtgtcgtgcaggcagaatgagtttggggaggaagcgttgagagtgtcca

SEQ ID NO: 6751 - DNA, 31 bp, Homo sapiens
  chr19:39139745-39139776
  hyper
tcttttttggagagaccggaggtaggtgaag

SEQ ID NO: 6752 - DNA, 31 bp, Homo sapiens
  chr19:39140556-39140587
  hyper
gaggggtgtccttatccgtggccccacctac

SEQ ID NO: 6753 - DNA, 31 bp, Homo sapiens
  chr19:39140589-39140620
  hyper
caggatggacaggttgcgatagttggcataa

SEQ ID NO: 6754 - DNA, 31 bp, Homo sapiens
  chr19:39379455-39379486
  hyper
aggaggtcactgccaccgcactgcagacctg

SEQ ID NO: 6755 - DNA, 70 bp, Homo sapiens
  chr19:39818897-39818967
  hyper
ttcctctaggtcagcccgccccctgctggcccaagcctcgtactgcaggaaccgtcggctagagcccaga

SEQ ID NO: 6756 - DNA, 31 bp, Homo sapiens
  chr19:39818984-39819015
  hyper
ccaaactgaggatctccgagtttttgcattt

SEQ ID NO: 6757 - DNA, 44 bp, Homo sapiens
  chr19:40939938-40939982
  hyper
ggccgcggccgcctcccgggtaccccggccggcccagggcggag

SEQ ID NO: 6758 - DNA, 31 bp, Homo sapiens
  chr19:41103204-41103235
  hyper
cagccgccacctccgccgccagccccagccc

SEQ ID NO: 6759 - DNA, 54 bp, Homo sapiens
  chr19:41119081-41119135
  hyper
gtcggcccgggccctgcgcaggtgagcagcatagggacccgccagagagtctgg

SEQ ID NO: 6760 - DNA, 60 bp, Homo sapiens
  chr19:41119147-41119207
  hyper
ggttccagggcaaagccggctggaaaggtggaggcgggaccaaggcgctgtgggaggagc

SEQ ID NO: 6761 - DNA, 61 bp, Homo sapiens
  chr19:41119215-41119276
  hyper
ctggcattggtgggggcggggttactgcgatgtgggcggagcttgtctgggaggccgggtc

SEQ ID NO: 6762 - DNA, 21 bp, Homo sapiens
  chr19:41119669-41119690
  hyper
ggggggcggtgtttgcaggga

SEQ ID NO: 6763 - DNA, 47 bp, Homo sapiens
  chr19:41120295-41120342
  hyper
gctgtgtccgggactgcgatcctgggtaccacgcgggccccgagggc

SEQ ID NO: 6764 - DNA, 46 bp, Homo sapiens
  chr19:41223421-41223467
  hyper
tggtcagagctggagacgacttgtctttggacggagaccgggacag

SEQ ID NO: 6765 - DNA, 31 bp, Homo sapiens
  chr19:41223497-41223528
  hyper
acctccagtttcagcccgaggaggccagccc

SEQ ID NO: 6766 - DNA, 54 bp, Homo sapiens
  chr19:41732032-41732086
  hyper
tcccggctctggctccgcgcccccgaagccggccggaagcgctggggtggggag

SEQ ID NO: 6767 - DNA, 87 bp, Homo sapiens
  chr19:41732204-41732291
  hyper
ccctggcggggccccacgtgccaggtggctggacccgacccaggctccccgcccccactcgggccgcccgcccgggactgtactgtt

SEQ ID NO: 6768 - DNA, 37 bp, Homo sapiens
  chr19:41831044-41831081
  hyper
cccctcccagttctcccggggtcggggtaggtggaaa

SEQ ID NO: 6769 - DNA, 51 bp, Homo sapiens
  chr19:41832011-41832062
  hyper
ctgccacagccagctccgagccagcgtggcaccagccggcaaggggacgcg

SEQ ID NO: 6770 - DNA, 34 bp, Homo sapiens
  chr19:41882552-41882586
  hyper
gggatccctcgccggacgccgcggagggacagag

SEQ ID NO: 6771 - DNA, 31 bp, Homo sapiens
  chr19:42028282-42028313
  hyper
atctaaaacaaaccaacgaggctgccaacct

SEQ ID NO: 6772 - DNA, 108 bp, Homo sapiens
  chr19:42028352-42028460
  hyper
cttcagagccccacaccgctcatcctcccggcccggcgccggccgcggtgatggggtaggcgcggggcctggggcagcctttcccggcccgcccgggccccctccgcc

SEQ ID NO: 6773 - DNA, 284 bp, Homo sapiens
  chr19:42028469-42028753
  hyper
ccgctttctgcctgcgcgcgccgcagggacgtggcggcccttagaggccgggacagcgggcgcagcgtggagcttgggggccgcgaggcgcgggctcagacatccccgggtaagcctcggcggcggcggccgcgacaacggcaaaaatgcgactgcgaccgcgaccggtctcgtgctcgcgcttccgcggcccggctgctccctccggcgccccggcgctgcctcttcctcgcctgccttccttccccctgggctccccgtttgtttttcgaccttcctttata

SEQ ID NO: 6774 - DNA, 49 bp, Homo sapiens
  chr19:42257255-42257304
  hyper
ggaactggggaaagctcgctgcgccgccagggggcgccatcacaaacca

SEQ ID NO: 6775 - DNA, 46 bp, Homo sapiens
  chr19:42636785-42636831
  hyper
agcaggctggaagagccgactcctacggctgcgatccaagaggtgc

SEQ ID NO: 6776 - DNA, 31 bp, Homo sapiens
  chr19:42774823-42774854
  hyper
gccagcccagccagggcggggatgcatgcag

SEQ ID NO: 6777 - DNA, 40 bp, Homo sapiens
  chr19:42774862-42774902
  hyper
aggggggctgggcttgcgggtatcacgctgggtgctgtgg

SEQ ID NO: 6778 - DNA, 73 bp, Homo sapiens
  chr19:42905857-42905930
  hyper
gcccccttgccacccccgacttaagtaaggcacagcccgcgtccccttccgcccggcccggaaggcattcatg

SEQ ID NO: 6779 - DNA, 31 bp, Homo sapiens
  chr19:43866888-43866919
  hyper
gggtgctccagccaaacgtatttgggcatca

SEQ ID NO: 6780 - DNA, 74 bp, Homo sapiens
  chr19:44143853-44143927
  hyper
ggccgaccccggcccccgaccctacctggccccgccgcggccgcccacagcagcagcagcggccactggaagcg

SEQ ID NO: 6781 - DNA, 39 bp, Homo sapiens
  chr19:44144096-44144135
  hyper
gaggcccggagacaatcggggggacggcacggtggggga

SEQ ID NO: 6782 - DNA, 70 bp, Homo sapiens
  chr19:44144185-44144255
  hyper
ggggtgcgcgggagggcgacagcggcgtgggagcaggtgggggatctcggtgagcgcgggaaatggaggg

SEQ ID NO: 6783 - DNA, 95 bp, Homo sapiens
  chr19:44144257-44144352
  hyper
ttgggtgagggtgctgcgtgcgggcccaggtgctgcgcgcgagggtgcggagttgctggcatgcagggtgcttgcgctgcgcggaggggagggtg

SEQ ID NO: 6784 - DNA, 49 bp, Homo sapiens
  chr19:44144359-44144408
  hyper
gttgctggaggctgtgcgagggtgggggcgcgggcgtcgtggggtgcgg

SEQ ID NO: 6785 - DNA, 31 bp, Homo sapiens
  chr19:44506685-44506716
  hyper
ctgtcatcgtgggaggcgtttagacttcagg

SEQ ID NO: 6786 - DNA, 35 bp, Homo sapiens
  chr19:44506747-44506782
  hyper
gactcaggaagagagacggacgactcacagggtca

SEQ ID NO: 6787 - DNA, 110 bp, Homo sapiens
  chr19:44506787-44506897
  hyper
cacattccccaccaggcgctcagagatatggaatacgttcccggtgggcactgcggtgtgtgtagtcaaggaccaccgcggagtccaacgcttcccgctgaagagtgaga

SEQ ID NO: 6788 - DNA, 73 bp, Homo sapiens
  chr19:44507928-44508001
  hyper
gagatgttcacccaaccgagagtgtgtcctcgggaatgggtgttgataatcattaagccgtaattggtaactt

SEQ ID NO: 6789 - DNA, 79 bp, Homo sapiens
  chr19:44617148-44617227
  hyper
ttccccactaggcaggcgctcgtggctttgggattcgttcccagtgggcacctcggagtggcaacgcttccccctgaag

SEQ ID NO: 6790 - DNA, 31 bp, Homo sapiens
  chr19:44617243-44617274
  hyper
tttttccttcagcattcggaggagtgtaatc

SEQ ID NO: 6791 - DNA, 31 bp, Homo sapiens
  chr19:44617275-44617306
  hyper
aaatgctctgtggagtcgtacacactggctc

SEQ ID NO: 6792 - DNA, 68 bp, Homo sapiens
  chr19:44617331-44617399
  hyper
ggaatggtagtccagacgctcagtggagtagcggtcagcttggctccggcaggcgaatcaggggattt

SEQ ID NO: 6793 - DNA, 31 bp, Homo sapiens
  chr19:44645442-44645473
  hyper
caggcagagggaaggacgactctcagggtca

SEQ ID NO: 6794 - DNA, 50 bp, Homo sapiens
  chr19:44645478-44645528
  hyper
cacattccctaccaagcgctcagcgatataggattcgttccccatgggca

SEQ ID NO: 6795 - DNA, 52 bp, Homo sapiens
  chr19:44645834-44645886
  hyper
ctgggacctggtggtccggttatgggaaaagaagcctcgtgggagagcagag

SEQ ID NO: 6796 - DNA, 31 bp, Homo sapiens
  chr19:44646151-44646182
  hyper
accatctttgtagaatcgttttggtaactgg

SEQ ID NO: 6797 - DNA, 209 bp, Homo sapiens
  chr19:44808915-44809124
  hyper
agcagaccctcaacctcgaaggacgacgcgagcccgcctcccacgcaagaggttctgccgaggggacgcaaactcccgcagcctcccaaccccgccctccagcgctggccgcggcttctcttccccaagccaaggacgggttcattgctggccccacgcctaggcaaagagggctcggagaagtcttggagacccggagctgactcacc

SEQ ID NO: 6798 - DNA, 31 bp, Homo sapiens
  chr19:44809130-44809161
  hyper
ggagatatctcagatccgacctcgccttcct

SEQ ID NO: 6799 - DNA, 301 bp, Homo sapiens
  chr19:45004315-45004616
  hyper
cccctaccaacctgggcgtccgctggcccgcagcccaggctgggcctgtcaccgcctcagtgcctagcacggctctgcggcaggacgaactcgggttaggcaaccccctgccccgattctgcaacacggccgactcgggttaagctagttcggtcccctctcctagtcagcatccgcaaggccgctgggggttaagtctgaagggccgagctgctcggcgacagcaagcgtccgcgcgcgggacaatggctgctcttgtggccgaacccggaagtgcacttgggctcggagagccagaact

SEQ ID NO: 6800 - DNA, 60 bp, Homo sapiens
  chr19:45004619-45004679
  hyper
attcccagaagcctccgcggcgcggacggtcagtaggcggggttccggcttctccaagga

SEQ ID NO: 6801 - DNA, 110 bp, Homo sapiens
  chr19:45004771-45004881
  hyper
agcactaagaccagccgcggcgccgggaggccgaggccagtgcagcgacgcatggggagtcgctctggcgtgacgtcagaatccaatagaaatggcggggaccctttctg

SEQ ID NO: 6802 - DNA, 31 bp, Homo sapiens
  chr19:45004885-45004916
  hyper
ccccctgcctgtcagacgctgcgcgcgaccc

SEQ ID NO: 6803 - DNA, 53 bp, Homo sapiens
  chr19:45281277-45281330
  hyper
gcaatgcgtcgacccccggctgtccgtgagtcccccttcgctgcgggacctgc

SEQ ID NO: 6804 - DNA, 54 bp, Homo sapiens
  chr19:45281358-45281412
  hyper
ggtggcccattctcggcgggcggccggcggaggcggccccgggggtcccggcgg

SEQ ID NO: 6805 - DNA, 31 bp, Homo sapiens
  chr19:45287821-45287852
  hyper
ggtcttgaggaaggggcgcctctgagggtcg

SEQ ID NO: 6806 - DNA, 31 bp, Homo sapiens
  chr19:45300245-45300276
  hyper
ttaggaggcactcagccggctcccagaggac

SEQ ID NO: 6807 - DNA, 47 bp, Homo sapiens
  chr19:45312125-45312172
  hyper
ggccccccgctgcaggcgctggtcagtaagcccggacagctctaggc

SEQ ID NO: 6808 - DNA, 31 bp, Homo sapiens
  chr19:45312174-45312205
  hyper
gggggcggacgagccccgagcctggccccgt

SEQ ID NO: 6809 - DNA, 35 bp, Homo sapiens
  chr19:45312232-45312267
  hyper
ggaggtcctggccccgcgcccgggcatcgggggac

SEQ ID NO: 6810 - DNA, 31 bp, Homo sapiens
  chr19:45312293-45312324
  hyper
gcggggctgccgggggcggggcctctggctc

SEQ ID NO: 6811 - DNA, 53 bp, Homo sapiens
  chr19:45347905-45347958
  hyper
cccggcctcccgcttcgcgccctcatcccgccccccggcgcggcctcaccagc

SEQ ID NO: 6812 - DNA, 41 bp, Homo sapiens
  chr19:45348022-45348063
  hyper
ggagagacaaagggcccgagtctgagcgagagacacaaaga

SEQ ID NO: 6813 - DNA, 56 bp, Homo sapiens
  chr19:45348185-45348241
  hyper
ctctgctgccccctggcgggtggctgcggtgagaaggcggcgcggagcaggtgttg

SEQ ID NO: 6814 - DNA, 31 bp, Homo sapiens
  chr19:45348243-45348274
  hyper
aggggaggaccagggcgcgcagggaggtagg

SEQ ID NO: 6815 - DNA, 31 bp, Homo sapiens
  chr19:45348807-45348838
  hyper
aagaccagaaacagagcgacaccgaagcatg

SEQ ID NO: 6816 - DNA, 117 bp, Homo sapiens
  chr19:45348954-45349071
  hyper
agcgacacctagagttcggggcagagattagaaacgcacgagggtacgagaaacaggctcagggcgatgggctcgacctgcggggaggtcgcacaaccgggacgtgctgggggcaga

SEQ ID NO: 6817 - DNA, 495 bp, Homo sapiens
  chr19:45349504-45349999
  hyper
gggccggagccagggtcggcttgactcgggggagcagcgggtggatcctgtgacgtcagcgggttcgaaccgccggagctgagcgagaggccgggggtgccgagccgggcggggagagctgggccgggagagcagaacagggaggctagagcgcagcgggaaccggcccggagccggagccggagccccacaggcacctactaaaccgcccagccgatcggcccccacagagtggcccgcgggcctccggccgggcccagtcccctcccgggccctccatggcccgggccgctgccctcctgccgtcgagatcgccgccgacgccgctgctgtggccgctgctgctgctgctgctcctggaaaccggtgagacgagcggacggccccctgccctcgcgcggaccccctccaaccttaccttccgagctggggaagccgagcaccttccccgcccacccccggctccccgagccccctctcgcgtgcccccttcct

SEQ ID NO: 6818 - DNA, 56 bp, Homo sapiens
  chr19:45350001-45350057
  hyper
ctggccccacagactccgaccccctacacgtccgattctctcgaggagactctgac

SEQ ID NO: 6819 - DNA, 42 bp, Homo sapiens
  chr19:45350286-45350328
  hyper
taccgcagtaaggtctcgaggaagaggcgagaccacctccct

SEQ ID NO: 6820 - DNA, 62 bp, Homo sapiens
  chr19:45844195-45844257
  hyper
agggccttggggctcccggatgccccctgccccgtcctggggctctccgggatctggaggcc

SEQ ID NO: 6821 - DNA, 31 bp, Homo sapiens
  chr19:45889375-45889406
  hyper
gttgaggcgcgcgcggcgggccttgcgcggg

SEQ ID NO: 6822 - DNA, 47 bp, Homo sapiens
  chr19:45908809-45908856
  hyper
ttgtagtcctggagcccgcaggggctgcaccccggtgtctctctcgc

SEQ ID NO: 6823 - DNA, 31 bp, Homo sapiens
  chr19:45959072-45959103
  hyper
gtgtcaggcagccagccggctgcctgccctg

SEQ ID NO: 6824 - DNA, 59 bp, Homo sapiens
  chr19:45959173-45959232
  hyper
cagccacatacctggccgctgacatcacccggccagggcacccccggcagcctagacaa

SEQ ID NO: 6825 - DNA, 102 bp, Homo sapiens
  chr19:45959233-45959335
  hyper
ctgactgaatcacaggcggaattcagccaccccgggcacgtggcctgctgtgaccccccgcaacacccccgagtggccgtctggctgcgggggttgggccgg

SEQ ID NO: 6826 - DNA, 70 bp, Homo sapiens
  chr19:46271266-46271336
  hyper
agagctggacttgcgccgcccgaggcccctcacctcttgcagggcgcgccgcctccggccccggtccggt

SEQ ID NO: 6827 - DNA, 108 bp, Homo sapiens
  chr19:46271507-46271615
  hyper
agatggtcttgggcagcgggaacttcttgcgcagtcgatacttgtccactgcgccaagcgcgcggccgcgggcccgctcggcctcatggtagcgcgcgcgcaggtaga

SEQ ID NO: 6828 - DNA, 34 bp, Homo sapiens
  chr19:46273812-46273846
  hyper
ccaatgcagcccagggcggcggcacgagacagaa

SEQ ID NO: 6829 - DNA, 118 bp, Homo sapiens
  chr19:46379913-46380031
  hyper
acccccgccccctgccgcgctggctccccgtccgtcccaccagccttgctgtcctgggcaggccggggaattcctcccggttcctggaaaaaacaactggggccgagagaaaggccct

SEQ ID NO: 6830 - DNA, 95 bp, Homo sapiens
  chr19:46380032-46380127
  hyper
agtctccccaggcacccgcccccctccctcgggcctgggggtctctcccggagtcggccagcccgaggcaggaagccctgcggtttctggcttct

SEQ ID NO: 6831 - DNA, 51 bp, Homo sapiens
  chr19:46380169-46380220
  hyper
gcccaaatattattccgcgggaggagtcggtggtggcgggaggaggcccag

SEQ ID NO: 6832 - DNA, 31 bp, Homo sapiens
  chr19:46380224-46380255
  hyper
aaagaggctttcagggcggccaggcctgggg

SEQ ID NO: 6833 - DNA, 43 bp, Homo sapiens
  chr19:46380256-46380299
  hyper
ttcctgtccccaggctcgggcctcaggccgccccagtggggac

SEQ ID NO: 6834 - DNA, 31 bp, Homo sapiens
  chr19:46380377-46380408
  hyper
ccaccagctctgctggcgtgggcaggtgtga

SEQ ID NO: 6835 - DNA, 15 bp, Homo sapiens
  chr19:46380411-46380426
  hyper
ccaccccagggacag

SEQ ID NO: 6836 - DNA, 43 bp, Homo sapiens
  chr19:46996608-46996651
  hyper
cttcctccgtcgggatcgctggcgcccccggcctgcgagggcc

SEQ ID NO: 6837 - DNA, 56 bp, Homo sapiens
  chr19:47363285-47363341
  hyper
gcacacaggaccaggccgtcttccctctcctggggatcagtcgttcacagaaccaa

SEQ ID NO: 6838 - DNA, 31 bp, Homo sapiens
  chr19:47363344-47363375
  hyper
caagttgcatggacgcgcgcgttggctgcag

SEQ ID NO: 6839 - DNA, 14 bp, Homo sapiens
  chr19:47363388-47363402
  hyper
ccaggagaaagagc

SEQ ID NO: 6840 - DNA, 31 bp, Homo sapiens
  chr19:47494585-47494616
  hyper
gcgccatctagaggtgcgtgaaatcctgcca

SEQ ID NO: 6841 - DNA, 31 bp, Homo sapiens
  chr19:47516068-47516099
  hyper
tagtccaggagtgaaacggtggcggattaga

SEQ ID NO: 6842 - DNA, 31 bp, Homo sapiens
  chr19:47523252-47523283
  hyper
gggtaggggaagcttgcgggctggcaggagg

SEQ ID NO: 6843 - DNA, 31 bp, Homo sapiens
  chr19:47729938-47729969
  hyper
gccagagcccccggggcgctgggcacgggcg

SEQ ID NO: 6844 - DNA, 31 bp, Homo sapiens
  chr19:47738880-47738911
  hyper
ttgcagggtagatactcggaggccagatgta

SEQ ID NO: 6845 - DNA, 34 bp, Homo sapiens
  chr19:47742974-47743008
  hyper
gttgccaggggaaactcgccgccccgttacccag

SEQ ID NO: 6846 - DNA, 31 bp, Homo sapiens
  chr19:48823670-48823701
  hyper
cccttcagacagcaggcgggccagggcccag

SEQ ID NO: 6847 - DNA, 31 bp, Homo sapiens
  chr19:48823705-48823736
  hyper
ggtggacaatgaactgcgagggactgggaat

SEQ ID NO: 6848 - DNA, 24 bp, Homo sapiens
  chr19:48902532-48902556
  hyper
aggaatgggcctgggcgcggtggc

SEQ ID NO: 6849 - DNA, 50 bp, Homo sapiens
  chr19:48994397-48994447
  hyper
gccccggggtctccagcgcaggcgagacggagaagcgggagaagcacagc

SEQ ID NO: 6850 - DNA, 53 bp, Homo sapiens
  chr19:48994528-48994581
  hyper
aggctgcagacacctgcggcactcccgccctctggtcccgcccctcccgacca

SEQ ID NO: 6851 - DNA, 31 bp, Homo sapiens
  chr19:48996514-48996545
  hyper
gccttcgtctaggccccgccccaggccctgc

SEQ ID NO: 6852 - DNA, 31 bp, Homo sapiens
  chr19:48996832-48996863
  hyper
gcctccctccaggccccgcccaactctaagc

SEQ ID NO: 6853 - DNA, 117 bp, Homo sapiens
  chr19:48996913-48997030
  hyper
ccgcgaccccgaaaccgcgccctctcgggttccgcacctggtcgaagaggtagacggtcacgtccccgtggaaggagaccatcttgcgcttcctctccagctcgctgtcctctggct

SEQ ID NO: 6854 - DNA, 31 bp, Homo sapiens
  chr19:49466992-49467023
  hyper
gggaaccaaaaagacacggagacaaagcaca

SEQ ID NO: 6855 - DNA, 167 bp, Homo sapiens
  chr19:49467144-49467311
  hyper
tggccccacccccatccgtccccgcgggggccccttcccgcgctgagctcagcatgactcagcagtcgctgcctgcaacaaggaccccagataccggcctggcggggcatctgcagatcccctcggtcaggggctgccccgcctgggctgttcggagcagctcctct

SEQ ID NO: 6856 - DNA, 56 bp, Homo sapiens
  chr19:49577261-49577317
  hyper
gggcgcagagacaagacggtggccttctagccactggtgtccggtgacactgcata

SEQ ID NO: 6857 - DNA, 31 bp, Homo sapiens
  chr19:49577377-49577408
  hyper
ggaaagaagtcctggtcgccctctgctgggg

SEQ ID NO: 6858 - DNA, 35 bp, Homo sapiens
  chr19:49577420-49577455
  hyper
gtaggtactaagggttcgaacgccctgctaatcct

SEQ ID NO: 6859 - DNA, 334 bp, Homo sapiens
  chr19:49660927-49661261
  hyper
atcgcggcctgggacccgccctctccccgcctcccgctttggcgtctccaagactccccgccccccagacctcgccccgccccaggctaggctggaaagtggaggatccggtttgctctgggcgggtctggaagcagagccggcggagggagcgccggggccctgggctgcaggaggttgcggcggccgcggcagcatggtggtgccggagaaggagcaggtgagcgccggaccagggtctgcgggagcgcggagctggggacctcgcctccaggctcccagagaggagggcgctggacacccagattcctgggtcagacggaggagggggatg

SEQ ID NO: 6860 - DNA, 93 bp, Homo sapiens
  chr19:49661281-49661374
  hyper
tccagggcatgggggtcgagactcctgagtctggagcgggagggcgctgggggcccggactcctgtgtccgtggggagcgcacggggtgggtg

SEQ ID NO: 6861 - DNA, 35 bp, Homo sapiens
  chr19:50316325-50316360
  hyper
agcagatgcacagtgccgcccgtcccctcctcccc

SEQ ID NO: 6862 - DNA, 76 bp, Homo sapiens
  chr19:50316361-50316437
  hyper
atttaggactcccaccgcggtccctcacgtggggactgtcagtgcgggtcttggagcatggcggtaatcagagtaa

SEQ ID NO: 6863 - DNA, 31 bp, Homo sapiens
  chr19:50316562-50316593
  hyper
ccattaggttctcttccgccctagccggaag

SEQ ID NO: 6864 - DNA, 36 bp, Homo sapiens
  chr19:50815621-50815657
  hyper
ttcattcctccccaatcgccccgccccctggcccgt

SEQ ID NO: 6865 - DNA, 47 bp, Homo sapiens
  chr19:50816111-50816158
  hyper
ccctagccctttgccccgcccccaccaaaacccgccccacccctcac

SEQ ID NO: 6866 - DNA, 58 bp, Homo sapiens
  chr19:50816212-50816270
  hyper
ccccttgcataggaatcgttgcatcgagaatcgtgctcagtgacgccccccatccacc

SEQ ID NO: 6867 - DNA, 40 bp, Homo sapiens
  chr19:50818678-50818718
  hyper
aaggcgggatggtgggcggcaggggcgtggggaggggctg

SEQ ID NO: 6868 - DNA, 31 bp, Homo sapiens
  chr19:50818728-50818759
  hyper
atgtgggagcagccagcggagagggcaggga

SEQ ID NO: 6869 - DNA, 95 bp, Homo sapiens
  chr19:50819425-50819520
  hyper
tggggggatggagaaacgccgccgggatcatttcctcctctctggtgttttccgcgggaggggagcagtgaaatggggggcggctgagacatcaa

SEQ ID NO: 6870 - DNA, 62 bp, Homo sapiens
  chr19:50828913-50828975
  hyper
agttccccgccccctccgagccgggcgcgcggcgctagctgcggcaccgcagtgggggcggg

SEQ ID NO: 6871 - DNA, 31 bp, Homo sapiens
  chr19:50829065-50829096
  hyper
ttaaccccttccgggccggagcctattcaac

SEQ ID NO: 6872 - DNA, 31 bp, Homo sapiens
  chr19:50833852-50833883
  hyper
ctgcagattggaggaccgagggtagatgagg

SEQ ID NO: 6873 - DNA, 114 bp, Homo sapiens
  chr19:50833885-50833999
  hyper
tggtgaggagggggcacgcaaggaggcagagaggacgggagaggggagaggccaaagcgccaggaagcaccgtcaagactgaggcaatataggcaggaccgataaaaaatgggg

SEQ ID NO: 6874 - DNA, 98 bp, Homo sapiens
  chr19:50836544-50836642
  hyper
gggggagtgacatcaccgccggaggaggggcagcaccgctcccccaacccaggggcttcaagctccgcctttatggcggaccccggggtcctggaatg

SEQ ID NO: 6875 - DNA, 80 bp, Homo sapiens
  chr19:52097791-52097871
  hyper
acctgggagtcgtaggcggatgggcccaaagccttccgggagtcgtagtccttccgcccgctcctcgtttctttggaggt

SEQ ID NO: 6876 - DNA, 31 bp, Homo sapiens
  chr19:52160024-52160055
  hyper
actgacatgaaagccccgactttcttggaaa

SEQ ID NO: 6877 - DNA, 31 bp, Homo sapiens
  chr19:52207084-52207115
  hyper
ctaggggtaggttatgcgtaagggtttaagg

SEQ ID NO: 6878 - DNA, 31 bp, Homo sapiens
  chr19:52207133-52207164
  hyper
gtttagggcaggggagcgagaaggctcgggg

SEQ ID NO: 6879 - DNA, 82 bp, Homo sapiens
  chr19:52207202-52207284
  hyper
ggtctggctcggggggcggggcttgtaggttactcagtggcaagccggagttgaggcgtttaaacccgcgtgtcccgcagct

SEQ ID NO: 6880 - DNA, 405 bp, Homo sapiens
  chr19:52207401-52207806
  hyper
ccagcgccccctggcccggctctacttctttcttaacggtggggcggggcgcggccgcgtgagtgagcggggtcgggagaggggtggggctcgtgcctggctgacgtgcgcgcccccgcagtgacgggcccgcccccgcgggcggagacagagttgcaggcctcgttccgggaagtgctgcgctgggcgccgcgggatgccgagctgatcgagccctggaggcccagcctgggcgagctgctggccaggcccgaggctctgacgcccagcaatctgttcctgcttgcagtcctcggggccctcgcatcagcgagtgcgacagtgttggcgtggtgagttctggggactccggagccccagcatctagctccccgctgtctcagatcccaccgagaagtctgggtt

SEQ ID NO: 6881 - DNA, 31 bp, Homo sapiens
  chr19:52531307-52531338
  hyper
cagacccagacagagtcggactcgtcgctga

SEQ ID NO: 6882 - DNA, 57 bp, Homo sapiens
  chr19:52531783-52531840
  hyper
agggacactcaagagtcgggtgcccagccaaggccaacacggcgcagtggcattcta

SEQ ID NO: 6883 - DNA, 31 bp, Homo sapiens
  chr19:52643470-52643501
  hyper
ttgtcctgtgaagcagcgttgctgcctgcct

SEQ ID NO: 6884 - DNA, 36 bp, Homo sapiens
  chr19:52674676-52674712
  hyper
gttcgattcaggcagacggggcgaagcaaatgttta

SEQ ID NO: 6885 - DNA, 35 bp, Homo sapiens
  chr19:53360912-53360947
  hyper
ggagccaacgaggaggcgagcggggcccgggtgag

SEQ ID NO: 6886 - DNA, 77 bp, Homo sapiens
  chr19:55728162-55728239
  hyper
atcgtggaggatgccacgcacagacgtgaatagaaagagcctggaccgtgtcctgaggtcagcgactgaggtcctgg

SEQ ID NO: 6887 - DNA, 31 bp, Homo sapiens
  chr19:55728245-55728276
  hyper
ccagccaggacctgcccgggggctactgccc

SEQ ID NO: 6888 - DNA, 31 bp, Homo sapiens
  chr19:55728287-55728318
  hyper
acctccagggaccctacgttgacacccatgg

SEQ ID NO: 6889 - DNA, 56 bp, Homo sapiens
  chr19:55728329-55728385
  hyper
ccacccctcagtcctgcgtgcggcacgtagtgctcactgggcgtctgtgtaggggg

SEQ ID NO: 6890 - DNA, 59 bp, Homo sapiens
  chr19:55728394-55728453
  hyper
gaggctggaacaagggcgtggcggtcgcaggctccagggcacgacggtccttcctcttc

SEQ ID NO: 6891 - DNA, 117 bp, Homo sapiens
  chr19:55728462-55728579
  hyper
gccacatctggggctccgtccctgcagccaaggctccctggcgctgtccttggtgctgacgcggttctggaagtgcggtgccagggtggctggtgcggctcccgatggaaaagcccc

SEQ ID NO: 6892 - DNA, 22 bp, Homo sapiens
  chr19:55764189-55764211
  hyper
gccactgcgcctggctgtacac

SEQ ID NO: 6893 - DNA, 50 bp, Homo sapiens
  chr19:55953998-55954048
  hyper
gagggggcgcccgggccgccgcgcccgccccgcccgcggggccggtcctg

SEQ ID NO: 6894 - DNA, 34 bp, Homo sapiens
  chr19:56015146-56015180
  hyper
tcccgcaggagagtctcgccgcaagcgtcctttc

SEQ ID NO: 6895 - DNA, 68 bp, Homo sapiens
  chr19:56098516-56098584
  hyper
ttgcaacggttgagatcgtcctcagggtaaaattcccgctcctgtcctctcctcgcttcccacccccc

SEQ ID NO: 6896 - DNA, 114 bp, Homo sapiens
  chr19:56151955-56152069
  hyper
gctgggtggagaatcacggcccggccacatcggagccaatggctggtctctggacctcggtctccacatttgctcagccggcaggaacatcccttctcccgccctctacctcgg

SEQ ID NO: 6897 - DNA, 87 bp, Homo sapiens
  chr19:56159540-56159627
  hyper
gggtgggcgcttccctcggctccccgtgacactttgcagacgctccccggcgccgggcatgggcgccgccgccgtcggtccccgagc

SEQ ID NO: 6898 - DNA, 50 bp, Homo sapiens
  chr19:56159637-56159687
  hyper
gagcgggtgggtgagcgcggggggcctcggcccctcggaccccgggcacc

SEQ ID NO: 6899 - DNA, 31 bp, Homo sapiens
  chr19:56186172-56186203
  hyper
gggacgcccctgctgccggcgccggcagcct

SEQ ID NO: 6900 - DNA, 31 bp, Homo sapiens
  chr19:56809209-56809240
  hyper
tgataggactgagggccggaaaaccagaaaa

SEQ ID NO: 6901 - DNA, 31 bp, Homo sapiens
  chr19:56915153-56915184
  hyper
tgcccgatacagcaggcgctcaataagtggc

SEQ ID NO: 6902 - DNA, 52 bp, Homo sapiens
  chr19:56915376-56915428
  hyper
gcggtcactgcgcgtgcgcctcaccgcgctggcaccccggcctggcagcctt

SEQ ID NO: 6903 - DNA, 58 bp, Homo sapiens
  chr19:56915637-56915695
  hyper
cagcatcctctgcgccgcgccggccccggactccatttcccagcggcccctgcggcct

SEQ ID NO: 6904 - DNA, 43 bp, Homo sapiens
  chr19:56915725-56915768
  hyper
ggccgccggccaggatcgagccctggcccgggccctggcccag

SEQ ID NO: 6905 - DNA, 99 bp, Homo sapiens
  chr19:56915770-56915869
  hyper
ccggcctccaaggaccgcgccgaaggaggtgcccactggagggaggaggcggtgaggagcgcgggatggagctgacgccgggagcggccatgccaccat

SEQ ID NO: 6906 - DNA, 15 bp, Homo sapiens
  chr19:57831971-57831986
  hyper
cgggagcctgacgcc

SEQ ID NO: 6907 - DNA, 8 bp, Homo sapiens
  chr19:57832024-57832032
  hyper
cgaggcct

SEQ ID NO: 6908 - DNA, 31 bp, Homo sapiens
  chr19:57832165-57832196
  hyper
gggggtcggctgagccgcggcattcccgggc

SEQ ID NO: 6909 - DNA, 31 bp, Homo sapiens
  chr19:57832275-57832306
  hyper
ctacttctggaggcctcgtgggcaggcagaa

SEQ ID NO: 6910 - DNA, 73 bp, Homo sapiens
  chr19:58011403-58011476
  hyper
gcccgggccctttcctcggtcgttgtctcaccgccacaggctccgatggcggcggccacgctgagggaccccg

SEQ ID NO: 6911 - DNA, 52 bp, Homo sapiens
  chr19:58238325-58238377
  hyper
gcagtagcctccttaccggtctcctcgtatccatcctcgcagtccccacccc

SEQ ID NO: 6912 - DNA, 60 bp, Homo sapiens
  chr19:58238389-58238449
  hyper
tcccctgagcaaatttcgagacacttaaaatcccagctaagatcacgtccttctattcaa

SEQ ID NO: 6913 - DNA, 47 bp, Homo sapiens
  chr19:58238452-58238499
  hyper
cctcagttaatctcaacgccctcagaatgaagcgacaacttctcagc

SEQ ID NO: 6914 - DNA, 116 bp, Homo sapiens
  chr19:58238569-58238685
  hyper
gggtcagcagcacccccgagcctttacctgcgccgtcccctccgcccgtaactctcccacacccacccacaccgagataggaccccgccccaagagtgcgtcgctgtcctgggaca

SEQ ID NO: 6915 - DNA, 49 bp, Homo sapiens
  chr19:58238689-58238738
  hyper
ggctgcaggcactttacgattcggagtcggagaaagggtgactgagggc

SEQ ID NO: 6916 - DNA, 54 bp, Homo sapiens
  chr19:58238987-58239041
  hyper
gctacaaggaggagccggaagtcccgcccacgcaccccccgcaggcactgaaac

SEQ ID NO: 6917 - DNA, 31 bp, Homo sapiens
  chr19:58239057-58239088
  hyper
ctcattgggtatgcaacgtataggtttgtgg

SEQ ID NO: 6918 - DNA, 54 bp, Homo sapiens
  chr19:58239118-58239172
  hyper
caaggcaggggattctcggcctgggctcttgggaaaactcgaagtaggagggcc

SEQ ID NO: 6919 - DNA, 58 bp, Homo sapiens
  chr19:58239178-58239236
  hyper
tttgggaaaagtaacccgagtttcaaagggctgacaggacttccgtcctctttttttt

SEQ ID NO: 6920 - DNA, 53 bp, Homo sapiens
  chr19:58281161-58281214
  hyper
acaacgacaggaacaccgccgagcccgcgttccccccccgcccagagtcatgg

SEQ ID NO: 6921 - DNA, 50 bp, Homo sapiens
  chr19:58661721-58661771
  hyper
agaaaagctgcagactcgggggttacccccggagacggaccaggacaccc

SEQ ID NO: 6922 - DNA, 40 bp, Homo sapiens
  chr19:58694379-58694419
  hyper
acgtcataattaatcccgcccccaccgccacccaaccaag

SEQ ID NO: 6923 - DNA, 50 bp, Homo sapiens
  chr19:58694424-58694474
  hyper
cccattccagcacttccggcctgacccctgtccagcgcctttcctttctc

SEQ ID NO: 6924 - DNA, 105 bp, Homo sapiens
  chr19:58694485-58694590
  hyper
ctgccccaagagtggtcgccttcgtggcagggcacgactctctcccagctcgggtcgccgcccacattagtgtggggccctgcggcctagcgtccctcaccagag

SEQ ID NO: 6925 - DNA, 427 bp, Homo sapiens
  chr19:58694596-58695023
  hyper
ccttgcctagctggaccgccgagggacatcgacgagtatcctcctcctgctgtccccggcttcgcctgccgcccctaaccggccagtcaagatggccgccgctgggtgaggcaagctggcgcgccgcgggggcgtctgggagttgtagttcgggacggcgggctgacgcacttcgccgccggccgacgggcgccattgtgcggcgcgcgccgggtgagtgccgcgcgaaacctgcgtccgtcgggggctgcgctgggcgggtccagaaccgttagttgggggcgagcgcggcctctgcattttccgccgagctcgggtaccctgagccggccgtgcctgcagtcctcccgccgctctgtgggatggggtcggtgacccggaaccccgaggggagacagtgctttcggggcgccgcggtggagagaac

SEQ ID NO: 6926 - DNA, 89 bp, Homo sapiens
  chr19:58874183-58874272
  hyper
gcgtttctccccactgcgcctgcgtaactatgccgcggctgcgggcgcgcgccttctggttcccatggggacggcgccacagccaagct

SEQ ID NO: 6927 - DNA, 31 bp, Homo sapiens
  chr19:58874318-58874349
  hyper
acccggccagcctctgcggcacacacccaac

SEQ ID NO: 6928 - DNA, 72 bp, Homo sapiens
  chr19:58920315-58920387
  hyper
ggcgccgtgggtctcccgggcctccgtaccgtcctccttcccagcggctccgggaagcggttccctgtcttc

SEQ ID NO: 6929 - DNA, 31 bp, Homo sapiens
  chr19:59010522-59010553
  hyper
gcaagaagtccacctgcgacaacacgccctc

SEQ ID NO: 6930 - DNA, 39 bp, Homo sapiens
  chr20:656962-657001
  hyper
ggagggaaagcggtcccgagcaggcggggttcaggcaca

SEQ ID NO: 6931 - DNA, 43 bp, Homo sapiens
  chr20:657033-657076
  hyper
agtgcgcactggccagcggccaccctcccgcctccagtcctct

SEQ ID NO: 6932 - DNA, 57 bp, Homo sapiens
  chr20:657266-657323
  hyper
cggtgcctagctcaggcgggcgctgcaagaggaagtgaaaatcgtccagtaattaat

SEQ ID NO: 6933 - DNA, 60 bp, Homo sapiens
  chr20:1165915-1165975
  hyper
gggggtctctctcctgcggcgcagcccggagggcgcgggcccggccgccaccgcctcgcc

SEQ ID NO: 6934 - DNA, 31 bp, Homo sapiens
  chr20:1207095-1207126
  hyper
tccccctgcccctgagcgtggccgtcagctc

SEQ ID NO: 6935 - DNA, 95 bp, Homo sapiens
  chr20:1783320-1783415
  hyper
ttccaggcagtaggttcgccagccattgcttgtgcgtcttcgcggagagagaggggggagatgccccggcgctccttacccggctggataagacc

SEQ ID NO: 6936 - DNA, 75 bp, Homo sapiens
  chr20:1783419-1783494
  hyper
ggggaacttgctgcttcgcaagtcttacttgtgaggacccggagggtttgcctttgaccccgcctgtgaccttaa

SEQ ID NO: 6937 - DNA, 31 bp, Homo sapiens
  chr20:1783498-1783529
  hyper
acccctttctaccctgcgcctgtcccacagc

SEQ ID NO: 6938 - DNA, 46 bp, Homo sapiens
  chr20:1783547-1783593
  hyper
gaatgaattaagcactcggtgtgtgacactgcggcactaagcactt

SEQ ID NO: 6939 - DNA, 31 bp, Homo sapiens
  chr20:1783607-1783638
  hyper
ggccccattttacagacggggaagctgaggc

SEQ ID NO: 6940 - DNA, 54 bp, Homo sapiens
  chr20:1783813-1783867
  hyper
gaaagggccaacggagcggatattcccggagcccctctgcgagccacgcgcccc

SEQ ID NO: 6941 - DNA, 31 bp, Homo sapiens
  chr20:1783882-1783913
  hyper
tccccctgcagacaggcgctgtgacacgctt

SEQ ID NO: 6942 - DNA, 297 bp, Homo sapiens
  chr20:1784008-1784305
  hyper
ctcccgccgctccctccgctccgctgcgctccgcacgctggcgccggctccccgaggccccgggcgccccggccgcacgcctgggtaaaaggtcccgaggagtccgcagaagcgcgcccacgcccgagacggccgtttccgccggcctgggaaaggggcggagaagggggtcgcccgggccgcagcgtgccggtccccgccggccgagccgtgtttggggccagtccccgcaccccgcttcttccccacctggggagcggggcgccgcggtaggggcactggagcgcacgatgcacc

SEQ ID NO: 6943 - DNA, 69 bp, Homo sapiens
  chr20:2444477-2444546
  hyper
ctgccagcagccctgccgatccctgggcccccggcagctccagcaagtggaactcgagcaataccagtc

SEQ ID NO: 6944 - DNA, 53 bp, Homo sapiens
  chr20:2444614-2444667
  hyper
tgccaagagagcccctcgaaatagcttataaatactatcgaaatagcttataa

SEQ ID NO: 6945 - DNA, 154 bp, Homo sapiens
  chr20:3154655-3154809
  hyper
tccgctagggaggggtcgggacgagccgtcgcgggtggatccgcccggccgagcaacgacccgcccgggcgcgaggaccacgggctgtcgtgcgggaggcgtcgaggggcagtaaactccgttcgtgaccaaacggagacgatttgaaacttgc

SEQ ID NO: 6946 - DNA, 92 bp, Homo sapiens
  chr20:3154864-3154956
  hyper
ctccagcaggattgaacgctttcaccctgtgccccgcgcctggcgtaacgcgtggccccagaccacacgctgtaacccggggtgagagggag

SEQ ID NO: 6947 - DNA, 35 bp, Homo sapiens
  chr20:3220070-3220105
  hyper
tccttcgagcctgtgcgcgccggacccagcagacc

SEQ ID NO: 6948 - DNA, 291 bp, Homo sapiens
  chr20:3220114-3220405
  hyper
gagtttaggggctggacggggccggggagcttctgggaaaacgttcgactgcgccacgagcccaccgagctgtgcgactgaggcagaccccgggagggcttcccccgcgtccgctttaagtacgcggccggcccctgtctcctcctttcgaccggggacctccgcagggccacgcccgctggctgccccgcctcctgcatttatcccggtagctccggccgcaagtccttctcctcctcctccaggaagcgcgccccgactgactagacggacctccgtgcattccccggg

SEQ ID NO: 6949 - DNA, 31 bp, Homo sapiens
  chr20:3229261-3229292
  hyper
ctccctgcgcggccagcgggggcccggggtg

SEQ ID NO: 6950 - DNA, 58 bp, Homo sapiens
  chr20:3766678-3766736
  hyper
ggggtgcggggggcagcgtttcgcgcgcgggcgcgggccacgccgctgcaggacacca

SEQ ID NO: 6951 - DNA, 47 bp, Homo sapiens
  chr20:4129264-4129311
  hyper
agggagggagggggtgcgggcccagatgtgggcgtgggacccgggtt

SEQ ID NO: 6952 - DNA, 203 bp, Homo sapiens
  chr20:4129403-4129606
  hyper
ccgcccagaggcggagcggagggccgggccggagcggggtgggtaggggacgcgaggcggagcggggccccacacaggccgcggcggctggctcgggcccctacggtcccggcggcggctggaggaggaagccaggcggctggcggaggaggagagacggaggaggccgagaccggagcgccgctcgccgcagacttacttcc

SEQ ID NO: 6953 - DNA, 99 bp, Homo sapiens
  chr20:4129702-4129801
  hyper
gagagggtgaggggcccggagcggtccccgagggctcggccggcccggggcttgggcggccagcgcggcgctcgggcgctcgggcgggggtgcggggcg

SEQ ID NO: 6954 - DNA, 92 bp, Homo sapiens
  chr20:4129817-4129909
  hyper
gggagcagggggcgccgcgcccccctggcttccgccggggtaagcagtggtgtgggccggggtggcggcgatcccggcgccagggctgctcg

SEQ ID NO: 6955 - DNA, 96 bp, Homo sapiens
  chr20:4130006-4130102
  hyper
gcagacaaagccgggcgcggacgccccgcgacgactcgggctgccgggagggtgggcaccggggagaggacagaaggctcccgggtgatggcccga

SEQ ID NO: 6956 - DNA, 31 bp, Homo sapiens
  chr20:4130125-4130156
  hyper
ttccccctctgggctccgggcgtccgggtgg

SEQ ID NO: 6957 - DNA, 34 bp, Homo sapiens
  chr20:4803015-4803049
  hyper
aaaaacacgttctaggcgccgggattccagatac

SEQ ID NO: 6958 - DNA, 332 bp, Homo sapiens
  chr20:4803183-4803515
  hyper
aggccactggcactctcggctgtccccagagctctccgacttagagctgaatgcaaagtaagcgctcgaaatgcagaagtagccggggccgcccacggcacctgcctcgctcggggcgagagaagacgccaggctgaggtcccagcgacctcaggcaccagctccgaaggagggcggggagaccgcaaaggggaagtgcccggagggccaacggcccccgcgcaccctgcgcccctctgaagcgcgccgcctccccgcgccggggactgggacctgcctctggggaatccgcctagaagacggcggcggactggggtcgggcactctccagg

SEQ ID NO: 6959 - DNA, 132 bp, Homo sapiens
  chr20:4803531-4803663
  hyper
cagccctgcacctgccgcgccgccccacctcgccaggaagtctcagagaccccggggatggggtgggagcgccttcccatcgcgggctcaaaaagaaggaaggacgcccccaggggtcgtagaaggaggact

SEQ ID NO: 6960 - DNA, 421 bp, Homo sapiens
  chr20:4803669-4804090
  hyper
aagccacaactttcttcggacccaaggcaggccggctggggctccgcgcctacacggcccctggcgggggtccgcgcgccccgggagccccgcggctcggggaggaaagaggagacaagagacaggcgaggattacggggctgacccagccggggtagggaccatcgtggaaaaactttggcgaggtggggggacgcggaaagagagcggcccgcgccctgcaccttgcgccgggcatcccgcgccagtgcctcgctcccagtgccccgcgccccgcgccccgcgccttgccttcaccccgggccagctgcatcgcgcccgcgccgcaggaaccgtggagttggaaagtgggggcgccgcggctggggggctgcttcagctgcgcctcggccagcgatcggcgggccgggctcaaatccag

SEQ ID NO: 6961 - DNA, 52 bp, Homo sapiens
  chr20:4981390-4981442
  hyper
ttaaagtagtcacactcgaaatgtcattttttccccccgaaaggtggcaagg

SEQ ID NO: 6962 - DNA, 68 bp, Homo sapiens
  chr20:5891914-5891982
  hyper
tctgcactactcccctcggccgtccattctttggcccgcctttcccccacccccgctccagaccctgc

SEQ ID NO: 6963 - DNA, 31 bp, Homo sapiens
  chr20:9049221-9049252
  hyper
gtcggcgcccactcctcgccctgcgggctcg

SEQ ID NO: 6964 - DNA, 31 bp, Homo sapiens
  chr20:10015467-10015498
  hyper
cgcagctaccccatcccgcccaggccggcca

SEQ ID NO: 6965 - DNA, 45 bp, Homo sapiens
  chr20:10015594-10015639
  hyper
aggcggaggcgagcaccgccccaccgcgcacgctgcggttgcccc

SEQ ID NO: 6966 - DNA, 46 bp, Homo sapiens
  chr20:10015712-10015758
  hyper
cacctgcccgcgcgctcgccttccggggacccggggcccatggaca

SEQ ID NO: 6967 - DNA, 31 bp, Homo sapiens
  chr20:10653623-10653654
  hyper
ccaactcgaactgacccgaggccccacacac

SEQ ID NO: 6968 - DNA, 31 bp, Homo sapiens
  chr20:10653667-10653698
  hyper
aaggaggtaggtcagcgcgggagaaagctgt

SEQ ID NO: 6969 - DNA, 170 bp, Homo sapiens
  chr20:10653740-10653910
  hyper
cccgacgagccctcctcgccgagtgaaaataattttgcgaaactacgttcaaggactcaacatgattccggggcaaaaaaaaaaaaaaatgcacgagtgcggaagaaatccgacgacttcccggggggcaacagcggagcgaacgcgcccctgtccggcctggaggggtc

SEQ ID NO: 6970 - DNA, 108 bp, Homo sapiens
  chr20:10653916-10654024
  hyper
aggaggcaggggctcccgtgggggagttggcgcgctcagcccaggtgcagccgctcgggcgcaggggcgaggagtcgggcgctcgagggctgccgagcctgctcgcgg

SEQ ID NO: 6971 - DNA, 129 bp, Homo sapiens
  chr20:10654668-10654797
  hyper
ccacctctacccagcacgccgggcagggcgcatgcgcgcttattaatattcatgagagggcgtgctcaccctgggcacgcccctccccttcacgttgctggggagggggtagtgcgaggaggaacttgg

SEQ ID NO: 6972 - DNA, 36 bp, Homo sapiens
  chr20:10654955-10654991
  hyper
ggaccgccccctcgggcgccccgggccgtgcgcctt

SEQ ID NO: 6973 - DNA, 151 bp, Homo sapiens
  chr20:10655071-10655222
  hyper
ccgcctgcgtcagctgcggctttcgccccgggaggagggcctgcctgcccgccgggagttcggcccgcttcccgcgagcgagccgcccagagcgctctgctggcggcagaggcggcggcgaggctggcgcgcttgccgccgtctgctcgcc

SEQ ID NO: 6974 - DNA, 49 bp, Homo sapiens
  chr20:10655279-10655328
  hyper
aggcttgccgcagattcgaggggaagcctcggccgcgtcccaccccctc

SEQ ID NO: 6975 - DNA, 73 bp, Homo sapiens
  chr20:10655444-10655517
  hyper
aggctttgggaagggccggcggagatgctggtgggcttggacgccctccccggcccgacgccccggccgcagt

SEQ ID NO: 6976 - DNA, 38 bp, Homo sapiens
  chr20:10655521-10655559
  hyper
ggattgcacctgtaggcggcctccgagcagctctctgg

SEQ ID NO: 6977 - DNA, 53 bp, Homo sapiens
  chr20:10655570-10655623
  hyper
tgggcctgggagggaccgtgtccccagcaccgccagccgcggaacttgccttc

SEQ ID NO: 6978 - DNA, 61 bp, Homo sapiens
  chr20:10655627-10655688
  hyper
gggtggcagtggaaaccgatactgttttccaccttgaggcaagcctcgcaattaacagcta

SEQ ID NO: 6979 - DNA, 64 bp, Homo sapiens
  chr20:11871114-11871178
  hyper
caaagccaaatgcaatcggccctctattaccggaggatgccctgtatcccgcacatccactctg

SEQ ID NO: 6980 - DNA, 66 bp, Homo sapiens
  chr20:11871661-11871727
  hyper
cgcccgggcaggggcgcgcgccctgcggccggccggaggggccgagcgaagcgaggagaggccggg

SEQ ID NO: 6981 - DNA, 128 bp, Homo sapiens
  chr20:11871950-11872078
  hyper
gacgcccgcggggtgcgcgaccccggaggtggcggaggtccaggcagggggcgcggtcgggaagcctcggcgcctagcaggtggcgggggccgcgcccctctcccggggaggcgcgcggtgggaagcg

SEQ ID NO: 6982 - DNA, 34 bp, Homo sapiens
  chr20:11872100-11872134
  hyper
tttcctgaggcgctgccggcggggactccgggga

SEQ ID NO: 6983 - DNA, 67 bp, Homo sapiens
  chr20:11872459-11872526
  hyper
agaccaagggagatcacggtgctttttcttttttaaatattccccgccacctcgccaaatcctgtaa

SEQ ID NO: 6984 - DNA, 31 bp, Homo sapiens
  chr20:13976722-13976753
  hyper
gaggcggtgctgcgttcgcctcgcttgcggc

SEQ ID NO: 6985 - DNA, 31 bp, Homo sapiens
  chr20:17207526-17207557
  hyper
ccggggcggcccagggcggggcccgccgctt

SEQ ID NO: 6986 - DNA, 70 bp, Homo sapiens
  chr20:17549809-17549879
  hyper
ccagacctgaaattaacggtgactcacagagcactctgcatggccacggtcgcctcgggaaggaggaaaa

SEQ ID NO: 6987 - DNA, 31 bp, Homo sapiens
  chr20:17549887-17549918
  hyper
acttttttcccctcacgcgagggcaggacaa

SEQ ID NO: 6988 - DNA, 123 bp, Homo sapiens
  chr20:17549928-17550051
  hyper
gccaatcaggggagggcggcgggaatcgcaccaaagtaggtaaaaaatgcgggaggcgtccccgctgccgcggcccgcgactccgctcccgtgggtcctcccccagtgcgttccccctcctcg

SEQ ID NO: 6989 - DNA, 48 bp, Homo sapiens
  chr20:18037544-18037592
  hyper
cgacacacacactcggcgtcaacccgcacgcccgcggcagtttgacct

SEQ ID NO: 6990 - DNA, 31 bp, Homo sapiens
  chr20:18037657-18037688
  hyper
ggaggccagtaagccccgaatcggcccacag

SEQ ID NO: 6991 - DNA, 92 bp, Homo sapiens
  chr20:18038074-18038166
  hyper
gatgaggtggggagcccgcccctgccgatgagcagagaagacccgccaccccttcccccaccccgggagcccagcgcccaggcccggccccc

SEQ ID NO: 6992 - DNA, 39 bp, Homo sapiens
  chr20:18038209-18038248
  hyper
cgggagctcatcccagctgcggaccgagacccccaggct

SEQ ID NO: 6993 - DNA, 51 bp, Homo sapiens
  chr20:18038279-18038330
  hyper
gtggggtcccctctcccgactgcggccccctcctcccggctgctccccgct

SEQ ID NO: 6994 - DNA, 43 bp, Homo sapiens
  chr20:18039163-18039206
  hyper
gcttctcctcacaagacgttgcaccccccgagagccccctcac

SEQ ID NO: 6995 - DNA, 64 bp, Homo sapiens
  chr20:18039267-18039331
  hyper
acaagcccccaatcctcgcccactcccaccgttgcctctcctaaccacccgatccccaaattct

SEQ ID NO: 6996 - DNA, 31 bp, Homo sapiens
  chr20:19738269-19738300
  hyper
ccccggaaccaagagccgcagccagctcagg

SEQ ID NO: 6997 - DNA, 31 bp, Homo sapiens
  chr20:19997854-19997885
  hyper
gcgacctggcaattcccgccgccggccgcca

SEQ ID NO: 6998 - DNA, 31 bp, Homo sapiens
  chr20:20692668-20692699
  hyper
cagttcaatgtgtgcacgtgatgaccacttg

SEQ ID NO: 6999 - DNA, 31 bp, Homo sapiens
  chr20:21080562-21080593
  hyper
cccctctctggcagccgcggagacaaaggtc

SEQ ID NO: 7000 - DNA, 159 bp, Homo sapiens
  chr20:21080653-21080812
  hyper
tgcaaattctgacctccgatggcgcctatcaattaccccgcccgcagtgaaagcgaaagcgacagtttcttctcttcgcttttttttcttttttaagaactcgaaaaaggaaatatttgcaataagcaggcggtagtagcacttcgtagctggaattat

SEQ ID NO: 7001 - DNA, 85 bp, Homo sapiens
  chr20:21080827-21080912
  hyper
agtttttagggatgcccgtagaggataaaaccccagtgctcagcggagagggtgggaggggtacagggggcggaggaatctgttg

SEQ ID NO: 7002 - DNA, 43 bp, Homo sapiens
  chr20:21080913-21080956
  hyper
tttgactgtacacctgcgggcggcggcaaaatacagccacgag

SEQ ID NO: 7003 - DNA, 152 bp, Homo sapiens
  chr20:21081028-21081180
  hyper
cgttagcccggggtttcaccgaagccggcgattcgaagggagtggcgtttccgcaaactgcatcgctaggggcccggcgtggaagcgcctctgcgcaactttcctccaccgctgcctacaagggaggctctggcttccgtttacttattttt

SEQ ID NO: 7004 - DNA, 31 bp, Homo sapiens
  chr20:21081199-21081230
  hyper
ttcctgcttttacaaccgctaaccccaaaaa

SEQ ID NO: 7005 - DNA, 31 bp, Homo sapiens
  chr20:21081263-21081294
  hyper
aaaccactatgctgtgcgttcatgttcaact

SEQ ID NO: 7006 - DNA, 31 bp, Homo sapiens
  chr20:23618042-23618073
  hyper
acctgacgtgtccgtgcggttccaggccagg

SEQ ID NO: 7007 - DNA, 34 bp, Homo sapiens
  chr20:23618145-23618179
  hyper
gggtgagaagcccaggcgccggagaggagcagca

SEQ ID NO: 7008 - DNA, 31 bp, Homo sapiens
  chr20:23618624-23618655
  hyper
cccttccggccttcgccgccccaccccaccg

SEQ ID NO: 7009 - DNA, 31 bp, Homo sapiens
  chr20:23618696-23618727
  hyper
ctcccttctccctccccgcctcccctgcctc

SEQ ID NO: 7010 - DNA, 84 bp, Homo sapiens
  chr20:25228117-25228201
  hyper
ggctgcctcgcgccctcgggaacgggcgtctccagctcgctggcagctggttttctccacgtctgtcatcggcctggagtggca

SEQ ID NO: 7011 - DNA, 31 bp, Homo sapiens
  chr20:30639045-30639076
  hyper
gactcctcccctcccccgaccacctccccca

SEQ ID NO: 7012 - DNA, 31 bp, Homo sapiens
  chr20:30639104-30639135
  hyper
gccagggtggttccttcgggcagggaacttt

SEQ ID NO: 7013 - DNA, 31 bp, Homo sapiens
  chr20:30639140-30639171
  hyper
gccatggtggttccttcgagagaggaacttt

SEQ ID NO: 7014 - DNA, 76 bp, Homo sapiens
  chr20:30639182-30639258
  hyper
gaatggagcaggcctgcggaagagaaaccgctgaccacagacctgcctggaagtctcgggccgcggagttggggag

SEQ ID NO: 7015 - DNA, 78 bp, Homo sapiens
  chr20:30640282-30640360
  hyper
cgcccaggtgagtgccgcgcacaggggaccgggaatacccggcccgcgaggggtcccaggaggcggagggagcccagg

SEQ ID NO: 7016 - DNA, 184 bp, Homo sapiens
  chr20:30640364-30640548
  hyper
tggggagggctggctacgggtgcggctgggggcagcgaggggagacggaacgtcgggggagccgcgggtagcccgggggatgaggggtcgacagcgagtggagggtgccctagggaggggcggcactgttgcggactgctggattcccggggaaggggacgctcgggcccgtgcagtgacttta

SEQ ID NO: 7017 - DNA, 31 bp, Homo sapiens
  chr20:30640550-30640581
  hyper
caccacttctctgggccgtccaggttcccct

SEQ ID NO: 7018 - DNA, 117 bp, Homo sapiens
  chr20:31072614-31072731
  hyper
aggcaggactggcatcgcggggtgggagccctggacctccgagcaacctcggactcggcccgaaaagcaacactctcatcaccaaaccgcagaattagaccccgatggagaaaatgg

SEQ ID NO: 7019 - DNA, 87 bp, Homo sapiens
  chr20:31173450-31173537
  hyper
cccgcggggagtagggcgcagaccccagcccagacgccgacctcccggccgccccgccccacttagccaggccgggaaggtgtaggg

SEQ ID NO: 7020 - DNA, 93 bp, Homo sapiens
  chr20:31351104-31351197
  hyper
tgtgcgccgtggagggcgtgaggcagagggcgacctcccggggtgctcctgagctgagccatcaagcgcggggagcagcggggctgccctctg

SEQ ID NO: 7021 - DNA, 59 bp, Homo sapiens
  chr20:31351208-31351267
  hyper
ctggcccgggaggagccggccggaggggcggcgcctccctgtcccggccacgccgccta

SEQ ID NO: 7022 - DNA, 31 bp, Homo sapiens
  chr20:32090525-32090556
  hyper
accctcttcttggaatcggccatttctccaa

SEQ ID NO: 7023 - DNA, 31 bp, Homo sapiens
  chr20:33464342-33464373
  hyper
aggccccgcccctctacggaggccccgcctc

SEQ ID NO: 7024 - DNA, 277 bp, Homo sapiens
  chr20:33464381-33464658
  hyper
cctgttttctcagtcccggcacccgccgcgaccgcaaaggcggccgcggttctaggaacttgacgtgatggggcttcctgaggagcgggtccggagcggcagcgggagccggggccaggaggaagctggagccggaggccgggcgcggagttggtctccgccgcccgaggtcagccgctccgcgcacgtcccctcgctgcagcgctaccgcgagctgcaccggcgctccgtggaggagccgcggggtgaggcccggcccgggcgggcctggggtgtc

SEQ ID NO: 7025 - DNA, 31 bp, Homo sapiens
  chr20:33464676-33464707
  hyper
ggctccctgggggagtcgggggctcccttgg

SEQ ID NO: 7026 - DNA, 185 bp, Homo sapiens
  chr20:34680179-34680364
  hyper
ctaagctagggaaaatcgaggtcggcgctggcgggaacccgggaggacgtgggggccccgggtggggtctgctcctcttcttcgcccggcctctgagcccgccgcagctcaggttgacgccgggcccacgtggggaagccggcggcgggtccccagcgccgggagggttcgcggggctcagcccc

SEQ ID NO: 7027 - DNA, 370 bp, Homo sapiens
  chr20:34680572-34680942
  hyper
cgaggagggggctgagcgccgtgggagggagagcaggagcgagcgcgcgagagagcggggcatttctgcgcagctctagcgcgcctcggagcccgccggggcagccgccggacaccaggaccgcgagccagacagctcccggaagccgcgccgccgccgccaggttagccgcacccgccgtccccctccgcgtcccggggaccccgccgcgtcgggtcccgcgtgtgcgtgtggggtggccgccgagggcggcgggctcgattcccgatctttgggcactgacaggccggcgggccggctccaggagccgcgggcttcggttcgtgtgtgtggggactgtcgcgggtttgtgtgtcggggctccagtctc

SEQ ID NO: 7028 - DNA, 227 bp, Homo sapiens
  chr20:34680949-34681176
  hyper
gtgttaggtgtgagcgcgcgtgtgcccgtggatccgtgcgagcggctgctcggtgtgcgcgcgcgtgcgtgtgtgcgccgggtgtgcatctgtgtgtgcgtgtgtgagggtgtgtgccttgcgtgtcttcgcgagtggtgcgtgcgtatctgggtgagggtgcgtgtgtctgcgtgtgtctgtcggtgaatgtatctgtgagagggtgtgtccgaatgtgtagcagt

SEQ ID NO: 7029 - DNA, 180 bp, Homo sapiens
  chr20:34681181-34681361
  hyper
cacctctgggtgagggcgtgtgccagtggcttcgcttgtggctgcagcctgtggcgggtgtgggtgtgtgtgtgcgcgcgcgtcgctgtgtgcgcgccagtgtaactcccgtgtgtgcgcgtgtgagtgcgggtgtgctcccgcgtagcccccgtgtgcgtgtgcgcggctttgtcttcg

SEQ ID NO: 7030 - DNA, 31 bp, Homo sapiens
  chr20:34681529-34681560
  hyper
gctgacagcagagcccgcgttctgacctgag

SEQ ID NO: 7031 - DNA, 40 bp, Homo sapiens
  chr20:35201463-35201503
  hyper
tacaggccattgaggtcgtaacaagcgtctccatcagagc

SEQ ID NO: 7032 - DNA, 79 bp, Homo sapiens
  chr20:35201505-35201584
  hyper
agtccttaactagctgcgggtaagtgcccggactaagtggcctcagtttcccctcgaagcaacgggaccaatcgcaccg

SEQ ID NO: 7033 - DNA, 52 bp, Homo sapiens
  chr20:35201647-35201699
  hyper
cggtaacgacccccaccccggcaaggagcacagtaggcgctccggaaacgcc

SEQ ID NO: 7034 - DNA, 110 bp, Homo sapiens
  chr20:36012923-36013033
  hyper
gcccctgggtgacttgggtgtccggggggtgggggggcggccgtacacactgtgaagcgtccgcgccgccgccgctggctttggggtggagcaagcgcaaaagacacggg

SEQ ID NO: 7035 - DNA, 46 bp, Homo sapiens
  chr20:36013098-36013144
  hyper
cctgttgctgccttggcgcccagtcctttttcgttgcctgggtccg

SEQ ID NO: 7036 - DNA, 114 bp, Homo sapiens
  chr20:36013192-36013306
  hyper
tgggtcgctcggggaacggggcaccggatggccccggttgggcccgcgccaggatgcgcccctgcgccctctgctggcgctctgcggtcaccgcagccccggagagggccgttt

SEQ ID NO: 7037 - DNA, 66 bp, Homo sapiens
  chr20:37274777-37274843
  hyper
ggctgcggaggatgcacgcagacagggacaaggcgggggacggcctcgaggcggtgagtgcccccg

SEQ ID NO: 7038 - DNA, 57 bp, Homo sapiens
  chr20:37274850-37274907
  hyper
acaggtggagaagggccgaggcgacaggagggcacctggggcgcggtgcttcccttc

SEQ ID NO: 7039 - DNA, 31 bp, Homo sapiens
  chr20:37351616-37351647
  hyper
cagggagaaagggcctcgagagaggggagat

SEQ ID NO: 7040 - DNA, 162 bp, Homo sapiens
  chr20:37434190-37434352
  hyper
aagaggggtccccacccgagagcgccgggaccctgtcccgcgctgcctcccaagccggatggggttgagcgcgcccaccccagtcccaggagctcaggccccgccttgggggaggagccgagaggcggcgcggaggctcgcggccgagcagagccagctctg

SEQ ID NO: 7041 - DNA, 33 bp, Homo sapiens
  chr20:37434488-37434521
  hyper
cgggggatgaggatggggcggggaggtggtccc

SEQ ID NO: 7042 - DNA, 52 bp, Homo sapiens
  chr20:37434530-37434582
  hyper
tcacctagctgggggccggggcgctttggccaagggacgatagcttgagata

SEQ ID NO: 7043 - DNA, 128 bp, Homo sapiens
  chr20:37434593-37434721
  hyper
ggggactctggaaagacgggtaccgagagcgctaggtccgggagtcgggctggaatgggggcgttctccccggcctcgcaattccttgacgaggccaggggagggggcgcattggcaggttgttggct

SEQ ID NO: 7044 - DNA, 157 bp, Homo sapiens
  chr20:37434736-37434893
  hyper
cgatcttggggcggggaggtggggtcctcggtctgttctggactcatggggccgccgtctgccgggggtgcaatgccgggcggcgggagccacagcggacaccaaacaacccccccccgcgcactctcccggccgggcatggtggtgccgccccctc

SEQ ID NO: 7045 - DNA, 60 bp, Homo sapiens
  chr20:37434930-37434990
  hyper
cgcagagagcgctcctgcccgggcgggaaagatccccaaggcaggcgcctccacctgcag

SEQ ID NO: 7046 - DNA, 319 bp, Homo sapiens
  chr20:37434994-37435313
  hyper
gccccgcctcaggatccggctgacagcaccagccagcccggggagaccccgcgagtggtagttccccgggaggggcgcgcccggcctctcccagggccccgtgcgccggcggctgggtcccccgcgccaggagcgctcccctctgggcgactccggctcatcgattccggcccagaggagcgcccccgggcgccgaggatgggcggagacgtgcagccgcccctgagaggtcgcccagaggggtctccccaaggtcacccggagtgcccaggctgagctgcccagaccgccccgggtggagagccgggaggcaggcgct

SEQ ID NO: 7047 - DNA, 33 bp, Homo sapiens
  chr20:37435336-37435369
  hyper
gtagactcccttcctccgctcccccaccccggc

SEQ ID NO: 7048 - DNA, 117 bp, Homo sapiens
  chr20:37435487-37435604
  hyper
cgcgccaggcctgggtcccggtgctcccgggcacctcaggagcggagggagagggatgtggcttcatcagcgcttctaggaaccgaaaaccgagctgcctgcgcgcccatgtgattg

SEQ ID NO: 7049 - DNA, 31 bp, Homo sapiens
  chr20:37435663-37435694
  hyper
tctggacaccaggtgccgcctctgaatcacc

SEQ ID NO: 7050 - DNA, 65 bp, Homo sapiens
  chr20:40321458-40321523
  hyper
gctcaggcaaaggccacgtctcggaacagttggctgcacaggtcacgtgacgcgcccctagcccg

SEQ ID NO: 7051 - DNA, 34 bp, Homo sapiens
  chr20:40321598-40321632
  hyper
ttcgcagggggctttgcggcgcctacttcctcct

SEQ ID NO: 7052 - DNA, 31 bp, Homo sapiens
  chr20:42876274-42876305
  hyper
cccggaggtcgggggacgcaagggttccttc

SEQ ID NO: 7053 - DNA, 103 bp, Homo sapiens
  chr20:43976985-43977088
  hyper
gaagaacagcagcagcgcgaacagacgggcgggggccatggcaccgcggactggagaaggcgcgcaggctgcggcgagtggccccgggcgggcgcgccaccca

SEQ ID NO: 7054 - DNA, 40 bp, Homo sapiens
  chr20:43977172-43977212
  hyper
ggcctgcggggcactgcgcccgcccgcggagttggaaacc

SEQ ID NO: 7055 - DNA, 74 bp, Homo sapiens
  chr20:44462766-44462840
  hyper
cctcctcctcctgcgccgggctggggtacccctcctccgggatccggtacacagcgtcgcgcgctccccccagg

SEQ ID NO: 7056 - DNA, 31 bp, Homo sapiens
  chr20:44591913-44591944
  hyper
cccctccccacattcccgcaagctctgagga

SEQ ID NO: 7057 - DNA, 54 bp, Homo sapiens
  chr20:44660646-44660700
  hyper
cgggagcctggcgtcccgcccaggcagctactggaaaggcgggacccagaacta

SEQ ID NO: 7058 - DNA, 40 bp, Homo sapiens
  chr20:44746473-44746513
  hyper
ccagctgtggccttcccgttttctgcgtggtggtgtgggg

SEQ ID NO: 7059 - DNA, 48 bp, Homo sapiens
  chr20:44746517-44746565
  hyper
cttcctcaggcctctccgcagtggagcctctttcggttctgccaggat

SEQ ID NO: 7060 - DNA, 31 bp, Homo sapiens
  chr20:47663142-47663173
  hyper
cgcttgccgcgcctcgcggcatcctaggtct

SEQ ID NO: 7061 - DNA, 31 bp, Homo sapiens
  chr20:48195046-48195077
  hyper
ggtggatgttcagccacgctcatggttcaca

SEQ ID NO: 7062 - DNA, 42 bp, Homo sapiens
  chr20:48771161-48771203
  hyper
tttacagcagggcccccgtgccaggatcggggctggaacatg

SEQ ID NO: 7063 - DNA, 43 bp, Homo sapiens
  chr20:48771236-48771279
  hyper
aaggctcagccagatgcgtctaatacttcggcagataaatgac

SEQ ID NO: 7064 - DNA, 31 bp, Homo sapiens
  chr20:48771291-48771322
  hyper
ttaccccaggtctaaccgacaacaaagtatg

SEQ ID NO: 7065 - DNA, 31 bp, Homo sapiens
  chr20:49131961-49131992
  hyper
gctgtcattgtagctgcgtctttacaaacat

SEQ ID NO: 7066 - DNA, 31 bp, Homo sapiens
  chr20:49141977-49142008
  hyper
catttattaaattcttcgcttgccatataga

SEQ ID NO: 7067 - DNA, 47 bp, Homo sapiens
  chr20:49226026-49226073
  hyper
ccactggcccagctctcgatgtccccactgcccggcccagctcttgc

SEQ ID NO: 7068 - DNA, 61 bp, Homo sapiens
  chr20:49226085-49226146
  hyper
ccagcccagcttggcccggcccacctcggcgcactcgtgcaggctgcggcccagctcctgc

SEQ ID NO: 7069 - DNA, 89 bp, Homo sapiens
  chr20:49226147-49226236
  hyper
ggctctctcgggctgcgcggctcggggggcaccgggcgaaggcccgctgcatgctggaggcgccgtcgcgcaggcggcactggatgcag

SEQ ID NO: 7070 - DNA, 35 bp, Homo sapiens
  chr20:49410908-49410943
  hyper
aaattccaggaccctccgcccgatgcaaactagat

SEQ ID NO: 7071 - DNA, 105 bp, Homo sapiens
  chr20:49410945-49411050
  hyper
tttagtaggatgggaacgggtggggggcgggcggctttgggcttcctctaagctagcgcctctctaacccggacgcccgttagaatcacccggggagttttagaa

SEQ ID NO: 7072 - DNA, 31 bp, Homo sapiens
  chr20:49574742-49574773
  hyper
ccgcctctgcttccctcgcagggtggccctc

SEQ ID NO: 7073 - DNA, 60 bp, Homo sapiens
  chr20:49836918-49836978
  hyper
ccgtcctgcaggtggcgcgcctgagcccgtgcacggcagcctctccggaaggtgaagcac

SEQ ID NO: 7074 - DNA, 89 bp, Homo sapiens
  chr20:50157950-50158039
  hyper
acacagtgaggttgggcgtgtggccgcttccccctcctcctcctcctccctctaacgaatgctcctgttaaacacgtgaagtgacagat

SEQ ID NO: 7075 - DNA, 31 bp, Homo sapiens
  chr20:50158040-50158071
  hyper
agcattgggcccagcccggggaagtccccag

SEQ ID NO: 7076 - DNA, 297 bp, Homo sapiens
  chr20:50383734-50384031
  hyper
cccagagaggaccagacgcccgaggaagggcggagcagagcggccgcaggccccgcccaacaccgcgctcagcctcccgcgggctccagcctcacctgcgcggcctgtggagctgcacatctccaggccccgccccccagaactctgattggcgggtctaggcgggggccgggaaatctgcatttgcaccagcgcccacccccgtccttcccacccccgcccctcacgcccaggtaagtctatggcaggcgatacgagagccccgcaaacctcaacgcgtcacgctgccatcctccg

SEQ ID NO: 7077 - DNA, 63 bp, Homo sapiens
  chr20:50384088-50384151
  hyper
aaacccttgcctgttccgcgcctaagctgccctcggggtctcctactgcgggaagggcacagc

SEQ ID NO: 7078 - DNA, 47 bp, Homo sapiens
  chr20:50384157-50384204
  hyper
cagcccctgtcccagccgtgggattccttccccgaaattgtgggggg

SEQ ID NO: 7079 - DNA, 31 bp, Homo sapiens
  chr20:50384214-50384245
  hyper
gggtagtgtcaccaagcggccagtaggagac

SEQ ID NO: 7080 - DNA, 54 bp, Homo sapiens
  chr20:50384267-50384321
  hyper
tggttcgggtccaccccgggcggagggggaaggggccaccggagcgcaggtggt

SEQ ID NO: 7081 - DNA, 56 bp, Homo sapiens
  chr20:50384402-50384458
  hyper
agcatatctgggctcccgagtaatgctccaagcgcagagctcggtgtgacactgac

SEQ ID NO: 7082 - DNA, 91 bp, Homo sapiens
  chr20:50384468-50384559
  hyper
cctcagatattaattacggacagatattaattacggaacaataaaacggtgagaaagcacggctgatccgaattccgcgagtgtgtaaaca

SEQ ID NO: 7083 - DNA, 31 bp, Homo sapiens
  chr20:50384752-50384783
  hyper
gccaacctgtcaggcccggccaggctggccc

SEQ ID NO: 7084 - DNA, 55 bp, Homo sapiens
  chr20:50384805-50384860
  hyper
cggacaaaggaaaacacgggcccaggcccactcacccggcgcggggcctgctgtc

SEQ ID NO: 7085 - DNA, 105 bp, Homo sapiens
  chr20:50384933-50385038
  hyper
gccgcgccccccgcgccgcctgggccgccgcccggtccggcctccgcgccgccgcccgccggcgccgcgccgccccgggggaggaggcggcggcagcgggcgggc

SEQ ID NO: 7086 - DNA, 49 bp, Homo sapiens
  chr20:50385225-50385274
  hyper
tccccgcccccggcccgcgcccgcgccccccacgcgcgcccacccggcc

SEQ ID NO: 7087 - DNA, 31 bp, Homo sapiens
  chr20:50720436-50720467
  hyper
ccctccaccaccacctcgggaagttgtggtc

SEQ ID NO: 7088 - DNA, 31 bp, Homo sapiens
  chr20:50720523-50720554
  hyper
ctctggaggggtgagccgccccggagagggg

SEQ ID NO: 7089 - DNA, 168 bp, Homo sapiens
  chr20:54934125-54934293
  hyper
ccacctggctcctgggcgccaccgccccctgcgccccgccgcccctggccctggccctgctcccgcccaggctagacgcccggctgctccgcacggcgcgcggggactgccgcggccaccaggtaagcaccccaccccgaccctgatcccgggcggtgtccaggtccc

SEQ ID NO: 7090 - DNA, 35 bp, Homo sapiens
  chr20:54934305-54934340
  hyper
gggccgcgccggggtccggccgcctccgccaagga

SEQ ID NO: 7091 - DNA, 81 bp, Homo sapiens
  chr20:54934438-54934519
  hyper
cagagaaactgaggctcgggaaggtgtggcgctctgcccaaggtcgcgcagtcttcggccgagccccgggtctgcagagcc

SEQ ID NO: 7092 - DNA, 31 bp, Homo sapiens
  chr20:55405265-55405296
  hyper
cttccggtttccaccccgggctcatttgtct

SEQ ID NO: 7093 - DNA, 31 bp, Homo sapiens
  chr20:55965025-55965056
  hyper
aggcttccggaagactcgggggtcccatccc

SEQ ID NO: 7094 - DNA, 198 bp, Homo sapiens
  chr20:56284007-56284205
  hyper
cagagccacgcagccacgcacactccacagacgcacggacatccactcagagcccgagacacagcgccgcgaacactccagacacacgcccggagccccagacacctcgcagaccagacagtgtctcacacgcccctccacccccgcccaaagttgataaagagccggcctaaatgctccatcgcgactgccctcagg

SEQ ID NO: 7095 - DNA, 96 bp, Homo sapiens
  chr20:56284209-56284305
  hyper
taaaatggaaacttcacggatccgcccgccccaaccctcccgcgccgtgcgccgccgctgagccccgggtccgagtccgggcgggcggggcgcgga

SEQ ID NO: 7096 - DNA, 107 bp, Homo sapiens
  chr20:56284422-56284529
  hyper
tcggtccgagggggcgcgcagggcccggacccccgctcgcagctgtgccccgacatagggtccgagcccgatggagtctccggggaggggggcgtggggtcactcac

SEQ ID NO: 7097 - DNA, 80 bp, Homo sapiens
  chr20:56284539-56284619
  hyper
gctctggaacaaagagcgtttgcagttgcacgtgcaggagacattgggctgcccggcggcggcggcggcggtgctgttga

SEQ ID NO: 7098 - DNA, 138 bp, Homo sapiens
  chr20:56284747-56284885
  hyper
gaggcgcgccccggctcgccgggctcgggtcgccgccaagttcccggggcgccgcggggctcagtgcgcgggaccgcgctccgctgcgcccccccggcctcccctcggcagccccgggggcgtcggcagtgcccgcgg

SEQ ID NO: 7099 - DNA, 122 bp, Homo sapiens
  chr20:56285252-56285374
  hyper
cgcaacggaggaggggcgctgtgccctctccccaacggcggtcagcttggaacgcctgcccggcgcacgcccggggccggggagccgaactcggtgccagccgcacccgggcgggttgctgg

SEQ ID NO: 7100 - DNA, 121 bp, Homo sapiens
  chr20:56285513-56285634
  hyper
acccattgcctggtttcgcaggagactgtccgccttcagttctccagcagctcggggatcatggcccactgaacccccaagcgctttcacccgaacccaaggaggacgaccaggaaagacg

SEQ ID NO: 7101 - DNA, 76 bp, Homo sapiens
  chr20:56285666-56285742
  hyper
tcatgtaaatagctgtcggggactggtgtattgtcgccgccccagccggcgggacctggggcgaatccacacccat

SEQ ID NO: 7102 - DNA, 50 bp, Homo sapiens
  chr20:56285748-56285798
  hyper
ctgcccaaggggcctccggctggggggcgcggctgcggagttcaaaaggg

SEQ ID NO: 7103 - DNA, 31 bp, Homo sapiens
  chr20:56784986-56785017
  hyper
ctggatccgcgcgaggcgccactcggggagt

SEQ ID NO: 7104 - DNA, 47 bp, Homo sapiens
  chr20:56785103-56785150
  hyper
ccgacgccggcaggcccggagaggattttcttcgtgaatccaagaca

SEQ ID NO: 7105 - DNA, 43 bp, Homo sapiens
  chr20:56785202-56785245
  hyper
gctggggtgcagcccacgaggaagtgtccgtggggtgtgcgta

SEQ ID NO: 7106 - DNA, 58 bp, Homo sapiens
  chr20:57224814-57224872
  hyper
tcgcccagccctgctcgcggctctctcgattttatgtgggtttcgttggatgcatttt

SEQ ID NO: 7107 - DNA, 19 bp, Homo sapiens
  chr20:57225060-57225079
  hyper
cggcttcgcgtctccccgg

SEQ ID NO: 7108 - DNA, 123 bp, Homo sapiens
  chr20:57225218-57225341
  hyper
cgcagcccggcccgcagcctcgccccgcaaggggaagccggccctgcacaggcccggggcccggaaggcgccgccgcacagctctgcgcccccgacccgctccggccgcgcgctgggccaggc

SEQ ID NO: 7109 - DNA, 250 bp, Homo sapiens
  chr20:57225343-57225593
  hyper
ttggcctcaagcctcccgggcggctccgggccggacccgggtctccgtcgcgggacgccagcctgtttgtgggtgccgtgctcgggcccgggcggcccctgcccgacgcggccccacggagcccctgcacgaaccccgccgacctggcccggggcggcaagtcgaggtgcttagggcgccctgggcccggccaaccgtggaaaacccggcccggggcacgggggggcgcgggggtcgcagggccagggcc

SEQ ID NO: 7110 - DNA, 136 bp, Homo sapiens
  chr20:58090759-58090895
  hyper
aaggaatctcctctcccgagtttgcagcccgcgccttctgccgggcgtttggcgcatttcttccagagaatacggatccgaattattccagaggagcctcggccgcagtctctccagccgccgccagagggaaacc

SEQ ID NO: 7111 - DNA, 132 bp, Homo sapiens
  chr20:58514096-58514228
  hyper
tggatccagctctcttcgcactccccgcgaggcatgtgcagcgcgtggttgcgacatgtgaggctgtagtctcggtggtcgttgttgtcccagtactcggcacccgccacttggtagcgcaccgcgaagtgc

SEQ ID NO: 7112 - DNA, 288 bp, Homo sapiens
  chr20:58514241-58514529
  hyper
gctccagcaggaagggcggtactggaaagccgaaggtgaaaacgtcctccgtgccctcggggcctgcgggcccgcgccaccgcgccaccgcctcgtgggtactgcgccagcccgagaaagtgtagcgcacagccacctgcttctcgaaggccacgttgcacacgcgcaccgtaccgctgatgccaaggtccgagcaagtgacacgctccaggcacacgagctgccgctgcaggcgctcgccaaagtcggcggcctcgacgggcggcgggaaatcgggcaccaggcaat

SEQ ID NO: 7113 - DNA, 154 bp, Homo sapiens
  chr20:60552007-60552161
  hyper
agaagcatagctgctgcgtgccagctcctgtggagagctctggcggtttcagctgatgacacctgcatgacaccgcccagcagggcacgcgccacacacacgacaccgcccagcggggcacacgccacacacacgacaccgcccagcggggcac

SEQ ID NO: 7114 - DNA, 141 bp, Homo sapiens
  chr20:60552203-60552344
  hyper
acacgacaccgcccagcggggcacgagccacacacacgacaccgcccagcggggcgcgcgccacacacacacaacaccgcccagcggggcgcgcaccacacacacacgacaccgcccagcggggcacgtgccacacaactc

SEQ ID NO: 7115 - DNA, 37 bp, Homo sapiens
  chr20:60639842-60639879
  hyper
cccccggcgccggcgccgcagccgccgcgccgggccc

SEQ ID NO: 7116 - DNA, 84 bp, Homo sapiens
  chr20:60941670-60941754
  hyper
caagtcccgccctccccgggatcccggacttggggccgccagggactgggcccggcccccctcccgccccggtcaccgcagtcg

SEQ ID NO: 7117 - DNA, 40 bp, Homo sapiens
  chr20:60941797-60941837
  hyper
tttaattccgccttcccggagggacgcgaagtttcccggc

SEQ ID NO: 7118 - DNA, 31 bp, Homo sapiens
  chr20:60941840-60941871
  hyper
gacggagcggccgggtcggggtgccttcttg

SEQ ID NO: 7119 - DNA, 31 bp, Homo sapiens
  chr20:60941883-60941914
  hyper
gcggaaccagagagtccgcacctggactcgc

SEQ ID NO: 7120 - DNA, 64 bp, Homo sapiens
  chr20:61492376-61492440
  hyper
tgttgagcgccccgcccggctcggggggctcggggccgcgcggcgcgggcggcggctcggcggg

SEQ ID NO: 7121 - DNA, 31 bp, Homo sapiens
  chr20:61492473-61492504
  hyper
cacggccggcttggcccgggcctcgggcgcg

SEQ ID NO: 7122 - DNA, 74 bp, Homo sapiens
  chr20:61492714-61492788
  hyper
gccgcgcccccctgaccgcccgccgcgaagccgcccgcgcctgcgcccgggcccgccgccgccagcagcgccga

SEQ ID NO: 7123 - DNA, 114 bp, Homo sapiens
  chr20:61492901-61493015
  hyper
tcgtgaagctcagccccggctcgcccagcgccgcgtccccgccgcccgcgccctcgacggccgcctcgccgcctgccgcgcctgcctccggcggcggctcccgcggtccggggc

SEQ ID NO: 7124 - DNA, 64 bp, Homo sapiens
  chr20:61511890-61511954
  hyper
ggccccttctgggctccgaatctggctggcggaggccctcgtggcccatcgttagaagcgatat

SEQ ID NO: 7125 - DNA, 46 bp, Homo sapiens
  chr20:61585602-61585648
  hyper
aaggctgccacacgcacgccttttcctagcccgccctcctgcagcc

SEQ ID NO: 7126 - DNA, 19 bp, Homo sapiens
  chr20:61585654-61585673
  hyper
caaaggctgggccaggcga

SEQ ID NO: 7127 - DNA, 43 bp, Homo sapiens
  chr20:62152086-62152129
  hyper
cgcatataagtgggcgcgtccgcgcgtgcgcaccccgcgcgcg

SEQ ID NO: 7128 - DNA, 71 bp, Homo sapiens
  chr20:62273399-62273470
  hyper
cgccccggccccgccccggcccctgcccgctccgagctccgccccggccccgcccccgcaccttctcgcgc

SEQ ID NO: 7129 - DNA, 31 bp, Homo sapiens
  chr20:62273486-62273517
  hyper
cggccaggtgtgcctcgcggatctccttgct

SEQ ID NO: 7130 - DNA, 68 bp, Homo sapiens
  chr20:62273725-62273793
  hyper
cctcccgcccagcgcccgctcgcctcacctggcgcctccacctgcccaggcctcggtgggcgccggga

SEQ ID NO: 7131 - DNA, 40 bp, Homo sapiens
  chr20:62371935-62371975
  hyper
tggggtgcggagacaccggccccgacggaggccaggtcag

SEQ ID NO: 7132 - DNA, 31 bp, Homo sapiens
  chr20:62372059-62372090
  hyper
ctacacctccctccaccgcagttcctcgggg

SEQ ID NO: 7133 - DNA, 31 bp, Homo sapiens
  chr20:62383685-62383716
  hyper
acagggttctccctcccgaggcagggcgggg

SEQ ID NO: 7134 - DNA, 103 bp, Homo sapiens
  chr20:62383849-62383952
  hyper
gccacacccaggaggccggggcagagcagacaggggcccggggcggatctccctgccctgctgtcgtcccccctgtgcagagtggacccggtgtggggtccgg

SEQ ID NO: 7135 - DNA, 126 bp, Homo sapiens
  chr20:62384089-62384215
  hyper
ctcgcaggggtagggccgctctcccgtgtgcgagcgcatgtgtcgcttgaggatgcactggtgcatggccgagaagctgcagtacggacacttgaacttcttcctgatcaccgtgaactcattcac

SEQ ID NO: 7136 - DNA, 31 bp, Homo sapiens
  chr20:62674074-62674105
  hyper
ccacttcctgttttctcgcgctggcgggcgg

SEQ ID NO: 7137 - DNA, 45 bp, Homo sapiens
  chr20:62694349-62694394
  hyper
gggtattgtgggatcacgagtcactggcgacggtgggtcaggact

SEQ ID NO: 7138 - DNA, 26 bp, Homo sapiens
  chr20:62694399-62694425
  hyper
tcccaggaggctgtgcgcgccgcgtg

SEQ ID NO: 7139 - DNA, 52 bp, Homo sapiens
  chr20:62694477-62694529
  hyper
cgcgtggactacgcatcctaggatgccgcgcgcggccgcggggccgagggtt

SEQ ID NO: 7140 - DNA, 69 bp, Homo sapiens
  chr20:62694647-62694716
  hyper
gtcgctgctcctgaggcgatgatgggcaaggaagaggagattgcgcggatcgcccggaggctggacaag

SEQ ID NO: 7141 - DNA, 57 bp, Homo sapiens
  chr20:62733447-62733504
  hyper
tgggggaaggctggggcgcccgggagggtcccgggtcgcgtccgacctcaggaaggc

SEQ ID NO: 7142 - DNA, 109 bp, Homo sapiens
  chr20:62733593-62733702
  hyper
gaaccgcggtgactagcggggtcttaaagcgggtggcggggccgggctctcctgggaccaggagcccagagcgtggagacgtggcgggctgagccgctcagtgcggccc

SEQ ID NO: 7143 - DNA, 159 bp, Homo sapiens
  chr20:62733703-62733862
  hyper
tgccccgcgcccaccccgccccgtgtcaggaggtccgcggagcgggaggacccgcctcccggggagagctcgcccgcccctccctcccggctggccgcggggcggtctgcagaccctttggccgtgccggatctgcctggtccccggggagaagacgct

SEQ ID NO: 7144 - DNA, 31 bp, Homo sapiens
  chr21:16436647-16436678
  hyper
ggcgccgcccaggatccggctggacagcagg

SEQ ID NO: 7145 - DNA, 67 bp, Homo sapiens
  chr21:17101956-17102023
  hyper
gggtaagctagggatccgacaagccctgggcgcagggaggaacgctgccctccggcctccagtcgcg

SEQ ID NO: 7146 - DNA, 41 bp, Homo sapiens
  chr21:17102033-17102074
  hyper
cccagcgccagcgtcgcgcaacctgccgcaggggcggctcc

SEQ ID NO: 7147 - DNA, 84 bp, Homo sapiens
  chr21:17102747-17102831
  hyper
ggcgcagaaggtgaggcgagtccgccagccggcgggccccacttctccttccgacgggctgtcctctcccgctgcggccgggcg

SEQ ID NO: 7148 - DNA, 53 bp, Homo sapiens
  chr21:18885141-18885194
  hyper
ctacgacgccgcgcgccgggaggctgagagttcggcgccgggagggtcccggg

SEQ ID NO: 7149 - DNA, 34 bp, Homo sapiens
  chr21:18885232-18885266
  hyper
acgcggctggagaagccggcgctcgcagcccggc

SEQ ID NO: 7150 - DNA, 48 bp, Homo sapiens
  chr21:18885392-18885440
  hyper
gaccaggagcgagagccgcctacctgcagccgccgcccacggcacggc

SEQ ID NO: 7151 - DNA, 43 bp, Homo sapiens
  chr21:18885451-18885494
  hyper
cgctcctgctgtgcttcgtgctcctgtgcggagtagtgggtga

SEQ ID NO: 7152 - DNA, 31 bp, Homo sapiens
  chr21:18885607-18885638
  hyper
tgcaggggcggcggggcgggcagaattgcac

SEQ ID NO: 7153 - DNA, 278 bp, Homo sapiens
  chr21:18885657-18885935
  hyper
cgggcgctcctggagccgtcccgtagggagccgcgcagggcgcgcggagtgcccggggacggagccctcggcggggggtggaggcggaggggctcgggcgcggcgtgtcgggtgcgcctcgcagctctcccatagcattctctgccccggtgcgggcttgcctttctttgctctcgccgtctcccttgtcagccttcgtgtcggttctctccagcgttacccgatttcaaaaaccttgggcggcgagttttcaggtgtcgagtcgcccaggcggggag

SEQ ID NO: 7154 - DNA, 31 bp, Homo sapiens
  chr21:18985139-18985170
  hyper
cggcgcgtgcggctcccgcgtcgtcgggcgg

SEQ ID NO: 7155 - DNA, 118 bp, Homo sapiens
  chr21:27011419-27011537
  hyper
gacctgacttccagcacgagtcttgattgcttttttttttctcgagttcgaggcggagcccgcgaaccccatctcctcagagcgccaccccctcagcttcgcccgttgggcagaattt

SEQ ID NO: 7156 - DNA, 31 bp, Homo sapiens
  chr21:27011573-27011604
  hyper
agaagttttgagccaacgaggggaagaaagg

SEQ ID NO: 7157 - DNA, 61 bp, Homo sapiens
  chr21:27011608-27011669
  hyper
ggggcaaaacaggaggcgtttccctacccgcatacatccccgtccccgagacacccaatcc

SEQ ID NO: 7158 - DNA, 213 bp, Homo sapiens
  chr21:27011672-27011885
  hyper
cacccccagcctgcccgcgcctcccgcccccagctcctcgccctggggacagctggcagccccgcgcggaccagacacaaagccgatcaatcccggaggcgtgggggcggagggacgacccgccggggctttcccgggcgctgctctcctcctgctgccccctcgctaggacccggcggacgcctcgtctggttttcacgccctctagcccct

SEQ ID NO: 7159 - DNA, 62 bp, Homo sapiens
  chr21:27011920-27011982
  hyper
cctgggctggaggacccgcctcttggcagccagctgagaaggcgccccggggagggggaaac

SEQ ID NO: 7160 - DNA, 136 bp, Homo sapiens
  chr21:27011984-27012120
  hyper
acatcccatctagagccgtccctcctcttcctcccctcccgactctctgctcctttcccgccccagaagttcaagggcccccggcctcctgcgctcctgccgccgggaccctcgacctcctcagagcagccggctg

SEQ ID NO: 7161 - DNA, 77 bp, Homo sapiens
  chr21:27012148-27012225
  hyper
cgccaccgcctcctcctgctgctgctgcgctacctggtggtcgccctgggctgtaagttgctcgggttcctctaccc

SEQ ID NO: 7162 - DNA, 181 bp, Homo sapiens
  chr21:27012250-27012431
  hyper
accctccagccccccacggggcgctggctgacagtgtctgggcggctctgggccgaggtcgccgcggggcgtctgaccttgcgcccaggcgagcgggaaacccagggtgcccgcgagcggacgctgggagcaagggagcgcgaggtcgtgggtttcttgtgaattgcgtctgattttgtca

SEQ ID NO: 7163 - DNA, 38 bp, Homo sapiens
  chr21:27012498-27012536
  hyper
ttttcagacagagggacgtgattcgaatgcaaaactca

SEQ ID NO: 7164 - DNA, 96 bp, Homo sapiens
  chr21:27012572-27012668
  hyper
tggcatcactgggaggcgggcgccggccacactttgagtccccggggagggggcagcgtccgcgtggtctgggctctgtagcgtcccagctgagcc

SEQ ID NO: 7165 - DNA, 31 bp, Homo sapiens
  chr21:27541597-27541628
  hyper
gaggcgccatcttctccgtcttaatcttcac

SEQ ID NO: 7166 - DNA, 218 bp, Homo sapiens
  chr21:27541877-27542095
  hyper
gcacagaattaagcctcggaggtgatccgagggtgggaagcagaggggccccgaggctccgccagaagccccggcagcgtctctgccccctcccaggcggacgcgcagccccgggaagggagccgggcgggagcctcggtggcgcactgagactaacgcggctcggcccacggcgagggcggggtgtcgcggcttttgttcccgcggaccttctgcct

SEQ ID NO: 7167 - DNA, 31 bp, Homo sapiens
  chr21:27542233-27542264
  hyper
ctgtggaaggcggtgcgcgaccccgacgccg

SEQ ID NO: 7168 - DNA, 31 bp, Homo sapiens
  chr21:27542290-27542321
  hyper
gccgccgccagcagccgcgaaaagaggttgg

SEQ ID NO: 7169 - DNA, 84 bp, Homo sapiens
  chr21:27542344-27542428
  hyper
agagaggaaggtgaaacgaggcggagaacgcagggaaaagcgaggggctcctagcttcctgggctgtcccgactcctcctcctc

SEQ ID NO: 7170 - DNA, 85 bp, Homo sapiens
  chr21:27542444-27542529
  hyper
agaaaggaaagggcaacgattcaagagcgaaggactggctttagggacgctgcgttttcggttttccccacgtgctccttccccc

SEQ ID NO: 7171 - DNA, 70 bp, Homo sapiens
  chr21:27542536-27542606
  hyper
ctgtctgaatgtctctcgcctcccccgacccccgcttccaaggcagggactaagtcggggtctgggctca

SEQ ID NO: 7172 - DNA, 86 bp, Homo sapiens
  chr21:27542715-27542801
  hyper
gccgaaagcggggatgcgctggacgtccgcaagcgggggcggagaggagaggggtcccattgacggacccccggcttctctgcatt

SEQ ID NO: 7173 - DNA, 86 bp, Homo sapiens
  chr21:27542816-27542902
  hyper
ggtcttggggggtatcgcgtccccaccgtgcagcctccccccgccttccgaggcgcggcacccacctccagcgcccgagccgtcca

SEQ ID NO: 7174 - DNA, 275 bp, Homo sapiens
  chr21:27542942-27543217
  hyper
accctgcgcggggcaccgagtgcgctgctgtgcgagtgggatccgccgcgtccttgctctgcccgcgccgccaccgccgccgtctcccggggcccccgcgcacgctcctccgcgtgctctcgcctaccgctgccgaggaaactgacggagcccgagcgcggcggcggggctcagagccaggcgagtcagctgatccggcccaccccgctcggcacccgagagagacccctagcggcgccgccggggaactgcgcccgctcgcgccgggaggggcc

SEQ ID NO: 7175 - DNA, 31 bp, Homo sapiens
  chr21:27543334-27543365
  hyper
ggggccaggagagggacggtgcaggatcagg

SEQ ID NO: 7176 - DNA, 90 bp, Homo sapiens
  chr21:27543367-27543457
  hyper
aaggtgagtcctaggacgctgaggctctagaaaagtcgagagcgctcctgctcgtccccgtgagcttgaatcatccgaccccgcaggcct

SEQ ID NO: 7177 - DNA, 72 bp, Homo sapiens
  chr21:27543487-27543559
  hyper
agggtgcgtttttatccgcatttcgttttttctctcggtttggagaggtggggcaggcgtttctggaagaga

SEQ ID NO: 7178 - DNA, 276 bp, Homo sapiens
  chr21:33784350-33784626
  hyper
agcacccaaaggaagccgagctggagctaaagatcccggctccggagccatctgaccggttttgagacctccagctcgtcgccgtcctggctgcgagagcttgggcacggcgccggggctcagtctcctcttctgtggaatggcgataactgtatgtgccgggtgactgcacgtggcgcgcggcgggtggcggggatggcagcggtgcgatcccacgcctccaggaccccaccttcctgcggcccccgatcggccccgccccgggggcgccccagc

SEQ ID NO: 7179 - DNA, 86 bp, Homo sapiens
  chr21:33784754-33784840
  hyper
aggcgctcaaggtgcgcggcccggggcgcgctactgggggcgccctccgcggtgggcagcgcgccagggatcggcctgggcagccg

SEQ ID NO: 7180 - DNA, 36 bp, Homo sapiens
  chr21:33784934-33784970
  hyper
ccttttcggggatcctcgccccgccccagttctccg

SEQ ID NO: 7181 - DNA, 159 bp, Homo sapiens
  chr21:33785027-33785186
  hyper
agcctgggcagggaggcggcggggggccgcggagccgctggccatcgattctccccgccatgtgacgccgtccttagccctgcgacccccagcgcgtcccgggcctgcgcctccgccccgccgcgcagcgcacgatgcttctgccgggacgcgcacgcc

SEQ ID NO: 7182 - DNA, 57 bp, Homo sapiens
  chr21:33785201-33785258
  hyper
agcccgtgcagcatcccggcctccgccggcaggtagagccgccggggcagctcctgc

SEQ ID NO: 7183 - DNA, 52 bp, Homo sapiens
  chr21:34100891-34100943
  hyper
gctcacagggttctatcgaagagtgcttaggtgtatacgatggagagtggga

SEQ ID NO: 7184 - DNA, 31 bp, Homo sapiens
  chr21:34482191-34482222
  hyper
cttcccttgtttggggcggtaaggtcagaag

SEQ ID NO: 7185 - DNA, 31 bp, Homo sapiens
  chr21:34776440-34776471
  hyper
tggttctgcagcctggcgagactgcgcttag

SEQ ID NO: 7186 - DNA, 58 bp, Homo sapiens
  chr21:35013431-35013489
  hyper
tagaaacgcagatgttcggccccgacccagacctatcccaaggcgatgcttacatctc

SEQ ID NO: 7187 - DNA, 111 bp, Homo sapiens
  chr21:35986868-35986979
  hyper
aggggaccgggaccctcggggcgccgtccccacgccccagccctgacgggtccgcggccgagcagcccgggggacgtcgctgcctccccgccccgcgcgcggccgggactg

SEQ ID NO: 7188 - DNA, 31 bp, Homo sapiens
  chr21:36260354-36260385
  hyper
ttgggagttgagcagccgcagagtcacacac

SEQ ID NO: 7189 - DNA, 90 bp, Homo sapiens
  chr21:36260434-36260524
  hyper
tgactcagccctgactcgggcagcagcgagacgatactcctccaccgtcgcccagcacccgccggttagctgctccgaggcacgaacacc

SEQ ID NO: 7190 - DNA, 73 bp, Homo sapiens
  chr21:37528251-37528324
  hyper
gcaggggtcccaagcccgccgcgccccctgcgccccaaacgtgtgtggagggcttggacgtggtccagaggga

SEQ ID NO: 7191 - DNA, 236 bp, Homo sapiens
  chr21:37528389-37528625
  hyper
gactccaaagcacctccgagggccgacacacgcgcggacgaccttgggcgggcactgaccaatgtccccttccactcggttgtgtcgggggtccccaggtgaggcgcgaacgccgccccgctcacctgtacgaggcctttcccggagcagcccggctacgaagcgacacccatggcggagaagctaaggaagactcccgctccctcacaccgcggctgaggcgactgaaccgcccc

SEQ ID NO: 7192 - DNA, 69 bp, Homo sapiens
  chr21:37757665-37757734
  hyper
gcgggggcggggcctgcggcgcgcgggaagcggcgcgcgctgcgcgggaggtgacggtgcctctgactg

SEQ ID NO: 7193 - DNA, 157 bp, Homo sapiens
  chr21:37757750-37757907
  hyper
tacggcttccctggcccgggcagctccgcggctcttttggtcgcgtcggtccgggccagaggccctcgccgagggcgggcccctgggccccgggatagctccggagcggcgcgcgttggggcggcggggccccgtccacccccggccccgcgcggcc

SEQ ID NO: 7194 - DNA, 31 bp, Homo sapiens
  chr21:38071355-38071386
  hyper
ctcccgctcccccctccgggacccaggcggc

SEQ ID NO: 7195 - DNA, 31 bp, Homo sapiens
  chr21:38071408-38071439
  hyper
tctgccataaacaaacgcggctcggccgcac

SEQ ID NO: 7196 - DNA, 67 bp, Homo sapiens
  chr21:38362191-38362258
  hyper
gtcccgcagggaagaacgccagcggcgcgcggaggccgcgctgccctgggccgcgaggtccctatgg

SEQ ID NO: 7197 - DNA, 22 bp, Homo sapiens
  chr21:38362412-38362434
  hyper
cggcgaacgcccacccctgtcc

SEQ ID NO: 7198 - DNA, 31 bp, Homo sapiens
  chr21:38593485-38593516
  hyper
ccagggtggtgccccccggctgtggagccca

SEQ ID NO: 7199 - DNA, 31 bp, Homo sapiens
  chr21:38608355-38608386
  hyper
gatttatgatttttaccgttttagattgtta

SEQ ID NO: 7200 - DNA, 69 bp, Homo sapiens
  chr21:38608494-38608563
  hyper
acctttagagtaagtgcggtaaacagtgcgggccgaggagtgctggtctggacccgcaggctgaggctg

SEQ ID NO: 7201 - DNA, 163 bp, Homo sapiens
  chr21:40177484-40177647
  hyper
cctcagggccagccggcgagggacccagccgagtgacagcaggaggcggagggaaggttgggccggaaggtgtcagccccgccccgcgctccctcgccgcctccgccctcctcttctctcccctcgtgcgttccctctcctctccctccgctcccccaaccct

SEQ ID NO: 7202 - DNA, 31 bp, Homo sapiens
  chr21:40177761-40177792
  hyper
tcccctcccctccactcggccgtccctcctt

SEQ ID NO: 7203 - DNA, 88 bp, Homo sapiens
  chr21:40177801-40177889
  hyper
tcctccctcctcctcccgctcctgaagagcgcgccgcgtgggggacggcccggttacttcctccagagactgacgagtgcggtgtcgc

SEQ ID NO: 7204 - DNA, 66 bp, Homo sapiens
  chr21:40178016-40178082
  hyper
aagcgccggccctgcccgcagcggcagggtaagagctgggcccgcagagagcgcccggcgcgcggc

SEQ ID NO: 7205 - DNA, 270 bp, Homo sapiens
  chr21:40178123-40178393
  hyper
gcggggggcactgacacgcagatctcggggcgctgccgggggtgcaggtgggggtggcggctgctgcgaggactctaggggcgcgcgtctgagttccgcgccggctcgttttccggttatggagtggcctccggggctggcggggtcggccggggggttcctgcgtgctagggccgctgtcttcggggtcgcctagcggcgggcgcggccagggcgcgctggcttgtttcgctcgcttttgtttttaaaaggaaacgcaggcctggtagg

SEQ ID NO: 7206 - DNA, 149 bp, Homo sapiens
  chr21:40178399-40178548
  hyper
tgcccagtggatgtcccggcgaacatgatttcgcgaacgggagtgggggcacaggagagcgtgtccgaggtggcctggcgccccggctttgagggtgacttcctggagcggcgccgggcccggaggatctggggcgcccaagacacctg

SEQ ID NO: 7207 - DNA, 31 bp, Homo sapiens
  chr21:40275729-40275760
  hyper
ccaatgaagttggctgcgtttctgattcact

SEQ ID NO: 7208 - DNA, 31 bp, Homo sapiens
  chr21:40941232-40941263
  hyper
tcatttctctacacatcgtctcctacagctc

SEQ ID NO: 7209 - DNA, 31 bp, Homo sapiens
  chr21:40941272-40941303
  hyper
caccctgctccacccacgctggccttggctt

SEQ ID NO: 7210 - DNA, 61 bp, Homo sapiens
  chr21:42539439-42539500
  hyper
cgaaagcagccagacccggcgactgaaatgaggcggaggagcttggcgaggggaggcgcag

SEQ ID NO: 7211 - DNA, 66 bp, Homo sapiens
  chr21:42539637-42539703
  hyper
ccctagttcaggccctcgctgcccctttaagggttctcgaaactttccccccggtatcagatgagc

SEQ ID NO: 7212 - DNA, 36 bp, Homo sapiens
  chr21:42539862-42539898
  hyper
gggggaggggctgggccgctgcggggcagtcgcggc

SEQ ID NO: 7213 - DNA, 153 bp, Homo sapiens
  chr21:42540273-42540426
  hyper
cttcacgctgcccctccgggtggccgcggccacgaaccgcgtagttgcgcccaccccgggacccgggacccctgccgagcgccacgccgacggcttggcgctcgccctggagcctgccctggcgtcccccgcgggcgccgccaacttcttggc

SEQ ID NO: 7214 - DNA, 113 bp, Homo sapiens
  chr21:42540442-42540555
  hyper
cagggggactctggccgcggctactacctggagatgctgatcgggacccccccgcagaaggtagggacccccggctgctgccgcgggcttttcgggctcgttggagggagggg

SEQ ID NO: 7215 - DNA, 57 bp, Homo sapiens
  chr21:42540683-42540740
  hyper
ggaggacggcagcccccgcccggggcgcactgaggggtgtgcgcgagtgtttcagaa

SEQ ID NO: 7216 - DNA, 80 bp, Homo sapiens
  chr21:42540805-42540885
  hyper
cgtgatttccttcttgcgggcgacacctacttccagcgggagacggagcggtgggccttgggcgacgggctattatgggg

SEQ ID NO: 7217 - DNA, 200 bp, Homo sapiens
  chr21:42879162-42879362
  hyper
cagggtgccactgtgccgagccgggcaggacaggatgaggtggaccgaagcgcccaggtgccccgccttccccccaacccggcacggagcgcaagcggaggagccagaccggctcctcccgggcgggttcctgccggtgccgggtgtccaggaggccccggccctgatcgccgccagcgggtcgccgcaacggggcctga

SEQ ID NO: 7218 - DNA, 37 bp, Homo sapiens
  chr21:42879978-42880015
  hyper
gccgggaccctggtaccggcgccgctcacctgccgcg

SEQ ID NO: 7219 - DNA, 94 bp, Homo sapiens
  chr21:42880128-42880222
  hyper
gtcccagggtccagggcgacacccccaagcgggtcgcgggtcaccctgggcgggcgggggcgggggcggcgggaggaggcgtttcccaagggaa

SEQ ID NO: 7220 - DNA, 88 bp, Homo sapiens
  chr21:43067057-43067145
  hyper
atgtcactgcatttaccgcaaatggtaaacgttcacaaacattttgcgtaagtagacatcataatcaactttccggagaaacagaaat

SEQ ID NO: 7221 - DNA, 31 bp, Homo sapiens
  chr21:43186856-43186887
  hyper
gacattgtcggagccccgcggcctcgccggc

SEQ ID NO: 7222 - DNA, 106 bp, Homo sapiens
  chr21:43187116-43187222
  hyper
ccaccttctcccagcccgtgaactcgcccgcgtcgaaggtgcgcagcagcgccagggcccatggggtcccgccgtcgccctccatcgcgcacgtctagccagcgcc

SEQ ID NO: 7223 - DNA, 136 bp, Homo sapiens
  chr21:43187233-43187369
  hyper
ccaggtgcccaggtgcgcgctccgccctgttacgtcacttccgtaggtcgtcccgcccccaggccccgcccacttacccgccccccgggcgccctctctgccagcgcccggtgactgcggacggatgaatagacgc

SEQ ID NO: 7224 - DNA, 31 bp, Homo sapiens
  chr21:43373717-43373748
  hyper
gcgcctccccgagccacgagcccagccgggc

SEQ ID NO: 7225 - DNA, 76 bp, Homo sapiens
  chr21:43374032-43374108
  hyper
tgggaagttcctgggccgctgcgggccgcgcttcctcctgcgcgcgccgccccgggcgtcccgcccgcggcccagc

SEQ ID NO: 7226 - DNA, 34 bp, Homo sapiens
  chr21:43374331-43374365
  hyper
ttcatcagcccaaccccggcggctgctgtgcggc

SEQ ID NO: 7227 - DNA, 31 bp, Homo sapiens
  chr21:44013673-44013704
  hyper
cccctccaccacaccccggcaagcccctcct

SEQ ID NO: 7228 - DNA, 90 bp, Homo sapiens
  chr21:44847545-44847635
  hyper
cgcgtggggctggcggcgcggatgccctggggcgctgcagaccccgagaggccgcttgcccgcggggacgtcagccgcttttgctgttaa

SEQ ID NO: 7229 - DNA, 260 bp, Homo sapiens
  chr21:44847663-44847923
  hyper
ttgaaacctaaggaagcgtgaccggccgctctggaagcccccgccgcgcggccggtcccggccccggccctcagcggcgctggcgtctgcgcgtcccggggctgcccccgcagcatgtggggctgggaccctcttcccgcgcgggccccgggcggacgctgcgggcggtgacggagccaggccggccgcctgggtaggggacgggggcgcgggaccacttgcttgcccgtggccgatgcctcatccgaacggaaaacgtt

SEQ ID NO: 7230 - DNA, 31 bp, Homo sapiens
  chr21:45148315-45148346
  hyper
ctgctctcccctggaacgcctggaactaggg

SEQ ID NO: 7231 - DNA, 199 bp, Homo sapiens
  chr21:45148389-45148588
  hyper
cttcccccactcctgccgttctgagtcaccctgcctccccggaggaggaggaggatcagctgagccgccgcgctcacgtagtgtctggctgtctgcctgtctgcctcgctgtgagcagagtgggatgctgccgataaggcgcgcacgtgggccctgggaggagcccgaggcagccactcccgcacgtgggcaggaggag

SEQ ID NO: 7232 - DNA, 69 bp, Homo sapiens
  chr21:45148715-45148784
  hyper
aggttgaaagcacttccgctgcggcccccgcaggaagttcccaggaggaagttgcgaccctttctaagc

SEQ ID NO: 7233 - DNA, 179 bp, Homo sapiens
  chr21:45148847-45149026
  hyper
gactggctttctctctcggcaggagacggggcgcacgcctgcaggtgggggagccccaatacgtcacacggatgagcggggcaaagcccagccccccaccccgcacccgcccgcccgcaatcctgccccctggctgcggcctccgcggctcttcccaccccggctccgctgggtgcttg

SEQ ID NO: 7234 - DNA, 97 bp, Homo sapiens
  chr21:45286200-45286297
  hyper
gagggtgatgagcatgcggctcttattaaaaatgaaagccaacgccgagagcctgctgggggctgggaggtggggcgggcggcgggcccaggctgct

SEQ ID NO: 7235 - DNA, 41 bp, Homo sapiens
  chr21:45286319-45286360
  hyper
cttttaaattgcaggcgcggctgctccgactcgactcgctt

SEQ ID NO: 7236 - DNA, 39 bp, Homo sapiens
  chr21:45381602-45381641
  hyper
tgtctcatatggaaaacggtgagcgcgtatacactttgt

SEQ ID NO: 7237 - DNA, 52 bp, Homo sapiens
  chr21:45526962-45527014
  hyper
tgcggagcgcgcccagcgctggagcgcgcctaagaggcgccctgcagtgtgg

SEQ ID NO: 7238 - DNA, 38 bp, Homo sapiens
  chr21:45660234-45660272
  hyper
tgggggagggcgtgtccgcagaccgtgggcaccagctg

SEQ ID NO: 7239 - DNA, 49 bp, Homo sapiens
  chr21:45660350-45660399
  hyper
ggcagcgcccgtgccccggcgtgcagggtgcgcccgccttccctccctc

SEQ ID NO: 7240 - DNA, 55 bp, Homo sapiens
  chr21:45875787-45875842
  hyper
agttgaaagaaaaggcgcggttctgtgcccggtgcgagccgcggctcctttaggg

SEQ ID NO: 7241 - DNA, 31 bp, Homo sapiens
  chr21:45876001-45876032
  hyper
gtcaccgtcctcctggcgtccaccctgagga

SEQ ID NO: 7242 - DNA, 31 bp, Homo sapiens
  chr21:46294932-46294963
  hyper
ccacttctctggcactcggagcgctggcacc

SEQ ID NO: 7243 - DNA, 34 bp, Homo sapiens
  chr21:46351694-46351728
  hyper
cggcgcaggcgacccccgacgggcagccgctcac

SEQ ID NO: 7244 - DNA, 31 bp, Homo sapiens
  chr21:46438820-46438851
  hyper
gccccggccccggccccggccccgcccttgg

SEQ ID NO: 7245 - DNA, 105 bp, Homo sapiens
  chr21:46950777-46950882
  hyper
gaaggaagaccagccccgcctgcgtggccgtgacgcccgcgatgagcagcttggaccagcgcgcccagcggatcttcacgaagcccgcggcgaaggacgtgatgg

SEQ ID NO: 7246 - DNA, 109 bp, Homo sapiens
  chr21:47799168-47799277
  hyper
ccgtcttcctgggctgcgtgtcgtgagccgcgcccgtcttcccgggccgcgtgtcgtgagccgcacccatcttcctggggctacgtgtcttgagcggcacccatatacc

SEQ ID NO: 7247 - DNA, 172 bp, Homo sapiens
  chr22:18923727-18923899
  hyper
ccggcgccgtggacagcgggacgaagcggggaatgcaggggcgcagcgcgggcagggcgcgcctcagagccatggcgggacggcggtacccgcccgggccgcttaagtgtgcgctgttggtcccgccccgccccgccccgccccgccccgccccgctcggtcccagaggcct

SEQ ID NO: 7248 - DNA, 35 bp, Homo sapiens
  chr22:19706535-19706570
  hyper
aacgcggcggagaatgcggccgtgggacccctcca

SEQ ID NO: 7249 - DNA, 50 bp, Homo sapiens
  chr22:19706571-19706621
  hyper
gggccccaagggtctgcgggggctgggcgcctgggcgcgcgggcggggga

SEQ ID NO: 7250 - DNA, 64 bp, Homo sapiens
  chr22:19706632-19706696
  hyper
gcggtctataaataggcgctgctccgccaccgccgctgccgccgcccccgcggctggatccggg

SEQ ID NO: 7251 - DNA, 82 bp, Homo sapiens
  chr22:20255236-20255318
  hyper
ttaaccccttggtggccggggcgctccgaggccgggccccgcccttccagcccacggcccccgccctcgacttggcccagca

SEQ ID NO: 7252 - DNA, 182 bp, Homo sapiens
  chr22:20255327-20255509
  hyper
ctcggaccgccaccctcggccctgccgaagccgtcaactttcccgggaagcggcaacttttcctgccgcctccggctccgccctcccggggccggggcgccagcggccccagcctggcgcggcactgcggtggctttccctgccgcccggctacgcttccctcgcctcggcagcccgggacg

SEQ ID NO: 7253 - DNA, 84 bp, Homo sapiens
  chr22:20255583-20255667
  hyper
ggacactcacctccagcggacgccctcttcatcgtaggggttgggcggggcgcgtcggggactgaaagtcgtttcggggcgggc

SEQ ID NO: 7254 - DNA, 1 bp, Homo sapiens
  chr22:20255668-20255669
  hyper
c

SEQ ID NO: 7255 - DNA, 55 bp, Homo sapiens
  chr22:20286610-20286665
  hyper
gcggggcggaacctcccgaggagagggcgcggctgggagcgcggggcggggcctt

SEQ ID NO: 7256 - DNA, 36 bp, Homo sapiens
  chr22:20286727-20286763
  hyper
cggtcctcccgaggagcgggcgcggctgggaaggcg

SEQ ID NO: 7257 - DNA, 31 bp, Homo sapiens
  chr22:20286933-20286964
  hyper
ggtggggttgggacttcgggatgggttctcc

SEQ ID NO: 7258 - DNA, 183 bp, Homo sapiens
  chr22:22220989-22221172
  hyper
agtaaaaacttcaagacggaaatatgccaccaacactggcgtcagtaatccattttagaaagcctgcgcggagaccaccattagcaccgctgaggatatttaatgaaagccgttggctgcaaacagaggcgaagagagaaaaacgattatttcggtgttctgcacacacgcggaggcaaaacg

SEQ ID NO: 7259 - DNA, 31 bp, Homo sapiens
  chr22:22221290-22221321
  hyper
ccttccgttgccttcccgagggtccagactt

SEQ ID NO: 7260 - DNA, 31 bp, Homo sapiens
  chr22:22280174-22280205
  hyper
cagagatgcacccaaacgaggctcatcaaaa

SEQ ID NO: 7261 - DNA, 31 bp, Homo sapiens
  chr22:22307336-22307367
  hyper
acgtggacggtgactgcggccctttagtggt

SEQ ID NO: 7262 - DNA, 131 bp, Homo sapiens
  chr22:22862685-22862816
  hyper
ccttctccaggaggcccgggcccagcccgggggtgggggcgtctgcgtgagggagtggaggctgatgtaaaagtggcgcccgctgagattagggaagggggtgtgcgtgaggggatcgtgggacctggttc

SEQ ID NO: 7263 - DNA, 38 bp, Homo sapiens
  chr22:22862824-22862862
  hyper
actcccccacagaaagcggctgtattgcaaaggccgct

SEQ ID NO: 7264 - DNA, 13 bp, Homo sapiens
  chr22:22863219-22863232
  hyper
ggggttaaattga

SEQ ID NO: 7265 - DNA, 38 bp, Homo sapiens
  chr22:22863269-22863307
  hyper
aaaggatcttgggttccggatcacggttccaggcagtc

SEQ ID NO: 7266 - DNA, 234 bp, Homo sapiens
  chr22:23523109-23523343
  hyper
gcgcgcagcccggcggcgcaggtaaggccggccgcgccatggtggacccggtgggcttcgcggaggcgtggaaggcgcagttcccggactcagagcccccgcgcatggagctgcgctcagtgggcgacatcgagcaggagctggagcgctgcaaggcctccattcggcgcctggagcaggaggtgaaccaggagcgcttccgcatgatctacctgcagacgttgctggccaagg

SEQ ID NO: 7267 - DNA, 41 bp, Homo sapiens
  chr22:23523362-23523403
  hyper
gcagcgatggggcttccggcgcgcggcgcaggcccccgacg

SEQ ID NO: 7268 - DNA, 46 bp, Homo sapiens
  chr22:23523405-23523451
  hyper
gcctccgagccccgagcgtccgcgtcgcgcccgcagccagcgcccg

SEQ ID NO: 7269 - DNA, 37 bp, Homo sapiens
  chr22:23523514-23523551
  hyper
cgggtaaggccaggcccgggaccgcccgcaggcccgg

SEQ ID NO: 7270 - DNA, 31 bp, Homo sapiens
  chr22:23864390-23864421
  hyper
ccttacccctcctccccggtgcccagggccc

SEQ ID NO: 7271 - DNA, 80 bp, Homo sapiens
  chr22:24180686-24180766
  hyper
ggcctctctcccagcccggccggcctgccctccacccagcccgtgtccgcagggcgcaggatacacgaagagcatgttga

SEQ ID NO: 7272 - DNA, 125 bp, Homo sapiens
  chr22:24180811-24180936
  hyper
cgagcctccagacctacgggggacgggcggtcaggtgcggggtgggtgggtcgggcccacaggtgcgcggcgcggggcggcctcacctggaacttccggaacacaaggtgcgggttgaagtagag

SEQ ID NO: 7273 - DNA, 15 bp, Homo sapiens
  chr22:24180978-24180993
  hyper
ccagtcaagagctgc

SEQ ID NO: 7274 - DNA, 229 bp, Homo sapiens
  chr22:24181054-24181283
  hyper
cgacgtccggtccgcccggccgcttaccaccgcggcggtggtgaggacacaggctgcggtgtaagcccgcgtcaccgccggcacctgcaggaactcggccgctagtccctgccacgccattgaaccttctcaagcacgcgtggcccagccagcaacgcgctctttaacccgcctcccagccccgccttcggccaatccgcatccgaggcgctgcgcgccccaggctgaa

SEQ ID NO: 7275 - DNA, 69 bp, Homo sapiens
  chr22:24181412-24181481
  hyper
tggctgcggtggtggcgcgggagaacgtgtggccaatgaggaactggtcatttcgcggctttctaggag

SEQ ID NO: 7276 - DNA, 48 bp, Homo sapiens
  chr22:24181512-24181560
  hyper
ggggcggggctaagatcgtatgggttacaggagcgaagacccgagcag

SEQ ID NO: 7277 - DNA, 108 bp, Homo sapiens
  chr22:24181571-24181679
  hyper
ctggaaagggcggggcgcgtgggcggggcgcggagtgtggcggctcagaccgtgctggctcactaactgacgacctagccacaacgttgtcctcgctgccagcccaag

SEQ ID NO: 7278 - DNA, 81 bp, Homo sapiens
  chr22:24551917-24551998
  hyper
ggcgccccgtccggccgcgcctgccccgccccggcccgccgcgagcgagagagcgaacgagcctccgcggccatggcccgg

SEQ ID NO: 7279 - DNA, 68 bp, Homo sapiens
  chr22:24552115-24552183
  hyper
cttcgcctccgctgcccgtctgggtctccactttgctggcgcttttgctcaatcgtcccctggtgggc

SEQ ID NO: 7280 - DNA, 169 bp, Homo sapiens
  chr22:24552273-24552442
  hyper
cggcggcggggtgctgcgcccccatgcccagggcgggctggcacccggttcagcgtcaggtgggcggccaagccggcttgggcggcggcgcgcgggggcggcaggcgctggtgaagcccgcacacgcgccagcgcatccagccctaccaagccccgggctgggagctgg

SEQ ID NO: 7281 - DNA, 55 bp, Homo sapiens
  chr22:24552577-24552632
  hyper
tccgggcgcggtgcttcgctagctataaataggtgctgtgcggggacaggaagat

SEQ ID NO: 7282 - DNA, 100 bp, Homo sapiens
  chr22:24552638-24552738
  hyper
agccctttacaagcaccggcccgttatgtgcgctgggctaggaccttgccccgcagcggagtgggaggagtgaggttaggggtaacggttgcatgggatg

SEQ ID NO: 7283 - DNA, 34 bp, Homo sapiens
  chr22:24552756-24552790
  hyper
cctacagcagagttggcggcggggctctcccatg

SEQ ID NO: 7284 - DNA, 31 bp, Homo sapiens
  chr22:24552829-24552860
  hyper
gaagggaggaacagcccggcagttctgggga

SEQ ID NO: 7285 - DNA, 148 bp, Homo sapiens
  chr22:24552963-24553111
  hyper
attacctgtggatggcgcggggaatcccttgccctcagtagccccgcctggagagacaggaccgcgttgtggggggtggggtgtaggagtgggcggaggccagggcgcccctggtggcctgtgtacaaccctgcggccagagaggccc

SEQ ID NO: 7286 - DNA, 31 bp, Homo sapiens
  chr22:24563089-24563120
  hyper
agggcagggggccacccggaggagccgctct

SEQ ID NO: 7287 - DNA, 37 bp, Homo sapiens
  chr22:24643677-24643714
  hyper
ctgcctaagaaagggccggggtcgctgcaccctctgg

SEQ ID NO: 7288 - DNA, 89 bp, Homo sapiens
  chr22:24820073-24820162
  hyper
ctcagggttcctttcccgccgccccgagaccagttccccggcgcggggtccgagtcctgccccgcggcggctgccggcactgcctgtga

SEQ ID NO: 7289 - DNA, 31 bp, Homo sapiens
  chr22:24820223-24820254
  hyper
ctgtcccaaactgcaccggaaggcgcgcagg

SEQ ID NO: 7290 - DNA, 94 bp, Homo sapiens
  chr22:24820266-24820360
  hyper
gggaaggcaagtgcggcggccggcgcggcgcggggtgcggagccgcaggtagcgggcggggagcgtccgtccgtcagtccgtccgtccgtccat

SEQ ID NO: 7291 - DNA, 92 bp, Homo sapiens
  chr22:24989195-24989287
  hyper
gaggaggccctgcttgcgtcagtcttggcgctagaacccgagggcctggagccgccaggggagacgcggagctcggccgagacgaggtggct

SEQ ID NO: 7292 - DNA, 31 bp, Homo sapiens
  chr22:25348233-25348264
  hyper
ttgcccgcccccgggccggcaccagcagccc

SEQ ID NO: 7293 - DNA, 31 bp, Homo sapiens
  chr22:25348278-25348309
  hyper
gcccacatttatggagcgcctcctgaaatcc

SEQ ID NO: 7294 - DNA, 68 bp, Homo sapiens
  chr22:25348311-25348379
  hyper
ggttgcattaggctctcggggtcgccggctgggcagcgggtcggtgccggtggcgggggatcctggct

SEQ ID NO: 7295 - DNA, 295 bp, Homo sapiens
  chr22:25348388-25348683
  hyper
ggaacatccagggaacgcgggagggtacccggagcaaagttcccaattggacagagcggggtcgggcctcgaggggcgggagcgcttccggcaggggtgtccaagcgagtcgtgacctctgacccgccggagaggtcccaggcccaggcgccactgcggactcgggtcctgcctgctctgctcccctccgcgcaggcgcggccggcggcagttcccatggtgacgggggcgcgtccccgctcgaggccccgcccccagcaggctaggctgcgcggggctgcgggctcccagggca

SEQ ID NO: 7296 - DNA, 184 bp, Homo sapiens
  chr22:25348802-25348986
  hyper
aggtagctgggggtgacggcggctggcgagggccgccaagtttctgcccggccgaggccccgggagaaaagttggcaaagttggccggggaagaggcggggagccggaggatttccccagactccgggtctgcagggagggaggatcccggtttgggagccggggaatccgtctcccgagactt

SEQ ID NO: 7297 - DNA, 58 bp, Homo sapiens
  chr22:25349110-25349168
  hyper
ccccagtcaggggtgacggcgaagggtgattcgagactgggagcgagaggatcaatct

SEQ ID NO: 7298 - DNA, 31 bp, Homo sapiens
  chr22:25349197-25349228
  hyper
ggattcagagagatcccgtggctaggagctg

SEQ ID NO: 7299 - DNA, 235 bp, Homo sapiens
  chr22:25349271-25349506
  hyper
ggtctggacatttgtgcgggttggaggccccggaggtggaagtgggaagcaagggcggcgagcgagacggaaccctggtcgaggggagcccggaggacagcgcggtggttcggggggcgtgagaggggcggcgcgcggggcccctcggacgcggaggctccggacacgtcctctcggcctggcctgcgccccccctccgctcgtcttcccagggcggaggcgccctgatgggatt

SEQ ID NO: 7300 - DNA, 118 bp, Homo sapiens
  chr22:25349522-25349640
  hyper
gttaccaggcaggcccgcgtggtccccgccccgatggcggcgcggcccacccgggctcacgggtggggccctcgggatgggaagcggctcgttgacccccacccgagcctgacctttt

SEQ ID NO: 7301 - DNA, 112 bp, Homo sapiens
  chr22:25349645-25349757
  hyper
cctgctggcacaaactcgcctgggagtggggacgccgcgccttaaaaccctgctgtttgtccagtcccggagcaggcgtgtgacctccaccgcgcgacgcctaggtggctag

SEQ ID NO: 7302 - DNA, 31 bp, Homo sapiens
  chr22:25507703-25507734
  hyper
gagggtgcccaaaggccgccccctccacccc

SEQ ID NO: 7303 - DNA, 80 bp, Homo sapiens
  chr22:25507737-25507817
  hyper
ccccatccccatcccccgcctttcgggaccgtcacgccctggagtgagtgcagccggcttgttcctcaaagctccttgtc

SEQ ID NO: 7304 - DNA, 31 bp, Homo sapiens
  chr22:26756979-26757010
  hyper
ctacggggatacccacgcggctttaaacagt

SEQ ID NO: 7305 - DNA, 50 bp, Homo sapiens
  chr22:26880365-26880415
  hyper
tcaatgaattagtaaacggaaaccattttctggcacgtggtaagcactgt

SEQ ID NO: 7306 - DNA, 80 bp, Homo sapiens
  chr22:26880425-26880505
  hyper
gctattaatattatgccgatgttgatattattggtggtggtgacacgagggaagcaacatgaacacgtgactgctatcat

SEQ ID NO: 7307 - DNA, 31 bp, Homo sapiens
  chr22:27054040-27054071
  hyper
ggaggtgggggtggggcggtggggcagggtc

SEQ ID NO: 7308 - DNA, 59 bp, Homo sapiens
  chr22:27068716-27068775
  hyper
ggagcctttcttacaccggaagtcaatgaagcgggtctttcctacgctaaaaaccactg

SEQ ID NO: 7309 - DNA, 31 bp, Homo sapiens
  chr22:27068785-27068816
  hyper
ttagtacacaggaagtcggccagagaaacat

SEQ ID NO: 7310 - DNA, 41 bp, Homo sapiens
  chr22:27068933-27068974
  hyper
ggccggtttcccccaccgtaagtagacgtggggccgtgacc

SEQ ID NO: 7311 - DNA, 42 bp, Homo sapiens
  chr22:27068978-27069020
  hyper
gtccttgggaaagatccgtcccattcccggaagctagagggc

SEQ ID NO: 7312 - DNA, 37 bp, Homo sapiens
  chr22:27069054-27069091
  hyper
ggaagcagctttaccccgggctcggagtttgcaggag

SEQ ID NO: 7313 - DNA, 46 bp, Homo sapiens
  chr22:27069122-27069168
  hyper
gggctcacagggttcccgcagatgctcaggccggccaggaatgcat

SEQ ID NO: 7314 - DNA, 35 bp, Homo sapiens
  chr22:27069171-27069206
  hyper
tggctctctgttcccacggacgtcactgcctcagc

SEQ ID NO: 7315 - DNA, 46 bp, Homo sapiens
  chr22:27069207-27069253
  hyper
agcctcccccagagcccgccagccgctaagccggggccacacctgg

SEQ ID NO: 7316 - DNA, 71 bp, Homo sapiens
  chr22:29075826-29075897
  hyper
ctgcccccaaaccgcgcgcgcgcccccgcgggcccacacatgcaccgcgcacgcgcgcgttcgccgcgccc

SEQ ID NO: 7317 - DNA, 31 bp, Homo sapiens
  chr22:29279216-29279247
  hyper
aggggcggagcgaggacgaaggggcggagta

SEQ ID NO: 7318 - DNA, 74 bp, Homo sapiens
  chr22:29279555-29279629
  hyper
cggggataacccctcacgtggagcagatgaaagggccgcggcgcgacggccgggggagccgagctgagcctgcg

SEQ ID NO: 7319 - DNA, 74 bp, Homo sapiens
  chr22:29279910-29279984
  hyper
gcgcgggccaaggagacggcgttcgtggaggtggtgctgttcgagtcgagcccaagcggcgattacaccaccta

SEQ ID NO: 7320 - DNA, 173 bp, Homo sapiens
  chr22:29468802-29468975
  hyper
gagggccctgctgggccggcccaggtgaggcgagagatgggcggggcctgatgcgtgagtggcaggagcagcgcgcggccggggcggggcgtgcgtgcgcagtgggctccgccccccgggcctctccgcggatccgggcgggccccaggctgcaggggcggtggcggcgctga

SEQ ID NO: 7321 - DNA, 35 bp, Homo sapiens
  chr22:29469137-29469172
  hyper
gcctcgccctgctctccgccgcggcgctcacgctg

SEQ ID NO: 7322 - DNA, 63 bp, Homo sapiens
  chr22:29469213-29469276
  hyper
cggtgagtgtgagcgaccccccgccgcccgccctgagcggagcccactcgaggggcgacaagg

SEQ ID NO: 7323 - DNA, 2 bp, Homo sapiens
  chr22:29469460-29469462
  hyper
cg

SEQ ID NO: 7324 - DNA, 57 bp, Homo sapiens
  chr22:29702351-29702408
  hyper
tttaaaaagagcccagcggggcttaaccctcccgcgtccggccggcctccgatgccc

SEQ ID NO: 7325 - DNA, 56 bp, Homo sapiens
  chr22:29702531-29702587
  hyper
acaaggagccctcagtcgccaggggcatcctccccctccccgcggcggtgccgttt

SEQ ID NO: 7326 - DNA, 140 bp, Homo sapiens
  chr22:29702593-29702733
  hyper
ccaggggaggtccacccgggaggaggtgactttgcagcctccagccgctatcgcttcctgccttcatcttgggaacaggccgtgctgtgcgccagcccggggagcccaccgtctggggaggggggcgattaaaaggtccc

SEQ ID NO: 7327 - DNA, 536 bp, Homo sapiens
  chr22:29702784-29703320
  hyper
ctgggtgggggttgggcgcctgggccggtcgcagttgtctgggggccctggggctctctgcgtcgagagcgctcgaagacccgggattcctggcccgatcgcgggcggggggagaccccagctccaccccagctcccgccggctcggggaaggggcggcccctttaagagcgcgcggccccgcccgccccctccgggcaggatccgaattccagggaggcggggcggagacggcggcgaggaggaggccgcggcgcgggacgcatagagctgcggctcgggcggcgcctccctgcggcggcccggcccggctccggcccccgctggggcaatgctccccggggccgcgggatgagccaggtgagcgcggagacccccagcactccctgcctggtgcgcatggacgggggtggggaggcggggcgggaagcggcgtcctcggcctctgttccccggggctgtgtgaccttgggcggccccgcaccctctctgggcccagagccccagcaccggcagggcctgcggaggccgctctga

SEQ ID NO: 7328 - DNA, 189 bp, Homo sapiens
  chr22:30792948-30793137
  hyper
gggatcctttaagaggcggggcttggctgccagctccgcggcccgggcaaaaggctgggactttactccgggtggcggcgaggacgagtctgtgctccatcagctgccgcacccgccgcctcccgcccccaaaccccatccccgcggttgagccacgatgagcggcagagtcggcgatctgagccccag

SEQ ID NO: 7329 - DNA, 31 bp, Homo sapiens
  chr22:31002802-31002833
  hyper
ctgcagctgcagctcccgttccactccttgt

SEQ ID NO: 7330 - DNA, 62 bp, Homo sapiens
  chr22:31090873-31090935
  hyper
ccgcgcgcgggtcggccggctctatggggaaagcggcggctccgagccgaggcggcggctgt

SEQ ID NO: 7331 - DNA, 31 bp, Homo sapiens
  chr22:31090941-31090972
  hyper
cgctcccgcgggctctcgtcgctgttcacgg

SEQ ID NO: 7332 - DNA, 317 bp, Homo sapiens
  chr22:31198694-31199011
  hyper
cggatcctccggggaccgatcggtggcctcgcgcggctctcatcgctctccgagcagtgctccagggggcggagggagcctcctcgggcggtggggaggaggctggaggaatgaggacgcagcacggcgcgcccttgcagcgctcaggctgacgggcgggcgggcggagcgggcgcacggctcctctaggtccggctgctctctgagctcgcgggctggacgctgtccgcggtgctgaagcggcgcccgcggcagggaggcggacccggagccgccgggcagcacacacccaatcccgggaccgccctcctcccagg

SEQ ID NO: 7333 - DNA, 93 bp, Homo sapiens
  chr22:31199058-31199151
  hyper
cgcggcggcgggaaggcggcggcggcggcggcagcagcagcagctgcaagagccctcgcagcctcggggcaggacccacgtccacacccgaga

SEQ ID NO: 7334 - DNA, 65 bp, Homo sapiens
  chr22:31480650-31480715
  hyper
ctcagggttcttcagccgccacctccctctcttaagcgaggctcgggcggcgctggaaaagagtt

SEQ ID NO: 7335 - DNA, 414 bp, Homo sapiens
  chr22:31480758-31481172
  hyper
agatgagaacctgccccggtctcgggatcggtgcctctcgaagtctttccgaccccgggagcggctcctccagcacccggcgcccgccattactgcgccccgcgcgccggcccggcccccgctggcctcgtggcaagaacgggggcgtcccgagccgggctcctccccgcggggccgggccatataaggaaaagctaggcccgctccgcccgccctgcgccccagcgtctggccgatttggggacgcgggcagtcgcttccggccccggctcccgcacattcttgaggattgggccggggatgggaggaatggggacgcctggggacttgcacgccgcgtgcccctccaccacccgccgggacgccctctgcctcggtcccgagttcgagttcgacctccgccactcagctggg

SEQ ID NO: 7336 - DNA, 215 bp, Homo sapiens
  chr22:31481190-31481405
  hyper
ttcttccctttagatccggacactgaagcaggcggtagcgggtgtcttcctacctggctaccccttcggcgcctagcgcgaggcagggtgggcgaggcgagggcggcgccctgcgagggagggcggtcgcagaacctgcgggccttcagcgccccctggcgaggcttccctccaccgccggcgggacccccatgggcaaccgggggagctgggac

SEQ ID NO: 7337 - DNA, 31 bp, Homo sapiens
  chr22:31481411-31481442
  hyper
cctggagagccccctccgttgtgctgttggg

SEQ ID NO: 7338 - DNA, 43 bp, Homo sapiens
  chr22:31481463-31481506
  hyper
ctcagggcctgccaggcgttcccaacagcgagggcagagagta

SEQ ID NO: 7339 - DNA, 31 bp, Homo sapiens
  chr22:33149562-33149593
  hyper
ccctatttctggcttccgaggtttccaccac

SEQ ID NO: 7340 - DNA, 68 bp, Homo sapiens
  chr22:34316493-34316561
  hyper
cggggggggctgcaaccggccgcggcgcgctctcccccagggcctgcgccgcccgcccgcggctccgc

SEQ ID NO: 7341 - DNA, 31 bp, Homo sapiens
  chr22:35746850-35746881
  hyper
tcctgagcacggtctacggcccctgctcagg

SEQ ID NO: 7342 - DNA, 41 bp, Homo sapiens
  chr22:35768081-35768122
  hyper
tcccggtgtctgttttcgctgagtcacggtctagagatttg

SEQ ID NO: 7343 - DNA, 69 bp, Homo sapiens
  chr22:35768165-35768234
  hyper
caaagtccggactgtccggctggagtctggagtcgggacatgcctcagccagcacgtcctcggcctcgt

SEQ ID NO: 7344 - DNA, 91 bp, Homo sapiens
  chr22:35777143-35777234
  hyper
cgaacgagcccagcaccggccggatggagcgtccgcaacccgacaggcaagcgcggggcgcgggacgcgggacgggcgcctttctctccca

SEQ ID NO: 7345 - DNA, 31 bp, Homo sapiens
  chr22:35827119-35827150
  hyper
gactcagcagcccagacgctgcctggaggat

SEQ ID NO: 7346 - DNA, 34 bp, Homo sapiens
  chr22:36424034-36424068
  hyper
ccaaaacctatccactcgtcgtgcctcctggccc

SEQ ID NO: 7347 - DNA, 61 bp, Homo sapiens
  chr22:36424072-36424133
  hyper
ggaatcaggaccctctcgggcacaccaggttcagtcctgcaaccttcgttcctagcccgag

SEQ ID NO: 7348 - DNA, 58 bp, Homo sapiens
  chr22:36424336-36424394
  hyper
ttgctcaggccgggatcggctccgtctcctcccgctccgggcaccggcagctccagct

SEQ ID NO: 7349 - DNA, 40 bp, Homo sapiens
  chr22:36424418-36424458
  hyper
cggcggcgccgggcccgagctgaggcggctgatgcggctg

SEQ ID NO: 7350 - DNA, 52 bp, Homo sapiens
  chr22:36425194-36425246
  hyper
gtcctggaggcacagcgcggctggagtgcggggcagcgcggggggggcgggg

SEQ ID NO: 7351 - DNA, 44 bp, Homo sapiens
  chr22:36462013-36462057
  hyper
catggcaggaaatcagcgttttccaagaacgcccagtggcgcgg

SEQ ID NO: 7352 - DNA, 67 bp, Homo sapiens
  chr22:36462100-36462167
  hyper
agcagcagctccgtggcgccccctggaggccgcccctgctggcgccgtcccccgggtgtcaataggc

SEQ ID NO: 7353 - DNA, 51 bp, Homo sapiens
  chr22:36902361-36902412
  hyper
cagcacgcagtagtcccggcgcgggggcaccgacagcgctgggtgcagggc

SEQ ID NO: 7354 - DNA, 57 bp, Homo sapiens
  chr22:36902414-36902471
  hyper
tggccaggagcagccccgggggaccccacaacggggccgcagcggagaggcccatcc

SEQ ID NO: 7355 - DNA, 43 bp, Homo sapiens
  chr22:37099751-37099794
  hyper
cgctctcctgggctcccggagcttagaggaaggcgtagctaga

SEQ ID NO: 7356 - DNA, 112 bp, Homo sapiens
  chr22:37414959-37415071
  hyper
attccctctggaaagccggccccgcccctcccagccggcccgggggcccagcgcagaagcgggtggggcaagagtttccgaggactccaagtaggggcgcttcctggggcgg

SEQ ID NO: 7357 - DNA, 37 bp, Homo sapiens
  chr22:37415083-37415120
  hyper
tagaagttacagtactcgatcccgccaggaaagagca

SEQ ID NO: 7358 - DNA, 37 bp, Homo sapiens
  chr22:37415245-37415282
  hyper
gcctccccaggcagcccgagctcgcccgcctccagag

SEQ ID NO: 7359 - DNA, 41 bp, Homo sapiens
  chr22:37595693-37595734
  hyper
acgctccagccgtccccgcagccctgcgacaggcttttgag

SEQ ID NO: 7360 - DNA, 66 bp, Homo sapiens
  chr22:37915036-37915102
  hyper
gatgacccggcactggcgcagatacggcgtgagcttggccgggttcagggcgcgagccagccgatg

SEQ ID NO: 7361 - DNA, 42 bp, Homo sapiens
  chr22:37915114-37915156
  hyper
gattcgctcccacagcgcgtcctcctccgcctcagaccccga

SEQ ID NO: 7362 - DNA, 56 bp, Homo sapiens
  chr22:37915160-37915216
  hyper
gccccggcctcctcctcggcctcccccgcctccgcccggcccggcatggccgtgtc

SEQ ID NO: 7363 - DNA, 84 bp, Homo sapiens
  chr22:37915222-37915306
  hyper
gtctgcgggcaagaggcgcacgggggtcgaccagggctccctagggctagatgtgcggccaagcacccccggggcgtcgtccgc

SEQ ID NO: 7364 - DNA, 31 bp, Homo sapiens
  chr22:37915402-37915433
  hyper
cgccggcgcaggggggcggtgcccgtggcgc

SEQ ID NO: 7365 - DNA, 107 bp, Homo sapiens
  chr22:37956435-37956542
  hyper
accccgcccccgcccccggatccagcccgcggagcccgcggccagggcggcgcagaccggcccagcgactctcccgggctgccagccgggacgcgcggccgccgccg

SEQ ID NO: 7366 - DNA, 396 bp, Homo sapiens
  chr22:37956635-37957031
  hyper
ggaggccggcgggtcccggcgcccgcggggactctgcaccctactaggctcccggggccggaacggggacgggacccgcccgggagaggcgcccccgggtgcccacaggaaggccgggcgcggccgcggagccgcgcgaggaaactccgagctttcgggcttcgtgtcccgttccaggctggtggagggggcagaggatcggacacggctgagcggccaaaatgcgcgaggagggggcgagccgaggggcagagcgggggctgtctccgcgccttcctgcgcgggggaaggaagggccggggcgggcagcgggcgacgcggcggaatgtctcccctccgccgaggcccacgcggagagcgggaagtggggggtggggggcccggggagatggacag

SEQ ID NO: 7367 - DNA, 169 bp, Homo sapiens
  chr22:37957033-37957202
  hyper
accctgcccccctccccgaccgccgcattccaggctggagccgcggatgaggtcatcccgtccggttcccctccggccaagacagccggtcgtccccttcccccgcggagcgaccctccgcgtcctgagccccgtccccccagggaatgttggatggccgaagtctttc

SEQ ID NO: 7368 - DNA, 24 bp, Homo sapiens
  chr22:37957264-37957288
  hyper
cgcaacattcgaagcccttttcct

SEQ ID NO: 7369 - DNA, 107 bp, Homo sapiens
  chr22:37957312-37957419
  hyper
agtaggggggactggccgggaggccgcagcggcactaaacgtggcgcggggacccgagacgcggcccgcagccgctccgtctcgctcggtcccgggctggttcggct

SEQ ID NO: 7370 - DNA, 93 bp, Homo sapiens
  chr22:37957510-37957603
  hyper
gaccgggtcccctagcgcgactgcgaacaactagctaccccgttctggcctcagtttccccgtctctccaccttgaagcgtctggactttgag

SEQ ID NO: 7371 - DNA, 35 bp, Homo sapiens
  chr22:37957604-37957639
  hyper
agcaggagaagtcagccgaccggtttaacccctta

SEQ ID NO: 7372 - DNA, 31 bp, Homo sapiens
  chr22:38201306-38201337
  hyper
cggtgccgagaccaagcgacagaccggcggg

SEQ ID NO: 7373 - DNA, 38 bp, Homo sapiens
  chr22:38201356-38201394
  hyper
gctcggcgagctctcccgacacccgagccggggaggaa

SEQ ID NO: 7374 - DNA, 31 bp, Homo sapiens
  chr22:38578022-38578053
  hyper
tcctcggcggcgaggcgcggccatgtttgtg

SEQ ID NO: 7375 - DNA, 50 bp, Homo sapiens
  chr22:38578102-38578152
  hyper
gagtcctaccctagtccgccttccgcctcctaaagcgaccagagcctgga

SEQ ID NO: 7376 - DNA, 31 bp, Homo sapiens
  chr22:38863832-38863863
  hyper
aggcctccagtttctgcggagggaaggcaga

SEQ ID NO: 7377 - DNA, 63 bp, Homo sapiens
  chr22:38863865-38863928
  hyper
gcacttggggcatgggcgacatgggtcgtggcgggcacccggcgcacacggcagccgggcgca

SEQ ID NO: 7378 - DNA, 73 bp, Homo sapiens
  chr22:38864200-38864273
  hyper
gtttgctgggcgcgggcgcacgactgactggctggaccatgaacgtgttccgaatcctcggcgacctgagcca

SEQ ID NO: 7379 - DNA, 31 bp, Homo sapiens
  chr22:38966130-38966161
  hyper
actcgggcctagaacacggagcctggagacc

SEQ ID NO: 7380 - DNA, 55 bp, Homo sapiens
  chr22:39189767-39189822
  hyper
aggtgctgggggaagtcggctaaagggggacgcgggaccacgaagctgggcaggc

SEQ ID NO: 7381 - DNA, 48 bp, Homo sapiens
  chr22:39638592-39638640
  hyper
ccgggcgggcggcctgcggccctcgaggagccccgagaacaaaaggag

SEQ ID NO: 7382 - DNA, 105 bp, Homo sapiens
  chr22:39853146-39853251
  hyper
ggaggggagggggttgcggagggggcggggtgggggccggagccgcttgagccggcgggagcgggcacccctgcgcgccgcgctcggcctcgcctccgcgccccc

SEQ ID NO: 7383 - DNA, 53 bp, Homo sapiens
  chr22:39853409-39853462
  hyper
gatgccgggcgcccgccgcagccgctgccgccggagcccgggatggggcgaga

SEQ ID NO: 7384 - DNA, 31 bp, Homo sapiens
  chr22:39853475-39853506
  hyper
gccagcatctccccgccggggaccccggggg

SEQ ID NO: 7385 - DNA, 341 bp, Homo sapiens
  chr22:39853690-39854031
  hyper
cgggcgcgggcgcactggggctgggggcccggaggccgcggtgggggcgggatgccggggaagccgctcggcgcgggccccctccccctacccgccgctcctccgagctccccggtccccggagggcagagcctcagcgcccgaccccctcccacggccgggcgggggacgtccccgaggcgcggggctcgagccgtgctttgtgcgcggcaccccccagcctccggcgcggctcccccacaacctccggcgcggcgcggggctggggtgggaggcctccgcgcccgccttccccacccccgaccccagactgcggcggcggcagccgaggcccaagcgca

SEQ ID NO: 7386 - DNA, 54 bp, Homo sapiens
  chr22:41593088-41593142
  hyper
ctcctccgacttctcccgcaccgcggccgcaatccagcccggacactctgaggg

SEQ ID NO: 7387 - DNA, 136 bp, Homo sapiens
  chr22:41593144-41593280
  hyper
ctctctgagctgggcacggtcctcgctgctcggccgagtgcagccccctcacctcagtgcgactgagacaaagcaagggtcccaccggcccctgtcccctccctaaggcgcgccctcagggcgggagacccacctc

SEQ ID NO: 7388 - DNA, 67 bp, Homo sapiens
  chr22:41763317-41763384
  hyper
aaggcctggctgcagccggagctggcaggtggccgagccgggggtggacgggcgggctgggactggt

SEQ ID NO: 7389 - DNA, 42 bp, Homo sapiens
  chr22:41985664-41985706
  hyper
gcctcgggggtgtccgcgtgacactcccggtgggagcttcca

SEQ ID NO: 7390 - DNA, 31 bp, Homo sapiens
  chr22:42084265-42084296
  hyper
cctctaggtccctggcgcgtgtgactcgcgg

SEQ ID NO: 7391 - DNA, 31 bp, Homo sapiens
  chr22:42229857-42229888
  hyper
ggtcgccgggtgctccgcgaaactttgggca

SEQ ID NO: 7392 - DNA, 31 bp, Homo sapiens
  chr22:42310829-42310860
  hyper
tctggagctccgaggccgcacctccggtggg

SEQ ID NO: 7393 - DNA, 64 bp, Homo sapiens
  chr22:42310874-42310938
  hyper
gggctcacctcggacccgagctgcccggtccgcgtcctgagatcttccccgggccgggcggcgg

SEQ ID NO: 7394 - DNA, 182 bp, Homo sapiens
  chr22:42311281-42311463
  hyper
atcggaactgggcgctcgaaggggatcagttctagggcccgcgactagagcgtccctgtcttacaggtgcggggacctgtaccttacaggcgcggaggtcaaagcagcccggaattgccccgggacgggcagggccaccctctcacctccttcccgtcccctctgtccgttctgatcataac

SEQ ID NO: 7395 - DNA, 39 bp, Homo sapiens
  chr22:42311470-42311509
  hyper
gggccccttcccctctcggcgcctcgattttcccacctg

SEQ ID NO: 7396 - DNA, 31 bp, Homo sapiens
  chr22:42353610-42353641
  hyper
tctccctctgggtgggcgggacagggagcac

SEQ ID NO: 7397 - DNA, 427 bp, Homo sapiens
  chr22:42353643-42354070
  hyper
ctgctggccctcaccacgctgtgtctccgcagccaaggccgccgcgatgccgcacttcctggactggttcgtgccggtctacttggtcatctcggtcctcattctggtgggcttcggcgcctgcatctactacttcgagccgggcctgcaggaggcgcacaagtggcgcatgcagcgccccctggtggaccgcgacctccgcaagacgctaatggtgcgcgacaacctggccttcggcggcccggaggtctgagccgacttgcaaaggggataggcgggcggcaccgggcgccctcccccagcccgccccgcccgcccagcccggagacccccaaggcagagggaggccggcctgttggccctccacgctatccctctgcagcctgggccctcccgacagaggccccaggtgcgctggcagtggagg

SEQ ID NO: 7398 - DNA, 31 bp, Homo sapiens
  chr22:42670149-42670180
  hyper
ttcctgctcacaagctcggggcttcatctgc

SEQ ID NO: 7399 - DNA, 20 bp, Homo sapiens
  chr22:42679916-42679936
  hyper
cgaggcgggggaggagggga

SEQ ID NO: 7400 - DNA, 47 bp, Homo sapiens
  chr22:42696043-42696090
  hyper
gcagcctggttcctttcgttccttcgttccttcgctggtagaagccg

SEQ ID NO: 7401 - DNA, 132 bp, Homo sapiens
  chr22:42765053-42765185
  hyper
ggctgcttacctggcccgcaccctcacgctcccgtccgggctgcgcagccgcttctctcacacattttgcgataacatcgatggcgaaagaaaatgttgtaaatcctcctgcggccacgtggctgtcccccc

SEQ ID NO: 7402 - DNA, 61 bp, Homo sapiens
  chr22:42765320-42765381
  hyper
gtggtcggggcaggggcggggcgcgctggttccggccgccctccccgcggaaaccgggcct

SEQ ID NO: 7403 - DNA, 31 bp, Homo sapiens
  chr22:43177262-43177293
  hyper
agtaaacctttatctccgtaagctgctgaga

SEQ ID NO: 7404 - DNA, 67 bp, Homo sapiens
  chr22:43547343-43547410
  hyper
ggggaggaggaggagccgagagacttgctcgcggccggggggaggcagaagcgcgtcccgcgggaga

SEQ ID NO: 7405 - DNA, 31 bp, Homo sapiens
  chr22:44420412-44420443
  hyper
cccccgccctcccccacgcaccccgcccggc

SEQ ID NO: 7406 - DNA, 34 bp, Homo sapiens
  chr22:44893740-44893774
  hyper
gcaggagggtgaggggcggcgtggagggcccgcg

SEQ ID NO: 7407 - DNA, 205 bp, Homo sapiens
  chr22:44894099-44894304
  hyper
agggaccgggccaggccggggccggggcaggggcggggccggggtcgcggcagagggcgggtcaccgcgcggcctttgtgcgggcggggccggcgcggtggcggtggcgggcgggccttaggctggccccgctggttgccatggataccgaccgctcccgcgcgtgcggagacgaccgctgccccgcccccggaagtgatgcaca

SEQ ID NO: 7408 - DNA, 104 bp, Homo sapiens
  chr22:45097904-45098008
  hyper
cagagggcagacccagcgaggcgtcgtggcagctgcggccgcggagacgccggctccgcctcttgcacacgccccctcgcctgaggccccgccccgcccgcgat

SEQ ID NO: 7409 - DNA, 345 bp, Homo sapiens
  chr22:45098036-45098381
  hyper
ccggggcgccgagacccgcccctgggcccgcccccgggtccgcccccggcctccgtttgcgccgggtctgtgctggccgcgcgcctggcgctccacgctgagcctctccgtgcaatgattaacccggcggggcggccggcgcgggacccgagacggaggcgcggggccggggcgggaccccgcaggaccgctcggcttcctgctctcgccggagtttccgcgtagagggcgcatcgccggcccggggcccttggtgcggcgtggcgcagggcgcggcgtggggcgcgcgtgggcgcggcgcaggcggcccgggtcaccatgaggactctccgcaggttgaagttc

SEQ ID NO: 7410 - DNA, 254 bp, Homo sapiens
  chr22:45098405-45098659
  hyper
ctgggcaagagagagccggccgccgccgcggacgagcggggcacgcagcagcgccgggcctgcgccaacgccacctggaacaggtaaggccgcgccctcccggccacccggaggccctggagccgggggaggggacccctgagccgtccgcgggctaggggccgccccgagccaggaacgctgccgaaggcggcgcggcgcttcacagtttgcaaagaacttgccccgccggagtggtgcgggcctggaggaaa

SEQ ID NO: 7411 - DNA, 138 bp, Homo sapiens
  chr22:45098715-45098853
  hyper
ggggctggcccagaagcgcccggcgggtgggcggcggggtgggccgggaagccgcgtgcccgcctcctacccggggtctttccacgtctccactgcggtgctcgtgacaacctgggaggctaacggagcaggaagtat

SEQ ID NO: 7412 - DNA, 40 bp, Homo sapiens
  chr22:45098971-45099011
  hyper
ctgtcagcagggggtgcggcagctgcgaggcattctttag

SEQ ID NO: 7413 - DNA, 87 bp, Homo sapiens
  chr22:45148518-45148605
  hyper
ggcggcgggagggagcgcgcagggaggaggccgtgctcggggtgggggggtgcgccgcgggggctcccagggcgtgtacggggacaa

SEQ ID NO: 7414 - DNA, 31 bp, Homo sapiens
  chr22:45148800-45148831
  hyper
ccgccttccccgccctcgcctctctcagcct

SEQ ID NO: 7415 - DNA, 37 bp, Homo sapiens
  chr22:45664600-45664637
  hyper
cgtccctgctgaaaggcgactccgggagcacaggctt

SEQ ID NO: 7416 - DNA, 55 bp, Homo sapiens
  chr22:46363414-46363469
  hyper
cctagacacccacaaccgagccctctacctcatccaacaccgctatgccacaccc

SEQ ID NO: 7417 - DNA, 31 bp, Homo sapiens
  chr22:46363472-46363503
  hyper
gtctgttagggtcctccgagaacagagcctt

SEQ ID NO: 7418 - DNA, 31 bp, Homo sapiens
  chr22:46363559-46363590
  hyper
gggtgactcaagcctccggggatgtggtggg

SEQ ID NO: 7419 - DNA, 31 bp, Homo sapiens
  chr22:46372393-46372424
  hyper
gctgcgtctctgctggcgtggggcgagggtc

SEQ ID NO: 7420 - DNA, 60 bp, Homo sapiens
  chr22:46373011-46373071
  hyper
gtccgcacttgtcggccgccccaggtgactcgcggccccggcaagcgagccgcgagcgag

SEQ ID NO: 7421 - DNA, 31 bp, Homo sapiens
  chr22:46466169-46466200
  hyper
gggcgggaaaagacgccgcggcctccttggc

SEQ ID NO: 7422 - DNA, 31 bp, Homo sapiens
  chr22:46663611-46663642
  hyper
gacgacccagtgaagccggccccgaacgcca

SEQ ID NO: 7423 - DNA, 31 bp, Homo sapiens
  chr22:46774456-46774487
  hyper
gagggcacagtggccacgggaggatgcccac

SEQ ID NO: 7424 - DNA, 31 bp, Homo sapiens
  chr22:46933244-46933275
  hyper
cccgcagcttccacttcgagagcactttgcg

SEQ ID NO: 7425 - DNA, 98 bp, Homo sapiens
  chr22:46933585-46933683
  hyper
gcgtattgttcggccccggggggagccggctcggaggtgcgcgccgagaggatcgctatggagacgcgagggcgcggccgggacggggactggggccc

SEQ ID NO: 7426 - DNA, 57 bp, Homo sapiens
  chr22:46933977-46934034
  hyper
ccattttacagcaagacgcacggaggctaaaatgcttcaccccgactaaaactccct

SEQ ID NO: 7427 - DNA, 58 bp, Homo sapiens
  chr22:46934045-46934103
  hyper
cccaataggcagctaccggatctgcgtcccacttggtttaaagcgcaacttttaaatg

SEQ ID NO: 7428 - DNA, 53 bp, Homo sapiens
  chr22:50170509-50170562
  hyper
acagcccagagcccctcggtgtgtgatgaacccttccccgggaggttggccag

SEQ ID NO: 7429 - DNA, 31 bp, Homo sapiens
  chr22:50170582-50170613
  hyper
accatgctccctgagccggagtccagtcccc

SEQ ID NO: 7430 - DNA, 99 bp, Homo sapiens
  chr22:50246600-50246699
  hyper
gtgaaggggcacagccgcggggcaggggcgggctccgggcagaggcggccgtgataactccacgctcccgctccagccggtgaccgccacgcgggctcc

SEQ ID NO: 7431 - DNA, 43 bp, Homo sapiens
  chr22:50623801-50623844
  hyper
gctgaggcatgagtcccgggtcggggaccgctctgggccgacc

SEQ ID NO: 7432 - DNA, 53 bp, Homo sapiens
  chr22:50623991-50624044
  hyper
acatttcaatatcattcgactgaaaaccatcctgtggacgccgtgcgagcatt

SEQ ID NO: 7433 - DNA, 31 bp, Homo sapiens
  chr22:50745644-50745675
  hyper
cgagaccatctccgctcggcgcacggagctc

SEQ ID NO: 7434 - DNA, 31 bp, Homo sapiens
  chr22:50745698-50745729
  hyper
gcgcggaggagggatccgacgcggctccgga

SEQ ID NO: 7435 - DNA, 31 bp, Homo sapiens
  chr22:50765138-50765169
  hyper
cagggagagtgcggggcggccgagggcccca

SEQ ID NO: 7436 - DNA, 81 bp, Homo sapiens
  chr22:50920027-50920108
  hyper
ggcaggacccccaacccgcccagcccgctccgccttgcgccccggacccgcggccgaccccagacccgctgcccgcttcgc

SEQ ID NO: 7437 - DNA, 42 bp, Homo sapiens
  chr22:50965202-50965244
  hyper
cggggccttctgcagccggttcttggtcgaactccagcccct

SEQ ID NO: 7438 - DNA, 205 bp, Homo sapiens
  chr22:50970576-50970781
  hyper
gcaaattcttggggagcgcactttcccactaccctgggatcagcgcggggcggggcggggcctggaccgtatccctggcgccagcaaaacaaacgcgagcttccttcccggctgtgtggagcttggggccgggagcggatccagggccatcacccggactccaggcgcattaggcagggacgtgaactcgcgggggccaagtcta

SEQ ID NO: 7439 - DNA, 86 bp, Homo sapiens
  chr22:50970820-50970906
  hyper
gggggcaggagattttcgtgctgttgggaaagggtgccccgggaagggcctgcgtgggggacccggtgccccgaggtgcactgacc

SEQ ID NO: 7440 - DNA, 75 bp, Homo sapiens
  chr22:50970908-50970983
  hyper
ttgtggtagctcctagcgtgggaaaacaaagcgacgtggctggacatccccgctccgccccgcccacctcccaga

SEQ ID NO: 7441 - DNA, 31 bp, Homo sapiens
  chr22:50970986-50971017
  hyper
cattgtggccctttcccgcttcctggcaacc

SEQ ID NO: 7442 - DNA, 31 bp, Homo sapiens
  chr22:51066541-51066572
  hyper
caggaggagccggtaccgggctgcgggcgct

SEQ ID NO: 7443 - DNA, 102 bp, Homo sapiens
  chrX:2747434-2747536
  hyper
gcttggggaggggggcgcgggcccaaggcagaggctgcgggagcgcggggcaagggagaggtgcagagcgtggagggggctcgggggcgcttggggaggatg

SEQ ID NO: 7444 - DNA, 62 bp, Homo sapiens
  chrX:2846756-2846818
  hyper
gggcaaggctacgcttcgggggatggagccttggggcgggacggggcgcgtcttagtggggc

SEQ ID NO: 7445 - DNA, 52 bp, Homo sapiens
  chrX:9310728-9310780
  hyper
ctgtgccagcgccctacgtggactgggaaagaattaccgaggaccttagaag

SEQ ID NO: 7446 - DNA, 49 bp, Homo sapiens
  chrX:16888561-16888610
  hyper
acgcggcgttcggaggcgggcttctgggggtgggcggagcgtgccgcgg

SEQ ID NO: 7447 - DNA, 46 bp, Homo sapiens
  chrX:16965289-16965335
  hyper
tgtggggcagtgtgtgcgggggcggaggttgcgagtggggcgacag

SEQ ID NO: 7448 - DNA, 31 bp, Homo sapiens
  chrX:27999797-27999828
  hyper
tttatttgaaaggtcacgaagtgaatgcaaa

SEQ ID NO: 7449 - DNA, 31 bp, Homo sapiens
  chrX:27999837-27999868
  hyper
tagtcttgccaccagacggcaacattttggc

SEQ ID NO: 7450 - DNA, 52 bp, Homo sapiens
  chrY:15863329-15863381
  hyper
taggaggggcaggaagcggttggtgcggacggggaggcgactgcgtggggtc

SEQ ID NO: 7451 - DNA, 35 bp, Homo sapiens
  chrY:15863884-15863919
  hyper
ggttagtggagactcccgcccgccccgggttcttt

SEQ ID NO: 7452 - DNA, 92 bp, Homo sapiens
  chrY:15864024-15864116
  hyper
cctggcttctcctgggcgtggatcttacagtcggggtgcttaaatcgtgttttccagcctcctcccggctcccgatacgaaaaagaagcccg

SEQ ID NO: 7453 - DNA, 74 bp, Homo sapiens
  chrY:16635816-16635890
  hyper
ccatgcacccctttcccgtgtgtgtgggttacgacgtgggtgggagtggtgaggcaagccgcaaaagtggggta

SEQ ID NO: 7454 - DNA, 31 bp, Homo sapiens
  chrY:16635895-16635926
  hyper
ggtggttttgcttcttcggaagcctttgagt

SEQ ID NO: 7455 - DNA, 72 bp, Homo sapiens
  chrY:16635940-16636012
  hyper
agatgggggtgcagggcggtttgccgctgccaccctcggcaccatctctgaactgcccgcttttccggagga

SEQ ID NO: 7456 - DNA, 31 bp, Homo sapiens
  chrY:17245169-17245200
  hyper
gttcttatggcagaaacgctacaaaccagaa

SEQ ID NO: 7457 - DNA, 31 bp, Homo sapiens
  AC153808.1_1-20788:7948-7979
  hyper
ctctgaatattgagtacgaagtgctgcagac

SEQ ID NO: 7458 - DNA, 31 bp, Homo sapiens
  JH636052.4:1361786-1361817
  hyper
ggaaaacttgtcttttcgttgtaacttccgc

SEQ ID NO: 7459 - DNA, 66 bp, Homo sapiens
  JH636052.4:1362108-1362174
  hyper
gacttgctcctacagcgcgggaaatccttcgtggcgaagcagcagcccctgcgctgcctcatctac

SEQ ID NO: 7460 - DNA, 31 bp, Homo sapiens
  JH636052.4:1362185-1362216
  hyper
ctatcggtgatgtcaccgacagtgcctttcc

SEQ ID NO: 7461 - DNA, 85 bp, Homo sapiens
  JH636052.4:1376241-1376326
  hyper
tgagctcttgcacctccgccccgccacagcctcacacgcttcaccctttacacgcacggtcacttgccccgcgcagccccacccc

SEQ ID NO: 7462 - DNA, 31 bp, Homo sapiens
  JH636052.4:2302749-2302780
  hyper
ttcgcgttctttgcgccgccttcacccactg

SEQ ID NO: 7463 - DNA, 31 bp, Homo sapiens
  JH636052.4:5118722-5118753
  hyper
gagggtcaggacggggcgaaggccattccgc

SEQ ID NO: 7464 - DNA, 113 bp, Homo sapiens
  NW_001838402.2_289580-297926:6068-6181
  hyper
ggtgtcagtaaccaggcgctgcctccagcgccgccccgcccgccgccccgcccgccgcctgcgccaatccccgacgggcccgtcttccagccccgaagcggtcacctcctgac

SEQ ID NO: 7465 - DNA, 31 bp, Homo sapiens
  chr1:714260-714291
  hypo
cgccgcacataagccacgaggaggagcttta

SEQ ID NO: 7466 - DNA, 34 bp, Homo sapiens
  chr1:809312-809346
  hypo
cacggccgctacctaacggcggctgccattttcc

SEQ ID NO: 7467 - DNA, 65 bp, Homo sapiens; identical to SEQ ID NO: 1
  chr1:859735-859800
  hypo

SEQ ID NO: 7468 - DNA, 49 bp, Homo sapiens
  chr1:898727-898776
  hypo
cctcagacctggctaccgtggagtcctacgaccccgtgactaacacgtg

SEQ ID NO: 7469 - DNA, 31 bp, Homo sapiens
  chr1:913871-913902
  hypo
ctgccagtggaggccccgtgttctggtctgt

SEQ ID NO: 7470 - DNA, 31 bp, Homo sapiens
  chr1:913924-913955
  hypo
agtgtgagatgggcctcgtagagtgcctgac

SEQ ID NO: 7471 - DNA, 143 bp, Homo sapiens
  chr1:913961-914104
  hypo
ggtagccaggcctgggcgggaaccctgccagaggctgggggagggacgccgccgtcacatgggcccgaacacagggcaacggcggcgcagagccaaccccctgaacaacccgggtgcttggactgggccgccccatctggact

SEQ ID NO: 7472 - DNA, 96 bp, Homo sapiens; identical to SEQ ID NO: 2
  chr1:935361-935457
  hypo

SEQ ID NO: 7473 - DNA, 31 bp, Homo sapiens; identical to SEQ ID NO: 3
  chr1:935826-935857
  hypo

SEQ ID NO: 7474 - DNA, 67 bp, Homo sapiens; identical to SEQ ID NO: 4
  chr1:936193-936260
  hypo

SEQ ID NO: 7475 - DNA, 56 bp, Homo sapiens
  chr1:942312-942368
  hypo
ccctgagagtccagggcgccaagtcagccctgcacctggcccgggcctcggacccc

SEQ ID NO: 7476 - DNA, 48 bp, Homo sapiens
  chr1:942464-942512
  hypo
gagacgcgacgaagcacgaagacccgtgtttgacgggttgccaggtgc

SEQ ID NO: 7477 - DNA, 31 bp, Homo sapiens
  chr1:942536-942567
  hypo
acattaaatagatgcacgtgtgtgtgtcaag

SEQ ID NO: 7478 - DNA, 51 bp, Homo sapiens
  chr1:942598-942649
  hypo
tcagagttcttacactcgggggtgttttagcagctgcgcctcaagattcta

SEQ ID NO: 7479 - DNA, 353 bp, Homo sapiens; identical to SEQ ID NO: 5
  chr1:955507-955860
  hypo

SEQ ID NO: 7480 - DNA, 31 bp, Homo sapiens; identical to SEQ ID NO: 6
  chr1:955869-955900
  hypo

SEQ ID NO: 7481 - DNA, 31 bp, Homo sapiens
  chr1:973222-973253
  hypo
cgtggctgctgcaatgcgctgtgcctggcgg

SEQ ID NO: 7482 - DNA, 69 bp, Homo sapiens
  chr1:982370-982439
  hypo
atagcctgggctcggccgaggtgctgccccctcgcctgggcagcaggtcagtgccgggggttatggtct

SEQ ID NO: 7483 - DNA, 36 bp, Homo sapiens
  chr1:982449-982485
  hypo
ccccctcaaacatgtgcgtgccggggaccccacgcc

SEQ ID NO: 7484 - DNA, 35 bp, Homo sapiens
  chr1:984366-984401
  hypo
tgctgtacaatggcaacgcccggggcaaggacttc

SEQ ID NO: 7485 - DNA, 49 bp, Homo sapiens
  chr1:987798-987847
  hypo
gggacatgtagatatgcgtgtgtgactatgcggccgtgtgtgtgcatgg

SEQ ID NO: 7486 - DNA, 31 bp, Homo sapiens
  chr1:988013-988044
  hypo
catgcatgtgtgtgtccgtgtgtgtgcatgg

SEQ ID NO: 7487 - DNA, 45 bp, Homo sapiens
  chr1:988089-988134
  hypo
gtatatgagggagacacgcaggtgtgtgtccgagtgtgtgtgcat

SEQ ID NO: 7488 - DNA, 45 bp, Homo sapiens
  chr1:988181-988226
  hypo
gtatatgagggagacacgcaggtgtgtgtccgagtgtgtgtccat

SEQ ID NO: 7489 - DNA, 36 bp, Homo sapiens
  chr1:990258-990294
  hypo
ctttgtgggctgcttgcgggacgtggtggtgggccg

SEQ ID NO: 7490 - DNA, 50 bp, Homo sapiens
  chr1:990657-990707
  hypo
gctcctgaatcaccctcgctccgtcaggcgggactcgtgtcccagagagg

SEQ ID NO: 7491 - DNA, 31 bp, Homo sapiens
  chr1:990725-990756
  hypo
gatggggcccttcctccgggtgaccccacag

SEQ ID NO: 7492 - DNA, 41 bp, Homo sapiens
  chr1:990798-990839
  hypo
gctctgggccctgcctcggcctcctgcgccaatactgtgac

SEQ ID NO: 7493 - DNA, 42 bp, Homo sapiens
  chr1:991001-991043
  hypo
cacaccccaggccctgcgaggggctatcgagaggagctcact

SEQ ID NO: 7494 - DNA, 31 bp, Homo sapiens; identical to SEQ ID NO: 7
  chr1:995029-995060
  hypo

SEQ ID NO: 7495 - DNA, 78 bp, Homo sapiens
  chr1:1019319-1019397
  hypo
cccagcaccactgaagcgatggctgctcaggagggcctggcggaggccggctgcgtctgtcctcgggtggagctggac

SEQ ID NO: 7496 - DNA, 31 bp, Homo sapiens
  chr1:1019416-1019447
  hypo
tgggggtctgccctgtcgtggtgggtcctcc

SEQ ID NO: 7497 - DNA, 35 bp, Homo sapiens
  chr1:1050114-1050149
  hypo
cactgaacatcccaggcggccgcccctaccctggg

SEQ ID NO: 7498 - DNA, 57 bp, Homo sapiens; identical to SEQ ID NO: 10
  chr1:1052181-1052238
  hypo

SEQ ID NO: 7499 - DNA, 31 bp, Homo sapiens
  chr1:1069738-1069769
  hypo
gtaacatccagttccccgagggaccaggggg

SEQ ID NO: 7500 - DNA, 31 bp, Homo sapiens
  chr1:1069951-1069982
  hypo
caccagcccttttcagcgttccgccgaacag

SEQ ID NO: 7501 - DNA, 31 bp, Homo sapiens
  chr1:1074034-1074065
  hypo
tggtcccacctggcagcgaaggtggctggag

SEQ ID NO: 7502 - DNA, 31 bp, Homo sapiens
  chr1:1079128-1079159
  hypo
gccccgtgtctgagggcgcggctgtgtggag

SEQ ID NO: 7503 - DNA, 31 bp, Homo sapiens
  chr1:1080475-1080506
  hypo
tcaccccacagccccccgctcctcccctcca

SEQ ID NO: 7504 - DNA, 57 bp, Homo sapiens
  chr1:1080520-1080577
  hypo
ccctcctggctgacaccgtggcccctcctggcctgtgctccccgggaacctcagtca

SEQ ID NO: 7505 - DNA, 43 bp, Homo sapiens
  chr1:1080582-1080625
  hypo
acttgaactccagcaccggacctggccccgtccatccagcctc

SEQ ID NO: 7506 - DNA, 39 bp, Homo sapiens
  chr1:1140774-1140813
  hypo
gggacaagggtggtgccggcaggtcgtgcagcaagggtc

SEQ ID NO: 7507 - DNA, 38 bp, Homo sapiens
  chr1:1151686-1151724
  hypo
atcctcccaccacctgcgctggccgtggctctgtgaat

SEQ ID NO: 7508 - DNA, 31 bp, Homo sapiens
  chr1:1151917-1151948
  hypo
caggacccccaccagccgtcctaacacaccc

SEQ ID NO: 7509 - DNA, 91 bp, Homo sapiens
  chr1:1168701-1168792
  hypo
gcaggtgccgagcgggcgcactacgcccgggccccaaggcccccgtcccgcagccacgcttgtggtcgctgcgtcccggtctgcgtttggg

SEQ ID NO: 7510 - DNA, 31 bp, Homo sapiens
  chr1:1190307-1190338
  hypo
aggtccaaagacaacacggaagataagctac

SEQ ID NO: 7511 - DNA, 31 bp, Homo sapiens
  chr1:1218648-1218679
  hypo
gctgggcggctggtcccgagagacactggat

SEQ ID NO: 7512 - DNA, 31 bp, Homo sapiens
  chr1:1222236-1222267
  hypo
gcagagccgccctctccgccactgtcccccg

SEQ ID NO: 7513 - DNA, 25 bp, Homo sapiens
  chr1:1223585-1223610
  hypo
tgtctctgctccgtcccgtgtctct

SEQ ID NO: 7514 - DNA, 31 bp, Homo sapiens
  chr1:1232281-1232312
  hypo
cgtgggcagatggtgccgagcacactcccac

SEQ ID NO: 7515 - DNA, 31 bp, Homo sapiens
  chr1:1236047-1236078
  hypo
tgtctccttgaacttccgcacatccctggag

SEQ ID NO: 7516 - DNA, 15 bp, Homo sapiens
  chr1:1236156-1236171
  hypo
tttttgttttttgag

SEQ ID NO: 7517 - DNA, 105 bp, Homo sapiens
  chr1:1238400-1238505
  hypo
ccaggtcacccagccacgccctctgagcccctgggcggtgcagacaccggcctgcttctggcctggacgccctcaaggggctgcctccctcggcctctcccccaa

SEQ ID NO: 7518 - DNA, 35 bp, Homo sapiens
  chr1:1238565-1238600
  hypo
ctgctgggacaggtcgcggacgccgctcacgaaaa

SEQ ID NO: 7519 - DNA, 31 bp, Homo sapiens
  chr1:1253114-1253145
  hypo
atgcccagagacagaacgttgtttgcaaagt

SEQ ID NO: 7520 - DNA, 31 bp, Homo sapiens
  chr1:1253193-1253224
  hypo
aaaagtcctttaagaacgaggataaagtaaa

SEQ ID NO: 7521 - DNA, 2 bp, Homo sapiens
  chr1:1253244-1253246
  hypo
tt

SEQ ID NO: 7522 - DNA, 9 bp, Homo sapiens
  chr1:1253545-1253554
  hypo
ggccaaggc

SEQ ID NO: 7523 - DNA, 34 bp, Homo sapiens
  chr1:1258112-1258146
  hypo
tgggtagggggaccggcggcggggggggtagcca

SEQ ID NO: 7524 - DNA, 59 bp, Homo sapiens
  chr1:1264862-1264921
  hypo
atgcttgtgccgtttgcgtgtcccaagtgcgagtgtgctatttgcgtgtgccgcacgtg

SEQ ID NO: 7525 - DNA, 364 bp, Homo sapiens
  chr1:1267395-1267759
  hypo
ccttgcaggtcagctacggtgctagcatggagctgctgagcgcccgggagaccttcccctccttcttccgcaccgtgcccagcgaccgtgtgcagctgacggccgccgcggagctgctgcaggagttcggctggaactgggtggccgccctgggcagcgacgacgagtacggccggcagggcctgagcatcttctcggccctggccgcggcacgcggcatctgcatcgcgcacgagggcctggtgccgctgccccgtgccgatgactcgcggctggggaaggtgcaggacgtcctgcaccaggtgaaccagagcagcgtgcaggtggtgctgctgttcgcctccgtgcacgccgcccacgccct

SEQ ID NO: 7526 - DNA, 31 bp, Homo sapiens
  chr1:1268091-1268122
  hypo
acgcagctgtgtatagcgtggcccaggccct

SEQ ID NO: 7527 - DNA, 31 bp, Homo sapiens
  chr1:1273491-1273522
  hypo
ggggcagcggggccagcgtgtcctgatccga

SEQ ID NO: 7528 - DNA, 31 bp, Homo sapiens
  chr1:1380694-1380725
  hypo
ggctgtctacctctgcgcgctctctccattt

SEQ ID NO: 7529 - DNA, 31 bp, Homo sapiens
  chr1:1385741-1385772
  hypo
tggacactttagccatcgcctgactttctgt

SEQ ID NO: 7530 - DNA, 34 bp, Homo sapiens
  chr1:1388340-1388374
  hypo
ctgtggtggcgccccacgtcgcacatggctgtgt

SEQ ID NO: 7531 - DNA, 48 bp, Homo sapiens
  chr1:1389832-1389880
  hypo
gagacgtcccgcatcacggtgcttgaggcgctgcggcaccccatccag

SEQ ID NO: 7532 - DNA, 57 bp, Homo sapiens
  chr1:1390128-1390185
  hypo
gggtccttgcaagacccgggatttgggtgtgcggccgtctgtcggggaagctgctac

SEQ ID NO: 7533 - DNA, 31 bp, Homo sapiens
  chr1:1652614-1652645
  hypo
aagactcttgagacaccgtctcaaaaaaaaa

SEQ ID NO: 7534 - DNA, 128 bp, Homo sapiens; identical to SEQ ID NO: 11
  chr1:1737717-1737845
  hypo

SEQ ID NO: 7535 - DNA, 31 bp, Homo sapiens
  chr1:1781845-1781876
  hypo
acaagggtgagccaccgcgcccagcctaaat

SEQ ID NO: 7536 - DNA, 31 bp, Homo sapiens
  chr1:1795941-1795972
  hypo
ggccgacccatcctgccgattaccacctggc

SEQ ID NO: 7537 - DNA, 31 bp, Homo sapiens
  chr1:1856320-1856351
  hypo
catgcaacgcccgtctcgggctctgcctcca

SEQ ID NO: 7538 - DNA, 31 bp, Homo sapiens
  chr1:1869915-1869946
  hypo
ggctcacactgacaaacgcactcacacaccc

SEQ ID NO: 7539 - DNA, 31 bp, Homo sapiens
  chr1:1888176-1888207
  hypo
cctaccacgtagctgccgaagtcaatgagct

SEQ ID NO: 7540 - DNA, 31 bp, Homo sapiens
  chr1:1889050-1889081
  hypo
caaatgcgggagaggccggggcagctctggc

SEQ ID NO: 7541 - DNA, 31 bp, Homo sapiens
  chr1:1967235-1967266
  hypo
actggggggaccccatcggtcacttggcatc

SEQ ID NO: 7542 - DNA, 176 bp, Homo sapiens; identical to SEQ ID NO: 13
  chr1:1981252-1981428
  hypo

SEQ ID NO: 7543 - DNA, 97 bp, Homo sapiens; identical to SEQ ID NO: 14
  chr1:1981457-1981554
  hypo

SEQ ID NO: 7544 - DNA, 173 bp, Homo sapiens; identical to SEQ ID NO: 15
  chr1:1981576-1981749
  hypo

SEQ ID NO: 7545 - DNA, 193 bp, Homo sapiens; identical to SEQ ID NO: 16
  chr1:1981788-1981981
  hypo

SEQ ID NO: 7546 - DNA, 31 bp, Homo sapiens; identical to SEQ ID NO: 17
  chr1:1982244-1982275
  hypo

SEQ ID NO: 7547 - DNA, 49 bp, Homo sapiens; identical to SEQ ID NO: 18
  chr1:1982476-1982525
  hypo

SEQ ID NO: 7548 - DNA, 31 bp, Homo sapiens
  chr1:1986233-1986264
  hypo
tttgggtgaacttgaacgagtgcccgaccag

SEQ ID NO: 7549 - DNA, 31 bp, Homo sapiens
  chr1:2013464-2013495
  hypo
taaagcaggcttgatccgggctgccgtggtt

SEQ ID NO: 7550 - DNA, 54 bp, Homo sapiens
  chr1:2041086-2041140
  hypo
gggttgcggcagctcacgcccactgcagtgtccggaaggcggtgctaggtccac

SEQ ID NO: 7551 - DNA, 31 bp, Homo sapiens
  chr1:2066124-2066155
  hypo
actcgactggagagcccggggcctcgcgccg

SEQ ID NO: 7552 - DNA, 31 bp, Homo sapiens
  chr1:2096693-2096724
  hypo
gcgtgccctgtaatgacggtgctgtcaccgc

SEQ ID NO: 7553 - DNA, 31 bp, Homo sapiens
  chr1:2103162-2103193
  hypo
tgcactcctaccacaacgtgccatggctccg

SEQ ID NO: 7554 - DNA, 91 bp, Homo sapiens
  chr1:2103459-2103550
  hypo
ggcactgcccccatgacggcatccccacccccaggttctacgcggccgagatctgcatcgccctcaacttcctgcacgagagggggatcat

SEQ ID NO: 7555 - DNA, 147 bp, Homo sapiens
  chr1:2103558-2103705
  hypo
acctgaagctggacaacgtcctcctggatgcggacgggcacatcaagctcacagactacggcatgtgcaaggtgcgtgccttggaccgcctcccctgaccatcccgcatgtgcgtctcggggcgcctgtcccgcggggtagtgtcta

SEQ ID NO: 7556 - DNA, 31 bp, Homo sapiens
  chr1:2107101-2107132
  hypo
gacatggccccacttgcgtggagccaaggct

SEQ ID NO: 7557 - DNA, 31 bp, Homo sapiens
  chr1:2107843-2107874
  hypo
ggttctgtgtgggaagcgcagtctccaccta

SEQ ID NO: 7558 - DNA, 31 bp, Homo sapiens
  chr1:2111393-2111424
  hypo
ggctgggtctgggcagcgggtgggagcagga

SEQ ID NO: 7559 - DNA, 53 bp, Homo sapiens
  chr1:2116558-2116611
  hypo
acgcttgcgccgagaccgcagagggaagcgtcagcgggcgctgctgggagcag

SEQ ID NO: 7560 - DNA, 31 bp, Homo sapiens
  chr1:2116617-2116648
  hypo
ccctcacacctgggcccgggcaggccagctt

SEQ ID NO: 7561 - DNA, 31 bp, Homo sapiens
  chr1:2116950-2116981
  hypo
acctgtggggacacaccgcaatcaagaattg

SEQ ID NO: 7562 - DNA, 35 bp, Homo sapiens
  chr1:2125480-2125515
  hypo
tcagctccgggctcaccgtgcgcagtagctcggcc

SEQ ID NO: 7563 - DNA, 31 bp, Homo sapiens
  chr1:2132533-2132564
  hypo
gcatcccctgtgcagccggctgtgaactgtg

SEQ ID NO: 7564 - DNA, 14 bp, Homo sapiens
  chr1:2154149-2154163
  hypo
gagactccatctca

SEQ ID NO: 7565 - DNA, 31 bp, Homo sapiens
  chr1:2154219-2154250
  hypo
actgggcttcctggtgcgctcactactgctg

SEQ ID NO: 7566 - DNA, 31 bp, Homo sapiens
  chr1:2167250-2167281
  hypo
catggcccggaggtggcgtggtggtgcctgg

SEQ ID NO: 7567 - DNA, 50 bp, Homo sapiens
  chr1:2170933-2170983
  hypo
cccatgtgggtgtagccgttggcggcacctttgtacggggacacaccctg

SEQ ID NO: 7568 - DNA, 37 bp, Homo sapiens
  chr1:2171008-2171045
  hypo
tcaacctggatggcccgcgtgccggggacccgcaagg

SEQ ID NO: 7569 - DNA, 51 bp, Homo sapiens
  chr1:2238201-2238252
  hypo
tagattccgtgcctgccgccgcagcgccgccgacaacgcgggtgcaggggg

SEQ ID NO: 7570 - DNA, 31 bp, Homo sapiens
  chr1:2238317-2238348
  hypo
cgtgcctattaccaagcgagtgtttgtaacc

SEQ ID NO: 7571 - DNA, 31 bp, Homo sapiens
  chr1:2241012-2241043
  hypo
aaaaatgctttcctgccggggggcaggggag

SEQ ID NO: 7572 - DNA, 55 bp, Homo sapiens
  chr1:2259102-2259157
  hypo
caggagatggggtggacgaggcggcacagggggagggccacgaggaggggcaggc

SEQ ID NO: 7573 - DNA, 82 bp, Homo sapiens
  chr1:2263213-2263295
  hypo
cttatgtaaccactgccgctcctctcccgcggctgcgcctctcccgccgctgcgcctctccctcgtgcggctctcccgcccc

SEQ ID NO: 7574 - DNA, 40 bp, Homo sapiens
  chr1:2270735-2270775
  hypo
gcatggcacgggtccacggagggggcgtttctgctgccac

SEQ ID NO: 7575 - DNA, 134 bp, Homo sapiens
  chr1:2270790-2270924
  hypo
tgaccatgagagacagcggtccacctctgccatgcactccctgagtcggggctgcaggctgaccgcagcggcccctgggtcctggctgtgaccgcctttcccgaggccggcaccgcacccgccaggtgctcaag

SEQ ID NO: 7576 - DNA, 31 bp, Homo sapiens
  chr1:2270929-2270960
  hypo
agttgggggtcagcctcgttgcccctgcacc

SEQ ID NO: 7577 - DNA, 38 bp, Homo sapiens
  chr1:2283081-2283119
  hypo
tagaagcggaggggcccgaaacccgcttttcttcacgt

SEQ ID NO: 7578 - DNA, 121 bp, Homo sapiens
  chr1:2288356-2288477
  hypo
ggctggggggttctgccggagcacctgggcctcatctccacgaagaaacgtgaggcaacccgtgcagaagcggagcagcgggaaaccctgacctcgagagagcagtcggcgccgcggcccc

SEQ ID NO: 7579 - DNA, 88 bp, Homo sapiens
  chr1:2316414-2316502
  hypo
accttgtaggtggagccgtcggcgcagcgcagcaccccgtgtccctgacgccggtcccggacccagtcgccgtcgtacttgtcaccgt

SEQ ID NO: 7580 - DNA, 68 bp, Homo sapiens
  chr1:2328831-2328899
  hypo
ttgtttatgattcacccggagtcgcctcgccaggcttctcagtatacccaggccgtcctgagcccagc

SEQ ID NO: 7581 - DNA, 31 bp, Homo sapiens
  chr1:2328901-2328932
  hypo
ggccctgccctgggcacgtccaggcctggac

SEQ ID NO: 7582 - DNA, 52 bp, Homo sapiens
  chr1:2330457-2330509
  hypo
ggctctgggccagcatcgctcaggtgcccgggccacccgagcctgtggtgta

SEQ ID NO: 7583 - DNA, 45 bp, Homo sapiens
  chr1:2330535-2330580
  hypo
gcctccttttctgctgcgctccttgtggggcgtctgtggcttcag

SEQ ID NO: 7584 - DNA, 34 bp, Homo sapiens
  chr1:2331362-2331396
  hypo
tgtggtgcacagagaccgccgggactctaatgcc

SEQ ID NO: 7585 - DNA, 59 bp, Homo sapiens
  chr1:2331575-2331634
  hypo
caactgcattccaggacgtggtggccattgagggaaaacccacacgcagctccctgcca

SEQ ID NO: 7586 - DNA, 31 bp, Homo sapiens
  chr1:2359187-2359218
  hypo
ttgaaacagaagcagccggcgagccctccag

SEQ ID NO: 7587 - DNA, 40 bp, Homo sapiens
  chr1:2437268-2437308
  hypo
cttaccaggtgcccgtcggagcctgcgccaggcccagaag

SEQ ID NO: 7588 - DNA, 67 bp, Homo sapiens
  chr1:2437377-2437444
  hypo
agcctgctcctcaggacgcaggccctaaccccgggccacaggccccccaacccgggggactgctctg

SEQ ID NO: 7589 - DNA, 31 bp, Homo sapiens
  chr1:2507223-2507254
  hypo
agtcttggcccagccccgaagcccctgggag

SEQ ID NO: 7590 - DNA, 31 bp, Homo sapiens; identical to SEQ ID NO: 22
  chr1:2517090-2517121
  hypo

SEQ ID NO: 7591 - DNA, 87 bp, Homo sapiens
  chr1:2522318-2522405
  hypo
gcatggttggccggggcgggacgtacactgggtcgccgctagctgcaccttcgcacagatgcctccgagcagcgggtgggcgtgggc

SEQ ID NO: 7592 - DNA, 31 bp, Homo sapiens
  chr1:2529454-2529485
  hypo
ggttttggcagagctacgttctgccttgttg

SEQ ID NO: 7593 - DNA, 31 bp, Homo sapiens
  chr1:2562645-2562676
  hypo
actttcagtcgtcacacgcaatcacacacct

SEQ ID NO: 7594 - DNA, 31 bp, Homo sapiens
  chr1:2726568-2726599
  hypo
ccagcaggccacagcacggcattacgggacg

SEQ ID NO: 7595 - DNA, 41 bp, Homo sapiens
  chr1:2823318-2823359
  hypo
cgcagtggtggatccacgccatcacacgcctgtccacaccc

SEQ ID NO: 7596 - DNA, 31 bp, Homo sapiens
  chr1:3154696-3154727
  hypo
ctgcggggttctcatgcggaaccccaggcca

SEQ ID NO: 7597 - DNA, 31 bp, Homo sapiens
  chr1:3162049-3162080
  hypo
cccgctgaagggcctccggaaactgggtgaa

SEQ ID NO: 7598 - DNA, 31 bp, Homo sapiens
  chr1:3233990-3234021
  hypo
tcactaagcaggagtgcgggcgtgccgtcag

SEQ ID NO: 7599 - DNA, 31 bp, Homo sapiens; identical to SEQ ID NO: 23
  chr1:3370920-3370951
  hypo

SEQ ID NO: 7600 - DNA, 50 bp, Homo sapiens; identical to SEQ ID NO: 24
  chr1:3371087-3371137
  hypo

SEQ ID NO: 7601 - DNA, 73 bp, Homo sapiens; identical to SEQ ID NO: 25
  chr1:3371189-3371262
  hypo

SEQ ID NO: 7602 - DNA, 111 bp, Homo sapiens
  chr1:3378248-3378359
  hypo
gtagccacaacagccccgcaaagtgcctggaaacagacctctgggcccggctcctggaggccgtgtcggctgggggctctgcacatctcggtcacacggggtccaggccat

SEQ ID NO: 7603 - DNA, 38 bp, Homo sapiens
  chr1:3379982-3380020
  hypo
tacttagcagggaggccgcccggcgggaccctaagctc

SEQ ID NO: 7604 - DNA, 31 bp, Homo sapiens
  chr1:3383744-3383775
  hypo
ccaggagatccaggagcggggcctgaacacc

SEQ ID NO: 7605 - DNA, 57 bp, Homo sapiens
  chr1:3385657-3385714
  hypo
gctgtgcttccacctgcgccaggccctgacggagccccttcacgtcaccgggtgaat

SEQ ID NO: 7606 - DNA, 74 bp, Homo sapiens
  chr1:3393356-3393430
  hypo
caaccaagtaagggtgcggggtcccagctgggggagggggctcccggggtgggtcagggcgggctgcctggggc

SEQ ID NO: 7607 - DNA, 31 bp, Homo sapiens
  chr1:3393765-3393796
  hypo
aacagtcgctgaggagcgggagctggtgggc

SEQ ID NO: 7608 - DNA, 62 bp, Homo sapiens
  chr1:3435616-3435678
  hypo
cagcatggccaccaggcgtccagaaatggagcagggagggaaacgcccgccaccccccttcc

SEQ ID NO: 7609 - DNA, 56 bp, Homo sapiens
  chr1:3435743-3435799
  hypo
agatcatcctgcccagcgcccgcctttctgggtggtcagctcggcccatgcttggc

SEQ ID NO: 7610 - DNA, 39 bp, Homo sapiens; identical to SEQ ID NO: 28
  chr1:3447532-3447571
  hypo

SEQ ID NO: 7611 - DNA, 119 bp, Homo sapiens; identical to SEQ ID NO: 29
  chr1:3447572-3447691
  hypo

SEQ ID NO: 7612 - DNA, 52 bp, Homo sapiens; identical to SEQ ID NO: 30
  chr1:3447704-3447756
  hypo

SEQ ID NO: 7613 - DNA, 49 bp, Homo sapiens; identical to SEQ ID NO: 31
  chr1:3447761-3447810
  hypo

SEQ ID NO: 7614 - DNA, 162 bp, Homo sapiens; identical to SEQ ID NO: 32
  chr1:3447822-3447984
  hypo

SEQ ID NO: 7615 - DNA, 31 bp, Homo sapiens
  chr1:3448900-3448931
  hypo
cgcacctatccttggtcgggggtcactgggc

SEQ ID NO: 7616 - DNA, 31 bp, Homo sapiens
  chr1:3449030-3449061
  hypo
ccacctccagcactggcggtgagggtccaca

SEQ ID NO: 7617 - DNA, 31 bp, Homo sapiens
  chr1:3458047-3458078
  hypo
gctcatggagtgcaggcggacatgcgggcac

SEQ ID NO: 7618 - DNA, 31 bp, Homo sapiens
  chr1:3555533-3555564
  hypo
ccggaatattcaaatgcgtattttactgtgg

SEQ ID NO: 7619 - DNA, 31 bp, Homo sapiens
  chr1:3576145-3576176
  hypo
agaatctaatatggggcgcacaatatggctt

SEQ ID NO: 7620 - DNA, 34 bp, Homo sapiens
  chr1:3576263-3576297
  hypo
agacagagttccactccgtcgctcaaggctagag

SEQ ID NO: 7621 - DNA, 31 bp, Homo sapiens
  chr1:3608741-3608772
  hypo
ggtgctcacgtgtgtccgtatgtgtgttgcg

SEQ ID NO: 7622 - DNA, 31 bp, Homo sapiens
  chr1:3617449-3617480
  hypo
aacagaacccatgcggcgggagggtgatgat

SEQ ID NO: 7623 - DNA, 31 bp, Homo sapiens
  chr1:3622263-3622294
  hypo
tgcccctccggcatcccgggctgagctgcct

SEQ ID NO: 7624 - DNA, 38 bp, Homo sapiens
  chr1:3622992-3623030
  hypo
gtaatagggacaatcacggtgcccgccgcaggcccggg

SEQ ID NO: 7625 - DNA, 42 bp, Homo sapiens
  chr1:3623372-3623414
  hypo
tggtgtgtggtcctggcgggggagctgcgggtaggggcctaa

SEQ ID NO: 7626 - DNA, 31 bp, Homo sapiens
  chr1:3638487-3638518
  hypo
gcacccatggggaggacgtggctcccaatgg

SEQ ID NO: 7627 - DNA, 31 bp, Homo sapiens
  chr1:3650895-3650926
  hypo
cctgagccttggtggccgaaccttgaccgtc

SEQ ID NO: 7628 - DNA, 150 bp, Homo sapiens
  chr1:3651333-3651483
  hypo
ccacctccccgggggccgctgacagcacagtcgcctgggtgcacgcttgtgggggcagcaggaacggggctgtcggctctcaggggatctggctgcagccagggcgagggcctggcccttccttccagctccttccggctccttccagct

SEQ ID NO: 7629 - DNA, 31 bp, Homo sapiens
  chr1:3655596-3655627
  hypo
aggttcctcctgaaaacgtcacccaccttta

SEQ ID NO: 7630 - DNA, 70 bp, Homo sapiens
  chr1:3655641-3655711
  hypo
gtgtctgaagagctctcgataggagtcctggtagcggctagcctgggtctgggagcgaagggacagggac

SEQ ID NO: 7631 - DNA, 8 bp, Homo sapiens
  chr1:3655800-3655808
  hypo
acctgcgg

SEQ ID NO: 7632 - DNA, 31 bp, Homo sapiens
  chr1:3695642-3695673
  hypo
ctgagtgtgtgggcctcgtcctgtctggagt

SEQ ID NO: 7633 - DNA, 49 bp, Homo sapiens
  chr1:3695677-3695726
  hypo
tccctcccacagtgggcgagacgggaaggcctggcggtgaccagacaag

SEQ ID NO: 7634 - DNA, 31 bp, Homo sapiens
  chr1:3695798-3695829
  hypo
ccactgcacagggccccgggcctctcaggtt

SEQ ID NO: 7635 - DNA, 31 bp, Homo sapiens
  chr1:3705389-3705420
  hypo
agaaataaaagggctcgcgtgccctctggga

SEQ ID NO: 7636 - DNA, 31 bp, Homo sapiens
  chr1:3705432-3705463
  hypo
gtctaagcagcagtgacgcctgctggggaag

SEQ ID NO: 7637 - DNA, 88 bp, Homo sapiens; identical to SEQ ID NO: 35
  chr1:3817993-3818081
  hypo

SEQ ID NO: 7638 - DNA, 27 bp, Homo sapiens
  chr1:3818732-3818759
  hypo
agccaccgcgctcggcacactgttctg

SEQ ID NO: 7639 - DNA, 31 bp, Homo sapiens
  chr1:4359784-4359815
  hypo
gtttctgtctacacatcgggtggagggggaa

SEQ ID NO: 7640 - DNA, 31 bp, Homo sapiens
  chr1:4359831-4359862
  hypo
ttgggggagagtggggcgaggccaggtcagg

SEQ ID NO: 7641 - DNA, 31 bp, Homo sapiens
  chr1:4359904-4359935
  hypo
tcctggaagagtcagcgcggctcatcctgtc

SEQ ID NO: 7642 - DNA, 31 bp, Homo sapiens
  chr1:4359956-4359987
  hypo
gaaatatggctttgcccgaggttcatggcgg

SEQ ID NO: 7643 - DNA, 31 bp, Homo sapiens
  chr1:4531276-4531307
  hypo
acacagtacacacagacgcacatgcaaatgc

SEQ ID NO: 7644 - DNA, 31 bp, Homo sapiens
  chr1:6046170-6046201
  hypo
gctaagagcaataacacgcatttgctaacag

SEQ ID NO: 7645 - DNA, 90 bp, Homo sapiens
  chr1:6046210-6046300
  hypo
ttacctgcctaattaccggtccgtccagccacttgaggacacactggaatgccgtggattccttccaaggctggcgcgctctctgtgggt

SEQ ID NO: 7646 - DNA, 68 bp, Homo sapiens; identical to SEQ ID NO: 38
  chr1:6053624-6053692
  hypo

SEQ ID NO: 7647 - DNA, 105 bp, Homo sapiens
  chr1:6171649-6171754
  hypo
gaagccgggatgacagcggcggggagcgggcgacacagcaatgccgaggatttctagccaccgccagaagtgaggaagattgaggaagaacgaggaaggcttccc

SEQ ID NO: 7648 - DNA, 40 bp, Homo sapiens
  chr1:6171762-6171802
  hypo
ctcagagggctctccccgaggtccacggaggaacgggcaa

SEQ ID NO: 7649 - DNA, 31 bp, Homo sapiens
  chr1:6171997-6172028
  hypo
ggcaggcttggagagccgctccctccctact

SEQ ID NO: 7650 - DNA, 31 bp, Homo sapiens
  chr1:6195513-6195544
  hypo
gaggcagggtgcagagcgcctagcccatgta

SEQ ID NO: 7651 - DNA, 55 bp, Homo sapiens
  chr1:6280242-6280297
  hypo
cagttttgattttccccgtgtttgcatggcatgaagtcttcgtccttgtcacagt

SEQ ID NO: 7652 - DNA, 31 bp, Homo sapiens
  chr1:6280491-6280522
  hypo
aggaatccagttcctccggaataacagtccc

SEQ ID NO: 7653 - DNA, 82 bp, Homo sapiens
  chr1:6313882-6313964
  hypo
gcgccgcttgccctgcgcgtcctccaccacgatggtgggcacggtgaaggcgcggcggtcggcctggcgccccacctgcacg

SEQ ID NO: 7654 - DNA, 88 bp, Homo sapiens
  chr1:6313997-6314085
  hypo
atcacgcccatggccacgctgccgcccaccagcagcaggaagcagacgccaaagcccaggccgatctcagccacgatgaagcggcagc

SEQ ID NO: 7655 - DNA, 51 bp, Homo sapiens
  chr1:6334535-6334586
  hypo
tgccacgctgtcctctcggctggcgcggggcttacccggcccctgcactca

SEQ ID NO: 7656 - DNA, 31 bp, Homo sapiens
  chr1:6334624-6334655
  hypo
agggcagcagcagaagcgaggtgggcaccat

SEQ ID NO: 7657 - DNA, 31 bp, Homo sapiens
  chr1:6334683-6334714
  hypo
gtctgtgctgaggccacgcctcacataaggc

SEQ ID NO: 7658 - DNA, 35 bp, Homo sapiens
  chr1:6363865-6363900
  hypo
ttcactaagtggttcccggacgtctgggagcatca

SEQ ID NO: 7659 - DNA, 31 bp, Homo sapiens
  chr1:6379971-6380002
  hypo
ggccctgggtctgaaacgcctcccacttgat

SEQ ID NO: 7660 - DNA, 31 bp, Homo sapiens
  chr1:6397254-6397285
  hypo
aggaggaggagaaggccgagggctgtggtgg

SEQ ID NO: 7661 - DNA, 31 bp, Homo sapiens
  chr1:6397289-6397320
  hypo
gacacagctgggaggccgagaagctcccagc

SEQ ID NO: 7662 - DNA, 31 bp, Homo sapiens
  chr1:6409752-6409783
  hypo
tgaactcacactggtgcggcctccagggccc

SEQ ID NO: 7663 - DNA, 138 bp, Homo sapiens
  chr1:6409794-6409932
  hypo
gcccagacccttaccccgttctggctgttgcaatgccgggtgctgatgatggcgcctgcctcctcgatcatcttcaggatggtccccccgtggacattgccggccacgttggcatcatctggccgcatgatcctaggg

SEQ ID NO: 7664 - DNA, 31 bp, Homo sapiens
  chr1:6446078-6446109
  hypo
ccaggaccttaaacctcgcaccactcaggct

SEQ ID NO: 7665 - DNA, 31 bp, Homo sapiens
  chr1:6446130-6446161
  hypo
atgagttccacctgggcggagttccacctgg

SEQ ID NO: 7666 - DNA, 86 bp, Homo sapiens
  chr1:6446171-6446257
  hypo
cttggctcacaggcaccgggagagctggaaggctgcggggaagccgaggaaggccaacacaccgcacaacacggcaggtgcctggc

SEQ ID NO: 7667 - DNA, 31 bp, Homo sapiens
  chr1:6446277-6446308
  hypo
caagctccaggagggccgaggaaaatgcaga

SEQ ID NO: 7668 - DNA, 31 bp, Homo sapiens
  chr1:6486767-6486798
  hypo
gccaataggaagggagcgcctttctcaggag

SEQ ID NO: 7669 - DNA, 57 bp, Homo sapiens
  chr1:6486825-6486882
  hypo
gttctgcctgggtgcccgctagccagccccgacctttgggctcggaggggacagact

SEQ ID NO: 7670 - DNA, 31 bp, Homo sapiens
  chr1:6486919-6486950
  hypo
cacacaggaggggcctcggtgttgtcctcag

SEQ ID NO: 7671 - DNA, 31 bp, Homo sapiens
  chr1:6487014-6487045
  hypo
acaattgcccccaccccgcaggctgcctgaa

SEQ ID NO: 7672 - DNA, 50 bp, Homo sapiens
  chr1:6487046-6487096
  hypo
accctactagtggccccggcgcccccagctccctccgtgccctcttttcc

SEQ ID NO: 7673 - DNA, 56 bp, Homo sapiens
  chr1:6504648-6504704
  hypo
aactttgacctcagctcgcctaccagcaccctctccaactacgactcctgctcctc

SEQ ID NO: 7674 - DNA, 51 bp, Homo sapiens; identical to SEQ ID NO: 44
  chr1:6507703-6507754
  hypo

SEQ ID NO: 7675 - DNA, 43 bp, Homo sapiens
  chr1:6527867-6527910
  hypo
cagtccaggccactcacgaggcagtgagcgtggagttaagcag

SEQ ID NO: 7676 - DNA, 31 bp, Homo sapiens
  chr1:6528354-6528385
  hypo
tggggactctggggcccgaggcactagctct

SEQ ID NO: 7677 - DNA, 68 bp, Homo sapiens
  chr1:6528421-6528489
  hypo
gttggggagagggtgccgtaggcagagtccatggagcaggagcggccgtccaccggacccaggggcag

SEQ ID NO: 7678 - DNA, 31 bp, Homo sapiens
  chr1:6528938-6528969
  hypo
gtctgccctccccacccggactctgggggag

SEQ ID NO: 7679 - DNA, 31 bp, Homo sapiens
  chr1:6540612-6540643
  hypo
tggtgatgtgagcttgcggtcctaagagctt

SEQ ID NO: 7680 - DNA, 31 bp, Homo sapiens
  chr1:6547667-6547698
  hypo
ttgaaacagctgacaccgggccccaacttaa

SEQ ID NO: 7681 - DNA, 76 bp, Homo sapiens
  chr1:6562948-6563024
  hypo
gctgtgtgcagccccccggcgcctctctgccggccccggggagagctggggcaggcacacacgggtgaacaggtct

SEQ ID NO: 7682 - DNA, 31 bp, Homo sapiens
  chr1:6563078-6563109
  hypo
gggatctcaaaggcctcgccacacctcacca

SEQ ID NO: 7683 - DNA, 31 bp, Homo sapiens
  chr1:6565118-6565149
  hypo
ggccagctcctgggcccgaggatgaggctaa

SEQ ID NO: 7684 - DNA, 31 bp, Homo sapiens
  chr1:6565160-6565191
  hypo
acccaggcccaggccccggccccagacagtt

SEQ ID NO: 7685 - DNA, 31 bp, Homo sapiens
  chr1:6569032-6569063
  hypo
cctcacccacctgtagcgcctctcgaagtca

SEQ ID NO: 7686 - DNA, 31 bp, Homo sapiens
  chr1:6572210-6572241
  hypo
ggagacctgcccatgtcgctcggaaggggtt

SEQ ID NO: 7687 - DNA, 19 bp, Homo sapiens
  chr1:6669384-6669403
  hypo
actccgtctcagaaaaaca

SEQ ID NO: 7688 - DNA, 31 bp, Homo sapiens
  chr1:6672154-6672185
  hypo
atttagccaggcactacgctaaaatttaaca

SEQ ID NO: 7689 - DNA, 31 bp, Homo sapiens
  chr1:6713930-6713961
  hypo
gagcccttgctgtactcggagaggtggttgt

SEQ ID NO: 7690 - DNA, 31 bp, Homo sapiens
  chr1:6845865-6845896
  hypo
gggggcgggctggggccggagggggcggggg

SEQ ID NO: 7691 - DNA, 23 bp, Homo sapiens
  chr1:6964966-6964989
  hypo
gtattgcacgctgaacactccga

SEQ ID NO: 7692 - DNA, 31 bp, Homo sapiens
  chr1:7182591-7182622
  hypo
gagcaggcaggcacttcgggtgccgttctgt

SEQ ID NO: 7693 - DNA, 46 bp, Homo sapiens
  chr1:7407199-7407245
  hypo
tctgagtaacattcctcggtggggagagcggcggatggttctcaga

SEQ ID NO: 7694 - DNA, 31 bp, Homo sapiens
  chr1:7434891-7434922
  hypo
gctcagagatgagacacgtggcttctggtcg

SEQ ID NO: 7695 - DNA, 51 bp, Homo sapiens
  chr1:7723193-7723244
  hypo
tcaaaggggcgtgggacggcccccgggcttggggtacgtgtccaagggctg

SEQ ID NO: 7696 - DNA, 31 bp, Homo sapiens
  chr1:7742817-7742848
  hypo
gtgggcctgggccggccgctcctaggctggc

SEQ ID NO: 7697 - DNA, 124 bp, Homo sapiens; identical to SEQ ID NO: 47
  chr1:7843508-7843632
  hypo

SEQ ID NO: 7698 - DNA, 41 bp, Homo sapiens; identical to SEQ ID NO: 48
  chr1:7843652-7843693
  hypo

SEQ ID NO: 7699 - DNA, 189 bp, Homo sapiens; identical to SEQ ID NO: 49
  chr1:7844212-7844401
  hypo

SEQ ID NO: 7700 - DNA, 31 bp, Homo sapiens
  chr1:7926860-7926891
  hypo
gggctgaccatggtaccgggcctggaaaggg

SEQ ID NO: 7701 - DNA, 160 bp, Homo sapiens; identical to SEQ ID NO: 51
  chr1:8086055-8086215
  hypo

SEQ ID NO: 7702 - DNA, 31 bp, Homo sapiens; identical to SEQ ID NO: 52
  chr1:8086228-8086259
  hypo

SEQ ID NO: 7703 - DNA, 46 bp, Homo sapiens; identical to SEQ ID NO: 53
  chr1:8086282-8086328
  hypo

SEQ ID NO: 7704 - DNA, 31 bp, Homo sapiens
  chr1:8135328-8135359
  hypo
tttttttgggtgggggcggacagtgtcttac

SEQ ID NO: 7705 - DNA, 28 bp, Homo sapiens
  chr1:8141952-8141980
  hypo
aggcgtgagccaccgtgcccagctacaa

SEQ ID NO: 7706 - DNA, 19 bp, Homo sapiens
  chr1:8147825-8147844
  hypo
tccacgagcatttttatgg

SEQ ID NO: 7707 - DNA, 31 bp, Homo sapiens
  chr1:8149019-8149050
  hypo
tttatgtgcagttagtcgttttttcacctga

SEQ ID NO: 7708 - DNA, 31 bp, Homo sapiens
  chr1:8204554-8204585
  hypo
gacgcagctgtgcaggcgcacacagaaggcg

SEQ ID NO: 7709 - DNA, 43 bp, Homo sapiens
  chr1:8385722-8385765
  hypo
atggtgagtttgcaggcggcttttccaccgggctgtgcttgag

SEQ ID NO: 7710 - DNA, 31 bp, Homo sapiens
  chr1:8389321-8389352
  hypo
cctaaaccaaaaatcccgtgctggtagcagg

SEQ ID NO: 7711 - DNA, 31 bp, Homo sapiens
  chr1:8390773-8390804
  hypo
ccccgacggcttctaccgccaggaccgtgga

SEQ ID NO: 7712 - DNA, 43 bp, Homo sapiens
  chr1:8437574-8437617
  hypo
agtgggatttcactgccgttggttctatcgccacctcaccttt

SEQ ID NO: 7713 - DNA, 31 bp, Homo sapiens
  chr1:8781259-8781290
  hypo
tccccaagcccctgaacgacagcctgggact

SEQ ID NO: 7714 - DNA, 31 bp, Homo sapiens
  chr1:8781321-8781352
  hypo
aatggaagagttgaaccgaaagagtttttgt

SEQ ID NO: 7715 - DNA, 33 bp, Homo sapiens
  chr1:8997091-8997124
  hypo
ggcctgagccactgcgcccggccacaagactgt

SEQ ID NO: 7716 - DNA, 10 bp, Homo sapiens
  chr1:9028040-9028050
  hypo
ttgtgagaca

SEQ ID NO: 7717 - DNA, 31 bp, Homo sapiens
  chr1:9049402-9049433
  hypo
gaggggccctgagagacgcctgcttgtgtac

SEQ ID NO: 7718 - DNA, 31 bp, Homo sapiens
  chr1:9064759-9064790
  hypo
ttactccctggaggcccggtggagcgggttg

SEQ ID NO: 7719 - DNA, 31 bp, Homo sapiens
  chr1:9073881-9073912
  hypo
ccctggaatccagggtcgcagctcctccctc

SEQ ID NO: 7720 - DNA, 31 bp, Homo sapiens
  chr1:9075351-9075382
  hypo
cacctaccactgtgctcggaaggtcacgctc

SEQ ID NO: 7721 - DNA, 44 bp, Homo sapiens
  chr1:9084937-9084981
  hypo
aagatggcagcctccacggaggaagatggcggctaccttccacc

SEQ ID NO: 7722 - DNA, 31 bp, Homo sapiens
  chr1:9084988-9085019
  hypo
ccggtcagctgctgcccggcccaccttgtgc

SEQ ID NO: 7723 - DNA, 31 bp, Homo sapiens
  chr1:9097916-9097947
  hypo
gggatctggtggtgagcgtgggccccgggcc

SEQ ID NO: 7724 - DNA, 58 bp, Homo sapiens
  chr1:9165434-9165492
  hypo
gcagctgtgccttggccgacactggggtgcagccactgtgctgcgggaaggaatcagg

SEQ ID NO: 7725 - DNA, 31 bp, Homo sapiens
  chr1:9165500-9165531
  hypo
cctctgggggcagggacgacaagggccaggg

SEQ ID NO: 7726 - DNA, 112 bp, Homo sapiens
  chr1:9165546-9165658
  hypo
gcagaaccaccagcaccggcgtctgcacggccggggagccacagagggtcagcacgaaccgcacggtgctccagaccctgaggccgatgaagatgagcgggatgagcaccag

SEQ ID NO: 7727 - DNA, 20 bp, Homo sapiens
  chr1:9172517-9172537
  hypo
ttttctttttttgagacgga

SEQ ID NO: 7728 - DNA, 201 bp, Homo sapiens; identical to SEQ ID NO: 59
  chr1:9189021-9189222
  hypo

SEQ ID NO: 7729 - DNA, 53 bp, Homo sapiens
  chr1:9205247-9205300
  hypo
gagccctgtggaaggccgctgggcagagacagctcctccgttcacaggaccct

SEQ ID NO: 7730 - DNA, 31 bp, Homo sapiens
  chr1:9265243-9265274
  hypo
acaggcatgagccaccgcgcctggcccccac

SEQ ID NO: 7731 - DNA, 34 bp, Homo sapiens
  chr1:9324893-9324927
  hypo
tgtggtacatggactacgacgccttcctgggatg

SEQ ID NO: 7732 - DNA, 49 bp, Homo sapiens
  chr1:9332432-9332481
  hypo
caaatcagagtgaccccgaggactcaggctgaagcggcaccatttctct

SEQ ID NO: 7733 - DNA, 31 bp, Homo sapiens; identical to SEQ ID NO: 60
  chr1:9352659-9352690
  hypo

SEQ ID NO: 7734 - DNA, 190 bp, Homo sapiens; identical to SEQ ID NO: 61
  chr1:9352964-9353154
  hypo

SEQ ID NO: 7735 - DNA, 48 bp, Homo sapiens; identical to SEQ ID NO: 62
  chr1:9353808-9353856
  hypo

SEQ ID NO: 7736 - DNA, 31 bp, Homo sapiens
  chr1:9361975-9362006
  hypo
attctggatacagattcgtcttccctgcaca

SEQ ID NO: 7737 - DNA, 38 bp, Homo sapiens
  chr1:9362047-9362085
  hypo
acctttcccactgtcacgctgtccgtgtagcactgctt

SEQ ID NO: 7738 - DNA, 40 bp, Homo sapiens
  chr1:9362130-9362170
  hypo
tgtgcagggaattggccggtgagcacgagcccactggttt

SEQ ID NO: 7739 - DNA, 31 bp, Homo sapiens
  chr1:9365883-9365914
  hypo
gtgggtgagacaggcccgtctctgctgatga

SEQ ID NO: 7740 - DNA, 31 bp, Homo sapiens
  chr1:9420031-9420062
  hypo
gcgggggctgctgacccgagatgggaaagcc

SEQ ID NO: 7741 - DNA, 31 bp, Homo sapiens
  chr1:9420429-9420460
  hypo
cttgggtcagggggcacgggaggagcctgat

SEQ ID NO: 7742 - DNA, 31 bp, Homo sapiens
  chr1:9420475-9420506
  hypo
agacagacagggtattcgtctcctggagctg

SEQ ID NO: 7743 - DNA, 149 bp, Homo sapiens
  chr1:9420533-9420682
  hypo
ctgaaaacagcagaagcgctcaggaggccaggtgtctgcgatcaggatggtagcgggctcgactgcctccgagctctgagggggagcccgccccatgcctcccctcgcccctgggggctgccgggaatccttggcgtcccttggtctgt

SEQ ID NO: 7744 - DNA, 31 bp, Homo sapiens
  chr1:9426088-9426119
  hypo
tgagatctgaagctgacggctcatctgagat

SEQ ID NO: 7745 - DNA, 31 bp, Homo sapiens
  chr1:9447365-9447396
  hypo
gatgttagaagaggagcgagtgaaagcctcc

SEQ ID NO: 7746 - DNA, 106 bp, Homo sapiens; identical to SEQ ID NO: 63
  chr1:9489049-9489155
  hypo

SEQ ID NO: 7747 - DNA, 54 bp, Homo sapiens; identical to SEQ ID NO: 64
  chr1:9489161-9489215
  hypo

SEQ ID NO: 7748 - DNA, 6 bp, Homo sapiens
  chr1:9539438-9539444
  hypo
aaaaaa

SEQ ID NO: 7749 - DNA, 39 bp, Homo sapiens
  chr1:9539492-9539531
  hypo
gccagcagcctttatccgagcaagcggccagttcccatt

SEQ ID NO: 7750 - DNA, 38 bp, Homo sapiens
  chr1:9549416-9549454
  hypo
accatattctaaagtgcgtaattcgctggtttttagca

SEQ ID NO: 7751 - DNA, 376 bp, Homo sapiens; identical to SEQ ID NO: 65
  chr1:9711913-9712289
  hypo

SEQ ID NO: 7752 - DNA, 376 bp, Homo sapiens; identical to SEQ ID NO: 66
  chr1:9712290-9712666
  hypo

SEQ ID NO: 7753 - DNA, 31 bp, Homo sapiens; identical to SEQ ID NO: 67
  chr1:9712670-9712701
  hypo

SEQ ID NO: 7754 - DNA, 271 bp, Homo sapiens; identical to SEQ ID NO: 68
  chr1:9712743-9713014
  hypo

SEQ ID NO: 7755 - DNA, 31 bp, Homo sapiens
  chr1:9781133-9781164
  hypo
acctccaccctgaccccggccgcccccaagc

SEQ ID NO: 7756 - DNA, 31 bp, Homo sapiens
  chr1:9785103-9785134
  hypo
tgtgtgtgcctcatgccgtcccaggacccag

SEQ ID NO: 7757 - DNA, 18 bp, Homo sapiens
  chr1:9818657-9818675
  hypo
caccgcacctggccatga

SEQ ID NO: 7758 - DNA, 31 bp, Homo sapiens
  chr1:9892079-9892110
  hypo
gaggatacagataaagcgtttagctcagcgt

SEQ ID NO: 7759 - DNA, 44 bp, Homo sapiens
  chr1:9938565-9938609
  hypo
acatgctagaaacacacgaaaagcacagtcgcagcttgttcaca

SEQ ID NO: 7760 - DNA, 31 bp, Homo sapiens
  chr1:10068866-10068897
  hypo
tattaaatgaaacagccgaatattccgacag

SEQ ID NO: 7761 - DNA, 37 bp, Homo sapiens
  chr1:10091843-10091880
  hypo
atccacttatagtcttcgtcagcggcaaaatctggaa

SEQ ID NO: 7762 - DNA, 31 bp, Homo sapiens
  chr1:10091887-10091918
  hypo
gtactgttactttgatcgctcaacttagatt

SEQ ID NO: 7763 - DNA, 26 bp, Homo sapiens
  chr1:10091958-10091984
  hypo
tttttgagatggagtcgcgctctgtc

SEQ ID NO: 7764 - DNA, 17 bp, Homo sapiens
  chr1:10095062-10095079
  hypo
gtttgtttttttgagac

SEQ ID NO: 7765 - DNA, 17 bp, Homo sapiens
  chr1:10096098-10096115
  hypo
gccgaggtagtttttta

SEQ ID NO: 7766 - DNA, 51 bp, Homo sapiens
  chr1:10103748-10103799
  hypo
gtgctgggattacaggcgtgatccaacgcgctgggccgggatgcttcttat

SEQ ID NO: 7767 - DNA, 31 bp, Homo sapiens
  chr1:10103802-10103833
  hypo
tagatggtgtaatcaccgttggccaggtggc

SEQ ID NO: 7768 - DNA, 31 bp, Homo sapiens
  chr1:10166520-10166551
  hypo
gcccccaagcagtgcccgccagcagttccag

SEQ ID NO: 7769 - DNA, 31 bp, Homo sapiens; identical to SEQ ID NO: 72
  chr1:10271340-10271371
  hypo

SEQ ID NO: 7770 - DNA, 34 bp, Homo sapiens
  chr1:10706943-10706977
  hypo
ctcagacctcacttgccggcggagtgggagagct

SEQ ID NO: 7771 - DNA, 31 bp, Homo sapiens
  chr1:10707635-10707666
  hypo
gccaccatcggcccacgcgggctggcctgct

SEQ ID NO: 7772 - DNA, 104 bp, Homo sapiens
  chr1:10707863-10707967
  hypo
tggaactggaggaatccgggtttgacctggggcttggcgttctctagagaagtcgttgccaagggcgaggcgggcaggtgaggcactgacgctgggatctgagg

SEQ ID NO: 7773 - DNA, 73 bp, Homo sapiens
  chr1:10707986-10708059
  hypo
gccagctgcttccaggcgagcagggtgggggtggagggcacggaggccgggctgggagcgggcccctccagag

SEQ ID NO: 7774 - DNA, 44 bp, Homo sapiens
  chr1:10708358-10708402
  hypo
ggagggcaaactgcagcgtcccctggttccgaacttggtctcct

SEQ ID NO: 7775 - DNA, 31 bp, Homo sapiens
  chr1:10708426-10708457
  hypo
tacttgtgcccttcctcggtccccagctcct

SEQ ID NO: 7776 - DNA, 43 bp, Homo sapiens
  chr1:10713571-10713614
  hypo
ctgagtctccagctcccgaggcgaccagcgtgggtgtgtcagg

SEQ ID NO: 7777 - DNA, 36 bp, Homo sapiens
  chr1:10713622-10713658
  hypo
aggctgctgacccagacgacacggcacccaggaggc

SEQ ID NO: 7778 - DNA, 126 bp, Homo sapiens
  chr1:10714452-10714578
  hypo
gcccccaccaggctcccgcttacctgcagtggaagtgcgtggtcttctgtccgtagaactggcagtcggctgtgccacagtcttcggtggctcggaagcgctggaagccgtcgttaatgagctggg

SEQ ID NO: 7779 - DNA, 106 bp, Homo sapiens
  chr1:10716606-10716712
  hypo
taaccccccccactgccgtccccgcctgccgacttctaagcgcctccatgctgtgctggtggcggagaggcggagcccatctggctgtggccgtacctggtagtta

SEQ ID NO: 7780 - DNA, 31 bp, Homo sapiens
  chr1:10716725-10716756
  hypo
ggcagtggtagtgctcgcggtactggtaggc

SEQ ID NO: 7781 - DNA, 31 bp, Homo sapiens
  chr1:10718958-10718989
  hypo
ccaacagggagggattcgaggtgggggcagg

SEQ ID NO: 7782 - DNA, 31 bp, Homo sapiens
  chr1:10719284-10719315
  hypo
tccccagccagggtggcgccttctcagccaa

SEQ ID NO: 7783 - DNA, 31 bp, Homo sapiens
  chr1:10719382-10719413
  hypo
ctgtcatgggcagtcccggtgtgcatgctag

SEQ ID NO: 7784 - DNA, 47 bp, Homo sapiens
  chr1:10725221-10725268
  hypo
cttggagggctcctccgcgtggtcttcctcatcgctgcacccctggg

SEQ ID NO: 7785 - DNA, 31 bp, Homo sapiens
  chr1:10725477-10725508
  hypo
ccctccgtgtgggagccggcgtcagctcgct

SEQ ID NO: 7786 - DNA, 76 bp, Homo sapiens
  chr1:10725509-10725585
  hypo
ctccaccaccacctggcggctcagcttggcgcagatggcgttcagcttcaggccacccttgcgtttgggcgccatg

SEQ ID NO: 7787 - DNA, 73 bp, Homo sapiens
  chr1:10729046-10729119
  hypo
ctcggattcctaggttcgggaccttccctctcagggcgccacgagcagcaggtctccccgcaggtctctgagc

SEQ ID NO: 7788 - DNA, 97 bp, Homo sapiens
  chr1:10729133-10729230
  hypo
acagggttggggaaaacgggcatggactggaccgtccacctttccgggcactaaggcatgacttgtaacggcccagcggagccggcactgtcattgt

SEQ ID NO: 7789 - DNA, 31 bp, Homo sapiens
  chr1:10765348-10765379
  hypo
gaggggatcctactggcgggagggcatcttt

SEQ ID NO: 7790 - DNA, 31 bp, Homo sapiens
  chr1:10765534-10765565
  hypo
ggctcaggccttacctcgtagcaggtcctag

SEQ ID NO: 7791 - DNA, 30 bp, Homo sapiens
  chr1:10770896-10770926
  hypo
gaagcttacaaaaggccgggggcagtagct

SEQ ID NO: 7792 - DNA, 51 bp, Homo sapiens
  chr1:10775891-10775942
  hypo
cacccaatccactccccgcagcacccaatcctctcccggcagcacccaatc

SEQ ID NO: 7793 - DNA, 27 bp, Homo sapiens
  chr1:10779263-10779290
  hypo
cgcacccggccccgtgcccctttcttg

SEQ ID NO: 7794 - DNA, 31 bp, Homo sapiens
  chr1:10779503-10779534
  hypo
gtcctaaggctgcacacgccatgcatttaga

SEQ ID NO: 7795 - DNA, 51 bp, Homo sapiens
  chr1:10779555-10779606
  hypo
gatccctaagaagcagcgctgtggggaaggtggcaccgaacaagtttctaa

SEQ ID NO: 7796 - DNA, 37 bp, Homo sapiens
  chr1:10780356-10780393
  hypo
tcattgtcatcatcatcgccatcgctaaacacttctc

SEQ ID NO: 7797 - DNA, 31 bp, Homo sapiens
  chr1:10780402-10780433
  hypo
tatggtaactaggaatcgtgcctttggggct

SEQ ID NO: 7798 - DNA, 31 bp, Homo sapiens
  chr1:10807496-10807527
  hypo
agcggcagatgaaaggcgttccacccagatg

SEQ ID NO: 7799 - DNA, 31 bp, Homo sapiens
  chr1:10810300-10810331
  hypo
tgacgctgctttgcttcgattttcttttctt

SEQ ID NO: 7800 - DNA, 4 bp, Homo sapiens
  chr1:10810338-10810342
  hypo
tcta

SEQ ID NO: 7801 - DNA, 34 bp, Homo sapiens
  chr1:10815560-10815594
  hypo
gatcaactgcgtcacccgccgagaagtcccccga

SEQ ID NO: 7802 - DNA, 40 bp, Homo sapiens
  chr1:10815635-10815675
  hypo
cctcttccctggggcccgtgcatggcgagatgcggggttt

SEQ ID NO: 7803 - DNA, 77 bp, Homo sapiens
  chr1:10823335-10823412
  hypo
cttacagaaatcacaacgggctgagaaccaggagacgtgggtccgagtcccacttctgtccccgaaacctccatggg

SEQ ID NO: 7804 - DNA, 56 bp, Homo sapiens
  chr1:10823429-10823485
  hypo
taatctccctaggttccgtcccctcaccagccagacggagacgatgcctaagactt

SEQ ID NO: 7805 - DNA, 50 bp, Homo sapiens
  chr1:10823490-10823540
  hypo
ctaccttgcaggctgcgcggaggatggacaagaggcgtgaaagggtgtta

SEQ ID NO: 7806 - DNA, 31 bp, Homo sapiens
  chr1:10838656-10838687
  hypo
tcccaactcccctctcgcggtctttcttcct

SEQ ID NO: 7807 - DNA, 31 bp, Homo sapiens
  chr1:10838704-10838735
  hypo
tgtcttccagtggacacgaggaggagagctc

SEQ ID NO: 7808 - DNA, 50 bp, Homo sapiens
  chr1:10838743-10838793
  hypo
actgttcccaggcaaacgtgtccttgctcttgatccgtgtggaattccaa

SEQ ID NO: 7809 - DNA, 31 bp, Homo sapiens
  chr1:10838794-10838825
  hypo
tccccctggcagagagcggcttctgggactc

SEQ ID NO: 7810 - DNA, 31 bp, Homo sapiens
  chr1:10839639-10839670
  hypo
ataaaaaacaaatcaccgtagtcccaccacc

SEQ ID NO: 7811 - DNA, 167 bp, Homo sapiens; identical to SEQ ID NO: 82
  chr1:10854805-10854972
  hypo

SEQ ID NO: 7812 - DNA, 59 bp, Homo sapiens; identical to SEQ ID NO: 83
  chr1:10854994-10855053
  hypo

SEQ ID NO: 7813 - DNA, 34 bp, Homo sapiens; identical to SEQ ID NO: 84
  chr1:10855103-10855137
  hypo

SEQ ID NO: 7814 - DNA, 261 bp, Homo sapiens; identical to SEQ ID NO: 85
  chr1:10855138-10855399
  hypo

SEQ ID NO: 7815 - DNA, 206 bp, Homo sapiens; identical to SEQ ID NO: 86
  chr1:10855536-10855742
  hypo

SEQ ID NO: 7816 - DNA, 69 bp, Homo sapiens; identical to SEQ ID NO: 89
  chr1:10856314-10856383
  hypo

SEQ ID NO: 7817 - DNA, 56 bp, Homo sapiens; identical to SEQ ID NO: 90
  chr1:10856465-10856521
  hypo

SEQ ID NO: 7818 - DNA, 97 bp, Homo sapiens; identical to SEQ ID NO: 91
  chr1:10856550-10856647
  hypo

SEQ ID NO: 7819 - DNA, 145 bp, Homo sapiens; identical to SEQ ID NO: 92
  chr1:10856713-10856858
  hypo

SEQ ID NO: 7820 - DNA, 31 bp, Homo sapiens; identical to SEQ ID NO: 93
  chr1:10856861-10856892
  hypo

SEQ ID NO: 7821 - DNA, 31 bp, Homo sapiens
  chr1:11046049-11046080
  hypo
tcctcctacacacacacgcacacacctataa

SEQ ID NO: 7822 - DNA, 5 bp, Homo sapiens
  chr1:11091313-11091318
  hypo
ctcat

SEQ ID NO: 7823 - DNA, 20 bp, Homo sapiens
  chr1:11124906-11124926
  hypo
aactccgtctcaggaaaaaa

SEQ ID NO: 7824 - DNA, 84 bp, Homo sapiens
  chr1:11139770-11139854
  hypo
gagcaggggcatctctcgggcctgctggattaaaaggtgcatttcgttgatctgctgccgcacaaggggcggtactgggttgca

SEQ ID NO: 7825 - DNA, 40 bp, Homo sapiens
  chr1:11323836-11323876
  hypo
taaaatatgatgcattcgtttgggcgcggtggctcacacc

SEQ ID NO: 7826 - DNA, 39 bp, Homo sapiens
  chr1:11809702-11809741
  hypo
gagctggagaggagtgcgtgggcccggggctgatgtccc

SEQ ID NO: 7827 - DNA, 31 bp, Homo sapiens
  chr1:11809745-11809776
  hypo
cccaggttcctaagcacgtgctgcctgggga

SEQ ID NO: 7828 - DNA, 31 bp, Homo sapiens
  chr1:11810251-11810282
  hypo
ccagccacgctgcgcccggccctgccccggg

SEQ ID NO: 7829 - DNA, 31 bp, Homo sapiens
  chr1:11848613-11848644
  hypo
tctggtgcagcagtgtcgggggagaaaggca

SEQ ID NO: 7830 - DNA, 31 bp, Homo sapiens
  chr1:11856197-11856228
  hypo
ctgtgcgaggacggtgcggtgagagtggggt

SEQ ID NO: 7831 - DNA, 31 bp, Homo sapiens
  chr1:11856263-11856294
  hypo
tggatgggaaagatcccggggacgatggggc

SEQ ID NO: 7832 - DNA, 31 bp, Homo sapiens
  chr1:12041769-12041800
  hypo
ctcctgcagggacctccgtggtgcctcaaac

SEQ ID NO: 7833 - DNA, 31 bp, Homo sapiens
  chr1:12089141-12089172
  hypo
caagctgcaggagtttcgggaaaccaacaag

SEQ ID NO: 7834 - DNA, 54 bp, Homo sapiens; identical to SEQ ID NO: 95
  chr1:12123222-12123276
  hypo

SEQ ID NO: 7835 - DNA, 71 bp, Homo sapiens; identical to SEQ ID NO: 96
  chr1:12123282-12123353
  hypo

SEQ ID NO: 7836 - DNA, 53 bp, Homo sapiens; identical to SEQ ID NO: 97
  chr1:12123359-12123412
  hypo

SEQ ID NO: 7837 - DNA, 133 bp, Homo sapiens; identical to SEQ ID NO: 98
  chr1:12123420-12123553
  hypo

SEQ ID NO: 7838 - DNA, 39 bp, Homo sapiens; identical to SEQ ID NO: 99
  chr1:12123787-12123826
  hypo

SEQ ID NO: 7839 - DNA, 34 bp, Homo sapiens
  chr1:12183827-12183861
  hypo
tcccaaccagcgctcccgtcgctctctcctccac

SEQ ID NO: 7840 - DNA, 43 bp, Homo sapiens
  chr1:12188608-12188651
  hypo
ggatggtgaagtaattcgtttaaggccacgtgctgggtgagcc

SEQ ID NO: 7841 - DNA, 53 bp, Homo sapiens
  chr1:12194138-12194191
  hypo
cctagtgtccacacagcgtgttcaaatggtcagtcttgcgtatactttatcct

SEQ ID NO: 7842 - DNA, 47 bp, Homo sapiens
  chr1:12194266-12194313
  hypo
agatgtgtgcaggaggcggcgtggctgacatacgggcatcttggtgg

SEQ ID NO: 7843 - DNA, 31 bp, Homo sapiens
  chr1:12202224-12202255
  hypo
tcagcctgaagccacccggcaggtgtaccag

SEQ ID NO: 7844 - DNA, 31 bp, Homo sapiens
  chr1:12215980-12216011
  hypo
tgtatgtggaagaggccgggcacagtggctc

SEQ ID NO: 7845 - DNA, 31 bp, Homo sapiens; identical to SEQ ID NO: 100
  chr1:12227483-12227514
  hypo

SEQ ID NO: 7846 - DNA, 39 bp, Homo sapiens
  chr1:12241726-12241765
  hypo
ctttcctctcagaagtcgcctgctcgagctgccctccct

SEQ ID NO: 7847 - DNA, 31 bp, Homo sapiens
  chr1:12259772-12259803
  hypo
tggcacctgcgctgctcgctccacccctgct

SEQ ID NO: 7848 - DNA, 31 bp, Homo sapiens
  chr1:12260659-12260690
  hypo
ccaccattccatgtgccgcaaattattcttt

SEQ ID NO: 7849 - DNA, 5 bp, Homo sapiens
  chr1:12267962-12267967
  hypo
tctca

SEQ ID NO: 7850 - DNA, 31 bp, Homo sapiens
  chr1:12267969-12268000
  hypo
agaaaaaaaaaagcaccgcctccaaatgcca

SEQ ID NO: 7851 - DNA, 31 bp, Homo sapiens
  chr1:12285909-12285940
  hypo
tcgtctcaggaacctacgaaaagacactctt

SEQ ID NO: 7852 - DNA, 31 bp, Homo sapiens
  chr1:12304716-12304747
  hypo
atttctcaggtttaaacgtgtttctcctctt

SEQ ID NO: 7853 - DNA, 31 bp, Homo sapiens
  chr1:12333007-12333038
  hypo
taaagctgttgggtttcggcagttatggtta

SEQ ID NO: 7854 - DNA, 31 bp, Homo sapiens
  chr1:12607961-12607992
  hypo
ctctcccctctgtggacgcaggcaccagccc

SEQ ID NO: 7855 - DNA, 121 bp, Homo sapiens
  chr1:12608006-12608127
  hypo
cacagccacccagtgccgtggagtgaagggacatcaggccactcgcagggccccagggcatcctcttgtgcccgcctgggtcacccttcaccccggccgagctccacgtggatttgggccc

SEQ ID NO: 7856 - DNA, 31 bp, Homo sapiens
  chr1:12628465-12628496
  hypo
gaagaaaagaagatagcgatggttagtgggg

SEQ ID NO: 7857 - DNA, 50 bp, Homo sapiens
  chr1:12628499-12628549
  hypo
gatccaggggctgggtcgctggtggccatgtgagacggggcagcagaggg

SEQ ID NO: 7858 - DNA, 31 bp, Homo sapiens
  chr1:12629958-12629989
  hypo
aagacttgttcttattcggtctattttttgt

SEQ ID NO: 7859 - DNA, 31 bp, Homo sapiens
  chr1:12630383-12630414
  hypo
ggccctcacatgggcccggcacagagagggc

SEQ ID NO: 7860 - DNA, 31 bp, Homo sapiens
  chr1:12632581-12632612
  hypo
aaactctaaggggccccgtgactaacaagtt

SEQ ID NO: 7861 - DNA, 31 bp, Homo sapiens
  chr1:12635041-12635072
  hypo
tctatggctggaacatcgaagaggctcaatt

SEQ ID NO: 7862 - DNA, 31 bp, Homo sapiens
  chr1:12639826-12639857
  hypo
cttactcctaagtgaacgagtaatttctgag

SEQ ID NO: 7863 - DNA, 53 bp, Homo sapiens
  chr1:12663578-12663631
  hypo
cttgaacctcagctggcgctgaggtccgcatggggaccgcggggcttggaggc

SEQ ID NO: 7864 - DNA, 45 bp, Homo sapiens
  chr1:12663642-12663687
  hypo
gttgggggaggtgggacgcagacaggagaccgtgttccctaggag

SEQ ID NO: 7865 - DNA, 52 bp, Homo sapiens
  chr1:12663700-12663752
  hypo
ggacaagatcatcatacgcttcactcatcaaaatccccgaaaggctgctgaa

SEQ ID NO: 7866 - DNA, 74 bp, Homo sapiens
  chr1:12711250-12711324
  hypo
gttttgggacgatacccgtgaggctgttccagccgaaggcagcatcctccagaccccggcgaggcatcatcttc

SEQ ID NO: 7867 - DNA, 31 bp, Homo sapiens
  chr1:12711411-12711442
  hypo
cctagctcatgcctcccgcaagaacccttct

SEQ ID NO: 7868 - DNA, 81 bp, Homo sapiens; identical to SEQ ID NO: 101
  chr1:14026538-14026619
  hypo

SEQ ID NO: 7869 - DNA, 117 bp, Homo sapiens; identical to SEQ ID NO: 102
  chr1:14026621-14026738
  hypo

SEQ ID NO: 7870 - DNA, 85 bp, Homo sapiens; identical to SEQ ID NO: 103
  chr1:14026746-14026831
  hypo

SEQ ID NO: 7871 - DNA, 80 bp, Homo sapiens; identical to SEQ ID NO: 104
  chr1:14026839-14026919
  hypo

SEQ ID NO: 7872 - DNA, 214 bp, Homo sapiens; identical to SEQ ID NO: 105
  chr1:14026931-14027145
  hypo

SEQ ID NO: 7873 - DNA, 31 bp, Homo sapiens
  chr1:14125476-14125507
  hypo
gagatttctccttcaccgtggtgagtcagag

SEQ ID NO: 7874 - DNA, 55 bp, Homo sapiens
  chr1:14125567-14125622
  hypo
caaacacagaggtctccgccacttacttcgtcactaagtccggcatgttcaccat

SEQ ID NO: 7875 - DNA, 31 bp, Homo sapiens
  chr1:14128557-14128588
  hypo
aggactttggggatcacgagcagaaaggtag

SEQ ID NO: 7876 - DNA, 31 bp, Homo sapiens
  chr1:14139569-14139600
  hypo
gcaactgctgcagtcacgacactgtgctgat

SEQ ID NO: 7877 - DNA, 26 bp, Homo sapiens
  chr1:14144189-14144215
  hypo
ccccattaaaaaatcccgagttcagc

SEQ ID NO: 7878 - DNA, 87 bp, Homo sapiens
  chr1:15129597-15129684
  hypo
actacatcatggctaccgtttactgagggctccttataagacaaacgctgtgctaaagcctcccttcatctgcgcagtgtctgctga

SEQ ID NO: 7879 - DNA, 49 bp, Homo sapiens
  chr1:15129759-15129808
  hypo
cccaggtggggattagcggagggggattcagccccggatgtagctgacc

SEQ ID NO: 7880 - DNA, 51 bp, Homo sapiens
  chr1:15151514-15151565
  hypo
cgaggtgtgctcacagcgcatcccccttgctgaagccgggggttcacccac

SEQ ID NO: 7881 - DNA, 31 bp, Homo sapiens
  chr1:15151604-15151635
  hypo
gggaatttcagagtctcgcaaaagctagcaa

SEQ ID NO: 7882 - DNA, 31 bp, Homo sapiens
  chr1:15151671-15151702
  hypo
gaccatccctgaggccgcgaaggcacagaga

SEQ ID NO: 7883 - DNA, 31 bp, Homo sapiens
  chr1:15372344-15372375
  hypo
gcataggggaaaccagcgccattatccactt

SEQ ID NO: 7884 - DNA, 31 bp, Homo sapiens
  chr1:15375327-15375358
  hypo
gtcgttggtcctgggtcgttggtccttggtc

SEQ ID NO: 7885 - DNA, 31 bp, Homo sapiens
  chr1:15395208-15395239
  hypo
actccactgtatgtcccgagaagagggtacc

SEQ ID NO: 7886 - DNA, 31 bp, Homo sapiens
  chr1:15403423-15403454
  hypo
cgcctcatttcaactacgccacaaactcaga

SEQ ID NO: 7887 - DNA, 31 bp, Homo sapiens
  chr1:15421285-15421316
  hypo
atatgacactccctcccgggggcaggtgctg

SEQ ID NO: 7888 - DNA, 31 bp, Homo sapiens
  chr1:15488500-15488531
  hypo
gcagaaggacagcaggcgtcatgtggtgaga

SEQ ID NO: 7889 - DNA, 31 bp, Homo sapiens
  chr1:15721403-15721434
  hypo
tgtccagaattgtttgcgagagagatcttgg

SEQ ID NO: 7890 - DNA, 31 bp, Homo sapiens
  chr1:15771334-15771365
  hypo
ctgggaggagactgagcgagccctggctggg

SEQ ID NO: 7891 - DNA, 31 bp, Homo sapiens
  chr1:15885333-15885364
  hypo
ttttaattgcccagttcgctacaaatcctga

SEQ ID NO: 7892 - DNA, 31 bp, Homo sapiens
  chr1:15885389-15885420
  hypo
aaaatgattgacttttcgttttgggtttttg

SEQ ID NO: 7893 - DNA, 43 bp, Homo sapiens
  chr1:15892451-15892494
  hypo
ccctcttcatcctcttcggcactgtcatcgttcaggctttcag

SEQ ID NO: 7894 - DNA, 31 bp, Homo sapiens
  chr1:15892498-15892529
  hypo
atgtcctgtggcttctcggtgcaccaccatg

SEQ ID NO: 7895 - DNA, 47 bp, Homo sapiens
  chr1:15892560-15892607
  hypo
ttttttcttactttagcgactctaatgatgagcgagagtcaagccct

SEQ ID NO: 7896 - DNA, 31 bp, Homo sapiens; identical to SEQ ID NO: 122
  chr1:15928988-15929019
  hypo

SEQ ID NO: 7897 - DNA, 31 bp, Homo sapiens
  chr1:16077928-16077959
  hypo
tcccaggccaagaagacggctcaacaagggc

SEQ ID NO: 7898 - DNA, 59 bp, Homo sapiens
  chr1:16092325-16092384
  hypo
ctcttgaattcctgcccgcccatcatagcctatgggccctgcaccgggaggcaggcact

SEQ ID NO: 7899 - DNA, 31 bp, Homo sapiens
  chr1:16092419-16092450
  hypo
acctggttcctgactccgtgagctcatcgga

SEQ ID NO: 7900 - DNA, 31 bp, Homo sapiens
  chr1:16098311-16098342
  hypo
accacacgaggtcacacgagatggccaagga

SEQ ID NO: 7901 - DNA, 59 bp, Homo sapiens
  chr1:16101035-16101094
  hypo
gcctctcagaagaagacgaccctcgtgggttggggtgggtgtgtcgtggatggttctgg

SEQ ID NO: 7902 - DNA, 43 bp, Homo sapiens
  chr1:16101113-16101156
  hypo
acacactggagaggtgcggcaagtgtggcgaggtggtccggga

SEQ ID NO: 7903 - DNA, 31 bp, Homo sapiens
  chr1:16109724-16109755
  hypo
ggtagaatttgggccccgagtccctgtgttc

SEQ ID NO: 7904 - DNA, 35 bp, Homo sapiens
  chr1:16138130-16138165
  hypo
agataaagtcctgaggcgagcgtaagcattgtgta

SEQ ID NO: 7905 - DNA, 27 bp, Homo sapiens
  chr1:16164912-16164939
  hypo
aatcagaagtcttggccggttttggtg

SEQ ID NO: 7906 - DNA, 31 bp, Homo sapiens
  chr1:16273063-16273094
  hypo
ctaggaaagggaggaacgcagcctctggaag

SEQ ID NO: 7907 - DNA, 31 bp, Homo sapiens
  chr1:16273686-16273717
  hypo
ccactcagcagcaggacgcagggatttagga

SEQ ID NO: 7908 - DNA, 31 bp, Homo sapiens
  chr1:16273724-16273755
  hypo
agtggcaagcctgcatcgccccatctcctct

SEQ ID NO: 7909 - DNA, 31 bp, Homo sapiens
  chr1:16274994-16275025
  hypo
gaagaaagccaaagggcgttggggttagcac

SEQ ID NO: 7910 - DNA, 31 bp, Homo sapiens
  chr1:16283815-16283846
  hypo
tgcaaaaaccctgaggcgggcatgactttgg

SEQ ID NO: 7911 - DNA, 31 bp, Homo sapiens
  chr1:16320505-16320536
  hypo
agtcccatcaaggccacgagagagaaaggtg

SEQ ID NO: 7912 - DNA, 31 bp, Homo sapiens
  chr1:16363231-16363262
  hypo
ggcctcgggccatggccgtgggctttgtgat

SEQ ID NO: 7913 - DNA, 67 bp, Homo sapiens
  chr1:16457639-16457706
  hypo
cacatgtgcacacatacggatgcacacacatgcatggacacacggatacacacgtacaccccactcc

SEQ ID NO: 7914 - DNA, 41 bp, Homo sapiens
  chr1:16457747-16457788
  hypo
agcacaaggcctggcacgcagtagatcctcaagaaatattt

SEQ ID NO: 7915 - DNA, 31 bp, Homo sapiens
  chr1:16458420-16458451
  hypo
ttgcagccaagccccacgacccctccctgga

SEQ ID NO: 7916 - DNA, 57 bp, Homo sapiens
  chr1:16458831-16458888
  hypo
aatggccaggcatccccgccccctacaacccacatccttacccgaaggaacttgtcc

SEQ ID NO: 7917 - DNA, 31 bp, Homo sapiens
  chr1:16461544-16461575
  hypo
tcgtgcaccttgctgccggccccctggccct

SEQ ID NO: 7918 - DNA, 31 bp, Homo sapiens
  chr1:16464268-16464299
  hypo
ccgagccccagatggccgtcctccttaagcc

SEQ ID NO: 7919 - DNA, 71 bp, Homo sapiens
  chr1:16464369-16464440
  hypo
ggcagtacggaagctgcggctggttaccaggcctgagacgccattgcgggcctccacggtgaaggtgtagt

SEQ ID NO: 7920 - DNA, 31 bp, Homo sapiens
  chr1:16464442-16464473
  hypo
atgtggggctccaggtcgctcactgtcacac

SEQ ID NO: 7921 - DNA, 90 bp, Homo sapiens
  chr1:16464485-16464575
  hypo
gtccgtgaggaggctccgagtagcgcacactggcctcacacggcccgcattccccagactcgggccagcactgttcgcaggtgacgctgt

SEQ ID NO: 7922 - DNA, 66 bp, Homo sapiens
  chr1:16464596-16464662
  hypo
cgctgtcctgagggggcgtccagcgcagctccaccttggcacccatgcccacggctgtgaggtagt

SEQ ID NO: 7923 - DNA, 31 bp, Homo sapiens
  chr1:16466962-16466993
  hypo
atacaggcactattagcgctggttccacttt

SEQ ID NO: 7924 - DNA, 229 bp, Homo sapiens; identical to SEQ ID NO: 125
  chr1:16482017-16482246
  hypo

SEQ ID NO: 7925 - DNA, 94 bp, Homo sapiens; identical to SEQ ID NO: 126
  chr1:16482252-16482346
  hypo

SEQ ID NO: 7926 - DNA, 86 bp, Homo sapiens; identical to SEQ ID NO: 127
  chr1:16482709-16482795
  hypo

SEQ ID NO: 7927 - DNA, 31 bp, Homo sapiens
  chr1:16534427-16534458
  hypo
ggagctggtaccttcccgggctgctccggtg

SEQ ID NO: 7928 - DNA, 74 bp, Homo sapiens
  chr1:16534519-16534593
  hypo
gccgggtcatcagctccgatgccgagaagcgcctccgctcaggaccttcgaggctcactcgggtggacccagac

SEQ ID NO: 7929 - DNA, 24 bp, Homo sapiens
  chr1:16557529-16557553
  hypo
gaaaggcattgcaggccgggcgca

SEQ ID NO: 7930 - DNA, 31 bp, Homo sapiens
  chr1:16724423-16724454
  hypo
ggtcctgttttctggtcgtgtgatcccaggg

SEQ ID NO: 7931 - DNA, 31 bp, Homo sapiens
  chr1:16817289-16817320
  hypo
aaaggggatcagtaggcgcttgcccaggggg

SEQ ID NO: 7932 - DNA, 31 bp, Homo sapiens
  chr1:16929974-16930005
  hypo
cacttccaggatccatcgggggccctccatt

SEQ ID NO: 7933 - DNA, 45 bp, Homo sapiens
  chr1:17270868-17270913
  hypo
gtcctgggcctcctaccgtctggacccctccgatgtcgggttttc

SEQ ID NO: 7934 - DNA, 61 bp, Homo sapiens
  chr1:17280803-17280864
  hypo
gatggagcggcagaaacgagatgcccagagccggcaggagcaggaccgggtagggcaggct

SEQ ID NO: 7935 - DNA, 36 bp, Homo sapiens
  chr1:17280906-17280942
  hypo
tgaggagcccccaccacggggcggcatggccctgtc

SEQ ID NO: 7936 - DNA, 31 bp, Homo sapiens
  chr1:17316303-17316334
  hypo
accagggagagcgagccgtgaggaaggagac

SEQ ID NO: 7937 - DNA, 20 bp, Homo sapiens
  chr1:17427170-17427190
  hypo
ttttgagacaaagtctcgct

SEQ ID NO: 7938 - DNA, 31 bp, Homo sapiens
  chr1:17546141-17546172
  hypo
cgagatgaggacagagcgatggtgtgcaaag

SEQ ID NO: 7939 - DNA, 56 bp, Homo sapiens
  chr1:17702233-17702289
  hypo
aaacagccagaacttccgtgtcgctgccatctacccacctacgcctgtctagtgcc

SEQ ID NO: 7940 - DNA, 31 bp, Homo sapiens
  chr1:17702299-17702330
  hypo
ctttgttactaattgacgcatctggtccaaa

SEQ ID NO: 7941 - DNA, 44 bp, Homo sapiens
  chr1:17702390-17702434
  hypo
taccaatgtaagaagccgccacccttccccgccctctagatcac

SEQ ID NO: 7942 - DNA, 60 bp, Homo sapiens
  chr1:17738622-17738682
  hypo
ccccaaaggtcggtgacggaccccagctgatggtgctctcatcggcggccacaatgatgc

SEQ ID NO: 7943 - DNA, 31 bp, Homo sapiens
  chr1:17738727-17738758
  hypo
cccagacctgcacccacgcagctatggctca

SEQ ID NO: 7944 - DNA, 31 bp, Homo sapiens
  chr1:17738776-17738807
  hypo
gccacttttcccttggcgtactcattccaag

SEQ ID NO: 7945 - DNA, 58 bp, Homo sapiens
  chr1:17813198-17813256
  hypo
ccgccgctatatgtttcgtccctgcaaaattcgtatgttgaaacgtaccccacaatgt

SEQ ID NO: 7946 - DNA, 31 bp, Homo sapiens
  chr1:17813377-17813408
  hypo
ggacacacagaggaagcgccatctatcaacc

SEQ ID NO: 7947 - DNA, 31 bp, Homo sapiens
  chr1:17813416-17813447
  hypo
ggcccttggcagacaccgaacctaccaatgc

SEQ ID NO: 7948 - DNA, 31 bp, Homo sapiens
  chr1:17813455-17813486
  hypo
tggacttttcagctgccggaacagtgagaaa

SEQ ID NO: 7949 - DNA, 31 bp, Homo sapiens
  chr1:17813509-17813540
  hypo
tttgttatagcagagtcgattataactgagc

SEQ ID NO: 7950 - DNA, 31 bp, Homo sapiens
  chr1:17813549-17813580
  hypo
tgctggtcccaggtcacgtatctgggtgatg

SEQ ID NO: 7951 - DNA, 31 bp, Homo sapiens
  chr1:17813582-17813613
  hypo
aaagttaggaataagacgttgttggcaagac

SEQ ID NO: 7952 - DNA, 87 bp, Homo sapiens; identical to SEQ ID NO: 129
  chr1:17865913-17866000
  hypo

SEQ ID NO: 7953 - DNA, 118 bp, Homo sapiens; identical to SEQ ID NO: 130
  chr1:17866005-17866123
  hypo

SEQ ID NO: 7954 - DNA, 31 bp, Homo sapiens
  chr1:17897918-17897949
  hypo
gagcatgggcactcctcggggaagtcttgta

SEQ ID NO: 7955 - DNA, 31 bp, Homo sapiens
  chr1:17919149-17919180
  hypo
ggcaggtcagcaaggccggagtgggtccgca

SEQ ID NO: 7956 - DNA, 31 bp, Homo sapiens
  chr1:17919332-17919363
  hypo
gaggcatggcagataccggctctccgcccat

SEQ ID NO: 7957 - DNA, 31 bp, Homo sapiens
  chr1:17933062-17933093
  hypo
acaggtgtgagccaccgcgaccagtcagatt

SEQ ID NO: 7958 - DNA, 52 bp, Homo sapiens
  chr1:17934560-17934612
  hypo
ccaggcctaggactcacgtctgggtcccagggattcccgggtatgtgtggtg

SEQ ID NO: 7959 - DNA, 31 bp, Homo sapiens
  chr1:17939405-17939436
  hypo
ctggggtgccgcatcccgcctgcccgagctg

SEQ ID NO: 7960 - DNA, 43 bp, Homo sapiens
  chr1:17949468-17949511
  hypo
ctcaccccgccctccccggcaggactaccgcaaccccctgatg

SEQ ID NO: 7961 - DNA, 31 bp, Homo sapiens
  chr1:17973810-17973841
  hypo
ttctggctgtgctcagcgattgtgaagacta

SEQ ID NO: 7962 - DNA, 31 bp, Homo sapiens
  chr1:17992215-17992246
  hypo
aacagaaccaatggaacgtatgtgagtgtgt

SEQ ID NO: 7963 - DNA, 36 bp, Homo sapiens
  chr1:17997212-17997248
  hypo
tatgctattggatctccgcaacgctgaggagtgacc

SEQ ID NO: 7964 - DNA, 55 bp, Homo sapiens
  chr1:18006380-18006435
  hypo
gtgatctctgggcccacgactgtgtctcccagggccagctcggtggtgactgggc

SEQ ID NO: 7965 - DNA, 31 bp, Homo sapiens
  chr1:18006612-18006643
  hypo
ccacccggggttggttcgctctcttttcata

SEQ ID NO: 7966 - DNA, 57 bp, Homo sapiens
  chr1:18021387-18021444
  hypo
gttcccccaatgcatccgtatggcagccccactttacacaggcggaaactgaggctg

SEQ ID NO: 7967 - DNA, 267 bp, Homo sapiens
  chr1:18023465-18023732
  hypo
aggaggacaagccagacgggcaggcacacgagcccatgcccgatagccacgtgggccgagagctgacccgcaagaagggcatcctcttgcagtaccgcctgcgctccaccgcacacctcccgggcccgctgctctccatgcgggagccggcgcctgctgatggcgcagctttggagcacagcgaggaggacggctccatttacgagatggccgacgaccccgacatctgggtgcgcagccggccctgcgcccgcgacgcccaccgca

SEQ ID NO: 7968 - DNA, 102 bp, Homo sapiens
  chr1:18023744-18023846
  hypo
ctgtggccatcatctccggcgggcagggctaccgcaactttggcagcgctctgggcagcagtgggaggcaggccccgtgtggggagacggacagcaccctcc

SEQ ID NO: 7969 - DNA, 31 bp, Homo sapiens
  chr1:19202745-19202776
  hypo
tgtgtgtgctgtgctccggtgggattgtcct

SEQ ID NO: 7970 - DNA, 31 bp, Homo sapiens
  chr1:19491253-19491284
  hypo
ggttgctagggaaacacgacagaaatgtagt

SEQ ID NO: 7971 - DNA, 31 bp, Homo sapiens
  chr1:19491455-19491486
  hypo
agagatgcaacaggctcgggttagggctctt

SEQ ID NO: 7972 - DNA, 115 bp, Homo sapiens; identical to SEQ ID NO: 136
  chr1:19639207-19639322
  hypo

SEQ ID NO: 7973 - DNA, 35 bp, Homo sapiens; identical to SEQ ID NO: 137
  chr1:19639477-19639512
  hypo

SEQ ID NO: 7974 - DNA, 31 bp, Homo sapiens
  chr1:19692344-19692375
  hypo
aaagaaaagatggaaacgcccacagccttga

SEQ ID NO: 7975 - DNA, 18 bp, Homo sapiens
  chr1:19980864-19980882
  hypo
cagcgtgggtgaccgagt

SEQ ID NO: 7976 - DNA, 31 bp, Homo sapiens
  chr1:19984081-19984112
  hypo
cagaaacaggaggctccggcccacaggtttc

SEQ ID NO: 7977 - DNA, 31 bp, Homo sapiens
  chr1:19984406-19984437
  hypo
agaaatgttagtgccccgcactgtgccccaa

SEQ ID NO: 7978 - DNA, 31 bp, Homo sapiens
  chr1:19984767-19984798
  hypo
tgcccagcactgtctgcgtctgctcttctgt

SEQ ID NO: 7979 - DNA, 72 bp, Homo sapiens
  chr1:20230246-20230318
  hypo
atgagtcatgctcatccgtgactgtccagctgggacgggagcttcagtacctctaagcgtgctgatgatcaa

SEQ ID NO: 7980 - DNA, 90 bp, Homo sapiens
  chr1:20230356-20230446
  hypo
tcttcaagaccagcaccgtttttgtgcaaaagttcaccaggtgcgagtatagaggatcgttttctgttaagctcacggctctgaaaatca

SEQ ID NO: 7981 - DNA, 35 bp, Homo sapiens
  chr1:20554749-20554784
  hypo
gtctaagattctaatccgggcgacatggttctaga

SEQ ID NO: 7982 - DNA, 31 bp, Homo sapiens
  chr1:20554845-20554876
  hypo
aggatatggagatgtccgccagggctggagt

SEQ ID NO: 7983 - DNA, 31 bp, Homo sapiens
  chr1:20554882-20554913
  hypo
gaaacagatcctgagacggagacttgcatat

SEQ ID NO: 7984 - DNA, 31 bp, Homo sapiens
  chr1:20554918-20554949
  hypo
agttcattggcaagtgcgctccagatcacac

SEQ ID NO: 7985 - DNA, 35 bp, Homo sapiens
  chr1:20680359-20680394
  hypo
agtgtccctcaccacccgcccgtctgagtccaaga

SEQ ID NO: 7986 - DNA, 31 bp, Homo sapiens
  chr1:20802147-20802178
  hypo
cacaagagcgagacttcgtctcaaaaaaaaa

SEQ ID NO: 7987 - DNA, 37 bp, Homo sapiens; identical to SEQ ID NO: 145
  chr1:20812695-20812732
  hypo

SEQ ID NO: 7988 - DNA, 31 bp, Homo sapiens
  chr1:20920112-20920143
  hypo
ctggaagtacagtggcgcgagcctagttcac

SEQ ID NO: 7989 - DNA, 31 bp, Homo sapiens; identical to SEQ ID NO: 147
  chr1:20959848-20959879
  hypo

SEQ ID NO: 7990 - DNA, 21 bp, Homo sapiens
  chr1:21020041-21020062
  hypo
agccaccgcacccagcctcca

SEQ ID NO: 7991 - DNA, 31 bp, Homo sapiens
  chr1:21027557-21027588
  hypo
ggagcactgtgagtcacgatgggctttcctt

SEQ ID NO: 7992 - DNA, 31 bp, Homo sapiens
  chr1:21048390-21048421
  hypo
ttcaggcggcccatgtcgaggggacagaaga

SEQ ID NO: 7993 - DNA, 79 bp, Homo sapiens; identical to SEQ ID NO: 148
  chr1:21058206-21058285
  hypo

SEQ ID NO: 7994 - DNA, 50 bp, Homo sapiens; identical to SEQ ID NO: 149
  chr1:21058378-21058428
  hypo

SEQ ID NO: 7995 - DNA, 52 bp, Homo sapiens
  chr1:21568326-21568378
  hypo
aaatctccaaaaggagcgagggtctgatcgatctgaccggtcaggaagcctg

SEQ ID NO: 7996 - DNA, 31 bp, Homo sapiens
  chr1:21635872-21635903
  hypo
ggtgaatcacagtacccgtcccaccaagttg

SEQ ID NO: 7997 - DNA, 31 bp, Homo sapiens
  chr1:21635947-21635978
  hypo
cctggtatgcagtgagcgctggcttggttgg

SEQ ID NO: 7998 - DNA, 54 bp, Homo sapiens
  chr1:21635997-21636051
  hypo
aaggaatgagtcaatgcgtcggagctctgctctgtggcacgaggcccttcagga

SEQ ID NO: 7999 - DNA, 21 bp, Homo sapiens
  chr1:21636560-21636581
  hypo
tacaggcgtgagccactgtgc

SEQ ID NO: 8000 - DNA, 43 bp, Homo sapiens
  chr1:21786547-21786590
  hypo
aggctgtagatagaggcgtccacctggccgttgcgcggctgcg

SEQ ID NO: 8001 - DNA, 36 bp, Homo sapiens
  chr1:21848419-21848455
  hypo
tgaatgaatgaatactcgcagcgagttaacatttct

SEQ ID NO: 8002 - DNA, 31 bp, Homo sapiens
  chr1:21848503-21848534
  hypo
cctcagtttcatgtgtcgactccgtgagagg

SEQ ID NO: 8003 - DNA, 31 bp, Homo sapiens
  chr1:21882578-21882609
  hypo
ttctgttggagattcacgcggaagtgtttcc

SEQ ID NO: 8004 - DNA, 31 bp, Homo sapiens
  chr1:21889587-21889618
  hypo
ctctcccacctgcagacgtacaacaccaatg

SEQ ID NO: 8005 - DNA, 43 bp, Homo sapiens
  chr1:21889621-21889664
  hypo
aggtccctgacagtgccggcaccgccaccgcctacctgtgtgg

SEQ ID NO: 8006 - DNA, 43 bp, Homo sapiens
  chr1:21889669-21889712
  hypo
aggccaatgagggcaccgtgggggtaagcgcagccactgagcg

SEQ ID NO: 8007 - DNA, 31 bp, Homo sapiens
  chr1:21897870-21897901
  hypo
taggccaggtgcaggccgggtgcagtggctc

SEQ ID NO: 8008 - DNA, 31 bp, Homo sapiens
  chr1:21924747-21924778
  hypo
tggacaatgacctgcccgctgtcctccaagt

SEQ ID NO: 8009 - DNA, 31 bp, Homo sapiens
  chr1:21944016-21944047
  hypo
actgtaccccactgggcgccccaggacaccc

SEQ ID NO: 8010 - DNA, 40 bp, Homo sapiens
  chr1:21944051-21944091
  hypo
aactcagacctggagccgcttctgtcgtggctaaggggta

SEQ ID NO: 8011 - DNA, 34 bp, Homo sapiens
  chr1:21944149-21944183
  hypo
agccagacccagacagcgccgagacccaagtctc

SEQ ID NO: 8012 - DNA, 50 bp, Homo sapiens
  chr1:22166017-22166067
  hypo
ccagtggatggtgggcgcggggctgcctgtggagtcgagtggaagatgac

SEQ ID NO: 8013 - DNA, 85 bp, Homo sapiens
  chr1:22179017-22179102
  hypo
aagtgtgacgggaaggcggtggttactctgacaggtggagtcggcctgggcagggccctgcagccagctccggtgtgggccttct

SEQ ID NO: 8014 - DNA, 35 bp, Homo sapiens
  chr1:22422726-22422761
  hypo
taggcatgagtcactgcgcccggcctattcattca

SEQ ID NO: 8015 - DNA, 31 bp, Homo sapiens
  chr1:22498767-22498798
  hypo
ggagctatggacagaacggagagagtggggg

SEQ ID NO: 8016 - DNA, 31 bp, Homo sapiens
  chr1:22580524-22580555
  hypo
ggggacaggctcagtgcgcggaattcacagc

SEQ ID NO: 8017 - DNA, 31 bp, Homo sapiens
  chr1:22777374-22777405
  hypo
tggctggatttgggcacgtaactgtcaggga

SEQ ID NO: 8018 - DNA, 31 bp, Homo sapiens
  chr1:22777442-22777473
  hypo
tgttcagtgggccagcgcggaggtgactcag

SEQ ID NO: 8019 - DNA, 46 bp, Homo sapiens
  chr1:22777512-22777558
  hypo
aagggtggcaaggggacgcttcaacagggaacgcatagtgtgtgag

SEQ ID NO: 8020 - DNA, 31 bp, Homo sapiens
  chr1:22777610-22777641
  hypo
ccaaaattgggaggtgcgagaggcaggatca

SEQ ID NO: 8021 - DNA, 42 bp, Homo sapiens
  chr1:22777655-22777697
  hypo
tgccttcagcccactgcgccccaccagcgccaagcctgtccc

SEQ ID NO: 8022 - DNA, 31 bp, Homo sapiens
  chr1:22927345-22927376
  hypo
agggtgcagggagggacggctgagcccagcg

SEQ ID NO: 8023 - DNA, 81 bp, Homo sapiens
  chr1:22927401-22927482
  hypo
tgtggaggaggggtaccgcctgcccgcacccatgggctgcccccacgccctgcaccagctcatgctcgactgttggcacaa

SEQ ID NO: 8024 - DNA, 38 bp, Homo sapiens
  chr1:23021934-23021972
  hypo
tacaatacagtagccacgaggcacgtgtggtcatttaa

SEQ ID NO: 8025 - DNA, 31 bp, Homo sapiens
  chr1:23022010-23022041
  hypo
actgcacttgctcagtcgccctagtcatagt

SEQ ID NO: 8026 - DNA, 120 bp, Homo sapiens; identical to SEQ ID NO: 154
  chr1:23037774-23037894
  hypo

SEQ ID NO: 8027 - DNA, 39 bp, Homo sapiens; identical to SEQ ID NO: 155
  chr1:23038019-23038058
  hypo

SEQ ID NO: 8028 - DNA, 58 bp, Homo sapiens; identical to SEQ ID NO: 156
  chr1:23038236-23038294
  hypo

SEQ ID NO: 8029 - DNA, 46 bp, Homo sapiens
  chr1:23058381-23058427
  hypo
gcacagaagccagggccggaatgcttttgtgcggcctgtgccccag

SEQ ID NO: 8030 - DNA, 49 bp, Homo sapiens
  chr1:23063030-23063079
  hypo
aggagcctgggagcctcggtggggcctgcaggccgcggtctggttccca

SEQ ID NO: 8031 - DNA, 66 bp, Homo sapiens
  chr1:23063098-23063164
  hypo
cttcacagcttcagcacgaggccctttgagggtgggggcagcctccgcagcgcggcatgtttgcgc

SEQ ID NO: 8032 - DNA, 34 bp, Homo sapiens
  chr1:23063498-23063532
  hypo
ctgcgaatccagccatcggcgtgacgaggaatct

SEQ ID NO: 8033 - DNA, 86 bp, Homo sapiens
  chr1:23091395-23091481
  hypo
gatggggtttcaccctcgccagtttgggttcctccaagcaggggctgcggttggggcagatgcacgggaggcgctcagagagggag

SEQ ID NO: 8034 - DNA, 31 bp, Homo sapiens
  chr1:23111047-23111078
  hypo
gcagcagcatccccagcgtgcctggctcctg

SEQ ID NO: 8035 - DNA, 31 bp, Homo sapiens
  chr1:23111106-23111137
  hypo
gaggctgactttgactcggccaccaagacct

SEQ ID NO: 8036 - DNA, 34 bp, Homo sapiens
  chr1:23111170-23111204
  hypo
tggataccattgcagccgacgagagcttctccca

SEQ ID NO: 8037 - DNA, 36 bp, Homo sapiens
  chr1:23111252-23111288
  hypo
cttcggacctgtgtcccgcagcggcttctacctggc

SEQ ID NO: 8038 - DNA, 62 bp, Homo sapiens
  chr1:23111305-23111367
  hypo
gctgcatgtccctcatcgccgtgcgtgtcttctaccgcaagtgcccccgcatcatccagaat

SEQ ID NO: 8039 - DNA, 31 bp, Homo sapiens
  chr1:23162008-23162039
  hypo
aagcacattttatgcacgagtagacatgcat

SEQ ID NO: 8040 - DNA, 76 bp, Homo sapiens
  chr1:23162106-23162182
  hypo
tggggttgtgagtgaacgagtccatggtgctccgtgcaatgcctagcccattgtaagtactcggaagtcagcttta

SEQ ID NO: 8041 - DNA, 31 bp, Homo sapiens
  chr1:23162192-23162223
  hypo
gaatgggtctggagcacggtaaggggtacct

SEQ ID NO: 8042 - DNA, 31 bp, Homo sapiens
  chr1:23189581-23189612
  hypo
ctgtcccatcaacagccggaccacttctgaa

SEQ ID NO: 8043 - DNA, 36 bp, Homo sapiens
  chr1:23191505-23191541
  hypo
ccggggtgcctgcacccgctgcggggacaatgtaca

SEQ ID NO: 8044 - DNA, 41 bp, Homo sapiens
  chr1:23191647-23191688
  hypo
gaccagagccccttctcgcctcagttcgcctctgtgaacat

SEQ ID NO: 8045 - DNA, 31 bp, Homo sapiens
  chr1:23191818-23191849
  hypo
aggcttttcatgtgatcggtccacctgggag

SEQ ID NO: 8046 - DNA, 76 bp, Homo sapiens
  chr1:23201491-23201567
  hypo
agtctccacaagcagacgggctacaactctgcgttcctcaaactttcttagccacagaatacgcagtgccacccta

SEQ ID NO: 8047 - DNA, 47 bp, Homo sapiens
  chr1:23201656-23201703
  hypo
tttatttgcagaaattcggttgtgagaattatcgtcaggtcatccag

SEQ ID NO: 8048 - DNA, 59 bp, Homo sapiens
  chr1:23208895-23208954
  hypo
gacagcattaccctgtcgtggtcccagccggaccagcccaatggcgtgatcctggacta

SEQ ID NO: 8049 - DNA, 31 bp, Homo sapiens
  chr1:23209044-23209075
  hypo
gggagttctgccccaccgcaagatgagacgc

SEQ ID NO: 8050 - DNA, 31 bp, Homo sapiens
  chr1:23270401-23270432
  hypo
tatacagatgtagatccgacagtcctaagaa

SEQ ID NO: 8051 - DNA, 31 bp, Homo sapiens
  chr1:23270450-23270481
  hypo
gaactattttgtaatacgcagatgatatctt

SEQ ID NO: 8052 - DNA, 31 bp, Homo sapiens; identical to SEQ ID NO: 158
  chr1:23346339-23346370
  hypo

SEQ ID NO: 8053 - DNA, 31 bp, Homo sapiens
  chr1:23479365-23479396
  hypo
ttttcttctttctctacgttattaagtccca

SEQ ID NO: 8054 - DNA, 47 bp, Homo sapiens; identical to SEQ ID NO: 159
  chr1:23543644-23543691
  hypo

SEQ ID NO: 8055 - DNA, 43 bp, Homo sapiens
  chr1:23693472-23693515
  hypo
ctaagtcattttgacacgatctcaaaaacgtggaggcaaagaa

SEQ ID NO: 8056 - DNA, 128 bp, Homo sapiens
  chr1:23693559-23693687
  hypo
ctcctgcataacatcccggtaaaggtccctctgtgcagcgtccagaggtctccattcttcccgggtgagatacatggccatatcttcaaacgtcacaggtgcctgaaatcacacgatacttccctact

SEQ ID NO: 8057 - DNA, 31 bp, Homo sapiens
  chr1:23693909-23693940
  hypo
tatctggcacttgcatcgctccataccttta

SEQ ID NO: 8058 - DNA, 31 bp, Homo sapiens
  chr1:23693993-23694024
  hypo
ctactctttaaggtcccgctgcagtactaac

SEQ ID NO: 8059 - DNA, 31 bp, Homo sapiens
  chr1:23694037-23694068
  hypo
cccctacccctctgcacggctccactcccct

SEQ ID NO: 8060 - DNA, 34 bp, Homo sapiens
  chr1:23694077-23694111
  hypo
cagatagacttaatcacgccgacttcttgggagt

SEQ ID NO: 8061 - DNA, 31 bp, Homo sapiens
  chr1:23705731-23705762
  hypo
tctgtgagaggattttcgatctttccaagaa

SEQ ID NO: 8062 - DNA, 20 bp, Homo sapiens
  chr1:23714649-23714669
  hypo
aaggagggtggctgacgcga

SEQ ID NO: 8063 - DNA, 31 bp, Homo sapiens
  chr1:23768672-23768703
  hypo
acctacttgtgctgggcgtggaagaacttga

SEQ ID NO: 8064 - DNA, 31 bp, Homo sapiens
  chr1:23768732-23768763
  hypo
ttcatctggctctccccggctttgagcagat

SEQ ID NO: 8065 - DNA, 62 bp, Homo sapiens
  chr1:23768772-23768834
  hypo
agggcagggcaagatacgtgatgtgagctgaagcagaatcctgggaacgaggggctgcagtc

SEQ ID NO: 8066 - DNA, 31 bp, Homo sapiens
  chr1:23768845-23768876
  hypo
ctaatcctcctggctgcgactgggccttggt

SEQ ID NO: 8067 - DNA, 31 bp, Homo sapiens; identical to SEQ ID NO: 161
  chr1:23857852-23857883
  hypo

SEQ ID NO: 8068 - DNA, 58 bp, Homo sapiens
  chr1:24017559-24017617
  hypo
tgcctgtcttcaagctcgggactcttaaaccaccactcctttccgtttgtataaattc

SEQ ID NO: 8069 - DNA, 29 bp, Homo sapiens
  chr1:24017887-24017916
  hypo
acacagcgaggctccgtctcaaaaaataa

SEQ ID NO: 8070 - DNA, 34 bp, Homo sapiens
  chr1:24119110-24119144
  hypo
tggttttgctcttgaccgccgccccgatgtatgc

SEQ ID NO: 8071 - DNA, 31 bp, Homo sapiens; identical to SEQ ID NO: 165
  chr1:24126678-24126709
  hypo

SEQ ID NO: 8072 - DNA, 31 bp, Homo sapiens
  chr1:24228243-24228274
  hypo
ttgagctcaatcttcacgctgtactcagcct

SEQ ID NO: 8073 - DNA, 18 bp, Homo sapiens
  chr1:24246048-24246066
  hypo
tatttattttttaagacg

SEQ ID NO: 8074 - DNA, 31 bp, Homo sapiens
  chr1:24424242-24424273
  hypo
aaggcccccagggaagcgggagtctccaggg

SEQ ID NO: 8075 - DNA, 37 bp, Homo sapiens
  chr1:24424432-24424469
  hypo
aaggaggaggcctggccgtgggcgttcttcactcgca

SEQ ID NO: 8076 - DNA, 31 bp, Homo sapiens
  chr1:24424480-24424511
  hypo
gctgagtcctcaatggcgcatctgaaaagga

SEQ ID NO: 8077 - DNA, 33 bp, Homo sapiens
  chr1:24683005-24683038
  hypo
ggcgtgagccaccgtgtccggccacatttatct

SEQ ID NO: 8078 - DNA, 31 bp, Homo sapiens
  chr1:24701523-24701554
  hypo
gggcacacaagaaagtcgtatcatttaagat

SEQ ID NO: 8079 - DNA, 31 bp, Homo sapiens
  chr1:24877032-24877063
  hypo
gtaattactctttgtgcgtgtgcatgtgcgt

SEQ ID NO: 8080 - DNA, 163 bp, Homo sapiens; identical to SEQ ID NO: 170
  chr1:25255920-25256083
  hypo

SEQ ID NO: 8081 - DNA, 590 bp, Homo sapiens; identical to SEQ ID NO: 171
  chr1:25256156-25256746
  hypo

SEQ ID NO: 8082 - DNA, 73 bp, Homo sapiens; identical to SEQ ID NO: 172
  chr1:25256750-25256823
  hypo

SEQ ID NO: 8083 - DNA, 118 bp, Homo sapiens; identical to SEQ ID NO: 173
  chr1:25257156-25257274
  hypo

SEQ ID NO: 8084 - DNA, 31 bp, Homo sapiens
  chr1:25396319-25396350
  hypo
gtggctggcctaaactcgtctcttgaaggga

SEQ ID NO: 8085 - DNA, 31 bp, Homo sapiens
  chr1:25396369-25396400
  hypo
gggcatagttttaaaccgccatcttccttta

SEQ ID NO: 8086 - DNA, 31 bp, Homo sapiens
  chr1:25396422-25396453
  hypo
cccagagatgccttcccggacatgtctgttt

SEQ ID NO: 8087 - DNA, 51 bp, Homo sapiens
  chr1:25397930-25397981
  hypo
ttctccctctgctccacggatacatgctctcacttgcgctcccaaaccatc

SEQ ID NO: 8088 - DNA, 31 bp, Homo sapiens
  chr1:25398024-25398055
  hypo
tggagaaactgaggcccggaacagtcatcag

SEQ ID NO: 8089 - DNA, 47 bp, Homo sapiens
  chr1:25398075-25398122
  hypo
gaggagctgctgggaccggaatccaaggttcccgctgctcccaaatt

SEQ ID NO: 8090 - DNA, 58 bp, Homo sapiens
  chr1:25510192-25510250
  hypo
ctccaccctttcttgccgcagagtcagcttgctctcctgagaccgggttccagttatc

SEQ ID NO: 8091 - DNA, 44 bp, Homo sapiens
  chr1:25510285-25510329
  hypo
gggccagggctctccacgaggggtcttcacgtggtcagggctgc

SEQ ID NO: 8092 - DNA, 31 bp, Homo sapiens
  chr1:25510354-25510385
  hypo
caggcagtccagccccgcggacctgcccatg

SEQ ID NO: 8093 - DNA, 55 bp, Homo sapiens
  chr1:25718493-25718548
  hypo
cagacaaactgggtatcgttgctctctgatcattatcctccgttcccttgggtag

SEQ ID NO: 8094 - DNA, 37 bp, Homo sapiens
  chr1:25718576-25718613
  hypo
agcccaaaataggctgcgaacacgtagaagtgcctca

SEQ ID NO: 8095 - DNA, 31 bp, Homo sapiens
  chr1:25718648-25718679
  hypo
taagagcagtgagtgtcggcatcctctgccc

SEQ ID NO: 8096 - DNA, 62 bp, Homo sapiens; identical to SEQ ID NO: 174
  chr1:25870617-25870679
  hypo

SEQ ID NO: 8097 - DNA, 81 bp, Homo sapiens; identical to SEQ ID NO: 175
  chr1:25870705-25870786
  hypo

SEQ ID NO: 8098 - DNA, 31 bp, Homo sapiens
  chr1:26104541-26104572
  hypo
tctctgtgccctcccacgccccttctccctg

SEQ ID NO: 8099 - DNA, 31 bp, Homo sapiens
  chr1:26141989-26142020
  hypo
cctgggggcccccctccgccccacttgcctc

SEQ ID NO: 8100 - DNA, 33 bp, Homo sapiens
  chr1:26336890-26336923
  hypo
tttttattttttgagtcggagtctcgttctgtt

SEQ ID NO: 8101 - DNA, 8 bp, Homo sapiens
  chr1:26634462-26634470
  hypo
atttacag

SEQ ID NO: 8102 - DNA, 31 bp, Homo sapiens
  chr1:26670608-26670639
  hypo
cgctggagcttctcatcgtcactcagatagg

SEQ ID NO: 8103 - DNA, 31 bp, Homo sapiens
  chr1:26670686-26670717
  hypo
ggcacctcctggggtccggggcccagcaccc

SEQ ID NO: 8104 - DNA, 36 bp, Homo sapiens
  chr1:26670735-26670771
  hypo
cctcaatggcaggcagcgtggcgtacatggacaggt

SEQ ID NO: 8105 - DNA, 31 bp, Homo sapiens
  chr1:26670772-26670803
  hypo
ggaggagcgaggggctcgtggcagccggtga

SEQ ID NO: 8106 - DNA, 41 bp, Homo sapiens; identical to SEQ ID NO: 179
  chr1:26855979-26856020
  hypo

SEQ ID NO: 8107 - DNA, 31 bp, Homo sapiens; identical to SEQ ID NO: 180
  chr1:26856055-26856086
  hypo

SEQ ID NO: 8108 - DNA, 69 bp, Homo sapiens
  chr1:26885363-26885432
  hypo
ccggcctgatggaagacgacggcaagcctcgtgccccgcaggcacccctgcactcggtggtacaggtga

SEQ ID NO: 8109 - DNA, 31 bp, Homo sapiens
  chr1:26969658-26969689
  hypo
aaaatttattacaggccgggtgtggtggctc

SEQ ID NO: 8110 - DNA, 24 bp, Homo sapiens
  chr1:27062068-27062092
  hypo
cacctcacccggcctgaaatccag

SEQ ID NO: 8111 - DNA, 95 bp, Homo sapiens
  chr1:27183536-27183631
  hypo
ctctttgccccattcccgctccatgccggccagagtgtagaaagccataacgcagccatcagcacaataatgtgactctacgctgatatgctccc

SEQ ID NO: 8112 - DNA, 81 bp, Homo sapiens
  chr1:27189930-27190011
  hypo
gaaggggcccgaggtgcgtgagtaccgggagaaggtggagactgagctccagggcgtgtgcgacaccgtgctgggcctgct

SEQ ID NO: 8113 - DNA, 104 bp, Homo sapiens
  chr1:27190174-27190278
  hypo
agcaagaaggagatgccgcccaccaaccccatccgcctgggcctggccctgaacttttccgtcttccactacgagatcgccaacagccccgaggaggccatctc

SEQ ID NO: 8114 - DNA, 118 bp, Homo sapiens; identical to SEQ ID NO: 182
  chr1:27286496-27286614
  hypo

SEQ ID NO: 8115 - DNA, 44 bp, Homo sapiens
  chr1:27427839-27427883
  hypo
tgcacaccccacctttcgtatatgcagggcgcttgctccccctc

SEQ ID NO: 8116 - DNA, 31 bp, Homo sapiens
  chr1:27427888-27427919
  hypo
tgcctgtgtgggcacccgtactggcccctca

SEQ ID NO: 8117 - DNA, 31 bp, Homo sapiens
  chr1:27428622-27428653
  hypo
tggggcaatagggcatcggttaggtccccaa

SEQ ID NO: 8118 - DNA, 31 bp, Homo sapiens
  chr1:27480393-27480424
  hypo
acagcctcaaatggtgcgagatgaggcaaga

SEQ ID NO: 8119 - DNA, 31 bp, Homo sapiens
  chr1:27480526-27480557
  hypo
cgcacgtgtgtgtagtcgatgcccaggactg

SEQ ID NO: 8120 - DNA, 21 bp, Homo sapiens
  chr1:27494045-27494066
  hypo
agccaccgtgcccggctgtac

SEQ ID NO: 8121 - DNA, 31 bp, Homo sapiens
  chr1:27632598-27632629
  hypo
ctccccctcccctatacgtgtaccctggtgc

SEQ ID NO: 8122 - DNA, 28 bp, Homo sapiens
  chr1:27648199-27648227
  hypo
agagaaaaaattccgcctcagaaaaaaa

SEQ ID NO: 8123 - DNA, 31 bp, Homo sapiens
  chr1:27684980-27685011
  hypo
cccagcagtgtctgggcgctggctcggaggc

SEQ ID NO: 8124 - DNA, 19 bp, Homo sapiens
  chr1:27782814-27782833
  hypo
agagcgagactctaaaaaa

SEQ ID NO: 8125 - DNA, 31 bp, Homo sapiens
  chr1:27798553-27798584
  hypo
gaaatcagggccaggcgcggtggcttatgcc

SEQ ID NO: 8126 - DNA, 12 bp, Homo sapiens
  chr1:27819651-27819663
  hypo
tttttggagaca

SEQ ID NO: 8127 - DNA, 31 bp, Homo sapiens
  chr1:27844780-27844811
  hypo
cacctgcctgcctcgtcgactggactctggc

SEQ ID NO: 8128 - DNA, 41 bp, Homo sapiens
  chr1:27844877-27844918
  hypo
agcctcaatccatgatcggtagggaacgaatgaatggctaa

SEQ ID NO: 8129 - DNA, 31 bp, Homo sapiens
  chr1:27844949-27844980
  hypo
aaagtgacagggtctgcggtggcagcgagga

SEQ ID NO: 8130 - DNA, 31 bp, Homo sapiens
  chr1:27875900-27875931
  hypo
gggtccgccccagccccgctgctacccactg

SEQ ID NO: 8131 - DNA, 119 bp, Homo sapiens
  chr1:27876084-27876203
  hypo
catccgaatcgagcagcgagcgaaagtagccggtgaagaggttttggcgctcctggctgagctcggtctggcctgagggtgcacccgtgctgtagtagctgccacggcctgaggctcca

SEQ ID NO: 8132 - DNA, 74 bp, Homo sapiens
  chr1:27876214-27876288
  hypo
agtggaggcaaaggcccgggcctcggtcccctgaaacccacagtttcggccagcttgtccgcctgggtgcccat

SEQ ID NO: 8133 - DNA, 49 bp, Homo sapiens; identical to SEQ ID NO: 186
  chr1:27902441-27902490
  hypo

SEQ ID NO: 8134 - DNA, 54 bp, Homo sapiens
  chr1:28293350-28293404
  hypo
ggctgagggccgcacccgaggccgggccatcatccacttcgccttcctcctgag

SEQ ID NO: 8135 - DNA, 31 bp, Homo sapiens
  chr1:28293442-28293473
  hypo
gctcctggctgcccagcgggattccactgca

SEQ ID NO: 8136 - DNA, 18 bp, Homo sapiens
  chr1:28417246-28417264
  hypo
gcccggcccccacaatct

SEQ ID NO: 8137 - DNA, 31 bp, Homo sapiens
  chr1:28663348-28663379
  hypo
gtctcactgttgtccacgctggagtgcagtg

SEQ ID NO: 8138 - DNA, 28 bp, Homo sapiens
  chr1:28678501-28678529
  hypo
ttttttttttgagtctcgcactctagcc

SEQ ID NO: 8139 - DNA, 31 bp, Homo sapiens
  chr1:28853680-28853711
  hypo
aatggcactcacatgccgggcaactgatgct

SEQ ID NO: 8140 - DNA, 31 bp, Homo sapiens
  chr1:28853719-28853750
  hypo
ccttcccacagcagccgcgatcttcagtgca

SEQ ID NO: 8141 - DNA, 31 bp, Homo sapiens
  chr1:28853773-28853804
  hypo
cagtgtctgtctctttcgcccaggctaaagt

SEQ ID NO: 8142 - DNA, 39 bp, Homo sapiens
  chr1:28854233-28854272
  hypo
tacatgtggccaggcacgatggctcacgcctgtaatccc

SEQ ID NO: 8143 - DNA, 31 bp, Homo sapiens
  chr1:28867211-28867242
  hypo
aaaaggcttactgagccgcttgtgtattgtt

SEQ ID NO: 8144 - DNA, 46 bp, Homo sapiens; identical to SEQ ID NO: 190
  chr1:28879901-28879947
  hypo

SEQ ID NO: 8145 - DNA, 31 bp, Homo sapiens; identical to SEQ ID NO: 191
  chr1:28879959-28879990
  hypo

SEQ ID NO: 8146 - DNA, 31 bp, Homo sapiens
  chr1:28881387-28881418
  hypo
agtcaggacttgaattcgagtctatcctgaa

SEQ ID NO: 8147 - DNA, 31 bp, Homo sapiens
  chr1:28986971-28987002
  hypo
gacacagggcagggtgcggtggctcacacct

SEQ ID NO: 8148 - DNA, 35 bp, Homo sapiens
  chr1:29007852-29007887
  hypo
ctgggcaacggagcgagaccgcgtctcaaaaaaaa

SEQ ID NO: 8149 - DNA, 31 bp, Homo sapiens
  chr1:29047658-29047689
  hypo
ttttttttttgtgaggcggagtctgactccg

SEQ ID NO: 8150 - DNA, 30 bp, Homo sapiens
  chr1:29061398-29061428
  hypo
taaagtttatcttcacgacaaacctgttgg

SEQ ID NO: 8151 - DNA, 18 bp, Homo sapiens
  chr1:29115684-29115702
  hypo
aaataaaatccaagcccg

SEQ ID NO: 8152 - DNA, 47 bp, Homo sapiens
  chr1:29116012-29116059
  hypo
gcatgaccatcaagaccgtgtggtctggccgacgcctgacacctctc

SEQ ID NO: 8153 - DNA, 31 bp, Homo sapiens
  chr1:29152170-29152201
  hypo
caggcgtgagccacagcgcccagcccaagaa

SEQ ID NO: 8154 - DNA, 31 bp, Homo sapiens
  chr1:29513700-29513731
  hypo
ggcacacacaggttaacgcaagagcttttct

SEQ ID NO: 8155 - DNA, 31 bp, Homo sapiens
  chr1:29516492-29516523
  hypo
gcttgaataaaacagacgcttatttctcatg

SEQ ID NO: 8156 - DNA, 55 bp, Homo sapiens
  chr1:29605968-29606023
  hypo
tcagctaccagagcatcgagtcatcagacccggcagtgaacgtgccaggcccacg

SEQ ID NO: 8157 - DNA, 31 bp, Homo sapiens
  chr1:29644272-29644303
  hypo
tcaccccgccgctggacgtggaggagtgcag

SEQ ID NO: 8158 - DNA, 31 bp, Homo sapiens
  chr1:29645535-29645566
  hypo
ccacccagggggcttccgggtgtcagctgaa

SEQ ID NO: 8159 - DNA, 30 bp, Homo sapiens
  chr1:30092556-30092586
  hypo
tattatattattgagtcgtaagtattcttt

SEQ ID NO: 8160 - DNA, 31 bp, Homo sapiens
  chr1:30180748-30180779
  hypo
caccctgctctggctacgcagagctgcctac

SEQ ID NO: 8161 - DNA, 31 bp, Homo sapiens
  chr1:30180804-30180835
  hypo
ctttctctgccagtgccgtgcctgtgcctgg

SEQ ID NO: 8162 - DNA, 31 bp, Homo sapiens
  chr1:31189130-31189161
  hypo
agaccaggtcagtggccgagctgccaccacc

SEQ ID NO: 8163 - DNA, 31 bp, Homo sapiens; identical to SEQ ID NO: 194
  chr1:31192286-31192317
  hypo

SEQ ID NO: 8164 - DNA, 31 bp, Homo sapiens
  chr1:31237673-31237704
  hypo
aaaaccttttgacaaacgaggagatcaacta

SEQ ID NO: 8165 - DNA, 31 bp, Homo sapiens
  chr1:31239982-31240013
  hypo
tacaggcatgagccaccgggcctagccttct

SEQ ID NO: 8166 - DNA, 31 bp, Homo sapiens
  chr1:31240594-31240625
  hypo
tgcctgtaaagtaagtcgcaataatccctgg

SEQ ID NO: 8167 - DNA, 7 bp, Homo sapiens
  chr1:31240675-31240682
  hypo
cagagtc

SEQ ID NO: 8168 - DNA, 31 bp, Homo sapiens
  chr1:31260792-31260823
  hypo
gcctttccccagagcacgggactcctgtgtc

SEQ ID NO: 8169 - DNA, 52 bp, Homo sapiens
  chr1:31260829-31260881
  hypo
cacttccaggagttcacgcagctgagtgacggcatctcgaaatccacaggcc

SEQ ID NO: 8170 - DNA, 31 bp, Homo sapiens
  chr1:31347130-31347161
  hypo
ccccaagcctcacctacgagcacctccttcc

SEQ ID NO: 8171 - DNA, 31 bp, Homo sapiens
  chr1:31347269-31347300
  hypo
gagatgatgccttggccgcagcccctcccac

SEQ ID NO: 8172 - DNA, 31 bp, Homo sapiens
  chr1:31347384-31347415
  hypo
aacctctggctcatcccggattgtggtcagg

SEQ ID NO: 8173 - DNA, 78 bp, Homo sapiens
  chr1:31407297-31407375
  hypo
caaggaagggttgatccggtctagaaatcacctgcgcatgcttcccaggacacagagctgcatcgggtgtcacattcc

SEQ ID NO: 8174 - DNA, 34 bp, Homo sapiens
  chr1:31407442-31407476
  hypo
aaactcacctgtaaaacggcgtatgcaataatgc

SEQ ID NO: 8175 - DNA, 17 bp, Homo sapiens
  chr1:31563198-31563215
  hypo
agcgagactttgtctca

SEQ ID NO: 8176 - DNA, 31 bp, Homo sapiens
  chr1:31568455-31568486
  hypo
agacctcctgcctggacgcatgaggtctgca

SEQ ID NO: 8177 - DNA, 28 bp, Homo sapiens
  chr1:31606305-31606333
  hypo
cactgcaccccagcgtgggtgactgagc

SEQ ID NO: 8178 - DNA, 31 bp, Homo sapiens
  chr1:31623745-31623776
  hypo
agttcaattcccactgcgtacctttgaattt

SEQ ID NO: 8179 - DNA, 20 bp, Homo sapiens
  chr1:31627059-31627079
  hypo
ccaccgcgccctgccaagtt

SEQ ID NO: 8180 - DNA, 28 bp, Homo sapiens
  chr1:31631012-31631040
  hypo
aattaacaatatgaatcgttattcaatt

SEQ ID NO: 8181 - DNA, 31 bp, Homo sapiens
  chr1:31632165-31632196
  hypo
acagctccatgtctctcgttatccctcaatt

SEQ ID NO: 8182 - DNA, 31 bp, Homo sapiens
  chr1:31633839-31633870
  hypo
acactctggctctgggcgggaaaaaaggaca

SEQ ID NO: 8183 - DNA, 31 bp, Homo sapiens
  chr1:31639517-31639548
  hypo
cccacccaggagaggtcgctcctccctgtag

SEQ ID NO: 8184 - DNA, 31 bp, Homo sapiens
  chr1:31639549-31639580
  hypo
ccctgcagccaccagccgtgctgttaacagg

SEQ ID NO: 8185 - DNA, 38 bp, Homo sapiens
  chr1:31871813-31871851
  hypo
gtacacatgtgagccgctgcgcccggccagattttttt

SEQ ID NO: 8186 - DNA, 56 bp, Homo sapiens
  chr1:32050769-32050825
  hypo
ctaccccttctcgggccgtgaacgagacgaggctggccctgcgcccccctgtatga

SEQ ID NO: 8187 - DNA, 34 bp, Homo sapiens
  chr1:32139296-32139330
  hypo
gcccactcaagagaggcggcgtgacttgtctaag

SEQ ID NO: 8188 - DNA, 31 bp, Homo sapiens
  chr1:32139335-32139366
  hypo
tgggagcctggattggcgtgggcctgtccta

SEQ ID NO: 8189 - DNA, 31 bp, Homo sapiens
  chr1:32139429-32139460
  hypo
ctgggtcagcatgccccggggtgccatctga

SEQ ID NO: 8190 - DNA, 31 bp, Homo sapiens
  chr1:32139462-32139493
  hypo
ccttctccacactatgcgcactttctatttg

SEQ ID NO: 8191 - DNA, 39 bp, Homo sapiens
  chr1:32156855-32156894
  hypo
gtttccagggaccactcgctacagcgagatcttctaccc

SEQ ID NO: 8192 - DNA, 59 bp, Homo sapiens
  chr1:32156928-32156987
  hypo
agccttatcttccccccgttcattccctggccagggtgggagagcggtctctgagaaaa

SEQ ID NO: 8193 - DNA, 31 bp, Homo sapiens
  chr1:32157001-32157032
  hypo
gcaagggggtactcaccggggtcccaggcag

SEQ ID NO: 8194 - DNA, 31 bp, Homo sapiens
  chr1:32306490-32306521
  hypo
agtgggcatggaggcacggagcagatattct

SEQ ID NO: 8195 - DNA, 31 bp, Homo sapiens; identical to SEQ ID NO: 195
  chr1:32666346-32666377
  hypo

SEQ ID NO: 8196 - DNA, 40 bp, Homo sapiens
  chr1:32674988-32675028
  hypo
ctagcaagggaggtaacggcaagagcgtgtattcagtacc

SEQ ID NO: 8197 - DNA, 31 bp, Homo sapiens
  chr1:32705374-32705405
  hypo
aggaccccccgcctcccgccaacacatactc

SEQ ID NO: 8198 - DNA, 86 bp, Homo sapiens
  chr1:32705487-32705573
  hypo
aaccagccaggttaagcggccttggtctctgtgcctccgccagtcacgcgggcttgtttcgcggcctgggccgagagcgtgtccat

SEQ ID NO: 8199 - DNA, 77 bp, Homo sapiens
  chr1:32741467-32741544
  hypo
actcactgcgttctttcgtcgctttgtccatccattcattcattcaggatcgttttcactgtcggtccgggacttcg

SEQ ID NO: 8200 - DNA, 48 bp, Homo sapiens
  chr1:32751093-32751141
  hypo
ctttcacccatcaacccgtagggatgaccaacccggaggtgattcaga

SEQ ID NO: 8201 - DNA, 62 bp, Homo sapiens
  chr1:32827052-32827114
  hypo
gggctcccgcccatggcgaggtagacgtcgatgggcacgtgcagcagcgtcaggcagtggca

SEQ ID NO: 8202 - DNA, 31 bp, Homo sapiens; identical to SEQ ID NO: 197
  chr1:32852879-32852910
  hypo

SEQ ID NO: 8203 - DNA, 26 bp, Homo sapiens
  chr1:32852955-32852981
  hypo
tcttgagacagagtctcgctctcgtt

SEQ ID NO: 8204 - DNA, 37 bp, Homo sapiens; identical to SEQ ID NO: 199
  chr1:33005605-33005642
  hypo

SEQ ID NO: 8205 - DNA, 37 bp, Homo sapiens; identical to SEQ ID NO: 200
  chr1:33207543-33207580
  hypo

SEQ ID NO: 8206 - DNA, 31 bp, Homo sapiens
  chr1:33220941-33220972
  hypo
gtggtgggagaatctacgggtgtattcccag

SEQ ID NO: 8207 - DNA, 55 bp, Homo sapiens
  chr1:33220980-33221035
  hypo
acattcctagagattccgaaccggagcttgatgatctcatcgctccatggagggg

SEQ ID NO: 8208 - DNA, 57 bp, Homo sapiens
  chr1:33441502-33441559
  hypo
ggtttttttttttgagcgggagggtttcaatagattctgccccgcaagcttcccagc

SEQ ID NO: 8209 - DNA, 35 bp, Homo sapiens; identical to SEQ ID NO: 204
  chr1:33721671-33721706
  hypo

SEQ ID NO: 8210 - DNA, 31 bp, Homo sapiens
  chr1:33763442-33763473
  hypo
aataagattcctgcatcgtagtagctcagta

SEQ ID NO: 8211 - DNA, 31 bp, Homo sapiens
  chr1:33841564-33841595
  hypo
agtggataccaggtgacgactatgcagtata

SEQ ID NO: 8212 - DNA, 85 bp, Homo sapiens; identical to SEQ ID NO: 205
  chr1:33896550-33896635
  hypo

SEQ ID NO: 8213 - DNA, 31 bp, Homo sapiens; identical to SEQ ID NO: 207
  chr1:35208445-35208476
  hypo

SEQ ID NO: 8214 - DNA, 52 bp, Homo sapiens; identical to SEQ ID NO: 210
  chr1:35394613-35394665
  hypo

SEQ ID NO: 8215 - DNA, 49 bp, Homo sapiens; identical to SEQ ID NO: 211
  chr1:35394673-35394722
  hypo

SEQ ID NO: 8216 - DNA, 144 bp, Homo sapiens; identical to SEQ ID NO: 212
  chr1:35394731-35394875
  hypo

SEQ ID NO: 8217 - DNA, 133 bp, Homo sapiens; identical to SEQ ID NO: 213
  chr1:35394944-35395077
  hypo

SEQ ID NO: 8218 - DNA, 153 bp, Homo sapiens; identical to SEQ ID NO: 214
  chr1:35395184-35395337
  hypo

SEQ ID NO: 8219 - DNA, 288 bp, Homo sapiens; identical to SEQ ID NO: 215
  chr1:35395359-35395647
  hypo

SEQ ID NO: 8220 - DNA, 25 bp, Homo sapiens
  chr1:35544155-35544180
  hypo
ttttttttttttgagacgcagtctc

SEQ ID NO: 8221 - DNA, 23 bp, Homo sapiens
  chr1:35661112-35661135
  hypo
ttttttttttttgagacggagtc

SEQ ID NO: 8222 - DNA, 6 bp, Homo sapiens
  chr1:35664740-35664746
  hypo
ttctta

SEQ ID NO: 8223 - DNA, 41 bp, Homo sapiens
  chr1:35664815-35664856
  hypo
cagtgttctccccactcgccccgccccggctctttgcacag

SEQ ID NO: 8224 - DNA, 31 bp, Homo sapiens
  chr1:35664869-35664900
  hypo
atctttttttttccttcgctgctttatggaa

SEQ ID NO: 8225 - DNA, 31 bp, Homo sapiens
  chr1:36334780-36334811
  hypo
ggggaatgaatagggtcgttatattgattgt

SEQ ID NO: 8226 - DNA, 61 bp, Homo sapiens
  chr1:36563383-36563444
  hypo
acgttggtgcccttgacgtgcacatggtaagcaaagtagtagacgccgcccacagggcagg

SEQ ID NO: 8227 - DNA, 116 bp, Homo sapiens
  chr1:36563455-36563571
  hypo
gtggctgggttgtagccgctgtggccattgtagagagtccggtcaaatttcacgggcatgcccgaggcggggaagggcgaggtgagcaccgcagtgaaggccggtgtggcatgggc

SEQ ID NO: 8228 - DNA, 38 bp, Homo sapiens
  chr1:36774206-36774244
  hypo
ttttggattctaataccggttgagtatcgcttatccaa

SEQ ID NO: 8229 - DNA, 18 bp, Homo sapiens
  chr1:36774733-36774751
  hypo
aattttccacttaaggcg

SEQ ID NO: 8230 - DNA, 19 bp, Homo sapiens
  chr1:36845271-36845290
  hypo
cgcccggcctgggttgtag

SEQ ID NO: 8231 - DNA, 35 bp, Homo sapiens
  chr1:36845313-36845348
  hypo
tgtgttcccctcaggacgtacgacctcaacccaaa

SEQ ID NO: 8232 - DNA, 56 bp, Homo sapiens
  chr1:36857025-36857081
  hypo
tctctctccccacttgcgagggtatggtgacgttcccacagcgaaggccttccctc

SEQ ID NO: 8233 - DNA, 31 bp, Homo sapiens
  chr1:36857146-36857177
  hypo
cagttgtcagaggggccggaaaattcagaag

SEQ ID NO: 8234 - DNA, 31 bp, Homo sapiens
  chr1:36857181-36857212
  hypo
ctctgctaggaccctccgttctccctgaagg

SEQ ID NO: 8235 - DNA, 31 bp, Homo sapiens
  chr1:36881454-36881485
  hypo
actgataggacagatacgtttgaaatcacca

SEQ ID NO: 8236 - DNA, 31 bp, Homo sapiens
  chr1:36936976-36937007
  hypo
agcctttgaattgatgcgcttgacctctgtg

SEQ ID NO: 8237 - DNA, 34 bp, Homo sapiens
  chr1:36979462-36979496
  hypo
gtggtggtggcagcagcggcggtagagaagcagc

SEQ ID NO: 8238 - DNA, 31 bp, Homo sapiens
  chr1:36979514-36979545
  hypo
aatcctttacttccatcgaggagccaggacc

SEQ ID NO: 8239 - DNA, 55 bp, Homo sapiens
  chr1:36979558-36979613
  hypo
agggtcagctttccctcggcactcagggagcgagtgtgtgcgtgtgcacacccat

SEQ ID NO: 8240 - DNA, 38 bp, Homo sapiens
  chr1:38294271-38294309
  hypo
tggctgggaatgttctttttgaccggggtgctggttac

SEQ ID NO: 8241 - DNA, 31 bp, Homo sapiens
  chr1:38459550-38459581
  hypo
aaaaagtttgaaaaaacggaggctgggcatg

SEQ ID NO: 8242 - DNA, 59 bp, Homo sapiens; identical to SEQ ID NO: 229
  chr1:38510674-38510733
  hypo

SEQ ID NO: 8243 - DNA, 15 bp, Homo sapiens
  chr1:38510773-38510788
  hypo
cgaggggatgggggc

SEQ ID NO: 8244 - DNA, 37 bp, Homo sapiens
  chr1:39388384-39388421
  hypo
atttcctcatctctcccgctcacgtttatcttctgcc

SEQ ID NO: 8245 - DNA, 31 bp, Homo sapiens
  chr1:39416851-39416882
  hypo
tcacagcacatgtcagcgtcatgaagtctct

SEQ ID NO: 8246 - DNA, 31 bp, Homo sapiens
  chr1:40081627-40081658
  hypo
gctatgtaacaatgaccgtaaacctagtgct

SEQ ID NO: 8247 - DNA, 34 bp, Homo sapiens
  chr1:40117399-40117433
  hypo
cattaataaagaagttcgtaggccgagtgtggtg

SEQ ID NO: 8248 - DNA, 47 bp, Homo sapiens
  chr1:40349615-40349662
  hypo
acaggcatgcgccactgcgccagaccacctgccgtcttaaatggtag

SEQ ID NO: 8249 - DNA, 31 bp, Homo sapiens
  chr1:40349670-40349701
  hypo
cctatctaaatagatccgtccctattattct

SEQ ID NO: 8250 - DNA, 31 bp, Homo sapiens
  chr1:40409693-40409724
  hypo
caccaggcaatataggcgtattcattctgtt

SEQ ID NO: 8251 - DNA, 35 bp, Homo sapiens
  chr1:41116837-41116872
  hypo
acttggtttggaaacacggtcgttgcagatgtgac

SEQ ID NO: 8252 - DNA, 31 bp, Homo sapiens
  chr1:41292201-41292232
  hypo
ctttcccaccagctaccggaggccggcccca

SEQ ID NO: 8253 - DNA, 31 bp, Homo sapiens
  chr1:41304606-41304637
  hypo
cctcccgccaagtccccgccccacttggggg

SEQ ID NO: 8254 - DNA, 48 bp, Homo sapiens
  chr1:41967565-41967613
  hypo
gcccagccccaaaccacgggtaactagagacgccgggagcaggtggat

SEQ ID NO: 8255 - DNA, 39 bp, Homo sapiens
  chr1:41970957-41970996
  hypo
ttctcatggctcccttcgtcctcccgacccttaggactt

SEQ ID NO: 8256 - DNA, 31 bp, Homo sapiens
  chr1:41971060-41971091
  hypo
ccacagcagtgatggccgctgtgattgagta

SEQ ID NO: 8257 - DNA, 57 bp, Homo sapiens
  chr1:41971112-41971169
  hypo
tacaatgtgagctcctcgtggtggatctgtgtctgtcttgctcgctgttgtatcaat

SEQ ID NO: 8258 - DNA, 57 bp, Homo sapiens
  chr1:41976411-41976468
  hypo
gggtgcaggggctgtgcgtgggtgtgggctctgcaggtgccccggtcccatggggtg

SEQ ID NO: 8259 - DNA, 31 bp, Homo sapiens
  chr1:41976830-41976861
  hypo
cgggccaggatgtggccgtggaagtcatgga

SEQ ID NO: 8260 - DNA, 56 bp, Homo sapiens
  chr1:41979368-41979424
  hypo
agcctctgaaccctctcgtccttccgagtcctggaacaggtcgtcactggttcctg

SEQ ID NO: 8261 - DNA, 31 bp, Homo sapiens
  chr1:41979463-41979494
  hypo
ggccccactgcccacacggctgctcctctct

SEQ ID NO: 8262 - DNA, 31 bp, Homo sapiens
  chr1:41979520-41979551
  hypo
tgggcaaaatagccatcgcaagggcacaaga

SEQ ID NO: 8263 - DNA, 31 bp, Homo sapiens
  chr1:41981636-41981667
  hypo
ggagagtcaggaccagcgtctcctgatgtcc

SEQ ID NO: 8264 - DNA, 230 bp, Homo sapiens; identical to SEQ ID NO: 241
  chr1:41981772-41982002
  hypo

SEQ ID NO: 8265 - DNA, 34 bp, Homo sapiens
  chr1:41991668-41991702
  hypo
tgccctcacatactcacgccgcaccacctgcccc

SEQ ID NO: 8266 - DNA, 31 bp, Homo sapiens
  chr1:42049652-42049683
  hypo
ctcttccccagggatccgctccatctccagc

SEQ ID NO: 8267 - DNA, 36 bp, Homo sapiens
  chr1:42120783-42120819
  hypo
gtctgagctgtctgaccgagccgacccttccagctt

SEQ ID NO: 8268 - DNA, 31 bp, Homo sapiens
  chr1:42506900-42506931
  hypo
gccacgaggagcatagcggcctctgcaccac

SEQ ID NO: 8269 - DNA, 31 bp, Homo sapiens
  chr1:42851866-42851897
  hypo
tacgggcgtgagccaccgagcctggccccta

SEQ ID NO: 8270 - DNA, 31 bp, Homo sapiens
  chr1:42918351-42918382
  hypo
tgacagagcaagactccgtctcaaaaaaata

SEQ ID NO: 8271 - DNA, 54 bp, Homo sapiens
  chr1:43203988-43204042
  hypo
agacaaagcagaggggcgctcagctctgctctggccccccgaggccactggggc

SEQ ID NO: 8272 - DNA, 64 bp, Homo sapiens
  chr1:43353270-43353334
  hypo
tctgcatcatgaactccgagaagatgtggacggccacagcgcagcccagcgcagtccccagaca

SEQ ID NO: 8273 - DNA, 60 bp, Homo sapiens
  chr1:43353504-43353564
  hypo
gagcagaagatagtgacggcgtggatgccagaggtgctgcccacccggtattagcattag

SEQ ID NO: 8274 - DNA, 31 bp, Homo sapiens
  chr1:43498269-43498300
  hypo
tgcacataaaaacagacgcacattttttttc

SEQ ID NO: 8275 - DNA, 13 bp, Homo sapiens
  chr1:43521464-43521477
  hypo
cccagcctggatc

SEQ ID NO: 8276 - DNA, 47 bp, Homo sapiens
  chr1:43521507-43521554
  hypo
tggggtggggagcacacgcaggtacagtcacacgcatgggaggctgt

SEQ ID NO: 8277 - DNA, 31 bp, Homo sapiens
  chr1:43524035-43524066
  hypo
ctgacagcatgctggacgtggggaaaaaggc

SEQ ID NO: 8278 - DNA, 51 bp, Homo sapiens
  chr1:43534660-43534711
  hypo
atcactgacaacaagccggaggctctgccatgggcccgtcccagggtcccc

SEQ ID NO: 8279 - DNA, 45 bp, Homo sapiens
  chr1:43534737-43534782
  hypo
ttcagtgtggtggacccgaggaatgagttccgttaatctcctgga

SEQ ID NO: 8280 - DNA, 31 bp, Homo sapiens
  chr1:43534811-43534842
  hypo
ggggtgagggtggaggcgccaggtggctgga

SEQ ID NO: 8281 - DNA, 24 bp, Homo sapiens
  chr1:43593210-43593234
  hypo
gtgagactccgcctcaaaaaaaaa

SEQ ID NO: 8282 - DNA, 31 bp, Homo sapiens
  chr1:43738852-43738883
  hypo
ctggctgccttgggctcgcttttgctgctgg

SEQ ID NO: 8283 - DNA, 31 bp, Homo sapiens
  chr1:43739132-43739163
  hypo
tgagtacacatgagtgcgtgtatgcccccag

SEQ ID NO: 8284 - DNA, 70 bp, Homo sapiens
  chr1:43754320-43754390
  hypo
cacaaatgctgagatgcgggagcacggctggcttgttcagctacaacaaggcggccgcttgatggagtgc

SEQ ID NO: 8285 - DNA, 41 bp, Homo sapiens
  chr1:43754443-43754484
  hypo
tcctgaggggcctcaccggatctctccgggagatgggaagc

SEQ ID NO: 8286 - DNA, 31 bp, Homo sapiens
  chr1:43775219-43775250
  hypo
gtccacagggaatggacggtgagcagagtag

SEQ ID NO: 8287 - DNA, 31 bp, Homo sapiens
  chr1:43782855-43782886
  hypo
ctcatcctgtgaagggcgaggagaccatcct

SEQ ID NO: 8288 - DNA, 31 bp, Homo sapiens
  chr1:43798209-43798240
  hypo
caaacttaaaacttaacgttgactggccggg

SEQ ID NO: 8289 - DNA, 31 bp, Homo sapiens
  chr1:43834715-43834746
  hypo
gaatttctacctccagcggcccctggaacag

SEQ ID NO: 8290 - DNA, 31 bp, Homo sapiens
  chr1:43889357-43889388
  hypo
cagagttgcagaagggcgtggcttagcgggg

SEQ ID NO: 8291 - DNA, 93 bp, Homo sapiens; identical to SEQ ID NO: 250
  chr1:43919567-43919660
  hypo

SEQ ID NO: 8292 - DNA, 45 bp, Homo sapiens
  chr1:43969025-43969070
  hypo
agcaggtgagtagaaccgccccgccccccacgaccctctgatttc

SEQ ID NO: 8293 - DNA, 31 bp, Homo sapiens
  chr1:43969083-43969114
  hypo
ctagtgtttcatgtagcggggggctgcccag

SEQ ID NO: 8294 - DNA, 34 bp, Homo sapiens
  chr1:43987295-43987329
  hypo
gaaataaagagagtgccgtcgcagtgatggaaaa

SEQ ID NO: 8295 - DNA, 31 bp, Homo sapiens
  chr1:43987382-43987413
  hypo
catttcagtggagacacgatagacccctcag

SEQ ID NO: 8296 - DNA, 48 bp, Homo sapiens
  chr1:43987437-43987485
  hypo
gggggtgagaggcagacgcagccccaccttcagcgtgccttgccttcc

SEQ ID NO: 8297 - DNA, 36 bp, Homo sapiens
  chr1:43991182-43991218
  hypo
gcaacatcaggccaggcgtggtggctcacgcctgta

SEQ ID NO: 8298 - DNA, 31 bp, Homo sapiens
  chr1:44016540-44016571
  hypo
aagttagagtgtatggcggaggttggcagaa

SEQ ID NO: 8299 - DNA, 31 bp, Homo sapiens
  chr1:44044917-44044948
  hypo
tgtgtgtgtgcacacacgggcacacttatct

SEQ ID NO: 8300 - DNA, 31 bp, Homo sapiens
  chr1:44044989-44045020
  hypo
acatcctcctgcctgccgcagcatggtgggc

SEQ ID NO: 8301 - DNA, 31 bp, Homo sapiens
  chr1:44053822-44053853
  hypo
ctgagaccctggcaggcggccctgctgcttg

SEQ ID NO: 8302 - DNA, 31 bp, Homo sapiens
  chr1:44063578-44063609
  hypo
ggtggatggcatcagccgtgagcactccagc

SEQ ID NO: 8303 - DNA, 51 bp, Homo sapiens
  chr1:44063621-44063672
  hypo
ggcctggagaagtggacggagtaccgggtgtgggtgcgggcacacacagac

SEQ ID NO: 8304 - DNA, 31 bp, Homo sapiens
  chr1:44069554-44069585
  hypo
ccgaggacctgcccagcggcttcccccaaaa

SEQ ID NO: 8305 - DNA, 111 bp, Homo sapiens
  chr1:44069592-44069703
  hypo
gtgacaggactgaccacgtctaccacagaactggcctgggacccgccagtgctggcggagaggaacgggcgcatcatcagctacaccgtggtgttccgagacatcaacagc

SEQ ID NO: 8306 - DNA, 44 bp, Homo sapiens
  chr1:44072458-44072502
  hypo
gcctgctgttctccaccgggccacagaagcgctatgcctccagc

SEQ ID NO: 8307 - DNA, 31 bp, Homo sapiens
  chr1:44072666-44072697
  hypo
acggccacctgcccctcgcctttcaggccct

SEQ ID NO: 8308 - DNA, 31 bp, Homo sapiens
  chr1:44082000-44082031
  hypo
tatcattattgctctccgaggtgaagaagag

SEQ ID NO: 8309 - DNA, 31 bp, Homo sapiens
  chr1:44084830-44084861
  hypo
cctgcaaccccctagacgcagggcccatggt

SEQ ID NO: 8310 - DNA, 43 bp, Homo sapiens
  chr1:44084948-44084991
  hypo
tgtcctgcagcgcgggcgtgggccgcaccggctgcttcatcgt

SEQ ID NO: 8311 - DNA, 31 bp, Homo sapiens
  chr1:44085147-44085178
  hypo
cacagaggtgcctgcccgcaacctgtatgcc

SEQ ID NO: 8312 - DNA, 31 bp, Homo sapiens
  chr1:44132661-44132692
  hypo
cttatggttaccatgccggctttaaccatgg

SEQ ID NO: 8313 - DNA, 47 bp, Homo sapiens
  chr1:44137395-44137442
  hypo
tgagcctctctcctgccgagcccaagggcaaacgggagttctcactg

SEQ ID NO: 8314 - DNA, 59 bp, Homo sapiens
  chr1:44351016-44351075
  hypo
gttccagtgcaacttccgtctcctccttccccgggtccttctcacgcactcacacacac

SEQ ID NO: 8315 - DNA, 57 bp, Homo sapiens
  chr1:44351089-44351146
  hypo
atcctgaggctgcctcgcgtgccggggtgctggcggggctggcgggctggggcctgt

SEQ ID NO: 8316 - DNA, 44 bp, Homo sapiens
  chr1:44351189-44351233
  hypo
gggcaagcaggtcaggcgtcccacacccccgctagtctgaccag

SEQ ID NO: 8317 - DNA, 31 bp, Homo sapiens
  chr1:44436575-44436606
  hypo
agtgatgacagcaactcgcctccagaagaga

SEQ ID NO: 8318 - DNA, 49 bp, Homo sapiens; identical to SEQ ID NO: 254
  chr1:44444660-44444709
  hypo

SEQ ID NO: 8319 - DNA, 31 bp, Homo sapiens
  chr1:44463686-44463717
  hypo
actagaataaactgcacggggcaggtgtggg

SEQ ID NO: 8320 - DNA, 23 bp, Homo sapiens
  chr1:44494137-44494160
  hypo
ccaggccaggctgggcgcggtgg

SEQ ID NO: 8321 - DNA, 31 bp, Homo sapiens
  chr1:44595367-44595398
  hypo
gggtagccaggcccttcggtgggaatctaag

SEQ ID NO: 8322 - DNA, 52 bp, Homo sapiens
  chr1:44718071-44718123
  hypo
tctgcgacgggcctgccgcatagccctgctgtaggtgcggcgggtggccccc

SEQ ID NO: 8323 - DNA, 31 bp, Homo sapiens
  chr1:44726772-44726803
  hypo
cagtcctttgagaactcgacaggcctcgact

SEQ ID NO: 8324 - DNA, 31 bp, Homo sapiens
  chr1:44726955-44726986
  hypo
cagcgcggaggaaggcgcgagtcagtctgga

SEQ ID NO: 8325 - DNA, 49 bp, Homo sapiens
  chr1:44726993-44727042
  hypo
ccatttatcaagctcacgcaggccgccagccgagcgagtctttctatca

SEQ ID NO: 8326 - DNA, 31 bp, Homo sapiens
  chr1:44727043-44727074
  hypo
tacacctctcaaaatccgattcataccacta

SEQ ID NO: 8327 - DNA, 48 bp, Homo sapiens
  chr1:44727220-44727268
  hypo
agggaaaaaaggagagcgaacgagagcaggcagcggccagagactgca

SEQ ID NO: 8328 - DNA, 31 bp, Homo sapiens
  chr1:45092411-45092442
  hypo
ttcaaaagcatgataccggccgggtgcagtg

SEQ ID NO: 8329 - DNA, 46 bp, Homo sapiens
  chr1:45120344-45120390
  hypo
gacccggcgtgccaggcgtgcctccaccatgcgttctatgtctctg

SEQ ID NO: 8330 - DNA, 26 bp, Homo sapiens
  chr1:45131013-45131039
  hypo
aacatgcaatctttgccgggcgcagt

SEQ ID NO: 8331 - DNA, 31 bp, Homo sapiens
  chr1:45264887-45264918
  hypo
tagctgcccaagtgcccgtgtctagcatttg

SEQ ID NO: 8332 - DNA, 41 bp, Homo sapiens
  chr1:45268615-45268656
  hypo
ctgccctataggtacacgctgctctgcgggagccctccctt

SEQ ID NO: 8333 - DNA, 34 bp, Homo sapiens
  chr1:45280582-45280616
  hypo
tcagacaccacaggctcggcgagaaattgatctc

SEQ ID NO: 8334 - DNA, 35 bp, Homo sapiens
  chr1:45308227-45308262
  hypo
cgtgagtcaccgcgcccggccggcataggcccatt

SEQ ID NO: 8335 - DNA, 34 bp, Homo sapiens
  chr1:45308281-45308315
  hypo
atgtacacacacctgtcgtcgggtggacacagag

SEQ ID NO: 8336 - DNA, 31 bp, Homo sapiens
  chr1:45529303-45529334
  hypo
gaccaaaaaacccaaccgttctcattgttaa

SEQ ID NO: 8337 - DNA, 60 bp, Homo sapiens
  chr1:45529344-45529404
  hypo
gctccagagtcagggccgcaatgagaaacagaaaccataggaaggcgcagtggctcacac

SEQ ID NO: 8338 - DNA, 63 bp, Homo sapiens
  chr1:45759289-45759352
  hypo
taatcccagcaagagacggtggtaatccaagcaagagacgctggtaacgcggattaggacaac

SEQ ID NO: 8339 - DNA, 31 bp, Homo sapiens
  chr1:45759426-45759457
  hypo
acttggtgactggacacggctacagggtgag

SEQ ID NO: 8340 - DNA, 31 bp, Homo sapiens
  chr1:45801239-45801270
  hypo
taccccaggccaggcacggtggctcatgcct

SEQ ID NO: 8341 - DNA, 25 bp, Homo sapiens
  chr1:45909227-45909252
  hypo
cgagatccatcgcaaaaaaaaaaaa

SEQ ID NO: 8342 - DNA, 31 bp, Homo sapiens
  chr1:46278401-46278432
  hypo
cctatttttaatagtccgtgtaacattttca

SEQ ID NO: 8343 - DNA, 20 bp, Homo sapiens
  chr1:46409260-46409280
  hypo
tacaaaattagctgggcgtg

SEQ ID NO: 8344 - DNA, 31 bp, Homo sapiens
  chr1:46653314-46653345
  hypo
cacacttctcctctgccgtgtgcctgtgtgg

SEQ ID NO: 8345 - DNA, 31 bp, Homo sapiens
  chr1:46653357-46653388
  hypo
atttgtttgcccagggcgggcctctacctca

SEQ ID NO: 8346 - DNA, 57 bp, Homo sapiens
  chr1:46653448-46653505
  hypo
caacaaacactgaaggcgtcagggtggcgagatatgtccaagcgacataccacccat

SEQ ID NO: 8347 - DNA, 31 bp, Homo sapiens
  chr1:46752099-46752130
  hypo
cacatcaatggtcccacgtagaacatgggaa

SEQ ID NO: 8348 - DNA, 31 bp, Homo sapiens
  chr1:47652619-47652650
  hypo
cacccaaaggagggaccgcaccttctagagg

SEQ ID NO: 8349 - DNA, 26 bp, Homo sapiens
  chr1:47793445-47793471
  hypo
tatctgaggccaggtgcgatggctca

SEQ ID NO: 8350 - DNA, 238 bp, Homo sapiens; identical to SEQ ID NO: 261
  chr1:47903679-47903917
  hypo

SEQ ID NO: 8351 - DNA, 31 bp, Homo sapiens
  chr1:48187538-48187569
  hypo
ttatttgaaatgttcccggcttcctcccacc

SEQ ID NO: 8352 - DNA, 31 bp, Homo sapiens
  chr1:48187610-48187641
  hypo
cctcctgactccaggccggccctagtcaatt

SEQ ID NO: 8353 - DNA, 31 bp, Homo sapiens
  chr1:48231659-48231690
  hypo
tgctggcgggccctggcgggtcctgctgttg

SEQ ID NO: 8354 - DNA, 31 bp, Homo sapiens
  chr1:48257293-48257324
  hypo
taggtgaggagtggagcgggtatgtcttcag

SEQ ID NO: 8355 - DNA, 31 bp, Homo sapiens
  chr1:48257348-48257379
  hypo
tagtcccagctctgcacgtaagtcagcctgt

SEQ ID NO: 8356 - DNA, 37 bp, Homo sapiens
  chr1:48257407-48257444
  hypo
gatcataagaatgtaacgaggccggagtggacttccc

SEQ ID NO: 8357 - DNA, 37 bp, Homo sapiens
  chr1:48257445-48257482
  hypo
caccacagctttcatgcggatgcgttccatgtcaata

SEQ ID NO: 8358 - DNA, 31 bp, Homo sapiens
  chr1:48459839-48459870
  hypo
cgtccctctctgtgagcgagtttaccatgag

SEQ ID NO: 8359 - DNA, 31 bp, Homo sapiens; identical to SEQ ID NO: 268
  chr1:48463141-48463172
  hypo

SEQ ID NO: 8360 - DNA, 60 bp, Homo sapiens; identical to SEQ ID NO: 269
  chr1:48463405-48463465
  hypo

SEQ ID NO: 8361 - DNA, 31 bp, Homo sapiens
  chr1:48694609-48694640
  hypo
gtggcttcgagtggaacgtaaggaagctggc

SEQ ID NO: 8362 - DNA, 31 bp, Homo sapiens
  chr1:48733207-48733238
  hypo
ttcctctgaagttggccgcccagcagctgga

SEQ ID NO: 8363 - DNA, 258 bp, Homo sapiens; identical to SEQ ID NO: 273
  chr1:49242226-49242484
  hypo

SEQ ID NO: 8364 - DNA, 89 bp, Homo sapiens; identical to SEQ ID NO: 274
  chr1:49242496-49242585
  hypo

SEQ ID NO: 8365 - DNA, 36 bp, Homo sapiens
  chr1:51424029-51424065
  hypo
aaaatggttatctgaacgttaatttgtaaaaataag

SEQ ID NO: 8366 - DNA, 27 bp, Homo sapiens
  chr1:51426976-51427003
  hypo
tgggattacaggcgtgagccactgcac

SEQ ID NO: 8367 - DNA, 31 bp, Homo sapiens
  chr1:51767451-51767482
  hypo
acccctctgcatcctccgaacctcccaacac

SEQ ID NO: 8368 - DNA, 17 bp, Homo sapiens
  chr1:52110287-52110304
  hypo
ccgcgcccagcccatgt

SEQ ID NO: 8369 - DNA, 191 bp, Homo sapiens; identical to SEQ ID NO: 278
  chr1:52195012-52195203
  hypo

SEQ ID NO: 8370 - DNA, 33 bp, Homo sapiens
  chr1:52524547-52524580
  hypo
aggcgtgagccaccgtgccgggcctgaatttgg

SEQ ID NO: 8371 - DNA, 43 bp, Homo sapiens
  chr1:52832631-52832674
  hypo
ttttctaaggaaagcacgtttctccctgcggcttgcagagtcc

SEQ ID NO: 8372 - DNA, 31 bp, Homo sapiens
  chr1:52832686-52832717
  hypo
attgagctcaggagtccgagaccagcctggg

SEQ ID NO: 8373 - DNA, 70 bp, Homo sapiens; identical to SEQ ID NO: 279
  chr1:53067877-53067947
  hypo

SEQ ID NO: 8374 - DNA, 113 bp, Homo sapiens; identical to SEQ ID NO: 280
  chr1:53099036-53099149
  hypo

SEQ ID NO: 8375 - DNA, 20 bp, Homo sapiens
  chr1:53129422-53129442
  hypo
aactgcgtctaaaaaaaaag

SEQ ID NO: 8376 - DNA, 31 bp, Homo sapiens
  chr1:53479903-53479934
  hypo
ccttcaatagctggtccgatagaaaggcaaa

SEQ ID NO: 8377 - DNA, 31 bp, Homo sapiens
  chr1:53537412-53537443
  hypo
tggaagagagcaggcccgggccaggctagca

SEQ ID NO: 8378 - DNA, 31 bp, Homo sapiens
  chr1:53607948-53607979
  hypo
tcctggacaggggtcccgagatgctctgggt

SEQ ID NO: 8379 - DNA, 31 bp, Homo sapiens
  chr1:53703057-53703088
  hypo
caagcccggccgggcgcggtggctcacacct

SEQ ID NO: 8380 - DNA, 3 bp, Homo sapiens
  chr1:53703092-53703095
  hypo
tcc

SEQ ID NO: 8381 - DNA, 104 bp, Homo sapiens
  chr1:53769706-53769810
  hypo
ggctggtgataggtttcggtgggaaaaagaaaggaaaggggcgatgaattccaacttgctgagcgataaaggaaattaaggcataataccgaggaggcagcagt

SEQ ID NO: 8382 - DNA, 57 bp, Homo sapiens
  chr1:53986259-53986316
  hypo
ggcccctcctgggctacgcccctggccctgcctccccgcacacgtacctgggagcag

SEQ ID NO: 8383 - DNA, 76 bp, Homo sapiens
  chr1:54060384-54060460
  hypo
cgcttcaggctgccctcggggaggtgggtctcgggctggaggcccaggccagagctgggttcgctgcccagaaggt

SEQ ID NO: 8384 - DNA, 31 bp, Homo sapiens
  chr1:54595917-54595948
  hypo
acatctgccacatagtcggtgcttaggaggt

SEQ ID NO: 8385 - DNA, 31 bp, Homo sapiens
  chr1:54602394-54602425
  hypo
ccttggtccgctccagcggggccagcgcctg

SEQ ID NO: 8386 - DNA, 31 bp, Homo sapiens
  chr1:54605373-54605404
  hypo
tgcaaagcctccccttcgccctcagtggacc

SEQ ID NO: 8387 - DNA, 31 bp, Homo sapiens
  chr1:54605547-54605578
  hypo
agcaggggtgcctcctcgctggccccatcga

SEQ ID NO: 8388 - DNA, 51 bp, Homo sapiens
  chr1:54610115-54610166
  hypo
ggtccctaaggccccccgttgacctttctggtagcccgcagaaaagccatg

SEQ ID NO: 8389 - DNA, 31 bp, Homo sapiens
  chr1:54722665-54722696
  hypo
agtaagctaccagccacgttaaacctgcccc

SEQ ID NO: 8390 - DNA, 31 bp, Homo sapiens
  chr1:54860654-54860685
  hypo
cgtgagccaccgcgcccggctaagactcctt

SEQ ID NO: 8391 - DNA, 31 bp, Homo sapiens
  chr1:54860695-54860726
  hypo
tattgtatgtgggaatcgcctttgtgggatt

SEQ ID NO: 8392 - DNA, 31 bp, Homo sapiens; identical to SEQ ID NO: 284
  chr1:54871324-54871355
  hypo

SEQ ID NO: 8393 - DNA, 37 bp, Homo sapiens
  chr1:54944839-54944876
  hypo
gatgtgagccaccgtgcctggccgaaaagaaataact

SEQ ID NO: 8394 - DNA, 31 bp, Homo sapiens
  chr1:54961586-54961617
  hypo
ttcctcatctcacaaacgagtacttggcaaa

SEQ ID NO: 8395 - DNA, 45 bp, Homo sapiens
  chr1:55009516-55009561
  hypo
gaggggatcagaagaacgaagtctggacagcgaggccagggctga

SEQ ID NO: 8396 - DNA, 28 bp, Homo sapiens
  chr1:55033217-55033245
  hypo
ctgggattacaggcgtgagccactgtgc

SEQ ID NO: 8397 - DNA, 31 bp, Homo sapiens
  chr1:55033281-55033312
  hypo
cctcccatcatctccacgaccaagtccccta

SEQ ID NO: 8398 - DNA, 55 bp, Homo sapiens
  chr1:55050845-55050900
  hypo
actgcctgccctgcagcgctccttcccttgagttgaggtgcgctggactgagccc

SEQ ID NO: 8399 - DNA, 51 bp, Homo sapiens
  chr1:55050905-55050956
  hypo
attccttttgttgcaccggtgttctccaacctacagcgctcacagcctggt

SEQ ID NO: 8400 - DNA, 31 bp, Homo sapiens
  chr1:55050970-55051001
  hypo
ggatagacaggtgacccgactgttccccagc

SEQ ID NO: 8401 - DNA, 38 bp, Homo sapiens
  chr1:55074066-55074104
  hypo
ccataaaacccagcagcgcagtccgtgttgatggaaaa

SEQ ID NO: 8402 - DNA, 31 bp, Homo sapiens
  chr1:55074112-55074143
  hypo
ggaggctgagggaaagcgagggtggggtact

SEQ ID NO: 8403 - DNA, 31 bp, Homo sapiens
  chr1:55074206-55074237
  hypo
ccagcagagactcagccggtgtttgctgaat

SEQ ID NO: 8404 - DNA, 31 bp, Homo sapiens
  chr1:55074242-55074273
  hypo
tgcttgaacccatgagcgcctcagaaccatc

SEQ ID NO: 8405 - DNA, 37 bp, Homo sapiens
  chr1:55146064-55146101
  hypo
attgaaaggaggtctgcgtgtccgtcctgactctgcc

SEQ ID NO: 8406 - DNA, 35 bp, Homo sapiens
  chr1:55146235-55146270
  hypo
tgctcaggcctgggcccgtgcggaagggtgctcca

SEQ ID NO: 8407 - DNA, 31 bp, Homo sapiens
  chr1:55160577-55160608
  hypo
tttctagctctgtgaccgtgggcggttcaca

SEQ ID NO: 8408 - DNA, 31 bp, Homo sapiens
  chr1:55166801-55166832
  hypo
ctcctgccccacagaccgccaaggtgaaggc

SEQ ID NO: 8409 - DNA, 38 bp, Homo sapiens
  chr1:55261944-55261982
  hypo
cgccaggtccccaccccgctgggcgcagtgatggattg

SEQ ID NO: 8410 - DNA, 31 bp, Homo sapiens; identical to SEQ ID NO: 285
  chr1:55352447-55352478
  hypo

SEQ ID NO: 8411 - DNA, 101 bp, Homo sapiens; identical to SEQ ID NO: 286
  chr1:55352583-55352684
  hypo

SEQ ID NO: 8412 - DNA, 31 bp, Homo sapiens
  chr1:55494086-55494117
  hypo
aaaaaaataaatttagcgtagcctaaatgta

SEQ ID NO: 8413 - DNA, 31 bp, Homo sapiens
  chr1:55517830-55517861
  hypo
gtgaatatatttaaggcgctttcaccagtgc

SEQ ID NO: 8414 - DNA, 44 bp, Homo sapiens
  chr1:55517922-55517966
  hypo
cctctcccacaaatgtcgccttggaaagacggaggcagcctggt

SEQ ID NO: 8415 - DNA, 39 bp, Homo sapiens
  chr1:55517990-55518029
  hypo
catacagagtgaccaccgggaaatcgagggcagggtcat

SEQ ID NO: 8416 - DNA, 31 bp, Homo sapiens
  chr1:55524322-55524353
  hypo
gactgtacccctccttcgtgtgtgtgtgtgt

SEQ ID NO: 8417 - DNA, 31 bp, Homo sapiens
  chr1:55525309-55525340
  hypo
gccaccaacagggccacgtcctcacaggtag

SEQ ID NO: 8418 - DNA, 41 bp, Homo sapiens
  chr1:55583106-55583147
  hypo
caaaagaaactgtggccgggcgcggtggctcacgcctgtaa

SEQ ID NO: 8419 - DNA, 126 bp, Homo sapiens; identical to SEQ ID NO: 287
  chr1:57044386-57044512
  hypo

SEQ ID NO: 8420 - DNA, 53 bp, Homo sapiens; identical to SEQ ID NO: 288
  chr1:57044989-57045042
  hypo

SEQ ID NO: 8421 - DNA, 31 bp, Homo sapiens
  chr1:58794164-58794195
  hypo
atcccaggccctttgccgcagcagccacact

SEQ ID NO: 8422 - DNA, 31 bp, Homo sapiens
  chr1:59404584-59404615
  hypo
agcaagataacaaattcgaaaactgtgtagg

SEQ ID NO: 8423 - DNA, 55 bp, Homo sapiens; identical to SEQ ID NO: 293
  chr1:59762086-59762141
  hypo

SEQ ID NO: 8424 - DNA, 42 bp, Homo sapiens; identical to SEQ ID NO: 294
  chr1:59762154-59762196
  hypo

SEQ ID NO: 8425 - DNA, 62 bp, Homo sapiens; identical to SEQ ID NO: 296
  chr1:60280812-60280874
  hypo

SEQ ID NO: 8426 - DNA, 25 bp, Homo sapiens
  chr1:60371579-60371604
  hypo
gaatatattttcctcacgcttgtaa

SEQ ID NO: 8427 - DNA, 63 bp, Homo sapiens
  chr1:61445391-61445454
  hypo
tcaaagcagggatgttcggctatcaacatcaaaaatagtgaaacgaaccgagctgctaaactt

SEQ ID NO: 8428 - DNA, 1 bp, Homo sapiens
  chr1:61445467-61445468
  hypo
t

SEQ ID NO: 8429 - DNA, 41 bp, Homo sapiens; identical to SEQ ID NO: 297
  chr1:61516033-61516074
  hypo

SEQ ID NO: 8430 - DNA, 31 bp, Homo sapiens
  chr1:61530060-61530091
  hypo
aaacaaaagagaaggccgggcatggtggctc

SEQ ID NO: 8431 - DNA, 31 bp, Homo sapiens
  chr1:61543522-61543553
  hypo
tcttttttttttttttcgggatttgaaaaaa

SEQ ID NO: 8432 - DNA, 314 bp, Homo sapiens; identical to SEQ ID NO: 299
  chr1:61547870-61548184
  hypo

SEQ ID NO: 8433 - DNA, 76 bp, Homo sapiens; identical to SEQ ID NO: 300
  chr1:61548948-61549024
  hypo

SEQ ID NO: 8434 - DNA, 31 bp, Homo sapiens; identical to SEQ ID NO: 301
  chr1:61549048-61549079
  hypo

SEQ ID NO: 8435 - DNA, 31 bp, Homo sapiens; identical to SEQ ID NO: 302
  chr1:61549083-61549114
  hypo

SEQ ID NO: 8436 - DNA, 31 bp, Homo sapiens
  chr1:61655354-61655385
  hypo
aggctgccataggttgcgtctccagctttca

SEQ ID NO: 8437 - DNA, 24 bp, Homo sapiens
  chr1:61663687-61663711
  hypo
gagaaagaacgaacagacatagat

SEQ ID NO: 8438 - DNA, 48 bp, Homo sapiens
  chr1:61875329-61875377
  hypo
gaacccccaattacatcgtcatagctaccaggtcgctggcaggactag

SEQ ID NO: 8439 - DNA, 31 bp, Homo sapiens
  chr1:61875389-61875420
  hypo
cttcctacatatggtccgccctagcctgtaa

SEQ ID NO: 8440 - DNA, 31 bp, Homo sapiens
  chr1:61875423-61875454
  hypo
tgatggcatgaaggtgcgggtggcagtgtgc

SEQ ID NO: 8441 - DNA, 31 bp, Homo sapiens
  chr1:61875458-61875489
  hypo
caccagcacctgtccccgaagaggaagagac

SEQ ID NO: 8442 - DNA, 31 bp, Homo sapiens
  chr1:61959223-61959254
  hypo
atgttggtacaggggtcgggaaccgaccttg

SEQ ID NO: 8443 - DNA, 31 bp, Homo sapiens
  chr1:62120543-62120574
  hypo
tcaagcctggagcccacgtggacttctacta

SEQ ID NO: 8444 - DNA, 51 bp, Homo sapiens; identical to SEQ ID NO: 304
  chr1:62207888-62207939
  hypo

SEQ ID NO: 8445 - DNA, 94 bp, Homo sapiens; identical to SEQ ID NO: 305
  chr1:62207948-62208042
  hypo

SEQ ID NO: 8446 - DNA, 218 bp, Homo sapiens; identical to SEQ ID NO: 309
  chr1:62208505-62208723
  hypo

SEQ ID NO: 8447 - DNA, 31 bp, Homo sapiens
  chr1:62285410-62285441
  hypo
aggcaatgcacagtagcgcttcaatgctgca

SEQ ID NO: 8448 - DNA, 31 bp, Homo sapiens
  chr1:62734254-62734285
  hypo
gcctcgggtaacactccgcagcttgctaatc

SEQ ID NO: 8449 - DNA, 31 bp, Homo sapiens; identical to SEQ ID NO: 310
  chr1:63153559-63153590
  hypo

SEQ ID NO: 8450 - DNA, 14 bp, Homo sapiens
  chr1:65210893-65210907
  hypo
cgcgggcctgggca

SEQ ID NO: 8451 - DNA, 108 bp, Homo sapiens; identical to SEQ ID NO: 315
  chr1:65210939-65211047
  hypo

SEQ ID NO: 8452 - DNA, 20 bp, Homo sapiens
  chr1:65417624-65417644
  hypo
ccaccgcgccaggcacaagt

SEQ ID NO: 8453 - DNA, 40 bp, Homo sapiens; identical to SEQ ID NO: 322
  chr1:65720328-65720368
  hypo

SEQ ID NO: 8454 - DNA, 31 bp, Homo sapiens; identical to SEQ ID NO: 323
  chr1:65886883-65886914
  hypo

SEQ ID NO: 8455 - DNA, 31 bp, Homo sapiens
  chr1:67797228-67797259
  hypo
aagcactcatttaggccggcatggtcgctca

SEQ ID NO: 8456 - DNA, 31 bp, Homo sapiens
  chr1:68703994-68704025
  hypo
ccagaaacacctgccccggacagtgattcct

SEQ ID NO: 8457 - DNA, 31 bp, Homo sapiens
  chr1:68704034-68704065
  hypo
agacaacacccagtaccgtggcagacttggc

SEQ ID NO: 8458 - DNA, 103 bp, Homo sapiens
  chr1:70710351-70710454
  hypo
cttttacactattaggcggtcaagaagcagatcgagacggcggtcacattctaagtctaggagtcggcgacgatccaaaagcccaaggcggagaagatctcat

SEQ ID NO: 8459 - DNA, 31 bp, Homo sapiens
  chr1:71519946-71519977
  hypo
caggtttcccaagacccggagaagacagcaa

SEQ ID NO: 8460 - DNA, 31 bp, Homo sapiens
  chr1:71519979-71520010
  hypo
ctgtgttcccagccagcgctagtggcagctg

SEQ ID NO: 8461 - DNA, 31 bp, Homo sapiens
  chr1:72740461-72740492
  hypo
cagctgtgtaaaagatcgggtagaaaaagtg

SEQ ID NO: 8462 - DNA, 31 bp, Homo sapiens
  chr1:72740575-72740606
  hypo
acagaaccaagtcaatcgaaagtcagatatc

SEQ ID NO: 8463 - DNA, 31 bp, Homo sapiens
  chr1:72885249-72885280
  hypo
tacgcctctctgtttccgtggatgtgtgtgt

SEQ ID NO: 8464 - DNA, 74 bp, Homo sapiens
  chr1:77165570-77165644
  hypo
aggtgccggccgacaccgaggtggtttgtactccgcctactgcctatatcgacttcgcccggcagaagctagat

SEQ ID NO: 8465 - DNA, 31 bp, Homo sapiens
  chr1:77992103-77992134
  hypo
gtcaggacaggtcctgcgcatgtttggaagc

SEQ ID NO: 8466 - DNA, 69 bp, Homo sapiens; identical to SEQ ID NO: 338
  chr1:78354048-78354117
  hypo

SEQ ID NO: 8467 - DNA, 31 bp, Homo sapiens
  chr1:84944537-84944568
  hypo
cattaaagcaaggctccgtctcaaaaagatg

SEQ ID NO: 8468 - DNA, 156 bp, Homo sapiens; identical to SEQ ID NO: 341
  chr1:85666851-85667007
  hypo

SEQ ID NO: 8469 - DNA, 51 bp, Homo sapiens; identical to SEQ ID NO: 342
  chr1:85667112-85667163
  hypo

SEQ ID NO: 8470 - DNA, 18 bp, Homo sapiens
  chr1:85720385-85720403
  hypo
taacgagttaattatcac

SEQ ID NO: 8471 - DNA, 37 bp, Homo sapiens
  chr1:85725177-85725214
  hypo
cgcccgccgacttcgccggatccggggttctgcgact

SEQ ID NO: 8472 - DNA, 189 bp, Homo sapiens; identical to SEQ ID NO: 347
  chr1:85930279-85930468
  hypo

SEQ ID NO: 8473 - DNA, 49 bp, Homo sapiens; identical to SEQ ID NO: 348
  chr1:85930496-85930545
  hypo

SEQ ID NO: 8474 - DNA, 157 bp, Homo sapiens; identical to SEQ ID NO: 349
  chr1:85930555-85930712
  hypo

SEQ ID NO: 8475 - DNA, 56 bp, Homo sapiens; identical to SEQ ID NO: 350
  chr1:85930890-85930946
  hypo

SEQ ID NO: 8476 - DNA, 65 bp, Homo sapiens
  chr1:86860884-86860949
  hypo
caaaaacacttgaaaccgtactatgcgttgcgtgatgaggaaactgtcttcgaaatagattttat

SEQ ID NO: 8477 - DNA, 31 bp, Homo sapiens
  chr1:89148527-89148558
  hypo
aaaggtaatcatatcccggcctttccaagtg

SEQ ID NO: 8478 - DNA, 31 bp, Homo sapiens
  chr1:89228940-89228971
  hypo
gcagggagctccttttcgcagggaaaagaca

SEQ ID NO: 8479 - DNA, 27 bp, Homo sapiens
  chr1:89228991-89229018
  hypo
aaagttcacatccatccggccacatgt

SEQ ID NO: 8480 - DNA, 25 bp, Homo sapiens
  chr1:89240660-89240685
  hypo
ggattataggcgtgagccactatgc

SEQ ID NO: 8481 - DNA, 147 bp, Homo sapiens; identical to SEQ ID NO: 358
  chr1:90309277-90309424
  hypo

SEQ ID NO: 8482 - DNA, 61 bp, Homo sapiens
  chr1:92102534-92102595
  hypo
cctgacatttacatagcgggtgatctcagtgagttattcaacctctcggagggccagtttt

SEQ ID NO: 8483 - DNA, 53 bp, Homo sapiens
  chr1:92102677-92102730
  hypo
ggtacttattattttccgagatagtaaagcaattccgccgtttttactataaa

SEQ ID NO: 8484 - DNA, 54 bp, Homo sapiens; identical to SEQ ID NO: 373
  chr1:92951325-92951379
  hypo

SEQ ID NO: 8485 - DNA, 272 bp, Homo sapiens; identical to SEQ ID NO: 374
  chr1:92951381-92951653
  hypo

SEQ ID NO: 8486 - DNA, 31 bp, Homo sapiens; identical to SEQ ID NO: 375
  chr1:92951664-92951695
  hypo

SEQ ID NO: 8487 - DNA, 36 bp, Homo sapiens; identical to SEQ ID NO: 379
  chr1:92951957-92951993
  hypo

SEQ ID NO: 8488 - DNA, 115 bp, Homo sapiens; identical to SEQ ID NO: 380
  chr1:92951999-92952114
  hypo

SEQ ID NO: 8489 - DNA, 89 bp, Homo sapiens; identical to SEQ ID NO: 381
  chr1:92952479-92952568
  hypo

SEQ ID NO: 8490 - DNA, 107 bp, Homo sapiens; identical to SEQ ID NO: 382
  chr1:93250728-93250835
  hypo

SEQ ID NO: 8491 - DNA, 151 bp, Homo sapiens; identical to SEQ ID NO: 383
  chr1:93250907-93251058
  hypo

SEQ ID NO: 8492 - DNA, 27 bp, Homo sapiens
  chr1:93507009-93507036
  hypo
cagagtccctctctctcgcccaggctg

SEQ ID NO: 8493 - DNA, 31 bp, Homo sapiens
  chr1:93647179-93647210
  hypo
cttttttttttgagaccgagtctcactctgt

SEQ ID NO: 8494 - DNA, 88 bp, Homo sapiens; identical to SEQ ID NO: 384
  chr1:93913453-93913541
  hypo

SEQ ID NO: 8495 - DNA, 378 bp, Homo sapiens; identical to SEQ ID NO: 385
  chr1:93913688-93914066
  hypo

SEQ ID NO: 8496 - DNA, 63 bp, Homo sapiens; identical to SEQ ID NO: 386
  chr1:93914095-93914158
  hypo

SEQ ID NO: 8497 - DNA, 31 bp, Homo sapiens; identical to SEQ ID NO: 387
  chr1:93914232-93914263
  hypo

SEQ ID NO: 8498 - DNA, 47 bp, Homo sapiens; identical to SEQ ID NO: 388
  chr1:93914301-93914348
  hypo

SEQ ID NO: 8499 - DNA, 61 bp, Homo sapiens; identical to SEQ ID NO: 389
  chr1:93914404-93914465
  hypo

SEQ ID NO: 8500 - DNA, 31 bp, Homo sapiens
  chr1:93917485-93917516
  hypo
cgtgagccaccgtgcccggtcttcatcatat

SEQ ID NO: 8501 - DNA, 72 bp, Homo sapiens
  chr1:94047870-94047942
  hypo
ctcagtacgtgctgggcgatgaccttggggtcgttgttggtgaacagttcttttgcacgtttcaacattgct

SEQ ID NO: 8502 - DNA, 31 bp, Homo sapiens
  chr1:94047972-94048003
  hypo
aactttgactcaaactcgttgggcctgaagg

SEQ ID NO: 8503 - DNA, 42 bp, Homo sapiens
  chr1:94048009-94048051
  hypo
cagtctccaggaggggcgtcacaaactcgcccttgtcccact

SEQ ID NO: 8504 - DNA, 26 bp, Homo sapiens
  chr1:94343567-94343593
  hypo
aaaatcaaaatttggccgggcgcggt

SEQ ID NO: 8505 - DNA, 88 bp, Homo sapiens
  chr1:94345699-94345787
  hypo
tgcatgtctttagggacggcatctaaaagagaggaggccgtccctgacttttttttttggagacggagtcttgctctgtcgcccaggg

SEQ ID NO: 8506 - DNA, 54 bp, Homo sapiens
  chr1:94466587-94466641
  hypo
tctctgatgatgctcacgatgacgttccacagcatgcggcgtgcctgggggtcc

SEQ ID NO: 8507 - DNA, 31 bp, Homo sapiens
  chr1:94466749-94466780
  hypo
atgagctgacagaaggcgcacacagtcactc

SEQ ID NO: 8508 - DNA, 31 bp, Homo sapiens
  chr1:94507307-94507338
  hypo
tcataaagaacacacacgtgcatactctcac

SEQ ID NO: 8509 - DNA, 39 bp, Homo sapiens
  chr1:94507721-94507760
  hypo
ccctcagagaaaggcacggggcaacgctgtgtgagtaga

SEQ ID NO: 8510 - DNA, 42 bp, Homo sapiens
  chr1:94507771-94507813
  hypo
agctctggcttgaccacggggttgaaccgtgctgttacctct

SEQ ID NO: 8511 - DNA, 31 bp, Homo sapiens
  chr1:94528402-94528433
  hypo
aaatctttctcctaaacgcttcaaaaggatc

SEQ ID NO: 8512 - DNA, 31 bp, Homo sapiens
  chr1:94546399-94546430
  hypo
atccttaatccagctgcgaaaaacaaaaaac

SEQ ID NO: 8513 - DNA, 197 bp, Homo sapiens; identical to SEQ ID NO: 394
  chr1:94702824-94703021
  hypo

SEQ ID NO: 8514 - DNA, 26 bp, Homo sapiens
  chr1:94812326-94812352
  hypo
tgagactccatcgaaaaaaaaaaaaa

SEQ ID NO: 8515 - DNA, 79 bp, Homo sapiens; identical to SEQ ID NO: 402
  chr1:95007290-95007369
  hypo

SEQ ID NO: 8516 - DNA, 138 bp, Homo sapiens; identical to SEQ ID NO: 403
  chr1:95007378-95007516
  hypo

SEQ ID NO: 8517 - DNA, 32 bp, Homo sapiens
  chr1:95222490-95222522
  hypo
aatgcagctctttggccgggcacggtggttca

SEQ ID NO: 8518 - DNA, 31 bp, Homo sapiens
  chr1:95314374-95314405
  hypo
aacaccagaacaaggccgtaacccatgctgt

SEQ ID NO: 8519 - DNA, 31 bp, Homo sapiens; identical to SEQ ID NO: 407
  chr1:95391394-95391425
  hypo

SEQ ID NO: 8520 - DNA, 31 bp, Homo sapiens; identical to SEQ ID NO: 414
  chr1:95582867-95582898
  hypo

SEQ ID NO: 8521 - DNA, 41 bp, Homo sapiens; identical to SEQ ID NO: 415
  chr1:95583056-95583097
  hypo

SEQ ID NO: 8522 - DNA, 138 bp, Homo sapiens; identical to SEQ ID NO: 416
  chr1:95583267-95583405
  hypo

SEQ ID NO: 8523 - DNA, 26 bp, Homo sapiens
  chr1:95693439-95693465
  hypo
ttttttttttttgagacggagtctcg

SEQ ID NO: 8524 - DNA, 20 bp, Homo sapiens
  chr1:98386546-98386566
  hypo
gccaagtgacagcagccgga

SEQ ID NO: 8525 - DNA, 31 bp, Homo sapiens; identical to SEQ ID NO: 419
  chr1:99127080-99127111
  hypo

SEQ ID NO: 8526 - DNA, 37 bp, Homo sapiens; identical to SEQ ID NO: 420
  chr1:99127233-99127270
  hypo

SEQ ID NO: 8527 - DNA, 53 bp, Homo sapiens; identical to SEQ ID NO: 421
  chr1:99127286-99127339
  hypo

SEQ ID NO: 8528 - DNA, 95 bp, Homo sapiens; identical to SEQ ID NO: 422
  chr1:99127365-99127460
  hypo

SEQ ID NO: 8529 - DNA, 31 bp, Homo sapiens; identical to SEQ ID NO: 423
  chr1:99127771-99127802
  hypo

SEQ ID NO: 8530 - DNA, 42 bp, Homo sapiens
  chr1:100106763-100106805
  hypo
tataaaaaataaacaccgtattcttagcgtgacactacttct

SEQ ID NO: 8531 - DNA, 31 bp, Homo sapiens
  chr1:100106827-100106858
  hypo
tataaagagagaaagacgggaagaaaaagag

SEQ ID NO: 8532 - DNA, 31 bp, Homo sapiens
  chr1:100106896-100106927
  hypo
atccagttttttaacacgggatctggtttca

SEQ ID NO: 8533 - DNA, 42 bp, Homo sapiens; identical to SEQ ID NO: 425
  chr1:100437130-100437172
  hypo

SEQ ID NO: 8534 - DNA, 42 bp, Homo sapiens
  chr1:100437227-100437269
  hypo
ttttagccaaactagtcgttaattagacgtccagtttctgaa

SEQ ID NO: 8535 - DNA, 39 bp, Homo sapiens
  chr1:100928458-100928497
  hypo
tggtggctgtgcttatcgaaggggcgggccaaggaagag

SEQ ID NO: 8536 - DNA, 74 bp, Homo sapiens; identical to SEQ ID NO: 427
  chr1:101702007-101702081
  hypo

SEQ ID NO: 8537 - DNA, 55 bp, Homo sapiens; identical to SEQ ID NO: 428
  chr1:101702344-101702399
  hypo

SEQ ID NO: 8538 - DNA, 80 bp, Homo sapiens; identical to SEQ ID NO: 429
  chr1:101702430-101702510
  hypo

SEQ ID NO: 8539 - DNA, 31 bp, Homo sapiens; identical to SEQ ID NO: 430
  chr1:101702528-101702559
  hypo

SEQ ID NO: 8540 - DNA, 157 bp, Homo sapiens; identical to SEQ ID NO: 431
  chr1:101702601-101702758
  hypo

SEQ ID NO: 8541 - DNA, 35 bp, Homo sapiens; identical to SEQ ID NO: 432
  chr1:101702761-101702796
  hypo

SEQ ID NO: 8542 - DNA, 31 bp, Homo sapiens; identical to SEQ ID NO: 433
  chr1:101702806-101702837
  hypo

SEQ ID NO: 8543 - DNA, 31 bp, Homo sapiens; identical to SEQ ID NO: 434
  chr1:101702879-101702910
  hypo

SEQ ID NO: 8544 - DNA, 31 bp, Homo sapiens; identical to SEQ ID NO: 435
  chr1:101702911-101702942
  hypo

SEQ ID NO: 8545 - DNA, 72 bp, Homo sapiens; identical to SEQ ID NO: 442
  chr1:107600099-107600171
  hypo

SEQ ID NO: 8546 - DNA, 31 bp, Homo sapiens; identical to SEQ ID NO: 443
  chr1:107683591-107683622
  hypo

SEQ ID NO: 8547 - DNA, 279 bp, Homo sapiens; identical to SEQ ID NO: 444
  chr1:107683787-107684066
  hypo

SEQ ID NO: 8548 - DNA, 300 bp, Homo sapiens; identical to SEQ ID NO: 445
  chr1:107684195-107684495
  hypo

SEQ ID NO: 8549 - DNA, 24 bp, Homo sapiens
  chr1:108199576-108199600
  hypo
tttttttttttttttccgagacga

SEQ ID NO: 8550 - DNA, 15 bp, Homo sapiens
  chr1:108507148-108507163
  hypo
cgaagtggtcccaaa

SEQ ID NO: 8551 - DNA, 89 bp, Homo sapiens; identical to SEQ ID NO: 457
  chr1:108507177-108507266
  hypo

SEQ ID NO: 8552 - DNA, 112 bp, Homo sapiens; identical to SEQ ID NO: 458
  chr1:108507494-108507606
  hypo

SEQ ID NO: 8553 - DNA, 323 bp, Homo sapiens; identical to SEQ ID NO: 459
  chr1:108507657-108507980
  hypo

SEQ ID NO: 8554 - DNA, 31 bp, Homo sapiens; identical to SEQ ID NO: 460
  chr1:109420435-109420466
  hypo

SEQ ID NO: 8555 - DNA, 31 bp, Homo sapiens
  chr1:109585386-109585417
  hypo
atacgtgatgttcaaccgagcttaattaagc

SEQ ID NO: 8556 - DNA, 28 bp, Homo sapiens
  chr1:109593505-109593533
  hypo
tcaagggccaggcaccgcggctcacgcc

SEQ ID NO: 8557 - DNA, 31 bp, Homo sapiens
  chr1:109725167-109725198
  hypo
gatccaaacccatatccgtctagcttaaaat

SEQ ID NO: 8558 - DNA, 68 bp, Homo sapiens
  chr1:109812119-109812187
  hypo
gggccctggacaaacccgtcacggtgcagttccgcctgctggagacagaggagcggaccaagcccatc

SEQ ID NO: 8559 - DNA, 95 bp, Homo sapiens
  chr1:109816184-109816279
  hypo
tccccgcccaccgccccggcagagcctccaggagcagctgaacggggtcatgcccatcgccatgagcatcaaggcaggcacggtggatgaggact

SEQ ID NO: 8560 - DNA, 71 bp, Homo sapiens; identical to SEQ ID NO: 463
  chr1:109940218-109940289
  hypo

SEQ ID NO: 8561 - DNA, 137 bp, Homo sapiens; identical to SEQ ID NO: 464
  chr1:109940368-109940505
  hypo

SEQ ID NO: 8562 - DNA, 45 bp, Homo sapiens; identical to SEQ ID NO: 465
  chr1:109940574-109940619
  hypo

SEQ ID NO: 8563 - DNA, 31 bp, Homo sapiens; identical to SEQ ID NO: 466
  chr1:109940635-109940666
  hypo

SEQ ID NO: 8564 - DNA, 31 bp, Homo sapiens; identical to SEQ ID NO: 467
  chr1:109940704-109940735
  hypo

SEQ ID NO: 8565 - DNA, 31 bp, Homo sapiens
  chr1:110027020-110027051
  hypo
tccagctttccctgtccgcaacagtcctcca

SEQ ID NO: 8566 - DNA, 8 bp, Homo sapiens
  chr1:110042270-110042278
  hypo
agccaggt

SEQ ID NO: 8567 - DNA, 31 bp, Homo sapiens
  chr1:110042318-110042349
  hypo
ccctaagccagctggccgctgtgctaaagcc

SEQ ID NO: 8568 - DNA, 31 bp, Homo sapiens; identical to SEQ ID NO: 470
  chr1:110052254-110052285
  hypo

SEQ ID NO: 8569 - DNA, 31 bp, Homo sapiens
  chr1:110061030-110061061
  hypo
aggtgattctttataccgccaactttaagca

SEQ ID NO: 8570 - DNA, 31 bp, Homo sapiens
  chr1:110085338-110085369
  hypo
aaggccattccgaaagcggagtgttgagtgg

SEQ ID NO: 8571 - DNA, 31 bp, Homo sapiens
  chr1:110085374-110085405
  hypo
gctcctgcacctctcacgtctcctgcttctt

SEQ ID NO: 8572 - DNA, 31 bp, Homo sapiens
  chr1:110085422-110085453
  hypo
accctgcagctacctccggccagaaagggga

SEQ ID NO: 8573 - DNA, 40 bp, Homo sapiens
  chr1:110085469-110085509
  hypo
cagctgcctggcctggcgctctgtacgcagacaaacctgc

SEQ ID NO: 8574 - DNA, 45 bp, Homo sapiens
  chr1:110085847-110085892
  hypo
caagacgcctgccctccgaaaatttgtcttcgtcttccacctctg

SEQ ID NO: 8575 - DNA, 31 bp, Homo sapiens
  chr1:110307261-110307292
  hypo
ctgcactccatggtatcgaaaaatctttctt

SEQ ID NO: 8576 - DNA, 31 bp, Homo sapiens
  chr1:110338330-110338361
  hypo
catgagccacagtgcccggcctggaaacagg

SEQ ID NO: 8577 - DNA, 148 bp, Homo sapiens; identical to SEQ ID NO: 473
  chr1:110453159-110453307
  hypo

SEQ ID NO: 8578 - DNA, 239 bp, Homo sapiens; identical to SEQ ID NO: 474
  chr1:110453530-110453769
  hypo

SEQ ID NO: 8579 - DNA, 160 bp, Homo sapiens; identical to SEQ ID NO: 475
  chr1:110453792-110453952
  hypo

SEQ ID NO: 8580 - DNA, 31 bp, Homo sapiens; identical to SEQ ID NO: 476
  chr1:110627497-110627528
  hypo

SEQ ID NO: 8581 - DNA, 92 bp, Homo sapiens; identical to SEQ ID NO: 477
  chr1:110627538-110627630
  hypo

SEQ ID NO: 8582 - DNA, 31 bp, Homo sapiens; identical to SEQ ID NO: 478
  chr1:110627635-110627666
  hypo

SEQ ID NO: 8583 - DNA, 39 bp, Homo sapiens
  chr1:110738170-110738209
  hypo
acctttgcccccaaaccggcctcccggctctctgtagtg

SEQ ID NO: 8584 - DNA, 33 bp, Homo sapiens
  chr1:111001560-111001593
  hypo
aagagagagagggggccgggcgcggtggctcac

SEQ ID NO: 8585 - DNA, 40 bp, Homo sapiens
  chr1:111204440-111204480
  hypo
taatgtcagccgggcgcggtggctcacgcctataatccca

SEQ ID NO: 8586 - DNA, 440 bp, Homo sapiens; identical to SEQ ID NO: 481
  chr1:111217194-111217634
  hypo

SEQ ID NO: 8587 - DNA, 61 bp, Homo sapiens; identical to SEQ ID NO: 482
  chr1:111217655-111217716
  hypo

SEQ ID NO: 8588 - DNA, 73 bp, Homo sapiens; identical to SEQ ID NO: 483
  chr1:111217732-111217805
  hypo

SEQ ID NO: 8589 - DNA, 55 bp, Homo sapiens; identical to SEQ ID NO: 484
  chr1:111217821-111217876
  hypo

SEQ ID NO: 8590 - DNA, 6 bp, Homo sapiens
  chr1:111217885-111217891
  hypo
cccggc

SEQ ID NO: 8591 - DNA, 27 bp, Homo sapiens
  chr1:111217923-111217950
  hypo
cggcccgtgggccgggagagctcccgc

SEQ ID NO: 8592 - DNA, 31 bp, Homo sapiens
  chr1:112155751-112155782
  hypo
gcttttttggtgaaaacgtagggtttttttt

SEQ ID NO: 8593 - DNA, 29 bp, Homo sapiens
  chr1:112160643-112160672
  hypo
acagagcaagactccgcctcaaaaaaaaa

SEQ ID NO: 8594 - DNA, 43 bp, Homo sapiens; identical to SEQ ID NO: 492
  chr1:113249255-113249298
  hypo

SEQ ID NO: 8595 - DNA, 31 bp, Homo sapiens
  chr1:113399486-113399517
  hypo
cattttccatgaatctcgtgaagcttttggg

SEQ ID NO: 8596 - DNA, 29 bp, Homo sapiens
  chr1:113442039-113442068
  hypo
gaactccatcctcccggccaaaaccaagc

SEQ ID NO: 8597 - DNA, 80 bp, Homo sapiens; identical to SEQ ID NO: 496
  chr1:113499269-113499349
  hypo

SEQ ID NO: 8598 - DNA, 31 bp, Homo sapiens; identical to SEQ ID NO: 497
  chr1:113499352-113499383
  hypo

SEQ ID NO: 8599 - DNA, 229 bp, Homo sapiens; identical to SEQ ID NO: 498
  chr1:113932572-113932801
  hypo

SEQ ID NO: 8600 - DNA, 31 bp, Homo sapiens; identical to SEQ ID NO: 499
  chr1:113932872-113932903
  hypo

SEQ ID NO: 8601 - DNA, 80 bp, Homo sapiens; identical to SEQ ID NO: 500
  chr1:113932989-113933069
  hypo

SEQ ID NO: 8602 - DNA, 162 bp, Homo sapiens; identical to SEQ ID NO: 501
  chr1:113933116-113933278
  hypo

SEQ ID NO: 8603 - DNA, 94 bp, Homo sapiens; identical to SEQ ID NO: 502
  chr1:113933395-113933489
  hypo

SEQ ID NO: 8604 - DNA, 165 bp, Homo sapiens; identical to SEQ ID NO: 503
  chr1:113933515-113933680
  hypo

SEQ ID NO: 8605 - DNA, 136 bp, Homo sapiens; identical to SEQ ID NO: 504
  chr1:113933692-113933828
  hypo

SEQ ID NO: 8606 - DNA, 80 bp, Homo sapiens; identical to SEQ ID NO: 505
  chr1:113933829-113933909
  hypo

SEQ ID NO: 8607 - DNA, 99 bp, Homo sapiens; identical to SEQ ID NO: 506
  chr1:113933912-113934011
  hypo

SEQ ID NO: 8608 - DNA, 71 bp, Homo sapiens; identical to SEQ ID NO: 507
  chr1:113934012-113934083
  hypo

SEQ ID NO: 8609 - DNA, 22 bp, Homo sapiens
  chr1:114299494-114299516
  hypo
aaaccatactctaggccgggcg

SEQ ID NO: 8610 - DNA, 35 bp, Homo sapiens
  chr1:114355896-114355931
  hypo
agtatttatttagagacgggcggggcggggctcgg

SEQ ID NO: 8611 - DNA, 286 bp, Homo sapiens; identical to SEQ ID NO: 508
  chr1:116184426-116184712
  hypo

SEQ ID NO: 8612 - DNA, 75 bp, Homo sapiens; identical to SEQ ID NO: 509
  chr1:116184713-116184788
  hypo

SEQ ID NO: 8613 - DNA, 108 bp, Homo sapiens; identical to SEQ ID NO: 510
  chr1:116184804-116184912
  hypo

SEQ ID NO: 8614 - DNA, 411 bp, Homo sapiens; identical to SEQ ID NO: 511
  chr1:116184919-116185330
  hypo

SEQ ID NO: 8615 - DNA, 57 bp, Homo sapiens; identical to SEQ ID NO: 512
  chr1:116185332-116185389
  hypo

SEQ ID NO: 8616 - DNA, 53 bp, Homo sapiens; identical to SEQ ID NO: 513
  chr1:116185400-116185453
  hypo

SEQ ID NO: 8617 - DNA, 31 bp, Homo sapiens; identical to SEQ ID NO: 514
  chr1:116185470-116185501
  hypo

SEQ ID NO: 8618 - DNA, 65 bp, Homo sapiens; identical to SEQ ID NO: 515
  chr1:116185508-116185573
  hypo

SEQ ID NO: 8619 - DNA, 31 bp, Homo sapiens
  chr1:116205679-116205710
  hypo
acaggtgtgagccaccgcgccccagtccata

SEQ ID NO: 8620 - DNA, 31 bp, Homo sapiens
  chr1:116206290-116206321
  hypo
tggggagagaccaccacggccatcacaggca

SEQ ID NO: 8621 - DNA, 31 bp, Homo sapiens
  chr1:116214287-116214318
  hypo
tcccaggcaggggaggcgcagtgcaggttgg

SEQ ID NO: 8622 - DNA, 44 bp, Homo sapiens
  chr1:116214327-116214371
  hypo
ggaaatggcagcatggcgaggtttgtgccgcggcctacaagcag

SEQ ID NO: 8623 - DNA, 31 bp, Homo sapiens
  chr1:116214412-116214443
  hypo
ctcacttgtagggaagcgtgtctcctaggtg

SEQ ID NO: 8624 - DNA, 37 bp, Homo sapiens
  chr1:116224396-116224433
  hypo
ggattacaggcgtgagccaccgcgcgtggccaaggcc

SEQ ID NO: 8625 - DNA, 51 bp, Homo sapiens
  chr1:116225056-116225107
  hypo
aacagcctccaaattccgagcagccaagcatatggccgggctgaaagtcta

SEQ ID NO: 8626 - DNA, 31 bp, Homo sapiens
  chr1:116225124-116225155
  hypo
gccttgaaagggtgtccgtggtgctcacagg

SEQ ID NO: 8627 - DNA, 40 bp, Homo sapiens
  chr1:116225173-116225213
  hypo
tttaagattcatggtacgtttggttcgacttcttctctgg

SEQ ID NO: 8628 - DNA, 31 bp, Homo sapiens
  chr1:116226507-116226538
  hypo
ctctgtttcccaccctcgtggtattaacact

SEQ ID NO: 8629 - DNA, 31 bp, Homo sapiens
  chr1:116226577-116226608
  hypo
tgccactggccagtcccgggccatgattgct

SEQ ID NO: 8630 - DNA, 31 bp, Homo sapiens
  chr1:116228226-116228257
  hypo
ctagaagtgataaaatcgaaaggcatctcta

SEQ ID NO: 8631 - DNA, 47 bp, Homo sapiens
  chr1:116295787-116295834
  hypo
gtgctgatctagggctcgggggagaggtcctgcgtgagaggtcaagg

SEQ ID NO: 8632 - DNA, 31 bp, Homo sapiens
  chr1:116295846-116295877
  hypo
tgacatctttgggagacgagtatgaaagaaa

SEQ ID NO: 8633 - DNA, 50 bp, Homo sapiens
  chr1:116295924-116295974
  hypo
taccctggaggcagagcggagctatgggagaagtgcggggagagaaagga

SEQ ID NO: 8634 - DNA, 31 bp, Homo sapiens
  chr1:116642573-116642604
  hypo
gccaggcatggaagtgcgctggtgagcccac

SEQ ID NO: 8635 - DNA, 19 bp, Homo sapiens
  chr1:116674141-116674160
  hypo
ttttttgtttttgagacgg

SEQ ID NO: 8636 - DNA, 52 bp, Homo sapiens
  chr1:116840628-116840680
  hypo
gagcagggggtggggccggtcggggaggctggggctgcgtgggaacttgggg

SEQ ID NO: 8637 - DNA, 20 bp, Homo sapiens
  chr1:117021628-117021648
  hypo
caacatggtgaaaccccgtc

SEQ ID NO: 8638 - DNA, 31 bp, Homo sapiens
  chr1:117055697-117055728
  hypo
agaagaaaagaccatgcgagggtattagatt

SEQ ID NO: 8639 - DNA, 62 bp, Homo sapiens
  chr1:117060146-117060208
  hypo
cactgaccacagcaaccgactccacaaaaccaaaggtcttaacccctcgcctacctccttgt

SEQ ID NO: 8640 - DNA, 77 bp, Homo sapiens
  chr1:117127237-117127314
  hypo
agtggaagcttggggacgtggaccctcacctggtcgcatgactgtcagagctgtctgcccagcggtgtcctctgccc

SEQ ID NO: 8641 - DNA, 65 bp, Homo sapiens
  chr1:117131422-117131487
  hypo
ccgctgtcgctgacctcggctctctggacggtgaggctgaacaggccccccgacacatgcctctc

SEQ ID NO: 8642 - DNA, 55 bp, Homo sapiens
  chr1:117131503-117131558
  hypo
ctcaggccctcctcctcggcgtaagtaccgtattcaaaggcggagttgtgggtgg

SEQ ID NO: 8643 - DNA, 31 bp, Homo sapiens
  chr1:117131563-117131594
  hypo
aggataagcttgccatcggcatccgagggct

SEQ ID NO: 8644 - DNA, 35 bp, Homo sapiens
  chr1:117157579-117157614
  hypo
caaggcttgggtcttacgggtctcctgctgggaac

SEQ ID NO: 8645 - DNA, 56 bp, Homo sapiens; identical to SEQ ID NO: 517
  chr1:117210091-117210147
  hypo

SEQ ID NO: 8646 - DNA, 31 bp, Homo sapiens
  chr1:117250049-117250080
  hypo
tgcaggcatgagccaccgtacttggcctaac

SEQ ID NO: 8647 - DNA, 31 bp, Homo sapiens
  chr1:117371752-117371783
  hypo
ttccctcaacactgaccgtttcccactctct

SEQ ID NO: 8648 - DNA, 51 bp, Homo sapiens
  chr1:117450852-117450903
  hypo
aatttttttttagagacggtgtctcacaatgttgcccgagtggtctcaaac

SEQ ID NO: 8649 - DNA, 36 bp, Homo sapiens
  chr1:117451188-117451224
  hypo
cctgatcgcaccactgcactccggcctgggtgacag

SEQ ID NO: 8650 - DNA, 31 bp, Homo sapiens
  chr1:117452157-117452188
  hypo
tttggcataggccaagcggctggttggtggg

SEQ ID NO: 8651 - DNA, 70 bp, Homo sapiens
  chr1:117503896-117503966
  hypo
aaggtccccgggtttgcggatgaccccacagagctggcatgccgggtggtggacacgaagagtggggagg

SEQ ID NO: 8652 - DNA, 31 bp, Homo sapiens
  chr1:117509520-117509551
  hypo
cattcattccagattccgtgcttgtggtgaa

SEQ ID NO: 8653 - DNA, 31 bp, Homo sapiens
  chr1:118163136-118163167
  hypo
acagtaaagccagccccgtaactttctgtaa

SEQ ID NO: 8654 - DNA, 18 bp, Homo sapiens
  chr1:118163199-118163217
  hypo
cccacccccctgaccacg

SEQ ID NO: 8655 - DNA, 31 bp, Homo sapiens
  chr1:118163672-118163703
  hypo
cacagtaaacattattcgtcacagattttgc

SEQ ID NO: 8656 - DNA, 31 bp, Homo sapiens
  chr1:118163875-118163906
  hypo
gctgctttctgcctctcggccccaaccaaca

SEQ ID NO: 8657 - DNA, 31 bp, Homo sapiens
  chr1:118166361-118166392
  hypo
accttcaaaaccacttcgctgaagaagagag

SEQ ID NO: 8658 - DNA, 40 bp, Homo sapiens
  chr1:118166418-118166458
  hypo
ttcgcagggtggtgaacgagagcaccgtgtgtctcatggg

SEQ ID NO: 8659 - DNA, 61 bp, Homo sapiens
  chr1:118166529-118166590
  hypo
tccccagtgccaccaacgtcacctgttactaccagccggccccttacgtcagtgatggcaa

SEQ ID NO: 8660 - DNA, 31 bp, Homo sapiens
  chr1:119876257-119876288
  hypo
gcctgcctactctggccgcccttgaggagcc

SEQ ID NO: 8661 - DNA, 15 bp, Homo sapiens
  chr1:120190434-120190449
  hypo
tcagcctcctcctcc

SEQ ID NO: 8662 - DNA, 180 bp, Homo sapiens; identical to SEQ ID NO: 526
  chr1:120190519-120190699
  hypo

SEQ ID NO: 8663 - DNA, 99 bp, Homo sapiens; identical to SEQ ID NO: 527
  chr1:120190713-120190812
  hypo

SEQ ID NO: 8664 - DNA, 35 bp, Homo sapiens
  chr1:150283343-150283378
  hypo
ctccagcttgggcaacggagcgtccccaaaaaaaa

SEQ ID NO: 8665 - DNA, 39 bp, Homo sapiens
  chr1:150504353-150504392
  hypo
ctcctctgcctgccttcgaagctccgtcaaaatgcaagt

SEQ ID NO: 8666 - DNA, 28 bp, Homo sapiens
  chr1:151095642-151095670
  hypo
caaaaatggctgggcacggtggctcacg

SEQ ID NO: 8667 - DNA, 21 bp, Homo sapiens
  chr1:151122206-151122227
  hypo
acagagcgagactccatctca

SEQ ID NO: 8668 - DNA, 31 bp, Homo sapiens
  chr1:151164981-151165012
  hypo
ttctagtgttcttggccgggtgtggtggctc

SEQ ID NO: 8669 - DNA, 40 bp, Homo sapiens
  chr1:151169637-151169677
  hypo
tgcatggggatattctatggatgttcgggtcctaggttac

SEQ ID NO: 8670 - DNA, 7 bp, Homo sapiens
  chr1:151170057-151170064
  hypo
aaacctg

SEQ ID NO: 8671 - DNA, 43 bp, Homo sapiens
  chr1:151170098-151170141
  hypo
agaggatctatctgaccgactcttaccccgaatgttttaccat

SEQ ID NO: 8672 - DNA, 31 bp, Homo sapiens
  chr1:151170175-151170206
  hypo
gagcccctactatgtacgaagtcactggagg

SEQ ID NO: 8673 - DNA, 31 bp, Homo sapiens
  chr1:151338236-151338267
  hypo
cactcacctggcatttcgggcagcagccagc

SEQ ID NO: 8674 - DNA, 58 bp, Homo sapiens
  chr1:151338904-151338962
  hypo
acatataagtggctcccgtacagtcctggggtgggagtggggccggaggataggctca

SEQ ID NO: 8675 - DNA, 48 bp, Homo sapiens
  chr1:151339196-151339244
  hypo
ccagcctccacatcagcggggttgaagccatctcgtaagacattggga

SEQ ID NO: 8676 - DNA, 60 bp, Homo sapiens
  chr1:151339261-151339321
  hypo
gatcatgacattgtgtcgaggctggtaccagaagtcatagcccaacggtgcagcaccccc

SEQ ID NO: 8677 - DNA, 35 bp, Homo sapiens
  chr1:151339331-151339366
  hypo
catgtccccttcacctcgaacgtctccccatccag

SEQ ID NO: 8678 - DNA, 31 bp, Homo sapiens
  chr1:151346972-151347003
  hypo
agtaaaggtagaggggcgattctcctgcctc

SEQ ID NO: 8679 - DNA, 43 bp, Homo sapiens
  chr1:151356359-151356402
  hypo
tctaggtttggatttgcgttctctgacccgatactgccaccac

SEQ ID NO: 8680 - DNA, 55 bp, Homo sapiens
  chr1:151356482-151356537
  hypo
actgtacagtgaaagacgggtaatgatacccagcgtgtgacgagtcctgcaagtg

SEQ ID NO: 8681 - DNA, 76 bp, Homo sapiens; identical to SEQ ID NO: 535
  chr1:151693821-151693897
  hypo

SEQ ID NO: 8682 - DNA, 53 bp, Homo sapiens; identical to SEQ ID NO: 536
  chr1:151694320-151694373
  hypo

SEQ ID NO: 8683 - DNA, 31 bp, Homo sapiens
  chr1:151829047-151829078
  hypo
agaggggatcctcaggcggccctgacagctg

SEQ ID NO: 8684 - DNA, 31 bp, Homo sapiens
  chr1:153537352-153537383
  hypo
attctttttgcagcaacgcccacatgcacac

SEQ ID NO: 8685 - DNA, 132 bp, Homo sapiens
  chr1:153540022-153540154
  hypo
aagcctggcagtgaggcgctccagactcggcctgctgctgcgtgtcccttaaacacaccggcacatgcaactagtgtggccaagaccctcggcttgcgctgacccctctgttcagaacgtgcccacacatgc

SEQ ID NO: 8686 - DNA, 31 bp, Homo sapiens
  chr1:153540211-153540242
  hypo
cttcccagggcccaaccggattcagtgtcta

SEQ ID NO: 8687 - DNA, 31 bp, Homo sapiens
  chr1:153540247-153540278
  hypo
tctgtcctgtacaaagcgccccttttgccct

SEQ ID NO: 8688 - DNA, 34 bp, Homo sapiens; identical to SEQ ID NO: 537
  chr1:153652398-153652432
  hypo

SEQ ID NO: 8689 - DNA, 129 bp, Homo sapiens; identical to SEQ ID NO: 538
  chr1:153936614-153936743
  hypo

SEQ ID NO: 8690 - DNA, 38 bp, Homo sapiens; identical to SEQ ID NO: 539
  chr1:153936753-153936791
  hypo

SEQ ID NO: 8691 - DNA, 31 bp, Homo sapiens
  chr1:153937069-153937100
  hypo
cacaaggctccagaaacgaagcccagtaatt

SEQ ID NO: 8692 - DNA, 25 bp, Homo sapiens
  chr1:153937123-153937148
  hypo
agacttcttaaggggccgggcgcgg

SEQ ID NO: 8693 - DNA, 131 bp, Homo sapiens; identical to SEQ ID NO: 543
  chr1:153958680-153958811
  hypo

SEQ ID NO: 8694 - DNA, 87 bp, Homo sapiens; identical to SEQ ID NO: 544
  chr1:153958816-153958903
  hypo

SEQ ID NO: 8695 - DNA, 34 bp, Homo sapiens
  chr1:154098519-154098553
  hypo
aggcgtgagccaccgcgcccggccaagaaatgtt

SEQ ID NO: 8696 - DNA, 31 bp, Homo sapiens
  chr1:154098579-154098610
  hypo
atatatacacaatgaccgcaaatgcagatat

SEQ ID NO: 8697 - DNA, 22 bp, Homo sapiens
  chr1:154107501-154107523
  hypo
ccacgcccggcctctgtgtacc

SEQ ID NO: 8698 - DNA, 58 bp, Homo sapiens
  chr1:154116695-154116753
  hypo
aaaataaagttgtagtcgtattaaaggattatactttattctacgtcttacttttaaa

SEQ ID NO: 8699 - DNA, 31 bp, Homo sapiens
  chr1:154243764-154243795
  hypo
tgaaggcaacatgtatcgtctggcagaacta

SEQ ID NO: 8700 - DNA, 31 bp, Homo sapiens
  chr1:154243915-154243946
  hypo
acctgtaccccaaaaacgaaataaaaaaaca

SEQ ID NO: 8701 - DNA, 168 bp, Homo sapiens; identical to SEQ ID NO: 546
  chr1:154297758-154297926
  hypo

SEQ ID NO: 8702 - DNA, 114 bp, Homo sapiens; identical to SEQ ID NO: 547
  chr1:154298038-154298152
  hypo

SEQ ID NO: 8703 - DNA, 240 bp, Homo sapiens; identical to SEQ ID NO: 548
  chr1:154298253-154298493
  hypo

SEQ ID NO: 8704 - DNA, 31 bp, Homo sapiens
  chr1:154533445-154533476
  hypo
taaaaatttaaaagatcggccgggcgcggtg

SEQ ID NO: 8705 - DNA, 31 bp, Homo sapiens; identical to SEQ ID NO: 549
  chr1:154816590-154816621
  hypo

SEQ ID NO: 8706 - DNA, 37 bp, Homo sapiens
  chr1:154987688-154987725
  hypo
cccctcccaccacctccgccaccgccacctcggcctg

SEQ ID NO: 8707 - DNA, 31 bp, Homo sapiens
  chr1:155005173-155005204
  hypo
aaagaacttgcggacccggtcagccacctct

SEQ ID NO: 8708 - DNA, 31 bp, Homo sapiens
  chr1:155005731-155005762
  hypo
ggccctgccctgggggcgacagctttgttag

SEQ ID NO: 8709 - DNA, 38 bp, Homo sapiens
  chr1:155082408-155082446
  hypo
aagtgtaggccaggcacggtggctcacgcctgtaatca

SEQ ID NO: 8710 - DNA, 31 bp, Homo sapiens; identical to SEQ ID NO: 553
  chr1:155099827-155099858
  hypo

SEQ ID NO: 8711 - DNA, 71 bp, Homo sapiens; identical to SEQ ID NO: 554
  chr1:155099899-155099970
  hypo

SEQ ID NO: 8712 - DNA, 31 bp, Homo sapiens
  chr1:155160924-155160955
  hypo
gccctggcagaggtgccgttgtgcaccagag

SEQ ID NO: 8713 - DNA, 87 bp, Homo sapiens
  chr1:155160970-155161057
  hypo
atgcagagcctgaggccgaggtgacattgtggactggaggggcggtggagcccaaggcgggcctgttgtccggggccgaggtgacac

SEQ ID NO: 8714 - DNA, 31 bp, Homo sapiens
  chr1:155283338-155283369
  hypo
ctgcctgtcctgtgggcggtggaaattccag

SEQ ID NO: 8715 - DNA, 61 bp, Homo sapiens
  chr1:155403642-155403703
  hypo
aaccctcttgcaggctcgaaagagaaagcgaaccagtatcgagaaccgagtgagaggcaac

SEQ ID NO: 8716 - DNA, 114 bp, Homo sapiens
  chr1:155403712-155403826
  hypo
ttgttcctgcagtgcccgaaacccacactgcagcagatcagccacatcgcccagcagcttgggctcgagaaggatgtggtccgagtgtggttctgtaaccggtgccagaaaggc

SEQ ID NO: 8717 - DNA, 48 bp, Homo sapiens
  chr1:155466739-155466787
  hypo
tattagattttctattcggcgtcagtgattttccgtctgccagtccac

SEQ ID NO: 8718 - DNA, 3 bp, Homo sapiens
  chr1:155578924-155578927
  hypo
tgt

SEQ ID NO: 8719 - DNA, 31 bp, Homo sapiens
  chr1:155659965-155659996
  hypo
aaagagtaggtaatgtcggtgatagatataa

SEQ ID NO: 8720 - DNA, 19 bp, Homo sapiens
  chr1:155826317-155826336
  hypo
cgcccgacctacagttagt

SEQ ID NO: 8721 - DNA, 78 bp, Homo sapiens; identical to SEQ ID NO: 560
  chr1:155830323-155830401
  hypo

SEQ ID NO: 8722 - DNA, 38 bp, Homo sapiens
  chr1:155862236-155862274
  hypo
caggcatgcaccaccacgacacacgtgctaccacacct

SEQ ID NO: 8723 - DNA, 22 bp, Homo sapiens
  chr1:155892701-155892723
  hypo
taaagacagtcctggccgggcg

SEQ ID NO: 8724 - DNA, 26 bp, Homo sapiens
  chr1:155892962-155892988
  hypo
tccagcctgggcgacagaaaaaaaaa

SEQ ID NO: 8725 - DNA, 9 bp, Homo sapiens
  chr1:155893813-155893822
  hypo
tttgctttt

SEQ ID NO: 8726 - DNA, 60 bp, Homo sapiens
  chr1:155911659-155911719
  hypo
ttgctgggaaatttggcggtgctgtgggtactgagtaactgtgcccggagagcccctggc

SEQ ID NO: 8727 - DNA, 51 bp, Homo sapiens
  chr1:155911720-155911771
  hypo
caccttcagacaccttcgtcttcaacctggctctggcggacctgggactgg

SEQ ID NO: 8728 - DNA, 25 bp, Homo sapiens
  chr1:156010522-156010547
  hypo
gtgagccaccgcgcccagccagtcc

SEQ ID NO: 8729 - DNA, 31 bp, Homo sapiens; identical to SEQ ID NO: 563
  chr1:156084628-156084659
  hypo

SEQ ID NO: 8730 - DNA, 31 bp, Homo sapiens
  chr1:156085875-156085906
  hypo
tatgcccaggtctggccgcactcctcccttg

SEQ ID NO: 8731 - DNA, 31 bp, Homo sapiens
  chr1:156111391-156111422
  hypo
ttaaggtgtccacacacgtggtcacctcaca

SEQ ID NO: 8732 - DNA, 45 bp, Homo sapiens
  chr1:156111503-156111548
  hypo
tacatgcttggcctagcgtggtggcacgcacgcctgtagtcccag

SEQ ID NO: 8733 - DNA, 31 bp, Homo sapiens
  chr1:156111549-156111580
  hypo
aactcctggcctgaggcgggaaaattgtctg

SEQ ID NO: 8734 - DNA, 31 bp, Homo sapiens
  chr1:156271415-156271446
  hypo
gagcccatcaaagccccggacccagccacaa

SEQ ID NO: 8735 - DNA, 31 bp, Homo sapiens
  chr1:156276676-156276707
  hypo
agagctgaaaacaaaacgaacctagactgag

SEQ ID NO: 8736 - DNA, 39 bp, Homo sapiens
  chr1:156362386-156362425
  hypo
gagaagagcgaaattccgagtgagcgggtgtgggatgaa

SEQ ID NO: 8737 - DNA, 48 bp, Homo sapiens
  chr1:156362432-156362480
  hypo
cccacctcccccacatcggacccagagtccaggcggctggagaggtgg

SEQ ID NO: 8738 - DNA, 31 bp, Homo sapiens
  chr1:156362506-156362537
  hypo
ggggcttgggcttctccgccactgacaccag

SEQ ID NO: 8739 - DNA, 68 bp, Homo sapiens; identical to SEQ ID NO: 565
  chr1:156390432-156390500
  hypo

SEQ ID NO: 8740 - DNA, 63 bp, Homo sapiens; identical to SEQ ID NO: 566
  chr1:156390506-156390569
  hypo

SEQ ID NO: 8741 - DNA, 189 bp, Homo sapiens; identical to SEQ ID NO: 567
  chr1:156390691-156390880
  hypo

SEQ ID NO: 8742 - DNA, 59 bp, Homo sapiens; identical to SEQ ID NO: 570
  chr1:156391156-156391215
  hypo

SEQ ID NO: 8743 - DNA, 121 bp, Homo sapiens; identical to SEQ ID NO: 571
  chr1:156391242-156391363
  hypo

SEQ ID NO: 8744 - DNA, 31 bp, Homo sapiens
  chr1:156432017-156432048
  hypo
cagtacagatggtcatcggcattttgcagat

SEQ ID NO: 8745 - DNA, 46 bp, Homo sapiens
  chr1:156432223-156432269
  hypo
gcagccacaccctgttcggaggaagccaagccggatctgctttcct

SEQ ID NO: 8746 - DNA, 9 bp, Homo sapiens
  chr1:156432333-156432342
  hypo
ttttttttt

SEQ ID NO: 8747 - DNA, 36 bp, Homo sapiens
  chr1:156441194-156441230
  hypo
acaggtgtgagccaccgcgcccggccagaatcaact

SEQ ID NO: 8748 - DNA, 31 bp, Homo sapiens
  chr1:156716807-156716838
  hypo
acctccccgcttgccccgtggcctctgggga

SEQ ID NO: 8749 - DNA, 19 bp, Homo sapiens
  chr1:156837273-156837292
  hypo
atttctttcatttttacgt

SEQ ID NO: 8750 - DNA, 73 bp, Homo sapiens
  chr1:156849854-156849927
  hypo
tcaccaccgagagcgacgtgtggagcttcggcgtggtgctctgggagatcttcacctacggcaagcagccctg

SEQ ID NO: 8751 - DNA, 31 bp, Homo sapiens
  chr1:157458772-157458803
  hypo
ggacttggcaaccagccggacactgattcca

SEQ ID NO: 8752 - DNA, 7 bp, Homo sapiens
  chr1:157458909-157458916
  hypo
tagaaga

SEQ ID NO: 8753 - DNA, 31 bp, Homo sapiens
  chr1:158098451-158098482
  hypo
aatgtgtagtctatgccgttttatcatacct

SEQ ID NO: 8754 - DNA, 31 bp, Homo sapiens
  chr1:158098484-158098515
  hypo
agattcttgcagccaccgctgcaatcaagat

SEQ ID NO: 8755 - DNA, 34 bp, Homo sapiens; identical to SEQ ID NO: 581
  chr1:158150718-158150752
  hypo

SEQ ID NO: 8756 - DNA, 43 bp, Homo sapiens
  chr1:160121589-160121632
  hypo
tcctcttcccagcggacggctggaggaccgctcagtctctcct

SEQ ID NO: 8757 - DNA, 31 bp, Homo sapiens; identical to SEQ ID NO: 586
  chr1:160175619-160175650
  hypo

SEQ ID NO: 8758 - DNA, 28 bp, Homo sapiens
  chr1:160524876-160524904
  hypo
ttttttttttttgagacggagtcttgct

SEQ ID NO: 8759 - DNA, 31 bp, Homo sapiens
  chr1:160986424-160986455
  hypo
taacagaatgagactccgtctcaaaaaaaaa

SEQ ID NO: 8760 - DNA, 31 bp, Homo sapiens
  chr1:161007586-161007617
  hypo
tctctataggctccagcgtagttgcgagccc

SEQ ID NO: 8761 - DNA, 47 bp, Homo sapiens
  chr1:161007715-161007762
  hypo
gactccgggccagctgcgtggcctggaggccccgcttgcccatctga

SEQ ID NO: 8762 - DNA, 13 bp, Homo sapiens
  chr1:161122835-161122848
  hypo
gtctccaaaaaaa

SEQ ID NO: 8763 - DNA, 31 bp, Homo sapiens
  chr1:161145826-161145857
  hypo
ccgctccagcagcctccgcaacatcctgggg

SEQ ID NO: 8764 - DNA, 22 bp, Homo sapiens
  chr1:161361044-161361066
  hypo
tgggtgtggtggcagtcgcctg

SEQ ID NO: 8765 - DNA, 57 bp, Homo sapiens
  chr1:161367419-161367476
  hypo
tgtacaagttttgacacgtgtatacacctgggaaattatcaccgcaattcgggtctg

SEQ ID NO: 8766 - DNA, 48 bp, Homo sapiens
  chr1:161367559-161367607
  hypo
cgctcactacaaccttcgcctctcaggctcaagcgagtctcaagcctc

SEQ ID NO: 8767 - DNA, 9 bp, Homo sapiens
  chr1:161367786-161367795
  hypo
ggccaaaaa

SEQ ID NO: 8768 - DNA, 31 bp, Homo sapiens
  chr1:161367881-161367912
  hypo
tatatgtgagcagttccgtcctttttttggc

SEQ ID NO: 8769 - DNA, 31 bp, Homo sapiens
  chr1:161367920-161367951
  hypo
attccattgtatggatcggtctttcacttgt

SEQ ID NO: 8770 - DNA, 31 bp, Homo sapiens
  chr1:161370752-161370783
  hypo
tgaaagagcaaaacttcgtcaaaaaaaaaaa

SEQ ID NO: 8771 - DNA, 31 bp, Homo sapiens
  chr1:161879451-161879482
  hypo
agtgaacagtaagggccggtcacagaggctc

SEQ ID NO: 8772 - DNA, 135 bp, Homo sapiens; identical to SEQ ID NO: 603
  chr1:162039283-162039418
  hypo

SEQ ID NO: 8773 - DNA, 117 bp, Homo sapiens; identical to SEQ ID NO: 604
  chr1:162039485-162039602
  hypo

SEQ ID NO: 8774 - DNA, 82 bp, Homo sapiens; identical to SEQ ID NO: 605
  chr1:162039725-162039807
  hypo

SEQ ID NO: 8775 - DNA, 81 bp, Homo sapiens; identical to SEQ ID NO: 606
  chr1:162039811-162039892
  hypo

SEQ ID NO: 8776 - DNA, 55 bp, Homo sapiens; identical to SEQ ID NO: 607
  chr1:162039917-162039972
  hypo

SEQ ID NO: 8777 - DNA, 82 bp, Homo sapiens; identical to SEQ ID NO: 608
  chr1:162039983-162040065
  hypo

SEQ ID NO: 8778 - DNA, 36 bp, Homo sapiens
  chr1:162116824-162116860
  hypo
ttgataaatacaaggccgggcgcggtggctcatgcc

SEQ ID NO: 8779 - DNA, 31 bp, Homo sapiens
  chr1:162344601-162344632
  hypo
taggggtacaaagggccgttggatcttgggg

SEQ ID NO: 8780 - DNA, 31 bp, Homo sapiens
  chr1:162344656-162344687
  hypo
aagccttggtatttgtcgaggccttcccctc

SEQ ID NO: 8781 - DNA, 31 bp, Homo sapiens
  chr1:164550440-164550471
  hypo
atatccagcagctccccgaccgccatttttt

SEQ ID NO: 8782 - DNA, 31 bp, Homo sapiens
  chr1:164550735-164550766
  hypo
tacaggcatgagccaccgcacccagccccct

SEQ ID NO: 8783 - DNA, 31 bp, Homo sapiens
  chr1:164579428-164579459
  hypo
ccaaccacaatctccccgggaaagagatttg

SEQ ID NO: 8784 - DNA, 31 bp, Homo sapiens
  chr1:164590593-164590624
  hypo
ttatccccaacgggggcgagaattaggttcc

SEQ ID NO: 8785 - DNA, 31 bp, Homo sapiens
  chr1:164667271-164667302
  hypo
ttggattttctagtgtcgggctcttctcttt

SEQ ID NO: 8786 - DNA, 31 bp, Homo sapiens
  chr1:164769264-164769295
  hypo
agactagatgggccatcggtttcacacagta

SEQ ID NO: 8787 - DNA, 24 bp, Homo sapiens
  chr1:165591139-165591163
  hypo
ctggcacagtggctcacgcctgta

SEQ ID NO: 8788 - DNA, 42 bp, Homo sapiens; identical to SEQ ID NO: 610
  chr1:166135600-166135642
  hypo

SEQ ID NO: 8789 - DNA, 31 bp, Homo sapiens
  chr1:167065623-167065654
  hypo
ggataggtgacagtttcgtgtattgctaaga

SEQ ID NO: 8790 - DNA, 44 bp, Homo sapiens; identical to SEQ ID NO: 612
  chr1:167190357-167190401
  hypo

SEQ ID NO: 8791 - DNA, 31 bp, Homo sapiens
  chr1:167393582-167393613
  hypo
tctgcgtgcatgggcacgtgtgcattgctca

SEQ ID NO: 8792 - DNA, 47 bp, Homo sapiens; identical to SEQ ID NO: 613
  chr1:167423948-167423995
  hypo

SEQ ID NO: 8793 - DNA, 55 bp, Homo sapiens; identical to SEQ ID NO: 615
  chr1:167599354-167599409
  hypo

SEQ ID NO: 8794 - DNA, 169 bp, Homo sapiens; identical to SEQ ID NO: 616
  chr1:167599448-167599617
  hypo

SEQ ID NO: 8795 - DNA, 83 bp, Homo sapiens; identical to SEQ ID NO: 617
  chr1:167599661-167599744
  hypo

SEQ ID NO: 8796 - DNA, 31 bp, Homo sapiens; identical to SEQ ID NO: 618
  chr1:167599846-167599877
  hypo

SEQ ID NO: 8797 - DNA, 16 bp, Homo sapiens
  chr1:167741350-167741366
  hypo
ccgaaaaaaggaggag

SEQ ID NO: 8798 - DNA, 20 bp, Homo sapiens
  chr1:167789092-167789112
  hypo
gcgcccggcatgattttcta

SEQ ID NO: 8799 - DNA, 40 bp, Homo sapiens
  chr1:167852541-167852581
  hypo
ctgggattacaggcgtgagccaccacgcccagcctctagg

SEQ ID NO: 8800 - DNA, 22 bp, Homo sapiens
  chr1:168101995-168102017
  hypo
ttttaagatggagtttcgctct

SEQ ID NO: 8801 - DNA, 32 bp, Homo sapiens
  chr1:168116129-168116161
  hypo
aactacacgtagaagccgggtgcggtggctct

SEQ ID NO: 8802 - DNA, 31 bp, Homo sapiens
  chr1:168150960-168150991
  hypo
taaaattccatatctacgatctccttatgta

SEQ ID NO: 8803 - DNA, 30 bp, Homo sapiens
  chr1:168151294-168151324
  hypo
ccgtcccccaccctccgccaaaaaaaaaaa

SEQ ID NO: 8804 - DNA, 29 bp, Homo sapiens
  chr1:168538956-168538985
  hypo
ccttttctggacggacgcgttggctcacg

SEQ ID NO: 8805 - DNA, 27 bp, Homo sapiens
  chr1:168847750-168847777
  hypo
tggatttggccaggcacggtggttcat

SEQ ID NO: 8806 - DNA, 31 bp, Homo sapiens
  chr1:168882769-168882800
  hypo
aagttttcatagctaacgaagaggtggggcc

SEQ ID NO: 8807 - DNA, 59 bp, Homo sapiens
  chr1:168882837-168882896
  hypo
ctgtgctcttaaagtccgatgcctccctaccccaagactccctccgacaagcagcaggg

SEQ ID NO: 8808 - DNA, 48 bp, Homo sapiens; identical to SEQ ID NO: 623
  chr1:169076041-169076089
  hypo

SEQ ID NO: 8809 - DNA, 76 bp, Homo sapiens; identical to SEQ ID NO: 624
  chr1:169076134-169076210
  hypo

SEQ ID NO: 8810 - DNA, 82 bp, Homo sapiens; identical to SEQ ID NO: 625
  chr1:169076243-169076325
  hypo

SEQ ID NO: 8811 - DNA, 5 bp, Homo sapiens
  chr1:169575558-169575563
  hypo
aatgt

SEQ ID NO: 8812 - DNA, 31 bp, Homo sapiens
  chr1:169575616-169575647
  hypo
tttcttctgagaatcccgtaacctccagtat

SEQ ID NO: 8813 - DNA, 44 bp, Homo sapiens
  chr1:169838015-169838059
  hypo
gcaggcagcagtgttccggaagcagctggcgtcaccacaccaga

SEQ ID NO: 8814 - DNA, 38 bp, Homo sapiens
  chr1:169838084-169838122
  hypo
atagtaaggtgcagagcgctggccgacattttggaatg

SEQ ID NO: 8815 - DNA, 31 bp, Homo sapiens
  chr1:169838156-169838187
  hypo
agctggagagaacatccgctgaaactgaaat

SEQ ID NO: 8816 - DNA, 31 bp, Homo sapiens
  chr1:170521417-170521448
  hypo
aggccatttcagcctgcggaggagagtgtga

SEQ ID NO: 8817 - DNA, 82 bp, Homo sapiens
  chr1:171554920-171555002
  hypo
tagaagaatggagatacggttgagggttgagtgtctcttaccgaaatgcttgggaccagaaatgtctcggatttcagattgg

SEQ ID NO: 8818 - DNA, 57 bp, Homo sapiens
  chr1:171555004-171555061
  hypo
tttttttgtgtgtttgcgtatacataatgaggtgtcttggggcgaggggcctgtcta

SEQ ID NO: 8819 - DNA, 31 bp, Homo sapiens
  chr1:171563323-171563354
  hypo
aaacaaatctgtcagccgggcgtggtggctc

SEQ ID NO: 8820 - DNA, 36 bp, Homo sapiens
  chr1:171625524-171625560
  hypo
aacactgacccttggccgggcgcggtgactcatgcc

SEQ ID NO: 8821 - DNA, 21 bp, Homo sapiens
  chr1:173897635-173897656
  hypo
ccgtctcgaggaaaaaaaaaa

SEQ ID NO: 8822 - DNA, 31 bp, Homo sapiens; identical to SEQ ID NO: 633
  chr1:173991621-173991652
  hypo

SEQ ID NO: 8823 - DNA, 95 bp, Homo sapiens
  chr1:173993035-173993130
  hypo
agcagtatgatttttacgttgtttatttttatctcgtcaatatttcaattaaaaatacgttaaaggacagatagatgcagtggctcacgcctgta

SEQ ID NO: 8824 - DNA, 51 bp, Homo sapiens
  chr1:174634544-174634595
  hypo
cctttcttgtctgcctcgcctcgccccgccccgccccgccccgcctcgcct

SEQ ID NO: 8825 - DNA, 31 bp, Homo sapiens
  chr1:174903583-174903614
  hypo
tgaactgttactctcccgtactggctgtgtt

SEQ ID NO: 8826 - DNA, 39 bp, Homo sapiens
  chr1:178007138-178007177
  hypo
cagcgccgcccagccccgggagagcggaagggcggcccg

SEQ ID NO: 8827 - DNA, 104 bp, Homo sapiens; identical to SEQ ID NO: 634
  chr1:178062639-178062743
  hypo

SEQ ID NO: 8828 - DNA, 346 bp, Homo sapiens; identical to SEQ ID NO: 635
  chr1:178062745-178063091
  hypo

SEQ ID NO: 8829 - DNA, 126 bp, Homo sapiens; identical to SEQ ID NO: 636
  chr1:178063111-178063237
  hypo

SEQ ID NO: 8830 - DNA, 200 bp, Homo sapiens; identical to SEQ ID NO: 637
  chr1:178063273-178063473
  hypo

SEQ ID NO: 8831 - DNA, 124 bp, Homo sapiens; identical to SEQ ID NO: 638
  chr1:178063567-178063691
  hypo

SEQ ID NO: 8832 - DNA, 57 bp, Homo sapiens; identical to SEQ ID NO: 639
  chr1:178063716-178063773
  hypo

SEQ ID NO: 8833 - DNA, 31 bp, Homo sapiens
  chr1:178099910-178099941
  hypo
aaaaaataacatttgtcgcctgtaatcccag

SEQ ID NO: 8834 - DNA, 12 bp, Homo sapiens
  chr1:178099943-178099955
  hypo
ctttgggaggcc

SEQ ID NO: 8835 - DNA, 21 bp, Homo sapiens
  chr1:178197698-178197719
  hypo
agactccgtcccggggaaacg

SEQ ID NO: 8836 - DNA, 31 bp, Homo sapiens
  chr1:178228197-178228228
  hypo
agtagtttcttagggccgagggggatgggtg

SEQ ID NO: 8837 - DNA, 31 bp, Homo sapiens
  chr1:178228553-178228584
  hypo
aagaatgttctaaaatcgtctatgttgattg

SEQ ID NO: 8838 - DNA, 31 bp, Homo sapiens
  chr1:178271748-178271779
  hypo
cttaccaccacatacacgtatacaaattggc

SEQ ID NO: 8839 - DNA, 31 bp, Homo sapiens
  chr1:178271785-178271816
  hypo
attctaaaattcatctcgaaatgccatagac

SEQ ID NO: 8840 - DNA, 18 bp, Homo sapiens
  chr1:178271881-178271899
  hypo
aaaaagtataataggccg

SEQ ID NO: 8841 - DNA, 40 bp, Homo sapiens
  chr1:178465303-178465343
  hypo
ccagccccatgcagggcgcccctcccgccggcctctccag

SEQ ID NO: 8842 - DNA, 14 bp, Homo sapiens
  chr1:178665799-178665813
  hypo
gacagagccagact

SEQ ID NO: 8843 - DNA, 31 bp, Homo sapiens; identical to SEQ ID NO: 640
  chr1:178694819-178694850
  hypo

SEQ ID NO: 8844 - DNA, 19 bp, Homo sapiens
  chr1:178988891-178988910
  hypo
tggccgagaccctttcttg

SEQ ID NO: 8845 - DNA, 31 bp, Homo sapiens
  chr1:178988944-178988975
  hypo
accatttctttcaaagcgttgctaacatctc

SEQ ID NO: 8846 - DNA, 31 bp, Homo sapiens
  chr1:178994187-178994218
  hypo
aggcacactaagtttgcgctttagtatatgg

SEQ ID NO: 8847 - DNA, 31 bp, Homo sapiens
  chr1:178994226-178994257
  hypo
tggatggacacagtggcggctctgtataagt

SEQ ID NO: 8848 - DNA, 64 bp, Homo sapiens
  chr1:178994284-178994348
  hypo
gaatctttcattcacacgatttatccgcgcccactgggtgcactacggtcgggcattggcgacc

SEQ ID NO: 8849 - DNA, 31 bp, Homo sapiens
  chr1:179262293-179262324
  hypo
tacaggcgtgagccaccgcacctggcctcaa

SEQ ID NO: 8850 - DNA, 45 bp, Homo sapiens
  chr1:180478156-180478201
  hypo
gcccgctgccctggcacgggatccaccaggcgaagctggctgacc

SEQ ID NO: 8851 - DNA, 52 bp, Homo sapiens
  chr1:180885189-180885241
  hypo
tctggacaggactcaacgccaagacactttggggccccgggaggttgtgggg

SEQ ID NO: 8852 - DNA, 82 bp, Homo sapiens
  chr1:180888524-180888606
  hypo
ccacagtgttgaggagcgtgactacagaaaggcctgtgggcctcagccggctctgctcccctgtctgcgccctgttcaagtt

SEQ ID NO: 8853 - DNA, 31 bp, Homo sapiens
  chr1:180888618-180888649
  hypo
tttccctctttctgtgcggagccctggagga

SEQ ID NO: 8854 - DNA, 31 bp, Homo sapiens
  chr1:180888672-180888703
  hypo
tctgcagaggtggtgccgcctctgcctgcag

SEQ ID NO: 8855 - DNA, 31 bp, Homo sapiens
  chr1:180925243-180925274
  hypo
aagaagctctgcccagcgctctctggctgtg

SEQ ID NO: 8856 - DNA, 36 bp, Homo sapiens
  chr1:181382649-181382685
  hypo
acatcatcaaggcccacgaggcgcacaagatgcaga

SEQ ID NO: 8857 - DNA, 31 bp, Homo sapiens
  chr1:181382823-181382854
  hypo
tgctttcgctgtgctgcgactaacgagaggc

SEQ ID NO: 8858 - DNA, 31 bp, Homo sapiens
  chr1:182148662-182148693
  hypo
ataactccattaactccgtctctgggtgata

SEQ ID NO: 8859 - DNA, 31 bp, Homo sapiens
  chr1:182292205-182292236
  hypo
attttattatttgagacggcgtctcactctg

SEQ ID NO: 8860 - DNA, 31 bp, Homo sapiens; identical to SEQ ID NO: 643
  chr1:182584115-182584146
  hypo

SEQ ID NO: 8861 - DNA, 146 bp, Homo sapiens; identical to SEQ ID NO: 644
  chr1:182584162-182584308
  hypo

SEQ ID NO: 8862 - DNA, 28 bp, Homo sapiens
  chr1:182584311-182584339
  hypo
agcagtcaccaggaacgcggcgttttgg

SEQ ID NO: 8863 - DNA, 13 bp, Homo sapiens
  chr1:182584403-182584416
  hypo
cggcctgcggctc

SEQ ID NO: 8864 - DNA, 102 bp, Homo sapiens; identical to SEQ ID NO: 647
  chr1:182584456-182584558
  hypo

SEQ ID NO: 8865 - DNA, 52 bp, Homo sapiens; identical to SEQ ID NO: 648
  chr1:182584561-182584613
  hypo

SEQ ID NO: 8866 - DNA, 36 bp, Homo sapiens
  chr1:182992749-182992785
  hypo
ccccaggctcaagcagcgaagcggcctccgggggac

SEQ ID NO: 8867 - DNA, 117 bp, Homo sapiens; identical to SEQ ID NO: 649
  chr1:182992919-182993036
  hypo

SEQ ID NO: 8868 - DNA, 31 bp, Homo sapiens
  chr1:183129204-183129235
  hypo
tggctccgtcactgggcgtgtgcatgactgt

SEQ ID NO: 8869 - DNA, 51 bp, Homo sapiens
  chr1:183129381-183129432
  hypo
ccaaaggaagaaagagcgcctgaagcatgtgttcaccgggcaactatgaat

SEQ ID NO: 8870 - DNA, 31 bp, Homo sapiens
  chr1:184333000-184333031
  hypo
cttcctcctgggtccccggcagaggctgggg

SEQ ID NO: 8871 - DNA, 31 bp, Homo sapiens
  chr1:184333052-184333083
  hypo
agtgttgcttccagctcggatggaagctctc

SEQ ID NO: 8872 - DNA, 31 bp, Homo sapiens
  chr1:184333135-184333166
  hypo
caggcagatgagtgcccgagcttggcaccat

SEQ ID NO: 8873 - DNA, 74 bp, Homo sapiens; identical to SEQ ID NO: 653
  chr1:184355814-184355888
  hypo

SEQ ID NO: 8874 - DNA, 71 bp, Homo sapiens; identical to SEQ ID NO: 654
  chr1:184355957-184356028
  hypo

SEQ ID NO: 8875 - DNA, 141 bp, Homo sapiens; identical to SEQ ID NO: 655
  chr1:184356073-184356214
  hypo

SEQ ID NO: 8876 - DNA, 97 bp, Homo sapiens; identical to SEQ ID NO: 656
  chr1:184356590-184356687
  hypo

SEQ ID NO: 8877 - DNA, 31 bp, Homo sapiens
  chr1:184442500-184442531
  hypo
cttacctctctctaagcgctgtggtttcagg

SEQ ID NO: 8878 - DNA, 53 bp, Homo sapiens
  chr1:184764468-184764521
  hypo
ggccccaggggctcctcggtgagccctccactggctggcggagaggctgggct

SEQ ID NO: 8879 - DNA, 31 bp, Homo sapiens
  chr1:184774919-184774950
  hypo
actggagaaactgcagcggactgacagtcac

SEQ ID NO: 8880 - DNA, 31 bp, Homo sapiens
  chr1:185413916-185413947
  hypo
gaacacttgcttggcacgaattctaagtctt

SEQ ID NO: 8881 - DNA, 31 bp, Homo sapiens
  chr1:185630509-185630540
  hypo
tcttttaacctgtgttcgattcattcagaac

SEQ ID NO: 8882 - DNA, 49 bp, Homo sapiens
  chr1:186344812-186344861
  hypo
ggcgcccagaagggggcggggtggcgaccgcagtcgctttggctgaggc

SEQ ID NO: 8883 - DNA, 65 bp, Homo sapiens
  chr1:193149420-193149485
  hypo
tttctaatgtagtttacggtggcgatacctgcctgccttttcttttgctgcgttggcacaggcat

SEQ ID NO: 8884 - DNA, 44 bp, Homo sapiens
  chr1:193149560-193149604
  hypo
ggctgtatttacagctcgaataagagactcgccagtgattgaac

SEQ ID NO: 8885 - DNA, 76 bp, Homo sapiens
  chr1:198124723-198124799
  hypo
ggcctccttttgagatcgtgaacgttttcatttatttatttatttttttgagacggattttcgctctttcacccac

SEQ ID NO: 8886 - DNA, 31 bp, Homo sapiens
  chr1:200513746-200513777
  hypo
agacagaacaagattccgtctcaaagaaacg

SEQ ID NO: 8887 - DNA, 31 bp, Homo sapiens
  chr1:200556915-200556946
  hypo
aacaagaatgaaactccgtctcaaaataaaa

SEQ ID NO: 8888 - DNA, 31 bp, Homo sapiens
  chr1:200589466-200589497
  hypo
tccaaaccaaaacatccggtgattctgttct

SEQ ID NO: 8889 - DNA, 236 bp, Homo sapiens; identical to SEQ ID NO: 657
  chr1:200708631-200708867
  hypo

SEQ ID NO: 8890 - DNA, 31 bp, Homo sapiens
  chr1:200937987-200938018
  hypo
cgtgcaccacgcacagcgtagtccaggccct

SEQ ID NO: 8891 - DNA, 49 bp, Homo sapiens
  chr1:200941619-200941668
  hypo
cccgccttcccgggggcgctgggcacaagacctcgcgagtgagaagaca

SEQ ID NO: 8892 - DNA, 39 bp, Homo sapiens
  chr1:200942599-200942638
  hypo
tccaggctgctggggtcgagggtccgggggcatccctct

SEQ ID NO: 8893 - DNA, 68 bp, Homo sapiens
  chr1:200942643-200942711
  hypo
cactcctagggtgggccgctgtggggtaaccgccggacactccagaacttcaccgtcaggtcactggg

SEQ ID NO: 8894 - DNA, 31 bp, Homo sapiens
  chr1:200951960-200951991
  hypo
ccccagctctagctggcgcagtccaaggcct

SEQ ID NO: 8895 - DNA, 51 bp, Homo sapiens
  chr1:200956135-200956186
  hypo
cgggtaggcagactgacggtgcgcgagaccctgtcccggtaataggggtct

SEQ ID NO: 8896 - DNA, 31 bp, Homo sapiens
  chr1:200964905-200964936
  hypo
atagtaaatgttcaaacgatggtaactgtta

SEQ ID NO: 8897 - DNA, 20 bp, Homo sapiens
  chr1:200970224-200970244
  hypo
aactccgtctcagaaaaaaa

SEQ ID NO: 8898 - DNA, 31 bp, Homo sapiens
  chr1:201036179-201036210
  hypo
acagacaagggcttctcgcctctgctcagga

SEQ ID NO: 8899 - DNA, 31 bp, Homo sapiens; identical to SEQ ID NO: 658
  chr1:201050380-201050411
  hypo

SEQ ID NO: 8900 - DNA, 31 bp, Homo sapiens
  chr1:201069412-201069443
  hypo
gctaaaggcaaggaggcgttgcctgctgtga

SEQ ID NO: 8901 - DNA, 59 bp, Homo sapiens; identical to SEQ ID NO: 660
  chr1:201083369-201083428
  hypo

SEQ ID NO: 8902 - DNA, 122 bp, Homo sapiens; identical to SEQ ID NO: 661
  chr1:201083442-201083564
  hypo

SEQ ID NO: 8903 - DNA, 31 bp, Homo sapiens; identical to SEQ ID NO: 662
  chr1:201083641-201083672
  hypo

SEQ ID NO: 8904 - DNA, 37 bp, Homo sapiens
  chr1:201168309-201168346
  hypo
tccctcttgctgggatcgtccacgccttagaggacag

SEQ ID NO: 8905 - DNA, 31 bp, Homo sapiens
  chr1:201168413-201168444
  hypo
ccctgcttgtccacatcgactccttcctctc

SEQ ID NO: 8906 - DNA, 59 bp, Homo sapiens
  chr1:201168453-201168512
  hypo
tgttgcagttggctttcggaagaatcggaagaggcacagggaaccgcaggaaggtaggc

SEQ ID NO: 8907 - DNA, 31 bp, Homo sapiens
  chr1:201187509-201187540
  hypo
gggaactgagtcacagcgggtggagggatgt

SEQ ID NO: 8908 - DNA, 38 bp, Homo sapiens
  chr1:201244906-201244944
  hypo
aaggaggagggaaccccggtccccgtgtgggggaagta

SEQ ID NO: 8909 - DNA, 31 bp, Homo sapiens
  chr1:201244970-201245001
  hypo
gaccacatcaccatgccgctctctactcagc

SEQ ID NO: 8910 - DNA, 49 bp, Homo sapiens
  chr1:201245047-201245096
  hypo
ccccttccacctctgccgttctgaagtctccaagcgtagtaatggcaga

SEQ ID NO: 8911 - DNA, 51 bp, Homo sapiens
  chr1:201261830-201261881
  hypo
ccacagacagggtttccgatgggggagtctgaccatcgctttagagaaaag

SEQ ID NO: 8912 - DNA, 51 bp, Homo sapiens
  chr1:201261955-201262006
  hypo
agtgtgggccaggccacggagccatggcttgctcttcgtggagctcccagt

SEQ ID NO: 8913 - DNA, 31 bp, Homo sapiens
  chr1:201262008-201262039
  hypo
agctgagggaatgggacgcagggcagaatga

SEQ ID NO: 8914 - DNA, 56 bp, Homo sapiens
  chr1:201355457-201355513
  hypo
ccaacctggagtgtgacgggtgggaggcgggaggccacagtcggagggtctgaagc

SEQ ID NO: 8915 - DNA, 40 bp, Homo sapiens
  chr1:201355587-201355627
  hypo
ttcccccagaggctggcggctcctgcgccaggggctgctc

SEQ ID NO: 8916 - DNA, 31 bp, Homo sapiens
  chr1:201358467-201358498
  hypo
aaacccaggaccctcccgaggcaggctcctc

SEQ ID NO: 8917 - DNA, 31 bp, Homo sapiens
  chr1:201380508-201380539
  hypo
agacttgaggttggcccgcagatccatggac

SEQ ID NO: 8918 - DNA, 31 bp, Homo sapiens; identical to SEQ ID NO: 666
  chr1:201507612-201507643
  hypo

SEQ ID NO: 8919 - DNA, 56 bp, Homo sapiens; identical to SEQ ID NO: 669
  chr1:201977861-201977917
  hypo

SEQ ID NO: 8920 - DNA, 31 bp, Homo sapiens; identical to SEQ ID NO: 670
  chr1:201977931-201977962
  hypo

SEQ ID NO: 8921 - DNA, 31 bp, Homo sapiens
  chr1:202022786-202022817
  hypo
cagatgcagccaggcacggtggctcaagcct

SEQ ID NO: 8922 - DNA, 5 bp, Homo sapiens
  chr1:202022824-202022829
  hypo
cagca

SEQ ID NO: 8923 - DNA, 28 bp, Homo sapiens
  chr1:202032891-202032919
  hypo
caacaatgtgagacgctgtctcaaaaaa

SEQ ID NO: 8924 - DNA, 31 bp, Homo sapiens
  chr1:202032940-202032971
  hypo
ataaagacaggattttcgaaaaactttcagg

SEQ ID NO: 8925 - DNA, 31 bp, Homo sapiens
  chr1:202049891-202049922
  hypo
aaggatggagatgaaacgggtgagggtaggc

SEQ ID NO: 8926 - DNA, 25 bp, Homo sapiens
  chr1:202051925-202051950
  hypo
agccaccgcccggcctgggaagact

SEQ ID NO: 8927 - DNA, 39 bp, Homo sapiens
  chr1:202052583-202052622
  hypo
caaaagttttctcactcggaggctcggtctccccatctg

SEQ ID NO: 8928 - DNA, 43 bp, Homo sapiens
  chr1:202058379-202058422
  hypo
tgagtcccagagaagtcgaggtcaaggtcgagtaactgtcttt

SEQ ID NO: 8929 - DNA, 29 bp, Homo sapiens
  chr1:202085507-202085536
  hypo
actgcgcccggcctcgaatgtgaatttca

SEQ ID NO: 8930 - DNA, 62 bp, Homo sapiens
  chr1:202097361-202097423
  hypo
agaacgtctgcaacatcgtggtggcctacctctccaccgagctgacccgccagaccctggac

SEQ ID NO: 8931 - DNA, 31 bp, Homo sapiens
  chr1:202115853-202115884
  hypo
caggcatgagccaccacgccaggccagcaat

SEQ ID NO: 8932 - DNA, 31 bp, Homo sapiens
  chr1:202115900-202115931
  hypo
gaagccacatggtttacggtagtgtgaattg

SEQ ID NO: 8933 - DNA, 31 bp, Homo sapiens
  chr1:202127154-202127185
  hypo
acttgcccagggtgcccgtgagagaatggtt

SEQ ID NO: 8934 - DNA, 31 bp, Homo sapiens
  chr1:202218131-202218162
  hypo
ctttgagcatctcctgcgtgatagataccag

SEQ ID NO: 8935 - DNA, 61 bp, Homo sapiens
  chr1:202218200-202218261
  hypo
caccagtaccactcaccgaggctccactgcagccgactcctgacttcgctctctcctcccc

SEQ ID NO: 8936 - DNA, 31 bp, Homo sapiens
  chr1:202218290-202218321
  hypo
gttcttcatctacaggcgaagcattcttacc

SEQ ID NO: 8937 - DNA, 50 bp, Homo sapiens
  chr1:202287418-202287468
  hypo
ccgcagtgcagtgcagcgtctccgtctcctgtgtccgggcctatgggaag

SEQ ID NO: 8938 - DNA, 31 bp, Homo sapiens
  chr1:202287547-202287578
  hypo
cctcagtgggagaatacggggcctccccact

SEQ ID NO: 8939 - DNA, 31 bp, Homo sapiens
  chr1:202287658-202287689
  hypo
gtttcctggtcgtggccggtgcctacatcaa

SEQ ID NO: 8940 - DNA, 31 bp, Homo sapiens
  chr1:202287691-202287722
  hypo
tgtactgtgacctgccgcggggcgactttga

SEQ ID NO: 8941 - DNA, 41 bp, Homo sapiens
  chr1:202287825-202287866
  hypo
ggcctcttccctgtcacgcccgaggccgtcaagtctgtcct

SEQ ID NO: 8942 - DNA, 31 bp, Homo sapiens
  chr1:202306342-202306373
  hypo
acaggcgtgagccaccgcgcccagccaacac

SEQ ID NO: 8943 - DNA, 31 bp, Homo sapiens
  chr1:202455900-202455931
  hypo
actccagcatgggcaacgaagtaagactcaa

SEQ ID NO: 8944 - DNA, 31 bp, Homo sapiens; identical to SEQ ID NO: 672
  chr1:202612864-202612895
  hypo

SEQ ID NO: 8945 - DNA, 91 bp, Homo sapiens; identical to SEQ ID NO: 673
  chr1:202612931-202613022
  hypo

SEQ ID NO: 8946 - DNA, 31 bp, Homo sapiens
  chr1:202898298-202898329
  hypo
cattctaaatttacaacgtgtccccatcttc

SEQ ID NO: 8947 - DNA, 63 bp, Homo sapiens
  chr1:202933729-202933792
  hypo
tgtaatgcacctgtcccgccggcaatcattcccagtttcttcgccactcggggttctggtgga

SEQ ID NO: 8948 - DNA, 31 bp, Homo sapiens
  chr1:202933854-202933885
  hypo
aataaagtcaatacagcgaacttagaaaaca

SEQ ID NO: 8949 - DNA, 31 bp, Homo sapiens; identical to SEQ ID NO: 675
  chr1:202935961-202935992
  hypo

SEQ ID NO: 8950 - DNA, 31 bp, Homo sapiens
  chr1:202940672-202940703
  hypo
caggcatgagccactgcgcctggccccagct

SEQ ID NO: 8951 - DNA, 31 bp, Homo sapiens
  chr1:202995300-202995331
  hypo
ttgacaattacaaggccgagactaaggccaa

SEQ ID NO: 8952 - DNA, 31 bp, Homo sapiens
  chr1:203054705-203054736
  hypo
gtactggatggcactgcgcaggatctccacc

SEQ ID NO: 8953 - DNA, 36 bp, Homo sapiens
  chr1:203140949-203140985
  hypo
tgcggaaggatgaagccgtctcgctgggtctcagct

SEQ ID NO: 8954 - DNA, 31 bp, Homo sapiens; identical to SEQ ID NO: 676
  chr1:203143408-203143439
  hypo

SEQ ID NO: 8955 - DNA, 31 bp, Homo sapiens
  chr1:203242259-203242290
  hypo
gacggaaaggagggagcgggagaatttctgc

SEQ ID NO: 8956 - DNA, 31 bp, Homo sapiens; identical to SEQ ID NO: 678
  chr1:203561334-203561365
  hypo

SEQ ID NO: 8957 - DNA, 31 bp, Homo sapiens
  chr1:204003760-204003791
  hypo
gctgccaccatgccggcgtatgttactaagt

SEQ ID NO: 8958 - DNA, 31 bp, Homo sapiens
  chr1:204003834-204003865
  hypo
agagaggtgagagtttcgcaggggggcagtc

SEQ ID NO: 8959 - DNA, 16 bp, Homo sapiens
  chr1:204003906-204003922
  hypo
ggcatggtggctcaca

SEQ ID NO: 8960 - DNA, 31 bp, Homo sapiens
  chr1:204031964-204031995
  hypo
ccagtcacattggattcggacccactctcgt

SEQ ID NO: 8961 - DNA, 88 bp, Homo sapiens; identical to SEQ ID NO: 686
  chr1:204043483-204043571
  hypo

SEQ ID NO: 8962 - DNA, 20 bp, Homo sapiens
  chr1:204066524-204066544
  hypo
aacttgcttatgaggccggg

SEQ ID NO: 8963 - DNA, 31 bp, Homo sapiens
  chr1:204091447-204091478
  hypo
gagcagctgtgtgccccgcccccccagccat

SEQ ID NO: 8964 - DNA, 31 bp, Homo sapiens
  chr1:204092697-204092728
  hypo
ctggtcaagtaggggacgtctctctgctggc

SEQ ID NO: 8965 - DNA, 31 bp, Homo sapiens
  chr1:204093984-204094015
  hypo
cgtgagcaggcccccccgcaggcagccagga

SEQ ID NO: 8966 - DNA, 35 bp, Homo sapiens
  chr1:204094089-204094124
  hypo
gggtgctgtgtgtatgcgtacgtgtgtgtgttatc

SEQ ID NO: 8967 - DNA, 40 bp, Homo sapiens
  chr1:204094128-204094168
  hypo
tatagctgagcctgcacgtgcgacccgactgtgtatggct

SEQ ID NO: 8968 - DNA, 31 bp, Homo sapiens
  chr1:204106497-204106528
  hypo
gcccaaggaggcggcccgagaaggcagcttc

SEQ ID NO: 8969 - DNA, 21 bp, Homo sapiens
  chr1:204122434-204122455
  hypo
atttgagacagaatttcgctc

SEQ ID NO: 8970 - DNA, 31 bp, Homo sapiens
  chr1:204125071-204125102
  hypo
tcttgagtatggaagacgtctcagcagacaa

SEQ ID NO: 8971 - DNA, 31 bp, Homo sapiens
  chr1:204187311-204187342
  hypo
caacatgcagaagccccgctgagcctgccag

SEQ ID NO: 8972 - DNA, 31 bp, Homo sapiens
  chr1:204197938-204197969
  hypo
ctccaggtcaatgtaccgttcagggatgagg

SEQ ID NO: 8973 - DNA, 31 bp, Homo sapiens
  chr1:204198307-204198338
  hypo
ctttcccttcccagctcgcctgatctagctg

SEQ ID NO: 8974 - DNA, 31 bp, Homo sapiens
  chr1:204199618-204199649
  hypo
ggagccactctggtgccgccgcattcggtca

SEQ ID NO: 8975 - DNA, 59 bp, Homo sapiens
  chr1:204212335-204212394
  hypo
ggagactccagggggacgtaggctttggggaggggaggccgaggcgggccaggttcctg

SEQ ID NO: 8976 - DNA, 31 bp, Homo sapiens
  chr1:204216413-204216444
  hypo
acctttgcttttgtctcgaggccaactcctc

SEQ ID NO: 8977 - DNA, 31 bp, Homo sapiens
  chr1:204217169-204217200
  hypo
ccgagccacactttcacggggctttttctgc

SEQ ID NO: 8978 - DNA, 31 bp, Homo sapiens
  chr1:204217218-204217249
  hypo
tccaagcagtctgtgtcggaaggtctgccct

SEQ ID NO: 8979 - DNA, 31 bp, Homo sapiens
  chr1:204220390-204220421
  hypo
ttcaagagcagagttgcgatccccagcatgg

SEQ ID NO: 8980 - DNA, 86 bp, Homo sapiens
  chr1:204226615-204226701
  hypo
gccctggctgggtgagcggggcacagagtgggagcggggctgcagggacaggcggcgcagggagctagaggcggcatccagctcat

SEQ ID NO: 8981 - DNA, 97 bp, Homo sapiens
  chr1:204226702-204226799
  hypo
ataatagactggctgccgggaggggcttgggatccagacggtggcatcctgccgcccgtagctggcgggctccttccactctcgcagctggtaggca

SEQ ID NO: 8982 - DNA, 108 bp, Homo sapiens
  chr1:204226833-204226941
  hypo
cctccagggcccagggcgggctgatccgatcataggccggcatggaacagatgctctccggccgcactcctggcgggtagtactgataatcatcggggtactgggagg

SEQ ID NO: 8983 - DNA, 31 bp, Homo sapiens
  chr1:204228402-204228433
  hypo
cgggggtaccccccggcgcagattcacccac

SEQ ID NO: 8984 - DNA, 100 bp, Homo sapiens
  chr1:204228471-204228571
  hypo
tttgtcagggttggtgcgtggtgggaaactccgccggtgtcccccagtctctccatcctgagacgggaaagctgtgctccctggccggcttggggagtgg

SEQ ID NO: 8985 - DNA, 31 bp, Homo sapiens
  chr1:204286091-204286122
  hypo
caatcacataatctaccgtgccatctgcagc

SEQ ID NO: 8986 - DNA, 89 bp, Homo sapiens; identical to SEQ ID NO: 690
  chr1:204347105-204347194
  hypo

SEQ ID NO: 8987 - DNA, 57 bp, Homo sapiens; identical to SEQ ID NO: 691
  chr1:204347196-204347253
  hypo

SEQ ID NO: 8988 - DNA, 54 bp, Homo sapiens; identical to SEQ ID NO: 692
  chr1:204347293-204347347
  hypo

SEQ ID NO: 8989 - DNA, 31 bp, Homo sapiens; identical to SEQ ID NO: 693
  chr1:204347367-204347398
  hypo

SEQ ID NO: 8990 - DNA, 31 bp, Homo sapiens
  chr1:204358693-204358724
  hypo
tgtgggagcaaactttcgatccagtctactc

SEQ ID NO: 8991 - DNA, 31 bp, Homo sapiens
  chr1:204394217-204394248
  hypo
gaatccagagggaacccgagagggagatggt

SEQ ID NO: 8992 - DNA, 31 bp, Homo sapiens
  chr1:204487137-204487168
  hypo
aatcagtgtcatagagcgagcttccagtccc

SEQ ID NO: 8993 - DNA, 31 bp, Homo sapiens; identical to SEQ ID NO: 694
  chr1:204487762-204487793
  hypo

SEQ ID NO: 8994 - DNA, 31 bp, Homo sapiens
  chr1:204497982-204498013
  hypo
cgagctgtcatggtgacgacgtccttgaagc

SEQ ID NO: 8995 - DNA, 31 bp, Homo sapiens
  chr1:204665809-204665840
  hypo
gactataaaaggagagcgtgagggatctttg

SEQ ID NO: 8996 - DNA, 47 bp, Homo sapiens
  chr1:204721216-204721263
  hypo
ctgtagccgcccaacccgcagctacagacccacgcctcctgctgtat

SEQ ID NO: 8997 - DNA, 31 bp, Homo sapiens
  chr1:204954944-204954975
  hypo
caagcaaaggaaagaccggtcactaccacca

SEQ ID NO: 8998 - DNA, 31 bp, Homo sapiens
  chr1:204955016-204955047
  hypo
cagcctgcctctgtcccgaaggcctactact

SEQ ID NO: 8999 - DNA, 42 bp, Homo sapiens
  chr1:204955102-204955144
  hypo
cagcttccctggtgaccgcctccgtggcgtggtgtcccgcct

SEQ ID NO: 9000 - DNA, 31 bp, Homo sapiens
  chr1:204962416-204962447
  hypo
gccggggtagtcaacacgccatgtggacatt

SEQ ID NO: 9001 - DNA, 21 bp, Homo sapiens
  chr1:205051221-205051242
  hypo
gccaccgcgcctggccagaaa

SEQ ID NO: 9002 - DNA, 24 bp, Homo sapiens
  chr1:205094556-205094580
  hypo
ttttttttttttgagacggagtct

SEQ ID NO: 9003 - DNA, 46 bp, Homo sapiens
  chr1:205144483-205144529
  hypo
tgctgggattacaggcgtgagccaccgtgcccgccagaagctgcct

SEQ ID NO: 9004 - DNA, 20 bp, Homo sapiens
  chr1:205174866-205174886
  hypo
ccagccgaaaatgcctattt

SEQ ID NO: 9005 - DNA, 31 bp, Homo sapiens
  chr1:205250964-205250995
  hypo
ttcaaacctgtagaaacgttggcttgggcca

SEQ ID NO: 9006 - DNA, 40 bp, Homo sapiens
  chr1:205310684-205310724
  hypo
aactacaagcctgggtcgacagcaccggctcagtgccttc

SEQ ID NO: 9007 - DNA, 86 bp, Homo sapiens; identical to SEQ ID NO: 695
  chr1:205399678-205399764
  hypo

SEQ ID NO: 9008 - DNA, 54 bp, Homo sapiens; identical to SEQ ID NO: 696
  chr1:205399774-205399828
  hypo

SEQ ID NO: 9009 - DNA, 163 bp, Homo sapiens; identical to SEQ ID NO: 697
  chr1:205399831-205399994
  hypo

SEQ ID NO: 9010 - DNA, 31 bp, Homo sapiens; identical to SEQ ID NO: 698
  chr1:205400013-205400044
  hypo

SEQ ID NO: 9011 - DNA, 82 bp, Homo sapiens; identical to SEQ ID NO: 699
  chr1:205400052-205400134
  hypo

SEQ ID NO: 9012 - DNA, 31 bp, Homo sapiens; identical to SEQ ID NO: 702
  chr1:205426080-205426111
  hypo

SEQ ID NO: 9013 - DNA, 31 bp, Homo sapiens
  chr1:207130058-207130089
  hypo
caagcaaggggcacggcgatccagaacatag

SEQ ID NO: 9014 - DNA, 31 bp, Homo sapiens
  chr1:207130092-207130123
  hypo
tggaggtgggctgctccgagtggcctttgct

SEQ ID NO: 9015 - DNA, 31 bp, Homo sapiens
  chr1:207130175-207130206
  hypo
atgtctgtcctatctccgttacaggattatt

SEQ ID NO: 9016 - DNA, 31 bp, Homo sapiens
  chr1:207130211-207130242
  hypo
caggtcattgagaaagcgaacaggaaaatag

SEQ ID NO: 9017 - DNA, 13 bp, Homo sapiens
  chr1:207405709-207405722
  hypo
agaacagactaat

SEQ ID NO: 9018 - DNA, 31 bp, Homo sapiens
  chr1:207596502-207596533
  hypo
gactggccaccataaccgtgagtgaaagcag

SEQ ID NO: 9019 - DNA, 31 bp, Homo sapiens
  chr1:207832515-207832546
  hypo
atggaggatgggatcccgccaagggaactct

SEQ ID NO: 9020 - DNA, 31 bp, Homo sapiens; identical to SEQ ID NO: 708
  chr1:208084210-208084241
  hypo

SEQ ID NO: 9021 - DNA, 31 bp, Homo sapiens
  chr1:208201565-208201596
  hypo
ccgggcccaggtccttcgagggcactgatgt

SEQ ID NO: 9022 - DNA, 56 bp, Homo sapiens
  chr1:208212990-208213046
  hypo
cggatgagcttgtcctcgctcagggagtagcgggcctcgcccgtgatggcatcaat

SEQ ID NO: 9023 - DNA, 31 bp, Homo sapiens
  chr1:208213089-208213120
  hypo
aagagtggctcccctgcgcactcctgtgggc

SEQ ID NO: 9024 - DNA, 74 bp, Homo sapiens
  chr1:208213129-208213203
  hypo
gcaggaggtgtgggcacggcctcctcaggtttgtacgttttccctttcctctctcggagcgaggccagtggaag

SEQ ID NO: 9025 - DNA, 31 bp, Homo sapiens
  chr1:208215054-208215085
  hypo
acagctctagaggcaccgggaggaagagact

SEQ ID NO: 9026 - DNA, 31 bp, Homo sapiens
  chr1:208317146-208317177
  hypo
gtattgactacctactcgaattgttctctaa

SEQ ID NO: 9027 - DNA, 31 bp, Homo sapiens
  chr1:208397335-208397366
  hypo
ggccccatcttttccccgtgggtggaatgct

SEQ ID NO: 9028 - DNA, 31 bp, Homo sapiens
  chr1:208405048-208405079
  hypo
ggttgagagcagcatacgcatcaccagttta

SEQ ID NO: 9029 - DNA, 306 bp, Homo sapiens; identical to SEQ ID NO: 709
  chr1:208416771-208417077
  hypo

SEQ ID NO: 9030 - DNA, 42 bp, Homo sapiens; identical to SEQ ID NO: 711
  chr1:208417260-208417302
  hypo

SEQ ID NO: 9031 - DNA, 31 bp, Homo sapiens; identical to SEQ ID NO: 713
  chr1:208418805-208418836
  hypo

SEQ ID NO: 9032 - DNA, 31 bp, Homo sapiens
  chr1:209790962-209790993
  hypo
ggtgggtctcataggtcggggggttcatccc

SEQ ID NO: 9033 - DNA, 31 bp, Homo sapiens
  chr1:209808685-209808716
  hypo
atttcccctttccccacgttcactcttactc

SEQ ID NO: 9034 - DNA, 28 bp, Homo sapiens
  chr1:209814136-209814164
  hypo
ctagcacaggccaggcgcggtggctcac

SEQ ID NO: 9035 - DNA, 47 bp, Homo sapiens
  chr1:210560010-210560057
  hypo
agtgtgcatctctccacgctcctcttggcctccgtggtcctttctgg

SEQ ID NO: 9036 - DNA, 45 bp, Homo sapiens
  chr1:210857128-210857173
  hypo
ggcactcggaccctggcgcctgtagctttgcgtggtctggcaccc

SEQ ID NO: 9037 - DNA, 31 bp, Homo sapiens
  chr1:210857408-210857439
  hypo
gggggcctcattctttcgtttcatgcgttct

SEQ ID NO: 9038 - DNA, 10 bp, Homo sapiens
  chr1:211430455-211430465
  hypo
tggcctatca

SEQ ID NO: 9039 - DNA, 31 bp, Homo sapiens
  chr1:211430530-211430561
  hypo
ggcatttccaagatttcgccttagacctttt

SEQ ID NO: 9040 - DNA, 31 bp, Homo sapiens
  chr1:211518071-211518102
  hypo
gtgctttctcctccttcgttttcctttcctt

SEQ ID NO: 9041 - DNA, 31 bp, Homo sapiens
  chr1:211824878-211824909
  hypo
cagcacatcctggcagcgtgttctccttagc

SEQ ID NO: 9042 - DNA, 31 bp, Homo sapiens
  chr1:211824918-211824949
  hypo
actcctggatctggtccgccaggcctggttc

SEQ ID NO: 9043 - DNA, 31 bp, Homo sapiens
  chr1:211969081-211969112
  hypo
ctccaatggagacacacggacatacaaacac

SEQ ID NO: 9044 - DNA, 31 bp, Homo sapiens
  chr1:211990520-211990551
  hypo
tcatattagggggaaacgtatatattgatct

SEQ ID NO: 9045 - DNA, 341 bp, Homo sapiens; identical to SEQ ID NO: 717
  chr1:212003415-212003756
  hypo

SEQ ID NO: 9046 - DNA, 62 bp, Homo sapiens; identical to SEQ ID NO: 718
  chr1:212003805-212003867
  hypo

SEQ ID NO: 9047 - DNA, 196 bp, Homo sapiens; identical to SEQ ID NO: 719
  chr1:212003876-212004072
  hypo

SEQ ID NO: 9048 - DNA, 42 bp, Homo sapiens; identical to SEQ ID NO: 720
  chr1:212004141-212004183
  hypo

SEQ ID NO: 9049 - DNA, 31 bp, Homo sapiens
  chr1:212086234-212086265
  hypo
cgtgaaccactgtgaccgacctcttttttta

SEQ ID NO: 9050 - DNA, 31 bp, Homo sapiens
  chr1:212557992-212558023
  hypo
gtaaatcaatacaaaacgcctaccctgtctt

SEQ ID NO: 9051 - DNA, 123 bp, Homo sapiens; identical to SEQ ID NO: 721
  chr1:212873600-212873723
  hypo

SEQ ID NO: 9052 - DNA, 82 bp, Homo sapiens; identical to SEQ ID NO: 722
  chr1:212873750-212873832
  hypo

SEQ ID NO: 9053 - DNA, 45 bp, Homo sapiens; identical to SEQ ID NO: 723
  chr1:212873837-212873882
  hypo

SEQ ID NO: 9054 - DNA, 49 bp, Homo sapiens; identical to SEQ ID NO: 724
  chr1:212874012-212874061
  hypo

SEQ ID NO: 9055 - DNA, 31 bp, Homo sapiens; identical to SEQ ID NO: 725
  chr1:212874068-212874099
  hypo

SEQ ID NO: 9056 - DNA, 31 bp, Homo sapiens
  chr1:213134378-213134409
  hypo
gtgaccatgctgccatcggctctcaggagca

SEQ ID NO: 9057 - DNA, 31 bp, Homo sapiens
  chr1:213134449-213134480
  hypo
aagctgggccccagagcgcctccttcataaa

SEQ ID NO: 9058 - DNA, 58 bp, Homo sapiens
  chr1:213134525-213134583
  hypo
ccaaactacaggctgtcgatgacgatcccagactggctccaggcgatccagaattaca

SEQ ID NO: 9059 - DNA, 31 bp, Homo sapiens
  chr1:213189699-213189730
  hypo
agctgaggctgaacaacgcatcctctgggtg

SEQ ID NO: 9060 - DNA, 31 bp, Homo sapiens
  chr1:213189756-213189787
  hypo
tttgcaattaatgttgcggaagcacagccat

SEQ ID NO: 9061 - DNA, 43 bp, Homo sapiens
  chr1:213189791-213189834
  hypo
ctcactttaaaatgtacgtgtatgggccgggcgcggtggctca

SEQ ID NO: 9062 - DNA, 31 bp, Homo sapiens
  chr1:214543809-214543840
  hypo
caatcgctgtaggtcacgttactcctttcgg

SEQ ID NO: 9063 - DNA, 39 bp, Homo sapiens
  chr1:214557875-214557914
  hypo
ggcctgtacgagggcacgatgatcgcgctgtgccggtgg

SEQ ID NO: 9064 - DNA, 31 bp, Homo sapiens
  chr1:214569255-214569286
  hypo
tatccccctacccacacgtgaggagaagagc

SEQ ID NO: 9065 - DNA, 31 bp, Homo sapiens
  chr1:214569287-214569318
  hypo
tgctgcagtcccctaccggtcaccacattgc

SEQ ID NO: 9066 - DNA, 79 bp, Homo sapiens
  chr1:214569366-214569445
  hypo
ccacaggccccatacccggtgcagggattctgccttcttcgtttctgtgttccaagcactgaatcgagtacctggccca

SEQ ID NO: 9067 - DNA, 22 bp, Homo sapiens
  chr1:214600332-214600354
  hypo
tatgattacaggccagcgtggt

SEQ ID NO: 9068 - DNA, 46 bp, Homo sapiens
  chr1:214662583-214662629
  hypo
ctcatgttatgggtgacgaaactgaggcttgcggaggttgagattt

SEQ ID NO: 9069 - DNA, 31 bp, Homo sapiens
  chr1:214662659-214662690
  hypo
gagccaaacccaaaaccgtatccatctgtac

SEQ ID NO: 9070 - DNA, 31 bp, Homo sapiens
  chr1:214662710-214662741
  hypo
acccttttcccatatgcgccagtcacctgca

SEQ ID NO: 9071 - DNA, 31 bp, Homo sapiens
  chr1:214662753-214662784
  hypo
catggaaccaccataccgtttctaatctcca

SEQ ID NO: 9072 - DNA, 31 bp, Homo sapiens
  chr1:214679484-214679515
  hypo
catcaatagcattaatcgaaaaacttctcag

SEQ ID NO: 9073 - DNA, 149 bp, Homo sapiens; identical to SEQ ID NO: 733
  chr1:215740889-215741038
  hypo

SEQ ID NO: 9074 - DNA, 27 bp, Homo sapiens
  chr1:215744974-215745001
  hypo
tttttttttttttttccgagacggagt

SEQ ID NO: 9075 - DNA, 26 bp, Homo sapiens
  chr1:218567538-218567564
  hypo
ccgcacccggccggcattggcctctt

SEQ ID NO: 9076 - DNA, 31 bp, Homo sapiens
  chr1:218897274-218897305
  hypo
gagagagagcataccacgcataagaaaaagg

SEQ ID NO: 9077 - DNA, 49 bp, Homo sapiens; identical to SEQ ID NO: 737
  chr1:219347343-219347392
  hypo

SEQ ID NO: 9078 - DNA, 34 bp, Homo sapiens; identical to SEQ ID NO: 738
  chr1:219347393-219347427
  hypo

SEQ ID NO: 9079 - DNA, 87 bp, Homo sapiens; identical to SEQ ID NO: 739
  chr1:219347429-219347516
  hypo

SEQ ID NO: 9080 - DNA, 38 bp, Homo sapiens
  chr1:220426846-220426884
  hypo
ggtagagagtagggggcggtagtcgggggtggtgggag

SEQ ID NO: 9081 - DNA, 31 bp, Homo sapiens
  chr1:220881047-220881078
  hypo
cagggacaggtttgttcgctgctgaatcctc

SEQ ID NO: 9082 - DNA, 31 bp, Homo sapiens
  chr1:221660545-221660576
  hypo
tgattctataatgcctcgagcctatcttcat

SEQ ID NO: 9083 - DNA, 24 bp, Homo sapiens
  chr1:221724006-221724030
  hypo
tttgtgccactgttaccgggggtc

SEQ ID NO: 9084 - DNA, 31 bp, Homo sapiens
  chr1:223195635-223195666
  hypo
gatgatgttcaaccatcgcagccaaggagca

SEQ ID NO: 9085 - DNA, 40 bp, Homo sapiens
  chr1:223211665-223211705
  hypo
tggggcgcagggtggccgaggctgcgcgtccacatctcat

SEQ ID NO: 9086 - DNA, 31 bp, Homo sapiens
  chr1:223211738-223211769
  hypo
ctttacctcctgtctgcgctgtgccagcaaa

SEQ ID NO: 9087 - DNA, 60 bp, Homo sapiens
  chr1:223211801-223211861
  hypo
ttgctcagggagggcccgctctgggcatggttgggctcggggcttcgttgggcccggggc

SEQ ID NO: 9088 - DNA, 31 bp, Homo sapiens
  chr1:223212020-223212051
  hypo
tctgggtctttggccccgcctgcctctgcat

SEQ ID NO: 9089 - DNA, 20 bp, Homo sapiens
  chr1:223233055-223233075
  hypo
atttgagtcctccttgcggc

SEQ ID NO: 9090 - DNA, 93 bp, Homo sapiens; identical to SEQ ID NO: 745
  chr1:223307233-223307326
  hypo

SEQ ID NO: 9091 - DNA, 31 bp, Homo sapiens
  chr1:223396862-223396893
  hypo
cctaaggcactcaagccgccactcacagctt

SEQ ID NO: 9092 - DNA, 50 bp, Homo sapiens
  chr1:223813495-223813545
  hypo
cacaattttacctcttcgactccagtgacagagtacgcatgactcttaac

SEQ ID NO: 9093 - DNA, 56 bp, Homo sapiens
  chr1:223813552-223813608
  hypo
tggctggtgatggcttcggcttcggctgcactggagacctgcgtagagaagaaagt

SEQ ID NO: 9094 - DNA, 35 bp, Homo sapiens
  chr1:223813625-223813660
  hypo
ctgacctctcaggggccggccgtagaatgctttcc

SEQ ID NO: 9095 - DNA, 31 bp, Homo sapiens
  chr1:223894432-223894463
  hypo
aaaactgagactgacacgtggaggtgcaaaa

SEQ ID NO: 9096 - DNA, 41 bp, Homo sapiens
  chr1:223894492-223894533
  hypo
agaacctggctaggcacggtggctcacatctgtaatctcag

SEQ ID NO: 9097 - DNA, 16 bp, Homo sapiens
  chr1:223899326-223899342
  hypo
ttttgatatggagttt

SEQ ID NO: 9098 - DNA, 21 bp, Homo sapiens
  chr1:223899581-223899602
  hypo
aactaccgcacccagccttat

SEQ ID NO: 9099 - DNA, 339 bp, Homo sapiens; identical to SEQ ID NO: 748
  chr1:223899974-223900313
  hypo

SEQ ID NO: 9100 - DNA, 31 bp, Homo sapiens
  chr1:223907490-223907521
  hypo
ttctcaggggtgtgtgcgtgtgtgtgtgtgt

SEQ ID NO: 9101 - DNA, 31 bp, Homo sapiens
  chr1:223907523-223907554
  hypo
gtgtgtgtgtgcgcgcgcgcgcgtataatgc

SEQ ID NO: 9102 - DNA, 31 bp, Homo sapiens
  chr1:223907649-223907680
  hypo
tctggcacctggccagcgggtgctgatgggg

SEQ ID NO: 9103 - DNA, 140 bp, Homo sapiens; identical to SEQ ID NO: 751
  chr1:223936579-223936719
  hypo

SEQ ID NO: 9104 - DNA, 62 bp, Homo sapiens; identical to SEQ ID NO: 752
  chr1:223936995-223937057
  hypo

SEQ ID NO: 9105 - DNA, 27 bp, Homo sapiens
  chr1:224242939-224242966
  hypo
agtggatgagccaggcgcggtggctca

SEQ ID NO: 9106 - DNA, 38 bp, Homo sapiens
  chr1:224368627-224368665
  hypo
ctcagactacagacgtaagcctccgcacaccttttgga

SEQ ID NO: 9107 - DNA, 31 bp, Homo sapiens
  chr1:224368687-224368718
  hypo
cctgtgatagcaactgcgttctgaactgcag

SEQ ID NO: 9108 - DNA, 31 bp, Homo sapiens
  chr1:224447974-224448005
  hypo
ctattattttttgagacggagtcttgctctg

SEQ ID NO: 9109 - DNA, 31 bp, Homo sapiens; identical to SEQ ID NO: 754
  chr1:224481115-224481146
  hypo

SEQ ID NO: 9110 - DNA, 24 bp, Homo sapiens
  chr1:224493974-224493998
  hypo
ttttttttttttgagacggagtct

SEQ ID NO: 9111 - DNA, 22 bp, Homo sapiens
  chr1:224529878-224529900
  hypo
ttacaggcgtgagccacccctg

SEQ ID NO: 9112 - DNA, 35 bp, Homo sapiens; identical to SEQ ID NO: 755
  chr1:224622765-224622800
  hypo

SEQ ID NO: 9113 - DNA, 97 bp, Homo sapiens; identical to SEQ ID NO: 756
  chr1:224691179-224691276
  hypo

SEQ ID NO: 9114 - DNA, 31 bp, Homo sapiens
  chr1:225645397-225645428
  hypo
agttttgtaaatcatacgcctaagagacttg

SEQ ID NO: 9115 - DNA, 26 bp, Homo sapiens
  chr1:225646855-225646881
  hypo
agaaaaataatcggttgtggaggtgg

SEQ ID NO: 9116 - DNA, 31 bp, Homo sapiens
  chr1:225920495-225920526
  hypo
ctcctttctaaagaaacgactaacctacagg

SEQ ID NO: 9117 - DNA, 31 bp, Homo sapiens
  chr1:225920535-225920566
  hypo
cagaaggagtgggcatcgggtatgttaacag

SEQ ID NO: 9118 - DNA, 31 bp, Homo sapiens
  chr1:225945259-225945290
  hypo
agcaaggggctagatgcggtggctcatgcct

SEQ ID NO: 9119 - DNA, 1 bp, Homo sapiens
  chr1:225945302-225945303
  hypo
c

SEQ ID NO: 9120 - DNA, 51 bp, Homo sapiens; identical to SEQ ID NO: 759
  chr1:225998106-225998157
  hypo

SEQ ID NO: 9121 - DNA, 56 bp, Homo sapiens
  chr1:226026644-226026700
  hypo
caccaggctctccttccggcggggtgagcagggagttggcccgaggaagctgggaa

SEQ ID NO: 9122 - DNA, 31 bp, Homo sapiens
  chr1:226053431-226053462
  hypo
ggagccactccatacacgtgtggcagggcca

SEQ ID NO: 9123 - DNA, 31 bp, Homo sapiens
  chr1:226062778-226062809
  hypo
caggctgagccagaaacggtcagttttttcc

SEQ ID NO: 9124 - DNA, 31 bp, Homo sapiens
  chr1:226062823-226062854
  hypo
ccctgaaggcaggccccgcaggccctgcaat

SEQ ID NO: 9125 - DNA, 62 bp, Homo sapiens
  chr1:226062877-226062939
  hypo
aggcagcaaggcaccacgagaacctgtgctcgggctggcttggcctccgtaagctgggacac

SEQ ID NO: 9126 - DNA, 31 bp, Homo sapiens
  chr1:226062968-226062999
  hypo
cagggctggactaagccgcttagctctagac

SEQ ID NO: 9127 - DNA, 31 bp, Homo sapiens
  chr1:226094607-226094638
  hypo
atggtgtgtgtgtgtgcgtgtgtgtgtgtgc

SEQ ID NO: 9128 - DNA, 50 bp, Homo sapiens
  chr1:226109782-226109832
  hypo
gggtgagggagagagccgaatgagtggccagggcacggctcccaccagca

SEQ ID NO: 9129 - DNA, 31 bp, Homo sapiens
  chr1:226196858-226196889
  hypo
accctagaccacaatgcgctgttataaaaga

SEQ ID NO: 9130 - DNA, 31 bp, Homo sapiens
  chr1:226250006-226250037
  hypo
ccgccgcgcctccgcccgccttcccctcccc

SEQ ID NO: 9131 - DNA, 40 bp, Homo sapiens; identical to SEQ ID NO: 760
  chr1:226297511-226297551
  hypo

SEQ ID NO: 9132 - DNA, 47 bp, Homo sapiens; identical to SEQ ID NO: 761
  chr1:226411600-226411647
  hypo

SEQ ID NO: 9133 - DNA, 18 bp, Homo sapiens
  chr1:226437619-226437637
  hypo
ctcacacctgtaatcccg

SEQ ID NO: 9134 - DNA, 21 bp, Homo sapiens
  chr1:226643671-226643692
  hypo
cagctgcggtgtcttcatgga

SEQ ID NO: 9135 - DNA, 31 bp, Homo sapiens
  chr1:226774439-226774470
  hypo
ctaaggagatggtagccgtgttgtctcctat

SEQ ID NO: 9136 - DNA, 31 bp, Homo sapiens
  chr1:226822615-226822646
  hypo
gctgaagcccgggcctcgccctccccactgc

SEQ ID NO: 9137 - DNA, 31 bp, Homo sapiens
  chr1:226911753-226911784
  hypo
acccctgttctgcacccggtacttgagctgc

SEQ ID NO: 9138 - DNA, 31 bp, Homo sapiens
  chr1:227248037-227248068
  hypo
tgaaccatatctacttcggcaatttctaaca

SEQ ID NO: 9139 - DNA, 31 bp, Homo sapiens
  chr1:227248089-227248120
  hypo
ttgtgagctcacaatacgttggatactaagc

SEQ ID NO: 9140 - DNA, 31 bp, Homo sapiens
  chr1:227254155-227254186
  hypo
gaacttgagcgttatgcgaaatatcttggat

SEQ ID NO: 9141 - DNA, 31 bp, Homo sapiens
  chr1:227311005-227311036
  hypo
agaaaaaacagtactacgaaactgggttagc

SEQ ID NO: 9142 - DNA, 25 bp, Homo sapiens
  chr1:227318266-227318291
  hypo
aggggaggtgtaggtgcggtggctc

SEQ ID NO: 9143 - DNA, 31 bp, Homo sapiens
  chr1:227370568-227370599
  hypo
gcatgaagcctgcttccgctttccctgccct

SEQ ID NO: 9144 - DNA, 31 bp, Homo sapiens
  chr1:227370635-227370666
  hypo
tgcaccagcagcttcccggggaatctcagga

SEQ ID NO: 9145 - DNA, 61 bp, Homo sapiens
  chr1:227370679-227370740
  hypo
ctgaaggctgccatgtcggcttccctggttttccggctttcaaactcggactgagccatta

SEQ ID NO: 9146 - DNA, 31 bp, Homo sapiens
  chr1:227376435-227376466
  hypo
ggcagtgaaattattccgcataatactatta

SEQ ID NO: 9147 - DNA, 31 bp, Homo sapiens
  chr1:227422354-227422385
  hypo
cctattctatccaccacgtgagcaccatttc

SEQ ID NO: 9148 - DNA, 31 bp, Homo sapiens
  chr1:227422394-227422425
  hypo
ctcagctcccatgtgacggaggcagacagac

SEQ ID NO: 9149 - DNA, 31 bp, Homo sapiens
  chr1:227422443-227422474
  hypo
tgtaagcctcactacacgccttcctacaaag

SEQ ID NO: 9150 - DNA, 31 bp, Homo sapiens
  chr1:227463300-227463331
  hypo
cctctccccctccccacggtctcccactttc

SEQ ID NO: 9151 - DNA, 29 bp, Homo sapiens
  chr1:227478959-227478988
  hypo
gaagtctaggctgggcgcggtggctcatg

SEQ ID NO: 9152 - DNA, 31 bp, Homo sapiens
  chr1:227488696-227488727
  hypo
tcatatccatcctttgcgtcatttacatcat

SEQ ID NO: 9153 - DNA, 31 bp, Homo sapiens
  chr1:227545941-227545972
  hypo
atttaatgggactggccgggcgcagtgggtc

SEQ ID NO: 9154 - DNA, 21 bp, Homo sapiens
  chr1:227551690-227551711
  hypo
aaactccgtgtcaaaaaaaag

SEQ ID NO: 9155 - DNA, 38 bp, Homo sapiens
  chr1:227618269-227618307
  hypo
tactcaacaccagcatcggtgggcggtggaaaaaaagc

SEQ ID NO: 9156 - DNA, 47 bp, Homo sapiens
  chr1:227618322-227618369
  hypo
catttaggctgtgggtcgaagatatgctcatgcggtgttgaggaaag

SEQ ID NO: 9157 - DNA, 31 bp, Homo sapiens
  chr1:227618406-227618437
  hypo
tgaggatgaggtggaacgtgtgatcaccatt

SEQ ID NO: 9158 - DNA, 31 bp, Homo sapiens
  chr1:227618449-227618480
  hypo
tgccagtacaagatcccggactggttcttga

SEQ ID NO: 9159 - DNA, 19 bp, Homo sapiens
  chr1:227768582-227768601
  hypo
atcccgcctttgcactcca

SEQ ID NO: 9160 - DNA, 31 bp, Homo sapiens
  chr1:227825261-227825292
  hypo
actccatgctgttcatcggtatagttggaga

SEQ ID NO: 9161 - DNA, 31 bp, Homo sapiens
  chr1:227948692-227948723
  hypo
agcattatagctaatacgcatgcatgtatac

SEQ ID NO: 9162 - DNA, 57 bp, Homo sapiens
  chr1:227948760-227948817
  hypo
atgtatgtgacatgtacgtccacactataatgcgtgtctatacgtacagcatgtaaa

SEQ ID NO: 9163 - DNA, 31 bp, Homo sapiens
  chr1:227948866-227948897
  hypo
atatttgctaccctttcggtttctctaattt

SEQ ID NO: 9164 - DNA, 31 bp, Homo sapiens
  chr1:228003874-228003905
  hypo
actacgcaggcctccacgtctgcggcggctc

SEQ ID NO: 9165 - DNA, 31 bp, Homo sapiens
  chr1:228030205-228030236
  hypo
agagcattgacaataacgtatctgcttttgt

SEQ ID NO: 9166 - DNA, 31 bp, Homo sapiens
  chr1:228078002-228078033
  hypo
ttgagcccattcccctcgcagatgccccgcc

SEQ ID NO: 9167 - DNA, 46 bp, Homo sapiens
  chr1:228092975-228093021
  hypo
ttcaagtcacacacttcgcagagatcagccccgcttcctctgggag

SEQ ID NO: 9168 - DNA, 31 bp, Homo sapiens
  chr1:228111801-228111832
  hypo
ccctcccttcccaccccgccagccccacccc

SEQ ID NO: 9169 - DNA, 31 bp, Homo sapiens
  chr1:228361363-228361394
  hypo
ggacccttgggctcctcgatggcttccctgg

SEQ ID NO: 9170 - DNA, 43 bp, Homo sapiens
  chr1:228406667-228406710
  hypo
ggtccacatgatggcccgtgtccataggcggtggacttccagg

SEQ ID NO: 9171 - DNA, 31 bp, Homo sapiens; identical to SEQ ID NO: 776
  chr1:228444739-228444770
  hypo

SEQ ID NO: 9172 - DNA, 31 bp, Homo sapiens
  chr1:228525868-228525899
  hypo
gggtcctcaggggtcccggaggcccctagca

SEQ ID NO: 9173 - DNA, 31 bp, Homo sapiens
  chr1:228551865-228551896
  hypo
ccccaccatggtctcacgcttaattccctaa

SEQ ID NO: 9174 - DNA, 31 bp, Homo sapiens
  chr1:228601706-228601737
  hypo
gcaggggatcaaaatacgtcacccagaatgt

SEQ ID NO: 9175 - DNA, 48 bp, Homo sapiens; identical to SEQ ID NO: 779
  chr1:228871131-228871179
  hypo

SEQ ID NO: 9176 - DNA, 55 bp, Homo sapiens
  chr1:229073282-229073337
  hypo
ttggcaaagtcatctccggccctacgttctcaggtgtgaacggtggagtcagggg

SEQ ID NO: 9177 - DNA, 41 bp, Homo sapiens
  chr1:229104402-229104443
  hypo
ggattacagacgtgagccaccgcgcccggccccacatcaaa

SEQ ID NO: 9178 - DNA, 31 bp, Homo sapiens
  chr1:229116092-229116123
  hypo
agcaagtgatgaagggcgacccaggccatct

SEQ ID NO: 9179 - DNA, 31 bp, Homo sapiens
  chr1:229134663-229134694
  hypo
gcaggggagtgggagacggcaggcttcctgc

SEQ ID NO: 9180 - DNA, 31 bp, Homo sapiens
  chr1:229141514-229141545
  hypo
ccttggtcccgggtcccgccattgggaggca

SEQ ID NO: 9181 - DNA, 60 bp, Homo sapiens
  chr1:229202156-229202216
  hypo
tatgtgggaaggggtgcggagcttccatgccctccctaagcgccacgctccaagaacctc

SEQ ID NO: 9182 - DNA, 54 bp, Homo sapiens
  chr1:229202261-229202315
  hypo
gtttttatggaagcttcgtgacatcagcattcctttccccgctttacagggtgg

SEQ ID NO: 9183 - DNA, 31 bp, Homo sapiens
  chr1:229210259-229210290
  hypo
cttgtctgttcttttacggaggacatgctgt

SEQ ID NO: 9184 - DNA, 31 bp, Homo sapiens
  chr1:229252144-229252175
  hypo
tccctcagcagaggccgcgtatcacactgga

SEQ ID NO: 9185 - DNA, 31 bp, Homo sapiens
  chr1:229462408-229462439
  hypo
gatgcccgatgacaggcgcatggcccagctg

SEQ ID NO: 9186 - DNA, 62 bp, Homo sapiens
  chr1:229462463-229462525
  hypo
ccacaagggcccagagcgcacctcgtgcacaggagcggacgcacagacgttgtgagtcttct

SEQ ID NO: 9187 - DNA, 36 bp, Homo sapiens
  chr1:229678577-229678613
  hypo
caaaaaaccccattatcgggtggggtgtggtggctc

SEQ ID NO: 9188 - DNA, 62 bp, Homo sapiens
  chr1:230213775-230213837
  hypo
cagcccatagcattgccgacgtcattgattgtgagctgcattccagtcgggggtggtggagg

SEQ ID NO: 9189 - DNA, 71 bp, Homo sapiens
  chr1:230256266-230256337
  hypo
tgtctaagtggagtcccgggcctctcccctccagtgtcgcctgtgccagctggacacgaagcagcagatca

SEQ ID NO: 9190 - DNA, 31 bp, Homo sapiens
  chr1:230256345-230256376
  hypo
aatggctgctcagctccgatctgcccttcct

SEQ ID NO: 9191 - DNA, 31 bp, Homo sapiens
  chr1:230398380-230398411
  hypo
tgccttctgctagaaacgttccttatggaaa

SEQ ID NO: 9192 - DNA, 31 bp, Homo sapiens
  chr1:230404128-230404159
  hypo
tggccagcctcacctccgtgtttaatctctg

SEQ ID NO: 9193 - DNA, 59 bp, Homo sapiens
  chr1:230404216-230404275
  hypo
ctcctttctgtgtcagcgcctctgctggaaagcgacacaccttacgctacagcacatta

SEQ ID NO: 9194 - DNA, 31 bp, Homo sapiens
  chr1:230404439-230404470
  hypo
ggaggtggcaggtctacgggaaccaaagact

SEQ ID NO: 9195 - DNA, 31 bp, Homo sapiens
  chr1:230404544-230404575
  hypo
tgtggccctcaccccccggtcctgcccagta

SEQ ID NO: 9196 - DNA, 31 bp, Homo sapiens
  chr1:230414970-230415001
  hypo
aggtcctgaattcacacgaatctgtttgtac

SEQ ID NO: 9197 - DNA, 31 bp, Homo sapiens
  chr1:230446596-230446627
  hypo
ttaattacatatttttcgttttaactctgtt

SEQ ID NO: 9198 - DNA, 31 bp, Homo sapiens
  chr1:230453631-230453662
  hypo
gcacaatcaagtctcccgcaggagtctcctc

SEQ ID NO: 9199 - DNA, 31 bp, Homo sapiens
  chr1:230469989-230470020
  hypo
ctccattcctagcaaccgcacgtgaccactc

SEQ ID NO: 9200 - DNA, 31 bp, Homo sapiens
  chr1:230485876-230485907
  hypo
gcagcaagtgagcgtgcggtcagcagtcacc

SEQ ID NO: 9201 - DNA, 31 bp, Homo sapiens
  chr1:230840798-230840829
  hypo
tgaacctcgaggacatcgtggtggttgccgg

SEQ ID NO: 9202 - DNA, 36 bp, Homo sapiens
  chr1:230870970-230871006
  hypo
cagagcatggaaatctcgccccgactgcagcgggag

SEQ ID NO: 9203 - DNA, 31 bp, Homo sapiens
  chr1:230872266-230872297
  hypo
aaaaaaagaattatttcgaacacttttgttt

SEQ ID NO: 9204 - DNA, 31 bp, Homo sapiens
  chr1:230898510-230898541
  hypo
tgctggaaaaagcctacgccaagtgagtgac

SEQ ID NO: 9205 - DNA, 31 bp, Homo sapiens
  chr1:230898550-230898581
  hypo
agctcaggcagcctcccgacaggagtctcta

SEQ ID NO: 9206 - DNA, 85 bp, Homo sapiens
  chr1:230898633-230898718
  hypo
gtttgcaggtgaggctcggcaggacccaaccctctcagggctcaagcggggttggaggtggttttcctgtcgtagcctagatgtg

SEQ ID NO: 9207 - DNA, 82 bp, Homo sapiens
  chr1:230898788-230898870
  hypo
gagctgggaaggcaagcggaggggaattctggctgtgccgacagcacttagtgcttcacacttccctcggacactggcatgg

SEQ ID NO: 9208 - DNA, 31 bp, Homo sapiens
  chr1:230953934-230953965
  hypo
cctcccaccctacacacgcttacaccccaga

SEQ ID NO: 9209 - DNA, 31 bp, Homo sapiens
  chr1:230976920-230976951
  hypo
gagacagaaaacagaacggagagatgggcag

SEQ ID NO: 9210 - DNA, 73 bp, Homo sapiens
  chr1:230979559-230979632
  hypo
gacagtggtctgggctcgctggcggcggtgccgttgctcggctcctggatggatagggcggagatactgaact

SEQ ID NO: 9211 - DNA, 96 bp, Homo sapiens
  chr1:230979676-230979772
  hypo
aagagatcctgagaatcgaccgtcacaagtgtgccagctcacgcacccctcctcagcataaggacgcacaccagccacacacgagttgttgcccat

SEQ ID NO: 9212 - DNA, 31 bp, Homo sapiens
  chr1:230979804-230979835
  hypo
tggtcaggactcccatcgcacacctgaaatg

SEQ ID NO: 9213 - DNA, 31 bp, Homo sapiens
  chr1:230979843-230979874
  hypo
gcttaaatgccaaggccgggtgacagagtgt

SEQ ID NO: 9214 - DNA, 15 bp, Homo sapiens
  chr1:230979887-230979902
  hypo
ctcccaaatctcatg

SEQ ID NO: 9215 - DNA, 31 bp, Homo sapiens
  chr1:230980022-230980053
  hypo
cctcatgagatctggtcgtttaaaagggtgt

SEQ ID NO: 9216 - DNA, 31 bp, Homo sapiens
  chr1:230980101-230980132
  hypo
gatacctgctctcctccgccttccaccatga

SEQ ID NO: 9217 - DNA, 31 bp, Homo sapiens
  chr1:230986634-230986665
  hypo
atgggcagcaaagccccgaaagtcacagata

SEQ ID NO: 9218 - DNA, 88 bp, Homo sapiens
  chr1:230986671-230986759
  hypo
agctccaattgctctccgcccactcgacctgccaggcacctgaccccctgcatcccggtgtcctgacccacagcgtgaacagggacac

SEQ ID NO: 9219 - DNA, 31 bp, Homo sapiens
  chr1:230988835-230988866
  hypo
cccagctcccatcaggcgatcagatgacaca

SEQ ID NO: 9220 - DNA, 31 bp, Homo sapiens
  chr1:230988873-230988904
  hypo
tcccaggcaaggccaacggaagaacagtcca

SEQ ID NO: 9221 - DNA, 31 bp, Homo sapiens
  chr1:231012508-231012539
  hypo
acagaggtgacatatgcgaaggcccctccct

SEQ ID NO: 9222 - DNA, 31 bp, Homo sapiens
  chr1:231345006-231345037
  hypo
gccccatcctgcctcccgtggacacaggttg

SEQ ID NO: 9223 - DNA, 39 bp, Homo sapiens
  chr1:231475547-231475586
  hypo
tggaatgtgttccatccgtctcagcgaaccccttttgaa

SEQ ID NO: 9224 - DNA, 51 bp, Homo sapiens
  chr1:231475606-231475657
  hypo
ttgtagaggtatttttcgtgtaaacttgcttcctagcgcagtaatttacaa

SEQ ID NO: 9225 - DNA, 44 bp, Homo sapiens
  chr1:231475673-231475717
  hypo
tagactgctgtgaattcgcctgtatgtatcgttaaaaaaagtca

SEQ ID NO: 9226 - DNA, 6 bp, Homo sapiens
  chr1:231475813-231475819
  hypo
aaaggc

SEQ ID NO: 9227 - DNA, 31 bp, Homo sapiens
  chr1:231476371-231476402
  hypo
aaccagtgtgagggcacgcttcacatttaga

SEQ ID NO: 9228 - DNA, 13 bp, Homo sapiens
  chr1:231738970-231738983
  hypo
tatacagaagcct

SEQ ID NO: 9229 - DNA, 31 bp, Homo sapiens
  chr1:232550812-232550843
  hypo
aggtgaacagacttctcggcctgtgcttgtc

SEQ ID NO: 9230 - DNA, 31 bp, Homo sapiens
  chr1:232566619-232566650
  hypo
aggtggggagctccagcggagacacaatctc

SEQ ID NO: 9231 - DNA, 31 bp, Homo sapiens
  chr1:232566661-232566692
  hypo
gtgtgcacacaacctgcgactcaagagacac

SEQ ID NO: 9232 - DNA, 31 bp, Homo sapiens
  chr1:232566710-232566741
  hypo
attctggacactgcctcgctctcactgagca

SEQ ID NO: 9233 - DNA, 31 bp, Homo sapiens
  chr1:232566745-232566776
  hypo
tgccatcaaaccagtgcgtggaaatgcataa

SEQ ID NO: 9234 - DNA, 31 bp, Homo sapiens
  chr1:232566787-232566818
  hypo
ttgcattaaaactgtccgaatgggctccttt

SEQ ID NO: 9235 - DNA, 59 bp, Homo sapiens
  chr1:232568781-232568840
  hypo
aatcccactccaagggcgcacacacacagcaaacccctgctgcacgtgcaactgtcaac

SEQ ID NO: 9236 - DNA, 68 bp, Homo sapiens
  chr1:232568906-232568974
  hypo
atagtagaaggatattcgattaataactatgaatgaatacacggaatactctacgaatgaatggactg

SEQ ID NO: 9237 - DNA, 61 bp, Homo sapiens
  chr1:232649853-232649914
  hypo
taaggacaactaaggacgaggtcgttacttttcccatcaccctcatcggcatccaggttct

SEQ ID NO: 9238 - DNA, 96 bp, Homo sapiens; identical to SEQ ID NO: 784
  chr1:232765940-232766036
  hypo

SEQ ID NO: 9239 - DNA, 31 bp, Homo sapiens; identical to SEQ ID NO: 785
  chr1:232766315-232766346
  hypo

SEQ ID NO: 9240 - DNA, 31 bp, Homo sapiens
  chr1:232889010-232889041
  hypo
agaattatgttgtcatcgaaattcttattgg

SEQ ID NO: 9241 - DNA, 35 bp, Homo sapiens
  chr1:232889055-232889090
  hypo
gaaaaaaaatctgggccgggcgcagtggctcacac

SEQ ID NO: 9242 - DNA, 62 bp, Homo sapiens
  chr1:232909164-232909226
  hypo
aaacggcagaacagcgcggcagagaaggagcgaaaagaaggaacatccggaggagttcggct

SEQ ID NO: 9243 - DNA, 31 bp, Homo sapiens
  chr1:233015538-233015569
  hypo
atcctctaaacctctgcgctgagctctataa

SEQ ID NO: 9244 - DNA, 31 bp, Homo sapiens
  chr1:233135996-233136027
  hypo
ctcagatagagagacacgagccaacagggga

SEQ ID NO: 9245 - DNA, 28 bp, Homo sapiens
  chr1:233749768-233749796
  hypo
cggaggagcggggcgggcgggcgcgcgg

SEQ ID NO: 9246 - DNA, 96 bp, Homo sapiens; identical to SEQ ID NO: 788
  chr1:233749825-233749921
  hypo

SEQ ID NO: 9247 - DNA, 31 bp, Homo sapiens
  chr1:234541032-234541063
  hypo
gagataaggaaacaagcgcagagacctggag

SEQ ID NO: 9248 - DNA, 72 bp, Homo sapiens
  chr1:234541078-234541150
  hypo
cagcctgcttctgcaccgtgacaggtgcggggaaagagaggcagacatgggaaccaccgtgggggcttcaca

SEQ ID NO: 9249 - DNA, 50 bp, Homo sapiens
  chr1:234541151-234541201
  hypo
acactgggtcctgcaccgctccctcaccccatccacgtcacttgcttgat

SEQ ID NO: 9250 - DNA, 31 bp, Homo sapiens
  chr1:234541213-234541244
  hypo
tgtatgattttgtctgcggaataggagagtt

SEQ ID NO: 9251 - DNA, 44 bp, Homo sapiens
  chr1:234541508-234541552
  hypo
gcccagtccaagccctcgatgctccaggacggcagcatgaggat

SEQ ID NO: 9252 - DNA, 64 bp, Homo sapiens
  chr1:234541606-234541670
  hypo
tggaggagagtgagggcgatgaggttgacgagggctccttaccctgctccgtgcatgctttcca

SEQ ID NO: 9253 - DNA, 31 bp, Homo sapiens
  chr1:234548569-234548600
  hypo
tatctcgggtgacccccggtcaaccaaccct

SEQ ID NO: 9254 - DNA, 36 bp, Homo sapiens
  chr1:234604774-234604810
  hypo
aggttggtgcgaaagtcgttgcggtttttgcctttt

SEQ ID NO: 9255 - DNA, 36 bp, Homo sapiens
  chr1:234604830-234604866
  hypo
aaaaaaaggcaaaaaccgcaacgactttcgcaccaa

SEQ ID NO: 9256 - DNA, 31 bp, Homo sapiens
  chr1:234621891-234621922
  hypo
gtccagcaggggcctccgagaagtcattttc

SEQ ID NO: 9257 - DNA, 31 bp, Homo sapiens
  chr1:234641873-234641904
  hypo
ctcctacagctttagccgcctggaagaaact

SEQ ID NO: 9258 - DNA, 31 bp, Homo sapiens
  chr1:234691149-234691180
  hypo
tgagatacacaacattcggtgggaggggaaa

SEQ ID NO: 9259 - DNA, 59 bp, Homo sapiens
  chr1:234691189-234691248
  hypo
taagggtcaattataccgccttatggggaaaaaagtatccaactcggagtctggaatgg

SEQ ID NO: 9260 - DNA, 53 bp, Homo sapiens
  chr1:234691278-234691331
  hypo
caggtgacctaaggcacgctgctccagcttcatggtgacgtgattctgtgttg

SEQ ID NO: 9261 - DNA, 31 bp, Homo sapiens
  chr1:234721944-234721975
  hypo
gccttgcggcatgtcccggcataacagaaag

SEQ ID NO: 9262 - DNA, 26 bp, Homo sapiens
  chr1:234828213-234828239
  hypo
gccgccatgcccggcttatttttttc

SEQ ID NO: 9263 - DNA, 51 bp, Homo sapiens; identical to SEQ ID NO: 792
  chr1:234828256-234828307
  hypo

SEQ ID NO: 9264 - DNA, 31 bp, Homo sapiens
  chr1:234828324-234828355
  hypo
gagatgttccatgcatcgcaattccccacct

SEQ ID NO: 9265 - DNA, 69 bp, Homo sapiens
  chr1:234868846-234868915
  hypo
ttggtcctggggagggcgagggttccgacagtgggctccgccgaccatcactgccgcaagggatgctgg

SEQ ID NO: 9266 - DNA, 44 bp, Homo sapiens
  chr1:234868936-234868980
  hypo
ctggtgtgcagttcaccggggagccccatcggtggacccaggca

SEQ ID NO: 9267 - DNA, 11 bp, Homo sapiens
  chr1:234869962-234869973
  hypo
tattagatttt

SEQ ID NO: 9268 - DNA, 81 bp, Homo sapiens
  chr1:234893918-234893999
  hypo
ctggaaagtcaagtctcgaatgccccaggaacgtgaagccttcatagagccagcgaagggggtctgcgtccaggatgtgga

SEQ ID NO: 9269 - DNA, 31 bp, Homo sapiens
  chr1:234895629-234895660
  hypo
gaagcctctggatcaacgatatccaaagtct

SEQ ID NO: 9270 - DNA, 31 bp, Homo sapiens
  chr1:234957453-234957484
  hypo
ttcatttactccctcacgtgttcatttattc

SEQ ID NO: 9271 - DNA, 53 bp, Homo sapiens
  chr1:234957530-234957583
  hypo
taaccgccaaccccagcgtctggttgtcactgtctggccgcagaaccagcttt

SEQ ID NO: 9272 - DNA, 31 bp, Homo sapiens
  chr1:234957614-234957645
  hypo
gcttgccttgcagccccgcacccactcacat

SEQ ID NO: 9273 - DNA, 31 bp, Homo sapiens
  chr1:235009660-235009691
  hypo
caaggtgggtcttggccgttcttgttttgtt

SEQ ID NO: 9274 - DNA, 31 bp, Homo sapiens
  chr1:235019853-235019884
  hypo
gcaggtgaaggggacccggagcaggtgggag

SEQ ID NO: 9275 - DNA, 31 bp, Homo sapiens
  chr1:235036867-235036898
  hypo
gagatggtttagacagcgccacagtcacaaa

SEQ ID NO: 9276 - DNA, 66 bp, Homo sapiens
  chr1:235037096-235037162
  hypo
cccggctaaaaaaaaacgtcatttcattaatgctcacggaggtccctcagtcgcttgggatccagc

SEQ ID NO: 9277 - DNA, 31 bp, Homo sapiens
  chr1:235037192-235037223
  hypo
ccaggaaacccttctccgtggcttccccata

SEQ ID NO: 9278 - DNA, 31 bp, Homo sapiens
  chr1:235037247-235037278
  hypo
gagggctaaggaaagccgctccctccaggtg

SEQ ID NO: 9279 - DNA, 10 bp, Homo sapiens
  chr1:235042106-235042116
  hypo
gccaccttgc

SEQ ID NO: 9280 - DNA, 40 bp, Homo sapiens
  chr1:235042146-235042186
  hypo
gtgtccagcaccaggacggtggccacgtacatgcccccta

SEQ ID NO: 9281 - DNA, 31 bp, Homo sapiens
  chr1:235044522-235044553
  hypo
gggctgttaaacccaccgaatgcagacccaa

SEQ ID NO: 9282 - DNA, 34 bp, Homo sapiens
  chr1:235044573-235044607
  hypo
acagtcccctgccactcgccgctgcctgctgggc

SEQ ID NO: 9283 - DNA, 59 bp, Homo sapiens
  chr1:235044611-235044670
  hypo
tccactgtggctgttacgtgtctcctcccagcaccctccgaggccgccttctcctatat

SEQ ID NO: 9284 - DNA, 49 bp, Homo sapiens
  chr1:235044754-235044803
  hypo
tcaccccaatgcacctcgcctcccatttctattgcgaacagagctctca

SEQ ID NO: 9285 - DNA, 31 bp, Homo sapiens
  chr1:235067967-235067998
  hypo
ccctccctccagggctcgcatgctattcctg

SEQ ID NO: 9286 - DNA, 31 bp, Homo sapiens
  chr1:235068013-235068044
  hypo
aaaggtacagccccagcggcaccatagacga

SEQ ID NO: 9287 - DNA, 37 bp, Homo sapiens
  chr1:235129829-235129866
  hypo
tgttcctgcagagtgacggtcacgcaagctgatctga

SEQ ID NO: 9288 - DNA, 31 bp, Homo sapiens
  chr1:235129901-235129932
  hypo
tctcttcctgggatcacgagttctattcaga

SEQ ID NO: 9289 - DNA, 50 bp, Homo sapiens
  chr1:235129957-235130007
  hypo
gggccccaggttctcacggtgaactaaactttctccgcaaacccccttgg

SEQ ID NO: 9290 - DNA, 21 bp, Homo sapiens
  chr1:235255587-235255608
  hypo
ttttgtttttttgagacggag

SEQ ID NO: 9291 - DNA, 31 bp, Homo sapiens
  chr1:235292637-235292668
  hypo
aagaaaaaatagaaaacgtgaattgttttat

SEQ ID NO: 9292 - DNA, 28 bp, Homo sapiens
  chr1:235325292-235325320
  hypo
tctttgcagccaggtgcggtggctcgcc

SEQ ID NO: 9293 - DNA, 35 bp, Homo sapiens
  chr1:235325379-235325414
  hypo
aaccagcctggtcgatctagcgagacttattctct

SEQ ID NO: 9294 - DNA, 26 bp, Homo sapiens
  chr1:235714544-235714570
  hypo
taagaaaaccattccacggccgggtg

SEQ ID NO: 9295 - DNA, 31 bp, Homo sapiens
  chr1:235751252-235751283
  hypo
caggtgggtcatgtggcggggagggaacagc

SEQ ID NO: 9296 - DNA, 31 bp, Homo sapiens
  chr1:235754113-235754144
  hypo
tgagccacttctacttcgtgattccttagtg

SEQ ID NO: 9297 - DNA, 21 bp, Homo sapiens
  chr1:235844182-235844203
  hypo
gccaccgcgcctggcctacaa

SEQ ID NO: 9298 - DNA, 31 bp, Homo sapiens
  chr1:235855353-235855384
  hypo
tgggcacagtggctcacgcatgtaatcccag

SEQ ID NO: 9299 - DNA, 31 bp, Homo sapiens
  chr1:236055034-236055065
  hypo
tctgaataaaatctaacgtttagttgtacca

SEQ ID NO: 9300 - DNA, 31 bp, Homo sapiens
  chr1:236062561-236062592
  hypo
atccaccacacctggccgactttaacttttt

SEQ ID NO: 9301 - DNA, 31 bp, Homo sapiens
  chr1:236062611-236062642
  hypo
ccacttctttgaagtccgtgtttcctggatg

SEQ ID NO: 9302 - DNA, 21 bp, Homo sapiens
  chr1:236093296-236093317
  hypo
ttttttttttttgagacggag

SEQ ID NO: 9303 - DNA, 31 bp, Homo sapiens
  chr1:236125189-236125220
  hypo
caggcacacgccaccacgcctggccagaagg

SEQ ID NO: 9304 - DNA, 31 bp, Homo sapiens
  chr1:236156642-236156673
  hypo
ctaccattacaggtaccgctgtggcaggccc

SEQ ID NO: 9305 - DNA, 31 bp, Homo sapiens
  chr1:236156679-236156710
  hypo
gtatttacaccctacacgtgtgtgtgttggg

SEQ ID NO: 9306 - DNA, 41 bp, Homo sapiens
  chr1:236189393-236189434
  hypo
gctcgggctcagtcaccgtgtactcccgggtggaggaggaa

SEQ ID NO: 9307 - DNA, 31 bp, Homo sapiens
  chr1:236194740-236194771
  hypo
ctctcctttcttaagacggccacactttatg

SEQ ID NO: 9308 - DNA, 31 bp, Homo sapiens
  chr1:236194790-236194821
  hypo
ttggaggggttaccagcgtgcagcctggatg

SEQ ID NO: 9309 - DNA, 21 bp, Homo sapiens
  chr1:236280818-236280839
  hypo
ccattgcgcctggccaacaat

SEQ ID NO: 9310 - DNA, 29 bp, Homo sapiens
  chr1:236451639-236451668
  hypo
actataaaatccagcgcactccatcaccc

SEQ ID NO: 9311 - DNA, 31 bp, Homo sapiens
  chr1:236514729-236514760
  hypo
aatgaggaggctgggcgcggtggctcatgcc

SEQ ID NO: 9312 - DNA, 7 bp, Homo sapiens
  chr1:236540754-236540761
  hypo
ccagccc

SEQ ID NO: 9313 - DNA, 31 bp, Homo sapiens
  chr1:236540836-236540867
  hypo
gattctgatgcttgcccggtctcttcaaact

SEQ ID NO: 9314 - DNA, 7 bp, Homo sapiens
  chr1:236540868-236540875
  hypo
tattttt

SEQ ID NO: 9315 - DNA, 57 bp, Homo sapiens
  chr1:236561304-236561361
  hypo
tcccacactcttctcccgcctggtgttttcacaccattccaacgtaggttttcacac

SEQ ID NO: 9316 - DNA, 31 bp, Homo sapiens
  chr1:236660745-236660776
  hypo
gtgggagaatcacttgcgttccagctgtagt

SEQ ID NO: 9317 - DNA, 29 bp, Homo sapiens
  chr1:236938014-236938043
  hypo
cgagccactgcgcccggcttaaattctct

SEQ ID NO: 9318 - DNA, 41 bp, Homo sapiens
  chr1:240064134-240064175
  hypo
aatatttttaatccatcgtattcaggcgagcaagatcagtc

SEQ ID NO: 9319 - DNA, 31 bp, Homo sapiens
  chr1:240064183-240064214
  hypo
tttgtataacttgcctcgaagctgcctgttg

SEQ ID NO: 9320 - DNA, 47 bp, Homo sapiens
  chr1:240064288-240064335
  hypo
ctgaaatcaaggtgttcgcccagctgagtttacgtcttaggcaagac

SEQ ID NO: 9321 - DNA, 31 bp, Homo sapiens; identical to SEQ ID NO: 794
  chr1:243418478-243418509
  hypo

SEQ ID NO: 9322 - DNA, 75 bp, Homo sapiens
  chr1:243637639-243637714
  hypo
cgagcccccgtggagtcgcctgagccagatgctccgcacccagcctccccaagccccggccggctgccctccagg

SEQ ID NO: 9323 - DNA, 68 bp, Homo sapiens
  chr1:243637859-243637927
  hypo
cctaggccaccctgcccggcgagggagaggggtgtctcctgcctggagcgctccgcggtggcccgaga

SEQ ID NO: 9324 - DNA, 58 bp, Homo sapiens; identical to SEQ ID NO: 795
  chr1:244013023-244013081
  hypo

SEQ ID NO: 9325 - DNA, 31 bp, Homo sapiens
  chr1:244455411-244455442
  hypo
ccagtaaatcaagacacgtacacagtattgt

SEQ ID NO: 9326 - DNA, 31 bp, Homo sapiens
  chr1:244641920-244641951
  hypo
gcacaagtagacagagcgatgtgggagaagc

SEQ ID NO: 9327 - DNA, 24 bp, Homo sapiens
  chr1:244642040-244642064
  hypo
agaacacaattcatgccgggcgcg

SEQ ID NO: 9328 - DNA, 31 bp, Homo sapiens
  chr1:244943827-244943858
  hypo
acgtgctctcaccagcgcgcccacccacccc

SEQ ID NO: 9329 - DNA, 20 bp, Homo sapiens
  chr1:244990926-244990946
  hypo
ttttttttttttgagacgga

SEQ ID NO: 9330 - DNA, 31 bp, Homo sapiens
  chr1:245032254-245032285
  hypo
aaagaattcaggcctgcggggaatgatggga

SEQ ID NO: 9331 - DNA, 31 bp, Homo sapiens
  chr1:245032655-245032686
  hypo
ttgtttataagctactcggcttatgatgttt

SEQ ID NO: 9332 - DNA, 14 bp, Homo sapiens
  chr1:245136153-245136167
  hypo
gagaagcactcatg

SEQ ID NO: 9333 - DNA, 31 bp, Homo sapiens
  chr1:245481235-245481266
  hypo
tgaaaaatatggggcacgcatggggatttca

SEQ ID NO: 9334 - DNA, 31 bp, Homo sapiens
  chr1:245492187-245492218
  hypo
gaccgtgtctctgttgcggttcttatgtcca

SEQ ID NO: 9335 - DNA, 56 bp, Homo sapiens
  chr1:245576465-245576521
  hypo
ggccactgcttttagacggtgacagtgacacatacacgtaacgaagataatgaggc

SEQ ID NO: 9336 - DNA, 31 bp, Homo sapiens
  chr1:245576592-245576623
  hypo
gtatctttcacagtatcgcaagagaagaaat

SEQ ID NO: 9337 - DNA, 31 bp, Homo sapiens
  chr1:245576627-245576658
  hypo
tcctaagagtctaacacgcagatgtaagcca

SEQ ID NO: 9338 - DNA, 36 bp, Homo sapiens
  chr1:245704934-245704970
  hypo
tgtagtgaaagaaagacgtggcggtttaatttttta

SEQ ID NO: 9339 - DNA, 68 bp, Homo sapiens
  chr1:245866075-245866143
  hypo
gtaggaaaggtgcaaacgtcaaacaccgtggaaggagaaaaggatgggaagcccgaggggtgtccaag

SEQ ID NO: 9340 - DNA, 47 bp, Homo sapiens
  chr1:245866222-245866269
  hypo
actcttctcttgctttcgtgagaaaggaggggcgtggatgtaggatt

SEQ ID NO: 9341 - DNA, 47 bp, Homo sapiens
  chr1:245986625-245986672
  hypo
cacacacacgcgcgctcgtgcttgctcgctctcgctctctctctctc

SEQ ID NO: 9342 - DNA, 60 bp, Homo sapiens
  chr1:245986677-245986737
  hypo
taaggctccaggcatccgtccctggagaagtgcaccttgggaaggcgatgaaatgaaaga

SEQ ID NO: 9343 - DNA, 35 bp, Homo sapiens
  chr1:245986760-245986795
  hypo
aaacatctgaagtcagcgccgcgcactactgcgat

SEQ ID NO: 9344 - DNA, 55 bp, Homo sapiens
  chr1:246094265-246094320
  hypo
ggagaaagagcaagtgcgaaggccctacgctaggaatgcccgtggtaacagagga

SEQ ID NO: 9345 - DNA, 70 bp, Homo sapiens
  chr1:246094331-246094401
  hypo
gctagtgtgaccaaagcggagcaagaaagtagggggcaaaacacgagctcaaagacggagtgggatcact

SEQ ID NO: 9346 - DNA, 31 bp, Homo sapiens
  chr1:246518820-246518851
  hypo
tcagcagggaggctggcggtctggggcaagt

SEQ ID NO: 9347 - DNA, 44 bp, Homo sapiens
  chr1:246518872-246518916
  hypo
gcctggaaacagactccgtgctgctgtgggggcacggtgggagt

SEQ ID NO: 9348 - DNA, 31 bp, Homo sapiens
  chr1:246625741-246625772
  hypo
tcaagtcataggcccccgactgtgccactgt

SEQ ID NO: 9349 - DNA, 31 bp, Homo sapiens
  chr1:246864972-246865003
  hypo
aactaaactgctcacacgtgtaatcccagca

SEQ ID NO: 9350 - DNA, 195 bp, Homo sapiens; identical to SEQ ID NO: 796
  chr1:246887363-246887558
  hypo

SEQ ID NO: 9351 - DNA, 31 bp, Homo sapiens
  chr1:246913294-246913325
  hypo
ggttcaaacccattttcgctttagcttggtt

SEQ ID NO: 9352 - DNA, 31 bp, Homo sapiens
  chr1:246944243-246944274
  hypo
aactgaccttaaaatacggagattagcctgg

SEQ ID NO: 9353 - DNA, 31 bp, Homo sapiens
  chr1:246944304-246944335
  hypo
gggtcttcaatatggccgagagaagcagaag

SEQ ID NO: 9354 - DNA, 53 bp, Homo sapiens
  chr1:246954178-246954231
  hypo
ggaaggtctacagctgcggaggatggcaggtggcatctcggggcctcctgtgt

SEQ ID NO: 9355 - DNA, 31 bp, Homo sapiens
  chr1:246954579-246954610
  hypo
tggcatcccctctccccgccctgctcccctg

SEQ ID NO: 9356 - DNA, 16 bp, Homo sapiens
  chr1:247103101-247103117
  hypo
gcgactctgtctcaaa

SEQ ID NO: 9357 - DNA, 21 bp, Homo sapiens
  chr1:247116659-247116680
  hypo
cagcactttaggaggccgagg

SEQ ID NO: 9358 - DNA, 31 bp, Homo sapiens
  chr1:247129039-247129070
  hypo
gtgacagtgcaaaaaacgaagaaagaaaaag

SEQ ID NO: 9359 - DNA, 34 bp, Homo sapiens
  chr1:249218263-249218297
  hypo
cagttccccaatgggacggcgtgtgggagccaca

SEQ ID NO: 9360 - DNA, 31 bp, Homo sapiens
  chr1:249218299-249218330
  hypo
tcactggcccctatagcgtgggagcagtgtg

SEQ ID NO: 9361 - DNA, 31 bp, Homo sapiens
  chr1:249218350-249218381
  hypo
tctcctccagcagcagcgtccatccagaaat

SEQ ID NO: 9362 - DNA, 31 bp, Homo sapiens
  chr1:249218425-249218456
  hypo
ggagttctttcttatgcgctttttttctaag

SEQ ID NO: 9363 - DNA, 26 bp, Homo sapiens
  chr2:142611-142637
  hypo
gagtgatactccgtctcaaaaccaaa

SEQ ID NO: 9364 - DNA, 31 bp, Homo sapiens
  chr2:266542-266573
  hypo
actccccagtggatcccgaaactgtgggtag

SEQ ID NO: 9365 - DNA, 31 bp, Homo sapiens; identical to SEQ ID NO: 804
  chr2:288831-288862
  hypo

SEQ ID NO: 9366 - DNA, 20 bp, Homo sapiens
  chr2:426595-426615
  hypo
ggcacgcagggggctccgca

SEQ ID NO: 9367 - DNA, 31 bp, Homo sapiens
  chr2:1461907-1461938
  hypo
atggtatataagatagcgtgtggacacgtgt

SEQ ID NO: 9368 - DNA, 31 bp, Homo sapiens
  chr2:1501007-1501038
  hypo
aagtgtggcttcctggcggtaatttgagagc

SEQ ID NO: 9369 - DNA, 31 bp, Homo sapiens
  chr2:1501046-1501077
  hypo
gaggcacctttcaggccgcaaggcaagacag

SEQ ID NO: 9370 - DNA, 31 bp, Homo sapiens
  chr2:1771824-1771855
  hypo
catcccatccaatccacggccactcactcca

SEQ ID NO: 9371 - DNA, 31 bp, Homo sapiens
  chr2:1816187-1816218
  hypo
aataggtgcccagtgacgacttctgaaagca

SEQ ID NO: 9372 - DNA, 31 bp, Homo sapiens
  chr2:1816309-1816340
  hypo
ccctcaaagaggcctgcggcaggattttgca

SEQ ID NO: 9373 - DNA, 35 bp, Homo sapiens
  chr2:1863597-1863632
  hypo
cagcgttggggacagcgcgccggatgagaggggct

SEQ ID NO: 9374 - DNA, 31 bp, Homo sapiens
  chr2:1933005-1933036
  hypo
ggcgcccctcagctgccggcagcacaggaca

SEQ ID NO: 9375 - DNA, 31 bp, Homo sapiens
  chr2:3084233-3084264
  hypo
ccccaggtggcctcaccggggtgtgtgggac

SEQ ID NO: 9376 - DNA, 31 bp, Homo sapiens
  chr2:3213314-3213345
  hypo
aggagaaagcaggagacgatcttcagcatcc

SEQ ID NO: 9377 - DNA, 78 bp, Homo sapiens
  chr2:3352457-3352535
  hypo
ctgcattatgcagtaacgatgcaggtaccgggcattttccagggaatcaacgactgaaaggagcgaggacctgaggca

SEQ ID NO: 9378 - DNA, 64 bp, Homo sapiens
  chr2:3352589-3352653
  hypo
ccagagtgagggatggcggcttccgactgtgcaggaggagaccagactccgttgtcacagaagg

SEQ ID NO: 9379 - DNA, 34 bp, Homo sapiens
  chr2:3352676-3352710
  hypo
gccagtggagccttcccggcgtctctcctggtct

SEQ ID NO: 9380 - DNA, 116 bp, Homo sapiens; identical to SEQ ID NO: 805
  chr2:3465148-3465264
  hypo

SEQ ID NO: 9381 - DNA, 31 bp, Homo sapiens
  chr2:3507168-3507199
  hypo
ttcacacacatgcacacgtacacacacgagt

SEQ ID NO: 9382 - DNA, 31 bp, Homo sapiens
  chr2:3990914-3990945
  hypo
cctctctgggtgccaccgacattacagctag

SEQ ID NO: 9383 - DNA, 31 bp, Homo sapiens
  chr2:3991026-3991057
  hypo
ccagtggctgctgttgcgcacctggggagaa

SEQ ID NO: 9384 - DNA, 52 bp, Homo sapiens
  chr2:3991068-3991120
  hypo
agggaacctccctgtgcgcccttggggtgcgtttcctcgccttgtcctcact

SEQ ID NO: 9385 - DNA, 31 bp, Homo sapiens
  chr2:4271695-4271726
  hypo
gctggtatcgtgagttcgtttctgagtgggt

SEQ ID NO: 9386 - DNA, 38 bp, Homo sapiens; identical to SEQ ID NO: 806
  chr2:7005629-7005667
  hypo

SEQ ID NO: 9387 - DNA, 182 bp, Homo sapiens; identical to SEQ ID NO: 807
  chr2:7005741-7005923
  hypo

SEQ ID NO: 9388 - DNA, 263 bp, Homo sapiens; identical to SEQ ID NO: 808
  chr2:7005935-7006198
  hypo

SEQ ID NO: 9389 - DNA, 31 bp, Homo sapiens
  chr2:7064666-7064697
  hypo
gggcaaagacccaggacgggcagggtttgtt

SEQ ID NO: 9390 - DNA, 31 bp, Homo sapiens
  chr2:7109818-7109849
  hypo
atttgacctcaagtgacggattgcaggcaaa

SEQ ID NO: 9391 - DNA, 11 bp, Homo sapiens
  chr2:7109906-7109917
  hypo
ttgtttcagac

SEQ ID NO: 9392 - DNA, 34 bp, Homo sapiens
  chr2:7180009-7180043
  hypo
acagtgtcaggctggacgccgtgatttcagggac

SEQ ID NO: 9393 - DNA, 53 bp, Homo sapiens
  chr2:8658285-8658338
  hypo
ggattccagtggggtgcgggagtgggaagcactccatccgggccgagggagga

SEQ ID NO: 9394 - DNA, 42 bp, Homo sapiens; identical to SEQ ID NO: 809
  chr2:8818538-8818580
  hypo

SEQ ID NO: 9395 - DNA, 442 bp, Homo sapiens; identical to SEQ ID NO: 810
  chr2:8818828-8819270
  hypo

SEQ ID NO: 9396 - DNA, 31 bp, Homo sapiens; identical to SEQ ID NO: 811
  chr2:8821591-8821622
  hypo

SEQ ID NO: 9397 - DNA, 31 bp, Homo sapiens; identical to SEQ ID NO: 812
  chr2:8821625-8821656
  hypo

SEQ ID NO: 9398 - DNA, 277 bp, Homo sapiens; identical to SEQ ID NO: 813
  chr2:8821975-8822252
  hypo

SEQ ID NO: 9399 - DNA, 146 bp, Homo sapiens; identical to SEQ ID NO: 814
  chr2:8822253-8822399
  hypo

SEQ ID NO: 9400 - DNA, 61 bp, Homo sapiens; identical to SEQ ID NO: 815
  chr2:8822479-8822540
  hypo

SEQ ID NO: 9401 - DNA, 31 bp, Homo sapiens; identical to SEQ ID NO: 816
  chr2:8822640-8822671
  hypo

SEQ ID NO: 9402 - DNA, 44 bp, Homo sapiens; identical to SEQ ID NO: 817
  chr2:8825799-8825843
  hypo

SEQ ID NO: 9403 - DNA, 52 bp, Homo sapiens
  chr2:8833972-8834024
  hypo
tctctctctgagagctcggggggtttctgtctcctgacggggccctgactgg

SEQ ID NO: 9404 - DNA, 31 bp, Homo sapiens
  chr2:8854101-8854132
  hypo
agcatttccaatatgcgcgctgtgggtcatc

SEQ ID NO: 9405 - DNA, 65 bp, Homo sapiens
  chr2:8854208-8854273
  hypo
cagaagctctgccagccggactcacaacgaactcagcctgctccggccttcggctcctcccagca

SEQ ID NO: 9406 - DNA, 48 bp, Homo sapiens
  chr2:8978037-8978085
  hypo
cttccggatccaggagcgagacctctgcctttcgcggggcctgtagtt

SEQ ID NO: 9407 - DNA, 31 bp, Homo sapiens
  chr2:8978146-8978177
  hypo
ccttgctgccaacaagcgtcaatcttgattt

SEQ ID NO: 9408 - DNA, 55 bp, Homo sapiens
  chr2:8978184-8978239
  hypo
ggtccaaggatgattacgacgtgcgtaggttgcgaaccatcgaaaagcacccacc

SEQ ID NO: 9409 - DNA, 31 bp, Homo sapiens
  chr2:8978287-8978318
  hypo
tcatcagaagttggtgcggggtggggacaat

SEQ ID NO: 9410 - DNA, 14 bp, Homo sapiens
  chr2:8978341-8978355
  hypo
ttttgggaggccaa

SEQ ID NO: 9411 - DNA, 31 bp, Homo sapiens
  chr2:8983019-8983050
  hypo
aaaatccctgaggatacgcagcatgcaactt

SEQ ID NO: 9412 - DNA, 31 bp, Homo sapiens
  chr2:8983104-8983135
  hypo
ttattggaaacaggctcggctgtagccacat

SEQ ID NO: 9413 - DNA, 64 bp, Homo sapiens
  chr2:8983143-8983207
  hypo
aggaggaaaggagggtcggacgccaggtgtggcagggggcagatgatggcgggctggtgatgag

SEQ ID NO: 9414 - DNA, 31 bp, Homo sapiens
  chr2:9119835-9119866
  hypo
gcaattctaaatcacacgtttttgacttcca

SEQ ID NO: 9415 - DNA, 31 bp, Homo sapiens; identical to SEQ ID NO: 818
  chr2:9143657-9143688
  hypo

SEQ ID NO: 9416 - DNA, 45 bp, Homo sapiens; identical to SEQ ID NO: 819
  chr2:9144127-9144172
  hypo

SEQ ID NO: 9417 - DNA, 53 bp, Homo sapiens
  chr2:9218663-9218716
  hypo
ggggtttgagaagcacgcgaaagtgggtggtgcttacacgttactgaattgct

SEQ ID NO: 9418 - DNA, 31 bp, Homo sapiens
  chr2:9234916-9234947
  hypo
caggcacagtggctaacgcctgtaatcccag

SEQ ID NO: 9419 - DNA, 31 bp, Homo sapiens
  chr2:9241807-9241838
  hypo
tacctgcagctcctaacggtgccaagtacat

SEQ ID NO: 9420 - DNA, 68 bp, Homo sapiens
  chr2:9250673-9250741
  hypo
gtgcctgcagagatggcggcctgctctctaggtcaggccaggttcccgggagccgaggtctggctgtt

SEQ ID NO: 9421 - DNA, 57 bp, Homo sapiens
  chr2:9250791-9250848
  hypo
ctgcagcctgagctgccgtcctcagaccactctgcctctgagcgtgcaagaggctca

SEQ ID NO: 9422 - DNA, 31 bp, Homo sapiens
  chr2:9266321-9266352
  hypo
gagcggcactttgccacggcagccccaggaa

SEQ ID NO: 9423 - DNA, 31 bp, Homo sapiens
  chr2:9291497-9291528
  hypo
cggggatcattaaggtcgctgagaattaagg

SEQ ID NO: 9424 - DNA, 31 bp, Homo sapiens
  chr2:9314160-9314191
  hypo
catcgatggggtgaaccgaaagagggaaggc

SEQ ID NO: 9425 - DNA, 39 bp, Homo sapiens; identical to SEQ ID NO: 821
  chr2:9346514-9346553
  hypo

SEQ ID NO: 9426 - DNA, 111 bp, Homo sapiens; identical to SEQ ID NO: 822
  chr2:9346710-9346821
  hypo

SEQ ID NO: 9427 - DNA, 388 bp, Homo sapiens; identical to SEQ ID NO: 823
  chr2:9346877-9347265
  hypo

SEQ ID NO: 9428 - DNA, 66 bp, Homo sapiens; identical to SEQ ID NO: 824
  chr2:9347472-9347538
  hypo

SEQ ID NO: 9429 - DNA, 37 bp, Homo sapiens; identical to SEQ ID NO: 825
  chr2:9347559-9347596
  hypo

SEQ ID NO: 9430 - DNA, 213 bp, Homo sapiens; identical to SEQ ID NO: 826
  chr2:9347603-9347816
  hypo

SEQ ID NO: 9431 - DNA, 46 bp, Homo sapiens
  chr2:9409364-9409410
  hypo
gagaggaattattttgcgggggggagggggcgcgcataacatttat

SEQ ID NO: 9432 - DNA, 81 bp, Homo sapiens
  chr2:9409458-9409539
  hypo
attcattggaaatgttcgtctggaaacacccttagctcacggttggataaaagctgtcccgcaggccgtgtgtgcccaccc

SEQ ID NO: 9433 - DNA, 86 bp, Homo sapiens
  chr2:9456807-9456893
  hypo
ttcctgactgaagtttcgcatcttgagttgactcgcatttgaactgctgtcacggagacttgcttgctcctcgtgtacctgttggt

SEQ ID NO: 9434 - DNA, 35 bp, Homo sapiens
  chr2:9456911-9456946
  hypo
cccaatttaatccatgcggacggtgtgtgtcccca

SEQ ID NO: 9435 - DNA, 31 bp, Homo sapiens
  chr2:9507573-9507604
  hypo
gtattatttcattaaacgtttaagaatctga

SEQ ID NO: 9436 - DNA, 31 bp, Homo sapiens
  chr2:9770735-9770766
  hypo
gcccgcttttgtctcccgcacacgcggccgc

SEQ ID NO: 9437 - DNA, 31 bp, Homo sapiens
  chr2:9853194-9853225
  hypo
gatgagatctaacaaccggtgggcattggtg

SEQ ID NO: 9438 - DNA, 31 bp, Homo sapiens
  chr2:9865161-9865192
  hypo
cagtgcggccaggagtcgagggccaagctct

SEQ ID NO: 9439 - DNA, 31 bp, Homo sapiens
  chr2:9921446-9921477
  hypo
tccaacccctggttggcggctgggaggtgtg

SEQ ID NO: 9440 - DNA, 31 bp, Homo sapiens
  chr2:9949033-9949064
  hypo
gtgcctggcaaggcagcgggagagtttcagg

SEQ ID NO: 9441 - DNA, 55 bp, Homo sapiens
  chr2:9960406-9960461
  hypo
gatgaagtcacagaatcggaatgctggctttgggagagaccgccctgctccttca

SEQ ID NO: 9442 - DNA, 89 bp, Homo sapiens
  chr2:9960640-9960729
  hypo
tgccccacggaggtgccgtaaagacagaacgactctgcagatagcgttaagcacgatgccagccaccttggaggcgcacagtacatacg

SEQ ID NO: 9443 - DNA, 31 bp, Homo sapiens
  chr2:9962491-9962522
  hypo
ctgcatctgttgccttcgcccttgttaaaca

SEQ ID NO: 9444 - DNA, 31 bp, Homo sapiens
  chr2:9964325-9964356
  hypo
aataaaccatggtggccgatgtttgtaaatc

SEQ ID NO: 9445 - DNA, 31 bp, Homo sapiens
  chr2:10047694-10047725
  hypo
accctgcctgagtaagcgctgcccctttgat

SEQ ID NO: 9446 - DNA, 31 bp, Homo sapiens
  chr2:10107384-10107415
  hypo
gtggccagctcttcttcgttgggtgtggtca

SEQ ID NO: 9447 - DNA, 17 bp, Homo sapiens
  chr2:10115710-10115727
  hypo
agatataaacacaggcc

SEQ ID NO: 9448 - DNA, 54 bp, Homo sapiens; identical to SEQ ID NO: 831
  chr2:10151689-10151743
  hypo

SEQ ID NO: 9449 - DNA, 25 bp, Homo sapiens
  chr2:10151850-10151875
  hypo
gggtcaggtggacaggcgtgcgtac

SEQ ID NO: 9450 - DNA, 56 bp, Homo sapiens; identical to SEQ ID NO: 833
  chr2:10152417-10152473
  hypo

SEQ ID NO: 9451 - DNA, 80 bp, Homo sapiens; identical to SEQ ID NO: 834
  chr2:10152482-10152562
  hypo

SEQ ID NO: 9452 - DNA, 19 bp, Homo sapiens
  chr2:10152954-10152973
  hypo
caggcgtgtgtatgggcag

SEQ ID NO: 9453 - DNA, 60 bp, Homo sapiens
  chr2:10153000-10153060
  hypo
gggtcaggtgggcaggcgtgcgtatggtcgggtcatgtgggcaggcgtgcttatgggcag

SEQ ID NO: 9454 - DNA, 139 bp, Homo sapiens
  chr2:10153099-10153238
  hypo
caggattgaatatgggcgggtcaggtgcgcagacatgcgtatggccgggtcacgtgggcaggcgtgcgtttgggcgggtcaggtgggcaggggtgcatatgggcgggtcaggtggacaggcgcacgtatgggtgagtaa

SEQ ID NO: 9455 - DNA, 31 bp, Homo sapiens
  chr2:10153294-10153325
  hypo
caggtggacaggtgtgcgtatgggtgtgcct

SEQ ID NO: 9456 - DNA, 160 bp, Homo sapiens
  chr2:10153335-10153495
  hypo
caggtggacaggattgcgtatagccggatcaggtgggcaggcatgcgtatgagcgagtcaggtgggcagacatgcgtatgggcgggtcaggtggacaggcgtgtgtataggcaggtcaggtggacaggcgtgcatatgggtatgtgtatgggcgggtcag

SEQ ID NO: 9457 - DNA, 129 bp, Homo sapiens
  chr2:10153587-10153716
  hypo
caggagttcttatggtcgggtcaggtgggcaggcgtgcatatggtcggtttaggtggacaggcgtgtgtatgggtgtgcgtatggacgagtcaggtgggcaggcatcctacaggcgggtcaggtgggca

SEQ ID NO: 9458 - DNA, 60 bp, Homo sapiens
  chr2:10153805-10153865
  hypo
catgtgtatgggtgtgcgtatggacgagtcaggtggacaggcgtgcgtatgggagagtca

SEQ ID NO: 9459 - DNA, 226 bp, Homo sapiens
  chr2:10153871-10154097
  hypo
caggcatgtgtatgggcgagtcaggtggacacgcgtgcgtatgggcaagtcaggtgggcaggcatgcgtatgggagagtcaggtggacagccctgcgtatgagcgagtcaggtggacaggattgcgtatgggcaagtcaggtggacaggcgtgcgtatgagtgagtcaggtggacaggattgcgtatgggagagtcaggtggacagccctgcgtatgagcgagtca

SEQ ID NO: 9460 - DNA, 95 bp, Homo sapiens
  chr2:10154120-10154215
  hypo
aagtcaggtggacaggcgtgcgtatgagcgagtcaggtggacaggattgcgtatgggagagtcaggtggacaggcgtgcatatgagcgagtcagg

SEQ ID NO: 9461 - DNA, 53 bp, Homo sapiens
  chr2:10154874-10154927
  hypo
gcatgcgtacgggcaggtcaggtgggcaggcgtgcatacgggcaggtcaggtg

SEQ ID NO: 9462 - DNA, 52 bp, Homo sapiens
  chr2:10154929-10154981
  hypo
caggtgtttgtatgggcgggtcaggtgggcaggcgttcgtatggtcaggtca

SEQ ID NO: 9463 - DNA, 54 bp, Homo sapiens
  chr2:10155174-10155228
  hypo
tgcgtatgggcgagttaggtggacaggcatgtgtatggacgagtcagatgggca

SEQ ID NO: 9464 - DNA, 39 bp, Homo sapiens
  chr2:10155230-10155269
  hypo
tgtgcgtatgggtgtgcgtatgggcgagtcaggtggaca

SEQ ID NO: 9465 - DNA, 73 bp, Homo sapiens
  chr2:10155342-10155415
  hypo
gggtcaggtgggcaggcgtgcgtatggtcgggtcatgtgggcaggcgtgcttatgggcgggtctggtggacag

SEQ ID NO: 9466 - DNA, 46 bp, Homo sapiens
  chr2:10155774-10155820
  hypo
agtgtgcgtatgggcgagtcaggtgggcagacgtgcatatgggtgt

SEQ ID NO: 9467 - DNA, 89 bp, Homo sapiens
  chr2:10155830-10155919
  hypo
gattcaggtggacaggcgtgcgtatgggcggctcacgtggacaggcgtgcgtgtcagcgtgtcacgtggacaggcgtgtgtgtgggcgg

SEQ ID NO: 9468 - DNA, 77 bp, Homo sapiens
  chr2:10156254-10156331
  hypo
atggctgtgcgtttgggcgagtcaggtgggcagacgtgcgtatgggcagtcaggtggacaggcgtgtgtatgggtga

SEQ ID NO: 9469 - DNA, 31 bp, Homo sapiens
  chr2:10156387-10156418
  hypo
aggtcaggtgggtaggcgtgtgtatggatgt

SEQ ID NO: 9470 - DNA, 58 bp, Homo sapiens
  chr2:10156572-10156630
  hypo
cagagtccttgggctccgggaagacacaaccgataagtggttacggggatgcctggga

SEQ ID NO: 9471 - DNA, 31 bp, Homo sapiens
  chr2:10172772-10172803
  hypo
gtgggactggccaagccgctcagcctctctt

SEQ ID NO: 9472 - DNA, 62 bp, Homo sapiens
  chr2:10178431-10178493
  hypo
agctgcccacagcccccgactctgggccagcttacaaggactcagcacgtgctcttagcagc

SEQ ID NO: 9473 - DNA, 71 bp, Homo sapiens
  chr2:10178521-10178592
  hypo
aaagcagcactggacccgagctggagggatggatcccgggccctccactcactggccgacaatgacgggca

SEQ ID NO: 9474 - DNA, 71 bp, Homo sapiens; identical to SEQ ID NO: 835
  chr2:10183603-10183674
  hypo

SEQ ID NO: 9475 - DNA, 39 bp, Homo sapiens; identical to SEQ ID NO: 836
  chr2:10183763-10183802
  hypo

SEQ ID NO: 9476 - DNA, 43 bp, Homo sapiens; identical to SEQ ID NO: 837
  chr2:10183844-10183887
  hypo

SEQ ID NO: 9477 - DNA, 236 bp, Homo sapiens; identical to SEQ ID NO: 838
  chr2:10183982-10184218
  hypo

SEQ ID NO: 9478 - DNA, 31 bp, Homo sapiens
  chr2:10381198-10381229
  hypo
catgtgacctgcatcccggggaacccaggac

SEQ ID NO: 9479 - DNA, 31 bp, Homo sapiens
  chr2:10397608-10397639
  hypo
aaccatggacaccatacgtccagccctacac

SEQ ID NO: 9480 - DNA, 31 bp, Homo sapiens
  chr2:10577315-10577346
  hypo
cagggtagggaaacaccgaatgaatgctggg

SEQ ID NO: 9481 - DNA, 55 bp, Homo sapiens
  chr2:10577403-10577458
  hypo
gagtttatgtcttcacgcgggaaacctattttacaatcctcgtaaagtcagtaat

SEQ ID NO: 9482 - DNA, 57 bp, Homo sapiens
  chr2:10577460-10577517
  hypo
attccaatatcaaaagcgcagtgtggagccagtccccactctcggcccaggcctctg

SEQ ID NO: 9483 - DNA, 37 bp, Homo sapiens; identical to SEQ ID NO: 843
  chr2:10589000-10589037
  hypo

SEQ ID NO: 9484 - DNA, 31 bp, Homo sapiens; identical to SEQ ID NO: 844
  chr2:10589038-10589069
  hypo

SEQ ID NO: 9485 - DNA, 73 bp, Homo sapiens; identical to SEQ ID NO: 845
  chr2:10589095-10589168
  hypo

SEQ ID NO: 9486 - DNA, 31 bp, Homo sapiens
  chr2:10615283-10615314
  hypo
aatgacatctgtagaacggagtccctcttcc

SEQ ID NO: 9487 - DNA, 42 bp, Homo sapiens
  chr2:10615321-10615363
  hypo
gggacccagaggctcacggcggtcaggcggctcacccaaggc

SEQ ID NO: 9488 - DNA, 31 bp, Homo sapiens
  chr2:10615572-10615603
  hypo
ttctcagggctggccacgggggagggggggc

SEQ ID NO: 9489 - DNA, 41 bp, Homo sapiens
  chr2:10615616-10615657
  hypo
cagggaaccctacccccggcccagggcggggagggctgcac

SEQ ID NO: 9490 - DNA, 44 bp, Homo sapiens
  chr2:10642585-10642629
  hypo
atttcatgcctgtcctcggttcagcccctcgcagcctacagaag

SEQ ID NO: 9491 - DNA, 31 bp, Homo sapiens
  chr2:10645139-10645170
  hypo
ctcccaggagtgctcacggggcacccctgga

SEQ ID NO: 9492 - DNA, 45 bp, Homo sapiens
  chr2:10645203-10645248
  hypo
tcacacagggaagggccgccaggacgggagcgctgagctcctcca

SEQ ID NO: 9493 - DNA, 31 bp, Homo sapiens
  chr2:10659326-10659357
  hypo
acacacaccagtgccccgctgcctccatgtt

SEQ ID NO: 9494 - DNA, 31 bp, Homo sapiens
  chr2:10676513-10676544
  hypo
gtgtattggggtgtttcggggggttctgtgt

SEQ ID NO: 9495 - DNA, 47 bp, Homo sapiens
  chr2:10925016-10925063
  hypo
aaccaggactgctgcccgcacagcttccctcccgggcactcacctcg

SEQ ID NO: 9496 - DNA, 31 bp, Homo sapiens
  chr2:11209932-11209963
  hypo
actggtccactgggcccgtgggcccgccctg

SEQ ID NO: 9497 - DNA, 31 bp, Homo sapiens
  chr2:11312055-11312086
  hypo
atgtactttcatcagcgcggccagtaagttt

SEQ ID NO: 9498 - DNA, 31 bp, Homo sapiens
  chr2:11758939-11758970
  hypo
gcagtggacggtgccccggcccagccacatg

SEQ ID NO: 9499 - DNA, 31 bp, Homo sapiens
  chr2:11995229-11995260
  hypo
gatgatgcagggtgagcgcttagacccagtg

SEQ ID NO: 9500 - DNA, 31 bp, Homo sapiens
  chr2:12005881-12005912
  hypo
gggaaatggtgagtttcggagacaaacttgg

SEQ ID NO: 9501 - DNA, 31 bp, Homo sapiens
  chr2:12005916-12005947
  hypo
cactcagcagtggaggcggcagttcatccta

SEQ ID NO: 9502 - DNA, 31 bp, Homo sapiens
  chr2:12005987-12006018
  hypo
accagaatccagaacacgctgtgcttaatgg

SEQ ID NO: 9503 - DNA, 46 bp, Homo sapiens
  chr2:12006020-12006066
  hypo
tgaactgcctgtgaagcgcaggtgtgaggggcggatgataagtgac

SEQ ID NO: 9504 - DNA, 31 bp, Homo sapiens
  chr2:12006067-12006098
  hypo
gtgccggtgcccccagcgcccttttacctga

SEQ ID NO: 9505 - DNA, 31 bp, Homo sapiens; identical to SEQ ID NO: 848
  chr2:14774643-14774674
  hypo

SEQ ID NO: 9506 - DNA, 49 bp, Homo sapiens
  chr2:15307223-15307272
  hypo
tggtgagtccccctcacggccagaaggagagacccggcttcggcttcat

SEQ ID NO: 9507 - DNA, 18 bp, Homo sapiens
  chr2:15474599-15474617
  hypo
ccacgcctctcttctcct

SEQ ID NO: 9508 - DNA, 31 bp, Homo sapiens
  chr2:15474652-15474683
  hypo
ttacaggattttgacacgctggcaatattac

SEQ ID NO: 9509 - DNA, 31 bp, Homo sapiens
  chr2:15579676-15579707
  hypo
ggtctacagctcccagcgtgagcgatgcaga

SEQ ID NO: 9510 - DNA, 31 bp, Homo sapiens
  chr2:15792394-15792425
  hypo
gattgttgagaactctcgcagagggagacca

SEQ ID NO: 9511 - DNA, 31 bp, Homo sapiens
  chr2:15910903-15910934
  hypo
agggcacagccacctccggaaggcgacaggt

SEQ ID NO: 9512 - DNA, 31 bp, Homo sapiens; identical to SEQ ID NO: 849
  chr2:16079904-16079935
  hypo

SEQ ID NO: 9513 - DNA, 31 bp, Homo sapiens; identical to SEQ ID NO: 850
  chr2:16079966-16079997
  hypo

SEQ ID NO: 9514 - DNA, 38 bp, Homo sapiens; identical to SEQ ID NO: 851
  chr2:16080353-16080391
  hypo

SEQ ID NO: 9515 - DNA, 31 bp, Homo sapiens; identical to SEQ ID NO: 852
  chr2:16080605-16080636
  hypo

SEQ ID NO: 9516 - DNA, 93 bp, Homo sapiens; identical to SEQ ID NO: 853
  chr2:16080681-16080774
  hypo

SEQ ID NO: 9517 - DNA, 31 bp, Homo sapiens
  chr2:16121785-16121816
  hypo
ccttcttttcctcacccgtatctcccatgaa

SEQ ID NO: 9518 - DNA, 7 bp, Homo sapiens
  chr2:16274078-16274085
  hypo
aaaaaaa

SEQ ID NO: 9519 - DNA, 31 bp, Homo sapiens
  chr2:16274090-16274121
  hypo
aaaaaaaaaaaaaaagcgaatgattatataa

SEQ ID NO: 9520 - DNA, 31 bp, Homo sapiens
  chr2:16396900-16396931
  hypo
tgctggtttgaatttccgattttctctgttg

SEQ ID NO: 9521 - DNA, 31 bp, Homo sapiens
  chr2:16705037-16705068
  hypo
cttctacaagggaggccgttggctgctttcc

SEQ ID NO: 9522 - DNA, 31 bp, Homo sapiens
  chr2:19605841-19605872
  hypo
atcaagggaaagcaatcgtatataacggagt

SEQ ID NO: 9523 - DNA, 31 bp, Homo sapiens
  chr2:20047967-20047998
  hypo
aatggggggttacctgcgattggcgcctgaa

SEQ ID NO: 9524 - DNA, 40 bp, Homo sapiens
  chr2:20253273-20253313
  hypo
ataagatcaggggagccgggcgcggtggctcacgcctgta

SEQ ID NO: 9525 - DNA, 41 bp, Homo sapiens; identical to SEQ ID NO: 860
  chr2:20424155-20424196
  hypo

SEQ ID NO: 9526 - DNA, 31 bp, Homo sapiens
  chr2:20456197-20456228
  hypo
atgtatgttgaaacaacgtagtgatgctgaa

SEQ ID NO: 9527 - DNA, 48 bp, Homo sapiens
  chr2:20456250-20456298
  hypo
cactgtgtaaatcatccgctaatatttatcgggcggtaactaacatga

SEQ ID NO: 9528 - DNA, 31 bp, Homo sapiens
  chr2:20456304-20456335
  hypo
cagaattacacacttccgccttacttagtac

SEQ ID NO: 9529 - DNA, 42 bp, Homo sapiens; identical to SEQ ID NO: 863
  chr2:20646412-20646454
  hypo

SEQ ID NO: 9530 - DNA, 71 bp, Homo sapiens; identical to SEQ ID NO: 864
  chr2:20646463-20646534
  hypo

SEQ ID NO: 9531 - DNA, 235 bp, Homo sapiens; identical to SEQ ID NO: 865
  chr2:20646538-20646773
  hypo

SEQ ID NO: 9532 - DNA, 103 bp, Homo sapiens; identical to SEQ ID NO: 867
  chr2:20646863-20646966
  hypo

SEQ ID NO: 9533 - DNA, 35 bp, Homo sapiens; identical to SEQ ID NO: 868
  chr2:20646981-20647016
  hypo

SEQ ID NO: 9534 - DNA, 84 bp, Homo sapiens; identical to SEQ ID NO: 869
  chr2:20647037-20647121
  hypo

SEQ ID NO: 9535 - DNA, 44 bp, Homo sapiens
  chr2:20666563-20666607
  hypo
aaacaagcatctagaacggatccctgaaccggcttctgactcat

SEQ ID NO: 9536 - DNA, 146 bp, Homo sapiens; identical to SEQ ID NO: 875
  chr2:21022801-21022947
  hypo

SEQ ID NO: 9537 - DNA, 31 bp, Homo sapiens; identical to SEQ ID NO: 876
  chr2:21022954-21022985
  hypo

SEQ ID NO: 9538 - DNA, 31 bp, Homo sapiens; identical to SEQ ID NO: 877
  chr2:21022990-21023021
  hypo

SEQ ID NO: 9539 - DNA, 31 bp, Homo sapiens; identical to SEQ ID NO: 878
  chr2:21023025-21023056
  hypo

SEQ ID NO: 9540 - DNA, 31 bp, Homo sapiens
  chr2:23767027-23767058
  hypo
agtccaggatcttgcccgtctgtggggagag

SEQ ID NO: 9541 - DNA, 31 bp, Homo sapiens
  chr2:23785121-23785152
  hypo
gcgaatggagcgtcaacgggacgcatgggac

SEQ ID NO: 9542 - DNA, 31 bp, Homo sapiens
  chr2:23793021-23793052
  hypo
tgagaactgagcagagcgagtgggccaggca

SEQ ID NO: 9543 - DNA, 59 bp, Homo sapiens
  chr2:23793177-23793236
  hypo
ctgtgaaaaggagtcccgggagctggggaatggcgcgaggtgcacgtctcaatagcaga

SEQ ID NO: 9544 - DNA, 31 bp, Homo sapiens
  chr2:23841356-23841387
  hypo
aggggtttctcctgaccgcctttgagttggg

SEQ ID NO: 9545 - DNA, 31 bp, Homo sapiens
  chr2:23841412-23841443
  hypo
ctggaactgaaacatccgctcttcttgggtc

SEQ ID NO: 9546 - DNA, 31 bp, Homo sapiens
  chr2:23841467-23841498
  hypo
gaactataccagttcccgctcctgggtctcc

SEQ ID NO: 9547 - DNA, 31 bp, Homo sapiens
  chr2:23841501-23841532
  hypo
ttgctaactgcagatcgcgggacttctcggc

SEQ ID NO: 9548 - DNA, 38 bp, Homo sapiens
  chr2:23842952-23842990
  hypo
tgaggataagatggagcgagcctcggtgagggggccca

SEQ ID NO: 9549 - DNA, 31 bp, Homo sapiens
  chr2:23843019-23843050
  hypo
atgtgtggagattggacgcagcaaaccacat

SEQ ID NO: 9550 - DNA, 65 bp, Homo sapiens
  chr2:23843098-23843163
  hypo
ggcaccaggaggccagcggggcccatcagggagttggcactcgatcccttcgacaatgggattgg

SEQ ID NO: 9551 - DNA, 36 bp, Homo sapiens
  chr2:23863677-23863713
  hypo
ggggcgatgcaggcctcgtaccgtggtctatgtgac

SEQ ID NO: 9552 - DNA, 31 bp, Homo sapiens
  chr2:23865087-23865118
  hypo
ctggacgcaggtgtctcgttcccctctgtga

SEQ ID NO: 9553 - DNA, 31 bp, Homo sapiens
  chr2:23865122-23865153
  hypo
gcacccagtgcagggccggggatggtcagtg

SEQ ID NO: 9554 - DNA, 31 bp, Homo sapiens
  chr2:23881925-23881956
  hypo
gactttagaacacccccgctgctgaccgatt

SEQ ID NO: 9555 - DNA, 31 bp, Homo sapiens
  chr2:23901107-23901138
  hypo
ccagtccccattccctcgtgccacttgccgc

SEQ ID NO: 9556 - DNA, 31 bp, Homo sapiens
  chr2:23906650-23906681
  hypo
tgcttgcttgctttcccgaaaagtccccaca

SEQ ID NO: 9557 - DNA, 31 bp, Homo sapiens
  chr2:23918783-23918814
  hypo
gagtgtgtcccaagggcgcccatccatgtcc

SEQ ID NO: 9558 - DNA, 31 bp, Homo sapiens
  chr2:23925991-23926022
  hypo
cttgtgacctctgccccgcacaaggtccatc

SEQ ID NO: 9559 - DNA, 31 bp, Homo sapiens
  chr2:24060294-24060325
  hypo
tctgcacccaggcccccgcaagagcacaggg

SEQ ID NO: 9560 - DNA, 31 bp, Homo sapiens
  chr2:24060337-24060368
  hypo
acagccacaacttgggcggctgcagctgcac

SEQ ID NO: 9561 - DNA, 31 bp, Homo sapiens
  chr2:24060372-24060403
  hypo
ggagctcccatcccaccgactcaaaaggggt

SEQ ID NO: 9562 - DNA, 48 bp, Homo sapiens
  chr2:24060421-24060469
  hypo
cagtttccaaaagctccgtggaatgtgcagccccggctacacctcccc

SEQ ID NO: 9563 - DNA, 35 bp, Homo sapiens
  chr2:24279839-24279874
  hypo
tgtaagccatggtgcccggccggttgtctttttct

SEQ ID NO: 9564 - DNA, 29 bp, Homo sapiens
  chr2:24681768-24681797
  hypo
tgagccaccgcgcccggccccatctctga

SEQ ID NO: 9565 - DNA, 39 bp, Homo sapiens
  chr2:25141801-25141840
  hypo
cggctgagtactcggccgagtattcgggctcggagaagc

SEQ ID NO: 9566 - DNA, 80 bp, Homo sapiens; identical to SEQ ID NO: 879
  chr2:25265054-25265134
  hypo

SEQ ID NO: 9567 - DNA, 60 bp, Homo sapiens
  chr2:25369950-25370010
  hypo
cactggtgcagctgagcgcctgtgaactgtctgttctccagcgcccggcccctgttcagt

SEQ ID NO: 9568 - DNA, 31 bp, Homo sapiens
  chr2:25444163-25444194
  hypo
acaaggtgaaaatggccgagttggggataca

SEQ ID NO: 9569 - DNA, 107 bp, Homo sapiens
  chr2:25536769-25536876
  hypo
cccgctgctcacctttcggtcctcctcccgctccgcagcagagctgctggtgtccccggggccgctggagggcatggcgggcatctgggcgccgggaggcaggctgg

SEQ ID NO: 9570 - DNA, 47 bp, Homo sapiens
  chr2:25627753-25627800
  hypo
ggaaaactacacaacccgtggaaaatccaactcgccaccattattat

SEQ ID NO: 9571 - DNA, 31 bp, Homo sapiens
  chr2:25684629-25684660
  hypo
tgaccacaccaataaacgtaaacttgcaaat

SEQ ID NO: 9572 - DNA, 45 bp, Homo sapiens
  chr2:25924789-25924834
  hypo
gggctccccagtggcccggcagaataatgacggcttctgtggcaa

SEQ ID NO: 9573 - DNA, 31 bp, Homo sapiens
  chr2:25980216-25980247
  hypo
gaataccctggctgggcgcggtggctcacat

SEQ ID NO: 9574 - DNA, 31 bp, Homo sapiens
  chr2:26027550-26027581
  hypo
agttggttttcctgttcgtaagtgaaaagtt

SEQ ID NO: 9575 - DNA, 32 bp, Homo sapiens
  chr2:26027623-26027655
  hypo
tggcaagcttgaaggccgggcacggtggctca

SEQ ID NO: 9576 - DNA, 31 bp, Homo sapiens
  chr2:26153168-26153199
  hypo
gtacaatcagatgtttcgagagacagacaca

SEQ ID NO: 9577 - DNA, 13 bp, Homo sapiens
  chr2:26153255-26153268
  hypo
ctcactctgtcac

SEQ ID NO: 9578 - DNA, 31 bp, Homo sapiens
  chr2:26215604-26215635
  hypo
ctccatcctccaatgacgtctcatccctctc

SEQ ID NO: 9579 - DNA, 31 bp, Homo sapiens
  chr2:26362292-26362323
  hypo
agggtttcaataagaccgggctaaaatggca

SEQ ID NO: 9580 - DNA, 31 bp, Homo sapiens
  chr2:26362353-26362384
  hypo
gtgtgtgaatgggggcgcggtgtatttctgg

SEQ ID NO: 9581 - DNA, 31 bp, Homo sapiens
  chr2:26362425-26362456
  hypo
tgggttaggtcttcaacgtccttgtgaatta

SEQ ID NO: 9582 - DNA, 31 bp, Homo sapiens
  chr2:26385183-26385214
  hypo
ccagacttgaaattcacggggcctggaattc

SEQ ID NO: 9583 - DNA, 31 bp, Homo sapiens
  chr2:26405759-26405790
  hypo
atgaaggctcttgggacgcaggctagactcc

SEQ ID NO: 9584 - DNA, 25 bp, Homo sapiens
  chr2:26493752-26493777
  hypo
ttttttttttttgagacggagtctc

SEQ ID NO: 9585 - DNA, 50 bp, Homo sapiens
  chr2:26534836-26534886
  hypo
cagccagcaggagagtcgagcctgcccagggcttccgggcttgggccagg

SEQ ID NO: 9586 - DNA, 58 bp, Homo sapiens
  chr2:26534954-26535012
  hypo
aaagaaagatgaaccccgtctgctggcgcccacaggactgagccgggggcaatgagaa

SEQ ID NO: 9587 - DNA, 63 bp, Homo sapiens
  chr2:26706035-26706098
  hypo
tgtgtgagttggtatgcgtgcgtgtatgagtgggtgcatgtgtgtgtgcgtgcctgtgtgtgg

SEQ ID NO: 9588 - DNA, 31 bp, Homo sapiens
  chr2:26706136-26706167
  hypo
cctctcatgccccctgcgcagctctcagtct

SEQ ID NO: 9589 - DNA, 31 bp, Homo sapiens; identical to SEQ ID NO: 881
  chr2:26749880-26749911
  hypo

SEQ ID NO: 9590 - DNA, 55 bp, Homo sapiens
  chr2:26788318-26788373
  hypo
tcattcagcaagttgccgagcctcggctttgtgacttcaacgccccaactcaccc

SEQ ID NO: 9591 - DNA, 31 bp, Homo sapiens
  chr2:26965248-26965279
  hypo
gtcatgccagtggcctcggtggccccagcag

SEQ ID NO: 9592 - DNA, 36 bp, Homo sapiens
  chr2:26965291-26965327
  hypo
ggcagggagcaggagccgtgacgggcaggagtgtgc

SEQ ID NO: 9593 - DNA, 58 bp, Homo sapiens
  chr2:26965378-26965436
  hypo
aacagcttaggagcctcggaaggcccacaacccacccctaggacgccacctcccatgg

SEQ ID NO: 9594 - DNA, 6 bp, Homo sapiens
  chr2:27007704-27007710
  hypo
tacagg

SEQ ID NO: 9595 - DNA, 28 bp, Homo sapiens
  chr2:27090274-27090302
  hypo
tctattgatggacattcggtttgttccc

SEQ ID NO: 9596 - DNA, 31 bp, Homo sapiens
  chr2:27246589-27246620
  hypo
actgagctctgtgcaccgctcctgtgaagtt

SEQ ID NO: 9597 - DNA, 216 bp, Homo sapiens; identical to SEQ ID NO: 884
  chr2:27308892-27309108
  hypo

SEQ ID NO: 9598 - DNA, 6 bp, Homo sapiens
  chr2:27309136-27309142
  hypo
cgatcc

SEQ ID NO: 9599 - DNA, 45 bp, Homo sapiens; identical to SEQ ID NO: 886
  chr2:27309206-27309251
  hypo

SEQ ID NO: 9600 - DNA, 57 bp, Homo sapiens; identical to SEQ ID NO: 887
  chr2:27309260-27309317
  hypo

SEQ ID NO: 9601 - DNA, 42 bp, Homo sapiens
  chr2:27433174-27433216
  hypo
cctacattgatccaaacgctatggtctcgcatctctccagaa

SEQ ID NO: 9602 - DNA, 56 bp, Homo sapiens; identical to SEQ ID NO: 890
  chr2:27484951-27485007
  hypo

SEQ ID NO: 9603 - DNA, 69 bp, Homo sapiens; identical to SEQ ID NO: 891
  chr2:27485047-27485116
  hypo

SEQ ID NO: 9604 - DNA, 98 bp, Homo sapiens; identical to SEQ ID NO: 892
  chr2:27485132-27485230
  hypo

SEQ ID NO: 9605 - DNA, 19 bp, Homo sapiens
  chr2:27630896-27630915
  hypo
agagcgaaattctgtctca

SEQ ID NO: 9606 - DNA, 56 bp, Homo sapiens
  chr2:27668570-27668626
  hypo
cactggtgaggccttccggttttccaaccctgtgcccttaccggtacatgctgctt

SEQ ID NO: 9607 - DNA, 31 bp, Homo sapiens
  chr2:27711607-27711638
  hypo
aagttggtgagtgctccgagacattgtataa

SEQ ID NO: 9608 - DNA, 31 bp, Homo sapiens
  chr2:28058161-28058192
  hypo
aaaaagaattatgacacgtctgatgtagatc

SEQ ID NO: 9609 - DNA, 51 bp, Homo sapiens
  chr2:28572402-28572453
  hypo
gtgagacagtgagaagcgtgttgagcctccaggctgcgaggctgcacctag

SEQ ID NO: 9610 - DNA, 31 bp, Homo sapiens
  chr2:28577899-28577930
  hypo
aggatgagacctcactcgttcccaccttgga

SEQ ID NO: 9611 - DNA, 31 bp, Homo sapiens
  chr2:28581021-28581052
  hypo
tgtgcagtgattattccgcaccgtggtgatg

SEQ ID NO: 9612 - DNA, 52 bp, Homo sapiens
  chr2:28586479-28586531
  hypo
gacccttctcagcctccgggatgtttccccagcagcccgtgggcttccatcc

SEQ ID NO: 9613 - DNA, 66 bp, Homo sapiens
  chr2:28586563-28586629
  hypo
atcactgcagacagcacgcagaggagcccacccgctgggtccctggggcaccgcagcccctctccc

SEQ ID NO: 9614 - DNA, 31 bp, Homo sapiens
  chr2:28919663-28919694
  hypo
aagtttggggagctgacgacagtacaagttg

SEQ ID NO: 9615 - DNA, 31 bp, Homo sapiens
  chr2:29225584-29225615
  hypo
ctcacgagttgagacccggtgctcaggaggt

SEQ ID NO: 9616 - DNA, 140 bp, Homo sapiens; identical to SEQ ID NO: 896
  chr2:29338529-29338669
  hypo

SEQ ID NO: 9617 - DNA, 31 bp, Homo sapiens
  chr2:30368679-30368710
  hypo
tcaggtaaacttcagacgaactaaatgaaaa

SEQ ID NO: 9618 - DNA, 31 bp, Homo sapiens; identical to SEQ ID NO: 898
  chr2:30369485-30369516
  hypo

SEQ ID NO: 9619 - DNA, 48 bp, Homo sapiens; identical to SEQ ID NO: 899
  chr2:30453837-30453885
  hypo

SEQ ID NO: 9620 - DNA, 122 bp, Homo sapiens; identical to SEQ ID NO: 900
  chr2:30454013-30454135
  hypo

SEQ ID NO: 9621 - DNA, 53 bp, Homo sapiens; identical to SEQ ID NO: 901
  chr2:30454240-30454293
  hypo

SEQ ID NO: 9622 - DNA, 31 bp, Homo sapiens; identical to SEQ ID NO: 902
  chr2:30454307-30454338
  hypo

SEQ ID NO: 9623 - DNA, 37 bp, Homo sapiens; identical to SEQ ID NO: 903
  chr2:30454340-30454377
  hypo

SEQ ID NO: 9624 - DNA, 119 bp, Homo sapiens; identical to SEQ ID NO: 904
  chr2:30454474-30454593
  hypo

SEQ ID NO: 9625 - DNA, 58 bp, Homo sapiens; identical to SEQ ID NO: 905
  chr2:30454626-30454684
  hypo

SEQ ID NO: 9626 - DNA, 31 bp, Homo sapiens
  chr2:30521569-30521600
  hypo
aatgttttcatttctccggtagaaataccta

SEQ ID NO: 9627 - DNA, 31 bp, Homo sapiens
  chr2:30870559-30870590
  hypo
agggttttactacttacggtaagtagttttg

SEQ ID NO: 9628 - DNA, 31 bp, Homo sapiens; identical to SEQ ID NO: 908
  chr2:31360230-31360261
  hypo

SEQ ID NO: 9629 - DNA, 31 bp, Homo sapiens; identical to SEQ ID NO: 909
  chr2:31360724-31360755
  hypo

SEQ ID NO: 9630 - DNA, 49 bp, Homo sapiens; identical to SEQ ID NO: 910
  chr2:31360816-31360865
  hypo

SEQ ID NO: 9631 - DNA, 287 bp, Homo sapiens; identical to SEQ ID NO: 911
  chr2:31360879-31361166
  hypo

SEQ ID NO: 9632 - DNA, 53 bp, Homo sapiens; identical to SEQ ID NO: 912
  chr2:31361295-31361348
  hypo

SEQ ID NO: 9633 - DNA, 36 bp, Homo sapiens; identical to SEQ ID NO: 913
  chr2:31361399-31361435
  hypo

SEQ ID NO: 9634 - DNA, 65 bp, Homo sapiens; identical to SEQ ID NO: 914
  chr2:31361542-31361607
  hypo

SEQ ID NO: 9635 - DNA, 48 bp, Homo sapiens; identical to SEQ ID NO: 915
  chr2:31361610-31361658
  hypo

SEQ ID NO: 9636 - DNA, 31 bp, Homo sapiens
  chr2:31551360-31551391
  hypo
ttccttttgagacagtcgctctctgttacct

SEQ ID NO: 9637 - DNA, 12 bp, Homo sapiens
  chr2:31551444-31551456
  hypo
gctcaagaaatc

SEQ ID NO: 9638 - DNA, 14 bp, Homo sapiens
  chr2:32263996-32264010
  hypo
gtgggccatcgcgc

SEQ ID NO: 9639 - DNA, 48 bp, Homo sapiens
  chr2:32367737-32367785
  hypo
tacaggcatgagtcaccgtgcccggccagaaatcgaaaatttctagaa

SEQ ID NO: 9640 - DNA, 31 bp, Homo sapiens
  chr2:32482237-32482268
  hypo
attaaatgtcaaaagacggtataagtgtcaa

SEQ ID NO: 9641 - DNA, 29 bp, Homo sapiens
  chr2:32504349-32504378
  hypo
tttttattacacttcgtgcaccagttatt

SEQ ID NO: 9642 - DNA, 29 bp, Homo sapiens
  chr2:32854102-32854131
  hypo
aggcctgagccaccgcgcccgggtctggt

SEQ ID NO: 9643 - DNA, 17 bp, Homo sapiens
  chr2:33802101-33802118
  hypo
acacctataatcacagc

SEQ ID NO: 9644 - DNA, 61 bp, Homo sapiens
  chr2:36824206-36824267
  hypo
tccccaccagaccatgcgatcgttaccatcagtaagcagggcccttcgttttcgtctctgt

SEQ ID NO: 9645 - DNA, 39 bp, Homo sapiens
  chr2:37149991-37150030
  hypo
atgaaaataaccactccgggccgcacgcggtggctcacg

SEQ ID NO: 9646 - DNA, 31 bp, Homo sapiens
  chr2:37195421-37195452
  hypo
agtgagacgacatatccgacaattcctttaa

SEQ ID NO: 9647 - DNA, 31 bp, Homo sapiens
  chr2:37227245-37227276
  hypo
aaactctgttttttgccgagcctggagtgca

SEQ ID NO: 9648 - DNA, 22 bp, Homo sapiens
  chr2:37227280-37227302
  hypo
tgtgatcttggctcaccgcaac

SEQ ID NO: 9649 - DNA, 28 bp, Homo sapiens
  chr2:37241580-37241608
  hypo
aggtgtgagccaccgtgcccagccagta

SEQ ID NO: 9650 - DNA, 31 bp, Homo sapiens
  chr2:37241637-37241668
  hypo
ttttattgtactcctacgtagaaaacaaaat

SEQ ID NO: 9651 - DNA, 16 bp, Homo sapiens
  chr2:37242101-37242117
  hypo
gcgagactttgtctca

SEQ ID NO: 9652 - DNA, 31 bp, Homo sapiens; identical to SEQ ID NO: 919
  chr2:37980872-37980903
  hypo

SEQ ID NO: 9653 - DNA, 49 bp, Homo sapiens
  chr2:38157988-38158037
  hypo
tgcccagcctctggcacggtgggccttccgcctccgcctgacatgagga

SEQ ID NO: 9654 - DNA, 31 bp, Homo sapiens
  chr2:38571500-38571531
  hypo
caacactttgggaggccgaggcaggcagatc

SEQ ID NO: 9655 - DNA, 31 bp, Homo sapiens
  chr2:38649876-38649907
  hypo
agaaaaaaaaaacaaacgataaagcttgcaa

SEQ ID NO: 9656 - DNA, 31 bp, Homo sapiens
  chr2:38709159-38709190
  hypo
caagaacaccatgatgcgcaaggccatccga

SEQ ID NO: 9657 - DNA, 16 bp, Homo sapiens
  chr2:39034203-39034219
  hypo
ttgttttttttgagac

SEQ ID NO: 9658 - DNA, 277 bp, Homo sapiens; identical to SEQ ID NO: 921
  chr2:42274632-42274909
  hypo

SEQ ID NO: 9659 - DNA, 70 bp, Homo sapiens; identical to SEQ ID NO: 922
  chr2:42274911-42274981
  hypo

SEQ ID NO: 9660 - DNA, 58 bp, Homo sapiens; identical to SEQ ID NO: 924
  chr2:42275208-42275266
  hypo

SEQ ID NO: 9661 - DNA, 405 bp, Homo sapiens; identical to SEQ ID NO: 925
  chr2:42275281-42275686
  hypo

SEQ ID NO: 9662 - DNA, 31 bp, Homo sapiens
  chr2:43002055-43002086
  hypo
gagtggctaaatttcccgtccctccccacca

SEQ ID NO: 9663 - DNA, 31 bp, Homo sapiens
  chr2:43147316-43147347
  hypo
gtgaccaaaggttcttcggctgtgggctggt

SEQ ID NO: 9664 - DNA, 41 bp, Homo sapiens
  chr2:43147360-43147401
  hypo
ccttaggggtgatggtcggtgtataacgctaagaccagagc

SEQ ID NO: 9665 - DNA, 31 bp, Homo sapiens
  chr2:43147404-43147435
  hypo
aatggctctgattctccgccatagagtgcca

SEQ ID NO: 9666 - DNA, 31 bp, Homo sapiens
  chr2:43148272-43148303
  hypo
acgatgatttccacctcgatgggcagtctca

SEQ ID NO: 9667 - DNA, 31 bp, Homo sapiens
  chr2:43148317-43148348
  hypo
ggcttgggtcactctccgcatcccaggtaca

SEQ ID NO: 9668 - DNA, 56 bp, Homo sapiens
  chr2:43159424-43159480
  hypo
caaagagcagccctgccgaatctaccctgtgctggaggtgccgagtggagcccaat

SEQ ID NO: 9669 - DNA, 59 bp, Homo sapiens
  chr2:43173212-43173271
  hypo
accccctgactgaggacgccagcctctgaccagtggctgaaacccgtcttctaggcatt

SEQ ID NO: 9670 - DNA, 11 bp, Homo sapiens
  chr2:43173303-43173314
  hypo
ggtctttctta

SEQ ID NO: 9671 - DNA, 31 bp, Homo sapiens
  chr2:43185202-43185233
  hypo
tcaggggtcctggatacggtcagcactgggg

SEQ ID NO: 9672 - DNA, 54 bp, Homo sapiens
  chr2:43185301-43185355
  hypo
ctgctctcctttccagcgttcacaaccctgcctctccccgcggaatgcctgact

SEQ ID NO: 9673 - DNA, 31 bp, Homo sapiens
  chr2:43185372-43185403
  hypo
aagctgccatctgtaccgccctcatggtgtg

SEQ ID NO: 9674 - DNA, 31 bp, Homo sapiens
  chr2:43198399-43198430
  hypo
gacggatgaggtaggacgggatggagagata

SEQ ID NO: 9675 - DNA, 31 bp, Homo sapiens
  chr2:43270310-43270341
  hypo
ggcagaggcagggctccgactctcaagcagc

SEQ ID NO: 9676 - DNA, 31 bp, Homo sapiens
  chr2:43271000-43271031
  hypo
cttcttcataaatgggcgtccccaggaaggc

SEQ ID NO: 9677 - DNA, 37 bp, Homo sapiens
  chr2:43299387-43299424
  hypo
tgatccaggtagcctccgtgtccggctgatgggctga

SEQ ID NO: 9678 - DNA, 61 bp, Homo sapiens
  chr2:43299435-43299496
  hypo
agaatggccaggctcccgtggctggattccagcaagcctttcatagcgtcctctgccatgc

SEQ ID NO: 9679 - DNA, 31 bp, Homo sapiens
  chr2:43299530-43299561
  hypo
tttgtgactcctcaggcgctgggccttgagg

SEQ ID NO: 9680 - DNA, 31 bp, Homo sapiens
  chr2:43306146-43306177
  hypo
tctctcctcccctgggcggcctctgctccag

SEQ ID NO: 9681 - DNA, 59 bp, Homo sapiens
  chr2:43408167-43408226
  hypo
tctgtgcctgacattacgctgggtgccgcaggtacaatggtgaacgacacagacccaat

SEQ ID NO: 9682 - DNA, 59 bp, Homo sapiens
  chr2:43408241-43408300
  hypo
gtgaatcatctagcaacggagacaaatattcaatacacacccaacgcatagttagtgag

SEQ ID NO: 9683 - DNA, 52 bp, Homo sapiens
  chr2:43408305-43408357
  hypo
cagagagtgaagggtgcgatgggatcagatttcccagcgggcccaagagagg

SEQ ID NO: 9684 - DNA, 59 bp, Homo sapiens
  chr2:44047672-44047731
  hypo
atgggattattgcctacgtgaaaatccctcacttcttttgtcctcgatcaggttagccc

SEQ ID NO: 9685 - DNA, 48 bp, Homo sapiens
  chr2:44047781-44047829
  hypo
ccactgatttgaccttcgttttcttttttgagacggagttgcactctg

SEQ ID NO: 9686 - DNA, 31 bp, Homo sapiens
  chr2:44079072-44079103
  hypo
aactcagcttgccttccgccagccctgggct

SEQ ID NO: 9687 - DNA, 41 bp, Homo sapiens
  chr2:44126097-44126138
  hypo
ctacccccgcaccacccgccgctccccgctacctcaattct

SEQ ID NO: 9688 - DNA, 31 bp, Homo sapiens
  chr2:44126198-44126229
  hypo
gtccttgtcctgcaaccgtgattcacactga

SEQ ID NO: 9689 - DNA, 34 bp, Homo sapiens
  chr2:44224213-44224247
  hypo
caaaacaaaaaaaccacgtcgctgccttcacagg

SEQ ID NO: 9690 - DNA, 36 bp, Homo sapiens
  chr2:44528015-44528051
  hypo
accatgtttgagtgtgcgtctcgcttggcttgagcc

SEQ ID NO: 9691 - DNA, 31 bp, Homo sapiens
  chr2:45318688-45318719
  hypo
tatccttacatatgctcggatagccttagaa

SEQ ID NO: 9692 - DNA, 54 bp, Homo sapiens
  chr2:45927197-45927251
  hypo
cgagccacaagatgaacgggggcagttaactaaccaggccgcctggggttgagg

SEQ ID NO: 9693 - DNA, 46 bp, Homo sapiens
  chr2:45927295-45927341
  hypo
acatctgaggccctgccgggagccagggtctcggtggagaggtgag

SEQ ID NO: 9694 - DNA, 31 bp, Homo sapiens
  chr2:45927372-45927403
  hypo
ttttctttgcagcactcgaagtctgatggca

SEQ ID NO: 9695 - DNA, 31 bp, Homo sapiens
  chr2:45997208-45997239
  hypo
gctctccttctctatgcgcatgtcttttatc

SEQ ID NO: 9696 - DNA, 31 bp, Homo sapiens
  chr2:46143761-46143792
  hypo
tatttctttagccaatcgggaatcttgggtg

SEQ ID NO: 9697 - DNA, 46 bp, Homo sapiens; identical to SEQ ID NO: 935
  chr2:46524184-46524230
  hypo

SEQ ID NO: 9698 - DNA, 56 bp, Homo sapiens; identical to SEQ ID NO: 936
  chr2:46524317-46524373
  hypo

SEQ ID NO: 9699 - DNA, 122 bp, Homo sapiens; identical to SEQ ID NO: 937
  chr2:46524519-46524641
  hypo

SEQ ID NO: 9700 - DNA, 48 bp, Homo sapiens; identical to SEQ ID NO: 938
  chr2:46524645-46524693
  hypo

SEQ ID NO: 9701 - DNA, 60 bp, Homo sapiens; identical to SEQ ID NO: 939
  chr2:46525000-46525060
  hypo

SEQ ID NO: 9702 - DNA, 97 bp, Homo sapiens; identical to SEQ ID NO: 940
  chr2:46525065-46525162
  hypo

SEQ ID NO: 9703 - DNA, 45 bp, Homo sapiens; identical to SEQ ID NO: 941
  chr2:46525166-46525211
  hypo

SEQ ID NO: 9704 - DNA, 43 bp, Homo sapiens; identical to SEQ ID NO: 942
  chr2:46525215-46525258
  hypo

SEQ ID NO: 9705 - DNA, 31 bp, Homo sapiens
  chr2:47102025-47102056
  hypo
aagcctgaattcccctcggtttatgaggtaa

SEQ ID NO: 9706 - DNA, 31 bp, Homo sapiens
  chr2:47102070-47102101
  hypo
ccttcacatgctttcccgaccctatcctgga

SEQ ID NO: 9707 - DNA, 56 bp, Homo sapiens
  chr2:47102130-47102186
  hypo
tactccagtgatgttgcggccgggatgccttctggggaactcgaatgctgcaggca

SEQ ID NO: 9708 - DNA, 46 bp, Homo sapiens; identical to SEQ ID NO: 948
  chr2:47167941-47167987
  hypo

SEQ ID NO: 9709 - DNA, 31 bp, Homo sapiens
  chr2:47193929-47193960
  hypo
ttttttttttttttttcgaagataaattcct

SEQ ID NO: 9710 - DNA, 52 bp, Homo sapiens
  chr2:47194036-47194088
  hypo
ttgttttttttttttccgttaaaaaattgtgttggccgggcgcggtggctca

SEQ ID NO: 9711 - DNA, 40 bp, Homo sapiens
  chr2:47249808-47249848
  hypo
ctgggagcggcagtcacggtgacatcgggtataaatgagc

SEQ ID NO: 9712 - DNA, 48 bp, Homo sapiens
  chr2:47475843-47475891
  hypo
actagagctatacttccgcatccctggggccatcgcagactcattaga

SEQ ID NO: 9713 - DNA, 31 bp, Homo sapiens
  chr2:47475933-47475964
  hypo
tatgtacaaagattgtcgtatgtcatttcta

SEQ ID NO: 9714 - DNA, 41 bp, Homo sapiens
  chr2:47475975-47476016
  hypo
acactctgaagcatctcgttagactgcggaatgagaagccc

SEQ ID NO: 9715 - DNA, 31 bp, Homo sapiens
  chr2:47536015-47536046
  hypo
tgtgagccaccatgcccggcttatcctgcca

SEQ ID NO: 9716 - DNA, 54 bp, Homo sapiens
  chr2:47574193-47574247
  hypo
gtgacgcttagttcaccggcatgaggctgtatctggaccgcggctcccctagcc

SEQ ID NO: 9717 - DNA, 31 bp, Homo sapiens; identical to SEQ ID NO: 949
  chr2:47596551-47596582
  hypo

SEQ ID NO: 9718 - DNA, 16 bp, Homo sapiens
  chr2:47596832-47596848
  hypo
tttccagcgtggagac

SEQ ID NO: 9719 - DNA, 31 bp, Homo sapiens
  chr2:47598376-47598407
  hypo
taaacaacttggctgccgtctctctctctct

SEQ ID NO: 9720 - DNA, 38 bp, Homo sapiens
  chr2:47598414-47598452
  hypo
ttggaaacagtgtctccgtctgtcgttcagcctggagt

SEQ ID NO: 9721 - DNA, 16 bp, Homo sapiens
  chr2:47612111-47612127
  hypo
ccgggattacaggcat

SEQ ID NO: 9722 - DNA, 41 bp, Homo sapiens; identical to SEQ ID NO: 951
  chr2:47796907-47796948
  hypo

SEQ ID NO: 9723 - DNA, 68 bp, Homo sapiens; identical to SEQ ID NO: 952
  chr2:47797117-47797185
  hypo

SEQ ID NO: 9724 - DNA, 31 bp, Homo sapiens; identical to SEQ ID NO: 953
  chr2:47798114-47798145
  hypo

SEQ ID NO: 9725 - DNA, 31 bp, Homo sapiens
  chr2:48112329-48112360
  hypo
cataaaaggaagtgatcgaatactgaagtca

SEQ ID NO: 9726 - DNA, 59 bp, Homo sapiens; identical to SEQ ID NO: 957
  chr2:54683031-54683090
  hypo

SEQ ID NO: 9727 - DNA, 56 bp, Homo sapiens; identical to SEQ ID NO: 958
  chr2:54683116-54683172
  hypo

SEQ ID NO: 9728 - DNA, 17 bp, Homo sapiens
  chr2:55492354-55492371
  hypo
gacgacaagaacaaaac

SEQ ID NO: 9729 - DNA, 2 bp, Homo sapiens
  chr2:55874934-55874936
  hypo
ag

SEQ ID NO: 9730 - DNA, 31 bp, Homo sapiens
  chr2:58614663-58614694
  hypo
cggagctgttcctattcggccatcttggctc

SEQ ID NO: 9731 - DNA, 1 bp, Homo sapiens
  chr2:58776939-58776940
  hypo
a

SEQ ID NO: 9732 - DNA, 31 bp, Homo sapiens; identical to SEQ ID NO: 960
  chr2:58777010-58777041
  hypo

SEQ ID NO: 9733 - DNA, 67 bp, Homo sapiens
  chr2:60705870-60705937
  hypo
aggctgaatgaaggagcgctctggtgctgcgaggccaggcctcctcccatgacggcaagtccttctt

SEQ ID NO: 9734 - DNA, 31 bp, Homo sapiens
  chr2:60705941-60705972
  hypo
aaaacaggcctctgcccggggcatgctgcag

SEQ ID NO: 9735 - DNA, 31 bp, Homo sapiens
  chr2:60705986-60706017
  hypo
tgcctcagcaccttcccgcctcccaggcaca

SEQ ID NO: 9736 - DNA, 75 bp, Homo sapiens
  chr2:60706685-60706760
  hypo
aagccccctctgtcaccggcccacagatctcagctgccatcgcactcaaaccctgtcaggcggtggagagtgtgg

SEQ ID NO: 9737 - DNA, 31 bp, Homo sapiens
  chr2:60706788-60706819
  hypo
ccgaccaggcaagaaccgtcctgtactcctg

SEQ ID NO: 9738 - DNA, 21 bp, Homo sapiens
  chr2:61142250-61142271
  hypo
ccaccacgcctggccagtttg

SEQ ID NO: 9739 - DNA, 28 bp, Homo sapiens
  chr2:61556161-61556189
  hypo
tgttttgtttttgagacggagtttcact

SEQ ID NO: 9740 - DNA, 31 bp, Homo sapiens
  chr2:61923842-61923873
  hypo
gctggagagtagtggccgtatcatttagttc

SEQ ID NO: 9741 - DNA, 52 bp, Homo sapiens; identical to SEQ ID NO: 963
  chr2:61990959-61991011
  hypo

SEQ ID NO: 9742 - DNA, 53 bp, Homo sapiens; identical to SEQ ID NO: 964
  chr2:61991090-61991143
  hypo

SEQ ID NO: 9743 - DNA, 83 bp, Homo sapiens; identical to SEQ ID NO: 965
  chr2:61991157-61991240
  hypo

SEQ ID NO: 9744 - DNA, 31 bp, Homo sapiens; identical to SEQ ID NO: 966
  chr2:61991256-61991287
  hypo

SEQ ID NO: 9745 - DNA, 233 bp, Homo sapiens; identical to SEQ ID NO: 968
  chr2:61991553-61991786
  hypo

SEQ ID NO: 9746 - DNA, 20 bp, Homo sapiens
  chr2:62092173-62092193
  hypo
gactccgtctcaaaaaaaaa

SEQ ID NO: 9747 - DNA, 28 bp, Homo sapiens
  chr2:62910505-62910533
  hypo
agtaagcaggccaggcgcggtgtctccg

SEQ ID NO: 9748 - DNA, 44 bp, Homo sapiens
  chr2:64348215-64348259
  hypo
cccacttaggttacagcgaaataaatctgcgcaggtaggctgct

SEQ ID NO: 9749 - DNA, 31 bp, Homo sapiens
  chr2:64348296-64348327
  hypo
tacctgcaaaaatgatcggggcatattctag

SEQ ID NO: 9750 - DNA, 57 bp, Homo sapiens
  chr2:64348349-64348406
  hypo
ccttgtcatgtgattccgggctgatgagattgctcaagaagccggacatgacaaatt

SEQ ID NO: 9751 - DNA, 31 bp, Homo sapiens
  chr2:64538863-64538894
  hypo
gcactctggaagaaagcgcaaattcaaagta

SEQ ID NO: 9752 - DNA, 31 bp, Homo sapiens
  chr2:64543594-64543625
  hypo
tcatgaaagcatcctccgggacccagtttcc

SEQ ID NO: 9753 - DNA, 31 bp, Homo sapiens
  chr2:64835503-64835534
  hypo
actgaggacagggaggcgaagtgagctgtta

SEQ ID NO: 9754 - DNA, 58 bp, Homo sapiens
  chr2:64835556-64835614
  hypo
tgctggggatagaacacgggtggctacgccgggcatggtggtgcgcacctgcagtcct

SEQ ID NO: 9755 - DNA, 32 bp, Homo sapiens
  chr2:64835618-64835650
  hypo
gctggagaagctgaggcggaaggatcgcttaa

SEQ ID NO: 9756 - DNA, 31 bp, Homo sapiens
  chr2:65267111-65267142
  hypo
agaaggcaaggaagcccgcaaatctaagcca

SEQ ID NO: 9757 - DNA, 22 bp, Homo sapiens
  chr2:65727278-65727300
  hypo
gcaagaacgaaactttgcctca

SEQ ID NO: 9758 - DNA, 31 bp, Homo sapiens
  chr2:65740148-65740179
  hypo
gaaggcctggtgttgccggatcttccaggaa

SEQ ID NO: 9759 - DNA, 31 bp, Homo sapiens
  chr2:65740183-65740214
  hypo
tcagagaagctggaaacgcataactttatgt

SEQ ID NO: 9760 - DNA, 31 bp, Homo sapiens; identical to SEQ ID NO: 974
  chr2:66661598-66661629
  hypo

SEQ ID NO: 9761 - DNA, 31 bp, Homo sapiens
  chr2:66666250-66666281
  hypo
cgacatctaggcccctcgcaatactagctgc

SEQ ID NO: 9762 - DNA, 31 bp, Homo sapiens
  chr2:67625452-67625483
  hypo
ttttttttataccttacgtgtcttttttctt

SEQ ID NO: 9763 - DNA, 31 bp, Homo sapiens
  chr2:67747554-67747585
  hypo
atttttcttaagcacacggccactgaacctc

SEQ ID NO: 9764 - DNA, 28 bp, Homo sapiens
  chr2:68287494-68287522
  hypo
tgggcgcagtgactgacgcctgtaatcc

SEQ ID NO: 9765 - DNA, 23 bp, Homo sapiens
  chr2:68433261-68433284
  hypo
ttcaaatacgtgaaagaacagag

SEQ ID NO: 9766 - DNA, 31 bp, Homo sapiens
  chr2:68433310-68433341
  hypo
aaaatcaaagagaagtcgactgtgttataaa

SEQ ID NO: 9767 - DNA, 31 bp, Homo sapiens
  chr2:68672362-68672393
  hypo
gattctaagtccccagcgaaaacccacacca

SEQ ID NO: 9768 - DNA, 76 bp, Homo sapiens
  chr2:68672688-68672764
  hypo
atcaaaataacaaacacgcacgacgtcttcgatcaccttcctgtaaaaccgggtttctagccggacccatgtcctc

SEQ ID NO: 9769 - DNA, 77 bp, Homo sapiens
  chr2:68672770-68672847
  hypo
cctgaatcaagttcaccgtctgtgcaagcgccacctgacagagctccctgcgacactgaaacgcgtttgggcacttc

SEQ ID NO: 9770 - DNA, 31 bp, Homo sapiens
  chr2:69520725-69520756
  hypo
attggagcgtggctgccgacacgtgactttt

SEQ ID NO: 9771 - DNA, 31 bp, Homo sapiens; identical to SEQ ID NO: 977
  chr2:69614637-69614668
  hypo

SEQ ID NO: 9772 - DNA, 70 bp, Homo sapiens; identical to SEQ ID NO: 978
  chr2:69968733-69968803
  hypo

SEQ ID NO: 9773 - DNA, 31 bp, Homo sapiens
  chr2:70055298-70055329
  hypo
atgggaaacacctgcacgttctttgtgctgg

SEQ ID NO: 9774 - DNA, 73 bp, Homo sapiens
  chr2:70055358-70055431
  hypo
tgcagccattattctccgcctcccacctccaccccaagctgcctcggctagcctctctcggttcagatttctc

SEQ ID NO: 9775 - DNA, 29 bp, Homo sapiens
  chr2:70055439-70055468
  hypo
atcagacattagtccacggggaccctcaa

SEQ ID NO: 9776 - DNA, 31 bp, Homo sapiens
  chr2:70203998-70204029
  hypo
acacacactcatacaccgaggagacacaaac

SEQ ID NO: 9777 - DNA, 12 bp, Homo sapiens
  chr2:70204073-70204085
  hypo
agcactttggga

SEQ ID NO: 9778 - DNA, 31 bp, Homo sapiens
  chr2:70224804-70224835
  hypo
atggccacctccagcccgatggcactgaacc

SEQ ID NO: 9779 - DNA, 31 bp, Homo sapiens; identical to SEQ ID NO: 981
  chr2:70351210-70351241
  hypo

SEQ ID NO: 9780 - DNA, 91 bp, Homo sapiens; identical to SEQ ID NO: 982
  chr2:70351300-70351391
  hypo

SEQ ID NO: 9781 - DNA, 53 bp, Homo sapiens; identical to SEQ ID NO: 983
  chr2:70351408-70351461
  hypo

SEQ ID NO: 9782 - DNA, 31 bp, Homo sapiens; identical to SEQ ID NO: 984
  chr2:70369300-70369331
  hypo

SEQ ID NO: 9783 - DNA, 31 bp, Homo sapiens; identical to SEQ ID NO: 985
  chr2:70418190-70418221
  hypo

SEQ ID NO: 9784 - DNA, 26 bp, Homo sapiens
  chr2:70557172-70557198
  hypo
aaagtgccggctgggcgcggtggctc

SEQ ID NO: 9785 - DNA, 30 bp, Homo sapiens
  chr2:71355581-71355611
  hypo
aatgtctatcaagagacgaatggataaaca

SEQ ID NO: 9786 - DNA, 33 bp, Homo sapiens
  chr2:71792490-71792523
  hypo
gattcaggcgtgagccaccgcgccagccctcct

SEQ ID NO: 9787 - DNA, 50 bp, Homo sapiens
  chr2:71839445-71839495
  hypo
aagaaatgttgagtcccgggccaactcccctcgcccgctccccagccagt

SEQ ID NO: 9788 - DNA, 45 bp, Homo sapiens
  chr2:72359981-72360026
  hypo
cctgatgcatttggggcgcacttctcccatcggactgaaagctcc

SEQ ID NO: 9789 - DNA, 31 bp, Homo sapiens
  chr2:72369008-72369039
  hypo
ccaccaacatgccccacgtggcaagcataaa

SEQ ID NO: 9790 - DNA, 34 bp, Homo sapiens; identical to SEQ ID NO: 987
  chr2:72375617-72375651
  hypo

SEQ ID NO: 9791 - DNA, 50 bp, Homo sapiens; identical to SEQ ID NO: 988
  chr2:72375662-72375712
  hypo

SEQ ID NO: 9792 - DNA, 32 bp, Homo sapiens
  chr2:72459901-72459933
  hypo
ttattataaagaaacccgggccaggcgcagtg

SEQ ID NO: 9793 - DNA, 443 bp, Homo sapiens; identical to SEQ ID NO: 991
  chr2:73052797-73053240
  hypo

SEQ ID NO: 9794 - DNA, 31 bp, Homo sapiens; identical to SEQ ID NO: 994
  chr2:73114324-73114355
  hypo

SEQ ID NO: 9795 - DNA, 97 bp, Homo sapiens; identical to SEQ ID NO: 995
  chr2:73114405-73114502
  hypo

SEQ ID NO: 9796 - DNA, 31 bp, Homo sapiens
  chr2:73384739-73384770
  hypo
accgcgcccggcctcccgtagcatctcatta

SEQ ID NO: 9797 - DNA, 37 bp, Homo sapiens; identical to SEQ ID NO: 1000
  chr2:73520647-73520684
  hypo

SEQ ID NO: 9798 - DNA, 102 bp, Homo sapiens; identical to SEQ ID NO: 1001
  chr2:73520696-73520798
  hypo

SEQ ID NO: 9799 - DNA, 69 bp, Homo sapiens; identical to SEQ ID NO: 1002
  chr2:73520882-73520951
  hypo

SEQ ID NO: 9800 - DNA, 78 bp, Homo sapiens
  chr2:74152824-74152902
  hypo
tgggtaggactttagccgctccagtagccattaacgccccaccctggttatccttaaaaaattcgattaaaaaaaaag

SEQ ID NO: 9801 - DNA, 31 bp, Homo sapiens
  chr2:74152948-74152979
  hypo
cataagaaaaaggtcccgtgctttttatggg

SEQ ID NO: 9802 - DNA, 31 bp, Homo sapiens
  chr2:74152992-74153023
  hypo
caggtatcccagcccccggcccctccccagc

SEQ ID NO: 9803 - DNA, 31 bp, Homo sapiens
  chr2:74155623-74155654
  hypo
atgagggagcaaatcacgtggatacctggga

SEQ ID NO: 9804 - DNA, 20 bp, Homo sapiens
  chr2:74315938-74315958
  hypo
ggctcatgcctgtggtcgca

SEQ ID NO: 9805 - DNA, 41 bp, Homo sapiens
  chr2:74350345-74350386
  hypo
tgctaacatgtcaaatcgcttgaattcaggcggcaaagatg

SEQ ID NO: 9806 - DNA, 31 bp, Homo sapiens
  chr2:74454118-74454149
  hypo
tgaggatccagagcaccgccaggcagaggat

SEQ ID NO: 9807 - DNA, 31 bp, Homo sapiens
  chr2:74454230-74454261
  hypo
caggaagagcttgcagcgttcccagaactag

SEQ ID NO: 9808 - DNA, 31 bp, Homo sapiens
  chr2:74454280-74454311
  hypo
ccaggcagccagaccccgagggcccgctggg

SEQ ID NO: 9809 - DNA, 31 bp, Homo sapiens
  chr2:74460531-74460562
  hypo
cagtttgttctccttccggttgacaatgacg

SEQ ID NO: 9810 - DNA, 31 bp, Homo sapiens
  chr2:74669782-74669813
  hypo
ataaagagcagctgcgcgcggtggctcacgc

SEQ ID NO: 9811 - DNA, 31 bp, Homo sapiens
  chr2:74672966-74672997
  hypo
aattaactttagagatcgtaatttggcagcc

SEQ ID NO: 9812 - DNA, 27 bp, Homo sapiens
  chr2:74700452-74700479
  hypo
ttttctttttttgagacgaagttttgc

SEQ ID NO: 9813 - DNA, 37 bp, Homo sapiens; identical to SEQ ID NO: 1003
  chr2:74776039-74776076
  hypo

SEQ ID NO: 9814 - DNA, 77 bp, Homo sapiens; identical to SEQ ID NO: 1006
  chr2:74781910-74781987
  hypo

SEQ ID NO: 9815 - DNA, 83 bp, Homo sapiens; identical to SEQ ID NO: 1007
  chr2:74782004-74782087
  hypo

SEQ ID NO: 9816 - DNA, 53 bp, Homo sapiens; identical to SEQ ID NO: 1008
  chr2:74782218-74782271
  hypo

SEQ ID NO: 9817 - DNA, 58 bp, Homo sapiens; identical to SEQ ID NO: 1009
  chr2:74782284-74782342
  hypo

SEQ ID NO: 9818 - DNA, 19 bp, Homo sapiens
  chr2:74790431-74790450
  hypo
aaagagagagcagggccgg

SEQ ID NO: 9819 - DNA, 31 bp, Homo sapiens
  chr2:74856914-74856945
  hypo
gtatataaggtatatacgaaaccagtgaatt

SEQ ID NO: 9820 - DNA, 57 bp, Homo sapiens
  chr2:75105985-75106042
  hypo
aggcgaggagcggctgcgctctactattggggtcgacggttccgtctacaagaaaca

SEQ ID NO: 9821 - DNA, 31 bp, Homo sapiens
  chr2:75106060-75106091
  hypo
gcagggcctggagatgcggagttcctggagt

SEQ ID NO: 9822 - DNA, 31 bp, Homo sapiens
  chr2:75803805-75803836
  hypo
gaactttacctacaagcgatacaggcttact

SEQ ID NO: 9823 - DNA, 34 bp, Homo sapiens
  chr2:75825353-75825387
  hypo
gatttggttccagaaccggcgcatgaagtacaag

SEQ ID NO: 9824 - DNA, 31 bp, Homo sapiens
  chr2:85227243-85227274
  hypo
ttaaatataactaagacgatattgatttttt

SEQ ID NO: 9825 - DNA, 66 bp, Homo sapiens
  chr2:85280280-85280346
  hypo
cctaaaatgtctgaaacggagcgccagtccatggaaagcgagcgtgcagaccgcagcctgtttgtc

SEQ ID NO: 9826 - DNA, 31 bp, Homo sapiens
  chr2:85280357-85280388
  hypo
tctgtccactttagtgcgtgaagagagctca

SEQ ID NO: 9827 - DNA, 31 bp, Homo sapiens
  chr2:85280390-85280421
  hypo
ctcagatgaggatgatcggggggagatggca

SEQ ID NO: 9828 - DNA, 31 bp, Homo sapiens
  chr2:85498072-85498103
  hypo
gcctcccaaaatgctgcgattacaagtgtga

SEQ ID NO: 9829 - DNA, 31 bp, Homo sapiens
  chr2:85686736-85686767
  hypo
aaaaaacaaaaaaaaacgaagaagaagaaga

SEQ ID NO: 9830 - DNA, 35 bp, Homo sapiens
  chr2:85729114-85729149
  hypo
cagctacctgggaggccgaggcaggccaatcacct

SEQ ID NO: 9831 - DNA, 84 bp, Homo sapiens; identical to SEQ ID NO: 1010
  chr2:85829250-85829334
  hypo

SEQ ID NO: 9832 - DNA, 31 bp, Homo sapiens; identical to SEQ ID NO: 1011
  chr2:85829368-85829399
  hypo

SEQ ID NO: 9833 - DNA, 50 bp, Homo sapiens
  chr2:85870243-85870293
  hypo
acacaaaatgattaaacgtagtatttctcttttgccgcatggacagtttt

SEQ ID NO: 9834 - DNA, 10 bp, Homo sapiens
  chr2:85870324-85870334
  hypo
ttctccaaac

SEQ ID NO: 9835 - DNA, 31 bp, Homo sapiens
  chr2:86258592-86258623
  hypo
ggagggcgggaagggacgggtcctcctcagt

SEQ ID NO: 9836 - DNA, 31 bp, Homo sapiens; identical to SEQ ID NO: 1013
  chr2:86850367-86850398
  hypo

SEQ ID NO: 9837 - DNA, 27 bp, Homo sapiens
  chr2:86915599-86915626
  hypo
attcacgggaaagcaacgaacacctcg

SEQ ID NO: 9838 - DNA, 22 bp, Homo sapiens
  chr2:88328177-88328199
  hypo
ttttttcttgagatggcgtctc

SEQ ID NO: 9839 - DNA, 68 bp, Homo sapiens
  chr2:88387491-88387559
  hypo
ggagcagaaggacctgcgggtggacgtggacacattcttgcagtactggccgccgcagagccagcagt

SEQ ID NO: 9840 - DNA, 41 bp, Homo sapiens
  chr2:88469320-88469361
  hypo
cctgcagcgaagactccgaggctgaacgtcaataaagcgtt

SEQ ID NO: 9841 - DNA, 62 bp, Homo sapiens
  chr2:88559424-88559486
  hypo
ttagctatttagcattcgagactctttgcagggagtccaaggaacttcgcacttggcaccat

SEQ ID NO: 9842 - DNA, 31 bp, Homo sapiens
  chr2:88559499-88559530
  hypo
aagctggcaaattcaccgggagaagattcct

SEQ ID NO: 9843 - DNA, 31 bp, Homo sapiens
  chr2:88559544-88559575
  hypo
tccacctgcaatcaaccgtggatgaactggt

SEQ ID NO: 9844 - DNA, 31 bp, Homo sapiens
  chr2:88559590-88559621
  hypo
ctaagtagagtgttttcggcatggaaaactg

SEQ ID NO: 9845 - DNA, 20 bp, Homo sapiens
  chr2:88892429-88892449
  hypo
acattggatcacctgacgtc

SEQ ID NO: 9846 - DNA, 31 bp, Homo sapiens
  chr2:88990233-88990264
  hypo
aaatctaggtgataaccggcagttaacagtg

SEQ ID NO: 9847 - DNA, 31 bp, Homo sapiens
  chr2:89371576-89371607
  hypo
gggggggagaggatgacgttactttaaatat

SEQ ID NO: 9848 - DNA, 31 bp, Homo sapiens
  chr2:95646408-95646439
  hypo
ccctgaaggaagccgccggcagctatggtgg

SEQ ID NO: 9849 - DNA, 30 bp, Homo sapiens
  chr2:95677207-95677237
  hypo
tgctgggattacaggcgtgagccactgcca

SEQ ID NO: 9850 - DNA, 35 bp, Homo sapiens
  chr2:95715630-95715665
  hypo
caagactccgcttagtcgtccggccagggctgcat

SEQ ID NO: 9851 - DNA, 24 bp, Homo sapiens
  chr2:95745774-95745798
  hypo
tgcctggcccggacacaagcattt

SEQ ID NO: 9852 - DNA, 31 bp, Homo sapiens; identical to SEQ ID NO: 1014
  chr2:95825322-95825353
  hypo

SEQ ID NO: 9853 - DNA, 42 bp, Homo sapiens; identical to SEQ ID NO: 1015
  chr2:95825489-95825531
  hypo

SEQ ID NO: 9854 - DNA, 44 bp, Homo sapiens; identical to SEQ ID NO: 1016
  chr2:95825584-95825628
  hypo

SEQ ID NO: 9855 - DNA, 31 bp, Homo sapiens
  chr2:95940204-95940235
  hypo
aggaacccaaacctgtcgggcaggttttgag

SEQ ID NO: 9856 - DNA, 31 bp, Homo sapiens
  chr2:96049659-96049690
  hypo
ggctccgagtccctggcgggaatctgctcaa

SEQ ID NO: 9857 - DNA, 31 bp, Homo sapiens
  chr2:96754441-96754472
  hypo
ctcaaaaaacattcagcgcagctttttctgt

SEQ ID NO: 9858 - DNA, 31 bp, Homo sapiens
  chr2:96800289-96800320
  hypo
ctccacagcaccccagcgtgcctgtgccatc

SEQ ID NO: 9859 - DNA, 31 bp, Homo sapiens
  chr2:96806866-96806897
  hypo
agaatcacccttcattcggcctcacagagtg

SEQ ID NO: 9860 - DNA, 31 bp, Homo sapiens
  chr2:96821949-96821980
  hypo
ctgacatgcccatggccgcactgccacccat

SEQ ID NO: 9861 - DNA, 31 bp, Homo sapiens
  chr2:96829030-96829061
  hypo
accacaccactcaggccgggggtttcctctg

SEQ ID NO: 9862 - DNA, 31 bp, Homo sapiens
  chr2:96970462-96970493
  hypo
catctgcggtttggtccgttgagccttgtct

SEQ ID NO: 9863 - DNA, 31 bp, Homo sapiens; identical to SEQ ID NO: 1017
  chr2:96987293-96987324
  hypo

SEQ ID NO: 9864 - DNA, 34 bp, Homo sapiens
  chr2:96993130-96993164
  hypo
ggacccagccctgggccgccgctgtggctgtgtg

SEQ ID NO: 9865 - DNA, 31 bp, Homo sapiens
  chr2:97068615-97068646
  hypo
actgtgagatgatgaacggtgagagaatgca

SEQ ID NO: 9866 - DNA, 92 bp, Homo sapiens
  chr2:97068713-97068805
  hypo
tatagaaatacataggcggcctactccaggcatgagccaccgctcccggccctatatatttctatacagagtgtgtccgtttgtttgggctg

SEQ ID NO: 9867 - DNA, 56 bp, Homo sapiens; identical to SEQ ID NO: 1018
  chr2:97171201-97171257
  hypo

SEQ ID NO: 9868 - DNA, 31 bp, Homo sapiens; identical to SEQ ID NO: 1019
  chr2:97171276-97171307
  hypo

SEQ ID NO: 9869 - DNA, 46 bp, Homo sapiens; identical to SEQ ID NO: 1020
  chr2:97171366-97171412
  hypo

SEQ ID NO: 9870 - DNA, 37 bp, Homo sapiens; identical to SEQ ID NO: 1021
  chr2:97175301-97175338
  hypo

SEQ ID NO: 9871 - DNA, 42 bp, Homo sapiens; identical to SEQ ID NO: 1027
  chr2:97203490-97203532
  hypo

SEQ ID NO: 9872 - DNA, 31 bp, Homo sapiens; identical to SEQ ID NO: 1028
  chr2:97304170-97304201
  hypo

SEQ ID NO: 9873 - DNA, 37 bp, Homo sapiens
  chr2:97370002-97370039
  hypo
ctatattttctggaaacgctatcgcttcaaactcata

SEQ ID NO: 9874 - DNA, 31 bp, Homo sapiens; identical to SEQ ID NO: 1029
  chr2:97405566-97405597
  hypo

SEQ ID NO: 9875 - DNA, 36 bp, Homo sapiens
  chr2:97427362-97427398
  hypo
ggaccccatggagctgcgcatcgtgcagaactgtgg

SEQ ID NO: 9876 - DNA, 31 bp, Homo sapiens
  chr2:97435406-97435437
  hypo
aagggggcacgctattcgggagcctccttgg

SEQ ID NO: 9877 - DNA, 31 bp, Homo sapiens
  chr2:97435639-97435670
  hypo
gagctggttaatactccgggtgcaggcagag

SEQ ID NO: 9878 - DNA, 35 bp, Homo sapiens
  chr2:97438094-97438129
  hypo
caggtgctcacacacacgtgcgcacacacactcat

SEQ ID NO: 9879 - DNA, 174 bp, Homo sapiens; identical to SEQ ID NO: 1030
  chr2:97482862-97483036
  hypo

SEQ ID NO: 9880 - DNA, 31 bp, Homo sapiens
  chr2:97489112-97489143
  hypo
aaccaaaaccacatgtcgcacttggccttcc

SEQ ID NO: 9881 - DNA, 157 bp, Homo sapiens; identical to SEQ ID NO: 1032
  chr2:97535759-97535916
  hypo

SEQ ID NO: 9882 - DNA, 36 bp, Homo sapiens
  chr2:97545465-97545501
  hypo
acacagtgggggaaaccgaggcgtgcctccaggaga

SEQ ID NO: 9883 - DNA, 58 bp, Homo sapiens
  chr2:97558026-97558084
  hypo
cagaggtgtaggggagcgcagcagagggggtctaaggtggtctcgggctgcagtgaag

SEQ ID NO: 9884 - DNA, 31 bp, Homo sapiens
  chr2:97558091-97558122
  hypo
agagctgcctgggactcgcctgcctctccac

SEQ ID NO: 9885 - DNA, 40 bp, Homo sapiens
  chr2:97558145-97558185
  hypo
ccctttggggctctgccgagctgcacggtgcctccatgtt

SEQ ID NO: 9886 - DNA, 29 bp, Homo sapiens
  chr2:97562880-97562909
  hypo
ggagtgagccacagcgcttggcccctttg

SEQ ID NO: 9887 - DNA, 19 bp, Homo sapiens
  chr2:97567214-97567233
  hypo
aggccgacctcttaatgcc

SEQ ID NO: 9888 - DNA, 31 bp, Homo sapiens
  chr2:97612348-97612379
  hypo
ccttcctaatggggagcgcatcagagacaac

SEQ ID NO: 9889 - DNA, 31 bp, Homo sapiens
  chr2:97614532-97614563
  hypo
cctcaccaagtgtctgcgtctgataattggc

SEQ ID NO: 9890 - DNA, 31 bp, Homo sapiens
  chr2:97615857-97615888
  hypo
ccgggaaggcactccacgccagtgtcagggt

SEQ ID NO: 9891 - DNA, 31 bp, Homo sapiens
  chr2:97655846-97655877
  hypo
tagagtaaagtggtctcgctgtagtgtgtgc

SEQ ID NO: 9892 - DNA, 31 bp, Homo sapiens
  chr2:97655911-97655942
  hypo
gttcatgtgaccaaagcgttagagagcccct

SEQ ID NO: 9893 - DNA, 6 bp, Homo sapiens
  chr2:97656002-97656008
  hypo
ttttga

SEQ ID NO: 9894 - DNA, 31 bp, Homo sapiens
  chr2:98025686-98025717
  hypo
tgtgcttattgggccccgcttctggagaaac

SEQ ID NO: 9895 - DNA, 24 bp, Homo sapiens
  chr2:98266896-98266920
  hypo
caccgtgcccggccataaacttgt

SEQ ID NO: 9896 - DNA, 31 bp, Homo sapiens
  chr2:99444495-99444526
  hypo
catttatacttcagcacggaagaactgatag

SEQ ID NO: 9897 - DNA, 47 bp, Homo sapiens
  chr2:99444578-99444625
  hypo
gaatgaaggcaatacccgcagatccctgcccccgaacttggccagct

SEQ ID NO: 9898 - DNA, 31 bp, Homo sapiens
  chr2:99444626-99444657
  hypo
caccactgagtgaggtcgaagtgggctcccc

SEQ ID NO: 9899 - DNA, 36 bp, Homo sapiens
  chr2:99444666-99444702
  hypo
aagttgggatgaaactcggagcgcctgtgagcacat

SEQ ID NO: 9900 - DNA, 31 bp, Homo sapiens
  chr2:99795932-99795963
  hypo
gcactcagcactgaaacgtgatatctatgct

SEQ ID NO: 9901 - DNA, 40 bp, Homo sapiens
  chr2:99796438-99796478
  hypo
ggagcttagtccagaccgggagtgtcgggggttggggagc

SEQ ID NO: 9902 - DNA, 58 bp, Homo sapiens
  chr2:99798645-99798703
  hypo
gttttacagaagacagcgtaattgtttcagggtccaggagttacgtgcctaattatta

SEQ ID NO: 9903 - DNA, 12 bp, Homo sapiens
  chr2:99798711-99798723
  hypo
ttttactttatt

SEQ ID NO: 9904 - DNA, 53 bp, Homo sapiens
  chr2:99799022-99799075
  hypo
aataaataagataaaataaacgtattctttgagtcaaacgtggtgacacacac

SEQ ID NO: 9905 - DNA, 31 bp, Homo sapiens
  chr2:99799122-99799153
  hypo
aataccagaaacatagcgagactctgtctct

SEQ ID NO: 9906 - DNA, 31 bp, Homo sapiens
  chr2:99951500-99951531
  hypo
aatggagtattttgtacgagaaattttatac

SEQ ID NO: 9907 - DNA, 45 bp, Homo sapiens
  chr2:100107652-100107697
  hypo
tcaacttcagtattctcgtcgctaatccaacgaatttagattgca

SEQ ID NO: 9908 - DNA, 31 bp, Homo sapiens
  chr2:100293283-100293314
  hypo
gacaggacagtaaacacgcctatcagcccca

SEQ ID NO: 9909 - DNA, 5 bp, Homo sapiens
  chr2:101006127-101006132
  hypo
aacaa

SEQ ID NO: 9910 - DNA, 31 bp, Homo sapiens
  chr2:101006139-101006170
  hypo
ataacaaaaaaacaaacggttgaagctgaga

SEQ ID NO: 9911 - DNA, 6 bp, Homo sapiens
  chr2:101006242-101006248
  hypo
ggctga

SEQ ID NO: 9912 - DNA, 31 bp, Homo sapiens; identical to SEQ ID NO: 1035
  chr2:101033529-101033560
  hypo

SEQ ID NO: 9913 - DNA, 61 bp, Homo sapiens; identical to SEQ ID NO: 1036
  chr2:101033571-101033632
  hypo

SEQ ID NO: 9914 - DNA, 140 bp, Homo sapiens; identical to SEQ ID NO: 1037
  chr2:101033731-101033871
  hypo

SEQ ID NO: 9915 - DNA, 424 bp, Homo sapiens; identical to SEQ ID NO: 1038
  chr2:101033873-101034297
  hypo

SEQ ID NO: 9916 - DNA, 31 bp, Homo sapiens
  chr2:101362899-101362930
  hypo
gcctaggtaagaggtgcggacaggctgagaa

SEQ ID NO: 9917 - DNA, 31 bp, Homo sapiens
  chr2:101362951-101362982
  hypo
gcctgggccttgccagcggtgcaccctgggc

SEQ ID NO: 9918 - DNA, 31 bp, Homo sapiens
  chr2:101363009-101363040
  hypo
atcctcatccacaaagcggggctaagatgag

SEQ ID NO: 9919 - DNA, 52 bp, Homo sapiens
  chr2:101363045-101363097
  hypo
caggccttagaaaattcgctgatatgtatgaggccttcgatatgaattagct

SEQ ID NO: 9920 - DNA, 31 bp, Homo sapiens
  chr2:101607562-101607593
  hypo
acaattcacaccccaccgtttgccatcatct

SEQ ID NO: 9921 - DNA, 31 bp, Homo sapiens
  chr2:101612185-101612216
  hypo
catctctggagtgcagcgcttgctgcagtgg

SEQ ID NO: 9922 - DNA, 48 bp, Homo sapiens
  chr2:101612220-101612268
  hypo
gatcaggaatactgaccgtgtttctcttgcctccgaggttcttgggca

SEQ ID NO: 9923 - DNA, 49 bp, Homo sapiens
  chr2:101612288-101612337
  hypo
caggaaccaggtgccccgtgtaggcatcgtcggtcggtttgccgtcaga

SEQ ID NO: 9924 - DNA, 20 bp, Homo sapiens
  chr2:101641693-101641713
  hypo
tttatttattttgagacgga

SEQ ID NO: 9925 - DNA, 31 bp, Homo sapiens
  chr2:101649863-101649894
  hypo
ctttccggaaagggaccgagtacagcgcctt

SEQ ID NO: 9926 - DNA, 31 bp, Homo sapiens
  chr2:101651029-101651060
  hypo
gatgaagggatgaatgcgtcccttatgaaaa

SEQ ID NO: 9927 - DNA, 274 bp, Homo sapiens; identical to SEQ ID NO: 1045
  chr2:101767367-101767641
  hypo

SEQ ID NO: 9928 - DNA, 182 bp, Homo sapiens; identical to SEQ ID NO: 1046
  chr2:101767661-101767843
  hypo

SEQ ID NO: 9929 - DNA, 39 bp, Homo sapiens
  chr2:101772515-101772554
  hypo
gcttgagccaccgcacccgccccacgctgaatagtttaa

SEQ ID NO: 9930 - DNA, 31 bp, Homo sapiens
  chr2:101833727-101833758
  hypo
taaaatatgataaaaacgtactaatttttta

SEQ ID NO: 9931 - DNA, 383 bp, Homo sapiens; identical to SEQ ID NO: 1048
  chr2:101924690-101925073
  hypo

SEQ ID NO: 9932 - DNA, 31 bp, Homo sapiens; identical to SEQ ID NO: 1049
  chr2:101925074-101925105
  hypo

SEQ ID NO: 9933 - DNA, 300 bp, Homo sapiens; identical to SEQ ID NO: 1050
  chr2:101925108-101925408
  hypo

SEQ ID NO: 9934 - DNA, 31 bp, Homo sapiens
  chr2:101955034-101955065
  hypo
cacacgcccacttgggcgttaggagttgaag

SEQ ID NO: 9935 - DNA, 57 bp, Homo sapiens
  chr2:101970927-101970984
  hypo
ccatggggttgtggatcgcccctccagctcaacacttgccttcgtgttactctccct

SEQ ID NO: 9936 - DNA, 48 bp, Homo sapiens
  chr2:101971029-101971077
  hypo
gcctgcaccccagctccgagcctgcacttccggcggtccctgcatgga

SEQ ID NO: 9937 - DNA, 31 bp, Homo sapiens
  chr2:101971083-101971114
  hypo
tggaaaggccacccccgcgtgcatgcgcggt

SEQ ID NO: 9938 - DNA, 27 bp, Homo sapiens
  chr2:102251913-102251940
  hypo
ctgttaggaacagggtcgcatagctgg

SEQ ID NO: 9939 - DNA, 47 bp, Homo sapiens; identical to SEQ ID NO: 1051
  chr2:102313749-102313796
  hypo

SEQ ID NO: 9940 - DNA, 174 bp, Homo sapiens; identical to SEQ ID NO: 1052
  chr2:102313837-102314011
  hypo

SEQ ID NO: 9941 - DNA, 44 bp, Homo sapiens; identical to SEQ ID NO: 1053
  chr2:102314200-102314244
  hypo

SEQ ID NO: 9942 - DNA, 31 bp, Homo sapiens
  chr2:102347214-102347245
  hypo
tatgttgaatagtggccgggtgtggtggctc

SEQ ID NO: 9943 - DNA, 31 bp, Homo sapiens
  chr2:102349438-102349469
  hypo
agctgtcctgtcagcccgagccctgtgtcac

SEQ ID NO: 9944 - DNA, 31 bp, Homo sapiens
  chr2:102356563-102356594
  hypo
tcaacacaacatctgtcgctttcttggcttc

SEQ ID NO: 9945 - DNA, 22 bp, Homo sapiens
  chr2:102356621-102356643
  hypo
ttttttttttttgagacggagt

SEQ ID NO: 9946 - DNA, 25 bp, Homo sapiens
  chr2:102377171-102377196
  hypo
aagaaaattgttggcccggcgcagt

SEQ ID NO: 9947 - DNA, 31 bp, Homo sapiens
  chr2:102450133-102450164
  hypo
atgtttagtgagtacccgccattacaaaagt

SEQ ID NO: 9948 - DNA, 31 bp, Homo sapiens
  chr2:102452625-102452656
  hypo
tctctgaattacaaaacggtgacaaatgacc

SEQ ID NO: 9949 - DNA, 31 bp, Homo sapiens
  chr2:102636185-102636216
  hypo
agatgctggctattaccgctgtgtcctgaca

SEQ ID NO: 9950 - DNA, 31 bp, Homo sapiens
  chr2:102636248-102636279
  hypo
taggagtattgagctacgcatcaagagtaag

SEQ ID NO: 9951 - DNA, 38 bp, Homo sapiens
  chr2:102636324-102636362
  hypo
tgcagagaacaaatgacggtgcacgtagaattccttgc

SEQ ID NO: 9952 - DNA, 31 bp, Homo sapiens
  chr2:102683511-102683542
  hypo
aagagtcagtctcacccgtcagaattcagtg

SEQ ID NO: 9953 - DNA, 31 bp, Homo sapiens
  chr2:102849810-102849841
  hypo
ctgcttgcagcagcacgcgtctcactttgag

SEQ ID NO: 9954 - DNA, 52 bp, Homo sapiens
  chr2:102867170-102867222
  hypo
cggggaccctagggtccgctccttcgctgcccgagcacggtgcctgcagggg

SEQ ID NO: 9955 - DNA, 67 bp, Homo sapiens
  chr2:105887867-105887934
  hypo
actgatcagtcagggacggtggctgtgagtgaacagagattgcacagcggatcgccacagaaagtcc

SEQ ID NO: 9956 - DNA, 56 bp, Homo sapiens
  chr2:105888003-105888059
  hypo
ttctggctctactgctcgtgggctgtgtgacctgtggcaagcggggtaacctctct

SEQ ID NO: 9957 - DNA, 31 bp, Homo sapiens
  chr2:105888487-105888518
  hypo
ctttatggagacaacacgtgtgttagatatg

SEQ ID NO: 9958 - DNA, 37 bp, Homo sapiens
  chr2:106064704-106064741
  hypo
acacccccatcatccacgcacccggttcctagcataa

SEQ ID NO: 9959 - DNA, 22 bp, Homo sapiens
  chr2:106066835-106066857
  hypo
tggcccccgaatttactttcaa

SEQ ID NO: 9960 - DNA, 31 bp, Homo sapiens
  chr2:106730181-106730212
  hypo
ggcagggagcctggggcgtgaggacctgggc

SEQ ID NO: 9961 - DNA, 31 bp, Homo sapiens
  chr2:106730399-106730430
  hypo
gttcttttttcaatttcggccaacaccttag

SEQ ID NO: 9962 - DNA, 31 bp, Homo sapiens
  chr2:106959508-106959539
  hypo
cgcagcaggctggcatcgcttcctgaggttt

SEQ ID NO: 9963 - DNA, 37 bp, Homo sapiens
  chr2:106959578-106959615
  hypo
taaattgtcttcatcacgtcagcgattgctttcactt

SEQ ID NO: 9964 - DNA, 31 bp, Homo sapiens
  chr2:106960011-106960042
  hypo
cctgcttttgagaggcgcggcactctgccaa

SEQ ID NO: 9965 - DNA, 3 bp, Homo sapiens
  chr2:107919280-107919283
  hypo
aaa

SEQ ID NO: 9966 - DNA, 61 bp, Homo sapiens
  chr2:107919330-107919391
  hypo
tataaatgtgtgcatgcgtatgtataaatatatgtacacatgtatacgtttctataacatg

SEQ ID NO: 9967 - DNA, 31 bp, Homo sapiens
  chr2:107919406-107919437
  hypo
tttaatatatatactacgacaaatggaagga

SEQ ID NO: 9968 - DNA, 40 bp, Homo sapiens
  chr2:109225029-109225069
  hypo
aattacaggcgtgagccaccgcgcccggcccactcacatt

SEQ ID NO: 9969 - DNA, 34 bp, Homo sapiens
  chr2:109335132-109335166
  hypo
tctggaaccaatcccccgccgagatgactgttta

SEQ ID NO: 9970 - DNA, 31 bp, Homo sapiens
  chr2:109523049-109523080
  hypo
gctgggtggtcagactcgtaagatacttggg

SEQ ID NO: 9971 - DNA, 38 bp, Homo sapiens
  chr2:109536233-109536271
  hypo
gcacctgccctctccccgcactacgaagctgcctcatg

SEQ ID NO: 9972 - DNA, 31 bp, Homo sapiens
  chr2:109543737-109543768
  hypo
gtcccatggagtagggcgggaggcatcaaga

SEQ ID NO: 9973 - DNA, 38 bp, Homo sapiens
  chr2:109556839-109556877
  hypo
tcctccatggccgagccggcccacgtgcctcctactct

SEQ ID NO: 9974 - DNA, 56 bp, Homo sapiens
  chr2:110007878-110007934
  hypo
gggtcacccatgggctcgggccttcactctggcagggccggcggcctcacacaggt

SEQ ID NO: 9975 - DNA, 42 bp, Homo sapiens
  chr2:110008028-110008070
  hypo
agcaggtgtgtggccacggcttgtggccgggcagggagcatc

SEQ ID NO: 9976 - DNA, 31 bp, Homo sapiens
  chr2:110011965-110011996
  hypo
ctcttacttctcctgccgtctgttgaagctg

SEQ ID NO: 9977 - DNA, 31 bp, Homo sapiens
  chr2:110016923-110016954
  hypo
catgtgcacacacatgcgtacaggtgcattt

SEQ ID NO: 9978 - DNA, 31 bp, Homo sapiens
  chr2:110022089-110022120
  hypo
gcagaaggctcctgcccgcccttccagacca

SEQ ID NO: 9979 - DNA, 31 bp, Homo sapiens
  chr2:110025458-110025489
  hypo
ggaagccccgggtaggcgagaaaggggtcct

SEQ ID NO: 9980 - DNA, 31 bp, Homo sapiens
  chr2:110025509-110025540
  hypo
cccctttccttgttgacgttttgagattttc

SEQ ID NO: 9981 - DNA, 31 bp, Homo sapiens
  chr2:110025541-110025572
  hypo
ttcaccaaactggagtcgggttgtggatgtt

SEQ ID NO: 9982 - DNA, 31 bp, Homo sapiens
  chr2:110033758-110033789
  hypo
gactcatgatccagaccggctctggggagtt

SEQ ID NO: 9983 - DNA, 31 bp, Homo sapiens
  chr2:110040035-110040066
  hypo
tcaagacaataagactcggtaaaataagtcc

SEQ ID NO: 9984 - DNA, 31 bp, Homo sapiens
  chr2:110040229-110040260
  hypo
atattacagacagatgcgaccaagaatatga

SEQ ID NO: 9985 - DNA, 31 bp, Homo sapiens
  chr2:110105993-110106024
  hypo
tctacacagacaatgacgttgccaggcttgg

SEQ ID NO: 9986 - DNA, 50 bp, Homo sapiens
  chr2:110256841-110256891
  hypo
ggttattgagtgccttcgccctgccaggcccatctcggtgctgctcagca

SEQ ID NO: 9987 - DNA, 31 bp, Homo sapiens
  chr2:110259068-110259099
  hypo
tgtttccccaggtaccgcgtggtggtctcgt

SEQ ID NO: 9988 - DNA, 31 bp, Homo sapiens
  chr2:110266916-110266947
  hypo
aaaataccatgcactgcgtggctgaaacaac

SEQ ID NO: 9989 - DNA, 31 bp, Homo sapiens
  chr2:110267204-110267235
  hypo
tagtgtatccatcacccgaataacatacatg

SEQ ID NO: 9990 - DNA, 31 bp, Homo sapiens
  chr2:110853613-110853644
  hypo
agaagccggcaaaaaacgtggtgtgggggca

SEQ ID NO: 9991 - DNA, 57 bp, Homo sapiens
  chr2:110853646-110853703
  hypo
gagcttctcaaatatacgcatacctgagcactaccctccgggcggcactccaagtcc

SEQ ID NO: 9992 - DNA, 31 bp, Homo sapiens
  chr2:110853779-110853810
  hypo
caggtaagggaggctgcgttgttccccaggt

SEQ ID NO: 9993 - DNA, 31 bp, Homo sapiens; identical to SEQ ID NO: 1065
  chr2:111880645-111880676
  hypo

SEQ ID NO: 9994 - DNA, 54 bp, Homo sapiens; identical to SEQ ID NO: 1066
  chr2:111880677-111880731
  hypo

SEQ ID NO: 9995 - DNA, 31 bp, Homo sapiens; identical to SEQ ID NO: 1067
  chr2:112655268-112655299
  hypo

SEQ ID NO: 9996 - DNA, 34 bp, Homo sapiens
  chr2:112655539-112655573
  hypo
ggggaggtgagctcctcgccgccagggccgtgtc

SEQ ID NO: 9997 - DNA, 31 bp, Homo sapiens
  chr2:113242120-113242151
  hypo
catgaaccaccgtgcccggccaacatttggt

SEQ ID NO: 9998 - DNA, 31 bp, Homo sapiens
  chr2:113451876-113451907
  hypo
ggcatgagccaccgcgcgctgcccacggtgt

SEQ ID NO: 9999 - DNA, 91 bp, Homo sapiens
  chr2:113973330-113973421
  hypo
acaccaccccaaatgccggggcacgtcgaattgtctttctttcgcccgatacataaatggccttattttctgagcccgaaaaggggaccca

SEQ ID NO: 10000 - DNA, 31 bp, Homo sapiens
  chr2:113973488-113973519
  hypo
acagtcaacaaacacccgctctgagcagagg

SEQ ID NO: 10001 - DNA, 31 bp, Homo sapiens
  chr2:114469901-114469932
  hypo
ttttttttttttgagacggagtctcgctgtc

SEQ ID NO: 10002 - DNA, 31 bp, Homo sapiens
  chr2:114737398-114737429
  hypo
cgcagcgcgccctggccgacccctggtggcc

SEQ ID NO: 10003 - DNA, 31 bp, Homo sapiens
  chr2:119997107-119997138
  hypo
gctgtgggcacatactcgttcacccagggac

SEQ ID NO: 10004 - DNA, 46 bp, Homo sapiens
  chr2:120011807-120011853
  hypo
cctgggattctggggccggaaaaccgtgagacggagccatgcttaa

SEQ ID NO: 10005 - DNA, 62 bp, Homo sapiens
  chr2:120011896-120011958
  hypo
ttctgattggctgccccggggcagatatgtgaaagccccaggagccccggtcattggcacca

SEQ ID NO: 10006 - DNA, 31 bp, Homo sapiens
  chr2:120012442-120012473
  hypo
tgccagccagcttcagcgtggccctggccca

SEQ ID NO: 10007 - DNA, 46 bp, Homo sapiens
  chr2:120020876-120020922
  hypo
cagaccacgccctggccgagaagacgagccacgtatgaggtgcctg

SEQ ID NO: 10008 - DNA, 40 bp, Homo sapiens
  chr2:120247826-120247866
  hypo
ctgtccctgtcccttgcgcagtggccgagtgcatgggcta

SEQ ID NO: 10009 - DNA, 31 bp, Homo sapiens
  chr2:120247882-120247913
  hypo
tccatgctgctgcctccgctgctcacaaacc

SEQ ID NO: 10010 - DNA, 31 bp, Homo sapiens
  chr2:120247939-120247970
  hypo
cctgacaaatgagggccgggagtgctccagg

SEQ ID NO: 10011 - DNA, 31 bp, Homo sapiens
  chr2:120247980-120248011
  hypo
ggttctcttcccttcccgctcctgcactctc

SEQ ID NO: 10012 - DNA, 19 bp, Homo sapiens
  chr2:120315524-120315543
  hypo
actccgtctcaaaaaaaaa

SEQ ID NO: 10013 - DNA, 129 bp, Homo sapiens; identical to SEQ ID NO: 1072
  chr2:120770808-120770937
  hypo

SEQ ID NO: 10014 - DNA, 92 bp, Homo sapiens; identical to SEQ ID NO: 1073
  chr2:120771018-120771110
  hypo

SEQ ID NO: 10015 - DNA, 40 bp, Homo sapiens
  chr2:120973476-120973516
  hypo
ttcaactctttatcggatgagaaggcgtaggaatcatgtc

SEQ ID NO: 10016 - DNA, 31 bp, Homo sapiens
  chr2:120973524-120973555
  hypo
tggctgatgatatggccgagcagatgctaac

SEQ ID NO: 10017 - DNA, 31 bp, Homo sapiens
  chr2:120973819-120973850
  hypo
agttttcctactcatccgtttctactcttta

SEQ ID NO: 10018 - DNA, 218 bp, Homo sapiens
  chr2:120973916-120974134
  hypo
gcaatctgcccttcagcgccaggggaatgcccgacagctaccttctcccccgtgaccgccgggctccgtatcctgggcgagccgcccggctccggatagcaggaaactggggagggctccggcctcgcctcgtcagccccggagccttcaccaatcccgggcccggaaagaccacgcccactgctggccccgcctagcacctgcgcaggtgcagtctc

SEQ ID NO: 10019 - DNA, 31 bp, Homo sapiens
  chr2:121109323-121109354
  hypo
ctgttaaagtattgtacgtttgtgtacagtt

SEQ ID NO: 10020 - DNA, 31 bp, Homo sapiens
  chr2:121136846-121136877
  hypo
gtggctgtgggtcctgcggcaggctgcaggc

SEQ ID NO: 10021 - DNA, 31 bp, Homo sapiens
  chr2:121190433-121190464
  hypo
gcatgtggggcagtggcggctgtgaagctag

SEQ ID NO: 10022 - DNA, 31 bp, Homo sapiens
  chr2:121210914-121210945
  hypo
ttgaacttcctgtgagcgattctggatctta

SEQ ID NO: 10023 - DNA, 31 bp, Homo sapiens
  chr2:121243024-121243055
  hypo
acaatgagatgcccaacggagctcagcaagt

SEQ ID NO: 10024 - DNA, 31 bp, Homo sapiens
  chr2:121243128-121243159
  hypo
ccatgctttgagttctcgtgtttcttggtga

SEQ ID NO: 10025 - DNA, 18 bp, Homo sapiens
  chr2:121253110-121253128
  hypo
ctccgtctctaaaataaa

SEQ ID NO: 10026 - DNA, 40 bp, Homo sapiens
  chr2:121327690-121327730
  hypo
tgggtctccagagtggcgagaaagacgcccacctcctgct

SEQ ID NO: 10027 - DNA, 31 bp, Homo sapiens
  chr2:121381301-121381332
  hypo
ggaggcctccaatcaccggcatggacccagg

SEQ ID NO: 10028 - DNA, 35 bp, Homo sapiens
  chr2:121381394-121381429
  hypo
gtggggtgggagggaccgtacgtctcagaagagac

SEQ ID NO: 10029 - DNA, 31 bp, Homo sapiens
  chr2:121381443-121381474
  hypo
ttacttcaggtcctccgcgctatggagtcaa

SEQ ID NO: 10030 - DNA, 31 bp, Homo sapiens
  chr2:121411774-121411805
  hypo
caagcccattaactctcgaccaccacgttgc

SEQ ID NO: 10031 - DNA, 34 bp, Homo sapiens
  chr2:121436962-121436996
  hypo
ggcctttcctggtcttcgtcgccaaaaatctgct

SEQ ID NO: 10032 - DNA, 31 bp, Homo sapiens; identical to SEQ ID NO: 1074
  chr2:121438058-121438089
  hypo

SEQ ID NO: 10033 - DNA, 31 bp, Homo sapiens
  chr2:121534939-121534970
  hypo
gtgaggcgtgtctgaacgagatgagggacag

SEQ ID NO: 10034 - DNA, 39 bp, Homo sapiens
  chr2:121550759-121550798
  hypo
tccgggccctgggtcccgggtgcccgctcccaccccctt

SEQ ID NO: 10035 - DNA, 48 bp, Homo sapiens
  chr2:121550816-121550864
  hypo
gtggctgtgtttccttcgtggttgtttggacagcggcagagctgtgtg

SEQ ID NO: 10036 - DNA, 31 bp, Homo sapiens
  chr2:121550940-121550971
  hypo
ggagctctgtggagcccgtgggagccatccc

SEQ ID NO: 10037 - DNA, 31 bp, Homo sapiens
  chr2:121609722-121609753
  hypo
gaacccagatggcattcgcctgtgtggaggg

SEQ ID NO: 10038 - DNA, 31 bp, Homo sapiens
  chr2:121609831-121609862
  hypo
gcccaggcctatggatcgcacagagacggat

SEQ ID NO: 10039 - DNA, 31 bp, Homo sapiens
  chr2:121688087-121688118
  hypo
ctctgacgagtccagccgagcccttcttgac

SEQ ID NO: 10040 - DNA, 31 bp, Homo sapiens
  chr2:121711173-121711204
  hypo
ccagtaaagacgtctacgggaggaaggaaca

SEQ ID NO: 10041 - DNA, 31 bp, Homo sapiens
  chr2:121711222-121711253
  hypo
gctcaggaagcagagacgctgtattccactg

SEQ ID NO: 10042 - DNA, 11 bp, Homo sapiens
  chr2:121711304-121711315
  hypo
cctgtaattgg

SEQ ID NO: 10043 - DNA, 31 bp, Homo sapiens
  chr2:121723280-121723311
  hypo
ggatgcccctgtttgccgtccaggatcccta

SEQ ID NO: 10044 - DNA, 45 bp, Homo sapiens
  chr2:121726278-121726323
  hypo
ctatcccacagtgtcccgtttctccagcccgcgggtgacgccccg

SEQ ID NO: 10045 - DNA, 31 bp, Homo sapiens
  chr2:121818463-121818494
  hypo
ggttcccaagcttgagcgtgcatcagaatca

SEQ ID NO: 10046 - DNA, 31 bp, Homo sapiens
  chr2:121827342-121827373
  hypo
tggagggggtggggtacgcccatcccacgtt

SEQ ID NO: 10047 - DNA, 31 bp, Homo sapiens
  chr2:121846109-121846140
  hypo
ccattttgtgaaagccgcgtcagtgtgccta

SEQ ID NO: 10048 - DNA, 23 bp, Homo sapiens
  chr2:121962010-121962033
  hypo
ctaaggcacgagggttagagctt

SEQ ID NO: 10049 - DNA, 37 bp, Homo sapiens
  chr2:121962068-121962105
  hypo
gctcctgcccttgggacgattccgggccttgctctat

SEQ ID NO: 10050 - DNA, 91 bp, Homo sapiens
  chr2:121975956-121976047
  hypo
ggccaggtgggcccaccgtatgctagctgacaagggcagtcacacaccggtaagtgctgatacaggatgaggggtgcggagctgaggatgt

SEQ ID NO: 10051 - DNA, 31 bp, Homo sapiens
  chr2:121976098-121976129
  hypo
tcagggctcctcaggacgaagggcatgagga

SEQ ID NO: 10052 - DNA, 31 bp, Homo sapiens
  chr2:121976134-121976165
  hypo
tcccactctggcccttcgctgggggacatgg

SEQ ID NO: 10053 - DNA, 31 bp, Homo sapiens
  chr2:121982627-121982658
  hypo
tccagggtctatgagtcggtcagagggcttt

SEQ ID NO: 10054 - DNA, 31 bp, Homo sapiens
  chr2:122006602-122006633
  hypo
ccagctgctggtgctccgtatactgcagccg

SEQ ID NO: 10055 - DNA, 31 bp, Homo sapiens
  chr2:122011447-122011478
  hypo
tctgcatgcctacccccgtgccaacacagtg

SEQ ID NO: 10056 - DNA, 31 bp, Homo sapiens
  chr2:122104568-122104599
  hypo
gcagagcccaggtgtgcgtatcagcccaggt

SEQ ID NO: 10057 - DNA, 9 bp, Homo sapiens
  chr2:122305113-122305122
  hypo
caaccacta

SEQ ID NO: 10058 - DNA, 31 bp, Homo sapiens
  chr2:122409687-122409718
  hypo
tatattgtttaaggtccgtgactaggcatag

SEQ ID NO: 10059 - DNA, 32 bp, Homo sapiens
  chr2:122497729-122497761
  hypo
aagatgaggtcatgaccgggcacggtggctca

SEQ ID NO: 10060 - DNA, 31 bp, Homo sapiens
  chr2:122783864-122783895
  hypo
cccttaggctggaagtcggtacaggggccca

SEQ ID NO: 10061 - DNA, 56 bp, Homo sapiens
  chr2:122783907-122783963
  hypo
ggagggatatgcttctcgccggggtaggttatttgcacagacgcagagcaccagag

SEQ ID NO: 10062 - DNA, 62 bp, Homo sapiens
  chr2:127428872-127428934
  hypo
ctcactgggcaggtgccggagggagagccagagcaggtgcaagcatgcgaggcaggcttccc

SEQ ID NO: 10063 - DNA, 35 bp, Homo sapiens
  chr2:127429009-127429044
  hypo
gggagcaacctctccacgcacggggccaggtgtca

SEQ ID NO: 10064 - DNA, 83 bp, Homo sapiens
  chr2:127438701-127438784
  hypo
aaaaccactcctaacccgtctacttcttaaaagccggtacttaacatttgaagcgtatttcttttcatcgctttgttttaagg

SEQ ID NO: 10065 - DNA, 31 bp, Homo sapiens
  chr2:127438809-127438840
  hypo
tctatttagagggtcccgttttcttcactta

SEQ ID NO: 10066 - DNA, 31 bp, Homo sapiens; identical to SEQ ID NO: 1079
  chr2:127534738-127534769
  hypo

SEQ ID NO: 10067 - DNA, 31 bp, Homo sapiens; identical to SEQ ID NO: 1080
  chr2:127534811-127534842
  hypo

SEQ ID NO: 10068 - DNA, 37 bp, Homo sapiens; identical to SEQ ID NO: 1081
  chr2:127534849-127534886
  hypo

SEQ ID NO: 10069 - DNA, 176 bp, Homo sapiens; identical to SEQ ID NO: 1082
  chr2:127535023-127535199
  hypo

SEQ ID NO: 10070 - DNA, 31 bp, Homo sapiens
  chr2:127827840-127827871
  hypo
ctgtgaggatcagatacgctgaggactgggg

SEQ ID NO: 10071 - DNA, 40 bp, Homo sapiens
  chr2:127855674-127855714
  hypo
acttagggtgtaaatgcgaagccatcgctgcctctaccca

SEQ ID NO: 10072 - DNA, 31 bp, Homo sapiens
  chr2:128029535-128029566
  hypo
gtttggtgcttataagcgcccagccacaatc

SEQ ID NO: 10073 - DNA, 31 bp, Homo sapiens
  chr2:128338346-128338377
  hypo
tcagacgtgatggagacgcccgcctttccca

SEQ ID NO: 10074 - DNA, 30 bp, Homo sapiens
  chr2:128549955-128549985
  hypo
cagggcaggtggctcacgcctataatccca

SEQ ID NO: 10075 - DNA, 34 bp, Homo sapiens
  chr2:128600139-128600173
  hypo
ccttgtagctccacaccgacgctattcaaaatgg

SEQ ID NO: 10076 - DNA, 16 bp, Homo sapiens
  chr2:128600203-128600219
  hypo
cagtgcaggccgggca

SEQ ID NO: 10077 - DNA, 23 bp, Homo sapiens
  chr2:128601382-128601405
  hypo
cttataaaagaggctgcgggctg

SEQ ID NO: 10078 - DNA, 25 bp, Homo sapiens
  chr2:128616616-128616641
  hypo
aaaaaatgaattgtgccgggcacgg

SEQ ID NO: 10079 - DNA, 31 bp, Homo sapiens
  chr2:128847692-128847723
  hypo
cgtgagccaccgcgcccggcctccatcagtg

SEQ ID NO: 10080 - DNA, 31 bp, Homo sapiens
  chr2:129134897-129134928
  hypo
agggcctccaagagtgcgccactcaccactg

SEQ ID NO: 10081 - DNA, 31 bp, Homo sapiens
  chr2:129377450-129377481
  hypo
gaactgaggcctggggcgggcaggatgacac

SEQ ID NO: 10082 - DNA, 48 bp, Homo sapiens
  chr2:130356760-130356808
  hypo
ttctttcttcctttatcggctttttttccttttcgcttttgtttgttt

SEQ ID NO: 10083 - DNA, 31 bp, Homo sapiens
  chr2:130356817-130356848
  hypo
gggttttttttgtgtgcgtatatatatattt

SEQ ID NO: 10084 - DNA, 31 bp, Homo sapiens
  chr2:130669986-130670017
  hypo
gaggcctgaggcctagcgggcacgtgaggtt

SEQ ID NO: 10085 - DNA, 37 bp, Homo sapiens
  chr2:130670340-130670377
  hypo
gcaggagcggaggccccgacaccgcagaggagacttg

SEQ ID NO: 10086 - DNA, 40 bp, Homo sapiens
  chr2:130919035-130919075
  hypo
tgcagtcccagcagccgcgggccagcgcagcacccccctc

SEQ ID NO: 10087 - DNA, 139 bp, Homo sapiens
  chr2:130943150-130943289
  hypo
acagcaggaggggggtcggcagagccccacacgtgtgagctggggcagtgggagggcgtgggtgaggcagagcgctgtccaggtgctggtaggccgggggcgggaggaggcaggtgggggggcacggtcaagatgtatg

SEQ ID NO: 10088 - DNA, 136 bp, Homo sapiens
  chr2:130948041-130948177
  hypo
ggagaaacaaaggcagcgctgccctcgggggagcattggccctggcggaacgcagcagccgcgaaggatccagccagaggatgccacgccagcccagcgctaccaggctgcccaaggggggcgggcctgggaagag

SEQ ID NO: 10089 - DNA, 35 bp, Homo sapiens; identical to SEQ ID NO: 1087
  chr2:131114432-131114467
  hypo

SEQ ID NO: 10090 - DNA, 31 bp, Homo sapiens
  chr2:131502559-131502590
  hypo
aggccagggcccagtccgctctccaggctgc

SEQ ID NO: 10091 - DNA, 31 bp, Homo sapiens
  chr2:131502617-131502648
  hypo
catgaacctgaggatccgtctccagagaagc

SEQ ID NO: 10092 - DNA, 31 bp, Homo sapiens
  chr2:131583858-131583889
  hypo
tcgcagtgatgcgagccgcatgttcctcgcc

SEQ ID NO: 10093 - DNA, 49 bp, Homo sapiens
  chr2:131674645-131674694
  hypo
ccttcaggtatctttccggaaaagtcctggctggcgtcccccggcagcc

SEQ ID NO: 10094 - DNA, 31 bp, Homo sapiens
  chr2:131813290-131813321
  hypo
ctgagttcacccaagccggtccaggcgcagg

SEQ ID NO: 10095 - DNA, 31 bp, Homo sapiens
  chr2:131813492-131813523
  hypo
aaataccaaaagagaacgttctacagatgga

SEQ ID NO: 10096 - DNA, 24 bp, Homo sapiens
  chr2:131823063-131823087
  hypo
tcaaaaagaaaagaaacgccgggc

SEQ ID NO: 10097 - DNA, 31 bp, Homo sapiens
  chr2:131878768-131878799
  hypo
cagtccctgctgctttcgctctcctcactag

SEQ ID NO: 10098 - DNA, 31 bp, Homo sapiens
  chr2:132274361-132274392
  hypo
ctgggctccaggccaccggaggatttggccc

SEQ ID NO: 10099 - DNA, 42 bp, Homo sapiens
  chr2:132274444-132274486
  hypo
ctgagctacctgcagccgtggcggtacgcgcctgacaagcag

SEQ ID NO: 10100 - DNA, 88 bp, Homo sapiens
  chr2:132586578-132586666
  hypo
ccgagccaggacgtcacgctcacggtattttccgaagtcctccgtgtaaaaagggcgggcggtggagtgggcccggggctcctcaggg

SEQ ID NO: 10101 - DNA, 31 bp, Homo sapiens; identical to SEQ ID NO: 1088
  chr2:132767742-132767773
  hypo

SEQ ID NO: 10102 - DNA, 31 bp, Homo sapiens
  chr2:135926351-135926382
  hypo
ttcttctagcattactcgttggtggcttcag

SEQ ID NO: 10103 - DNA, 34 bp, Homo sapiens; identical to SEQ ID NO: 1092
  chr2:136288365-136288399
  hypo

SEQ ID NO: 10104 - DNA, 43 bp, Homo sapiens; identical to SEQ ID NO: 1093
  chr2:136288411-136288454
  hypo

SEQ ID NO: 10105 - DNA, 43 bp, Homo sapiens; identical to SEQ ID NO: 1094
  chr2:136874156-136874199
  hypo

SEQ ID NO: 10106 - DNA, 173 bp, Homo sapiens; identical to SEQ ID NO: 1095
  chr2:136874870-136875043
  hypo

SEQ ID NO: 10107 - DNA, 85 bp, Homo sapiens; identical to SEQ ID NO: 1096
  chr2:136875077-136875162
  hypo

SEQ ID NO: 10108 - DNA, 132 bp, Homo sapiens; identical to SEQ ID NO: 1097
  chr2:136875163-136875295
  hypo

SEQ ID NO: 10109 - DNA, 52 bp, Homo sapiens; identical to SEQ ID NO: 1098
  chr2:136875472-136875524
  hypo

SEQ ID NO: 10110 - DNA, 159 bp, Homo sapiens; identical to SEQ ID NO: 1099
  chr2:136875620-136875779
  hypo

SEQ ID NO: 10111 - DNA, 57 bp, Homo sapiens; identical to SEQ ID NO: 1100
  chr2:136875880-136875937
  hypo

SEQ ID NO: 10112 - DNA, 88 bp, Homo sapiens; identical to SEQ ID NO: 1101
  chr2:136875948-136876036
  hypo

SEQ ID NO: 10113 - DNA, 158 bp, Homo sapiens; identical to SEQ ID NO: 1106
  chr2:136876869-136877027
  hypo

SEQ ID NO: 10114 - DNA, 31 bp, Homo sapiens
  chr2:138689490-138689521
  hypo
aagtcactgtcagaatcggtatctggtgagg

SEQ ID NO: 10115 - DNA, 31 bp, Homo sapiens
  chr2:138689541-138689572
  hypo
acagtgactgtcttctcgctgtgtcttctct

SEQ ID NO: 10116 - DNA, 66 bp, Homo sapiens
  chr2:138689623-138689689
  hypo
cactaatctgattcaccgattcatgaatcacgaatcacttttgaaagatcccgtctcctaatacca

SEQ ID NO: 10117 - DNA, 34 bp, Homo sapiens; identical to SEQ ID NO: 1107
  chr2:145090079-145090113
  hypo

SEQ ID NO: 10118 - DNA, 22 bp, Homo sapiens
  chr2:145204291-145204313
  hypo
taacaattggctggacgcggtg

SEQ ID NO: 10119 - DNA, 31 bp, Homo sapiens; identical to SEQ ID NO: 1108
  chr2:145273327-145273358
  hypo

SEQ ID NO: 10120 - DNA, 31 bp, Homo sapiens; identical to SEQ ID NO: 1109
  chr2:145273403-145273434
  hypo

SEQ ID NO: 10121 - DNA, 84 bp, Homo sapiens; identical to SEQ ID NO: 1110
  chr2:145273440-145273524
  hypo

SEQ ID NO: 10122 - DNA, 214 bp, Homo sapiens; identical to SEQ ID NO: 1111
  chr2:145273537-145273751
  hypo

SEQ ID NO: 10123 - DNA, 53 bp, Homo sapiens; identical to SEQ ID NO: 1112
  chr2:145273759-145273812
  hypo

SEQ ID NO: 10124 - DNA, 42 bp, Homo sapiens; identical to SEQ ID NO: 1114
  chr2:145274018-145274060
  hypo

SEQ ID NO: 10125 - DNA, 100 bp, Homo sapiens; identical to SEQ ID NO: 1115
  chr2:145274079-145274179
  hypo

SEQ ID NO: 10126 - DNA, 326 bp, Homo sapiens; identical to SEQ ID NO: 1116
  chr2:145274184-145274510
  hypo

SEQ ID NO: 10127 - DNA, 197 bp, Homo sapiens; identical to SEQ ID NO: 1117
  chr2:145274576-145274773
  hypo

SEQ ID NO: 10128 - DNA, 395 bp, Homo sapiens; identical to SEQ ID NO: 1118
  chr2:145274781-145275176
  hypo

SEQ ID NO: 10129 - DNA, 31 bp, Homo sapiens; identical to SEQ ID NO: 1119
  chr2:145275181-145275212
  hypo

SEQ ID NO: 10130 - DNA, 154 bp, Homo sapiens; identical to SEQ ID NO: 1120
  chr2:145275237-145275391
  hypo

SEQ ID NO: 10131 - DNA, 68 bp, Homo sapiens; identical to SEQ ID NO: 1122
  chr2:145275488-145275556
  hypo

SEQ ID NO: 10132 - DNA, 31 bp, Homo sapiens; identical to SEQ ID NO: 1123
  chr2:145275645-145275676
  hypo

SEQ ID NO: 10133 - DNA, 86 bp, Homo sapiens; identical to SEQ ID NO: 1125
  chr2:145281722-145281808
  hypo

SEQ ID NO: 10134 - DNA, 169 bp, Homo sapiens; identical to SEQ ID NO: 1126
  chr2:145281809-145281978
  hypo

SEQ ID NO: 10135 - DNA, 317 bp, Homo sapiens; identical to SEQ ID NO: 1129
  chr2:148601815-148602132
  hypo

SEQ ID NO: 10136 - DNA, 277 bp, Homo sapiens; identical to SEQ ID NO: 1130
  chr2:148602136-148602413
  hypo

SEQ ID NO: 10137 - DNA, 38 bp, Homo sapiens; identical to SEQ ID NO: 1131
  chr2:148602727-148602765
  hypo

SEQ ID NO: 10138 - DNA, 36 bp, Homo sapiens; identical to SEQ ID NO: 1132
  chr2:148602775-148602811
  hypo

SEQ ID NO: 10139 - DNA, 54 bp, Homo sapiens; identical to SEQ ID NO: 1133
  chr2:148602889-148602943
  hypo

SEQ ID NO: 10140 - DNA, 31 bp, Homo sapiens
  chr2:148776774-148776805
  hypo
agcaatgatgcataaacggggtccactgccc

SEQ ID NO: 10141 - DNA, 38 bp, Homo sapiens
  chr2:149045674-149045712
  hypo
aaaagtgatttctggccgggcgcggtggctcacgcctg

SEQ ID NO: 10142 - DNA, 31 bp, Homo sapiens
  chr2:150184648-150184679
  hypo
ctgccccgggcagtttcgaagacttgatttt

SEQ ID NO: 10143 - DNA, 31 bp, Homo sapiens
  chr2:152154197-152154228
  hypo
taagatggaaatgtggcggcaaggcagatct

SEQ ID NO: 10144 - DNA, 25 bp, Homo sapiens
  chr2:152266077-152266102
  hypo
cccaacagtacgttatctccttttg

SEQ ID NO: 10145 - DNA, 49 bp, Homo sapiens
  chr2:152642696-152642745
  hypo
tgattggtccattgaacgctgtatagttcacttgcgtttccattgagcc

SEQ ID NO: 10146 - DNA, 31 bp, Homo sapiens
  chr2:152642804-152642835
  hypo
tgacagtcttacactgcgaggaaacagacaa

SEQ ID NO: 10147 - DNA, 38 bp, Homo sapiens
  chr2:152642865-152642903
  hypo
tatgtctgaaatgaaacgagcaacgtaggtttaaattc

SEQ ID NO: 10148 - DNA, 31 bp, Homo sapiens; identical to SEQ ID NO: 1145
  chr2:153192302-153192333
  hypo

SEQ ID NO: 10149 - DNA, 31 bp, Homo sapiens; identical to SEQ ID NO: 1146
  chr2:153192342-153192373
  hypo

SEQ ID NO: 10150 - DNA, 56 bp, Homo sapiens; identical to SEQ ID NO: 1148
  chr2:157189364-157189420
  hypo

SEQ ID NO: 10151 - DNA, 96 bp, Homo sapiens; identical to SEQ ID NO: 1149
  chr2:157189481-157189577
  hypo

SEQ ID NO: 10152 - DNA, 108 bp, Homo sapiens; identical to SEQ ID NO: 1150
  chr2:157292330-157292438
  hypo

SEQ ID NO: 10153 - DNA, 177 bp, Homo sapiens; identical to SEQ ID NO: 1151
  chr2:157292445-157292622
  hypo

SEQ ID NO: 10154 - DNA, 31 bp, Homo sapiens; identical to SEQ ID NO: 1153
  chr2:158485185-158485216
  hypo

SEQ ID NO: 10155 - DNA, 75 bp, Homo sapiens; identical to SEQ ID NO: 1154
  chr2:158485223-158485298
  hypo

SEQ ID NO: 10156 - DNA, 34 bp, Homo sapiens
  chr2:158914981-158915015
  hypo
aggacgtgtgaggacacaacgagaaggtggtctc

SEQ ID NO: 10157 - DNA, 31 bp, Homo sapiens; identical to SEQ ID NO: 1157
  chr2:159313053-159313084
  hypo

SEQ ID NO: 10158 - DNA, 199 bp, Homo sapiens; identical to SEQ ID NO: 1158
  chr2:159313328-159313527
  hypo

SEQ ID NO: 10159 - DNA, 147 bp, Homo sapiens; identical to SEQ ID NO: 1159
  chr2:159313580-159313727
  hypo

SEQ ID NO: 10160 - DNA, 163 bp, Homo sapiens; identical to SEQ ID NO: 1160
  chr2:159313730-159313893
  hypo

SEQ ID NO: 10161 - DNA, 103 bp, Homo sapiens; identical to SEQ ID NO: 1161
  chr2:159314097-159314200
  hypo

SEQ ID NO: 10162 - DNA, 248 bp, Homo sapiens; identical to SEQ ID NO: 1162
  chr2:159314217-159314465
  hypo

SEQ ID NO: 10163 - DNA, 66 bp, Homo sapiens; identical to SEQ ID NO: 1163
  chr2:159314657-159314723
  hypo

SEQ ID NO: 10164 - DNA, 71 bp, Homo sapiens; identical to SEQ ID NO: 1164
  chr2:159314726-159314797
  hypo

SEQ ID NO: 10165 - DNA, 31 bp, Homo sapiens
  chr2:159538761-159538792
  hypo
acccaagagaaaactgcgttttcttgccgaa

SEQ ID NO: 10166 - DNA, 31 bp, Homo sapiens
  chr2:159747449-159747480
  hypo
gttttggggcacacatcgctgtagcaggaag

SEQ ID NO: 10167 - DNA, 31 bp, Homo sapiens; identical to SEQ ID NO: 1169
  chr2:160142448-160142479
  hypo

SEQ ID NO: 10168 - DNA, 31 bp, Homo sapiens; identical to SEQ ID NO: 1170
  chr2:160142591-160142622
  hypo

SEQ ID NO: 10169 - DNA, 45 bp, Homo sapiens; identical to SEQ ID NO: 1171
  chr2:160142703-160142748
  hypo

SEQ ID NO: 10170 - DNA, 31 bp, Homo sapiens; identical to SEQ ID NO: 1172
  chr2:160142757-160142788
  hypo

SEQ ID NO: 10171 - DNA, 31 bp, Homo sapiens; identical to SEQ ID NO: 1173
  chr2:160142924-160142955
  hypo

SEQ ID NO: 10172 - DNA, 43 bp, Homo sapiens
  chr2:160632630-160632673
  hypo
tgggattacaggcgtgagccactgcgcccggcctgtgcctggc

SEQ ID NO: 10173 - DNA, 31 bp, Homo sapiens; identical to SEQ ID NO: 1175
  chr2:160654434-160654465
  hypo

SEQ ID NO: 10174 - DNA, 31 bp, Homo sapiens; identical to SEQ ID NO: 1176
  chr2:160760684-160760715
  hypo

SEQ ID NO: 10175 - DNA, 26 bp, Homo sapiens
  chr2:160760872-160760898
  hypo
tcctcccacatccaccgcgccctcct

SEQ ID NO: 10176 - DNA, 31 bp, Homo sapiens; identical to SEQ ID NO: 1178
  chr2:160760980-160761011
  hypo

SEQ ID NO: 10177 - DNA, 153 bp, Homo sapiens; identical to SEQ ID NO: 1179
  chr2:160761037-160761190
  hypo

SEQ ID NO: 10178 - DNA, 134 bp, Homo sapiens; identical to SEQ ID NO: 1180
  chr2:160761232-160761366
  hypo

SEQ ID NO: 10179 - DNA, 31 bp, Homo sapiens
  chr2:161253406-161253437
  hypo
ctctctgaccgaggtccggggactttcccct

SEQ ID NO: 10180 - DNA, 31 bp, Homo sapiens
  chr2:161253492-161253523
  hypo
gtctttcttgatttcacgtttccttagcctt

SEQ ID NO: 10181 - DNA, 64 bp, Homo sapiens; identical to SEQ ID NO: 1185
  chr2:165477629-165477693
  hypo

SEQ ID NO: 10182 - DNA, 53 bp, Homo sapiens; identical to SEQ ID NO: 1186
  chr2:165697708-165697761
  hypo

SEQ ID NO: 10183 - DNA, 36 bp, Homo sapiens; identical to SEQ ID NO: 1187
  chr2:165697973-165698009
  hypo

SEQ ID NO: 10184 - DNA, 37 bp, Homo sapiens; identical to SEQ ID NO: 1188
  chr2:165698273-165698310
  hypo

SEQ ID NO: 10185 - DNA, 129 bp, Homo sapiens; identical to SEQ ID NO: 1189
  chr2:165698490-165698619
  hypo

SEQ ID NO: 10186 - DNA, 46 bp, Homo sapiens; identical to SEQ ID NO: 1190
  chr2:165698623-165698669
  hypo

SEQ ID NO: 10187 - DNA, 31 bp, Homo sapiens
  chr2:168249795-168249826
  hypo
tttaattatatagtcacgcctgtgatctagt

SEQ ID NO: 10188 - DNA, 20 bp, Homo sapiens
  chr2:168593132-168593152
  hypo
tggatgcagtggctcacgcc

SEQ ID NO: 10189 - DNA, 31 bp, Homo sapiens
  chr2:168931676-168931707
  hypo
ctccactcccagtccccgtcttcggttttat

SEQ ID NO: 10190 - DNA, 154 bp, Homo sapiens; identical to SEQ ID NO: 1194
  chr2:169312793-169312947
  hypo

SEQ ID NO: 10191 - DNA, 24 bp, Homo sapiens
  chr2:169340960-169340984
  hypo
gattacaggcgttgagccactgtg

SEQ ID NO: 10192 - DNA, 42 bp, Homo sapiens
  chr2:169436466-169436508
  hypo
cccttgataatcacaacgccacttttccgcccaagaaatata

SEQ ID NO: 10193 - DNA, 31 bp, Homo sapiens
  chr2:169453320-169453351
  hypo
tgtgaaccaccatgcccggctcccatccctt

SEQ ID NO: 10194 - DNA, 31 bp, Homo sapiens
  chr2:169533300-169533331
  hypo
catctggatgtttactcgagggtagaggttt

SEQ ID NO: 10195 - DNA, 31 bp, Homo sapiens
  chr2:169533380-169533411
  hypo
ctttttccttctaatcgcgactgtctgctgg

SEQ ID NO: 10196 - DNA, 42 bp, Homo sapiens
  chr2:169533456-169533498
  hypo
tttcctgctaagcctccggcagttttacgcaccattgctttg

SEQ ID NO: 10197 - DNA, 20 bp, Homo sapiens
  chr2:169584038-169584058
  hypo
cagagcgagactccatctca

SEQ ID NO: 10198 - DNA, 31 bp, Homo sapiens
  chr2:169596485-169596516
  hypo
caggcatgagtcactgcgcccagcctggaaa

SEQ ID NO: 10199 - DNA, 31 bp, Homo sapiens
  chr2:169610604-169610635
  hypo
atcaaataccactccccgtgttaagtatcag

SEQ ID NO: 10200 - DNA, 31 bp, Homo sapiens
  chr2:170551728-170551759
  hypo
tctatcagatgttccacgtaataatgctggt

SEQ ID NO: 10201 - DNA, 31 bp, Homo sapiens
  chr2:170551800-170551831
  hypo
gtttgtgcacatacagcgctggtaggttttt

SEQ ID NO: 10202 - DNA, 30 bp, Homo sapiens
  chr2:170551856-170551886
  hypo
gaactgggggccaggcgcggtggctcacgc

SEQ ID NO: 10203 - DNA, 31 bp, Homo sapiens
  chr2:170552125-170552156
  hypo
cgacagagcgagactccgtctcaaaaaaaaa

SEQ ID NO: 10204 - DNA, 20 bp, Homo sapiens
  chr2:170596964-170596984
  hypo
ttttttttttttgagacgga

SEQ ID NO: 10205 - DNA, 25 bp, Homo sapiens
  chr2:170681880-170681905
  hypo
agtggagaggcagggcgcggcggct

SEQ ID NO: 10206 - DNA, 35 bp, Homo sapiens
  chr2:170682144-170682179
  hypo
tgggagacagagcgagactccgtctcaaaaaaaaa

SEQ ID NO: 10207 - DNA, 31 bp, Homo sapiens
  chr2:170682270-170682301
  hypo
gtagcagattgtggagcgaatggaaatttag

SEQ ID NO: 10208 - DNA, 46 bp, Homo sapiens
  chr2:171542903-171542949
  hypo
gcgaggcggggcggggcggggcggggcggggcgaggcaatagaaaa

SEQ ID NO: 10209 - DNA, 31 bp, Homo sapiens
  chr2:171542955-171542986
  hypo
agaaaatgtatatgaacgtatccatgcttct

SEQ ID NO: 10210 - DNA, 49 bp, Homo sapiens; identical to SEQ ID NO: 1201
  chr2:171627263-171627312
  hypo

SEQ ID NO: 10211 - DNA, 34 bp, Homo sapiens; identical to SEQ ID NO: 1202
  chr2:171627346-171627380
  hypo

SEQ ID NO: 10212 - DNA, 208 bp, Homo sapiens; identical to SEQ ID NO: 1203
  chr2:171627473-171627681
  hypo

SEQ ID NO: 10213 - DNA, 73 bp, Homo sapiens; identical to SEQ ID NO: 1204
  chr2:171627823-171627896
  hypo

SEQ ID NO: 10214 - DNA, 48 bp, Homo sapiens; identical to SEQ ID NO: 1205
  chr2:171627930-171627978
  hypo

SEQ ID NO: 10215 - DNA, 59 bp, Homo sapiens
  chr2:171822508-171822567
  hypo
ctcactgtggatgtgacgccccccactgccaaggcccccaccaccgttgaggacagagt

SEQ ID NO: 10216 - DNA, 22 bp, Homo sapiens
  chr2:172178477-172178499
  hypo
ttttttttttttgatacgcagt

SEQ ID NO: 10217 - DNA, 5 bp, Homo sapiens
  chr2:172188911-172188916
  hypo
tcccg

SEQ ID NO: 10218 - DNA, 15 bp, Homo sapiens
  chr2:172192620-172192635
  hypo
ttttgagacaaagtt

SEQ ID NO: 10219 - DNA, 31 bp, Homo sapiens
  chr2:172411135-172411166
  hypo
cagaccgcaatggaaacgtcctaaggagcca

SEQ ID NO: 10220 - DNA, 31 bp, Homo sapiens
  chr2:172873883-172873914
  hypo
gtgtgagatttcatcacgctgtgcagaacgg

SEQ ID NO: 10221 - DNA, 21 bp, Homo sapiens
  chr2:173036682-173036703
  hypo
gtcaccgcgcccagcccaata

SEQ ID NO: 10222 - DNA, 31 bp, Homo sapiens
  chr2:173424037-173424068
  hypo
ggcttgtgccctgaatcgtggactccacaac

SEQ ID NO: 10223 - DNA, 46 bp, Homo sapiens; identical to SEQ ID NO: 1214
  chr2:173940455-173940501
  hypo

SEQ ID NO: 10224 - DNA, 106 bp, Homo sapiens; identical to SEQ ID NO: 1215
  chr2:173940629-173940735
  hypo

SEQ ID NO: 10225 - DNA, 22 bp, Homo sapiens
  chr2:174108654-174108676
  hypo
agatttacgtttttaacagatc

SEQ ID NO: 10226 - DNA, 31 bp, Homo sapiens; identical to SEQ ID NO: 1216
  chr2:174349950-174349981
  hypo

SEQ ID NO: 10227 - DNA, 52 bp, Homo sapiens; identical to SEQ ID NO: 1217
  chr2:174349995-174350047
  hypo

SEQ ID NO: 10228 - DNA, 31 bp, Homo sapiens; identical to SEQ ID NO: 1218
  chr2:174350101-174350132
  hypo

SEQ ID NO: 10229 - DNA, 31 bp, Homo sapiens; identical to SEQ ID NO: 1219
  chr2:174350137-174350168
  hypo

SEQ ID NO: 10230 - DNA, 31 bp, Homo sapiens
  chr2:174522472-174522503
  hypo
tgacagagctagactccgtctcaaaaaaaaa

SEQ ID NO: 10231 - DNA, 43 bp, Homo sapiens
  chr2:174522509-174522552
  hypo
aatggatcatcatggtcgctgggagcttcgaagtttacaaaat

SEQ ID NO: 10232 - DNA, 31 bp, Homo sapiens
  chr2:174522595-174522626
  hypo
tcatgagggagtgggtcggtaggctggagat

SEQ ID NO: 10233 - DNA, 30 bp, Homo sapiens
  chr2:175110638-175110668
  hypo
tgaacacttaagttgcgtgtgtatagagtt

SEQ ID NO: 10234 - DNA, 21 bp, Homo sapiens
  chr2:175261537-175261558
  hypo
aaaaaacgaataagcctttat

SEQ ID NO: 10235 - DNA, 31 bp, Homo sapiens; identical to SEQ ID NO: 1223
  chr2:175546788-175546819
  hypo

SEQ ID NO: 10236 - DNA, 62 bp, Homo sapiens; identical to SEQ ID NO: 1224
  chr2:175546899-175546961
  hypo

SEQ ID NO: 10237 - DNA, 31 bp, Homo sapiens
  chr2:175855047-175855078
  hypo
ggggggtgcgggggggcgggcaagatggaga

SEQ ID NO: 10238 - DNA, 35 bp, Homo sapiens
  chr2:175927793-175927828
  hypo
tctctttctctgggcacgagcgcctgaacagtgtc

SEQ ID NO: 10239 - DNA, 55 bp, Homo sapiens
  chr2:175927847-175927902
  hypo
ttacagacaatagtagcgtaaagcccagtgatgaccttcccgtgttatgtacata

SEQ ID NO: 10240 - DNA, 37 bp, Homo sapiens
  chr2:175927915-175927952
  hypo
tatacatggaattgtgcgcctgcgttccaatcctgct

SEQ ID NO: 10241 - DNA, 31 bp, Homo sapiens
  chr2:177013794-177013825
  hypo
gaaatgcaggtcacagcgtctaacaaatatg

SEQ ID NO: 10242 - DNA, 31 bp, Homo sapiens
  chr2:177013828-177013859
  hypo
atgtgtatattcaccccggtctccagccggc

SEQ ID NO: 10243 - DNA, 31 bp, Homo sapiens
  chr2:178131779-178131810
  hypo
gctgtctttgggaagacggccttccctacat

SEQ ID NO: 10244 - DNA, 31 bp, Homo sapiens
  chr2:178627423-178627454
  hypo
gaaaatcctccaggcccgctcttcctcccag

SEQ ID NO: 10245 - DNA, 51 bp, Homo sapiens
  chr2:178972991-178973042
  hypo
acctggccagagtccacgcctcaacttcgaggctggcgatccagaaagagc

SEQ ID NO: 10246 - DNA, 31 bp, Homo sapiens
  chr2:179012822-179012853
  hypo
gacttaaagctgggagcgatggctcacgcct

SEQ ID NO: 10247 - DNA, 31 bp, Homo sapiens
  chr2:179058447-179058478
  hypo
taatctgcacaccgaacgcaggccgggagtg

SEQ ID NO: 10248 - DNA, 33 bp, Homo sapiens
  chr2:179303694-179303727
  hypo
ccactgtgcctggccaaacgctggtaggttttg

SEQ ID NO: 10249 - DNA, 31 bp, Homo sapiens
  chr2:179999949-179999980
  hypo
gtgagccaccgccccccggcccaaactgact

SEQ ID NO: 10250 - DNA, 32 bp, Homo sapiens
  chr2:180019920-180019952
  hypo
gtgtgagccatcgcatccggcccacaactctt

SEQ ID NO: 10251 - DNA, 31 bp, Homo sapiens
  chr2:180027743-180027774
  hypo
aataattgttgtctaacgagattgatatatt

SEQ ID NO: 10252 - DNA, 86 bp, Homo sapiens; identical to SEQ ID NO: 1231
  chr2:180129610-180129696
  hypo

SEQ ID NO: 10253 - DNA, 31 bp, Homo sapiens
  chr2:180886918-180886949
  hypo
ctgccacttactgccccgtttgatcttgatc

SEQ ID NO: 10254 - DNA, 42 bp, Homo sapiens; identical to SEQ ID NO: 1235
  chr2:182321513-182321555
  hypo

SEQ ID NO: 10255 - DNA, 31 bp, Homo sapiens; identical to SEQ ID NO: 1236
  chr2:182321606-182321637
  hypo

SEQ ID NO: 10256 - DNA, 34 bp, Homo sapiens; identical to SEQ ID NO: 1237
  chr2:182321640-182321674
  hypo

SEQ ID NO: 10257 - DNA, 92 bp, Homo sapiens; identical to SEQ ID NO: 1238
  chr2:182321745-182321837
  hypo

SEQ ID NO: 10258 - DNA, 153 bp, Homo sapiens; identical to SEQ ID NO: 1239
  chr2:182322038-182322191
  hypo

SEQ ID NO: 10259 - DNA, 268 bp, Homo sapiens; identical to SEQ ID NO: 1240
  chr2:182322399-182322667
  hypo

SEQ ID NO: 10260 - DNA, 48 bp, Homo sapiens; identical to SEQ ID NO: 1241
  chr2:182322677-182322725
  hypo

SEQ ID NO: 10261 - DNA, 310 bp, Homo sapiens; identical to SEQ ID NO: 1242
  chr2:182322732-182323042
  hypo

SEQ ID NO: 10262 - DNA, 31 bp, Homo sapiens; identical to SEQ ID NO: 1245
  chr2:182756672-182756703
  hypo

SEQ ID NO: 10263 - DNA, 31 bp, Homo sapiens; identical to SEQ ID NO: 1255
  chr2:183902341-183902372
  hypo

SEQ ID NO: 10264 - DNA, 15 bp, Homo sapiens
  chr2:183902386-183902401
  hypo
ggccccatcatgggg

SEQ ID NO: 10265 - DNA, 44 bp, Homo sapiens; identical to SEQ ID NO: 1257
  chr2:183902442-183902486
  hypo

SEQ ID NO: 10266 - DNA, 121 bp, Homo sapiens; identical to SEQ ID NO: 1258
  chr2:183902679-183902800
  hypo

SEQ ID NO: 10267 - DNA, 31 bp, Homo sapiens; identical to SEQ ID NO: 1259
  chr2:183902804-183902835
  hypo

SEQ ID NO: 10268 - DNA, 31 bp, Homo sapiens; identical to SEQ ID NO: 1260
  chr2:183902865-183902896
  hypo

SEQ ID NO: 10269 - DNA, 58 bp, Homo sapiens; identical to SEQ ID NO: 1261
  chr2:183902905-183902963
  hypo

SEQ ID NO: 10270 - DNA, 45 bp, Homo sapiens; identical to SEQ ID NO: 1262
  chr2:183902964-183903009
  hypo

SEQ ID NO: 10271 - DNA, 178 bp, Homo sapiens; identical to SEQ ID NO: 1263
  chr2:183903037-183903215
  hypo

SEQ ID NO: 10272 - DNA, 190 bp, Homo sapiens; identical to SEQ ID NO: 1264
  chr2:183903236-183903426
  hypo

SEQ ID NO: 10273 - DNA, 31 bp, Homo sapiens
  chr2:183964790-183964821
  hypo
gaagatttgttgttcccgtctcttcaagaaa

SEQ ID NO: 10274 - DNA, 39 bp, Homo sapiens; identical to SEQ ID NO: 1265
  chr2:187454989-187455028
  hypo

SEQ ID NO: 10275 - DNA, 61 bp, Homo sapiens; identical to SEQ ID NO: 1266
  chr2:187455150-187455211
  hypo

SEQ ID NO: 10276 - DNA, 58 bp, Homo sapiens; identical to SEQ ID NO: 1267
  chr2:187455216-187455274
  hypo

SEQ ID NO: 10277 - DNA, 40 bp, Homo sapiens; identical to SEQ ID NO: 1270
  chr2:191513081-191513121
  hypo

SEQ ID NO: 10278 - DNA, 36 bp, Homo sapiens; identical to SEQ ID NO: 1271
  chr2:192109886-192109922
  hypo

SEQ ID NO: 10279 - DNA, 117 bp, Homo sapiens; identical to SEQ ID NO: 1272
  chr2:192110380-192110497
  hypo

SEQ ID NO: 10280 - DNA, 31 bp, Homo sapiens
  chr2:192342591-192342622
  hypo
caactagccttccccacgtgctatgtaaaca

SEQ ID NO: 10281 - DNA, 31 bp, Homo sapiens
  chr2:192342645-192342676
  hypo
tgagtcctatgaaaatcggacatcccctcct

SEQ ID NO: 10282 - DNA, 31 bp, Homo sapiens
  chr2:192746022-192746053
  hypo
tccacgaacttttcgtcgcatgccaggcctg

SEQ ID NO: 10283 - DNA, 31 bp, Homo sapiens
  chr2:192746554-192746585
  hypo
tccatgacttcctccccgttccgctgcccaa

SEQ ID NO: 10284 - DNA, 31 bp, Homo sapiens
  chr2:194333178-194333209
  hypo
ttcctggaagttctagcgagggcaagaaaaa

SEQ ID NO: 10285 - DNA, 9 bp, Homo sapiens
  chr2:197663622-197663631
  hypo
taaaaattt

SEQ ID NO: 10286 - DNA, 26 bp, Homo sapiens
  chr2:198262503-198262529
  hypo
gagcgagactccgtctcaaaaaaaaa

SEQ ID NO: 10287 - DNA, 38 bp, Homo sapiens
  chr2:198317067-198317105
  hypo
ttacaggcgtgagccaccgcgcccggcccattttctcc

SEQ ID NO: 10288 - DNA, 31 bp, Homo sapiens
  chr2:200457172-200457203
  hypo
gaatgaacaggtgtgtcgttgcttctttcct

SEQ ID NO: 10289 - DNA, 58 bp, Homo sapiens
  chr2:200938956-200939014
  hypo
tcatcagaacccagaacgctgttttattcctgtcccctttctccgtctttctacctac

SEQ ID NO: 10290 - DNA, 134 bp, Homo sapiens; identical to SEQ ID NO: 1277
  chr2:201171184-201171318
  hypo

SEQ ID NO: 10291 - DNA, 103 bp, Homo sapiens; identical to SEQ ID NO: 1278
  chr2:201171396-201171499
  hypo

SEQ ID NO: 10292 - DNA, 405 bp, Homo sapiens; identical to SEQ ID NO: 1279
  chr2:201171603-201172008
  hypo

SEQ ID NO: 10293 - DNA, 226 bp, Homo sapiens; identical to SEQ ID NO: 1280
  chr2:201172122-201172348
  hypo

SEQ ID NO: 10294 - DNA, 31 bp, Homo sapiens; identical to SEQ ID NO: 1281
  chr2:201172568-201172599
  hypo

SEQ ID NO: 10295 - DNA, 31 bp, Homo sapiens
  chr2:202893411-202893442
  hypo
ttttttcctggagagtcgattgttaaacatt

SEQ ID NO: 10296 - DNA, 31 bp, Homo sapiens
  chr2:203431924-203431955
  hypo
ctgaaacatggagatgcgtagctgtcatgct

SEQ ID NO: 10297 - DNA, 117 bp, Homo sapiens
  chr2:203431970-203432087
  hypo
ggagaaacataagctacggagtattcacttctgaggatgcttttccggaaaaagaaaggctagaaaatactcgcacttcctcagaaccctctttcttgttaacgggtatcttttgtt

SEQ ID NO: 10298 - DNA, 31 bp, Homo sapiens
  chr2:203498547-203498578
  hypo
aaggccttccaccaccgcgcaaagggaccca

SEQ ID NO: 10299 - DNA, 27 bp, Homo sapiens
  chr2:203880464-203880491
  hypo
gcgtgagccaccgcgcctggccccaac

SEQ ID NO: 10300 - DNA, 82 bp, Homo sapiens; identical to SEQ ID NO: 1282
  chr2:204399881-204399963
  hypo

SEQ ID NO: 10301 - DNA, 31 bp, Homo sapiens; identical to SEQ ID NO: 1287
  chr2:206166172-206166203
  hypo

SEQ ID NO: 10302 - DNA, 45 bp, Homo sapiens
  chr2:206166493-206166538
  hypo
tgtactcagaaaaaagcgcacgcttttcctcgtcttcagccaaat

SEQ ID NO: 10303 - DNA, 38 bp, Homo sapiens
  chr2:206605354-206605392
  hypo
tccggctggagctcttcggctgccgggtcacaggtgag

SEQ ID NO: 10304 - DNA, 31 bp, Homo sapiens
  chr2:206608211-206608242
  hypo
tctcctacagcctaaacggcaaggactggga

SEQ ID NO: 10305 - DNA, 31 bp, Homo sapiens
  chr2:206609769-206609800
  hypo
actcctgtccttcccccggatgagtgtctcc

SEQ ID NO: 10306 - DNA, 31 bp, Homo sapiens
  chr2:206609827-206609858
  hypo
gcagccccctgctccccgcatcatcagtttt

SEQ ID NO: 10307 - DNA, 60 bp, Homo sapiens
  chr2:206826959-206827019
  hypo
ctgcccctgctgctttcggagttgaacccagtctctctgactgcacgacctggttgcagt

SEQ ID NO: 10308 - DNA, 31 bp, Homo sapiens
  chr2:206827020-206827051
  hypo
gtccctgtacctatcacgatggtgctgaata

SEQ ID NO: 10309 - DNA, 31 bp, Homo sapiens
  chr2:206830608-206830639
  hypo
ggggccttgcaagtctcggcagatttccctg

SEQ ID NO: 10310 - DNA, 37 bp, Homo sapiens
  chr2:206971205-206971242
  hypo
tcttttttttttgagacggagtcttgctctgtcgccc

SEQ ID NO: 10311 - DNA, 31 bp, Homo sapiens; identical to SEQ ID NO: 1289
  chr2:208395299-208395330
  hypo

SEQ ID NO: 10312 - DNA, 51 bp, Homo sapiens
  chr2:208574953-208575004
  hypo
atagaagaaattgggacgcagaagttaagttacttccgcaagcttacatga

SEQ ID NO: 10313 - DNA, 52 bp, Homo sapiens
  chr2:208575124-208575176
  hypo
ttttatttttttgaaacggagcctaggtcgcccaggctggagtgcaatggcg

SEQ ID NO: 10314 - DNA, 42 bp, Homo sapiens
  chr2:208577541-208577583
  hypo
agttgtttttttgagacggaatctcgttttgtcgcccgccca

SEQ ID NO: 10315 - DNA, 6 bp, Homo sapiens
  chr2:208580709-208580715
  hypo
aagaga

SEQ ID NO: 10316 - DNA, 52 bp, Homo sapiens
  chr2:208580768-208580820
  hypo
ccttgcctttatttaacggtatgtctaacataactgacggtagtatcagtaa

SEQ ID NO: 10317 - DNA, 31 bp, Homo sapiens
  chr2:208580834-208580865
  hypo
ctaagatcttattgtccgattttattagtac

SEQ ID NO: 10318 - DNA, 31 bp, Homo sapiens
  chr2:208622119-208622150
  hypo
tgtcttgataagttgccgactaggataaaag

SEQ ID NO: 10319 - DNA, 31 bp, Homo sapiens
  chr2:208994120-208994151
  hypo
acagtggggactctggcggcatgatggaaat

SEQ ID NO: 10320 - DNA, 20 bp, Homo sapiens
  chr2:209038329-209038349
  hypo
gagagcgagactccatctca

SEQ ID NO: 10321 - DNA, 86 bp, Homo sapiens; identical to SEQ ID NO: 1293
  chr2:209118760-209118846
  hypo

SEQ ID NO: 10322 - DNA, 37 bp, Homo sapiens; identical to SEQ ID NO: 1294
  chr2:209118862-209118899
  hypo

SEQ ID NO: 10323 - DNA, 17 bp, Homo sapiens
  chr2:216132271-216132288
  hypo
tccgtcacaagaaaaaa

SEQ ID NO: 10324 - DNA, 31 bp, Homo sapiens
  chr2:216196383-216196414
  hypo
ggtgagccattgtacccggctcatttttgtt

SEQ ID NO: 10325 - DNA, 19 bp, Homo sapiens
  chr2:216808583-216808602
  hypo
agagcgaaaggcttttgga

SEQ ID NO: 10326 - DNA, 38 bp, Homo sapiens
  chr2:216825035-216825073
  hypo
acctgaccacaagaaccgggattcgcccaggtcctaac

SEQ ID NO: 10327 - DNA, 31 bp, Homo sapiens; identical to SEQ ID NO: 1295
  chr2:216826037-216826068
  hypo

SEQ ID NO: 10328 - DNA, 46 bp, Homo sapiens
  chr2:216852231-216852277
  hypo
tgctgggattacaggcgttagccaccatacccggcaacataagcaa

SEQ ID NO: 10329 - DNA, 31 bp, Homo sapiens
  chr2:216885425-216885456
  hypo
tggtaataacagctagcgatgcactgtttca

SEQ ID NO: 10330 - DNA, 31 bp, Homo sapiens
  chr2:216885467-216885498
  hypo
tgtatccaaggaggaccgccatctagaatgg

SEQ ID NO: 10331 - DNA, 31 bp, Homo sapiens
  chr2:216885526-216885557
  hypo
tgttgggccaaagccccgcaaaacacactac

SEQ ID NO: 10332 - DNA, 47 bp, Homo sapiens
  chr2:216885562-216885609
  hypo
ctctctgcaagaggaacgtcagactcccactgcgtcccttaaaaatt

SEQ ID NO: 10333 - DNA, 31 bp, Homo sapiens
  chr2:216913503-216913534
  hypo
tgcagtgagctatgatcgtgacactatactt

SEQ ID NO: 10334 - DNA, 31 bp, Homo sapiens
  chr2:217528923-217528954
  hypo
ttccagttctgacacacgtatttatatttgg

SEQ ID NO: 10335 - DNA, 47 bp, Homo sapiens
  chr2:218676419-218676466
  hypo
aggtgcccacctgccacgctccagggctgatgcgcctccatgagaga

SEQ ID NO: 10336 - DNA, 59 bp, Homo sapiens
  chr2:218678425-218678484
  hypo
tgatggttggaggtggcgaagacaccttcatggccagcccgtacgcgcctcggaaggag

SEQ ID NO: 10337 - DNA, 31 bp, Homo sapiens
  chr2:218698051-218698082
  hypo
gcagatgagtgggcgacgctaaagccaggca

SEQ ID NO: 10338 - DNA, 69 bp, Homo sapiens
  chr2:218700731-218700800
  hypo
actcacctctttgggccgccctccaggattgagagcgatggtaagagccagctccggggagacacactg

SEQ ID NO: 10339 - DNA, 36 bp, Homo sapiens
  chr2:218704381-218704417
  hypo
caccacccctggatcacgtgacgagtaccctggtgt

SEQ ID NO: 10340 - DNA, 31 bp, Homo sapiens
  chr2:218712678-218712709
  hypo
tgtagtggggcagcagcggaggctggctcca

SEQ ID NO: 10341 - DNA, 31 bp, Homo sapiens
  chr2:218738051-218738082
  hypo
ggaattgtggagagcacggtgtttggtggca

SEQ ID NO: 10342 - DNA, 43 bp, Homo sapiens
  chr2:218757380-218757423
  hypo
caaggaaaagtggctccgaggagctggccgcatgggttgctca

SEQ ID NO: 10343 - DNA, 31 bp, Homo sapiens
  chr2:218757475-218757506
  hypo
ggactctcctccctcccgccctctgtccaca

SEQ ID NO: 10344 - DNA, 60 bp, Homo sapiens
  chr2:218757523-218757583
  hypo
caggggccccttcccccgtcctcatcgcttctcattccctctgtgcgtatcccctcactc

SEQ ID NO: 10345 - DNA, 31 bp, Homo sapiens
  chr2:218765457-218765488
  hypo
acaaaaggaagaatcccgaatgctgaggagt

SEQ ID NO: 10346 - DNA, 31 bp, Homo sapiens
  chr2:218765558-218765589
  hypo
ttcactttgatacactcgccaacacaagaga

SEQ ID NO: 10347 - DNA, 67 bp, Homo sapiens
  chr2:218765591-218765658
  hypo
ccccaggaggagaatacgactgccaccacaaaaggagcgatgagagtaatggcgcccctctgtcttg

SEQ ID NO: 10348 - DNA, 31 bp, Homo sapiens
  chr2:219016358-219016389
  hypo
tgttcctcaggtactgcgggaggcctgacac

SEQ ID NO: 10349 - DNA, 13 bp, Homo sapiens
  chr2:219204241-219204254
  hypo
cctggcctctcca

SEQ ID NO: 10350 - DNA, 31 bp, Homo sapiens
  chr2:219204300-219204331
  hypo
gagttctaggtgtgtccgtctcattctccat

SEQ ID NO: 10351 - DNA, 31 bp, Homo sapiens
  chr2:219205429-219205460
  hypo
caaacctcctctctctcgcaggcttccattg

SEQ ID NO: 10352 - DNA, 31 bp, Homo sapiens
  chr2:219209329-219209360
  hypo
aggcactcagccccaacgggaacccatccat

SEQ ID NO: 10353 - DNA, 31 bp, Homo sapiens
  chr2:219209442-219209473
  hypo
aggatggggcaggggtcgggtcaggcttctc

SEQ ID NO: 10354 - DNA, 87 bp, Homo sapiens
  chr2:219209575-219209662
  hypo
agaacccactgcctggcgctacaggaggctctggggccggggccgggccccactggggatgatgactactcccgggcccagctcctg

SEQ ID NO: 10355 - DNA, 31 bp, Homo sapiens
  chr2:219209697-219209728
  hypo
caagtgatgcccccagcgcccccagcccagc

SEQ ID NO: 10356 - DNA, 31 bp, Homo sapiens
  chr2:219210000-219210031
  hypo
ttccctactcctgggacggcagcaaggacat

SEQ ID NO: 10357 - DNA, 21 bp, Homo sapiens
  chr2:219231159-219231180
  hypo
gattttcgagtgctgtacctc

SEQ ID NO: 10358 - DNA, 140 bp, Homo sapiens; identical to SEQ ID NO: 1299
  chr2:219264032-219264172
  hypo

SEQ ID NO: 10359 - DNA, 237 bp, Homo sapiens; identical to SEQ ID NO: 1300
  chr2:219264205-219264442
  hypo

SEQ ID NO: 10360 - DNA, 89 bp, Homo sapiens
  chr2:219294082-219294171
  hypo
aatgaattggcatccccgaagctgatggaggtgatgaaccacgtgctgggcaagcgcagggagctgaaggcggccgtgcccgacacggt

SEQ ID NO: 10361 - DNA, 31 bp, Homo sapiens
  chr2:219431995-219432026
  hypo
ttcatggcttgcaagacgcatcctcctctat

SEQ ID NO: 10362 - DNA, 31 bp, Homo sapiens
  chr2:219432032-219432063
  hypo
ttaaacagcaggaattcgtcaatgctccatc

SEQ ID NO: 10363 - DNA, 31 bp, Homo sapiens
  chr2:219432083-219432114
  hypo
gcactatactctttttcggcaatttcatcca

SEQ ID NO: 10364 - DNA, 31 bp, Homo sapiens
  chr2:219432153-219432184
  hypo
aacacatacacacaccgcgcacatttacgta

SEQ ID NO: 10365 - DNA, 46 bp, Homo sapiens; identical to SEQ ID NO: 1303
  chr2:219735784-219735830
  hypo

SEQ ID NO: 10366 - DNA, 31 bp, Homo sapiens; identical to SEQ ID NO: 1305
  chr2:219736150-219736181
  hypo

SEQ ID NO: 10367 - DNA, 31 bp, Homo sapiens; identical to SEQ ID NO: 1306
  chr2:219736284-219736315
  hypo

SEQ ID NO: 10368 - DNA, 196 bp, Homo sapiens; identical to SEQ ID NO: 1307
  chr2:219736318-219736514
  hypo

SEQ ID NO: 10369 - DNA, 31 bp, Homo sapiens; identical to SEQ ID NO: 1308
  chr2:219757765-219757796
  hypo

SEQ ID NO: 10370 - DNA, 235 bp, Homo sapiens; identical to SEQ ID NO: 1309
  chr2:219757800-219758035
  hypo

SEQ ID NO: 10371 - DNA, 31 bp, Homo sapiens
  chr2:219879556-219879587
  hypo
cacacacctgaaagtgcgcaacacacacccg

SEQ ID NO: 10372 - DNA, 65 bp, Homo sapiens
  chr2:219892663-219892728
  hypo
ccgtcgaagaagaactcggtcatgggggggatataagggtactgcggggccggcatgtcctccag

SEQ ID NO: 10373 - DNA, 31 bp, Homo sapiens
  chr2:219892810-219892841
  hypo
gaaaggctacaccagtcgccctgactactaa

SEQ ID NO: 10374 - DNA, 34 bp, Homo sapiens
  chr2:219919241-219919275
  hypo
ggtatgggagactgaccggcggagggggtgggga

SEQ ID NO: 10375 - DNA, 37 bp, Homo sapiens
  chr2:220080732-220080769
  hypo
gacactggatgtgccccgatccgcgatccgcagcacc

SEQ ID NO: 10376 - DNA, 139 bp, Homo sapiens
  chr2:220080825-220080964
  hypo
gatgagcagctccacccgccgagacgtgaactgctgcacccggatccacaggaaggtgcgcaggttgctcacgaagcctgcagggagccgggggacgcctcagtagggcctgggagctgagggacgtcagcccagcacc

SEQ ID NO: 10377 - DNA, 37 bp, Homo sapiens
  chr2:220092639-220092676
  hypo
tcacacttgctcccctcggcgacgtgcaccaacaggt

SEQ ID NO: 10378 - DNA, 66 bp, Homo sapiens
  chr2:220092701-220092767
  hypo
ataggaggcctctaggcgctggtattcagtgtcaaactgcgccatcaccaccgccccctgtccacc

SEQ ID NO: 10379 - DNA, 57 bp, Homo sapiens
  chr2:220150959-220151016
  hypo
catttctgatagatcccgcttgggggaggtggtgtatggttacggagctgtgcatct

SEQ ID NO: 10380 - DNA, 40 bp, Homo sapiens
  chr2:220337589-220337629
  hypo
ctagtagctcctctcccgccagacccggactccctgacgt

SEQ ID NO: 10381 - DNA, 31 bp, Homo sapiens; identical to SEQ ID NO: 1313
  chr2:220408153-220408184
  hypo

SEQ ID NO: 10382 - DNA, 31 bp, Homo sapiens; identical to SEQ ID NO: 1314
  chr2:220408748-220408779
  hypo

SEQ ID NO: 10383 - DNA, 58 bp, Homo sapiens
  chr2:220431757-220431815
  hypo
atgatggtggagagatcgagggagaagacggcatcttccccgtcgtatacctgcacat

SEQ ID NO: 10384 - DNA, 43 bp, Homo sapiens; identical to SEQ ID NO: 1315
  chr2:220492469-220492512
  hypo

SEQ ID NO: 10385 - DNA, 31 bp, Homo sapiens
  chr2:220497988-220498019
  hypo
cttccagccatcccaacgatgacaaggacag

SEQ ID NO: 10386 - DNA, 35 bp, Homo sapiens
  chr2:220499162-220499197
  hypo
agcctgcagcagccttcgtgcgtctgaatgaggct

SEQ ID NO: 10387 - DNA, 35 bp, Homo sapiens
  chr2:220508876-220508911
  hypo
ctatggcaagggagggcggccgtagtttaggaagg

SEQ ID NO: 10388 - DNA, 94 bp, Homo sapiens; identical to SEQ ID NO: 1316
  chr2:222437144-222437238
  hypo

SEQ ID NO: 10389 - DNA, 41 bp, Homo sapiens; identical to SEQ ID NO: 1317
  chr2:222437313-222437354
  hypo

SEQ ID NO: 10390 - DNA, 7 bp, Homo sapiens
  chr2:223562590-223562597
  hypo
cagaatc

SEQ ID NO: 10391 - DNA, 31 bp, Homo sapiens
  chr2:223562617-223562648
  hypo
cagatgggtaatgtgccgatgttgtaacaag

SEQ ID NO: 10392 - DNA, 72 bp, Homo sapiens
  chr2:223562662-223562734
  hypo
acatttcacatgtgcccgtgagcacccaatcttcacgctcatgaactacagaaggaccgaattatcagactc

SEQ ID NO: 10393 - DNA, 31 bp, Homo sapiens
  chr2:223628807-223628838
  hypo
ggttctctgctaaactcggtaattttaacta

SEQ ID NO: 10394 - DNA, 56 bp, Homo sapiens
  chr2:223753472-223753528
  hypo
agtgtatctttccagacgctttgtttgcgacgctttgtttgcgtatccaagattgc

SEQ ID NO: 10395 - DNA, 31 bp, Homo sapiens
  chr2:223753572-223753603
  hypo
gtccactttaatagtacgcctcactttgttt

SEQ ID NO: 10396 - DNA, 31 bp, Homo sapiens
  chr2:223753605-223753636
  hypo
gacatgtctgtgcctgcgtctctttgaggga

SEQ ID NO: 10397 - DNA, 95 bp, Homo sapiens; identical to SEQ ID NO: 1322
  chr2:224809097-224809192
  hypo

SEQ ID NO: 10398 - DNA, 31 bp, Homo sapiens
  chr2:224900728-224900759
  hypo
ttcgctaacaatgaagcggatatggggtggg

SEQ ID NO: 10399 - DNA, 31 bp, Homo sapiens
  chr2:225233497-225233528
  hypo
gggctcagaaaactcacgagaactgtggcag

SEQ ID NO: 10400 - DNA, 31 bp, Homo sapiens; identical to SEQ ID NO: 1323
  chr2:225381703-225381734
  hypo

SEQ ID NO: 10401 - DNA, 31 bp, Homo sapiens
  chr2:225482440-225482471
  hypo
ttgtggggcacatgaccgtacttaaatctgg

SEQ ID NO: 10402 - DNA, 31 bp, Homo sapiens; identical to SEQ ID NO: 1325
  chr2:225906403-225906434
  hypo

SEQ ID NO: 10403 - DNA, 101 bp, Homo sapiens; identical to SEQ ID NO: 1326
  chr2:225906438-225906539
  hypo

SEQ ID NO: 10404 - DNA, 42 bp, Homo sapiens; identical to SEQ ID NO: 1327
  chr2:225906542-225906584
  hypo

SEQ ID NO: 10405 - DNA, 94 bp, Homo sapiens; identical to SEQ ID NO: 1328
  chr2:225906594-225906688
  hypo

SEQ ID NO: 10406 - DNA, 87 bp, Homo sapiens; identical to SEQ ID NO: 1329
  chr2:225906691-225906778
  hypo

SEQ ID NO: 10407 - DNA, 458 bp, Homo sapiens; identical to SEQ ID NO: 1330
  chr2:225906790-225907248
  hypo

SEQ ID NO: 10408 - DNA, 85 bp, Homo sapiens; identical to SEQ ID NO: 1331
  chr2:225907276-225907361
  hypo

SEQ ID NO: 10409 - DNA, 94 bp, Homo sapiens; identical to SEQ ID NO: 1332
  chr2:225907439-225907533
  hypo

SEQ ID NO: 10410 - DNA, 31 bp, Homo sapiens
  chr2:226907862-226907893
  hypo
tcttagaaattaaatacggccgggcatggtg

SEQ ID NO: 10411 - DNA, 11 bp, Homo sapiens
  chr2:230788583-230788594
  hypo
ttttgagacgg

SEQ ID NO: 10412 - DNA, 37 bp, Homo sapiens
  chr2:231492422-231492459
  hypo
tgttatagtctcccatcgtaaaaacaccttccggccg

SEQ ID NO: 10413 - DNA, 78 bp, Homo sapiens
  chr2:231676878-231676956
  hypo
ggctgctcaaaagaaacgtagcctttcctagcactgggacctgaaaccggtttctctccttggcgttcttaaaggaga

SEQ ID NO: 10414 - DNA, 31 bp, Homo sapiens
  chr2:231676976-231677007
  hypo
agtggacagtcattgccgtggcattgcagta

SEQ ID NO: 10415 - DNA, 31 bp, Homo sapiens
  chr2:231677008-231677039
  hypo
ataaaatgctcaactccgatgcagttccctg

SEQ ID NO: 10416 - DNA, 31 bp, Homo sapiens
  chr2:231690698-231690729
  hypo
caggcgtgagccaccacgcccagcctaaagt

SEQ ID NO: 10417 - DNA, 100 bp, Homo sapiens; identical to SEQ ID NO: 1336
  chr2:231902439-231902539
  hypo

SEQ ID NO: 10418 - DNA, 24 bp, Homo sapiens
  chr2:231919624-231919648
  hypo
tttttttctttttagacggagtct

SEQ ID NO: 10419 - DNA, 15 bp, Homo sapiens
  chr2:231965553-231965568
  hypo
cgaacttggaaatcc

SEQ ID NO: 10420 - DNA, 31 bp, Homo sapiens
  chr2:231965580-231965611
  hypo
aatgacttactgactgcgcagtttcttcacc

SEQ ID NO: 10421 - DNA, 31 bp, Homo sapiens
  chr2:232054070-232054101
  hypo
gacggctgggcactgacgggccagggagcag

SEQ ID NO: 10422 - DNA, 31 bp, Homo sapiens
  chr2:232131874-232131905
  hypo
cctgggaaacacagagcgtctggcggaattg

SEQ ID NO: 10423 - DNA, 6 bp, Homo sapiens
  chr2:232223173-232223179
  hypo
aaagtg

SEQ ID NO: 10424 - DNA, 31 bp, Homo sapiens
  chr2:232223242-232223273
  hypo
tcctggccccaggcagcgctccccacaggtc

SEQ ID NO: 10425 - DNA, 78 bp, Homo sapiens
  chr2:232247494-232247572
  hypo
cttcctgccagccacccgctcgtatacccagggctcccgttaaccttccagccctgactcctgcgggatgacagccca

SEQ ID NO: 10426 - DNA, 34 bp, Homo sapiens
  chr2:232247586-232247620
  hypo
caggggttccacccagcgacgagagggtctaagc

SEQ ID NO: 10427 - DNA, 31 bp, Homo sapiens
  chr2:232390143-232390174
  hypo
gacagagaagggaggccgagtgcccgcccga

SEQ ID NO: 10428 - DNA, 79 bp, Homo sapiens
  chr2:232458616-232458695
  hypo
gacctgctgcacagctcggggcccagcttgcgctcggtccccagcctggtgggaagcgtcagctcggccttctcctctg

SEQ ID NO: 10429 - DNA, 31 bp, Homo sapiens
  chr2:232472539-232472570
  hypo
ttcactcaatgactggcgagcagtggcatcc

SEQ ID NO: 10430 - DNA, 53 bp, Homo sapiens; identical to SEQ ID NO: 1338
  chr2:232479319-232479372
  hypo

SEQ ID NO: 10431 - DNA, 40 bp, Homo sapiens
  chr2:232485650-232485690
  hypo
tcgttgttcctcatagcggcatctccgcagtatggatgga

SEQ ID NO: 10432 - DNA, 52 bp, Homo sapiens; identical to SEQ ID NO: 1339
  chr2:232526937-232526989
  hypo

SEQ ID NO: 10433 - DNA, 31 bp, Homo sapiens
  chr2:232528195-232528226
  hypo
acctgttggtgaggctcggggggcagaagac

SEQ ID NO: 10434 - DNA, 42 bp, Homo sapiens
  chr2:232557730-232557772
  hypo
ggtgcctcttgccctgcgttctatgcccgcaccaggcctgcc

SEQ ID NO: 10435 - DNA, 98 bp, Homo sapiens
  chr2:233198523-233198621
  hypo
aggctctgacccatcccgtcccgcagatggcactgtacttctgctcggggctgctgcaggacccagcgcagttccggcactacgcgctcaatgtgccc

SEQ ID NO: 10436 - DNA, 51 bp, Homo sapiens
  chr2:233198675-233198726
  hypo
cgcctcctggctgccgcgttaggtgaggggtgcagtcggggtcagggcaga

SEQ ID NO: 10437 - DNA, 31 bp, Homo sapiens
  chr2:233217697-233217728
  hypo
agaaggcctgggcctgcgagtgcggccccca

SEQ ID NO: 10438 - DNA, 31 bp, Homo sapiens
  chr2:233321555-233321586
  hypo
ttggggtctgggtgtccgccccgaagtagag

SEQ ID NO: 10439 - DNA, 46 bp, Homo sapiens
  chr2:233355392-233355438
  hypo
gggggtggaggaaggccggagccgccgtggccgccacagccgccac

SEQ ID NO: 10440 - DNA, 31 bp, Homo sapiens
  chr2:233357812-233357843
  hypo
cccccagtgcccagcccggagcctggcacgt

SEQ ID NO: 10441 - DNA, 31 bp, Homo sapiens
  chr2:233389941-233389972
  hypo
gctccaagacactgaccgggcttttcagagc

SEQ ID NO: 10442 - DNA, 31 bp, Homo sapiens
  chr2:233394636-233394667
  hypo
tgccgccctcagagaacggggagtgggagat

SEQ ID NO: 10443 - DNA, 21 bp, Homo sapiens
  chr2:233440624-233440645
  hypo
ggggtgctttgctgggcgcag

SEQ ID NO: 10444 - DNA, 31 bp, Homo sapiens
  chr2:233466816-233466847
  hypo
ttacaggcatgagctccggcacccagcctgc

SEQ ID NO: 10445 - DNA, 62 bp, Homo sapiens
  chr2:233540160-233540222
  hypo
aggtcaggccttcccccgactgctgagtgttagaaccacctgcacaccggcttcccaggccc

SEQ ID NO: 10446 - DNA, 61 bp, Homo sapiens
  chr2:233540249-233540310
  hypo
ggtgggtttcaggaaacgtgtagtcgatggagctgtgacatgattccgatgcacagccgca

SEQ ID NO: 10447 - DNA, 49 bp, Homo sapiens
  chr2:233714269-233714318
  hypo
ggaagcccagtaagcacgtgcacccatgggcgcacgcatacacacatgc

SEQ ID NO: 10448 - DNA, 61 bp, Homo sapiens
  chr2:233753187-233753248
  hypo
cacacacatgtacacacgtgtacaaacatgcatacaagcatgtgtgcgcacacatacatgc

SEQ ID NO: 10449 - DNA, 39 bp, Homo sapiens
  chr2:233753263-233753302
  hypo
tacctgcacacacacacgcatgcacgcacacacatacac

SEQ ID NO: 10450 - DNA, 31 bp, Homo sapiens
  chr2:233753322-233753353
  hypo
ggagagcaagagagcccgcaggtgtggcacc

SEQ ID NO: 10451 - DNA, 31 bp, Homo sapiens
  chr2:233753917-233753948
  hypo
aacagcacggtttagacgccatcttttctca

SEQ ID NO: 10452 - DNA, 57 bp, Homo sapiens
  chr2:233754009-233754066
  hypo
gttccttagcctggcacgtgctctcccacgccagcctccactcggtgtgtccccagc

SEQ ID NO: 10453 - DNA, 31 bp, Homo sapiens
  chr2:233754074-233754105
  hypo
tgatgtggagacttgccgttctctctggaat

SEQ ID NO: 10454 - DNA, 31 bp, Homo sapiens
  chr2:233764978-233765009
  hypo
cacattcacacacacacgctctcagtcactc

SEQ ID NO: 10455 - DNA, 23 bp, Homo sapiens
  chr2:233813713-233813736
  hypo
caagactgcgtctcaaaaaaacc

SEQ ID NO: 10456 - DNA, 40 bp, Homo sapiens
  chr2:233845596-233845636
  hypo
ggagaagctgcctgggcgagagcagcggcccttgctttgg

SEQ ID NO: 10457 - DNA, 31 bp, Homo sapiens
  chr2:233845647-233845678
  hypo
gcacatggagtgcctgcgcaggtcagaggca

SEQ ID NO: 10458 - DNA, 37 bp, Homo sapiens
  chr2:233845731-233845768
  hypo
gagccctgccatctctcgctatcgtcttctgcctctc

SEQ ID NO: 10459 - DNA, 31 bp, Homo sapiens
  chr2:233888472-233888503
  hypo
ttcctctgggaaaagccgcccaggccaccac

SEQ ID NO: 10460 - DNA, 31 bp, Homo sapiens
  chr2:233945669-233945700
  hypo
gcagaaccactccctgcgtagttaggctggc

SEQ ID NO: 10461 - DNA, 37 bp, Homo sapiens
  chr2:233986805-233986842
  hypo
tctgtcctcaggcatccgaaggcgtctccatgaggtt

SEQ ID NO: 10462 - DNA, 31 bp, Homo sapiens
  chr2:234093874-234093905
  hypo
agaaatcaggaagaagcgtgtgctgccagtt

SEQ ID NO: 10463 - DNA, 31 bp, Homo sapiens
  chr2:234093949-234093980
  hypo
aggcctggtgctagagcggcctttgtcactg

SEQ ID NO: 10464 - DNA, 60 bp, Homo sapiens
  chr2:234094000-234094060
  hypo
cccagcagggtcaaagcggttcgaaaaatgatgaggatttttgtgcgggtgtttttaata

SEQ ID NO: 10465 - DNA, 127 bp, Homo sapiens
  chr2:234369774-234369901
  hypo
attcctgctcctcgcccgccaggtgcgggttccgcctgtgagtccctcccagccggcagctgtgctgctccgccggtgcggggcctgcctgcattctccccccgtggccgcacgctggctggtgccc

SEQ ID NO: 10466 - DNA, 54 bp, Homo sapiens
  chr2:234369945-234369999
  hypo
tgtggacaggtgcacccgtcggttttgtgcccggcatgccgtgtgcccttccag

SEQ ID NO: 10467 - DNA, 82 bp, Homo sapiens
  chr2:234370002-234370084
  hypo
gcctgcccagccctggcgtgcagatggatcgtctgtgccagccttcggctcttgtcgagcaggtggtcgctgtcccagtcat

SEQ ID NO: 10468 - DNA, 31 bp, Homo sapiens
  chr2:234724687-234724718
  hypo
tgacatacttaaattccgtattttaaatcct

SEQ ID NO: 10469 - DNA, 79 bp, Homo sapiens
  chr2:234737330-234737409
  hypo
tgctggagaagggtgccgaccaggaggaagacgaggccctgcgggtgctgtccctgcgcgccctcggcaacatggccct

SEQ ID NO: 10470 - DNA, 59 bp, Homo sapiens
  chr2:235005078-235005137
  hypo
catgcccgcacgcacccgttcgtacagacatgcgcgcacgcacccgtttgtacacacat

SEQ ID NO: 10471 - DNA, 46 bp, Homo sapiens
  chr2:235460457-235460503
  hypo
tgttggtttatagcatcgaatgaacaaaaatcggggtataaaggag

SEQ ID NO: 10472 - DNA, 31 bp, Homo sapiens
  chr2:235517160-235517191
  hypo
agcaaagactgcacctcgttaagctgcgggt

SEQ ID NO: 10473 - DNA, 31 bp, Homo sapiens
  chr2:235637559-235637590
  hypo
gaagaaagaagttggccgggggcggtggctc

SEQ ID NO: 10474 - DNA, 31 bp, Homo sapiens
  chr2:235809203-235809234
  hypo
accttacctgggtttacgctaatgaaatgac

SEQ ID NO: 10475 - DNA, 31 bp, Homo sapiens
  chr2:235809246-235809277
  hypo
taaatagcttcaagaccggaggaaccaccca

SEQ ID NO: 10476 - DNA, 31 bp, Homo sapiens
  chr2:235815938-235815969
  hypo
actttcgggttgggtgcggtggctcatgcct

SEQ ID NO: 10477 - DNA, 31 bp, Homo sapiens
  chr2:235823641-235823672
  hypo
aggagaggcatggctgcgggactgcacaggc

SEQ ID NO: 10478 - DNA, 134 bp, Homo sapiens; identical to SEQ ID NO: 1343
  chr2:235860416-235860550
  hypo

SEQ ID NO: 10479 - DNA, 130 bp, Homo sapiens; identical to SEQ ID NO: 1344
  chr2:235860594-235860724
  hypo

SEQ ID NO: 10480 - DNA, 31 bp, Homo sapiens
  chr2:235868187-235868218
  hypo
gtccagtggccatccccgtagttctgtgcaa

SEQ ID NO: 10481 - DNA, 29 bp, Homo sapiens
  chr2:235870196-235870225
  hypo
tgagccactgcgcccggcctccatgttgg

SEQ ID NO: 10482 - DNA, 31 bp, Homo sapiens
  chr2:235893743-235893774
  hypo
tggtgtgctgggatagcggagcacctgcaga

SEQ ID NO: 10483 - DNA, 56 bp, Homo sapiens
  chr2:235894217-235894273
  hypo
ggcattttgactctccgcgcacaggtatttttgaccctctgcgcacagatattttt

SEQ ID NO: 10484 - DNA, 31 bp, Homo sapiens
  chr2:235901828-235901859
  hypo
ggtttctcgaagcccccgtcagagctgatgt

SEQ ID NO: 10485 - DNA, 31 bp, Homo sapiens
  chr2:235903729-235903760
  hypo
ccggtgaaggtccttccgctggccactctcc

SEQ ID NO: 10486 - DNA, 31 bp, Homo sapiens
  chr2:235904049-235904080
  hypo
ttgccatacctggacccgctttaccatgtca

SEQ ID NO: 10487 - DNA, 41 bp, Homo sapiens
  chr2:235922809-235922850
  hypo
tagaggtgtaattacccgttgcctgccgacatcagcctgat

SEQ ID NO: 10488 - DNA, 51 bp, Homo sapiens
  chr2:235922851-235922902
  hypo
cttcaggaatgtttggcgagcaggatcgggcgatgccggatactttgggct

SEQ ID NO: 10489 - DNA, 69 bp, Homo sapiens
  chr2:235922905-235922974
  hypo
aggaaagtccactcagcgagcgtggaggctggccgagttttgtggtggaggcctcgtccctctttttgg

SEQ ID NO: 10490 - DNA, 64 bp, Homo sapiens
  chr2:235931226-235931290
  hypo
attgaaatgttgaaagcgggtgaatcgagacattgacggcccatcccctcgttgtcagataagc

SEQ ID NO: 10491 - DNA, 54 bp, Homo sapiens
  chr2:235941052-235941106
  hypo
cattttctttctgcatcgattctcttcagtaaatgatcccgcatttttgtatgg

SEQ ID NO: 10492 - DNA, 61 bp, Homo sapiens
  chr2:235941181-235941242
  hypo
tggcctccaagcagcccgggggcttgcacacgtggcccttgcatttcggggctgccgggct

SEQ ID NO: 10493 - DNA, 64 bp, Homo sapiens
  chr2:235941253-235941317
  hypo
gtagggtggtctctcacgtggcggcaagaccccttcatccagctctacacgcaggctgtgcatt

SEQ ID NO: 10494 - DNA, 31 bp, Homo sapiens
  chr2:235941334-235941365
  hypo
tgcttctggtagggggcgagggtgctgtgcc

SEQ ID NO: 10495 - DNA, 31 bp, Homo sapiens
  chr2:235950746-235950777
  hypo
tggagccctgtatgtacgtggctgtcgtggc

SEQ ID NO: 10496 - DNA, 31 bp, Homo sapiens
  chr2:235951107-235951138
  hypo
gctgggcaaggtgagccgcctgatcttcccc

SEQ ID NO: 10497 - DNA, 31 bp, Homo sapiens
  chr2:235951347-235951378
  hypo
cccgactttccaggaccgcccggtgtccagc

SEQ ID NO: 10498 - DNA, 31 bp, Homo sapiens
  chr2:235960995-235961026
  hypo
actggtgaacctggcacgctctgcacatcat

SEQ ID NO: 10499 - DNA, 31 bp, Homo sapiens
  chr2:235970776-235970807
  hypo
gaacggctttgctgtacgtggggagaggagg

SEQ ID NO: 10500 - DNA, 31 bp, Homo sapiens
  chr2:236008617-236008648
  hypo
ggtcaaagaacatggccgtgccaggctaacg

SEQ ID NO: 10501 - DNA, 58 bp, Homo sapiens
  chr2:236015359-236015417
  hypo
cccatgccctataaaacgcattcttgtcttgcgcttctgttggcgggtggtcctcact

SEQ ID NO: 10502 - DNA, 31 bp, Homo sapiens
  chr2:236015447-236015478
  hypo
ggccccatttgcctggcgcttccttggatca

SEQ ID NO: 10503 - DNA, 31 bp, Homo sapiens
  chr2:236015515-236015546
  hypo
aaccaaatccagccctcgccctaaaagcagc

SEQ ID NO: 10504 - DNA, 60 bp, Homo sapiens
  chr2:236024874-236024934
  hypo
tcagtccccttccacccgcacacccccacctgatgctgctgtcatcgtgcctcatctggc

SEQ ID NO: 10505 - DNA, 31 bp, Homo sapiens
  chr2:236024962-236024993
  hypo
aaggtcatccataatgcgaagccacctctcc

SEQ ID NO: 10506 - DNA, 43 bp, Homo sapiens
  chr2:236025031-236025074
  hypo
tctgcctctctcaccccgtggtccttcccgatgctcccatcct

SEQ ID NO: 10507 - DNA, 107 bp, Homo sapiens; identical to SEQ ID NO: 1347
  chr2:236402571-236402678
  hypo

SEQ ID NO: 10508 - DNA, 21 bp, Homo sapiens
  chr2:236412780-236412801
  hypo
cagcctcgaactctctttttt

SEQ ID NO: 10509 - DNA, 31 bp, Homo sapiens
  chr2:236426084-236426115
  hypo
acatagctgtgcccaacgtagatctttatgg

SEQ ID NO: 10510 - DNA, 31 bp, Homo sapiens
  chr2:236456628-236456659
  hypo
gagaatgcaggtatagcggtgacagctacaa

SEQ ID NO: 10511 - DNA, 31 bp, Homo sapiens
  chr2:236456704-236456735
  hypo
gtttctgccccagggtcgtgagaaatagctg

SEQ ID NO: 10512 - DNA, 31 bp, Homo sapiens
  chr2:236459168-236459199
  hypo
ccccaccccacacctgcgactccagactcag

SEQ ID NO: 10513 - DNA, 76 bp, Homo sapiens
  chr2:236459203-236459279
  hypo
gatgagggtctgcaggcgtcggtctgggagccacagacaggtgtgtttgccgcagaggtgccgagggcccagcagg

SEQ ID NO: 10514 - DNA, 71 bp, Homo sapiens
  chr2:236459299-236459370
  hypo
ccatccacacctgaggcgtggggatctccgggcatgatgcggaatgtagtgacgatcgcaaatccttcctg

SEQ ID NO: 10515 - DNA, 31 bp, Homo sapiens
  chr2:236466162-236466193
  hypo
aatggaaaatgagaaacgatgatgtcagtga

SEQ ID NO: 10516 - DNA, 31 bp, Homo sapiens
  chr2:236467580-236467611
  hypo
tttttagatagggtctcgctgtgtgtcctag

SEQ ID NO: 10517 - DNA, 31 bp, Homo sapiens
  chr2:236511015-236511046
  hypo
tatctactccctggcccgtggcagtggaact

SEQ ID NO: 10518 - DNA, 53 bp, Homo sapiens
  chr2:236541633-236541686
  hypo
ttccaaaccagaagcccgtggtgcagcctctgaacccccgactcttggtgggc

SEQ ID NO: 10519 - DNA, 31 bp, Homo sapiens
  chr2:236541701-236541732
  hypo
ttgcttgaacttctagcggcagaaagggggt

SEQ ID NO: 10520 - DNA, 31 bp, Homo sapiens
  chr2:236541778-236541809
  hypo
acaaaagacaggttaacgagagaaaagcatt

SEQ ID NO: 10521 - DNA, 79 bp, Homo sapiens
  chr2:236541818-236541897
  hypo
cttgatcctggttttacggcatgcgggagcctacggaatgaagacccgaagattcaggggaggtcgtctgtgtgccttg

SEQ ID NO: 10522 - DNA, 19 bp, Homo sapiens
  chr2:236541937-236541956
  hypo
acaaatagggcatgagcgg

SEQ ID NO: 10523 - DNA, 31 bp, Homo sapiens
  chr2:236544007-236544038
  hypo
tctccttttctctgcccgtaggattgacttt

SEQ ID NO: 10524 - DNA, 54 bp, Homo sapiens
  chr2:236553451-236553505
  hypo
tatggtgtgtcagcttcgctgtctttcaaggatgacttgcgtagattgcattta

SEQ ID NO: 10525 - DNA, 24 bp, Homo sapiens
  chr2:236555500-236555524
  hypo
cgcgtgcggtggctcacgcctgta

SEQ ID NO: 10526 - DNA, 22 bp, Homo sapiens
  chr2:236566309-236566331
  hypo
gccaccgcgcccagcccagtgg

SEQ ID NO: 10527 - DNA, 31 bp, Homo sapiens
  chr2:236571424-236571455
  hypo
cctcatccccttgctccgctgcaagaacccc

SEQ ID NO: 10528 - DNA, 31 bp, Homo sapiens
  chr2:236571482-236571513
  hypo
gctgactggtgcatggcgagcagaggtttta

SEQ ID NO: 10529 - DNA, 37 bp, Homo sapiens
  chr2:236571525-236571562
  hypo
gtgtcagatgtgattccggggacgcagttctttctta

SEQ ID NO: 10530 - DNA, 31 bp, Homo sapiens
  chr2:236571588-236571619
  hypo
gagggcaggtagctgccgctcccagcagccc

SEQ ID NO: 10531 - DNA, 31 bp, Homo sapiens
  chr2:236602264-236602295
  hypo
tgcggcgggaggatcacgagctcaggagttc

SEQ ID NO: 10532 - DNA, 31 bp, Homo sapiens
  chr2:236602309-236602340
  hypo
caacatagtgaggcctcgtctccaaaaaacc

SEQ ID NO: 10533 - DNA, 31 bp, Homo sapiens
  chr2:236603368-236603399
  hypo
tctcctgggcacctttcggggcaagtcctgc

SEQ ID NO: 10534 - DNA, 31 bp, Homo sapiens
  chr2:236603462-236603493
  hypo
tgattaggaagcaaacgcgtctcagacttgg

SEQ ID NO: 10535 - DNA, 40 bp, Homo sapiens
  chr2:236603526-236603566
  hypo
gatgcatggggggttccggcttcttcgcagtttcacctgg

SEQ ID NO: 10536 - DNA, 31 bp, Homo sapiens
  chr2:236605764-236605795
  hypo
gccagctttaggtctgcgtggaaagggtgtt

SEQ ID NO: 10537 - DNA, 23 bp, Homo sapiens
  chr2:236612997-236613020
  hypo
aatgctgatttgaggccgggcgt

SEQ ID NO: 10538 - DNA, 57 bp, Homo sapiens
  chr2:236613259-236613316
  hypo
agcctggcaacagagcgagactccgtctcaaaaaagaaatgccgatttgaaggttct

SEQ ID NO: 10539 - DNA, 31 bp, Homo sapiens
  chr2:236615816-236615847
  hypo
agtgcagggagaagtccgcctcccaggcatc

SEQ ID NO: 10540 - DNA, 110 bp, Homo sapiens
  chr2:236616174-236616284
  hypo
gtgggttgtgctcccccggcgtgtgacctggtgggacgtgctccccagcgtgtgacatggtgggttgtgctcccccggcgtgtgacttggtgggacgtgctccccagcat

SEQ ID NO: 10541 - DNA, 70 bp, Homo sapiens
  chr2:236619769-236619839
  hypo
ctgcactgcccagtgccgtcacggctggcgccatgtggctgttgagtgattgaaacgtggccagtcagtg

SEQ ID NO: 10542 - DNA, 31 bp, Homo sapiens
  chr2:236619890-236619921
  hypo
agccacacagggccagcggccaccctactgc

SEQ ID NO: 10543 - DNA, 31 bp, Homo sapiens
  chr2:236619926-236619957
  hypo
ttacagactaactgatcgtcaagtattgaac

SEQ ID NO: 10544 - DNA, 31 bp, Homo sapiens
  chr2:236621491-236621522
  hypo
cgctccgacagcttcacgggtggcgtgacac

SEQ ID NO: 10545 - DNA, 31 bp, Homo sapiens
  chr2:236622524-236622555
  hypo
tcacgtggaggaagacgcgagaggtctttct

SEQ ID NO: 10546 - DNA, 61 bp, Homo sapiens
  chr2:236624441-236624502
  hypo
ggtgcccaggagggagcggactccctgacttccagccactgggagtcggggatggcctcca

SEQ ID NO: 10547 - DNA, 60 bp, Homo sapiens
  chr2:236624570-236624630
  hypo
caaggtgtggacccatcgaggcgtgaataccgcataggtggcgtacggatgtatataaag

SEQ ID NO: 10548 - DNA, 56 bp, Homo sapiens
  chr2:236637397-236637453
  hypo
tacattgaaatgaaagcgtgcctagtggagcaagagcggggcggggaggaggggaa

SEQ ID NO: 10549 - DNA, 31 bp, Homo sapiens
  chr2:236637521-236637552
  hypo
aggtttggagcctggacgagagcaggggttg

SEQ ID NO: 10550 - DNA, 31 bp, Homo sapiens
  chr2:236637559-236637590
  hypo
atggtcaaaacccaggcgtgatgtgaccaca

SEQ ID NO: 10551 - DNA, 31 bp, Homo sapiens
  chr2:236644830-236644861
  hypo
ccctgggggtgcccgccgttgggaggtgctg

SEQ ID NO: 10552 - DNA, 31 bp, Homo sapiens
  chr2:236646339-236646370
  hypo
cgtcacggtcattccacgagagctgggtggt

SEQ ID NO: 10553 - DNA, 31 bp, Homo sapiens
  chr2:236647744-236647775
  hypo
tcaacttattactcctcgcctgctaggacat

SEQ ID NO: 10554 - DNA, 31 bp, Homo sapiens
  chr2:236647793-236647824
  hypo
ggacactgagatggggcgaggtggggcaaga

SEQ ID NO: 10555 - DNA, 31 bp, Homo sapiens
  chr2:236648899-236648930
  hypo
ccaggcccctcatgcccgcaccccctcctca

SEQ ID NO: 10556 - DNA, 104 bp, Homo sapiens
  chr2:236648940-236649044
  hypo
tgttcctgcagggtcccggtggtctcccgctaaccccgcgtggtctctaacgcctcctgtcagccgctgctctgctgtctccacccgtgcggaggtcccatcca

SEQ ID NO: 10557 - DNA, 31 bp, Homo sapiens
  chr2:236652842-236652873
  hypo
agtaggccagccgctgcggtagcgagtggga

SEQ ID NO: 10558 - DNA, 31 bp, Homo sapiens
  chr2:236660556-236660587
  hypo
ctcctgctgcctctgtcgggagaatgtcctg

SEQ ID NO: 10559 - DNA, 31 bp, Homo sapiens
  chr2:236660595-236660626
  hypo
aaacctcatttcaagccgtgctggtgaacat

SEQ ID NO: 10560 - DNA, 100 bp, Homo sapiens
  chr2:236660701-236660801
  hypo
ggagcaaggtcactgtcggccgctgcgctgccgaggcccctgtgaatgttgaagtaaagcgtcgtagatgaagggtccccaggcccgtgcatgaggccag

SEQ ID NO: 10561 - DNA, 31 bp, Homo sapiens
  chr2:236664671-236664702
  hypo
ccctttgagcattacacgtgcaccttgggag

SEQ ID NO: 10562 - DNA, 26 bp, Homo sapiens
  chr2:236669005-236669031
  hypo
gagcgagactccgtctcaaaaaacaa

SEQ ID NO: 10563 - DNA, 31 bp, Homo sapiens
  chr2:236669055-236669086
  hypo
tgtgtaagatagaattcgttatgaagctaca

SEQ ID NO: 10564 - DNA, 37 bp, Homo sapiens
  chr2:236675950-236675987
  hypo
ttggccaggcacctcacgttagcgtctgcagccttga

SEQ ID NO: 10565 - DNA, 31 bp, Homo sapiens
  chr2:236680141-236680172
  hypo
tcaactggagacatgccggtctctgccctgt

SEQ ID NO: 10566 - DNA, 31 bp, Homo sapiens
  chr2:236697236-236697267
  hypo
gagggtccatcggtgtcgtcagtgcacatcc

SEQ ID NO: 10567 - DNA, 31 bp, Homo sapiens
  chr2:236717069-236717100
  hypo
ttgaagcaaataggaacgcagccttagagag

SEQ ID NO: 10568 - DNA, 31 bp, Homo sapiens
  chr2:236719835-236719866
  hypo
cagatacacagtcatacgccttggcctcctc

SEQ ID NO: 10569 - DNA, 31 bp, Homo sapiens
  chr2:236721555-236721586
  hypo
ttacagagtgaactgccgtgccctgcaagct

SEQ ID NO: 10570 - DNA, 31 bp, Homo sapiens
  chr2:236722174-236722205
  hypo
cacttcttcggtgtcccgcagctcagacccc

SEQ ID NO: 10571 - DNA, 90 bp, Homo sapiens
  chr2:236722552-236722642
  hypo
ttaccctggagtcgggccactcagtggccggactctcctcctaccgcccccgggtgaattccacgtcacccacatcgttctgccattggt

SEQ ID NO: 10572 - DNA, 31 bp, Homo sapiens
  chr2:236722684-236722715
  hypo
tctctcgacgcccagccgcctgtgtgtgtgc

SEQ ID NO: 10573 - DNA, 31 bp, Homo sapiens
  chr2:236723849-236723880
  hypo
aatcctgcagcctgggcggcttaaacagcac

SEQ ID NO: 10574 - DNA, 60 bp, Homo sapiens
  chr2:236727032-236727092
  hypo
tgttgcatccccttcccgccccatgccatctgtgctcaccatgaccgtcttttttttgtt

SEQ ID NO: 10575 - DNA, 20 bp, Homo sapiens
  chr2:236730154-236730174
  hypo
gtagccgggactacagggaa

SEQ ID NO: 10576 - DNA, 42 bp, Homo sapiens
  chr2:236733469-236733511
  hypo
tacccatcaaggtaaccggtgcattcacgggtttggataatt

SEQ ID NO: 10577 - DNA, 41 bp, Homo sapiens
  chr2:236733527-236733568
  hypo
atgtttttatgtctcacgtttacaggcgcttttctgatttt

SEQ ID NO: 10578 - DNA, 31 bp, Homo sapiens
  chr2:236738718-236738749
  hypo
ggctggctgatggagtcgttctcatttgtga

SEQ ID NO: 10579 - DNA, 38 bp, Homo sapiens
  chr2:236738778-236738816
  hypo
gccaaggcaaggccaccgtgatccgagactgggaggcc

SEQ ID NO: 10580 - DNA, 31 bp, Homo sapiens
  chr2:236738827-236738858
  hypo
cagacaaggtaggagtcggctctgtgtgact

SEQ ID NO: 10581 - DNA, 31 bp, Homo sapiens
  chr2:236738876-236738907
  hypo
gccaggctacagtcaccgtttgagtgcccgt

SEQ ID NO: 10582 - DNA, 31 bp, Homo sapiens
  chr2:236739766-236739797
  hypo
gttagggaatcacattcgagactttaactag

SEQ ID NO: 10583 - DNA, 59 bp, Homo sapiens
  chr2:236739837-236739896
  hypo
aaaaaaaaacagtaaacgttcttttttagagcagttttaggtcacggcaaagttgagca

SEQ ID NO: 10584 - DNA, 60 bp, Homo sapiens
  chr2:236739899-236739959
  hypo
ggacacccacagcctccgccattgtcccccacagtctgttgcagccgatgagcctgcact

SEQ ID NO: 10585 - DNA, 31 bp, Homo sapiens
  chr2:236741688-236741719
  hypo
aagacctggagggggccggtgagccagggag

SEQ ID NO: 10586 - DNA, 31 bp, Homo sapiens
  chr2:236741722-236741753
  hypo
ggtagaagagacaagccggagagcagctggc

SEQ ID NO: 10587 - DNA, 31 bp, Homo sapiens
  chr2:236741760-236741791
  hypo
gggcactggcaggacccgagggtgcaggcag

SEQ ID NO: 10588 - DNA, 31 bp, Homo sapiens
  chr2:236741800-236741831
  hypo
tgttgggtgctgcaggcgctctccattggag

SEQ ID NO: 10589 - DNA, 45 bp, Homo sapiens
  chr2:236741832-236741877
  hypo
agtgctgtggaagcaccgtcggcctgccgccgtgctgagtgatgc

SEQ ID NO: 10590 - DNA, 31 bp, Homo sapiens
  chr2:236743374-236743405
  hypo
caagagcgagagtctccgaagttagacaggc

SEQ ID NO: 10591 - DNA, 31 bp, Homo sapiens
  chr2:236749799-236749830
  hypo
cagcaagtgtagacaccgcctaggagaggcc

SEQ ID NO: 10592 - DNA, 31 bp, Homo sapiens
  chr2:236750707-236750738
  hypo
gtggaggagggcctctcgttggaagcccagg

SEQ ID NO: 10593 - DNA, 45 bp, Homo sapiens
  chr2:236750758-236750803
  hypo
ctccccagcctgctggcgttgggcttcctccgctcctggtttctt

SEQ ID NO: 10594 - DNA, 31 bp, Homo sapiens
  chr2:236750806-236750837
  hypo
tctggagcacagactccgtgctctggagcaa

SEQ ID NO: 10595 - DNA, 31 bp, Homo sapiens
  chr2:236750862-236750893
  hypo
tagaattcaggggtccgcgaatgtggctggg

SEQ ID NO: 10596 - DNA, 31 bp, Homo sapiens
  chr2:236750906-236750937
  hypo
gtatttccactgacttcgactgaaagttaac

SEQ ID NO: 10597 - DNA, 38 bp, Homo sapiens
  chr2:236751636-236751674
  hypo
ctggagttacaggcgttagctgccgtgcccggcccgtg

SEQ ID NO: 10598 - DNA, 37 bp, Homo sapiens
  chr2:236751878-236751915
  hypo
gggaggacctgagcttcggctgcggccttccagcccc

SEQ ID NO: 10599 - DNA, 31 bp, Homo sapiens
  chr2:236751968-236751999
  hypo
ccctccctctgtcccacgctgtgtccctttc

SEQ ID NO: 10600 - DNA, 31 bp, Homo sapiens
  chr2:236752042-236752073
  hypo
tgcttattgcatggcacggtctggttgggcc

SEQ ID NO: 10601 - DNA, 31 bp, Homo sapiens
  chr2:236759875-236759906
  hypo
gctgaatatagaccatcggtgcccacctggc

SEQ ID NO: 10602 - DNA, 31 bp, Homo sapiens
  chr2:236760073-236760104
  hypo
ttcacccgtccaccaacgcaccatgtgccgc

SEQ ID NO: 10603 - DNA, 37 bp, Homo sapiens
  chr2:236760945-236760982
  hypo
taatgcctattgtctgcgtctgcgtttgctttttaat

SEQ ID NO: 10604 - DNA, 31 bp, Homo sapiens
  chr2:236765491-236765522
  hypo
aagtgccagccactgtcgtgagctcaggtgt

SEQ ID NO: 10605 - DNA, 31 bp, Homo sapiens
  chr2:236765665-236765696
  hypo
gtgatctccatggagacgcaggtggtgagcc

SEQ ID NO: 10606 - DNA, 3 bp, Homo sapiens
  chr2:236765757-236765760
  hypo
gtg

SEQ ID NO: 10607 - DNA, 28 bp, Homo sapiens
  chr2:236766059-236766087
  hypo
atcctttgacgagcgtccccaaggagac

SEQ ID NO: 10608 - DNA, 31 bp, Homo sapiens
  chr2:236786675-236786706
  hypo
ttgagagaagggcccacggtgcccgtggaaa

SEQ ID NO: 10609 - DNA, 31 bp, Homo sapiens
  chr2:236791005-236791036
  hypo
ttaggaaatttcactccgcttctgcccagtg

SEQ ID NO: 10610 - DNA, 31 bp, Homo sapiens
  chr2:236796531-236796562
  hypo
ttgcagttgtattaaacgtggaagattcaga

SEQ ID NO: 10611 - DNA, 135 bp, Homo sapiens
  chr2:236796563-236796698
  hypo
agagatgagatagggccgtgcggcagcccatcaccggcagcgcttgctcgtggtggtgaggcctctcccttccggcacagacatttatcttctgtccacgtgtgtgccgctcacagtccacgtaaggctgcgccc

SEQ ID NO: 10612 - DNA, 31 bp, Homo sapiens
  chr2:236801620-236801651
  hypo
acgctgctgcagaaggcgtgattcatcttaa

SEQ ID NO: 10613 - DNA, 85 bp, Homo sapiens
  chr2:236801866-236801951
  hypo
gcaccatgtctgtagcgcgggtgtgccatgtccatcataaggaagcgccgtgtctgtagcgtgggtgtagcgtgtctgtggcgca

SEQ ID NO: 10614 - DNA, 40 bp, Homo sapiens
  chr2:236802172-236802212
  hypo
caccatgtctgtggtgcgggtgtgccgtgtccatcatgag

SEQ ID NO: 10615 - DNA, 57 bp, Homo sapiens
  chr2:236839043-236839100
  hypo
catcttgccggcctgccggatcgcggtgtctctgctaagactcgctgggtcttttgt

SEQ ID NO: 10616 - DNA, 73 bp, Homo sapiens
  chr2:236839122-236839195
  hypo
ggttgcggttgggttgcgtctttgtatagggttgttcggtgcgagccatctgtggcatcgggtcccttcacat

SEQ ID NO: 10617 - DNA, 75 bp, Homo sapiens
  chr2:236839206-236839281
  hypo
gcaccatcaagattggcgtcccccttttattcctcccgaatagtttctgtctggcgcttccgtttgccatgcagg

SEQ ID NO: 10618 - DNA, 31 bp, Homo sapiens
  chr2:236839283-236839314
  hypo
ggacaggggctgctctcggtggtaaggtgca

SEQ ID NO: 10619 - DNA, 110 bp, Homo sapiens
  chr2:236839457-236839567
  hypo
ggtctccttcaacagccgacccgacggcatgcaccagcgctcctactcagtctccagtgccgaccagtggagtgaggctacggtcattgcaaactcggccatcagcagtg

SEQ ID NO: 10620 - DNA, 31 bp, Homo sapiens
  chr2:236839572-236839603
  hypo
agggggctcagccccacggacccgcagccac

SEQ ID NO: 10621 - DNA, 38 bp, Homo sapiens
  chr2:236840459-236840497
  hypo
catctccaaaccaagccgggagacgcggagtcagcgag

SEQ ID NO: 10622 - DNA, 31 bp, Homo sapiens
  chr2:236841397-236841428
  hypo
tttctgttgagctgtacgtatgtgcagtggg

SEQ ID NO: 10623 - DNA, 36 bp, Homo sapiens
  chr2:236842448-236842484
  hypo
acaggcatgagccaccgcgcccggcctttctaagga

SEQ ID NO: 10624 - DNA, 63 bp, Homo sapiens
  chr2:236847370-236847433
  hypo
attttgagaaagacatcggcacactgggaagcacatgaagcggagggccgagatggggagagg

SEQ ID NO: 10625 - DNA, 54 bp, Homo sapiens
  chr2:236847440-236847494
  hypo
aacccacaacacctagcgtggctgaaaacctgggagggccggaggaccctctca

SEQ ID NO: 10626 - DNA, 31 bp, Homo sapiens
  chr2:236848202-236848233
  hypo
cacgttccaggacactcgtctgtcctcagct

SEQ ID NO: 10627 - DNA, 36 bp, Homo sapiens
  chr2:236853750-236853786
  hypo
ttttgtttttttgagacggagtctcgctcttttgcc

SEQ ID NO: 10628 - DNA, 36 bp, Homo sapiens
  chr2:236854025-236854061
  hypo
cagaagcatggttaacgcgtgcgctagcagaaaagt

SEQ ID NO: 10629 - DNA, 43 bp, Homo sapiens
  chr2:236857147-236857190
  hypo
aagttattttaaaatacgaatttcataacgagaacacaaattg

SEQ ID NO: 10630 - DNA, 31 bp, Homo sapiens
  chr2:236857203-236857234
  hypo
tgagaatttccatggccgctttggcagtagg

SEQ ID NO: 10631 - DNA, 31 bp, Homo sapiens
  chr2:236857275-236857306
  hypo
gagtctgtctttgtagcgctagagatgggtc

SEQ ID NO: 10632 - DNA, 31 bp, Homo sapiens
  chr2:236857325-236857356
  hypo
gaaggatgggcagaggcgggtgtttgagact

SEQ ID NO: 10633 - DNA, 41 bp, Homo sapiens
  chr2:236863815-236863856
  hypo
gggctggagctgccttcgagtctgtgcggttccagttcatg

SEQ ID NO: 10634 - DNA, 31 bp, Homo sapiens
  chr2:236868107-236868138
  hypo
ttcatattcccgtggccgagctcagcgccca

SEQ ID NO: 10635 - DNA, 31 bp, Homo sapiens
  chr2:236868300-236868331
  hypo
acatcctaattcaccccgccatcaccttctc

SEQ ID NO: 10636 - DNA, 31 bp, Homo sapiens
  chr2:236868991-236869022
  hypo
cttgcctccttctccccgcagtggccaggac

SEQ ID NO: 10637 - DNA, 31 bp, Homo sapiens
  chr2:236870132-236870163
  hypo
ctggagtgaggccagccgtggacagcagtgc

SEQ ID NO: 10638 - DNA, 31 bp, Homo sapiens
  chr2:236870216-236870247
  hypo
ccagggtggaggtgtgcggccaagggagagt

SEQ ID NO: 10639 - DNA, 23 bp, Homo sapiens
  chr2:236870258-236870281
  hypo
tgtgagatgacagggccgggcgt

SEQ ID NO: 10640 - DNA, 50 bp, Homo sapiens
  chr2:236872389-236872439
  hypo
gagtatatgctcagaacggtcaagcataactaaggcgatagtgaagagta

SEQ ID NO: 10641 - DNA, 72 bp, Homo sapiens
  chr2:236872482-236872554
  hypo
ggaatagagagcctagcggtagacctaccacgcccctgtggaagcctgtcgtgtggacggcatagctaatgt

SEQ ID NO: 10642 - DNA, 31 bp, Homo sapiens
  chr2:236872556-236872587
  hypo
gtgttctgagtgtcttcgaaatagcggtgta

SEQ ID NO: 10643 - DNA, 31 bp, Homo sapiens
  chr2:236881385-236881416
  hypo
gaagccgtagagtgttcgtgcctttcacagc

SEQ ID NO: 10644 - DNA, 31 bp, Homo sapiens
  chr2:236881423-236881454
  hypo
acaagcccctgaagcccgtgccatgccactc

SEQ ID NO: 10645 - DNA, 31 bp, Homo sapiens
  chr2:236881464-236881495
  hypo
ccacaaacacaggaaacgaagctctagaggg

SEQ ID NO: 10646 - DNA, 97 bp, Homo sapiens
  chr2:236900736-236900833
  hypo
gtgatggtggccatcacgagacccagataacaggagtggttagaagcgcagcggaggagcctgtcttcctgggtccgagttgcgtggttaggagcgc

SEQ ID NO: 10647 - DNA, 76 bp, Homo sapiens
  chr2:236901339-236901415
  hypo
aactcaccaagaatatcgtggccgctgaggtcctgcacacctggggatgcgtcgtgggcgccgaggagagcgtagc

SEQ ID NO: 10648 - DNA, 44 bp, Homo sapiens
  chr2:236901512-236901556
  hypo
gttggcctctttccgtcgtgaaccatggacgtctctccttgacc

SEQ ID NO: 10649 - DNA, 31 bp, Homo sapiens
  chr2:236908516-236908547
  hypo
ttaaacttgtaagtcacgatttgtgggtgct

SEQ ID NO: 10650 - DNA, 31 bp, Homo sapiens
  chr2:236909410-236909441
  hypo
gggccactaaggggggcggagaagacccctg

SEQ ID NO: 10651 - DNA, 54 bp, Homo sapiens
  chr2:236909528-236909582
  hypo
aggaaccagggccaagcgagggaggcagatgccgcgtggcgtgaggagggtgag

SEQ ID NO: 10652 - DNA, 31 bp, Homo sapiens
  chr2:236912262-236912293
  hypo
ctctcccttggatttgcgcctgttctttctc

SEQ ID NO: 10653 - DNA, 31 bp, Homo sapiens
  chr2:236919372-236919403
  hypo
ctctgtgtgtgttttccggaaaattaatacc

SEQ ID NO: 10654 - DNA, 51 bp, Homo sapiens
  chr2:236945109-236945160
  hypo
cagctgaacccagaggcgcttctgtgacagagggcccgcagggggactgct

SEQ ID NO: 10655 - DNA, 11 bp, Homo sapiens
  chr2:236945254-236945265
  hypo
tggcactttga

SEQ ID NO: 10656 - DNA, 40 bp, Homo sapiens
  chr2:236950836-236950876
  hypo
ggaggccagccagggtcggcttggccgggaagggagacag

SEQ ID NO: 10657 - DNA, 31 bp, Homo sapiens
  chr2:236950896-236950927
  hypo
caaaagggaaaggaagcgccccctccaagag

SEQ ID NO: 10658 - DNA, 55 bp, Homo sapiens
  chr2:236950958-236951013
  hypo
atcaaaagtctgtctgcggcctctctggaagcctgtcctgcgggtgagggaaggg

SEQ ID NO: 10659 - DNA, 31 bp, Homo sapiens
  chr2:236951333-236951364
  hypo
cttgtgcatgtgagtgcggatggggggtggg

SEQ ID NO: 10660 - DNA, 31 bp, Homo sapiens
  chr2:236970388-236970419
  hypo
cttcttttggagacaacgaaaatgatctgga

SEQ ID NO: 10661 - DNA, 69 bp, Homo sapiens
  chr2:236970590-236970659
  hypo
ggagcaaaggtgcaggcgtacaggaacgcatgctgggtggcgggggcctgggtgcgggccgagggctgg

SEQ ID NO: 10662 - DNA, 57 bp, Homo sapiens
  chr2:236976365-236976422
  hypo
ctcatctcttaacagacgttccgcacatcctttccagtatgccgtgttcacgtgagg

SEQ ID NO: 10663 - DNA, 19 bp, Homo sapiens
  chr2:236981923-236981942
  hypo
ccaccgtgcctggcctata

SEQ ID NO: 10664 - DNA, 31 bp, Homo sapiens
  chr2:236989877-236989908
  hypo
acagtgggcaggaggccggggtcctgtcctg

SEQ ID NO: 10665 - DNA, 31 bp, Homo sapiens
  chr2:236991808-236991839
  hypo
aaaagaaaagaggcctcgccttccatttaga

SEQ ID NO: 10666 - DNA, 52 bp, Homo sapiens
  chr2:236994422-236994474
  hypo
gcctggctccatgggccgcctcaggatgtggcccagccggcttcctttgtga

SEQ ID NO: 10667 - DNA, 40 bp, Homo sapiens
  chr2:236994530-236994570
  hypo
tgatagcaaattccagcgtccaggccgtgggttcatctgg

SEQ ID NO: 10668 - DNA, 31 bp, Homo sapiens
  chr2:236994580-236994611
  hypo
gggctgatggcagcaacgctgaccacactcg

SEQ ID NO: 10669 - DNA, 44 bp, Homo sapiens
  chr2:236996174-236996218
  hypo
tgcacactgcccatgacgggctacttggacggctcatgcccacc

SEQ ID NO: 10670 - DNA, 31 bp, Homo sapiens
  chr2:236996243-236996274
  hypo
aggccccttggttaagcgtgataacatgatc

SEQ ID NO: 10671 - DNA, 31 bp, Homo sapiens
  chr2:236996298-236996329
  hypo
tgtttccatgtggtgccgtgaatagtctcat

SEQ ID NO: 10672 - DNA, 56 bp, Homo sapiens
  chr2:236999645-236999701
  hypo
gtgctgggttgacaggcgtgtgccaccgcaccggccgtaatcgttcctggtaagca

SEQ ID NO: 10673 - DNA, 31 bp, Homo sapiens
  chr2:236999705-236999736
  hypo
tctgaacacatcaatccgctgcctgcatgcc

SEQ ID NO: 10674 - DNA, 40 bp, Homo sapiens
  chr2:237007807-237007847
  hypo
tgcttggggccaggtgcggtggctcacgcctgtaatccca

SEQ ID NO: 10675 - DNA, 31 bp, Homo sapiens
  chr2:237010462-237010493
  hypo
ctgggtacacatttatcgggatttatgcttt

SEQ ID NO: 10676 - DNA, 29 bp, Homo sapiens
  chr2:237013228-237013257
  hypo
gggttacaaagacaagcgtgcacaggcca

SEQ ID NO: 10677 - DNA, 21 bp, Homo sapiens
  chr2:237014529-237014550
  hypo
cgtgcccggcccctcttgtgc

SEQ ID NO: 10678 - DNA, 31 bp, Homo sapiens
  chr2:237015288-237015319
  hypo
aaggtggctggagtcacgcacagccagctgg

SEQ ID NO: 10679 - DNA, 40 bp, Homo sapiens
  chr2:237015346-237015386
  hypo
ctcattttcccacctgcgtaagtcacggtgctggtggtag

SEQ ID NO: 10680 - DNA, 31 bp, Homo sapiens
  chr2:237015391-237015422
  hypo
tggggtctgcaggtctcgcaggagtaggtca

SEQ ID NO: 10681 - DNA, 68 bp, Homo sapiens
  chr2:237018157-237018225
  hypo
atggcagaagtgttctcgatcagcagccttggaaatgtcctagtcagcggcagcgtcggtgctctgga

SEQ ID NO: 10682 - DNA, 31 bp, Homo sapiens
  chr2:237020449-237020480
  hypo
aagaaagggtccatcccggtatcaggcaatg

SEQ ID NO: 10683 - DNA, 46 bp, Homo sapiens
  chr2:237020563-237020609
  hypo
ttttgattggagtcatcggcagtgttgtcacgcgactggtcttgct

SEQ ID NO: 10684 - DNA, 56 bp, Homo sapiens
  chr2:237022762-237022818
  hypo
ttagctcattagctaacggaggctgtgaacggtgatcctcccggggattggaatga

SEQ ID NO: 10685 - DNA, 31 bp, Homo sapiens
  chr2:237022820-237022851
  hypo
ggaggtgatctactgccggctgcctgctctt

SEQ ID NO: 10686 - DNA, 65 bp, Homo sapiens
  chr2:237022973-237023038
  hypo
ggcaaatgcctctagacggaatagtctcatcgagaagaagccattgtcagcgtgtcccttggtca

SEQ ID NO: 10687 - DNA, 31 bp, Homo sapiens
  chr2:237032440-237032471
  hypo
gttgtgtagctggccccgctgtccaagcaca

SEQ ID NO: 10688 - DNA, 64 bp, Homo sapiens
  chr2:237032541-237032605
  hypo
tgggctcccttacctccgcagtacggagtggacgtcacggcccgagatgcccacgggaacacag

SEQ ID NO: 10689 - DNA, 35 bp, Homo sapiens
  chr2:237032664-237032699
  hypo
ggctgccccgacgagcgcttcgtgctcatggccac

SEQ ID NO: 10690 - DNA, 31 bp, Homo sapiens
  chr2:237032711-237032742
  hypo
caggagaaacaataaccggaacaacagcagt

SEQ ID NO: 10691 - DNA, 34 bp, Homo sapiens
  chr2:237032835-237032869
  hypo
cgcagcacgtgagtcccgtcgcatcccctccctc

SEQ ID NO: 10692 - DNA, 62 bp, Homo sapiens
  chr2:237033006-237033068
  hypo
acacaggagagagcgacgggcctcggccctttgatgatagcacatggcgcaggacccttgtc

SEQ ID NO: 10693 - DNA, 55 bp, Homo sapiens
  chr2:237034240-237034295
  hypo
agatggggtggttttccgaatgccagaccgaggtgccttacgaaggcagctgcca

SEQ ID NO: 10694 - DNA, 59 bp, Homo sapiens
  chr2:237037748-237037807
  hypo
gcctttggcatcaatgcgtgcattctccacctttccgcggcttgcgcttggatttctga

SEQ ID NO: 10695 - DNA, 45 bp, Homo sapiens
  chr2:237037865-237037910
  hypo
ccaggccaggccagcacgctcaggtgatagcgagtggggccagga

SEQ ID NO: 10696 - DNA, 31 bp, Homo sapiens
  chr2:237225643-237225674
  hypo
atcataggcgctcagccgggcgaggtggctc

SEQ ID NO: 10697 - DNA, 31 bp, Homo sapiens
  chr2:237482705-237482736
  hypo
gggggtgatgggcctgcgtgccttcccaatt

SEQ ID NO: 10698 - DNA, 31 bp, Homo sapiens
  chr2:237686475-237686506
  hypo
ggccagtgcttgtcctcgtgacacccctgag

SEQ ID NO: 10699 - DNA, 26 bp, Homo sapiens
  chr2:237806448-237806474
  hypo
aattattaagaagtttcgggccgggc

SEQ ID NO: 10700 - DNA, 31 bp, Homo sapiens
  chr2:238268758-238268789
  hypo
tggaaaccttgagtgccgttcacaccaggcg

SEQ ID NO: 10701 - DNA, 43 bp, Homo sapiens
  chr2:238359553-238359596
  hypo
ggctggtggccaccaccgtgaacagggccggcaaatgtttcct

SEQ ID NO: 10702 - DNA, 50 bp, Homo sapiens; identical to SEQ ID NO: 1358
  chr2:238384222-238384272
  hypo

SEQ ID NO: 10703 - DNA, 43 bp, Homo sapiens
  chr2:238492722-238492765
  hypo
aaggaactagggcctcgcgcctcattgtcggggcctccatccc

SEQ ID NO: 10704 - DNA, 31 bp, Homo sapiens
  chr2:238492774-238492805
  hypo
taaaatacagaatgcccggcaccaccctgaa

SEQ ID NO: 10705 - DNA, 51 bp, Homo sapiens
  chr2:238540446-238540497
  hypo
tgcattaggaactcaccgtggggccttgagacagtgcggtgagcttattat

SEQ ID NO: 10706 - DNA, 31 bp, Homo sapiens
  chr2:238540523-238540554
  hypo
tcctcacccagcaggacggaggccctccccc

SEQ ID NO: 10707 - DNA, 31 bp, Homo sapiens
  chr2:238540587-238540618
  hypo
gcccctctgtggcctgcggcctcgggccctg

SEQ ID NO: 10708 - DNA, 31 bp, Homo sapiens
  chr2:238550619-238550650
  hypo
atgactggagacacttcgcacacccatgaga

SEQ ID NO: 10709 - DNA, 31 bp, Homo sapiens
  chr2:238552317-238552348
  hypo
gaccctggatcactagcgtttagtggcagaa

SEQ ID NO: 10710 - DNA, 31 bp, Homo sapiens
  chr2:238553952-238553983
  hypo
gaagccctggagttgtcgtggctcagccccg

SEQ ID NO: 10711 - DNA, 31 bp, Homo sapiens
  chr2:238590665-238590696
  hypo
gtgctgggctcgaagacggacagctgcctga

SEQ ID NO: 10712 - DNA, 41 bp, Homo sapiens
  chr2:238785778-238785819
  hypo
ccgggctgcaggggcgcgcgggctggcggtgatacccctag

SEQ ID NO: 10713 - DNA, 49 bp, Homo sapiens
  chr2:238786044-238786093
  hypo
agggagagggggcaagcggaggaggagtggaccacgtgggagctgtgga

SEQ ID NO: 10714 - DNA, 61 bp, Homo sapiens
  chr2:238786094-238786155
  hypo
gatcctttctagaccccggaagggttcttcccccagtggggggggccgggatgaagacaga

SEQ ID NO: 10715 - DNA, 59 bp, Homo sapiens
  chr2:238786162-238786221
  hypo
gccagtagcaggtggacgtgaagagtgacggtgggaggaggccacgtcctcaataatct

SEQ ID NO: 10716 - DNA, 31 bp, Homo sapiens
  chr2:238786475-238786506
  hypo
acagcccccagcaggacggcttcagccgaac

SEQ ID NO: 10717 - DNA, 31 bp, Homo sapiens; identical to SEQ ID NO: 1359
  chr2:238791402-238791433
  hypo

SEQ ID NO: 10718 - DNA, 34 bp, Homo sapiens
  chr2:238793663-238793697
  hypo
acgctctgggtccacacgacgttgggcagggtgc

SEQ ID NO: 10719 - DNA, 31 bp, Homo sapiens
  chr2:238819638-238819669
  hypo
aaaatagtcacacacacggtcacacagagaa

SEQ ID NO: 10720 - DNA, 31 bp, Homo sapiens
  chr2:238820427-238820458
  hypo
ggggcccaggctgcccgcgggtgcacccagg

SEQ ID NO: 10721 - DNA, 52 bp, Homo sapiens
  chr2:238822392-238822444
  hypo
ctaagtcagggaccaccggaggaggtagcccttgagccgccctggagcccgg

SEQ ID NO: 10722 - DNA, 18 bp, Homo sapiens
  chr2:238874441-238874459
  hypo
gcccggctgagttgtgtt

SEQ ID NO: 10723 - DNA, 52 bp, Homo sapiens; identical to SEQ ID NO: 1360
  chr2:238876149-238876201
  hypo

SEQ ID NO: 10724 - DNA, 46 bp, Homo sapiens
  chr2:239006884-239006930
  hypo
ggccaggaacgcgctccggctcagcgtgggccgcagcaccaccagg

SEQ ID NO: 10725 - DNA, 31 bp, Homo sapiens
  chr2:239010178-239010209
  hypo
gggaccctgtggccagcgggagggcactggg

SEQ ID NO: 10726 - DNA, 75 bp, Homo sapiens
  chr2:239010263-239010338
  hypo
agtgggcaggtgtctgcgggcacccgactgcgtgggaaagggccttctccacactggggacgggcccaggagagg

SEQ ID NO: 10727 - DNA, 31 bp, Homo sapiens
  chr2:239010426-239010457
  hypo
atgttgcaggcagaaacggagggaaggagga

SEQ ID NO: 10728 - DNA, 31 bp, Homo sapiens
  chr2:239011436-239011467
  hypo
ctgtcttggctgagggcgaaccttcctgtcc

SEQ ID NO: 10729 - DNA, 31 bp, Homo sapiens
  chr2:239011477-239011508
  hypo
cacctacctctgaccacggctcttctctttt

SEQ ID NO: 10730 - DNA, 31 bp, Homo sapiens
  chr2:239012748-239012779
  hypo
tgagaggggaagggcccggaggtggagggtc

SEQ ID NO: 10731 - DNA, 31 bp, Homo sapiens
  chr2:239030394-239030425
  hypo
gccctggtgggccctccggacaggtgtactc

SEQ ID NO: 10732 - DNA, 31 bp, Homo sapiens
  chr2:239033394-239033425
  hypo
caggagagtgtacatgcgtgtgtgcaggaga

SEQ ID NO: 10733 - DNA, 74 bp, Homo sapiens
  chr2:239039047-239039121
  hypo
gaggcctcaatcccagcggctgagcccgcagggtctgcggaggcctcagaggtggcccccggggtgcagcccct

SEQ ID NO: 10734 - DNA, 31 bp, Homo sapiens
  chr2:239041689-239041720
  hypo
ctagggcccaaggggacggacactcaagaag

SEQ ID NO: 10735 - DNA, 53 bp, Homo sapiens
  chr2:239041750-239041803
  hypo
ttggggcaggcagggccgggaagggaagtagcaccggccgcagccccaagcca

SEQ ID NO: 10736 - DNA, 41 bp, Homo sapiens
  chr2:239041818-239041859
  hypo
gggcctatcctgcagccggcccgctccggcttcctccactg

SEQ ID NO: 10737 - DNA, 31 bp, Homo sapiens
  chr2:239057679-239057710
  hypo
cccaagtacctgtcctcgcctcgctgtgctg

SEQ ID NO: 10738 - DNA, 31 bp, Homo sapiens
  chr2:239065003-239065034
  hypo
atgctccaactcatcacgcacctcttatttc

SEQ ID NO: 10739 - DNA, 31 bp, Homo sapiens
  chr2:239065063-239065094
  hypo
aagccaaacataaggccgtgaagatgtaacc

SEQ ID NO: 10740 - DNA, 67 bp, Homo sapiens
  chr2:239065111-239065178
  hypo
ggcctctgcagccccacgccggctctgcccatgggctgcgtcctgggcaagccgcccacctctctgg

SEQ ID NO: 10741 - DNA, 91 bp, Homo sapiens
  chr2:239091202-239091293
  hypo
caaagaggagggcaagcgttgtgcatgctggccgagtgccaggtaggccgtccacaccagtgcctccaggtgttctcgcccctgccaggtt

SEQ ID NO: 10742 - DNA, 31 bp, Homo sapiens
  chr2:239091311-239091342
  hypo
ggaagacactgaggcacgaagaataagtaac

SEQ ID NO: 10743 - DNA, 79 bp, Homo sapiens; identical to SEQ ID NO: 1361
  chr2:239148239-239148318
  hypo

SEQ ID NO: 10744 - DNA, 31 bp, Homo sapiens; identical to SEQ ID NO: 1362
  chr2:239148419-239148450
  hypo

SEQ ID NO: 10745 - DNA, 40 bp, Homo sapiens; identical to SEQ ID NO: 1363
  chr2:239148489-239148529
  hypo

SEQ ID NO: 10746 - DNA, 193 bp, Homo sapiens; identical to SEQ ID NO: 1364
  chr2:239148533-239148726
  hypo

SEQ ID NO: 10747 - DNA, 252 bp, Homo sapiens; identical to SEQ ID NO: 1365
  chr2:239148736-239148988
  hypo

SEQ ID NO: 10748 - DNA, 56 bp, Homo sapiens
  chr2:239211885-239211941
  hypo
ctttgtcgtctccatgcgcccgctcaggactcctgagttctcgaaaactcaaaact

SEQ ID NO: 10749 - DNA, 31 bp, Homo sapiens
  chr2:239212967-239212998
  hypo
caaaactgggcaggagcgtgccaagtgatgc

SEQ ID NO: 10750 - DNA, 31 bp, Homo sapiens
  chr2:239213023-239213054
  hypo
tgattctcctccaccccggttccagcagccc

SEQ ID NO: 10751 - DNA, 52 bp, Homo sapiens
  chr2:239213082-239213134
  hypo
acccctgctgggacaccgactcctttccttgcttgctcgtcttttggcacag

SEQ ID NO: 10752 - DNA, 31 bp, Homo sapiens
  chr2:239213143-239213174
  hypo
gaccagtgacagccatcgcttattgtccact

SEQ ID NO: 10753 - DNA, 31 bp, Homo sapiens
  chr2:239224074-239224105
  hypo
tttgggaagactctcccgctttcagccacca

SEQ ID NO: 10754 - DNA, 31 bp, Homo sapiens
  chr2:239224149-239224180
  hypo
atcctgtgaagatgaccgccctctctctaac

SEQ ID NO: 10755 - DNA, 31 bp, Homo sapiens
  chr2:239224208-239224239
  hypo
tgtctaagggcttcatcgtttcagagcttta

SEQ ID NO: 10756 - DNA, 12 bp, Homo sapiens
  chr2:239265433-239265445
  hypo
ttttgaggtaga

SEQ ID NO: 10757 - DNA, 31 bp, Homo sapiens
  chr2:239265756-239265787
  hypo
attgtacctggttccccgcagtctccctcac

SEQ ID NO: 10758 - DNA, 31 bp, Homo sapiens
  chr2:239265850-239265881
  hypo
cacatgaccactagggcgggcacctgtgggc

SEQ ID NO: 10759 - DNA, 57 bp, Homo sapiens
  chr2:239467686-239467743
  hypo
caagcatagctggcagcgatccggacagaggggggtgcccaccgtggagaaggttca

SEQ ID NO: 10760 - DNA, 31 bp, Homo sapiens
  chr2:239475086-239475117
  hypo
agggcatcagtgcaggcgacaacagcccctt

SEQ ID NO: 10761 - DNA, 31 bp, Homo sapiens
  chr2:239709447-239709478
  hypo
agaattatgtacatcccgtaatacttgataa

SEQ ID NO: 10762 - DNA, 31 bp, Homo sapiens
  chr2:239780653-239780684
  hypo
actctacgcttcaaaacgttaagacggtcaa

SEQ ID NO: 10763 - DNA, 31 bp, Homo sapiens
  chr2:239834260-239834291
  hypo
gcggcggccgcctctccgggcatcaccgcct

SEQ ID NO: 10764 - DNA, 41 bp, Homo sapiens
  chr2:239957266-239957307
  hypo
cctagcctagcagccccgctctcctgcgggctcccccgtgg

SEQ ID NO: 10765 - DNA, 57 bp, Homo sapiens
  chr2:239958979-239959036
  hypo
gggtgctcgcctaggccgtgtgggttctctgtctttcctgttcgctgcatttgtgct

SEQ ID NO: 10766 - DNA, 31 bp, Homo sapiens
  chr2:239970200-239970231
  hypo
gttttctaccacattccgtaagaagctcttg

SEQ ID NO: 10767 - DNA, 65 bp, Homo sapiens
  chr2:239971538-239971603
  hypo
ggcacggcgggaagccgcgagggcagggcagacgccaagaggcccagtggcgtcatcagggtttc

SEQ ID NO: 10768 - DNA, 31 bp, Homo sapiens
  chr2:239997556-239997587
  hypo
ggaaacaaagctgggccgggatagcaggtgg

SEQ ID NO: 10769 - DNA, 84 bp, Homo sapiens
  chr2:240032301-240032385
  hypo
ctgagagtgagaacctcgcagactgcagaacactaagccacgtgatgagaatcatctgaagaatgaagccgtgctgtatttaca

SEQ ID NO: 10770 - DNA, 31 bp, Homo sapiens
  chr2:240032386-240032417
  hypo
aacatttttcttagtgcgtcattaacaagaa

SEQ ID NO: 10771 - DNA, 31 bp, Homo sapiens
  chr2:240032427-240032458
  hypo
ataacaacatgaagagcgctcctgcctctgt

SEQ ID NO: 10772 - DNA, 100 bp, Homo sapiens
  chr2:240080392-240080492
  hypo
cacaccatgcagagcccgccccaccgcgcacccgccctccagacaccaggagagggcggccctcaccgtcagggcaggtcacacccgcccagccctggtc

SEQ ID NO: 10773 - DNA, 70 bp, Homo sapiens
  chr2:240080495-240080565
  hypo
tggtcccaggccagaccgcacacgcgtgccctccgcgaagaagcgtccagcagggcgagcagaagtgaag

SEQ ID NO: 10774 - DNA, 36 bp, Homo sapiens
  chr2:240080573-240080609
  hypo
ctgctgcaatcacacccgcaccgcacacaattactc

SEQ ID NO: 10775 - DNA, 44 bp, Homo sapiens
  chr2:240103577-240103621
  hypo
cacttttgaaagatgtcgcctagagacgccgacttcctgcagac

SEQ ID NO: 10776 - DNA, 45 bp, Homo sapiens
  chr2:240103677-240103722
  hypo
agcacaccttcctaacgcggtgttccttgccgccacatgcaagca

SEQ ID NO: 10777 - DNA, 38 bp, Homo sapiens
  chr2:240107030-240107068
  hypo
cctatgaagggtgccccgtgtctcgtggggagacatgt

SEQ ID NO: 10778 - DNA, 31 bp, Homo sapiens
  chr2:240107072-240107103
  hypo
tgcagggggtgccccacgcctcctggggaga

SEQ ID NO: 10779 - DNA, 31 bp, Homo sapiens
  chr2:240107133-240107164
  hypo
ccctgtgggggtgtcccgtgcctcctgggga

SEQ ID NO: 10780 - DNA, 31 bp, Homo sapiens
  chr2:240107173-240107204
  hypo
cctgcagggggtgccccgtgtttcctaggga

SEQ ID NO: 10781 - DNA, 37 bp, Homo sapiens
  chr2:240165273-240165310
  hypo
agctgcttttcagacacgggaacggaagcttagggct

SEQ ID NO: 10782 - DNA, 31 bp, Homo sapiens
  chr2:240167439-240167470
  hypo
atgccaggaataaagacgagcctgcccccac

SEQ ID NO: 10783 - DNA, 41 bp, Homo sapiens
  chr2:240167686-240167727
  hypo
ccacactggctgcctgcgtccagtcccgccatggggtctgc

SEQ ID NO: 10784 - DNA, 31 bp, Homo sapiens
  chr2:240167776-240167807
  hypo
tgtccagctgctctcacgtgccaggccaggc

SEQ ID NO: 10785 - DNA, 64 bp, Homo sapiens
  chr2:240167813-240167877
  hypo
acacctgtggcttagtcgggtgatagggacaaaacgtgcaaactgagcccgctggacacgcaga

SEQ ID NO: 10786 - DNA, 83 bp, Homo sapiens
  chr2:240168810-240168893
  hypo
ctggagactagctctgcggtctgctcgtggataaccgcgctccctcgctgccgggccacccgcacagccgggcaaaccaaaag

SEQ ID NO: 10787 - DNA, 51 bp, Homo sapiens
  chr2:240212377-240212428
  hypo
cgcgcatgcacacacacgcacgcacacactcacatacgcactcacgtacgc

SEQ ID NO: 10788 - DNA, 31 bp, Homo sapiens
  chr2:240247259-240247290
  hypo
ataaaaaatattggtgcggatgtgaagaaat

SEQ ID NO: 10789 - DNA, 51 bp, Homo sapiens
  chr2:240270344-240270395
  hypo
tctgtgtcctgacaaacgcatcctgccctgccacagcgcatcccctcaggg

SEQ ID NO: 10790 - DNA, 42 bp, Homo sapiens
  chr2:240270397-240270439
  hypo
ggtgtggagggctggccgggcaaggggcgtaaggctccaggg

SEQ ID NO: 10791 - DNA, 50 bp, Homo sapiens
  chr2:240270480-240270530
  hypo
ggttcttccctcaggccgctcacatcattagaaatcgttctttagagcaa

SEQ ID NO: 10792 - DNA, 72 bp, Homo sapiens
  chr2:240270735-240270807
  hypo
agagggggcccatgggcggctggactcccccagcccggcctgcccagggagtgagggcggcacgggcaccca

SEQ ID NO: 10793 - DNA, 31 bp, Homo sapiens
  chr2:240271611-240271642
  hypo
gagagaatggagaggtcgtgggtggcaataa

SEQ ID NO: 10794 - DNA, 31 bp, Homo sapiens; identical to SEQ ID NO: 1368
  chr2:240294440-240294471
  hypo

SEQ ID NO: 10795 - DNA, 52 bp, Homo sapiens
  chr2:240361082-240361134
  hypo
ttaatctgcagctgcacgaggcgagatgctgagccaccgcaatccaaaccct

SEQ ID NO: 10796 - DNA, 55 bp, Homo sapiens
  chr2:240361148-240361203
  hypo
tgtgtgtgcacaaaatcgcctccttattgcattgctctctcggaggctggatgtg

SEQ ID NO: 10797 - DNA, 31 bp, Homo sapiens
  chr2:240484932-240484963
  hypo
aataattttctttaagcgttgtaacaatccc

SEQ ID NO: 10798 - DNA, 31 bp, Homo sapiens
  chr2:240506414-240506445
  hypo
atgggaacctgggggacgggtctcaggctga

SEQ ID NO: 10799 - DNA, 31 bp, Homo sapiens
  chr2:240618672-240618703
  hypo
ggccttttctgtccaccgcaacagacccagg

SEQ ID NO: 10800 - DNA, 31 bp, Homo sapiens
  chr2:240618752-240618783
  hypo
ttataatcaaagctctcgtatttatggcttg

SEQ ID NO: 10801 - DNA, 58 bp, Homo sapiens
  chr2:240666722-240666780
  hypo
gcactgagagtctggccgtctggaagccaggaccagctctgcccggaagtcgtagagc

SEQ ID NO: 10802 - DNA, 31 bp, Homo sapiens
  chr2:240668882-240668913
  hypo
tccaaatgtgtgaccccgatgggattttgat

SEQ ID NO: 10803 - DNA, 31 bp, Homo sapiens
  chr2:240670557-240670588
  hypo
ccaatgccaaagtgctcgccactgaggccac

SEQ ID NO: 10804 - DNA, 31 bp, Homo sapiens
  chr2:240747275-240747306
  hypo
tcatgctggagcatggcgggctggagtcctc

SEQ ID NO: 10805 - DNA, 45 bp, Homo sapiens
  chr2:240747334-240747379
  hypo
aatggggagaagggcacgtgaaggtgaaggcgcagatcaaggtgg

SEQ ID NO: 10806 - DNA, 31 bp, Homo sapiens
  chr2:240747395-240747426
  hypo
tgaacaccaaggctgccggcaaaccccagag

SEQ ID NO: 10807 - DNA, 31 bp, Homo sapiens
  chr2:240747432-240747463
  hypo
gagaggcctggagctgcggctgcctcccagc

SEQ ID NO: 10808 - DNA, 59 bp, Homo sapiens
  chr2:240927100-240927159
  hypo
ggatgctacatgcaggcgcagcgcccagggaaggggtgggcagccgtggggcgaatgcg

SEQ ID NO: 10809 - DNA, 31 bp, Homo sapiens
  chr2:240928849-240928880
  hypo
cacagccaccactgccgcggatatggatcgt

SEQ ID NO: 10810 - DNA, 31 bp, Homo sapiens
  chr2:240930792-240930823
  hypo
taagtgtatttatgtgcgtttccacatgggt

SEQ ID NO: 10811 - DNA, 31 bp, Homo sapiens
  chr2:240943998-240944029
  hypo
tagtcctgccccattccgccatggcctcctc

SEQ ID NO: 10812 - DNA, 31 bp, Homo sapiens
  chr2:240965862-240965893
  hypo
ttcagaaatgatcatgcgattgtaaaacagt

SEQ ID NO: 10813 - DNA, 35 bp, Homo sapiens
  chr2:240965899-240965934
  hypo
gcagctgtgtaaactacggccggttctatggatgt

SEQ ID NO: 10814 - DNA, 49 bp, Homo sapiens
  chr2:240965953-240966002
  hypo
ctttttgtcaaaaatacggattcccggtccccaacgcaggagggtctgg

SEQ ID NO: 10815 - DNA, 31 bp, Homo sapiens
  chr2:241100736-241100767
  hypo
aggcttcttaggaggccggaccctcaggcac

SEQ ID NO: 10816 - DNA, 31 bp, Homo sapiens
  chr2:241154321-241154352
  hypo
aactccagggtgcccccggatatgagagagg

SEQ ID NO: 10817 - DNA, 39 bp, Homo sapiens
  chr2:241157269-241157308
  hypo
aacaggtagcatgcaccgcctttccgcacctgctgtagt

SEQ ID NO: 10818 - DNA, 35 bp, Homo sapiens
  chr2:241197208-241197243
  hypo
tggcgacatcatcagccgaccgtaaacaccaggct

SEQ ID NO: 10819 - DNA, 31 bp, Homo sapiens
  chr2:241328245-241328276
  hypo
atgacaggggttaaatcgggcagaggtgggg

SEQ ID NO: 10820 - DNA, 31 bp, Homo sapiens
  chr2:241328280-241328311
  hypo
gcaggagggagggggacggttgcaggaggga

SEQ ID NO: 10821 - DNA, 51 bp, Homo sapiens
  chr2:241328351-241328402
  hypo
gtggcatgggacactccggaagactcctggggactccggggtcctgagaag

SEQ ID NO: 10822 - DNA, 31 bp, Homo sapiens
  chr2:241328409-241328440
  hypo
gtgagatcctgggagccgctggtgggtgggg

SEQ ID NO: 10823 - DNA, 37 bp, Homo sapiens; identical to SEQ ID NO: 1370
  chr2:241374578-241374615
  hypo

SEQ ID NO: 10824 - DNA, 68 bp, Homo sapiens; identical to SEQ ID NO: 1371
  chr2:241375297-241375365
  hypo

SEQ ID NO: 10825 - DNA, 223 bp, Homo sapiens; identical to SEQ ID NO: 1372
  chr2:241375406-241375629
  hypo

SEQ ID NO: 10826 - DNA, 44 bp, Homo sapiens
  chr2:241378933-241378977
  hypo
gtaccaagcacccactcgttgggcccctccgaaggaatcttttc

SEQ ID NO: 10827 - DNA, 31 bp, Homo sapiens
  chr2:241384030-241384061
  hypo
aagtctgtggcctgtgcgcaccttcagacga

SEQ ID NO: 10828 - DNA, 31 bp, Homo sapiens
  chr2:241385468-241385499
  hypo
tgggcaacggggcccacggcacagagaaagt

SEQ ID NO: 10829 - DNA, 31 bp, Homo sapiens
  chr2:241388730-241388761
  hypo
cccccccccacccccacgctgcaaagggccg

SEQ ID NO: 10830 - DNA, 62 bp, Homo sapiens
  chr2:241542040-241542102
  hypo
cagcttcctgtggcaccgctgccactcccgccaggctcctggggcaccgccaccactcccgc

SEQ ID NO: 10831 - DNA, 31 bp, Homo sapiens
  chr2:241542266-241542297
  hypo
gcatggcacaggtgagcggtgtgaccttggt

SEQ ID NO: 10832 - DNA, 31 bp, Homo sapiens
  chr2:241542320-241542351
  hypo
cagctcacaccacacacgcctacgcctaccc

SEQ ID NO: 10833 - DNA, 31 bp, Homo sapiens
  chr2:241542463-241542494
  hypo
tgtcaaacctgtgtctcgggacactgctgtt

SEQ ID NO: 10834 - DNA, 68 bp, Homo sapiens
  chr2:241542501-241542569
  hypo
cagcttccctatcaggcgcctcagcacccagtcctaccagtgctcccgcctcccgtccccagctggct

SEQ ID NO: 10835 - DNA, 31 bp, Homo sapiens
  chr2:241542578-241542609
  hypo
gccccctcctgtgccccgagctggccgggcc

SEQ ID NO: 10836 - DNA, 55 bp, Homo sapiens
  chr2:241543512-241543567
  hypo
accctgggaacacctgcggggagaagcgcccttggcctggcggcttgggggagac

SEQ ID NO: 10837 - DNA, 31 bp, Homo sapiens
  chr2:241628004-241628035
  hypo
ccactccatttcagctcgtctcccccgagag

SEQ ID NO: 10838 - DNA, 116 bp, Homo sapiens
  chr2:241631409-241631525
  hypo
ccctgctcccagtgggcgcctatgaagtcttcgcccgggaggcggtgggtgcgggtgcagctcgggccctgctgcctggagatgaggacgctggtcgagctcgggccctgggctgg

SEQ ID NO: 10839 - DNA, 41 bp, Homo sapiens
  chr2:241655277-241655318
  hypo
gatgtaactgctcccacgggccacggcgggagaggggctct

SEQ ID NO: 10840 - DNA, 31 bp, Homo sapiens
  chr2:241656740-241656771
  hypo
gatgggctgggcctgccggctgtcacgggag

SEQ ID NO: 10841 - DNA, 31 bp, Homo sapiens
  chr2:241717833-241717864
  hypo
ccaacatttcctaacacggctccccacggga

SEQ ID NO: 10842 - DNA, 31 bp, Homo sapiens
  chr2:241718184-241718215
  hypo
cgcaccgttccacacacggttcctcaccgct

SEQ ID NO: 10843 - DNA, 31 bp, Homo sapiens
  chr2:241724228-241724259
  hypo
ggggcggggggggggacgtccacacctggtg

SEQ ID NO: 10844 - DNA, 41 bp, Homo sapiens
  chr2:241750152-241750193
  hypo
gatgacactccaggagcgatcagcaccgaattcatggtgct

SEQ ID NO: 10845 - DNA, 31 bp, Homo sapiens
  chr2:241817567-241817598
  hypo
gtgagagggagcgcctcgagggccttttgca

SEQ ID NO: 10846 - DNA, 31 bp, Homo sapiens
  chr2:241830264-241830295
  hypo
acgccgcccctgcctcgcgtgaaggggtcag

SEQ ID NO: 10847 - DNA, 31 bp, Homo sapiens
  chr2:241838794-241838825
  hypo
aatgcctgcagtactccgggaaggagaccct

SEQ ID NO: 10848 - DNA, 31 bp, Homo sapiens
  chr2:241858347-241858378
  hypo
gggacagtcctgggcccggtgctggccaagg

SEQ ID NO: 10849 - DNA, 40 bp, Homo sapiens
  chr2:241865194-241865234
  hypo
gaagaaggccaatgacgcgctgggccgggagctggccggg

SEQ ID NO: 10850 - DNA, 80 bp, Homo sapiens
  chr2:241872168-241872248
  hypo
tgaattgggggagccacggcgcccactgaggagcccccaacgtgccacatccccccatcaaggggcgtccccaccacaca

SEQ ID NO: 10851 - DNA, 31 bp, Homo sapiens
  chr2:241896340-241896371
  hypo
ggtggccagagcccagcgataggacatagat

SEQ ID NO: 10852 - DNA, 62 bp, Homo sapiens
  chr2:241896389-241896451
  hypo
tctccaagggcccaggcggcctgaggagaggctgtttgtgttgaggtcggggctgctgtcct

SEQ ID NO: 10853 - DNA, 31 bp, Homo sapiens
  chr2:241896470-241896501
  hypo
tgaatagacacaggtgcgagggtgccctggg

SEQ ID NO: 10854 - DNA, 31 bp, Homo sapiens
  chr2:241903090-241903121
  hypo
gccgggcgctgagtgacgaggcccgcgagaa

SEQ ID NO: 10855 - DNA, 31 bp, Homo sapiens
  chr2:241908035-241908066
  hypo
agcggcaggcatggggcggccctggcccagc

SEQ ID NO: 10856 - DNA, 31 bp, Homo sapiens
  chr2:241937929-241937960
  hypo
ctcccacggggcctggcgctttaagagacgc

SEQ ID NO: 10857 - DNA, 43 bp, Homo sapiens
  chr2:241989266-241989309
  hypo
tcaacggaggctcctgcgatgcccatgacgactcctacacctg

SEQ ID NO: 10858 - DNA, 75 bp, Homo sapiens
  chr2:241989350-241989425
  hypo
gtatggcgggcaggggcgtccgggccggcgtcagcaccctggagagcgcccgcggtccgccgtcctgcttctctg

SEQ ID NO: 10859 - DNA, 46 bp, Homo sapiens
  chr2:241989428-241989474
  hypo
tctctctccttgtttcgcgaattgctgacctcgtctagagccttgc

SEQ ID NO: 10860 - DNA, 31 bp, Homo sapiens
  chr2:242004900-242004931
  hypo
tccaggccctggcggccggcagggcctacaa

SEQ ID NO: 10861 - DNA, 56 bp, Homo sapiens
  chr2:242011136-242011192
  hypo
tacatgccccacccatcggccccatcgcccgaggcggcgctcggactgtggtgacc

SEQ ID NO: 10862 - DNA, 31 bp, Homo sapiens
  chr2:242072560-242072591
  hypo
ctctcaccaccccaggcgtcccaggtccaac

SEQ ID NO: 10863 - DNA, 31 bp, Homo sapiens
  chr2:242074733-242074764
  hypo
ccagaatgccaaaatccgagcaccctcaagt

SEQ ID NO: 10864 - DNA, 46 bp, Homo sapiens
  chr2:242130372-242130418
  hypo
ctctggccctgcctgccgctccccgcgcctgcgcatcctgtgcccc

SEQ ID NO: 10865 - DNA, 53 bp, Homo sapiens
  chr2:242142972-242143025
  hypo
taacaatttgccagtccgtacccctggagggcagcgtgcgtgggggcctggac

SEQ ID NO: 10866 - DNA, 51 bp, Homo sapiens
  chr2:242277266-242277317
  hypo
aaggagtgtgttcccacgctcagtctgctcaggtgtcgggaggcagggcgg

SEQ ID NO: 10867 - DNA, 31 bp, Homo sapiens
  chr2:242436355-242436386
  hypo
ctgagcctcctgtcaccgggtgtcacccacc

SEQ ID NO: 10868 - DNA, 31 bp, Homo sapiens
  chr2:242436602-242436633
  hypo
ccaagcccgctggccacgccctgggcacaca

SEQ ID NO: 10869 - DNA, 126 bp, Homo sapiens
  chr2:242523981-242524107
  hypo
agtagccaggccctcccgagggctccagaagctctaggtttacggggtcaccttcttgtaggtgacgtgaagatgctgagtcattggctgtgtcgtggttgccatggagaccgtctgctcaagttt

SEQ ID NO: 10870 - DNA, 31 bp, Homo sapiens
  chr2:242554548-242554579
  hypo
ccaattagatgaaattcgagaccaggcagaa

SEQ ID NO: 10871 - DNA, 47 bp, Homo sapiens
  chr2:242602196-242602243
  hypo
aatcaataaagcgggccgggcgcggtggctcacgcctataatcccaa

SEQ ID NO: 10872 - DNA, 47 bp, Homo sapiens
  chr2:242602249-242602296
  hypo
aaccaataaagtgggccgggcgcggtggctcacgcctataatcccaa

SEQ ID NO: 10873 - DNA, 52 bp, Homo sapiens
  chr2:242602297-242602349
  hypo
ttcaaaatcaataaagcgggccgggcatggtggctcacgcctataatcccaa

SEQ ID NO: 10874 - DNA, 31 bp, Homo sapiens
  chr2:242617340-242617371
  hypo
gacccaccagacaaagcgccaaatgtcaaca

SEQ ID NO: 10875 - DNA, 21 bp, Homo sapiens
  chr2:242673150-242673171
  hypo
aagtgctttgggaggccgacg

SEQ ID NO: 10876 - DNA, 31 bp, Homo sapiens
  chr2:242710640-242710671
  hypo
tcgcatccaggcaggccgtgttctcgcagcc

SEQ ID NO: 10877 - DNA, 210 bp, Homo sapiens
  chr2:242713946-242714156
  hypo
acccctgcccctgccccgaggtggccctgggcttgcccgcccgcctgcagtgtcggctgaagagggtaacgtgcgtgcgccccggctgctcccggctgctcccggctgctccccggctgctccccgctgctcccggctgctccccggctgctccccggctgctccccgctgctcccggctgctctcggctgctcccggctgctccccagc

SEQ ID NO: 10878 - DNA, 31 bp, Homo sapiens
  chr2:242735880-242735911
  hypo
gagctgatggtcgtcacgtatcagggctctg

SEQ ID NO: 10879 - DNA, 31 bp, Homo sapiens
  chr2:242738173-242738204
  hypo
tctggtcccaggagcgcggccctgtcagctc

SEQ ID NO: 10880 - DNA, 31 bp, Homo sapiens
  chr2:242753192-242753223
  hypo
ccccagagggtgtgtgcggaccccagagggt

SEQ ID NO: 10881 - DNA, 66 bp, Homo sapiens
  chr2:242756161-242756227
  hypo
atgctggcacgggcaccgtcttcctcttcttcatcgcggtgctgggccacacgcctgaggccgtgc

SEQ ID NO: 10882 - DNA, 31 bp, Homo sapiens
  chr2:242832899-242832930
  hypo
atgttcaccgtgaatccggcaacctgtggag

SEQ ID NO: 10883 - DNA, 176 bp, Homo sapiens
  chr2:242832983-242833159
  hypo
gcaccaacagtccctgcggggacctttcccggacacccggccttctcggcggtgaggcaggtggcggcaccgacaggcccgggggggacctttcccggacacccagcctcctcggtggcgaggcaggtggcggcaccgacaggcccggcggggacctttcccggacacctggcctc

SEQ ID NO: 10884 - DNA, 31 bp, Homo sapiens
  chr2:242833237-242833268
  hypo
ggcagaactggttccacgtctgatcttcctt

SEQ ID NO: 10885 - DNA, 64 bp, Homo sapiens
  chr2:242833524-242833588
  hypo
acaggagctcagaccccggcatcagaccggcctccgcagggaggagctgcggtgcccaggccag

SEQ ID NO: 10886 - DNA, 66 bp, Homo sapiens
  chr2:242833797-242833863
  hypo
ctgcccaggtcttcacgcgcctaactgagcgtgagcgtgtctgagtcttaccgcagaaacattaaa

SEQ ID NO: 10887 - DNA, 31 bp, Homo sapiens
  chr2:242835073-242835104
  hypo
tccatggccagtgttgcgagggccctggctg

SEQ ID NO: 10888 - DNA, 101 bp, Homo sapiens
  chr2:242836468-242836569
  hypo
ctcagcccatcccacgcggagcctggggcagggcgataatttcggcattgtgagtcaagctctcggaacttagtgacggccaagcccgtgtctctcagcac

SEQ ID NO: 10889 - DNA, 31 bp, Homo sapiens
  chr2:242836609-242836640
  hypo
ggggtgggggtgtcaccgcatccctgcccag

SEQ ID NO: 10890 - DNA, 31 bp, Homo sapiens
  chr2:242925458-242925489
  hypo
atgcatgaacttctggcgtccacaatctagt

SEQ ID NO: 10891 - DNA, 111 bp, Homo sapiens
  chr2:242925495-242925606
  hypo
atctcaaaagatacttcgagcaaaaacaccggacagaagcgtccgtgccagccccgcaggctgcctgtgtgccaggctatcccgtgccatctgatccgggagaagcaggac

SEQ ID NO: 10892 - DNA, 66 bp, Homo sapiens
  chr2:242925610-242925676
  hypo
ttgcacaggtactcagcgctgtggctgtgggaggagccgggagggccctggcgtgggtgggcttgg

SEQ ID NO: 10893 - DNA, 31 bp, Homo sapiens
  chr3:3167654-3167685
  hypo
ccggcaaaagtaatcccggcacttttggggg

SEQ ID NO: 10894 - DNA, 31 bp, Homo sapiens
  chr3:3167987-3168018
  hypo
tctctttgctcttttccgctctagaaagaat

SEQ ID NO: 10895 - DNA, 31 bp, Homo sapiens
  chr3:4748815-4748846
  hypo
acagtagcacctacctcgtggggttgatgtg

SEQ ID NO: 10896 - DNA, 31 bp, Homo sapiens
  chr3:4756207-4756238
  hypo
gagctgagagactgcccgaggtcacgtgtga

SEQ ID NO: 10897 - DNA, 63 bp, Homo sapiens
  chr3:4840916-4840979
  hypo
catcaagggcttgacacgatgtctaacaattgttaaatgcgtagaaagcggcacatgtgcctc

SEQ ID NO: 10898 - DNA, 31 bp, Homo sapiens; identical to SEQ ID NO: 1381
  chr3:5020396-5020427
  hypo

SEQ ID NO: 10899 - DNA, 31 bp, Homo sapiens
  chr3:5030719-5030750
  hypo
atataagaggctgcctcgctttgtggaacag

SEQ ID NO: 10900 - DNA, 37 bp, Homo sapiens
  chr3:5030810-5030847
  hypo
gaagactgtgtgttaacgggatcggcatgttctcctg

SEQ ID NO: 10901 - DNA, 36 bp, Homo sapiens
  chr3:5030860-5030896
  hypo
cctgaggtgtctgccacgtggcgtggagggagggaa

SEQ ID NO: 10902 - DNA, 31 bp, Homo sapiens
  chr3:5066590-5066621
  hypo
tataataaaatctagacggaaatggtccaaa

SEQ ID NO: 10903 - DNA, 31 bp, Homo sapiens
  chr3:5126484-5126515
  hypo
gaatgaatgaataaatcgctcaatgttttta

SEQ ID NO: 10904 - DNA, 71 bp, Homo sapiens
  chr3:5252797-5252868
  hypo
tttgtaggtgtgggtacgccacgctgcatcacgtcattgacaagtccacagaagaccggatggagagcttc

SEQ ID NO: 10905 - DNA, 31 bp, Homo sapiens
  chr3:5252941-5252972
  hypo
gcttagagcaagcattcgcatagtcttccat

SEQ ID NO: 10906 - DNA, 31 bp, Homo sapiens
  chr3:8505218-8505249
  hypo
cgctgacaagaccctccggaactgagcctac

SEQ ID NO: 10907 - DNA, 31 bp, Homo sapiens; identical to SEQ ID NO: 1382
  chr3:8543387-8543418
  hypo

SEQ ID NO: 10908 - DNA, 31 bp, Homo sapiens
  chr3:8595737-8595768
  hypo
tatttttttagatacacggctctcactctct

SEQ ID NO: 10909 - DNA, 12 bp, Homo sapiens
  chr3:8595769-8595781
  hypo
acccaggctgga

SEQ ID NO: 10910 - DNA, 16 bp, Homo sapiens
  chr3:8595840-8595856
  hypo
ccgcctcaacctccca

SEQ ID NO: 10911 - DNA, 31 bp, Homo sapiens
  chr3:8595905-8595936
  hypo
gttgtgatacccatttcgcagatgaggaccc

SEQ ID NO: 10912 - DNA, 29 bp, Homo sapiens
  chr3:8651966-8651995
  hypo
atgtctttactagccgagtgagaacagat

SEQ ID NO: 10913 - DNA, 46 bp, Homo sapiens
  chr3:8669370-8669416
  hypo
gagatgcccctaccttcgcctgccggaccccgcgcacagctgacat

SEQ ID NO: 10914 - DNA, 31 bp, Homo sapiens
  chr3:8787621-8787652
  hypo
tcacaggggctgctggcgagctctttctctt

SEQ ID NO: 10915 - DNA, 31 bp, Homo sapiens
  chr3:9006146-9006177
  hypo
caatttttttcttaaacgagatataaatata

SEQ ID NO: 10916 - DNA, 31 bp, Homo sapiens
  chr3:9173887-9173918
  hypo
acatcttgcattccatcgtgcatttattgca

SEQ ID NO: 10917 - DNA, 31 bp, Homo sapiens
  chr3:9173947-9173978
  hypo
tctgtcacttacattacggctcaccctttgt

SEQ ID NO: 10918 - DNA, 31 bp, Homo sapiens
  chr3:9173989-9174020
  hypo
tctgggttttgacaaacgtctaatgtcatgt

SEQ ID NO: 10919 - DNA, 47 bp, Homo sapiens
  chr3:9174054-9174101
  hypo
ccaccctaaaaatcctcgtgctccacctatttcgccccttattcttc

SEQ ID NO: 10920 - DNA, 31 bp, Homo sapiens
  chr3:9204928-9204959
  hypo
catcagcgcccactctcgtgggagagatcac

SEQ ID NO: 10921 - DNA, 31 bp, Homo sapiens
  chr3:9553507-9553538
  hypo
gctcgccactggctgccggatgcatcttgca

SEQ ID NO: 10922 - DNA, 60 bp, Homo sapiens
  chr3:9553596-9553656
  hypo
tgcatcctttacatggcgactgtttttttttttttttttagacggaatctggctctgtcg

SEQ ID NO: 10923 - DNA, 40 bp, Homo sapiens
  chr3:9793442-9793482
  hypo
ctggtctccaggtgtgcgactgctgcgacaagaccccatc

SEQ ID NO: 10924 - DNA, 31 bp, Homo sapiens; identical to SEQ ID NO: 1388
  chr3:9851988-9852019
  hypo

SEQ ID NO: 10925 - DNA, 31 bp, Homo sapiens
  chr3:9905282-9905313
  hypo
tctccacctatttcttcgtttccactggaaa

SEQ ID NO: 10926 - DNA, 66 bp, Homo sapiens
  chr3:9905322-9905388
  hypo
aacaattcctcagcctcgaccccagggagcggcccccactaaaccagctgacgtgggacccctggg

SEQ ID NO: 10927 - DNA, 31 bp, Homo sapiens
  chr3:9905392-9905423
  hypo
tgctggccaggagatgcggctgacatcaaag

SEQ ID NO: 10928 - DNA, 31 bp, Homo sapiens
  chr3:9905442-9905473
  hypo
cctacaaccctggtcacggtggccatgggat

SEQ ID NO: 10929 - DNA, 31 bp, Homo sapiens
  chr3:9926968-9926999
  hypo
gaaaatactgtatattcgaactaatatcaca

SEQ ID NO: 10930 - DNA, 33 bp, Homo sapiens
  chr3:9941468-9941501
  hypo
aactcattatttgggccgggcgcagtggctcac

SEQ ID NO: 10931 - DNA, 31 bp, Homo sapiens
  chr3:9947647-9947678
  hypo
cgacttactatcaggccggctcatgcctgta

SEQ ID NO: 10932 - DNA, 31 bp, Homo sapiens
  chr3:9948632-9948663
  hypo
tcctctccccaggacccgagttctcctttga

SEQ ID NO: 10933 - DNA, 31 bp, Homo sapiens
  chr3:9963223-9963254
  hypo
atttggattttgttttcgttttgtattttct

SEQ ID NO: 10934 - DNA, 31 bp, Homo sapiens
  chr3:9965746-9965777
  hypo
atgcctgtgcaaaggacgcagtgccatatca

SEQ ID NO: 10935 - DNA, 31 bp, Homo sapiens
  chr3:9989483-9989514
  hypo
agcgggggtgcagtggcgttggctggggggc

SEQ ID NO: 10936 - DNA, 31 bp, Homo sapiens
  chr3:9991407-9991438
  hypo
agaggtcctgtccagccgtgggagcttggtc

SEQ ID NO: 10937 - DNA, 69 bp, Homo sapiens; identical to SEQ ID NO: 1391
  chr3:9993763-9993832
  hypo

SEQ ID NO: 10938 - DNA, 97 bp, Homo sapiens; identical to SEQ ID NO: 1392
  chr3:9993835-9993932
  hypo

SEQ ID NO: 10939 - DNA, 165 bp, Homo sapiens; identical to SEQ ID NO: 1393
  chr3:9993964-9994129
  hypo

SEQ ID NO: 10940 - DNA, 79 bp, Homo sapiens
  chr3:10182837-10182916
  hypo
ttttgtactttataagcgtgatgattgggtgttcccgtgtgagatgcgccaccctcgaaccttgttacgacgtcggcac

SEQ ID NO: 10941 - DNA, 19 bp, Homo sapiens
  chr3:10183215-10183234
  hypo
cgggcgacagagtgagacc

SEQ ID NO: 10942 - DNA, 31 bp, Homo sapiens
  chr3:11050501-11050532
  hypo
ccaatgatcagtttagcgtcaatgtatttag

SEQ ID NO: 10943 - DNA, 53 bp, Homo sapiens
  chr3:11210230-11210283
  hypo
ctcgccccagtcaccccggtggactcaggcactgccgccgcacaatgccacag

SEQ ID NO: 10944 - DNA, 31 bp, Homo sapiens; identical to SEQ ID NO: 1395
  chr3:11258023-11258054
  hypo

SEQ ID NO: 10945 - DNA, 43 bp, Homo sapiens
  chr3:11300931-11300974
  hypo
cggtggcggacttgatcgtgggtgccgtcgtcatgcctatgaa

SEQ ID NO: 10946 - DNA, 100 bp, Homo sapiens
  chr3:11581321-11581421
  hypo
tcctgccctgcacagccgcctggaggttcacctgcatcattgcgtgtgtcagcgcttggtgcctttctgtcgctgagtagcgtctcgctgtgtgagtgta

SEQ ID NO: 10947 - DNA, 31 bp, Homo sapiens
  chr3:11688146-11688177
  hypo
ataaaatatttggtaacgtcccttaagggac

SEQ ID NO: 10948 - DNA, 31 bp, Homo sapiens
  chr3:11712550-11712581
  hypo
cgacagcagctgcccccgtccttaagaccac

SEQ ID NO: 10949 - DNA, 31 bp, Homo sapiens
  chr3:12186613-12186644
  hypo
ataataaaattacaaccgttgctcatgcatg

SEQ ID NO: 10950 - DNA, 31 bp, Homo sapiens
  chr3:12204373-12204404
  hypo
ctgactttccataatacgcataaaatgcagg

SEQ ID NO: 10951 - DNA, 5 bp, Homo sapiens
  chr3:12204450-12204455
  hypo
ttaca

SEQ ID NO: 10952 - DNA, 31 bp, Homo sapiens
  chr3:12223765-12223796
  hypo
agcactgatggtgaagcgagtgctcactgag

SEQ ID NO: 10953 - DNA, 30 bp, Homo sapiens
  chr3:12503124-12503154
  hypo
caggcgaggtggctcacgcctgtaatccta

SEQ ID NO: 10954 - DNA, 31 bp, Homo sapiens
  chr3:12586226-12586257
  hypo
tttttgtttatgctagcgctctcagcaagag

SEQ ID NO: 10955 - DNA, 31 bp, Homo sapiens
  chr3:12734231-12734262
  hypo
tgcaaagcatttaggccgggcacagtggctc

SEQ ID NO: 10956 - DNA, 31 bp, Homo sapiens
  chr3:12788072-12788103
  hypo
gtgaggcacccaggctcggggccttctaggg

SEQ ID NO: 10957 - DNA, 31 bp, Homo sapiens
  chr3:12820765-12820796
  hypo
tataagagaaaatcaacgtgagcttggattt

SEQ ID NO: 10958 - DNA, 31 bp, Homo sapiens
  chr3:12821388-12821419
  hypo
cactaaagaatatacacggatagcaaatagg

SEQ ID NO: 10959 - DNA, 14 bp, Homo sapiens
  chr3:12821453-12821467
  hypo
ttttgagatggagt

SEQ ID NO: 10960 - DNA, 46 bp, Homo sapiens
  chr3:12867101-12867147
  hypo
ccaggagacaaagatccggcgggacctcatccgagaggtgtggagc

SEQ ID NO: 10961 - DNA, 25 bp, Homo sapiens
  chr3:12870930-12870955
  hypo
ccaccacgcccggccccatattaca

SEQ ID NO: 10962 - DNA, 31 bp, Homo sapiens
  chr3:12977044-12977075
  hypo
aggtctgcttgctgagcgtctgctcccgcag

SEQ ID NO: 10963 - DNA, 31 bp, Homo sapiens
  chr3:12977139-12977170
  hypo
atgctgtcattgtcaccgtctgagtagtccg

SEQ ID NO: 10964 - DNA, 31 bp, Homo sapiens
  chr3:12984704-12984735
  hypo
acccagtggtcccctccgcctcaccacctcc

SEQ ID NO: 10965 - DNA, 31 bp, Homo sapiens
  chr3:12984823-12984854
  hypo
cgagctcatcccgactcggaactcgcaagcc

SEQ ID NO: 10966 - DNA, 31 bp, Homo sapiens; identical to SEQ ID NO: 1398
  chr3:13008871-13008902
  hypo

SEQ ID NO: 10967 - DNA, 31 bp, Homo sapiens
  chr3:13028805-13028836
  hypo
agcgagaggtatggtacgtgctgggggcagt

SEQ ID NO: 10968 - DNA, 51 bp, Homo sapiens
  chr3:13028839-13028890
  hypo
ggtagggaaaagaacacggttctcaccaaatggtgccgggccacctgggaa

SEQ ID NO: 10969 - DNA, 31 bp, Homo sapiens
  chr3:13028898-13028929
  hypo
tgtgtgcacctggggccgtgcatgtgcacac

SEQ ID NO: 10970 - DNA, 31 bp, Homo sapiens
  chr3:13028944-13028975
  hypo
agagagagagagagaccgtagatgaaaatct

SEQ ID NO: 10971 - DNA, 101 bp, Homo sapiens
  chr3:13083940-13084041
  hypo
accggctgcttcggcccgccctggtccctgccacggcggcccccactcacatggcccagcccgcccggcgcagcttgtacagtacacgcctccaatacaaa

SEQ ID NO: 10972 - DNA, 40 bp, Homo sapiens
  chr3:13084066-13084106
  hypo
actcattcacgcagctcgcctggcccggctcatgctgctg

SEQ ID NO: 10973 - DNA, 95 bp, Homo sapiens
  chr3:13205533-13205628
  hypo
cacatggtttcatcaacgccgctcaccgccaggattcagacacacggacagaggtggatgaagcacatacctgacgctccgcgagctttctcctt

SEQ ID NO: 10974 - DNA, 31 bp, Homo sapiens
  chr3:13363860-13363891
  hypo
gggtgtgggccaggcccgatggccaccacac

SEQ ID NO: 10975 - DNA, 53 bp, Homo sapiens
  chr3:13501984-13502037
  hypo
tgaaggctttgccaggcgggacccccatggcctggcgccggaaaaggaggttc

SEQ ID NO: 10976 - DNA, 27 bp, Homo sapiens
  chr3:13627315-13627342
  hypo
aaaagcctagcacgtgtagttagttac

SEQ ID NO: 10977 - DNA, 31 bp, Homo sapiens
  chr3:13669959-13669990
  hypo
acagttttacagatgccggcctagtccccaa

SEQ ID NO: 10978 - DNA, 38 bp, Homo sapiens
  chr3:13669993-13670031
  hypo
ggtctgagattctacccgctctgcgccccccatcaact

SEQ ID NO: 10979 - DNA, 31 bp, Homo sapiens
  chr3:13670102-13670133
  hypo
agctagacccctggcacgtggttggtgtagt

SEQ ID NO: 10980 - DNA, 31 bp, Homo sapiens
  chr3:13670135-13670166
  hypo
tcctagcactcagcctcgatcccgccctgcc

SEQ ID NO: 10981 - DNA, 59 bp, Homo sapiens
  chr3:14174652-14174711
  hypo
taaggcctgcactaagcgtctaaggggatttgcacacacggggccggggaagcattttg

SEQ ID NO: 10982 - DNA, 31 bp, Homo sapiens
  chr3:14174748-14174779
  hypo
ggctttccagaggcagcggcatttgttcagg

SEQ ID NO: 10983 - DNA, 31 bp, Homo sapiens
  chr3:14174798-14174829
  hypo
agggaggttagctccacggcatgccagtggt

SEQ ID NO: 10984 - DNA, 1 bp, Homo sapiens
  chr3:14291142-14291143
  hypo
t

SEQ ID NO: 10985 - DNA, 31 bp, Homo sapiens
  chr3:14291205-14291236
  hypo
tatgtgtccatctgtccgtgtctctcactag

SEQ ID NO: 10986 - DNA, 31 bp, Homo sapiens
  chr3:14383871-14383902
  hypo
taggtgccttgccccccgccatctggagctg

SEQ ID NO: 10987 - DNA, 55 bp, Homo sapiens
  chr3:14383961-14384016
  hypo
ccctgagacacacacccgatcctgaccctctgtgtgccagcgcccaggcccctgg

SEQ ID NO: 10988 - DNA, 31 bp, Homo sapiens
  chr3:14384851-14384882
  hypo
attacaaatttaaagccggcaaccaggagca

SEQ ID NO: 10989 - DNA, 42 bp, Homo sapiens
  chr3:14385075-14385117
  hypo
gtcacccctccagtgtcgtgtccctcacgtctgaagccccgt

SEQ ID NO: 10990 - DNA, 37 bp, Homo sapiens
  chr3:14508071-14508108
  hypo
ctggtccgagggctgacgctgccgggcgcgggcgcag

SEQ ID NO: 10991 - DNA, 62 bp, Homo sapiens
  chr3:14564197-14564259
  hypo
gggaccattccacagacgggaaaaccaaggagcaggaaagggaagaacgacaccaaggctgc

SEQ ID NO: 10992 - DNA, 31 bp, Homo sapiens
  chr3:14564298-14564329
  hypo
tggggaagaaagggctcgaggtttccctcat

SEQ ID NO: 10993 - DNA, 31 bp, Homo sapiens
  chr3:14575093-14575124
  hypo
tgaagcacagggtgcccgatgttggctggcg

SEQ ID NO: 10994 - DNA, 39 bp, Homo sapiens
  chr3:14852684-14852723
  hypo
agaaagacgcccctttcgcaaaagcgacttcgtctggcc

SEQ ID NO: 10995 - DNA, 31 bp, Homo sapiens
  chr3:15317991-15318022
  hypo
aattggacggtctccccgccagcaatacatg

SEQ ID NO: 10996 - DNA, 102 bp, Homo sapiens; identical to SEQ ID NO: 1403
  chr3:16554151-16554253
  hypo

SEQ ID NO: 10997 - DNA, 124 bp, Homo sapiens; identical to SEQ ID NO: 1404
  chr3:16554289-16554413
  hypo

SEQ ID NO: 10998 - DNA, 142 bp, Homo sapiens; identical to SEQ ID NO: 1405
  chr3:16554428-16554570
  hypo

SEQ ID NO: 10999 - DNA, 249 bp, Homo sapiens; identical to SEQ ID NO: 1406
  chr3:16554589-16554838
  hypo

SEQ ID NO: 11000 - DNA, 61 bp, Homo sapiens; identical to SEQ ID NO: 1407
  chr3:16555196-16555257
  hypo

SEQ ID NO: 11001 - DNA, 155 bp, Homo sapiens; identical to SEQ ID NO: 1408
  chr3:16555271-16555426
  hypo

SEQ ID NO: 11002 - DNA, 31 bp, Homo sapiens; identical to SEQ ID NO: 1409
  chr3:16555435-16555466
  hypo

SEQ ID NO: 11003 - DNA, 31 bp, Homo sapiens; identical to SEQ ID NO: 1410
  chr3:16555487-16555518
  hypo

SEQ ID NO: 11004 - DNA, 310 bp, Homo sapiens; identical to SEQ ID NO: 1411
  chr3:16925655-16925965
  hypo

SEQ ID NO: 11005 - DNA, 144 bp, Homo sapiens; identical to SEQ ID NO: 1412
  chr3:16925998-16926142
  hypo

SEQ ID NO: 11006 - DNA, 61 bp, Homo sapiens; identical to SEQ ID NO: 1413
  chr3:16926801-16926862
  hypo

SEQ ID NO: 11007 - DNA, 25 bp, Homo sapiens
  chr3:17192867-17192892
  hypo
gagcgagaatcgtctcaaaaaaaaa

SEQ ID NO: 11008 - DNA, 31 bp, Homo sapiens; identical to SEQ ID NO: 1414
  chr3:17571374-17571405
  hypo

SEQ ID NO: 11009 - DNA, 53 bp, Homo sapiens
  chr3:18452750-18452803
  hypo
gatgtgtgtgtgtgcacgtgtgcacgcgcgagtatgtacgcccacatgtgtgg

SEQ ID NO: 11010 - DNA, 31 bp, Homo sapiens
  chr3:18452809-18452840
  hypo
agggaaggtaaaaatgcgcaaatcagattaa

SEQ ID NO: 11011 - DNA, 31 bp, Homo sapiens
  chr3:18452872-18452903
  hypo
tagaaggaagacattacgctggtagaagtaa

SEQ ID NO: 11012 - DNA, 26 bp, Homo sapiens
  chr3:20013244-20013270
  hypo
gtggaagccaccgcacctggcccagt

SEQ ID NO: 11013 - DNA, 37 bp, Homo sapiens
  chr3:20120130-20120167
  hypo
gaagtgctgggattacagctaccgcacccttcatcat

SEQ ID NO: 11014 - DNA, 31 bp, Homo sapiens
  chr3:20171684-20171715
  hypo
tggagctttttgtcttcgactcctagcacta

SEQ ID NO: 11015 - DNA, 20 bp, Homo sapiens
  chr3:23924048-23924068
  hypo
gggaccgggagccgcggagc

SEQ ID NO: 11016 - DNA, 65 bp, Homo sapiens; identical to SEQ ID NO: 1416
  chr3:23986745-23986810
  hypo

SEQ ID NO: 11017 - DNA, 31 bp, Homo sapiens
  chr3:24436869-24436900
  hypo
atctgtatctaaaatacgtaaaggactatta

SEQ ID NO: 11018 - DNA, 31 bp, Homo sapiens
  chr3:24436903-24436934
  hypo
ctcaataatgataaaacgaataatccaattg

SEQ ID NO: 11019 - DNA, 72 bp, Homo sapiens
  chr3:24436993-24437065
  hypo
aaagcacataaaaagacgttcaacttgatttgcagtacacgcaaatcaaaactacagcgatataccatttca

SEQ ID NO: 11020 - DNA, 59 bp, Homo sapiens; identical to SEQ ID NO: 1417
  chr3:24536767-24536826
  hypo

SEQ ID NO: 11021 - DNA, 31 bp, Homo sapiens; identical to SEQ ID NO: 1418
  chr3:24536986-24537017
  hypo

SEQ ID NO: 11022 - DNA, 54 bp, Homo sapiens; identical to SEQ ID NO: 1419
  chr3:24563200-24563254
  hypo

SEQ ID NO: 11023 - DNA, 22 bp, Homo sapiens
  chr3:27487117-27487139
  hypo
tattgtaatggctgggcgcagc

SEQ ID NO: 11024 - DNA, 31 bp, Homo sapiens
  chr3:27514260-27514291
  hypo
aattccttttcaaaaacgaattgcatcaggc

SEQ ID NO: 11025 - DNA, 31 bp, Homo sapiens
  chr3:27519020-27519051
  hypo
ctgtttggcaataccacgtaatattaagctg

SEQ ID NO: 11026 - DNA, 38 bp, Homo sapiens
  chr3:27587340-27587378
  hypo
gcaaaattggagagagcgtctccctctgtcgcccaggc

SEQ ID NO: 11027 - DNA, 37 bp, Homo sapiens
  chr3:30574869-30574906
  hypo
taaagaaaatcaatgacgtggtcgcccatgtgcccac

SEQ ID NO: 11028 - DNA, 31 bp, Homo sapiens
  chr3:31398337-31398368
  hypo
gaggtccaagaggagtcggtgggcaggtaaa

SEQ ID NO: 11029 - DNA, 31 bp, Homo sapiens
  chr3:32151265-32151296
  hypo
cagctggacacagtcccggtccttaaacaac

SEQ ID NO: 11030 - DNA, 31 bp, Homo sapiens
  chr3:32151323-32151354
  hypo
acatggaagataagaccgaaggaattgccaa

SEQ ID NO: 11031 - DNA, 31 bp, Homo sapiens
  chr3:32151373-32151404
  hypo
ctgttacactttaaatcgtgtttcttttttt

SEQ ID NO: 11032 - DNA, 31 bp, Homo sapiens
  chr3:32300385-32300416
  hypo
ctgagttctgtcccctcgcttccccacccca

SEQ ID NO: 11033 - DNA, 31 bp, Homo sapiens
  chr3:32412106-32412137
  hypo
taagtgcagtgactgacgtgcttgtgatatt

SEQ ID NO: 11034 - DNA, 76 bp, Homo sapiens; identical to SEQ ID NO: 1420
  chr3:32433864-32433940
  hypo

SEQ ID NO: 11035 - DNA, 35 bp, Homo sapiens; identical to SEQ ID NO: 1421
  chr3:32612741-32612776
  hypo

SEQ ID NO: 11036 - DNA, 31 bp, Homo sapiens
  chr3:32886061-32886092
  hypo
aaaattttgtagagagcgtctcaccagtgac

SEQ ID NO: 11037 - DNA, 31 bp, Homo sapiens
  chr3:32891114-32891145
  hypo
tgctgggatttacaggcgtgagcctggccta

SEQ ID NO: 11038 - DNA, 31 bp, Homo sapiens
  chr3:33841158-33841189
  hypo
ataagaacattttttacgattttatagttaa

SEQ ID NO: 11039 - DNA, 40 bp, Homo sapiens
  chr3:33841201-33841241
  hypo
cataccttgttaatctcgttttctccgtatagtatattct

SEQ ID NO: 11040 - DNA, 36 bp, Homo sapiens
  chr3:33841317-33841353
  hypo
aaaagacttattctgccgggcgcggtggctcacgcc

SEQ ID NO: 11041 - DNA, 42 bp, Homo sapiens
  chr3:33841690-33841732
  hypo
aggtatcactggagatcgtcttgcctccgtgatgcttccctc

SEQ ID NO: 11042 - DNA, 31 bp, Homo sapiens
  chr3:36778834-36778865
  hypo
aggtctcctccctgcacgtactccaggatca

SEQ ID NO: 11043 - DNA, 31 bp, Homo sapiens; identical to SEQ ID NO: 1426
  chr3:37034213-37034244
  hypo

SEQ ID NO: 11044 - DNA, 232 bp, Homo sapiens; identical to SEQ ID NO: 1427
  chr3:37034290-37034522
  hypo

SEQ ID NO: 11045 - DNA, 35 bp, Homo sapiens
  chr3:37214388-37214423
  hypo
gttgagttttattggccgggcgtggtggctcatcc

SEQ ID NO: 11046 - DNA, 62 bp, Homo sapiens
  chr3:37774453-37774515
  hypo
acaccggggtatactccggaggggctgcatcatatggtctttctcttcgattcacatgatgt

SEQ ID NO: 11047 - DNA, 21 bp, Homo sapiens
  chr3:37983173-37983194
  hypo
ttgggccgggcatgttttcat

SEQ ID NO: 11048 - DNA, 67 bp, Homo sapiens
  chr3:38017264-38017331
  hypo
atcatgtgtttttcatcgtgggaactacgtgaaggacctgagtcgccttgggcgggagctgagcaaa

SEQ ID NO: 11049 - DNA, 31 bp, Homo sapiens
  chr3:38017396-38017427
  hypo
caaagaaagaaaatgtcgtgctccatctgag

SEQ ID NO: 11050 - DNA, 47 bp, Homo sapiens
  chr3:38032424-38032471
  hypo
ggccacagagcctccgcggcagaattgggaggcggcagcagcccagc

SEQ ID NO: 11051 - DNA, 30 bp, Homo sapiens; identical to SEQ ID NO: 1436
  chr3:38495144-38495174
  hypo

SEQ ID NO: 11052 - DNA, 52 bp, Homo sapiens; identical to SEQ ID NO: 1437
  chr3:38495213-38495265
  hypo

SEQ ID NO: 11053 - DNA, 102 bp, Homo sapiens; identical to SEQ ID NO: 1438
  chr3:38495678-38495780
  hypo

SEQ ID NO: 11054 - DNA, 150 bp, Homo sapiens; identical to SEQ ID NO: 1439
  chr3:38496020-38496170
  hypo

SEQ ID NO: 11055 - DNA, 71 bp, Homo sapiens; identical to SEQ ID NO: 1442
  chr3:38496417-38496488
  hypo

SEQ ID NO: 11056 - DNA, 356 bp, Homo sapiens; identical to SEQ ID NO: 1443
  chr3:38496526-38496882
  hypo

SEQ ID NO: 11057 - DNA, 82 bp, Homo sapiens; identical to SEQ ID NO: 1444
  chr3:38496886-38496968
  hypo

SEQ ID NO: 11058 - DNA, 31 bp, Homo sapiens; identical to SEQ ID NO: 1445
  chr3:38497012-38497043
  hypo

SEQ ID NO: 11059 - DNA, 116 bp, Homo sapiens; identical to SEQ ID NO: 1446
  chr3:38497048-38497164
  hypo

SEQ ID NO: 11060 - DNA, 31 bp, Homo sapiens
  chr3:38645195-38645226
  hypo
ggctcaccgtgtctggcgggtgctctagcat

SEQ ID NO: 11061 - DNA, 43 bp, Homo sapiens; identical to SEQ ID NO: 1448
  chr3:39148466-39148509
  hypo

SEQ ID NO: 11062 - DNA, 31 bp, Homo sapiens
  chr3:39229445-39229476
  hypo
ggtcagggcatggaggcggcccttgctgtcc

SEQ ID NO: 11063 - DNA, 46 bp, Homo sapiens
  chr3:40172134-40172180
  hypo
tgctgggattacaagcgtgagccaccgcgcccggcctctagtccaa

SEQ ID NO: 11064 - DNA, 31 bp, Homo sapiens
  chr3:40231757-40231788
  hypo
tgcatggagagctggacgtgaacttcaaccc

SEQ ID NO: 11065 - DNA, 31 bp, Homo sapiens
  chr3:40231795-40231826
  hypo
gccagcagggagacctcggacagcagcgagc

SEQ ID NO: 11066 - DNA, 31 bp, Homo sapiens
  chr3:40374173-40374204
  hypo
aagaaaataatccagccgttggtggtaggag

SEQ ID NO: 11067 - DNA, 31 bp, Homo sapiens
  chr3:40374247-40374278
  hypo
agcagagcaatgagcacgccagagatttgtt

SEQ ID NO: 11068 - DNA, 72 bp, Homo sapiens
  chr3:41119484-41119556
  hypo
gctacgggagagtgcccgcccaccagtgttcataccggagtttctaagcctggacagcggtccccacagtgg

SEQ ID NO: 11069 - DNA, 59 bp, Homo sapiens
  chr3:41119570-41119629
  hypo
gaggaaggtgacagcacggtggcctccaataacctggtctgacacgtgttcacacaagc

SEQ ID NO: 11070 - DNA, 31 bp, Homo sapiens
  chr3:41119644-41119675
  hypo
tagaagtaccttgagacgggatttttaaaag

SEQ ID NO: 11071 - DNA, 53 bp, Homo sapiens
  chr3:41289146-41289199
  hypo
gccatgaccaggagaccgttccatgcattcctgctctgcgcatcaaagcccct

SEQ ID NO: 11072 - DNA, 31 bp, Homo sapiens
  chr3:41289200-41289231
  hypo
tgtgacagaaggaatgcgtttgaacttggcc

SEQ ID NO: 11073 - DNA, 37 bp, Homo sapiens
  chr3:41289257-41289294
  hypo
tagtggggccatgctgcgcccccgcacacagcaggcc

SEQ ID NO: 11074 - DNA, 31 bp, Homo sapiens
  chr3:41289318-41289349
  hypo
actggcagagcagcatcggaactgagaacaa

SEQ ID NO: 11075 - DNA, 31 bp, Homo sapiens
  chr3:42159858-42159889
  hypo
taggtgtgagccactgcgccccgctgagatc

SEQ ID NO: 11076 - DNA, 21 bp, Homo sapiens
  chr3:42162757-42162778
  hypo
ttttttttttttgagacggag

SEQ ID NO: 11077 - DNA, 53 bp, Homo sapiens
  chr3:42222605-42222658
  hypo
cctgttggtttctggccgtttgtgtgctggaagccttccgcatccttcaggtg

SEQ ID NO: 11078 - DNA, 42 bp, Homo sapiens
  chr3:42222718-42222760
  hypo
tttgcattgaaatgtgcgtacaaaatgcggctaaaggccggg

SEQ ID NO: 11079 - DNA, 63 bp, Homo sapiens
  chr3:42249919-42249982
  hypo
ctctgcgcacaccatgcggcctctccctcaccccaccgcctcccacctcggcctgcctgtgtt

SEQ ID NO: 11080 - DNA, 38 bp, Homo sapiens
  chr3:42569052-42569090
  hypo
cccagcgtggcccaggcgtgccccgacccctccactgt

SEQ ID NO: 11081 - DNA, 13 bp, Homo sapiens
  chr3:42640753-42640766
  hypo
cccatgtaatgtg

SEQ ID NO: 11082 - DNA, 20 bp, Homo sapiens
  chr3:42640854-42640874
  hypo
atatatggtcacaaggcgaa

SEQ ID NO: 11083 - DNA, 31 bp, Homo sapiens; identical to SEQ ID NO: 1452
  chr3:42696340-42696371
  hypo

SEQ ID NO: 11084 - DNA, 41 bp, Homo sapiens; identical to SEQ ID NO: 1453
  chr3:42696420-42696461
  hypo

SEQ ID NO: 11085 - DNA, 71 bp, Homo sapiens; identical to SEQ ID NO: 1454
  chr3:42814257-42814328
  hypo

SEQ ID NO: 11086 - DNA, 110 bp, Homo sapiens; identical to SEQ ID NO: 1455
  chr3:42814331-42814441
  hypo

SEQ ID NO: 11087 - DNA, 31 bp, Homo sapiens; identical to SEQ ID NO: 1456
  chr3:42814445-42814476
  hypo

SEQ ID NO: 11088 - DNA, 416 bp, Homo sapiens; identical to SEQ ID NO: 1457
  chr3:42814490-42814906
  hypo

SEQ ID NO: 11089 - DNA, 43 bp, Homo sapiens
  chr3:42906565-42906608
  hypo
gtgtgtggaactgccacgcagatttcggcgggcatgggaccat

SEQ ID NO: 11090 - DNA, 45 bp, Homo sapiens
  chr3:43074999-43075044
  hypo
ccataccgagtgggcacgcctggcgctcttcgacttcctgttgca

SEQ ID NO: 11091 - DNA, 40 bp, Homo sapiens; identical to SEQ ID NO: 1460
  chr3:43147124-43147164
  hypo

SEQ ID NO: 11092 - DNA, 104 bp, Homo sapiens; identical to SEQ ID NO: 1461
  chr3:43147168-43147272
  hypo

SEQ ID NO: 11093 - DNA, 164 bp, Homo sapiens; identical to SEQ ID NO: 1462
  chr3:43147273-43147437
  hypo

SEQ ID NO: 11094 - DNA, 110 bp, Homo sapiens; identical to SEQ ID NO: 1463
  chr3:43147463-43147573
  hypo

SEQ ID NO: 11095 - DNA, 135 bp, Homo sapiens; identical to SEQ ID NO: 1464
  chr3:43147591-43147726
  hypo

SEQ ID NO: 11096 - DNA, 43 bp, Homo sapiens; identical to SEQ ID NO: 1466
  chr3:43663333-43663376
  hypo

SEQ ID NO: 11097 - DNA, 57 bp, Homo sapiens; identical to SEQ ID NO: 1467
  chr3:43663491-43663548
  hypo

SEQ ID NO: 11098 - DNA, 31 bp, Homo sapiens
  chr3:44295784-44295815
  hypo
ttcctttgacattgaccgtatgacatacata

SEQ ID NO: 11099 - DNA, 31 bp, Homo sapiens; identical to SEQ ID NO: 1469
  chr3:44379883-44379914
  hypo

SEQ ID NO: 11100 - DNA, 42 bp, Homo sapiens; identical to SEQ ID NO: 1470
  chr3:44518641-44518683
  hypo

SEQ ID NO: 11101 - DNA, 33 bp, Homo sapiens
  chr3:44902782-44902815
  hypo
ggaaacattctaaacatacgtaagtataacagg

SEQ ID NO: 11102 - DNA, 35 bp, Homo sapiens
  chr3:44999994-45000029
  hypo
aaacattcaatagccacgtgcgcagcttggcatat

SEQ ID NO: 11103 - DNA, 31 bp, Homo sapiens
  chr3:45000079-45000110
  hypo
caagaggcacttgctgcggcctgaaacaggc

SEQ ID NO: 11104 - DNA, 57 bp, Homo sapiens
  chr3:45000124-45000181
  hypo
aggaaaagatgcacctcgcccaagcaaagtgaaggccatttccgtgcaggttcctgg

SEQ ID NO: 11105 - DNA, 30 bp, Homo sapiens
  chr3:45365530-45365560
  hypo
acaggcgtgagccaccgcacctggcctcca

SEQ ID NO: 11106 - DNA, 31 bp, Homo sapiens
  chr3:46586213-46586244
  hypo
gttgaatgaaaggcgccgtcacttaaattga

SEQ ID NO: 11107 - DNA, 49 bp, Homo sapiens
  chr3:46586267-46586316
  hypo
tgttaagggtctagggcggggaacaggagaggaacgcatcctgaaagac

SEQ ID NO: 11108 - DNA, 31 bp, Homo sapiens
  chr3:46713299-46713330
  hypo
aggtatcagaagatatcgtggttgggggtgg

SEQ ID NO: 11109 - DNA, 44 bp, Homo sapiens
  chr3:46943638-46943682
  hypo
ctgaggaacaggtaggcggtgagtggccccgggaaggctgcagc

SEQ ID NO: 11110 - DNA, 31 bp, Homo sapiens
  chr3:46944571-46944602
  hypo
tagattctgggtgtgtcggctgcctgtagcc

SEQ ID NO: 11111 - DNA, 93 bp, Homo sapiens
  chr3:46944661-46944754
  hypo
attcccattttcattccgtgctgggtgtccaggggccgggatggggcatcgctggggttgggagacacacctgactgccgcacccttactgcc

SEQ ID NO: 11112 - DNA, 31 bp, Homo sapiens
  chr3:46947810-46947841
  hypo
aggctgcgagaagaatcgctgaaggcccttg

SEQ ID NO: 11113 - DNA, 29 bp, Homo sapiens
  chr3:46996119-46996148
  hypo
gaacaggtatttccaccgggcacggtggc

SEQ ID NO: 11114 - DNA, 31 bp, Homo sapiens
  chr3:47087395-47087426
  hypo
gctgggactacaggtgcggagcaaaatatgt

SEQ ID NO: 11115 - DNA, 21 bp, Homo sapiens
  chr3:47275290-47275311
  hypo
gaggggaagccaggcacggtg

SEQ ID NO: 11116 - DNA, 41 bp, Homo sapiens
  chr3:47373435-47373476
  hypo
ggagagctggggcacacgcccagggacgggggacaggtaga

SEQ ID NO: 11117 - DNA, 55 bp, Homo sapiens
  chr3:47373519-47373574
  hypo
gagtgaggatgagggacgaaggttagaaacttaaggaaggccgggagcagtggct

SEQ ID NO: 11118 - DNA, 19 bp, Homo sapiens
  chr3:47411264-47411283
  hypo
agaacgggacgcaggccgg

SEQ ID NO: 11119 - DNA, 23 bp, Homo sapiens
  chr3:47555870-47555893
  hypo
ggccgacacggaattatatcttg

SEQ ID NO: 11120 - DNA, 28 bp, Homo sapiens
  chr3:47799254-47799282
  hypo
caaagcgaggctccgtatcaaaaaaaaa

SEQ ID NO: 11121 - DNA, 31 bp, Homo sapiens
  chr3:48179596-48179627
  hypo
gcttgattaaggaggccgggcgcggtagctc

SEQ ID NO: 11122 - DNA, 3 bp, Homo sapiens
  chr3:48236566-48236569
  hypo
cag

SEQ ID NO: 11123 - DNA, 51 bp, Homo sapiens
  chr3:48263633-48263684
  hypo
gcccagtggggacaaccgggacgttcatgggagtctcgaactcagagatac

SEQ ID NO: 11124 - DNA, 47 bp, Homo sapiens
  chr3:48263714-48263761
  hypo
gtgtcctgggagagggcgtccccagggaaacccgaggccagggaaga

SEQ ID NO: 11125 - DNA, 31 bp, Homo sapiens
  chr3:48263771-48263802
  hypo
aggaggtgaccccacacgctctcaatattaa

SEQ ID NO: 11126 - DNA, 26 bp, Homo sapiens
  chr3:48275731-48275757
  hypo
ccgcacccagccggaaatctgtttta

SEQ ID NO: 11127 - DNA, 25 bp, Homo sapiens
  chr3:48316726-48316751
  hypo
tgagccaccacgcccgacctcttaa

SEQ ID NO: 11128 - DNA, 31 bp, Homo sapiens
  chr3:48451212-48451243
  hypo
cggcactgtgcctgcacgagccccacaccac

SEQ ID NO: 11129 - DNA, 31 bp, Homo sapiens
  chr3:48456271-48456302
  hypo
ggctgcagggtggggtcggcctcataggaga

SEQ ID NO: 11130 - DNA, 31 bp, Homo sapiens
  chr3:48459417-48459448
  hypo
gcccctgatggtgacacgggtgcctccgtct

SEQ ID NO: 11131 - DNA, 31 bp, Homo sapiens
  chr3:48459583-48459614
  hypo
cagcctttcaacaaaccgagtggatgagggg

SEQ ID NO: 11132 - DNA, 31 bp, Homo sapiens
  chr3:48459644-48459675
  hypo
ctcaccacaggcctcccgggtcacacaacgt

SEQ ID NO: 11133 - DNA, 31 bp, Homo sapiens
  chr3:48461256-48461287
  hypo
gtgggatgaagagcctcggggccagggtctg

SEQ ID NO: 11134 - DNA, 31 bp, Homo sapiens
  chr3:48461296-48461327
  hypo
ctgctgctacctctgacggtgacagcgggga

SEQ ID NO: 11135 - DNA, 31 bp, Homo sapiens
  chr3:48563028-48563059
  hypo
tcctggtcccgcagggcgaactccagtggat

SEQ ID NO: 11136 - DNA, 52 bp, Homo sapiens
  chr3:48563061-48563113
  hypo
ttatcctgaatttcctcgtaggtcatttcctcacagacgccctagggagata

SEQ ID NO: 11137 - DNA, 31 bp, Homo sapiens
  chr3:48584749-48584780
  hypo
ctgtgcatatggtatacgcatgtccggatgt

SEQ ID NO: 11138 - DNA, 31 bp, Homo sapiens
  chr3:48604090-48604121
  hypo
acctgctcccctctctcgccaggagctccag

SEQ ID NO: 11139 - DNA, 31 bp, Homo sapiens
  chr3:48605091-48605122
  hypo
ttggcccccgtccacccgtggccccctcatt

SEQ ID NO: 11140 - DNA, 40 bp, Homo sapiens
  chr3:48607710-48607750
  hypo
gatgcctggctccccacgctcgcctcggggcccaggcagc

SEQ ID NO: 11141 - DNA, 31 bp, Homo sapiens
  chr3:48622954-48622985
  hypo
tgcctcagagaaacctcgatggtctccacac

SEQ ID NO: 11142 - DNA, 31 bp, Homo sapiens
  chr3:48684050-48684081
  hypo
agattcacacagaacccggcaaggatggggc

SEQ ID NO: 11143 - DNA, 31 bp, Homo sapiens
  chr3:48685739-48685770
  hypo
agttccatattccttgcgagtgtggctgcat

SEQ ID NO: 11144 - DNA, 35 bp, Homo sapiens
  chr3:48733584-48733619
  hypo
ggattacaggtgtgagcgaccgcacccagccccat

SEQ ID NO: 11145 - DNA, 31 bp, Homo sapiens
  chr3:48948534-48948565
  hypo
tatgcagcactcctcacggtgataatttttt

SEQ ID NO: 11146 - DNA, 42 bp, Homo sapiens
  chr3:48954851-48954893
  hypo
caggcgtgagccacggtgcccggccacgcggcatgattttta

SEQ ID NO: 11147 - DNA, 13 bp, Homo sapiens
  chr3:48954959-48954972
  hypo
ctggactgcagtg

SEQ ID NO: 11148 - DNA, 38 bp, Homo sapiens
  chr3:49034203-49034241
  hypo
tataattaagtctgtccggggttcgacaaacagcatct

SEQ ID NO: 11149 - DNA, 31 bp, Homo sapiens
  chr3:49142733-49142764
  hypo
caggaaagggaagggacgggtctgggccagg

SEQ ID NO: 11150 - DNA, 31 bp, Homo sapiens
  chr3:49167302-49167333
  hypo
cccaaagaagccatcacggcattgctggcag

SEQ ID NO: 11151 - DNA, 31 bp, Homo sapiens
  chr3:49168953-49168984
  hypo
atgccagccctcacctcgccttcagtggatg

SEQ ID NO: 11152 - DNA, 23 bp, Homo sapiens
  chr3:49243948-49243971
  hypo
actgcacccggcccagaggtcac

SEQ ID NO: 11153 - DNA, 32 bp, Homo sapiens
  chr3:49433705-49433737
  hypo
tttcaagaagtcagcccggggccaggcctggt

SEQ ID NO: 11154 - DNA, 34 bp, Homo sapiens
  chr3:49532338-49532372
  hypo
tacaggtgtgagccaccggcgcttggctgcttgg

SEQ ID NO: 11155 - DNA, 41 bp, Homo sapiens
  chr3:49636112-49636153
  hypo
tacaggcatgagccaccgtgcccggccgccaccattacact

SEQ ID NO: 11156 - DNA, 31 bp, Homo sapiens
  chr3:49636178-49636209
  hypo
cccataaaactgtgtacgaagcaaagatata

SEQ ID NO: 11157 - DNA, 31 bp, Homo sapiens
  chr3:49662398-49662429
  hypo
tcatttcagcacttcccggagactggacccc

SEQ ID NO: 11158 - DNA, 31 bp, Homo sapiens
  chr3:49662453-49662484
  hypo
gcagcttccccaactccgaagcaggcttctg

SEQ ID NO: 11159 - DNA, 31 bp, Homo sapiens
  chr3:49662494-49662525
  hypo
tggccatgagagcccccgagagacaagggca

SEQ ID NO: 11160 - DNA, 59 bp, Homo sapiens
  chr3:49688340-49688399
  hypo
ccaggaaaagaagacccgagtccccactaaagctgagcccatgccgaagccacctccag

SEQ ID NO: 11161 - DNA, 31 bp, Homo sapiens
  chr3:49688401-49688432
  hypo
actaccccaacccctgcgactcctaaagtaa

SEQ ID NO: 11162 - DNA, 31 bp, Homo sapiens
  chr3:49688453-49688484
  hypo
aacctgccacccctgtcgtcaaggctgttcc

SEQ ID NO: 11163 - DNA, 31 bp, Homo sapiens
  chr3:49688491-49688522
  hypo
cccaagggtggggaggcggaggtcagtccca

SEQ ID NO: 11164 - DNA, 31 bp, Homo sapiens
  chr3:49698034-49698065
  hypo
agccagcctgctgcagcgagggctgacgggg

SEQ ID NO: 11165 - DNA, 31 bp, Homo sapiens
  chr3:49700336-49700367
  hypo
ctggtttgataagccccgggatgcccgctct

SEQ ID NO: 11166 - DNA, 31 bp, Homo sapiens
  chr3:49700894-49700925
  hypo
ctctggggcagcatcacgccagccacagaca

SEQ ID NO: 11167 - DNA, 31 bp, Homo sapiens
  chr3:49701764-49701795
  hypo
tgtgttcagattctctcgtgggtacttgccc

SEQ ID NO: 11168 - DNA, 42 bp, Homo sapiens
  chr3:49755534-49755576
  hypo
actacgtgcttgtggacgctggccttgcggctgggtgcgtct

SEQ ID NO: 11169 - DNA, 54 bp, Homo sapiens
  chr3:49755786-49755840
  hypo
acgctcacgttgtactcgtgcgtctggttgtggtgcaggcggggcccagtggcc

SEQ ID NO: 11170 - DNA, 73 bp, Homo sapiens; identical to SEQ ID NO: 1476
  chr3:49907057-49907130
  hypo

SEQ ID NO: 11171 - DNA, 31 bp, Homo sapiens
  chr3:49928713-49928744
  hypo
ctgatgaggtccttcacggtggggttctggg

SEQ ID NO: 11172 - DNA, 31 bp, Homo sapiens
  chr3:49940324-49940355
  hypo
tgggcagcactgacaacgccacaaagcccgg

SEQ ID NO: 11173 - DNA, 31 bp, Homo sapiens
  chr3:49977173-49977204
  hypo
atttctctcacactaacggacaataaggagg

SEQ ID NO: 11174 - DNA, 39 bp, Homo sapiens; identical to SEQ ID NO: 1478
  chr3:50192965-50193004
  hypo

SEQ ID NO: 11175 - DNA, 48 bp, Homo sapiens; identical to SEQ ID NO: 1479
  chr3:50193032-50193080
  hypo

SEQ ID NO: 11176 - DNA, 31 bp, Homo sapiens
  chr3:50218760-50218791
  hypo
ttcctgctttttgagacggttgtctcactgt

SEQ ID NO: 11177 - DNA, 31 bp, Homo sapiens
  chr3:50220857-50220888
  hypo
tgttccgaggctctgccgtgtgtgtctactc

SEQ ID NO: 11178 - DNA, 58 bp, Homo sapiens
  chr3:50224042-50224100
  hypo
aagccaacaagaatgccgtggagtctgtgcagtatggcgtggccggcagcgcagcctt

SEQ ID NO: 11179 - DNA, 49 bp, Homo sapiens
  chr3:50225312-50225361
  hypo
caccactgtccatgagcgccccgccacccccaggcgcaggccccccaac

SEQ ID NO: 11180 - DNA, 31 bp, Homo sapiens
  chr3:50255894-50255925
  hypo
cctggctgtgccttgccgctgtggaggtgag

SEQ ID NO: 11181 - DNA, 31 bp, Homo sapiens; identical to SEQ ID NO: 1480
  chr3:50374390-50374421
  hypo

SEQ ID NO: 11182 - DNA, 31 bp, Homo sapiens; identical to SEQ ID NO: 1481
  chr3:50374463-50374494
  hypo

SEQ ID NO: 11183 - DNA, 91 bp, Homo sapiens; identical to SEQ ID NO: 1482
  chr3:50375341-50375432
  hypo

SEQ ID NO: 11184 - DNA, 55 bp, Homo sapiens; identical to SEQ ID NO: 1483
  chr3:50375442-50375497
  hypo

SEQ ID NO: 11185 - DNA, 58 bp, Homo sapiens
  chr3:50395834-50395892
  hypo
gtcagccatgtcccctcggccccggctatggcgctggtagaagcgaagatatacccaa

SEQ ID NO: 11186 - DNA, 31 bp, Homo sapiens
  chr3:50417389-50417420
  hypo
ctcactcacacatccacgatgatgaccatgt

SEQ ID NO: 11187 - DNA, 41 bp, Homo sapiens
  chr3:50420381-50420422
  hypo
gctactcagccccatgcgcacagacccgtacccacctgcac

SEQ ID NO: 11188 - DNA, 31 bp, Homo sapiens
  chr3:50438043-50438074
  hypo
agggccgagcagggtccgtgacttacgtgct

SEQ ID NO: 11189 - DNA, 54 bp, Homo sapiens
  chr3:50523257-50523311
  hypo
gggatatagcaatcagcgagaggcactaacaaacaagcccgggcctcccagggg

SEQ ID NO: 11190 - DNA, 267 bp, Homo sapiens; identical to SEQ ID NO: 1486
  chr3:50605016-50605283
  hypo

SEQ ID NO: 11191 - DNA, 80 bp, Homo sapiens; identical to SEQ ID NO: 1487
  chr3:50605292-50605372
  hypo

SEQ ID NO: 11192 - DNA, 31 bp, Homo sapiens
  chr3:51660734-51660765
  hypo
acaggcatgagccaccgcgcccagcccccaa

SEQ ID NO: 11193 - DNA, 41 bp, Homo sapiens; identical to SEQ ID NO: 1488
  chr3:52001296-52001337
  hypo

SEQ ID NO: 11194 - DNA, 31 bp, Homo sapiens
  chr3:52257401-52257432
  hypo
gaggtttcccagcccacggaaccaactggca

SEQ ID NO: 11195 - DNA, 26 bp, Homo sapiens
  chr3:52352345-52352371
  hypo
gccactgcgcccggcctggaggtgca

SEQ ID NO: 11196 - DNA, 31 bp, Homo sapiens; identical to SEQ ID NO: 1489
  chr3:52477535-52477566
  hypo

SEQ ID NO: 11197 - DNA, 31 bp, Homo sapiens
  chr3:52485958-52485989
  hypo
gcatcctcacaccaaacgccaggcttgtgta

SEQ ID NO: 11198 - DNA, 31 bp, Homo sapiens
  chr3:52487923-52487954
  hypo
ctggggctactaaccccgcactctcagctga

SEQ ID NO: 11199 - DNA, 31 bp, Homo sapiens
  chr3:52538705-52538736
  hypo
aagaggactggccccccggctcactttgctc

SEQ ID NO: 11200 - DNA, 56 bp, Homo sapiens
  chr3:52540174-52540230
  hypo
ccttgccccagctgaccgttgagaagctcatctccaagggtcggatcctcaccatg

SEQ ID NO: 11201 - DNA, 31 bp, Homo sapiens
  chr3:52540367-52540398
  hypo
cactgctaggccatggcgggctcatggggaa

SEQ ID NO: 11202 - DNA, 31 bp, Homo sapiens
  chr3:52540566-52540597
  hypo
tggctggtatggccagcggggccttcagcag

SEQ ID NO: 11203 - DNA, 39 bp, Homo sapiens
  chr3:52552851-52552890
  hypo
ctcagggcacccactgcgcttcagcgagagggaggtgag

SEQ ID NO: 11204 - DNA, 38 bp, Homo sapiens
  chr3:52553247-52553285
  hypo
tctgcttcatcagccccgtgccccgcccccagggcagc

SEQ ID NO: 11205 - DNA, 37 bp, Homo sapiens
  chr3:52553515-52553552
  hypo
ctcagagaaatgtcaccgccgccgcccagggcttcgg

SEQ ID NO: 11206 - DNA, 38 bp, Homo sapiens
  chr3:52558860-52558898
  hypo
cagccagcacctgcctcgactccgcgtcctgataggtc

SEQ ID NO: 11207 - DNA, 31 bp, Homo sapiens
  chr3:52558927-52558958
  hypo
gcacccaggaggctaccgccctggccctccc

SEQ ID NO: 11208 - DNA, 31 bp, Homo sapiens
  chr3:52599736-52599767
  hypo
tctaaaaaaagacatacgaatgtccaatagg

SEQ ID NO: 11209 - DNA, 31 bp, Homo sapiens
  chr3:52900370-52900401
  hypo
gcttgccaccgtctaccgccttgaggggcct

SEQ ID NO: 11210 - DNA, 31 bp, Homo sapiens
  chr3:52900429-52900460
  hypo
acctgctctctcctctcggacatgagcccag

SEQ ID NO: 11211 - DNA, 31 bp, Homo sapiens
  chr3:53014728-53014759
  hypo
acaggtgcaaaaacctcgcattttgtgtgaa

SEQ ID NO: 11212 - DNA, 28 bp, Homo sapiens
  chr3:53032136-53032164
  hypo
aaaatgtagatcaggtcgggcacggtgg

SEQ ID NO: 11213 - DNA, 31 bp, Homo sapiens
  chr3:53032443-53032474
  hypo
aatattattttgctgacgcattggagaaagt

SEQ ID NO: 11214 - DNA, 37 bp, Homo sapiens
  chr3:53032549-53032586
  hypo
gcccagccatagctctcgccctcgcagggtccctcca

SEQ ID NO: 11215 - DNA, 37 bp, Homo sapiens
  chr3:53032621-53032658
  hypo
gccatggctaagaaagcgccagcgcccacccacctgg

SEQ ID NO: 11216 - DNA, 172 bp, Homo sapiens
  chr3:53032797-53032969
  hypo
ggggagctggtgctgccgatcgacctgactggcccacaacgtcttcagctaccactgcaagggcctgcggggtgacggctgtgcagcgctgctcgcctagctgttgatcgcctggctgttgatgggctggcacccgcagagctgccctgccggccaccgaccaccatggagg

SEQ ID NO: 11217 - DNA, 31 bp, Homo sapiens
  chr3:53032970-53033001
  hypo
agcattcagctggtgcgcgagctgggtacta

SEQ ID NO: 11218 - DNA, 37 bp, Homo sapiens
  chr3:53033004-53033041
  hypo
tggctctactgtgagccgccctcggcccctccatctc

SEQ ID NO: 11219 - DNA, 216 bp, Homo sapiens
  chr3:53033047-53033263
  hypo
ccccttgtcatccatgcgtaagccggggacgcccgaggacatgctcttcacccaaggcctgcgccggcgtctgctgatcaagggcccagtacaaaggccgtcatggagatccaggccttcgccaacagcggcctgttctggtgcaagggccagccgggcagcccaaggacctcacgactggctgctgggtcaaggcgttcccggggtgaaggtgga

SEQ ID NO: 11220 - DNA, 133 bp, Homo sapiens
  chr3:53033279-53033412
  hypo
ggctcctggaaccctacgtgaaggaggccaagcacagccgtggacaccggcctgaaggctgggaaaggagccgacgccccacctcctctgaccaggcctgcggggaggagccacccacgcgccacagcaagtc

SEQ ID NO: 11221 - DNA, 67 bp, Homo sapiens
  chr3:53033457-53033524
  hypo
ctgagagagctgcttccggattgcgttggggtagtcaaggagctcgggacatcgcaggggaggcaaa

SEQ ID NO: 11222 - DNA, 51 bp, Homo sapiens
  chr3:53033584-53033635
  hypo
tgatgctatgttcaaacgctccagaagacaggagttcgtgtccttgcccct

SEQ ID NO: 11223 - DNA, 40 bp, Homo sapiens
  chr3:53132044-53132084
  hypo
gagtagaaagcatcagcgtgtcctacgcataactggggta

SEQ ID NO: 11224 - DNA, 56 bp, Homo sapiens
  chr3:53132113-53132169
  hypo
cacacacacctaagtgcgtcctaggtcacagtgctccgtgtcgtttttactgtgaa

SEQ ID NO: 11225 - DNA, 105 bp, Homo sapiens; identical to SEQ ID NO: 1490
  chr3:53195773-53195878
  hypo

SEQ ID NO: 11226 - DNA, 38 bp, Homo sapiens; identical to SEQ ID NO: 1492
  chr3:53528138-53528176
  hypo

SEQ ID NO: 11227 - DNA, 68 bp, Homo sapiens; identical to SEQ ID NO: 1494
  chr3:53528642-53528710
  hypo

SEQ ID NO: 11228 - DNA, 31 bp, Homo sapiens
  chr3:53675066-53675097
  hypo
gagcagacgtgaagaccgtaccttccagtga

SEQ ID NO: 11229 - DNA, 31 bp, Homo sapiens
  chr3:53675127-53675158
  hypo
tgagggactggaggcacgtggaggaggaagg

SEQ ID NO: 11230 - DNA, 49 bp, Homo sapiens
  chr3:53675171-53675220
  hypo
gcaggggcactgtcctcgctggacccatgacagacgtcagttggttgtt

SEQ ID NO: 11231 - DNA, 31 bp, Homo sapiens
  chr3:53675238-53675269
  hypo
agattgcagaggtcctcggggatgccagatg

SEQ ID NO: 11232 - DNA, 31 bp, Homo sapiens
  chr3:53757556-53757587
  hypo
accggtttgattgcttcgtggtgtgtggtgg

SEQ ID NO: 11233 - DNA, 31 bp, Homo sapiens
  chr3:53841385-53841416
  hypo
cagtgcgcactgggcacgagagaccaggact

SEQ ID NO: 11234 - DNA, 35 bp, Homo sapiens
  chr3:53842745-53842780
  hypo
tcccatcttcccccatcgcacggccctgcctctgc

SEQ ID NO: 11235 - DNA, 44 bp, Homo sapiens
  chr3:53844087-53844131
  hypo
agcaacccctccctaccgggactggacaccgtgctacacccccc

SEQ ID NO: 11236 - DNA, 37 bp, Homo sapiens
  chr3:53845188-53845225
  hypo
tgtcagcaacaaaacacgaaatcgctgatgcctgtga

SEQ ID NO: 11237 - DNA, 31 bp, Homo sapiens
  chr3:53845385-53845416
  hypo
gatgaggaggacctggcggatgaaatgatat

SEQ ID NO: 11238 - DNA, 60 bp, Homo sapiens
  chr3:53857418-53857478
  hypo
gtggcctccaggaatgcgcagtgcagcgggtggttggtcttgccccgggacacccgcagc

SEQ ID NO: 11239 - DNA, 31 bp, Homo sapiens
  chr3:54307079-54307110
  hypo
ctcggctccagctgcacgtccagctcttccg

SEQ ID NO: 11240 - DNA, 62 bp, Homo sapiens
  chr3:56718132-56718194
  hypo
agaaaaaataaacttgcggtcacattaaaaaatacacagcaggtcgtcgctctcccataaag

SEQ ID NO: 11241 - DNA, 39 bp, Homo sapiens
  chr3:56718242-56718281
  hypo
tcagtataaactatcacgggttatcgtgagtacagccaa

SEQ ID NO: 11242 - DNA, 62 bp, Homo sapiens
  chr3:56718285-56718347
  hypo
tactgagtgctttctacgtgctagacacggactggacaagtgatttacgtgcattgtctcca

SEQ ID NO: 11243 - DNA, 62 bp, Homo sapiens
  chr3:56718389-56718451
  hypo
cagaatttgaaagaagcgttgcaagacactggacaaattatggtaaccgaagatttgaaacc

SEQ ID NO: 11244 - DNA, 3 bp, Homo sapiens
  chr3:56882997-56883000
  hypo
cac

SEQ ID NO: 11245 - DNA, 31 bp, Homo sapiens
  chr3:56883014-56883045
  hypo
acacttgatgtaccagcggctttttaaagag

SEQ ID NO: 11246 - DNA, 31 bp, Homo sapiens
  chr3:56883064-56883095
  hypo
attatcagcaggtatccgctctttatttagt

SEQ ID NO: 11247 - DNA, 58 bp, Homo sapiens
  chr3:57040321-57040379
  hypo
cgatgccaatgaccagcgtgaggtatctggagaaccactacaccgacaagatagattt

SEQ ID NO: 11248 - DNA, 41 bp, Homo sapiens
  chr3:57040453-57040494
  hypo
caaggaactcattaggcggagctccccgctccgatctccac

SEQ ID NO: 11249 - DNA, 31 bp, Homo sapiens
  chr3:57044050-57044081
  hypo
agctgccttctgagcccgggcttctgacctc

SEQ ID NO: 11250 - DNA, 33 bp, Homo sapiens
  chr3:57101180-57101213
  hypo
aaagaataacatttgtcggccaggcgcggtggc

SEQ ID NO: 11251 - DNA, 31 bp, Homo sapiens; identical to SEQ ID NO: 1498
  chr3:57113349-57113380
  hypo

SEQ ID NO: 11252 - DNA, 35 bp, Homo sapiens; identical to SEQ ID NO: 1499
  chr3:57113437-57113472
  hypo

SEQ ID NO: 11253 - DNA, 38 bp, Homo sapiens
  chr3:57131628-57131666
  hypo
cctgaagaggaggacacgctctccgtcagggaagacgt

SEQ ID NO: 11254 - DNA, 31 bp, Homo sapiens
  chr3:57131713-57131744
  hypo
cggatgagggcacagacgagtcatagatgcc

SEQ ID NO: 11255 - DNA, 31 bp, Homo sapiens; identical to SEQ ID NO: 1503
  chr3:57261347-57261378
  hypo

SEQ ID NO: 11256 - DNA, 31 bp, Homo sapiens
  chr3:57539554-57539585
  hypo
cttttttttttttttccgagacagagtcttg

SEQ ID NO: 11257 - DNA, 25 bp, Homo sapiens
  chr3:58713169-58713194
  hypo
ttctttttttttgagacggagtttc

SEQ ID NO: 11258 - DNA, 31 bp, Homo sapiens; identical to SEQ ID NO: 1506
  chr3:61656125-61656156
  hypo

SEQ ID NO: 11259 - DNA, 48 bp, Homo sapiens; identical to SEQ ID NO: 1507
  chr3:61656168-61656216
  hypo

SEQ ID NO: 11260 - DNA, 31 bp, Homo sapiens
  chr3:63867446-63867477
  hypo
agccactgcacccagccgcttgattggagca

SEQ ID NO: 11261 - DNA, 31 bp, Homo sapiens; identical to SEQ ID NO: 1509
  chr3:64673805-64673836
  hypo

SEQ ID NO: 11262 - DNA, 31 bp, Homo sapiens
  chr3:65364854-65364885
  hypo
tgagtcagctttcactcgcaagagaacaaaa

SEQ ID NO: 11263 - DNA, 105 bp, Homo sapiens
  chr3:65364905-65365010
  hypo
accctgggtaatttcacgttcagcactcaccaaaggtcgtgcctgcttcgggcctgctcaccgaggacacgatgacgaagccgaagccctcgttctccccgcgcc

SEQ ID NO: 11264 - DNA, 31 bp, Homo sapiens
  chr3:65368389-65368420
  hypo
gctaagaacatgaactcgagtcagaccttat

SEQ ID NO: 11265 - DNA, 31 bp, Homo sapiens
  chr3:65368600-65368631
  hypo
accacaaggaaattaacgatacctatttcag

SEQ ID NO: 11266 - DNA, 31 bp, Homo sapiens
  chr3:65435158-65435189
  hypo
acaatcaggggccaggcgtggtgtctcatgc

SEQ ID NO: 11267 - DNA, 21 bp, Homo sapiens
  chr3:65676965-65676986
  hypo
agactccgtctcaaaaaaaaa

SEQ ID NO: 11268 - DNA, 20 bp, Homo sapiens
  chr3:65722694-65722714
  hypo
ttttgagacggagtctcgct

SEQ ID NO: 11269 - DNA, 31 bp, Homo sapiens
  chr3:65999147-65999178
  hypo
agatagaggccagactcggtggctcaagcct

SEQ ID NO: 11270 - DNA, 64 bp, Homo sapiens; identical to SEQ ID NO: 1512
  chr3:66024641-66024705
  hypo

SEQ ID NO: 11271 - DNA, 67 bp, Homo sapiens; identical to SEQ ID NO: 1513
  chr3:66024996-66025063
  hypo

SEQ ID NO: 11272 - DNA, 39 bp, Homo sapiens
  chr3:66455987-66456026
  hypo
agtctgtattctgccccgagagagcggacatctggcccc

SEQ ID NO: 11273 - DNA, 31 bp, Homo sapiens
  chr3:66456048-66456079
  hypo
ggttccttaaggctcccgtctgctctcatac

SEQ ID NO: 11274 - DNA, 31 bp, Homo sapiens
  chr3:66456091-66456122
  hypo
cttttctggacatgaccgagaaactgcagaa

SEQ ID NO: 11275 - DNA, 52 bp, Homo sapiens
  chr3:66460440-66460492
  hypo
gtctctgagccctccccgaggccactgtgtggtggaacgaaccaggcctagc

SEQ ID NO: 11276 - DNA, 31 bp, Homo sapiens
  chr3:66461117-66461148
  hypo
gacccaggccaacaaacgggcacaggagttc

SEQ ID NO: 11277 - DNA, 42 bp, Homo sapiens
  chr3:66461172-66461214
  hypo
ggaatagaaaggagagcgaataggaggcggctcttattatca

SEQ ID NO: 11278 - DNA, 31 bp, Homo sapiens
  chr3:66463001-66463032
  hypo
ggaagggggctgggtccggctgaagtcttga

SEQ ID NO: 11279 - DNA, 40 bp, Homo sapiens
  chr3:66482907-66482947
  hypo
cttaccagtagctaggcgctggcttcgctcttaacatctt

SEQ ID NO: 11280 - DNA, 44 bp, Homo sapiens
  chr3:66482963-66483007
  hypo
atgacaaccccagaggcggccactattaccgtccccattttaca

SEQ ID NO: 11281 - DNA, 31 bp, Homo sapiens
  chr3:66483009-66483040
  hypo
tggggatgctaaggcacggaaaggtcaactc

SEQ ID NO: 11282 - DNA, 31 bp, Homo sapiens
  chr3:66483073-66483104
  hypo
agttgggactggagcccggaacaggaatcca

SEQ ID NO: 11283 - DNA, 31 bp, Homo sapiens
  chr3:66521939-66521970
  hypo
agcctagggccccagccgctgcagggagagc

SEQ ID NO: 11284 - DNA, 56 bp, Homo sapiens
  chr3:66521983-66522039
  hypo
tcccaaccagcagggacggagggcatggcggggatgaagggcggccagaggtaaaa

SEQ ID NO: 11285 - DNA, 41 bp, Homo sapiens
  chr3:66522077-66522118
  hypo
tcataaatgaaaaccacgctctactgcggcagaaaacggag

SEQ ID NO: 11286 - DNA, 280 bp, Homo sapiens; identical to SEQ ID NO: 1514
  chr3:66550413-66550693
  hypo

SEQ ID NO: 11287 - DNA, 68 bp, Homo sapiens; identical to SEQ ID NO: 1515
  chr3:66550698-66550766
  hypo

SEQ ID NO: 11288 - DNA, 69 bp, Homo sapiens; identical to SEQ ID NO: 1516
  chr3:66550867-66550936
  hypo

SEQ ID NO: 11289 - DNA, 80 bp, Homo sapiens; identical to SEQ ID NO: 1517
  chr3:66551011-66551091
  hypo

SEQ ID NO: 11290 - DNA, 356 bp, Homo sapiens; identical to SEQ ID NO: 1518
  chr3:66551117-66551473
  hypo

SEQ ID NO: 11291 - DNA, 126 bp, Homo sapiens; identical to SEQ ID NO: 1519
  chr3:66551524-66551650
  hypo

SEQ ID NO: 11292 - DNA, 31 bp, Homo sapiens; identical to SEQ ID NO: 1520
  chr3:66551712-66551743
  hypo

SEQ ID NO: 11293 - DNA, 76 bp, Homo sapiens; identical to SEQ ID NO: 1521
  chr3:66551785-66551861
  hypo

SEQ ID NO: 11294 - DNA, 30 bp, Homo sapiens
  chr3:66744845-66744875
  hypo
gcgtaagccaccgtgcgcatccatgttctg

SEQ ID NO: 11295 - DNA, 31 bp, Homo sapiens
  chr3:66852897-66852928
  hypo
tagtgtaaaagtaatacgagaacttttagca

SEQ ID NO: 11296 - DNA, 31 bp, Homo sapiens
  chr3:66852984-66853015
  hypo
tttttaaacctggcagcgctgtttcagaaaa

SEQ ID NO: 11297 - DNA, 31 bp, Homo sapiens
  chr3:66853016-66853047
  hypo
gatccatgttagctaacgtctaacagttaga

SEQ ID NO: 11298 - DNA, 2 bp, Homo sapiens
  chr3:66853051-66853053
  hypo
tt

SEQ ID NO: 11299 - DNA, 36 bp, Homo sapiens
  chr3:67079760-67079796
  hypo
gtaagaatgaataggccgggcgcggtggctcatgcc

SEQ ID NO: 11300 - DNA, 18 bp, Homo sapiens
  chr3:69309256-69309274
  hypo
acgtgctagcagccctcg

SEQ ID NO: 11301 - DNA, 47 bp, Homo sapiens
  chr3:69309483-69309530
  hypo
cgggtgggcgtgggctcggcagcctctgcacccggagcggctggtcg

SEQ ID NO: 11302 - DNA, 31 bp, Homo sapiens; identical to SEQ ID NO: 1523
  chr3:69788413-69788444
  hypo

SEQ ID NO: 11303 - DNA, 148 bp, Homo sapiens; identical to SEQ ID NO: 1524
  chr3:69788530-69788678
  hypo

SEQ ID NO: 11304 - DNA, 41 bp, Homo sapiens
  chr3:70901511-70901552
  hypo
ggaagtgaagacagaccgcacgctcacggaaatagcgtttg

SEQ ID NO: 11305 - DNA, 49 bp, Homo sapiens; identical to SEQ ID NO: 1525
  chr3:71114104-71114153
  hypo

SEQ ID NO: 11306 - DNA, 12 bp, Homo sapiens
  chr3:71127280-71127292
  hypo
cctcctctgtat

SEQ ID NO: 11307 - DNA, 31 bp, Homo sapiens
  chr3:71163676-71163707
  hypo
taagaaacacaagcaccgatagatgagtgac

SEQ ID NO: 11308 - DNA, 26 bp, Homo sapiens
  chr3:71510925-71510951
  hypo
gggaaaaagagcgagactctgtatcg

SEQ ID NO: 11309 - DNA, 50 bp, Homo sapiens
  chr3:71533899-71533949
  hypo
tgtctcagtgtgggcccgaaagtctgtatttaatgcgcttcccaggcagt

SEQ ID NO: 11310 - DNA, 31 bp, Homo sapiens
  chr3:71533962-71533993
  hypo
tttgaaaaacacaaaacgtggaggtaaagaa

SEQ ID NO: 11311 - DNA, 133 bp, Homo sapiens; identical to SEQ ID NO: 1526
  chr3:71631263-71631396
  hypo

SEQ ID NO: 11312 - DNA, 103 bp, Homo sapiens; identical to SEQ ID NO: 1527
  chr3:71631398-71631501
  hypo

SEQ ID NO: 11313 - DNA, 110 bp, Homo sapiens; identical to SEQ ID NO: 1528
  chr3:71631789-71631899
  hypo

SEQ ID NO: 11314 - DNA, 5 bp, Homo sapiens
  chr3:72506010-72506015
  hypo
gttct

SEQ ID NO: 11315 - DNA, 31 bp, Homo sapiens
  chr3:72506018-72506049
  hypo
atgtttattaaagccccgggcccagaaattg

SEQ ID NO: 11316 - DNA, 31 bp, Homo sapiens
  chr3:72739581-72739612
  hypo
tgtgagccactgtgcccggtctgaatcccat

SEQ ID NO: 11317 - DNA, 31 bp, Homo sapiens; identical to SEQ ID NO: 1533
  chr3:72896942-72896973
  hypo

SEQ ID NO: 11318 - DNA, 31 bp, Homo sapiens
  chr3:72913684-72913715
  hypo
cttttagagataaccacgttaactaacatct

SEQ ID NO: 11319 - DNA, 32 bp, Homo sapiens
  chr3:72964697-72964729
  hypo
ttgagggagctgggcgcgggtggctcacgcct

SEQ ID NO: 11320 - DNA, 31 bp, Homo sapiens
  chr3:72998942-72998973
  hypo
tgtgagccacagtgcccggcctcattctttc

SEQ ID NO: 11321 - DNA, 15 bp, Homo sapiens
  chr3:73045128-73045143
  hypo
ttttttgaaacagtc

SEQ ID NO: 11322 - DNA, 42 bp, Homo sapiens
  chr3:73045563-73045605
  hypo
ctctacgttttttaggcgcattctgaacgtgaagtgtataca

SEQ ID NO: 11323 - DNA, 31 bp, Homo sapiens
  chr3:73045730-73045761
  hypo
tcaaagcctaggagtccgcctgcaaccctct

SEQ ID NO: 11324 - DNA, 31 bp, Homo sapiens
  chr3:74039864-74039895
  hypo
gtgcagccaagatggccgaataggaatagct

SEQ ID NO: 11325 - DNA, 31 bp, Homo sapiens; identical to SEQ ID NO: 1535
  chr3:74663813-74663844
  hypo

SEQ ID NO: 11326 - DNA, 31 bp, Homo sapiens
  chr3:82247998-82248029
  hypo
caaagtaaatggcttccgaatagtatatata

SEQ ID NO: 11327 - DNA, 31 bp, Homo sapiens
  chr3:82248105-82248136
  hypo
atatttttgtgtacatcgtgttcaagctttg

SEQ ID NO: 11328 - DNA, 45 bp, Homo sapiens
  chr3:82248152-82248197
  hypo
aaacctttacaggtatcgagaaactcacgccgtataacactaatg

SEQ ID NO: 11329 - DNA, 41 bp, Homo sapiens
  chr3:84175658-84175699
  hypo
ctgagtgggcaaatctcgggaaaaggcgccaccaccacaga

SEQ ID NO: 11330 - DNA, 31 bp, Homo sapiens
  chr3:85471958-85471989
  hypo
caggagctggggcgagcgctttggggcttca

SEQ ID NO: 11331 - DNA, 31 bp, Homo sapiens
  chr3:93697928-93697959
  hypo
ttatttatttttgagacggagtcttgctctg

SEQ ID NO: 11332 - DNA, 102 bp, Homo sapiens; identical to SEQ ID NO: 1536
  chr3:97690940-97691042
  hypo

SEQ ID NO: 11333 - DNA, 19 bp, Homo sapiens
  chr3:99535344-99535363
  hypo
aaagcgttgggattacagg

SEQ ID NO: 11334 - DNA, 31 bp, Homo sapiens
  chr3:99622031-99622062
  hypo
aaaacagtagctggcacgtcataaatctgtg

SEQ ID NO: 11335 - DNA, 31 bp, Homo sapiens
  chr3:99694509-99694540
  hypo
acacagaggaagagagcgttctgttttagac

SEQ ID NO: 11336 - DNA, 58 bp, Homo sapiens
  chr3:99944287-99944345
  hypo
acctacaaggggtgcccgagcggctgctgggggcggcggggaccgaagagaagaagaa

SEQ ID NO: 11337 - DNA, 31 bp, Homo sapiens
  chr3:99944373-99944404
  hypo
caggaagcaaatgaaacgttggcagagatgg

SEQ ID NO: 11338 - DNA, 23 bp, Homo sapiens
  chr3:99981552-99981575
  hypo
gtgaggctcggtctcaaaaaaaa

SEQ ID NO: 11339 - DNA, 31 bp, Homo sapiens
  chr3:101230986-101231017
  hypo
tctctgcagaaaccaacggtaccatcagaaa

SEQ ID NO: 11340 - DNA, 35 bp, Homo sapiens
  chr3:101231035-101231070
  hypo
taattgattcattgggcgttcgtttgtgtactgga

SEQ ID NO: 11341 - DNA, 26 bp, Homo sapiens
  chr3:101406822-101406848
  hypo
ttttttttccttgagacggagtttcg

SEQ ID NO: 11342 - DNA, 79 bp, Homo sapiens; identical to SEQ ID NO: 1543
  chr3:113557397-113557476
  hypo

SEQ ID NO: 11343 - DNA, 29 bp, Homo sapiens
  chr3:115502400-115502429
  hypo
caagagcgaaacgccgtctcaaaagaaaa

SEQ ID NO: 11344 - DNA, 59 bp, Homo sapiens
  chr3:119342486-119342545
  hypo
cagcctgcttccctgacgctgggtgtgtggagagggagcagggccgttgctgtatttaa

SEQ ID NO: 11345 - DNA, 31 bp, Homo sapiens; identical to SEQ ID NO: 1545
  chr3:120068919-120068950
  hypo

SEQ ID NO: 11346 - DNA, 41 bp, Homo sapiens
  chr3:120150380-120150421
  hypo
cagttatggctggatgcggtggctcacgcctgttatcccag

SEQ ID NO: 11347 - DNA, 31 bp, Homo sapiens
  chr3:120150552-120150583
  hypo
tctgacctcactgcatcggaggaggagggtt

SEQ ID NO: 11348 - DNA, 41 bp, Homo sapiens
  chr3:121280184-121280225
  hypo
cccagggttggccgggcgtggtggctcacgcctgtaatccc

SEQ ID NO: 11349 - DNA, 21 bp, Homo sapiens
  chr3:121511496-121511517
  hypo
agactccgtctcaaaaaaaaa

SEQ ID NO: 11350 - DNA, 31 bp, Homo sapiens
  chr3:121563923-121563954
  hypo
tgaaaagctctgatgccgaaagaacaaagag

SEQ ID NO: 11351 - DNA, 31 bp, Homo sapiens
  chr3:121563959-121563990
  hypo
ggaataagtgactttacgtagtaaatcatag

SEQ ID NO: 11352 - DNA, 29 bp, Homo sapiens
  chr3:121563996-121564025
  hypo
gaaaaatgggatgggcgcggtggctcacc

SEQ ID NO: 11353 - DNA, 27 bp, Homo sapiens
  chr3:121612931-121612958
  hypo
taggattatatgcgtgaaccaccgcgc

SEQ ID NO: 11354 - DNA, 35 bp, Homo sapiens
  chr3:121638036-121638071
  hypo
ctctcctgtagtctagcgagcgggagcgtgttacg

SEQ ID NO: 11355 - DNA, 27 bp, Homo sapiens
  chr3:121657605-121657632
  hypo
gctgttcctattcggccatcttggctc

SEQ ID NO: 11356 - DNA, 43 bp, Homo sapiens
  chr3:122231269-122231312
  hypo
ataaagtaacataatgcggctgggcgcggtggctcatgcctgt

SEQ ID NO: 11357 - DNA, 33 bp, Homo sapiens
  chr3:122234241-122234274
  hypo
aaaaataattaagggccgggcgcggtggctcac

SEQ ID NO: 11358 - DNA, 45 bp, Homo sapiens; identical to SEQ ID NO: 1548
  chr3:122296693-122296738
  hypo

SEQ ID NO: 11359 - DNA, 99 bp, Homo sapiens; identical to SEQ ID NO: 1549
  chr3:122514391-122514490
  hypo

SEQ ID NO: 11360 - DNA, 31 bp, Homo sapiens; identical to SEQ ID NO: 1550
  chr3:122514524-122514555
  hypo

SEQ ID NO: 11361 - DNA, 22 bp, Homo sapiens
  chr3:122573648-122573670
  hypo
gactcaaaggctgggcgcggtg

SEQ ID NO: 11362 - DNA, 31 bp, Homo sapiens
  chr3:122762423-122762454
  hypo
ctactaattctgctggcgactggctttgaaa

SEQ ID NO: 11363 - DNA, 70 bp, Homo sapiens; identical to SEQ ID NO: 1551
  chr3:122785819-122785889
  hypo

SEQ ID NO: 11364 - DNA, 31 bp, Homo sapiens
  chr3:122844185-122844216
  hypo
gtaaggaagatgttaccgttctcttcatttt

SEQ ID NO: 11365 - DNA, 31 bp, Homo sapiens
  chr3:123061284-123061315
  hypo
cctgatgtgtggggagcggggctgactacct

SEQ ID NO: 11366 - DNA, 31 bp, Homo sapiens
  chr3:123064299-123064330
  hypo
agcacctttgtccatgcggtgccagggacaa

SEQ ID NO: 11367 - DNA, 31 bp, Homo sapiens
  chr3:123161050-123161081
  hypo
cctgggaaacacatgacggcaggttgcaccc

SEQ ID NO: 11368 - DNA, 31 bp, Homo sapiens
  chr3:123356920-123356951
  hypo
atgtagcagatgaccccgatgctccacatgt

SEQ ID NO: 11369 - DNA, 31 bp, Homo sapiens
  chr3:123528975-123529006
  hypo
gagtgcccacaatacccgctaggactataaa

SEQ ID NO: 11370 - DNA, 89 bp, Homo sapiens; identical to SEQ ID NO: 1552
  chr3:123752027-123752116
  hypo

SEQ ID NO: 11371 - DNA, 31 bp, Homo sapiens
  chr3:124281775-124281806
  hypo
ggtagagctgctggagcggcccagcgagcgg

SEQ ID NO: 11372 - DNA, 31 bp, Homo sapiens
  chr3:124331583-124331614
  hypo
aagtttctaatttcagcgactttgtctgtct

SEQ ID NO: 11373 - DNA, 31 bp, Homo sapiens
  chr3:124377424-124377455
  hypo
tttcagaaataccagacgtcatccatccata

SEQ ID NO: 11374 - DNA, 31 bp, Homo sapiens
  chr3:124436153-124436184
  hypo
agtagctttctatatccgagacatcatggag

SEQ ID NO: 11375 - DNA, 7 bp, Homo sapiens
  chr3:124436242-124436249
  hypo
gtggcaa

SEQ ID NO: 11376 - DNA, 29 bp, Homo sapiens
  chr3:124440790-124440819
  hypo
gcaaaattctgtctcgaaaaaaaaggaaa

SEQ ID NO: 11377 - DNA, 52 bp, Homo sapiens
  chr3:124515491-124515543
  hypo
ctcccgttgcacctggcgctgttgggttccagccccacgctgcagccgcacg

SEQ ID NO: 11378 - DNA, 31 bp, Homo sapiens
  chr3:124516871-124516902
  hypo
cttaattctattctttcggctagaataaagc

SEQ ID NO: 11379 - DNA, 38 bp, Homo sapiens
  chr3:124518662-124518700
  hypo
atgaggtctacctcatcggggtgcgcagggagagccag

SEQ ID NO: 11380 - DNA, 44 bp, Homo sapiens
  chr3:124518757-124518801
  hypo
ctccacatctttctgccgtgggctgggaacgatttgagcctgca

SEQ ID NO: 11381 - DNA, 41 bp, Homo sapiens
  chr3:124518815-124518856
  hypo
ggggactatgcctgcccgaagccacccgtggggccatcaag

SEQ ID NO: 11382 - DNA, 61 bp, Homo sapiens; identical to SEQ ID NO: 1554
  chr3:124605739-124605800
  hypo

SEQ ID NO: 11383 - DNA, 50 bp, Homo sapiens; identical to SEQ ID NO: 1555
  chr3:124605853-124605903
  hypo

SEQ ID NO: 11384 - DNA, 31 bp, Homo sapiens
  chr3:124884655-124884686
  hypo
agtgccaggccagctgcgaggcccagagagc

SEQ ID NO: 11385 - DNA, 33 bp, Homo sapiens
  chr3:125412959-125412992
  hypo
tgatagccagggtagacggtgacattacttcat

SEQ ID NO: 11386 - DNA, 31 bp, Homo sapiens; identical to SEQ ID NO: 1556
  chr3:125635404-125635435
  hypo

SEQ ID NO: 11387 - DNA, 31 bp, Homo sapiens
  chr3:125652362-125652393
  hypo
aggttggccaggtgcccgtcacaccaacccc

SEQ ID NO: 11388 - DNA, 43 bp, Homo sapiens
  chr3:125678378-125678421
  hypo
aggccagccgccccggcggtcgctgctgcgcctcaggtagccc

SEQ ID NO: 11389 - DNA, 31 bp, Homo sapiens
  chr3:125679194-125679225
  hypo
acagtgcccccacctgcgtgtgctgcctgtg

SEQ ID NO: 11390 - DNA, 65 bp, Homo sapiens
  chr3:125679707-125679772
  hypo
ctcaggactctgcctccgccacccccgtgggcacacactgaagggttgcccgcagggtctccaga

SEQ ID NO: 11391 - DNA, 31 bp, Homo sapiens
  chr3:125679847-125679878
  hypo
ttgacctagatgcagtcgggcagacctcaca

SEQ ID NO: 11392 - DNA, 31 bp, Homo sapiens
  chr3:125774552-125774583
  hypo
ctcaatgattccaatacgctgcccaaaccat

SEQ ID NO: 11393 - DNA, 51 bp, Homo sapiens
  chr3:125774612-125774663
  hypo
aatctccctcagcacacgcctccactgcagggagaccgccatggccctccc

SEQ ID NO: 11394 - DNA, 44 bp, Homo sapiens
  chr3:125774695-125774739
  hypo
tttttaccaggggccacgccaggatgctgcgggctgggcacact

SEQ ID NO: 11395 - DNA, 31 bp, Homo sapiens
  chr3:125793293-125793324
  hypo
aggaaaagaaatgagacgtatccagcttgaa

SEQ ID NO: 11396 - DNA, 45 bp, Homo sapiens
  chr3:125793436-125793481
  hypo
gtgtaggactggaggacgcaggtcaatacacgaaagtcagttttt

SEQ ID NO: 11397 - DNA, 31 bp, Homo sapiens
  chr3:125828922-125828953
  hypo
gcccaccttcatcttccgcacctcttctacc

SEQ ID NO: 11398 - DNA, 31 bp, Homo sapiens
  chr3:125846598-125846629
  hypo
acagtgagggtggacccggggctggggctct

SEQ ID NO: 11399 - DNA, 31 bp, Homo sapiens
  chr3:125977271-125977302
  hypo
ccatccaggagtcactcgcatggctactgtc

SEQ ID NO: 11400 - DNA, 57 bp, Homo sapiens
  chr3:125977332-125977389
  hypo
gggatggcctctctggcgtgtctggcagttggtgctggcggtcgactggggcacctt

SEQ ID NO: 11401 - DNA, 31 bp, Homo sapiens
  chr3:125977430-125977461
  hypo
ggtctttcctatagcacggtgggctcagggc

SEQ ID NO: 11402 - DNA, 37 bp, Homo sapiens
  chr3:126137172-126137209
  hypo
ccggtagtcacctgggcgtggacgcaaagcagtggcc

SEQ ID NO: 11403 - DNA, 92 bp, Homo sapiens; identical to SEQ ID NO: 1558
  chr3:126195082-126195174
  hypo

SEQ ID NO: 11404 - DNA, 31 bp, Homo sapiens
  chr3:126202246-126202277
  hypo
ctctcccctcggcctccggggtaccgtccag

SEQ ID NO: 11405 - DNA, 31 bp, Homo sapiens
  chr3:126218193-126218224
  hypo
cacataggaagggtagcggaactctgtcctg

SEQ ID NO: 11406 - DNA, 50 bp, Homo sapiens
  chr3:126218231-126218281
  hypo
ctttcttctccacatccgctcctgtgggcagagcccggacagtcaccacc

SEQ ID NO: 11407 - DNA, 31 bp, Homo sapiens
  chr3:126258809-126258840
  hypo
acacaaatgccacacacgcatgacacacaca

SEQ ID NO: 11408 - DNA, 31 bp, Homo sapiens
  chr3:126755184-126755215
  hypo
gggcgggtggtggggacggcagtggtgatga

SEQ ID NO: 11409 - DNA, 31 bp, Homo sapiens
  chr3:127394687-127394718
  hypo
taatttgggaaggcatcgccagagattcgga

SEQ ID NO: 11410 - DNA, 61 bp, Homo sapiens
  chr3:127394801-127394862
  hypo
gcctcccccaggagcccgctgcgaggccaacaccttcgatggtgagcgctgcctctatggg

SEQ ID NO: 11411 - DNA, 44 bp, Homo sapiens
  chr3:127394864-127394908
  hypo
actgagtgaccccatccgccgggctctacgcgattacaagcagg

SEQ ID NO: 11412 - DNA, 31 bp, Homo sapiens
  chr3:127395890-127395921
  hypo
acctggaggccaagtgcgagaaggtgtctga

SEQ ID NO: 11413 - DNA, 26 bp, Homo sapiens
  chr3:127512901-127512927
  hypo
cagccctccaggaggccgaggtgggc

SEQ ID NO: 11414 - DNA, 50 bp, Homo sapiens; identical to SEQ ID NO: 1560
  chr3:127794526-127794576
  hypo

SEQ ID NO: 11415 - DNA, 74 bp, Homo sapiens
  chr3:127865561-127865635
  hypo
ggccccatctgcctgccgctgtgtgcacgtgtgtgtacgtacatctgtgtgtctctgtgcgtgtgcacgtgtgt

SEQ ID NO: 11416 - DNA, 31 bp, Homo sapiens
  chr3:127871428-127871459
  hypo
gggcactgtagcccagcggaacccaccaggc

SEQ ID NO: 11417 - DNA, 31 bp, Homo sapiens
  chr3:128056310-128056341
  hypo
gcatgaggcccctggccgccctctctcacag

SEQ ID NO: 11418 - DNA, 31 bp, Homo sapiens
  chr3:128056382-128056413
  hypo
gtctggaatctcagctcggtgctttgccagg

SEQ ID NO: 11419 - DNA, 39 bp, Homo sapiens
  chr3:128056458-128056497
  hypo
gtcactctcttcagagcggctgggcgtttatctggacct

SEQ ID NO: 11420 - DNA, 31 bp, Homo sapiens
  chr3:128056526-128056557
  hypo
tgctgggcactgaggacgcagcatagggaga

SEQ ID NO: 11421 - DNA, 31 bp, Homo sapiens
  chr3:128110727-128110758
  hypo
ctgtgccagagggaggcgcccagcaccatgg

SEQ ID NO: 11422 - DNA, 68 bp, Homo sapiens
  chr3:128110777-128110845
  hypo
ggagggagtctgcaagcgcttccagaagggcgagtgcctgagtgtgccccagccgtggcttccctggg

SEQ ID NO: 11423 - DNA, 31 bp, Homo sapiens
  chr3:128141569-128141600
  hypo
ctgacaaggaggtgcccgggagggtgggaga

SEQ ID NO: 11424 - DNA, 31 bp, Homo sapiens
  chr3:128662254-128662285
  hypo
tatggatttgccggttcgggacatttcacaa

SEQ ID NO: 11425 - DNA, 31 bp, Homo sapiens
  chr3:128768446-128768477
  hypo
gaaaaattattttcaacgaatgatgctagaa

SEQ ID NO: 11426 - DNA, 31 bp, Homo sapiens
  chr3:128822756-128822787
  hypo
atttttctttagtgcacgtcactgcctgaca

SEQ ID NO: 11427 - DNA, 31 bp, Homo sapiens
  chr3:128933594-128933625
  hypo
ctagacctgtattaagcgctttatagacatt

SEQ ID NO: 11428 - DNA, 31 bp, Homo sapiens
  chr3:129045610-129045641
  hypo
gatttctgttatcattcggctcaggtgcaga

SEQ ID NO: 11429 - DNA, 31 bp, Homo sapiens
  chr3:129072726-129072757
  hypo
aaccctgcccaaacctcgatagcagggcctt

SEQ ID NO: 11430 - DNA, 31 bp, Homo sapiens
  chr3:129233461-129233492
  hypo
tgcctggcctgggttccgtttgaagagagac

SEQ ID NO: 11431 - DNA, 31 bp, Homo sapiens
  chr3:129246204-129246235
  hypo
cagcacttgcacaggccgccccagacacccc

SEQ ID NO: 11432 - DNA, 34 bp, Homo sapiens
  chr3:129246255-129246289
  hypo
catcatgttgcttggacgacggggagagggggac

SEQ ID NO: 11433 - DNA, 31 bp, Homo sapiens
  chr3:129246340-129246371
  hypo
actactttctttctcacggtacatcctgcta

SEQ ID NO: 11434 - DNA, 31 bp, Homo sapiens
  chr3:129247589-129247620
  hypo
aaggccctaacttctacgtgcccttctccaa

SEQ ID NO: 11435 - DNA, 31 bp, Homo sapiens
  chr3:129247919-129247950
  hypo
tctttgccaccctgggcggtatgagccgggt

SEQ ID NO: 11436 - DNA, 49 bp, Homo sapiens
  chr3:129252487-129252536
  hypo
agaacccactgggtgacgatgaggcctctgctaccgtgtccaagacgga

SEQ ID NO: 11437 - DNA, 31 bp, Homo sapiens
  chr3:129266573-129266604
  hypo
gcctctgtgagtgctgcggcctctactggaa

SEQ ID NO: 11438 - DNA, 31 bp, Homo sapiens
  chr3:129275268-129275299
  hypo
gatctgaggggagcagcggagtcagccgggc

SEQ ID NO: 11439 - DNA, 31 bp, Homo sapiens
  chr3:129275852-129275883
  hypo
attgaggcccagcccccgacccccgatccct

SEQ ID NO: 11440 - DNA, 27 bp, Homo sapiens
  chr3:130473843-130473870
  hypo
gagagagaaagagtctcgctctgtagc

SEQ ID NO: 11441 - DNA, 65 bp, Homo sapiens
  chr3:131100367-131100432
  hypo
gccacacctctagccccgccccaccgcaggcccaacccagaggctgctttcggttaccctagggt

SEQ ID NO: 11442 - DNA, 37 bp, Homo sapiens
  chr3:133217917-133217954
  hypo
tacaggcatgagccaccgtgcccggcctgttctatgt

SEQ ID NO: 11443 - DNA, 31 bp, Homo sapiens
  chr3:133217968-133217999
  hypo
aagcatttgtggaaaacgtgcccttgttaga

SEQ ID NO: 11444 - DNA, 31 bp, Homo sapiens
  chr3:133218024-133218055
  hypo
ctttgtatgccttttgcgttctaatcattta

SEQ ID NO: 11445 - DNA, 31 bp, Homo sapiens
  chr3:133364597-133364628
  hypo
ctacagcagttctttccgtttattttagcag

SEQ ID NO: 11446 - DNA, 31 bp, Homo sapiens
  chr3:133364634-133364665
  hypo
ctcttttcaaacagaccgcacccaaaagcct

SEQ ID NO: 11447 - DNA, 31 bp, Homo sapiens
  chr3:133560512-133560543
  hypo
agagaaaagcacagaacggtcaaaatcaaaa

SEQ ID NO: 11448 - DNA, 31 bp, Homo sapiens
  chr3:133560555-133560586
  hypo
aggggcaaaagcctagcgaccacaggtggtg

SEQ ID NO: 11449 - DNA, 31 bp, Homo sapiens
  chr3:133560590-133560621
  hypo
aaccagcaagaggggacgctcatgtcaggtc

SEQ ID NO: 11450 - DNA, 31 bp, Homo sapiens; identical to SEQ ID NO: 1562
  chr3:133646341-133646372
  hypo

SEQ ID NO: 11451 - DNA, 115 bp, Homo sapiens; identical to SEQ ID NO: 1563
  chr3:133646379-133646494
  hypo

SEQ ID NO: 11452 - DNA, 31 bp, Homo sapiens; identical to SEQ ID NO: 1565
  chr3:133969928-133969959
  hypo

SEQ ID NO: 11453 - DNA, 31 bp, Homo sapiens
  chr3:134021045-134021076
  hypo
aaagtttgctgactcccgtcttagcagattt

SEQ ID NO: 11454 - DNA, 24 bp, Homo sapiens
  chr3:134042382-134042406
  hypo
gactgcccagctgtgccgggtgca

SEQ ID NO: 11455 - DNA, 93 bp, Homo sapiens
  chr3:134080495-134080588
  hypo
ttgcgcagctcctcttcggctcgagctgcccggccctgcgcattgcccagagcctgctccagcagctcggcacgccgccgctggtcctcgatg

SEQ ID NO: 11456 - DNA, 361 bp, Homo sapiens; identical to SEQ ID NO: 1570
  chr3:134092992-134093353
  hypo

SEQ ID NO: 11457 - DNA, 188 bp, Homo sapiens; identical to SEQ ID NO: 1571
  chr3:134093363-134093551
  hypo

SEQ ID NO: 11458 - DNA, 128 bp, Homo sapiens; identical to SEQ ID NO: 1572
  chr3:134093626-134093754
  hypo

SEQ ID NO: 11459 - DNA, 31 bp, Homo sapiens
  chr3:134103115-134103146
  hypo
tttgtaagataccacacggttttccaaagtg

SEQ ID NO: 11460 - DNA, 31 bp, Homo sapiens
  chr3:134166665-134166696
  hypo
gaagaagggcacaaagcgggagccaggtccc

SEQ ID NO: 11461 - DNA, 40 bp, Homo sapiens
  chr3:134195845-134195885
  hypo
tcaagccagtcctagacggagatttcgaagccctggttga

SEQ ID NO: 11462 - DNA, 31 bp, Homo sapiens
  chr3:134195947-134195978
  hypo
accataacacaagttacgaacttgcccagag

SEQ ID NO: 11463 - DNA, 41 bp, Homo sapiens
  chr3:134195979-134196020
  hypo
ctattcctgggggtggcggcagttctcggatgagtgtcata

SEQ ID NO: 11464 - DNA, 38 bp, Homo sapiens
  chr3:134202928-134202966
  hypo
aaatggctcacagggccgggcgcggtggctcgcgcctg

SEQ ID NO: 11465 - DNA, 36 bp, Homo sapiens; identical to SEQ ID NO: 1573
  chr3:135684722-135684758
  hypo

SEQ ID NO: 11466 - DNA, 36 bp, Homo sapiens; identical to SEQ ID NO: 1574
  chr3:135684954-135684990
  hypo

SEQ ID NO: 11467 - DNA, 31 bp, Homo sapiens
  chr3:135870246-135870277
  hypo
atctaagcaggctttgcggttagagtagcaa

SEQ ID NO: 11468 - DNA, 31 bp, Homo sapiens
  chr3:137783020-137783051
  hypo
actctgatgtgctatgcgaggccactccagt

SEQ ID NO: 11469 - DNA, 31 bp, Homo sapiens
  chr3:137783053-137783084
  hypo
cacccttgggggagtccgctccacacacata

SEQ ID NO: 11470 - DNA, 31 bp, Homo sapiens
  chr3:137783127-137783158
  hypo
cactgtgggatgagaccgggctggaagagca

SEQ ID NO: 11471 - DNA, 41 bp, Homo sapiens
  chr3:137783175-137783216
  hypo
gacacagagtcagctccgaagctctccgagaggcaggagat

SEQ ID NO: 11472 - DNA, 61 bp, Homo sapiens
  chr3:137822426-137822487
  hypo
cagctcctgctgaccacgctgctgctggcccaggctggtctgcagccgtgcctccagctgg

SEQ ID NO: 11473 - DNA, 95 bp, Homo sapiens
  chr3:137822527-137822622
  hypo
actcaatgatgagctgcgccaggcgcagcaccttgagcagtgccgggtccacaggctgcccacagcggctgcacacctcccggtccaagttgcag

SEQ ID NO: 11474 - DNA, 46 bp, Homo sapiens; identical to SEQ ID NO: 1579
  chr3:138067287-138067333
  hypo

SEQ ID NO: 11475 - DNA, 59 bp, Homo sapiens
  chr3:138081463-138081522
  hypo
gcctacattgtactcccgtatggacttggggctagggcagggtccgggggcctccagca

SEQ ID NO: 11476 - DNA, 39 bp, Homo sapiens
  chr3:138577522-138577561
  hypo
aaaagatagaggcaaccgggcgcagtggctcatgcgtgt

SEQ ID NO: 11477 - DNA, 31 bp, Homo sapiens
  chr3:138634049-138634080
  hypo
tcgttttccccatccccgcaggggagaatag

SEQ ID NO: 11478 - DNA, 28 bp, Homo sapiens
  chr3:138635479-138635507
  hypo
gctccagattgagcgataaagtgagacc

SEQ ID NO: 11479 - DNA, 31 bp, Homo sapiens
  chr3:138635532-138635563
  hypo
taaaagagctgagcaccgaccagtccaagca

SEQ ID NO: 11480 - DNA, 31 bp, Homo sapiens
  chr3:138694446-138694477
  hypo
aggttggccagccaggcggagacctgtacac

SEQ ID NO: 11481 - DNA, 37 bp, Homo sapiens
  chr3:138981443-138981480
  hypo
tctgtgatacacagttcggcttcgatgagacagagtt

SEQ ID NO: 11482 - DNA, 13 bp, Homo sapiens
  chr3:140434138-140434151
  hypo
cctcctcaaacct

SEQ ID NO: 11483 - DNA, 60 bp, Homo sapiens
  chr3:140434159-140434219
  hypo
aatccagcacatctgccgtccaccagccttttccacatggagacccgcttctctatagag

SEQ ID NO: 11484 - DNA, 31 bp, Homo sapiens
  chr3:140434260-140434291
  hypo
ctgctcctaaattcctcgtgtgtgtctatgt

SEQ ID NO: 11485 - DNA, 60 bp, Homo sapiens
  chr3:141174348-141174408
  hypo
ctgctcctgctgaacacgacgacattccagccaccgggaactgctcgggactcagtatca

SEQ ID NO: 11486 - DNA, 31 bp, Homo sapiens
  chr3:141174444-141174475
  hypo
tcctccacaggtgccccgccgcacggggcaa

SEQ ID NO: 11487 - DNA, 31 bp, Homo sapiens
  chr3:141174575-141174606
  hypo
caaggcctgttctggccgcttccttgccagt

SEQ ID NO: 11488 - DNA, 53 bp, Homo sapiens
  chr3:141174640-141174693
  hypo
tgcaggggttgtggaccgagtttgtgatggagtttcagcgtccacatgtgtgc

SEQ ID NO: 11489 - DNA, 31 bp, Homo sapiens
  chr3:141482042-141482073
  hypo
tcatgcttcaaatagccgttgatgaccctga

SEQ ID NO: 11490 - DNA, 31 bp, Homo sapiens
  chr3:141482075-141482106
  hypo
ccatagtgctgtgtttcggtcaaacaacagc

SEQ ID NO: 11491 - DNA, 39 bp, Homo sapiens
  chr3:141509676-141509715
  hypo
attacaggcgtaagccaccgcgcccggtcaacatgcact

SEQ ID NO: 11492 - DNA, 35 bp, Homo sapiens
  chr3:141622406-141622441
  hypo
tgcatacacacacacacgcacgtgcacatttcata

SEQ ID NO: 11493 - DNA, 78 bp, Homo sapiens
  chr3:141622505-141622583
  hypo
gcactcttctcattcacgatgtgggttatgcttcagactctcaacgatgaggttccaaaataccgtgaccagattcct

SEQ ID NO: 11494 - DNA, 31 bp, Homo sapiens
  chr3:141664327-141664358
  hypo
gaactcagtactgaaacgtgatccccggagt

SEQ ID NO: 11495 - DNA, 31 bp, Homo sapiens
  chr3:141954428-141954459
  hypo
catgagccactgtgcccggcccaaggtatat

SEQ ID NO: 11496 - DNA, 31 bp, Homo sapiens
  chr3:141959959-141959990
  hypo
tattaaaagcaaaacacgggcagggcacggt

SEQ ID NO: 11497 - DNA, 31 bp, Homo sapiens
  chr3:142499819-142499850
  hypo
aagaatgaatttaagtcgtctaaaacttgct

SEQ ID NO: 11498 - DNA, 4 bp, Homo sapiens
  chr3:142727843-142727847
  hypo
agtg

SEQ ID NO: 11499 - DNA, 37 bp, Homo sapiens
  chr3:142791152-142791189
  hypo
tattaagactgtcacgcgcgttcgtgtgaagagacca

SEQ ID NO: 11500 - DNA, 87 bp, Homo sapiens; identical to SEQ ID NO: 1583
  chr3:142837869-142837956
  hypo

SEQ ID NO: 11501 - DNA, 94 bp, Homo sapiens; identical to SEQ ID NO: 1584
  chr3:142837958-142838052
  hypo

SEQ ID NO: 11502 - DNA, 157 bp, Homo sapiens; identical to SEQ ID NO: 1585
  chr3:142838099-142838256
  hypo

SEQ ID NO: 11503 - DNA, 32 bp, Homo sapiens; identical to SEQ ID NO: 1586
  chr3:142838286-142838318
  hypo

SEQ ID NO: 11504 - DNA, 167 bp, Homo sapiens; identical to SEQ ID NO: 1587
  chr3:142838479-142838646
  hypo

SEQ ID NO: 11505 - DNA, 196 bp, Homo sapiens; identical to SEQ ID NO: 1588
  chr3:142838876-142839072
  hypo

SEQ ID NO: 11506 - DNA, 228 bp, Homo sapiens; identical to SEQ ID NO: 1589
  chr3:142839204-142839432
  hypo

SEQ ID NO: 11507 - DNA, 75 bp, Homo sapiens; identical to SEQ ID NO: 1590
  chr3:142839439-142839514
  hypo

SEQ ID NO: 11508 - DNA, 40 bp, Homo sapiens; identical to SEQ ID NO: 1591
  chr3:142839648-142839688
  hypo

SEQ ID NO: 11509 - DNA, 67 bp, Homo sapiens; identical to SEQ ID NO: 1592
  chr3:142839783-142839850
  hypo

SEQ ID NO: 11510 - DNA, 15 bp, Homo sapiens
  chr3:142839886-142839901
  hypo
aagtggcacaaggag

SEQ ID NO: 11511 - DNA, 25 bp, Homo sapiens
  chr3:142839944-142839969
  hypo
cgggggcagccggaggcagctgggg

SEQ ID NO: 11512 - DNA, 31 bp, Homo sapiens
  chr3:142896012-142896043
  hypo
agaagtgtggcatcaccgtgtctcaggtctc

SEQ ID NO: 11513 - DNA, 31 bp, Homo sapiens
  chr3:142896155-142896186
  hypo
agcagcaccagctccccgacacccccttcct

SEQ ID NO: 11514 - DNA, 31 bp, Homo sapiens
  chr3:145833014-145833045
  hypo
ctcacagaaattgagtcgatctacatgtgaa

SEQ ID NO: 11515 - DNA, 40 bp, Homo sapiens; identical to SEQ ID NO: 1595
  chr3:145878854-145878894
  hypo

SEQ ID NO: 11516 - DNA, 44 bp, Homo sapiens; identical to SEQ ID NO: 1596
  chr3:145879058-145879102
  hypo

SEQ ID NO: 11517 - DNA, 31 bp, Homo sapiens
  chr3:145969119-145969150
  hypo
gataaaagccagcccacggtcacttccaatc

SEQ ID NO: 11518 - DNA, 18 bp, Homo sapiens
  chr3:148523466-148523484
  hypo
gagcgagactcctactca

SEQ ID NO: 11519 - DNA, 36 bp, Homo sapiens; identical to SEQ ID NO: 1597
  chr3:148710030-148710066
  hypo

SEQ ID NO: 11520 - DNA, 31 bp, Homo sapiens; identical to SEQ ID NO: 1598
  chr3:148710176-148710207
  hypo

SEQ ID NO: 11521 - DNA, 34 bp, Homo sapiens
  chr3:148726131-148726165
  hypo
ccatgcaactcattcccgccgagtccacttactc

SEQ ID NO: 11522 - DNA, 33 bp, Homo sapiens
  chr3:149233986-149234019
  hypo
agccaccatgcgcctggccgattggacagtttt

SEQ ID NO: 11523 - DNA, 31 bp, Homo sapiens
  chr3:149345428-149345459
  hypo
gtccatgaaatcacagcggggttcacctcca

SEQ ID NO: 11524 - DNA, 31 bp, Homo sapiens
  chr3:149470936-149470967
  hypo
taatgatgacaatgaccgatgcttacaggat

SEQ ID NO: 11525 - DNA, 31 bp, Homo sapiens
  chr3:149858728-149858759
  hypo
tctccctttctctgggcgccagcatgcccac

SEQ ID NO: 11526 - DNA, 31 bp, Homo sapiens
  chr3:150057189-150057220
  hypo
gtgtaaaaatgttcatcgcaactttatttgt

SEQ ID NO: 11527 - DNA, 57 bp, Homo sapiens
  chr3:150086092-150086149
  hypo
ggctgactaccacagtcggcactcattcaacatctgaatgagcgaatgaagtgatct

SEQ ID NO: 11528 - DNA, 21 bp, Homo sapiens
  chr3:150086222-150086243
  hypo
gtataaaaatccatcccggcc

SEQ ID NO: 11529 - DNA, 41 bp, Homo sapiens
  chr3:150237900-150237941
  hypo
ctcctgacctcgtgatccgcccgcctcggcatcccaaagtg

SEQ ID NO: 11530 - DNA, 48 bp, Homo sapiens
  chr3:150237948-150237996
  hypo
ggttttaattacctctcgggtgattgtggtgcacgctcaagtttgaga

SEQ ID NO: 11531 - DNA, 53 bp, Homo sapiens; identical to SEQ ID NO: 1599
  chr3:150321029-150321082
  hypo

SEQ ID NO: 11532 - DNA, 54 bp, Homo sapiens
  chr3:150379954-150380008
  hypo
actaatacactagggcgcgtaatgggaacaactgaagagcgaatgagtgagggg

SEQ ID NO: 11533 - DNA, 31 bp, Homo sapiens
  chr3:150380012-150380043
  hypo
aatgggctggccctggcgaaaggtacaactc

SEQ ID NO: 11534 - DNA, 31 bp, Homo sapiens
  chr3:150380083-150380114
  hypo
agcttcaaaatatatacggcaaaagttgatt

SEQ ID NO: 11535 - DNA, 31 bp, Homo sapiens
  chr3:150420394-150420425
  hypo
gcttctagcacagccacgggtagaggacagg

SEQ ID NO: 11536 - DNA, 18 bp, Homo sapiens
  chr3:151944526-151944544
  hypo
caggtgcagtggctcacg

SEQ ID NO: 11537 - DNA, 56 bp, Homo sapiens
  chr3:154907167-154907223
  hypo
gaaaatgtcattggcccggagacctcaggaaagctatttaacgcctctgaaactta

SEQ ID NO: 11538 - DNA, 16 bp, Homo sapiens
  chr3:155351687-155351703
  hypo
gcgagactctgtctca

SEQ ID NO: 11539 - DNA, 31 bp, Homo sapiens
  chr3:155460890-155460921
  hypo
ataagcaagaagctaccgctccttctacata

SEQ ID NO: 11540 - DNA, 31 bp, Homo sapiens
  chr3:155460954-155460985
  hypo
gctgtatgtaaacaaacggattttaaaagag

SEQ ID NO: 11541 - DNA, 19 bp, Homo sapiens
  chr3:155461030-155461049
  hypo
ttctcatctgctgggcgcg

SEQ ID NO: 11542 - DNA, 31 bp, Homo sapiens
  chr3:156543177-156543208
  hypo
taccgatactgctctgcgtcatttaatcact

SEQ ID NO: 11543 - DNA, 78 bp, Homo sapiens; identical to SEQ ID NO: 1602
  chr3:156799360-156799438
  hypo

SEQ ID NO: 11544 - DNA, 31 bp, Homo sapiens; identical to SEQ ID NO: 1603
  chr3:156799497-156799528
  hypo

SEQ ID NO: 11545 - DNA, 31 bp, Homo sapiens
  chr3:158448985-158449016
  hypo
ggtgtttgcttccaggcgtttggcactgtta

SEQ ID NO: 11546 - DNA, 31 bp, Homo sapiens
  chr3:158449031-158449062
  hypo
gctacactttaaaactcgacctatttattaa

SEQ ID NO: 11547 - DNA, 31 bp, Homo sapiens
  chr3:158690124-158690155
  hypo
atggattttctaaatacgtggagttatctac

SEQ ID NO: 11548 - DNA, 31 bp, Homo sapiens
  chr3:158690205-158690236
  hypo
caagaggttcatatgcgcgctctgcagtaac

SEQ ID NO: 11549 - DNA, 45 bp, Homo sapiens
  chr3:158690273-158690318
  hypo
gaaagagtttaatgatcgcagggcactgatcgaggagatgggagg

SEQ ID NO: 11550 - DNA, 159 bp, Homo sapiens; identical to SEQ ID NO: 1606
  chr3:160472595-160472754
  hypo

SEQ ID NO: 11551 - DNA, 268 bp, Homo sapiens; identical to SEQ ID NO: 1607
  chr3:160472764-160473032
  hypo

SEQ ID NO: 11552 - DNA, 62 bp, Homo sapiens; identical to SEQ ID NO: 1608
  chr3:160473172-160473234
  hypo

SEQ ID NO: 11553 - DNA, 96 bp, Homo sapiens; identical to SEQ ID NO: 1609
  chr3:160473309-160473405
  hypo

SEQ ID NO: 11554 - DNA, 216 bp, Homo sapiens; identical to SEQ ID NO: 1610
  chr3:160473409-160473625
  hypo

SEQ ID NO: 11555 - DNA, 31 bp, Homo sapiens; identical to SEQ ID NO: 1611
  chr3:160473642-160473673
  hypo

SEQ ID NO: 11556 - DNA, 34 bp, Homo sapiens; identical to SEQ ID NO: 1612
  chr3:160473774-160473808
  hypo

SEQ ID NO: 11557 - DNA, 91 bp, Homo sapiens; identical to SEQ ID NO: 1613
  chr3:160473982-160474073
  hypo

SEQ ID NO: 11558 - DNA, 39 bp, Homo sapiens
  chr3:160879848-160879887
  hypo
atcttctggccctccgcgtacatacgaggcagaagtctg

SEQ ID NO: 11559 - DNA, 31 bp, Homo sapiens
  chr3:165174993-165175024
  hypo
tggctttgttaagtgccgggtctgtttagca

SEQ ID NO: 11560 - DNA, 31 bp, Homo sapiens
  chr3:167566092-167566123
  hypo
atgtacatttcccccccgccctttgtataca

SEQ ID NO: 11561 - DNA, 31 bp, Homo sapiens; identical to SEQ ID NO: 1617
  chr3:168754776-168754807
  hypo

SEQ ID NO: 11562 - DNA, 57 bp, Homo sapiens; identical to SEQ ID NO: 1627
  chr3:169482613-169482670
  hypo

SEQ ID NO: 11563 - DNA, 117 bp, Homo sapiens; identical to SEQ ID NO: 1628
  chr3:169482679-169482796
  hypo

SEQ ID NO: 11564 - DNA, 31 bp, Homo sapiens
  chr3:169539897-169539928
  hypo
tccccaggagattcagcgtttaaagaacatc

SEQ ID NO: 11565 - DNA, 34 bp, Homo sapiens
  chr3:169539955-169539989
  hypo
ctgaggagcctgtgcccggcgctggggctgctga

SEQ ID NO: 11566 - DNA, 56 bp, Homo sapiens
  chr3:169540028-169540084
  hypo
tctcctcctcccttgtcgttgtcagcttcctccacgccctgcgcgagctccggctc

SEQ ID NO: 11567 - DNA, 31 bp, Homo sapiens
  chr3:169540324-169540355
  hypo
gagatcggacacctgacggggctgcagaagt

SEQ ID NO: 11568 - DNA, 38 bp, Homo sapiens
  chr3:169540402-169540440
  hypo
cagtgtagccaactgtcggtgctcgatttatcccacaa

SEQ ID NO: 11569 - DNA, 198 bp, Homo sapiens
  chr3:169540441-169540639
  hypo
ctcctccactccatcccgaagagcttcgccgagctcaggaagatgacggaaatcgggctgagcgggaaccgcctggagaaggtgccacgcctcatttgcaggtggacctcgctgcacctgctctacctgggaaacaccggcctgcacaggctgcggggctccttcaggtgcctggtcaacttgcgcttcctggaccta

SEQ ID NO: 11570 - DNA, 31 bp, Homo sapiens
  chr3:169540648-169540679
  hypo
catctgcaccactgcccgctgcagatctgtg

SEQ ID NO: 11571 - DNA, 31 bp, Homo sapiens
  chr3:169540716-169540747
  hypo
taaaataggacaggtacggattccttttctg

SEQ ID NO: 11572 - DNA, 4 bp, Homo sapiens
  chr3:169896228-169896232
  hypo
aatt

SEQ ID NO: 11573 - DNA, 56 bp, Homo sapiens
  chr3:169896269-169896325
  hypo
ctctagtcttccaccacggaatgaggcaataagacggccctcgtgagatgccagct

SEQ ID NO: 11574 - DNA, 36 bp, Homo sapiens
  chr3:169980663-169980699
  hypo
aaccttcttttgtggccgggcgcggtgactcacgcc

SEQ ID NO: 11575 - DNA, 31 bp, Homo sapiens
  chr3:170179926-170179957
  hypo
ctgtgtttggccctccgcggactttcctctg

SEQ ID NO: 11576 - DNA, 31 bp, Homo sapiens
  chr3:170179970-170180001
  hypo
ctggtaaaacctagtgcgaaaggggacggca

SEQ ID NO: 11577 - DNA, 31 bp, Homo sapiens; identical to SEQ ID NO: 1640
  chr3:171758578-171758609
  hypo

SEQ ID NO: 11578 - DNA, 69 bp, Homo sapiens
  chr3:172341770-172341839
  hypo
ccgcggtaataagttccgggttggctagctgtaccacagcacgatgtgcagggacggccaggagaggat

SEQ ID NO: 11579 - DNA, 36 bp, Homo sapiens
  chr3:172351502-172351538
  hypo
tctgcaatgagtggggcggagcgggcatccagcaac

SEQ ID NO: 11580 - DNA, 31 bp, Homo sapiens
  chr3:172355894-172355925
  hypo
aaatgtttgtgaaatacgttgacaagtagtg

SEQ ID NO: 11581 - DNA, 11 bp, Homo sapiens
  chr3:172356109-172356120
  hypo
tgccatatagc

SEQ ID NO: 11582 - DNA, 31 bp, Homo sapiens
  chr3:172425346-172425377
  hypo
catctggggaacttttcgttttttattttta

SEQ ID NO: 11583 - DNA, 3 bp, Homo sapiens
  chr3:172425682-172425685
  hypo
ttc

SEQ ID NO: 11584 - DNA, 31 bp, Homo sapiens
  chr3:172425686-172425717
  hypo
taaacactgctaagaacgttcatctcccaga

SEQ ID NO: 11585 - DNA, 88 bp, Homo sapiens; identical to SEQ ID NO: 1642
  chr3:174158754-174158842
  hypo

SEQ ID NO: 11586 - DNA, 163 bp, Homo sapiens; identical to SEQ ID NO: 1643
  chr3:174158852-174159015
  hypo

SEQ ID NO: 11587 - DNA, 97 bp, Homo sapiens; identical to SEQ ID NO: 1644
  chr3:174159124-174159221
  hypo

SEQ ID NO: 11588 - DNA, 11 bp, Homo sapiens
  chr3:176872485-176872496
  hypo
agaacttttta

SEQ ID NO: 11589 - DNA, 31 bp, Homo sapiens; identical to SEQ ID NO: 1645
  chr3:176915777-176915808
  hypo

SEQ ID NO: 11590 - DNA, 31 bp, Homo sapiens
  chr3:177299217-177299248
  hypo
tctattttaacccacacggaaatttcatatg

SEQ ID NO: 11591 - DNA, 26 bp, Homo sapiens
  chr3:179121285-179121311
  hypo
aattaaaaagtcaggccgggcgcagt

SEQ ID NO: 11592 - DNA, 132 bp, Homo sapiens; identical to SEQ ID NO: 1648
  chr3:179168906-179169038
  hypo

SEQ ID NO: 11593 - DNA, 31 bp, Homo sapiens
  chr3:182812782-182812813
  hypo
ctgccctggccaggcacggtggctcacacct

SEQ ID NO: 11594 - DNA, 2 bp, Homo sapiens
  chr3:182812820-182812822
  hypo
ca

SEQ ID NO: 11595 - DNA, 39 bp, Homo sapiens
  chr3:182815988-182816027
  hypo
ttacaggcgtgagctaccgcgccccgccaacttccaaca

SEQ ID NO: 11596 - DNA, 42 bp, Homo sapiens
  chr3:182882984-182883026
  hypo
attttaagcacatagccgggcgcagtggctcacgcctgtaat

SEQ ID NO: 11597 - DNA, 24 bp, Homo sapiens
  chr3:182895964-182895988
  hypo
taaattccggctgggcgcggtggc

SEQ ID NO: 11598 - DNA, 101 bp, Homo sapiens; identical to SEQ ID NO: 1655
  chr3:183165243-183165344
  hypo

SEQ ID NO: 11599 - DNA, 31 bp, Homo sapiens; identical to SEQ ID NO: 1656
  chr3:183165349-183165380
  hypo

SEQ ID NO: 11600 - DNA, 31 bp, Homo sapiens
  chr3:183217391-183217422
  hypo
tcatttttcaatgtcacgcatgcaaactcca

SEQ ID NO: 11601 - DNA, 31 bp, Homo sapiens
  chr3:183419804-183419835
  hypo
tcacctctaccttctccgcttaccgaaatgc

SEQ ID NO: 11602 - DNA, 31 bp, Homo sapiens; identical to SEQ ID NO: 1657
  chr3:183602889-183602920
  hypo

SEQ ID NO: 11603 - DNA, 31 bp, Homo sapiens
  chr3:183603066-183603097
  hypo
tccctagaggaaccaacgtggcaagccaagt

SEQ ID NO: 11604 - DNA, 31 bp, Homo sapiens
  chr3:183627257-183627288
  hypo
agagtgcctccagccccgttccccaggcaag

SEQ ID NO: 11605 - DNA, 31 bp, Homo sapiens
  chr3:183637698-183637729
  hypo
agaattgtttgatacacgaagagttttacaa

SEQ ID NO: 11606 - DNA, 21 bp, Homo sapiens
  chr3:183643632-183643653
  hypo
ttttttttttttgagacggag

SEQ ID NO: 11607 - DNA, 61 bp, Homo sapiens
  chr3:183652389-183652450
  hypo
ctactaaagctacaggcgcacgatgttctacccacaccagctgcacgcgcccatggtcaat

SEQ ID NO: 11608 - DNA, 31 bp, Homo sapiens
  chr3:183657846-183657877
  hypo
gacttggaagaagtaacgcccaggaaacttg

SEQ ID NO: 11609 - DNA, 31 bp, Homo sapiens
  chr3:183659806-183659837
  hypo
aaaggatctacagttacgcatttcttttctt

SEQ ID NO: 11610 - DNA, 4 bp, Homo sapiens
  chr3:183670354-183670358
  hypo
gtgg

SEQ ID NO: 11611 - DNA, 31 bp, Homo sapiens
  chr3:183670363-183670394
  hypo
cccatgctattcttgtcgtgacagtgagttc

SEQ ID NO: 11612 - DNA, 37 bp, Homo sapiens
  chr3:183670419-183670456
  hypo
gtttgacatgtcctcccgcacacgctgtcttgtctct

SEQ ID NO: 11613 - DNA, 31 bp, Homo sapiens; identical to SEQ ID NO: 1658
  chr3:183676020-183676051
  hypo

SEQ ID NO: 11614 - DNA, 31 bp, Homo sapiens; identical to SEQ ID NO: 1659
  chr3:183676074-183676105
  hypo

SEQ ID NO: 11615 - DNA, 31 bp, Homo sapiens
  chr3:183676453-183676484
  hypo
ttgtcaggatctcactcggtcccccaggctg

SEQ ID NO: 11616 - DNA, 31 bp, Homo sapiens
  chr3:183681332-183681363
  hypo
ctctggcgctgcccaccgctcaggttggctc

SEQ ID NO: 11617 - DNA, 31 bp, Homo sapiens
  chr3:183687201-183687232
  hypo
cagatgcagcagctcacgcctataatcccca

SEQ ID NO: 11618 - DNA, 31 bp, Homo sapiens
  chr3:183728921-183728952
  hypo
ccctatcttctagaaacgcctttcctccatc

SEQ ID NO: 11619 - DNA, 31 bp, Homo sapiens
  chr3:183756606-183756637
  hypo
atggacaagggcccagcgggaacacgaggcc

SEQ ID NO: 11620 - DNA, 31 bp, Homo sapiens
  chr3:183801964-183801995
  hypo
ggtgcagttcagccacgcgatggacaccctg

SEQ ID NO: 11621 - DNA, 31 bp, Homo sapiens
  chr3:183802176-183802207
  hypo
ctagcactcccagaaacgagaatgtatttcc

SEQ ID NO: 11622 - DNA, 31 bp, Homo sapiens
  chr3:183806894-183806925
  hypo
cagcttttgggctgggcgcagtggctcaagc

SEQ ID NO: 11623 - DNA, 31 bp, Homo sapiens
  chr3:183830375-183830406
  hypo
gttttcgttgcctgctcgtaattttgtgtcc

SEQ ID NO: 11624 - DNA, 31 bp, Homo sapiens; identical to SEQ ID NO: 1661
  chr3:183851914-183851945
  hypo

SEQ ID NO: 11625 - DNA, 44 bp, Homo sapiens
  chr3:184026276-184026320
  hypo
ggctgccatgcagccccgaatgctggttacgtttgatgaggagc

SEQ ID NO: 11626 - DNA, 31 bp, Homo sapiens
  chr3:184031715-184031746
  hypo
atttacttaggcaggacggagtctttaattt

SEQ ID NO: 11627 - DNA, 10 bp, Homo sapiens
  chr3:184057547-184057557
  hypo
tgagaagggg

SEQ ID NO: 11628 - DNA, 31 bp, Homo sapiens
  chr3:184059877-184059908
  hypo
acgtgaccaagcctaccgccatggcccaggg

SEQ ID NO: 11629 - DNA, 31 bp, Homo sapiens
  chr3:184070999-184071030
  hypo
aatgacatttaggaagcgtttgtggcttttc

SEQ ID NO: 11630 - DNA, 39 bp, Homo sapiens
  chr3:184071378-184071417
  hypo
gctccctgccccttcccgaagcttcgaccctgggcaatg

SEQ ID NO: 11631 - DNA, 63 bp, Homo sapiens
  chr3:184071552-184071615
  hypo
catgatgtcctccacacgcacccggtactgcctgggggccgagagaggcgcttggtttgtggt

SEQ ID NO: 11632 - DNA, 31 bp, Homo sapiens
  chr3:184071673-184071704
  hypo
agcccatccatggggacgggagctaaggacc

SEQ ID NO: 11633 - DNA, 80 bp, Homo sapiens
  chr3:184072026-184072106
  hypo
atctggcctgtgagctcgaacacgatcacagccgtggacactgtgtgtgtcaccgctcctgccagcgcagctgcccctgg

SEQ ID NO: 11634 - DNA, 31 bp, Homo sapiens
  chr3:184073334-184073365
  hypo
cctcaggctgggaaaccgacaggatgaaggg

SEQ ID NO: 11635 - DNA, 31 bp, Homo sapiens; identical to SEQ ID NO: 1662
  chr3:184097687-184097718
  hypo

SEQ ID NO: 11636 - DNA, 71 bp, Homo sapiens; identical to SEQ ID NO: 1664
  chr3:184098371-184098442
  hypo

SEQ ID NO: 11637 - DNA, 31 bp, Homo sapiens
  chr3:184127162-184127193
  hypo
ttggaggacccctacacgcagacactgcaag

SEQ ID NO: 11638 - DNA, 31 bp, Homo sapiens
  chr3:184133972-184134003
  hypo
catggggcactgtgggcgtatcagtgagggg

SEQ ID NO: 11639 - DNA, 31 bp, Homo sapiens
  chr3:184273716-184273747
  hypo
atgatgcagtggttctcgagacttcccttcc

SEQ ID NO: 11640 - DNA, 31 bp, Homo sapiens
  chr3:184273772-184273803
  hypo
ttgggggctttggaaacgcacccctgcccag

SEQ ID NO: 11641 - DNA, 38 bp, Homo sapiens
  chr3:184273812-184273850
  hypo
cagaccagtatctctgcgggtggcgtccttcttcctaa

SEQ ID NO: 11642 - DNA, 35 bp, Homo sapiens
  chr3:184273853-184273888
  hypo
cctccccaggtgattccgtgcgtgtttagggctga

SEQ ID NO: 11643 - DNA, 31 bp, Homo sapiens; identical to SEQ ID NO: 1665
  chr3:184279244-184279275
  hypo

SEQ ID NO: 11644 - DNA, 39 bp, Homo sapiens
  chr3:184295555-184295594
  hypo
ctatgggcagtacagccgccctgccgagtttgagaccac

SEQ ID NO: 11645 - DNA, 45 bp, Homo sapiens
  chr3:184295604-184295649
  hypo
ggttagtagccccctgcgcctgtccccatcgcggccctcactctc

SEQ ID NO: 11646 - DNA, 31 bp, Homo sapiens
  chr3:184298770-184298801
  hypo
cgtggagcaggattaccggctgccaccaccc

SEQ ID NO: 11647 - DNA, 44 bp, Homo sapiens
  chr3:184331110-184331154
  hypo
agtctggggtcctgcccgctgtgggctcacggggcacatgagcc

SEQ ID NO: 11648 - DNA, 31 bp, Homo sapiens
  chr3:184331212-184331243
  hypo
gaaatcaggttaatgacgtagaaggtggtga

SEQ ID NO: 11649 - DNA, 36 bp, Homo sapiens
  chr3:184331257-184331293
  hypo
gacagtggtgtgggagcgatgcgctctgccagtcta

SEQ ID NO: 11650 - DNA, 31 bp, Homo sapiens
  chr3:184353658-184353689
  hypo
atgcgtggaggaggcacgaagccacctaaag

SEQ ID NO: 11651 - DNA, 46 bp, Homo sapiens
  chr3:184378703-184378749
  hypo
ggagcaggattctggccgcagaggctgggtgcgagatagcagtgag

SEQ ID NO: 11652 - DNA, 31 bp, Homo sapiens
  chr3:184491997-184492028
  hypo
ggaaatgaaggccaggcgcagtggctcaggc

SEQ ID NO: 11653 - DNA, 31 bp, Homo sapiens
  chr3:184661514-184661545
  hypo
ctttttttgctcttgccgccaacacctgagt

SEQ ID NO: 11654 - DNA, 4 bp, Homo sapiens
  chr3:184661610-184661614
  hypo
cagg

SEQ ID NO: 11655 - DNA, 31 bp, Homo sapiens
  chr3:184689920-184689951
  hypo
tgccctctcagccacccgggtttaattcaag

SEQ ID NO: 11656 - DNA, 31 bp, Homo sapiens
  chr3:184935944-184935975
  hypo
tgattgcttcttcaaccgggtctgagtttac

SEQ ID NO: 11657 - DNA, 31 bp, Homo sapiens
  chr3:185001578-185001609
  hypo
cagggaggagttggaccgttgtaaataaact

SEQ ID NO: 11658 - DNA, 31 bp, Homo sapiens
  chr3:185270831-185270862
  hypo
ttgtatttcttcctaccgagaatttctacag

SEQ ID NO: 11659 - DNA, 27 bp, Homo sapiens
  chr3:185270881-185270908
  hypo
aaaaagaaaaacaggccggcacggtgg

SEQ ID NO: 11660 - DNA, 31 bp, Homo sapiens
  chr3:185271295-185271326
  hypo
ttaattccctttctggcgagagtgcttgcaa

SEQ ID NO: 11661 - DNA, 19 bp, Homo sapiens
  chr3:185271362-185271381
  hypo
aaatcaattaataagccgg

SEQ ID NO: 11662 - DNA, 31 bp, Homo sapiens
  chr3:185375183-185375214
  hypo
ctggatactgggagggcgagacaagaaagaa

SEQ ID NO: 11663 - DNA, 31 bp, Homo sapiens
  chr3:185375281-185375312
  hypo
catggtgggaaggccccgccacccaaggaaa

SEQ ID NO: 11664 - DNA, 38 bp, Homo sapiens
  chr3:185375325-185375363
  hypo
gcacaggatccttctgcggcctgcggctctgcaggtgt

SEQ ID NO: 11665 - DNA, 31 bp, Homo sapiens
  chr3:185375379-185375410
  hypo
acctgagcacaggcagcgctagtgataatca

SEQ ID NO: 11666 - DNA, 31 bp, Homo sapiens
  chr3:185375448-185375479
  hypo
ccaaaagctgtctgatcgcaggttttctgtc

SEQ ID NO: 11667 - DNA, 31 bp, Homo sapiens
  chr3:185498444-185498475
  hypo
gaaaacatgttatatacgtgattccttctgc

SEQ ID NO: 11668 - DNA, 37 bp, Homo sapiens
  chr3:185643323-185643360
  hypo
actgtaagacctgctacgtgatcgtctatgggagcgg

SEQ ID NO: 11669 - DNA, 65 bp, Homo sapiens; identical to SEQ ID NO: 1678
  chr3:186079203-186079268
  hypo

SEQ ID NO: 11670 - DNA, 53 bp, Homo sapiens; identical to SEQ ID NO: 1679
  chr3:186079278-186079331
  hypo

SEQ ID NO: 11671 - DNA, 31 bp, Homo sapiens; identical to SEQ ID NO: 1680
  chr3:186079334-186079365
  hypo

SEQ ID NO: 11672 - DNA, 85 bp, Homo sapiens; identical to SEQ ID NO: 1683
  chr3:186079481-186079566
  hypo

SEQ ID NO: 11673 - DNA, 192 bp, Homo sapiens; identical to SEQ ID NO: 1684
  chr3:186079578-186079770
  hypo

SEQ ID NO: 11674 - DNA, 76 bp, Homo sapiens; identical to SEQ ID NO: 1685
  chr3:186079818-186079894
  hypo

SEQ ID NO: 11675 - DNA, 31 bp, Homo sapiens; identical to SEQ ID NO: 1686
  chr3:186079895-186079926
  hypo

SEQ ID NO: 11676 - DNA, 54 bp, Homo sapiens; identical to SEQ ID NO: 1687
  chr3:186079928-186079982
  hypo

SEQ ID NO: 11677 - DNA, 74 bp, Homo sapiens; identical to SEQ ID NO: 1688
  chr3:186079983-186080057
  hypo

SEQ ID NO: 11678 - DNA, 162 bp, Homo sapiens; identical to SEQ ID NO: 1689
  chr3:186080060-186080222
  hypo

SEQ ID NO: 11679 - DNA, 68 bp, Homo sapiens; identical to SEQ ID NO: 1690
  chr3:186080227-186080295
  hypo

SEQ ID NO: 11680 - DNA, 31 bp, Homo sapiens
  chr3:186329021-186329052
  hypo
tttcttttttttgagtcggagtcccactccg

SEQ ID NO: 11681 - DNA, 23 bp, Homo sapiens
  chr3:186629364-186629387
  hypo
caagactccgtctcaaaaaaaga

SEQ ID NO: 11682 - DNA, 31 bp, Homo sapiens
  chr3:186783727-186783758
  hypo
gagcccagaaagtaagcgacagaggtgggat

SEQ ID NO: 11683 - DNA, 79 bp, Homo sapiens
  chr3:186783851-186783930
  hypo
ggatgggttggcagggcgggtgggaggtgggcgagatttccatcaacaacgggtctaaaaccagcgatggtgagctggg

SEQ ID NO: 11684 - DNA, 51 bp, Homo sapiens
  chr3:186938674-186938725
  hypo
ggaatccctcctcccacggccttcctccagtcccccgcgcccccacactgc

SEQ ID NO: 11685 - DNA, 170 bp, Homo sapiens; identical to SEQ ID NO: 1693
  chr3:187455315-187455485
  hypo

SEQ ID NO: 11686 - DNA, 31 bp, Homo sapiens; identical to SEQ ID NO: 1694
  chr3:187455499-187455530
  hypo

SEQ ID NO: 11687 - DNA, 31 bp, Homo sapiens; identical to SEQ ID NO: 1705
  chr3:187456764-187456795
  hypo

SEQ ID NO: 11688 - DNA, 46 bp, Homo sapiens; identical to SEQ ID NO: 1706
  chr3:187456797-187456843
  hypo

SEQ ID NO: 11689 - DNA, 174 bp, Homo sapiens; identical to SEQ ID NO: 1713
  chr3:187462563-187462737
  hypo

SEQ ID NO: 11690 - DNA, 73 bp, Homo sapiens; identical to SEQ ID NO: 1714
  chr3:187462739-187462812
  hypo

SEQ ID NO: 11691 - DNA, 70 bp, Homo sapiens; identical to SEQ ID NO: 1715
  chr3:187463099-187463169
  hypo

SEQ ID NO: 11692 - DNA, 31 bp, Homo sapiens
  chr3:187870564-187870595
  hypo
tggccatggctgctgcgcgtcataatcccct

SEQ ID NO: 11693 - DNA, 56 bp, Homo sapiens
  chr3:188070250-188070306
  hypo
ggagctgtgtgactggcgagccctcagttgccacttggaaacggttggaaactgta

SEQ ID NO: 11694 - DNA, 31 bp, Homo sapiens
  chr3:188070342-188070373
  hypo
gggcttgtgaatatcccgtactctcatttga

SEQ ID NO: 11695 - DNA, 40 bp, Homo sapiens
  chr3:188070375-188070415
  hypo
tgtgaggacagtgaggcgcattatgcggaggtgacttgct

SEQ ID NO: 11696 - DNA, 31 bp, Homo sapiens
  chr3:190421350-190421381
  hypo
catggcagaggtactacgtagattataaacc

SEQ ID NO: 11697 - DNA, 81 bp, Homo sapiens; identical to SEQ ID NO: 1716
  chr3:192635695-192635776
  hypo

SEQ ID NO: 11698 - DNA, 87 bp, Homo sapiens
  chr3:193312127-193312214
  hypo
ggtatagataatttatcgtgtttataaggaatggaatgcattcgttagtttgtttttgttttgttttgagacggagtcttgctctgt

SEQ ID NO: 11699 - DNA, 31 bp, Homo sapiens
  chr3:193419608-193419639
  hypo
agagtgtaattttgttcgcgtcaaaagcatt

SEQ ID NO: 11700 - DNA, 31 bp, Homo sapiens
  chr3:193438389-193438420
  hypo
tttttctttttcccttcgctcttattgccca

SEQ ID NO: 11701 - DNA, 31 bp, Homo sapiens
  chr3:193481550-193481581
  hypo
tttttcttacatatcacgttcaatgtcagca

SEQ ID NO: 11702 - DNA, 31 bp, Homo sapiens
  chr3:193481891-193481922
  hypo
ctttggggcctttgtacggcgcctctctcag

SEQ ID NO: 11703 - DNA, 36 bp, Homo sapiens
  chr3:193503309-193503345
  hypo
ggttccccaggccgggcgcggtggctcacgcctgta

SEQ ID NO: 11704 - DNA, 56 bp, Homo sapiens
  chr3:193505271-193505327
  hypo
cagctgccaccccattcggtacttctctcaaggcacacgggcggtgtggcagagcc

SEQ ID NO: 11705 - DNA, 31 bp, Homo sapiens
  chr3:193505356-193505387
  hypo
ctttcttccttagtatcggattccagtttta

SEQ ID NO: 11706 - DNA, 54 bp, Homo sapiens
  chr3:193505426-193505480
  hypo
cagcaaggatggccaacgagacgcaagcacaagtcatgacgtgggtcttcaagg

SEQ ID NO: 11707 - DNA, 48 bp, Homo sapiens
  chr3:193509944-193509992
  hypo
ataggtgtgtgtgtggcggggtgtggtggggggcggtaaccatggagg

SEQ ID NO: 11708 - DNA, 1 bp, Homo sapiens
  chr3:193510046-193510047
  hypo
t

SEQ ID NO: 11709 - DNA, 31 bp, Homo sapiens
  chr3:193577777-193577808
  hypo
tatgaaaacaaagatacgtttgtttgagcat

SEQ ID NO: 11710 - DNA, 31 bp, Homo sapiens
  chr3:193659934-193659965
  hypo
tgggctggaatttcagcgggtcttcaggggt

SEQ ID NO: 11711 - DNA, 56 bp, Homo sapiens
  chr3:193659971-193660027
  hypo
gtaaagtcttggtggacgagcattctaggcaaaagccatgccggttcatggtgctg

SEQ ID NO: 11712 - DNA, 43 bp, Homo sapiens
  chr3:193660039-193660082
  hypo
tgtttagtagattccccgctacaaaaaatagtcctcggccggg

SEQ ID NO: 11713 - DNA, 31 bp, Homo sapiens
  chr3:193663524-193663555
  hypo
gctgctgtgagtggaccggagatgctgcacc

SEQ ID NO: 11714 - DNA, 38 bp, Homo sapiens
  chr3:193711553-193711591
  hypo
ctgccttgtgttttctcgagcatcgctgtaatctggtc

SEQ ID NO: 11715 - DNA, 65 bp, Homo sapiens
  chr3:193711592-193711657
  hypo
tatgtgatgtttcaggcgtatcttgctgttgttcagggaaagcacgcctacggagcctcagataa

SEQ ID NO: 11716 - DNA, 31 bp, Homo sapiens
  chr3:193711692-193711723
  hypo
ttgttgacaccagtcccgctaagtgtcccga

SEQ ID NO: 11717 - DNA, 31 bp, Homo sapiens; identical to SEQ ID NO: 1720
  chr3:193721400-193721431
  hypo

SEQ ID NO: 11718 - DNA, 31 bp, Homo sapiens; identical to SEQ ID NO: 1721
  chr3:193721460-193721491
  hypo

SEQ ID NO: 11719 - DNA, 31 bp, Homo sapiens; identical to SEQ ID NO: 1723
  chr3:193721576-193721607
  hypo

SEQ ID NO: 11720 - DNA, 31 bp, Homo sapiens; identical to SEQ ID NO: 1724
  chr3:193852179-193852210
  hypo

SEQ ID NO: 11721 - DNA, 70 bp, Homo sapiens; identical to SEQ ID NO: 1725
  chr3:193852643-193852713
  hypo

SEQ ID NO: 11722 - DNA, 31 bp, Homo sapiens; identical to SEQ ID NO: 1726
  chr3:193853961-193853992
  hypo

SEQ ID NO: 11723 - DNA, 31 bp, Homo sapiens
  chr3:193940698-193940729
  hypo
aggcttctgagcatcccgtaccctcttccag

SEQ ID NO: 11724 - DNA, 56 bp, Homo sapiens
  chr3:193940754-193940810
  hypo
cttaggtagctgaggccgcaggacacagaaggggtgtttgccgctttcactaagct

SEQ ID NO: 11725 - DNA, 31 bp, Homo sapiens
  chr3:194048750-194048781
  hypo
acacacaaccacacaacggtgtggctgaagc

SEQ ID NO: 11726 - DNA, 129 bp, Homo sapiens
  chr3:194048819-194048948
  hypo
acagctcacactcatgcgggtcactgtggcacggcgccctcacacgcgcatccgcagagcgcacctgtcccagcgtggccaagaccgcctctttcacccagggccctctgtggacgttagtctgctctg

SEQ ID NO: 11727 - DNA, 31 bp, Homo sapiens
  chr3:194048984-194049015
  hypo
tatgaaacatttagcacgtacagtcctttga

SEQ ID NO: 11728 - DNA, 63 bp, Homo sapiens
  chr3:194061693-194061756
  hypo
tgaaaagccaaggcttcggagactcagctcccctccgcccctacctgtcgcctggtcaggccc

SEQ ID NO: 11729 - DNA, 96 bp, Homo sapiens
  chr3:194061769-194061865
  hypo
ccccagctcctgtatgcgctgctactagggccctgctgcccgagcctcgatagacacggtgagccgcagagaaccgcagctcgacctcaggtccca

SEQ ID NO: 11730 - DNA, 54 bp, Homo sapiens
  chr3:194066804-194066858
  hypo
cagttcccaaagctcccgcacatacatcttgatcctcagcgcaaacctagaagt

SEQ ID NO: 11731 - DNA, 31 bp, Homo sapiens
  chr3:194066868-194066899
  hypo
ggcagactggggctcccggagctacagtgac

SEQ ID NO: 11732 - DNA, 98 bp, Homo sapiens
  chr3:194066909-194067007
  hypo
gaacacaacacagaagcgaggggccagggccagtcctgacagcccgggctctgcagggaagatggacccggggaggcagcccacggaggccggggtcc

SEQ ID NO: 11733 - DNA, 31 bp, Homo sapiens
  chr3:194128439-194128470
  hypo
aagtctgaagattactcgcctagtagccttt

SEQ ID NO: 11734 - DNA, 37 bp, Homo sapiens; identical to SEQ ID NO: 1729
  chr3:194208175-194208212
  hypo

SEQ ID NO: 11735 - DNA, 24 bp, Homo sapiens
  chr3:194208233-194208257
  hypo
atgaccacggactctgcgccccgg

SEQ ID NO: 11736 - DNA, 36 bp, Homo sapiens
  chr3:194228175-194228211
  hypo
acctagttttcagcaccgaagcgaagctctcaagac

SEQ ID NO: 11737 - DNA, 31 bp, Homo sapiens
  chr3:194228227-194228258
  hypo
cagttaacttaatggccgcaggaaaagcaaa

SEQ ID NO: 11738 - DNA, 49 bp, Homo sapiens
  chr3:194228274-194228323
  hypo
tgcttctgcaaagaaccggttctgttggtccagtcgcttgagttcctac

SEQ ID NO: 11739 - DNA, 20 bp, Homo sapiens
  chr3:194316643-194316663
  hypo
gcacccggctgatggtctgt

SEQ ID NO: 11740 - DNA, 31 bp, Homo sapiens
  chr3:194316727-194316758
  hypo
gatttagacaggacagcgaaaggtaggagaa

SEQ ID NO: 11741 - DNA, 31 bp, Homo sapiens
  chr3:194316760-194316791
  hypo
cagataggcagagaaacgcagagaagagaaa

SEQ ID NO: 11742 - DNA, 37 bp, Homo sapiens
  chr3:194335589-194335626
  hypo
aacatttgtataattgcgaaaccggaggatcctatgg

SEQ ID NO: 11743 - DNA, 31 bp, Homo sapiens
  chr3:194338061-194338092
  hypo
gtggcacagcaggttgcggggcaagccctct

SEQ ID NO: 11744 - DNA, 35 bp, Homo sapiens
  chr3:194341459-194341494
  hypo
gttgaagtccctaggccgggcgtggtggctcaaac

SEQ ID NO: 11745 - DNA, 31 bp, Homo sapiens
  chr3:194344004-194344035
  hypo
ctacccagcaggtagccgaggatctcagtat

SEQ ID NO: 11746 - DNA, 110 bp, Homo sapiens; identical to SEQ ID NO: 1731
  chr3:194353931-194354041
  hypo

SEQ ID NO: 11747 - DNA, 42 bp, Homo sapiens; identical to SEQ ID NO: 1732
  chr3:194354210-194354252
  hypo

SEQ ID NO: 11748 - DNA, 42 bp, Homo sapiens; identical to SEQ ID NO: 1733
  chr3:194354405-194354447
  hypo

SEQ ID NO: 11749 - DNA, 42 bp, Homo sapiens; identical to SEQ ID NO: 1734
  chr3:194354461-194354503
  hypo

SEQ ID NO: 11750 - DNA, 31 bp, Homo sapiens
  chr3:194365665-194365696
  hypo
ctagctcttcccatggcgccccagactagga

SEQ ID NO: 11751 - DNA, 31 bp, Homo sapiens
  chr3:194365702-194365733
  hypo
ctctttcttcttttctcgtttgcattcccac

SEQ ID NO: 11752 - DNA, 31 bp, Homo sapiens
  chr3:194365736-194365767
  hypo
agtattcttcagtatacggacatgatcatac

SEQ ID NO: 11753 - DNA, 40 bp, Homo sapiens
  chr3:194365801-194365841
  hypo
cataactggacagttacggtaatgccgggttagactgtta

SEQ ID NO: 11754 - DNA, 31 bp, Homo sapiens
  chr3:194365842-194365873
  hypo
agtcaggagagttcctcgactcctgtatgtg

SEQ ID NO: 11755 - DNA, 21 bp, Homo sapiens
  chr3:194411156-194411177
  hypo
tacaggcgtgagccactgtac

SEQ ID NO: 11756 - DNA, 31 bp, Homo sapiens
  chr3:194431442-194431473
  hypo
ctggtggttgaggctgcgagacacaaaacct

SEQ ID NO: 11757 - DNA, 77 bp, Homo sapiens
  chr3:194558267-194558344
  hypo
agatgggagcatgccccgccagggcagggggcctgggaatccgtggagtgggagctggtcccgcgtgtaggtggttg

SEQ ID NO: 11758 - DNA, 50 bp, Homo sapiens
  chr3:194596887-194596937
  hypo
attatggtgaactcttcgatcctatccttggactccggtgacatgggaaa

SEQ ID NO: 11759 - DNA, 60 bp, Homo sapiens
  chr3:194596981-194597041
  hypo
gaggaacaccaggctgcggggactggagcagcctcaactattcacgcgtgggttagagag

SEQ ID NO: 11760 - DNA, 31 bp, Homo sapiens
  chr3:194597043-194597074
  hypo
gcctcccctccctccccgggccatggtgaga

SEQ ID NO: 11761 - DNA, 31 bp, Homo sapiens; identical to SEQ ID NO: 1739
  chr3:194602924-194602955
  hypo

SEQ ID NO: 11762 - DNA, 41 bp, Homo sapiens
  chr3:194669149-194669190
  hypo
catgctctaggagaggcggaaggaaacgagtaaacaagaat

SEQ ID NO: 11763 - DNA, 31 bp, Homo sapiens
  chr3:194669205-194669236
  hypo
ttgttgttgctgcattcggcaagatattaca

SEQ ID NO: 11764 - DNA, 38 bp, Homo sapiens
  chr3:194669296-194669334
  hypo
gagagaatcagaaattcgggacacgcagcaatggggaa

SEQ ID NO: 11765 - DNA, 31 bp, Homo sapiens
  chr3:194670887-194670918
  hypo
cccgtgacacctgtcacggttgctgcttccc

SEQ ID NO: 11766 - DNA, 21 bp, Homo sapiens
  chr3:194706825-194706846
  hypo
cgcgcccggcctcaacctcag

SEQ ID NO: 11767 - DNA, 31 bp, Homo sapiens
  chr3:194755642-194755673
  hypo
cacactgcctcctggccggggcctcagagaa

SEQ ID NO: 11768 - DNA, 64 bp, Homo sapiens
  chr3:194766333-194766397
  hypo
cttggcttcagagtgccgccaggagaccgccctccaccctcactccatgcgggggttggcctgg

SEQ ID NO: 11769 - DNA, 49 bp, Homo sapiens
  chr3:194783224-194783273
  hypo
cagcctccttccacagcggcatatgccactcatgcggaggcagctctga

SEQ ID NO: 11770 - DNA, 31 bp, Homo sapiens
  chr3:194790031-194790062
  hypo
tctgtttgtactttctcgaaaaatggaaggc

SEQ ID NO: 11771 - DNA, 31 bp, Homo sapiens
  chr3:194790285-194790316
  hypo
agcacagtgacctgcccggcaggaggtctca

SEQ ID NO: 11772 - DNA, 45 bp, Homo sapiens
  chr3:194790325-194790370
  hypo
tcacaggacttccctgcggtgtctctctagcgggtcagacactgc

SEQ ID NO: 11773 - DNA, 104 bp, Homo sapiens
  chr3:194790634-194790738
  hypo
ggtccccgaggtggccgcggaagtggtacttgtcggccagctgctgcacctgcgccggctccagcaggcggctgtagagcggggactggcgcatggcctccagg

SEQ ID NO: 11774 - DNA, 42 bp, Homo sapiens
  chr3:194790751-194790793
  hypo
ccccgctgttgaagcccggcagcccctcggggggcgggcccc

SEQ ID NO: 11775 - DNA, 53 bp, Homo sapiens
  chr3:194793569-194793622
  hypo
tgtgtctgctggttctcgtagaggaatcgcatcagcctcggggtagaaggaat

SEQ ID NO: 11776 - DNA, 31 bp, Homo sapiens
  chr3:194798290-194798321
  hypo
cccatagtgtcagtctcgttcccaaagctgt

SEQ ID NO: 11777 - DNA, 39 bp, Homo sapiens
  chr3:194799661-194799700
  hypo
ctctccatgaactttgcgaccagacgcactctgctccag

SEQ ID NO: 11778 - DNA, 31 bp, Homo sapiens
  chr3:194817220-194817251
  hypo
tgctgacaaacacacacgatacacacacaca

SEQ ID NO: 11779 - DNA, 62 bp, Homo sapiens
  chr3:194825298-194825360
  hypo
ggcagtggggacgaggcggggacccgggagatccagacagcgtggcacgaccacctgagaga

SEQ ID NO: 11780 - DNA, 31 bp, Homo sapiens
  chr3:194825431-194825462
  hypo
ttttaaaggaaagctacggaataccttgatt

SEQ ID NO: 11781 - DNA, 47 bp, Homo sapiens
  chr3:194832847-194832894
  hypo
ttattcttaaaacccacgagaccatttctagccgtcaggagggccca

SEQ ID NO: 11782 - DNA, 60 bp, Homo sapiens
  chr3:194832912-194832972
  hypo
cttgctgacatctcagcgacacctgggcaaaagcctactggaatccgggtcaggttctgt

SEQ ID NO: 11783 - DNA, 31 bp, Homo sapiens
  chr3:194841585-194841616
  hypo
atgtcaggccagcccccgccctgttcccaga

SEQ ID NO: 11784 - DNA, 31 bp, Homo sapiens
  chr3:194841831-194841862
  hypo
gggaaccacagcacaccggccatgcccttgg

SEQ ID NO: 11785 - DNA, 31 bp, Homo sapiens
  chr3:194863436-194863467
  hypo
ggctggggctggggtgcgtatgcacgctggg

SEQ ID NO: 11786 - DNA, 167 bp, Homo sapiens
  chr3:194866033-194866200
  hypo
cattgatggggccctgcgagcatctctgtgaagccacatgaacgggcacatcactccacggtgactggcactgatggggccctgcgagcatctctgtgaagtcacatgaacgggcacctcactccacggtgactggcactgatggggccctgcgagcatctctgtga

SEQ ID NO: 11787 - DNA, 31 bp, Homo sapiens
  chr3:194866459-194866490
  hypo
acagacgcaaggacaccgcagacatccaggc

SEQ ID NO: 11788 - DNA, 24 bp, Homo sapiens
  chr3:194890868-194890892
  hypo
acgcctggccgttaatgtatatat

SEQ ID NO: 11789 - DNA, 31 bp, Homo sapiens
  chr3:194896168-194896199
  hypo
gtcattagccaagcttcggaaagggcacatt

SEQ ID NO: 11790 - DNA, 18 bp, Homo sapiens
  chr3:194927208-194927226
  hypo
actttccagccagttgcg

SEQ ID NO: 11791 - DNA, 31 bp, Homo sapiens
  chr3:194933211-194933242
  hypo
gtccccaagccccatgcgaacaggtacaggt

SEQ ID NO: 11792 - DNA, 31 bp, Homo sapiens
  chr3:194935162-194935193
  hypo
aaccagcccccacccccgtcaatcctcagac

SEQ ID NO: 11793 - DNA, 31 bp, Homo sapiens
  chr3:194935234-194935265
  hypo
gggaaccagcatgcaccgtcagcccctttca

SEQ ID NO: 11794 - DNA, 31 bp, Homo sapiens
  chr3:194935284-194935315
  hypo
gaaaaccatctacatacggcatccacaatcg

SEQ ID NO: 11795 - DNA, 80 bp, Homo sapiens; identical to SEQ ID NO: 1740
  chr3:194980431-194980511
  hypo

SEQ ID NO: 11796 - DNA, 70 bp, Homo sapiens
  chr3:195058609-195058679
  hypo
cccactttctgtactccgacctgagcccggggccactcccacctcaacctgagcccggggccactcccac

SEQ ID NO: 11797 - DNA, 31 bp, Homo sapiens
  chr3:195176385-195176416
  hypo
ccaggagggtagagatcgaggtttggggtcc

SEQ ID NO: 11798 - DNA, 68 bp, Homo sapiens
  chr3:195448189-195448257
  hypo
gtgtaagcgtgcctggcgctgcagtacacgctaatcaaccatgacgctgccatcgtaagggatggctg

SEQ ID NO: 11799 - DNA, 57 bp, Homo sapiens
  chr3:195448259-195448316
  hypo
agtttgtctttatgaacgtgggacagtaagtggggcacggagcgggggtgcagggag

SEQ ID NO: 11800 - DNA, 31 bp, Homo sapiens
  chr3:195540175-195540206
  hypo
ataataatgcggataccgtggggaagtggcg

SEQ ID NO: 11801 - DNA, 31 bp, Homo sapiens
  chr3:195544692-195544723
  hypo
gtatgtggtctctatccgaggccatggtgaa

SEQ ID NO: 11802 - DNA, 52 bp, Homo sapiens
  chr3:195573452-195573504
  hypo
agctcttcaagacccacgggcttcctgcaaaccttggcggtggcctccagtg

SEQ ID NO: 11803 - DNA, 64 bp, Homo sapiens
  chr3:195573517-195573581
  hypo
ccagcaaagtcccatgcggggggctggtgcatgttttcgaaggaggaatcgtatcagaagctga

SEQ ID NO: 11804 - DNA, 31 bp, Homo sapiens
  chr3:195573603-195573634
  hypo
tttgcagggattttgtcgcatctttcagtaa

SEQ ID NO: 11805 - DNA, 70 bp, Homo sapiens
  chr3:195587079-195587149
  hypo
caagccggctcgtgcccgccgcctcggctgcagggccctccacctgcagcgctttcgtccctacctggcg

SEQ ID NO: 11806 - DNA, 48 bp, Homo sapiens
  chr3:195591688-195591736
  hypo
ctgcgtcccaggtgcaaatcagtaagaaacacccgagacagtgacaga

SEQ ID NO: 11807 - DNA, 36 bp, Homo sapiens
  chr3:195591740-195591776
  hypo
tgacagcaagtgcctgcgtcccgggtgcaaatcagt

SEQ ID NO: 11808 - DNA, 31 bp, Homo sapiens
  chr3:195592095-195592126
  hypo
atcagtaagaaccacccgagacagtgacaga

SEQ ID NO: 11809 - DNA, 31 bp, Homo sapiens
  chr3:195592130-195592161
  hypo
tgacagcgagtgcctgcgtcccaggtgcaaa

SEQ ID NO: 11810 - DNA, 31 bp, Homo sapiens
  chr3:195597365-195597396
  hypo
agcccacaccaggcagcggccagagggcaga

SEQ ID NO: 11811 - DNA, 31 bp, Homo sapiens
  chr3:195599731-195599762
  hypo
agttccctggcaaggccggggccccagtcct

SEQ ID NO: 11812 - DNA, 69 bp, Homo sapiens
  chr3:195599771-195599840
  hypo
acttgatttcactcctcggctgggttccaggagttctgagaggtgcgggggtgccgggggacacctagg

SEQ ID NO: 11813 - DNA, 58 bp, Homo sapiens
  chr3:195600085-195600143
  hypo
cctctgacctcagacacgaaacctctgctgatgtggcctaagccggggcctgggcagg

SEQ ID NO: 11814 - DNA, 104 bp, Homo sapiens
  chr3:195600174-195600278
  hypo
ggaagcacagggctcccgcaagacactcctgactcccgaaggctctcacaggttgtgaggctcccgcgtctgctgctggacttgtcatacgtgatgccgtgagc

SEQ ID NO: 11815 - DNA, 72 bp, Homo sapiens
  chr3:195600652-195600724
  hypo
agaccaaagtcaaacccgagagcaccacggtcggcggggaggcggggggcgcggggcgcggggagacggggc

SEQ ID NO: 11816 - DNA, 31 bp, Homo sapiens
  chr3:195601238-195601269
  hypo
ttagtgcaggtatggccgaggcaagagcccc

SEQ ID NO: 11817 - DNA, 56 bp, Homo sapiens
  chr3:195602497-195602553
  hypo
cccttccttccaggcccgccctgtccgcgccctctctctcccgccatgaacaggcc

SEQ ID NO: 11818 - DNA, 31 bp, Homo sapiens
  chr3:195602575-195602606
  hypo
ggccagggctgctacccggccgtgactgaag

SEQ ID NO: 11819 - DNA, 77 bp, Homo sapiens
  chr3:195603846-195603923
  hypo
agaggggccaggcccacggctttccagctcgtggaggtggacacggtcatgaggctggacttcgggctggaggccct

SEQ ID NO: 11820 - DNA, 31 bp, Homo sapiens
  chr3:195603965-195603996
  hypo
tttccagaatgctccccggagcgccacgctt

SEQ ID NO: 11821 - DNA, 49 bp, Homo sapiens
  chr3:195637215-195637264
  hypo
gaaggagaaaacccagcgctcggattcccagcggcggggcagcctgcag

SEQ ID NO: 11822 - DNA, 55 bp, Homo sapiens
  chr3:195637287-195637342
  hypo
catgtcccagcccaaacggaggcagccctgggcagcgggcgcgtggagcccaagg

SEQ ID NO: 11823 - DNA, 31 bp, Homo sapiens
  chr3:195648721-195648752
  hypo
aacagaggagcacttccgtcacccaggaaca

SEQ ID NO: 11824 - DNA, 24 bp, Homo sapiens
  chr3:195779138-195779162
  hypo
ccaaatttaagaatgccgatcaga

SEQ ID NO: 11825 - DNA, 31 bp, Homo sapiens; identical to SEQ ID NO: 1741
  chr3:195809081-195809112
  hypo

SEQ ID NO: 11826 - DNA, 36 bp, Homo sapiens
  chr3:195901886-195901922
  hypo
taactttggggacttgcggggaagggtgggaggggg

SEQ ID NO: 11827 - DNA, 8 bp, Homo sapiens
  chr3:196069870-196069878
  hypo
acaagaca

SEQ ID NO: 11828 - DNA, 72 bp, Homo sapiens
  chr3:196069900-196069972
  hypo
tgagataaacgggtctcgtaaggctagcgttgggactatctcttcatttccatgtggcgagcctcctagggc

SEQ ID NO: 11829 - DNA, 31 bp, Homo sapiens
  chr3:196070068-196070099
  hypo
cttgctgttactttgtcggtgatgctcctag

SEQ ID NO: 11830 - DNA, 31 bp, Homo sapiens
  chr3:196070117-196070148
  hypo
ctgaggacataaatgacgaacagggcctggg

SEQ ID NO: 11831 - DNA, 31 bp, Homo sapiens
  chr3:196070187-196070218
  hypo
tgaaagatttgggagacggccaggtgccagt

SEQ ID NO: 11832 - DNA, 3 bp, Homo sapiens
  chr3:196070228-196070231
  hypo
tgt

SEQ ID NO: 11833 - DNA, 25 bp, Homo sapiens
  chr3:196138387-196138412
  hypo
aaaactagcagatggccgagcacag

SEQ ID NO: 11834 - DNA, 31 bp, Homo sapiens
  chr3:196199258-196199289
  hypo
tactgatcagtaggcacgactcttcattttc

SEQ ID NO: 11835 - DNA, 31 bp, Homo sapiens
  chr3:196199470-196199501
  hypo
ccttcatggtaccattcggcaccacaggcac

SEQ ID NO: 11836 - DNA, 60 bp, Homo sapiens
  chr3:196386790-196386850
  hypo
ctggagcgcatcagccgcggcgccttccaggagcaaggtcacctgcgcagcctggtcctg

SEQ ID NO: 11837 - DNA, 52 bp, Homo sapiens
  chr3:196386970-196387022
  hypo
ctccagaacctctcctcgctgcggtccgtgtccctggcggggaacaccatca

SEQ ID NO: 11838 - DNA, 34 bp, Homo sapiens
  chr3:196387100-196387134
  hypo
tcgagggcggcgctttcgacggcctggctgagct

SEQ ID NO: 11839 - DNA, 64 bp, Homo sapiens
  chr3:196387225-196387289
  hypo
ctggagtggttcctcgcgaccgggggagaggctgccttcgagctggagacgctggacctgtctc

SEQ ID NO: 11840 - DNA, 179 bp, Homo sapiens
  chr3:196387294-196387473
  hypo
cagctgctgttcttcccgctgctgccccagtacagcaagttgcggaccctcctgctgcgcgacaacaacatgggcttctaccgggacctgtacaacacctcgtcgccgagggagatggtggcccagttcctcctcgtggacggcaacgtgaccaacatcaccaccgtcagcctctggga

SEQ ID NO: 11841 - DNA, 60 bp, Homo sapiens
  chr3:196387605-196387665
  hypo
gatgacgcttcacattcgggagcacgagccccccggagcgctcaccgagctggacctgag

SEQ ID NO: 11842 - DNA, 36 bp, Homo sapiens
  chr3:196387837-196387873
  hypo
cccctgccagctgcctcggaccgggtgggcccccct

SEQ ID NO: 11843 - DNA, 104 bp, Homo sapiens
  chr3:196388383-196388487
  hypo
tcctccaagatcatccgcgtgacggagctgcccggaggtgtgcctcgggactgcaagtgggagcggctggacctgggcctgctctacctcgtgctcatcctccc

SEQ ID NO: 11844 - DNA, 31 bp, Homo sapiens
  chr3:196388507-196388538
  hypo
tggcctgcactgtcatcgtcctcacttttaa

SEQ ID NO: 11845 - DNA, 31 bp, Homo sapiens
  chr3:196388550-196388581
  hypo
tcaggtcatcaagagccgctgccactggtcc

SEQ ID NO: 11846 - DNA, 26 bp, Homo sapiens
  chr3:196402165-196402191
  hypo
tgttgtacttactggccgggcgcggt

SEQ ID NO: 11847 - DNA, 31 bp, Homo sapiens
  chr3:196719326-196719357
  hypo
ttgggcgggatgggagcgccctggagccaac

SEQ ID NO: 11848 - DNA, 56 bp, Homo sapiens
  chr3:196754611-196754667
  hypo
agggagaggactcaccgcgatgagctggacgcagtggtcggcggaggtgccccgga

SEQ ID NO: 11849 - DNA, 82 bp, Homo sapiens
  chr3:196754676-196754758
  hypo
gggagggctggatgcccgcttcccggaaggcctcgctcatgttgccgcacttgtgctgctctgggtccgaggtggcgcacca

SEQ ID NO: 11850 - DNA, 31 bp, Homo sapiens
  chr3:196766011-196766042
  hypo
gtgaatgaataggctgcggtgagtgcatcca

SEQ ID NO: 11851 - DNA, 96 bp, Homo sapiens
  chr3:196766099-196766195
  hypo
taagccacaccccaaacgctacattacactccatacgacattccgggaaaggcaaaactacaggcactgcgaacagatcggcggttgtcacagact

SEQ ID NO: 11852 - DNA, 31 bp, Homo sapiens
  chr3:196766250-196766281
  hypo
gacagtgggactgtttcgcagtcttgattgt

SEQ ID NO: 11853 - DNA, 31 bp, Homo sapiens
  chr3:197127485-197127516
  hypo
accccctggccagcaccgggccctgactccc

SEQ ID NO: 11854 - DNA, 31 bp, Homo sapiens
  chr3:197133968-197133999
  hypo
ttcacaacactcgctgcgcctgtaatttttg

SEQ ID NO: 11855 - DNA, 31 bp, Homo sapiens
  chr3:197152284-197152315
  hypo
ggaaggaaggtgcaggcgcagcagtgatgtc

SEQ ID NO: 11856 - DNA, 31 bp, Homo sapiens
  chr3:197152328-197152359
  hypo
gcctggcacaagtgggcgcccagcatgttca

SEQ ID NO: 11857 - DNA, 31 bp, Homo sapiens
  chr3:197161832-197161863
  hypo
ttaaatcacagagctgcgctcattagtggtc

SEQ ID NO: 11858 - DNA, 31 bp, Homo sapiens
  chr3:197216364-197216395
  hypo
gtgcccagggattccccgactggacccctga

SEQ ID NO: 11859 - DNA, 36 bp, Homo sapiens
  chr3:197216423-197216459
  hypo
agtgcaatcttttcttcgagacagagtctcgctctg

SEQ ID NO: 11860 - DNA, 37 bp, Homo sapiens; identical to SEQ ID NO: 1742
  chr3:197222651-197222688
  hypo

SEQ ID NO: 11861 - DNA, 31 bp, Homo sapiens; identical to SEQ ID NO: 1743
  chr3:197222713-197222744
  hypo

SEQ ID NO: 11862 - DNA, 31 bp, Homo sapiens
  chr3:197226094-197226125
  hypo
ggtggcaggtgccgggcgccacgacctcact

SEQ ID NO: 11863 - DNA, 31 bp, Homo sapiens
  chr3:197313910-197313941
  hypo
caacacggcgaaaccccgtctctactaaaaa

SEQ ID NO: 11864 - DNA, 44 bp, Homo sapiens
  chr3:197327175-197327219
  hypo
atggctcacctggaggcggcgctcccatacggcacccggcagcc

SEQ ID NO: 11865 - DNA, 31 bp, Homo sapiens
  chr3:197435285-197435316
  hypo
cgtaagccaccacacccggcctatatgtaaa

SEQ ID NO: 11866 - DNA, 31 bp, Homo sapiens
  chr3:197459517-197459548
  hypo
actggcatttaggaaacggagggaaagtgaa

SEQ ID NO: 11867 - DNA, 77 bp, Homo sapiens
  chr3:197608098-197608175
  hypo
tgagatcctgaatccccgctttgtcggtaggcacaggtccatataagcatttgcggtctggacgtttcaaaggtatt

SEQ ID NO: 11868 - DNA, 31 bp, Homo sapiens
  chr3:197726425-197726456
  hypo
ggtctcactccttctgcgcaggctggagtgc

SEQ ID NO: 11869 - DNA, 31 bp, Homo sapiens
  chr3:197726474-197726505
  hypo
ctaatcctggacttcccgggctcaagcagtc

SEQ ID NO: 11870 - DNA, 5 bp, Homo sapiens
  chr3:197726508-197726513
  hypo
tcacc

SEQ ID NO: 11871 - DNA, 45 bp, Homo sapiens
  chr3:197764837-197764882
  hypo
ttgcatcctcacagtccgtctgcctattgtcgttattgctggtcc

SEQ ID NO: 11872 - DNA, 31 bp, Homo sapiens
  chr3:197764902-197764933
  hypo
tctgtctgcctgttgtcgttattgatgctcc

SEQ ID NO: 11873 - DNA, 31 bp, Homo sapiens
  chr3:197764939-197764970
  hypo
ttgcctcctcacagtccgtctgcctgttgtc

SEQ ID NO: 11874 - DNA, 31 bp, Homo sapiens
  chr3:197764990-197765021
  hypo
ttgcatcctcacagtccgtctgcctgttgtc

SEQ ID NO: 11875 - DNA, 31 bp, Homo sapiens
  chr4:513703-513734
  hypo
ggggtgggcctgcaggcgtgtgggttcatgc

SEQ ID NO: 11876 - DNA, 31 bp, Homo sapiens
  chr4:623248-623279
  hypo
gaacagccacggaccccgcagtgctgtgcat

SEQ ID NO: 11877 - DNA, 75 bp, Homo sapiens
  chr4:651195-651270
  hypo
gaacaagctggagaaccgcaaggacatcgcacaggacatggtcctttaccacgtgaagtgcgacagggacgagat

SEQ ID NO: 11878 - DNA, 31 bp, Homo sapiens
  chr4:651353-651384
  hypo
ggtcacccaggggtctcggctgtgtggtggg

SEQ ID NO: 11879 - DNA, 55 bp, Homo sapiens; identical to SEQ ID NO: 1745
  chr4:667711-667766
  hypo

SEQ ID NO: 11880 - DNA, 31 bp, Homo sapiens; identical to SEQ ID NO: 1746
  chr4:699369-699400
  hypo

SEQ ID NO: 11881 - DNA, 45 bp, Homo sapiens
  chr4:708089-708134
  hypo
actgcccagacccactcgtggccgttcggccgcatttgcttcctc

SEQ ID NO: 11882 - DNA, 80 bp, Homo sapiens
  chr4:718160-718240
  hypo
ggaaggtgaagctccacggagcaccctggtggacagcggtgctgtgggggccatggaccagaaggcggagcccatgctgt

SEQ ID NO: 11883 - DNA, 31 bp, Homo sapiens
  chr4:718960-718991
  hypo
ggttttgatgaggactcgtatttcagctcct

SEQ ID NO: 11884 - DNA, 31 bp, Homo sapiens
  chr4:738346-738377
  hypo
tttggatttcatggtgcgctatgttctgttt

SEQ ID NO: 11885 - DNA, 80 bp, Homo sapiens
  chr4:738387-738467
  hypo
gtgaaaccaaagcagacgacagttcaaacaaagaggccgcggaggagaagccggaggaggacaacgactaccaccgcagc

SEQ ID NO: 11886 - DNA, 56 bp, Homo sapiens
  chr4:757281-757337
  hypo
tacatgatcagggaaacgcaaggaaaactgcgtggcaccacgcgtaccccatagaa

SEQ ID NO: 11887 - DNA, 31 bp, Homo sapiens
  chr4:757352-757383
  hypo
gcactgacaacacattcgggaaacgccggga

SEQ ID NO: 11888 - DNA, 31 bp, Homo sapiens
  chr4:760152-760183
  hypo
gagtcaccttctgacacgagctccctctgct

SEQ ID NO: 11889 - DNA, 44 bp, Homo sapiens
  chr4:765528-765572
  hypo
cagcagagccaagcctcggcctctctgctcgctggtggttttgt

SEQ ID NO: 11890 - DNA, 31 bp, Homo sapiens
  chr4:765627-765658
  hypo
ttagtacacctgtgaccgggtgaaagccaaa

SEQ ID NO: 11891 - DNA, 36 bp, Homo sapiens
  chr4:765703-765739
  hypo
ttgctgtgatgagacccgcaccgtctgcgttcagga

SEQ ID NO: 11892 - DNA, 35 bp, Homo sapiens
  chr4:793058-793093
  hypo
atcacacccttttcatcggtcgcatttctacgggg

SEQ ID NO: 11893 - DNA, 12 bp, Homo sapiens
  chr4:793647-793659
  hypo
ctcaaaaaataa

SEQ ID NO: 11894 - DNA, 57 bp, Homo sapiens
  chr4:793730-793787
  hypo
taaacccaagaggggtcgcatgaaccccaactcgaagccggtcgttcagacattcta

SEQ ID NO: 11895 - DNA, 45 bp, Homo sapiens; identical to SEQ ID NO: 1749
  chr4:819689-819734
  hypo

SEQ ID NO: 11896 - DNA, 31 bp, Homo sapiens
  chr4:852609-852640
  hypo
agaaacgatgaggagacgggaaatgctcccg

SEQ ID NO: 11897 - DNA, 37 bp, Homo sapiens
  chr4:877547-877584
  hypo
aggccctggttttccacggacacggccttgtgttgtt

SEQ ID NO: 11898 - DNA, 52 bp, Homo sapiens
  chr4:877607-877659
  hypo
tgggaggccaggctggcgctgaccctgtccactgctgcgcctggaggtgctg

SEQ ID NO: 11899 - DNA, 39 bp, Homo sapiens
  chr4:881387-881426
  hypo
ctcatacaggcactcgcgcgcatgcgtacacatgcatgc

SEQ ID NO: 11900 - DNA, 35 bp, Homo sapiens
  chr4:887621-887656
  hypo
ccagggtcctgccccacgcacgcattccaccggga

SEQ ID NO: 11901 - DNA, 47 bp, Homo sapiens
  chr4:905869-905916
  hypo
ccctcagggggctgtgcgcagggaggctgcggcgtggctgtgtccac

SEQ ID NO: 11902 - DNA, 37 bp, Homo sapiens
  chr4:907578-907615
  hypo
aacataatggccccagcgtacacgccccccgcaaaca

SEQ ID NO: 11903 - DNA, 31 bp, Homo sapiens
  chr4:942935-942966
  hypo
gctgcccctttcagaacggggtcgctgaggt

SEQ ID NO: 11904 - DNA, 42 bp, Homo sapiens
  chr4:949384-949426
  hypo
tggggctcccccactccgcccctcgggcgtccctgtcctgtc

SEQ ID NO: 11905 - DNA, 31 bp, Homo sapiens
  chr4:955927-955958
  hypo
tccccaacagctctgccggcaggcagagaca

SEQ ID NO: 11906 - DNA, 96 bp, Homo sapiens
  chr4:956304-956400
  hypo
agcacggcgtcggcctcgtccacagacagcagtacggagaacgggtcctcgccgctgtagcccgccccccagcggaggactcgaccaaggtcattc

SEQ ID NO: 11907 - DNA, 31 bp, Homo sapiens
  chr4:957057-957088
  hypo
gtctgggggcagcttcgcgtgctgacagaca

SEQ ID NO: 11908 - DNA, 31 bp, Homo sapiens
  chr4:957267-957298
  hypo
ctgctggccagcagggcggcactgaggacag

SEQ ID NO: 11909 - DNA, 31 bp, Homo sapiens
  chr4:958712-958743
  hypo
acctactgggcagcctcggatgagcgctgac

SEQ ID NO: 11910 - DNA, 31 bp, Homo sapiens; identical to SEQ ID NO: 1750
  chr4:966932-966963
  hypo

SEQ ID NO: 11911 - DNA, 31 bp, Homo sapiens; identical to SEQ ID NO: 1751
  chr4:966986-967017
  hypo

SEQ ID NO: 11912 - DNA, 34 bp, Homo sapiens; identical to SEQ ID NO: 1752
  chr4:967208-967242
  hypo

SEQ ID NO: 11913 - DNA, 31 bp, Homo sapiens; identical to SEQ ID NO: 1753
  chr4:1004428-1004459
  hypo

SEQ ID NO: 11914 - DNA, 31 bp, Homo sapiens; identical to SEQ ID NO: 1754
  chr4:1004480-1004511
  hypo

SEQ ID NO: 11915 - DNA, 31 bp, Homo sapiens
  chr4:1032331-1032362
  hypo
acctgctcccagggtgcgtgtcagctcagat

SEQ ID NO: 11916 - DNA, 97 bp, Homo sapiens
  chr4:1036244-1036341
  hypo
acacccacacacacaccgacacacacaccgacacacacacctccacatacacccccgcacactgacacacccacacacacaccgacacacacacctc

SEQ ID NO: 11917 - DNA, 31 bp, Homo sapiens; identical to SEQ ID NO: 1756
  chr4:1036591-1036622
  hypo

SEQ ID NO: 11918 - DNA, 49 bp, Homo sapiens
  chr4:1044604-1044653
  hypo
taagccaggcagctggcggatggcgcggcacgagcgctggctgtgcctg

SEQ ID NO: 11919 - DNA, 31 bp, Homo sapiens
  chr4:1077031-1077062
  hypo
atgactacataaaagacgaagatgcaacaat

SEQ ID NO: 11920 - DNA, 94 bp, Homo sapiens
  chr4:1189020-1189114
  hypo
ctcaatgtcccactcccgcatctcctgcggtcccagggcgggtcccgctggtgtgtggccggcctcgcaggaaccacttcgctctcccccatcc

SEQ ID NO: 11921 - DNA, 43 bp, Homo sapiens
  chr4:1201009-1201052
  hypo
cagagggggtggaggccggaggcctagacgcctgtaggggctg

SEQ ID NO: 11922 - DNA, 31 bp, Homo sapiens
  chr4:1222995-1223026
  hypo
aggaagtgccctaggccgaagaaccaggtgc

SEQ ID NO: 11923 - DNA, 31 bp, Homo sapiens
  chr4:1223049-1223080
  hypo
gtgtgtgcaccacctgcgcatccacccacac

SEQ ID NO: 11924 - DNA, 70 bp, Homo sapiens
  chr4:1223145-1223215
  hypo
gcagagatgctctgtgcgaacagccgtggctgaggacaccaggacatgcaggcctcgtccacatgggcat

SEQ ID NO: 11925 - DNA, 31 bp, Homo sapiens
  chr4:1225294-1225325
  hypo
gaaacagaccccaggacgctcctggtggcag

SEQ ID NO: 11926 - DNA, 31 bp, Homo sapiens
  chr4:1233071-1233102
  hypo
gccactgtcagccccacggcagctgggcaga

SEQ ID NO: 11927 - DNA, 31 bp, Homo sapiens
  chr4:1282472-1282503
  hypo
ataggaaggtcaggaacgctgttacggggag

SEQ ID NO: 11928 - DNA, 49 bp, Homo sapiens
  chr4:1299055-1299104
  hypo
ggtccctgtggaaagccgctgcactaggtgagcccggccctggtgaggg

SEQ ID NO: 11929 - DNA, 94 bp, Homo sapiens
  chr4:1299125-1299219
  hypo
ttgtgctgctgtgccccgctgcttccaggcggcgcggccctccgtctgattgctggaggactcttcggtgtggacacaccgtggtttgtttacc

SEQ ID NO: 11930 - DNA, 31 bp, Homo sapiens
  chr4:1299340-1299371
  hypo
cttttaaagaactaagcgctttttccagaag

SEQ ID NO: 11931 - DNA, 53 bp, Homo sapiens
  chr4:1299393-1299446
  hypo
aagagtccaggtatcccggctccaccagcatgtggtggcggcctcttgacttg

SEQ ID NO: 11932 - DNA, 31 bp, Homo sapiens
  chr4:1299449-1299480
  hypo
ctgttcttctgggtgccggggttctccagag

SEQ ID NO: 11933 - DNA, 36 bp, Homo sapiens
  chr4:1299599-1299635
  hypo
tatcaaagctaagtcccgagccggagacccaggaga

SEQ ID NO: 11934 - DNA, 31 bp, Homo sapiens
  chr4:1309979-1310010
  hypo
gcaccctgtagaaacacgtggcacccttgcc

SEQ ID NO: 11935 - DNA, 31 bp, Homo sapiens; identical to SEQ ID NO: 1757
  chr4:1310814-1310845
  hypo

SEQ ID NO: 11936 - DNA, 33 bp, Homo sapiens
  chr4:1326207-1326240
  hypo
acttaaaaatgcaggccgggtgcagcggctcat

SEQ ID NO: 11937 - DNA, 31 bp, Homo sapiens
  chr4:1331674-1331705
  hypo
caactgactctgtccccgcctatgaatgtct

SEQ ID NO: 11938 - DNA, 42 bp, Homo sapiens; identical to SEQ ID NO: 1758
  chr4:1332423-1332465
  hypo

SEQ ID NO: 11939 - DNA, 233 bp, Homo sapiens; identical to SEQ ID NO: 1759
  chr4:1332482-1332715
  hypo

SEQ ID NO: 11940 - DNA, 39 bp, Homo sapiens
  chr4:1332877-1332916
  hypo
gtcaagatgataaagtcgtgtgcccgagaaccaaagaag

SEQ ID NO: 11941 - DNA, 109 bp, Homo sapiens
  chr4:1332919-1333028
  hypo
tccacttctcacaagccgagaaggtgtacatcatgtaggccccacgtcgtgaagcgcacgcctcggggacgggctgcagtgggcggggaggccacgccttcctcctgtc

SEQ ID NO: 11942 - DNA, 31 bp, Homo sapiens
  chr4:1333152-1333183
  hypo
gtaggattttgtaacacgtcaaccatttgat

SEQ ID NO: 11943 - DNA, 31 bp, Homo sapiens
  chr4:1336758-1336789
  hypo
gttgcatttccacgcacgttgtaaaatcaac

SEQ ID NO: 11944 - DNA, 62 bp, Homo sapiens
  chr4:1338570-1338632
  hypo
cggcaggtttagaaaacggatggggggtgttgagccagggaggtgagcgggtgcagaagtat

SEQ ID NO: 11945 - DNA, 34 bp, Homo sapiens
  chr4:1338813-1338847
  hypo
gccctgggatgggagccgtcggaggattttgtgt

SEQ ID NO: 11946 - DNA, 31 bp, Homo sapiens
  chr4:1338848-1338879
  hypo
gaggaatcctgtgatccgaccttagactttc

SEQ ID NO: 11947 - DNA, 31 bp, Homo sapiens
  chr4:1505043-1505074
  hypo
gaggggacaccctgagcgccccacctgcctc

SEQ ID NO: 11948 - DNA, 31 bp, Homo sapiens
  chr4:1616845-1616876
  hypo
aggcaggatgcagccacgcccaccccacctg

SEQ ID NO: 11949 - DNA, 54 bp, Homo sapiens
  chr4:1621568-1621622
  hypo
cacttcatctgccctgcgatcatctaagctgtcctctctcgcctcatggtctcc

SEQ ID NO: 11950 - DNA, 31 bp, Homo sapiens
  chr4:1640681-1640712
  hypo
gactgcagggagggggcgaggccccacctgc

SEQ ID NO: 11951 - DNA, 46 bp, Homo sapiens
  chr4:1642969-1643015
  hypo
ccagggcaggtgcaggcggcagccatggccccgaccagcccccacc

SEQ ID NO: 11952 - DNA, 31 bp, Homo sapiens
  chr4:1658843-1658874
  hypo
caccttccagaaagggcgcagcagacccctg

SEQ ID NO: 11953 - DNA, 47 bp, Homo sapiens
  chr4:1658896-1658943
  hypo
gagacctggctgggcccgcaccctacacgagccgtcctgctcacaga

SEQ ID NO: 11954 - DNA, 31 bp, Homo sapiens
  chr4:1672853-1672884
  hypo
agccacagccatggcccggactcacctctgt

SEQ ID NO: 11955 - DNA, 131 bp, Homo sapiens
  chr4:1673035-1673166
  hypo
ctcacctctgtcccagcgtcagagcccccagctcacagccacggcccggactcacctctgtcccagcgtcagagccaccagctcacagccacggcccggactcacctctgtcccagcgtcagagccaccag

SEQ ID NO: 11956 - DNA, 31 bp, Homo sapiens
  chr4:1687243-1687274
  hypo
atgctgggggaggcatcggggctcccagggg

SEQ ID NO: 11957 - DNA, 49 bp, Homo sapiens
  chr4:1687420-1687469
  hypo
gaagggctggagcaggcgtccaggccattctcttcgctggggtccggta

SEQ ID NO: 11958 - DNA, 149 bp, Homo sapiens
  chr4:1763038-1763187
  hypo
cactgcccatgcaacccggtgcgccttgtccaccctgtccgccctgcctgccctgcctgccccgtgtgccccacccaccccgtgcaccctgtgcaccccgtccacctcatctaccccgtgcaccccgaccaccccgtccaccccgccca

SEQ ID NO: 11959 - DNA, 31 bp, Homo sapiens
  chr4:1764446-1764477
  hypo
atgcgtgtgtctggtgcgaggtgtgcatgtg

SEQ ID NO: 11960 - DNA, 31 bp, Homo sapiens
  chr4:1780620-1780651
  hypo
ccaggttttcatgcagcgtggcccccaggac

SEQ ID NO: 11961 - DNA, 31 bp, Homo sapiens
  chr4:1781227-1781258
  hypo
atggagggttccctggcgtggggagaagggg

SEQ ID NO: 11962 - DNA, 67 bp, Homo sapiens
  chr4:1781291-1781358
  hypo
ctgccacctcccctggcgagtggcaggaccccagacaggcccagcgatgggccgaggggcaggtcct

SEQ ID NO: 11963 - DNA, 31 bp, Homo sapiens
  chr4:1781373-1781404
  hypo
cccagggaatgggggccggggctccaggcag

SEQ ID NO: 11964 - DNA, 31 bp, Homo sapiens
  chr4:1782912-1782943
  hypo
tctttgccctgcctgccgggcagctcagacc

SEQ ID NO: 11965 - DNA, 31 bp, Homo sapiens
  chr4:1782945-1782976
  hypo
gccaagggcccaagggcggtaattctctctc

SEQ ID NO: 11966 - DNA, 59 bp, Homo sapiens
  chr4:1787675-1787734
  hypo
gggggaggcaggcaggcgtggcggggaagggaggcctcaggaggcgaagatgtctctat

SEQ ID NO: 11967 - DNA, 20 bp, Homo sapiens
  chr4:1794935-1794955
  hypo
ggggaccgggcgggagcggg

SEQ ID NO: 11968 - DNA, 84 bp, Homo sapiens; identical to SEQ ID NO: 1761
  chr4:1794972-1795056
  hypo

SEQ ID NO: 11969 - DNA, 172 bp, Homo sapiens; identical to SEQ ID NO: 1762
  chr4:1795075-1795247
  hypo

SEQ ID NO: 11970 - DNA, 31 bp, Homo sapiens; identical to SEQ ID NO: 1763
  chr4:1795283-1795314
  hypo

SEQ ID NO: 11971 - DNA, 35 bp, Homo sapiens; identical to SEQ ID NO: 1764
  chr4:1795555-1795590
  hypo

SEQ ID NO: 11972 - DNA, 660 bp, Homo sapiens; identical to SEQ ID NO: 1765
  chr4:1795964-1796624
  hypo

SEQ ID NO: 11973 - DNA, 62 bp, Homo sapiens
  chr4:1801891-1801953
  hypo
gcactcaggtggctgccgtggggtggatggacccggggtgagggcgccggggcacctgccac

SEQ ID NO: 11974 - DNA, 31 bp, Homo sapiens
  chr4:1840860-1840891
  hypo
agaatcttttcagaaccgtgaaggacagcag

SEQ ID NO: 11975 - DNA, 62 bp, Homo sapiens
  chr4:1955050-1955112
  hypo
ggattcactcatgtttcgtgtgtaaagagagcaagacagatgttaagcgctgtgtggtaact

SEQ ID NO: 11976 - DNA, 86 bp, Homo sapiens
  chr4:1960268-1960354
  hypo
ccctcagggctgcctgcgctcagagctggtgcggcaagccgcatccccaggagcctcgtggccgttcctgacgagtgtttgtgata

SEQ ID NO: 11977 - DNA, 31 bp, Homo sapiens
  chr4:1977183-1977214
  hypo
ggagacctgtgtcccccgtgaacagcggctt

SEQ ID NO: 11978 - DNA, 31 bp, Homo sapiens
  chr4:1993650-1993681
  hypo
gcaaggccccggcatccggtgccctcccagc

SEQ ID NO: 11979 - DNA, 36 bp, Homo sapiens
  chr4:1993714-1993750
  hypo
gggcctactcttccaccggtgcgcagatgcaagaaa

SEQ ID NO: 11980 - DNA, 148 bp, Homo sapiens
  chr4:1993752-1993900
  hypo
ctgaagggtgagaagccggggccaccactgctcccgcagaaagcctgcgggtgggaaatcctggggatgaggggcgtagagcaggcaggtgcccggcacagcagagcgcaggagcagggtggagtcacctgccgcgggggtgtgtgcc

SEQ ID NO: 11981 - DNA, 92 bp, Homo sapiens
  chr4:1993966-1994058
  hypo
accatctaggcagggacggctgcctctgggtctggacggcgctgggagttggcgctcgtggagcctggaggtggccccgggatctggagtga

SEQ ID NO: 11982 - DNA, 60 bp, Homo sapiens
  chr4:1994068-1994128
  hypo
ttggggaggccatgggcgacgtgcgtggaggaagcaggcgcaccccgtgctccctcaata

SEQ ID NO: 11983 - DNA, 102 bp, Homo sapiens
  chr4:1994149-1994251
  hypo
acaccagggcctgcttcggccacataaaccccctcccacgaggaaacgcagagagccaggccatggcgtgcctgtgcctctgccatgcgcccactgggctgc

SEQ ID NO: 11984 - DNA, 71 bp, Homo sapiens
  chr4:1994264-1994335
  hypo
cagctgggctggctggcgctgggggtgaacaacagcgccctgccctgtccagacgccggggctgaaacccc

SEQ ID NO: 11985 - DNA, 58 bp, Homo sapiens
  chr4:1999768-1999826
  hypo
aagagggacatgactacggcaaggaaaacaaacgagcagaaaacgacaacagcatcaa

SEQ ID NO: 11986 - DNA, 60 bp, Homo sapiens
  chr4:2066114-2066174
  hypo
ggcatcttggaccaccgcggctgtccatgacgctgccctgcccgccgccactggggaagg

SEQ ID NO: 11987 - DNA, 99 bp, Homo sapiens
  chr4:2066200-2066299
  hypo
cctctgcagcagatcccggggccaggctccggccccgcctgcggccccagcgccactgcctgtggaggccccagctggccacggcgctgctttgctccg

SEQ ID NO: 11988 - DNA, 31 bp, Homo sapiens
  chr4:2171163-2171194
  hypo
tcactgtgagaggaggcggaaggaaagtcaa

SEQ ID NO: 11989 - DNA, 35 bp, Homo sapiens
  chr4:2278789-2278824
  hypo
ggccggattggcgtggcgcccgacacagaaggctc

SEQ ID NO: 11990 - DNA, 214 bp, Homo sapiens
  chr4:2305613-2305827
  hypo
ctcagggcaaggggcccggcgctggcacagcccgctcccactgccccgcacaggcacgcggctcacaccaggggcgggatgggccggggctgcggcaggtgagctgagggcttggcactgcgcccatgtcacctgacaggcacccggaacatcagaaacagggaagcgggcccgctggcgcacattttctggtgcatgacgccccacagggcag

SEQ ID NO: 11991 - DNA, 52 bp, Homo sapiens
  chr4:2337322-2337374
  hypo
caccgtgaggtggagacgccatggaccggcacccgcacgggacctggcacca

SEQ ID NO: 11992 - DNA, 31 bp, Homo sapiens
  chr4:2339950-2339981
  hypo
gccagtggctctgagacgtgaaggcttgtcc

SEQ ID NO: 11993 - DNA, 31 bp, Homo sapiens
  chr4:2353586-2353617
  hypo
actcagggaaacacttcgtttatggttctgg

SEQ ID NO: 11994 - DNA, 31 bp, Homo sapiens
  chr4:2361256-2361287
  hypo
caggcaggtagagggccgactttgtggggac

SEQ ID NO: 11995 - DNA, 31 bp, Homo sapiens
  chr4:2362274-2362305
  hypo
ccagcagtgcctggggcgggagcaggagggg

SEQ ID NO: 11996 - DNA, 31 bp, Homo sapiens
  chr4:2387539-2387570
  hypo
ctccttgcttaagagccgcagacaggcgccc

SEQ ID NO: 11997 - DNA, 31 bp, Homo sapiens
  chr4:2411285-2411316
  hypo
cactccgctggctgctcgctgtccctccgat

SEQ ID NO: 11998 - DNA, 31 bp, Homo sapiens
  chr4:2426868-2426899
  hypo
ttgcttgttccttggacgctgtatctcctct

SEQ ID NO: 11999 - DNA, 45 bp, Homo sapiens
  chr4:2427612-2427657
  hypo
ggccctgttcccccatcgtcaggatggcggcgttgaccccaggga

SEQ ID NO: 12000 - DNA, 125 bp, Homo sapiens
  chr4:2459774-2459899
  hypo
aagagccaggaggcaccgccgccctcttctgcactcccggcctgaggcgcccagccgtctccctgtgccatggtctgacgctgtggctgcgcggggagggccggtgtggacgcctcttttctctc

SEQ ID NO: 12001 - DNA, 31 bp, Homo sapiens
  chr4:2459909-2459940
  hypo
gtctggttgactgagacgggaatcttggtat

SEQ ID NO: 12002 - DNA, 31 bp, Homo sapiens
  chr4:2459964-2459995
  hypo
tcatatttctacacaacgtattaccaagttt

SEQ ID NO: 12003 - DNA, 12 bp, Homo sapiens
  chr4:2524745-2524757
  hypo
ctcaaaaaaaaa

SEQ ID NO: 12004 - DNA, 31 bp, Homo sapiens
  chr4:2527906-2527937
  hypo
ttcattgtaaaatgaacgggaaagaaaactt

SEQ ID NO: 12005 - DNA, 31 bp, Homo sapiens
  chr4:2571129-2571160
  hypo
cccaaaggtagtttatcgaatcctatttatt

SEQ ID NO: 12006 - DNA, 31 bp, Homo sapiens
  chr4:2639920-2639951
  hypo
tgtcttgtagctgaatcgtaagtcaggtcac

SEQ ID NO: 12007 - DNA, 86 bp, Homo sapiens
  chr4:2639954-2640040
  hypo
ctactcttctgttccccgggaactcctggagagcagcggactattgtagcaggaggtagtcttcgtgtcctcgtacctggcacagg

SEQ ID NO: 12008 - DNA, 31 bp, Homo sapiens
  chr4:2733979-2734010
  hypo
ctctcctgtgcccctgcgtctcaccctaggc

SEQ ID NO: 12009 - DNA, 25 bp, Homo sapiens
  chr4:2874726-2874751
  hypo
ttattattttttaagacggagtctt

SEQ ID NO: 12010 - DNA, 31 bp, Homo sapiens
  chr4:2926365-2926396
  hypo
accagccactgcattacgtagttgtgactga

SEQ ID NO: 12011 - DNA, 50 bp, Homo sapiens
  chr4:2926415-2926465
  hypo
tttttcagtgtcacaccgctatttactattcaggccgccacacacaccag

SEQ ID NO: 12012 - DNA, 39 bp, Homo sapiens
  chr4:2957243-2957282
  hypo
cctctagtcacctgcacgccacggcgccccctctagtca

SEQ ID NO: 12013 - DNA, 31 bp, Homo sapiens
  chr4:2979114-2979145
  hypo
agagctccggctgctacgcctactgctagac

SEQ ID NO: 12014 - DNA, 39 bp, Homo sapiens
  chr4:3267991-3268030
  hypo
cagtgtggggcacgcgcggccacacggggacagcccagc

SEQ ID NO: 12015 - DNA, 31 bp, Homo sapiens
  chr4:3310788-3310819
  hypo
gagaggagctgggactcgggaatggcaggtg

SEQ ID NO: 12016 - DNA, 31 bp, Homo sapiens
  chr4:3363136-3363167
  hypo
gtgagtacttttttcccgcccttttgaatgg

SEQ ID NO: 12017 - DNA, 35 bp, Homo sapiens
  chr4:3368269-3368304
  hypo
gaggcagcagggcttgcggccgggatccaccaggg

SEQ ID NO: 12018 - DNA, 38 bp, Homo sapiens
  chr4:3375343-3375381
  hypo
tgactggtgctgggatcgcagggcgtgcacaccctgtg

SEQ ID NO: 12019 - DNA, 50 bp, Homo sapiens
  chr4:3375393-3375443
  hypo
gtgcctggcctctgcccgcctgtgtcctgctgtatcggtcagcttacctt

SEQ ID NO: 12020 - DNA, 31 bp, Homo sapiens
  chr4:3413101-3413132
  hypo
ggtctgtgtgtgttctcgtgttaggcctgtc

SEQ ID NO: 12021 - DNA, 47 bp, Homo sapiens
  chr4:3418656-3418703
  hypo
gtttgatagctacactcgctttctgaagtccccgctgtaccaggaat

SEQ ID NO: 12022 - DNA, 47 bp, Homo sapiens
  chr4:3418710-3418757
  hypo
ggcggaagtggagggccgtgcactcccggactcgcagcaggtcccca

SEQ ID NO: 12023 - DNA, 73 bp, Homo sapiens
  chr4:3425118-3425191
  hypo
gaactggggggcacaccgaggccttgagggcggcctggggctgtgctgtagttctgctcgtgagactgatctc

SEQ ID NO: 12024 - DNA, 39 bp, Homo sapiens
  chr4:3425239-3425278
  hypo
aggctggatcttgttccgattaaccggtcagtgggactc

SEQ ID NO: 12025 - DNA, 36 bp, Homo sapiens
  chr4:3425282-3425318
  hypo
ccaagcccaccaagcccgtcacggaggtgctgcggc

SEQ ID NO: 12026 - DNA, 50 bp, Homo sapiens
  chr4:3448499-3448549
  hypo
tggggagaccctgagacggagcagcctgggccagacgcccttccaccttc

SEQ ID NO: 12027 - DNA, 1 bp, Homo sapiens
  chr4:3452961-3452962
  hypo
c

SEQ ID NO: 12028 - DNA, 31 bp, Homo sapiens
  chr4:3453080-3453111
  hypo
cccgtcgtgctctgccgcgggaggctggcct

SEQ ID NO: 12029 - DNA, 31 bp, Homo sapiens
  chr4:3468343-3468374
  hypo
ccttccctcagcccccgcgtcaggacaggga

SEQ ID NO: 12030 - DNA, 31 bp, Homo sapiens
  chr4:3516337-3516368
  hypo
gccctggggttcaactcggacagggaagaca

SEQ ID NO: 12031 - DNA, 62 bp, Homo sapiens
  chr4:3588427-3588489
  hypo
cagcaacaacaaggaacgcagctgcagcagcgggggccctgggcaggcggcctgccctcact

SEQ ID NO: 12032 - DNA, 38 bp, Homo sapiens
  chr4:3588492-3588530
  hypo
gccaccatgtgcctgtcgaagtgcgtaggagcctggag

SEQ ID NO: 12033 - DNA, 31 bp, Homo sapiens
  chr4:3588547-3588578
  hypo
ttataactgtgggcaccgaggttaaacagtt

SEQ ID NO: 12034 - DNA, 31 bp, Homo sapiens
  chr4:3671160-3671191
  hypo
tgctccgggaggctcacggttcattctgcag

SEQ ID NO: 12035 - DNA, 31 bp, Homo sapiens
  chr4:3692094-3692125
  hypo
tctagtccctgggattcggcttgagggctac

SEQ ID NO: 12036 - DNA, 31 bp, Homo sapiens
  chr4:3782693-3782724
  hypo
catccccaggtgcccccgacatgaggtgagc

SEQ ID NO: 12037 - DNA, 44 bp, Homo sapiens
  chr4:3810693-3810737
  hypo
agtgtggtagagagaccgtgggggtttttcgttctacatgtggg

SEQ ID NO: 12038 - DNA, 31 bp, Homo sapiens
  chr4:3826670-3826701
  hypo
atggaaagcacctccccgtcactgtggttcc

SEQ ID NO: 12039 - DNA, 31 bp, Homo sapiens
  chr4:3949947-3949978
  hypo
ctgcaccaagagagggcgagagagtcagtcc

SEQ ID NO: 12040 - DNA, 31 bp, Homo sapiens
  chr4:3951479-3951510
  hypo
cttgagcccaggagttcgaggacagcctggg

SEQ ID NO: 12041 - DNA, 31 bp, Homo sapiens
  chr4:4199685-4199716
  hypo
atgttcttccacaggacgtagagcattgtgg

SEQ ID NO: 12042 - DNA, 31 bp, Homo sapiens
  chr4:4417661-4417692
  hypo
gctgtttgttctgtagcgtgtcaggtgcttc

SEQ ID NO: 12043 - DNA, 31 bp, Homo sapiens
  chr4:5448003-5448034
  hypo
gatttctgaccggatgcgatggctcacgcct

SEQ ID NO: 12044 - DNA, 31 bp, Homo sapiens
  chr4:5753889-5753920
  hypo
gggagatgccaacgtccgccgtccgctcctc

SEQ ID NO: 12045 - DNA, 37 bp, Homo sapiens; identical to SEQ ID NO: 1780
  chr4:6271358-6271395
  hypo

SEQ ID NO: 12046 - DNA, 39 bp, Homo sapiens; identical to SEQ ID NO: 1781
  chr4:6271572-6271611
  hypo

SEQ ID NO: 12047 - DNA, 52 bp, Homo sapiens; identical to SEQ ID NO: 1782
  chr4:6271619-6271671
  hypo

SEQ ID NO: 12048 - DNA, 248 bp, Homo sapiens; identical to SEQ ID NO: 1783
  chr4:6271702-6271950
  hypo

SEQ ID NO: 12049 - DNA, 31 bp, Homo sapiens
  chr4:6374029-6374060
  hypo
caatgctcagcaaccacgactttgcggtttt

SEQ ID NO: 12050 - DNA, 31 bp, Homo sapiens
  chr4:6423229-6423260
  hypo
gatactgagtgtcatccgctttgcaccaggc

SEQ ID NO: 12051 - DNA, 31 bp, Homo sapiens
  chr4:6580165-6580196
  hypo
gccaggtcatgcatgacgaggctgtgacgca

SEQ ID NO: 12052 - DNA, 31 bp, Homo sapiens
  chr4:6586517-6586548
  hypo
gacaggagggagtaagcgtgccacatttggc

SEQ ID NO: 12053 - DNA, 31 bp, Homo sapiens
  chr4:6586549-6586580
  hypo
tagatcaactgtgattcgtcccttgaggctg

SEQ ID NO: 12054 - DNA, 31 bp, Homo sapiens
  chr4:6586598-6586629
  hypo
cagagggaaggttctgcgagtgaaaaagggg

SEQ ID NO: 12055 - DNA, 55 bp, Homo sapiens
  chr4:6586645-6586700
  hypo
ttcagcctgcccccaccggctgccctgtctggtgcgaggccgtaccctccagagc

SEQ ID NO: 12056 - DNA, 31 bp, Homo sapiens
  chr4:6588842-6588873
  hypo
acctcggctcccggatcgactacgacctgaa

SEQ ID NO: 12057 - DNA, 41 bp, Homo sapiens
  chr4:6590874-6590915
  hypo
ctttctccaacaggtacgtgcccttccgcagtgcctttggg

SEQ ID NO: 12058 - DNA, 31 bp, Homo sapiens
  chr4:6600202-6600233
  hypo
ccccatggtgagagctcggacaggtggcttc

SEQ ID NO: 12059 - DNA, 31 bp, Homo sapiens
  chr4:6600600-6600631
  hypo
atcacagcagggcagccgtgggaccagcctc

SEQ ID NO: 12060 - DNA, 31 bp, Homo sapiens
  chr4:6600761-6600792
  hypo
ttttgtgtgcataggccgccaggtcccaccc

SEQ ID NO: 12061 - DNA, 95 bp, Homo sapiens
  chr4:6616020-6616115
  hypo
gagcatccctggctggcgctacagctccaaccacacggagcactctcagaatctccggaaaggtgaggcaggtgccctggcgtctcagacctgct

SEQ ID NO: 12062 - DNA, 31 bp, Homo sapiens
  chr4:6616126-6616157
  hypo
gagtcaaacaggccaccgggcccaccaccag

SEQ ID NO: 12063 - DNA, 20 bp, Homo sapiens
  chr4:6626826-6626846
  hypo
gactccgtctcaaaaaaaaa

SEQ ID NO: 12064 - DNA, 31 bp, Homo sapiens
  chr4:6658783-6658814
  hypo
agaccaggaatataaacgtatcttttttttt

SEQ ID NO: 12065 - DNA, 61 bp, Homo sapiens
  chr4:6686432-6686493
  hypo
tccaacccagctttcccgtgaacaggatggccaggctgtggctctgcggtcttcccaaggg

SEQ ID NO: 12066 - DNA, 31 bp, Homo sapiens
  chr4:6686513-6686544
  hypo
gcacacccccaggcttcgccctactcctccc

SEQ ID NO: 12067 - DNA, 123 bp, Homo sapiens; identical to SEQ ID NO: 1787
  chr4:6717791-6717914
  hypo

SEQ ID NO: 12068 - DNA, 31 bp, Homo sapiens
  chr4:6724730-6724761
  hypo
actactccatgctgtgcgtgccccccttggc

SEQ ID NO: 12069 - DNA, 58 bp, Homo sapiens
  chr4:6726064-6726122
  hypo
atcacatgcccttgagcgacaaatccctatgtcctctgcacagcgtgacttggacact

SEQ ID NO: 12070 - DNA, 78 bp, Homo sapiens
  chr4:6733364-6733442
  hypo
gctcagttatgtctgccgagttcagctggcgtgcaggcactgccacaggccccgagaaaagaacggggtgcagagcag

SEQ ID NO: 12071 - DNA, 34 bp, Homo sapiens
  chr4:6733444-6733478
  hypo
gctgctttcagggacccgccgtgctagtgaaggt

SEQ ID NO: 12072 - DNA, 31 bp, Homo sapiens
  chr4:6733641-6733672
  hypo
actggccaggcaacatcgccattatttctgt

SEQ ID NO: 12073 - DNA, 42 bp, Homo sapiens
  chr4:6735825-6735867
  hypo
gtaacagcagctccagcgagcaaaggacggaaggaggggatg

SEQ ID NO: 12074 - DNA, 14 bp, Homo sapiens
  chr4:6738168-6738182
  hypo
gaaaataaacaaac

SEQ ID NO: 12075 - DNA, 59 bp, Homo sapiens
  chr4:6738206-6738265
  hypo
tacatttacagtgttgcgcagccatcacctcctcacccatctcccgaacttgttcaatt

SEQ ID NO: 12076 - DNA, 30 bp, Homo sapiens
  chr4:6786672-6786702
  hypo
ttttttttttttgagacggagtctcgctct

SEQ ID NO: 12077 - DNA, 25 bp, Homo sapiens
  chr4:6942920-6942945
  hypo
ttttttttttgagatgcggtctcac

SEQ ID NO: 12078 - DNA, 31 bp, Homo sapiens
  chr4:7004327-7004358
  hypo
cagtgtcagtggcccccgctagcactggtac

SEQ ID NO: 12079 - DNA, 36 bp, Homo sapiens
  chr4:7167401-7167437
  hypo
cgcccttctgcaggaacgtcccgagtgtgaatctcg

SEQ ID NO: 12080 - DNA, 31 bp, Homo sapiens
  chr4:7431090-7431121
  hypo
atttaccaggtcccatcgcctcttccgccct

SEQ ID NO: 12081 - DNA, 31 bp, Homo sapiens
  chr4:7445128-7445159
  hypo
ctaaagcccttctgagcgcacagccgcgaat

SEQ ID NO: 12082 - DNA, 31 bp, Homo sapiens
  chr4:7528960-7528991
  hypo
ctcccacagacgtccacgtcctaatccccgg

SEQ ID NO: 12083 - DNA, 75 bp, Homo sapiens
  chr4:7789548-7789623
  hypo
gcgctgtggcttcctgcgctcggtcagtctcctgggtgccccggcactcccctggctctcgcggctcccccagcc

SEQ ID NO: 12084 - DNA, 45 bp, Homo sapiens
  chr4:7791291-7791336
  hypo
tccgtgcatctccccacgctccgcaccagccgctgctttccatcc

SEQ ID NO: 12085 - DNA, 35 bp, Homo sapiens
  chr4:7812694-7812729
  hypo
aggcaagaaatcagaacgtgcgtgtgagacagcac

SEQ ID NO: 12086 - DNA, 31 bp, Homo sapiens
  chr4:7828943-7828974
  hypo
gagtatccacaatctacgggaagtatcagag

SEQ ID NO: 12087 - DNA, 50 bp, Homo sapiens
  chr4:7967942-7967992
  hypo
gaataaggctggaggccgctcccctgcggagggaccgtaaaattaaactc

SEQ ID NO: 12088 - DNA, 31 bp, Homo sapiens
  chr4:7973586-7973617
  hypo
cacagggctggctgaccgggtgggcctcagg

SEQ ID NO: 12089 - DNA, 31 bp, Homo sapiens
  chr4:7984131-7984162
  hypo
caggagatgaaacccccgggctggatgctgg

SEQ ID NO: 12090 - DNA, 31 bp, Homo sapiens
  chr4:7992551-7992582
  hypo
aacagtacataaaagtcgtagaaagagtgaa

SEQ ID NO: 12091 - DNA, 48 bp, Homo sapiens
  chr4:7992671-7992719
  hypo
aagctaagaatctccacgtgatgatgagttctgcgcatatcagctctc

SEQ ID NO: 12092 - DNA, 41 bp, Homo sapiens
  chr4:7992722-7992763
  hypo
gcacatgcagagagcacgccagctaacgctctccttcccac

SEQ ID NO: 12093 - DNA, 48 bp, Homo sapiens
  chr4:8001654-8001702
  hypo
cagaggtcaaagtcaccgctggacattcaaggccgggcaccttgtggg

SEQ ID NO: 12094 - DNA, 31 bp, Homo sapiens
  chr4:8001712-8001743
  hypo
tggctcacacagcatccgggtctgctttgtg

SEQ ID NO: 12095 - DNA, 45 bp, Homo sapiens
  chr4:8001768-8001813
  hypo
ttgggcagttcccatccgctcctgggtgcacgggcaggaggcttg

SEQ ID NO: 12096 - DNA, 31 bp, Homo sapiens
  chr4:8001814-8001845
  hypo
aggctgtggcactgcacgggttcaggtcccc

SEQ ID NO: 12097 - DNA, 82 bp, Homo sapiens
  chr4:8005624-8005706
  hypo
tacctagggggtctcacgtctctaagcctgaggccaggtgccctgcccgtcccaccagatatcctcacgagattgacagtag

SEQ ID NO: 12098 - DNA, 31 bp, Homo sapiens
  chr4:8062716-8062747
  hypo
tctgcaaacatctggccgcacctgacacata

SEQ ID NO: 12099 - DNA, 31 bp, Homo sapiens
  chr4:8063598-8063629
  hypo
gtcattttgagcatcccgttttccctgtcct

SEQ ID NO: 12100 - DNA, 31 bp, Homo sapiens
  chr4:8153833-8153864
  hypo
gaccctcaccaagaagcgccatcatgatgcc

SEQ ID NO: 12101 - DNA, 85 bp, Homo sapiens; identical to SEQ ID NO: 1797
  chr4:8160485-8160570
  hypo

SEQ ID NO: 12102 - DNA, 18 bp, Homo sapiens
  chr4:8296287-8296305
  hypo
cttctatccgtccgtccg

SEQ ID NO: 12103 - DNA, 31 bp, Homo sapiens
  chr4:8309965-8309996
  hypo
atgcctcaggggagagcggatcacaaatccc

SEQ ID NO: 12104 - DNA, 31 bp, Homo sapiens
  chr4:8354965-8354996
  hypo
gagagggaagagttgtcgtccatccagggcc

SEQ ID NO: 12105 - DNA, 39 bp, Homo sapiens
  chr4:8375723-8375762
  hypo
ggtgcatggcagggggcgcaggggcgagggggtgcctgg

SEQ ID NO: 12106 - DNA, 31 bp, Homo sapiens
  chr4:8398833-8398864
  hypo
gctgcctgacgtcctacgggagggacacaga

SEQ ID NO: 12107 - DNA, 44 bp, Homo sapiens
  chr4:8411914-8411958
  hypo
ctgagggccaccccagcgtcctacctgcacgataaagggatgca

SEQ ID NO: 12108 - DNA, 31 bp, Homo sapiens
  chr4:8411989-8412020
  hypo
cttagcaaacaccaccgcgtgagtggctgtc

SEQ ID NO: 12109 - DNA, 31 bp, Homo sapiens
  chr4:8412038-8412069
  hypo
caaaacttggcagcttcgaaatcaggggaat

SEQ ID NO: 12110 - DNA, 35 bp, Homo sapiens
  chr4:8475667-8475702
  hypo
tcatctctatcatcagcgcccgctcctcagtcctt

SEQ ID NO: 12111 - DNA, 38 bp, Homo sapiens
  chr4:8475738-8475776
  hypo
ggtgtgctcttaactccggagccgcgtgggagggcctg

SEQ ID NO: 12112 - DNA, 31 bp, Homo sapiens
  chr4:8483723-8483754
  hypo
atgaaagaaagccttccgtgttgaggtctat

SEQ ID NO: 12113 - DNA, 36 bp, Homo sapiens
  chr4:8483758-8483794
  hypo
cagacttgttaaggtgcgtgtcgaggtctgcaaagc

SEQ ID NO: 12114 - DNA, 31 bp, Homo sapiens
  chr4:8483827-8483858
  hypo
ggctcatcttgtttttcgccagttgcctctt

SEQ ID NO: 12115 - DNA, 56 bp, Homo sapiens
  chr4:8484046-8484102
  hypo
cctgggtgaactcttgcgtgtcctcctctggatgccactcacgcacaccttggcag

SEQ ID NO: 12116 - DNA, 31 bp, Homo sapiens
  chr4:8560622-8560653
  hypo
aggccttgaagctctccgtgaaggtgtacat

SEQ ID NO: 12117 - DNA, 35 bp, Homo sapiens; identical to SEQ ID NO: 1799
  chr4:8594317-8594352
  hypo

SEQ ID NO: 12118 - DNA, 31 bp, Homo sapiens; identical to SEQ ID NO: 1800
  chr4:8594372-8594403
  hypo

SEQ ID NO: 12119 - DNA, 31 bp, Homo sapiens
  chr4:8842664-8842695
  hypo
atccccagacagcccacgtgtgagaggtggg

SEQ ID NO: 12120 - DNA, 41 bp, Homo sapiens
  chr4:9701509-9701550
  hypo
gtcctgagcacccagtcgatggaagacgagcaggatgactg

SEQ ID NO: 12121 - DNA, 31 bp, Homo sapiens
  chr4:9701554-9701585
  hypo
gaaggggaactggccccgtagtgtgccagca

SEQ ID NO: 12122 - DNA, 46 bp, Homo sapiens
  chr4:9701671-9701717
  hypo
acacacagaggccaagcgacccctgaactcccgcagactgcagccc

SEQ ID NO: 12123 - DNA, 36 bp, Homo sapiens
  chr4:9784384-9784420
  hypo
ctacacgcgcatctaccgcatcgcccaggtgcagat

SEQ ID NO: 12124 - DNA, 57 bp, Homo sapiens; identical to SEQ ID NO: 1802
  chr4:10090132-10090189
  hypo

SEQ ID NO: 12125 - DNA, 47 bp, Homo sapiens; identical to SEQ ID NO: 1803
  chr4:10090202-10090249
  hypo

SEQ ID NO: 12126 - DNA, 31 bp, Homo sapiens; identical to SEQ ID NO: 1804
  chr4:10090276-10090307
  hypo

SEQ ID NO: 12127 - DNA, 31 bp, Homo sapiens
  chr4:10412561-10412592
  hypo
agcctgagcgtgcctgcgtggcaccactcgg

SEQ ID NO: 12128 - DNA, 31 bp, Homo sapiens
  chr4:10575193-10575224
  hypo
taaagaccagctggcccggaaggagcaaatg

SEQ ID NO: 12129 - DNA, 31 bp, Homo sapiens
  chr4:11374202-11374233
  hypo
ccaaaggctatgcgtgcgtagagtttgagaa

SEQ ID NO: 12130 - DNA, 34 bp, Homo sapiens
  chr4:11374289-11374323
  hypo
aggagatcactgccaccgtcgtgctggccccctg

SEQ ID NO: 12131 - DNA, 31 bp, Homo sapiens
  chr4:11374360-11374391
  hypo
agaatgttgccaccaccgcctatgtggctca

SEQ ID NO: 12132 - DNA, 31 bp, Homo sapiens
  chr4:13300569-13300600
  hypo
agcaggatcctgccctcgtgttttgacatcg

SEQ ID NO: 12133 - DNA, 28 bp, Homo sapiens
  chr4:15697094-15697122
  hypo
cacaaggtgaaattgacgggaaaaggaa

SEQ ID NO: 12134 - DNA, 63 bp, Homo sapiens
  chr4:15789215-15789278
  hypo
acttcaggaatgattacgaatctttgtaggtaaagcggcagaatgccacgtcctctcctggtt

SEQ ID NO: 12135 - DNA, 34 bp, Homo sapiens
  chr4:15789490-15789524
  hypo
attaacattgttgttccgccgtgcagggagcagt

SEQ ID NO: 12136 - DNA, 31 bp, Homo sapiens
  chr4:17818104-17818135
  hypo
caagatggctctattgcgctgtagtgagaaa

SEQ ID NO: 12137 - DNA, 29 bp, Homo sapiens
  chr4:21639111-21639140
  hypo
agaaaacaggccaggcgcggtggcttatg

SEQ ID NO: 12138 - DNA, 118 bp, Homo sapiens; identical to SEQ ID NO: 1812
  chr4:22517213-22517331
  hypo

SEQ ID NO: 12139 - DNA, 94 bp, Homo sapiens; identical to SEQ ID NO: 1813
  chr4:22517554-22517648
  hypo

SEQ ID NO: 12140 - DNA, 40 bp, Homo sapiens; identical to SEQ ID NO: 1814
  chr4:22517719-22517759
  hypo

SEQ ID NO: 12141 - DNA, 31 bp, Homo sapiens
  chr4:24631209-24631240
  hypo
aagccctgcacttccccgcttctccctacac

SEQ ID NO: 12142 - DNA, 31 bp, Homo sapiens
  chr4:24670641-24670672
  hypo
ctcctggggtgggagccgattacaccaccgt

SEQ ID NO: 12143 - DNA, 31 bp, Homo sapiens; identical to SEQ ID NO: 1815
  chr4:24914463-24914494
  hypo

SEQ ID NO: 12144 - DNA, 31 bp, Homo sapiens
  chr4:25005691-25005722
  hypo
aagaacgtctcgtcgtcgatctgaaacagct

SEQ ID NO: 12145 - DNA, 60 bp, Homo sapiens
  chr4:25025016-25025076
  hypo
gacctaggacattgtccggtatcaactatgctgacacagatgtttcggcctcccatgtct

SEQ ID NO: 12146 - DNA, 31 bp, Homo sapiens
  chr4:25025079-25025110
  hypo
ccctcatctccttacccgataggctttaact

SEQ ID NO: 12147 - DNA, 31 bp, Homo sapiens
  chr4:25025117-25025148
  hypo
agcctctacttgtgggcgttccagaatcaag

SEQ ID NO: 12148 - DNA, 31 bp, Homo sapiens
  chr4:25025170-25025201
  hypo
ccccctttgccaatatcggggcttgatgtga

SEQ ID NO: 12149 - DNA, 31 bp, Homo sapiens
  chr4:25360433-25360464
  hypo
ataattaccctgctaacgctgtacatatggc

SEQ ID NO: 12150 - DNA, 31 bp, Homo sapiens
  chr4:25360471-25360502
  hypo
taggttggctcatgcccgggctcacttgcac

SEQ ID NO: 12151 - DNA, 31 bp, Homo sapiens
  chr4:25360529-25360560
  hypo
actgtctacaattcctcgagtctttttccag

SEQ ID NO: 12152 - DNA, 31 bp, Homo sapiens
  chr4:35039894-35039925
  hypo
cgctgccccgctgccccgaccaagggtgcca

SEQ ID NO: 12153 - DNA, 106 bp, Homo sapiens
  chr4:35039945-35040051
  hypo
agtctctgtgcagggccgcctggggccgtgtccccagggtctgtctggcgtcagggtgactgctgagccttctactcccgatggctcggcccggggagtgatccac

SEQ ID NO: 12154 - DNA, 31 bp, Homo sapiens; identical to SEQ ID NO: 1818
  chr4:37688563-37688594
  hypo

SEQ ID NO: 12155 - DNA, 55 bp, Homo sapiens; identical to SEQ ID NO: 1819
  chr4:37688595-37688650
  hypo

SEQ ID NO: 12156 - DNA, 23 bp, Homo sapiens
  chr4:38198464-38198487
  hypo
caagactccgtctcaaaaaaaaa

SEQ ID NO: 12157 - DNA, 31 bp, Homo sapiens
  chr4:38278934-38278965
  hypo
ctaattacacttgcaacgatcctgttgcaac

SEQ ID NO: 12158 - DNA, 55 bp, Homo sapiens
  chr4:38278988-38279043
  hypo
ttagaagttcaacatacgaactttagaggtggtgggggggcggtacaattcaacc

SEQ ID NO: 12159 - DNA, 48 bp, Homo sapiens
  chr4:38279075-38279123
  hypo
atgtcatacaataacacgaaaatcttatgactgcgataaagagaaaaa

SEQ ID NO: 12160 - DNA, 23 bp, Homo sapiens
  chr4:38570997-38571020
  hypo
gggtattggccaggtgcggtggc

SEQ ID NO: 12161 - DNA, 22 bp, Homo sapiens
  chr4:38704219-38704241
  hypo
ttaccggcgtgagtcactgtgc

SEQ ID NO: 12162 - DNA, 31 bp, Homo sapiens; identical to SEQ ID NO: 1822
  chr4:38868923-38868954
  hypo

SEQ ID NO: 12163 - DNA, 31 bp, Homo sapiens; identical to SEQ ID NO: 1823
  chr4:38868972-38869003
  hypo

SEQ ID NO: 12164 - DNA, 57 bp, Homo sapiens; identical to SEQ ID NO: 1824
  chr4:38869019-38869076
  hypo

SEQ ID NO: 12165 - DNA, 31 bp, Homo sapiens; identical to SEQ ID NO: 1825
  chr4:38869082-38869113
  hypo

SEQ ID NO: 12166 - DNA, 31 bp, Homo sapiens; identical to SEQ ID NO: 1826
  chr4:38869203-38869234
  hypo

SEQ ID NO: 12167 - DNA, 53 bp, Homo sapiens; identical to SEQ ID NO: 1827
  chr4:38869245-38869298
  hypo

SEQ ID NO: 12168 - DNA, 43 bp, Homo sapiens; identical to SEQ ID NO: 1828
  chr4:38869437-38869480
  hypo

SEQ ID NO: 12169 - DNA, 51 bp, Homo sapiens; identical to SEQ ID NO: 1829
  chr4:38869487-38869538
  hypo

SEQ ID NO: 12170 - DNA, 87 bp, Homo sapiens
  chr4:39448267-39448354
  hypo
tgtattatccgacccacgcccacctaggcctccccgagcctctgttgcatgccgacgggtggctgaacccatcgacggccgaggcct

SEQ ID NO: 12171 - DNA, 51 bp, Homo sapiens
  chr4:39448436-39448487
  hypo
aagtgacatctacaaccgctctggcaacgacacctacggggcggcgcacaa

SEQ ID NO: 12172 - DNA, 62 bp, Homo sapiens; identical to SEQ ID NO: 1832
  chr4:39529829-39529891
  hypo

SEQ ID NO: 12173 - DNA, 51 bp, Homo sapiens; identical to SEQ ID NO: 1833
  chr4:39529893-39529944
  hypo

SEQ ID NO: 12174 - DNA, 48 bp, Homo sapiens
  chr4:39816676-39816724
  hypo
gctgggcaagaaaagacgagaaagttttcctgtcgatgtggcctcttg

SEQ ID NO: 12175 - DNA, 36 bp, Homo sapiens
  chr4:39913157-39913193
  hypo
aaatgcacatgttggccgggcgcggtggctcacacc

SEQ ID NO: 12176 - DNA, 31 bp, Homo sapiens
  chr4:39953928-39953959
  hypo
ccacagagtgagactccgtctcaaaacaaaa

SEQ ID NO: 12177 - DNA, 31 bp, Homo sapiens
  chr4:40161796-40161827
  hypo
aaaaaactaaatgacacggactagcttaata

SEQ ID NO: 12178 - DNA, 31 bp, Homo sapiens
  chr4:40161870-40161901
  hypo
cattgctacattagcccgccctatttaatat

SEQ ID NO: 12179 - DNA, 41 bp, Homo sapiens
  chr4:40823879-40823920
  hypo
taactcaccatgcaggcggcctgcaccgcctcagacacgtt

SEQ ID NO: 12180 - DNA, 36 bp, Homo sapiens
  chr4:40857393-40857429
  hypo
agctagaactaaacaacgtggcggctgttagaaaag

SEQ ID NO: 12181 - DNA, 30 bp, Homo sapiens
  chr4:40888204-40888234
  hypo
ttatgttttggctgggcgcagtggcccacg

SEQ ID NO: 12182 - DNA, 31 bp, Homo sapiens
  chr4:40983417-40983448
  hypo
caagccagaattaattcgaatccagaatgat

SEQ ID NO: 12183 - DNA, 31 bp, Homo sapiens; identical to SEQ ID NO: 1835
  chr4:41003481-41003512
  hypo

SEQ ID NO: 12184 - DNA, 68 bp, Homo sapiens
  chr4:41012739-41012807
  hypo
tacttaaaaagactgacgtagaaaaatggactgatctacaaaatacgttcttacgtgaaaaaaagcaa

SEQ ID NO: 12185 - DNA, 35 bp, Homo sapiens
  chr4:41012893-41012928
  hypo
aatagaataatgaacccgcacgtacccataatgca

SEQ ID NO: 12186 - DNA, 31 bp, Homo sapiens
  chr4:41111870-41111901
  hypo
aatttgtcaaaggtcacggagctaaaaaatt

SEQ ID NO: 12187 - DNA, 31 bp, Homo sapiens
  chr4:41167663-41167694
  hypo
gcctcaagagacaagacgtcaatttataacc

SEQ ID NO: 12188 - DNA, 31 bp, Homo sapiens
  chr4:41167721-41167752
  hypo
acacctggggagttttcggccacttttacaa

SEQ ID NO: 12189 - DNA, 31 bp, Homo sapiens; identical to SEQ ID NO: 1836
  chr4:41168397-41168428
  hypo

SEQ ID NO: 12190 - DNA, 35 bp, Homo sapiens
  chr4:41198149-41198184
  hypo
tggtcgacagagcaagactccgtctcaaaaaaaaa

SEQ ID NO: 12191 - DNA, 37 bp, Homo sapiens; identical to SEQ ID NO: 1837
  chr4:41216264-41216301
  hypo

SEQ ID NO: 12192 - DNA, 69 bp, Homo sapiens; identical to SEQ ID NO: 1838
  chr4:41216334-41216403
  hypo

SEQ ID NO: 12193 - DNA, 119 bp, Homo sapiens; identical to SEQ ID NO: 1839
  chr4:41218382-41218501
  hypo

SEQ ID NO: 12194 - DNA, 31 bp, Homo sapiens; identical to SEQ ID NO: 1840
  chr4:41218544-41218575
  hypo

SEQ ID NO: 12195 - DNA, 44 bp, Homo sapiens; identical to SEQ ID NO: 1841
  chr4:41362780-41362824
  hypo

SEQ ID NO: 12196 - DNA, 115 bp, Homo sapiens; identical to SEQ ID NO: 1842
  chr4:41362836-41362951
  hypo

SEQ ID NO: 12197 - DNA, 31 bp, Homo sapiens
  chr4:41993804-41993835
  hypo
acctcctgaaagaagtcggaagttgcagtca

SEQ ID NO: 12198 - DNA, 31 bp, Homo sapiens
  chr4:41994051-41994082
  hypo
ggacagaatgaatcatcggctgggtgcagtg

SEQ ID NO: 12199 - DNA, 32 bp, Homo sapiens
  chr4:41994107-41994139
  hypo
attgtaaaccttaggacgctgaggtgggtgga

SEQ ID NO: 12200 - DNA, 50 bp, Homo sapiens; identical to SEQ ID NO: 1844
  chr4:42153259-42153309
  hypo

SEQ ID NO: 12201 - DNA, 29 bp, Homo sapiens
  chr4:42153881-42153910
  hypo
ggcccggccgggcccgggggggtaggagc

SEQ ID NO: 12202 - DNA, 31 bp, Homo sapiens; identical to SEQ ID NO: 1849
  chr4:42658119-42658150
  hypo

SEQ ID NO: 12203 - DNA, 22 bp, Homo sapiens
  chr4:48017181-48017203
  hypo
gagactccgtctcaaaaaaaac

SEQ ID NO: 12204 - DNA, 60 bp, Homo sapiens
  chr4:48017272-48017332
  hypo
tggcataaatctccctcgctttcaactttcacctattccactctccgtggtgttccttct

SEQ ID NO: 12205 - DNA, 31 bp, Homo sapiens
  chr4:54357937-54357968
  hypo
ttaagtgctgaggatacgatacttttttttg

SEQ ID NO: 12206 - DNA, 31 bp, Homo sapiens
  chr4:54459311-54459342
  hypo
tcaggaaaaggtttcacgccactagtttgat

SEQ ID NO: 12207 - DNA, 31 bp, Homo sapiens
  chr4:54500683-54500714
  hypo
tacaggtgtgagccaccgcccccaggctcag

SEQ ID NO: 12208 - DNA, 31 bp, Homo sapiens
  chr4:54775816-54775847
  hypo
ataagaatcagatggccgggcggatcgcttg

SEQ ID NO: 12209 - DNA, 31 bp, Homo sapiens
  chr4:55021856-55021887
  hypo
accatatcggtatctacgttcagagcctaca

SEQ ID NO: 12210 - DNA, 41 bp, Homo sapiens
  chr4:55406439-55406480
  hypo
taaaaatacacatttccggccgggcgcggtggctcacgcct

SEQ ID NO: 12211 - DNA, 35 bp, Homo sapiens; identical to SEQ ID NO: 1852
  chr4:56412389-56412424
  hypo

SEQ ID NO: 12212 - DNA, 27 bp, Homo sapiens
  chr4:56785799-56785826
  hypo
ctttgggaggccaaggcgggcggctca

SEQ ID NO: 12213 - DNA, 12 bp, Homo sapiens
  chr4:57274916-57274928
  hypo
ttcaaaaaaaaa

SEQ ID NO: 12214 - DNA, 31 bp, Homo sapiens
  chr4:57409185-57409216
  hypo
aaaaattcatcctgtacgtgtacttttacct

SEQ ID NO: 12215 - DNA, 39 bp, Homo sapiens; identical to SEQ ID NO: 1854
  chr4:57521708-57521747
  hypo

SEQ ID NO: 12216 - DNA, 83 bp, Homo sapiens; identical to SEQ ID NO: 1855
  chr4:57521929-57522012
  hypo

SEQ ID NO: 12217 - DNA, 73 bp, Homo sapiens; identical to SEQ ID NO: 1856
  chr4:57522035-57522108
  hypo

SEQ ID NO: 12218 - DNA, 254 bp, Homo sapiens; identical to SEQ ID NO: 1857
  chr4:57522128-57522382
  hypo

SEQ ID NO: 12219 - DNA, 31 bp, Homo sapiens; identical to SEQ ID NO: 1858
  chr4:57522419-57522450
  hypo

SEQ ID NO: 12220 - DNA, 102 bp, Homo sapiens; identical to SEQ ID NO: 1859
  chr4:57522452-57522554
  hypo

SEQ ID NO: 12221 - DNA, 31 bp, Homo sapiens; identical to SEQ ID NO: 1860
  chr4:57522563-57522594
  hypo

SEQ ID NO: 12222 - DNA, 114 bp, Homo sapiens; identical to SEQ ID NO: 1861
  chr4:57522602-57522716
  hypo

SEQ ID NO: 12223 - DNA, 31 bp, Homo sapiens; identical to SEQ ID NO: 1862
  chr4:57522745-57522776
  hypo

SEQ ID NO: 12224 - DNA, 31 bp, Homo sapiens; identical to SEQ ID NO: 1864
  chr4:57687842-57687873
  hypo

SEQ ID NO: 12225 - DNA, 41 bp, Homo sapiens
  chr4:71566952-71566993
  hypo
gcctcagtcttacaggcgtgagccaccgcacccagcccacc

SEQ ID NO: 12226 - DNA, 31 bp, Homo sapiens
  chr4:71756395-71756426
  hypo
catgagccaccatacccggctagtatcgtgt

SEQ ID NO: 12227 - DNA, 82 bp, Homo sapiens
  chr4:71857999-71858081
  hypo
aaagaattgaacaaaacgtagaaacaaagcaacaaaagaagcaacgaaagacaaaacaacaaaagaacgaagtaacaaaagc

SEQ ID NO: 12228 - DNA, 38 bp, Homo sapiens
  chr4:71894315-71894353
  hypo
tatttcttttttttctcgagacagtcttgctccgtcgc

SEQ ID NO: 12229 - DNA, 23 bp, Homo sapiens
  chr4:71925576-71925599
  hypo
ggtttgctcgttaaatttattta

SEQ ID NO: 12230 - DNA, 84 bp, Homo sapiens
  chr4:71986659-71986743
  hypo
ggaaccagggcagcacgccgccctcgcgggccagcacgagttccgggtgggcacgcgctcggtaggtcccgcacttggagtggc

SEQ ID NO: 12231 - DNA, 31 bp, Homo sapiens
  chr4:75241448-75241479
  hypo
agtgtttgggagcagacgcatattgcaggaa

SEQ ID NO: 12232 - DNA, 31 bp, Homo sapiens
  chr4:76394242-76394273
  hypo
tccagcatcctgttcccgtaggctgccaatc

SEQ ID NO: 12233 - DNA, 31 bp, Homo sapiens
  chr4:76600185-76600216
  hypo
cgtgagccaccgcacccggccagtagttgct

SEQ ID NO: 12234 - DNA, 25 bp, Homo sapiens
  chr4:76912438-76912463
  hypo
ctttgggaggccaaggcgggcctga

SEQ ID NO: 12235 - DNA, 31 bp, Homo sapiens
  chr4:76912744-76912775
  hypo
gaggaaaaaagagcaacgagggtcatataag

SEQ ID NO: 12236 - DNA, 61 bp, Homo sapiens; identical to SEQ ID NO: 1877
  chr4:77227950-77228011
  hypo

SEQ ID NO: 12237 - DNA, 31 bp, Homo sapiens; identical to SEQ ID NO: 1878
  chr4:77228079-77228110
  hypo

SEQ ID NO: 12238 - DNA, 31 bp, Homo sapiens
  chr4:77475935-77475966
  hypo
ctgttagcaaccaggccgcacagtaggagtg

SEQ ID NO: 12239 - DNA, 31 bp, Homo sapiens
  chr4:77596099-77596130
  hypo
gtcttagggttcataccggctgccaggggtc

SEQ ID NO: 12240 - DNA, 62 bp, Homo sapiens
  chr4:77661924-77661986
  hypo
ctgagcggaggagcgtcggacagcggccgtggcccccagaggccggacgctcggctcctccg

SEQ ID NO: 12241 - DNA, 31 bp, Homo sapiens
  chr4:78100428-78100459
  hypo
tccactatagctttgccgaagcacccaagac

SEQ ID NO: 12242 - DNA, 31 bp, Homo sapiens
  chr4:79345221-79345252
  hypo
actcacccgcattcaccgatttgtaggattt

SEQ ID NO: 12243 - DNA, 39 bp, Homo sapiens
  chr4:79689604-79689643
  hypo
cttttctctgctcacacgcagtgtcgtggcagcaggcac

SEQ ID NO: 12244 - DNA, 88 bp, Homo sapiens
  chr4:79689650-79689738
  hypo
agatgcagaaggacagcggcgagcttgtggacctgtacatgcggcagaaagtctctgctagtaaccgcgtcaccggtgccaagaacca

SEQ ID NO: 12245 - DNA, 31 bp, Homo sapiens
  chr4:79689740-79689771
  hypo
catccatccagatgaacgtggtggaggctga

SEQ ID NO: 12246 - DNA, 34 bp, Homo sapiens
  chr4:83448626-83448660
  hypo
agtgtgtttagctccacgacgaaaggtaccctct

SEQ ID NO: 12247 - DNA, 31 bp, Homo sapiens
  chr4:83496633-83496664
  hypo
ttttgctaaacttattcgttagttctggtat

SEQ ID NO: 12248 - DNA, 44 bp, Homo sapiens; identical to SEQ ID NO: 1889
  chr4:84292569-84292613
  hypo

SEQ ID NO: 12249 - DNA, 2 bp, Homo sapiens
  chr4:84292653-84292655
  hypo
ta

SEQ ID NO: 12250 - DNA, 31 bp, Homo sapiens
  chr4:84405333-84405364
  hypo
ttttgagtaaaatagacgttatatcttaaaa

SEQ ID NO: 12251 - DNA, 36 bp, Homo sapiens
  chr4:84468674-84468710
  hypo
gattacaggcgtgagctactgcgcctggcctctgct

SEQ ID NO: 12252 - DNA, 31 bp, Homo sapiens
  chr4:85464134-85464165
  hypo
gctgggatcaaaggcacgtgagccaccgcgc

SEQ ID NO: 12253 - DNA, 15 bp, Homo sapiens
  chr4:85503895-85503910
  hypo
cctcctcccgcccca

SEQ ID NO: 12254 - DNA, 33 bp, Homo sapiens; identical to SEQ ID NO: 1895
  chr4:85503985-85504018
  hypo

SEQ ID NO: 12255 - DNA, 31 bp, Homo sapiens
  chr4:85547362-85547393
  hypo
aataccacaggctgatcgtagaacccaactg

SEQ ID NO: 12256 - DNA, 31 bp, Homo sapiens
  chr4:85634474-85634505
  hypo
tagattttcatagttgcgtctaccctcccat

SEQ ID NO: 12257 - DNA, 150 bp, Homo sapiens; identical to SEQ ID NO: 1898
  chr4:85886792-85886942
  hypo

SEQ ID NO: 12258 - DNA, 173 bp, Homo sapiens; identical to SEQ ID NO: 1899
  chr4:85887144-85887317
  hypo

SEQ ID NO: 12259 - DNA, 98 bp, Homo sapiens; identical to SEQ ID NO: 1900
  chr4:85887394-85887492
  hypo

SEQ ID NO: 12260 - DNA, 92 bp, Homo sapiens; identical to SEQ ID NO: 1901
  chr4:85887500-85887592
  hypo

SEQ ID NO: 12261 - DNA, 68 bp, Homo sapiens; identical to SEQ ID NO: 1902
  chr4:85887625-85887693
  hypo

SEQ ID NO: 12262 - DNA, 35 bp, Homo sapiens; identical to SEQ ID NO: 1903
  chr4:85888137-85888172
  hypo

SEQ ID NO: 12263 - DNA, 31 bp, Homo sapiens; identical to SEQ ID NO: 1904
  chr4:85888431-85888462
  hypo

SEQ ID NO: 12264 - DNA, 31 bp, Homo sapiens
  chr4:85948837-85948868
  hypo
atatgtgaaacatggccgggtgcagtggctc

SEQ ID NO: 12265 - DNA, 22 bp, Homo sapiens
  chr4:88005401-88005423
  hypo
tgccattggctgggtgcggtgg

SEQ ID NO: 12266 - DNA, 31 bp, Homo sapiens
  chr4:88258990-88259021
  hypo
cagtttaaattcctcacgtgtaaatggaaaa

SEQ ID NO: 12267 - DNA, 31 bp, Homo sapiens; identical to SEQ ID NO: 1928
  chr4:91760070-91760101
  hypo

SEQ ID NO: 12268 - DNA, 50 bp, Homo sapiens
  chr4:95127589-95127639
  hypo
aattaaaacaattgaacgtatgagaaacggtagaacgatggctaccagag

SEQ ID NO: 12269 - DNA, 33 bp, Homo sapiens
  chr4:95127644-95127677
  hypo
gaagggtagtgtggggcgggggaggaccccggt

SEQ ID NO: 12270 - DNA, 31 bp, Homo sapiens
  chr4:95128037-95128068
  hypo
gtgctgggattacaggcgtgagccaccactc

SEQ ID NO: 12271 - DNA, 31 bp, Homo sapiens
  chr4:95257392-95257423
  hypo
cataaaaggttaaacacgaatcataaaaatc

SEQ ID NO: 12272 - DNA, 22 bp, Homo sapiens
  chr4:95461295-95461317
  hypo
ttttgagatggagtctcgctct

SEQ ID NO: 12273 - DNA, 16 bp, Homo sapiens
  chr4:95461556-95461572
  hypo
ccgcacccagcctatt

SEQ ID NO: 12274 - DNA, 31 bp, Homo sapiens
  chr4:95461611-95461642
  hypo
taaataatttgtctaacgtcacacagccagg

SEQ ID NO: 12275 - DNA, 31 bp, Homo sapiens
  chr4:99178277-99178308
  hypo
acaggcatgagccaccgcgcctggcccttat

SEQ ID NO: 12276 - DNA, 31 bp, Homo sapiens
  chr4:99835221-99835252
  hypo
aaaaaaaggccaggcacggtggctcacacct

SEQ ID NO: 12277 - DNA, 31 bp, Homo sapiens
  chr4:99836004-99836035
  hypo
aaagctgtacctgcaccggggcaaggagtaa

SEQ ID NO: 12278 - DNA, 84 bp, Homo sapiens; identical to SEQ ID NO: 1930
  chr4:100867971-100868055
  hypo

SEQ ID NO: 12279 - DNA, 31 bp, Homo sapiens
  chr4:102332875-102332906
  hypo
atgtcaagtcacattgcggccttgcttcacc

SEQ ID NO: 12280 - DNA, 32 bp, Homo sapiens
  chr4:103421131-103421163
  hypo
gtgtgagccaccgcacccggctcacagaattt

SEQ ID NO: 12281 - DNA, 36 bp, Homo sapiens
  chr4:103494438-103494474
  hypo
tgcgcaacaagaaagaaactccgtctcaaaaaaaaa

SEQ ID NO: 12282 - DNA, 54 bp, Homo sapiens; identical to SEQ ID NO: 1934
  chr4:106067335-106067389
  hypo

SEQ ID NO: 12283 - DNA, 72 bp, Homo sapiens; identical to SEQ ID NO: 1935
  chr4:106067416-106067488
  hypo

SEQ ID NO: 12284 - DNA, 31 bp, Homo sapiens
  chr4:108789574-108789605
  hypo
tcttaaagttgctgcccgccaggtgtggtgg

SEQ ID NO: 12285 - DNA, 21 bp, Homo sapiens
  chr4:109099899-109099920
  hypo
gccaccgcgcccagcaactta

SEQ ID NO: 12286 - DNA, 31 bp, Homo sapiens
  chr4:109680328-109680359
  hypo
ctagcttgttgccaggcgcagtggctcacgc

SEQ ID NO: 12287 - DNA, 31 bp, Homo sapiens
  chr4:110735439-110735470
  hypo
taaaaagaccaacattcgttaaaatcaaatt

SEQ ID NO: 12288 - DNA, 20 bp, Homo sapiens
  chr4:110735818-110735838
  hypo
cgccccgcctacaaaggtat

SEQ ID NO: 12289 - DNA, 31 bp, Homo sapiens
  chr4:110974665-110974696
  hypo
gaaaaagaaagttggccgggtgtggtgactc

SEQ ID NO: 12290 - DNA, 88 bp, Homo sapiens
  chr4:111019209-111019297
  hypo
aatatctgacctgcatcgtatctgtctacaagttagaaacattaaccgtgatagattcttcaagagttgaacacggacagaaaagaaa

SEQ ID NO: 12291 - DNA, 25 bp, Homo sapiens
  chr4:111042653-111042678
  hypo
accatcttggctaacacggtgaaac

SEQ ID NO: 12292 - DNA, 45 bp, Homo sapiens
  chr4:111096240-111096285
  hypo
atcaagacataagtatcggccagtcacagtggctcatgcctgtaa

SEQ ID NO: 12293 - DNA, 31 bp, Homo sapiens
  chr4:111097858-111097889
  hypo
tttaagcctctcaaggcgatcactctctttg

SEQ ID NO: 12294 - DNA, 6 bp, Homo sapiens
  chr4:111097939-111097945
  hypo
ctggag

SEQ ID NO: 12295 - DNA, 31 bp, Homo sapiens; identical to SEQ ID NO: 1946
  chr4:111117164-111117195
  hypo

SEQ ID NO: 12296 - DNA, 31 bp, Homo sapiens
  chr4:111135520-111135551
  hypo
agaaatagagagctaacggggtaaattcagc

SEQ ID NO: 12297 - DNA, 31 bp, Homo sapiens
  chr4:111147617-111147648
  hypo
aaacaaaaaaaagtgacgctaaatgtcaact

SEQ ID NO: 12298 - DNA, 31 bp, Homo sapiens
  chr4:111214505-111214536
  hypo
agcatctctttggctccgcagccaaatggtc

SEQ ID NO: 12299 - DNA, 238 bp, Homo sapiens; identical to SEQ ID NO: 1951
  chr4:113437621-113437859
  hypo

SEQ ID NO: 12300 - DNA, 79 bp, Homo sapiens
  chr4:113559123-113559202
  hypo
tagcttctcaggaaaacgtgcatgtacctattaaaacattttgcgaggctgggcacggtggctcacgcctgtaatccca

SEQ ID NO: 12301 - DNA, 19 bp, Homo sapiens
  chr4:113559441-113559460
  hypo
gctgcgtctccaaacaaac

SEQ ID NO: 12302 - DNA, 31 bp, Homo sapiens
  chr4:114528565-114528596
  hypo
cccaagcctgcaggtacgcattaagatggtc

SEQ ID NO: 12303 - DNA, 31 bp, Homo sapiens
  chr4:114528597-114528628
  hypo
ggagcaactgaggaaccgcaggagaggtgaa

SEQ ID NO: 12304 - DNA, 39 bp, Homo sapiens
  chr4:119501590-119501629
  hypo
ctcccatagtgccgggataacaggcgtgagtcaccacgc

SEQ ID NO: 12305 - DNA, 11 bp, Homo sapiens
  chr4:120024256-120024267
  hypo
caccaccatgc

SEQ ID NO: 12306 - DNA, 31 bp, Homo sapiens
  chr4:120024322-120024353
  hypo
atcaacatgtaatcttcgcttttagatttaa

SEQ ID NO: 12307 - DNA, 132 bp, Homo sapiens; identical to SEQ ID NO: 1956
  chr4:120549977-120550109
  hypo

SEQ ID NO: 12308 - DNA, 37 bp, Homo sapiens; identical to SEQ ID NO: 1957
  chr4:120550111-120550148
  hypo

SEQ ID NO: 12309 - DNA, 31 bp, Homo sapiens
  chr4:122158961-122158992
  hypo
agatttgaaagtatttcgaaaggttcaataa

SEQ ID NO: 12310 - DNA, 61 bp, Homo sapiens
  chr4:122159050-122159111
  hypo
ctccctctccctctcccgcttcctctccctctcccgctcccgctcccgctccctctccagc

SEQ ID NO: 12311 - DNA, 253 bp, Homo sapiens; identical to SEQ ID NO: 1964
  chr4:123748321-123748574
  hypo

SEQ ID NO: 12312 - DNA, 138 bp, Homo sapiens; identical to SEQ ID NO: 1965
  chr4:123748575-123748713
  hypo

SEQ ID NO: 12313 - DNA, 137 bp, Homo sapiens; identical to SEQ ID NO: 1970
  chr4:124318595-124318732
  hypo

SEQ ID NO: 12314 - DNA, 36 bp, Homo sapiens
  chr4:124335279-124335315
  hypo
aacaatgtttgcaggccgggcgcggcagctcacgcc

SEQ ID NO: 12315 - DNA, 38 bp, Homo sapiens
  chr4:124533357-124533395
  hypo
ttacaggcataagccacgacgcccggcagctcaatttc

SEQ ID NO: 12316 - DNA, 96 bp, Homo sapiens; identical to SEQ ID NO: 1974
  chr4:125633238-125633334
  hypo

SEQ ID NO: 12317 - DNA, 133 bp, Homo sapiens; identical to SEQ ID NO: 1975
  chr4:125633807-125633940
  hypo

SEQ ID NO: 12318 - DNA, 60 bp, Homo sapiens; identical to SEQ ID NO: 1976
  chr4:125634007-125634067
  hypo

SEQ ID NO: 12319 - DNA, 34 bp, Homo sapiens
  chr4:128702665-128702699
  hypo
cagagacaagggtcagcggcggggccagcatctt

SEQ ID NO: 12320 - DNA, 54 bp, Homo sapiens; identical to SEQ ID NO: 1977
  chr4:128703234-128703288
  hypo

SEQ ID NO: 12321 - DNA, 78 bp, Homo sapiens; identical to SEQ ID NO: 1978
  chr4:128703294-128703372
  hypo

SEQ ID NO: 12322 - DNA, 25 bp, Homo sapiens
  chr4:129736539-129736564
  hypo
ccaccgtgcccggcaatcttaagta

SEQ ID NO: 12323 - DNA, 4 bp, Homo sapiens
  chr4:138974560-138974564
  hypo
agga

SEQ ID NO: 12324 - DNA, 31 bp, Homo sapiens
  chr4:139707320-139707351
  hypo
cagagctgttcctattcggccatctttgtac

SEQ ID NO: 12325 - DNA, 28 bp, Homo sapiens
  chr4:139864070-139864098
  hypo
aactaggggctgggtgcggtggctcacg

SEQ ID NO: 12326 - DNA, 103 bp, Homo sapiens; identical to SEQ ID NO: 1979
  chr4:140097253-140097356
  hypo

SEQ ID NO: 12327 - DNA, 31 bp, Homo sapiens
  chr4:140134627-140134658
  hypo
ttagacacccagtacacgttggacattgaaa

SEQ ID NO: 12328 - DNA, 31 bp, Homo sapiens
  chr4:140290552-140290583
  hypo
ttttctgaagtggttccgttgtttgctatct

SEQ ID NO: 12329 - DNA, 21 bp, Homo sapiens
  chr4:140406966-140406987
  hypo
tttcaccgtgttagccaggat

SEQ ID NO: 12330 - DNA, 35 bp, Homo sapiens
  chr4:140592641-140592676
  hypo
agacctactgctctgtcgcccgggctggagtgcag

SEQ ID NO: 12331 - DNA, 31 bp, Homo sapiens
  chr4:140640070-140640101
  hypo
caaagctgctgtctcccgacctggggcagga

SEQ ID NO: 12332 - DNA, 31 bp, Homo sapiens
  chr4:140640122-140640153
  hypo
gggtaatagtccctctcggctgaagcagctc

SEQ ID NO: 12333 - DNA, 40 bp, Homo sapiens
  chr4:140641397-140641437
  hypo
gttctgtgccatcagccgtgacgttcgcatgctctggagg

SEQ ID NO: 12334 - DNA, 36 bp, Homo sapiens
  chr4:140701210-140701246
  hypo
ctagagccatgctgtccgaggcggtacccactattt

SEQ ID NO: 12335 - DNA, 31 bp, Homo sapiens
  chr4:140701270-140701301
  hypo
aattcatttctgcaggcgtgtcagccacttt

SEQ ID NO: 12336 - DNA, 36 bp, Homo sapiens
  chr4:140705887-140705923
  hypo
ttgggcctttgctatgcgctacgccttggccaagtc

SEQ ID NO: 12337 - DNA, 31 bp, Homo sapiens
  chr4:140751842-140751873
  hypo
caggcgtgagccactgcgcctggcctacact

SEQ ID NO: 12338 - DNA, 31 bp, Homo sapiens
  chr4:140751894-140751925
  hypo
taaaaaaaataagacacgatcctattatttc

SEQ ID NO: 12339 - DNA, 31 bp, Homo sapiens
  chr4:140751953-140751984
  hypo
tcccatgaacaatcaccggcctcttacaaaa

SEQ ID NO: 12340 - DNA, 45 bp, Homo sapiens
  chr4:140781102-140781147
  hypo
gcaaggccggagtgaccggacgaaggcgtcgcgggaggggctaga

SEQ ID NO: 12341 - DNA, 25 bp, Homo sapiens
  chr4:140865030-140865055
  hypo
ttttttttttttgagacggaatctt

SEQ ID NO: 12342 - DNA, 31 bp, Homo sapiens
  chr4:141050717-141050748
  hypo
tgccagagagaccaaacgtgtagaaacgaaa

SEQ ID NO: 12343 - DNA, 68 bp, Homo sapiens; identical to SEQ ID NO: 1982
  chr4:141071934-141072002
  hypo

SEQ ID NO: 12344 - DNA, 145 bp, Homo sapiens; identical to SEQ ID NO: 1983
  chr4:141072010-141072155
  hypo

SEQ ID NO: 12345 - DNA, 164 bp, Homo sapiens; identical to SEQ ID NO: 1984
  chr4:141072156-141072320
  hypo

SEQ ID NO: 12346 - DNA, 175 bp, Homo sapiens; identical to SEQ ID NO: 1985
  chr4:141072547-141072722
  hypo

SEQ ID NO: 12347 - DNA, 31 bp, Homo sapiens; identical to SEQ ID NO: 1986
  chr4:141073195-141073226
  hypo

SEQ ID NO: 12348 - DNA, 87 bp, Homo sapiens; identical to SEQ ID NO: 1987
  chr4:141073274-141073361
  hypo

SEQ ID NO: 12349 - DNA, 49 bp, Homo sapiens; identical to SEQ ID NO: 1988
  chr4:141073451-141073500
  hypo

SEQ ID NO: 12350 - DNA, 40 bp, Homo sapiens; identical to SEQ ID NO: 1989
  chr4:141073590-141073630
  hypo

SEQ ID NO: 12351 - DNA, 103 bp, Homo sapiens; identical to SEQ ID NO: 1992
  chr4:141073988-141074091
  hypo

SEQ ID NO: 12352 - DNA, 42 bp, Homo sapiens; identical to SEQ ID NO: 1993
  chr4:141074134-141074176
  hypo

SEQ ID NO: 12353 - DNA, 181 bp, Homo sapiens; identical to SEQ ID NO: 1994
  chr4:141074191-141074372
  hypo

SEQ ID NO: 12354 - DNA, 31 bp, Homo sapiens; identical to SEQ ID NO: 1995
  chr4:141074619-141074650
  hypo

SEQ ID NO: 12355 - DNA, 37 bp, Homo sapiens; identical to SEQ ID NO: 1996
  chr4:141074696-141074733
  hypo

SEQ ID NO: 12356 - DNA, 31 bp, Homo sapiens; identical to SEQ ID NO: 1997
  chr4:141074879-141074910
  hypo

SEQ ID NO: 12357 - DNA, 74 bp, Homo sapiens; identical to SEQ ID NO: 1998
  chr4:141074924-141074998
  hypo

SEQ ID NO: 12358 - DNA, 36 bp, Homo sapiens; identical to SEQ ID NO: 1999
  chr4:141075021-141075057
  hypo

SEQ ID NO: 12359 - DNA, 161 bp, Homo sapiens; identical to SEQ ID NO: 2000
  chr4:141075080-141075241
  hypo

SEQ ID NO: 12360 - DNA, 68 bp, Homo sapiens; identical to SEQ ID NO: 2001
  chr4:141075245-141075313
  hypo

SEQ ID NO: 12361 - DNA, 75 bp, Homo sapiens; identical to SEQ ID NO: 2002
  chr4:141075316-141075391
  hypo

SEQ ID NO: 12362 - DNA, 31 bp, Homo sapiens
  chr4:141087175-141087206
  hypo
aataatgaaatatgttcgggattggctaaat

SEQ ID NO: 12363 - DNA, 85 bp, Homo sapiens
  chr4:142134703-142134788
  hypo
gaactggggctgcgcctggcgatcacgggccagtgcaagttctgggtgggcgctggctcggcaggcccaccggcccacctggcag

SEQ ID NO: 12364 - DNA, 31 bp, Homo sapiens; identical to SEQ ID NO: 2003
  chr4:142557475-142557506
  hypo

SEQ ID NO: 12365 - DNA, 79 bp, Homo sapiens; identical to SEQ ID NO: 2004
  chr4:142557742-142557821
  hypo

SEQ ID NO: 12366 - DNA, 100 bp, Homo sapiens; identical to SEQ ID NO: 2005
  chr4:142557826-142557926
  hypo

SEQ ID NO: 12367 - DNA, 31 bp, Homo sapiens
  chr4:142677008-142677039
  hypo
ctaagtggatttgctgcgtggccagcaaatt

SEQ ID NO: 12368 - DNA, 72 bp, Homo sapiens
  chr4:142677066-142677138
  hypo
aacctgccattgagaacgctttgcaaaatgcgtaactacagcagagtttcagtatgacggaattttccactt

SEQ ID NO: 12369 - DNA, 31 bp, Homo sapiens
  chr4:142677163-142677194
  hypo
aggggggacagggttgcggagaaaggaggta

SEQ ID NO: 12370 - DNA, 31 bp, Homo sapiens
  chr4:143477971-143478002
  hypo
ttgcaggggaaagtatcgattgcagttttta

SEQ ID NO: 12371 - DNA, 31 bp, Homo sapiens
  chr4:143478013-143478044
  hypo
gatacctaggaaacctcgctatctcctcata

SEQ ID NO: 12372 - DNA, 31 bp, Homo sapiens
  chr4:143478100-143478131
  hypo
ttagatacatcaaaaccgatacagcacaaag

SEQ ID NO: 12373 - DNA, 31 bp, Homo sapiens
  chr4:143478137-143478168
  hypo
ctcaaagctgccctgtcgtgaccaccggagg

SEQ ID NO: 12374 - DNA, 76 bp, Homo sapiens; identical to SEQ ID NO: 2008
  chr4:144257423-144257499
  hypo

SEQ ID NO: 12375 - DNA, 190 bp, Homo sapiens; identical to SEQ ID NO: 2009
  chr4:144257936-144258126
  hypo

SEQ ID NO: 12376 - DNA, 250 bp, Homo sapiens; identical to SEQ ID NO: 2010
  chr4:144258374-144258624
  hypo

SEQ ID NO: 12377 - DNA, 31 bp, Homo sapiens; identical to SEQ ID NO: 2012
  chr4:146102129-146102160
  hypo

SEQ ID NO: 12378 - DNA, 52 bp, Homo sapiens; identical to SEQ ID NO: 2014
  chr4:146402905-146402957
  hypo

SEQ ID NO: 12379 - DNA, 117 bp, Homo sapiens; identical to SEQ ID NO: 2016
  chr4:146403592-146403709
  hypo

SEQ ID NO: 12380 - DNA, 35 bp, Homo sapiens; identical to SEQ ID NO: 2017
  chr4:146403852-146403887
  hypo

SEQ ID NO: 12381 - DNA, 33 bp, Homo sapiens
  chr4:146853897-146853930
  hypo
ttacaggcgtgagccaccgcgctcagcttgtat

SEQ ID NO: 12382 - DNA, 31 bp, Homo sapiens
  chr4:146853950-146853981
  hypo
caggagaagcctgcatcgtcactccaccaac

SEQ ID NO: 12383 - DNA, 31 bp, Homo sapiens
  chr4:148463774-148463805
  hypo
ccttagaagcactcctcggtactcccataat

SEQ ID NO: 12384 - DNA, 34 bp, Homo sapiens; identical to SEQ ID NO: 2018
  chr4:148538934-148538968
  hypo

SEQ ID NO: 12385 - DNA, 29 bp, Homo sapiens
  chr4:148835301-148835330
  hypo
caaaaaaagaaatccgctttattgaggta

SEQ ID NO: 12386 - DNA, 31 bp, Homo sapiens
  chr4:148884819-148884850
  hypo
gaagaggcatttattccgtcacaattctaga

SEQ ID NO: 12387 - DNA, 31 bp, Homo sapiens
  chr4:148985416-148985447
  hypo
ctgatgttcacttccacgttaatttctcttt

SEQ ID NO: 12388 - DNA, 31 bp, Homo sapiens
  chr4:149363505-149363536
  hypo
gcctgaagttggctcccgtctcccgggccca

SEQ ID NO: 12389 - DNA, 31 bp, Homo sapiens
  chr4:149364526-149364557
  hypo
aaagcaagcttaccatcgaggatattcacgt

SEQ ID NO: 12390 - DNA, 31 bp, Homo sapiens; identical to SEQ ID NO: 2019
  chr4:149364622-149364653
  hypo

SEQ ID NO: 12391 - DNA, 96 bp, Homo sapiens; identical to SEQ ID NO: 2022
  chr4:149365995-149366091
  hypo

SEQ ID NO: 12392 - DNA, 164 bp, Homo sapiens; identical to SEQ ID NO: 2023
  chr4:149366094-149366258
  hypo

SEQ ID NO: 12393 - DNA, 31 bp, Homo sapiens
  chr4:149905344-149905375
  hypo
aacagttctgggataccgatgggatgcagta

SEQ ID NO: 12394 - DNA, 6 bp, Homo sapiens
  chr4:149905376-149905382
  hypo
ctgaag

SEQ ID NO: 12395 - DNA, 22 bp, Homo sapiens
  chr4:151029369-151029391
  hypo
aaccttcttggccgggcgcagt

SEQ ID NO: 12396 - DNA, 42 bp, Homo sapiens
  chr4:151897749-151897791
  hypo
aaatacaagccttcaccgatcatcgccgcgacagaaacaaca

SEQ ID NO: 12397 - DNA, 31 bp, Homo sapiens
  chr4:151897841-151897872
  hypo
aggtgagcaatcacttcgtatcacagaaagg

SEQ ID NO: 12398 - DNA, 34 bp, Homo sapiens
  chr4:152157385-152157419
  hypo
gagaggtgcaagcgggagccggggctgcgcccgg

SEQ ID NO: 12399 - DNA, 31 bp, Homo sapiens
  chr4:152273414-152273445
  hypo
cataaagagtttgggccgggtgcgtggctca

SEQ ID NO: 12400 - DNA, 31 bp, Homo sapiens; identical to SEQ ID NO: 2029
  chr4:152330027-152330058
  hypo

SEQ ID NO: 12401 - DNA, 120 bp, Homo sapiens; identical to SEQ ID NO: 2030
  chr4:152330090-152330210
  hypo

SEQ ID NO: 12402 - DNA, 38 bp, Homo sapiens; identical to SEQ ID NO: 2031
  chr4:152330252-152330290
  hypo

SEQ ID NO: 12403 - DNA, 226 bp, Homo sapiens; identical to SEQ ID NO: 2032
  chr4:152330321-152330547
  hypo

SEQ ID NO: 12404 - DNA, 63 bp, Homo sapiens
  chr4:153460845-153460908
  hypo
ctgccaagggcaagtacggcgtggagtggcaaggcatgtgtgagcgagcgtgaggtctggcta

SEQ ID NO: 12405 - DNA, 16 bp, Homo sapiens
  chr4:153702686-153702702
  hypo
ccgaattggccatttc

SEQ ID NO: 12406 - DNA, 31 bp, Homo sapiens
  chr4:153702704-153702735
  hypo
tgctgttctctcagagcggctacagattact

SEQ ID NO: 12407 - DNA, 31 bp, Homo sapiens
  chr4:153702753-153702784
  hypo
aattctgcttttctttcgtttgtcctgtggt

SEQ ID NO: 12408 - DNA, 18 bp, Homo sapiens
  chr4:153736902-153736920
  hypo
ttttttttttttgagacg

SEQ ID NO: 12409 - DNA, 31 bp, Homo sapiens
  chr4:153821325-153821356
  hypo
gggagggatcaaagggcgggaactaacactg

SEQ ID NO: 12410 - DNA, 31 bp, Homo sapiens
  chr4:153821362-153821393
  hypo
catagaacaaaaaaggcgaaagacttttttt

SEQ ID NO: 12411 - DNA, 80 bp, Homo sapiens
  chr4:153821397-153821477
  hypo
aaggtgagaaaatctccgcactcagaatgttaatgtatgtaattattcgataaagaattataagacgtcaccacagttct

SEQ ID NO: 12412 - DNA, 2 bp, Homo sapiens
  chr4:153889784-153889786
  hypo
gc

SEQ ID NO: 12413 - DNA, 31 bp, Homo sapiens
  chr4:153896020-153896051
  hypo
ctccagcccctcctaccggcccccgaacacc

SEQ ID NO: 12414 - DNA, 62 bp, Homo sapiens
  chr4:153897168-153897230
  hypo
ccaagtccagcagaggcgccggctggaggcgaccagagctgtcatcccgggggccctcccag

SEQ ID NO: 12415 - DNA, 46 bp, Homo sapiens
  chr4:153897247-153897293
  hypo
agatactgtgtggtcacgccagaactccgtgcggagggcctccaca

SEQ ID NO: 12416 - DNA, 123 bp, Homo sapiens; identical to SEQ ID NO: 2037
  chr4:154387494-154387617
  hypo

SEQ ID NO: 12417 - DNA, 67 bp, Homo sapiens; identical to SEQ ID NO: 2038
  chr4:154387667-154387734
  hypo

SEQ ID NO: 12418 - DNA, 83 bp, Homo sapiens; identical to SEQ ID NO: 2039
  chr4:154388113-154388196
  hypo

SEQ ID NO: 12419 - DNA, 31 bp, Homo sapiens
  chr4:154410568-154410599
  hypo
tgtatctgtaggagcacgtccaaggaaaatt

SEQ ID NO: 12420 - DNA, 21 bp, Homo sapiens
  chr4:154420588-154420609
  hypo
ttttttttttgagatgcgtct

SEQ ID NO: 12421 - DNA, 22 bp, Homo sapiens
  chr4:154437983-154438005
  hypo
tattattcttttgagacggagt

SEQ ID NO: 12422 - DNA, 31 bp, Homo sapiens
  chr4:154454482-154454513
  hypo
ataagtagggggactgcgtgtgggagtgggg

SEQ ID NO: 12423 - DNA, 22 bp, Homo sapiens
  chr4:154455868-154455890
  hypo
gccacggcgcctggccaggagt

SEQ ID NO: 12424 - DNA, 35 bp, Homo sapiens
  chr4:154469358-154469393
  hypo
tagcatacctcttctccgaccgtgttcaaaacaag

SEQ ID NO: 12425 - DNA, 4 bp, Homo sapiens
  chr4:154469458-154469462
  hypo
tttt

SEQ ID NO: 12426 - DNA, 31 bp, Homo sapiens
  chr4:154520338-154520369
  hypo
agctaaagcaggagcacgagaggggagaagg

SEQ ID NO: 12427 - DNA, 99 bp, Homo sapiens
  chr4:154520383-154520482
  hypo
aaacaaccagatctcacgacaactcactatcacagtgacagcattgcgggagtcgggggagggtgctaaaccatgagagaccaccgccatgatccattg

SEQ ID NO: 12428 - DNA, 31 bp, Homo sapiens
  chr4:154681753-154681784
  hypo
tgagaacaagctggaacgtttaggcaagcct

SEQ ID NO: 12429 - DNA, 31 bp, Homo sapiens
  chr4:157974482-157974513
  hypo
aatgctgaaattctagcgggctgcatttcca

SEQ ID NO: 12430 - DNA, 31 bp, Homo sapiens
  chr4:157974528-157974559
  hypo
aactttcttgatgagtcgctgattctgcttg

SEQ ID NO: 12431 - DNA, 151 bp, Homo sapiens; identical to SEQ ID NO: 2041
  chr4:159690016-159690167
  hypo

SEQ ID NO: 12432 - DNA, 195 bp, Homo sapiens; identical to SEQ ID NO: 2042
  chr4:159690191-159690386
  hypo

SEQ ID NO: 12433 - DNA, 48 bp, Homo sapiens; identical to SEQ ID NO: 2043
  chr4:159690395-159690443
  hypo

SEQ ID NO: 12434 - DNA, 109 bp, Homo sapiens; identical to SEQ ID NO: 2044
  chr4:159690446-159690555
  hypo

SEQ ID NO: 12435 - DNA, 125 bp, Homo sapiens; identical to SEQ ID NO: 2045
  chr4:159690556-159690681
  hypo

SEQ ID NO: 12436 - DNA, 31 bp, Homo sapiens
  chr4:159790257-159790288
  hypo
cacggtgcaggaggaacgggagggaggaggc

SEQ ID NO: 12437 - DNA, 34 bp, Homo sapiens
  chr4:159919844-159919878
  hypo
cattaggtaagaatcgcgccggttttacccacac

SEQ ID NO: 12438 - DNA, 31 bp, Homo sapiens
  chr4:159919944-159919975
  hypo
atccacagagcacaaccgacactggactggg

SEQ ID NO: 12439 - DNA, 31 bp, Homo sapiens
  chr4:159920009-159920040
  hypo
aatatggcttgtaaaacgtatgtaccattga

SEQ ID NO: 12440 - DNA, 31 bp, Homo sapiens
  chr4:160286683-160286714
  hypo
gttgtgaatcattgagcgcaggcactacgtc

SEQ ID NO: 12441 - DNA, 30 bp, Homo sapiens
  chr4:160310849-160310879
  hypo
cgggcgcggtggctcacgcctgtaatccca

SEQ ID NO: 12442 - DNA, 24 bp, Homo sapiens
  chr4:165953686-165953710
  hypo
caccgtgctcggccggattctgtt

SEQ ID NO: 12443 - DNA, 31 bp, Homo sapiens
  chr4:166035174-166035205
  hypo
atggtgtaagactccacgtgatcttcttttt

SEQ ID NO: 12444 - DNA, 31 bp, Homo sapiens
  chr4:167457985-167458016
  hypo
tcttacagtgctgctgcgaggtaaaatgata

SEQ ID NO: 12445 - DNA, 35 bp, Homo sapiens
  chr4:169198693-169198728
  hypo
aatgaaaattccaggccgggcgcagtggctcacac

SEQ ID NO: 12446 - DNA, 33 bp, Homo sapiens
  chr4:169224158-169224191
  hypo
aaaaaaattattcagccgggctcggtggctcac

SEQ ID NO: 12447 - DNA, 31 bp, Homo sapiens
  chr4:169358977-169359008
  hypo
cttcacttaaacccttcggctgactccatgg

SEQ ID NO: 12448 - DNA, 60 bp, Homo sapiens
  chr4:169377151-169377211
  hypo
acagctttctgcctggcggctgtgttctttttacttactaagacacgatggtacattctc

SEQ ID NO: 12449 - DNA, 42 bp, Homo sapiens
  chr4:169377228-169377270
  hypo
agtgacacagagaacacgctggatgtccgatccttctgacca

SEQ ID NO: 12450 - DNA, 31 bp, Homo sapiens
  chr4:169377284-169377315
  hypo
gaaatagagtctgatacgcctatcaaaaaag

SEQ ID NO: 12451 - DNA, 31 bp, Homo sapiens
  chr4:169667597-169667628
  hypo
cctgagacagaaaacccgtgtgacacagaat

SEQ ID NO: 12452 - DNA, 31 bp, Homo sapiens
  chr4:169667637-169667668
  hypo
taagcaaaaggactgtcgtattcatccctgt

SEQ ID NO: 12453 - DNA, 83 bp, Homo sapiens
  chr4:169667720-169667803
  hypo
gagtgaataacaagcccgttctccattctggttaacttacgagtactgtaccaattttcttccctgggcggaaaaaattatga

SEQ ID NO: 12454 - DNA, 46 bp, Homo sapiens
  chr4:169744532-169744578
  hypo
tcagaaatccctttctcggcaaggtagttcacgcctagagtcccag

SEQ ID NO: 12455 - DNA, 20 bp, Homo sapiens
  chr4:169978176-169978196
  hypo
ttagagcaggctcttgcgct

SEQ ID NO: 12456 - DNA, 22 bp, Homo sapiens
  chr4:169978255-169978277
  hypo
gctacagcgatcctcccacctc

SEQ ID NO: 12457 - DNA, 31 bp, Homo sapiens
  chr4:169978303-169978334
  hypo
aacaggtgtgagccaccgcacctgatcccag

SEQ ID NO: 12458 - DNA, 24 bp, Homo sapiens
  chr4:170162086-170162110
  hypo
ttaaaactgcccaggccgggcgtg

SEQ ID NO: 12459 - DNA, 74 bp, Homo sapiens; identical to SEQ ID NO: 2048
  chr4:170192273-170192347
  hypo

SEQ ID NO: 12460 - DNA, 31 bp, Homo sapiens
  chr4:170211793-170211824
  hypo
gatttttaaatcacaccgtcagttgccacta

SEQ ID NO: 12461 - DNA, 31 bp, Homo sapiens
  chr4:171014687-171014718
  hypo
agcacgttgatgcacccgtctgtgatttgta

SEQ ID NO: 12462 - DNA, 31 bp, Homo sapiens; identical to SEQ ID NO: 2051
  chr4:172735202-172735233
  hypo

SEQ ID NO: 12463 - DNA, 31 bp, Homo sapiens
  chr4:173298763-173298794
  hypo
ccacacgggagcccaccggttgtgggggagc

SEQ ID NO: 12464 - DNA, 31 bp, Homo sapiens
  chr4:183081013-183081044
  hypo
atttatatgaaaaagacggaaagatttttga

SEQ ID NO: 12465 - DNA, 68 bp, Homo sapiens
  chr4:183824603-183824671
  hypo
tgtgtgaaaataaagacgagaaacgggggtgatgtggagaaacccgccgcatgcgtggaaaatgtgtg

SEQ ID NO: 12466 - DNA, 31 bp, Homo sapiens
  chr4:183824716-183824747
  hypo
tagaagaaaatgacagcgcaaaggaattcta

SEQ ID NO: 12467 - DNA, 31 bp, Homo sapiens
  chr4:183824764-183824795
  hypo
agtggtgggtcactcacgtaaaaggcagccc

SEQ ID NO: 12468 - DNA, 31 bp, Homo sapiens
  chr4:184000059-184000090
  hypo
agctggagacattccccgccttccaccaagg

SEQ ID NO: 12469 - DNA, 31 bp, Homo sapiens
  chr4:184160137-184160168
  hypo
gcactctaaaatattgcgcaacagaatgtgt

SEQ ID NO: 12470 - DNA, 31 bp, Homo sapiens
  chr4:184265808-184265839
  hypo
cccgcccagggcccatcgccccttgaggcct

SEQ ID NO: 12471 - DNA, 31 bp, Homo sapiens
  chr4:184289494-184289525
  hypo
aatgctatttgagcaccgatacgatgccgca

SEQ ID NO: 12472 - DNA, 31 bp, Homo sapiens
  chr4:184322586-184322617
  hypo
atcctgcactgagaatcgcatctgagtgcct

SEQ ID NO: 12473 - DNA, 31 bp, Homo sapiens; identical to SEQ ID NO: 2058
  chr4:184328289-184328320
  hypo

SEQ ID NO: 12474 - DNA, 34 bp, Homo sapiens; identical to SEQ ID NO: 2059
  chr4:184328355-184328389
  hypo

SEQ ID NO: 12475 - DNA, 38 bp, Homo sapiens
  chr4:184339995-184340033
  hypo
tatcaacacacttcatcgcaatccggaatgtgctgaac

SEQ ID NO: 12476 - DNA, 2 bp, Homo sapiens
  chr4:184375284-184375286
  hypo
cc

SEQ ID NO: 12477 - DNA, 22 bp, Homo sapiens
  chr4:184375704-184375726
  hypo
gcccggccgatcctgcttcttt

SEQ ID NO: 12478 - DNA, 31 bp, Homo sapiens
  chr4:184546934-184546965
  hypo
tgacctggatgtcttacgtgctaccccaggc

SEQ ID NO: 12479 - DNA, 31 bp, Homo sapiens
  chr4:184649712-184649743
  hypo
caggagtgaacgcctccgaactgtgtgtgta

SEQ ID NO: 12480 - DNA, 31 bp, Homo sapiens
  chr4:184670514-184670545
  hypo
ggcaattggcatcatccgaaatacagatttt

SEQ ID NO: 12481 - DNA, 31 bp, Homo sapiens
  chr4:184670631-184670662
  hypo
atcattactacatccacgtgttccttagccc

SEQ ID NO: 12482 - DNA, 39 bp, Homo sapiens
  chr4:184670676-184670715
  hypo
gggagatggagtcacacgttcgtccgtgaacagatatta

SEQ ID NO: 12483 - DNA, 19 bp, Homo sapiens
  chr4:184685030-184685049
  hypo
gagccgctgcgccaggcct

SEQ ID NO: 12484 - DNA, 31 bp, Homo sapiens
  chr4:184952936-184952967
  hypo
taacagggatggatcccgccttccctgcctc

SEQ ID NO: 12485 - DNA, 38 bp, Homo sapiens
  chr4:185185201-185185239
  hypo
tccaaccctggcatgacgtcaaacgcagcagaagtgag

SEQ ID NO: 12486 - DNA, 17 bp, Homo sapiens
  chr4:185239349-185239366
  hypo
ggcgacagagtgagact

SEQ ID NO: 12487 - DNA, 31 bp, Homo sapiens
  chr4:185239991-185240022
  hypo
ttttagtcctgtgtatcgccttcccagcccc

SEQ ID NO: 12488 - DNA, 46 bp, Homo sapiens
  chr4:185240070-185240116
  hypo
ggtccactccacagagcgctgggccagagctcgttctggtgccatt

SEQ ID NO: 12489 - DNA, 31 bp, Homo sapiens
  chr4:185352803-185352834
  hypo
gtaggtatagtggtcacgagtagagagcaac

SEQ ID NO: 12490 - DNA, 31 bp, Homo sapiens
  chr4:185353295-185353326
  hypo
ttcgatccacactgttcgcagattctgtatc

SEQ ID NO: 12491 - DNA, 31 bp, Homo sapiens
  chr4:185480838-185480869
  hypo
gcctgcacctcagaagcggttgctgctgctg

SEQ ID NO: 12492 - DNA, 70 bp, Homo sapiens
  chr4:185873078-185873148
  hypo
cgtggccatgcgtgttcgtgcctggtgtgtatggggtgggggacgcatggccatgcgtgttggctcctgg

SEQ ID NO: 12493 - DNA, 34 bp, Homo sapiens; identical to SEQ ID NO: 2061
  chr4:186130482-186130516
  hypo

SEQ ID NO: 12494 - DNA, 31 bp, Homo sapiens; identical to SEQ ID NO: 2062
  chr4:186130520-186130551
  hypo

SEQ ID NO: 12495 - DNA, 19 bp, Homo sapiens
  chr4:186348208-186348227
  hypo
actccgtctcaaaaaaaaa

SEQ ID NO: 12496 - DNA, 31 bp, Homo sapiens
  chr4:186580879-186580910
  hypo
agtccttattaagacacggtgagatatttga

SEQ ID NO: 12497 - DNA, 35 bp, Homo sapiens
  chr4:186933525-186933560
  hypo
gtaaaggagcccagtgcgagcgaagaaggactcag

SEQ ID NO: 12498 - DNA, 31 bp, Homo sapiens; identical to SEQ ID NO: 2063
  chr4:187066081-187066112
  hypo

SEQ ID NO: 12499 - DNA, 31 bp, Homo sapiens
  chr4:187206901-187206932
  hypo
ataaaatggcagaaagcgggtatgatattgc

SEQ ID NO: 12500 - DNA, 45 bp, Homo sapiens
  chr4:187206954-187206999
  hypo
gtgaattacacaggtacggagaattttatccggaaagttgtctcc

SEQ ID NO: 12501 - DNA, 58 bp, Homo sapiens
  chr4:187207023-187207081
  hypo
aacactactagacttacggcctgaccctgccaatctctccatgcgttatcatcatgaa

SEQ ID NO: 12502 - DNA, 37 bp, Homo sapiens
  chr4:187509899-187509936
  hypo
gacatgggcatgctctcgacagcgggcgcctcgaagt

SEQ ID NO: 12503 - DNA, 31 bp, Homo sapiens
  chr4:187527078-187527109
  hypo
cttttaatactgatagcgacttcttgaattc

SEQ ID NO: 12504 - DNA, 36 bp, Homo sapiens
  chr4:187527242-187527278
  hypo
tttcccctggagaagacgggcgcgttgtcattgaca

SEQ ID NO: 12505 - DNA, 49 bp, Homo sapiens
  chr4:187550653-187550702
  hypo
ttccataatgaaaagacgtatggatttggcacagcggaaatcactgcca

SEQ ID NO: 12506 - DNA, 36 bp, Homo sapiens
  chr4:187550726-187550762
  hypo
aagaagaagaaaactgcgcttcgtgggggcatatgg

SEQ ID NO: 12507 - DNA, 31 bp, Homo sapiens
  chr4:187550800-187550831
  hypo
agggtcccaggcagagcggtcaaccacatgg

SEQ ID NO: 12508 - DNA, 31 bp, Homo sapiens
  chr4:187552633-187552664
  hypo
tggtatcgtagtgtctcgcctcccagctgat

SEQ ID NO: 12509 - DNA, 261 bp, Homo sapiens; identical to SEQ ID NO: 2068
  chr4:187647865-187648126
  hypo

SEQ ID NO: 12510 - DNA, 31 bp, Homo sapiens
  chr4:187680707-187680738
  hypo
cgccctcgggcccttccgggccgcttgcttt

SEQ ID NO: 12511 - DNA, 31 bp, Homo sapiens
  chr4:187796051-187796082
  hypo
tgccaataggataagtcgtcctattttccca

SEQ ID NO: 12512 - DNA, 31 bp, Homo sapiens; identical to SEQ ID NO: 2069
  chr4:187855389-187855420
  hypo

SEQ ID NO: 12513 - DNA, 31 bp, Homo sapiens
  chr4:188428284-188428315
  hypo
cagtgcagccagtaaccgcccatttatgtat

SEQ ID NO: 12514 - DNA, 31 bp, Homo sapiens
  chr4:188593959-188593990
  hypo
tgtcagaagccataatcggtgtgtgctaccc

SEQ ID NO: 12515 - DNA, 6 bp, Homo sapiens
  chr4:189100359-189100365
  hypo
gggttc

SEQ ID NO: 12516 - DNA, 70 bp, Homo sapiens
  chr4:189100384-189100454
  hypo
gcctgagtttcccctccgctgcgggctcctgcgcggcccgagcctgccctacgagcgctgtcccctgctc

SEQ ID NO: 12517 - DNA, 31 bp, Homo sapiens
  chr4:190509468-190509499
  hypo
caggccccctccttttcgaagatctttcttt

SEQ ID NO: 12518 - DNA, 106 bp, Homo sapiens
  chr4:190509512-190509618
  hypo
tgacttcatggctcctcgctccccgcatcacgccgtggtggtgcctggatgcgtgacgatgtactgaccacattctgcggcaatcactgttcgtgaagctgcctcc

SEQ ID NO: 12519 - DNA, 31 bp, Homo sapiens
  chr5:156162-156193
  hypo
ttattcctccccatcccgtgcaggaagtcgc

SEQ ID NO: 12520 - DNA, 31 bp, Homo sapiens
  chr5:286453-286484
  hypo
atgttgttttgagagccgtgcagctggagat

SEQ ID NO: 12521 - DNA, 31 bp, Homo sapiens
  chr5:397105-397136
  hypo
agcccctgaccatccacgttagcccctgacc

SEQ ID NO: 12522 - DNA, 31 bp, Homo sapiens
  chr5:429731-429762
  hypo
gcagctcagccttgccgcgcgatcctgcagc

SEQ ID NO: 12523 - DNA, 31 bp, Homo sapiens
  chr5:453958-453989
  hypo
aaattataaggaagtacgtcctggatgacct

SEQ ID NO: 12524 - DNA, 31 bp, Homo sapiens
  chr5:465821-465852
  hypo
ctgccttccagggtttcggggaagacgtgga

SEQ ID NO: 12525 - DNA, 31 bp, Homo sapiens; identical to SEQ ID NO: 2070
  chr5:472704-472735
  hypo

SEQ ID NO: 12526 - DNA, 31 bp, Homo sapiens
  chr5:492757-492788
  hypo
ctggatggacggtggtcgggggggggcctct

SEQ ID NO: 12527 - DNA, 54 bp, Homo sapiens
  chr5:554298-554352
  hypo
tggcaaggaaaataaacgagccgttacctttcaccaaatcgcactgtattttat

SEQ ID NO: 12528 - DNA, 50 bp, Homo sapiens
  chr5:554397-554447
  hypo
gcagattgtaaaattacgctcaacatacagcaaggcgactataaatacaa

SEQ ID NO: 12529 - DNA, 56 bp, Homo sapiens
  chr5:554456-554512
  hypo
tgaggtgctggtgctgcgggtgggtcacgggataaaccaggcgtggggtctgggtc

SEQ ID NO: 12530 - DNA, 31 bp, Homo sapiens
  chr5:554604-554635
  hypo
gtggggggctgggtcacgggatgaacggggg

SEQ ID NO: 12531 - DNA, 37 bp, Homo sapiens
  chr5:554637-554674
  hypo
gggtcacaggatgaaccgtgggcgggtcatgggataa

SEQ ID NO: 12532 - DNA, 107 bp, Homo sapiens
  chr5:554689-554796
  hypo
gggtcacaggatgacccgggggtgggtcacgggataaaccaggggtggggggtgggtcacgggatgaacggggggcgggtcacaggatgaaccgtgggtgggtcatg

SEQ ID NO: 12533 - DNA, 70 bp, Homo sapiens
  chr5:554807-554877
  hypo
ggtggggtctgggtcacgggatgaacggggttgggggctgggtcacgggatgaaccggggggtgggtcac

SEQ ID NO: 12534 - DNA, 31 bp, Homo sapiens
  chr5:555054-555085
  hypo
gggtcacgggatgaaccggggtggggggtgg

SEQ ID NO: 12535 - DNA, 43 bp, Homo sapiens
  chr5:677957-678000
  hypo
ccgtgcatctccctcccggtggccctggcgtccccgtgcacgg

SEQ ID NO: 12536 - DNA, 65 bp, Homo sapiens
  chr5:678029-678094
  hypo
ctgagctcaggggatgcggctgccccctcaccagcaccctccgattccagcgacagcctcttggc

SEQ ID NO: 12537 - DNA, 36 bp, Homo sapiens; identical to SEQ ID NO: 2071
  chr5:693797-693833
  hypo

SEQ ID NO: 12538 - DNA, 78 bp, Homo sapiens
  chr5:750520-750598
  hypo
cctgcctccatcctcacgaggccccctcccctctgcgtctctcctttctcttacaagcacactcgtggctagatttgg

SEQ ID NO: 12539 - DNA, 31 bp, Homo sapiens
  chr5:750635-750666
  hypo
gatattaagtcacagccgcaggcccatttcc

SEQ ID NO: 12540 - DNA, 41 bp, Homo sapiens
  chr5:760083-760124
  hypo
gccgtcctgagcccagcgccggccagcgggaggggcagcat

SEQ ID NO: 12541 - DNA, 57 bp, Homo sapiens
  chr5:881865-881922
  hypo
cctgagaagagccggacgtttgtgtgggggcagctccccaccgcggatccatgcaaa

SEQ ID NO: 12542 - DNA, 92 bp, Homo sapiens
  chr5:881947-882039
  hypo
ggccctgggggagaggcggaaggtcagctcaatgggacacggagttgatacgaagattaggagacaagtcctcacggcgcagatacaaaact

SEQ ID NO: 12543 - DNA, 66 bp, Homo sapiens
  chr5:882040-882106
  hypo
aaagggaagaagtgggcggaacccacggggcacgagggaactggaagtttccgtgtaaaaacagtt

SEQ ID NO: 12544 - DNA, 31 bp, Homo sapiens
  chr5:936463-936494
  hypo
ccatggtctgttgtcacgaggcctgtgccct

SEQ ID NO: 12545 - DNA, 31 bp, Homo sapiens
  chr5:948028-948059
  hypo
ggcaaccccccacccccgccacccctccacc

SEQ ID NO: 12546 - DNA, 89 bp, Homo sapiens
  chr5:948090-948179
  hypo
ttctttcttcacactgcgaggctttttgggggagcagggtggctccgagctgccctgaggatggattgagagggcggggcggggagggg

SEQ ID NO: 12547 - DNA, 31 bp, Homo sapiens
  chr5:962517-962548
  hypo
caggggccagggtctgcgggaatgagggggc

SEQ ID NO: 12548 - DNA, 31 bp, Homo sapiens
  chr5:1003104-1003135
  hypo
tgtttcacatgttcaccggtgtgtacgcccg

SEQ ID NO: 12549 - DNA, 31 bp, Homo sapiens
  chr5:1013562-1013593
  hypo
caggcacagagggaaccgaagggagttgcca

SEQ ID NO: 12550 - DNA, 37 bp, Homo sapiens
  chr5:1031040-1031077
  hypo
caacaatattcagcctcggcagcgccaccttagtgcc

SEQ ID NO: 12551 - DNA, 31 bp, Homo sapiens
  chr5:1049742-1049773
  hypo
ccaggagtggacctgccggggaaggggcggc

SEQ ID NO: 12552 - DNA, 31 bp, Homo sapiens
  chr5:1050925-1050956
  hypo
cgctctgggcagcagccgtcactctacagca

SEQ ID NO: 12553 - DNA, 61 bp, Homo sapiens
  chr5:1052176-1052237
  hypo
ggcttcttgtgacctgcgagaagatctggccacgtccaggtcactccggtagcagcgtctg

SEQ ID NO: 12554 - DNA, 41 bp, Homo sapiens
  chr5:1052412-1052453
  hypo
aggcccaggctgcccacgccgtcctccgtgcctgtcccaga

SEQ ID NO: 12555 - DNA, 31 bp, Homo sapiens
  chr5:1052712-1052743
  hypo
agagagaccccccaggcggggaggagcaggg

SEQ ID NO: 12556 - DNA, 61 bp, Homo sapiens
  chr5:1054676-1054737
  hypo
gacttgaaagtcggagcgggtctcaggccagctgcagccgtgcggtcgtgactgtggcccc

SEQ ID NO: 12557 - DNA, 31 bp, Homo sapiens
  chr5:1055003-1055034
  hypo
cttggaactttgaattcgacttctggataga

SEQ ID NO: 12558 - DNA, 31 bp, Homo sapiens
  chr5:1055878-1055909
  hypo
tcggctttaattaacacgctattctgaaggc

SEQ ID NO: 12559 - DNA, 163 bp, Homo sapiens
  chr5:1056092-1056255
  hypo
gaaaacatggcccaggcggttactggcgggggcaggcaggggacagagacggcatcgaggactcccagggagcaccctgggggtccgtccagggtacaccctcccacctgccccggagctcagacgcaggtagctcctgccgagggtccgaccacacagagaa

SEQ ID NO: 12560 - DNA, 31 bp, Homo sapiens
  chr5:1056257-1056288
  hypo
gatctgcacccctctccgcctggaggctgga

SEQ ID NO: 12561 - DNA, 31 bp, Homo sapiens
  chr5:1056306-1056337
  hypo
cattccaggtgggaacgcgactcagctagcg

SEQ ID NO: 12562 - DNA, 41 bp, Homo sapiens
  chr5:1056388-1056429
  hypo
cgcctcccctccactccggagcggctcggacacctcccagg

SEQ ID NO: 12563 - DNA, 46 bp, Homo sapiens
  chr5:1057063-1057109
  hypo
ggaattctgtgcccagcggcacaagcctcctcgcctccatggaaca

SEQ ID NO: 12564 - DNA, 31 bp, Homo sapiens
  chr5:1057143-1057174
  hypo
gtaaagcaggcctggccgcagggctgacttc

SEQ ID NO: 12565 - DNA, 57 bp, Homo sapiens
  chr5:1057248-1057305
  hypo
tacaaggacccctcagcgcttggcactagaaggacccctcagcgcttggcactagaa

SEQ ID NO: 12566 - DNA, 31 bp, Homo sapiens
  chr5:1057330-1057361
  hypo
gtcttacaaggactcccggccttggcactag

SEQ ID NO: 12567 - DNA, 133 bp, Homo sapiens
  chr5:1057676-1057809
  hypo
tctgcaccttgtctggcgtaggcggcgcttgggtcctggctgccgccgcggtgtgggacgcggtgttcctgtcgtggatcagctgggcctggcgggcccgggacttggtgagaccagccggtctcaaaactcc

SEQ ID NO: 12568 - DNA, 102 bp, Homo sapiens
  chr5:1057872-1057974
  hypo
ccctgtgtgcctgacccgggacccagcctggcgtcccacactggtcctgcgccgcccccgtgactgcctccctcctcccaggcttcccgaccaaacgctcac

SEQ ID NO: 12569 - DNA, 31 bp, Homo sapiens
  chr5:1058966-1058997
  hypo
gagggtgtccacccagcgtctgcacagcagc

SEQ ID NO: 12570 - DNA, 31 bp, Homo sapiens
  chr5:1059003-1059034
  hypo
aaacccttctgcagagcggtgacacctccaa

SEQ ID NO: 12571 - DNA, 65 bp, Homo sapiens
  chr5:1059646-1059711
  hypo
acagagctgagcatcccgctaccaggtgacccccgtgctgtcctccagtgcgaagtgaccacaaa

SEQ ID NO: 12572 - DNA, 75 bp, Homo sapiens
  chr5:1060519-1060594
  hypo
atcattagtgtcctctcgtaggtgaaagcagatatgtcgttttcaacctagaaagttcccaagcacgtagtaagc

SEQ ID NO: 12573 - DNA, 15 bp, Homo sapiens
  chr5:1060647-1060662
  hypo
cgagccgccctgagc

SEQ ID NO: 12574 - DNA, 41 bp, Homo sapiens
  chr5:1060848-1060889
  hypo
accaacctggcacacacggctcagggcgaggcactgcccca

SEQ ID NO: 12575 - DNA, 35 bp, Homo sapiens
  chr5:1060981-1061016
  hypo
cacagcacaacctcagcgcccgccatgcaggaccc

SEQ ID NO: 12576 - DNA, 190 bp, Homo sapiens
  chr5:1061023-1061213
  hypo
cacccattgcacccaccgtgcgggacccctgcgcctcacccggaacatccacagtgtgggactgctgcgtctcacccactgcacctgccgtgcaggatccctgagtctcacccgccgcacccgccgtgcgggatccctgagtctcacccgccgcacccgccgcacctgccgcatccgccatgcggaaccc

SEQ ID NO: 12577 - DNA, 154 bp, Homo sapiens; identical to SEQ ID NO: 2073
  chr5:1061581-1061735
  hypo

SEQ ID NO: 12578 - DNA, 26 bp, Homo sapiens
  chr5:1061775-1061801
  hypo
cacaccagatcaggtgcggtggctca

SEQ ID NO: 12579 - DNA, 31 bp, Homo sapiens
  chr5:1062886-1062917
  hypo
gcttcctgggggacagcgtgacagtctctat

SEQ ID NO: 12580 - DNA, 100 bp, Homo sapiens
  chr5:1062967-1063067
  hypo
gacctgcaaaaccatgcgctggggtcacgggagccggaagaaaccaggactttgcgggttctgacttcaagaccagtgttgtcggcgtgatccaagtggg

SEQ ID NO: 12581 - DNA, 90 bp, Homo sapiens
  chr5:1063070-1063160
  hypo
agaacccacaaagtcccgggaccgccagcaggaccggaggggaaggcacagccgtggatccgggtgggctggtagcgagcaggcatggtt

SEQ ID NO: 12582 - DNA, 100 bp, Homo sapiens
  chr5:1063202-1063302
  hypo
ctccatgcttgggggccgggggcaagcgctccaatgccaggcctccgcccatcaaccccgtcctctccaggcgtgaaggacgggacgagtctctgtccag

SEQ ID NO: 12583 - DNA, 31 bp, Homo sapiens
  chr5:1063304-1063335
  hypo
cctgcctatagctgaccgagggcctgtctgt

SEQ ID NO: 12584 - DNA, 31 bp, Homo sapiens
  chr5:1063374-1063405
  hypo
ccctctccccgggtcccgactgctgatgtgt

SEQ ID NO: 12585 - DNA, 31 bp, Homo sapiens
  chr5:1063437-1063468
  hypo
gggagagcacccaaaacgggaggtgctcaga

SEQ ID NO: 12586 - DNA, 31 bp, Homo sapiens
  chr5:1063496-1063527
  hypo
ggtgtgaggtcctggacggggtcccgggccg

SEQ ID NO: 12587 - DNA, 46 bp, Homo sapiens
  chr5:1063537-1063583
  hypo
gggaccatggaggacacggagatgctgatgccggctctagggcaac

SEQ ID NO: 12588 - DNA, 40 bp, Homo sapiens
  chr5:1063687-1063727
  hypo
aaggcctggcagcccccgccacaatcgccaccaccttctc

SEQ ID NO: 12589 - DNA, 37 bp, Homo sapiens; identical to SEQ ID NO: 2074
  chr5:1064051-1064088
  hypo

SEQ ID NO: 12590 - DNA, 143 bp, Homo sapiens; identical to SEQ ID NO: 2075
  chr5:1064116-1064259
  hypo

SEQ ID NO: 12591 - DNA, 220 bp, Homo sapiens; identical to SEQ ID NO: 2076
  chr5:1064261-1064481
  hypo

SEQ ID NO: 12592 - DNA, 31 bp, Homo sapiens; identical to SEQ ID NO: 2077
  chr5:1064568-1064599
  hypo

SEQ ID NO: 12593 - DNA, 270 bp, Homo sapiens; identical to SEQ ID NO: 2078
  chr5:1064616-1064886
  hypo

SEQ ID NO: 12594 - DNA, 97 bp, Homo sapiens; identical to SEQ ID NO: 2079
  chr5:1065012-1065109
  hypo

SEQ ID NO: 12595 - DNA, 50 bp, Homo sapiens
  chr5:1065119-1065169
  hypo
ggagactgaggggacacgggacagtgaggggacagcgaggggaggcagag

SEQ ID NO: 12596 - DNA, 34 bp, Homo sapiens
  chr5:1065213-1065247
  hypo
ggggacagtgaggggacggcgaggggatgcagag

SEQ ID NO: 12597 - DNA, 56 bp, Homo sapiens
  chr5:1065255-1065311
  hypo
aaggggacagtggggacgaaaaggggacagtgagaggacagcgaggggacactgag

SEQ ID NO: 12598 - DNA, 83 bp, Homo sapiens
  chr5:1065313-1065396
  hypo
gacacacaggggacagcgaggggacactgagaggacacagaggggacggtgaggggatgccgaagggccgccagccatgccta

SEQ ID NO: 12599 - DNA, 63 bp, Homo sapiens
  chr5:1066028-1066091
  hypo
cagcaacggcggggggcgggggtgggggactgccgtgtggtctcctcccggggttggaggggg

SEQ ID NO: 12600 - DNA, 108 bp, Homo sapiens
  chr5:1066125-1066233
  hypo
tgatgaggctgcaccacggaacggcttgactccatggggtttgcacgtgcgtggccgaggacctgccacgcactaaagccatgcatgtgtggacgcaggcctcccacc

SEQ ID NO: 12601 - DNA, 59 bp, Homo sapiens
  chr5:1066840-1066899
  hypo
tgggaggaagagactgcgtggaggcacaggcgcccagggtcgcccgggggcccaggagc

SEQ ID NO: 12602 - DNA, 31 bp, Homo sapiens
  chr5:1067373-1067404
  hypo
ggcaccagccagcaagcggaggcaggggccc

SEQ ID NO: 12603 - DNA, 31 bp, Homo sapiens
  chr5:1068168-1068199
  hypo
aacagagcacaagggcgcgcatgagcctccc

SEQ ID NO: 12604 - DNA, 68 bp, Homo sapiens
  chr5:1068742-1068810
  hypo
ggctcgctgagagcagcgggggcagggtgcgctcgtcctcccgtccgcaagagcgggctcctgtctga

SEQ ID NO: 12605 - DNA, 146 bp, Homo sapiens
  chr5:1068815-1068961
  hypo
ccccagaccccccagccgaagggctgtcggacggagaggatctgcctgtgagctccgttaacgtgagagtataagtgagcgcagctcttcccatggccgtgaagactgtggcagagcgtggcagggggtcccgtcatcccccagtc

SEQ ID NO: 12606 - DNA, 44 bp, Homo sapiens
  chr5:1068968-1069012
  hypo
tccctgccctgtccctcgtgcgcacagacgcgccctcacacacc

SEQ ID NO: 12607 - DNA, 31 bp, Homo sapiens
  chr5:1069442-1069473
  hypo
ccacccctaggctgaccggcccagacctgga

SEQ ID NO: 12608 - DNA, 46 bp, Homo sapiens
  chr5:1074938-1074984
  hypo
tgccctgaagggagcccgtcctaggagccaccgggtcagagggtgc

SEQ ID NO: 12609 - DNA, 51 bp, Homo sapiens
  chr5:1074985-1075036
  hypo
gtggctgtggagggaacgaggtctacgtccagcatgcgtgaggtgccttcc

SEQ ID NO: 12610 - DNA, 44 bp, Homo sapiens
  chr5:1076149-1076193
  hypo
cctgtggggctcctgacgcctgtgctgagcggcctcaccagtgg

SEQ ID NO: 12611 - DNA, 35 bp, Homo sapiens
  chr5:1076214-1076249
  hypo
cctgtggggctcctcacgcccgtgctgagtggcct

SEQ ID NO: 12612 - DNA, 52 bp, Homo sapiens
  chr5:1076254-1076306
  hypo
gtggtagaacttgaagcgtggacgccagttgggggtacgtagcagggtctgc

SEQ ID NO: 12613 - DNA, 47 bp, Homo sapiens
  chr5:1076344-1076391
  hypo
gaagaacctgcagggacggccggccactgatacgggcccactgggcc

SEQ ID NO: 12614 - DNA, 60 bp, Homo sapiens
  chr5:1076436-1076496
  hypo
ctgtccctcccacctgcgccttgtctccccatgtctgtctctgcacgtgagctgactcag

SEQ ID NO: 12615 - DNA, 123 bp, Homo sapiens
  chr5:1077829-1077952
  hypo
ccatggggtccaagccgcgggcatgcgtcccacacacggcactgtgaggatcccgcaggggaggagagcccccgaccctgaccttccagggtccccccgacgagggtgcgggactcacctgca

SEQ ID NO: 12616 - DNA, 91 bp, Homo sapiens
  chr5:1077978-1078069
  hypo
atggcctgcagtaggcgcggtgcccccgtgaggctctgcaggccggcaccgcaggtggagaagaaggagccgatgacgatgacccaggggg

SEQ ID NO: 12617 - DNA, 93 bp, Homo sapiens
  chr5:1078071-1078164
  hypo
ggccaggccagcatgccgatgaccaggttcccctgcagggcctccccgaacctgcaggcaggcgggcaggcgggcgggcggctttcagaagtg

SEQ ID NO: 12618 - DNA, 91 bp, Homo sapiens
  chr5:1078185-1078276
  hypo
cttctcccacccagagcgaggggcccagtgcagtgggggcgactccttggaaagctgaggcccggcctccagtccccgttggctgaaacct

SEQ ID NO: 12619 - DNA, 31 bp, Homo sapiens
  chr5:1078338-1078369
  hypo
ctgctcacctcagggtcgctcttgggagcag

SEQ ID NO: 12620 - DNA, 31 bp, Homo sapiens
  chr5:1078425-1078456
  hypo
ttggggctgccagacacgcacaccccatgag

SEQ ID NO: 12621 - DNA, 31 bp, Homo sapiens
  chr5:1078529-1078560
  hypo
agggccaagcctcacccgtccacacccctgt

SEQ ID NO: 12622 - DNA, 31 bp, Homo sapiens
  chr5:1078565-1078596
  hypo
ccccaggaagggcctgcgcccccagccgcat

SEQ ID NO: 12623 - DNA, 73 bp, Homo sapiens
  chr5:1078867-1078940
  hypo
agagatccacagccctcgtcaaggaaaggcaggtccgtgggtgcagggtcctcaggtacggggggtggggtgg

SEQ ID NO: 12624 - DNA, 146 bp, Homo sapiens
  chr5:1078960-1079106
  hypo
gagatgcactggccagcgggccgcaggatccaggtgggcggggaccgttctgcatcccatcccatcccgggcacgtcctgtcccccgtgtcctcagcgcaccctcctggggctctgtccagcgccacagaacggggccctggggtg

SEQ ID NO: 12625 - DNA, 31 bp, Homo sapiens
  chr5:1079119-1079150
  hypo
tggcctggtgcttgaccgccagggattggca

SEQ ID NO: 12626 - DNA, 50 bp, Homo sapiens
  chr5:1079345-1079395
  hypo
acagcagcccttgccccgtctcccagggaggatgacgtggtgagagcaca

SEQ ID NO: 12627 - DNA, 78 bp, Homo sapiens
  chr5:1080130-1080208
  hypo
ggtgggggccacttcacgcctggctcggtcccatccaaggcgcagcctgaagcacccattgctcggggtggcctggga

SEQ ID NO: 12628 - DNA, 39 bp, Homo sapiens
  chr5:1080284-1080323
  hypo
gcggctcagagacacccggagccacgcagaggctctacc

SEQ ID NO: 12629 - DNA, 55 bp, Homo sapiens
  chr5:1080434-1080489
  hypo
ccacgccctccacccacggcgcggagcgcactcagacggacgggggaggctggag

SEQ ID NO: 12630 - DNA, 59 bp, Homo sapiens
  chr5:1081413-1081472
  hypo
aaatacagacattaaccgggcgtggtaccgtgtgcctggggtcccggctgcccccctct

SEQ ID NO: 12631 - DNA, 30 bp, Homo sapiens
  chr5:1081477-1081507
  hypo
aaatacagatattagccgggcgtggtactg

SEQ ID NO: 12632 - DNA, 54 bp, Homo sapiens
  chr5:1083625-1083679
  hypo
agcttgctgaccatgacggaggctgtctccctgccacaccgtgtttggcttcta

SEQ ID NO: 12633 - DNA, 31 bp, Homo sapiens
  chr5:1083725-1083756
  hypo
cagctgggaaggggctcggccaggcaggagg

SEQ ID NO: 12634 - DNA, 66 bp, Homo sapiens
  chr5:1083768-1083834
  hypo
gagagtgactctaaggcgagagcagccaccagggccagcgcctgctgcccccgccaccccccagct

SEQ ID NO: 12635 - DNA, 36 bp, Homo sapiens
  chr5:1083863-1083899
  hypo
gaagacaccactggccgcgcccgggatgccctggat

SEQ ID NO: 12636 - DNA, 58 bp, Homo sapiens
  chr5:1083912-1083970
  hypo
ttctggatgaagtactcgtcacaggcggcgctgggctgggagccgttgcagaagaggc

SEQ ID NO: 12637 - DNA, 89 bp, Homo sapiens
  chr5:1084002-1084091
  hypo
atgccgtaggccttgacgcaggcatcgaagctgcgccgtgacagcgtgcggttccccaggaggcagaccctgggcgggacagggaggca

SEQ ID NO: 12638 - DNA, 36 bp, Homo sapiens
  chr5:1084145-1084181
  hypo
cgggcacccatggtgtcgcccgcgagtggctcctgg

SEQ ID NO: 12639 - DNA, 52 bp, Homo sapiens
  chr5:1084267-1084319
  hypo
ggatcacactggggaccggggactggggaccagggaccggggaccaggccag

SEQ ID NO: 12640 - DNA, 31 bp, Homo sapiens
  chr5:1084668-1084699
  hypo
ccgtagcgtcaagcatcggcagggggtctca

SEQ ID NO: 12641 - DNA, 603 bp, Homo sapiens
  chr5:1085306-1085909
  hypo
gccccacacccacccacggctcagaggccccgagactcacgggatgtccggggggtcgaaggcagacttgatgacgccggcatagatggccaggatggacagcacgacgcaggccaggaagaccagcgccagcttgttgacatacttgacgcccacgaagaccaccagggccatgagcacgagcgtgcacgtgccgtacacacgcatgttgtgcagcatggcggccgcctcgccacctgcagcctccgcctggaagatggccgcacccggggagatgtacgtctgtgggaacaaggccggtcgggaggccgtccccggacacaactccccagtgcccgtccctcccgcaagcccccagcgccacacaggggcctcctcccaacaggtgccggggccatcgggacgcatccgtgctggacggagcccgcgggggtcagcgcacaggcaagggacggagcccgcgggggtcagcgcacaggcgagggacggagcccgcgggggtcagcgcacaggcgagggacggagcccgcgggggtcagcgcacaggccatggacagccaggggcctgaacgtttcccaggaaccacccgggagccttagagt

SEQ ID NO: 12642 - DNA, 48 bp, Homo sapiens
  chr5:1085910-1085958
  hypo
aagcaacttcaggacccggggcatccgcatgtccgcactcaaaagaaa

SEQ ID NO: 12643 - DNA, 83 bp, Homo sapiens
  chr5:1085983-1086066
  hypo
tgctgcccagagagctcggcccaccccggctggacgtcctggacacacacagggtctgaccacgccggcggggggcaacctct

SEQ ID NO: 12644 - DNA, 37 bp, Homo sapiens
  chr5:1086076-1086113
  hypo
gattcaagggaagggacggagacgtgagacagtgctg

SEQ ID NO: 12645 - DNA, 31 bp, Homo sapiens
  chr5:1086242-1086273
  hypo
acatggccaggggactcgggttgggacgggt

SEQ ID NO: 12646 - DNA, 31 bp, Homo sapiens
  chr5:1086827-1086858
  hypo
gtcgctgctgagtggacgctgcccagtggct

SEQ ID NO: 12647 - DNA, 248 bp, Homo sapiens
  chr5:1087126-1087374
  hypo
atcatgtagtaggacccgccagctgcggagacaaaggcggcagccgcgggtcaggggcgcacttggactcggacccgaggtgcggtctgcgctgccattcacgggcaaaggagggcctgtctctgcgaaggcagcgtgtagaccctcgtccacccgcaaagcagcacatggagacgcttccacggtgaactctcccctcccgaggctcggcacacgttccacaccaagagcacgcgctctcatggaca

SEQ ID NO: 12648 - DNA, 73 bp, Homo sapiens
  chr5:1087849-1087922
  hypo
tgcactcagaagcagacgtggcagcgtctccgttcactagttatttcgtatcgtaattcgtttattactaatt

SEQ ID NO: 12649 - DNA, 31 bp, Homo sapiens
  chr5:1087936-1087967
  hypo
agtttactagttattacgtattgtaattaac

SEQ ID NO: 12650 - DNA, 31 bp, Homo sapiens
  chr5:1087973-1088004
  hypo
ctaattaatatcatctcggttcactagttat

SEQ ID NO: 12651 - DNA, 31 bp, Homo sapiens
  chr5:1088062-1088093
  hypo
tgtcttcaccttccctcgtgagatacaggtt

SEQ ID NO: 12652 - DNA, 82 bp, Homo sapiens
  chr5:1088100-1088182
  hypo
ctcagcctatggcacacgctgggctacaggagccactggaatcgcccgtgcctccccctccccagcccgctgcctggtgggc

SEQ ID NO: 12653 - DNA, 189 bp, Homo sapiens
  chr5:1088187-1088376
  hypo
ctaccctggcaagagacggtcaccacgcagcaaaatggggaagaaaaccaaacagccgtgacctcacggctcaaacgccagaggagccagtggagaacacgcagaaggcccggctgagacccccaggcagcccccggcccggcctcgccaagcggcctcctcgcggttgccgtgcggcaaaacacagac

SEQ ID NO: 12654 - DNA, 95 bp, Homo sapiens
  chr5:1088382-1088477
  hypo
aacaggactcagggccgcggctggcgggcaccccttacctgggaccacaccgttggtagcgatcgcactcatggaaatggcggtcagcattgtct

SEQ ID NO: 12655 - DNA, 46 bp, Homo sapiens
  chr5:1088624-1088670
  hypo
aggacctggaggctcccgggcaccaggcatgcgtgtcctggttccc

SEQ ID NO: 12656 - DNA, 31 bp, Homo sapiens
  chr5:1088673-1088704
  hypo
ccttcccctatgacagcgacccctgaaagtg

SEQ ID NO: 12657 - DNA, 38 bp, Homo sapiens
  chr5:1088761-1088799
  hypo
tggaagcctcagcccccgggtgccgccccatgacaccc

SEQ ID NO: 12658 - DNA, 230 bp, Homo sapiens
  chr5:1088805-1089035
  hypo
ggctgagatgcctgtccgcagacacgggtaaatgaggtgccagcacgccagtcaacacgccagcactaaccccggacagtgtggcatctcatccccgcagctgcccggctctcgtggaggagacggcgctgaacgacgtctacacgggcgtctggggagggccctactgtccggctgccaccgcccgaaggcacaaccacagcggccaggggagacggcatctggggaga

SEQ ID NO: 12659 - DNA, 57 bp, Homo sapiens
  chr5:1089040-1089097
  hypo
actgtccagctgccaccgcccgaaggcacagccacacctggccgggggagactcaca

SEQ ID NO: 12660 - DNA, 101 bp, Homo sapiens
  chr5:1089188-1089289
  hypo
ggatgttctgcaggcacggcaggtagacgccgatgaaggtgcccatgcgcggagcctgcgacagagcatagcgtgtcccaggggctcgtaccccacaccca

SEQ ID NO: 12661 - DNA, 36 bp, Homo sapiens
  chr5:1090421-1090457
  hypo
taatgtaagagcagctcggagcgtgggaagccctgg

SEQ ID NO: 12662 - DNA, 71 bp, Homo sapiens
  chr5:1090502-1090573
  hypo
ggaagcaacaggggagcgacttgcttctgacgggggccctggagaggagagggtgacggggctgggggccg

SEQ ID NO: 12663 - DNA, 31 bp, Homo sapiens
  chr5:1090632-1090663
  hypo
gcggatggtggagaaccggctttgggacatt

SEQ ID NO: 12664 - DNA, 58 bp, Homo sapiens
  chr5:1091173-1091231
  hypo
aggcctgctggggtcacgggccctggtccctccacgactgaaacgcaggcagcatcag

SEQ ID NO: 12665 - DNA, 38 bp, Homo sapiens
  chr5:1092773-1092811
  hypo
caagactgggggaggccgtcgcccggcttcagagcagg

SEQ ID NO: 12666 - DNA, 31 bp, Homo sapiens
  chr5:1094018-1094049
  hypo
ggggttcccgtggggccggagcaccctagat

SEQ ID NO: 12667 - DNA, 31 bp, Homo sapiens
  chr5:1094547-1094578
  hypo
catttcccagggtgcacgctagtcccaggac

SEQ ID NO: 12668 - DNA, 31 bp, Homo sapiens
  chr5:1094655-1094686
  hypo
ctagctccagggcatacgctatcccccacac

SEQ ID NO: 12669 - DNA, 53 bp, Homo sapiens
  chr5:1095612-1095665
  hypo
ctgggaacgaccaagccgggacccttcctaggggtgctcggcccatccttgcc

SEQ ID NO: 12670 - DNA, 56 bp, Homo sapiens
  chr5:1095704-1095760
  hypo
gagggtgcagaagaaacggtcaaggcaggatgcgaggtggccggaggagggcaggc

SEQ ID NO: 12671 - DNA, 107 bp, Homo sapiens
  chr5:1095830-1095937
  hypo
tgccagagcccactggcggccaccctggctggctgacaggcaccagccgcaggagtggtgggttccagccgtgccagcaaagagggcatcgccgtctgggggcaggc

SEQ ID NO: 12672 - DNA, 138 bp, Homo sapiens; identical to SEQ ID NO: 2080
  chr5:1111380-1111518
  hypo

SEQ ID NO: 12673 - DNA, 132 bp, Homo sapiens; identical to SEQ ID NO: 2081
  chr5:1111655-1111787
  hypo

SEQ ID NO: 12674 - DNA, 31 bp, Homo sapiens; identical to SEQ ID NO: 2082
  chr5:1111873-1111904
  hypo

SEQ ID NO: 12675 - DNA, 31 bp, Homo sapiens; identical to SEQ ID NO: 2083
  chr5:1111996-1112027
  hypo

SEQ ID NO: 12676 - DNA, 68 bp, Homo sapiens; identical to SEQ ID NO: 2084
  chr5:1112174-1112242
  hypo

SEQ ID NO: 12677 - DNA, 35 bp, Homo sapiens; identical to SEQ ID NO: 2085
  chr5:1112256-1112291
  hypo

SEQ ID NO: 12678 - DNA, 98 bp, Homo sapiens; identical to SEQ ID NO: 2086
  chr5:1112303-1112401
  hypo

SEQ ID NO: 12679 - DNA, 90 bp, Homo sapiens
  chr5:1115141-1115231
  hypo
aagtatatttgtacatcgctgatgaaacacattggtgggtctcagtcgatcaccattagtgccctttccaagcatcggtgtccagctttg

SEQ ID NO: 12680 - DNA, 31 bp, Homo sapiens
  chr5:1115242-1115273
  hypo
tcttcaaatgcaatctcgcatccttatgatg

SEQ ID NO: 12681 - DNA, 31 bp, Homo sapiens
  chr5:1115288-1115319
  hypo
gcgatggcctcttggccgtgtgcagggcaca

SEQ ID NO: 12682 - DNA, 43 bp, Homo sapiens
  chr5:1115328-1115371
  hypo
accctgggatttagtgcgaaagtgtagccgatggtggttacat

SEQ ID NO: 12683 - DNA, 83 bp, Homo sapiens
  chr5:1116659-1116742
  hypo
tcagtcctgtaattcacggacactgagtcttcgctcaagttccctctggaagattccgtggatgagtccgacacactcttccc

SEQ ID NO: 12684 - DNA, 31 bp, Homo sapiens
  chr5:1116758-1116789
  hypo
caggatttttagaccacgtgtgtggctttcc

SEQ ID NO: 12685 - DNA, 31 bp, Homo sapiens
  chr5:1120598-1120629
  hypo
gccagatgctcacagccgctgtacctcccca

SEQ ID NO: 12686 - DNA, 31 bp, Homo sapiens
  chr5:1120638-1120669
  hypo
aggtccgtggaatgcacggccactgtggaaa

SEQ ID NO: 12687 - DNA, 31 bp, Homo sapiens
  chr5:1121381-1121412
  hypo
aggcctggactttacacgtggagttccctgt

SEQ ID NO: 12688 - DNA, 49 bp, Homo sapiens
  chr5:1122643-1122692
  hypo
tgtccgacggacgaaccgcattcccacagctgtgcgtccaccttcacca

SEQ ID NO: 12689 - DNA, 31 bp, Homo sapiens
  chr5:1129214-1129245
  hypo
ccctctcctcaaacctcggtcacagctgctg

SEQ ID NO: 12690 - DNA, 31 bp, Homo sapiens
  chr5:1129555-1129586
  hypo
tccgggcttcccctagcgtaagggacagaac

SEQ ID NO: 12691 - DNA, 31 bp, Homo sapiens
  chr5:1149269-1149300
  hypo
gatcctatgatgctaccgtgtgagcttctga

SEQ ID NO: 12692 - DNA, 38 bp, Homo sapiens
  chr5:1213549-1213587
  hypo
cccatcccacatgtcccgccctccgcaggccgtgtaca

SEQ ID NO: 12693 - DNA, 55 bp, Homo sapiens
  chr5:1266472-1266527
  hypo
gacttggcagagacaacgctgcggtgccaggggcaggacacggggggctcaactg

SEQ ID NO: 12694 - DNA, 31 bp, Homo sapiens
  chr5:1272203-1272234
  hypo
gggccaacagtctgtccggtcatgagcccag

SEQ ID NO: 12695 - DNA, 31 bp, Homo sapiens
  chr5:1272252-1272283
  hypo
cccactgctgggagtccgtgcccaaccctgc

SEQ ID NO: 12696 - DNA, 135 bp, Homo sapiens
  chr5:1294181-1294316
  hypo
caccacacagaaaccacggtcactcggtccacgcgtcctgcccgggtgggcccaggacccctgcccaacgggcgtccgctccggctcaggggcagcgccacgcctgggcctcttgggcaacggcagacttcggct

SEQ ID NO: 12697 - DNA, 31 bp, Homo sapiens; identical to SEQ ID NO: 2087
  chr5:1295157-1295188
  hypo

SEQ ID NO: 12698 - DNA, 31 bp, Homo sapiens
  chr5:1341689-1341720
  hypo
ctggagccctagacatcgcccacctgtgtgg

SEQ ID NO: 12699 - DNA, 31 bp, Homo sapiens
  chr5:1342378-1342409
  hypo
ggaagggcagcagccacgagggctccaggtg

SEQ ID NO: 12700 - DNA, 40 bp, Homo sapiens
  chr5:1381048-1381088
  hypo
gggctgcctcatgggacgccacatccgccagcaccctggt

SEQ ID NO: 12701 - DNA, 42 bp, Homo sapiens
  chr5:1381147-1381189
  hypo
aggcttaggcgtgttgtcacagcagcccgaatggactccagc

SEQ ID NO: 12702 - DNA, 53 bp, Homo sapiens
  chr5:1381194-1381247
  hypo
agcagccagggctgcacgtggtgcgtgaacacacccgccgccctcctcctcct

SEQ ID NO: 12703 - DNA, 31 bp, Homo sapiens
  chr5:1490330-1490361
  hypo
tccctagattggaccccgccttccccctgtg

SEQ ID NO: 12704 - DNA, 31 bp, Homo sapiens
  chr5:1490395-1490426
  hypo
tcctcactcctggtaccgggaatgggacctc

SEQ ID NO: 12705 - DNA, 31 bp, Homo sapiens
  chr5:1511331-1511362
  hypo
cttgcacctgggctcacggttggctctgcgg

SEQ ID NO: 12706 - DNA, 31 bp, Homo sapiens
  chr5:1588247-1588278
  hypo
tatatcaggttctccacggccccatggctaa

SEQ ID NO: 12707 - DNA, 31 bp, Homo sapiens
  chr5:1747146-1747177
  hypo
gggcgaggtgtccttccgggggccctgaggg

SEQ ID NO: 12708 - DNA, 31 bp, Homo sapiens
  chr5:1786713-1786744
  hypo
cctaaatgcgtcctgacggggccgagggaag

SEQ ID NO: 12709 - DNA, 44 bp, Homo sapiens
  chr5:1815266-1815310
  hypo
aaaaagaacacaggaccggagaaagagaccgtgggctgaagctg

SEQ ID NO: 12710 - DNA, 35 bp, Homo sapiens
  chr5:1815351-1815386
  hypo
agatcactcagggactcgggcggctgctgacctgg

SEQ ID NO: 12711 - DNA, 58 bp, Homo sapiens
  chr5:1815394-1815452
  hypo
gagagggggaggccaccgacagtggagcactcagggactcaggcggctgctgggcttg

SEQ ID NO: 12712 - DNA, 31 bp, Homo sapiens
  chr5:1840310-1840341
  hypo
tgagcccttccccctgcggtgtcccacgtga

SEQ ID NO: 12713 - DNA, 31 bp, Homo sapiens
  chr5:2007815-2007846
  hypo
tgacagctgatgtgtcgcggcctgagcctcc

SEQ ID NO: 12714 - DNA, 31 bp, Homo sapiens
  chr5:2181885-2181916
  hypo
ccccagggcctggcaccgcagggggtattgc

SEQ ID NO: 12715 - DNA, 31 bp, Homo sapiens
  chr5:3324843-3324874
  hypo
gcaagagcaaagccaccgctccacgcctgcc

SEQ ID NO: 12716 - DNA, 45 bp, Homo sapiens
  chr5:3324900-3324945
  hypo
gggaccactggtccacgcgatgccccgtgacgggccaggaagggt

SEQ ID NO: 12717 - DNA, 78 bp, Homo sapiens
  chr5:3325041-3325119
  hypo
ctcaaggggagagggccgcatccctgttccccgccttcctcgccatgactggacgcagcggggcgccctgtccctgcc

SEQ ID NO: 12718 - DNA, 34 bp, Homo sapiens
  chr5:3325329-3325363
  hypo
caaagccctagctgttcggcgtgtgtgtgtgtgt

SEQ ID NO: 12719 - DNA, 31 bp, Homo sapiens; identical to SEQ ID NO: 2091
  chr5:5140314-5140345
  hypo

SEQ ID NO: 12720 - DNA, 31 bp, Homo sapiens
  chr5:5886658-5886689
  hypo
cgtgaactgggccaggcggccacgaggccga

SEQ ID NO: 12721 - DNA, 31 bp, Homo sapiens
  chr5:6546412-6546443
  hypo
aggccccgcctcggtccggagaatcagaact

SEQ ID NO: 12722 - DNA, 26 bp, Homo sapiens
  chr5:10252571-10252597
  hypo
caggcattgactgggcgcggtggctc

SEQ ID NO: 12723 - DNA, 77 bp, Homo sapiens
  chr5:10278514-10278591
  hypo
cccacatggaccatgccgatatcctacccacaccgacccctctcagtcacagcgtgagtccccggggctcatgcctg

SEQ ID NO: 12724 - DNA, 31 bp, Homo sapiens
  chr5:10278674-10278705
  hypo
agctccctctctctctcgttctccaccttct

SEQ ID NO: 12725 - DNA, 31 bp, Homo sapiens
  chr5:10296893-10296924
  hypo
gctgagtgttgccctccgcgtttggcaaagt

SEQ ID NO: 12726 - DNA, 57 bp, Homo sapiens
  chr5:10322103-10322160
  hypo
agtgggaagagtcattcgagatccctgcagcattgggactcccgtttgcctacagtc

SEQ ID NO: 12727 - DNA, 24 bp, Homo sapiens
  chr5:10325892-10325916
  hypo
ttttttttttttgagacggagtct

SEQ ID NO: 12728 - DNA, 31 bp, Homo sapiens
  chr5:10352315-10352346
  hypo
tatcagcaggccaatacgtgctctgctacag

SEQ ID NO: 12729 - DNA, 31 bp, Homo sapiens
  chr5:10477381-10477412
  hypo
gttaacccacatttaccgagggccactgacc

SEQ ID NO: 12730 - DNA, 31 bp, Homo sapiens
  chr5:10483795-10483826
  hypo
ctgtcctgaatgtttcgcgggcactgagtcc

SEQ ID NO: 12731 - DNA, 31 bp, Homo sapiens
  chr5:10486100-10486131
  hypo
ccacccaggtggccagcgctggtggttccat

SEQ ID NO: 12732 - DNA, 31 bp, Homo sapiens
  chr5:10486176-10486207
  hypo
ttggccaagcctgggccggcccctgctctgg

SEQ ID NO: 12733 - DNA, 47 bp, Homo sapiens; identical to SEQ ID NO: 2096
  chr5:10564408-10564455
  hypo

SEQ ID NO: 12734 - DNA, 188 bp, Homo sapiens; identical to SEQ ID NO: 2097
  chr5:10564470-10564658
  hypo

SEQ ID NO: 12735 - DNA, 175 bp, Homo sapiens; identical to SEQ ID NO: 2098
  chr5:10564800-10564975
  hypo

SEQ ID NO: 12736 - DNA, 228 bp, Homo sapiens; identical to SEQ ID NO: 2099
  chr5:10564999-10565227
  hypo

SEQ ID NO: 12737 - DNA, 48 bp, Homo sapiens; identical to SEQ ID NO: 2100
  chr5:10565262-10565310
  hypo

SEQ ID NO: 12738 - DNA, 37 bp, Homo sapiens
  chr5:10618605-10618642
  hypo
gccgtggccagagcaccgccgccgggcagcccgggct

SEQ ID NO: 12739 - DNA, 31 bp, Homo sapiens
  chr5:14046165-14046196
  hypo
catgagccactgcgcccggccccacattttt

SEQ ID NO: 12740 - DNA, 31 bp, Homo sapiens
  chr5:14122605-14122636
  hypo
aaagtctcctgtaactcggttgtgaagggca

SEQ ID NO: 12741 - DNA, 19 bp, Homo sapiens
  chr5:14122686-14122705
  hypo
ttggtgtgatggaaagcgt

SEQ ID NO: 12742 - DNA, 132 bp, Homo sapiens; identical to SEQ ID NO: 2104
  chr5:14143001-14143133
  hypo

SEQ ID NO: 12743 - DNA, 45 bp, Homo sapiens; identical to SEQ ID NO: 2105
  chr5:14143190-14143235
  hypo

SEQ ID NO: 12744 - DNA, 166 bp, Homo sapiens; identical to SEQ ID NO: 2106
  chr5:14143456-14143622
  hypo

SEQ ID NO: 12745 - DNA, 49 bp, Homo sapiens; identical to SEQ ID NO: 2107
  chr5:14143766-14143815
  hypo

SEQ ID NO: 12746 - DNA, 166 bp, Homo sapiens; identical to SEQ ID NO: 2108
  chr5:14143872-14144038
  hypo

SEQ ID NO: 12747 - DNA, 113 bp, Homo sapiens; identical to SEQ ID NO: 2109
  chr5:14144296-14144409
  hypo

SEQ ID NO: 12748 - DNA, 17 bp, Homo sapiens
  chr5:14152780-14152797
  hypo
cacgctttttaagagtc

SEQ ID NO: 12749 - DNA, 35 bp, Homo sapiens
  chr5:14253720-14253755
  hypo
tgattacgggcatgaactcccgcacctggccagtg

SEQ ID NO: 12750 - DNA, 31 bp, Homo sapiens
  chr5:14253783-14253814
  hypo
gactatgcccttaaagcggcaattctcaaag

SEQ ID NO: 12751 - DNA, 53 bp, Homo sapiens
  chr5:14273914-14273967
  hypo
cttagaaaatctcacacgacaaccaccagaattaagaacgcattcttttttaa

SEQ ID NO: 12752 - DNA, 37 bp, Homo sapiens
  chr5:14274010-14274047
  hypo
gtatagtgaatttgtacgaattcgttgcccacttcag

SEQ ID NO: 12753 - DNA, 31 bp, Homo sapiens
  chr5:14274065-14274096
  hypo
tttccacttagtcttccgttcactctggata

SEQ ID NO: 12754 - DNA, 31 bp, Homo sapiens
  chr5:14289049-14289080
  hypo
ggttaagatttcttgccgaggccaggcacag

SEQ ID NO: 12755 - DNA, 57 bp, Homo sapiens
  chr5:14303325-14303382
  hypo
gtggaggagattgagccgggattgggatggctgccgcaggaccgttgatgatcctgg

SEQ ID NO: 12756 - DNA, 31 bp, Homo sapiens
  chr5:14303397-14303428
  hypo
gtggaggagattgagccgggattgggatggc

SEQ ID NO: 12757 - DNA, 49 bp, Homo sapiens
  chr5:14303467-14303516
  hypo
gtggaggagattgagccgggattgggatggctgccgcaggaattgatga

SEQ ID NO: 12758 - DNA, 42 bp, Homo sapiens
  chr5:14315627-14315669
  hypo
gggattacaggcgagagacaccacacccggcctgcttactag

SEQ ID NO: 12759 - DNA, 20 bp, Homo sapiens
  chr5:14317793-14317813
  hypo
tggtaaattcaaaagacgtt

SEQ ID NO: 12760 - DNA, 57 bp, Homo sapiens
  chr5:14325500-14325557
  hypo
gaaggcaaaggggagccggagctgcgtgtacagaacacacggcgagagagaagcaag

SEQ ID NO: 12761 - DNA, 22 bp, Homo sapiens
  chr5:14327555-14327577
  hypo
agccaccgcgcctggccagaaa

SEQ ID NO: 12762 - DNA, 31 bp, Homo sapiens
  chr5:14338463-14338494
  hypo
cttccaggacccctcccgctcaacacagtat

SEQ ID NO: 12763 - DNA, 41 bp, Homo sapiens
  chr5:14338521-14338562
  hypo
ttgagacaaggatgggcgtggttagccgctctcccttgcac

SEQ ID NO: 12764 - DNA, 45 bp, Homo sapiens
  chr5:14338578-14338623
  hypo
tacatgcacctgttaacggcagttgtcatgcgtgtgattgtgtgt

SEQ ID NO: 12765 - DNA, 35 bp, Homo sapiens
  chr5:14349006-14349041
  hypo
catgtttgtgtgtgtacgcacgtgagcatgtgttt

SEQ ID NO: 12766 - DNA, 31 bp, Homo sapiens
  chr5:14349045-14349076
  hypo
tgtatgtgtgtacacacgtgagcatgtgtgt

SEQ ID NO: 12767 - DNA, 35 bp, Homo sapiens
  chr5:14349082-14349117
  hypo
tgtgtgtatatgtgtgcgcacgcacatgagcatgt

SEQ ID NO: 12768 - DNA, 35 bp, Homo sapiens
  chr5:14349127-14349162
  hypo
tgtttatttatgtgtacgcacgtgagcatgtgttt

SEQ ID NO: 12769 - DNA, 31 bp, Homo sapiens
  chr5:14368814-14368845
  hypo
agaaaacacatcagagcgcgctgcaggtgca

SEQ ID NO: 12770 - DNA, 36 bp, Homo sapiens
  chr5:14369626-14369662
  hypo
ctgaaggtaggggcagcgctgcgggacagtgcaccc

SEQ ID NO: 12771 - DNA, 46 bp, Homo sapiens
  chr5:14369673-14369719
  hypo
cctgcctgccaggtgcgcgtggcacagtcatcgcttcccaagggag

SEQ ID NO: 12772 - DNA, 31 bp, Homo sapiens
  chr5:14369738-14369769
  hypo
ctgctgtggaatgtaacggggcagtgtcgca

SEQ ID NO: 12773 - DNA, 31 bp, Homo sapiens
  chr5:14378047-14378078
  hypo
aaatgaatggaatttcgcggttgttttaatt

SEQ ID NO: 12774 - DNA, 31 bp, Homo sapiens
  chr5:14378127-14378158
  hypo
gaatgaactcttccaacgggagaacagggta

SEQ ID NO: 12775 - DNA, 54 bp, Homo sapiens
  chr5:14378169-14378223
  hypo
gaccatgaggaagagacggctggaccagtgtcagcagtacgtggtctttgagag

SEQ ID NO: 12776 - DNA, 60 bp, Homo sapiens
  chr5:14381248-14381308
  hypo
ggatccatgacaatggcgagttctacctttccacacacacctccacgggctccagtatac

SEQ ID NO: 12777 - DNA, 31 bp, Homo sapiens
  chr5:14381320-14381351
  hypo
agctcctgaaagagcacgaggagttccagat

SEQ ID NO: 12778 - DNA, 35 bp, Homo sapiens
  chr5:14390711-14390746
  hypo
gaggcagacaggtgaacgtgcggtcatgctgtcca

SEQ ID NO: 12779 - DNA, 31 bp, Homo sapiens
  chr5:14390752-14390783
  hypo
acagccagctctgcacgcgtgactgtggaaa

SEQ ID NO: 12780 - DNA, 42 bp, Homo sapiens
  chr5:14390790-14390832
  hypo
ctggtgctcagcccgacgtgtcggggtcggggaggctgctgc

SEQ ID NO: 12781 - DNA, 31 bp, Homo sapiens
  chr5:14390834-14390865
  hypo
ctgcatgctgtcagaacgatgtgtttcttat

SEQ ID NO: 12782 - DNA, 31 bp, Homo sapiens
  chr5:14390944-14390975
  hypo
atgaaagtttatcatgcgttgacttgttatg

SEQ ID NO: 12783 - DNA, 74 bp, Homo sapiens
  chr5:14409997-14410071
  hypo
attgcctctccagccccgctcctgggaggctctttcttactgaggaccgcagcctgccacgcagcaacactcac

SEQ ID NO: 12784 - DNA, 31 bp, Homo sapiens
  chr5:14420064-14420095
  hypo
gtggttcactgtgcatcgcccactccagaag

SEQ ID NO: 12785 - DNA, 43 bp, Homo sapiens
  chr5:14420167-14420210
  hypo
ggaagtggccctggagcgctctgtctccgcgcctctcctgcct

SEQ ID NO: 12786 - DNA, 31 bp, Homo sapiens
  chr5:14426902-14426933
  hypo
agactctcagcacagacggtcatggggaagt

SEQ ID NO: 12787 - DNA, 65 bp, Homo sapiens
  chr5:14427741-14427806
  hypo
ctctacccacagggccgcggccttgtcctggattctcaccggggcagtcacgtcaggatggagag

SEQ ID NO: 12788 - DNA, 58 bp, Homo sapiens
  chr5:14427843-14427901
  hypo
gtctgaaatgacctgccgatggtccaggctgagccagggaagccgagcctgggtgcct

SEQ ID NO: 12789 - DNA, 31 bp, Homo sapiens
  chr5:14431095-14431126
  hypo
caggcatgagccactgcgcctggcctgaatt

SEQ ID NO: 12790 - DNA, 58 bp, Homo sapiens
  chr5:14435334-14435392
  hypo
aaagaaggatcctccacgaggccggactccctgctagagcacccgcagtttgaatccc

SEQ ID NO: 12791 - DNA, 1 bp, Homo sapiens
  chr5:14454340-14454341
  hypo
a

SEQ ID NO: 12792 - DNA, 62 bp, Homo sapiens
  chr5:14454375-14454437
  hypo
tcctgagcccccaccccgacactgctttacatgacaggcagtgttcacgtacacttagtctg

SEQ ID NO: 12793 - DNA, 31 bp, Homo sapiens
  chr5:14454470-14454501
  hypo
caagtgagagatgagtcgctagaagggttgc

SEQ ID NO: 12794 - DNA, 47 bp, Homo sapiens
  chr5:14459598-14459645
  hypo
cacgctcactggtgtgcgagttgtacagtagacgtcacacaagtcca

SEQ ID NO: 12795 - DNA, 29 bp, Homo sapiens
  chr5:14460338-14460367
  hypo
ttaaaatgtggtggcgtttttgttcattg

SEQ ID NO: 12796 - DNA, 86 bp, Homo sapiens
  chr5:14460408-14460494
  hypo
actgtgagcaaagtcccggtgtgccgccgtggcctggccgtgaacaggaaagaggctgagggccgctcctccgagagccccaccag

SEQ ID NO: 12797 - DNA, 31 bp, Homo sapiens
  chr5:14461136-14461167
  hypo
ccgtctccagcaatgacgccagtccacccgc

SEQ ID NO: 12798 - DNA, 49 bp, Homo sapiens
  chr5:14461195-14461244
  hypo
atcggggcccagagctcgccgggccccaagcggccgggcaacaccctgc

SEQ ID NO: 12799 - DNA, 77 bp, Homo sapiens
  chr5:14461251-14461328
  hypo
gctcaccagccccgtgcggcggctcagcagcggcaaggccgacgggcacgtgaagaagctggcgcacaagcacaaga

SEQ ID NO: 12800 - DNA, 52 bp, Homo sapiens
  chr5:14461340-14461392
  hypo
tccgcaagagcgccgacgccggctcgcagaaggactccgacgacagtgcggc

SEQ ID NO: 12801 - DNA, 44 bp, Homo sapiens
  chr5:14485222-14485266
  hypo
aaatttgctctgacatcgaggacgggtgacgtggtagagacctt

SEQ ID NO: 12802 - DNA, 31 bp, Homo sapiens
  chr5:14485278-14485309
  hypo
atctagtccaagtgtccggcaaacttggatc

SEQ ID NO: 12803 - DNA, 31 bp, Homo sapiens
  chr5:14485323-14485354
  hypo
aattttagaaaaccagcgcaattttttaaat

SEQ ID NO: 12804 - DNA, 31 bp, Homo sapiens
  chr5:14485379-14485410
  hypo
gtgtgctttctttcctcgtgtactcacttgt

SEQ ID NO: 12805 - DNA, 47 bp, Homo sapiens
  chr5:14487502-14487549
  hypo
gttcctccctcaccccgcggcgtgctccttggcgccctgacccagtc

SEQ ID NO: 12806 - DNA, 101 bp, Homo sapiens
  chr5:14488199-14488300
  hypo
ccatccccgcctcccccgccagccgacccggctccttcaccttcccgggggacagcgactccctccagcggcagacaccccgccacgcggcccctggcaag

SEQ ID NO: 12807 - DNA, 87 bp, Homo sapiens
  chr5:14488414-14488501
  hypo
tcccgccagctctaaacgccaccgcggctgttctcactaactcggctgcccagcgctctccgccgcccgttgcggcctctacctggg

SEQ ID NO: 12808 - DNA, 31 bp, Homo sapiens
  chr5:14488667-14488698
  hypo
acctctgccttcctcacgcacctattttttg

SEQ ID NO: 12809 - DNA, 57 bp, Homo sapiens
  chr5:14489507-14489564
  hypo
tttcagttaggttggacgtgctaggtaggcaggtatgctaggcgggtgagcatagat

SEQ ID NO: 12810 - DNA, 42 bp, Homo sapiens
  chr5:14489593-14489635
  hypo
gcagtcaacccagtgacgggctatacccgtcagcacttagtt

SEQ ID NO: 12811 - DNA, 31 bp, Homo sapiens
  chr5:14489660-14489691
  hypo
ttatagctgtgaccctcgctgaatctgccag

SEQ ID NO: 12812 - DNA, 31 bp, Homo sapiens
  chr5:14492757-14492788
  hypo
tctaccaaggagaggtcgttcaaattctggc

SEQ ID NO: 12813 - DNA, 54 bp, Homo sapiens
  chr5:14492803-14492857
  hypo
catgtttctggtgttccgagccgccactgaccagtgccccgcagctgagggctg

SEQ ID NO: 12814 - DNA, 46 bp, Homo sapiens
  chr5:14492880-14492926
  hypo
acaccagtgcagtcatcgtggagaacccggacgggactctcaagtg

SEQ ID NO: 12815 - DNA, 35 bp, Homo sapiens
  chr5:14493320-14493355
  hypo
caggaccagtagggagcgtgcggagatgttggcat

SEQ ID NO: 12816 - DNA, 31 bp, Homo sapiens
  chr5:14493409-14493440
  hypo
cattgccttttttacacgagttttgtggcaa

SEQ ID NO: 12817 - DNA, 51 bp, Homo sapiens
  chr5:14493445-14493496
  hypo
tgtcaagcaagtctctcggtgccatttgtccaacaacgtatgctcacactc

SEQ ID NO: 12818 - DNA, 43 bp, Homo sapiens
  chr5:14498252-14498295
  hypo
cgttgttcttagatgtcgagtctgtggccgccccaaagcctca

SEQ ID NO: 12819 - DNA, 31 bp, Homo sapiens
  chr5:14498372-14498403
  hypo
cactcctggtgggtttcgctggctgggagca

SEQ ID NO: 12820 - DNA, 89 bp, Homo sapiens
  chr5:14498424-14498513
  hypo
ggaaattcctccttcacggatggatttctttggctgccttcggcactccacttcttccgtgagagcccatttcacgcctgggtgtacag

SEQ ID NO: 12821 - DNA, 238 bp, Homo sapiens
  chr5:14498552-14498790
  hypo
tgaaggaggaggccagcgctgatggccacgtgctcagcttttctgatgcgcagtgtgttcccatctgtgccgcagtgacctgggagaggccacgctgaagattgtgggcgtgaccacggaagatgacggcatctacacgtgcatcgctgtcaatgacatgggttcagcctcatcgtcggccagcctgagggtcctaggtaagcaccgtgcaacgaggattctacgtgacccagtgggg

SEQ ID NO: 12822 - DNA, 99 bp, Homo sapiens
  chr5:14504055-14504154
  hypo
cacacccccacaggggcgaggctgaggcagtgaccacagcagacgcacctttcaaacgtgcagggaaaggtggctgacgggaggcgtgagcagccatcc

SEQ ID NO: 12823 - DNA, 31 bp, Homo sapiens
  chr5:14504531-14504562
  hypo
tcagaaaggaaccaagcgagcagtggccact

SEQ ID NO: 12824 - DNA, 31 bp, Homo sapiens
  chr5:14505470-14505501
  hypo
tagctttgaaaaatgtcgattcctccttttt

SEQ ID NO: 12825 - DNA, 31 bp, Homo sapiens
  chr5:14507311-14507342
  hypo
ggttctggaagctgtccggtacctgcacaac

SEQ ID NO: 12826 - DNA, 73 bp, Homo sapiens
  chr5:14507366-14507439
  hypo
aaggttggtgaggccccgggcaggtgaaggggggtctgagcacaccggcttggccatgcgggacacagagccc

SEQ ID NO: 12827 - DNA, 116 bp, Homo sapiens
  chr5:14507565-14507681
  hypo
acactgggtaaaacgccggagccctcccagccttccacgactttcagaaagtccccatgagttttgcccggtgggtgtggcgggtgcagtggtagcttaggcgggaaagagagcat

SEQ ID NO: 12828 - DNA, 51 bp, Homo sapiens
  chr5:14508325-14508376
  hypo
tcctgcaggaggaccccgccaagcgtccctcggctgcgctggccctccagg

SEQ ID NO: 12829 - DNA, 34 bp, Homo sapiens
  chr5:14508434-14508468
  hypo
gacttccttcattgagcggcgcaaacaccagaat

SEQ ID NO: 12830 - DNA, 31 bp, Homo sapiens
  chr5:14509070-14509101
  hypo
ataaaatagaatgaatcgttttgctctgatg

SEQ ID NO: 12831 - DNA, 31 bp, Homo sapiens
  chr5:16537287-16537318
  hypo
tgtttaatccacactgcgacctcccaattaa

SEQ ID NO: 12832 - DNA, 129 bp, Homo sapiens; identical to SEQ ID NO: 2111
  chr5:16616954-16617083
  hypo

SEQ ID NO: 12833 - DNA, 31 bp, Homo sapiens
  chr5:16668249-16668280
  hypo
caccacactgtattttcgtgttttgaagaaa

SEQ ID NO: 12834 - DNA, 53 bp, Homo sapiens
  chr5:16668401-16668454
  hypo
agcagctccctctcatcgaccacgatcttatacgtattcgccaggggtgcccc

SEQ ID NO: 12835 - DNA, 34 bp, Homo sapiens
  chr5:16671130-16671164
  hypo
tgccatgggatgcccacgtcgcttgctccctcac

SEQ ID NO: 12836 - DNA, 37 bp, Homo sapiens
  chr5:16671881-16671918
  hypo
agtgttttcagagagccgcattcgaattagtaccagc

SEQ ID NO: 12837 - DNA, 35 bp, Homo sapiens
  chr5:16680074-16680109
  hypo
tgctgggtgggggtgtcgatcggggccttggtgtc

SEQ ID NO: 12838 - DNA, 31 bp, Homo sapiens
  chr5:16701782-16701813
  hypo
ctgctgctccttcatgcgctgcaggtcctcg

SEQ ID NO: 12839 - DNA, 78 bp, Homo sapiens
  chr5:16766143-16766221
  hypo
caggagtgtctagtaacgcaagatcagatggcaaagcgtgtgtacctgttgaacattgagaggcgtgaggatctcttc

SEQ ID NO: 12840 - DNA, 31 bp, Homo sapiens
  chr5:16766274-16766305
  hypo
ccagcccaagtaactccgcagatctgcccaa

SEQ ID NO: 12841 - DNA, 140 bp, Homo sapiens; identical to SEQ ID NO: 2112
  chr5:16935547-16935687
  hypo

SEQ ID NO: 12842 - DNA, 31 bp, Homo sapiens; identical to SEQ ID NO: 2113
  chr5:16936072-16936103
  hypo

SEQ ID NO: 12843 - DNA, 46 bp, Homo sapiens; identical to SEQ ID NO: 2114
  chr5:16936151-16936197
  hypo

SEQ ID NO: 12844 - DNA, 50 bp, Homo sapiens; identical to SEQ ID NO: 2115
  chr5:16936251-16936301
  hypo

SEQ ID NO: 12845 - DNA, 171 bp, Homo sapiens; identical to SEQ ID NO: 2116
  chr5:16936429-16936600
  hypo

SEQ ID NO: 12846 - DNA, 79 bp, Homo sapiens; identical to SEQ ID NO: 2122
  chr5:17217991-17218070
  hypo

SEQ ID NO: 12847 - DNA, 50 bp, Homo sapiens; identical to SEQ ID NO: 2123
  chr5:17218072-17218122
  hypo

SEQ ID NO: 12848 - DNA, 35 bp, Homo sapiens; identical to SEQ ID NO: 2124
  chr5:17218127-17218162
  hypo

SEQ ID NO: 12849 - DNA, 168 bp, Homo sapiens; identical to SEQ ID NO: 2125
  chr5:17218209-17218377
  hypo

SEQ ID NO: 12850 - DNA, 68 bp, Homo sapiens; identical to SEQ ID NO: 2126
  chr5:17218384-17218452
  hypo

SEQ ID NO: 12851 - DNA, 31 bp, Homo sapiens; identical to SEQ ID NO: 2128
  chr5:29296868-29296899
  hypo

SEQ ID NO: 12852 - DNA, 31 bp, Homo sapiens
  chr5:32199878-32199909
  hypo
tgctctccattcttgccgacaactggtattg

SEQ ID NO: 12853 - DNA, 31 bp, Homo sapiens
  chr5:32314527-32314558
  hypo
gaggaataagtttgagcgtttgataataaaa

SEQ ID NO: 12854 - DNA, 24 bp, Homo sapiens
  chr5:32446107-32446131
  hypo
gaaatgctggccgggcgcggtggc

SEQ ID NO: 12855 - DNA, 31 bp, Homo sapiens
  chr5:32526514-32526545
  hypo
cttactcacttctaatcgtgtttctccctat

SEQ ID NO: 12856 - DNA, 34 bp, Homo sapiens
  chr5:32526557-32526591
  hypo
atgaaatccttctccacgccgggcgcggtggctc

SEQ ID NO: 12857 - DNA, 31 bp, Homo sapiens
  chr5:33443000-33443031
  hypo
tcaaacccagtatccccgtttttttccttcc

SEQ ID NO: 12858 - DNA, 40 bp, Homo sapiens
  chr5:33724925-33724965
  hypo
gattacaggcgtgagccaccgcacccggccaacagcttct

SEQ ID NO: 12859 - DNA, 84 bp, Homo sapiens
  chr5:34551766-34551850
  hypo
cacttgttggattttaactccgagctctgagcatccacatcttcatcagccgaaagggacttgacccgtcggctggctcccagg

SEQ ID NO: 12860 - DNA, 29 bp, Homo sapiens
  chr5:34591002-34591031
  hypo
gctgggattacagacgtgaaccactgtgc

SEQ ID NO: 12861 - DNA, 43 bp, Homo sapiens
  chr5:34591123-34591166
  hypo
ccagaattttgctctgcgtctagggcaacgttttatttggttg

SEQ ID NO: 12862 - DNA, 31 bp, Homo sapiens
  chr5:34702683-34702714
  hypo
agcccattatggaccccgttcacattagcat

SEQ ID NO: 12863 - DNA, 35 bp, Homo sapiens
  chr5:34756420-34756455
  hypo
gcttccttttaagggtcgatcgtaaagctgttaat

SEQ ID NO: 12864 - DNA, 31 bp, Homo sapiens
  chr5:35044505-35044536
  hypo
tcggtatcatccgctccggacatgatctctc

SEQ ID NO: 12865 - DNA, 43 bp, Homo sapiens
  chr5:36240987-36241030
  hypo
gcttttaaaacaagctcgtagtgtccaacgaccacgttccagc

SEQ ID NO: 12866 - DNA, 25 bp, Homo sapiens
  chr5:36868344-36868369
  hypo
atttatttttttgagacggagtttc

SEQ ID NO: 12867 - DNA, 31 bp, Homo sapiens
  chr5:40775146-40775177
  hypo
ataatatattttgtaacgattaattacatta

SEQ ID NO: 12868 - DNA, 73 bp, Homo sapiens
  chr5:40775239-40775312
  hypo
gggctcaagccaattccgtcattaataaatcacgttactgtgagcaatcatataagccgcgaggctcagtatc

SEQ ID NO: 12869 - DNA, 31 bp, Homo sapiens
  chr5:43387665-43387696
  hypo
ggtatagatatttccacgcttctttttgaac

SEQ ID NO: 12870 - DNA, 18 bp, Homo sapiens
  chr5:43387737-43387755
  hypo
tggtggttttttgagacg

SEQ ID NO: 12871 - DNA, 31 bp, Homo sapiens; identical to SEQ ID NO: 2177
  chr5:43603562-43603593
  hypo

SEQ ID NO: 12872 - DNA, 31 bp, Homo sapiens; identical to SEQ ID NO: 2178
  chr5:49736690-49736721
  hypo

SEQ ID NO: 12873 - DNA, 59 bp, Homo sapiens; identical to SEQ ID NO: 2179
  chr5:49736745-49736804
  hypo

SEQ ID NO: 12874 - DNA, 108 bp, Homo sapiens; identical to SEQ ID NO: 2180
  chr5:49736869-49736977
  hypo

SEQ ID NO: 12875 - DNA, 61 bp, Homo sapiens; identical to SEQ ID NO: 2181
  chr5:49737195-49737256
  hypo

SEQ ID NO: 12876 - DNA, 39 bp, Homo sapiens
  chr5:52888052-52888091
  hypo
attacaggtgtgagccgctgcgcccggcattgttgagtt

SEQ ID NO: 12877 - DNA, 31 bp, Homo sapiens
  chr5:53593991-53594022
  hypo
cagtgtactaagttcccgcaccccattgtct

SEQ ID NO: 12878 - DNA, 108 bp, Homo sapiens; identical to SEQ ID NO: 2193
  chr5:54469035-54469143
  hypo

SEQ ID NO: 12879 - DNA, 33 bp, Homo sapiens
  chr5:54734439-54734472
  hypo
tgtacataggccaggcgcggtggctcacgcctg

SEQ ID NO: 12880 - DNA, 41 bp, Homo sapiens
  chr5:54952934-54952975
  hypo
cacctcggcctcccaaagtcagtcaccgggcccagcctata

SEQ ID NO: 12881 - DNA, 31 bp, Homo sapiens
  chr5:55309327-55309358
  hypo
cggttgttgttagcagcggcaacaactggta

SEQ ID NO: 12882 - DNA, 70 bp, Homo sapiens
  chr5:56011131-56011201
  hypo
ttcactgtggaatagtcgctgctccgcatgtgccttttccagcagtgggtgggcacgttctgattcacag

SEQ ID NO: 12883 - DNA, 35 bp, Homo sapiens
  chr5:56011243-56011278
  hypo
tatgtgattagaaatacgctgctatcgggccgggc

SEQ ID NO: 12884 - DNA, 51 bp, Homo sapiens; identical to SEQ ID NO: 2198
  chr5:57755844-57755895
  hypo

SEQ ID NO: 12885 - DNA, 111 bp, Homo sapiens; identical to SEQ ID NO: 2199
  chr5:57755954-57756065
  hypo

SEQ ID NO: 12886 - DNA, 38 bp, Homo sapiens; identical to SEQ ID NO: 2200
  chr5:57756488-57756526
  hypo

SEQ ID NO: 12887 - DNA, 31 bp, Homo sapiens; identical to SEQ ID NO: 2201
  chr5:57756573-57756604
  hypo

SEQ ID NO: 12888 - DNA, 31 bp, Homo sapiens; identical to SEQ ID NO: 2203
  chr5:60626140-60626171
  hypo

SEQ ID NO: 12889 - DNA, 31 bp, Homo sapiens
  chr5:60821653-60821684
  hypo
tgttcacccgagccatcgaggcatgcgatct

SEQ ID NO: 12890 - DNA, 31 bp, Homo sapiens
  chr5:60821801-60821832
  hypo
tggtaagtgaccaaaccggaaagacatttcc

SEQ ID NO: 12891 - DNA, 31 bp, Homo sapiens; identical to SEQ ID NO: 2204
  chr5:60840110-60840141
  hypo

SEQ ID NO: 12892 - DNA, 31 bp, Homo sapiens
  chr5:64339981-64340012
  hypo
ctaaggagacacaaaacgaaaacaactgctg

SEQ ID NO: 12893 - DNA, 26 bp, Homo sapiens
  chr5:64340094-64340120
  hypo
ttttgagacagagtctcgccctgttg

SEQ ID NO: 12894 - DNA, 18 bp, Homo sapiens
  chr5:66273220-66273238
  hypo
gcccggctatcagacatt

SEQ ID NO: 12895 - DNA, 38 bp, Homo sapiens
  chr5:66441262-66441300
  hypo
gtgctcagtcccagggcgggcctcgccaggcagtaaag

SEQ ID NO: 12896 - DNA, 31 bp, Homo sapiens
  chr5:66441341-66441372
  hypo
ccttaggcttgggacacgatcttctgagagc

SEQ ID NO: 12897 - DNA, 59 bp, Homo sapiens
  chr5:66441390-66441449
  hypo
acccctcctcagtgctcggccatgcagcaaactgttattgcttccgtttgaccttgggg

SEQ ID NO: 12898 - DNA, 31 bp, Homo sapiens
  chr5:66534314-66534345
  hypo
tgatttagaaactcagcggtcatccagaaag

SEQ ID NO: 12899 - DNA, 35 bp, Homo sapiens
  chr5:66911430-66911465
  hypo
aaattttagccagctgcggtggctcacgcctgtaa

SEQ ID NO: 12900 - DNA, 44 bp, Homo sapiens
  chr5:66938603-66938647
  hypo
tgaattgattttaaaccgcaaaaatgaatcgttttattttgcta

SEQ ID NO: 12901 - DNA, 91 bp, Homo sapiens
  chr5:66938675-66938766
  hypo
ccatgtaaagtagtttcggtttctgcaaaggaaaaagaacatgatcggatttagcaaaatggtgtattacatagggcgaaaatcagatcat

SEQ ID NO: 12902 - DNA, 38 bp, Homo sapiens
  chr5:66987569-66987607
  hypo
tgggattataggcgtgagccaccgcgccaggcctattg

SEQ ID NO: 12903 - DNA, 37 bp, Homo sapiens
  chr5:67015512-67015549
  hypo
tacaggcgtgagccaccgcgaccggcccagtaatgtt

SEQ ID NO: 12904 - DNA, 31 bp, Homo sapiens
  chr5:67021474-67021505
  hypo
cagtgggaatttactacgtgccctgagccat

SEQ ID NO: 12905 - DNA, 34 bp, Homo sapiens
  chr5:67617619-67617653
  hypo
cttcctatgtgccagacgccgaactaaatgtttt

SEQ ID NO: 12906 - DNA, 31 bp, Homo sapiens
  chr5:67617691-67617722
  hypo
agttgagtactatctgcgtcatccccactat

SEQ ID NO: 12907 - DNA, 56 bp, Homo sapiens
  chr5:67617738-67617794
  hypo
actgaggcacacagagcgcatcagtaactttcttaaggtcacgaagttactaagtt

SEQ ID NO: 12908 - DNA, 24 bp, Homo sapiens
  chr5:67646893-67646917
  hypo
caccacgcccggcctgggctcagt

SEQ ID NO: 12909 - DNA, 31 bp, Homo sapiens
  chr5:67708115-67708146
  hypo
atgtcattttaaaaatcgcattataccctta

SEQ ID NO: 12910 - DNA, 30 bp, Homo sapiens
  chr5:67708166-67708196
  hypo
ttttttttttttgagacggagtcttgctct

SEQ ID NO: 12911 - DNA, 31 bp, Homo sapiens
  chr5:67857567-67857598
  hypo
acaattacccagacaacgtagccactccatt

SEQ ID NO: 12912 - DNA, 31 bp, Homo sapiens
  chr5:68018530-68018561
  hypo
aaaaaaaatatatcaccgatcagctcagcct

SEQ ID NO: 12913 - DNA, 27 bp, Homo sapiens
  chr5:68133363-68133390
  hypo
agccaccgcgcccggccagaaatgggt

SEQ ID NO: 12914 - DNA, 31 bp, Homo sapiens
  chr5:68238778-68238809
  hypo
aatttgttggcctcatcgccctcctgcttca

SEQ ID NO: 12915 - DNA, 31 bp, Homo sapiens
  chr5:68368094-68368125
  hypo
ataaataaaataaatgcgttatcagtaacaa

SEQ ID NO: 12916 - DNA, 20 bp, Homo sapiens
  chr5:68459532-68459552
  hypo
tataatattcccagtgcggc

SEQ ID NO: 12917 - DNA, 31 bp, Homo sapiens
  chr5:68476732-68476763
  hypo
gagccaatgcgcctgacgcccacttctattt

SEQ ID NO: 12918 - DNA, 31 bp, Homo sapiens; identical to SEQ ID NO: 2205
  chr5:68485209-68485240
  hypo

SEQ ID NO: 12919 - DNA, 18 bp, Homo sapiens
  chr5:72236833-72236851
  hypo
agacgtatttttcttcct

SEQ ID NO: 12920 - DNA, 37 bp, Homo sapiens
  chr5:72242482-72242519
  hypo
aaaatccctgggtggccgggtgcggtggctcatgcct

SEQ ID NO: 12921 - DNA, 31 bp, Homo sapiens
  chr5:72806527-72806558
  hypo
gagtgggtagcaggttcgtcttccccttgac

SEQ ID NO: 12922 - DNA, 220 bp, Homo sapiens; identical to SEQ ID NO: 2209
  chr5:72921556-72921776
  hypo

SEQ ID NO: 12923 - DNA, 54 bp, Homo sapiens; identical to SEQ ID NO: 2210
  chr5:72921779-72921833
  hypo

SEQ ID NO: 12924 - DNA, 142 bp, Homo sapiens; identical to SEQ ID NO: 2211
  chr5:72921840-72921982
  hypo

SEQ ID NO: 12925 - DNA, 258 bp, Homo sapiens; identical to SEQ ID NO: 2212
  chr5:72921983-72922241
  hypo

SEQ ID NO: 12926 - DNA, 72 bp, Homo sapiens
  chr5:73081112-73081184
  hypo
aaattaatggatcacacgagagtccttttttcgcagttctcaacctctcatagaaaccgtctgtgaaaggta

SEQ ID NO: 12927 - DNA, 54 bp, Homo sapiens
  chr5:73081253-73081307
  hypo
ctatcacctgggttcccgccatctgttagtccagtaatgcgcacaccagagaag

SEQ ID NO: 12928 - DNA, 39 bp, Homo sapiens
  chr5:73102525-73102564
  hypo
atatgtaccatatatacgatatatcgtatacatctatat

SEQ ID NO: 12929 - DNA, 24 bp, Homo sapiens
  chr5:73127801-73127825
  hypo
caccatgtccggcctgaagtttag

SEQ ID NO: 12930 - DNA, 42 bp, Homo sapiens
  chr5:73192670-73192712
  hypo
accgtgacagaggtgccggggcagcggcggacccagctgctt

SEQ ID NO: 12931 - DNA, 59 bp, Homo sapiens
  chr5:73205692-73205751
  hypo
cccgcggtgctccttccgggtggccccgaggtatggaccttctgcggtgctgtgaggca

SEQ ID NO: 12932 - DNA, 43 bp, Homo sapiens
  chr5:73228901-73228944
  hypo
tgggattacaggcgtgagccaccgtgcccggcctatttcctat

SEQ ID NO: 12933 - DNA, 31 bp, Homo sapiens
  chr5:73229007-73229038
  hypo
ccaaattccaagaaaacgttaactcatttca

SEQ ID NO: 12934 - DNA, 46 bp, Homo sapiens
  chr5:73247792-73247838
  hypo
aacacgacaaaagaaccgttagtttcgggccgagcacggtggctca

SEQ ID NO: 12935 - DNA, 31 bp, Homo sapiens
  chr5:73627933-73627964
  hypo
tgtttttctcattttacggatgagaaaactg

SEQ ID NO: 12936 - DNA, 43 bp, Homo sapiens
  chr5:73628000-73628043
  hypo
aaagaatgatttctcccggctgtcacttcggtgctaaaatgct

SEQ ID NO: 12937 - DNA, 42 bp, Homo sapiens
  chr5:73628070-73628112
  hypo
cccaggagcttctcttcgctgtgttcccgtggcattggagtg

SEQ ID NO: 12938 - DNA, 31 bp, Homo sapiens
  chr5:73636136-73636167
  hypo
gacctccccaatgacccgctgctcataaatg

SEQ ID NO: 12939 - DNA, 36 bp, Homo sapiens
  chr5:73665485-73665521
  hypo
agttaacaaacagggccgggcactgtggctcacgcc

SEQ ID NO: 12940 - DNA, 31 bp, Homo sapiens
  chr5:73771007-73771038
  hypo
aggaatatacaactctcgggtgggtgaggtg

SEQ ID NO: 12941 - DNA, 41 bp, Homo sapiens; identical to SEQ ID NO: 2215
  chr5:73843884-73843925
  hypo

SEQ ID NO: 12942 - DNA, 40 bp, Homo sapiens; identical to SEQ ID NO: 2216
  chr5:73844038-73844078
  hypo

SEQ ID NO: 12943 - DNA, 85 bp, Homo sapiens
  chr5:73855840-73855925
  hypo
ctggagcccttctgctcggagttcaaggctcccatgtagacctggagcgtgtgcccccaggggctgccagcgtgggtctctgctc

SEQ ID NO: 12944 - DNA, 45 bp, Homo sapiens
  chr5:73855987-73856032
  hypo
aattatctctttctgccgtgttgaagggcacgctgctattccatc

SEQ ID NO: 12945 - DNA, 118 bp, Homo sapiens; identical to SEQ ID NO: 2217
  chr5:73935723-73935841
  hypo

SEQ ID NO: 12946 - DNA, 144 bp, Homo sapiens; identical to SEQ ID NO: 2218
  chr5:73935843-73935987
  hypo

SEQ ID NO: 12947 - DNA, 516 bp, Homo sapiens; identical to SEQ ID NO: 2219
  chr5:73936032-73936548
  hypo

SEQ ID NO: 12948 - DNA, 95 bp, Homo sapiens; identical to SEQ ID NO: 2220
  chr5:73936773-73936868
  hypo

SEQ ID NO: 12949 - DNA, 23 bp, Homo sapiens
  chr5:74177827-74177850
  hypo
gagacagggtctgggccgggcgc

SEQ ID NO: 12950 - DNA, 31 bp, Homo sapiens
  chr5:74238223-74238254
  hypo
agatcaccttcacatacgtttaactctgaga

SEQ ID NO: 12951 - DNA, 34 bp, Homo sapiens; identical to SEQ ID NO: 2226
  chr5:74348705-74348739
  hypo

SEQ ID NO: 12952 - DNA, 53 bp, Homo sapiens; identical to SEQ ID NO: 2227
  chr5:74348751-74348804
  hypo

SEQ ID NO: 12953 - DNA, 75 bp, Homo sapiens; identical to SEQ ID NO: 2228
  chr5:74348819-74348894
  hypo

SEQ ID NO: 12954 - DNA, 97 bp, Homo sapiens; identical to SEQ ID NO: 2230
  chr5:74349197-74349294
  hypo

SEQ ID NO: 12955 - DNA, 35 bp, Homo sapiens
  chr5:76159637-76159672
  hypo
caggtgtgagccactgcgcccggccaattatatta

SEQ ID NO: 12956 - DNA, 9 bp, Homo sapiens
  chr5:76327712-76327721
  hypo
agtgcaact

SEQ ID NO: 12957 - DNA, 47 bp, Homo sapiens
  chr5:76373686-76373733
  hypo
ggctcgccactcctcattctgcggcgcccgcacgctggggagcaggg

SEQ ID NO: 12958 - DNA, 80 bp, Homo sapiens
  chr5:76399985-76400065
  hypo
tgtatcccaggcttcccgtagaggtttatgtggggcctatcgctcttccacacagtaaggaaccacgtgaaggcttggga

SEQ ID NO: 12959 - DNA, 31 bp, Homo sapiens
  chr5:76400067-76400098
  hypo
tgaagtacatgtttgccgggagggagctcag

SEQ ID NO: 12960 - DNA, 31 bp, Homo sapiens
  chr5:76400152-76400183
  hypo
atggtttgaatgtttgcgtctattcaaaatt

SEQ ID NO: 12961 - DNA, 33 bp, Homo sapiens
  chr5:76738422-76738455
  hypo
aacctttaaaaaaagccgggtgcggtggctcac

SEQ ID NO: 12962 - DNA, 23 bp, Homo sapiens
  chr5:77047288-77047311
  hypo
caccgcgccggccagcctgacca

SEQ ID NO: 12963 - DNA, 51 bp, Homo sapiens
  chr5:77655147-77655198
  hypo
agaaaagtgaggaaagcgatgctctttcaataagttcggcagggtggggca

SEQ ID NO: 12964 - DNA, 31 bp, Homo sapiens
  chr5:77655603-77655634
  hypo
tgctcaagttaatactcgagggccttgatct

SEQ ID NO: 12965 - DNA, 31 bp, Homo sapiens
  chr5:77810047-77810078
  hypo
taaatacgtttcccctcgacaacacctgacc

SEQ ID NO: 12966 - DNA, 31 bp, Homo sapiens
  chr5:77816709-77816740
  hypo
ctgaaaaatcactgaccgttcctttcttata

SEQ ID NO: 12967 - DNA, 54 bp, Homo sapiens
  chr5:77816767-77816821
  hypo
aaaatgcttggaatcacgaacaatttgatagctgtatgccgaaagacatggcag

SEQ ID NO: 12968 - DNA, 21 bp, Homo sapiens
  chr5:77885002-77885023
  hypo
ttagaagttggccaggcgcag

SEQ ID NO: 12969 - DNA, 31 bp, Homo sapiens
  chr5:77916703-77916734
  hypo
ttaaatgcacatatgccgtggctccagtgaa

SEQ ID NO: 12970 - DNA, 19 bp, Homo sapiens
  chr5:77922886-77922905
  hypo
agagcgaaactccatttca

SEQ ID NO: 12971 - DNA, 31 bp, Homo sapiens; identical to SEQ ID NO: 2244
  chr5:77944026-77944057
  hypo

SEQ ID NO: 12972 - DNA, 25 bp, Homo sapiens
  chr5:78264450-78264475
  hypo
cgtgagccaccgcacccagcctgga

SEQ ID NO: 12973 - DNA, 31 bp, Homo sapiens
  chr5:78356327-78356358
  hypo
ctcatggagcacatatcgtgcttcagggaaa

SEQ ID NO: 12974 - DNA, 32 bp, Homo sapiens
  chr5:78949959-78949991
  hypo
taatgaaaaaggaggccgggcacggtggctca

SEQ ID NO: 12975 - DNA, 31 bp, Homo sapiens
  chr5:78985160-78985191
  hypo
agctgctggagctcttcggagtctcagtttc

SEQ ID NO: 12976 - DNA, 31 bp, Homo sapiens
  chr5:79086452-79086483
  hypo
gaagtcaggagggctgcggtggggtccgaga

SEQ ID NO: 12977 - DNA, 31 bp, Homo sapiens
  chr5:79451010-79451041
  hypo
gaattaagaaatagttcgtggaggccaggat

SEQ ID NO: 12978 - DNA, 31 bp, Homo sapiens
  chr5:79453490-79453521
  hypo
tattgtaggtactctgcgaacaacttaggaa

SEQ ID NO: 12979 - DNA, 31 bp, Homo sapiens
  chr5:79498711-79498742
  hypo
ttcatcttgtgagccacggttgttgacatca

SEQ ID NO: 12980 - DNA, 51 bp, Homo sapiens; identical to SEQ ID NO: 2247
  chr5:79551392-79551443
  hypo

SEQ ID NO: 12981 - DNA, 23 bp, Homo sapiens
  chr5:79554325-79554348
  hypo
agccaccgcgcgcagccacaagg

SEQ ID NO: 12982 - DNA, 23 bp, Homo sapiens
  chr5:79753567-79753590
  hypo
caggcacagtggctcacgcctgt

SEQ ID NO: 12983 - DNA, 15 bp, Homo sapiens
  chr5:79783239-79783254
  hypo
gacagtctagctcta

SEQ ID NO: 12984 - DNA, 31 bp, Homo sapiens
  chr5:79911233-79911264
  hypo
ataatggctttatccacgtgtggccttttga

SEQ ID NO: 12985 - DNA, 31 bp, Homo sapiens
  chr5:79911294-79911325
  hypo
aaatagttctttcccacgagctgtttctgca

SEQ ID NO: 12986 - DNA, 31 bp, Homo sapiens
  chr5:79911331-79911362
  hypo
caaacagacaattacccggttccacttaaca

SEQ ID NO: 12987 - DNA, 31 bp, Homo sapiens
  chr5:80652823-80652854
  hypo
taccttcttcctctcccgcctccctctacct

SEQ ID NO: 12988 - DNA, 63 bp, Homo sapiens
  chr5:80652907-80652970
  hypo
tgctggttcatgcctccgtgccttcaccctcactgctacgcaattcctcgccttcccaacttt

SEQ ID NO: 12989 - DNA, 31 bp, Homo sapiens
  chr5:80652976-80653007
  hypo
atagcccctcctgcagcgagtctctcgtgaa

SEQ ID NO: 12990 - DNA, 30 bp, Homo sapiens
  chr5:81266660-81266690
  hypo
ttcatctgtgaaatacgtttttaaggtaaa

SEQ ID NO: 12991 - DNA, 61 bp, Homo sapiens
  chr5:83095504-83095565
  hypo
aatgaaaaactgtttccggtatcaggctggcaaagataaaaaggttcgctaatatactgag

SEQ ID NO: 12992 - DNA, 31 bp, Homo sapiens
  chr5:84845601-84845632
  hypo
tgaaaatgcacttggccgggaagtcagagca

SEQ ID NO: 12993 - DNA, 41 bp, Homo sapiens; identical to SEQ ID NO: 2249
  chr5:87437222-87437263
  hypo

SEQ ID NO: 12994 - DNA, 31 bp, Homo sapiens
  chr5:88097575-88097606
  hypo
tacaggtgtgagtcaccgtgcctggcctact

SEQ ID NO: 12995 - DNA, 189 bp, Homo sapiens; identical to SEQ ID NO: 2258
  chr5:88178940-88179129
  hypo

SEQ ID NO: 12996 - DNA, 62 bp, Homo sapiens; identical to SEQ ID NO: 2259
  chr5:88179187-88179249
  hypo

SEQ ID NO: 12997 - DNA, 27 bp, Homo sapiens
  chr5:88371467-88371494
  hypo
taatcttgcttaggggcggatctcctg

SEQ ID NO: 12998 - DNA, 31 bp, Homo sapiens
  chr5:90256912-90256943
  hypo
gctcattataaatgctcgataacaaaatgct

SEQ ID NO: 12999 - DNA, 31 bp, Homo sapiens
  chr5:90257318-90257349
  hypo
aaaaaagggggggtggcggtcatttcaagaa

SEQ ID NO: 13000 - DNA, 31 bp, Homo sapiens
  chr5:92310056-92310087
  hypo
caatcaagttcactaacgattacagaaaaaa

SEQ ID NO: 13001 - DNA, 31 bp, Homo sapiens; identical to SEQ ID NO: 2264
  chr5:92917347-92917378
  hypo

SEQ ID NO: 13002 - DNA, 31 bp, Homo sapiens
  chr5:93823875-93823906
  hypo
caggcgtgagccacagcgcccttctgaaaac

SEQ ID NO: 13003 - DNA, 31 bp, Homo sapiens
  chr5:94981772-94981803
  hypo
tattgaaccattcctccgtgttatcacttca

SEQ ID NO: 13004 - DNA, 24 bp, Homo sapiens
  chr5:94981843-94981867
  hypo
ttttgagatggagtttcgctcgtg

SEQ ID NO: 13005 - DNA, 33 bp, Homo sapiens
  chr5:95290420-95290453
  hypo
ggcatgagccactgcgcccggccaatatcttgt

SEQ ID NO: 13006 - DNA, 31 bp, Homo sapiens
  chr5:96114668-96114699
  hypo
cctgcttcaggatcttcgcacctgatatttc

SEQ ID NO: 13007 - DNA, 31 bp, Homo sapiens
  chr5:96121581-96121612
  hypo
tcccatccatcatcctcgtaatgcacaatgt

SEQ ID NO: 13008 - DNA, 43 bp, Homo sapiens; identical to SEQ ID NO: 2270
  chr5:98109212-98109255
  hypo

SEQ ID NO: 13009 - DNA, 34 bp, Homo sapiens; identical to SEQ ID NO: 2271
  chr5:98109257-98109291
  hypo

SEQ ID NO: 13010 - DNA, 80 bp, Homo sapiens; identical to SEQ ID NO: 2272
  chr5:98109331-98109411
  hypo

SEQ ID NO: 13011 - DNA, 83 bp, Homo sapiens; identical to SEQ ID NO: 2273
  chr5:98109412-98109495
  hypo

SEQ ID NO: 13012 - DNA, 31 bp, Homo sapiens; identical to SEQ ID NO: 2275
  chr5:98109926-98109957
  hypo

SEQ ID NO: 13013 - DNA, 131 bp, Homo sapiens; identical to SEQ ID NO: 2276
  chr5:98110030-98110161
  hypo

SEQ ID NO: 13014 - DNA, 61 bp, Homo sapiens
  chr5:98242973-98243034
  hypo
gagttgttctttagtacgataaagaatatgcaaaaagagctgggagcggtggctcatgcct

SEQ ID NO: 13015 - DNA, 296 bp, Homo sapiens; identical to SEQ ID NO: 2290
  chr5:100238616-100238912
  hypo

SEQ ID NO: 13016 - DNA, 59 bp, Homo sapiens; identical to SEQ ID NO: 2291
  chr5:100238938-100238997
  hypo

SEQ ID NO: 13017 - DNA, 119 bp, Homo sapiens; identical to SEQ ID NO: 2292
  chr5:100239000-100239119
  hypo

SEQ ID NO: 13018 - DNA, 16 bp, Homo sapiens
  chr5:100239134-100239150
  hypo
cgcgcacatacacata

SEQ ID NO: 13019 - DNA, 37 bp, Homo sapiens; identical to SEQ ID NO: 2294
  chr5:100239170-100239207
  hypo

SEQ ID NO: 13020 - DNA, 82 bp, Homo sapiens; identical to SEQ ID NO: 2295
  chr5:100239251-100239333
  hypo

SEQ ID NO: 13021 - DNA, 112 bp, Homo sapiens; identical to SEQ ID NO: 2296
  chr5:100239364-100239476
  hypo

SEQ ID NO: 13022 - DNA, 63 bp, Homo sapiens; identical to SEQ ID NO: 2297
  chr5:100239512-100239575
  hypo

SEQ ID NO: 13023 - DNA, 81 bp, Homo sapiens
  chr5:103289776-103289857
  hypo
ccaggccggcggcgcccgcccgctaagagtgtgggtcccaccgagcccacgcccacccggaactccgcgctggcctgccag

SEQ ID NO: 13024 - DNA, 19 bp, Homo sapiens
  chr5:104382503-104382522
  hypo
cagacggctgcacatcagt

SEQ ID NO: 13025 - DNA, 31 bp, Homo sapiens; identical to SEQ ID NO: 2308
  chr5:107006663-107006694
  hypo

SEQ ID NO: 13026 - DNA, 44 bp, Homo sapiens; identical to SEQ ID NO: 2309
  chr5:107006932-107006976
  hypo

SEQ ID NO: 13027 - DNA, 31 bp, Homo sapiens; identical to SEQ ID NO: 2310
  chr5:107007962-107007993
  hypo

SEQ ID NO: 13028 - DNA, 50 bp, Homo sapiens; identical to SEQ ID NO: 2311
  chr5:107008015-107008065
  hypo

SEQ ID NO: 13029 - DNA, 63 bp, Homo sapiens; identical to SEQ ID NO: 2315
  chr5:110559714-110559777
  hypo

SEQ ID NO: 13030 - DNA, 62 bp, Homo sapiens; identical to SEQ ID NO: 2316
  chr5:110559969-110560031
  hypo

SEQ ID NO: 13031 - DNA, 61 bp, Homo sapiens; identical to SEQ ID NO: 2317
  chr5:110560057-110560118
  hypo

SEQ ID NO: 13032 - DNA, 248 bp, Homo sapiens; identical to SEQ ID NO: 2318
  chr5:110560138-110560386
  hypo

SEQ ID NO: 13033 - DNA, 39 bp, Homo sapiens
  chr5:111065739-111065778
  hypo
ctctaagtcaggcaggcgaggctacggaaaggaagagat

SEQ ID NO: 13034 - DNA, 67 bp, Homo sapiens
  chr5:111065795-111065862
  hypo
gttttgtgattgctcccgctaccgtgactgcatgtccgtgagcgccagccaacgagacaatggtctc

SEQ ID NO: 13035 - DNA, 23 bp, Homo sapiens
  chr5:112094580-112094603
  hypo
tgagtcaccgcacccagcctacc

SEQ ID NO: 13036 - DNA, 31 bp, Homo sapiens; identical to SEQ ID NO: 2322
  chr5:114879309-114879340
  hypo

SEQ ID NO: 13037 - DNA, 31 bp, Homo sapiens
  chr5:118420252-118420283
  hypo
acagaaatggaaaaaacgatccttggctggg

SEQ ID NO: 13038 - DNA, 24 bp, Homo sapiens
  chr5:118717628-118717652
  hypo
aaaaaacaccgaacaaaaaacgga

SEQ ID NO: 13039 - DNA, 31 bp, Homo sapiens
  chr5:120004769-120004800
  hypo
aactctgtggtgactgcgtgtaatgacactg

SEQ ID NO: 13040 - DNA, 31 bp, Homo sapiens
  chr5:121495181-121495212
  hypo
tttctcgatgaaatatcgggcaatcttatca

SEQ ID NO: 13041 - DNA, 27 bp, Homo sapiens
  chr5:121874456-121874483
  hypo
agagcaagactccgtttcaaaaaaaaa

SEQ ID NO: 13042 - DNA, 42 bp, Homo sapiens
  chr5:121874489-121874531
  hypo
atattcttttgttagacgtggccctcacgacagataccatgt

SEQ ID NO: 13043 - DNA, 31 bp, Homo sapiens
  chr5:121874591-121874622
  hypo
cataaaaataagctttcggaacacacttctg

SEQ ID NO: 13044 - DNA, 31 bp, Homo sapiens
  chr5:121906793-121906824
  hypo
tcctgactgagctttacgatggcccatgggg

SEQ ID NO: 13045 - DNA, 77 bp, Homo sapiens
  chr5:121906920-121906997
  hypo
ctgttgttaggagatgcgccatagctttcaccctccatgctgtctgccgcagcgcctcacaccgtaggtaaatggag

SEQ ID NO: 13046 - DNA, 31 bp, Homo sapiens
  chr5:122116620-122116651
  hypo
tttgaaaatttcattacgaattatctatgtt

SEQ ID NO: 13047 - DNA, 39 bp, Homo sapiens
  chr5:123929399-123929438
  hypo
attacaggcgtgagccaccctgcccggcaccctgacata

SEQ ID NO: 13048 - DNA, 31 bp, Homo sapiens
  chr5:123929457-123929488
  hypo
tattacttataattatcgttgatttacttgc

SEQ ID NO: 13049 - DNA, 31 bp, Homo sapiens; identical to SEQ ID NO: 2328
  chr5:124084142-124084173
  hypo

SEQ ID NO: 13050 - DNA, 39 bp, Homo sapiens; identical to SEQ ID NO: 2329
  chr5:124084200-124084239
  hypo

SEQ ID NO: 13051 - DNA, 31 bp, Homo sapiens; identical to SEQ ID NO: 2330
  chr5:124084838-124084869
  hypo

SEQ ID NO: 13052 - DNA, 20 bp, Homo sapiens
  chr5:125400286-125400306
  hypo
ccaccgcgcccggccgagct

SEQ ID NO: 13053 - DNA, 31 bp, Homo sapiens
  chr5:126139595-126139626
  hypo
aaaatattagggaggccgttatttattgtta

SEQ ID NO: 13054 - DNA, 12 bp, Homo sapiens
  chr5:126339398-126339410
  hypo
gccagaggagta

SEQ ID NO: 13055 - DNA, 31 bp, Homo sapiens
  chr5:126409451-126409482
  hypo
tccgagccattttaaccgctctgcatgcatc

SEQ ID NO: 13056 - DNA, 41 bp, Homo sapiens
  chr5:126479574-126479615
  hypo
ctgtcccgctgcacagcgcagggaggcggcccacagcgcgc

SEQ ID NO: 13057 - DNA, 22 bp, Homo sapiens
  chr5:127344554-127344576
  hypo
cgagcgtggtggctcacgcctg

SEQ ID NO: 13058 - DNA, 31 bp, Homo sapiens
  chr5:130661705-130661736
  hypo
ttttcattactgttaacgtctgagtatttta

SEQ ID NO: 13059 - DNA, 31 bp, Homo sapiens
  chr5:130661740-130661771
  hypo
tttcttaatgtttttacgttttaatctgagt

SEQ ID NO: 13060 - DNA, 31 bp, Homo sapiens; identical to SEQ ID NO: 2334
  chr5:131133197-131133228
  hypo

SEQ ID NO: 13061 - DNA, 81 bp, Homo sapiens; identical to SEQ ID NO: 2335
  chr5:131133234-131133315
  hypo

SEQ ID NO: 13062 - DNA, 73 bp, Homo sapiens; identical to SEQ ID NO: 2336
  chr5:131133322-131133395
  hypo

SEQ ID NO: 13063 - DNA, 41 bp, Homo sapiens
  chr5:131133934-131133975
  hypo
gccgaggcaggcagatcgctttagctctgtagttcgaaacc

SEQ ID NO: 13064 - DNA, 40 bp, Homo sapiens; identical to SEQ ID NO: 2340
  chr5:131563665-131563705
  hypo

SEQ ID NO: 13065 - DNA, 129 bp, Homo sapiens; identical to SEQ ID NO: 2341
  chr5:131563707-131563836
  hypo

SEQ ID NO: 13066 - DNA, 54 bp, Homo sapiens
  chr5:132001669-132001723
  hypo
agaacgcaacgcagggcgaaggcggagcagggagatgagcgccaaggtgcctgc

SEQ ID NO: 13067 - DNA, 31 bp, Homo sapiens
  chr5:132001725-132001756
  hypo
agatgctggtggggagcgatggtgcttgtgg

SEQ ID NO: 13068 - DNA, 31 bp, Homo sapiens
  chr5:132001761-132001792
  hypo
gaggactggagaggggcgtgtgtgtaagatg

SEQ ID NO: 13069 - DNA, 31 bp, Homo sapiens
  chr5:132001798-132001829
  hypo
tacattatactgctatcgtatacattattta

SEQ ID NO: 13070 - DNA, 53 bp, Homo sapiens
  chr5:132095766-132095819
  hypo
agcccctgtgggaagccgctttcctcccttaagccctgcgggcccttcagaac

SEQ ID NO: 13071 - DNA, 40 bp, Homo sapiens
  chr5:132095846-132095886
  hypo
gccagtgttggctggcgcgagtgcccgcagttctccatca

SEQ ID NO: 13072 - DNA, 31 bp, Homo sapiens
  chr5:132095887-132095918
  hypo
cacctgccagccaatacgggctccacaccac

SEQ ID NO: 13073 - DNA, 60 bp, Homo sapiens
  chr5:132095926-132095986
  hypo
agactgaggagggatgcgccacaggtgtccaagcagaaaccaccacggcttttggaatct

SEQ ID NO: 13074 - DNA, 31 bp, Homo sapiens
  chr5:132383280-132383311
  hypo
ggcctggtgtgggatccgggtgggagtgggt

SEQ ID NO: 13075 - DNA, 31 bp, Homo sapiens
  chr5:132448250-132448281
  hypo
ccaatggactcagcctcgtgtgatcctatta

SEQ ID NO: 13076 - DNA, 31 bp, Homo sapiens
  chr5:132654499-132654530
  hypo
ctggaccttggtggggcgtaaaccacttctg

SEQ ID NO: 13077 - DNA, 31 bp, Homo sapiens
  chr5:132654562-132654593
  hypo
tgggagcctcttatttcgtctcaggacccca

SEQ ID NO: 13078 - DNA, 31 bp, Homo sapiens
  chr5:132654605-132654636
  hypo
gcctaagcatggagagcgccctgggagttct

SEQ ID NO: 13079 - DNA, 39 bp, Homo sapiens
  chr5:132654667-132654706
  hypo
agtctgtagagctacacggactggcgtccccctgtgagc

SEQ ID NO: 13080 - DNA, 31 bp, Homo sapiens
  chr5:132664449-132664480
  hypo
caccaggcagggaagtcggaggggatatggg

SEQ ID NO: 13081 - DNA, 79 bp, Homo sapiens
  chr5:132664568-132664647
  hypo
actaaggggaaaaggccggctgtggagctggcagtaactttgctcagcgtcagcgaggcaatggcgtcagtgatgtcca

SEQ ID NO: 13082 - DNA, 31 bp, Homo sapiens
  chr5:132738534-132738565
  hypo
cactttgctaattgttcgcatgtcaccatga

SEQ ID NO: 13083 - DNA, 31 bp, Homo sapiens
  chr5:133034437-133034468
  hypo
atctggagctctcaagcgtctcacagcaatg

SEQ ID NO: 13084 - DNA, 31 bp, Homo sapiens
  chr5:133237867-133237898
  hypo
tgctaagggccaggcacggtggctcacgcct

SEQ ID NO: 13085 - DNA, 14 bp, Homo sapiens
  chr5:133240404-133240418
  hypo
gggccacctcctat

SEQ ID NO: 13086 - DNA, 61 bp, Homo sapiens
  chr5:133240436-133240497
  hypo
cacagagaaaaacacccgggaaagcctcgtgcctcactccagggaacggaccacgtggggg

SEQ ID NO: 13087 - DNA, 31 bp, Homo sapiens
  chr5:133337022-133337053
  hypo
aacatcacagaacattcgttgagcccccaga

SEQ ID NO: 13088 - DNA, 31 bp, Homo sapiens
  chr5:133362903-133362934
  hypo
ctgcaaagtgctgagacgtccctggatcagg

SEQ ID NO: 13089 - DNA, 61 bp, Homo sapiens
  chr5:133362957-133363018
  hypo
gccctcctccctctcccgccccatcagcagccatgagaggggctcccgttgcctccttcac

SEQ ID NO: 13090 - DNA, 51 bp, Homo sapiens
  chr5:133363043-133363094
  hypo
cttcatgaccagttcccgagcagcaaggtgtgcaggcgctgtgccgggccc

SEQ ID NO: 13091 - DNA, 31 bp, Homo sapiens
  chr5:133363360-133363391
  hypo
atttgtttcaattacccgtgatcttctccct

SEQ ID NO: 13092 - DNA, 31 bp, Homo sapiens
  chr5:133459374-133459405
  hypo
cttggtgctggggcagcgctggttccagagc

SEQ ID NO: 13093 - DNA, 31 bp, Homo sapiens
  chr5:133459407-133459438
  hypo
gggagaagctgatgggcgcatgcagcatgtt

SEQ ID NO: 13094 - DNA, 31 bp, Homo sapiens
  chr5:133459442-133459473
  hypo
tcatggtagggcaaggcggtacccacccaca

SEQ ID NO: 13095 - DNA, 41 bp, Homo sapiens
  chr5:133459478-133459519
  hypo
tgtgaattggacatggcggacaaaggcggggagagccagct

SEQ ID NO: 13096 - DNA, 31 bp, Homo sapiens
  chr5:133459551-133459582
  hypo
gatcatgggaggaactcgaacagagccaagg

SEQ ID NO: 13097 - DNA, 21 bp, Homo sapiens
  chr5:133462599-133462620
  hypo
aaagatcgtacaagccaagaa

SEQ ID NO: 13098 - DNA, 31 bp, Homo sapiens
  chr5:133464240-133464271
  hypo
gggctggtgcaggctgcgggacagaacacat

SEQ ID NO: 13099 - DNA, 99 bp, Homo sapiens
  chr5:133465709-133465808
  hypo
cacagggcatccagcacgctgtgggcagggagcttgcgggccgtcctttggagagcaccgtgtcctgggcagtggtgcctggagcgggggctagggata

SEQ ID NO: 13100 - DNA, 49 bp, Homo sapiens
  chr5:133465810-133465859
  hypo
agggcatgagcaggggcgcctccagcctggctggcgcactcagccctac

SEQ ID NO: 13101 - DNA, 46 bp, Homo sapiens
  chr5:133465871-133465917
  hypo
gcagagatggggtctgcgaaagcccacaaatcgaggcctggtccat

SEQ ID NO: 13102 - DNA, 43 bp, Homo sapiens
  chr5:133469214-133469257
  hypo
aggccctggagtgggacgttccactgggcgagggggacatggg

SEQ ID NO: 13103 - DNA, 65 bp, Homo sapiens
  chr5:133469260-133469325
  hypo
caggccctgtgctagacggtttcccctggctcctaccaccgggcgcaaagcgggctggggattga

SEQ ID NO: 13104 - DNA, 31 bp, Homo sapiens
  chr5:133665434-133665465
  hypo
caggcgtgagccaccacgctgttaattaatt

SEQ ID NO: 13105 - DNA, 18 bp, Homo sapiens
  chr5:133682095-133682113
  hypo
tttgttaaatttgtcacg

SEQ ID NO: 13106 - DNA, 44 bp, Homo sapiens
  chr5:133819199-133819243
  hypo
ctgggattacagacgtaagccaccgcgcccggcctgaataattt

SEQ ID NO: 13107 - DNA, 39 bp, Homo sapiens
  chr5:133984528-133984567
  hypo
cgggcgttcgcggccccgccggcccgactctcaagcctc

SEQ ID NO: 13108 - DNA, 31 bp, Homo sapiens
  chr5:134331950-134331981
  hypo
ctacccctgtagttctcggagatcttctttg

SEQ ID NO: 13109 - DNA, 31 bp, Homo sapiens
  chr5:134343157-134343188
  hypo
gacctacctgtgaagacggggtcgacaagga

SEQ ID NO: 13110 - DNA, 31 bp, Homo sapiens
  chr5:134436702-134436733
  hypo
tgtaaaatcacttggccgggtctgtgggtgc

SEQ ID NO: 13111 - DNA, 31 bp, Homo sapiens
  chr5:134436753-134436784
  hypo
tcttcgctgtaggcctcgctttggtgctttt

SEQ ID NO: 13112 - DNA, 31 bp, Homo sapiens
  chr5:134436788-134436819
  hypo
tggtccttctgcacagcggcactgacatctc

SEQ ID NO: 13113 - DNA, 53 bp, Homo sapiens
  chr5:134436873-134436926
  hypo
tcatctggctctttttcgaagtcttctctacctggcctcgtccgaagctcagg

SEQ ID NO: 13114 - DNA, 31 bp, Homo sapiens
  chr5:134440294-134440325
  hypo
gatatgttttgtggctcgctggtcctgggag

SEQ ID NO: 13115 - DNA, 57 bp, Homo sapiens
  chr5:134453699-134453756
  hypo
agcaagctttcagagtcgggttctgattttgcacccctgctgcgaccattttgtatt

SEQ ID NO: 13116 - DNA, 46 bp, Homo sapiens
  chr5:134453781-134453827
  hypo
ctggctgacttgtgtccgagaagcagttggccgtgctgggattgtg

SEQ ID NO: 13117 - DNA, 31 bp, Homo sapiens
  chr5:134453855-134453886
  hypo
gaggagtagatggacccggcctgggacagga

SEQ ID NO: 13118 - DNA, 31 bp, Homo sapiens
  chr5:134468970-134469001
  hypo
gtagtgtgtccagcagcgctgcccagtgatg

SEQ ID NO: 13119 - DNA, 31 bp, Homo sapiens
  chr5:134513709-134513740
  hypo
atggggcctggcaccccgacactctgtaggg

SEQ ID NO: 13120 - DNA, 31 bp, Homo sapiens
  chr5:134513793-134513824
  hypo
agtcactcagtgggcacgtcttcacccccat

SEQ ID NO: 13121 - DNA, 31 bp, Homo sapiens
  chr5:134513833-134513864
  hypo
taaagcagtgatgccgcgcggtgatgccact

SEQ ID NO: 13122 - DNA, 31 bp, Homo sapiens
  chr5:134547962-134547993
  hypo
cttcctccagcctccacgcagtgtcctgcga

SEQ ID NO: 13123 - DNA, 3 bp, Homo sapiens
  chr5:134583054-134583057
  hypo
tta

SEQ ID NO: 13124 - DNA, 22 bp, Homo sapiens
  chr5:134583072-134583094
  hypo
ctaggaacggctaggacctccc

SEQ ID NO: 13125 - DNA, 31 bp, Homo sapiens
  chr5:134585644-134585675
  hypo
gcttcttgataggcaccgccatgttggggat

SEQ ID NO: 13126 - DNA, 31 bp, Homo sapiens
  chr5:134585683-134585714
  hypo
gtgcccatggtccactcgggggctcatccag

SEQ ID NO: 13127 - DNA, 31 bp, Homo sapiens
  chr5:134585723-134585754
  hypo
atccatcagaaccttccgtggtgatggaaat

SEQ ID NO: 13128 - DNA, 41 bp, Homo sapiens
  chr5:134585808-134585849
  hypo
gagcttttgaaatacccgctctggctcgtgcagctgaagga

SEQ ID NO: 13129 - DNA, 40 bp, Homo sapiens
  chr5:134608287-134608327
  hypo
gcctgcatgggagtggcggggaggccgagggccactcccc

SEQ ID NO: 13130 - DNA, 31 bp, Homo sapiens
  chr5:134608335-134608366
  hypo
ggctcctcagggctttcggcactctgagggc

SEQ ID NO: 13131 - DNA, 62 bp, Homo sapiens
  chr5:134608377-134608439
  hypo
ggtccctgtggtgatacgagaccagtgcctgactacagcgtaggttccggaaaagtaagggg

SEQ ID NO: 13132 - DNA, 31 bp, Homo sapiens
  chr5:134666318-134666349
  hypo
gaagaaaaggtggcctcgccccagccattga

SEQ ID NO: 13133 - DNA, 39 bp, Homo sapiens
  chr5:134666377-134666416
  hypo
cccaggactccctcctcgccccatcgccttcaggtggat

SEQ ID NO: 13134 - DNA, 31 bp, Homo sapiens
  chr5:134785498-134785529
  hypo
gcgtcctgcccccgtccgagaagcagagggc

SEQ ID NO: 13135 - DNA, 31 bp, Homo sapiens
  chr5:135265700-135265731
  hypo
tgcattgataaaggggcgcccttcatcggga

SEQ ID NO: 13136 - DNA, 80 bp, Homo sapiens; identical to SEQ ID NO: 2345
  chr5:135468431-135468511
  hypo

SEQ ID NO: 13137 - DNA, 31 bp, Homo sapiens; identical to SEQ ID NO: 2346
  chr5:135468535-135468566
  hypo

SEQ ID NO: 13138 - DNA, 31 bp, Homo sapiens
  chr5:135802138-135802169
  hypo
accacaatcaaattaacgaacatactcttca

SEQ ID NO: 13139 - DNA, 35 bp, Homo sapiens
  chr5:135989644-135989679
  hypo
tattctcagctgggtgcggtggctcacgcctgtaa

SEQ ID NO: 13140 - DNA, 13 bp, Homo sapiens
  chr5:137727661-137727674
  hypo
gcagatttttcac

SEQ ID NO: 13141 - DNA, 56 bp, Homo sapiens
  chr5:137727708-137727764
  hypo
gttctcactggatgaacgaagcttggcttgcagacaagactcggactccagcacca

SEQ ID NO: 13142 - DNA, 31 bp, Homo sapiens
  chr5:137790369-137790400
  hypo
ccgctttccatctggacggttgtcccacttc

SEQ ID NO: 13143 - DNA, 40 bp, Homo sapiens; identical to SEQ ID NO: 2347
  chr5:137801266-137801306
  hypo

SEQ ID NO: 13144 - DNA, 55 bp, Homo sapiens; identical to SEQ ID NO: 2348
  chr5:137801307-137801362
  hypo

SEQ ID NO: 13145 - DNA, 41 bp, Homo sapiens
  chr5:137865701-137865742
  hypo
aggttataggcgcaagcgaccgtgcccgcctgacccacaag

SEQ ID NO: 13146 - DNA, 31 bp, Homo sapiens
  chr5:137911776-137911807
  hypo
cttgggtttccaactacgaagcgtttgattc

SEQ ID NO: 13147 - DNA, 24 bp, Homo sapiens
  chr5:137912555-137912579
  hypo
tgagccaccgcgcccaacccagtt

SEQ ID NO: 13148 - DNA, 31 bp, Homo sapiens
  chr5:138064358-138064389
  hypo
ggctgttgtggccaggcgtggtggctcatgc

SEQ ID NO: 13149 - DNA, 80 bp, Homo sapiens; identical to SEQ ID NO: 2349
  chr5:138088595-138088675
  hypo

SEQ ID NO: 13150 - DNA, 52 bp, Homo sapiens; identical to SEQ ID NO: 2350
  chr5:138089783-138089835
  hypo

SEQ ID NO: 13151 - DNA, 31 bp, Homo sapiens; identical to SEQ ID NO: 2351
  chr5:138089858-138089889
  hypo

SEQ ID NO: 13152 - DNA, 31 bp, Homo sapiens
  chr5:138119914-138119945
  hypo
aggtttcttttccagtcggagaatttcaaca

SEQ ID NO: 13153 - DNA, 31 bp, Homo sapiens
  chr5:138119973-138120004
  hypo
atcagctaaggtaaatcgagccctgctattt

SEQ ID NO: 13154 - DNA, 31 bp, Homo sapiens
  chr5:138627554-138627585
  hypo
atttcaggtagtgcttcgttgaggcatcaag

SEQ ID NO: 13155 - DNA, 31 bp, Homo sapiens
  chr5:138676298-138676329
  hypo
gcacccatttcctagtcggtcatttgccctc

SEQ ID NO: 13156 - DNA, 23 bp, Homo sapiens
  chr5:138709154-138709177
  hypo
cactgagccgggctagtaatttt

SEQ ID NO: 13157 - DNA, 78 bp, Homo sapiens; identical to SEQ ID NO: 2353
  chr5:139017027-139017105
  hypo

SEQ ID NO: 13158 - DNA, 167 bp, Homo sapiens; identical to SEQ ID NO: 2354
  chr5:139017117-139017284
  hypo

SEQ ID NO: 13159 - DNA, 31 bp, Homo sapiens; identical to SEQ ID NO: 2355
  chr5:139017454-139017485
  hypo

SEQ ID NO: 13160 - DNA, 31 bp, Homo sapiens; identical to SEQ ID NO: 2356
  chr5:139017554-139017585
  hypo

SEQ ID NO: 13161 - DNA, 31 bp, Homo sapiens; identical to SEQ ID NO: 2357
  chr5:139017711-139017742
  hypo

SEQ ID NO: 13162 - DNA, 31 bp, Homo sapiens; identical to SEQ ID NO: 2358
  chr5:139039950-139039981
  hypo

SEQ ID NO: 13163 - DNA, 31 bp, Homo sapiens; identical to SEQ ID NO: 2359
  chr5:139039984-139040015
  hypo

SEQ ID NO: 13164 - DNA, 73 bp, Homo sapiens; identical to SEQ ID NO: 2360
  chr5:139089042-139089115
  hypo

SEQ ID NO: 13165 - DNA, 31 bp, Homo sapiens
  chr5:139535849-139535880
  hypo
gtaataatagtaatgacgaatattcccggag

SEQ ID NO: 13166 - DNA, 31 bp, Homo sapiens
  chr5:139556301-139556332
  hypo
tgtggggcattggattcgctgaaaggagtcc

SEQ ID NO: 13167 - DNA, 31 bp, Homo sapiens
  chr5:139556365-139556396
  hypo
tagacctggcctggtgcggtggctcacacct

SEQ ID NO: 13168 - DNA, 92 bp, Homo sapiens; identical to SEQ ID NO: 2364
  chr5:139725996-139726088
  hypo

SEQ ID NO: 13169 - DNA, 55 bp, Homo sapiens; identical to SEQ ID NO: 2365
  chr5:139726093-139726148
  hypo

SEQ ID NO: 13170 - DNA, 33 bp, Homo sapiens
  chr5:140088249-140088282
  hypo
tcttttttgagacagtcgctctgttgcccaggc

SEQ ID NO: 13171 - DNA, 31 bp, Homo sapiens
  chr5:141051472-141051503
  hypo
cattactccagacactcgtgtccagcttcag

SEQ ID NO: 13172 - DNA, 31 bp, Homo sapiens
  chr5:141051521-141051552
  hypo
cccagaacccagggcccggtgctgacctgtg

SEQ ID NO: 13173 - DNA, 31 bp, Homo sapiens
  chr5:141051586-141051617
  hypo
tgaggggcatgtggcacgggtaccctgagcc

SEQ ID NO: 13174 - DNA, 31 bp, Homo sapiens
  chr5:141052013-141052044
  hypo
tgtgcataccctctgacgtcctactaaagag

SEQ ID NO: 13175 - DNA, 94 bp, Homo sapiens
  chr5:141052406-141052500
  hypo
gggtggttgggggggccgggggtggcccaggaggcgctgctccttcagacaggactgcagcgtggagcaccacatgtcccgctgagctggtggg

SEQ ID NO: 13176 - DNA, 66 bp, Homo sapiens; identical to SEQ ID NO: 2383
  chr5:141257915-141257981
  hypo

SEQ ID NO: 13177 - DNA, 34 bp, Homo sapiens; identical to SEQ ID NO: 2384
  chr5:141257996-141258030
  hypo

SEQ ID NO: 13178 - DNA, 31 bp, Homo sapiens
  chr5:141303243-141303274
  hypo
ccaaggacatcccccacggaagcctgggccc

SEQ ID NO: 13179 - DNA, 30 bp, Homo sapiens
  chr5:141576297-141576327
  hypo
atgagcctccgtgcccggcctcaccaaatg

SEQ ID NO: 13180 - DNA, 35 bp, Homo sapiens
  chr5:141581714-141581749
  hypo
caggagtgggccactgcgcccggccacctgaggca

SEQ ID NO: 13181 - DNA, 31 bp, Homo sapiens
  chr5:141639936-141639967
  hypo
cactgcgcctggcctccggtctcaatttaaa

SEQ ID NO: 13182 - DNA, 31 bp, Homo sapiens
  chr5:141663281-141663312
  hypo
ggcaaactgtctcacacgatgcctggcacag

SEQ ID NO: 13183 - DNA, 49 bp, Homo sapiens
  chr5:141663477-141663526
  hypo
gttccatgggtctagccgccaagtcctgcagtctcgctgtattcctctg

SEQ ID NO: 13184 - DNA, 35 bp, Homo sapiens
  chr5:141674167-141674202
  hypo
tttaattttcaatacacggccgggcacggtggctc

SEQ ID NO: 13185 - DNA, 35 bp, Homo sapiens
  chr5:141674501-141674536
  hypo
ttgctgctggatcagatgtacggtaggaaataaag

SEQ ID NO: 13186 - DNA, 113 bp, Homo sapiens; identical to SEQ ID NO: 2386
  chr5:141704447-141704560
  hypo

SEQ ID NO: 13187 - DNA, 55 bp, Homo sapiens; identical to SEQ ID NO: 2387
  chr5:141704618-141704673
  hypo

SEQ ID NO: 13188 - DNA, 39 bp, Homo sapiens; identical to SEQ ID NO: 2388
  chr5:141736298-141736337
  hypo

SEQ ID NO: 13189 - DNA, 148 bp, Homo sapiens; identical to SEQ ID NO: 2389
  chr5:141736379-141736527
  hypo

SEQ ID NO: 13190 - DNA, 41 bp, Homo sapiens; identical to SEQ ID NO: 2390
  chr5:141736531-141736572
  hypo

SEQ ID NO: 13191 - DNA, 36 bp, Homo sapiens; identical to SEQ ID NO: 2391
  chr5:141736579-141736615
  hypo

SEQ ID NO: 13192 - DNA, 31 bp, Homo sapiens
  chr5:141803866-141803897
  hypo
ataggtgtgagccaccgcgcctggctgccag

SEQ ID NO: 13193 - DNA, 31 bp, Homo sapiens
  chr5:141815622-141815653
  hypo
agtggcatttgtttcacggagcacatcaggg

SEQ ID NO: 13194 - DNA, 51 bp, Homo sapiens
  chr5:141850812-141850863
  hypo
gtctgattattagcaacggtaacacacaaagaggagcggggttggggtggg

SEQ ID NO: 13195 - DNA, 7 bp, Homo sapiens
  chr5:141850956-141850963
  hypo
aatggga

SEQ ID NO: 13196 - DNA, 31 bp, Homo sapiens
  chr5:141903303-141903334
  hypo
caggcatgagccaccacgcccaaccccacac

SEQ ID NO: 13197 - DNA, 31 bp, Homo sapiens
  chr5:142054639-142054670
  hypo
gtcgttagaaacaacccggccatcgccttgg

SEQ ID NO: 13198 - DNA, 31 bp, Homo sapiens; identical to SEQ ID NO: 2392
  chr5:142092798-142092829
  hypo

SEQ ID NO: 13199 - DNA, 49 bp, Homo sapiens
  chr5:142239512-142239561
  hypo
ccctcagggctgtcagcgttcccccttactcagtcgtagatataagaca

SEQ ID NO: 13200 - DNA, 47 bp, Homo sapiens
  chr5:142239637-142239684
  hypo
acaaggagccccagtgcgcccgcatgacatcccggttgttgttcctg

SEQ ID NO: 13201 - DNA, 31 bp, Homo sapiens
  chr5:142625702-142625733
  hypo
accgccatttgggcctcgggcctcatgactc

SEQ ID NO: 13202 - DNA, 49 bp, Homo sapiens; identical to SEQ ID NO: 2393
  chr5:142781826-142781875
  hypo

SEQ ID NO: 13203 - DNA, 73 bp, Homo sapiens; identical to SEQ ID NO: 2394
  chr5:142781965-142782038
  hypo

SEQ ID NO: 13204 - DNA, 72 bp, Homo sapiens; identical to SEQ ID NO: 2395
  chr5:142782056-142782128
  hypo

SEQ ID NO: 13205 - DNA, 31 bp, Homo sapiens; identical to SEQ ID NO: 2396
  chr5:142782141-142782172
  hypo

SEQ ID NO: 13206 - DNA, 212 bp, Homo sapiens; identical to SEQ ID NO: 2397
  chr5:142782221-142782433
  hypo

SEQ ID NO: 13207 - DNA, 31 bp, Homo sapiens; identical to SEQ ID NO: 2398
  chr5:142784013-142784044
  hypo

SEQ ID NO: 13208 - DNA, 167 bp, Homo sapiens; identical to SEQ ID NO: 2399
  chr5:142784568-142784735
  hypo

SEQ ID NO: 13209 - DNA, 331 bp, Homo sapiens; identical to SEQ ID NO: 2400
  chr5:142784780-142785111
  hypo

SEQ ID NO: 13210 - DNA, 40 bp, Homo sapiens
  chr5:143182535-143182575
  hypo
ataataaatgacggattattctgggcgttatttcaaatgg

SEQ ID NO: 13211 - DNA, 31 bp, Homo sapiens
  chr5:145379610-145379641
  hypo
gccattgcaggtgcctcgagcaaaggcctta

SEQ ID NO: 13212 - DNA, 31 bp, Homo sapiens
  chr5:145379648-145379679
  hypo
acagagggcagaatcccggtgacctaaggtt

SEQ ID NO: 13213 - DNA, 31 bp, Homo sapiens
  chr5:145379688-145379719
  hypo
agatatcatccttctccggagacagcttgat

SEQ ID NO: 13214 - DNA, 31 bp, Homo sapiens
  chr5:145379738-145379769
  hypo
aaatcaatggcatcagcgggaacttcccagc

SEQ ID NO: 13215 - DNA, 31 bp, Homo sapiens
  chr5:145438102-145438133
  hypo
gaagtcacgatgcagacgtggccttggctca

SEQ ID NO: 13216 - DNA, 56 bp, Homo sapiens
  chr5:147040650-147040706
  hypo
tggccgttttcaggtccgcaatttcctgtaagagcttaaggcgctctgtgtcaaac

SEQ ID NO: 13217 - DNA, 35 bp, Homo sapiens
  chr5:147274325-147274360
  hypo
aaaaaaagggagggatcggccgggaatggtggctc

SEQ ID NO: 13218 - DNA, 31 bp, Homo sapiens
  chr5:148409734-148409765
  hypo
aagagtatgagtgatgcgcaagttacaaaat

SEQ ID NO: 13219 - DNA, 31 bp, Homo sapiens
  chr5:148409804-148409835
  hypo
ccttccctatggtatacgccttggggaagct

SEQ ID NO: 13220 - DNA, 43 bp, Homo sapiens
  chr5:148409889-148409932
  hypo
gcacaaccataaggtgcggactgcacgccgcagagctgcactc

SEQ ID NO: 13221 - DNA, 31 bp, Homo sapiens
  chr5:148669501-148669532
  hypo
gacttaatttatgggccgggtgcggtggctc

SEQ ID NO: 13222 - DNA, 36 bp, Homo sapiens
  chr5:148686934-148686970
  hypo
gtgatggatcctttcccgtgacgcctgcagataatg

SEQ ID NO: 13223 - DNA, 62 bp, Homo sapiens
  chr5:148695864-148695926
  hypo
tggtgggtccagggcacggggaggaagggtgctcaggtcctgtgtgcgcgggctttgggggc

SEQ ID NO: 13224 - DNA, 31 bp, Homo sapiens
  chr5:148695933-148695964
  hypo
aggagacctcatgcctcgtccacctcacccc

SEQ ID NO: 13225 - DNA, 31 bp, Homo sapiens; identical to SEQ ID NO: 2408
  chr5:148724796-148724827
  hypo

SEQ ID NO: 13226 - DNA, 31 bp, Homo sapiens; identical to SEQ ID NO: 2409
  chr5:148724872-148724903
  hypo

SEQ ID NO: 13227 - DNA, 31 bp, Homo sapiens
  chr5:148745523-148745554
  hypo
cacggctatgccttctcgggtgtggaggagc

SEQ ID NO: 13228 - DNA, 31 bp, Homo sapiens
  chr5:148748095-148748126
  hypo
ccgtggaggtgatggccgtggctgccaagaa

SEQ ID NO: 13229 - DNA, 50 bp, Homo sapiens
  chr5:148754032-148754082
  hypo
gaacctggctgaacaccggcacgctcaccatgctgcggtcctcctgcatg

SEQ ID NO: 13230 - DNA, 31 bp, Homo sapiens
  chr5:148823375-148823406
  hypo
cagaggagggtagagacgttaaaatcttaac

SEQ ID NO: 13231 - DNA, 31 bp, Homo sapiens
  chr5:148850848-148850879
  hypo
gcagttcagggtggctcgagagggtggtgga

SEQ ID NO: 13232 - DNA, 18 bp, Homo sapiens
  chr5:148872639-148872657
  hypo
tttgttgttgttgagacg

SEQ ID NO: 13233 - DNA, 59 bp, Homo sapiens
  chr5:148938521-148938580
  hypo
agcccaggcaacagagcgagaccttgtcccaaaaaatataagtacgtattttatttttc

SEQ ID NO: 13234 - DNA, 23 bp, Homo sapiens
  chr5:148976154-148976177
  hypo
accgcacccgggcccttgatact

SEQ ID NO: 13235 - DNA, 62 bp, Homo sapiens
  chr5:148980119-148980181
  hypo
acctaggctaaaaccccggttcagcttttcttccccactgagtactccgtctgttcctctct

SEQ ID NO: 13236 - DNA, 31 bp, Homo sapiens
  chr5:148981577-148981608
  hypo
gagtggggaagtgacacggtttgatttatgt

SEQ ID NO: 13237 - DNA, 31 bp, Homo sapiens
  chr5:148982436-148982467
  hypo
taacctttcctgaacacgaatgatgaggatg

SEQ ID NO: 13238 - DNA, 16 bp, Homo sapiens
  chr5:148982509-148982525
  hypo
ttttgagatggagtct

SEQ ID NO: 13239 - DNA, 90 bp, Homo sapiens
  chr5:148989227-148989317
  hypo
ggcacatccagggcatcgttgaggcggtggtgtgagtagaacggccagtgagcactcgctcctaccccactgacccggttcaggagcagc

SEQ ID NO: 13240 - DNA, 43 bp, Homo sapiens
  chr5:148989329-148989372
  hypo
cctttttcatgccattcgtgctgcttcacgagtgttgctctgt

SEQ ID NO: 13241 - DNA, 37 bp, Homo sapiens
  chr5:148999329-148999366
  hypo
catgggaaaaaacaaacgcactgctgggtgcagtggc

SEQ ID NO: 13242 - DNA, 44 bp, Homo sapiens
  chr5:149006875-149006919
  hypo
accaccccacagaagccggtgcagagacccgggcactcttgtgg

SEQ ID NO: 13243 - DNA, 31 bp, Homo sapiens
  chr5:149270743-149270774
  hypo
taaaatgggctgggtgcggaggctggtgcct

SEQ ID NO: 13244 - DNA, 103 bp, Homo sapiens
  chr5:149323763-149323866
  hypo
tcctctgtgttggggacgttagcaatcttcttagagtgtgcgacatggcccacgatgcccatgtccaaagggaagacgatctcttggtcgggcatcaccaggc

SEQ ID NO: 13245 - DNA, 31 bp, Homo sapiens
  chr5:149333519-149333550
  hypo
catcttgcctttggtccgctctgccaccaca

SEQ ID NO: 13246 - DNA, 52 bp, Homo sapiens
  chr5:149449458-149449510
  hypo
caggagccactccccacgctgttgtgggccctgcactcgtaggtttggttgt

SEQ ID NO: 13247 - DNA, 40 bp, Homo sapiens
  chr5:149501435-149501475
  hypo
cacccaccagagggaacgtagttatcgtaaggggccatgt

SEQ ID NO: 13248 - DNA, 31 bp, Homo sapiens
  chr5:149502536-149502567
  hypo
aaaggaggggaaggagcggtgctcctcaggt

SEQ ID NO: 13249 - DNA, 75 bp, Homo sapiens
  chr5:149503639-149503714
  hypo
agtttctaaaccccaccgccctctgggaccgcgcagtgagggcgctggagcgggtgggcacggaccctccagcag

SEQ ID NO: 13250 - DNA, 31 bp, Homo sapiens
  chr5:149503735-149503766
  hypo
ctgaggggggggtaggcggggcctggccttg

SEQ ID NO: 13251 - DNA, 36 bp, Homo sapiens
  chr5:149573354-149573390
  hypo
cttaaaatatggtgcccggaacggaggaacaaaact

SEQ ID NO: 13252 - DNA, 31 bp, Homo sapiens
  chr5:149573406-149573437
  hypo
aaggagacctggctttcgcatcaggaagcct

SEQ ID NO: 13253 - DNA, 31 bp, Homo sapiens
  chr5:149573467-149573498
  hypo
aacctggtagaaacctcgggtatgtcatgac

SEQ ID NO: 13254 - DNA, 31 bp, Homo sapiens
  chr5:149573511-149573542
  hypo
tcagttttcctcatgacgaaaatggagctta

SEQ ID NO: 13255 - DNA, 31 bp, Homo sapiens
  chr5:149581943-149581974
  hypo
ccctgggtgtgggcttcggggggctcctcac

SEQ ID NO: 13256 - DNA, 55 bp, Homo sapiens
  chr5:149725940-149725995
  hypo
ggagatttacttttctcggtaccctttgcatacctttacacgtttgcatcatgtg

SEQ ID NO: 13257 - DNA, 31 bp, Homo sapiens
  chr5:149726051-149726082
  hypo
aatccagtgctctggccgtgtgagcaggctg

SEQ ID NO: 13258 - DNA, 31 bp, Homo sapiens
  chr5:149726098-149726129
  hypo
gatggtggggtgactcgcggtcagtaagtgg

SEQ ID NO: 13259 - DNA, 42 bp, Homo sapiens
  chr5:149800712-149800754
  hypo
ttttaaattgggtaggcggtttggggacggagatggaaaaaa

SEQ ID NO: 13260 - DNA, 15 bp, Homo sapiens
  chr5:149800845-149800860
  hypo
gtttgcttgtttgag

SEQ ID NO: 13261 - DNA, 27 bp, Homo sapiens
  chr5:149814536-149814563
  hypo
agagaatgcagccaggcgcagtggctc

SEQ ID NO: 13262 - DNA, 31 bp, Homo sapiens
  chr5:149866413-149866444
  hypo
aagttctccctttgcacgcagctctttaacg

SEQ ID NO: 13263 - DNA, 31 bp, Homo sapiens
  chr5:149922920-149922951
  hypo
cccttcagggacaggtcgctggtctttgggc

SEQ ID NO: 13264 - DNA, 31 bp, Homo sapiens
  chr5:149925306-149925337
  hypo
aggtggaggctggttacgcctagaggaagct

SEQ ID NO: 13265 - DNA, 55 bp, Homo sapiens
  chr5:150028667-150028722
  hypo
gccagacaggagcccccggccacagagacacataatgtcccgcagccccatggtg

SEQ ID NO: 13266 - DNA, 31 bp, Homo sapiens
  chr5:150030360-150030391
  hypo
aggctcaagctcctggcgtctttcttcctgt

SEQ ID NO: 13267 - DNA, 31 bp, Homo sapiens
  chr5:150055342-150055373
  hypo
tgcatcccagtgcctacgcgcctgtgctttc

SEQ ID NO: 13268 - DNA, 31 bp, Homo sapiens
  chr5:150446151-150446182
  hypo
accaccatgcttgaatcgcctccttgtcagg

SEQ ID NO: 13269 - DNA, 62 bp, Homo sapiens
  chr5:150446274-150446336
  hypo
aaactgaggctcagggcggttaagtaactcagccacgatgacccggccgcaataagagccaa

SEQ ID NO: 13270 - DNA, 31 bp, Homo sapiens
  chr5:150834190-150834221
  hypo
ccctcttgactctccacgtactgatcctagc

SEQ ID NO: 13271 - DNA, 31 bp, Homo sapiens
  chr5:150885248-150885279
  hypo
ataagagggcccagctcggctgaggcgcata

SEQ ID NO: 13272 - DNA, 31 bp, Homo sapiens
  chr5:150885683-150885714
  hypo
gagctcattttctccccggaaggtttcagct

SEQ ID NO: 13273 - DNA, 311 bp, Homo sapiens; identical to SEQ ID NO: 2410
  chr5:151150429-151150740
  hypo

SEQ ID NO: 13274 - DNA, 62 bp, Homo sapiens
  chr5:153785958-153786020
  hypo
tgattatgtgtgggttcgcagaaccacagagatgcctgaatcaggtgcggccttttattatg

SEQ ID NO: 13275 - DNA, 35 bp, Homo sapiens
  chr5:153786061-153786096
  hypo
tatttgttcagtgggccgggcgtggtggctcatgc

SEQ ID NO: 13276 - DNA, 49 bp, Homo sapiens
  chr5:154318069-154318118
  hypo
tgttcaaccactatcccgtccaacgttttttgagcgctatgtgccaggg

SEQ ID NO: 13277 - DNA, 27 bp, Homo sapiens
  chr5:154318147-154318174
  hypo
gatatgcacaagaggccgggtgcggtg

SEQ ID NO: 13278 - DNA, 18 bp, Homo sapiens
  chr5:156485566-156485584
  hypo
ctccgtctcaaaaaacaa

SEQ ID NO: 13279 - DNA, 31 bp, Homo sapiens
  chr5:156874151-156874182
  hypo
gataggtaagcaccaacgtatttaatgggct

SEQ ID NO: 13280 - DNA, 82 bp, Homo sapiens
  chr5:156874257-156874339
  hypo
aactgtgtaaaaaggcgcggctttttattggcccagcgcctttgtgtgcaaccaatcctgaggtgggcggctgtgtccccgc

SEQ ID NO: 13281 - DNA, 31 bp, Homo sapiens; identical to SEQ ID NO: 2412
  chr5:156887145-156887176
  hypo

SEQ ID NO: 13282 - DNA, 220 bp, Homo sapiens; identical to SEQ ID NO: 2416
  chr5:157002342-157002562
  hypo

SEQ ID NO: 13283 - DNA, 147 bp, Homo sapiens; identical to SEQ ID NO: 2417
  chr5:157002646-157002793
  hypo

SEQ ID NO: 13284 - DNA, 116 bp, Homo sapiens; identical to SEQ ID NO: 2422
  chr5:158526149-158526265
  hypo

SEQ ID NO: 13285 - DNA, 63 bp, Homo sapiens; identical to SEQ ID NO: 2423
  chr5:158526309-158526372
  hypo

SEQ ID NO: 13286 - DNA, 89 bp, Homo sapiens; identical to SEQ ID NO: 2424
  chr5:158527742-158527831
  hypo

SEQ ID NO: 13287 - DNA, 31 bp, Homo sapiens; identical to SEQ ID NO: 2426
  chr5:159228213-159228244
  hypo

SEQ ID NO: 13288 - DNA, 31 bp, Homo sapiens
  chr5:159669396-159669427
  hypo
aagaccttcccttcctcggtcacagaggagt

SEQ ID NO: 13289 - DNA, 62 bp, Homo sapiens
  chr5:159686735-159686797
  hypo
tgctccaacttggggacgtggtcttcccgatcctcgaacttacctgtcggggagcaggggaa

SEQ ID NO: 13290 - DNA, 31 bp, Homo sapiens
  chr5:159686824-159686855
  hypo
gaacccaggaagctaacggcccaccttacag

SEQ ID NO: 13291 - DNA, 31 bp, Homo sapiens
  chr5:159686888-159686919
  hypo
cagacaggccagactgcggaggaataggagc

SEQ ID NO: 13292 - DNA, 37 bp, Homo sapiens
  chr5:159687105-159687142
  hypo
tggaacacaaagcagccgatagcggtcagcagcagca

SEQ ID NO: 13293 - DNA, 31 bp, Homo sapiens
  chr5:159692187-159692218
  hypo
ccaaaagtccttcatgcgtgggaagatgcct

SEQ ID NO: 13294 - DNA, 52 bp, Homo sapiens; identical to SEQ ID NO: 2428
  chr5:159826415-159826467
  hypo

SEQ ID NO: 13295 - DNA, 56 bp, Homo sapiens; identical to SEQ ID NO: 2429
  chr5:159826533-159826589
  hypo

SEQ ID NO: 13296 - DNA, 31 bp, Homo sapiens
  chr5:160498376-160498407
  hypo
cgaataggaacagctccggtctgcagtgcca

SEQ ID NO: 13297 - DNA, 31 bp, Homo sapiens
  chr5:166318065-166318096
  hypo
tcagtcttccatgtcacgcagacggtgggca

SEQ ID NO: 13298 - DNA, 66 bp, Homo sapiens
  chr5:166477137-166477203
  hypo
agggattcccaacccccgggctgcggactggtgttggtccatggcctcttacgaacagggctgcat

SEQ ID NO: 13299 - DNA, 57 bp, Homo sapiens
  chr5:167652912-167652969
  hypo
atcacagctgtttctccgggcataatagggttttgactgtgacgaggggcctcagtg

SEQ ID NO: 13300 - DNA, 49 bp, Homo sapiens
  chr5:167671585-167671634
  hypo
atacttcttcaatgggcgcctggctgggcttcagcgtggggccatgagc

SEQ ID NO: 13301 - DNA, 31 bp, Homo sapiens
  chr5:167689408-167689439
  hypo
gcaaggtgctagagagcggggtgaacgtgac

SEQ ID NO: 13302 - DNA, 36 bp, Homo sapiens
  chr5:167698410-167698446
  hypo
ggaagtgggctgggcgcggtggctcacgccttaatc

SEQ ID NO: 13303 - DNA, 149 bp, Homo sapiens; identical to SEQ ID NO: 2434
  chr5:167718507-167718656
  hypo

SEQ ID NO: 13304 - DNA, 66 bp, Homo sapiens; identical to SEQ ID NO: 2435
  chr5:167718665-167718731
  hypo

SEQ ID NO: 13305 - DNA, 31 bp, Homo sapiens; identical to SEQ ID NO: 2436
  chr5:167718951-167718982
  hypo

SEQ ID NO: 13306 - DNA, 72 bp, Homo sapiens; identical to SEQ ID NO: 2437
  chr5:167719031-167719103
  hypo

SEQ ID NO: 13307 - DNA, 35 bp, Homo sapiens; identical to SEQ ID NO: 2438
  chr5:167719147-167719182
  hypo

SEQ ID NO: 13308 - DNA, 31 bp, Homo sapiens
  chr5:167825007-167825038
  hypo
tgtaccaggcacagtgcgaaatatctcatgt

SEQ ID NO: 13309 - DNA, 31 bp, Homo sapiens
  chr5:167833667-167833698
  hypo
cgggcgcggtggctcacgcctgtaatcccag

SEQ ID NO: 13310 - DNA, 43 bp, Homo sapiens
  chr5:167847700-167847743
  hypo
gggccacttggctgcccgtagcagtaaccgcacagtcttccac

SEQ ID NO: 13311 - DNA, 52 bp, Homo sapiens
  chr5:167853640-167853692
  hypo
aaagcaggaggtctccgcgggctcagcaggcatgggacgcaggctcagcttc

SEQ ID NO: 13312 - DNA, 55 bp, Homo sapiens
  chr5:167853707-167853762
  hypo
tgcagtctcccagacccgccttgtcacccatcgccgtccccggcctgccatgccc

SEQ ID NO: 13313 - DNA, 49 bp, Homo sapiens
  chr5:167853770-167853819
  hypo
gtgcccctcaatgctgcgagcccttgccctgctccggtctgcccgcagg

SEQ ID NO: 13314 - DNA, 31 bp, Homo sapiens
  chr5:167858405-167858436
  hypo
tcgatgtctgtaccaccgacaggagccatct

SEQ ID NO: 13315 - DNA, 45 bp, Homo sapiens
  chr5:167897878-167897923
  hypo
acccactgaactatcccgcccaccctgggacggtccccagtgcca

SEQ ID NO: 13316 - DNA, 31 bp, Homo sapiens
  chr5:168184344-168184375
  hypo
tttttatggccttgcacgcagccaagttcca

SEQ ID NO: 13317 - DNA, 65 bp, Homo sapiens; identical to SEQ ID NO: 2442
  chr5:169064096-169064161
  hypo

SEQ ID NO: 13318 - DNA, 76 bp, Homo sapiens; identical to SEQ ID NO: 2443
  chr5:169064164-169064240
  hypo

SEQ ID NO: 13319 - DNA, 460 bp, Homo sapiens; identical to SEQ ID NO: 2444
  chr5:169064254-169064714
  hypo

SEQ ID NO: 13320 - DNA, 31 bp, Homo sapiens
  chr5:169157435-169157466
  hypo
agatgaatttggacagcgagtcagaggctac

SEQ ID NO: 13321 - DNA, 51 bp, Homo sapiens
  chr5:169157507-169157558
  hypo
gggatttaactaaaaacgcttgtatggcaggtagcacgtataatacttggg

SEQ ID NO: 13322 - DNA, 38 bp, Homo sapiens
  chr5:169157572-169157610
  hypo
tgtgtcatggaccacacgtgtgtcgtaacctctacaag

SEQ ID NO: 13323 - DNA, 31 bp, Homo sapiens
  chr5:169821168-169821199
  hypo
cttccacaggactccccgctggggccttccc

SEQ ID NO: 13324 - DNA, 31 bp, Homo sapiens
  chr5:170169587-170169618
  hypo
aacactgcctccagaccgccacgcgattcgg

SEQ ID NO: 13325 - DNA, 31 bp, Homo sapiens
  chr5:170680140-170680171
  hypo
gattgacaagcccttccgatcacagtagttg

SEQ ID NO: 13326 - DNA, 85 bp, Homo sapiens
  chr5:170863091-170863176
  hypo
cccaggtgctggttgccgaggagaacgtggacttccgcatccacgtggagaaccagacgcgggctcgggacgatgtgagccgtaa

SEQ ID NO: 13327 - DNA, 130 bp, Homo sapiens
  chr5:171533618-171533748
  hypo
ctcaccacttagagggcgtgagcagcgtgggagggtccgacttggcgatctttagcaggacccgcatggggttgagctcgtggtgtggcggctcgatctgggccatctcaatcagcgtgatgcccaggga

SEQ ID NO: 13328 - DNA, 46 bp, Homo sapiens
  chr5:171724014-171724060
  hypo
gaatcccacgggcgtacggcttcaggagtctcgaatcccacgggcg

SEQ ID NO: 13329 - DNA, 31 bp, Homo sapiens
  chr5:171762546-171762577
  hypo
cgcctcacaggcttgccgtaaggattaaagg

SEQ ID NO: 13330 - DNA, 168 bp, Homo sapiens
  chr5:171766443-171766611
  hypo
cttgggagtggggccccggagctgctccgtcctctgccgctcccgctcccgctccagcagctccccctccgacttgatgatggattctttccgcggagggaggctgggcttctcctccatgtcggggtctgagatctcctcgtagcctgctgacgcagacatgtctga

SEQ ID NO: 13331 - DNA, 31 bp, Homo sapiens
  chr5:171766652-171766683
  hypo
tagaccatggcaaccccgagtccatgacacc

SEQ ID NO: 13332 - DNA, 73 bp, Homo sapiens
  chr5:171766796-171766869
  hypo
ccagaaagttgggtctcgacgcgttgctcgtcttcttgtacttgtcaatgaaggtggccggggcccacccttc

SEQ ID NO: 13333 - DNA, 73 bp, Homo sapiens
  chr5:171769328-171769401
  hypo
ctgtcacctcattttacgcatgcagaacggagcctcaggagagctgaggaacacacagcgggtcctgtagaag

SEQ ID NO: 13334 - DNA, 41 bp, Homo sapiens
  chr5:171777274-171777315
  hypo
ctgtgaggatgagggacgatgtgagacgccttgagcacaga

SEQ ID NO: 13335 - DNA, 31 bp, Homo sapiens
  chr5:171777336-171777367
  hypo
ttatcaggagcttgggcgggtgtcactcact

SEQ ID NO: 13336 - DNA, 18 bp, Homo sapiens
  chr5:171782457-171782475
  hypo
acccgggtcccagaaaga

SEQ ID NO: 13337 - DNA, 25 bp, Homo sapiens
  chr5:171818129-171818154
  hypo
ccaccacgcccggcttgcagcttcc

SEQ ID NO: 13338 - DNA, 61 bp, Homo sapiens
  chr5:171821578-171821639
  hypo
atcaattggtatcaggcgtttgacagccacgtcccggatgtggcttcgtctgaagagaatc

SEQ ID NO: 13339 - DNA, 31 bp, Homo sapiens
  chr5:171821706-171821737
  hypo
gagggtgtggacatggcggttcctagggtag

SEQ ID NO: 13340 - DNA, 31 bp, Homo sapiens
  chr5:171821749-171821780
  hypo
ccaaaattcctggctgcgatcaaggtacccc

SEQ ID NO: 13341 - DNA, 45 bp, Homo sapiens
  chr5:171858872-171858917
  hypo
gataccttatttaggccgggcgcagtggctcgtaatcctagatca

SEQ ID NO: 13342 - DNA, 31 bp, Homo sapiens
  chr5:171859508-171859539
  hypo
ttttcaccgctctgcacgtgcccatgtccga

SEQ ID NO: 13343 - DNA, 31 bp, Homo sapiens
  chr5:171859591-171859622
  hypo
agcaagtaggcaaattcgcaaacatgaaatc

SEQ ID NO: 13344 - DNA, 31 bp, Homo sapiens
  chr5:171863585-171863616
  hypo
aagccagggctaccatcgggaggtgctgaga

SEQ ID NO: 13345 - DNA, 31 bp, Homo sapiens
  chr5:171892635-171892666
  hypo
gcaggcgtgaggaaccgcgcctggccaactt

SEQ ID NO: 13346 - DNA, 31 bp, Homo sapiens
  chr5:171916859-171916890
  hypo
caggctctccctggagcgggccagctcagct

SEQ ID NO: 13347 - DNA, 31 bp, Homo sapiens
  chr5:171916917-171916948
  hypo
ccagtcacaagtccaccgtggagtggggtca

SEQ ID NO: 13348 - DNA, 45 bp, Homo sapiens
  chr5:171916965-171917010
  hypo
cctcaaggacagtgggcggcaaaagccctgcgcccctgaggcaac

SEQ ID NO: 13349 - DNA, 31 bp, Homo sapiens
  chr5:172016614-172016645
  hypo
ccaagcacagagctgacgtgctgtctagtga

SEQ ID NO: 13350 - DNA, 31 bp, Homo sapiens
  chr5:172016649-172016680
  hypo
aggcacaagaaggctgcgatgagccttatgg

SEQ ID NO: 13351 - DNA, 33 bp, Homo sapiens
  chr5:172062314-172062347
  hypo
ataaaagtgacttgctcggccgggtgctgtggc

SEQ ID NO: 13352 - DNA, 31 bp, Homo sapiens
  chr5:172097650-172097681
  hypo
cattcattcattcattcgctcactcattcct

SEQ ID NO: 13353 - DNA, 31 bp, Homo sapiens
  chr5:172097714-172097745
  hypo
cactcattcactcattcgcacatgtattcat

SEQ ID NO: 13354 - DNA, 40 bp, Homo sapiens
  chr5:172105003-172105043
  hypo
atcctgggcccactaccgggcccctcgctttcagcccagg

SEQ ID NO: 13355 - DNA, 64 bp, Homo sapiens
  chr5:172113721-172113785
  hypo
cccgtgttctccccaccggagccggcaggcatcaagaatggcgagtgcacggtgtgcttcgatg

SEQ ID NO: 13356 - DNA, 38 bp, Homo sapiens
  chr5:172114001-172114039
  hypo
gctgccagggagtccacgggcagcggccatctctccag

SEQ ID NO: 13357 - DNA, 38 bp, Homo sapiens
  chr5:172114044-172114082
  hypo
ggcaaggtgtgacagtcgtggagcgaggcccacagggc

SEQ ID NO: 13358 - DNA, 31 bp, Homo sapiens
  chr5:172118020-172118051
  hypo
gcctcctggcatttctcggtatttaactgtc

SEQ ID NO: 13359 - DNA, 14 bp, Homo sapiens
  chr5:172235650-172235664
  hypo
gggttcatgccatt

SEQ ID NO: 13360 - DNA, 31 bp, Homo sapiens
  chr5:172235666-172235697
  hypo
cctgcctcagccaccacgcccagcccctaaa

SEQ ID NO: 13361 - DNA, 30 bp, Homo sapiens
  chr5:172235741-172235771
  hypo
ttcccagatggggtatcgctgtgttgtcca

SEQ ID NO: 13362 - DNA, 69 bp, Homo sapiens
  chr5:172346277-172346346
  hypo
tgcacagatgaacagacgtacacgcacacctcctcactgtgggccccccgcccccggggagatgcaacc

SEQ ID NO: 13363 - DNA, 31 bp, Homo sapiens
  chr5:172346379-172346410
  hypo
gtgaccaagaagggatcgtgcttattcaagc

SEQ ID NO: 13364 - DNA, 31 bp, Homo sapiens
  chr5:172346412-172346443
  hypo
ctggagtgacaacccacgagacagccctgcc

SEQ ID NO: 13365 - DNA, 31 bp, Homo sapiens
  chr5:172346455-172346486
  hypo
cacctcttggcaaacacgcccaagactgcag

SEQ ID NO: 13366 - DNA, 31 bp, Homo sapiens
  chr5:172354042-172354073
  hypo
ctcctcctagagtcctcgccctccttagctc

SEQ ID NO: 13367 - DNA, 23 bp, Homo sapiens
  chr5:172384946-172384969
  hypo
ttaactgtgaagggcccggaata

SEQ ID NO: 13368 - DNA, 65 bp, Homo sapiens; identical to SEQ ID NO: 2452
  chr5:172385727-172385792
  hypo

SEQ ID NO: 13369 - DNA, 50 bp, Homo sapiens; identical to SEQ ID NO: 2453
  chr5:172385794-172385844
  hypo

SEQ ID NO: 13370 - DNA, 72 bp, Homo sapiens; identical to SEQ ID NO: 2454
  chr5:172385853-172385925
  hypo

SEQ ID NO: 13371 - DNA, 45 bp, Homo sapiens; identical to SEQ ID NO: 2455
  chr5:172386282-172386327
  hypo

SEQ ID NO: 13372 - DNA, 51 bp, Homo sapiens; identical to SEQ ID NO: 2456
  chr5:172386395-172386446
  hypo

SEQ ID NO: 13373 - DNA, 35 bp, Homo sapiens
  chr5:172454587-172454622
  hypo
tatatatatgtttatacgtacgtgtgggtttttgt

SEQ ID NO: 13374 - DNA, 31 bp, Homo sapiens
  chr5:172724771-172724802
  hypo
attcccgagtagcctccgatattgattggct

SEQ ID NO: 13375 - DNA, 61 bp, Homo sapiens
  chr5:172765670-172765731
  hypo
cacatggggaaaggttcgagggcaaggagagatgatctatggggtgcgcaagtggggatgg

SEQ ID NO: 13376 - DNA, 40 bp, Homo sapiens
  chr5:172765757-172765797
  hypo
gcttggagctaggtgtcgagggattcgagtctcagccttg

SEQ ID NO: 13377 - DNA, 31 bp, Homo sapiens
  chr5:172765836-172765867
  hypo
ctctctgagcttcaatcgggtcaacataggc

SEQ ID NO: 13378 - DNA, 42 bp, Homo sapiens
  chr5:173396937-173396979
  hypo
gtcaaaatacaggttgcgagtcagcagcgctgggagcctgag

SEQ ID NO: 13379 - DNA, 56 bp, Homo sapiens
  chr5:173397036-173397092
  hypo
tagttcttgagaaagccgtgaacgttcagacctgggagtaacgctgtcagaatgag

SEQ ID NO: 13380 - DNA, 21 bp, Homo sapiens
  chr5:173780908-173780929
  hypo
agccaccgtgcctggcctcca

SEQ ID NO: 13381 - DNA, 26 bp, Homo sapiens
  chr5:174056496-174056522
  hypo
gtggaaggacagtgatcgcttagaaa

SEQ ID NO: 13382 - DNA, 24 bp, Homo sapiens
  chr5:174921425-174921449
  hypo
agatcatctttatttgcgacagca

SEQ ID NO: 13383 - DNA, 31 bp, Homo sapiens
  chr5:175337161-175337192
  hypo
ctccacttcaggaatgcgtcccgccatcccc

SEQ ID NO: 13384 - DNA, 31 bp, Homo sapiens
  chr5:175387361-175387392
  hypo
gcaggaaagtgtctccgcgtcacagggacat

SEQ ID NO: 13385 - DNA, 31 bp, Homo sapiens
  chr5:175387428-175387459
  hypo
acaatgttcaccacaacgtgactaacagggg

SEQ ID NO: 13386 - DNA, 62 bp, Homo sapiens
  chr5:175387490-175387552
  hypo
tctttactttcctcttcgaagttttctatacagttttaatctttttacgaagagtgtcaaag

SEQ ID NO: 13387 - DNA, 37 bp, Homo sapiens; identical to SEQ ID NO: 2458
  chr5:175792655-175792692
  hypo

SEQ ID NO: 13388 - DNA, 31 bp, Homo sapiens
  chr5:175831151-175831182
  hypo
attgctgggtgtgactcgccacatagtagct

SEQ ID NO: 13389 - DNA, 31 bp, Homo sapiens
  chr5:175831642-175831673
  hypo
actgggcccacatctccgccacctgccacca

SEQ ID NO: 13390 - DNA, 31 bp, Homo sapiens
  chr5:175871777-175871808
  hypo
acaggcatgagccaccgcgcctggccaacac

SEQ ID NO: 13391 - DNA, 13 bp, Homo sapiens
  chr5:175971446-175971459
  hypo
tctttcctttttt

SEQ ID NO: 13392 - DNA, 31 bp, Homo sapiens
  chr5:175971805-175971836
  hypo
ttgtctgtaagagcaacgaagggactttgta

SEQ ID NO: 13393 - DNA, 31 bp, Homo sapiens
  chr5:175975194-175975225
  hypo
tattatatgtgtggttcgttgttgaccaaaa

SEQ ID NO: 13394 - DNA, 88 bp, Homo sapiens
  chr5:176003231-176003319
  hypo
cagtgggagcctggatcgagtgacggtgtcatgtggtgctgggtggcggtgctggtggtgcagggtgtgatggcggagaatgggggtg

SEQ ID NO: 13395 - DNA, 36 bp, Homo sapiens
  chr5:176003352-176003388
  hypo
agtatcatcctctgggcgatccgtgtggggctgaat

SEQ ID NO: 13396 - DNA, 38 bp, Homo sapiens
  chr5:176003398-176003436
  hypo
gctgagtggaggctgacgtagaacgtcagatgatgctg

SEQ ID NO: 13397 - DNA, 31 bp, Homo sapiens
  chr5:176012686-176012717
  hypo
acaggccagagaagaccgatcaggcattctg

SEQ ID NO: 13398 - DNA, 94 bp, Homo sapiens
  chr5:176012755-176012849
  hypo
catgggagagaagctgcggggcatggggttgaggctgcggggcacggggttgaggctgcggggcacagggttgaggctgcggggcacggggttg

SEQ ID NO: 13399 - DNA, 77 bp, Homo sapiens
  chr5:176016152-176016229
  hypo
ccgaggccgacgtgttcgctgggagcattcagtaactgcgggcggccccgggagggaggttgcggggaggggcccga

SEQ ID NO: 13400 - DNA, 31 bp, Homo sapiens
  chr5:176066107-176066138
  hypo
ttaaacaaagaagttacgtgaccagattaat

SEQ ID NO: 13401 - DNA, 31 bp, Homo sapiens
  chr5:176066139-176066170
  hypo
ttttaaatgatccccccgaggaacctggaga

SEQ ID NO: 13402 - DNA, 31 bp, Homo sapiens
  chr5:176087845-176087876
  hypo
agaacacccaggctggcgagctcctttatct

SEQ ID NO: 13403 - DNA, 31 bp, Homo sapiens
  chr5:176680868-176680899
  hypo
atcaagcagtcctcctcgttcagcctctgaa

SEQ ID NO: 13404 - DNA, 31 bp, Homo sapiens
  chr5:176694902-176694933
  hypo
aatacatgttctctgtcgaaatttttttttc

SEQ ID NO: 13405 - DNA, 76 bp, Homo sapiens
  chr5:176694989-176695065
  hypo
aatctcacaaggcaggcgcattgttaacatttcggcatatgtactcccagacgtaccaatacgcagttatgccccc

SEQ ID NO: 13406 - DNA, 157 bp, Homo sapiens
  chr5:176764099-176764256
  hypo
ctgggctgggaaccaacgcctggcccggcccactcaccagacaggtcgccggtgccggcggaggccccgaagtagtagccggtgggcaggcgcactcccgtgatgtcaatgcagttcttccactcgttcttgtcctccaggtcggtcatcacctgca

SEQ ID NO: 13407 - DNA, 35 bp, Homo sapiens
  chr5:176780527-176780562
  hypo
ttggtcatatatttttcgttcgcttttttattatt

SEQ ID NO: 13408 - DNA, 31 bp, Homo sapiens
  chr5:176912593-176912624
  hypo
tggggactgtgtcacacggaggaggacctct

SEQ ID NO: 13409 - DNA, 31 bp, Homo sapiens
  chr5:176918897-176918928
  hypo
cgcggagggtccgcggcgggggcggaggcct

SEQ ID NO: 13410 - DNA, 42 bp, Homo sapiens
  chr5:176919050-176919092
  hypo
atctatttggaggctacggggagaggacgactcaggtttcaa

SEQ ID NO: 13411 - DNA, 31 bp, Homo sapiens
  chr5:176919217-176919248
  hypo
tgcgtggtgccaggaccgtgcagcagcccct

SEQ ID NO: 13412 - DNA, 46 bp, Homo sapiens
  chr5:176919339-176919385
  hypo
ggcgagcaggcctggccgtccaagcccacaccgcccaccgcccgga

SEQ ID NO: 13413 - DNA, 31 bp, Homo sapiens
  chr5:176926732-176926763
  hypo
actggttcagcagaaacgatgaagttatcct

SEQ ID NO: 13414 - DNA, 80 bp, Homo sapiens
  chr5:176965941-176966021
  hypo
ttcctccatgctctttcggcaactctggcagacccacagaggcatctcgcctaggagattcttgacgagctttggcatga

SEQ ID NO: 13415 - DNA, 31 bp, Homo sapiens
  chr5:176966073-176966104
  hypo
ttcttcccagcctttgcgttcccggtgacac

SEQ ID NO: 13416 - DNA, 44 bp, Homo sapiens
  chr5:177031178-177031222
  hypo
ggtccgggttgctctccggcggcctccctcggaagtgttccgtc

SEQ ID NO: 13417 - DNA, 35 bp, Homo sapiens
  chr5:177031530-177031565
  hypo
ggaccacttcaggtagcgcccgcccccaccctctc

SEQ ID NO: 13418 - DNA, 62 bp, Homo sapiens
  chr5:177310251-177310313
  hypo
aatctgtgacactcttcgtaaaaagattaaaactgtatagaaaacttcgaagaggaaagtaa

SEQ ID NO: 13419 - DNA, 31 bp, Homo sapiens
  chr5:177310340-177310371
  hypo
atgctcctgttagtcacgttgtggtgaacat

SEQ ID NO: 13420 - DNA, 31 bp, Homo sapiens
  chr5:177310407-177310438
  hypo
tgcatgtccctgtgacgcggagacactttcc

SEQ ID NO: 13421 - DNA, 31 bp, Homo sapiens
  chr5:177675598-177675629
  hypo
tggtggctcttccagtcgggccacaaaagca

SEQ ID NO: 13422 - DNA, 40 bp, Homo sapiens
  chr5:177718240-177718280
  hypo
cagtcagcggccagcacgatttatacgtcccaagtatgag

SEQ ID NO: 13423 - DNA, 37 bp, Homo sapiens
  chr5:177964384-177964421
  hypo
tcacagatggggaaaccgaggccgggtggggctgggt

SEQ ID NO: 13424 - DNA, 31 bp, Homo sapiens
  chr5:178006763-178006794
  hypo
cttccctgccactccacgcatccatcactta

SEQ ID NO: 13425 - DNA, 31 bp, Homo sapiens
  chr5:178012189-178012220
  hypo
gttatgagaacttaggcgggccagtggatga

SEQ ID NO: 13426 - DNA, 31 bp, Homo sapiens
  chr5:178224674-178224705
  hypo
ccacatgccactcagacgctaccagaagcag

SEQ ID NO: 13427 - DNA, 152 bp, Homo sapiens; identical to SEQ ID NO: 2464
  chr5:178287096-178287248
  hypo

SEQ ID NO: 13428 - DNA, 31 bp, Homo sapiens; identical to SEQ ID NO: 2465
  chr5:178287336-178287367
  hypo

SEQ ID NO: 13429 - DNA, 199 bp, Homo sapiens; identical to SEQ ID NO: 2466
  chr5:178287401-178287600
  hypo

SEQ ID NO: 13430 - DNA, 31 bp, Homo sapiens
  chr5:178289145-178289176
  hypo
catttgttctctcactcgcacagtagcacaa

SEQ ID NO: 13431 - DNA, 60 bp, Homo sapiens
  chr5:178289252-178289312
  hypo
gcctggctctgagttccgtcggaccacccagtcgtccctgtggtgcgtctttcagagtat

SEQ ID NO: 13432 - DNA, 31 bp, Homo sapiens
  chr5:178291936-178291967
  hypo
tgaatggggacaaactcgaaacagtgatata

SEQ ID NO: 13433 - DNA, 31 bp, Homo sapiens
  chr5:178292217-178292248
  hypo
cctggattggaatccccgctctaccactgaa

SEQ ID NO: 13434 - DNA, 31 bp, Homo sapiens
  chr5:178292250-178292281
  hypo
gctgtgtgactttagacgaattttttttttc

SEQ ID NO: 13435 - DNA, 31 bp, Homo sapiens
  chr5:178293312-178293343
  hypo
tcagagaaacttgtaccgggatgtgatgctg

SEQ ID NO: 13436 - DNA, 46 bp, Homo sapiens
  chr5:178295549-178295595
  hypo
attccagtgaggaccacgtgggaaagacactcggtgctgtgagagt

SEQ ID NO: 13437 - DNA, 31 bp, Homo sapiens
  chr5:178295982-178296013
  hypo
aaaaaagaatggtgttcgtgaaggtccaaag

SEQ ID NO: 13438 - DNA, 42 bp, Homo sapiens
  chr5:178296033-178296075
  hypo
aggtagagccaggcaccgaagagagccgcgggccttgtcata

SEQ ID NO: 13439 - DNA, 31 bp, Homo sapiens
  chr5:178296168-178296199
  hypo
atgtgaggaacctgaccgccacagtgcaggg

SEQ ID NO: 13440 - DNA, 52 bp, Homo sapiens
  chr5:178296224-178296276
  hypo
atggccccttgtgccacgggcccagcgaggagctgcacggcaggcagctttg

SEQ ID NO: 13441 - DNA, 31 bp, Homo sapiens
  chr5:178296294-178296325
  hypo
ctggggagagctttctcgtgatgatagcttg

SEQ ID NO: 13442 - DNA, 44 bp, Homo sapiens
  chr5:178298334-178298378
  hypo
gtctgggactgttcttcgtggcagtcatgcgtccatgtggctca

SEQ ID NO: 13443 - DNA, 24 bp, Homo sapiens
  chr5:178320069-178320093
  hypo
aaaaacaaagctaggccgggcgca

SEQ ID NO: 13444 - DNA, 31 bp, Homo sapiens; identical to SEQ ID NO: 2467
  chr5:178423618-178423649
  hypo

SEQ ID NO: 13445 - DNA, 31 bp, Homo sapiens; identical to SEQ ID NO: 2468
  chr5:178423673-178423704
  hypo

SEQ ID NO: 13446 - DNA, 31 bp, Homo sapiens; identical to SEQ ID NO: 2469
  chr5:178423764-178423795
  hypo

SEQ ID NO: 13447 - DNA, 34 bp, Homo sapiens; identical to SEQ ID NO: 2470
  chr5:178423799-178423833
  hypo

SEQ ID NO: 13448 - DNA, 31 bp, Homo sapiens
  chr5:178451595-178451626
  hypo
ttcaactgctgtttttcgtattgaacaacat

SEQ ID NO: 13449 - DNA, 31 bp, Homo sapiens
  chr5:178551593-178551624
  hypo
agtacagcactgaccacgtggcagccactgg

SEQ ID NO: 13450 - DNA, 31 bp, Homo sapiens
  chr5:178589359-178589390
  hypo
ggtggggggcctgcagcggctggagcccccc

SEQ ID NO: 13451 - DNA, 31 bp, Homo sapiens
  chr5:178589425-178589456
  hypo
aggatgagaccactgtcgagctaagactggg

SEQ ID NO: 13452 - DNA, 37 bp, Homo sapiens
  chr5:178589466-178589503
  hypo
catctgaaggctgtaccggaggcgggtcagctcccag

SEQ ID NO: 13453 - DNA, 34 bp, Homo sapiens
  chr5:178589504-178589538
  hypo
ctcattcaggtggtcacggcgggccccagctgag

SEQ ID NO: 13454 - DNA, 31 bp, Homo sapiens
  chr5:178652178-178652209
  hypo
actctcaattcagccccgcacagccaagggc

SEQ ID NO: 13455 - DNA, 31 bp, Homo sapiens
  chr5:178744775-178744806
  hypo
ccctggccagactcatcgccagctggggaga

SEQ ID NO: 13456 - DNA, 55 bp, Homo sapiens; identical to SEQ ID NO: 2471
  chr5:179234472-179234527
  hypo

SEQ ID NO: 13457 - DNA, 23 bp, Homo sapiens
  chr5:179234921-179234944
  hypo
attacaggcgtgagccaccacgc

SEQ ID NO: 13458 - DNA, 95 bp, Homo sapiens; identical to SEQ ID NO: 2472
  chr5:179246494-179246589
  hypo

SEQ ID NO: 13459 - DNA, 31 bp, Homo sapiens
  chr5:179293875-179293906
  hypo
caggtggcattatggtcggttttgcaagtgt

SEQ ID NO: 13460 - DNA, 31 bp, Homo sapiens
  chr5:179383617-179383648
  hypo
ctgatcctgctctgtgcggtcctcactgtgt

SEQ ID NO: 13461 - DNA, 99 bp, Homo sapiens
  chr5:179473084-179473183
  hypo
ggcatctgaggccccacgagaatctgtgcgcggtggaccgcggcgcgtgcaggcccacagtgctgagggacccagcgcaccctccgcagctgctggccc

SEQ ID NO: 13462 - DNA, 66 bp, Homo sapiens
  chr5:179473189-179473255
  hypo
taagcccctcactgaccggggcaggtgcagggcccgccaagctcacacccacgcagaactccaggg

SEQ ID NO: 13463 - DNA, 31 bp, Homo sapiens
  chr5:179503668-179503699
  hypo
aagcctgcatgcctctcggtggggatgtgtc

SEQ ID NO: 13464 - DNA, 31 bp, Homo sapiens
  chr5:179503704-179503735
  hypo
ctctgagagtgtccttcggagtgggatgctg

SEQ ID NO: 13465 - DNA, 49 bp, Homo sapiens
  chr5:179503741-179503790
  hypo
gtgcaggcatgtatttcgtgttggtaggcactggcgccatattttcaag

SEQ ID NO: 13466 - DNA, 31 bp, Homo sapiens
  chr5:179503826-179503857
  hypo
gtgtcttccctccccacgcccacctcctgct

SEQ ID NO: 13467 - DNA, 42 bp, Homo sapiens
  chr5:179545454-179545496
  hypo
ggtggtgagttccccacgctggaggcacgcaagcaaggagac

SEQ ID NO: 13468 - DNA, 31 bp, Homo sapiens
  chr5:179547026-179547057
  hypo
ccaggctcggccctctcgcctgcagccagcg

SEQ ID NO: 13469 - DNA, 70 bp, Homo sapiens
  chr5:179547318-179547388
  hypo
caactcctgtgtccatcgccacgtcgcatggggccgcctcctctctactcttctccgcaggtgtggaccc

SEQ ID NO: 13470 - DNA, 23 bp, Homo sapiens
  chr5:179725477-179725500
  hypo
acgcctgtaatcccagcgctttg

SEQ ID NO: 13471 - DNA, 74 bp, Homo sapiens
  chr5:179726330-179726404
  hypo
ctagtggaggcagtgccgccctctccttgcaccgccagcatgcactcaccctccactttcgaactaggcagtgt

SEQ ID NO: 13472 - DNA, 34 bp, Homo sapiens
  chr5:179726461-179726495
  hypo
caaaagtcagaatggccgtcgcctcttgggcata

SEQ ID NO: 13473 - DNA, 36 bp, Homo sapiens
  chr5:179731618-179731654
  hypo
gtgcactccccacaggcggcccgggggagggtgtgt

SEQ ID NO: 13474 - DNA, 53 bp, Homo sapiens
  chr5:179731759-179731812
  hypo
gagagccctcacctggcgggccgtgacttgctgcagggcgttctggcatttgg

SEQ ID NO: 13475 - DNA, 31 bp, Homo sapiens
  chr5:179773468-179773499
  hypo
caccccaccagggcctcggtgaccacggcaa

SEQ ID NO: 13476 - DNA, 20 bp, Homo sapiens
  chr5:179826083-179826103
  hypo
tgccacggcctcccaaagtg

SEQ ID NO: 13477 - DNA, 31 bp, Homo sapiens
  chr5:179903411-179903442
  hypo
tgcttcacggtttggacgcatgacagtctgt

SEQ ID NO: 13478 - DNA, 24 bp, Homo sapiens
  chr5:180024540-180024564
  hypo
caccgcgcccggcctctcagctcc

SEQ ID NO: 13479 - DNA, 37 bp, Homo sapiens
  chr5:180036854-180036891
  hypo
ggccccagccctgagccgagagcgcagcccccaccct

SEQ ID NO: 13480 - DNA, 58 bp, Homo sapiens
  chr5:180047268-180047326
  hypo
tgatggacaggtagcccgtcttgatgtctgcgtgggccggctgcggggaggggacagg

SEQ ID NO: 13481 - DNA, 75 bp, Homo sapiens
  chr5:180502177-180502252
  hypo
gccagtcatgatggcacgtgcctgtggtcccagatatttggacggctgagctgggagggtcggttgagcccagga

SEQ ID NO: 13482 - DNA, 19 bp, Homo sapiens
  chr5:180502315-180502334
  hypo
gggacgaggaaagagggaa

SEQ ID NO: 13483 - DNA, 31 bp, Homo sapiens
  chr5:180657109-180657140
  hypo
tggaaagactctggtgcggggctcaagccac

SEQ ID NO: 13484 - DNA, 31 bp, Homo sapiens
  chr5:180657141-180657172
  hypo
tcccctcagctgtgagcgtgggagctctcta

SEQ ID NO: 13485 - DNA, 20 bp, Homo sapiens
  chr5:180657194-180657214
  hypo
agaatacacacagggccggc

SEQ ID NO: 13486 - DNA, 42 bp, Homo sapiens; identical to SEQ ID NO: 2476
  chr5:180673931-180673973
  hypo

SEQ ID NO: 13487 - DNA, 83 bp, Homo sapiens; identical to SEQ ID NO: 2477
  chr5:180674032-180674115
  hypo

SEQ ID NO: 13488 - DNA, 47 bp, Homo sapiens; identical to SEQ ID NO: 2478
  chr5:180674116-180674163
  hypo

SEQ ID NO: 13489 - DNA, 31 bp, Homo sapiens; identical to SEQ ID NO: 2479
  chr5:180674175-180674206
  hypo

SEQ ID NO: 13490 - DNA, 44 bp, Homo sapiens; identical to SEQ ID NO: 2480
  chr5:180674226-180674270
  hypo

SEQ ID NO: 13491 - DNA, 242 bp, Homo sapiens; identical to SEQ ID NO: 2484
  chr6:391402-391644
  hypo

SEQ ID NO: 13492 - DNA, 72 bp, Homo sapiens; identical to SEQ ID NO: 2485
  chr6:391647-391719
  hypo

SEQ ID NO: 13493 - DNA, 112 bp, Homo sapiens; identical to SEQ ID NO: 2486
  chr6:391726-391838
  hypo

SEQ ID NO: 13494 - DNA, 51 bp, Homo sapiens; identical to SEQ ID NO: 2487
  chr6:391848-391899
  hypo

SEQ ID NO: 13495 - DNA, 24 bp, Homo sapiens
  chr6:392409-392433
  hypo
gctctcccgggcctgctccggggt

SEQ ID NO: 13496 - DNA, 371 bp, Homo sapiens; identical to SEQ ID NO: 2489
  chr6:392587-392958
  hypo

SEQ ID NO: 13497 - DNA, 348 bp, Homo sapiens; identical to SEQ ID NO: 2490
  chr6:393124-393472
  hypo

SEQ ID NO: 13498 - DNA, 31 bp, Homo sapiens
  chr6:623146-623177
  hypo
cccgtgcaccacaggccgctgggaggacacg

SEQ ID NO: 13499 - DNA, 156 bp, Homo sapiens; identical to SEQ ID NO: 2492
  chr6:711029-711185
  hypo

SEQ ID NO: 13500 - DNA, 66 bp, Homo sapiens; identical to SEQ ID NO: 2493
  chr6:711244-711310
  hypo

SEQ ID NO: 13501 - DNA, 31 bp, Homo sapiens
  chr6:1001881-1001912
  hypo
cagctcccccctcacacggaaccttttgatg

SEQ ID NO: 13502 - DNA, 31 bp, Homo sapiens
  chr6:1317676-1317707
  hypo
tgtttggtttgggactcgccctttgacacct

SEQ ID NO: 13503 - DNA, 74 bp, Homo sapiens
  chr6:1666396-1666470
  hypo
atgaagcagcaaaggccgtgagagtccctgagggtcaagtcgctctgagatcctagagacgggagtcctgctct

SEQ ID NO: 13504 - DNA, 37 bp, Homo sapiens
  chr6:1679634-1679671
  hypo
aatttaggtcagctgacgcaagcgctgagaagctgaa

SEQ ID NO: 13505 - DNA, 31 bp, Homo sapiens
  chr6:1679719-1679750
  hypo
ccagctaatgctgctccgtgctgatctgctc

SEQ ID NO: 13506 - DNA, 31 bp, Homo sapiens
  chr6:1679758-1679789
  hypo
tcatacctgttggtatcgaccttgtaagaag

SEQ ID NO: 13507 - DNA, 31 bp, Homo sapiens
  chr6:1679793-1679824
  hypo
agatccatgagtggcccgtgatgactgaaca

SEQ ID NO: 13508 - DNA, 49 bp, Homo sapiens
  chr6:1708612-1708661
  hypo
gtagggggcttgcactcgaaaccacctctgaaggcgttgtcaatacagc

SEQ ID NO: 13509 - DNA, 58 bp, Homo sapiens
  chr6:2127866-2127924
  hypo
gtgatagggcctgggccgcacaatgagtgggaaacgagccgagcgagggctcctggtc

SEQ ID NO: 13510 - DNA, 39 bp, Homo sapiens
  chr6:2127932-2127971
  hypo
agggggcccagctggccgccccctcgtcctttccccagg

SEQ ID NO: 13511 - DNA, 52 bp, Homo sapiens
  chr6:2127978-2128030
  hypo
gggactccaggagagacgtggtatctgagcaggcagacgtccgccaagccaa

SEQ ID NO: 13512 - DNA, 31 bp, Homo sapiens
  chr6:2803700-2803731
  hypo
gcctgcaggtgacagcgcgcgtggaaagtct

SEQ ID NO: 13513 - DNA, 64 bp, Homo sapiens
  chr6:2907532-2907596
  hypo
aggttgtgtgtgtgctcgagtacgtgtgtcgaggttgtgtgtgtgtgctcgagtatgtgtgtcc

SEQ ID NO: 13514 - DNA, 31 bp, Homo sapiens; identical to SEQ ID NO: 2502
  chr6:2999296-2999327
  hypo

SEQ ID NO: 13515 - DNA, 78 bp, Homo sapiens
  chr6:3065513-3065591
  hypo
aaaaaaaaaaaagacacggctttctgaggtgccgtgcggctgtggcgggggtggctgggggtgcgggttgtgttcatt

SEQ ID NO: 13516 - DNA, 64 bp, Homo sapiens
  chr6:3065598-3065662
  hypo
gctctccagtgctttgcgtggcgttttggggagcacagatgaggtgtcccgacagtggggagtg

SEQ ID NO: 13517 - DNA, 76 bp, Homo sapiens
  chr6:3115742-3115818
  hypo
tgggcagagccaatgacgacacagaccagcaaagcagaaccgagactgtccgcacttggttcggaaacaaatactc

SEQ ID NO: 13518 - DNA, 31 bp, Homo sapiens
  chr6:3115825-3115856
  hypo
aggttattgctggtaacggagacctccttcc

SEQ ID NO: 13519 - DNA, 31 bp, Homo sapiens
  chr6:3115911-3115942
  hypo
tgctttgggtctgtcacgtgaggttagggtt

SEQ ID NO: 13520 - DNA, 31 bp, Homo sapiens
  chr6:3132219-3132250
  hypo
cccttgcctcggtcaccgcagtgggaactca

SEQ ID NO: 13521 - DNA, 58 bp, Homo sapiens
  chr6:3132290-3132348
  hypo
aagagtctctcagtagcgcagcactctttactctctgacgtctcgctacttcccctcc

SEQ ID NO: 13522 - DNA, 31 bp, Homo sapiens
  chr6:3143423-3143454
  hypo
cccgggcaacaagagccgaaaccctctctga

SEQ ID NO: 13523 - DNA, 27 bp, Homo sapiens
  chr6:3154184-3154211
  hypo
tcgttcatgttgctctcggcctcggtg

SEQ ID NO: 13524 - DNA, 58 bp, Homo sapiens; identical to SEQ ID NO: 2503
  chr6:3162904-3162962
  hypo

SEQ ID NO: 13525 - DNA, 41 bp, Homo sapiens
  chr6:3177386-3177427
  hypo
gttcaccgccagcttgcgcaggtctacgttcagctggcccg

SEQ ID NO: 13526 - DNA, 31 bp, Homo sapiens
  chr6:3281276-3281307
  hypo
ctcacctggacccctccgtgagggcaaagga

SEQ ID NO: 13527 - DNA, 31 bp, Homo sapiens
  chr6:3281342-3281373
  hypo
gtggatagaaaagatccgccccagcacagcc

SEQ ID NO: 13528 - DNA, 37 bp, Homo sapiens
  chr6:3289594-3289631
  hypo
gcaggttcaggaagggcggggccggctacaggcaggg

SEQ ID NO: 13529 - DNA, 31 bp, Homo sapiens
  chr6:3289980-3290011
  hypo
tgtcctctgtgactcacgagttcacacacag

SEQ ID NO: 13530 - DNA, 43 bp, Homo sapiens
  chr6:3290702-3290745
  hypo
catgcacacattcatacgcatgcatatacgtgtgcatgtttta

SEQ ID NO: 13531 - DNA, 40 bp, Homo sapiens
  chr6:3290815-3290855
  hypo
gactgagtttcttgtgcggctccagcggctctgaaagccc

SEQ ID NO: 13532 - DNA, 31 bp, Homo sapiens
  chr6:3292642-3292673
  hypo
tgggcaacagggagcccggccaggttgtggg

SEQ ID NO: 13533 - DNA, 31 bp, Homo sapiens
  chr6:3302109-3302140
  hypo
gggaaaatccaaaatgcggcatatttgagta

SEQ ID NO: 13534 - DNA, 56 bp, Homo sapiens
  chr6:3302174-3302230
  hypo
taaagcccttgtaaaacgagttggaagaattccttctgtttcgtttttttggggaa

SEQ ID NO: 13535 - DNA, 31 bp, Homo sapiens
  chr6:3316814-3316845
  hypo
tcactggggagcttgtcgaactagcatcaaa

SEQ ID NO: 13536 - DNA, 37 bp, Homo sapiens
  chr6:3316854-3316891
  hypo
ctactcttagagcagacgagcacgttgttttttaaga

SEQ ID NO: 13537 - DNA, 31 bp, Homo sapiens
  chr6:3317655-3317686
  hypo
ccacctatcttcctagcgcatctaagcagaa

SEQ ID NO: 13538 - DNA, 26 bp, Homo sapiens
  chr6:3362338-3362364
  hypo
actttaaaaaaattagcggccaggtg

SEQ ID NO: 13539 - DNA, 31 bp, Homo sapiens
  chr6:3368646-3368677
  hypo
gtgtgtaagagatatgcgcttttccagggga

SEQ ID NO: 13540 - DNA, 31 bp, Homo sapiens
  chr6:3441918-3441949
  hypo
cctcctgggatgtgctcggttcaccccccac

SEQ ID NO: 13541 - DNA, 31 bp, Homo sapiens
  chr6:3441955-3441986
  hypo
ctcccattccctgccccgctcatcctgtgcc

SEQ ID NO: 13542 - DNA, 277 bp, Homo sapiens; identical to SEQ ID NO: 2508
  chr6:3456740-3457017
  hypo

SEQ ID NO: 13543 - DNA, 188 bp, Homo sapiens; identical to SEQ ID NO: 2509
  chr6:3457076-3457264
  hypo

SEQ ID NO: 13544 - DNA, 67 bp, Homo sapiens; identical to SEQ ID NO: 2510
  chr6:3457536-3457603
  hypo

SEQ ID NO: 13545 - DNA, 31 bp, Homo sapiens; identical to SEQ ID NO: 2511
  chr6:3457811-3457842
  hypo

SEQ ID NO: 13546 - DNA, 31 bp, Homo sapiens
  chr6:3466107-3466138
  hypo
tgtggtagttggtacacggcatttccgtaat

SEQ ID NO: 13547 - DNA, 51 bp, Homo sapiens
  chr6:3580030-3580081
  hypo
cttctccatcagaccccgtgagaaccacaatggacacgtgtcaggtagcag

SEQ ID NO: 13548 - DNA, 36 bp, Homo sapiens
  chr6:3618240-3618276
  hypo
tcgagcctaagtcttacggcacgttgtgcagtttgg

SEQ ID NO: 13549 - DNA, 31 bp, Homo sapiens
  chr6:3618581-3618612
  hypo
gtggaggcagtggttgcggtgagattcatag

SEQ ID NO: 13550 - DNA, 72 bp, Homo sapiens
  chr6:3725376-3725448
  hypo
aagggggaaccttgggcgtgccgaaaggttcaagccagtcgagggacagagccacagcgccacctcaaacag

SEQ ID NO: 13551 - DNA, 31 bp, Homo sapiens
  chr6:3725747-3725778
  hypo
cccctggggccagactcggggcagcctgctg

SEQ ID NO: 13552 - DNA, 31 bp, Homo sapiens
  chr6:3738058-3738089
  hypo
cccagggaggaaaaaccggggccactggagc

SEQ ID NO: 13553 - DNA, 69 bp, Homo sapiens
  chr6:3738119-3738188
  hypo
ctgcacacctccactccgtccctatcgcctggtactaccagggagggaacaaaacggctaagtgagaca

SEQ ID NO: 13554 - DNA, 19 bp, Homo sapiens
  chr6:3758266-3758285
  hypo
gcctcctcggcctgggcgc

SEQ ID NO: 13555 - DNA, 31 bp, Homo sapiens
  chr6:3810823-3810854
  hypo
agtagctgaatcttgccgtatttcttacacc

SEQ ID NO: 13556 - DNA, 53 bp, Homo sapiens
  chr6:3821399-3821452
  hypo
ccataaatagggcatccgtagacctgagcagccagttgcggagaagttgagag

SEQ ID NO: 13557 - DNA, 31 bp, Homo sapiens
  chr6:3895146-3895177
  hypo
gtgttgggcctctactcggttgacttccagt

SEQ ID NO: 13558 - DNA, 31 bp, Homo sapiens
  chr6:3931975-3932006
  hypo
cgtgagccaccatgcccggccaccatgatta

SEQ ID NO: 13559 - DNA, 31 bp, Homo sapiens
  chr6:4020338-4020369
  hypo
ccctaacatttcaaaacgtttggaattcagg

SEQ ID NO: 13560 - DNA, 31 bp, Homo sapiens
  chr6:4160622-4160653
  hypo
tacagcaatgtgagaacggactcatactgtg

SEQ ID NO: 13561 - DNA, 31 bp, Homo sapiens
  chr6:4165190-4165221
  hypo
tgccatcttccacccccgagggagggctggg

SEQ ID NO: 13562 - DNA, 22 bp, Homo sapiens
  chr6:4166997-4167019
  hypo
gatcaagggccaggtgcggtgg

SEQ ID NO: 13563 - DNA, 40 bp, Homo sapiens
  chr6:4254743-4254783
  hypo
acatgagagctggcatcgaaggatacgtatgacttgactc

SEQ ID NO: 13564 - DNA, 42 bp, Homo sapiens
  chr6:4254840-4254882
  hypo
tgtggggctgcccatacgtcgcagactcgggaccagatcact

SEQ ID NO: 13565 - DNA, 42 bp, Homo sapiens; identical to SEQ ID NO: 13564
  chr6:4254889-4254931
  hypo

SEQ ID NO: 13566 - DNA, 77 bp, Homo sapiens; identical to SEQ ID NO: 2512
  chr6:4776193-4776270
  hypo

SEQ ID NO: 13567 - DNA, 17 bp, Homo sapiens
  chr6:4836441-4836458
  hypo
ttcggccatcttggctc

SEQ ID NO: 13568 - DNA, 31 bp, Homo sapiens
  chr6:4836551-4836582
  hypo
aattatttattttatacgtgtgctttcagaa

SEQ ID NO: 13569 - DNA, 31 bp, Homo sapiens
  chr6:4874126-4874157
  hypo
tgctcattctggttcccgccttctgcctgtc

SEQ ID NO: 13570 - DNA, 21 bp, Homo sapiens
  chr6:4886532-4886553
  hypo
gaacaacgagactgttttcca

SEQ ID NO: 13571 - DNA, 93 bp, Homo sapiens
  chr6:4951246-4951339
  hypo
ggcagtgagtcagccacgtgtttgctttgccgcctctgcctgtgtgctctccaagctgcgggtttcacatgcagtaaacggcatcaagacatt

SEQ ID NO: 13572 - DNA, 31 bp, Homo sapiens
  chr6:4951359-4951390
  hypo
tcttacactgtctcagcgacttcagggccaa

SEQ ID NO: 13573 - DNA, 83 bp, Homo sapiens
  chr6:5507944-5508027
  hypo
cctctcagtggcctcccggctagtgggtcagactgcggacacgccatgatggcacacagagagaagaccggagggagcagagg

SEQ ID NO: 13574 - DNA, 31 bp, Homo sapiens
  chr6:5508096-5508127
  hypo
gcctgttaaaacctgacgatccaaatgggat

SEQ ID NO: 13575 - DNA, 31 bp, Homo sapiens
  chr6:5508132-5508163
  hypo
gccagagcttatgccccgaggtaggagaagg

SEQ ID NO: 13576 - DNA, 69 bp, Homo sapiens
  chr6:6045509-6045578
  hypo
gaaatgagagttgggacgtgctaagcagcacgctggtagcatccttcttacctacgtgcactgaagccc

SEQ ID NO: 13577 - DNA, 31 bp, Homo sapiens
  chr6:6045601-6045632
  hypo
tctttacctactggtgcgccttacttaagtc

SEQ ID NO: 13578 - DNA, 31 bp, Homo sapiens
  chr6:6045656-6045687
  hypo
ctataaaatcacaactcggaagcactatgaa

SEQ ID NO: 13579 - DNA, 31 bp, Homo sapiens
  chr6:6558351-6558382
  hypo
cagagtcatccaagttcgtacaagttgattc

SEQ ID NO: 13580 - DNA, 31 bp, Homo sapiens
  chr6:6668387-6668418
  hypo
tccatcccaagatggccgaataggaacagct

SEQ ID NO: 13581 - DNA, 31 bp, Homo sapiens
  chr6:6753684-6753715
  hypo
atgtgtgccagaagggcggcacacctgagag

SEQ ID NO: 13582 - DNA, 31 bp, Homo sapiens
  chr6:6824563-6824594
  hypo
gggagataaacagatgcgtggcattccacag

SEQ ID NO: 13583 - DNA, 41 bp, Homo sapiens
  chr6:6824666-6824707
  hypo
gaaattcccactcctacgctcagtgacgggatcatcagagc

SEQ ID NO: 13584 - DNA, 44 bp, Homo sapiens
  chr6:6824713-6824757
  hypo
gcttcttggccatggtcgtgcacagccatcgccagccaccctgg

SEQ ID NO: 13585 - DNA, 17 bp, Homo sapiens
  chr6:6849734-6849751
  hypo
ggcgcccagccataaga

SEQ ID NO: 13586 - DNA, 31 bp, Homo sapiens
  chr6:6898398-6898429
  hypo
gtgttgtttcagtggacgctctaatcagatg

SEQ ID NO: 13587 - DNA, 31 bp, Homo sapiens
  chr6:6982818-6982849
  hypo
tccattgcaacgcagacgccaaatattagca

SEQ ID NO: 13588 - DNA, 31 bp, Homo sapiens
  chr6:6982881-6982912
  hypo
aaggtgtattaaccatcggtcaatggagaaa

SEQ ID NO: 13589 - DNA, 31 bp, Homo sapiens
  chr6:6984973-6985004
  hypo
gaatgtggccagatggcgtttggactttgtc

SEQ ID NO: 13590 - DNA, 31 bp, Homo sapiens
  chr6:7040003-7040034
  hypo
acttctcttttttttacgaagaagggagagc

SEQ ID NO: 13591 - DNA, 83 bp, Homo sapiens
  chr6:7230352-7230435
  hypo
acatctgcgactacatcgccgccgacaaggccgcgctcatccgccacctgcgcacgcacagtggggagcggccctacatttgc

SEQ ID NO: 13592 - DNA, 31 bp, Homo sapiens
  chr6:7268059-7268090
  hypo
atgcagcttcctgggtcggctccctgagatt

SEQ ID NO: 13593 - DNA, 56 bp, Homo sapiens
  chr6:7271970-7272026
  hypo
aggtgcctctgggatacgggtgtttggctgggtctaccgttcgctggagagagtgg

SEQ ID NO: 13594 - DNA, 69 bp, Homo sapiens
  chr6:7415146-7415215
  hypo
ggaatgtgaatcatcacgtggtccagcgtcttcacactgtcgacactccccacccgttagtcacttagt

SEQ ID NO: 13595 - DNA, 31 bp, Homo sapiens
  chr6:7415279-7415310
  hypo
tttgcttaataatgaccgtaaattacaggag

SEQ ID NO: 13596 - DNA, 232 bp, Homo sapiens; identical to SEQ ID NO: 2513
  chr6:7541474-7541706
  hypo

SEQ ID NO: 13597 - DNA, 90 bp, Homo sapiens; identical to SEQ ID NO: 2514
  chr6:7541771-7541861
  hypo

SEQ ID NO: 13598 - DNA, 31 bp, Homo sapiens
  chr6:7583974-7584005
  hypo
atccctgaatgatccccgagatagtcagaaa

SEQ ID NO: 13599 - DNA, 31 bp, Homo sapiens
  chr6:7692045-7692076
  hypo
ccgtgtggtgagatgacggcctggtaagcac

SEQ ID NO: 13600 - DNA, 31 bp, Homo sapiens
  chr6:7884118-7884149
  hypo
aacccaagcacaggaccgacttgctggcatg

SEQ ID NO: 13601 - DNA, 36 bp, Homo sapiens
  chr6:7884219-7884255
  hypo
atgtgtgaaaaatgagcgactcgggtatttatggca

SEQ ID NO: 13602 - DNA, 31 bp, Homo sapiens
  chr6:7884273-7884304
  hypo
tcaatcatcaagagtcgcggtgtgggaagcc

SEQ ID NO: 13603 - DNA, 31 bp, Homo sapiens
  chr6:7884500-7884531
  hypo
gagcagagtgagttatcgtggttgaggcaca

SEQ ID NO: 13604 - DNA, 31 bp, Homo sapiens
  chr6:7885607-7885638
  hypo
actatacagtcattcacggtaagtcttagaa

SEQ ID NO: 13605 - DNA, 56 bp, Homo sapiens
  chr6:7885682-7885738
  hypo
ctggtctccaagaccacgtggcatgcaggttcaggaaactgcgtagcatactgaat

SEQ ID NO: 13606 - DNA, 48 bp, Homo sapiens
  chr6:7885763-7885811
  hypo
ctctacaaaagaaatccgagtacttaaaagaaccgaggagcaaagcta

SEQ ID NO: 13607 - DNA, 31 bp, Homo sapiens
  chr6:7887586-7887617
  hypo
ctgccacctacacagccgaaagccttgaaga

SEQ ID NO: 13608 - DNA, 44 bp, Homo sapiens
  chr6:7887635-7887679
  hypo
agctcatccctttcctcgagctctggccccgcccctgtgctggg

SEQ ID NO: 13609 - DNA, 80 bp, Homo sapiens
  chr6:7887684-7887764
  hypo
tcctccaccagatatgcgggaatcagactcgcctcggaccctccctccctctccgcgctgcacagcggctggactcctta

SEQ ID NO: 13610 - DNA, 66 bp, Homo sapiens
  chr6:7887766-7887832
  hypo
ctggctttctcctcctcgccatcgcacagtcacggctgcagcatgagggaacgcatcatctttaaa

SEQ ID NO: 13611 - DNA, 40 bp, Homo sapiens
  chr6:7887849-7887889
  hypo
tcccacctccagcacacgtgcatgccggtcattttcctac

SEQ ID NO: 13612 - DNA, 36 bp, Homo sapiens
  chr6:7888465-7888501
  hypo
cagtcactggcctgatcgctgcggatgccctcttgg

SEQ ID NO: 13613 - DNA, 80 bp, Homo sapiens
  chr6:7888512-7888592
  hypo
ctaggggcctttacaacgggtaaaggaaaatgcccggagcaaggtcaggaatagaatcagggccccggggccagcagtcg

SEQ ID NO: 13614 - DNA, 54 bp, Homo sapiens
  chr6:7888731-7888785
  hypo
agcttttgtttgcattcgcccctgaaagcatgtgaaagtcgatgaaaaatacgt

SEQ ID NO: 13615 - DNA, 175 bp, Homo sapiens
  chr6:7888872-7889047
  hypo
tggggaggtggggggccgggggccacgggccacttatggggatcccgactccagcaggcacccaccttgtcagcctcgggctcagctgccagcaccggggcctctgagggcgtgacggtctccgtcgctccagtctctgtgcgctgcagctgcgactccacgtactccctcagtg

SEQ ID NO: 13616 - DNA, 38 bp, Homo sapiens
  chr6:7889077-7889115
  hypo
ccacctggccaagacacgggcacgcggctgagtgagtc

SEQ ID NO: 13617 - DNA, 57 bp, Homo sapiens
  chr6:7889148-7889205
  hypo
gcaacccctgcttgcccgggtcagagctcccagatgtcttagcggtggtgcaaagtc

SEQ ID NO: 13618 - DNA, 61 bp, Homo sapiens
  chr6:7889207-7889268
  hypo
catgttcatatttagacgggaatgtagagaggataactgaatgcctcggctttggtgagag

SEQ ID NO: 13619 - DNA, 31 bp, Homo sapiens
  chr6:7889278-7889309
  hypo
gcccctcttccctccacggggttacacatca

SEQ ID NO: 13620 - DNA, 31 bp, Homo sapiens
  chr6:7889325-7889356
  hypo
aggcctgccagcaagccgttgtgctgatggg

SEQ ID NO: 13621 - DNA, 31 bp, Homo sapiens
  chr6:7890516-7890547
  hypo
tcactatgtcagcaaacgggggtaaaaatac

SEQ ID NO: 13622 - DNA, 52 bp, Homo sapiens
  chr6:7890550-7890602
  hypo
ttcaacacctaagacccgtcagagagcagctaaggtgcggaactgaagtaca

SEQ ID NO: 13623 - DNA, 31 bp, Homo sapiens
  chr6:7890605-7890636
  hypo
ggcctcagcccaaggtcgggagaggacaagc

SEQ ID NO: 13624 - DNA, 59 bp, Homo sapiens
  chr6:7890675-7890734
  hypo
ggatgaagggcttcagcgtggtcacctgggcttgtgtctgctcacgcctaggtctgcta

SEQ ID NO: 13625 - DNA, 31 bp, Homo sapiens
  chr6:7893705-7893736
  hypo
caccatggtacctacacgacacagctgtgtg

SEQ ID NO: 13626 - DNA, 77 bp, Homo sapiens
  chr6:7893741-7893818
  hypo
gacccacttagggaggcgctggctaggcctgccggagtcggtctgtcctgccggagtcggtccgtaacaggtgattt

SEQ ID NO: 13627 - DNA, 67 bp, Homo sapiens
  chr6:7893855-7893922
  hypo
gctgaaaatgcattcccgtagcggaaagcatgctagagttctgccgtcagggcgctggtatggatga

SEQ ID NO: 13628 - DNA, 31 bp, Homo sapiens
  chr6:7893946-7893977
  hypo
aaggctgaaggcctcacgataagttactgtg

SEQ ID NO: 13629 - DNA, 31 bp, Homo sapiens
  chr6:7898571-7898602
  hypo
agccaccacacccagccgagttgagagagtc

SEQ ID NO: 13630 - DNA, 40 bp, Homo sapiens
  chr6:7898661-7898701
  hypo
agaagatggggcagagcggaagagccgcacagacacactg

SEQ ID NO: 13631 - DNA, 31 bp, Homo sapiens
  chr6:7898703-7898734
  hypo
aactggcaacagtaagcggcaaagctccaaa

SEQ ID NO: 13632 - DNA, 31 bp, Homo sapiens
  chr6:7898751-7898782
  hypo
ccttcaaatcagtgggcgcttagctgataca

SEQ ID NO: 13633 - DNA, 46 bp, Homo sapiens
  chr6:7976901-7976947
  hypo
tgtgacagcagaggcacgcacaaaataggaccgcagtgtctcccct

SEQ ID NO: 13634 - DNA, 41 bp, Homo sapiens
  chr6:10539696-10539737
  hypo
cagacgtgagccactgcgcccggccccgccatctctttaac

SEQ ID NO: 13635 - DNA, 31 bp, Homo sapiens
  chr6:10551605-10551636
  hypo
gttaaacttctttccccgcctctgagataat

SEQ ID NO: 13636 - DNA, 26 bp, Homo sapiens
  chr6:10693034-10693060
  hypo
gagtgagccaccgtgcccagccaaga

SEQ ID NO: 13637 - DNA, 78 bp, Homo sapiens
  chr6:10693317-10693395
  hypo
ctattgtatgtaactgcgggacatgctcacaggcccaggcacgttccagctcacagcctgtttagcaaatcgggtatc

SEQ ID NO: 13638 - DNA, 18 bp, Homo sapiens
  chr6:10761165-10761183
  hypo
tgccgcacctgatcattc

SEQ ID NO: 13639 - DNA, 19 bp, Homo sapiens
  chr6:10856653-10856672
  hypo
gagccgagatcatgccact

SEQ ID NO: 13640 - DNA, 31 bp, Homo sapiens
  chr6:11052369-11052400
  hypo
gagtcctgaactcctgcgctcaagggatcct

SEQ ID NO: 13641 - DNA, 31 bp, Homo sapiens
  chr6:11052401-11052432
  hypo
ctgccttagcatcctgcggagccaggattac

SEQ ID NO: 13642 - DNA, 61 bp, Homo sapiens
  chr6:11288374-11288435
  hypo
ggctcagtcaaaattacgcaggctggttcagctgcagttcaagtggcgtatggcgtgtggc

SEQ ID NO: 13643 - DNA, 31 bp, Homo sapiens
  chr6:12287831-12287862
  hypo
ggcaggtgccacccctcgcccctgacacaca

SEQ ID NO: 13644 - DNA, 42 bp, Homo sapiens
  chr6:12287986-12288028
  hypo
aggcgcgcgcgcgcgcgcgcaggcacacgtcttgcaaattca

SEQ ID NO: 13645 - DNA, 31 bp, Homo sapiens
  chr6:12288048-12288079
  hypo
accattatatttggcacggtggggcccttcc

SEQ ID NO: 13646 - DNA, 31 bp, Homo sapiens
  chr6:13293171-13293202
  hypo
ttgtcccctacagcatcgcaggtttgagggt

SEQ ID NO: 13647 - DNA, 31 bp, Homo sapiens
  chr6:13456799-13456830
  hypo
tttgaactactcatcacggtcacctctaatc

SEQ ID NO: 13648 - DNA, 58 bp, Homo sapiens
  chr6:13456947-13457005
  hypo
caccatatagagtgggcggcctgcacgctgctcgtcttggccccgcacagatctgtct

SEQ ID NO: 13649 - DNA, 66 bp, Homo sapiens
  chr6:13510252-13510318
  hypo
cttctggggtgctagtcgtgtttttttcatctggattattagtcacacgggcgtatttactttgta

SEQ ID NO: 13650 - DNA, 31 bp, Homo sapiens
  chr6:13510351-13510382
  hypo
ttctgttacatacatacgtattttagacaat

SEQ ID NO: 13651 - DNA, 113 bp, Homo sapiens; identical to SEQ ID NO: 2524
  chr6:13574017-13574130
  hypo

SEQ ID NO: 13652 - DNA, 31 bp, Homo sapiens; identical to SEQ ID NO: 2525
  chr6:13574133-13574164
  hypo

SEQ ID NO: 13653 - DNA, 45 bp, Homo sapiens; identical to SEQ ID NO: 2528
  chr6:14117633-14117678
  hypo

SEQ ID NO: 13654 - DNA, 58 bp, Homo sapiens
  chr6:14139161-14139219
  hypo
gaagagataataacagcgacttctggacgtagagacagcagagcgaggccatgtgttc

SEQ ID NO: 13655 - DNA, 31 bp, Homo sapiens
  chr6:14139225-14139256
  hypo
acagcacagtgagagtcgagagtcttggaat

SEQ ID NO: 13656 - DNA, 74 bp, Homo sapiens; identical to SEQ ID NO: 2529
  chr6:14211102-14211176
  hypo

SEQ ID NO: 13657 - DNA, 53 bp, Homo sapiens; identical to SEQ ID NO: 2530
  chr6:14211178-14211231
  hypo

SEQ ID NO: 13658 - DNA, 31 bp, Homo sapiens
  chr6:14273200-14273231
  hypo
ggcccactggaccctacgctccttgagaaca

SEQ ID NO: 13659 - DNA, 59 bp, Homo sapiens
  chr6:14273314-14273373
  hypo
gtttgccagccttcctcgtctacaccacagccacggtctcgtatcgacaggatctggat

SEQ ID NO: 13660 - DNA, 21 bp, Homo sapiens
  chr6:14559515-14559536
  hypo
cattgttggctgggtgcggtg

SEQ ID NO: 13661 - DNA, 31 bp, Homo sapiens
  chr6:14744737-14744768
  hypo
tttaaaaaaaagaaggcggccaggggcagtg

SEQ ID NO: 13662 - DNA, 18 bp, Homo sapiens
  chr6:14755745-14755763
  hypo
cgggcgcagtggctcacg

SEQ ID NO: 13663 - DNA, 31 bp, Homo sapiens
  chr6:14813397-14813428
  hypo
cactgggtcagtttcccggaggttctggctt

SEQ ID NO: 13664 - DNA, 31 bp, Homo sapiens
  chr6:14847049-14847080
  hypo
agcagtgctttatgcacggttctcatttcat

SEQ ID NO: 13665 - DNA, 37 bp, Homo sapiens
  chr6:14916086-14916123
  hypo
ggcatctcctctgcctcggcgcccactctggcggcgt

SEQ ID NO: 13666 - DNA, 31 bp, Homo sapiens
  chr6:14940112-14940143
  hypo
gtactaggattacaggcgtgagccacaataa

SEQ ID NO: 13667 - DNA, 31 bp, Homo sapiens
  chr6:14963355-14963386
  hypo
gcacctggccaaccaccggatggggtcctat

SEQ ID NO: 13668 - DNA, 28 bp, Homo sapiens
  chr6:14966732-14966760
  hypo
taaaaatttgaaatttcgaggccaggtg

SEQ ID NO: 13669 - DNA, 70 bp, Homo sapiens
  chr6:14966837-14966907
  hypo
agcctaggaaatatagcgtcagagccattcagtgaccctatgtcgaatgggactgcgtaaaataaggctg

SEQ ID NO: 13670 - DNA, 28 bp, Homo sapiens
  chr6:14993681-14993709
  hypo
ttttttttttttgagacggagtttcact

SEQ ID NO: 13671 - DNA, 31 bp, Homo sapiens
  chr6:15083857-15083888
  hypo
tgtgagccaccatgcccggccaactcttagg

SEQ ID NO: 13672 - DNA, 31 bp, Homo sapiens
  chr6:15282317-15282348
  hypo
agtgcaccatcatgctcgaccaatttctgta

SEQ ID NO: 13673 - DNA, 31 bp, Homo sapiens
  chr6:15282493-15282524
  hypo
agaaattttttccttccgaaaaccttcagcc

SEQ ID NO: 13674 - DNA, 31 bp, Homo sapiens
  chr6:15283515-15283546
  hypo
tatttattgaatatgtcgcaaatattgtctc

SEQ ID NO: 13675 - DNA, 39 bp, Homo sapiens
  chr6:15469669-15469708
  hypo
tttctttcttttgtgacggagtctcgctctgtcgcccag

SEQ ID NO: 13676 - DNA, 26 bp, Homo sapiens
  chr6:15891667-15891693
  hypo
tttcttaaaataaaaccggccgggct

SEQ ID NO: 13677 - DNA, 31 bp, Homo sapiens
  chr6:17508424-17508455
  hypo
atacaactggggtgtacgcagagacacctgg

SEQ ID NO: 13678 - DNA, 50 bp, Homo sapiens
  chr6:17508514-17508564
  hypo
ttgcctggtgaaccagcgtgaaaggaccttgcgttcgacagcacaagtaa

SEQ ID NO: 13679 - DNA, 31 bp, Homo sapiens
  chr6:17508598-17508629
  hypo
agaaaataggcccaaacggagacatggcaga

SEQ ID NO: 13680 - DNA, 25 bp, Homo sapiens
  chr6:17751570-17751595
  hypo
ccacggtgcccggccttgttgttgt

SEQ ID NO: 13681 - DNA, 11 bp, Homo sapiens
  chr6:17756938-17756949
  hypo
tcaaaaaaaaa

SEQ ID NO: 13682 - DNA, 31 bp, Homo sapiens
  chr6:17756958-17756989
  hypo
cttcatggtcacctagcgatgatttcctttg

SEQ ID NO: 13683 - DNA, 49 bp, Homo sapiens
  chr6:17757010-17757059
  hypo
tcttctttaaatggatcgtagccttgttccttaaagaacgtagtgtcgg

SEQ ID NO: 13684 - DNA, 36 bp, Homo sapiens
  chr6:17761888-17761924
  hypo
caggtgtgagccactgcgctccgctaaaaactcttt

SEQ ID NO: 13685 - DNA, 31 bp, Homo sapiens
  chr6:17779890-17779921
  hypo
tcctcttcaaactctgcgtgaaactctagta

SEQ ID NO: 13686 - DNA, 31 bp, Homo sapiens
  chr6:17788885-17788916
  hypo
agtttaagacttaagacgttacatcaagaat

SEQ ID NO: 13687 - DNA, 31 bp, Homo sapiens
  chr6:17795509-17795540
  hypo
acactgccatgaacatcgtataggctgggtg

SEQ ID NO: 13688 - DNA, 31 bp, Homo sapiens
  chr6:17797154-17797185
  hypo
atcgtgaccttaaatccgtctcttctgtttt

SEQ ID NO: 13689 - DNA, 12 bp, Homo sapiens
  chr6:17797238-17797250
  hypo
gtaatttaactc

SEQ ID NO: 13690 - DNA, 68 bp, Homo sapiens
  chr6:17800167-17800235
  hypo
tcactgtcctctcacccgacatgtcagctttttgactcggtgaatgatttccccgctgctgtctacga

SEQ ID NO: 13691 - DNA, 37 bp, Homo sapiens
  chr6:17934557-17934594
  hypo
gttgcttaagtgcagacgagagcggctgaacaccatc

SEQ ID NO: 13692 - DNA, 81 bp, Homo sapiens
  chr6:17940481-17940562
  hypo
aacttcaatatgtatacggatgcttcaggaacactattaagcgcagattcttcgattctgtaaatccgtggtgggtcctga

SEQ ID NO: 13693 - DNA, 31 bp, Homo sapiens
  chr6:17940605-17940636
  hypo
tgatccacaagggattcgagcatgcaaatta

SEQ ID NO: 13694 - DNA, 31 bp, Homo sapiens
  chr6:17940667-17940698
  hypo
acatatggtaggaaaacgctgttagtgaacc

SEQ ID NO: 13695 - DNA, 31 bp, Homo sapiens; identical to SEQ ID NO: 2542
  chr6:17987686-17987717
  hypo

SEQ ID NO: 13696 - DNA, 39 bp, Homo sapiens
  chr6:18024630-18024669
  hypo
tttatgcagggtctcacgatgctgcgtgtagatattcac

SEQ ID NO: 13697 - DNA, 37 bp, Homo sapiens
  chr6:18030873-18030910
  hypo
tacaggcgtgagctaccgggcccggccagggtaggaa

SEQ ID NO: 13698 - DNA, 31 bp, Homo sapiens
  chr6:18044394-18044425
  hypo
tacaggtgggagccaccgctcccagccaaaa

SEQ ID NO: 13699 - DNA, 5 bp, Homo sapiens
  chr6:18129285-18129290
  hypo
aaagt

SEQ ID NO: 13700 - DNA, 52 bp, Homo sapiens
  chr6:18129338-18129390
  hypo
ttgtgttggtccagctcgggttagttgtccattcaaccggtgatacaggcag

SEQ ID NO: 13701 - DNA, 21 bp, Homo sapiens
  chr6:18228603-18228624
  hypo
ctctaattgtttgccccggga

SEQ ID NO: 13702 - DNA, 31 bp, Homo sapiens
  chr6:18239433-18239464
  hypo
cgtgagccactgtgcccggccaagtcaacct

SEQ ID NO: 13703 - DNA, 77 bp, Homo sapiens
  chr6:18247861-18247938
  hypo
acaacaatttagaaagcgaattttaaaagtgagtataaaatgctctcgttttttttttttgagacggagtttcgctc

SEQ ID NO: 13704 - DNA, 31 bp, Homo sapiens
  chr6:18250344-18250375
  hypo
ttatgttaagctccaacggctgttaatactt

SEQ ID NO: 13705 - DNA, 155 bp, Homo sapiens; identical to SEQ ID NO: 2543
  chr6:18263770-18263925
  hypo

SEQ ID NO: 13706 - DNA, 59 bp, Homo sapiens; identical to SEQ ID NO: 2545
  chr6:18264016-18264075
  hypo

SEQ ID NO: 13707 - DNA, 249 bp, Homo sapiens; identical to SEQ ID NO: 2546
  chr6:18264081-18264330
  hypo

SEQ ID NO: 13708 - DNA, 418 bp, Homo sapiens; identical to SEQ ID NO: 2547
  chr6:18264337-18264755
  hypo

SEQ ID NO: 13709 - DNA, 482 bp, Homo sapiens; identical to SEQ ID NO: 2548
  chr6:18264758-18265240
  hypo

SEQ ID NO: 13710 - DNA, 31 bp, Homo sapiens
  chr6:18275932-18275963
  hypo
agaatgccaggccaggcgcagtggctcatgc

SEQ ID NO: 13711 - DNA, 22 bp, Homo sapiens
  chr6:18282593-18282615
  hypo
aagatatctggccaggcgtggt

SEQ ID NO: 13712 - DNA, 52 bp, Homo sapiens
  chr6:19677097-19677149
  hypo
ttctttgtctactctgcgtgtgcatgtgtgatgagaccgttttccctgtttt

SEQ ID NO: 13713 - DNA, 19 bp, Homo sapiens
  chr6:19677158-19677177
  hypo
gttcccagctatgccccgg

SEQ ID NO: 13714 - DNA, 35 bp, Homo sapiens
  chr6:19677244-19677279
  hypo
ttcaagacacaagcagcggacgtacacccttaagt

SEQ ID NO: 13715 - DNA, 31 bp, Homo sapiens
  chr6:20057722-20057753
  hypo
tcctcatccatgttttcgcaggtgggaaatt

SEQ ID NO: 13716 - DNA, 31 bp, Homo sapiens
  chr6:20105679-20105710
  hypo
tctacgaaagtttctacgcaaattctaacgt

SEQ ID NO: 13717 - DNA, 31 bp, Homo sapiens
  chr6:20124516-20124547
  hypo
caactgcctcccattacgtgttgagcttctt

SEQ ID NO: 13718 - DNA, 34 bp, Homo sapiens
  chr6:20124549-20124583
  hypo
atgaagtgatccaaaacgtcgttctggctaagcc

SEQ ID NO: 13719 - DNA, 484 bp, Homo sapiens; identical to SEQ ID NO: 2550
  chr6:20212303-20212787
  hypo

SEQ ID NO: 13720 - DNA, 89 bp, Homo sapiens; identical to SEQ ID NO: 2551
  chr6:20212792-20212881
  hypo

SEQ ID NO: 13721 - DNA, 37 bp, Homo sapiens
  chr6:20228882-20228919
  hypo
tacaggcatgacccaccgtgctcggccacattcacga

SEQ ID NO: 13722 - DNA, 7 bp, Homo sapiens
  chr6:20239550-20239557
  hypo
gcggcca

SEQ ID NO: 13723 - DNA, 26 bp, Homo sapiens
  chr6:20256566-20256592
  hypo
gagaacaaggccaggcgcggtggctc

SEQ ID NO: 13724 - DNA, 31 bp, Homo sapiens
  chr6:20294237-20294268
  hypo
aggaatggcaaaggagcgcagagcagctggg

SEQ ID NO: 13725 - DNA, 31 bp, Homo sapiens
  chr6:21459015-21459046
  hypo
ttatcaggcctatggccgggagcggtggctc

SEQ ID NO: 13726 - DNA, 23 bp, Homo sapiens
  chr6:21470164-21470187
  hypo
ctgcgccccgcctaaaataataa

SEQ ID NO: 13727 - DNA, 31 bp, Homo sapiens
  chr6:21494921-21494952
  hypo
taggggttttgagcagcggagcacctgagcc

SEQ ID NO: 13728 - DNA, 31 bp, Homo sapiens
  chr6:21570591-21570622
  hypo
aatcattgccctctcccgccctcaagtgcac

SEQ ID NO: 13729 - DNA, 31 bp, Homo sapiens; identical to SEQ ID NO: 2558
  chr6:21588775-21588806
  hypo

SEQ ID NO: 13730 - DNA, 31 bp, Homo sapiens; identical to SEQ ID NO: 2559
  chr6:21594474-21594505
  hypo

SEQ ID NO: 13731 - DNA, 38 bp, Homo sapiens; identical to SEQ ID NO: 2560
  chr6:21594537-21594575
  hypo

SEQ ID NO: 13732 - DNA, 567 bp, Homo sapiens; identical to SEQ ID NO: 2561
  chr6:21594597-21595164
  hypo

SEQ ID NO: 13733 - DNA, 31 bp, Homo sapiens; identical to SEQ ID NO: 2562
  chr6:21595200-21595231
  hypo

SEQ ID NO: 13734 - DNA, 372 bp, Homo sapiens; identical to SEQ ID NO: 2563
  chr6:21595234-21595606
  hypo

SEQ ID NO: 13735 - DNA, 31 bp, Homo sapiens
  chr6:21596585-21596616
  hypo
acccccagcaagaaggcgagttagttttcta

SEQ ID NO: 13736 - DNA, 31 bp, Homo sapiens
  chr6:21602480-21602511
  hypo
aagttcgaggggaagccgctgcttcagagac

SEQ ID NO: 13737 - DNA, 5 bp, Homo sapiens
  chr6:21622713-21622718
  hypo
atatg

SEQ ID NO: 13738 - DNA, 31 bp, Homo sapiens
  chr6:21622792-21622823
  hypo
ttaattctattgcccccgttccttaaaaaat

SEQ ID NO: 13739 - DNA, 31 bp, Homo sapiens
  chr6:21636069-21636100
  hypo
actgagctggggggatcggatcacctgagcc

SEQ ID NO: 13740 - DNA, 23 bp, Homo sapiens
  chr6:21649881-21649904
  hypo
caccgcgccggcctacactcttt

SEQ ID NO: 13741 - DNA, 31 bp, Homo sapiens
  chr6:21730829-21730860
  hypo
actgtcttccctcacccgattgccctgaact

SEQ ID NO: 13742 - DNA, 31 bp, Homo sapiens
  chr6:21919459-21919490
  hypo
ttatgatggcatcacacgcaggattcagaga

SEQ ID NO: 13743 - DNA, 31 bp, Homo sapiens
  chr6:21959458-21959489
  hypo
tagaaagcactgataccgaggtactccttct

SEQ ID NO: 13744 - DNA, 31 bp, Homo sapiens; identical to SEQ ID NO: 2566
  chr6:22146871-22146902
  hypo

SEQ ID NO: 13745 - DNA, 38 bp, Homo sapiens; identical to SEQ ID NO: 2567
  chr6:22146906-22146944
  hypo

SEQ ID NO: 13746 - DNA, 100 bp, Homo sapiens; identical to SEQ ID NO: 2568
  chr6:22146954-22147054
  hypo

SEQ ID NO: 13747 - DNA, 31 bp, Homo sapiens
  chr6:24433177-24433208
  hypo
aaaattaggtggcagacgacttggccccaac

SEQ ID NO: 13748 - DNA, 24 bp, Homo sapiens
  chr6:24647341-24647365
  hypo
aaaaaccagctgggtgcggtggct

SEQ ID NO: 13749 - DNA, 45 bp, Homo sapiens
  chr6:24662790-24662835
  hypo
taccctctagtcctgtcgcatccccctcaccgagatggggatagt

SEQ ID NO: 13750 - DNA, 31 bp, Homo sapiens
  chr6:24895642-24895673
  hypo
gtggggcctgggcatacgtactttaaaaaaa

SEQ ID NO: 13751 - DNA, 42 bp, Homo sapiens
  chr6:25023689-25023731
  hypo
tgcccctaggacttggcgatgcagtggcggacaaattcacac

SEQ ID NO: 13752 - DNA, 65 bp, Homo sapiens
  chr6:26047694-26047759
  hypo
caccgcgcccggcctccttgaagccattcttacgtcagattggctggcaacgaatgaagtacaca

SEQ ID NO: 13753 - DNA, 31 bp, Homo sapiens
  chr6:26047762-26047793
  hypo
tcacatatgcaaatcacgtaacttattatcc

SEQ ID NO: 13754 - DNA, 37 bp, Homo sapiens
  chr6:26095302-26095339
  hypo
ataaaagcacttacttcgtgtccgactcttctgagca

SEQ ID NO: 13755 - DNA, 11 bp, Homo sapiens
  chr6:26199886-26199897
  hypo
gcaaggagagc

SEQ ID NO: 13756 - DNA, 37 bp, Homo sapiens
  chr6:26214611-26214648
  hypo
agccggcgtgagccaccgcgcccggccaagagaaaaa

SEQ ID NO: 13757 - DNA, 31 bp, Homo sapiens
  chr6:26423338-26423369
  hypo
gcagaaggaggagtaccgagggagaaccacc

SEQ ID NO: 13758 - DNA, 70 bp, Homo sapiens
  chr6:26423379-26423449
  hypo
aagacagcaggggcagcgtggccctgatcatacacaatgtcacagccgaggataacggcatctaccagtg

SEQ ID NO: 13759 - DNA, 31 bp, Homo sapiens
  chr6:27428732-27428763
  hypo
catggtcactaattatcgacataattctgtg

SEQ ID NO: 13760 - DNA, 46 bp, Homo sapiens; identical to SEQ ID NO: 2609
  chr6:27440465-27440511
  hypo

SEQ ID NO: 13761 - DNA, 31 bp, Homo sapiens
  chr6:27442013-27442044
  hypo
tatatgcctgtgtcagcgagcacatagctgc

SEQ ID NO: 13762 - DNA, 30 bp, Homo sapiens
  chr6:27770798-27770828
  hypo
gccgggattataggcgcgagccaccatgcc

SEQ ID NO: 13763 - DNA, 19 bp, Homo sapiens
  chr6:27843639-27843658
  hypo
aaagaaagtttgtggccgg

SEQ ID NO: 13764 - DNA, 31 bp, Homo sapiens
  chr6:27846867-27846898
  hypo
ggtcaggccttgggtccgaagccacagctgg

SEQ ID NO: 13765 - DNA, 31 bp, Homo sapiens
  chr6:33549226-33549257
  hypo
gccaaggcaagaggatcgcttgaggccaggt

SEQ ID NO: 13766 - DNA, 38 bp, Homo sapiens
  chr6:33645951-33645989
  hypo
ccaggcctcaccttgacgctgaccgtgacacttcacct

SEQ ID NO: 13767 - DNA, 34 bp, Homo sapiens
  chr6:33694717-33694751
  hypo
gaggtctggggaagggcgccgctgcctgtggctg

SEQ ID NO: 13768 - DNA, 31 bp, Homo sapiens
  chr6:33698515-33698546
  hypo
cccaaggtcacatggtcggtgtggggtggag

SEQ ID NO: 13769 - DNA, 17 bp, Homo sapiens
  chr6:33701972-33701989
  hypo
tccgtctcaaaaaaaaa

SEQ ID NO: 13770 - DNA, 66 bp, Homo sapiens
  chr6:33702048-33702114
  hypo
caggtctggcatggggcgtggggacctgtgcgcctttgtgcacatacacgccggattctagtaaag

SEQ ID NO: 13771 - DNA, 31 bp, Homo sapiens
  chr6:33771000-33771031
  hypo
ttgcagcacccctggccgggctagccttgcc

SEQ ID NO: 13772 - DNA, 31 bp, Homo sapiens
  chr6:33771033-33771064
  hypo
cccatgtgctctccctcggggtcaacttttt

SEQ ID NO: 13773 - DNA, 41 bp, Homo sapiens
  chr6:33962223-33962264
  hypo
ctcgtctttacatagacgaggaggctcgagggtagagacac

SEQ ID NO: 13774 - DNA, 36 bp, Homo sapiens
  chr6:33985260-33985296
  hypo
ccgccaagcccgcgagcgccgcgcggagccatggtt

SEQ ID NO: 13775 - DNA, 74 bp, Homo sapiens
  chr6:33995979-33996053
  hypo
atggtggccgccgtaacgacggctttgaggctgcgcttgcgcttgggcacgttctgctccgggtggaagaggat

SEQ ID NO: 13776 - DNA, 49 bp, Homo sapiens
  chr6:33996076-33996125
  hypo
gcattcccagggacaccgaggcgctcagactcaccgagaccgtcagcgt

SEQ ID NO: 13777 - DNA, 104 bp, Homo sapiens
  chr6:34170820-34170924
  hypo
tccgcagccacagtttgggtggctgtagccccgcccaagagggcggggcttctgtcggctccatggagccggaggcccgggtctgcctccgtttggtttgggtg

SEQ ID NO: 13778 - DNA, 70 bp, Homo sapiens
  chr6:34170930-34171000
  hypo
gtttgggtggctgcagcggcaccccagggcgctcctgcccccaactcagaaggggcggggctcccactgg

SEQ ID NO: 13779 - DNA, 19 bp, Homo sapiens
  chr6:34171060-34171079
  hypo
ccaccgccaggagtgtggg

SEQ ID NO: 13780 - DNA, 31 bp, Homo sapiens
  chr6:34191861-34191892
  hypo
aggcgggggcggggcccgggctggcgcggcg

SEQ ID NO: 13781 - DNA, 31 bp, Homo sapiens
  chr6:34484387-34484418
  hypo
gtgagagctgaaggaacgtctgtccactcag

SEQ ID NO: 13782 - DNA, 14 bp, Homo sapiens
  chr6:34683316-34683330
  hypo
ggccaagctctata

SEQ ID NO: 13783 - DNA, 31 bp, Homo sapiens
  chr6:34683386-34683417
  hypo
tttggagaccaggacacggtgactgctttcc

SEQ ID NO: 13784 - DNA, 37 bp, Homo sapiens
  chr6:34723873-34723910
  hypo
aataattattacctgccgggcgcggtgggtcacgcct

SEQ ID NO: 13785 - DNA, 38 bp, Homo sapiens
  chr6:34726097-34726135
  hypo
ttttttttttttgaaacggagtttcgctcttgttgccc

SEQ ID NO: 13786 - DNA, 30 bp, Homo sapiens
  chr6:34854518-34854548
  hypo
aggcgtgagccactacgcccagacaaattt

SEQ ID NO: 13787 - DNA, 31 bp, Homo sapiens
  chr6:34953049-34953080
  hypo
aggcctgtatgtgacccggggcttacacctc

SEQ ID NO: 13788 - DNA, 31 bp, Homo sapiens
  chr6:34953107-34953138
  hypo
ctgaggtgatggggcacggggaagggaagtg

SEQ ID NO: 13789 - DNA, 31 bp, Homo sapiens
  chr6:35027635-35027666
  hypo
atcatgcatgtgcagccgtggccctggagca

SEQ ID NO: 13790 - DNA, 31 bp, Homo sapiens
  chr6:35109281-35109312
  hypo
cctggaactgctgagacgaggccagagcatg

SEQ ID NO: 13791 - DNA, 40 bp, Homo sapiens
  chr6:35149809-35149849
  hypo
gcaaatgtttcttgagcgctggcaacgtgccaggctcctt

SEQ ID NO: 13792 - DNA, 40 bp, Homo sapiens
  chr6:35150040-35150080
  hypo
ggagaatcagggcccacgtggcgggcgagggatctgcgac

SEQ ID NO: 13793 - DNA, 31 bp, Homo sapiens
  chr6:35260503-35260534
  hypo
ggcgagctggaggccacggaggagagcgagc

SEQ ID NO: 13794 - DNA, 27 bp, Homo sapiens
  chr6:35271478-35271505
  hypo
aataaggtgatcaggccgggcagggta

SEQ ID NO: 13795 - DNA, 31 bp, Homo sapiens
  chr6:35454663-35454694
  hypo
gtgacctgggatgcacgcgctacttcacctc

SEQ ID NO: 13796 - DNA, 31 bp, Homo sapiens
  chr6:35454700-35454731
  hypo
cctcagtcctgtaaaacgagaaaagggtctc

SEQ ID NO: 13797 - DNA, 31 bp, Homo sapiens
  chr6:35490043-35490074
  hypo
aggctggaggctgtcccgaggtgcacgccct

SEQ ID NO: 13798 - DNA, 25 bp, Homo sapiens
  chr6:35505223-35505248
  hypo
gctgagccaccgctcccggccaggg

SEQ ID NO: 13799 - DNA, 31 bp, Homo sapiens; identical to SEQ ID NO: 2618
  chr6:35523457-35523488
  hypo

SEQ ID NO: 13800 - DNA, 26 bp, Homo sapiens
  chr6:35568030-35568056
  hypo
atatttttactgaattcgctgagggt

SEQ ID NO: 13801 - DNA, 26 bp, Homo sapiens
  chr6:35568175-35568201
  hypo
cagagtgagaccgtctcaaaaaaaaa

SEQ ID NO: 13802 - DNA, 31 bp, Homo sapiens
  chr6:35763035-35763066
  hypo
agtaaatcccatagagcgtctgcagagacac

SEQ ID NO: 13803 - DNA, 55 bp, Homo sapiens
  chr6:35911712-35911767
  hypo
tgaatccataggatggcgtctcctctccactgaccatgtccgagtctgagtctga

SEQ ID NO: 13804 - DNA, 31 bp, Homo sapiens
  chr6:35989517-35989548
  hypo
actttacatatgtttacgtatacatataaat

SEQ ID NO: 13805 - DNA, 145 bp, Homo sapiens
  chr6:36198234-36198379
  hypo
tgggtgtggaagacaccgtggacaagctcaagatgctggaaggccgcaagaccagcatccgcaagtcagtgcaggtggcctatgaccgtgcgatgatccacctgagcagagtccgggggccccactccttcgtcacttccagcta

SEQ ID NO: 13806 - DNA, 31 bp, Homo sapiens
  chr6:36214734-36214765
  hypo
ctttccgcactccctgcggattttaggattt

SEQ ID NO: 13807 - DNA, 31 bp, Homo sapiens
  chr6:36339125-36339156
  hypo
gggggcctgcggcatcgcggggaaggaacag

SEQ ID NO: 13808 - DNA, 31 bp, Homo sapiens
  chr6:36339159-36339190
  hypo
ccctgggtcctgcagccgagctctgcacagt

SEQ ID NO: 13809 - DNA, 31 bp, Homo sapiens
  chr6:36339240-36339271
  hypo
gggtcatccaggtggccgaagttgctggtaa

SEQ ID NO: 13810 - DNA, 31 bp, Homo sapiens
  chr6:36343599-36343630
  hypo
ggcctaccagggttcccgcttagaggaaagc

SEQ ID NO: 13811 - DNA, 23 bp, Homo sapiens
  chr6:36392139-36392162
  hypo
ggagcgcggtggctcacgcctgt

SEQ ID NO: 13812 - DNA, 23 bp, Homo sapiens
  chr6:36392401-36392424
  hypo
cgagactccgtctcaaaaaaaca

SEQ ID NO: 13813 - DNA, 31 bp, Homo sapiens
  chr6:37023890-37023921
  hypo
acccatgatctcatcccggccctcagccacc

SEQ ID NO: 13814 - DNA, 38 bp, Homo sapiens
  chr6:37024479-37024517
  hypo
tgcctgtgtgggaagccgcttggcgtggccctccccat

SEQ ID NO: 13815 - DNA, 31 bp, Homo sapiens
  chr6:37024558-37024589
  hypo
gacctgtcccactgcccgctggaaccagctc

SEQ ID NO: 13816 - DNA, 47 bp, Homo sapiens
  chr6:37024602-37024649
  hypo
tgaggggcagagacctcgttccctcagctccccgtcctccatggtgt

SEQ ID NO: 13817 - DNA, 31 bp, Homo sapiens
  chr6:37033785-37033816
  hypo
ttgatggaacctgcagcggcagcccatctag

SEQ ID NO: 13818 - DNA, 31 bp, Homo sapiens
  chr6:37033829-37033860
  hypo
gaattaatcttgtgcacgccctaattgaaaa

SEQ ID NO: 13819 - DNA, 31 bp, Homo sapiens
  chr6:37053275-37053306
  hypo
atgataaaacccctaccgatggctgatgact

SEQ ID NO: 13820 - DNA, 23 bp, Homo sapiens
  chr6:37195193-37195216
  hypo
tcttgattgctctaagcgaaggt

SEQ ID NO: 13821 - DNA, 81 bp, Homo sapiens
  chr6:37358727-37358808
  hypo
gcaccaccaggattcacggcacccaactgcttcagggtacttcgtagactctgcctcactacatgtcgaaagagttatttg

SEQ ID NO: 13822 - DNA, 43 bp, Homo sapiens
  chr6:37358845-37358888
  hypo
tactgttttgatacctcggaaacacctccgttgacagttgttt

SEQ ID NO: 13823 - DNA, 100 bp, Homo sapiens
  chr6:37450274-37450374
  hypo
agccttgcctgcctgtcgaagatggattaactccgcactcccctgggatcgccacatgaccacttcaagtccccaagccgcccttcgctgcacagactgc

SEQ ID NO: 13824 - DNA, 64 bp, Homo sapiens
  chr6:37605016-37605080
  hypo
caggccccctccctggcgggccggccctgcccctgggcaccccagctggcgggggtcagtcttt

SEQ ID NO: 13825 - DNA, 31 bp, Homo sapiens
  chr6:37605090-37605121
  hypo
ggacactttggtgtgccgggggcaaggttgg

SEQ ID NO: 13826 - DNA, 31 bp, Homo sapiens
  chr6:37605139-37605170
  hypo
ctcatcatctctgcaacgccaagaggaagat

SEQ ID NO: 13827 - DNA, 36 bp, Homo sapiens
  chr6:37608134-37608170
  hypo
cttttttcggagggggcggtgcggggacagggtctt

SEQ ID NO: 13828 - DNA, 43 bp, Homo sapiens
  chr6:37642011-37642054
  hypo
atgtgtctctgacctccgggtacaagggcgctgtcactgaata

SEQ ID NO: 13829 - DNA, 39 bp, Homo sapiens
  chr6:37642076-37642115
  hypo
ggatcagtgtgcaggccgccaccccgccaccacaattga

SEQ ID NO: 13830 - DNA, 30 bp, Homo sapiens
  chr6:37791848-37791878
  hypo
gccggtatatattaacgtcatatttttagg

SEQ ID NO: 13831 - DNA, 19 bp, Homo sapiens
  chr6:37980160-37980179
  hypo
ttttttttttttgagtcgg

SEQ ID NO: 13832 - DNA, 83 bp, Homo sapiens
  chr6:38122001-38122084
  hypo
tcccgaagaggctgtgcgagcccttcccggccctccccagggccccccgccccctcctctgcctgctgcgtggaggcagccat

SEQ ID NO: 13833 - DNA, 46 bp, Homo sapiens
  chr6:38646376-38646422
  hypo
tcactgctgtgtgcatcggcacctgccctctcgcttgttcagatgt

SEQ ID NO: 13834 - DNA, 84 bp, Homo sapiens
  chr6:38646474-38646558
  hypo
gaaaaactggtagggccgaatgatctccccagccctctctccacgcccagggctagggaataacactatcggaagtgtctccta

SEQ ID NO: 13835 - DNA, 31 bp, Homo sapiens
  chr6:38852630-38852661
  hypo
cattagaagacttcaccggtgttgccagaag

SEQ ID NO: 13836 - DNA, 31 bp, Homo sapiens
  chr6:39127058-39127089
  hypo
ctgctagctgagatctcggagagaaggagga

SEQ ID NO: 13837 - DNA, 1 bp, Homo sapiens
  chr6:39127151-39127152
  hypo
a

SEQ ID NO: 13838 - DNA, 31 bp, Homo sapiens
  chr6:39158699-39158730
  hypo
tcattcatcagctgttcgtaaggcacagaga

SEQ ID NO: 13839 - DNA, 65 bp, Homo sapiens
  chr6:39158744-39158809
  hypo
ctggtgaaggtggactcggaggaggaggggaactcgcccatgttcaggggcgccttggcttcagc

SEQ ID NO: 13840 - DNA, 31 bp, Homo sapiens
  chr6:39162095-39162126
  hypo
cgtgatctgcgccttccgctgatggggagca

SEQ ID NO: 13841 - DNA, 74 bp, Homo sapiens
  chr6:41001833-41001907
  hypo
cctgggcttgggacagcgatggggcgtccgacaggtcccacaccaggatcaaagacacccgctcctggcggccc

SEQ ID NO: 13842 - DNA, 31 bp, Homo sapiens
  chr6:41619005-41619036
  hypo
ataggtaatcgccatacgatgtgataagtgc

SEQ ID NO: 13843 - DNA, 9 bp, Homo sapiens
  chr6:41956741-41956750
  hypo
gctgaactt

SEQ ID NO: 13844 - DNA, 31 bp, Homo sapiens
  chr6:41956753-41956784
  hypo
taaaatttaaaacctccgctccacaaaaggc

SEQ ID NO: 13845 - DNA, 29 bp, Homo sapiens
  chr6:41981483-41981512
  hypo
cagcagtcccttccagcgccaagccattc

SEQ ID NO: 13846 - DNA, 31 bp, Homo sapiens
  chr6:42110869-42110900
  hypo
agagaatgtgggatgacgaaatcttggcatt

SEQ ID NO: 13847 - DNA, 31 bp, Homo sapiens
  chr6:42141343-42141374
  hypo
cctgagcaatgggcaacgtgatggagggaaa

SEQ ID NO: 13848 - DNA, 39 bp, Homo sapiens
  chr6:42762763-42762802
  hypo
ctcacaaagagaattacgcatgaacgacagtcaaggtaa

SEQ ID NO: 13849 - DNA, 22 bp, Homo sapiens
  chr6:42762861-42762883
  hypo
ctattagatttaaaaacgtgac

SEQ ID NO: 13850 - DNA, 33 bp, Homo sapiens
  chr6:42773439-42773472
  hypo
taaagaggacaaggaacgggccaggtgcggtgg

SEQ ID NO: 13851 - DNA, 31 bp, Homo sapiens
  chr6:42777803-42777834
  hypo
cgtgagccactatgcccggccaaatttttaa

SEQ ID NO: 13852 - DNA, 34 bp, Homo sapiens
  chr6:42813436-42813470
  hypo
cagccactggcaggtgcgccggtttccaatactt

SEQ ID NO: 13853 - DNA, 10 bp, Homo sapiens
  chr6:42813506-42813516
  hypo
gttatagatt

SEQ ID NO: 13854 - DNA, 23 bp, Homo sapiens
  chr6:42905051-42905074
  hypo
aggatgaggccaggtgcggtggc

SEQ ID NO: 13855 - DNA, 22 bp, Homo sapiens
  chr6:42942139-42942161
  hypo
ctgatataccaagaggcgccta

SEQ ID NO: 13856 - DNA, 36 bp, Homo sapiens
  chr6:42951450-42951486
  hypo
gggattacaggcgtgagacaccgtgcctgcctggtt

SEQ ID NO: 13857 - DNA, 20 bp, Homo sapiens
  chr6:43050197-43050217
  hypo
gccaccgtgccctgctgcaa

SEQ ID NO: 13858 - DNA, 31 bp, Homo sapiens; identical to SEQ ID NO: 2624
  chr6:43081635-43081666
  hypo

SEQ ID NO: 13859 - DNA, 44 bp, Homo sapiens; identical to SEQ ID NO: 2625
  chr6:43081717-43081761
  hypo

SEQ ID NO: 13860 - DNA, 35 bp, Homo sapiens
  chr6:43104147-43104182
  hypo
caggttcaggtgggcccgctcgtctacctggtgtg

SEQ ID NO: 13861 - DNA, 31 bp, Homo sapiens
  chr6:43113235-43113266
  hypo
tcagtggttggagcaccgtgaaaaccttgtc

SEQ ID NO: 13862 - DNA, 31 bp, Homo sapiens
  chr6:43181064-43181095
  hypo
ctgctaccttatctgtcgctgttctcctcct

SEQ ID NO: 13863 - DNA, 31 bp, Homo sapiens
  chr6:43222389-43222420
  hypo
gtgagtaccgtcggggcggggaggacagtgg

SEQ ID NO: 13864 - DNA, 31 bp, Homo sapiens
  chr6:43249394-43249425
  hypo
ggaggcaggatatccccggggcttctggtct

SEQ ID NO: 13865 - DNA, 29 bp, Homo sapiens
  chr6:43338304-43338333
  hypo
tcttcacacgttttcgagctgttttctga

SEQ ID NO: 13866 - DNA, 19 bp, Homo sapiens
  chr6:43425113-43425132
  hypo
ttttttttttttgagacgg

SEQ ID NO: 13867 - DNA, 31 bp, Homo sapiens
  chr6:43478675-43478706
  hypo
cacaccttctcaggtacgcagggcactgttg

SEQ ID NO: 13868 - DNA, 37 bp, Homo sapiens
  chr6:43478707-43478744
  hypo
catctgagggtgtgtccgtgccgcgagactggggcag

SEQ ID NO: 13869 - DNA, 73 bp, Homo sapiens
  chr6:43748462-43748535
  hypo
ttccagaaaatcagttcgaggaaagggaaaggggcaaaaacgaaagcgcaagaaatcccggtataagtcctgg

SEQ ID NO: 13870 - DNA, 31 bp, Homo sapiens
  chr6:43819544-43819575
  hypo
tggggtggaactggaacgacaagatgcagtc

SEQ ID NO: 13871 - DNA, 31 bp, Homo sapiens
  chr6:43890965-43890996
  hypo
cactcagacacacaaacgtcccacactgcac

SEQ ID NO: 13872 - DNA, 43 bp, Homo sapiens
  chr6:43893357-43893400
  hypo
ctccttggatcagtgacgaagaggtcagcgtcactccatttct

SEQ ID NO: 13873 - DNA, 31 bp, Homo sapiens
  chr6:43917991-43918022
  hypo
ccattcaactccgcctcgtttgttcaacaat

SEQ ID NO: 13874 - DNA, 59 bp, Homo sapiens
  chr6:43990913-43990972
  hypo
actggatgcccacctgcgtccggcggccaagccagcgggcctggcggtaatgcaattac

SEQ ID NO: 13875 - DNA, 31 bp, Homo sapiens
  chr6:43991075-43991106
  hypo
gcaggagtgacacccacggccaagatagatc

SEQ ID NO: 13876 - DNA, 58 bp, Homo sapiens; identical to SEQ ID NO: 2632
  chr6:44095870-44095928
  hypo

SEQ ID NO: 13877 - DNA, 41 bp, Homo sapiens; identical to SEQ ID NO: 2633
  chr6:44096003-44096044
  hypo

SEQ ID NO: 13878 - DNA, 39 bp, Homo sapiens
  chr6:44120363-44120402
  hypo
acgcctggatgatgtgcgtcttcacggtggtcatgacct

SEQ ID NO: 13879 - DNA, 76 bp, Homo sapiens
  chr6:44120408-44120484
  hypo
tcacctgccccatcatcgtgcccttcggtaggcaccgccgcgccgggacctgggccctgctcggggggacccagga

SEQ ID NO: 13880 - DNA, 79 bp, Homo sapiens
  chr6:44120503-44120582
  hypo
ggaatgcaggccaccccgagtggacagggcccggctgggagaccggcccctcggggctcccgcccggtccctggctcag

SEQ ID NO: 13881 - DNA, 31 bp, Homo sapiens
  chr6:44121129-44121160
  hypo
ttagagaaaaatgatacgggttttaagaaga

SEQ ID NO: 13882 - DNA, 80 bp, Homo sapiens
  chr6:44121217-44121297
  hypo
gaatgaggggttgtagcggaggaagctgaagttctgtgatcacgctggggcacggggcactatcccgtcctggggcccgg

SEQ ID NO: 13883 - DNA, 37 bp, Homo sapiens
  chr6:44166168-44166205
  hypo
tgggattacaggcgtgagccaccgtgcctggcctatc

SEQ ID NO: 13884 - DNA, 31 bp, Homo sapiens
  chr6:44200718-44200749
  hypo
gcctctgcatgtgcttcgggcccaagtgagt

SEQ ID NO: 13885 - DNA, 31 bp, Homo sapiens
  chr6:44376364-44376395
  hypo
tgcaggtaacgtgtcacgtagtagaatgagg

SEQ ID NO: 13886 - DNA, 31 bp, Homo sapiens
  chr6:44429408-44429439
  hypo
aagcaggacagcagctcggggctgtcttagc

SEQ ID NO: 13887 - DNA, 24 bp, Homo sapiens
  chr6:46783944-46783968
  hypo
gattacaggcgtgagccaccatta

SEQ ID NO: 13888 - DNA, 61 bp, Homo sapiens; identical to SEQ ID NO: 2634
  chr6:46816791-46816852
  hypo

SEQ ID NO: 13889 - DNA, 42 bp, Homo sapiens
  chr6:49453724-49453766
  hypo
atgaagcatcctgtatcgtcacgggtacgtcctaaatccaat

SEQ ID NO: 13890 - DNA, 31 bp, Homo sapiens
  chr6:49453803-49453834
  hypo
gacaaagaaaaagccacgtgaaacacaatag

SEQ ID NO: 13891 - DNA, 31 bp, Homo sapiens
  chr6:49453838-49453869
  hypo
cataaataaaaagccacgtgaaagcaaaggc

SEQ ID NO: 13892 - DNA, 31 bp, Homo sapiens
  chr6:49527737-49527768
  hypo
ttgatcaggctgggtgcggtggctcatgcct

SEQ ID NO: 13893 - DNA, 17 bp, Homo sapiens
  chr6:49590554-49590571
  hypo
ttgttttgttttgagac

SEQ ID NO: 13894 - DNA, 31 bp, Homo sapiens
  chr6:52141054-52141085
  hypo
attccacttaccctgccgtagacagggttgg

SEQ ID NO: 13895 - DNA, 43 bp, Homo sapiens
  chr6:52141089-52141132
  hypo
tgccaaaacactgcagcgggcattcagccgagcatggatgcca

SEQ ID NO: 13896 - DNA, 31 bp, Homo sapiens
  chr6:52141134-52141165
  hypo
cttggcaatggtcactcgaccctgctccatc

SEQ ID NO: 13897 - DNA, 31 bp, Homo sapiens
  chr6:52141167-52141198
  hypo
ttcatggatggctgtgcgatccatgtcagac

SEQ ID NO: 13898 - DNA, 31 bp, Homo sapiens
  chr6:52161689-52161720
  hypo
ttaaccacagaatgaacgattgctgggcttt

SEQ ID NO: 13899 - DNA, 31 bp, Homo sapiens
  chr6:52344374-52344405
  hypo
attttactcctgattgcgtgagagaacatca

SEQ ID NO: 13900 - DNA, 19 bp, Homo sapiens
  chr6:52694101-52694120
  hypo
gaaatggcgggctgcacgt

SEQ ID NO: 13901 - DNA, 53 bp, Homo sapiens
  chr6:52769076-52769129
  hypo
tgctcctggcctgctccgtcttttacttcacctccccacgatctcacaaatgt

SEQ ID NO: 13902 - DNA, 31 bp, Homo sapiens
  chr6:52769131-52769162
  hypo
atgattagggagggaacgtcactggaggaaa

SEQ ID NO: 13903 - DNA, 31 bp, Homo sapiens
  chr6:53024100-53024131
  hypo
cacaaatttcattcaacgctcccaaaaatat

SEQ ID NO: 13904 - DNA, 63 bp, Homo sapiens
  chr6:53111000-53111063
  hypo
aggacaacactagttacgagctggaagcacgtgaatcctttaagagcccgagcaaagggcaaa

SEQ ID NO: 13905 - DNA, 31 bp, Homo sapiens
  chr6:53111138-53111169
  hypo
cacactatttaaaaaccgagaatgtatcagc

SEQ ID NO: 13906 - DNA, 31 bp, Homo sapiens
  chr6:53111176-53111207
  hypo
agattgatcctacaggcgctgcttgactttc

SEQ ID NO: 13907 - DNA, 74 bp, Homo sapiens; identical to SEQ ID NO: 2644
  chr6:53212601-53212675
  hypo

SEQ ID NO: 13908 - DNA, 69 bp, Homo sapiens; identical to SEQ ID NO: 2645
  chr6:53212684-53212753
  hypo

SEQ ID NO: 13909 - DNA, 244 bp, Homo sapiens; identical to SEQ ID NO: 2646
  chr6:53212978-53213222
  hypo

SEQ ID NO: 13910 - DNA, 31 bp, Homo sapiens; identical to SEQ ID NO: 2647
  chr6:53213229-53213260
  hypo

SEQ ID NO: 13911 - DNA, 576 bp, Homo sapiens; identical to SEQ ID NO: 2648
  chr6:53213394-53213970
  hypo

SEQ ID NO: 13912 - DNA, 31 bp, Homo sapiens
  chr6:53290504-53290535
  hypo
atatattttggcctggcgcagtggctcatgc

SEQ ID NO: 13913 - DNA, 31 bp, Homo sapiens
  chr6:53519303-53519334
  hypo
ctcaaaagatctgcagcgtattttactctct

SEQ ID NO: 13914 - DNA, 31 bp, Homo sapiens
  chr6:53725818-53725849
  hypo
gccgcttttagggtgacgggtgagagaaggg

SEQ ID NO: 13915 - DNA, 75 bp, Homo sapiens
  chr6:56297180-56297255
  hypo
tcgtccttctgctctgcgtggccgagccggccatagccaccgaagccccaggagaagactcgcttctgggagtcc

SEQ ID NO: 13916 - DNA, 26 bp, Homo sapiens
  chr6:56972904-56972930
  hypo
gggattacaggcgtgagccacagtgc

SEQ ID NO: 13917 - DNA, 36 bp, Homo sapiens
  chr6:57111927-57111963
  hypo
aggcgtgagccacaccgcgcccggcctggacttgat

SEQ ID NO: 13918 - DNA, 42 bp, Homo sapiens
  chr6:57111977-57112019
  hypo
cacctagagtatccatcgtctttcctacgtggctgggcaact

SEQ ID NO: 13919 - DNA, 31 bp, Homo sapiens; identical to SEQ ID NO: 2651
  chr6:64283109-64283140
  hypo

SEQ ID NO: 13920 - DNA, 5 bp, Homo sapiens
  chr6:64354842-64354847
  hypo
tgcag

SEQ ID NO: 13921 - DNA, 23 bp, Homo sapiens
  chr6:71121842-71121865
  hypo
tggtacaagccaggcacggtgtc

SEQ ID NO: 13922 - DNA, 57 bp, Homo sapiens; identical to SEQ ID NO: 2653
  chr6:71666008-71666065
  hypo

SEQ ID NO: 13923 - DNA, 15 bp, Homo sapiens
  chr6:72129834-72129849
  hypo
ctgcggccccggctg

SEQ ID NO: 13924 - DNA, 31 bp, Homo sapiens; identical to SEQ ID NO: 2658
  chr6:73331123-73331154
  hypo

SEQ ID NO: 13925 - DNA, 78 bp, Homo sapiens; identical to SEQ ID NO: 2659
  chr6:73331174-73331252
  hypo

SEQ ID NO: 13926 - DNA, 96 bp, Homo sapiens; identical to SEQ ID NO: 2660
  chr6:73331273-73331369
  hypo

SEQ ID NO: 13927 - DNA, 79 bp, Homo sapiens; identical to SEQ ID NO: 2661
  chr6:73331421-73331500
  hypo

SEQ ID NO: 13928 - DNA, 79 bp, Homo sapiens; identical to SEQ ID NO: 2662
  chr6:73331516-73331595
  hypo

SEQ ID NO: 13929 - DNA, 31 bp, Homo sapiens; identical to SEQ ID NO: 2663
  chr6:73331597-73331628
  hypo

SEQ ID NO: 13930 - DNA, 59 bp, Homo sapiens; identical to SEQ ID NO: 2664
  chr6:73331635-73331694
  hypo

SEQ ID NO: 13931 - DNA, 104 bp, Homo sapiens; identical to SEQ ID NO: 2665
  chr6:73331696-73331800
  hypo

SEQ ID NO: 13932 - DNA, 214 bp, Homo sapiens; identical to SEQ ID NO: 2666
  chr6:73331933-73332147
  hypo

SEQ ID NO: 13933 - DNA, 80 bp, Homo sapiens; identical to SEQ ID NO: 2667
  chr6:73332277-73332357
  hypo

SEQ ID NO: 13934 - DNA, 104 bp, Homo sapiens; identical to SEQ ID NO: 2668
  chr6:73332361-73332465
  hypo

SEQ ID NO: 13935 - DNA, 90 bp, Homo sapiens; identical to SEQ ID NO: 2669
  chr6:73332508-73332598
  hypo

SEQ ID NO: 13936 - DNA, 48 bp, Homo sapiens; identical to SEQ ID NO: 2670
  chr6:73332617-73332665
  hypo

SEQ ID NO: 13937 - DNA, 31 bp, Homo sapiens; identical to SEQ ID NO: 2671
  chr6:73332904-73332935
  hypo

SEQ ID NO: 13938 - DNA, 175 bp, Homo sapiens; identical to SEQ ID NO: 2672
  chr6:73332946-73333121
  hypo

SEQ ID NO: 13939 - DNA, 35 bp, Homo sapiens; identical to SEQ ID NO: 2673
  chr6:73972873-73972908
  hypo

SEQ ID NO: 13940 - DNA, 51 bp, Homo sapiens; identical to SEQ ID NO: 2674
  chr6:73972917-73972968
  hypo

SEQ ID NO: 13941 - DNA, 174 bp, Homo sapiens; identical to SEQ ID NO: 2677
  chr6:74019425-74019599
  hypo

SEQ ID NO: 13942 - DNA, 269 bp, Homo sapiens; identical to SEQ ID NO: 2678
  chr6:74019614-74019883
  hypo

SEQ ID NO: 13943 - DNA, 59 bp, Homo sapiens; identical to SEQ ID NO: 2679
  chr6:74020035-74020094
  hypo

SEQ ID NO: 13944 - DNA, 60 bp, Homo sapiens; identical to SEQ ID NO: 2680
  chr6:74020105-74020165
  hypo

SEQ ID NO: 13945 - DNA, 89 bp, Homo sapiens; identical to SEQ ID NO: 2681
  chr6:74161232-74161321
  hypo

SEQ ID NO: 13946 - DNA, 37 bp, Homo sapiens; identical to SEQ ID NO: 2682
  chr6:74161339-74161376
  hypo

SEQ ID NO: 13947 - DNA, 111 bp, Homo sapiens; identical to SEQ ID NO: 2683
  chr6:74161387-74161498
  hypo

SEQ ID NO: 13948 - DNA, 113 bp, Homo sapiens; identical to SEQ ID NO: 2684
  chr6:74161684-74161797
  hypo

SEQ ID NO: 13949 - DNA, 138 bp, Homo sapiens; identical to SEQ ID NO: 2685
  chr6:74161830-74161968
  hypo

SEQ ID NO: 13950 - DNA, 39 bp, Homo sapiens
  chr6:74234188-74234227
  hypo
agaaaagatgatggcccggtgcggtggctcacgcctgta

SEQ ID NO: 13951 - DNA, 16 bp, Homo sapiens
  chr6:76234822-76234838
  hypo
ttttttttttttgaga

SEQ ID NO: 13952 - DNA, 87 bp, Homo sapiens; identical to SEQ ID NO: 2687
  chr6:76458863-76458950
  hypo

SEQ ID NO: 13953 - DNA, 22 bp, Homo sapiens
  chr6:79879551-79879573
  hypo
acagtatcatgcctggcgctgt

SEQ ID NO: 13954 - DNA, 25 bp, Homo sapiens
  chr6:82560663-82560688
  hypo
agcgagactccgttaaaaaaaaaaa

SEQ ID NO: 13955 - DNA, 42 bp, Homo sapiens
  chr6:82588583-82588625
  hypo
aaaagataattagggccgggcgcggtggctcacgcctgtaat

SEQ ID NO: 13956 - DNA, 41 bp, Homo sapiens
  chr6:83901418-83901459
  hypo
aaacatcggccgggagcggtggctcacgccagtaatcttag

SEQ ID NO: 13957 - DNA, 31 bp, Homo sapiens
  chr6:86302344-86302375
  hypo
atcaattttaacctttcggaatatttcaggt

SEQ ID NO: 13958 - DNA, 38 bp, Homo sapiens
  chr6:86302412-86302450
  hypo
attatagggatgtggccgggtgcggtggctcacgcctg

SEQ ID NO: 13959 - DNA, 22 bp, Homo sapiens
  chr6:87890685-87890707
  hypo
cctagggcgagcatgcagacag

SEQ ID NO: 13960 - DNA, 8 bp, Homo sapiens
  chr6:87890798-87890806
  hypo
tttctttc

SEQ ID NO: 13961 - DNA, 31 bp, Homo sapiens
  chr6:88137642-88137673
  hypo
gtgtccttgcagggtgcgtggggggaacttt

SEQ ID NO: 13962 - DNA, 68 bp, Homo sapiens; identical to SEQ ID NO: 2715
  chr6:88875941-88876009
  hypo

SEQ ID NO: 13963 - DNA, 89 bp, Homo sapiens; identical to SEQ ID NO: 2716
  chr6:88876148-88876237
  hypo

SEQ ID NO: 13964 - DNA, 31 bp, Homo sapiens; identical to SEQ ID NO: 2717
  chr6:88876350-88876381
  hypo

SEQ ID NO: 13965 - DNA, 80 bp, Homo sapiens; identical to SEQ ID NO: 2718
  chr6:88876396-88876476
  hypo

SEQ ID NO: 13966 - DNA, 14 bp, Homo sapiens
  chr6:88876630-88876644
  hypo
ggggccgggctgag

SEQ ID NO: 13967 - DNA, 106 bp, Homo sapiens; identical to SEQ ID NO: 2720
  chr6:88876835-88876941
  hypo

SEQ ID NO: 13968 - DNA, 52 bp, Homo sapiens
  chr6:89857591-89857643
  hypo
acagagcgaggcctcctcttaaaaaaaaaaagagcggcggcttcatgtcaga

SEQ ID NO: 13969 - DNA, 31 bp, Homo sapiens
  chr6:90052740-90052771
  hypo
gaagactgagagaggccgagatgtttataca

SEQ ID NO: 13970 - DNA, 31 bp, Homo sapiens
  chr6:90052773-90052804
  hypo
aagccttgagtagctacggagacccatcaaa

SEQ ID NO: 13971 - DNA, 84 bp, Homo sapiens; identical to SEQ ID NO: 2723
  chr6:90121251-90121335
  hypo

SEQ ID NO: 13972 - DNA, 42 bp, Homo sapiens; identical to SEQ ID NO: 2724
  chr6:90121390-90121432
  hypo

SEQ ID NO: 13973 - DNA, 31 bp, Homo sapiens
  chr6:90522089-90522120
  hypo
gctcagccactgcacccggccaggaaaaaat

SEQ ID NO: 13974 - DNA, 297 bp, Homo sapiens; identical to SEQ ID NO: 2725
  chr6:91004760-91005057
  hypo

SEQ ID NO: 13975 - DNA, 105 bp, Homo sapiens; identical to SEQ ID NO: 2726
  chr6:91005073-91005178
  hypo

SEQ ID NO: 13976 - DNA, 106 bp, Homo sapiens; identical to SEQ ID NO: 2727
  chr6:91005208-91005314
  hypo

SEQ ID NO: 13977 - DNA, 31 bp, Homo sapiens; identical to SEQ ID NO: 2728
  chr6:91320685-91320716
  hypo

SEQ ID NO: 13978 - DNA, 103 bp, Homo sapiens; identical to SEQ ID NO: 2729
  chr6:91321002-91321105
  hypo

SEQ ID NO: 13979 - DNA, 109 bp, Homo sapiens; identical to SEQ ID NO: 2730
  chr6:91321110-91321219
  hypo

SEQ ID NO: 13980 - DNA, 25 bp, Homo sapiens
  chr6:94511686-94511711
  hypo
tttttattttttgagacggagtctc

SEQ ID NO: 13981 - DNA, 26 bp, Homo sapiens
  chr6:96026947-96026973
  hypo
gttaaaaaaaattctgcggcctggcg

SEQ ID NO: 13982 - DNA, 27 bp, Homo sapiens
  chr6:99396455-99396482
  hypo
tatgtattttttgagacggagtctcgc

SEQ ID NO: 13983 - DNA, 26 bp, Homo sapiens
  chr6:99396721-99396747
  hypo
gccaccgcgcccgcccttggcacttt

SEQ ID NO: 13984 - DNA, 34 bp, Homo sapiens; identical to SEQ ID NO: 2731
  chr6:99962858-99962892
  hypo

SEQ ID NO: 13985 - DNA, 31 bp, Homo sapiens; identical to SEQ ID NO: 2732
  chr6:99962894-99962925
  hypo

SEQ ID NO: 13986 - DNA, 31 bp, Homo sapiens
  chr6:100841321-100841352
  hypo
cctaatgcttggagttcgggaaccctttcac

SEQ ID NO: 13987 - DNA, 31 bp, Homo sapiens
  chr6:100841367-100841398
  hypo
atcctgtggactgaagcgatgtgaggcatgc

SEQ ID NO: 13988 - DNA, 31 bp, Homo sapiens
  chr6:100841437-100841468
  hypo
tcaggggcaaggctgcgcgagagccccacca

SEQ ID NO: 13989 - DNA, 81 bp, Homo sapiens
  chr6:105750565-105750646
  hypo
agagagcttggagaccgcgccgcctgtcagtggcgatgcgcagctgggacagctccaccttcaggtcgtccagctgtttga

SEQ ID NO: 13990 - DNA, 42 bp, Homo sapiens
  chr6:105750651-105750693
  hypo
aactctttctccttcccgtgaaggtcccgagacttgatctta

SEQ ID NO: 13991 - DNA, 31 bp, Homo sapiens
  chr6:105750694-105750725
  hypo
ccattgctgcacaggccgcccccgccgcctg

SEQ ID NO: 13992 - DNA, 31 bp, Homo sapiens
  chr6:106908237-106908268
  hypo
gctcatttttgtattgcgttgtttaccttgc

SEQ ID NO: 13993 - DNA, 20 bp, Homo sapiens
  chr6:106945964-106945984
  hypo
gactccgtcttaaaaaaaaa

SEQ ID NO: 13994 - DNA, 406 bp, Homo sapiens; identical to SEQ ID NO: 2736
  chr6:106960498-106960904
  hypo

SEQ ID NO: 13995 - DNA, 115 bp, Homo sapiens; identical to SEQ ID NO: 2737
  chr6:106960908-106961023
  hypo

SEQ ID NO: 13996 - DNA, 14 bp, Homo sapiens
  chr6:107562845-107562859
  hypo
ggctgctctacaaa

SEQ ID NO: 13997 - DNA, 31 bp, Homo sapiens; identical to SEQ ID NO: 2738
  chr6:107810277-107810308
  hypo

SEQ ID NO: 13998 - DNA, 31 bp, Homo sapiens
  chr6:108274498-108274529
  hypo
ccccaaaactgtactacgggggtcctcatct

SEQ ID NO: 13999 - DNA, 23 bp, Homo sapiens
  chr6:108274566-108274589
  hypo
tttttcagatttgccccgtccgg

SEQ ID NO: 14000 - DNA, 96 bp, Homo sapiens; identical to SEQ ID NO: 2740
  chr6:108882163-108882259
  hypo

SEQ ID NO: 14001 - DNA, 74 bp, Homo sapiens; identical to SEQ ID NO: 2741
  chr6:108882273-108882347
  hypo

SEQ ID NO: 14002 - DNA, 64 bp, Homo sapiens
  chr6:109038592-109038656
  hypo
agggtgcccgaggcttcggtgtgctgaggccggggcagctgctggacttcgggtcttcggtgcg

SEQ ID NO: 14003 - DNA, 38 bp, Homo sapiens
  chr6:109057735-109057773
  hypo
ctgttaggaatattctcggcccggtgccgtggctcacg

SEQ ID NO: 14004 - DNA, 31 bp, Homo sapiens
  chr6:109059834-109059865
  hypo
agaaagagagggcttccgagaggaaaaagaa

SEQ ID NO: 14005 - DNA, 31 bp, Homo sapiens
  chr6:109059880-109059911
  hypo
ttggccatggatgtgccggatttcatagtca

SEQ ID NO: 14006 - DNA, 22 bp, Homo sapiens
  chr6:109060079-109060101
  hypo
gctggcaaagaagggacgatgg

SEQ ID NO: 14007 - DNA, 112 bp, Homo sapiens; identical to SEQ ID NO: 2742
  chr6:109777315-109777427
  hypo

SEQ ID NO: 14008 - DNA, 40 bp, Homo sapiens; identical to SEQ ID NO: 2743
  chr6:109777566-109777606
  hypo

SEQ ID NO: 14009 - DNA, 49 bp, Homo sapiens
  chr6:110843340-110843389
  hypo
aggcttttgtccacatcggtgaactccactttgccgattcctgtagtgc

SEQ ID NO: 14010 - DNA, 47 bp, Homo sapiens
  chr6:110872231-110872278
  hypo
tcacctcatctcccagcgccactgccctctcccggtccagtgcaagc

SEQ ID NO: 14011 - DNA, 64 bp, Homo sapiens
  chr6:110872316-110872380
  hypo
gacactcctccactctcgctttccgctttgggaaatagttcctctagtgcgctgggctgagagg

SEQ ID NO: 14012 - DNA, 31 bp, Homo sapiens
  chr6:110872388-110872419
  hypo
agaaagggcagagggtcgtaaactaacaggg

SEQ ID NO: 14013 - DNA, 31 bp, Homo sapiens
  chr6:110967154-110967185
  hypo
gcgagggcttctacaacgagcacatgcagcg

SEQ ID NO: 14014 - DNA, 20 bp, Homo sapiens
  chr6:111190619-111190639
  hypo
ccaccgcgcccagcccatta

SEQ ID NO: 14015 - DNA, 73 bp, Homo sapiens
  chr6:111244971-111245044
  hypo
tgactaccagcaaaggcgcaaaggtgttgaagggctcattgacatcgagaatcccaaccgggtggcacagaca

SEQ ID NO: 14016 - DNA, 31 bp, Homo sapiens
  chr6:111245085-111245116
  hypo
gcttttgaggagagaacgagaggagattgag

SEQ ID NO: 14017 - DNA, 31 bp, Homo sapiens
  chr6:111245118-111245149
  hypo
gcagaaggcaaaagagcgttacatgaaaatg

SEQ ID NO: 14018 - DNA, 33 bp, Homo sapiens
  chr6:111581422-111581455
  hypo
ttcctacgtctccttcgtcggatgggaaggttg

SEQ ID NO: 14019 - DNA, 72 bp, Homo sapiens
  chr6:111673960-111674032
  hypo
agaaaaatgtgctcctcgtggtcagagcttcactggcaaaactgaaccgaccacctgcgtccaatccagaag

SEQ ID NO: 14020 - DNA, 57 bp, Homo sapiens
  chr6:111674099-111674156
  hypo
atatgaaaatttatttcgagtggaaaattgtgtgggagagagcggaactaattatag

SEQ ID NO: 14021 - DNA, 84 bp, Homo sapiens
  chr6:111751950-111752034
  hypo
aataatttagagagagcgcaggagcagcttgaccgcatcgtgaaggaatctggaggaaagctgaccaggcggcttgtgaacagt

SEQ ID NO: 14022 - DNA, 31 bp, Homo sapiens
  chr6:111752047-111752078
  hypo
aaagaagaaaaccagacggaacaacaatgtt

SEQ ID NO: 14023 - DNA, 31 bp, Homo sapiens
  chr6:111766136-111766167
  hypo
agtatagtggccaaagcgaaggagatttatg

SEQ ID NO: 14024 - DNA, 104 bp, Homo sapiens
  chr6:111766197-111766301
  hypo
taggcagtcaagcaaccgatcacctcatcgttttcaagaatcaactacagataataagacggcaacaggagagaaatataagaagctctcggcatgtggccaac

SEQ ID NO: 14025 - DNA, 31 bp, Homo sapiens
  chr6:111872273-111872304
  hypo
gcagccaaggcatcatcgggaggctagggct

SEQ ID NO: 14026 - DNA, 31 bp, Homo sapiens
  chr6:111955505-111955536
  hypo
tttccttgatgagtaacgttgttgagcatct

SEQ ID NO: 14027 - DNA, 26 bp, Homo sapiens
  chr6:111955582-111955608
  hypo
ctcttaagtcttttgccgaatttttt

SEQ ID NO: 14028 - DNA, 31 bp, Homo sapiens
  chr6:111960202-111960233
  hypo
tgtcttacagttttatcgtgaatcttcaaat

SEQ ID NO: 14029 - DNA, 31 bp, Homo sapiens
  chr6:111993234-111993265
  hypo
acccccaatgaggacacggttccctggttgc

SEQ ID NO: 14030 - DNA, 41 bp, Homo sapiens
  chr6:111993273-111993314
  hypo
accagcaaggccccaacgcaggctctcggccacccttccag

SEQ ID NO: 14031 - DNA, 31 bp, Homo sapiens
  chr6:111993390-111993421
  hypo
cctatgtgccttcccacgtgccagaccttgg

SEQ ID NO: 14032 - DNA, 7 bp, Homo sapiens
  chr6:114153358-114153365
  hypo
tgaaccc

SEQ ID NO: 14033 - DNA, 31 bp, Homo sapiens
  chr6:114153367-114153398
  hypo
cagaaggaaccaactccggacatattactat

SEQ ID NO: 14034 - DNA, 31 bp, Homo sapiens; identical to SEQ ID NO: 2744
  chr6:114180217-114180248
  hypo

SEQ ID NO: 14035 - DNA, 31 bp, Homo sapiens
  chr6:116574056-116574087
  hypo
atctctgcaattctgtcgaattctagaaggc

SEQ ID NO: 14036 - DNA, 151 bp, Homo sapiens; identical to SEQ ID NO: 2746
  chr6:117803612-117803763
  hypo

SEQ ID NO: 14037 - DNA, 31 bp, Homo sapiens; identical to SEQ ID NO: 2747
  chr6:117803795-117803826
  hypo

SEQ ID NO: 14038 - DNA, 108 bp, Homo sapiens; identical to SEQ ID NO: 2748
  chr6:117804001-117804109
  hypo

SEQ ID NO: 14039 - DNA, 113 bp, Homo sapiens; identical to SEQ ID NO: 2749
  chr6:117804130-117804243
  hypo

SEQ ID NO: 14040 - DNA, 31 bp, Homo sapiens; identical to SEQ ID NO: 2750
  chr6:117804250-117804281
  hypo

SEQ ID NO: 14041 - DNA, 26 bp, Homo sapiens
  chr6:119254690-119254716
  hypo
aacacttatttcgtttggaaagagat

SEQ ID NO: 14042 - DNA, 68 bp, Homo sapiens; identical to SEQ ID NO: 2753
  chr6:123110666-123110734
  hypo

SEQ ID NO: 14043 - DNA, 17 bp, Homo sapiens
  chr6:125843088-125843105
  hypo
cacgacctttcttttgg

SEQ ID NO: 14044 - DNA, 31 bp, Homo sapiens
  chr6:127739718-127739749
  hypo
ttctgtcataaaaatacgagaagtttgtttt

SEQ ID NO: 14045 - DNA, 31 bp, Homo sapiens
  chr6:128830108-128830139
  hypo
agaaaagaaaagaaaacgaaaaaatttcata

SEQ ID NO: 14046 - DNA, 31 bp, Homo sapiens
  chr6:128830160-128830191
  hypo
acacccttctgagtggcgtgatgaaatcaca

SEQ ID NO: 14047 - DNA, 31 bp, Homo sapiens; identical to SEQ ID NO: 2765
  chr6:130342613-130342644
  hypo

SEQ ID NO: 14048 - DNA, 31 bp, Homo sapiens
  chr6:131455818-131455849
  hypo
agagtaactagtttgccgacttctagtgtgc

SEQ ID NO: 14049 - DNA, 42 bp, Homo sapiens
  chr6:133118417-133118459
  hypo
ccttgtacattactgccgttttgaaaacgtactgctttcggc

SEQ ID NO: 14050 - DNA, 31 bp, Homo sapiens; identical to SEQ ID NO: 2769
  chr6:133146627-133146658
  hypo

SEQ ID NO: 14051 - DNA, 31 bp, Homo sapiens; identical to SEQ ID NO: 2770
  chr6:133146679-133146710
  hypo

SEQ ID NO: 14052 - DNA, 31 bp, Homo sapiens; identical to SEQ ID NO: 2771
  chr6:133146717-133146748
  hypo

SEQ ID NO: 14053 - DNA, 49 bp, Homo sapiens; identical to SEQ ID NO: 2772
  chr6:133146772-133146821
  hypo

SEQ ID NO: 14054 - DNA, 52 bp, Homo sapiens
  chr6:134589499-134589551
  hypo
acaactgtttgtgaagcgcattgtaaacaaacatagacggggtgagacatcc

SEQ ID NO: 14055 - DNA, 19 bp, Homo sapiens
  chr6:134589568-134589587
  hypo
tcaagaattcccaggccgg

SEQ ID NO: 14056 - DNA, 31 bp, Homo sapiens
  chr6:136681876-136681907
  hypo
cttctctcgttcctgccggaccctctctgct

SEQ ID NO: 14057 - DNA, 43 bp, Homo sapiens
  chr6:136682165-136682208
  hypo
cctcccgctcgcgcagcgcccgctcctccgcctgccgctgcag

SEQ ID NO: 14058 - DNA, 17 bp, Homo sapiens
  chr6:136770171-136770188
  hypo
cacagtggctcaagccc

SEQ ID NO: 14059 - DNA, 31 bp, Homo sapiens; identical to SEQ ID NO: 2775
  chr6:136870741-136870772
  hypo

SEQ ID NO: 14060 - DNA, 204 bp, Homo sapiens; identical to SEQ ID NO: 2776
  chr6:136870810-136871014
  hypo

SEQ ID NO: 14061 - DNA, 56 bp, Homo sapiens; identical to SEQ ID NO: 2777
  chr6:136871047-136871103
  hypo

SEQ ID NO: 14062 - DNA, 199 bp, Homo sapiens; identical to SEQ ID NO: 2778
  chr6:136871106-136871305
  hypo

SEQ ID NO: 14063 - DNA, 31 bp, Homo sapiens
  chr6:137144496-137144527
  hypo
gaggaatgcacacattcgcaagtaggtgtta

SEQ ID NO: 14064 - DNA, 36 bp, Homo sapiens
  chr6:137144533-137144569
  hypo
ccagttaattgtctcccgtcgcgcgcattggctcag

SEQ ID NO: 14065 - DNA, 12 bp, Homo sapiens
  chr6:137144584-137144596
  hypo
gctcaggaggct

SEQ ID NO: 14066 - DNA, 44 bp, Homo sapiens; identical to SEQ ID NO: 2781
  chr6:138428546-138428590
  hypo

SEQ ID NO: 14067 - DNA, 31 bp, Homo sapiens
  chr6:138790571-138790602
  hypo
agaacaaggctgagcgcgatgactcacgcct

SEQ ID NO: 14068 - DNA, 28 bp, Homo sapiens
  chr6:139002029-139002057
  hypo
aggcatgagccaccgtgcccagccccct

SEQ ID NO: 14069 - DNA, 175 bp, Homo sapiens; identical to SEQ ID NO: 2792
  chr6:139013360-139013535
  hypo

SEQ ID NO: 14070 - DNA, 71 bp, Homo sapiens; identical to SEQ ID NO: 2793
  chr6:139013607-139013678
  hypo

SEQ ID NO: 14071 - DNA, 122 bp, Homo sapiens; identical to SEQ ID NO: 2794
  chr6:139013722-139013844
  hypo

SEQ ID NO: 14072 - DNA, 31 bp, Homo sapiens
  chr6:139908685-139908716
  hypo
acaggcgtgggccaccgcgcctggccagaag

SEQ ID NO: 14073 - DNA, 31 bp, Homo sapiens
  chr6:140012887-140012918
  hypo
catgagtggctgggtgcggtggctcacccct

SEQ ID NO: 14074 - DNA, 31 bp, Homo sapiens; identical to SEQ ID NO: 2795
  chr6:143266116-143266147
  hypo

SEQ ID NO: 14075 - DNA, 86 bp, Homo sapiens; identical to SEQ ID NO: 2796
  chr6:143999273-143999359
  hypo

SEQ ID NO: 14076 - DNA, 31 bp, Homo sapiens
  chr6:144271405-144271436
  hypo
aactaattacctgtcccggctctgcccaaac

SEQ ID NO: 14077 - DNA, 31 bp, Homo sapiens
  chr6:144330174-144330205
  hypo
aggcctataagcattacgtaaaaagattaag

SEQ ID NO: 14078 - DNA, 31 bp, Homo sapiens
  chr6:144330216-144330247
  hypo
gagctcactacatgttcgggtttagaaagtc

SEQ ID NO: 14079 - DNA, 69 bp, Homo sapiens; identical to SEQ ID NO: 2797
  chr6:144606892-144606961
  hypo

SEQ ID NO: 14080 - DNA, 31 bp, Homo sapiens; identical to SEQ ID NO: 2798
  chr6:144606966-144606997
  hypo

SEQ ID NO: 14081 - DNA, 38 bp, Homo sapiens; identical to SEQ ID NO: 2799
  chr6:144607005-144607043
  hypo

SEQ ID NO: 14082 - DNA, 106 bp, Homo sapiens
  chr6:144608086-144608192
  hypo
agtgcagcggtcgccgcggccagagcgcgcggagctcgggggaggccggattccctaggtctgagccgaccctcccggccgcccggccgggcggcagcgaccgcat

SEQ ID NO: 14083 - DNA, 32 bp, Homo sapiens
  chr6:146011351-146011383
  hypo
agagctaacctcaggccgggcacggtggctca

SEQ ID NO: 14084 - DNA, 31 bp, Homo sapiens; identical to SEQ ID NO: 2802
  chr6:146136665-146136696
  hypo

SEQ ID NO: 14085 - DNA, 395 bp, Homo sapiens; identical to SEQ ID NO: 2803
  chr6:146864539-146864934
  hypo

SEQ ID NO: 14086 - DNA, 31 bp, Homo sapiens
  chr6:147177766-147177797
  hypo
gaaactgtgcggctgccgcccacccaagctc

SEQ ID NO: 14087 - DNA, 70 bp, Homo sapiens
  chr6:147519321-147519391
  hypo
gaagtaatatgatatacgattagtcgctgtctatatataaatatatatataggtgcgaatccaggggtgg

SEQ ID NO: 14088 - DNA, 40 bp, Homo sapiens
  chr6:148648688-148648728
  hypo
gattacaggcgtgagccactgcgcccggccagaaatttct

SEQ ID NO: 14089 - DNA, 31 bp, Homo sapiens
  chr6:148699760-148699791
  hypo
tatcagcgtgagccaccgtgcctggttgata

SEQ ID NO: 14090 - DNA, 31 bp, Homo sapiens
  chr6:148819896-148819927
  hypo
gtgctcttgggaacaacgctggggaagttgg

SEQ ID NO: 14091 - DNA, 34 bp, Homo sapiens
  chr6:148819989-148820023
  hypo
aaatcatttgccctagcgccggtccttatttaat

SEQ ID NO: 14092 - DNA, 51 bp, Homo sapiens
  chr6:148820044-148820095
  hypo
aggcactattgttattcgtaagtagaatttagactgcgggccatctccaac

SEQ ID NO: 14093 - DNA, 31 bp, Homo sapiens
  chr6:148854572-148854603
  hypo
ctctgaggagggaaggcgttcagagtgccgg

SEQ ID NO: 14094 - DNA, 31 bp, Homo sapiens
  chr6:148857378-148857409
  hypo
aaagcatctattgtcccgaaccacatctgcc

SEQ ID NO: 14095 - DNA, 31 bp, Homo sapiens
  chr6:148865873-148865904
  hypo
ggagtggatctagaaacgctcactgaaaaca

SEQ ID NO: 14096 - DNA, 54 bp, Homo sapiens
  chr6:149177571-149177625
  hypo
gttatatatcaaagtacgcatctactaagtcctattcatcggagacagccacag

SEQ ID NO: 14097 - DNA, 31 bp, Homo sapiens
  chr6:149177695-149177726
  hypo
aaggccagtgactaggcggtagctacctctt

SEQ ID NO: 14098 - DNA, 36 bp, Homo sapiens
  chr6:149177731-149177767
  hypo
gatgggactagggttgcggggcgggctttcccacat

SEQ ID NO: 14099 - DNA, 50 bp, Homo sapiens
  chr6:149198423-149198473
  hypo
tatgagtgcggggggtcgtgtatgagtgtgggtatcgtgtacaagtgtgg

SEQ ID NO: 14100 - DNA, 35 bp, Homo sapiens
  chr6:149198481-149198516
  hypo
gtatgagtgcagagatcgtgtatgagtgggggggt

SEQ ID NO: 14101 - DNA, 33 bp, Homo sapiens
  chr6:149198575-149198608
  hypo
gcgtatgagtggggggatcgtgtatgagtgtgg

SEQ ID NO: 14102 - DNA, 35 bp, Homo sapiens
  chr6:149772981-149773016
  hypo
ggccaggcttagggagcgggcggtagggagtgggt

SEQ ID NO: 14103 - DNA, 25 bp, Homo sapiens
  chr6:149851783-149851808
  hypo
gactccatctcggaaaaaaaaaaag

SEQ ID NO: 14104 - DNA, 88 bp, Homo sapiens; identical to SEQ ID NO: 2810
  chr6:150185521-150185609
  hypo

SEQ ID NO: 14105 - DNA, 31 bp, Homo sapiens; identical to SEQ ID NO: 2811
  chr6:150185610-150185641
  hypo

SEQ ID NO: 14106 - DNA, 94 bp, Homo sapiens
  chr6:150420026-150420120
  hypo
acaactcaatccatgtcggttacaaacctctcttacaatttctccgccttattctcactcgttctcacctttccagccacgttcaagaaatcac

SEQ ID NO: 14107 - DNA, 31 bp, Homo sapiens
  chr6:150420194-150420225
  hypo
cccaggactgggtacccgggcaagattggca

SEQ ID NO: 14108 - DNA, 31 bp, Homo sapiens
  chr6:150746914-150746945
  hypo
ttgctcacacagccctcgctgctccatgcct

SEQ ID NO: 14109 - DNA, 36 bp, Homo sapiens
  chr6:151346387-151346423
  hypo
gcaggctcgtggacgtcggcacgtagctcagatgtg

SEQ ID NO: 14110 - DNA, 35 bp, Homo sapiens
  chr6:151546981-151547016
  hypo
ccacgtgctaggccatcgtggatgagggcggtctt

SEQ ID NO: 14111 - DNA, 88 bp, Homo sapiens; identical to SEQ ID NO: 2816
  chr6:152623053-152623141
  hypo

SEQ ID NO: 14112 - DNA, 92 bp, Homo sapiens; identical to SEQ ID NO: 2817
  chr6:152623142-152623234
  hypo

SEQ ID NO: 14113 - DNA, 279 bp, Homo sapiens; identical to SEQ ID NO: 2818
  chr6:152623244-152623523
  hypo

SEQ ID NO: 14114 - DNA, 31 bp, Homo sapiens
  chr6:153990668-153990699
  hypo
gactccctgaagcccacgtagaagcccccat

SEQ ID NO: 14115 - DNA, 31 bp, Homo sapiens
  chr6:154709414-154709445
  hypo
agtttatttcacttagcgtaatgtccttaag

SEQ ID NO: 14116 - DNA, 31 bp, Homo sapiens
  chr6:154727733-154727764
  hypo
aatgatcggaggaatccgctcgttactgaaa

SEQ ID NO: 14117 - DNA, 31 bp, Homo sapiens
  chr6:154739332-154739363
  hypo
ctccaccaggatgcttcgtcctgcatagtag

SEQ ID NO: 14118 - DNA, 15 bp, Homo sapiens
  chr6:154764333-154764348
  hypo
cggctcattcttatc

SEQ ID NO: 14119 - DNA, 31 bp, Homo sapiens
  chr6:154764439-154764470
  hypo
atttggggccagataacgcttgtggggtggg

SEQ ID NO: 14120 - DNA, 20 bp, Homo sapiens
  chr6:154772650-154772670
  hypo
acactcgtgcacacacgcac

SEQ ID NO: 14121 - DNA, 22 bp, Homo sapiens
  chr6:154788906-154788928
  hypo
ttttgagatggagtctcgctct

SEQ ID NO: 14122 - DNA, 31 bp, Homo sapiens
  chr6:154827051-154827082
  hypo
ttttaaagcagaaaaacgacttgtggtagct

SEQ ID NO: 14123 - DNA, 48 bp, Homo sapiens; identical to SEQ ID NO: 2824
  chr6:154831462-154831510
  hypo

SEQ ID NO: 14124 - DNA, 91 bp, Homo sapiens; identical to SEQ ID NO: 2825
  chr6:154831530-154831621
  hypo

SEQ ID NO: 14125 - DNA, 163 bp, Homo sapiens; identical to SEQ ID NO: 2826
  chr6:154831742-154831905
  hypo

SEQ ID NO: 14126 - DNA, 43 bp, Homo sapiens; identical to SEQ ID NO: 2827
  chr6:154831918-154831961
  hypo

SEQ ID NO: 14127 - DNA, 31 bp, Homo sapiens
  chr6:154842781-154842812
  hypo
gactgcaacctgtgaacgaccctgagcagaa

SEQ ID NO: 14128 - DNA, 48 bp, Homo sapiens
  chr6:154894707-154894755
  hypo
gtagctgggattacaggcatgtgccatcgtgcccggcctcattagcta

SEQ ID NO: 14129 - DNA, 31 bp, Homo sapiens
  chr6:154894829-154894860
  hypo
ccctaataaactggggcggtacttgataaag

SEQ ID NO: 14130 - DNA, 22 bp, Homo sapiens
  chr6:154922341-154922363
  hypo
aagactccgtctcaaaaaaaaa

SEQ ID NO: 14131 - DNA, 33 bp, Homo sapiens
  chr6:155568744-155568777
  hypo
agccaccgcacctggccacgcttcatggctttt

SEQ ID NO: 14132 - DNA, 31 bp, Homo sapiens
  chr6:155568881-155568912
  hypo
gtgttagtctttggggcgcagcctgcattcc

SEQ ID NO: 14133 - DNA, 31 bp, Homo sapiens
  chr6:155838704-155838735
  hypo
aaccagctagggctggcgtctcactggcatc

SEQ ID NO: 14134 - DNA, 31 bp, Homo sapiens
  chr6:155838740-155838771
  hypo
acccacctaagccctccggcagcatctctgg

SEQ ID NO: 14135 - DNA, 22 bp, Homo sapiens
  chr6:157040391-157040413
  hypo
tttttttttttttttccgagac

SEQ ID NO: 14136 - DNA, 31 bp, Homo sapiens
  chr6:157319352-157319383
  hypo
ttttttttttggtgggcgggggtcagagttt

SEQ ID NO: 14137 - DNA, 53 bp, Homo sapiens
  chr6:157478284-157478337
  hypo
ggtggctgtgctcactcggagatggctcaccgtgactcgcgcaccactgtcta

SEQ ID NO: 14138 - DNA, 31 bp, Homo sapiens
  chr6:157478413-157478444
  hypo
cctgggatcgtcacagcgagaaccagcatta

SEQ ID NO: 14139 - DNA, 36 bp, Homo sapiens
  chr6:157502488-157502524
  hypo
ggctctgccaccaactcgcagcgtgacctcagcagg

SEQ ID NO: 14140 - DNA, 45 bp, Homo sapiens
  chr6:157502530-157502575
  hypo
tcttggacctcagtttcgtcatgtatacagcgggccagactagat

SEQ ID NO: 14141 - DNA, 49 bp, Homo sapiens
  chr6:157505816-157505865
  hypo
aatcaaaacaggctttcgaattctaagccatatacgtttattgcttata

SEQ ID NO: 14142 - DNA, 48 bp, Homo sapiens
  chr6:157506081-157506129
  hypo
gaatttaacaagctgtcgtggtaaggatccacacggccttgttttgga

SEQ ID NO: 14143 - DNA, 31 bp, Homo sapiens
  chr6:157540519-157540550
  hypo
ttccccggggctccctcgtccatgctcagcc

SEQ ID NO: 14144 - DNA, 31 bp, Homo sapiens
  chr6:157632955-157632986
  hypo
tggctgtaacaaaaatcgatgtatttctgac

SEQ ID NO: 14145 - DNA, 26 bp, Homo sapiens
  chr6:157637600-157637626
  hypo
tttagtagagacggggtttcaccatg

SEQ ID NO: 14146 - DNA, 41 bp, Homo sapiens
  chr6:157638361-157638402
  hypo
agcacagggcagcagccggcttggcccgcagtgctcctccc

SEQ ID NO: 14147 - DNA, 59 bp, Homo sapiens; identical to SEQ ID NO: 2828
  chr6:157802883-157802942
  hypo

SEQ ID NO: 14148 - DNA, 31 bp, Homo sapiens
  chr6:158018131-158018162
  hypo
gtggaacgcagcatttcgggttgtttattta

SEQ ID NO: 14149 - DNA, 36 bp, Homo sapiens; identical to SEQ ID NO: 2829
  chr6:158244129-158244165
  hypo

SEQ ID NO: 14150 - DNA, 71 bp, Homo sapiens; identical to SEQ ID NO: 2830
  chr6:158244316-158244387
  hypo

SEQ ID NO: 14151 - DNA, 31 bp, Homo sapiens; identical to SEQ ID NO: 2831
  chr6:158244423-158244454
  hypo

SEQ ID NO: 14152 - DNA, 51 bp, Homo sapiens; identical to SEQ ID NO: 2832
  chr6:158244503-158244554
  hypo

SEQ ID NO: 14153 - DNA, 31 bp, Homo sapiens
  chr6:158489761-158489792
  hypo
taaggggccaggtgtgcggggccaggcaggg

SEQ ID NO: 14154 - DNA, 31 bp, Homo sapiens
  chr6:159135763-159135794
  hypo
tcactgtgtttctgctcggcttctcttcatc

SEQ ID NO: 14155 - DNA, 31 bp, Homo sapiens
  chr6:159135801-159135832
  hypo
tttctgtagttgcatgcggatggtctcagtg

SEQ ID NO: 14156 - DNA, 31 bp, Homo sapiens
  chr6:159135865-159135896
  hypo
actttaattagttgtccgtattcctcatgag

SEQ ID NO: 14157 - DNA, 31 bp, Homo sapiens
  chr6:159135899-159135930
  hypo
tgtgtcagctgtcacacgatgacaatggaca

SEQ ID NO: 14158 - DNA, 31 bp, Homo sapiens
  chr6:159135948-159135979
  hypo
gatgagcagaaacagtcgtctcatgcaatgg

SEQ ID NO: 14159 - DNA, 36 bp, Homo sapiens
  chr6:159151891-159151927
  hypo
aaaagccgccagggggcgggtcggggtggggcggtg

SEQ ID NO: 14160 - DNA, 31 bp, Homo sapiens
  chr6:159177015-159177046
  hypo
ctgacctcatagggtgcgtgtgaaagctaaa

SEQ ID NO: 14161 - DNA, 49 bp, Homo sapiens
  chr6:159203060-159203109
  hypo
gattccaggtgtgagccgctgtgcctggcttttccgtgcttctttacca

SEQ ID NO: 14162 - DNA, 31 bp, Homo sapiens
  chr6:159345137-159345168
  hypo
tatttatgtctccaaacgtatctaaacagaa

SEQ ID NO: 14163 - DNA, 11 bp, Homo sapiens
  chr6:159419498-159419509
  hypo
tcaaaaaaaaa

SEQ ID NO: 14164 - DNA, 31 bp, Homo sapiens
  chr6:159419588-159419619
  hypo
taaaaacacaaactgccgtccgggcgcggtg

SEQ ID NO: 14165 - DNA, 58 bp, Homo sapiens
  chr6:160328045-160328103
  hypo
gcaggaacgcctcagtcgggaatgcacatcggcaaatccccatcgtgcactgggtcat

SEQ ID NO: 14166 - DNA, 31 bp, Homo sapiens
  chr6:160328148-160328179
  hypo
ctggttcctgtgcttccggatgagaagaaat

SEQ ID NO: 14167 - DNA, 31 bp, Homo sapiens
  chr6:160328195-160328226
  hypo
tcacccacctgtctatcgcagacatctcact

SEQ ID NO: 14168 - DNA, 45 bp, Homo sapiens; identical to SEQ ID NO: 2835
  chr6:160389821-160389866
  hypo

SEQ ID NO: 14169 - DNA, 83 bp, Homo sapiens
  chr6:160491753-160491836
  hypo
gagttgggcattaactcgggcaagaccagctcgctgggtgtcagggtggctcgccccatgctctccagcggtgggcagcagtg

SEQ ID NO: 14170 - DNA, 31 bp, Homo sapiens
  chr6:160491878-160491909
  hypo
gccctcttgcctggagcggcagggaagtttc

SEQ ID NO: 14171 - DNA, 31 bp, Homo sapiens
  chr6:160511959-160511990
  hypo
gtgccctggtgctgagcgcatcgccgagaag

SEQ ID NO: 14172 - DNA, 53 bp, Homo sapiens
  chr6:160512175-160512228
  hypo
ctggtgctgagcacatcgccgagaaggagcaggtgctccgtgccctggtgctg

SEQ ID NO: 14173 - DNA, 31 bp, Homo sapiens
  chr6:161460048-161460079
  hypo
agactgaggtggaaatcgcaggccttcttag

SEQ ID NO: 14174 - DNA, 31 bp, Homo sapiens
  chr6:161559687-161559718
  hypo
ccatttggaagaagcacgtgatctctgtgtg

SEQ ID NO: 14175 - DNA, 31 bp, Homo sapiens
  chr6:161577268-161577299
  hypo
agcaagctactgccctcgggacaagcctgct

SEQ ID NO: 14176 - DNA, 31 bp, Homo sapiens
  chr6:161767101-161767132
  hypo
taaaaaaactgaacatcgatattctccacac

SEQ ID NO: 14177 - DNA, 36 bp, Homo sapiens; identical to SEQ ID NO: 2836
  chr6:163836503-163836539
  hypo

SEQ ID NO: 14178 - DNA, 76 bp, Homo sapiens; identical to SEQ ID NO: 2837
  chr6:163836603-163836679
  hypo

SEQ ID NO: 14179 - DNA, 31 bp, Homo sapiens; identical to SEQ ID NO: 2841
  chr6:163837419-163837450
  hypo

SEQ ID NO: 14180 - DNA, 35 bp, Homo sapiens
  chr6:163946671-163946706
  hypo
caggcgtgagccaccacgcccggccatcttgtttc

SEQ ID NO: 14181 - DNA, 53 bp, Homo sapiens
  chr6:165747831-165747884
  hypo
ctacagcgccgggcacgcgcctccatagcgccctacagcgccgggcacgcgcc

SEQ ID NO: 14182 - DNA, 49 bp, Homo sapiens
  chr6:166748325-166748374
  hypo
aaccaaagggctgtctcgagaagattctcaaagacgaggtgcccaactg

SEQ ID NO: 14183 - DNA, 31 bp, Homo sapiens; identical to SEQ ID NO: 2842
  chr6:166822698-166822729
  hypo

SEQ ID NO: 14184 - DNA, 31 bp, Homo sapiens
  chr6:167065180-167065211
  hypo
cttacacaggatgcttcgatctgatgacgat

SEQ ID NO: 14185 - DNA, 31 bp, Homo sapiens
  chr6:167511714-167511745
  hypo
aaaagtgaagagattccgcttgcaagtttga

SEQ ID NO: 14186 - DNA, 31 bp, Homo sapiens
  chr6:167511787-167511818
  hypo
tcatatataattcttccgcctatacacagga

SEQ ID NO: 14187 - DNA, 58 bp, Homo sapiens
  chr6:167511853-167511911
  hypo
gtgcccagaccacccccgctaaccccagtgtgccctgcacaaacgtggggtcctgtgg

SEQ ID NO: 14188 - DNA, 31 bp, Homo sapiens
  chr6:167570837-167570868
  hypo
ctggtggagttctgggcggcctcagagatga

SEQ ID NO: 14189 - DNA, 31 bp, Homo sapiens
  chr6:167592732-167592763
  hypo
tctgaccacttttgtccgattccctggttgg

SEQ ID NO: 14190 - DNA, 31 bp, Homo sapiens
  chr6:167651139-167651170
  hypo
agcagctcccgtgggccgatgaggaggcatg

SEQ ID NO: 14191 - DNA, 31 bp, Homo sapiens
  chr6:167808332-167808363
  hypo
ccactactaactctacgcggacagaaatggt

SEQ ID NO: 14192 - DNA, 31 bp, Homo sapiens
  chr6:167835046-167835077
  hypo
tcttgctatgccagggcggtgctagagatag

SEQ ID NO: 14193 - DNA, 77 bp, Homo sapiens
  chr6:167835094-167835171
  hypo
gctgttttccccccacgcggatcctcacctccgcttctccactggctttccgcctttacatacgtctattttaaatt

SEQ ID NO: 14194 - DNA, 31 bp, Homo sapiens
  chr6:167859495-167859526
  hypo
caggaggagccattgccgctggcgtctgggg

SEQ ID NO: 14195 - DNA, 19 bp, Homo sapiens
  chr6:168046805-168046824
  hypo
taagaaagaagggggccgg

SEQ ID NO: 14196 - DNA, 52 bp, Homo sapiens
  chr6:168054235-168054287
  hypo
gaagtcagcatacccacgatggaagtgctaacctttacgtcccccaacagac

SEQ ID NO: 14197 - DNA, 31 bp, Homo sapiens
  chr6:168098917-168098948
  hypo
tggatcagccactaagcgacccaaggcagaa

SEQ ID NO: 14198 - DNA, 37 bp, Homo sapiens
  chr6:168131200-168131237
  hypo
cacaggtttgtggctccgcttccgccactgaggatat

SEQ ID NO: 14199 - DNA, 48 bp, Homo sapiens
  chr6:168156340-168156388
  hypo
agaagcgggtgggactcgtcctggtagtgggggcgagttcaaggtaac

SEQ ID NO: 14200 - DNA, 70 bp, Homo sapiens; identical to SEQ ID NO: 2850
  chr6:168227398-168227468
  hypo

SEQ ID NO: 14201 - DNA, 34 bp, Homo sapiens; identical to SEQ ID NO: 2851
  chr6:168227909-168227943
  hypo

SEQ ID NO: 14202 - DNA, 85 bp, Homo sapiens; identical to SEQ ID NO: 2852
  chr6:168228221-168228306
  hypo

SEQ ID NO: 14203 - DNA, 71 bp, Homo sapiens
  chr6:168377566-168377637
  hypo
atttcttcctgcccctcgctcccgcctcgagccaccccctcgtgctccccaacgcccgctcctgtgctggt

SEQ ID NO: 14204 - DNA, 40 bp, Homo sapiens
  chr6:168377656-168377696
  hypo
aggccagaagcagaggcgatgccggcggggagcgggcggt

SEQ ID NO: 14205 - DNA, 41 bp, Homo sapiens
  chr6:168387061-168387102
  hypo
ccatacagtcaggcatcgcttaatggcggggttgtgttctg

SEQ ID NO: 14206 - DNA, 87 bp, Homo sapiens
  chr6:168387332-168387419
  hypo
gggcccctgtgaggtacgaggcctgtcattgactaaagcacagccgtgcagcccaggacggcagttccttgccgagggcccgtgtgt

SEQ ID NO: 14207 - DNA, 31 bp, Homo sapiens
  chr6:168389683-168389714
  hypo
aaggaacctgaggtgtcgctgctctacaatc

SEQ ID NO: 14208 - DNA, 31 bp, Homo sapiens
  chr6:168389767-168389798
  hypo
acctcagacccctgcccgtgagtgcctgagc

SEQ ID NO: 14209 - DNA, 31 bp, Homo sapiens
  chr6:168389799-168389830
  hypo
tgcagaggtaacccctcgccatcacattcca

SEQ ID NO: 14210 - DNA, 37 bp, Homo sapiens
  chr6:168389835-168389872
  hypo
gccttctccagcagaacgtggacggcccccgctcagg

SEQ ID NO: 14211 - DNA, 92 bp, Homo sapiens
  chr6:168390654-168390746
  hypo
gcagccccacgttgagcgcagaccatcctggcgccatggattttcttagaactgccgttccacgccgggtgagtccccggggctctggaacc

SEQ ID NO: 14212 - DNA, 31 bp, Homo sapiens
  chr6:168390943-168390974
  hypo
ttctaacactcacgtgcgtggtatttctttc

SEQ ID NO: 14213 - DNA, 31 bp, Homo sapiens
  chr6:168391270-168391301
  hypo
tgcagcctccctgccccgctgcgcccggctc

SEQ ID NO: 14214 - DNA, 73 bp, Homo sapiens
  chr6:168391441-168391514
  hypo
catcccgggcctcacacgcagcccctcttccaggacgttctgcctccccgcacctggccgggaccctcaggct

SEQ ID NO: 14215 - DNA, 58 bp, Homo sapiens
  chr6:168391518-168391576
  hypo
cctggggatgcctccccgacggctcctgtggctccgtgccccgcgcgcccctggatca

SEQ ID NO: 14216 - DNA, 70 bp, Homo sapiens
  chr6:168420279-168420349
  hypo
gggacggctgggctgacgcaagccccacagtgcgaatgagcttgaggcccctggacggcacacttgaaat

SEQ ID NO: 14217 - DNA, 31 bp, Homo sapiens
  chr6:168420404-168420435
  hypo
gaacagagcatcatggcgccatgggaccatg

SEQ ID NO: 14218 - DNA, 31 bp, Homo sapiens
  chr6:168420449-168420480
  hypo
aagaagccaaatacagcgggagttgcagtcc

SEQ ID NO: 14219 - DNA, 46 bp, Homo sapiens
  chr6:168428431-168428477
  hypo
gtccgtgggtgagaaacgggttctctgtgtcgcgtctcttcagagc

SEQ ID NO: 14220 - DNA, 59 bp, Homo sapiens
  chr6:168434609-168434668
  hypo
ctataccatgctgggacgccattcggacgacggccctgttctgccgcttgacccacaga

SEQ ID NO: 14221 - DNA, 31 bp, Homo sapiens
  chr6:168434702-168434733
  hypo
gctcttcaggtactgccgatggtgatgagtg

SEQ ID NO: 14222 - DNA, 31 bp, Homo sapiens
  chr6:168434746-168434777
  hypo
tggcagggaagccaggcggtcagcaccttgg

SEQ ID NO: 14223 - DNA, 71 bp, Homo sapiens
  chr6:168450727-168450798
  hypo
cggaaccacaggggcccggccccatctcggggtccggggtggcttccctgcgggggcggcctctgtgcaga

SEQ ID NO: 14224 - DNA, 36 bp, Homo sapiens
  chr6:168450835-168450871
  hypo
aagtgtctgcctgtgccggaccgagtgatctgtact

SEQ ID NO: 14225 - DNA, 70 bp, Homo sapiens
  chr6:168450874-168450944
  hypo
attaccctgtgaggggcgcacgctgccgtcctagagcgtcacagacaccagcccccgggcctgttggtac

SEQ ID NO: 14226 - DNA, 37 bp, Homo sapiens
  chr6:168458056-168458093
  hypo
ctctcactcccaccaccgcacacggcagccacactgc

SEQ ID NO: 14227 - DNA, 47 bp, Homo sapiens
  chr6:168458118-168458165
  hypo
gccaatgcccaccctgcgccgcagtgcatggccggcctgcccctgga

SEQ ID NO: 14228 - DNA, 31 bp, Homo sapiens
  chr6:168458284-168458315
  hypo
ggacctggactcttagcgtttggtgtaattt

SEQ ID NO: 14229 - DNA, 48 bp, Homo sapiens
  chr6:168458360-168458408
  hypo
cctcagtggtcaagaacggcctcctattttatacgggaggaaactgtc

SEQ ID NO: 14230 - DNA, 31 bp, Homo sapiens
  chr6:168461479-168461510
  hypo
tcctggggctggaggacggctccttctcatg

SEQ ID NO: 14231 - DNA, 67 bp, Homo sapiens
  chr6:168461831-168461898
  hypo
acagcccagatgaggacgtggaacaggcagggagaccaggcctgcgggtaaacgctgaggccaggcc

SEQ ID NO: 14232 - DNA, 63 bp, Homo sapiens
  chr6:168463426-168463489
  hypo
acagcagaggcagggcgcgtccaggcagggccagccagcgcccatgaccgctgcagggatgct

SEQ ID NO: 14233 - DNA, 60 bp, Homo sapiens
  chr6:168463521-168463581
  hypo
gggggtgggggcaggacgaggggctctgtgaggctggagccccttcggtcacctggtaga

SEQ ID NO: 14234 - DNA, 31 bp, Homo sapiens
  chr6:168463598-168463629
  hypo
gccagtcccaggatcacggtgggacgacctt

SEQ ID NO: 14235 - DNA, 31 bp, Homo sapiens
  chr6:168464976-168465007
  hypo
aaccttaaagttcacccggaacagggcctgc

SEQ ID NO: 14236 - DNA, 42 bp, Homo sapiens
  chr6:168467712-168467754
  hypo
agaacatctgcaaaggcgggcttcgggcgggcacacctgctt

SEQ ID NO: 14237 - DNA, 31 bp, Homo sapiens
  chr6:168481549-168481580
  hypo
tgctggtgtgtgtgggcgctggtgtgtgtgg

SEQ ID NO: 14238 - DNA, 31 bp, Homo sapiens
  chr6:168482064-168482095
  hypo
agaggctggcctgccacgttcgtgatgtcag

SEQ ID NO: 14239 - DNA, 31 bp, Homo sapiens
  chr6:168529145-168529176
  hypo
gcctctggcctccaagcgcccggctgagccc

SEQ ID NO: 14240 - DNA, 56 bp, Homo sapiens
  chr6:168530047-168530103
  hypo
cacagcggccggttttcgctcgaggtccttcatgtggttgccgtcagatggtcaga

SEQ ID NO: 14241 - DNA, 39 bp, Homo sapiens
  chr6:168561522-168561561
  hypo
tgatgttcactttcttcgatcttacgtggtggcatccac

SEQ ID NO: 14242 - DNA, 76 bp, Homo sapiens
  chr6:168591252-168591328
  hypo
tcccgcctgcgagggtcggccgcctcacgtgtcctgcgctgtgcacctgacgtcccgcctgcgagggtcggccgcc

SEQ ID NO: 14243 - DNA, 31 bp, Homo sapiens
  chr6:168643920-168643951
  hypo
ccgtgaggctgcccaacgcagagcagagggc

SEQ ID NO: 14244 - DNA, 31 bp, Homo sapiens
  chr6:168708313-168708344
  hypo
gcgccgccctcctcgtcgctgctgctggact

SEQ ID NO: 14245 - DNA, 31 bp, Homo sapiens
  chr6:168710885-168710916
  hypo
tggcctgcatcctccacgctccctgggggcc

SEQ ID NO: 14246 - DNA, 37 bp, Homo sapiens
  chr6:168813948-168813985
  hypo
ggggtggcgggccctgcgggagcgtgtacgtgagcgc

SEQ ID NO: 14247 - DNA, 84 bp, Homo sapiens
  chr6:168813998-168814082
  hypo
ggagcgtgtacgtgagcggggcgggccctgcgggagcaagtacgcaggtgtggggtttgggggactttgcgggagaggctccag

SEQ ID NO: 14248 - DNA, 31 bp, Homo sapiens
  chr6:169567363-169567394
  hypo
cacagcgtacggccaccggcaccttcactcc

SEQ ID NO: 14249 - DNA, 31 bp, Homo sapiens
  chr6:169614048-169614079
  hypo
gatcaccccacacctgcgttcctcaaggcct

SEQ ID NO: 14250 - DNA, 31 bp, Homo sapiens
  chr6:169639660-169639691
  hypo
tgcaggatgcgcttgccggctggcgatactc

SEQ ID NO: 14251 - DNA, 31 bp, Homo sapiens
  chr6:169803234-169803265
  hypo
ccagaaatgtgcacacgcgtacacacacaca

SEQ ID NO: 14252 - DNA, 48 bp, Homo sapiens
  chr6:169803283-169803331
  hypo
cctacatgacacctctcgccatgcctggctctgcgagtcttggccccc

SEQ ID NO: 14253 - DNA, 31 bp, Homo sapiens
  chr6:169803364-169803395
  hypo
gcacaaccctcactgccgtgtccttctttta

SEQ ID NO: 14254 - DNA, 31 bp, Homo sapiens
  chr6:169803397-169803428
  hypo
ctgtcacagtgactgacgagctgggcttgca

SEQ ID NO: 14255 - DNA, 37 bp, Homo sapiens
  chr6:170061017-170061054
  hypo
ccgcaggagtggggagcgtgggcgttgggccccacgt

SEQ ID NO: 14256 - DNA, 126 bp, Homo sapiens
  chr6:170339547-170339673
  hypo
accctgagcctggtgacgtcacgggtggaggagaccgccccgagccctgtgacttcacggtggaggagaccaccctgagcccggtgacgtcacgggtggaggagaccgccccgagccctgtgactt

SEQ ID NO: 14257 - DNA, 31 bp, Homo sapiens
  chr6:170344373-170344404
  hypo
gggagctggagacttccgtgtccatgggcaa

SEQ ID NO: 14258 - DNA, 57 bp, Homo sapiens
  chr6:170474842-170474899
  hypo
gtccgacgttgctcagcgtccagcaaggggctgcccagatcccgtcttccacagacc

SEQ ID NO: 14259 - DNA, 31 bp, Homo sapiens
  chr6:170475210-170475241
  hypo
cctcttaatagcggtacgggtacggccaggg

SEQ ID NO: 14260 - DNA, 82 bp, Homo sapiens
  chr6:170475249-170475331
  hypo
gaacgtagacagaacccgggcactgagagaccggtgccgccccccgccgtccacacaacccgggcctcgggcagcaccagca

SEQ ID NO: 14261 - DNA, 60 bp, Homo sapiens
  chr6:170475334-170475394
  hypo
cttttattcctcaccccgcacgccgccgtccatctcctaggccagcgtgattcttctgag

SEQ ID NO: 14262 - DNA, 79 bp, Homo sapiens
  chr6:170475405-170475484
  hypo
ctcctcctgggagatccggtggctctagcagcgtgggtgctgggaacaggaccagcctcgccggcggacagtgtggacg

SEQ ID NO: 14263 - DNA, 47 bp, Homo sapiens
  chr6:170475499-170475546
  hypo
tggaccactctctccccgggggactccgttcccgcctccagggagct

SEQ ID NO: 14264 - DNA, 31 bp, Homo sapiens
  chr6:170491588-170491619
  hypo
cagctcagccccgtcccggactcaggggggc

SEQ ID NO: 14265 - DNA, 31 bp, Homo sapiens
  chr6:170561025-170561056
  hypo
tgcagagccctccacccgcacatggggtccc

SEQ ID NO: 14266 - DNA, 34 bp, Homo sapiens
  chr7:62936-62970
  hypo
gctgtctctggtccagcggcgaggagcccccaca

SEQ ID NO: 14267 - DNA, 90 bp, Homo sapiens
  chr7:88326-88416
  hypo
ctggaggctccagcagcgtcccctgttccactcctagaggcccccacgttcagccagtgttcctggaccctccagcggctgccttcctag

SEQ ID NO: 14268 - DNA, 31 bp, Homo sapiens
  chr7:156973-157004
  hypo
cgcaggagggatttgccggggctgcctctgc

SEQ ID NO: 14269 - DNA, 31 bp, Homo sapiens
  chr7:181307-181338
  hypo
tcgagtttcccctgcccgcagcccccataac

SEQ ID NO: 14270 - DNA, 66 bp, Homo sapiens
  chr7:204778-204844
  hypo
gagggaatgtggcactcgtgtggccttcgctgtgctgtgtccccacactgccgctgttctcagtgt

SEQ ID NO: 14271 - DNA, 40 bp, Homo sapiens
  chr7:204884-204924
  hypo
tgagtccccacactgccgctgttctcggtgctcggggagg

SEQ ID NO: 14272 - DNA, 31 bp, Homo sapiens
  chr7:211563-211594
  hypo
ccccctccctaggacccgtttgtcagggccc

SEQ ID NO: 14273 - DNA, 39 bp, Homo sapiens
  chr7:299616-299655
  hypo
ccctctcactttctctcgctttcccgtgggcaggcatct

SEQ ID NO: 14274 - DNA, 31 bp, Homo sapiens
  chr7:302539-302570
  hypo
cacaagaaccatcatgcgtgtgagagccttt

SEQ ID NO: 14275 - DNA, 31 bp, Homo sapiens
  chr7:307125-307156
  hypo
gagggacccgcaggtccgcaggtgagcgcag

SEQ ID NO: 14276 - DNA, 35 bp, Homo sapiens
  chr7:339203-339238
  hypo
ctggtggactctgtgtcgaacgagtcacgttcagc

SEQ ID NO: 14277 - DNA, 31 bp, Homo sapiens
  chr7:396925-396956
  hypo
gttgacagacagcgtccggagcaggctgctg

SEQ ID NO: 14278 - DNA, 31 bp, Homo sapiens
  chr7:416864-416895
  hypo
catgagacccaggccccgaggtgcaagggtg

SEQ ID NO: 14279 - DNA, 31 bp, Homo sapiens
  chr7:418814-418845
  hypo
gcccacggcctgtccccgctctcaggctgct

SEQ ID NO: 14280 - DNA, 31 bp, Homo sapiens
  chr7:425949-425980
  hypo
accatccccttggtgacgagttcctgctcag

SEQ ID NO: 14281 - DNA, 31 bp, Homo sapiens
  chr7:429736-429767
  hypo
tggtcatgtctcagaacggtgagaagggaca

SEQ ID NO: 14282 - DNA, 31 bp, Homo sapiens
  chr7:429778-429809
  hypo
ataccctgtctttttccggagccacactagt

SEQ ID NO: 14283 - DNA, 42 bp, Homo sapiens
  chr7:429841-429883
  hypo
tgcagtgggtcagccccgccctgacatcggcactgtcttagc

SEQ ID NO: 14284 - DNA, 31 bp, Homo sapiens
  chr7:469230-469261
  hypo
caagccgtcggttatgcgttccaggcagccc

SEQ ID NO: 14285 - DNA, 76 bp, Homo sapiens
  chr7:480949-481025
  hypo
aggccgcagcacataacgaggtaggaagagccggagaaggcctggctggccctgggagacacgtccatctcactgc

SEQ ID NO: 14286 - DNA, 85 bp, Homo sapiens
  chr7:481032-481117
  hypo
taagcatgtgggcacccgggaagctggagcgtggcctgtgtgacgtgggcgcccaccaccacgatgaggccggttcataaacatg

SEQ ID NO: 14287 - DNA, 36 bp, Homo sapiens
  chr7:485247-485283
  hypo
tggccccaccagccagcgccccgtcaccagcacccc

SEQ ID NO: 14288 - DNA, 47 bp, Homo sapiens
  chr7:534691-534738
  hypo
gcacttggggagctcccgccccaatgctgctccggagtctggggccc

SEQ ID NO: 14289 - DNA, 31 bp, Homo sapiens
  chr7:534782-534813
  hypo
agggcccctggatgcccggccacagcacaag

SEQ ID NO: 14290 - DNA, 63 bp, Homo sapiens
  chr7:534817-534880
  hypo
gcctctctgtgtcctgcgacccttctacttggggccccctaggcgttccgggcctgccagggg

SEQ ID NO: 14291 - DNA, 31 bp, Homo sapiens
  chr7:545345-545376
  hypo
gcccagagtcacacagcgttgaatctccatc

SEQ ID NO: 14292 - DNA, 31 bp, Homo sapiens
  chr7:545390-545421
  hypo
cttctcacctctttcacggaaagaaagccta

SEQ ID NO: 14293 - DNA, 55 bp, Homo sapiens; identical to SEQ ID NO: 2857
  chr7:557848-557903
  hypo

SEQ ID NO: 14294 - DNA, 31 bp, Homo sapiens; identical to SEQ ID NO: 2858
  chr7:557943-557974
  hypo

SEQ ID NO: 14295 - DNA, 15 bp, Homo sapiens
  chr7:557975-557990
  hypo
gatggggatgggggg

SEQ ID NO: 14296 - DNA, 37 bp, Homo sapiens; identical to SEQ ID NO: 2860
  chr7:558726-558763
  hypo

SEQ ID NO: 14297 - DNA, 43 bp, Homo sapiens; identical to SEQ ID NO: 2861
  chr7:559053-559096
  hypo

SEQ ID NO: 14298 - DNA, 31 bp, Homo sapiens; identical to SEQ ID NO: 2862
  chr7:559250-559281
  hypo

SEQ ID NO: 14299 - DNA, 57 bp, Homo sapiens; identical to SEQ ID NO: 2863
  chr7:559287-559344
  hypo

SEQ ID NO: 14300 - DNA, 73 bp, Homo sapiens; identical to SEQ ID NO: 2864
  chr7:559418-559491
  hypo

SEQ ID NO: 14301 - DNA, 31 bp, Homo sapiens
  chr7:576730-576761
  hypo
cgtggttgttaggtgtcggtttctcaccctg

SEQ ID NO: 14302 - DNA, 31 bp, Homo sapiens
  chr7:576773-576804
  hypo
tgtcctcacaacatggcggctggcatcccgg

SEQ ID NO: 14303 - DNA, 40 bp, Homo sapiens
  chr7:635125-635165
  hypo
gcaggtggggtgtgtgcggggagggcgtggagggtctcct

SEQ ID NO: 14304 - DNA, 35 bp, Homo sapiens
  chr7:667313-667348
  hypo
agggtgggcaggggctcgggcgctctccatccaga

SEQ ID NO: 14305 - DNA, 58 bp, Homo sapiens
  chr7:667362-667420
  hypo
tcacgcccgccctccccgggcactgggggaggaggtgagcacccgccactcaggctca

SEQ ID NO: 14306 - DNA, 31 bp, Homo sapiens
  chr7:711711-711742
  hypo
ttcccagaaccctgcacggagcctggcacac

SEQ ID NO: 14307 - DNA, 31 bp, Homo sapiens
  chr7:711750-711781
  hypo
ctctggaagtatttgtcgtcttaaattctgt

SEQ ID NO: 14308 - DNA, 31 bp, Homo sapiens
  chr7:718852-718883
  hypo
actggggaagccatgtcgatacatgacagac

SEQ ID NO: 14309 - DNA, 37 bp, Homo sapiens; identical to SEQ ID NO: 2865
  chr7:822391-822428
  hypo

SEQ ID NO: 14310 - DNA, 31 bp, Homo sapiens
  chr7:834358-834389
  hypo
cgcagggatccaggtccgggggcaggaggag

SEQ ID NO: 14311 - DNA, 31 bp, Homo sapiens
  chr7:834550-834581
  hypo
gtggggtccacacccgcggactgtaacctgg

SEQ ID NO: 14312 - DNA, 59 bp, Homo sapiens
  chr7:834591-834650
  hypo
ggcagggtccacacccgcggactgtaacctggacccgggcagggcggggtccacaccct

SEQ ID NO: 14313 - DNA, 96 bp, Homo sapiens
  chr7:834652-834748
  hypo
gactgtaacctggacccgggcagggcggggtccgcacccgcggactgtaacctggacccgggcagggcggggtccgcacccgcggactctaacctg

SEQ ID NO: 14314 - DNA, 54 bp, Homo sapiens
  chr7:834819-834873
  hypo
gactctaacctggacccgggcaggggaagggtccacacccgcagactctaacct

SEQ ID NO: 14315 - DNA, 54 bp, Homo sapiens
  chr7:899730-899784
  hypo
ataggacatttgtgtccgtctgctgttttactaggtggacgtgcaagtcagaga

SEQ ID NO: 14316 - DNA, 31 bp, Homo sapiens
  chr7:900163-900194
  hypo
cgtgcctgggcagtgccgtgtgtggaggggg

SEQ ID NO: 14317 - DNA, 55 bp, Homo sapiens
  chr7:925699-925754
  hypo
tcccagagcaagcacacggaggcccgggagctcatgtactcgggagccctgctct

SEQ ID NO: 14318 - DNA, 31 bp, Homo sapiens; identical to SEQ ID NO: 2866
  chr7:932818-932849
  hypo

SEQ ID NO: 14319 - DNA, 37 bp, Homo sapiens; identical to SEQ ID NO: 2867
  chr7:932916-932953
  hypo

SEQ ID NO: 14320 - DNA, 57 bp, Homo sapiens; identical to SEQ ID NO: 2868
  chr7:932991-933048
  hypo

SEQ ID NO: 14321 - DNA, 31 bp, Homo sapiens
  chr7:959575-959606
  hypo
gaggccccaccccacccgggtggcctcacct

SEQ ID NO: 14322 - DNA, 62 bp, Homo sapiens; identical to SEQ ID NO: 2869
  chr7:1007912-1007974
  hypo

SEQ ID NO: 14323 - DNA, 65 bp, Homo sapiens; identical to SEQ ID NO: 2870
  chr7:1007997-1008062
  hypo

SEQ ID NO: 14324 - DNA, 46 bp, Homo sapiens
  chr7:1024994-1025040
  hypo
agcctggagtgatgggcgtgcagcaggaggacgggggccccagtgc

SEQ ID NO: 14325 - DNA, 30 bp, Homo sapiens
  chr7:1029386-1029416
  hypo
gcctgggtgacagagcgagattccatctca

SEQ ID NO: 14326 - DNA, 31 bp, Homo sapiens
  chr7:1029419-1029450
  hypo
aaacagaaggaaatgtcgagccacacagtgg

SEQ ID NO: 14327 - DNA, 214 bp, Homo sapiens
  chr7:1029911-1030125
  hypo
gcagtgtgacagtggcgcgtgtgctgggggtggtgtggtcggcagtgtgacagtggcgcgtgtgctgggggcggtgtggtcggcagtgtgacagtggcgcgtgtgctgggggcggtgtgatgggacacctgctgtctgagacggccctggcccccgtcccagcgctgaccatgcacgtgagcggcaggcggcccctcaccgagaagagaggata

SEQ ID NO: 14328 - DNA, 104 bp, Homo sapiens
  chr7:1030143-1030247
  hypo
cctgcgccacgtgaagcggcgccccaaggccaggacgtggtggccgggacacacgggtgcacggcaggcctcacactcccaggtggggccgcagggtccctaag

SEQ ID NO: 14329 - DNA, 49 bp, Homo sapiens
  chr7:1030252-1030301
  hypo
ggtggggctgctgctacggaggctgctgcaaggacgagaaggggacgga

SEQ ID NO: 14330 - DNA, 46 bp, Homo sapiens
  chr7:1060058-1060104
  hypo
ttcgcttctcgccagccgctgccccatcttgcgtctccacccaagg

SEQ ID NO: 14331 - DNA, 31 bp, Homo sapiens
  chr7:1069636-1069667
  hypo
ctctgccactggtgtccgcaccccgctttca

SEQ ID NO: 14332 - DNA, 31 bp, Homo sapiens; identical to SEQ ID NO: 2871
  chr7:1069676-1069707
  hypo

SEQ ID NO: 14333 - DNA, 61 bp, Homo sapiens
  chr7:1075881-1075942
  hypo
cataagctgcggacttcgggcggttgtgctgtggccatgtagggttcgggtgctcgtgctg

SEQ ID NO: 14334 - DNA, 37 bp, Homo sapiens; identical to SEQ ID NO: 2872
  chr7:1083967-1084004
  hypo

SEQ ID NO: 14335 - DNA, 71 bp, Homo sapiens; identical to SEQ ID NO: 2873
  chr7:1084018-1084089
  hypo

SEQ ID NO: 14336 - DNA, 47 bp, Homo sapiens; identical to SEQ ID NO: 2874
  chr7:1084187-1084234
  hypo

SEQ ID NO: 14337 - DNA, 36 bp, Homo sapiens
  chr7:1086198-1086234
  hypo
ctggagagtagaataacgtttcgctccaatttgaga

SEQ ID NO: 14338 - DNA, 81 bp, Homo sapiens
  chr7:1086238-1086319
  hypo
aaaatgagatgctgcccgggaccagaagtcagtttcttaggagcgtgctgtctacccaggagcctccgtgtgcaaacaaaa

SEQ ID NO: 14339 - DNA, 54 bp, Homo sapiens
  chr7:1115698-1115752
  hypo
gattcacagtggagctcggaaagacccatccatgcccagcgccttgtcaaaaac

SEQ ID NO: 14340 - DNA, 43 bp, Homo sapiens
  chr7:1124307-1124350
  hypo
tgggatctcacagaaccgtgtagacccacgcacccccactgta

SEQ ID NO: 14341 - DNA, 119 bp, Homo sapiens
  chr7:1124367-1124486
  hypo
tcaggaaggttagagacgttgcccggtatcacacagcacgtggggtgaggaagtggaacccgggctggagccggcaacgctgaaaaccagggttgtttggacggcgacatgcaactccc

SEQ ID NO: 14342 - DNA, 31 bp, Homo sapiens
  chr7:1142682-1142713
  hypo
gagcagacctctgcagcgtgcgggccggggt

SEQ ID NO: 14343 - DNA, 40 bp, Homo sapiens
  chr7:1475089-1475129
  hypo
acaggagggcctgggccgaccacaccggtgacctgggaca

SEQ ID NO: 14344 - DNA, 31 bp, Homo sapiens
  chr7:1475297-1475328
  hypo
tggacccctcatgagacgagacaggaaagct

SEQ ID NO: 14345 - DNA, 31 bp, Homo sapiens
  chr7:1476257-1476288
  hypo
cagcatagacaataaccgcctggtcagaaag

SEQ ID NO: 14346 - DNA, 93 bp, Homo sapiens
  chr7:1476389-1476482
  hypo
tcgtccagcgagtccacgatgtcactgcggtcgttcacggtgctcacgtactgctccagcagctcctgctcccgccgccgctcctgcagtgac

SEQ ID NO: 14347 - DNA, 164 bp, Homo sapiens
  chr7:1477243-1477407
  hypo
cctgccgcacagacacgcgtctgaggcctgactctgccgccctgtcccccgcctggcccgcccagcccgcaacgaggtcctggacctgccacacagacacgagtctgaggcctgactcgccgcccgtcccccgcctggcccacccagaccgcaacgaggtcctg

SEQ ID NO: 14348 - DNA, 39 bp, Homo sapiens
  chr7:1477847-1477886
  hypo
ggggtgcagctgggaacggaggggcggtgaggatgccgg

SEQ ID NO: 14349 - DNA, 31 bp, Homo sapiens
  chr7:1478022-1478053
  hypo
gggccaccaggcccaacgtgaccaggacaca

SEQ ID NO: 14350 - DNA, 66 bp, Homo sapiens
  chr7:1478558-1478624
  hypo
agccagttgtcacaaacgtcgaggctggcagggacggccagtctcctgcggcggggtggggagggg

SEQ ID NO: 14351 - DNA, 44 bp, Homo sapiens
  chr7:1479426-1479470
  hypo
agcttctctggctgaccggagcgcctctccgcacaccccaggag

SEQ ID NO: 14352 - DNA, 31 bp, Homo sapiens
  chr7:1480105-1480136
  hypo
tactcacagggaggtgcgtctatccctggat

SEQ ID NO: 14353 - DNA, 31 bp, Homo sapiens
  chr7:1483466-1483497
  hypo
tttctactgtgtaagccgcccagtgaggggg

SEQ ID NO: 14354 - DNA, 31 bp, Homo sapiens
  chr7:1484816-1484847
  hypo
tggcaggcgagttgcccgcagcaggctccca

SEQ ID NO: 14355 - DNA, 38 bp, Homo sapiens; identical to SEQ ID NO: 2876
  chr7:1498584-1498622
  hypo

SEQ ID NO: 14356 - DNA, 269 bp, Homo sapiens; identical to SEQ ID NO: 2877
  chr7:1498624-1498893
  hypo

SEQ ID NO: 14357 - DNA, 329 bp, Homo sapiens; identical to SEQ ID NO: 2878
  chr7:1498940-1499269
  hypo

SEQ ID NO: 14358 - DNA, 31 bp, Homo sapiens
  chr7:1503565-1503596
  hypo
tcgggaatgcagagggcgtgagagagaacca

SEQ ID NO: 14359 - DNA, 31 bp, Homo sapiens
  chr7:1514387-1514418
  hypo
gctggcatccgcccctcggttctccaacgcc

SEQ ID NO: 14360 - DNA, 43 bp, Homo sapiens
  chr7:1532978-1533021
  hypo
ggtagggaggtgaggacgggggtgtggccggcagggtggggac

SEQ ID NO: 14361 - DNA, 69 bp, Homo sapiens
  chr7:1537960-1538029
  hypo
caccggcctccccagacgccacgtgcccctccagcccagagccccatattccggcgtggagggcaaggc

SEQ ID NO: 14362 - DNA, 31 bp, Homo sapiens
  chr7:1554244-1554275
  hypo
tctgaagaccctcacacggagctcccacccc

SEQ ID NO: 14363 - DNA, 36 bp, Homo sapiens
  chr7:1554277-1554313
  hypo
caggatccaggcttgccgctgcgtttggccaggccc

SEQ ID NO: 14364 - DNA, 31 bp, Homo sapiens
  chr7:1575821-1575852
  hypo
agcggaaactcagacccgcccacccaggccc

SEQ ID NO: 14365 - DNA, 58 bp, Homo sapiens
  chr7:1590460-1590518
  hypo
cagtcccgcacagagtcgaagtagacgtagtactggtggtctccgaggaggaggaggc

SEQ ID NO: 14366 - DNA, 31 bp, Homo sapiens
  chr7:1597683-1597714
  hypo
gtcctgcagcctcaggcgtcacctctggaga

SEQ ID NO: 14367 - DNA, 31 bp, Homo sapiens
  chr7:1601633-1601664
  hypo
ttacaggcgtgagcctcgcacccggcattat

SEQ ID NO: 14368 - DNA, 31 bp, Homo sapiens
  chr7:1607230-1607261
  hypo
aagttcctccctccaccggggagggaggtga

SEQ ID NO: 14369 - DNA, 55 bp, Homo sapiens
  chr7:1607279-1607334
  hypo
ggtgtctgggtgttcacgtgtcctgctgagcagcgcggggcggctgcctccaggt

SEQ ID NO: 14370 - DNA, 48 bp, Homo sapiens
  chr7:1607336-1607384
  hypo
ccacacctggcacacccggatcacctccctcagcgccttcagcccctc

SEQ ID NO: 14371 - DNA, 40 bp, Homo sapiens
  chr7:1607385-1607425
  hypo
atgcttttgtccttcacggccacggcgaggaggactgctc

SEQ ID NO: 14372 - DNA, 31 bp, Homo sapiens
  chr7:1607434-1607465
  hypo
cttcttgagacacaaacgctaccaggttctt

SEQ ID NO: 14373 - DNA, 50 bp, Homo sapiens
  chr7:1607760-1607810
  hypo
gagaagcctgcagaagcgagtgctgtcgaatctcacgtgtgatctccaca

SEQ ID NO: 14374 - DNA, 31 bp, Homo sapiens
  chr7:1607812-1607843
  hypo
gcacagcacagccagccgcctgctcacgtaa

SEQ ID NO: 14375 - DNA, 63 bp, Homo sapiens
  chr7:1607957-1608020
  hypo
gagacccacaaatgcccggaaaatgctatcgctgtaggggtatttgtccgccagatgccccat

SEQ ID NO: 14376 - DNA, 31 bp, Homo sapiens
  chr7:1642382-1642413
  hypo
gatggtatttggagcccgggccttgaaagag

SEQ ID NO: 14377 - DNA, 31 bp, Homo sapiens
  chr7:1787388-1787419
  hypo
caagggctgggaggcacgtcccccagcccag

SEQ ID NO: 14378 - DNA, 31 bp, Homo sapiens
  chr7:1794934-1794965
  hypo
atccatttttcactttcgtagatcatgcttt

SEQ ID NO: 14379 - DNA, 31 bp, Homo sapiens
  chr7:1855555-1855586
  hypo
ccgacgtaggtcccagcgtgtctgtcagtca

SEQ ID NO: 14380 - DNA, 31 bp, Homo sapiens
  chr7:1855602-1855633
  hypo
ggctggagaggcaggacgtgcacccagcctg

SEQ ID NO: 14381 - DNA, 86 bp, Homo sapiens
  chr7:1855833-1855919
  hypo
gctgcatcttggaacccgaggggctggtggcctgcggggcagtcaagaaagagacaagacagcggtcagcccgacaggcctctccc

SEQ ID NO: 14382 - DNA, 31 bp, Homo sapiens
  chr7:1867561-1867592
  hypo
atgctgctggcagtgacgtttcgtggagcgc

SEQ ID NO: 14383 - DNA, 31 bp, Homo sapiens
  chr7:1906135-1906166
  hypo
ctctggggcagagacacgagggtgcactgtg

SEQ ID NO: 14384 - DNA, 56 bp, Homo sapiens
  chr7:1906782-1906838
  hypo
ggtgagatggatggcacggtcagtgccacagacatgggcaccgtaggcctcccctg

SEQ ID NO: 14385 - DNA, 31 bp, Homo sapiens
  chr7:1924361-1924392
  hypo
gagcggaccacgcctgcgccctgaggccccc

SEQ ID NO: 14386 - DNA, 31 bp, Homo sapiens
  chr7:1932250-1932281
  hypo
cccgacttcaggttttcgaatcggggaggct

SEQ ID NO: 14387 - DNA, 53 bp, Homo sapiens
  chr7:1970868-1970921
  hypo
ccaactcctcaccccacgcacggtcacaggagcgagggcgcgtcgtggggtcc

SEQ ID NO: 14388 - DNA, 54 bp, Homo sapiens
  chr7:1995852-1995906
  hypo
ccagggccaccctggacgtccccccactaagggtgtaatcgcagggggtgtcag

SEQ ID NO: 14389 - DNA, 31 bp, Homo sapiens
  chr7:1995940-1995971
  hypo
ccaacactccacaggccgaaccccagtggcc

SEQ ID NO: 14390 - DNA, 40 bp, Homo sapiens
  chr7:2041551-2041591
  hypo
acccttccccgctcaacgcagcttccgacgacagaagagg

SEQ ID NO: 14391 - DNA, 31 bp, Homo sapiens
  chr7:2051726-2051757
  hypo
agggaggggcaaggtccgcaacatacatccc

SEQ ID NO: 14392 - DNA, 31 bp, Homo sapiens
  chr7:2053459-2053490
  hypo
ctccgcccaggccctgcgatacccagctcct

SEQ ID NO: 14393 - DNA, 41 bp, Homo sapiens
  chr7:2053520-2053561
  hypo
gagctagacaagggcacggagcgtcacggtggcccatgggg

SEQ ID NO: 14394 - DNA, 31 bp, Homo sapiens
  chr7:2069774-2069805
  hypo
agagtgccccagaaacgcggaacccagagct

SEQ ID NO: 14395 - DNA, 31 bp, Homo sapiens
  chr7:2138294-2138325
  hypo
cggcacatgcaagagccgcctgctgccactg

SEQ ID NO: 14396 - DNA, 45 bp, Homo sapiens
  chr7:2138329-2138374
  hypo
aggaggcccaagggagcgcactaccacacccgatagctgcccggc

SEQ ID NO: 14397 - DNA, 31 bp, Homo sapiens
  chr7:2172532-2172563
  hypo
ggtgggtccctcatgacggctcatgctgaag

SEQ ID NO: 14398 - DNA, 109 bp, Homo sapiens; identical to SEQ ID NO: 2880
  chr7:2195817-2195926
  hypo

SEQ ID NO: 14399 - DNA, 31 bp, Homo sapiens
  chr7:2197117-2197148
  hypo
ggaggagtgggagagccggtcccctacagtc

SEQ ID NO: 14400 - DNA, 31 bp, Homo sapiens
  chr7:2197209-2197240
  hypo
gagggcagacacctcccgagaagccctggga

SEQ ID NO: 14401 - DNA, 92 bp, Homo sapiens
  chr7:2206522-2206614
  hypo
ccactacacacctgggcggcgcactccgctcacaaagcactcttccaggaagggccccgggctgctggagactgaaccggaatctgcctaac

SEQ ID NO: 14402 - DNA, 31 bp, Homo sapiens
  chr7:2208344-2208375
  hypo
cgcgtggagggcgccacgaggtcaaggtcct

SEQ ID NO: 14403 - DNA, 77 bp, Homo sapiens
  chr7:2208795-2208872
  hypo
ggacctatgacgcaaacgcaggcggctacacattcgcctgcaggactgcaccttttaaagtccgcatgtagacagtg

SEQ ID NO: 14404 - DNA, 31 bp, Homo sapiens
  chr7:2208875-2208906
  hypo
atctacaaaggtaaaccggaatctcctaaga

SEQ ID NO: 14405 - DNA, 31 bp, Homo sapiens
  chr7:2212651-2212682
  hypo
atgtatacgtattcctcgtgaagttacataa

SEQ ID NO: 14406 - DNA, 76 bp, Homo sapiens
  chr7:2232917-2232993
  hypo
aagggccacccagctccgacagccaccacgtcctggagagaaagcgtccccgcccagaggacggtccttgtcctag

SEQ ID NO: 14407 - DNA, 37 bp, Homo sapiens
  chr7:2233019-2233056
  hypo
cctcaaagcccttccccgcctccgcacccagcaccac

SEQ ID NO: 14408 - DNA, 35 bp, Homo sapiens
  chr7:2233069-2233104
  hypo
gtttcagcacagggaccgtgcgtcctgctctctgc

SEQ ID NO: 14409 - DNA, 57 bp, Homo sapiens
  chr7:2233291-2233348
  hypo
ttaccaaggggtaacacggccgcgggtaactccagattcctccggaaaacctcactg

SEQ ID NO: 14410 - DNA, 31 bp, Homo sapiens
  chr7:2233383-2233414
  hypo
gccgcgatccgggagacgccagtctcaccct

SEQ ID NO: 14411 - DNA, 34 bp, Homo sapiens
  chr7:2233436-2233470
  hypo
tcaggcaaggccacaccgtcgcccaactgtccca

SEQ ID NO: 14412 - DNA, 31 bp, Homo sapiens
  chr7:2241773-2241804
  hypo
tcaaaggctcagcacacgcctactgcacgtc

SEQ ID NO: 14413 - DNA, 31 bp, Homo sapiens
  chr7:2255762-2255793
  hypo
cggctgccccatcccccgcaacccctcaccg

SEQ ID NO: 14414 - DNA, 31 bp, Homo sapiens
  chr7:2255864-2255895
  hypo
tcatgttcttcacaatcgctgcatcctgctc

SEQ ID NO: 14415 - DNA, 89 bp, Homo sapiens
  chr7:2255948-2256037
  hypo
agggaaaaatgagccacgaagagacctggagaaaatcacacgcacacggctaagagaaggaagccggtctgcaacggctatacacactg

SEQ ID NO: 14416 - DNA, 31 bp, Homo sapiens
  chr7:2256930-2256961
  hypo
cactaacagagtccatcgccctgccagccag

SEQ ID NO: 14417 - DNA, 58 bp, Homo sapiens
  chr7:2256973-2257031
  hypo
ggtggactgagggctgcgaggggccagggaccaccaccaggagcggacatggcagagg

SEQ ID NO: 14418 - DNA, 31 bp, Homo sapiens
  chr7:2265210-2265241
  hypo
acagaatcctcagtgacggcatcaaaccagg

SEQ ID NO: 14419 - DNA, 40 bp, Homo sapiens
  chr7:2265269-2265309
  hypo
cctgaggacccattcccgcaggtcccgtgctaagtcttga

SEQ ID NO: 14420 - DNA, 31 bp, Homo sapiens
  chr7:2265376-2265407
  hypo
cctgggaagaggaagacgtcttttgagatga

SEQ ID NO: 14421 - DNA, 45 bp, Homo sapiens
  chr7:2293742-2293787
  hypo
gagcaggtggctgggccggcaagtgcgtgacgggaggctgggagg

SEQ ID NO: 14422 - DNA, 41 bp, Homo sapiens
  chr7:2293851-2293892
  hypo
cagctggaatggaacacgcccccccacgcccccacctgtcc

SEQ ID NO: 14423 - DNA, 31 bp, Homo sapiens
  chr7:2293906-2293937
  hypo
cagcctcagtgccacacggtgcagaccccaa

SEQ ID NO: 14424 - DNA, 20 bp, Homo sapiens
  chr7:2312473-2312493
  hypo
aatactttttttgagacgga

SEQ ID NO: 14425 - DNA, 31 bp, Homo sapiens
  chr7:2324509-2324540
  hypo
cttacacattctgagtcggctaataaataaa

SEQ ID NO: 14426 - DNA, 2 bp, Homo sapiens
  chr7:2361067-2361069
  hypo
tt

SEQ ID NO: 14427 - DNA, 56 bp, Homo sapiens
  chr7:2420297-2420353
  hypo
tgccttgtacccccaccgtgcaggttgtggccggttttctccgcaggttgaacatg

SEQ ID NO: 14428 - DNA, 31 bp, Homo sapiens
  chr7:2477465-2477496
  hypo
gttcctgcaaaccctccgatgaggccagctg

SEQ ID NO: 14429 - DNA, 31 bp, Homo sapiens
  chr7:2539249-2539280
  hypo
gaggacaggggtcaggcgagcctcgggggtg

SEQ ID NO: 14430 - DNA, 31 bp, Homo sapiens
  chr7:2540087-2540118
  hypo
tccagtggtgggaagcgcgtttgccaggtgg

SEQ ID NO: 14431 - DNA, 31 bp, Homo sapiens
  chr7:2546548-2546579
  hypo
agccctccctcaggggcgactccacggatgg

SEQ ID NO: 14432 - DNA, 31 bp, Homo sapiens; identical to SEQ ID NO: 2886
  chr7:2555343-2555374
  hypo

SEQ ID NO: 14433 - DNA, 31 bp, Homo sapiens; identical to SEQ ID NO: 2887
  chr7:2555390-2555421
  hypo

SEQ ID NO: 14434 - DNA, 31 bp, Homo sapiens
  chr7:2565008-2565039
  hypo
ccggcatgccctcccccgatggccctgcctt

SEQ ID NO: 14435 - DNA, 31 bp, Homo sapiens; identical to SEQ ID NO: 2888
  chr7:2671600-2671631
  hypo

SEQ ID NO: 14436 - DNA, 31 bp, Homo sapiens
  chr7:2674427-2674458
  hypo
tagcaaactgaggctccgaatcacatagtga

SEQ ID NO: 14437 - DNA, 51 bp, Homo sapiens
  chr7:2680030-2680081
  hypo
tgtgtgtggggggggacgtgtgttccataggccggccgtgacttgctgtgc

SEQ ID NO: 14438 - DNA, 31 bp, Homo sapiens
  chr7:2683829-2683860
  hypo
tacaggtctgttctgccgttggcctctgagc

SEQ ID NO: 14439 - DNA, 37 bp, Homo sapiens
  chr7:2686783-2686820
  hypo
tcgcagtgggattctacggcaacggggagaccagtga

SEQ ID NO: 14440 - DNA, 64 bp, Homo sapiens
  chr7:2686848-2686912
  hypo
cgccacgccaaccgcacggtggccggggtccaggaccgcgtgagtggccgcggagttggggcca

SEQ ID NO: 14441 - DNA, 31 bp, Homo sapiens
  chr7:2690601-2690632
  hypo
cagcagctctgtgctgcgggaccataagctg

SEQ ID NO: 14442 - DNA, 74 bp, Homo sapiens
  chr7:2690668-2690742
  hypo
cagggagctggggcatcgggagtttcggccccctcgggaggtttgcgatgtgtgtcggacggcacagaggcagg

SEQ ID NO: 14443 - DNA, 31 bp, Homo sapiens
  chr7:2691941-2691972
  hypo
ggcccagcaggcctggcgcctggctcctcag

SEQ ID NO: 14444 - DNA, 90 bp, Homo sapiens
  chr7:2692036-2692126
  hypo
cctggggttaccatgccggtgacctggtgacctggctgagagcctttcggggggacctgctcaatgcacccgcatcgctgggactgcttt

SEQ ID NO: 14445 - DNA, 56 bp, Homo sapiens
  chr7:2695697-2695753
  hypo
ctgaccatctgcggtgcgtgccccccaggaccccctcctccgcgtccaggaggtgc

SEQ ID NO: 14446 - DNA, 31 bp, Homo sapiens
  chr7:2697945-2697976
  hypo
aggccgctccagggccgcggcaggcgcacga

SEQ ID NO: 14447 - DNA, 170 bp, Homo sapiens
  chr7:2698047-2698217
  hypo
cggccgcggcccacaccgtcagcaacgccccggtcactgagtacatgtgagttgacgtgggcctagtggggccagcggacacgtcagctgcggctgagagcgcggatctgggctggggctagctcgaggcaaggggctggagaaggggcggcctccgggctgggcagccc

SEQ ID NO: 14448 - DNA, 52 bp, Homo sapiens
  chr7:2698473-2698525
  hypo
gcccatctgggcacagcgggcctacccatgggccccccgacctgcagctggg

SEQ ID NO: 14449 - DNA, 90 bp, Homo sapiens
  chr7:2698566-2698656
  hypo
gcctcaggagccagaacgctaatttccagaacccccgctgtgagaacaccccactcattgggcgcgagtccccgccgccctcagtaagtc

SEQ ID NO: 14450 - DNA, 43 bp, Homo sapiens
  chr7:2699683-2699726
  hypo
caccggtcccccatcccgcacggccacccgcctgcgcctcccg

SEQ ID NO: 14451 - DNA, 35 bp, Homo sapiens
  chr7:2705239-2705274
  hypo
gctgggagtgctgatccgatcgacgtagtgaaagc

SEQ ID NO: 14452 - DNA, 31 bp, Homo sapiens; identical to SEQ ID NO: 2889
  chr7:2728271-2728302
  hypo

SEQ ID NO: 14453 - DNA, 36 bp, Homo sapiens
  chr7:2740394-2740430
  hypo
ggacgcctgcagccatcggcacgctcctgggggacc

SEQ ID NO: 14454 - DNA, 53 bp, Homo sapiens
  chr7:2752092-2752145
  hypo
cccggcaccagtgtgtcggagcccctcacccctgatgccgggagtcacacctt

SEQ ID NO: 14455 - DNA, 31 bp, Homo sapiens
  chr7:2764249-2764280
  hypo
aactgcacctgtgtcccgctttggttcatgt

SEQ ID NO: 14456 - DNA, 31 bp, Homo sapiens
  chr7:2797033-2797064
  hypo
ttatgaggaggagccacgtggcaaggaagtg

SEQ ID NO: 14457 - DNA, 31 bp, Homo sapiens
  chr7:2864021-2864052
  hypo
ggctcctctgggtctgcggaggcctctgcac

SEQ ID NO: 14458 - DNA, 31 bp, Homo sapiens
  chr7:2972384-2972415
  hypo
tctcccgcggccgggacgacaagacacagcg

SEQ ID NO: 14459 - DNA, 46 bp, Homo sapiens
  chr7:3033383-3033429
  hypo
gtcccgtgggttttgacgcagaaccggctctcggtaaacctgtccc

SEQ ID NO: 14460 - DNA, 31 bp, Homo sapiens
  chr7:3033434-3033465
  hypo
caccctgcaaagctcccgcccctgcctcctc

SEQ ID NO: 14461 - DNA, 31 bp, Homo sapiens
  chr7:3033476-3033507
  hypo
tgtctcccttctagctcgccaaatgctcagg

SEQ ID NO: 14462 - DNA, 31 bp, Homo sapiens
  chr7:3033657-3033688
  hypo
ttcctgttcctagtcacgccctgagccctgg

SEQ ID NO: 14463 - DNA, 79 bp, Homo sapiens; identical to SEQ ID NO: 2890
  chr7:3083126-3083205
  hypo

SEQ ID NO: 14464 - DNA, 31 bp, Homo sapiens; identical to SEQ ID NO: 2891
  chr7:3083208-3083239
  hypo

SEQ ID NO: 14465 - DNA, 164 bp, Homo sapiens; identical to SEQ ID NO: 2892
  chr7:3083330-3083494
  hypo

SEQ ID NO: 14466 - DNA, 78 bp, Homo sapiens; identical to SEQ ID NO: 2893
  chr7:3083524-3083602
  hypo

SEQ ID NO: 14467 - DNA, 37 bp, Homo sapiens; identical to SEQ ID NO: 2894
  chr7:3083609-3083646
  hypo

SEQ ID NO: 14468 - DNA, 31 bp, Homo sapiens
  chr7:3239134-3239165
  hypo
cgtgagccaccgcgcccggcctattttctct

SEQ ID NO: 14469 - DNA, 31 bp, Homo sapiens
  chr7:3949423-3949454
  hypo
gcgtgcttgcctaaagcgaggcacctcttca

SEQ ID NO: 14470 - DNA, 31 bp, Homo sapiens
  chr7:4015316-4015347
  hypo
tgtgtagcagtcagtccggaaggccctgtgg

SEQ ID NO: 14471 - DNA, 31 bp, Homo sapiens
  chr7:4027689-4027720
  hypo
aacttgacatctgtatcgggttgtctcacgg

SEQ ID NO: 14472 - DNA, 51 bp, Homo sapiens; identical to SEQ ID NO: 2895
  chr7:4770078-4770129
  hypo

SEQ ID NO: 14473 - DNA, 31 bp, Homo sapiens
  chr7:4801992-4802023
  hypo
cgaggtcaaaaggtcccgggtggaggagccc

SEQ ID NO: 14474 - DNA, 31 bp, Homo sapiens
  chr7:4802124-4802155
  hypo
cacccagcggcgaccccgaagctggacccgg

SEQ ID NO: 14475 - DNA, 44 bp, Homo sapiens
  chr7:4813798-4813842
  hypo
cggctccaggggcacccgccgcactccaccgactcccatccacc

SEQ ID NO: 14476 - DNA, 31 bp, Homo sapiens
  chr7:4813890-4813921
  hypo
ctcagacatcactgggcgccctagggcatct

SEQ ID NO: 14477 - DNA, 31 bp, Homo sapiens
  chr7:4825297-4825328
  hypo
acttcttcctgagccacggtgagcccagggt

SEQ ID NO: 14478 - DNA, 19 bp, Homo sapiens
  chr7:4843106-4843125
  hypo
ggcacgctggctgggtccc

SEQ ID NO: 14479 - DNA, 31 bp, Homo sapiens
  chr7:5272773-5272804
  hypo
actgcagattcttggtcgagaagaatgaaga

SEQ ID NO: 14480 - DNA, 45 bp, Homo sapiens
  chr7:5272829-5272874
  hypo
attgtggagggttacccgcctccactttcccgttgcccatttcac

SEQ ID NO: 14481 - DNA, 132 bp, Homo sapiens
  chr7:5272883-5273015
  hypo
ctcctcttcctctgctcgaacctatgagtcccagcctcactggcggcctcagacatgctcaggagtgacggggacagagggaggccgctgagttgcccgttagaactcttactgctgcgccagtgacccagg

SEQ ID NO: 14482 - DNA, 46 bp, Homo sapiens
  chr7:5273026-5273072
  hypo
cctgaaccaaacagaacgtgtgctaattttccgaactccaaactgt

SEQ ID NO: 14483 - DNA, 67 bp, Homo sapiens
  chr7:5273104-5273171
  hypo
caaacttcaaaaaggacgatgagcgtgggggataggaaacaaaacctgtaaacgttgtgaatgggct

SEQ ID NO: 14484 - DNA, 31 bp, Homo sapiens
  chr7:5331444-5331475
  hypo
ctgcacaggtaggaaccggggcccaaggggg

SEQ ID NO: 14485 - DNA, 79 bp, Homo sapiens
  chr7:5342788-5342867
  hypo
ccagcactgtgttctgcgtttggtctcatacctgcgtctaccttccatctgtgtccagcggccccggctccagcccagc

SEQ ID NO: 14486 - DNA, 36 bp, Homo sapiens
  chr7:5342871-5342907
  hypo
actctgcagggtcacacgcaccgtgtccccacccag

SEQ ID NO: 14487 - DNA, 42 bp, Homo sapiens
  chr7:5384804-5384846
  hypo
gtctcgggtaaccccacgtctctctcacgggccagactgggt

SEQ ID NO: 14488 - DNA, 31 bp, Homo sapiens
  chr7:5384892-5384923
  hypo
acctccatggagctcccgcagcccctcaagt

SEQ ID NO: 14489 - DNA, 31 bp, Homo sapiens
  chr7:5441390-5441421
  hypo
gtcctatgctgcacatcggaggtactcaagt

SEQ ID NO: 14490 - DNA, 109 bp, Homo sapiens
  chr7:5446784-5446893
  hypo
cacgtccttggcactgcggctgggctatcagacctgtggccaccgccgccgttctggaactcccatcggcgcagaaaagaggcaggtgagagtccgaggctgcagtctc

SEQ ID NO: 14491 - DNA, 31 bp, Homo sapiens
  chr7:5446941-5446972
  hypo
ccagcccagatcaacccgcttcagccctgcc

SEQ ID NO: 14492 - DNA, 31 bp, Homo sapiens
  chr7:5449225-5449256
  hypo
ataataataattaaatcgaaaggttagaaga

SEQ ID NO: 14493 - DNA, 36 bp, Homo sapiens
  chr7:5453844-5453880
  hypo
cgggattacaggcatgaaccccgtgcccagcctcac

SEQ ID NO: 14494 - DNA, 31 bp, Homo sapiens
  chr7:5453896-5453927
  hypo
atacttgatgtaccatcgtctcccataaata

SEQ ID NO: 14495 - DNA, 31 bp, Homo sapiens
  chr7:5453974-5454005
  hypo
ttttcctgaaccattccgaggacaagttgta

SEQ ID NO: 14496 - DNA, 21 bp, Homo sapiens
  chr7:5455294-5455315
  hypo
agccaccgtgcccagcctgca

SEQ ID NO: 14497 - DNA, 74 bp, Homo sapiens; identical to SEQ ID NO: 2900
  chr7:5462237-5462311
  hypo

SEQ ID NO: 14498 - DNA, 31 bp, Homo sapiens
  chr7:5473942-5473973
  hypo
tgtgcgccaccgcgcccggccaccaccttaa

SEQ ID NO: 14499 - DNA, 31 bp, Homo sapiens
  chr7:5480613-5480644
  hypo
agctgactgggggttgcgaggggcctgtggg

SEQ ID NO: 14500 - DNA, 48 bp, Homo sapiens
  chr7:5491668-5491716
  hypo
gtggctcctcgagtgacgggggctggtcatggacgttgaaccacctgg

SEQ ID NO: 14501 - DNA, 31 bp, Homo sapiens
  chr7:5491721-5491752
  hypo
ggctgtgtggagaggccgagctcaagagaca

SEQ ID NO: 14502 - DNA, 62 bp, Homo sapiens
  chr7:5491797-5491859
  hypo
gctggccaccacctctcggggcctcagtctccccatctgcactggagcgggtgggcacactt

SEQ ID NO: 14503 - DNA, 71 bp, Homo sapiens; identical to SEQ ID NO: 2913
  chr7:5594637-5594708
  hypo

SEQ ID NO: 14504 - DNA, 35 bp, Homo sapiens; identical to SEQ ID NO: 2914
  chr7:5594774-5594809
  hypo

SEQ ID NO: 14505 - DNA, 45 bp, Homo sapiens; identical to SEQ ID NO: 2915
  chr7:5594849-5594894
  hypo

SEQ ID NO: 14506 - DNA, 18 bp, Homo sapiens
  chr7:5625736-5625754
  hypo
cagtgctcgggctgggcg

SEQ ID NO: 14507 - DNA, 67 bp, Homo sapiens
  chr7:5647837-5647904
  hypo
aagccaggccaggggccgggggcatctctggggtcccaggtgagatgcgggtcgagggagccaggcc

SEQ ID NO: 14508 - DNA, 52 bp, Homo sapiens
  chr7:5647945-5647997
  hypo
gaggagcgggcactgcgcggaccggcagactctggggcgctcaggctcccca

SEQ ID NO: 14509 - DNA, 34 bp, Homo sapiens
  chr7:5648036-5648070
  hypo
gacaggttctggggctcgccggggcagggagcca

SEQ ID NO: 14510 - DNA, 63 bp, Homo sapiens
  chr7:5648073-5648136
  hypo
cagagggtgcagtttccgctcctgcctgagtcaccttcgctttctcagcgattcttcattcac

SEQ ID NO: 14511 - DNA, 57 bp, Homo sapiens
  chr7:5648362-5648419
  hypo
gttctcccaggtgggtcgggggccactagggaccccataccccgagggtggctcctc

SEQ ID NO: 14512 - DNA, 47 bp, Homo sapiens
  chr7:5896976-5897023
  hypo
caagtgttcagaggggcgttgccttcgtggtgcggcagaattggccc

SEQ ID NO: 14513 - DNA, 19 bp, Homo sapiens
  chr7:5897050-5897069
  hypo
agtctcaaaaggaccacgc

SEQ ID NO: 14514 - DNA, 24 bp, Homo sapiens
  chr7:5917879-5917903
  hypo
cactgcgcccggccagtagtcaaa

SEQ ID NO: 14515 - DNA, 52 bp, Homo sapiens
  chr7:5920561-5920613
  hypo
agcgctccaggaatgccgaggtagaggggacgtgaggcgggggtgggatttc

SEQ ID NO: 14516 - DNA, 31 bp, Homo sapiens
  chr7:5920618-5920649
  hypo
agctttgcacctccagcgagtcaacacaaaa

SEQ ID NO: 14517 - DNA, 6 bp, Homo sapiens
  chr7:5920650-5920656
  hypo
caaaat

SEQ ID NO: 14518 - DNA, 31 bp, Homo sapiens
  chr7:6034994-6035025
  hypo
agctgggggccatctgcggtagacttctgta

SEQ ID NO: 14519 - DNA, 40 bp, Homo sapiens
  chr7:6035054-6035094
  hypo
atgtttctcaaagtcccgagctccacgtaaactgcctatt

SEQ ID NO: 14520 - DNA, 31 bp, Homo sapiens
  chr7:6058646-6058677
  hypo
gagaaatgtaaacaaacgtgaagatgagcat

SEQ ID NO: 14521 - DNA, 28 bp, Homo sapiens
  chr7:6059154-6059182
  hypo
gctatttttccatcgtgcattgccataa

SEQ ID NO: 14522 - DNA, 31 bp, Homo sapiens
  chr7:6059668-6059699
  hypo
gggaaattcatgaaggcgtcactatagctgc

SEQ ID NO: 14523 - DNA, 57 bp, Homo sapiens
  chr7:6060715-6060772
  hypo
ggcactcagagccccacgagttaacaccaagggcgtcaaagtcgtctacttgccccc

SEQ ID NO: 14524 - DNA, 28 bp, Homo sapiens
  chr7:6154602-6154630
  hypo
gagccactgtgcccggccctatatatat

SEQ ID NO: 14525 - DNA, 61 bp, Homo sapiens
  chr7:6188919-6188980
  hypo
caggtcctgctgatttcgatcagatctgggacagaacgagtttggtcggaggattgttttc

SEQ ID NO: 14526 - DNA, 31 bp, Homo sapiens
  chr7:6189029-6189060
  hypo
cctgtggaaagtatgcgcgggtaggagggat

SEQ ID NO: 14527 - DNA, 20 bp, Homo sapiens
  chr7:6209131-6209151
  hypo
gcacccggctgataaaattt

SEQ ID NO: 14528 - DNA, 31 bp, Homo sapiens
  chr7:6217462-6217493
  hypo
aggtagtccccaatgacggtcttatttaggc

SEQ ID NO: 14529 - DNA, 31 bp, Homo sapiens
  chr7:6229695-6229726
  hypo
aaaacatattagttaacgaaagagggtctca

SEQ ID NO: 14530 - DNA, 31 bp, Homo sapiens
  chr7:6260173-6260204
  hypo
gactgggagaaagtctcgaaacatcctgtct

SEQ ID NO: 14531 - DNA, 64 bp, Homo sapiens
  chr7:6438068-6438132
  hypo
cctctgtcttcaccatcgttgaacttaacgcctgcttttgaccaggtagcgtggagtgtttcag

SEQ ID NO: 14532 - DNA, 31 bp, Homo sapiens
  chr7:6443278-6443309
  hypo
tgtcttgccagattaccgacactgtcacttg

SEQ ID NO: 14533 - DNA, 60 bp, Homo sapiens
  chr7:6443316-6443376
  hypo
ctgaccctctttacctcgcccacgcggacacacgcctcctgtagtcgctttgcctattga

SEQ ID NO: 14534 - DNA, 70 bp, Homo sapiens
  chr7:6443405-6443475
  hypo
actgtgctagtgctgacgatgttctgtacaacttaactcactggcgagaatacagcgtgggacccttcag

SEQ ID NO: 14535 - DNA, 31 bp, Homo sapiens
  chr7:6443688-6443719
  hypo
acagtcattttcaatgcgtgtctccacacag

SEQ ID NO: 14536 - DNA, 31 bp, Homo sapiens
  chr7:6443752-6443783
  hypo
tgggtgagcccaaatacggcaggagtggagg

SEQ ID NO: 14537 - DNA, 67 bp, Homo sapiens
  chr7:6443789-6443856
  hypo
tcatgtttggacctgtcgaacagtggcgaagctctgagggagaagcgcctatcggggtgtgtgtgca

SEQ ID NO: 14538 - DNA, 31 bp, Homo sapiens
  chr7:6444112-6444143
  hypo
ggttcatgttagaattcgttttcttaatatt

SEQ ID NO: 14539 - DNA, 40 bp, Homo sapiens
  chr7:6524572-6524612
  hypo
taggtagaaaagtgaacgtctgaccgggcgcggtggctca

SEQ ID NO: 14540 - DNA, 39 bp, Homo sapiens
  chr7:6524911-6524950
  hypo
ttgaatatttctacgggatggggacgtcacaagaaattg

SEQ ID NO: 14541 - DNA, 116 bp, Homo sapiens
  chr7:6524976-6525092
  hypo
tctgctacataatttgcgggacggagtgcaaaacaaaaacgcacagttcgcagttcaaaaagcagggcgggggcgaggacctggtgcggtggctcatgcctgtagtcccaacactt

SEQ ID NO: 14542 - DNA, 53 bp, Homo sapiens
  chr7:6560370-6560423
  hypo
ggtgagtccagagaatcggagtctgctgggaccacaggcgggagaggcatgag

SEQ ID NO: 14543 - DNA, 31 bp, Homo sapiens
  chr7:6641614-6641645
  hypo
gaaatgtagtatgaggcgctcttgctgtctt

SEQ ID NO: 14544 - DNA, 22 bp, Homo sapiens
  chr7:6643896-6643918
  hypo
ttcataccgatgcagttactaa

SEQ ID NO: 14545 - DNA, 31 bp, Homo sapiens
  chr7:6644209-6644240
  hypo
gggtcagtgagtggctcggcagccctggggg

SEQ ID NO: 14546 - DNA, 31 bp, Homo sapiens
  chr7:6644253-6644284
  hypo
agcctggcccagtggccgtgtcaggtccagc

SEQ ID NO: 14547 - DNA, 31 bp, Homo sapiens
  chr7:6644365-6644396
  hypo
cagcctgcagaggaaccgcatccttgtgtgg

SEQ ID NO: 14548 - DNA, 31 bp, Homo sapiens
  chr7:6644398-6644429
  hypo
gttggggactcccatccgtgccacactcact

SEQ ID NO: 14549 - DNA, 31 bp, Homo sapiens
  chr7:6644438-6644469
  hypo
tctgcaagggaggagccggggcagatgtctg

SEQ ID NO: 14550 - DNA, 31 bp, Homo sapiens
  chr7:6644476-6644507
  hypo
acaaagcctgagggggcggaagggaacagtc

SEQ ID NO: 14551 - DNA, 31 bp, Homo sapiens
  chr7:6644511-6644542
  hypo
ggataagactgtcctgcgtgaggtgtcatga

SEQ ID NO: 14552 - DNA, 31 bp, Homo sapiens
  chr7:6645604-6645635
  hypo
caggtgtgagccaccacgcctggcctacctc

SEQ ID NO: 14553 - DNA, 31 bp, Homo sapiens
  chr7:6645647-6645678
  hypo
cagtctctgtgttcaccgtgtttccaaatag

SEQ ID NO: 14554 - DNA, 31 bp, Homo sapiens
  chr7:6645693-6645724
  hypo
aagtgctttctatctccggcagggtgtgtac

SEQ ID NO: 14555 - DNA, 31 bp, Homo sapiens
  chr7:6645729-6645760
  hypo
caaatcatcacatgaccgaaatttggcctct

SEQ ID NO: 14556 - DNA, 31 bp, Homo sapiens
  chr7:6645775-6645806
  hypo
acctcctccttgggttcgttaatctcttgct

SEQ ID NO: 14557 - DNA, 53 bp, Homo sapiens
  chr7:6646145-6646198
  hypo
gagagaccagtgcaggcgctgcagacacaggacccagccggagcaagatcctg

SEQ ID NO: 14558 - DNA, 39 bp, Homo sapiens
  chr7:6647385-6647424
  hypo
gcagagcccactcccacgcatcctcgcctgtggggtcct

SEQ ID NO: 14559 - DNA, 425 bp, Homo sapiens
  chr7:6647427-6647852
  hypo
tctgccactgcttctccgtgtccaccgcctggacccccgggtggtccgtgcctgtgtcggtgcctctcctgggcggggtgcggggggacggggtcagcctaccgtgcgcacctgcggagtccccggagcccgcccgcgctgacgcttatgcttgtgttcgcagcctcctccagctggtgatctcgggtcccgtgcagcagtcgcctcacgccgcgctccccccggggttctacccccacatccacacgcccccgctgggctacggggctgtcccggcccaccccgccgcccaccccgccctgcccacgcatcccggccacaccttcatctccggcgtgacctttcccttcaggcccatccgctaggctggcccgtgtgtgccttctgcgctctcgctggacgaagcctttcgagatggaaggggt

SEQ ID NO: 14560 - DNA, 71 bp, Homo sapiens
  chr7:6647872-6647943
  hypo
acctcggggaaggggtcgggcagcccctccccgccggcagaaccgtcttggtgtcacggagtccaggtgct

SEQ ID NO: 14561 - DNA, 31 bp, Homo sapiens
  chr7:6648200-6648231
  hypo
agctgagcccaggctgcgtagtgaccacaag

SEQ ID NO: 14562 - DNA, 31 bp, Homo sapiens
  chr7:6648395-6648426
  hypo
atattgcttccaactgcggtattttcttagc

SEQ ID NO: 14563 - DNA, 34 bp, Homo sapiens; identical to SEQ ID NO: 2917
  chr7:6966950-6966984
  hypo

SEQ ID NO: 14564 - DNA, 68 bp, Homo sapiens; identical to SEQ ID NO: 2918
  chr7:6966987-6967055
  hypo

SEQ ID NO: 14565 - DNA, 28 bp, Homo sapiens
  chr7:7284850-7284878
  hypo
aagtaatttcttttttcggagactgtct

SEQ ID NO: 14566 - DNA, 22 bp, Homo sapiens
  chr7:7504653-7504675
  hypo
tatgaacacctttatgcgcata

SEQ ID NO: 14567 - DNA, 53 bp, Homo sapiens
  chr7:7605374-7605427
  hypo
tccctccagctctctgcgcaaaaactgatcatactggccgggcacagtggctc

SEQ ID NO: 14568 - DNA, 34 bp, Homo sapiens; identical to SEQ ID NO: 2920
  chr7:7605663-7605697
  hypo

SEQ ID NO: 14569 - DNA, 31 bp, Homo sapiens; identical to SEQ ID NO: 2921
  chr7:7605729-7605760
  hypo

SEQ ID NO: 14570 - DNA, 31 bp, Homo sapiens
  chr7:7605791-7605822
  hypo
aaactggtttccaacccgtttctgaaagcac

SEQ ID NO: 14571 - DNA, 31 bp, Homo sapiens
  chr7:7621496-7621527
  hypo
cttcccttgattcgctcggtgaactgagtaa

SEQ ID NO: 14572 - DNA, 31 bp, Homo sapiens
  chr7:7752548-7752579
  hypo
aaaattatcttggcctcgtgtttctttagtg

SEQ ID NO: 14573 - DNA, 24 bp, Homo sapiens
  chr7:8343760-8343784
  hypo
ctcctcccccggaattttcttaat

SEQ ID NO: 14574 - DNA, 31 bp, Homo sapiens
  chr7:12740190-12740221
  hypo
gctcagtgcccaagaccgcccctgatcctca

SEQ ID NO: 14575 - DNA, 33 bp, Homo sapiens
  chr7:12763982-12764015
  hypo
gccaccatgcctagccttcgatggcttttaatg

SEQ ID NO: 14576 - DNA, 18 bp, Homo sapiens
  chr7:12779952-12779970
  hypo
gcccggcccttactgttg

SEQ ID NO: 14577 - DNA, 45 bp, Homo sapiens
  chr7:12795791-12795836
  hypo
acttttatatagacagcgtctcttaccatacgtggcatatactag

SEQ ID NO: 14578 - DNA, 31 bp, Homo sapiens
  chr7:12802525-12802556
  hypo
attatagatttggaagcgtgctttgaaagaa

SEQ ID NO: 14579 - DNA, 79 bp, Homo sapiens
  chr7:16436344-16436423
  hypo
tgtgatggaatacattcgtatgacatgactgatagaaaacgtgtgacatacatgtgaaggaagacgtgatatgtgtgta

SEQ ID NO: 14580 - DNA, 38 bp, Homo sapiens
  chr7:16436438-16436476
  hypo
catgtgtgatggaatacgctatacgtatgtgacacgta

SEQ ID NO: 14581 - DNA, 31 bp, Homo sapiens
  chr7:16440254-16440285
  hypo
cgagtcatttttgacacgtgactgacacgtg

SEQ ID NO: 14582 - DNA, 31 bp, Homo sapiens
  chr7:16542229-16542260
  hypo
cccttcactagtcctacgaaggggtcaggga

SEQ ID NO: 14583 - DNA, 31 bp, Homo sapiens
  chr7:17324454-17324485
  hypo
taagccacccccaccccggccttttttctga

SEQ ID NO: 14584 - DNA, 94 bp, Homo sapiens; identical to SEQ ID NO: 2936
  chr7:17338150-17338244
  hypo

SEQ ID NO: 14585 - DNA, 136 bp, Homo sapiens; identical to SEQ ID NO: 2937
  chr7:17338602-17338738
  hypo

SEQ ID NO: 14586 - DNA, 31 bp, Homo sapiens; identical to SEQ ID NO: 2938
  chr7:17339051-17339082
  hypo

SEQ ID NO: 14587 - DNA, 31 bp, Homo sapiens
  chr7:17705052-17705083
  hypo
ccaccgcccacagagccggtgggaagcggac

SEQ ID NO: 14588 - DNA, 34 bp, Homo sapiens
  chr7:18041862-18041896
  hypo
aggcatgagccgccacacccggcatgaacgttct

SEQ ID NO: 14589 - DNA, 70 bp, Homo sapiens; identical to SEQ ID NO: 2939
  chr7:20837556-20837626
  hypo

SEQ ID NO: 14590 - DNA, 101 bp, Homo sapiens; identical to SEQ ID NO: 2940
  chr7:20837650-20837751
  hypo

SEQ ID NO: 14591 - DNA, 31 bp, Homo sapiens; identical to SEQ ID NO: 2941
  chr7:20837801-20837832
  hypo

SEQ ID NO: 14592 - DNA, 31 bp, Homo sapiens
  chr7:20852609-20852640
  hypo
tttaaaaaccttctcccggaaaagggcaata

SEQ ID NO: 14593 - DNA, 38 bp, Homo sapiens
  chr7:21409420-21409458
  hypo
aggattacaggcgtgagtcaccacgcctgggcttccaa

SEQ ID NO: 14594 - DNA, 31 bp, Homo sapiens; identical to SEQ ID NO: 2943
  chr7:22396516-22396547
  hypo

SEQ ID NO: 14595 - DNA, 31 bp, Homo sapiens; identical to SEQ ID NO: 2944
  chr7:22894198-22894229
  hypo

SEQ ID NO: 14596 - DNA, 57 bp, Homo sapiens; identical to SEQ ID NO: 2945
  chr7:22894264-22894321
  hypo

SEQ ID NO: 14597 - DNA, 160 bp, Homo sapiens; identical to SEQ ID NO: 2946
  chr7:23052933-23053093
  hypo

SEQ ID NO: 14598 - DNA, 210 bp, Homo sapiens; identical to SEQ ID NO: 2947
  chr7:23053095-23053305
  hypo

SEQ ID NO: 14599 - DNA, 31 bp, Homo sapiens; identical to SEQ ID NO: 2948
  chr7:23053448-23053479
  hypo

SEQ ID NO: 14600 - DNA, 72 bp, Homo sapiens; identical to SEQ ID NO: 2949
  chr7:23053720-23053792
  hypo

SEQ ID NO: 14601 - DNA, 27 bp, Homo sapiens
  chr7:23053819-23053846
  hypo
cgtcctccggggcgggatcagaacaac

SEQ ID NO: 14602 - DNA, 81 bp, Homo sapiens; identical to SEQ ID NO: 2951
  chr7:23053957-23054038
  hypo

SEQ ID NO: 14603 - DNA, 31 bp, Homo sapiens; identical to SEQ ID NO: 2952
  chr7:23054048-23054079
  hypo

SEQ ID NO: 14604 - DNA, 27 bp, Homo sapiens
  chr7:23321891-23321918
  hypo
gcgtgagcactgcgcccagccacttga

SEQ ID NO: 14605 - DNA, 400 bp, Homo sapiens; identical to SEQ ID NO: 2955
  chr7:23508609-23509009
  hypo

SEQ ID NO: 14606 - DNA, 31 bp, Homo sapiens; identical to SEQ ID NO: 2956
  chr7:23509018-23509049
  hypo

SEQ ID NO: 14607 - DNA, 125 bp, Homo sapiens; identical to SEQ ID NO: 2957
  chr7:23509128-23509253
  hypo

SEQ ID NO: 14608 - DNA, 194 bp, Homo sapiens; identical to SEQ ID NO: 2958
  chr7:23509309-23509503
  hypo

SEQ ID NO: 14609 - DNA, 64 bp, Homo sapiens; identical to SEQ ID NO: 2959
  chr7:23509545-23509609
  hypo

SEQ ID NO: 14610 - DNA, 102 bp, Homo sapiens; identical to SEQ ID NO: 2960
  chr7:23509623-23509725
  hypo

SEQ ID NO: 14611 - DNA, 31 bp, Homo sapiens; identical to SEQ ID NO: 2961
  chr7:23509743-23509774
  hypo

SEQ ID NO: 14612 - DNA, 108 bp, Homo sapiens; identical to SEQ ID NO: 2962
  chr7:23510877-23510985
  hypo

SEQ ID NO: 14613 - DNA, 37 bp, Homo sapiens; identical to SEQ ID NO: 2963
  chr7:23510987-23511024
  hypo

SEQ ID NO: 14614 - DNA, 313 bp, Homo sapiens; identical to SEQ ID NO: 2964
  chr7:23513518-23513831
  hypo

SEQ ID NO: 14615 - DNA, 238 bp, Homo sapiens; identical to SEQ ID NO: 2965
  chr7:23513895-23514133
  hypo

SEQ ID NO: 14616 - DNA, 31 bp, Homo sapiens
  chr7:23749705-23749736
  hypo
ggtcggcagcagccagcgtcaggcggctccc

SEQ ID NO: 14617 - DNA, 31 bp, Homo sapiens
  chr7:25100241-25100272
  hypo
cttaactgtcactcaccgcccccaggaggct

SEQ ID NO: 14618 - DNA, 27 bp, Homo sapiens
  chr7:25132699-25132726
  hypo
aaagcgatactccgtctcaaaaaaaaa

SEQ ID NO: 14619 - DNA, 31 bp, Homo sapiens
  chr7:25158786-25158817
  hypo
tgcattacatagctctcgcccccaacttggc

SEQ ID NO: 14620 - DNA, 31 bp, Homo sapiens
  chr7:25158834-25158865
  hypo
cagaatatactgatgacggattgccaaaaga

SEQ ID NO: 14621 - DNA, 31 bp, Homo sapiens
  chr7:25936760-25936791
  hypo
gctttcattctcctggcgtaagtgggttttt

SEQ ID NO: 14622 - DNA, 32 bp, Homo sapiens
  chr7:26217155-26217187
  hypo
gcagcgagccaagatcacggcagtagagtcca

SEQ ID NO: 14623 - DNA, 34 bp, Homo sapiens
  chr7:26217192-26217226
  hypo
agcaatggagggagaccgtcgaaaggagggaagg

SEQ ID NO: 14624 - DNA, 15 bp, Homo sapiens
  chr7:26259699-26259714
  hypo
ttttctttttttgag

SEQ ID NO: 14625 - DNA, 18 bp, Homo sapiens
  chr7:26317524-26317542
  hypo
gatcgcaccactgcactc

SEQ ID NO: 14626 - DNA, 10 bp, Homo sapiens
  chr7:26762352-26762362
  hypo
tcttcttact

SEQ ID NO: 14627 - DNA, 226 bp, Homo sapiens; identical to SEQ ID NO: 2972
  chr7:27135265-27135491
  hypo

SEQ ID NO: 14628 - DNA, 41 bp, Homo sapiens; identical to SEQ ID NO: 2973
  chr7:27135539-27135580
  hypo

SEQ ID NO: 14629 - DNA, 112 bp, Homo sapiens; identical to SEQ ID NO: 2974
  chr7:27135586-27135698
  hypo

SEQ ID NO: 14630 - DNA, 64 bp, Homo sapiens; identical to SEQ ID NO: 2975
  chr7:27135706-27135770
  hypo

SEQ ID NO: 14631 - DNA, 180 bp, Homo sapiens; identical to SEQ ID NO: 2976
  chr7:27135979-27136159
  hypo

SEQ ID NO: 14632 - DNA, 161 bp, Homo sapiens; identical to SEQ ID NO: 2977
  chr7:27136174-27136335
  hypo

SEQ ID NO: 14633 - DNA, 57 bp, Homo sapiens; identical to SEQ ID NO: 2978
  chr7:27136346-27136403
  hypo

SEQ ID NO: 14634 - DNA, 132 bp, Homo sapiens; identical to SEQ ID NO: 2979
  chr7:27136407-27136539
  hypo

SEQ ID NO: 14635 - DNA, 209 bp, Homo sapiens; identical to SEQ ID NO: 2980
  chr7:27136540-27136749
  hypo

SEQ ID NO: 14636 - DNA, 36 bp, Homo sapiens; identical to SEQ ID NO: 2981
  chr7:27136754-27136790
  hypo

SEQ ID NO: 14637 - DNA, 31 bp, Homo sapiens; identical to SEQ ID NO: 2982
  chr7:27136834-27136865
  hypo

SEQ ID NO: 14638 - DNA, 39 bp, Homo sapiens
  chr7:27514342-27514381
  hypo
tacatatttgggaggccgaggcgggcggatcacgaggtc

SEQ ID NO: 14639 - DNA, 31 bp, Homo sapiens
  chr7:27831638-27831669
  hypo
tttaaaggagcaacttcgtaaagcagaggaa

SEQ ID NO: 14640 - DNA, 31 bp, Homo sapiens
  chr7:27831763-27831794
  hypo
ctgcacgcttggaaaacgagaaagtgaaaaa

SEQ ID NO: 14641 - DNA, 31 bp, Homo sapiens
  chr7:27882727-27882758
  hypo
gaaaggtagtgtaggccgacaggtggtaagt

SEQ ID NO: 14642 - DNA, 31 bp, Homo sapiens
  chr7:27903816-27903847
  hypo
cctaattccatggcccgcgatttaatttgag

SEQ ID NO: 14643 - DNA, 80 bp, Homo sapiens
  chr7:27984538-27984618
  hypo
taagccacaccctttccggaacgctgtcatctgctacggtgtgactggtaatacatttcggagttcgagaaataatcctt

SEQ ID NO: 14644 - DNA, 31 bp, Homo sapiens
  chr7:27984692-27984723
  hypo
tctttggaaaagtgatcgagaactcactttg

SEQ ID NO: 14645 - DNA, 66 bp, Homo sapiens
  chr7:28012335-28012401
  hypo
taaatcattatatatccgtatcatagtattttgcgttgctgttaaaaagaacgacttagatctatc

SEQ ID NO: 14646 - DNA, 31 bp, Homo sapiens
  chr7:28012410-28012441
  hypo
ctggaaggatgttacacgaaaaacaaaagat

SEQ ID NO: 14647 - DNA, 31 bp, Homo sapiens
  chr7:28811873-28811904
  hypo
gttagtagccgaaaaccgctggaagttgggg

SEQ ID NO: 14648 - DNA, 31 bp, Homo sapiens
  chr7:28811992-28812023
  hypo
aggaagccaggtggaacggggagcccaactc

SEQ ID NO: 14649 - DNA, 38 bp, Homo sapiens
  chr7:28812031-28812069
  hypo
aggctgggagcccaggcgccgctcgagcctcgccactg

SEQ ID NO: 14650 - DNA, 51 bp, Homo sapiens; identical to SEQ ID NO: 2988
  chr7:29234146-29234197
  hypo

SEQ ID NO: 14651 - DNA, 60 bp, Homo sapiens
  chr7:29362349-29362409
  hypo
tattcctagtcagggacggcctagagttagaggatagacatgcctcgatttgggaagcac

SEQ ID NO: 14652 - DNA, 31 bp, Homo sapiens
  chr7:29362430-29362461
  hypo
ttcttgtaatggggaacgacctacctcctga

SEQ ID NO: 14653 - DNA, 21 bp, Homo sapiens
  chr7:29362489-29362510
  hypo
tccttgtggctgggtgcggtg

SEQ ID NO: 14654 - DNA, 31 bp, Homo sapiens
  chr7:29516192-29516223
  hypo
acatatatatgcaaagcgctgagtataacac

SEQ ID NO: 14655 - DNA, 31 bp, Homo sapiens; identical to SEQ ID NO: 2989
  chr7:29724331-29724362
  hypo

SEQ ID NO: 14656 - DNA, 115 bp, Homo sapiens; identical to SEQ ID NO: 2990
  chr7:29724384-29724499
  hypo

SEQ ID NO: 14657 - DNA, 120 bp, Homo sapiens; identical to SEQ ID NO: 2991
  chr7:29724581-29724701
  hypo

SEQ ID NO: 14658 - DNA, 55 bp, Homo sapiens; identical to SEQ ID NO: 2992
  chr7:29725076-29725131
  hypo

SEQ ID NO: 14659 - DNA, 40 bp, Homo sapiens; identical to SEQ ID NO: 2993
  chr7:30067984-30068024
  hypo

SEQ ID NO: 14660 - DNA, 31 bp, Homo sapiens
  chr7:30495017-30495048
  hypo
gagttcttagtacagccggtagctatgccat

SEQ ID NO: 14661 - DNA, 31 bp, Homo sapiens
  chr7:30603330-30603361
  hypo
aaactcaccgactcaccgttctggaggctgg

SEQ ID NO: 14662 - DNA, 31 bp, Homo sapiens
  chr7:30603368-30603399
  hypo
agatcaaagtgttggccgagccatgctcctg

SEQ ID NO: 14663 - DNA, 31 bp, Homo sapiens
  chr7:30899815-30899846
  hypo
ttgtggtgcccaggggcgggaggtcacagca

SEQ ID NO: 14664 - DNA, 31 bp, Homo sapiens
  chr7:30902137-30902168
  hypo
aaggtttgcggtgattcgcagggcaatgata

SEQ ID NO: 14665 - DNA, 41 bp, Homo sapiens
  chr7:30902192-30902233
  hypo
ctctgcctgctgcctccggggctagccgctggcaaaggcct

SEQ ID NO: 14666 - DNA, 51 bp, Homo sapiens
  chr7:30921726-30921777
  hypo
cagacagaaaaatgcccggacccctttccctggggacggcatttcacatca

SEQ ID NO: 14667 - DNA, 40 bp, Homo sapiens
  chr7:30922907-30922947
  hypo
cagatgtggcaagtaccgttaggcccgaaggaggcaggac

SEQ ID NO: 14668 - DNA, 56 bp, Homo sapiens
  chr7:30923025-30923081
  hypo
gaggtgctgcctggagcgacaccctctgcttgcggaggagccggaggagcagctcc

SEQ ID NO: 14669 - DNA, 31 bp, Homo sapiens
  chr7:30938647-30938678
  hypo
tccttgctgcccctaccgcagggtgtggtct

SEQ ID NO: 14670 - DNA, 31 bp, Homo sapiens
  chr7:30944105-30944136
  hypo
tgcatgtatgcacatgcgtgtcctcacatgt

SEQ ID NO: 14671 - DNA, 82 bp, Homo sapiens
  chr7:30944163-30944245
  hypo
tgtgtgcacacatgtacgggtgtgaaacgtacatcgtgtgtgtgcagatgtgtgttgtccgcgtgcacgtgtgtgtgcaagt

SEQ ID NO: 14672 - DNA, 31 bp, Homo sapiens
  chr7:30946538-30946569
  hypo
gtgctcagctctgcagcggggcatggtgggc

SEQ ID NO: 14673 - DNA, 35 bp, Homo sapiens
  chr7:32631008-32631043
  hypo
ctgtggaaagttctttcggtcgtgggcaccactgc

SEQ ID NO: 14674 - DNA, 31 bp, Homo sapiens
  chr7:32631090-32631121
  hypo
ctctgaactcaaccaccgcccctttcccttc

SEQ ID NO: 14675 - DNA, 31 bp, Homo sapiens
  chr7:32648439-32648470
  hypo
agctgtgtggccaggacgctgtaggtgcctg

SEQ ID NO: 14676 - DNA, 109 bp, Homo sapiens; identical to SEQ ID NO: 2996
  chr7:32768219-32768328
  hypo

SEQ ID NO: 14677 - DNA, 46 bp, Homo sapiens; identical to SEQ ID NO: 2997
  chr7:32768342-32768388
  hypo

SEQ ID NO: 14678 - DNA, 31 bp, Homo sapiens
  chr7:32963858-32963889
  hypo
aactgaataacacatgcgtaaccaatccatg

SEQ ID NO: 14679 - DNA, 60 bp, Homo sapiens; identical to SEQ ID NO: 2999
  chr7:32982309-32982369
  hypo

SEQ ID NO: 14680 - DNA, 107 bp, Homo sapiens; identical to SEQ ID NO: 3000
  chr7:32982429-32982536
  hypo

SEQ ID NO: 14681 - DNA, 93 bp, Homo sapiens; identical to SEQ ID NO: 3004
  chr7:32996716-32996809
  hypo

SEQ ID NO: 14682 - DNA, 83 bp, Homo sapiens; identical to SEQ ID NO: 3005
  chr7:32996812-32996895
  hypo

SEQ ID NO: 14683 - DNA, 67 bp, Homo sapiens; identical to SEQ ID NO: 3007
  chr7:32997011-32997078
  hypo

SEQ ID NO: 14684 - DNA, 350 bp, Homo sapiens; identical to SEQ ID NO: 3008
  chr7:32997194-32997544
  hypo

SEQ ID NO: 14685 - DNA, 31 bp, Homo sapiens
  chr7:33139662-33139693
  hypo
cactctaagtctccctcgtgcacacacaccc

SEQ ID NO: 14686 - DNA, 31 bp, Homo sapiens
  chr7:34192957-34192988
  hypo
gcagtatttgtgtgcccgattctgtaaacac

SEQ ID NO: 14687 - DNA, 29 bp, Homo sapiens
  chr7:35844772-35844801
  hypo
tgagccatcacgcccggccaagtgtttgt

SEQ ID NO: 14688 - DNA, 42 bp, Homo sapiens
  chr7:35994750-35994792
  hypo
ggcatccgaggggagacggtcagaggtcgactgctgtctcag

SEQ ID NO: 14689 - DNA, 31 bp, Homo sapiens
  chr7:36134136-36134167
  hypo
gcttccaagctgcatgcgtcaagaggaggca

SEQ ID NO: 14690 - DNA, 31 bp, Homo sapiens
  chr7:36134177-36134208
  hypo
cctgcaagaagctggacggaggctccaaggc

SEQ ID NO: 14691 - DNA, 31 bp, Homo sapiens
  chr7:36134218-36134249
  hypo
gtgtcctgcagaagttcgccccagttggcag

SEQ ID NO: 14692 - DNA, 31 bp, Homo sapiens; identical to SEQ ID NO: 3012
  chr7:36192381-36192412
  hypo

SEQ ID NO: 14693 - DNA, 67 bp, Homo sapiens; identical to SEQ ID NO: 3013
  chr7:36192422-36192489
  hypo

SEQ ID NO: 14694 - DNA, 85 bp, Homo sapiens; identical to SEQ ID NO: 3014
  chr7:36192637-36192722
  hypo

SEQ ID NO: 14695 - DNA, 411 bp, Homo sapiens; identical to SEQ ID NO: 3015
  chr7:36192725-36193136
  hypo

SEQ ID NO: 14696 - DNA, 132 bp, Homo sapiens; identical to SEQ ID NO: 3016
  chr7:36193160-36193292
  hypo

SEQ ID NO: 14697 - DNA, 23 bp, Homo sapiens
  chr7:36379758-36379781
  hypo
gagccaccgcgcttggcctgctt

SEQ ID NO: 14698 - DNA, 31 bp, Homo sapiens
  chr7:36428639-36428670
  hypo
agctactgaaggccaacgggctagcagcacc

SEQ ID NO: 14699 - DNA, 87 bp, Homo sapiens; identical to SEQ ID NO: 3018
  chr7:37487145-37487232
  hypo

SEQ ID NO: 14700 - DNA, 7 bp, Homo sapiens
  chr7:37487257-37487264
  hypo
acactca

SEQ ID NO: 14701 - DNA, 96 bp, Homo sapiens; identical to SEQ ID NO: 3020
  chr7:37487335-37487431
  hypo

SEQ ID NO: 14702 - DNA, 16 bp, Homo sapiens
  chr7:37487437-37487453
  hypo
ttcctcttcctcaaag

SEQ ID NO: 14703 - DNA, 71 bp, Homo sapiens; identical to SEQ ID NO: 3022
  chr7:37487755-37487826
  hypo

SEQ ID NO: 14704 - DNA, 116 bp, Homo sapiens; identical to SEQ ID NO: 3023
  chr7:37487849-37487965
  hypo

SEQ ID NO: 14705 - DNA, 368 bp, Homo sapiens; identical to SEQ ID NO: 3024
  chr7:37487984-37488352
  hypo

SEQ ID NO: 14706 - DNA, 54 bp, Homo sapiens; identical to SEQ ID NO: 3025
  chr7:37488353-37488407
  hypo

SEQ ID NO: 14707 - DNA, 101 bp, Homo sapiens; identical to SEQ ID NO: 3026
  chr7:37488411-37488512
  hypo

SEQ ID NO: 14708 - DNA, 138 bp, Homo sapiens; identical to SEQ ID NO: 3027
  chr7:37488547-37488685
  hypo

SEQ ID NO: 14709 - DNA, 31 bp, Homo sapiens; identical to SEQ ID NO: 3028
  chr7:37488704-37488735
  hypo

SEQ ID NO: 14710 - DNA, 109 bp, Homo sapiens; identical to SEQ ID NO: 3029
  chr7:37488800-37488909
  hypo

SEQ ID NO: 14711 - DNA, 100 bp, Homo sapiens; identical to SEQ ID NO: 3030
  chr7:37488919-37489019
  hypo

SEQ ID NO: 14712 - DNA, 34 bp, Homo sapiens; identical to SEQ ID NO: 3031
  chr7:37489049-37489083
  hypo

SEQ ID NO: 14713 - DNA, 25 bp, Homo sapiens
  chr7:38508455-38508480
  hypo
cagtagaacatacagacggccgggc

SEQ ID NO: 14714 - DNA, 38 bp, Homo sapiens
  chr7:39942870-39942908
  hypo
aaaataccaaagcagcgcggctcagtggttcacgcctg

SEQ ID NO: 14715 - DNA, 28 bp, Homo sapiens
  chr7:40156757-40156785
  hypo
ctggagtgcagtggcacgatctcggctc

SEQ ID NO: 14716 - DNA, 31 bp, Homo sapiens
  chr7:40243014-40243045
  hypo
aggattaacattaagtcgagtgaacatgaga

SEQ ID NO: 14717 - DNA, 31 bp, Homo sapiens
  chr7:43827244-43827275
  hypo
actttctgtgggtactcggaaggttttcaac

SEQ ID NO: 14718 - DNA, 61 bp, Homo sapiens
  chr7:43827298-43827359
  hypo
caagaacaggttttggcgggactgacttctctccaagcccccatttcggggactgtctcat

SEQ ID NO: 14719 - DNA, 34 bp, Homo sapiens
  chr7:43827396-43827430
  hypo
tggcttccatcttgctcgtcgggaccctgccagc

SEQ ID NO: 14720 - DNA, 21 bp, Homo sapiens
  chr7:44083439-44083460
  hypo
cgtgcccggcaggatttatat

SEQ ID NO: 14721 - DNA, 55 bp, Homo sapiens
  chr7:44152190-44152245
  hypo
tggagaagaaccccttcgtgctgggagcaaatctgaacggcggcgagcggctagt

SEQ ID NO: 14722 - DNA, 38 bp, Homo sapiens
  chr7:44301707-44301745
  hypo
ggtgatgagggttcagcgaccttcggagccaggcccag

SEQ ID NO: 14723 - DNA, 31 bp, Homo sapiens
  chr7:44302563-44302594
  hypo
ggtggggacccatccccgctccctaccccag

SEQ ID NO: 14724 - DNA, 54 bp, Homo sapiens
  chr7:44311756-44311810
  hypo
ctctggagatctggggcggggaattgggggggtgggcagcgaggacttggggag

SEQ ID NO: 14725 - DNA, 31 bp, Homo sapiens
  chr7:44311825-44311856
  hypo
gaggcaggaataaccccggcccaaggtctgg

SEQ ID NO: 14726 - DNA, 31 bp, Homo sapiens
  chr7:44582325-44582356
  hypo
cgggaactggtggggacgtgcccaagaaggt

SEQ ID NO: 14727 - DNA, 37 bp, Homo sapiens
  chr7:44612092-44612129
  hypo
tggcttccagccaccccgctctcgtcccaactcctac

SEQ ID NO: 14728 - DNA, 55 bp, Homo sapiens
  chr7:44801184-44801239
  hypo
ataatgaggtgagctccgcctggcccccacctgacccccacgaggctctgttcct

SEQ ID NO: 14729 - DNA, 31 bp, Homo sapiens
  chr7:44801243-44801274
  hypo
ccacactctcagggcccgttttctgggtgtc

SEQ ID NO: 14730 - DNA, 66 bp, Homo sapiens
  chr7:44801313-44801379
  hypo
tcaagtgctaccaccacgaggaccggcagatgaacaccaactggccagcctcggtgcaggtcagcg

SEQ ID NO: 14731 - DNA, 68 bp, Homo sapiens
  chr7:44835103-44835171
  hypo
tccgggctcaagcaatcctccccgcccagcctcctgagtagcgagcgcctcgacgcccagctaatttt

SEQ ID NO: 14732 - DNA, 31 bp, Homo sapiens
  chr7:44835407-44835438
  hypo
aagcacaattcagccccgaggcgggggcggt

SEQ ID NO: 14733 - DNA, 17 bp, Homo sapiens
  chr7:44918922-44918939
  hypo
gccgcatttggaatctc

SEQ ID NO: 14734 - DNA, 31 bp, Homo sapiens
  chr7:45015221-45015252
  hypo
gtggacttgagcagcacgtccttgaccctgt

SEQ ID NO: 14735 - DNA, 19 bp, Homo sapiens
  chr7:45027141-45027160
  hypo
agagcgagactctgtctca

SEQ ID NO: 14736 - DNA, 62 bp, Homo sapiens
  chr7:45743035-45743097
  hypo
acctcctgccggcccacgtcgcccagcacttcctcatgtccaaccctcggaacatggtgagc

SEQ ID NO: 14737 - DNA, 96 bp, Homo sapiens; identical to SEQ ID NO: 3033
  chr7:47294095-47294191
  hypo

SEQ ID NO: 14738 - DNA, 2 bp, Homo sapiens
  chr7:47420375-47420377
  hypo
ca

SEQ ID NO: 14739 - DNA, 31 bp, Homo sapiens
  chr7:47420405-47420436
  hypo
cttcaaaacagcccagcggctctctcagtct

SEQ ID NO: 14740 - DNA, 37 bp, Homo sapiens
  chr7:47420487-47420524
  hypo
gcatgccagaggagggcgggggcgtgccacctccctc

SEQ ID NO: 14741 - DNA, 48 bp, Homo sapiens
  chr7:47449176-47449224
  hypo
ggcaggtagaacactacgcaaacaagatgagggcgggtgcaaatccta

SEQ ID NO: 14742 - DNA, 31 bp, Homo sapiens
  chr7:47515266-47515297
  hypo
gctggtatgaatcaatcgcttgcagagtgta

SEQ ID NO: 14743 - DNA, 68 bp, Homo sapiens; identical to SEQ ID NO: 3034
  chr7:47621698-47621766
  hypo

SEQ ID NO: 14744 - DNA, 31 bp, Homo sapiens
  chr7:47711088-47711119
  hypo
agaacacataggcatacgtggaaggttgagc

SEQ ID NO: 14745 - DNA, 31 bp, Homo sapiens
  chr7:47711120-47711151
  hypo
atggcatttgggaacccgcctaaccccccgg

SEQ ID NO: 14746 - DNA, 134 bp, Homo sapiens; identical to SEQ ID NO: 3035
  chr7:48128031-48128165
  hypo

SEQ ID NO: 14747 - DNA, 31 bp, Homo sapiens; identical to SEQ ID NO: 3036
  chr7:48128168-48128199
  hypo

SEQ ID NO: 14748 - DNA, 31 bp, Homo sapiens
  chr7:50231282-50231313
  hypo
taatgtgagaaggaggcgatcctggcttctc

SEQ ID NO: 14749 - DNA, 31 bp, Homo sapiens
  chr7:50251706-50251737
  hypo
gtccacacgctggtatcgggaagcaggtgtc

SEQ ID NO: 14750 - DNA, 31 bp, Homo sapiens; identical to SEQ ID NO: 3037
  chr7:50343195-50343226
  hypo

SEQ ID NO: 14751 - DNA, 106 bp, Homo sapiens; identical to SEQ ID NO: 3038
  chr7:50343383-50343489
  hypo

SEQ ID NO: 14752 - DNA, 282 bp, Homo sapiens; identical to SEQ ID NO: 3039
  chr7:50343974-50344256
  hypo

SEQ ID NO: 14753 - DNA, 31 bp, Homo sapiens; identical to SEQ ID NO: 3040
  chr7:50344276-50344307
  hypo

SEQ ID NO: 14754 - DNA, 219 bp, Homo sapiens; identical to SEQ ID NO: 3041
  chr7:50344313-50344532
  hypo

SEQ ID NO: 14755 - DNA, 66 bp, Homo sapiens; identical to SEQ ID NO: 3042
  chr7:50344585-50344651
  hypo

SEQ ID NO: 14756 - DNA, 31 bp, Homo sapiens; identical to SEQ ID NO: 3043
  chr7:50344665-50344696
  hypo

SEQ ID NO: 14757 - DNA, 31 bp, Homo sapiens; identical to SEQ ID NO: 3044
  chr7:50344707-50344738
  hypo

SEQ ID NO: 14758 - DNA, 31 bp, Homo sapiens
  chr7:50365026-50365057
  hypo
atgaaagaggtgaaaacgctaagatatttag

SEQ ID NO: 14759 - DNA, 37 bp, Homo sapiens
  chr7:50365075-50365112
  hypo
ttttctatttataggccgggcgcagtggctcatgcct

SEQ ID NO: 14760 - DNA, 31 bp, Homo sapiens
  chr7:50441145-50441176
  hypo
tttatgaagtcaagccgcgtaggggaacatg

SEQ ID NO: 14761 - DNA, 49 bp, Homo sapiens
  chr7:50450339-50450388
  hypo
gccacctctgcaactacgcctgccgccggagggacgccctcactggcca

SEQ ID NO: 14762 - DNA, 44 bp, Homo sapiens
  chr7:50537913-50537957
  hypo
aagctggcttccttttcggctcaccggctcgcctatttctcttg

SEQ ID NO: 14763 - DNA, 31 bp, Homo sapiens
  chr7:50655023-50655054
  hypo
tacggcataatggatccgtgtgcccaggtgt

SEQ ID NO: 14764 - DNA, 31 bp, Homo sapiens
  chr7:50708877-50708908
  hypo
gcactgtccacctgttcgtctgttcgatgaa

SEQ ID NO: 14765 - DNA, 55 bp, Homo sapiens
  chr7:50715973-50716028
  hypo
catgctgctgcaggcccggcaagcggaagacagagaaccccgctggctttagcca

SEQ ID NO: 14766 - DNA, 31 bp, Homo sapiens
  chr7:50823199-50823230
  hypo
caactcctgaggctcacgaggagtgcccaga

SEQ ID NO: 14767 - DNA, 31 bp, Homo sapiens
  chr7:50853191-50853222
  hypo
ccctggcccatggtgacgggcactgacagga

SEQ ID NO: 14768 - DNA, 31 bp, Homo sapiens
  chr7:50853259-50853290
  hypo
tggaggactgggagctcgtgacacaagccag

SEQ ID NO: 14769 - DNA, 41 bp, Homo sapiens
  chr7:50853323-50853364
  hypo
ctaggcactgcccaccgcgggcaccccgcctcaccctgcac

SEQ ID NO: 14770 - DNA, 31 bp, Homo sapiens
  chr7:51082824-51082855
  hypo
tggcttgatgttgatacgggacatgggggcg

SEQ ID NO: 14771 - DNA, 31 bp, Homo sapiens
  chr7:51083467-51083498
  hypo
cctaacacccaggcagcgtcctgcccccagg

SEQ ID NO: 14772 - DNA, 31 bp, Homo sapiens
  chr7:51087890-51087921
  hypo
gtctgtgccccattttcgcacctgtcaaagg

SEQ ID NO: 14773 - DNA, 31 bp, Homo sapiens
  chr7:51088280-51088311
  hypo
gacaaagacagtcagacgcatacagctttgc

SEQ ID NO: 14774 - DNA, 34 bp, Homo sapiens
  chr7:51092656-51092690
  hypo
gtgagagacacagtgacgccggctctctctcaac

SEQ ID NO: 14775 - DNA, 31 bp, Homo sapiens
  chr7:51092717-51092748
  hypo
cctgcccacaggcaagcgtgtccctggatct

SEQ ID NO: 14776 - DNA, 49 bp, Homo sapiens
  chr7:51092873-51092922
  hypo
tgttgctgagggtgcccgtgctgaacctggaggccgtccttggtgcaga

SEQ ID NO: 14777 - DNA, 31 bp, Homo sapiens
  chr7:51092987-51093018
  hypo
ctagcagaggactttccgagccctgagcaga

SEQ ID NO: 14778 - DNA, 38 bp, Homo sapiens
  chr7:51098964-51099002
  hypo
tccaccgcacaaaagacggttcacgtgatccaggattt

SEQ ID NO: 14779 - DNA, 31 bp, Homo sapiens
  chr7:51099004-51099035
  hypo
ttgcatctgtgccttgcgctacagcagtccc

SEQ ID NO: 14780 - DNA, 31 bp, Homo sapiens
  chr7:51099075-51099106
  hypo
aggccaagcatgtgcacgtggctggaggctg

SEQ ID NO: 14781 - DNA, 31 bp, Homo sapiens
  chr7:51099118-51099149
  hypo
tcaacactgcacagcccggctgttccttggc

SEQ ID NO: 14782 - DNA, 41 bp, Homo sapiens
  chr7:51111295-51111336
  hypo
cagctgccaactgacacggtctcctccgcctctgacagcac

SEQ ID NO: 14783 - DNA, 52 bp, Homo sapiens
  chr7:51126557-51126609
  hypo
aacgactttcgttcagcgtcatcttattatcccaggccggggctactgtctg

SEQ ID NO: 14784 - DNA, 61 bp, Homo sapiens
  chr7:51126610-51126671
  hypo
gcagattacaccttctcggcaggtctgcatgggttttctctggctgcgctcatgtcctccc

SEQ ID NO: 14785 - DNA, 31 bp, Homo sapiens
  chr7:51126694-51126725
  hypo
gggtcactggggtgtccgaattgtccccatg

SEQ ID NO: 14786 - DNA, 31 bp, Homo sapiens
  chr7:51150748-51150779
  hypo
acatacgtttgggtatcgggtctgaggcctc

SEQ ID NO: 14787 - DNA, 31 bp, Homo sapiens
  chr7:51194780-51194811
  hypo
gctcaaggccgtgggacgtggagggccctgg

SEQ ID NO: 14788 - DNA, 43 bp, Homo sapiens
  chr7:51374680-51374723
  hypo
tggccaacgatgaggacgtggacactgacgagagacgtcagag

SEQ ID NO: 14789 - DNA, 31 bp, Homo sapiens
  chr7:53104021-53104052
  hypo
ctgagcaaaaatggagcggttgcttccttcg

SEQ ID NO: 14790 - DNA, 38 bp, Homo sapiens
  chr7:55323528-55323566
  hypo
tcctgtaagtggaccccgcttcccgggcctcagtggtc

SEQ ID NO: 14791 - DNA, 40 bp, Homo sapiens; identical to SEQ ID NO: 3052
  chr7:55593335-55593375
  hypo

SEQ ID NO: 14792 - DNA, 31 bp, Homo sapiens; identical to SEQ ID NO: 3053
  chr7:55593380-55593411
  hypo

SEQ ID NO: 14793 - DNA, 31 bp, Homo sapiens; identical to SEQ ID NO: 3054
  chr7:55593420-55593451
  hypo

SEQ ID NO: 14794 - DNA, 9 bp, Homo sapiens
  chr7:55923001-55923010
  hypo
gatcacaac

SEQ ID NO: 14795 - DNA, 60 bp, Homo sapiens
  chr7:55923020-55923080
  hypo
ctcatcctagtactgacgtttcaggtcgaccaattgttccagaatcgaaggagagacaga

SEQ ID NO: 14796 - DNA, 31 bp, Homo sapiens
  chr7:55923116-55923147
  hypo
ttctaggcaagaaagacgcagacatcagtga

SEQ ID NO: 14797 - DNA, 31 bp, Homo sapiens
  chr7:55960567-55960598
  hypo
aaaaaaaaaaaaaaggcggagtaataggaga

SEQ ID NO: 14798 - DNA, 31 bp, Homo sapiens
  chr7:56018544-56018575
  hypo
gtatgtttcaatgtatcgatagctacatctg

SEQ ID NO: 14799 - DNA, 50 bp, Homo sapiens
  chr7:56030944-56030994
  hypo
atttttccctctatagcgccagccacccagatccacgcctttgcttaagt

SEQ ID NO: 14800 - DNA, 31 bp, Homo sapiens
  chr7:56031246-56031277
  hypo
catggccagtgcccaccggtgctgaaatgaa

SEQ ID NO: 14801 - DNA, 44 bp, Homo sapiens
  chr7:56031536-56031580
  hypo
ctctctttctttctttcgctacaggacgtcgtgtgtttgcccag

SEQ ID NO: 14802 - DNA, 31 bp, Homo sapiens
  chr7:56031581-56031612
  hypo
ctggagtgcagtggcacgatcatagttcact

SEQ ID NO: 14803 - DNA, 2 bp, Homo sapiens
  chr7:56031792-56031794
  hypo
cc

SEQ ID NO: 14804 - DNA, 72 bp, Homo sapiens
  chr7:56031797-56031869
  hypo
gtgctgggatgacaggcgtgagctattgcgtccggccccagaatgcacttgttaaagcgttgtggggctttt

SEQ ID NO: 14805 - DNA, 31 bp, Homo sapiens
  chr7:56037256-56037287
  hypo
ctgtttgagttgtgatcgtgtttgtctgtct

SEQ ID NO: 14806 - DNA, 31 bp, Homo sapiens
  chr7:56144505-56144536
  hypo
gcctccttgctctcctcgcaggtcaagttta

SEQ ID NO: 14807 - DNA, 59 bp, Homo sapiens
  chr7:56144548-56144607
  hypo
ctggttccagccaaaccgcaccaacctgtggcaggtaagacctacgttcctcctttcac

SEQ ID NO: 14808 - DNA, 31 bp, Homo sapiens
  chr7:56144640-56144671
  hypo
actgtgttgttaggccgcggcatccagaagg

SEQ ID NO: 14809 - DNA, 18 bp, Homo sapiens
  chr7:56172895-56172913
  hypo
gcccggccactttaatct

SEQ ID NO: 14810 - DNA, 40 bp, Homo sapiens
  chr7:57712630-57712670
  hypo
gggccaggccttcacacacccaaagcggatccgcggcagt

SEQ ID NO: 14811 - DNA, 150 bp, Homo sapiens
  chr7:63027889-63028039
  hypo
cacatgcatgcacacacgtgcatgcacacacgtgcatgcacacgggcacacacatgcacaaacatgctcacccgggcgtccacgtgcacacctggccccatgctcacgcctgcaggagcgctcgcatgcacacaacgcacatggtctcca

SEQ ID NO: 14812 - DNA, 48 bp, Homo sapiens
  chr7:63757330-63757378
  hypo
gctgtgtgaacatatacgccacaatcacacctgcgggaaggaccagga

SEQ ID NO: 14813 - DNA, 61 bp, Homo sapiens
  chr7:63757439-63757500
  hypo
gttgcatccaaatacacgagacacagtcttaacatcggacaggatccgtgcatgagagctc

SEQ ID NO: 14814 - DNA, 33 bp, Homo sapiens
  chr7:64478037-64478070
  hypo
ggtgatagagcgagactccgtctcagaaaaaag

SEQ ID NO: 14815 - DNA, 31 bp, Homo sapiens
  chr7:64478145-64478176
  hypo
ttgtccaaattcaggccgcaagctggagagc

SEQ ID NO: 14816 - DNA, 31 bp, Homo sapiens
  chr7:64851807-64851838
  hypo
ttagtaatttttctctcgattattaagtatc

SEQ ID NO: 14817 - DNA, 21 bp, Homo sapiens
  chr7:64973893-64973914
  hypo
cctccgcgcgcagtgccgccc

SEQ ID NO: 14818 - DNA, 12 bp, Homo sapiens
  chr7:64974273-64974285
  hypo
gggctaaaagcc

SEQ ID NO: 14819 - DNA, 29 bp, Homo sapiens
  chr7:65236286-65236315
  hypo
atgaggctccctgggccgtgctatcccgg

SEQ ID NO: 14820 - DNA, 31 bp, Homo sapiens
  chr7:65439501-65439532
  hypo
cagagactcacggcagcgccaggcccacgcc

SEQ ID NO: 14821 - DNA, 39 bp, Homo sapiens; identical to SEQ ID NO: 3058
  chr7:65541036-65541075
  hypo

SEQ ID NO: 14822 - DNA, 34 bp, Homo sapiens
  chr7:65554005-65554039
  hypo
ccagacctggccattgcggcgctggaccagccaa

SEQ ID NO: 14823 - DNA, 25 bp, Homo sapiens
  chr7:65819313-65819338
  hypo
caggtgcggtggttcacgcctgtaa

SEQ ID NO: 14824 - DNA, 31 bp, Homo sapiens
  chr7:65841451-65841482
  hypo
ccactttgggccacatcgaggaaggcagctt

SEQ ID NO: 14825 - DNA, 31 bp, Homo sapiens
  chr7:65841862-65841893
  hypo
gaggcagccactggaccgggggaggccgact

SEQ ID NO: 14826 - DNA, 15 bp, Homo sapiens
  chr7:65879868-65879883
  hypo
cgacagagtgagaca

SEQ ID NO: 14827 - DNA, 60 bp, Homo sapiens
  chr7:65939522-65939582
  hypo
gccctgagcggactgccggacatctcgcagacttcgggcagcgatcgtggcggccgcctc

SEQ ID NO: 14828 - DNA, 40 bp, Homo sapiens
  chr7:65969577-65969617
  hypo
ttgtgaagaggagaggcgcactgggcgtcaataactttaa

SEQ ID NO: 14829 - DNA, 48 bp, Homo sapiens
  chr7:65969624-65969672
  hypo
ggaaaatatcagttcccgagtctccatgcgtttcgtgttgaagaagaa

SEQ ID NO: 14830 - DNA, 138 bp, Homo sapiens; identical to SEQ ID NO: 3059
  chr7:66094048-66094186
  hypo

SEQ ID NO: 14831 - DNA, 31 bp, Homo sapiens
  chr7:66105967-66105998
  hypo
cctccgtggggctggacggcagtgatctcct

SEQ ID NO: 14832 - DNA, 31 bp, Homo sapiens
  chr7:66106012-66106043
  hypo
aacaaagattccagggcgtggttttgcactc

SEQ ID NO: 14833 - DNA, 63 bp, Homo sapiens
  chr7:66106095-66106158
  hypo
aaaggatagtcattcacgttctgagatatgcgctctctctattgttctcgtacacaaagggat

SEQ ID NO: 14834 - DNA, 22 bp, Homo sapiens
  chr7:68263867-68263889
  hypo
gggtgggacggaatctcgctcc

SEQ ID NO: 14835 - DNA, 31 bp, Homo sapiens
  chr7:68678433-68678464
  hypo
ccaatcaacaaaaacacggtcgatctcaggt

SEQ ID NO: 14836 - DNA, 31 bp, Homo sapiens
  chr7:70234743-70234774
  hypo
gcggtgccttctgatacgcatattctacagt

SEQ ID NO: 14837 - DNA, 31 bp, Homo sapiens
  chr7:70250820-70250851
  hypo
acaggccaggtgggggcgtagagagggcagg

SEQ ID NO: 14838 - DNA, 41 bp, Homo sapiens
  chr7:70255441-70255482
  hypo
agaacttgacattcaccggagagacccgctgggcagggact

SEQ ID NO: 14839 - DNA, 42 bp, Homo sapiens
  chr7:70255540-70255582
  hypo
ccgctccttcagggaccgggagcctcacgactacagccacca

SEQ ID NO: 14840 - DNA, 57 bp, Homo sapiens
  chr7:70255960-70256017
  hypo
gaaggatatcgaggcccgataagccgagaacaggagcaagaacgaggaagaagaaac

SEQ ID NO: 14841 - DNA, 18 bp, Homo sapiens
  chr7:70382504-70382522
  hypo
gcccgccttggcctgtgt

SEQ ID NO: 14842 - DNA, 31 bp, Homo sapiens
  chr7:72325008-72325039
  hypo
atgacagctggggcagcgagctggctggcca

SEQ ID NO: 14843 - DNA, 27 bp, Homo sapiens
  chr7:75977564-75977591
  hypo
caagagccttagacttcgttttttttt

SEQ ID NO: 14844 - DNA, 31 bp, Homo sapiens
  chr7:76059753-76059784
  hypo
tgggtataagatgatgcggccaggtatggtg

SEQ ID NO: 14845 - DNA, 73 bp, Homo sapiens
  chr7:76631492-76631565
  hypo
gcatggagaagctgtccgcagcgtctggatacagcgatgtgactgacagcaaggcaatcgggcccctggctgt

SEQ ID NO: 14846 - DNA, 31 bp, Homo sapiens
  chr7:76631573-76631604
  hypo
tcaccaagtgcagccacgccttccacctgct

SEQ ID NO: 14847 - DNA, 81 bp, Homo sapiens
  chr7:76631612-76631693
  hypo
tggccatgtactgcaacggcaataaggtgcccccactggcccggggcggaggcgggtggcctgccccggaagtcctgagct

SEQ ID NO: 14848 - DNA, 31 bp, Homo sapiens
  chr7:77184924-77184955
  hypo
ttaaaaaaatctctagcgtttcttaggccgg

SEQ ID NO: 14849 - DNA, 17 bp, Homo sapiens
  chr7:77309373-77309390
  hypo
ctggagtgcagtggtcc

SEQ ID NO: 14850 - DNA, 59 bp, Homo sapiens
  chr7:77309652-77309711
  hypo
tgagctacttgagcctcggcctcccaaagtgctgggattactggcgtcagccactgcac

SEQ ID NO: 14851 - DNA, 31 bp, Homo sapiens
  chr7:77315388-77315419
  hypo
ctaaacacttaatatacgtgaaaaataagaa

SEQ ID NO: 14852 - DNA, 18 bp, Homo sapiens
  chr7:77315456-77315474
  hypo
aaagagtggttaggcccg

SEQ ID NO: 14853 - DNA, 31 bp, Homo sapiens
  chr7:80019541-80019572
  hypo
cacagttgtagggtgccgaggtgggaggatc

SEQ ID NO: 14854 - DNA, 31 bp, Homo sapiens; identical to SEQ ID NO: 3064
  chr7:80548345-80548376
  hypo

SEQ ID NO: 14855 - DNA, 60 bp, Homo sapiens; identical to SEQ ID NO: 3065
  chr7:80548576-80548636
  hypo

SEQ ID NO: 14856 - DNA, 31 bp, Homo sapiens
  chr7:80565299-80565330
  hypo
attaatttttgactatcgggtaaaaaggctg

SEQ ID NO: 14857 - DNA, 20 bp, Homo sapiens
  chr7:80619356-80619376
  hypo
gatgccgtctcaataataat

SEQ ID NO: 14858 - DNA, 16 bp, Homo sapiens
  chr7:90269563-90269579
  hypo
tcggccatcttggctc

SEQ ID NO: 14859 - DNA, 31 bp, Homo sapiens
  chr7:91510851-91510882
  hypo
agttatcctcaggagacgatggtgatttggt

SEQ ID NO: 14860 - DNA, 31 bp, Homo sapiens
  chr7:92164124-92164155
  hypo
aagaagagaagatgatcgtaaacttggaact

SEQ ID NO: 14861 - DNA, 144 bp, Homo sapiens; identical to SEQ ID NO: 3079
  chr7:92219763-92219907
  hypo

SEQ ID NO: 14862 - DNA, 385 bp, Homo sapiens; identical to SEQ ID NO: 3080
  chr7:92462331-92462716
  hypo

SEQ ID NO: 14863 - DNA, 140 bp, Homo sapiens; identical to SEQ ID NO: 3081
  chr7:92462810-92462950
  hypo

SEQ ID NO: 14864 - DNA, 31 bp, Homo sapiens; identical to SEQ ID NO: 3082
  chr7:92462963-92462994
  hypo

SEQ ID NO: 14865 - DNA, 31 bp, Homo sapiens; identical to SEQ ID NO: 3083
  chr7:92463001-92463032
  hypo

SEQ ID NO: 14866 - DNA, 31 bp, Homo sapiens; identical to SEQ ID NO: 3084
  chr7:92463048-92463079
  hypo

SEQ ID NO: 14867 - DNA, 78 bp, Homo sapiens; identical to SEQ ID NO: 3085
  chr7:92463082-92463160
  hypo

SEQ ID NO: 14868 - DNA, 31 bp, Homo sapiens; identical to SEQ ID NO: 3086
  chr7:92463161-92463192
  hypo

SEQ ID NO: 14869 - DNA, 138 bp, Homo sapiens; identical to SEQ ID NO: 3087
  chr7:92463195-92463333
  hypo

SEQ ID NO: 14870 - DNA, 64 bp, Homo sapiens
  chr7:94293683-94293747
  hypo
gccggtgggaggtgcccgcatgcgcctgacgcaggaagaaaaagaaagacgcagaaagctgaac

SEQ ID NO: 14871 - DNA, 97 bp, Homo sapiens; identical to SEQ ID NO: 3090
  chr7:95064295-95064392
  hypo

SEQ ID NO: 14872 - DNA, 59 bp, Homo sapiens
  chr7:97600088-97600147
  hypo
tcttagctattgaaaacgctaagttcagtgtcgacctcttgtgtcgcacatgctaatga

SEQ ID NO: 14873 - DNA, 31 bp, Homo sapiens
  chr7:97600148-97600179
  hypo
aaaaccaaagaaaaaccggttttagaaaaac

SEQ ID NO: 14874 - DNA, 39 bp, Homo sapiens
  chr7:97600248-97600287
  hypo
agcctgggcaacaccgtgagacctcgtctctatttaaaa

SEQ ID NO: 14875 - DNA, 93 bp, Homo sapiens
  chr7:97670350-97670443
  hypo
agggccctcccagttccggcgctccctatggagtccgctgaggccttcatcgagactgcactgcagctcagctttccccgctgttcaatcctg

SEQ ID NO: 14876 - DNA, 39 bp, Homo sapiens
  chr7:97670498-97670537
  hypo
ttatccccatctgccacgcatcctcgactggaacaatct

SEQ ID NO: 14877 - DNA, 15 bp, Homo sapiens
  chr7:97738177-97738192
  hypo
ttttttttttttgag

SEQ ID NO: 14878 - DNA, 31 bp, Homo sapiens
  chr7:97807741-97807772
  hypo
gatcgctctgctcatgcggccctgagtctca

SEQ ID NO: 14879 - DNA, 31 bp, Homo sapiens
  chr7:97832524-97832555
  hypo
tgcccactttggattccgggctgacctgagt

SEQ ID NO: 14880 - DNA, 31 bp, Homo sapiens
  chr7:97834166-97834197
  hypo
tgctcttcagcaggctcgtaagagcacttga

SEQ ID NO: 14881 - DNA, 31 bp, Homo sapiens
  chr7:97925190-97925221
  hypo
tgaggaggaaaaagaacgcttaagatgacag

SEQ ID NO: 14882 - DNA, 31 bp, Homo sapiens
  chr7:97942776-97942807
  hypo
tgtcctctccagcctgcgaccctggtgccac

SEQ ID NO: 14883 - DNA, 31 bp, Homo sapiens
  chr7:97947129-97947160
  hypo
gctgggactgtcaccccgtagttcacaccat

SEQ ID NO: 14884 - DNA, 65 bp, Homo sapiens
  chr7:97968885-97968950
  hypo
ccgggaatgcggctggcgtggccaggcctcactcgcttcatgattctagccgcatccatctttga

SEQ ID NO: 14885 - DNA, 61 bp, Homo sapiens
  chr7:97968957-97969018
  hypo
tctcttcagcctgtcacgggagctacgccctttgctgctacctgtgcgtgtgaccgcagca

SEQ ID NO: 14886 - DNA, 36 bp, Homo sapiens
  chr7:98012254-98012290
  hypo
cctgaggtcaggagttcgagaccagcctgaccaaca

SEQ ID NO: 14887 - DNA, 28 bp, Homo sapiens
  chr7:98019241-98019269
  hypo
ttttgagaggtagtctcgcactgtcgcc

SEQ ID NO: 14888 - DNA, 28 bp, Homo sapiens
  chr7:98019508-98019536
  hypo
gagccactgcgcccggtctcgggttagt

SEQ ID NO: 14889 - DNA, 35 bp, Homo sapiens; identical to SEQ ID NO: 3099
  chr7:98030419-98030454
  hypo

SEQ ID NO: 14890 - DNA, 74 bp, Homo sapiens; identical to SEQ ID NO: 3100
  chr7:98030480-98030554
  hypo

SEQ ID NO: 14891 - DNA, 39 bp, Homo sapiens; identical to SEQ ID NO: 3101
  chr7:98030571-98030610
  hypo

SEQ ID NO: 14892 - DNA, 100 bp, Homo sapiens
  chr7:98639723-98639823
  hypo
tgttcattcatacttacggggttgattgaagaatccggatttatttgcaacatgtaaatattgtccgtagaatactggaagagcccgtaataaggattca

SEQ ID NO: 14893 - DNA, 31 bp, Homo sapiens
  chr7:98639870-98639901
  hypo
aaaaatgcatttgagacgcgctaaaatttct

SEQ ID NO: 14894 - DNA, 16 bp, Homo sapiens
  chr7:98639924-98639940
  hypo
tggagtctcactctgt

SEQ ID NO: 14895 - DNA, 49 bp, Homo sapiens
  chr7:98775354-98775403
  hypo
ctactcaaagatgacccgatacagcagggataggcgagacacattaact

SEQ ID NO: 14896 - DNA, 48 bp, Homo sapiens
  chr7:98775436-98775484
  hypo
ccagtcacctgccacacgcaacagcccaggccccggcagggtgaccct

SEQ ID NO: 14897 - DNA, 42 bp, Homo sapiens
  chr7:98814529-98814571
  hypo
ttccaggtcttattaacggtattgagtcgcttcctctggttg

SEQ ID NO: 14898 - DNA, 31 bp, Homo sapiens
  chr7:98845138-98845169
  hypo
ggcctgaagggaactccgctgggggaagagg

SEQ ID NO: 14899 - DNA, 47 bp, Homo sapiens
  chr7:98876192-98876239
  hypo
cgccctgtaagacactcgattttcacgtgcatcgtacagggtagaaa

SEQ ID NO: 14900 - DNA, 47 bp, Homo sapiens
  chr7:98876332-98876379
  hypo
cctccctgctctgccacggccatctctgtagccgtgagcatgtgtgg

SEQ ID NO: 14901 - DNA, 31 bp, Homo sapiens
  chr7:98877234-98877265
  hypo
gaggaagagggcatggcggcctcactgagtg

SEQ ID NO: 14902 - DNA, 66 bp, Homo sapiens
  chr7:98879379-98879445
  hypo
cccaggcccactgtcacggctaaggttccagaatgcagagccggctctgaccggccaccagtgctg

SEQ ID NO: 14903 - DNA, 52 bp, Homo sapiens
  chr7:98879472-98879524
  hypo
cagacagtggacccctcgtccctgtgtttgctgataccgtgaatccacatgt

SEQ ID NO: 14904 - DNA, 41 bp, Homo sapiens
  chr7:98879534-98879575
  hypo
cctctccctgctgcctcgggaactaccgcccttgccctgtg

SEQ ID NO: 14905 - DNA, 31 bp, Homo sapiens
  chr7:98881512-98881543
  hypo
gcaggaaaagaaaatccgggcggaggtggaa

SEQ ID NO: 14906 - DNA, 31 bp, Homo sapiens
  chr7:98882347-98882378
  hypo
ggaggtacgtgcttttcggcaggttcaaggc

SEQ ID NO: 14907 - DNA, 119 bp, Homo sapiens
  chr7:98885540-98885659
  hypo
tgagctgctgaagctgcggcgggagctggaagaggccgccctgcagagcgaggcgacggcctccacactgcgcaagaagcacgtggactccatggccgagctgacggagcatgtggaga

SEQ ID NO: 14908 - DNA, 25 bp, Homo sapiens
  chr7:98889549-98889574
  hypo
gagtgaaactcggtctcaggaaaaa

SEQ ID NO: 14909 - DNA, 35 bp, Homo sapiens
  chr7:98889890-98889925
  hypo
ctgtggaaagcccccacgggcgcctgacaggctgg

SEQ ID NO: 14910 - DNA, 31 bp, Homo sapiens
  chr7:98894702-98894733
  hypo
gcagtgtaactttaggcgagttgcttaatct

SEQ ID NO: 14911 - DNA, 38 bp, Homo sapiens
  chr7:98901752-98901790
  hypo
agcacaggcccatgtccggcccacggtagaccctcatg

SEQ ID NO: 14912 - DNA, 46 bp, Homo sapiens
  chr7:98904457-98904503
  hypo
tggtaggtgtggactccgctctggacggtctcgctcagagcgctcc

SEQ ID NO: 14913 - DNA, 45 bp, Homo sapiens
  chr7:98960331-98960376
  hypo
gccatccccttcccagcgtcggggaagaggcgggtaagttctaga

SEQ ID NO: 14914 - DNA, 29 bp, Homo sapiens
  chr7:98971520-98971549
  hypo
ccaccgcgaccggccgaggtaaggttttc

SEQ ID NO: 14915 - DNA, 41 bp, Homo sapiens; identical to SEQ ID NO: 3103
  chr7:98971559-98971600
  hypo

SEQ ID NO: 14916 - DNA, 31 bp, Homo sapiens
  chr7:98994223-98994254
  hypo
cagggcacagggtgggcgagacacagcagag

SEQ ID NO: 14917 - DNA, 71 bp, Homo sapiens
  chr7:99065117-99065188
  hypo
cccaggcagtgaaaatcgcatatacaattataggtgtgtgaaagcacggccagcatcgccagtgggaatta

SEQ ID NO: 14918 - DNA, 31 bp, Homo sapiens; identical to SEQ ID NO: 3105
  chr7:99070937-99070968
  hypo

SEQ ID NO: 14919 - DNA, 31 bp, Homo sapiens
  chr7:99103864-99103895
  hypo
ggctctcagccaactccgggtgctctgctgt

SEQ ID NO: 14920 - DNA, 20 bp, Homo sapiens
  chr7:99155931-99155951
  hypo
cgggccgcctccttgcaggg

SEQ ID NO: 14921 - DNA, 101 bp, Homo sapiens; identical to SEQ ID NO: 3109
  chr7:99155954-99156055
  hypo

SEQ ID NO: 14922 - DNA, 246 bp, Homo sapiens; identical to SEQ ID NO: 3110
  chr7:99156057-99156303
  hypo

SEQ ID NO: 14923 - DNA, 156 bp, Homo sapiens; identical to SEQ ID NO: 3111
  chr7:99156403-99156559
  hypo

SEQ ID NO: 14924 - DNA, 78 bp, Homo sapiens; identical to SEQ ID NO: 3112
  chr7:99156570-99156648
  hypo

SEQ ID NO: 14925 - DNA, 223 bp, Homo sapiens; identical to SEQ ID NO: 3113
  chr7:99156692-99156915
  hypo

SEQ ID NO: 14926 - DNA, 65 bp, Homo sapiens; identical to SEQ ID NO: 3114
  chr7:99156917-99156982
  hypo

SEQ ID NO: 14927 - DNA, 39 bp, Homo sapiens
  chr7:99391323-99391362
  hypo
tcatccattttttttgcggttcatccattctgtagcatg

SEQ ID NO: 14928 - DNA, 31 bp, Homo sapiens
  chr7:99391422-99391453
  hypo
ttatttatccatccatcgatggacatgtggg

SEQ ID NO: 14929 - DNA, 31 bp, Homo sapiens
  chr7:99391489-99391520
  hypo
tagaaatatgtgagtccgtgtattttagtaa

SEQ ID NO: 14930 - DNA, 31 bp, Homo sapiens
  chr7:99611394-99611425
  hypo
agggtggagagattaccggtaattatttttc

SEQ ID NO: 14931 - DNA, 24 bp, Homo sapiens
  chr7:99761982-99762006
  hypo
ttcctttaaaaccccccgctctcg

SEQ ID NO: 14932 - DNA, 31 bp, Homo sapiens
  chr7:99782062-99782093
  hypo
atatgcagttgtacagcgtgttagttttttt

SEQ ID NO: 14933 - DNA, 3 bp, Homo sapiens
  chr7:99782097-99782100
  hypo
ttt

SEQ ID NO: 14934 - DNA, 31 bp, Homo sapiens; identical to SEQ ID NO: 3115
  chr7:99869133-99869164
  hypo

SEQ ID NO: 14935 - DNA, 31 bp, Homo sapiens
  chr7:100039691-100039722
  hypo
cctgtcacacgagacacgctggaagatggga

SEQ ID NO: 14936 - DNA, 36 bp, Homo sapiens
  chr7:100064740-100064776
  hypo
cacctccacctcctcccggaccgcaaacatgaggtg

SEQ ID NO: 14937 - DNA, 50 bp, Homo sapiens
  chr7:100086231-100086281
  hypo
gccccatgcccaccgccgcccagcttcagccctcccgagccggagggacg

SEQ ID NO: 14938 - DNA, 31 bp, Homo sapiens
  chr7:100116513-100116544
  hypo
tcacaataggaattggcgaatgggccagaca

SEQ ID NO: 14939 - DNA, 26 bp, Homo sapiens
  chr7:100153793-100153819
  hypo
cagccacaatggctcacgcctgcaat

SEQ ID NO: 14940 - DNA, 26 bp, Homo sapiens
  chr7:100153938-100153964
  hypo
aaacaaacgaacgaacaaacaaaacc

SEQ ID NO: 14941 - DNA, 74 bp, Homo sapiens
  chr7:100179297-100179371
  hypo
ccatgtataagctacccggtctgcagtgttttcgttaccgcagcctgagccaactgggacgcacatacaaacac

SEQ ID NO: 14942 - DNA, 39 bp, Homo sapiens
  chr7:100179888-100179927
  hypo
gagactgagaagcacacgctcccacgtggccctggctcg

SEQ ID NO: 14943 - DNA, 37 bp, Homo sapiens
  chr7:100189308-100189345
  hypo
ccaggcatttggaggccgccgccgatgtctcagcaag

SEQ ID NO: 14944 - DNA, 31 bp, Homo sapiens
  chr7:100190396-100190427
  hypo
ttcccccagtttgcctcggacccaaggtgtg

SEQ ID NO: 14945 - DNA, 31 bp, Homo sapiens
  chr7:100212727-100212758
  hypo
cccagggctgcccatgcgaccctattctttc

SEQ ID NO: 14946 - DNA, 50 bp, Homo sapiens
  chr7:100388724-100388774
  hypo
cgcttccccaggtgcacggcctggaagggatgaggcgggggaggtgaaca

SEQ ID NO: 14947 - DNA, 31 bp, Homo sapiens
  chr7:100402973-100403004
  hypo
gtaccaggcccaggtccgggggaggaggtgg

SEQ ID NO: 14948 - DNA, 41 bp, Homo sapiens
  chr7:100403261-100403302
  hypo
tgggacagtctgggggcgggggcagccggtagtcctgttca

SEQ ID NO: 14949 - DNA, 67 bp, Homo sapiens
  chr7:100405095-100405162
  hypo
gccaggtctcggtggacgtagctcatctcggcaaggtaccgcatgcccgaggcgatgccccgcagca

SEQ ID NO: 14950 - DNA, 2 bp, Homo sapiens
  chr7:100405285-100405287
  hypo
ca

SEQ ID NO: 14951 - DNA, 31 bp, Homo sapiens
  chr7:100407981-100408012
  hypo
aatcaagacattcaggcggacaagggaccta

SEQ ID NO: 14952 - DNA, 12 bp, Homo sapiens
  chr7:100408050-100408062
  hypo
aagatttagaga

SEQ ID NO: 14953 - DNA, 39 bp, Homo sapiens
  chr7:100410865-100410904
  hypo
taactcccactggactcggaggctcggctcatagctttt

SEQ ID NO: 14954 - DNA, 14 bp, Homo sapiens
  chr7:100410907-100410921
  hypo
cccaaacccctgtc

SEQ ID NO: 14955 - DNA, 38 bp, Homo sapiens
  chr7:100414989-100415027
  hypo
gaggtagtggggtggccgtcacccgggaacccaagttc

SEQ ID NO: 14956 - DNA, 30 bp, Homo sapiens
  chr7:100415897-100415927
  hypo
acaggcgtgagccaccgcacccaacctcag

SEQ ID NO: 14957 - DNA, 31 bp, Homo sapiens
  chr7:100417065-100417096
  hypo
tagcccctcacacttccggggtacccaactt

SEQ ID NO: 14958 - DNA, 58 bp, Homo sapiens
  chr7:100421439-100421497
  hypo
tgggacccaacctgtgcgaagccagtgggcctggcccggggcacgctgcacgtcacac

SEQ ID NO: 14959 - DNA, 45 bp, Homo sapiens; identical to SEQ ID NO: 3117
  chr7:100424501-100424546
  hypo

SEQ ID NO: 14960 - DNA, 326 bp, Homo sapiens; identical to SEQ ID NO: 3118
  chr7:100424625-100424951
  hypo

SEQ ID NO: 14961 - DNA, 89 bp, Homo sapiens; identical to SEQ ID NO: 3119
  chr7:100424995-100425084
  hypo

SEQ ID NO: 14962 - DNA, 44 bp, Homo sapiens
  chr7:100490910-100490954
  hypo
ggttcaccaggacctgcgctggtcgtgtccgaaggcaggctacc

SEQ ID NO: 14963 - DNA, 31 bp, Homo sapiens
  chr7:100650578-100650609
  hypo
actatagtcactctgtcgtgttaaatactag

SEQ ID NO: 14964 - DNA, 59 bp, Homo sapiens
  chr7:100731010-100731069
  hypo
cagacccacacccaccgcgtggtggacctggtgggctacagggccgggtggtatgatga

SEQ ID NO: 14965 - DNA, 21 bp, Homo sapiens
  chr7:100768457-100768478
  hypo
ccaaatccagctgggcgcggt

SEQ ID NO: 14966 - DNA, 31 bp, Homo sapiens
  chr7:100866247-100866278
  hypo
tggataagctctgacacgaagccttaggctt

SEQ ID NO: 14967 - DNA, 39 bp, Homo sapiens
  chr7:100866325-100866364
  hypo
gggcagaggctggtagcgaggggccgacttagagccagg

SEQ ID NO: 14968 - DNA, 31 bp, Homo sapiens
  chr7:100866374-100866405
  hypo
caggtgtggtggctcacgcctgtaatcccag

SEQ ID NO: 14969 - DNA, 58 bp, Homo sapiens
  chr7:100961429-100961487
  hypo
gctcgaattcacagcccgtgcctttgttgttgctggtaacatgcgggttctcaaattc

SEQ ID NO: 14970 - DNA, 31 bp, Homo sapiens
  chr7:101132097-101132128
  hypo
tgtgtgtcctgtctagcgcactcttccaggt

SEQ ID NO: 14971 - DNA, 14 bp, Homo sapiens
  chr7:101195309-101195323
  hypo
gaggcagtggtgga

SEQ ID NO: 14972 - DNA, 31 bp, Homo sapiens
  chr7:101195356-101195387
  hypo
aagccatgcctcctcccgtgcttgtctagtg

SEQ ID NO: 14973 - DNA, 31 bp, Homo sapiens
  chr7:101270579-101270610
  hypo
aaaagaaaaggaattgcggagtgaggtcagg

SEQ ID NO: 14974 - DNA, 31 bp, Homo sapiens
  chr7:101382584-101382615
  hypo
agggcagaggcccccacgggtagggcagcag

SEQ ID NO: 14975 - DNA, 100 bp, Homo sapiens
  chr7:101497174-101497274
  hypo
gcaggagggacctgaccgcagtggcattttgcacacctgcccggcctccaagtcctgcagctcgaatgagcttgcttgctgcaggcggcctgctccatct

SEQ ID NO: 14976 - DNA, 37 bp, Homo sapiens
  chr7:101497277-101497314
  hypo
ggcttgtctggaaaggcggcttcggctttccagtgct

SEQ ID NO: 14977 - DNA, 56 bp, Homo sapiens
  chr7:101504315-101504371
  hypo
ggcccccaaagtgccgggtttataggctgagccactgcacccggcctgcactagtt

SEQ ID NO: 14978 - DNA, 55 bp, Homo sapiens
  chr7:101504413-101504468
  hypo
ctgacctgctttagaacggatctcagccaccctgctccttcgaacccacatttct

SEQ ID NO: 14979 - DNA, 31 bp, Homo sapiens
  chr7:101521625-101521656
  hypo
ttttagagaccaacctcgcagttagccagca

SEQ ID NO: 14980 - DNA, 57 bp, Homo sapiens
  chr7:101533918-101533975
  hypo
tatagagaggttggtgcgaaaatagcagcttgtttctgcttgcgtatttctactcac

SEQ ID NO: 14981 - DNA, 22 bp, Homo sapiens
  chr7:101583546-101583568
  hypo
taatgttcgcaaagctggtcag

SEQ ID NO: 14982 - DNA, 31 bp, Homo sapiens
  chr7:101603158-101603189
  hypo
ttatagggtaataactcgattaattttgcaa

SEQ ID NO: 14983 - DNA, 70 bp, Homo sapiens
  chr7:101603242-101603312
  hypo
aagactttaatgccatcgagatgcctcacattggcacggttgcgtaagaatcgcacggtcccatgaaatg

SEQ ID NO: 14984 - DNA, 46 bp, Homo sapiens
  chr7:101624112-101624158
  hypo
ccgtgggactttctcccgaacacagcacctgcgcttcctgactcct

SEQ ID NO: 14985 - DNA, 45 bp, Homo sapiens
  chr7:101627908-101627953
  hypo
tccctcctggcacaagcgcagatgggcagtcgggagggaacatca

SEQ ID NO: 14986 - DNA, 48 bp, Homo sapiens
  chr7:101627982-101628030
  hypo
tgctggaggtggctggcgttcgcaaaactcagtcgtaaaaaacagcac

SEQ ID NO: 14987 - DNA, 31 bp, Homo sapiens
  chr7:101630647-101630678
  hypo
cacggtaatgggttggcgacagtgactcagc

SEQ ID NO: 14988 - DNA, 31 bp, Homo sapiens
  chr7:101632780-101632811
  hypo
tcaaacccgagtggagcgttctgttgcttca

SEQ ID NO: 14989 - DNA, 68 bp, Homo sapiens
  chr7:101652552-101652620
  hypo
ggagtggctgtcatgacgctgaccgcacaaatgatggtgttaggatccctccacggatgtggccaggt

SEQ ID NO: 14990 - DNA, 31 bp, Homo sapiens
  chr7:101652622-101652653
  hypo
cacccctcacctaggccgcacagcaccctaa

SEQ ID NO: 14991 - DNA, 46 bp, Homo sapiens
  chr7:101652659-101652705
  hypo
cactgaagaaaggctgcgtggggctgcagagcggctcatttctaag

SEQ ID NO: 14992 - DNA, 58 bp, Homo sapiens
  chr7:101656269-101656327
  hypo
tcaggttaaattcttgcggtaatccttacggccctgtggtgttcgctaagatgtagca

SEQ ID NO: 14993 - DNA, 31 bp, Homo sapiens
  chr7:101707050-101707081
  hypo
atgcagttggccattgcggaagatattaaaa

SEQ ID NO: 14994 - DNA, 37 bp, Homo sapiens
  chr7:101707084-101707121
  hypo
tattaaacacccactgcgtgcccgtggtcgggaggaa

SEQ ID NO: 14995 - DNA, 31 bp, Homo sapiens; identical to SEQ ID NO: 3127
  chr7:101707444-101707475
  hypo

SEQ ID NO: 14996 - DNA, 31 bp, Homo sapiens; identical to SEQ ID NO: 3128
  chr7:101707501-101707532
  hypo

SEQ ID NO: 14997 - DNA, 31 bp, Homo sapiens
  chr7:102088065-102088096
  hypo
caggagccaggacacacgtcagcccagcagg

SEQ ID NO: 14998 - DNA, 31 bp, Homo sapiens
  chr7:102088101-102088132
  hypo
ggggtgctgcagccctcggcagtggggtcag

SEQ ID NO: 14999 - DNA, 31 bp, Homo sapiens
  chr7:102097001-102097032
  hypo
tcctacttgttaacagcgttatggggctgga

SEQ ID NO: 15000 - DNA, 6 bp, Homo sapiens
  chr7:102782153-102782159
  hypo
atgccc

SEQ ID NO: 15001 - DNA, 31 bp, Homo sapiens
  chr7:103080374-103080405
  hypo
ctccttcaccaccttccggtctatgctcaat

SEQ ID NO: 15002 - DNA, 31 bp, Homo sapiens
  chr7:105016774-105016805
  hypo
caaacacacacccctacggcattcttcatct

SEQ ID NO: 15003 - DNA, 36 bp, Homo sapiens
  chr7:105279369-105279405
  hypo
gtgcaggtgggaggctcgattcggcccagacaaaca

SEQ ID NO: 15004 - DNA, 31 bp, Homo sapiens
  chr7:105279413-105279444
  hypo
aagcagagagggccatcgccttgatcccaag

SEQ ID NO: 15005 - DNA, 31 bp, Homo sapiens
  chr7:105279466-105279497
  hypo
aatacagggctttgggcgacccaatggcggc

SEQ ID NO: 15006 - DNA, 31 bp, Homo sapiens
  chr7:105279512-105279543
  hypo
gttcccctggccaccccggtgtggctggatc

SEQ ID NO: 15007 - DNA, 99 bp, Homo sapiens
  chr7:105279572-105279671
  hypo
gggctgcctttcagggcgctgccgccgccgccgccgccgctgccgctgctcctgcatacattaaaacgtagcaggctttagaaccgcctgtgagtgcct

SEQ ID NO: 15008 - DNA, 24 bp, Homo sapiens
  chr7:105340662-105340686
  hypo
acaaggggggctgggcgcggtggc

SEQ ID NO: 15009 - DNA, 31 bp, Homo sapiens
  chr7:105399235-105399266
  hypo
cttccttcttagcaaacgaagtgtatcagtt

SEQ ID NO: 15010 - DNA, 55 bp, Homo sapiens
  chr7:105399326-105399381
  hypo
cttgatttgggaggtacggggaagagaatggagacaggcacgattctgtctttac

SEQ ID NO: 15011 - DNA, 43 bp, Homo sapiens
  chr7:105399382-105399425
  hypo
tcttgagccatccctgcggaagggggtccgtggggtggccggg

SEQ ID NO: 15012 - DNA, 69 bp, Homo sapiens
  chr7:105586618-105586687
  hypo
ccctatgtggggaaggcgcagttcaccgtcaggactgcaggaagcctgggaggacgccatggagacctg

SEQ ID NO: 15013 - DNA, 31 bp, Homo sapiens
  chr7:105586749-105586780
  hypo
gggtgccctctccccacgccctcacgcagcc

SEQ ID NO: 15014 - DNA, 31 bp, Homo sapiens; identical to SEQ ID NO: 3134
  chr7:105752146-105752177
  hypo

SEQ ID NO: 15015 - DNA, 31 bp, Homo sapiens
  chr7:105753928-105753959
  hypo
tgtttatcttggctcccgttcctcagtcccc

SEQ ID NO: 15016 - DNA, 31 bp, Homo sapiens; identical to SEQ ID NO: 3135
  chr7:106684934-106684965
  hypo

SEQ ID NO: 15017 - DNA, 104 bp, Homo sapiens; identical to SEQ ID NO: 3136
  chr7:106685213-106685317
  hypo

SEQ ID NO: 15018 - DNA, 23 bp, Homo sapiens
  chr7:106797273-106797296
  hypo
ttagaaaccgagacagcttgttc

SEQ ID NO: 15019 - DNA, 31 bp, Homo sapiens
  chr7:106837821-106837852
  hypo
ttttgtttgtttgaggcggagtctcactgtc

SEQ ID NO: 15020 - DNA, 31 bp, Homo sapiens
  chr7:107148302-107148333
  hypo
cataatgcttctatgacgtatttggttttaa

SEQ ID NO: 15021 - DNA, 24 bp, Homo sapiens
  chr7:107148374-107148398
  hypo
caggaacagctcccagcgtgagcg

SEQ ID NO: 15022 - DNA, 31 bp, Homo sapiens
  chr7:107202109-107202140
  hypo
ggcactatccttagaacggagcagagactcg

SEQ ID NO: 15023 - DNA, 31 bp, Homo sapiens
  chr7:107202451-107202482
  hypo
gcagaggctccacttccgttgcaattgaaaa

SEQ ID NO: 15024 - DNA, 31 bp, Homo sapiens
  chr7:107202499-107202530
  hypo
gcaacagatggttatacgttgaggttaaatt

SEQ ID NO: 15025 - DNA, 31 bp, Homo sapiens
  chr7:107483917-107483948
  hypo
tagtcatgtggatcacgcggatccaaaatgg

SEQ ID NO: 15026 - DNA, 74 bp, Homo sapiens; identical to SEQ ID NO: 3138
  chr7:107531846-107531920
  hypo

SEQ ID NO: 15027 - DNA, 31 bp, Homo sapiens
  chr7:107621457-107621488
  hypo
agtttcataagaatgtcggccgggcgtggta

SEQ ID NO: 15028 - DNA, 45 bp, Homo sapiens
  chr7:107633906-107633951
  hypo
gttcaatcatcacccccgttttaccttctgcgcctacacaagtaa

SEQ ID NO: 15029 - DNA, 165 bp, Homo sapiens; identical to SEQ ID NO: 3140
  chr7:108095385-108095550
  hypo

SEQ ID NO: 15030 - DNA, 62 bp, Homo sapiens; identical to SEQ ID NO: 3141
  chr7:108095895-108095957
  hypo

SEQ ID NO: 15031 - DNA, 123 bp, Homo sapiens; identical to SEQ ID NO: 3142
  chr7:108096116-108096239
  hypo

SEQ ID NO: 15032 - DNA, 39 bp, Homo sapiens; identical to SEQ ID NO: 3143
  chr7:108096265-108096304
  hypo

SEQ ID NO: 15033 - DNA, 31 bp, Homo sapiens
  chr7:112149177-112149208
  hypo
gtgatcaggctctgtgcgggccctgtacaac

SEQ ID NO: 15034 - DNA, 31 bp, Homo sapiens
  chr7:114671155-114671186
  hypo
ttggctcctccctccccgttatcagatctta

SEQ ID NO: 15035 - DNA, 31 bp, Homo sapiens; identical to SEQ ID NO: 3149
  chr7:120497419-120497450
  hypo

SEQ ID NO: 15036 - DNA, 62 bp, Homo sapiens; identical to SEQ ID NO: 3160
  chr7:123174505-123174567
  hypo

SEQ ID NO: 15037 - DNA, 66 bp, Homo sapiens; identical to SEQ ID NO: 3161
  chr7:123174597-123174663
  hypo

SEQ ID NO: 15038 - DNA, 36 bp, Homo sapiens
  chr7:123175907-123175943
  hypo
acaggagtgagccaccgcgcccggcctatcaatgaa

SEQ ID NO: 15039 - DNA, 31 bp, Homo sapiens
  chr7:126013968-126013999
  hypo
agggcacggtggctcacgcctgtaatcccag

SEQ ID NO: 15040 - DNA, 46 bp, Homo sapiens; identical to SEQ ID NO: 3162
  chr7:127744069-127744115
  hypo

SEQ ID NO: 15041 - DNA, 247 bp, Homo sapiens; identical to SEQ ID NO: 3163
  chr7:127744304-127744551
  hypo

SEQ ID NO: 15042 - DNA, 31 bp, Homo sapiens
  chr7:127846529-127846560
  hypo
gggcaattctccattccgtggaagaccacag

SEQ ID NO: 15043 - DNA, 30 bp, Homo sapiens
  chr7:128064475-128064505
  hypo
gtgagccaccgtgcccgaccataaagagtt

SEQ ID NO: 15044 - DNA, 31 bp, Homo sapiens
  chr7:128086258-128086289
  hypo
gaggggctgaggggttcggtgtgggtagggc

SEQ ID NO: 15045 - DNA, 31 bp, Homo sapiens
  chr7:128097058-128097089
  hypo
gaagcaacactggctccgcagccatgaagtt

SEQ ID NO: 15046 - DNA, 24 bp, Homo sapiens
  chr7:128197985-128198009
  hypo
caccacgctcggccagttatatct

SEQ ID NO: 15047 - DNA, 31 bp, Homo sapiens
  chr7:128483018-128483049
  hypo
tcctgggtactcacagcgacatgcacctgcc

SEQ ID NO: 15048 - DNA, 31 bp, Homo sapiens
  chr7:128484036-128484067
  hypo
tgtcacttgccctccacgcagaggtggctgt

SEQ ID NO: 15049 - DNA, 41 bp, Homo sapiens
  chr7:128484115-128484156
  hypo
gggccaactggatgtgcggatgacttcgccctctcgccggc

SEQ ID NO: 15050 - DNA, 44 bp, Homo sapiens
  chr7:128484190-128484234
  hypo
ggaagcccaggctgtgcgctacatgcccccggaggaggggccct

SEQ ID NO: 15051 - DNA, 57 bp, Homo sapiens
  chr7:128484237-128484294
  hypo
aggtggatatcacctacgatggtcacccggtgcctggcagcccgtttgctgtggagg

SEQ ID NO: 15052 - DNA, 31 bp, Homo sapiens
  chr7:128489033-128489064
  hypo
caggtgggtgcccacccgctgcccgtgccct

SEQ ID NO: 15053 - DNA, 31 bp, Homo sapiens
  chr7:128489609-128489640
  hypo
ccaacagccccttccacgtgctggtaagttc

SEQ ID NO: 15054 - DNA, 31 bp, Homo sapiens
  chr7:128587360-128587391
  hypo
ccgcccactctgcggccgcctactctgcagc

SEQ ID NO: 15055 - DNA, 31 bp, Homo sapiens
  chr7:128602075-128602106
  hypo
ttattttagactgaaacgtcccagctttctt

SEQ ID NO: 15056 - DNA, 31 bp, Homo sapiens
  chr7:128602129-128602160
  hypo
agggaattggccaggcgcggtggctcacacc

SEQ ID NO: 15057 - DNA, 1 bp, Homo sapiens
  chr7:128602168-128602169
  hypo
c

SEQ ID NO: 15058 - DNA, 31 bp, Homo sapiens
  chr7:128845244-128845275
  hypo
ttcaccctggtcagccgcgggagggcaggcc

SEQ ID NO: 15059 - DNA, 31 bp, Homo sapiens
  chr7:129096501-129096532
  hypo
aatggtattgggacaccgactggccaaaaat

SEQ ID NO: 15060 - DNA, 31 bp, Homo sapiens
  chr7:129096565-129096596
  hypo
aaagcagtaaatgacccggctcatcctgccc

SEQ ID NO: 15061 - DNA, 49 bp, Homo sapiens
  chr7:129172366-129172415
  hypo
tgtgtgcatgcatgtgcgtgtgcccgtgtgcatgcgtacactctgtgta

SEQ ID NO: 15062 - DNA, 31 bp, Homo sapiens
  chr7:129172417-129172448
  hypo
tccatatgcatgtgtgcgtgtgtctgtgtgc

SEQ ID NO: 15063 - DNA, 24 bp, Homo sapiens
  chr7:129205463-129205487
  hypo
caccgcacccggctggatactttt

SEQ ID NO: 15064 - DNA, 31 bp, Homo sapiens
  chr7:129287571-129287602
  hypo
ttgttaactggattatcgtgttattagtatt

SEQ ID NO: 15065 - DNA, 31 bp, Homo sapiens
  chr7:129330423-129330454
  hypo
gtggcacaggtgtgggcgggcctctgatcac

SEQ ID NO: 15066 - DNA, 31 bp, Homo sapiens
  chr7:129410251-129410282
  hypo
gcaagtctagaaccaccggatcctgttacct

SEQ ID NO: 15067 - DNA, 31 bp, Homo sapiens
  chr7:129410296-129410327
  hypo
ctaccattgccaaaaacggggggaggcaagc

SEQ ID NO: 15068 - DNA, 45 bp, Homo sapiens
  chr7:129435133-129435178
  hypo
agtccctcagcccacccgagctccttgacacgtttccaggaccat

SEQ ID NO: 15069 - DNA, 31 bp, Homo sapiens
  chr7:129435215-129435246
  hypo
ggtctgagccggcactcgagggcggggtcct

SEQ ID NO: 15070 - DNA, 31 bp, Homo sapiens
  chr7:129483512-129483543
  hypo
catgctaagcaaaggacgttcagatgtttct

SEQ ID NO: 15071 - DNA, 78 bp, Homo sapiens
  chr7:129794661-129794739
  hypo
tgtgcaacccccatgccgcagcccgtcgcctcctgctccagcctccgccaggactgtcctgtgcgcccatcagggtgt

SEQ ID NO: 15072 - DNA, 31 bp, Homo sapiens
  chr7:129844189-129844220
  hypo
tttatttgttttgagacggagtcttgctgtc

SEQ ID NO: 15073 - DNA, 31 bp, Homo sapiens
  chr7:129851271-129851302
  hypo
tacaggcatgagccaccgtgtctggccagaa

SEQ ID NO: 15074 - DNA, 31 bp, Homo sapiens
  chr7:129851309-129851340
  hypo
tcttaaaagtgaactccgctttcaagatttt

SEQ ID NO: 15075 - DNA, 31 bp, Homo sapiens
  chr7:129861967-129861998
  hypo
tggcgatgtccagctacgttaagtatcacga

SEQ ID NO: 15076 - DNA, 31 bp, Homo sapiens
  chr7:129937094-129937125
  hypo
ccattctgtcttacatcggtccctttttttc

SEQ ID NO: 15077 - DNA, 31 bp, Homo sapiens
  chr7:131329430-131329461
  hypo
cgcttagaacctggcccgatgcttctccatc

SEQ ID NO: 15078 - DNA, 36 bp, Homo sapiens; identical to SEQ ID NO: 3170
  chr7:134143227-134143263
  hypo

SEQ ID NO: 15079 - DNA, 321 bp, Homo sapiens; identical to SEQ ID NO: 3171
  chr7:134143265-134143586
  hypo

SEQ ID NO: 15080 - DNA, 52 bp, Homo sapiens; identical to SEQ ID NO: 3172
  chr7:134143700-134143752
  hypo

SEQ ID NO: 15081 - DNA, 308 bp, Homo sapiens; identical to SEQ ID NO: 3173
  chr7:134143767-134144075
  hypo

SEQ ID NO: 15082 - DNA, 43 bp, Homo sapiens; identical to SEQ ID NO: 3174
  chr7:134144089-134144132
  hypo

SEQ ID NO: 15083 - DNA, 55 bp, Homo sapiens
  chr7:134853336-134853391
  hypo
agtgggtgcctgtcctcgagggttaacccgctttgcctcccgcccacagcccctc

SEQ ID NO: 15084 - DNA, 31 bp, Homo sapiens
  chr7:134853415-134853446
  hypo
atcagactgaaacacccgcccatcttgctgt

SEQ ID NO: 15085 - DNA, 31 bp, Homo sapiens
  chr7:134853490-134853521
  hypo
ctccacttgccagattcgcaggagtcttctg

SEQ ID NO: 15086 - DNA, 31 bp, Homo sapiens
  chr7:134862793-134862824
  hypo
ccaaacctttcactcacggcaaagccattgt

SEQ ID NO: 15087 - DNA, 31 bp, Homo sapiens
  chr7:134881010-134881041
  hypo
gtggctccactggctccgtgtggagctctgg

SEQ ID NO: 15088 - DNA, 40 bp, Homo sapiens
  chr7:134898275-134898315
  hypo
cagcctggtcgacagagcgagactccgtctcaaaaaaaaa

SEQ ID NO: 15089 - DNA, 44 bp, Homo sapiens
  chr7:134918564-134918608
  hypo
gacccagacaggaaccgcgatccccactccggcgcacgaagccg

SEQ ID NO: 15090 - DNA, 35 bp, Homo sapiens
  chr7:134918618-134918653
  hypo
gtcccgggagtggggacgtcgcgtgcaccgttggc

SEQ ID NO: 15091 - DNA, 31 bp, Homo sapiens
  chr7:135125374-135125405
  hypo
gtagaaaactgcaggccgggtgcagtggctc

SEQ ID NO: 15092 - DNA, 31 bp, Homo sapiens
  chr7:135247629-135247660
  hypo
atgatcttgccaaacccgttttctgtactgc

SEQ ID NO: 15093 - DNA, 31 bp, Homo sapiens
  chr7:135495522-135495553
  hypo
gttagaactctcctatcgttttagagcagcg

SEQ ID NO: 15094 - DNA, 31 bp, Homo sapiens
  chr7:137664094-137664125
  hypo
taaagcacagcaagggcgggtcatcaggcca

SEQ ID NO: 15095 - DNA, 31 bp, Homo sapiens
  chr7:138094770-138094801
  hypo
ctttctgtagaaagaacgcttatggtgtaaa

SEQ ID NO: 15096 - DNA, 31 bp, Homo sapiens
  chr7:138122332-138122363
  hypo
attttaatctttaaaccgtaagaatgtgtta

SEQ ID NO: 15097 - DNA, 31 bp, Homo sapiens
  chr7:138125640-138125671
  hypo
tctcctcccccatggacgctgtgacagaagc

SEQ ID NO: 15098 - DNA, 31 bp, Homo sapiens
  chr7:138127125-138127156
  hypo
gaggtccagaggggtccgtggccccttgctg

SEQ ID NO: 15099 - DNA, 25 bp, Homo sapiens
  chr7:138397736-138397761
  hypo
caggagtaaagacatgcggccgggc

SEQ ID NO: 15100 - DNA, 31 bp, Homo sapiens
  chr7:138487654-138487685
  hypo
ctgcccacaagcagcccggtgctgccgcaca

SEQ ID NO: 15101 - DNA, 39 bp, Homo sapiens
  chr7:138636037-138636076
  hypo
gacacttccctccacccgtgtcttcgcctctcccacttc

SEQ ID NO: 15102 - DNA, 31 bp, Homo sapiens
  chr7:139112526-139112557
  hypo
ctacatagacgatgcccgatgaatgtggaat

SEQ ID NO: 15103 - DNA, 92 bp, Homo sapiens
  chr7:139257982-139258074
  hypo
aggtgggcagcggcagcggctgcagccagatgcgggtgcacagtgccgtggctggggctgttgtgcgggaaggagtacggagcctgggccat

SEQ ID NO: 15104 - DNA, 38 bp, Homo sapiens; identical to SEQ ID NO: 3175
  chr7:139478236-139478274
  hypo

SEQ ID NO: 15105 - DNA, 77 bp, Homo sapiens; identical to SEQ ID NO: 3176
  chr7:139478356-139478433
  hypo

SEQ ID NO: 15106 - DNA, 31 bp, Homo sapiens
  chr7:139690718-139690749
  hypo
cccgacggtgcaggcacgggggcacagaggc

SEQ ID NO: 15107 - DNA, 53 bp, Homo sapiens
  chr7:139717470-139717523
  hypo
gttcacggctgaggcccggcagcagcaccggcccttcacgtacctgcccttcg

SEQ ID NO: 15108 - DNA, 31 bp, Homo sapiens
  chr7:139763700-139763731
  hypo
ctgtttaacaagcatgcgttagagctccgtg

SEQ ID NO: 15109 - DNA, 31 bp, Homo sapiens
  chr7:139763756-139763787
  hypo
atgatgtggtggtaaacgagaaaagatggct

SEQ ID NO: 15110 - DNA, 17 bp, Homo sapiens
  chr7:140026927-140026944
  hypo
agcgagattctgtctca

SEQ ID NO: 15111 - DNA, 31 bp, Homo sapiens
  chr7:140027171-140027202
  hypo
tattaacatcttcattcgtcattctaggaca

SEQ ID NO: 15112 - DNA, 31 bp, Homo sapiens; identical to SEQ ID NO: 3177
  chr7:140098302-140098333
  hypo

SEQ ID NO: 15113 - DNA, 69 bp, Homo sapiens; identical to SEQ ID NO: 3178
  chr7:140098372-140098441
  hypo

SEQ ID NO: 15114 - DNA, 31 bp, Homo sapiens
  chr7:140156477-140156508
  hypo
agcactcctccacttgcgaatgcacttgaga

SEQ ID NO: 15115 - DNA, 39 bp, Homo sapiens
  chr7:140156523-140156562
  hypo
cagttggagaggatcccgaagcggcgctcactggggttg

SEQ ID NO: 15116 - DNA, 38 bp, Homo sapiens
  chr7:140156597-140156635
  hypo
caccatgtccttgctgcgctgcacggcaaatgagagct

SEQ ID NO: 15117 - DNA, 31 bp, Homo sapiens
  chr7:140156647-140156678
  hypo
catgggcctcaatgcacgactagagaaggtg

SEQ ID NO: 15118 - DNA, 20 bp, Homo sapiens
  chr7:140176252-140176272
  hypo
cagagcgacactccatctca

SEQ ID NO: 15119 - DNA, 43 bp, Homo sapiens
  chr7:140180261-140180304
  hypo
aaacctttgtactggccgggcgcggtggctcacgcctgtaatc

SEQ ID NO: 15120 - DNA, 70 bp, Homo sapiens
  chr7:140205261-140205331
  hypo
gggcaagttggaaggccgtcagagctaggaaagggtagcggtgacattggctcctcgagaaagcagcagg

SEQ ID NO: 15121 - DNA, 31 bp, Homo sapiens
  chr7:140205348-140205379
  hypo
gtctgtccagaggtcccgggaatccaggagt

SEQ ID NO: 15122 - DNA, 78 bp, Homo sapiens
  chr7:140217362-140217440
  hypo
ctgcctcagctgtgttcggggcttttcctgcctccccgctgtccctgctgtccccactgtccccgctgcaggacagct

SEQ ID NO: 15123 - DNA, 31 bp, Homo sapiens
  chr7:140221610-140221641
  hypo
ggagctctagctgactcggccccaacagaga

SEQ ID NO: 15124 - DNA, 61 bp, Homo sapiens
  chr7:140221652-140221713
  hypo
acctttggcatcctgccggcgcagctcccgctcctggatgaagccccgaaacatctgagtc

SEQ ID NO: 15125 - DNA, 64 bp, Homo sapiens
  chr7:140221827-140221891
  hypo
tgtcccacaatctccacgaagaagcggacaaaggcttcagacaccacctcgttcaaggggctgg

SEQ ID NO: 15126 - DNA, 31 bp, Homo sapiens
  chr7:140255213-140255244
  hypo
caggcatgagccaccccgccaccacaccggg

SEQ ID NO: 15127 - DNA, 31 bp, Homo sapiens
  chr7:143013313-143013344
  hypo
atcccggtcacagcagcgtgggggtgaacaa

SEQ ID NO: 15128 - DNA, 31 bp, Homo sapiens
  chr7:143013387-143013418
  hypo
aacactgcaccagctacggactgccctctga

SEQ ID NO: 15129 - DNA, 31 bp, Homo sapiens
  chr7:143013427-143013458
  hypo
cctccagcacaggctccggaaggatgcaggc

SEQ ID NO: 15130 - DNA, 31 bp, Homo sapiens
  chr7:143018532-143018563
  hypo
tcctcatcctcttcagcgccctcttctgcca

SEQ ID NO: 15131 - DNA, 58 bp, Homo sapiens
  chr7:143096712-143096770
  hypo
ttcctcaggttctcaccgcctccgttcttaccaacacatgcttcgccactgccacctt

SEQ ID NO: 15132 - DNA, 80 bp, Homo sapiens
  chr7:143097072-143097152
  hypo
tccacattcagcttcacggagccagacacaaggtctcgaatggtgaagctctggtctgcagccaccgtggttacctgggt

SEQ ID NO: 15133 - DNA, 31 bp, Homo sapiens
  chr7:148481291-148481322
  hypo
aatgcttaaacataatcgtccttgccgttga

SEQ ID NO: 15134 - DNA, 24 bp, Homo sapiens
  chr7:148692792-148692816
  hypo
cgccgcgcccggcctcagttggga

SEQ ID NO: 15135 - DNA, 31 bp, Homo sapiens
  chr7:148692905-148692936
  hypo
gagcagcacaggcccccgctttagctggttt

SEQ ID NO: 15136 - DNA, 31 bp, Homo sapiens
  chr7:148703453-148703484
  hypo
acaggaagggttatcacgggctgggctgtgt

SEQ ID NO: 15137 - DNA, 31 bp, Homo sapiens
  chr7:148703648-148703679
  hypo
tgagcccaagggtttccgtggggatgggata

SEQ ID NO: 15138 - DNA, 31 bp, Homo sapiens
  chr7:148759940-148759971
  hypo
tgtgagccactgcacccggcccatatgtctc

SEQ ID NO: 15139 - DNA, 19 bp, Homo sapiens
  chr7:148819013-148819032
  hypo
ttgtttttttttgagacgg

SEQ ID NO: 15140 - DNA, 47 bp, Homo sapiens
  chr7:148846176-148846223
  hypo
cttgagtccaggagttcgaggcagtccacaccgcgtctctaaaataa

SEQ ID NO: 15141 - DNA, 31 bp, Homo sapiens
  chr7:148884130-148884161
  hypo
gataatacctagtttacgaaggtgttgtgaa

SEQ ID NO: 15142 - DNA, 34 bp, Homo sapiens
  chr7:148901697-148901731
  hypo
caagaaaggagcttgccggcgcctacctgagatc

SEQ ID NO: 15143 - DNA, 72 bp, Homo sapiens
  chr7:148921570-148921642
  hypo
cctgctcaagcaccagcgcatccacacgggcgagcgcccctacacgtgcggcgagtgcggcaagagcttccg

SEQ ID NO: 15144 - DNA, 31 bp, Homo sapiens; identical to SEQ ID NO: 3180
  chr7:148936685-148936716
  hypo

SEQ ID NO: 15145 - DNA, 49 bp, Homo sapiens
  chr7:148992354-148992403
  hypo
tgtgagagggactcctcgaccgatgagccgcccacgggcctcaggggtg

SEQ ID NO: 15146 - DNA, 52 bp, Homo sapiens
  chr7:149005004-149005056
  hypo
gcggagcagccctttccgccccgctcccagagcactgcggcctcctcctcac

SEQ ID NO: 15147 - DNA, 45 bp, Homo sapiens
  chr7:149005138-149005183
  hypo
ttttgtgtggtgtgtgcgtctcagccttcacggagcattcctaac

SEQ ID NO: 15148 - DNA, 31 bp, Homo sapiens
  chr7:149153083-149153114
  hypo
cgacagaggtgatgagcgttggttctccatg

SEQ ID NO: 15149 - DNA, 31 bp, Homo sapiens
  chr7:149315325-149315356
  hypo
caaaagtatctgtcctcggccatctttacat

SEQ ID NO: 15150 - DNA, 91 bp, Homo sapiens; identical to SEQ ID NO: 3181
  chr7:149411636-149411727
  hypo

SEQ ID NO: 15151 - DNA, 161 bp, Homo sapiens; identical to SEQ ID NO: 3182
  chr7:149411834-149411995
  hypo

SEQ ID NO: 15152 - DNA, 241 bp, Homo sapiens; identical to SEQ ID NO: 3183
  chr7:149412024-149412265
  hypo

SEQ ID NO: 15153 - DNA, 53 bp, Homo sapiens; identical to SEQ ID NO: 3184
  chr7:149412273-149412326
  hypo

SEQ ID NO: 15154 - DNA, 97 bp, Homo sapiens
  chr7:149427376-149427473
  hypo
tctgaaggagaagacccgaggccagagcctgatctctggaagccgctcccccagggtgagcctgtgcggagagggaggatagcgggatgtgtgccag

SEQ ID NO: 15155 - DNA, 31 bp, Homo sapiens
  chr7:150049532-150049563
  hypo
taccagaatgtcttatcgttgaaattatttt

SEQ ID NO: 15156 - DNA, 19 bp, Homo sapiens
  chr7:150049603-150049622
  hypo
ggtttggtttttgagacgg

SEQ ID NO: 15157 - DNA, 124 bp, Homo sapiens
  chr7:150068770-150068894
  hypo
tcccaaatgcgagagacgcttctggcgacgaaagcagcttcgagctcatctgcggcggtgccaccctcccgccccggaggcccggcccttcatatgcggcaactgtggccggagctttgcccag

SEQ ID NO: 15158 - DNA, 123 bp, Homo sapiens
  chr7:150068902-150069025
  hypo
gctagttgcccacaagcgggtgcacgtagctgaggccctggaggaggccgcagccaaggctctggggccccggcccaggggccgccccgcggtgaccgccccccggcccggtggagatgccgt

SEQ ID NO: 15159 - DNA, 31 bp, Homo sapiens
  chr7:150069127-150069158
  hypo
ccccgagtgcgggaagcgctttaccaataag

SEQ ID NO: 15160 - DNA, 34 bp, Homo sapiens
  chr7:150069347-150069381
  hypo
gcggccgagcccaccccggcggtacctctgaaac

SEQ ID NO: 15161 - DNA, 59 bp, Homo sapiens
  chr7:150069447-150069506
  hypo
ccctctacagctgcgacgactgcggcaggagcttccggctggagcgcttcctgcgggcc

SEQ ID NO: 15162 - DNA, 63 bp, Homo sapiens
  chr7:150069580-150069643
  hypo
cctggtggcgcactcgcgcgtgcactccggcgagcggcccttcgcctgcgaggagtgcggccg

SEQ ID NO: 15163 - DNA, 67 bp, Homo sapiens
  chr7:150081382-150081449
  hypo
cactggtgggagatggcgcatctggcccttgatgcctgtcttccagccggggcgctttgctgggcag

SEQ ID NO: 15164 - DNA, 54 bp, Homo sapiens
  chr7:150105547-150105601
  hypo
ccttctctggcccatccggcctagagcaggtgagacctgcggggctggccagag

SEQ ID NO: 15165 - DNA, 31 bp, Homo sapiens
  chr7:150699034-150699065
  hypo
gaaggcttttgatccccgggtagggctgagc

SEQ ID NO: 15166 - DNA, 56 bp, Homo sapiens
  chr7:150720587-150720643
  hypo
gctgtagatgtggctgcgtgtcaaggaacaagcctgaggcacggggggcctctcct

SEQ ID NO: 15167 - DNA, 39 bp, Homo sapiens
  chr7:150720669-150720708
  hypo
agtctcccacccatgacgccctcacggagtctccctgcc

SEQ ID NO: 15168 - DNA, 31 bp, Homo sapiens
  chr7:150720745-150720776
  hypo
acctctgcaggcctagcgcaaaggatatctt

SEQ ID NO: 15169 - DNA, 38 bp, Homo sapiens
  chr7:150753964-150754002
  hypo
accggcaaggagcacccgcctcccgcacacctgacgat

SEQ ID NO: 15170 - DNA, 71 bp, Homo sapiens
  chr7:150758925-150758996
  hypo
ggaggatccccagcagcgcagcctgcgcgtggtggctcctgccctcccagggctctcgatggtgatcaggc

SEQ ID NO: 15171 - DNA, 31 bp, Homo sapiens
  chr7:150773893-150773924
  hypo
tgggactccagttcctcgaagggtagctgtg

SEQ ID NO: 15172 - DNA, 48 bp, Homo sapiens
  chr7:150774017-150774065
  hypo
catcaggcctaggtgccgctccctcagggccctcgagcccagcagcac

SEQ ID NO: 15173 - DNA, 51 bp, Homo sapiens
  chr7:150774592-150774643
  hypo
ccagttttatggtggccgagagctccttagctttggcgcttcatggtccct

SEQ ID NO: 15174 - DNA, 41 bp, Homo sapiens
  chr7:150774703-150774744
  hypo
ccacctgtacttgcagcgggcacggtcggtgatgagaggct

SEQ ID NO: 15175 - DNA, 103 bp, Homo sapiens
  chr7:150774754-150774857
  hypo
gggcacttgctgccttcggggaaggcggggaccccggtatcctgggagctccagctccacggccgtgtccagcagggagaggtagcgacgcacaatcagagca

SEQ ID NO: 15176 - DNA, 134 bp, Homo sapiens; identical to SEQ ID NO: 3186
  chr7:150784072-150784206
  hypo

SEQ ID NO: 15177 - DNA, 148 bp, Homo sapiens; identical to SEQ ID NO: 3188
  chr7:150784689-150784837
  hypo

SEQ ID NO: 15178 - DNA, 31 bp, Homo sapiens
  chr7:150811427-150811458
  hypo
agaatgagaaatggcccgcttttctccaaaa

SEQ ID NO: 15179 - DNA, 31 bp, Homo sapiens
  chr7:150811491-150811522
  hypo
atttagttggcctgctcgtaatgacagctcc

SEQ ID NO: 15180 - DNA, 31 bp, Homo sapiens
  chr7:150811558-150811589
  hypo
tggaatttcctgttttcgagggctcccaggg

SEQ ID NO: 15181 - DNA, 55 bp, Homo sapiens
  chr7:150812865-150812920
  hypo
tggcgtctggggtcttcggcagtggccgaggaggacaggccggagggggagctct

SEQ ID NO: 15182 - DNA, 31 bp, Homo sapiens
  chr7:150813052-150813083
  hypo
ctgctgtggacctggtcgtcataactgctct

SEQ ID NO: 15183 - DNA, 80 bp, Homo sapiens
  chr7:150813151-150813231
  hypo
gttcccagagctagcccgagcacccatgtggaacctggaggtgacggagatgggggcctggctgtcggagggctctgggt

SEQ ID NO: 15184 - DNA, 31 bp, Homo sapiens
  chr7:150813272-150813303
  hypo
aagggagcccaggaggcggcctccctgctaa

SEQ ID NO: 15185 - DNA, 31 bp, Homo sapiens
  chr7:150813307-150813338
  hypo
gagcttagagaggaggcgggtggggtagatg

SEQ ID NO: 15186 - DNA, 34 bp, Homo sapiens; identical to SEQ ID NO: 3189
  chr7:150869803-150869837
  hypo

SEQ ID NO: 15187 - DNA, 48 bp, Homo sapiens; identical to SEQ ID NO: 3190
  chr7:150948762-150948810
  hypo

SEQ ID NO: 15188 - DNA, 25 bp, Homo sapiens
  chr7:151035057-151035082
  hypo
agcaagactccgcctcaaaaaaaaa

SEQ ID NO: 15189 - DNA, 35 bp, Homo sapiens; identical to SEQ ID NO: 3191
  chr7:151038573-151038608
  hypo

SEQ ID NO: 15190 - DNA, 65 bp, Homo sapiens; identical to SEQ ID NO: 3192
  chr7:151038609-151038674
  hypo

SEQ ID NO: 15191 - DNA, 282 bp, Homo sapiens; identical to SEQ ID NO: 3193
  chr7:151038681-151038963
  hypo

SEQ ID NO: 15192 - DNA, 31 bp, Homo sapiens
  chr7:151073545-151073576
  hypo
cttccaggttgctctacgctcacattgcaca

SEQ ID NO: 15193 - DNA, 31 bp, Homo sapiens
  chr7:151073690-151073721
  hypo
gatgctgtgacccctgcgctctcccctagtt

SEQ ID NO: 15194 - DNA, 52 bp, Homo sapiens
  chr7:151074138-151074190
  hypo
ctagtgcctcaacagacgaagacatggagacagaggccgtcaatgagatact

SEQ ID NO: 15195 - DNA, 35 bp, Homo sapiens
  chr7:151074642-151074677
  hypo
cctgggaagggtgtcccgaccgcttcctctccagc

SEQ ID NO: 15196 - DNA, 39 bp, Homo sapiens
  chr7:151129033-151129072
  hypo
ggggtccctgggagtccgggaaagcgccctggatcatcc

SEQ ID NO: 15197 - DNA, 34 bp, Homo sapiens
  chr7:151134319-151134353
  hypo
aaccacccagcccaggcgtcgggggagggtcctc

SEQ ID NO: 15198 - DNA, 65 bp, Homo sapiens; identical to SEQ ID NO: 3194
  chr7:151217152-151217217
  hypo

SEQ ID NO: 15199 - DNA, 31 bp, Homo sapiens
  chr7:151361418-151361449
  hypo
ccatttaacagaggcccgggtacagtgggat

SEQ ID NO: 15200 - DNA, 31 bp, Homo sapiens
  chr7:151474643-151474674
  hypo
taccccggctttccttcgccttcctccatga

SEQ ID NO: 15201 - DNA, 31 bp, Homo sapiens
  chr7:151476538-151476569
  hypo
atgatgtagagggaggcggagggtgatggtt

SEQ ID NO: 15202 - DNA, 64 bp, Homo sapiens
  chr7:151476622-151476686
  hypo
cctttgggcacccttccgatcatcaggttccctgtgctgctctccgccccgctcagaaagcctg

SEQ ID NO: 15203 - DNA, 36 bp, Homo sapiens
  chr7:151496735-151496771
  hypo
gtgtcctccagactgacgggcgcggacactctgcat

SEQ ID NO: 15204 - DNA, 27 bp, Homo sapiens
  chr7:151528530-151528557
  hypo
aatatttcgttacgtgaaagaagtcat

SEQ ID NO: 15205 - DNA, 121 bp, Homo sapiens; identical to SEQ ID NO: 3196
  chr7:151573023-151573144
  hypo

SEQ ID NO: 15206 - DNA, 31 bp, Homo sapiens
  chr7:151712355-151712386
  hypo
ctggatctattccctccgttcccacctccag

SEQ ID NO: 15207 - DNA, 31 bp, Homo sapiens
  chr7:151712411-151712442
  hypo
tagcttctccttgccccgtccccatgtgcaa

SEQ ID NO: 15208 - DNA, 211 bp, Homo sapiens; identical to SEQ ID NO: 3198
  chr7:151722792-151723003
  hypo

SEQ ID NO: 15209 - DNA, 40 bp, Homo sapiens; identical to SEQ ID NO: 3199
  chr7:151723103-151723143
  hypo

SEQ ID NO: 15210 - DNA, 39 bp, Homo sapiens; identical to SEQ ID NO: 3200
  chr7:151723167-151723206
  hypo

SEQ ID NO: 15211 - DNA, 91 bp, Homo sapiens
  chr7:151802390-151802481
  hypo
cataagaaatacaaagcgtgaggggttgattcgagggagaatgattggcgcggcccacgcgacaggtatcacttctcgttagctttgctct

SEQ ID NO: 15212 - DNA, 41 bp, Homo sapiens
  chr7:151802488-151802529
  hypo
ttggatgacaagggctcgagcctcagcgcctgtcctgattc

SEQ ID NO: 15213 - DNA, 31 bp, Homo sapiens
  chr7:151802543-151802574
  hypo
agagtagtgtttcaaacggacattgccagca

SEQ ID NO: 15214 - DNA, 45 bp, Homo sapiens
  chr7:152243972-152244017
  hypo
gcgtgacccaccgcacctggctatttcttacgattaatgagccca

SEQ ID NO: 15215 - DNA, 31 bp, Homo sapiens
  chr7:152252877-152252908
  hypo
tgaactcctgacctcacgatccacctgtaaa

SEQ ID NO: 15216 - DNA, 31 bp, Homo sapiens
  chr7:152397925-152397956
  hypo
tgtatattaaaatacacgcagagcctggcat

SEQ ID NO: 15217 - DNA, 31 bp, Homo sapiens
  chr7:152543181-152543212
  hypo
tcccagtgagccccagcgcctgggctgcagt

SEQ ID NO: 15218 - DNA, 35 bp, Homo sapiens
  chr7:152543616-152543651
  hypo
gtgtagtgagccccagcgcccgggctgcagtctgt

SEQ ID NO: 15219 - DNA, 31 bp, Homo sapiens
  chr7:152553622-152553653
  hypo
atctcacagtgggcaccgtcattcccacctc

SEQ ID NO: 15220 - DNA, 31 bp, Homo sapiens
  chr7:152555645-152555676
  hypo
ggcaggcaggtgtagacggggtttctctgct

SEQ ID NO: 15221 - DNA, 31 bp, Homo sapiens
  chr7:152555677-152555708
  hypo
ctaacatgagggaccacggactccaggtagg

SEQ ID NO: 15222 - DNA, 45 bp, Homo sapiens
  chr7:152555732-152555777
  hypo
ttgggaggaatggaggcgtctgaggactggcggccctgggcttca

SEQ ID NO: 15223 - DNA, 31 bp, Homo sapiens
  chr7:152555788-152555819
  hypo
ttgtggtcctgaagaacgatactgattaaga

SEQ ID NO: 15224 - DNA, 75 bp, Homo sapiens
  chr7:152562696-152562771
  hypo
gaccagatcgcagagtcggggccaccgcacctccagaccagaccgcagggttggggccaccgcacctccagacca

SEQ ID NO: 15225 - DNA, 31 bp, Homo sapiens
  chr7:152562880-152562911
  hypo
catctccagaccagatcgcagagtcagggag

SEQ ID NO: 15226 - DNA, 39 bp, Homo sapiens
  chr7:152564407-152564446
  hypo
gagaagagggaagctccggggtgccgagggggtgctgta

SEQ ID NO: 15227 - DNA, 31 bp, Homo sapiens
  chr7:152566125-152566156
  hypo
gggcaagtgacccagtcgctgtaactctaac

SEQ ID NO: 15228 - DNA, 31 bp, Homo sapiens
  chr7:152567398-152567429
  hypo
cggaccatgcagtagacggttagccgtgccc

SEQ ID NO: 15229 - DNA, 31 bp, Homo sapiens
  chr7:154468091-154468122
  hypo
tgctacacaggtgttccggctacagccttac

SEQ ID NO: 15230 - DNA, 31 bp, Homo sapiens
  chr7:155077345-155077376
  hypo
tcctcttcatcgctttcgcactccaacccca

SEQ ID NO: 15231 - DNA, 31 bp, Homo sapiens
  chr7:155077382-155077413
  hypo
tatggaacataggtcccggcaggacctaatg

SEQ ID NO: 15232 - DNA, 53 bp, Homo sapiens
  chr7:155077414-155077467
  hypo
caaggaagaaccaggccgatgtcatttctgcctccttccgtattttttttact

SEQ ID NO: 15233 - DNA, 31 bp, Homo sapiens
  chr7:155077519-155077550
  hypo
cagttctgtggcattacgcacactcgcatcg

SEQ ID NO: 15234 - DNA, 31 bp, Homo sapiens; identical to SEQ ID NO: 3202
  chr7:155244946-155244977
  hypo

SEQ ID NO: 15235 - DNA, 31 bp, Homo sapiens
  chr7:155352343-155352374
  hypo
tctcactgtgtcctcccgtgatgggaggggc

SEQ ID NO: 15236 - DNA, 31 bp, Homo sapiens
  chr7:155385398-155385429
  hypo
tggagtgcttttctcccgctcaattggaatt

SEQ ID NO: 15237 - DNA, 31 bp, Homo sapiens
  chr7:155385446-155385477
  hypo
ctggcctccctctctgcgggccctggttttc

SEQ ID NO: 15238 - DNA, 83 bp, Homo sapiens
  chr7:155385525-155385608
  hypo
gaagctaccaggaacacgcttgcgctcaggtttgttaagaacgacttcactggttctccagtgaggcccgggggatggggtat

SEQ ID NO: 15239 - DNA, 36 bp, Homo sapiens
  chr7:155436111-155436147
  hypo
ggattacaggcgtgagccaccgcgcccggccagcat

SEQ ID NO: 15240 - DNA, 31 bp, Homo sapiens
  chr7:155469875-155469906
  hypo
ttatatggtcacctaacggaaacttcatttt

SEQ ID NO: 15241 - DNA, 53 bp, Homo sapiens
  chr7:155530781-155530834
  hypo
tctttttctggaacagcgaagtccccctccaccaccaccgcctcctacccttc

SEQ ID NO: 15242 - DNA, 40 bp, Homo sapiens
  chr7:155530919-155530959
  hypo
agtgttcccaagagagcggcccgtacgaccagccttgcag

SEQ ID NO: 15243 - DNA, 73 bp, Homo sapiens
  chr7:155559942-155560015
  hypo
ctgtaggctgacccagcgaagaagctacctgcttgttcagtccgatttctggcctccccgtcaggtgccacct

SEQ ID NO: 15244 - DNA, 45 bp, Homo sapiens
  chr7:155560024-155560069
  hypo
attgttgccattgccacgcaccgtgcgtcccgtggtgggatctgg

SEQ ID NO: 15245 - DNA, 103 bp, Homo sapiens; identical to SEQ ID NO: 3203
  chr7:155580714-155580817
  hypo

SEQ ID NO: 15246 - DNA, 106 bp, Homo sapiens; identical to SEQ ID NO: 3204
  chr7:155580820-155580926
  hypo

SEQ ID NO: 15247 - DNA, 65 bp, Homo sapiens
  chr7:155581226-155581291
  hypo
ccaaaaccacacccagcgaagtaacaaagcgacaatcggccttggtcctgcgagggcagggaggg

SEQ ID NO: 15248 - DNA, 109 bp, Homo sapiens
  chr7:155581329-155581438
  hypo
gggtccactgcccagccggggatgcaaggacggccatggggctccagcacagggaccgggccccgcgggctttgagtgacgcggtaggccaggacgagccccatccaca

SEQ ID NO: 15249 - DNA, 92 bp, Homo sapiens
  chr7:155581439-155581531
  hypo
ttggacaatgagcaaccgcagccggccgcgcagcctgggggccgtctccctctccagcccccgtgtcctctggtccacgactggctcttgcc

SEQ ID NO: 15250 - DNA, 43 bp, Homo sapiens
  chr7:155581764-155581807
  hypo
gttgtgtgggtccccacgtggtcaccagcgtcctttcaggaca

SEQ ID NO: 15251 - DNA, 58 bp, Homo sapiens
  chr7:155581819-155581877
  hypo
gcaggaccagggcttccgcctgccgcattcatctgccccccttcggctgtgccaggtg

SEQ ID NO: 15252 - DNA, 31 bp, Homo sapiens
  chr7:155582169-155582200
  hypo
tgaggagaagctgtgccggagcctgcaggac

SEQ ID NO: 15253 - DNA, 31 bp, Homo sapiens
  chr7:155582210-155582241
  hypo
tcagggctctcacacccgctgggcggccttt

SEQ ID NO: 15254 - DNA, 64 bp, Homo sapiens
  chr7:155582276-155582340
  hypo
ttgtgcgtgtttaacccgcccagagactggtgctgccgcatttgttcatcggtttgttttgttt

SEQ ID NO: 15255 - DNA, 31 bp, Homo sapiens
  chr7:155613134-155613165
  hypo
gaagacgtcccaggagcgtgtcagagaagga

SEQ ID NO: 15256 - DNA, 23 bp, Homo sapiens
  chr7:155948644-155948667
  hypo
ggtgtagacgtagaacaagtggg

SEQ ID NO: 15257 - DNA, 31 bp, Homo sapiens
  chr7:155948762-155948793
  hypo
gcagatgtagacatggcgcaggtgtagaccc

SEQ ID NO: 15258 - DNA, 31 bp, Homo sapiens
  chr7:156181998-156182029
  hypo
cagtgggcagcagccccggtgctctggctag

SEQ ID NO: 15259 - DNA, 31 bp, Homo sapiens
  chr7:156233573-156233604
  hypo
ccatccgagacaccgccgcttctcacctgcc

SEQ ID NO: 15260 - DNA, 31 bp, Homo sapiens
  chr7:156264382-156264413
  hypo
aaaagctgaaagctgacgtggaatcccggtt

SEQ ID NO: 15261 - DNA, 31 bp, Homo sapiens
  chr7:156289999-156290030
  hypo
acaaagaggaacttgccgagcacctccacgg

SEQ ID NO: 15262 - DNA, 31 bp, Homo sapiens
  chr7:156613329-156613360
  hypo
aaattgttgaatctggcgcctcctgcatcaa

SEQ ID NO: 15263 - DNA, 83 bp, Homo sapiens
  chr7:156613381-156613464
  hypo
aggcctctctggacttcgaagacaacacatttctcatttgcgtgtgttgctccagctggtttactgagcggcctgaaaagctg

SEQ ID NO: 15264 - DNA, 31 bp, Homo sapiens
  chr7:156613486-156613517
  hypo
aggagggaaggctctgcggcagctccaggct

SEQ ID NO: 15265 - DNA, 50 bp, Homo sapiens
  chr7:156733284-156733334
  hypo
atcggcagagctttcacgcccggccctggccacctcgccagccgcatgtc

SEQ ID NO: 15266 - DNA, 14 bp, Homo sapiens
  chr7:156744699-156744713
  hypo
ggttttgattttta

SEQ ID NO: 15267 - DNA, 31 bp, Homo sapiens
  chr7:156744822-156744853
  hypo
tgcagtaagttaaggccgagcaaaagcgcag

SEQ ID NO: 15268 - DNA, 146 bp, Homo sapiens
  chr7:156782594-156782740
  hypo
actctcgagggctcctcgtccactgtggcgagtgcagaggacgcggcctgggcagtgcctgcggggagaccgtgctggcctgggcttcccagtgagcggggctcctcaggcttcctgggccctcgtcctcccggactggtggcact

SEQ ID NO: 15269 - DNA, 31 bp, Homo sapiens
  chr7:156782751-156782782
  hypo
ggggggtggcaggcagcgggaaggcccaggt

SEQ ID NO: 15270 - DNA, 221 bp, Homo sapiens; identical to SEQ ID NO: 3211
  chr7:156802133-156802354
  hypo

SEQ ID NO: 15271 - DNA, 48 bp, Homo sapiens; identical to SEQ ID NO: 3212
  chr7:156803445-156803493
  hypo

SEQ ID NO: 15272 - DNA, 56 bp, Homo sapiens
  chr7:156832822-156832878
  hypo
caagcggacttgggagcgacggggtttgggcatctgggagacgggaactccttccc

SEQ ID NO: 15273 - DNA, 31 bp, Homo sapiens
  chr7:156832943-156832974
  hypo
cgctgctgggccggtccgggagcccacactg

SEQ ID NO: 15274 - DNA, 31 bp, Homo sapiens
  chr7:156918681-156918712
  hypo
tgaggagagaaccatccggagtcgccatcca

SEQ ID NO: 15275 - DNA, 39 bp, Homo sapiens
  chr7:157073423-157073462
  hypo
gggcacttctgccgggcggggggtcggtgtccaggtgct

SEQ ID NO: 15276 - DNA, 43 bp, Homo sapiens
  chr7:157085503-157085546
  hypo
caccctatcagggcagcgagggctggggcggacaggggagccg

SEQ ID NO: 15277 - DNA, 40 bp, Homo sapiens
  chr7:157106436-157106476
  hypo
ctctcgtgaactgccccgagttgtacgtgccctaaagtga

SEQ ID NO: 15278 - DNA, 72 bp, Homo sapiens; identical to SEQ ID NO: 3216
  chr7:157129175-157129247
  hypo

SEQ ID NO: 15279 - DNA, 31 bp, Homo sapiens
  chr7:157151169-157151200
  hypo
agacccatcccaccaccgtgatttgcccatc

SEQ ID NO: 15280 - DNA, 31 bp, Homo sapiens
  chr7:157151242-157151273
  hypo
cccattccaacaatctcgtaaaacatggtgg

SEQ ID NO: 15281 - DNA, 69 bp, Homo sapiens
  chr7:157151276-157151345
  hypo
actatgaagttctaggcgtgcagagacatgcctcacccgaggatattaaaaaggcgtaagtagttttat

SEQ ID NO: 15282 - DNA, 31 bp, Homo sapiens
  chr7:157255060-157255091
  hypo
gcatgacagtgggacacggggtctggggcga

SEQ ID NO: 15283 - DNA, 31 bp, Homo sapiens
  chr7:157260472-157260503
  hypo
tccaaggctgggggcacgggagcaagcgggt

SEQ ID NO: 15284 - DNA, 42 bp, Homo sapiens
  chr7:157263055-157263097
  hypo
ctgcgttgggtgtgtccgtgtgtccggcgctggcctgggttg

SEQ ID NO: 15285 - DNA, 99 bp, Homo sapiens
  chr7:157263202-157263301
  hypo
gtgtccgtgtgtccggcgctggcctgggttgggtgtgtccgtgtgtccggcgctggcctgggttgggtgtgtccgtgtgtccggcgctggcctgggttg

SEQ ID NO: 15286 - DNA, 34 bp, Homo sapiens
  chr7:157263327-157263361
  hypo
ctgtgttgggtgtgtccggcgctggcctgcattg

SEQ ID NO: 15287 - DNA, 18 bp, Homo sapiens
  chr7:157271528-157271546
  hypo
gggcgtgaaccaccgcgc

SEQ ID NO: 15288 - DNA, 31 bp, Homo sapiens
  chr7:157716856-157716887
  hypo
gacaggatgagggggcgcggccacaggcagg

SEQ ID NO: 15289 - DNA, 31 bp, Homo sapiens
  chr7:157722646-157722677
  hypo
cctggacctagacacccgtcccagctcagac

SEQ ID NO: 15290 - DNA, 51 bp, Homo sapiens
  chr7:157730125-157730176
  hypo
gatgtctggagcagatcgcatcagctactactaagccgctgttgtcaggca

SEQ ID NO: 15291 - DNA, 31 bp, Homo sapiens
  chr7:157776681-157776712
  hypo
gcatctcttcctgactcgcagggggcccgtg

SEQ ID NO: 15292 - DNA, 31 bp, Homo sapiens
  chr7:157776780-157776811
  hypo
tagccatggagacagccgggaacccagcagc

SEQ ID NO: 15293 - DNA, 31 bp, Homo sapiens
  chr7:157776870-157776901
  hypo
accttgtgtaaaccagcgtccctgcctgagt

SEQ ID NO: 15294 - DNA, 99 bp, Homo sapiens
  chr7:157776904-157777003
  hypo
cttcacctgaaaccaccgccccacgccaggctccacctccccacgccaggctccaccccccacgccaggctccaccccatcccacgccaggctccaccc

SEQ ID NO: 15295 - DNA, 31 bp, Homo sapiens
  chr7:157793806-157793837
  hypo
ggggctggggtttggccgcaggtggggtgca

SEQ ID NO: 15296 - DNA, 31 bp, Homo sapiens
  chr7:157868202-157868233
  hypo
caggtccagcaggagacgggcactgagcctg

SEQ ID NO: 15297 - DNA, 56 bp, Homo sapiens
  chr7:157980854-157980910
  hypo
ggaaggccgccacgctcgccccgcgatggggaaggccgccacgctcgccgcctgat

SEQ ID NO: 15298 - DNA, 34 bp, Homo sapiens
  chr7:157981409-157981443
  hypo
ggaaggccgccacgctcgccgccttgtatgggga

SEQ ID NO: 15299 - DNA, 87 bp, Homo sapiens
  chr7:158188490-158188577
  hypo
cgcgaggggcgaggggcgagggctcccggcctgcgccgccttggatcccaccagccccgaattcgggcagagcgccatggagggccc

SEQ ID NO: 15300 - DNA, 53 bp, Homo sapiens
  chr7:158188578-158188631
  hypo
gcctggagggggagctcggagcctgcagcaggtgaggtcgggctacagacttc

SEQ ID NO: 15301 - DNA, 31 bp, Homo sapiens
  chr7:158381341-158381372
  hypo
caggaccaccccctgccgggtccctgtcctg

SEQ ID NO: 15302 - DNA, 50 bp, Homo sapiens
  chr7:158659173-158659223
  hypo
ccccgagtatcctgggcgtcccctctctggtcactcgtgtcctgggttcc

SEQ ID NO: 15303 - DNA, 219 bp, Homo sapiens
  chr7:158766775-158766994
  hypo
caccccgcgctgtccccggcggtctggcctggcgtctggagctccgggagcgcctgtcctcccagggccgatgccagcgcccgccctccgcgttcccggcattgacagaatgtccaggcgcgcagggcccgtgggtggggcctgggcacccggccctgccctcgcgcaccctccagacccgccacttcttagatagagagcggccgcctccccgccctc

SEQ ID NO: 15304 - DNA, 31 bp, Homo sapiens
  chr7:158767021-158767052
  hypo
gctctgctgactcttccggaggattctggaa

SEQ ID NO: 15305 - DNA, 44 bp, Homo sapiens
  chr7:158767053-158767097
  hypo
gttccagagggtgtgccgccgaggccctgcgagagggcgttccc

SEQ ID NO: 15306 - DNA, 81 bp, Homo sapiens
  chr7:158767223-158767304
  hypo
ggggtggtgggagggacgggaaggcaaacgcgctgcctgctggggacggacgcgccttggggcagccggggaggccccgaa

SEQ ID NO: 15307 - DNA, 31 bp, Homo sapiens
  chr8:591504-591535
  hypo
ggttaatagcctgtatcgtaatgtatttcct

SEQ ID NO: 15308 - DNA, 31 bp, Homo sapiens
  chr8:592904-592935
  hypo
aggctgtggggctggacgggagactgcagcc

SEQ ID NO: 15309 - DNA, 40 bp, Homo sapiens
  chr8:593193-593233
  hypo
cgttaaacattgcatgcgattcctgcgagttctctggcat

SEQ ID NO: 15310 - DNA, 31 bp, Homo sapiens
  chr8:593252-593283
  hypo
ggggtcgcagcagggacgggaagctggccag

SEQ ID NO: 15311 - DNA, 82 bp, Homo sapiens
  chr8:644617-644699
  hypo
acagtcacaggcaccacgcagacaggagcaccacgaggggcctcacggcttgctcgtctgtgaatcacggtgaccatgtaac

SEQ ID NO: 15312 - DNA, 31 bp, Homo sapiens
  chr8:667864-667895
  hypo
aagacagtcccagggacgggggcaggccagg

SEQ ID NO: 15313 - DNA, 31 bp, Homo sapiens
  chr8:1731056-1731087
  hypo
tcctgtatcttcatacgcgtgtgtggatgca

SEQ ID NO: 15314 - DNA, 45 bp, Homo sapiens
  chr8:1759475-1759520
  hypo
ggtaacttagcggaggcgtgcagggcccaccgtttgtaccggctg

SEQ ID NO: 15315 - DNA, 31 bp, Homo sapiens
  chr8:1779412-1779443
  hypo
gagggacagtggcagccgtggagggacagtg

SEQ ID NO: 15316 - DNA, 31 bp, Homo sapiens
  chr8:1783329-1783360
  hypo
gcagggccatggaggccggaggagtggacga

SEQ ID NO: 15317 - DNA, 31 bp, Homo sapiens
  chr8:1789553-1789584
  hypo
aagggggtcagagaggcggatggaaagctgt

SEQ ID NO: 15318 - DNA, 43 bp, Homo sapiens
  chr8:1798700-1798743
  hypo
gggcgtggggcagctgcgtggacacagacggcaaatgctgagg

SEQ ID NO: 15319 - DNA, 31 bp, Homo sapiens
  chr8:1814164-1814195
  hypo
ttgcaaaggatgacaccgcagtccctgtgtg

SEQ ID NO: 15320 - DNA, 31 bp, Homo sapiens
  chr8:1814209-1814240
  hypo
ggcccatgtgaccacccgctgggggcagagc

SEQ ID NO: 15321 - DNA, 55 bp, Homo sapiens
  chr8:1826000-1826055
  hypo
tgaggctggcgagtcccgtgttactgatagagatggtgaacggatgcccgccata

SEQ ID NO: 15322 - DNA, 31 bp, Homo sapiens
  chr8:1842463-1842494
  hypo
catgatcgcaccactgcgctgcaccctggac

SEQ ID NO: 15323 - DNA, 49 bp, Homo sapiens
  chr8:1902077-1902126
  hypo
tgatttcctcccaggccgacctgacggtggcttccgtgcactcagattt

SEQ ID NO: 15324 - DNA, 31 bp, Homo sapiens
  chr8:1902230-1902261
  hypo
atccaaaaacaaaatgcgaaatgctccaatt

SEQ ID NO: 15325 - DNA, 12 bp, Homo sapiens
  chr8:1902265-1902277
  hypo
ttttttcttttt

SEQ ID NO: 15326 - DNA, 34 bp, Homo sapiens
  chr8:1926962-1926996
  hypo
cacataaaaaaggctacggcgatccccaagtctc

SEQ ID NO: 15327 - DNA, 31 bp, Homo sapiens
  chr8:3881023-3881054
  hypo
tctaattacaggcatacgcttggctctgtgc

SEQ ID NO: 15328 - DNA, 31 bp, Homo sapiens
  chr8:6322706-6322737
  hypo
atctgtttgagatattcggaaactcaatagc

SEQ ID NO: 15329 - DNA, 31 bp, Homo sapiens
  chr8:6323427-6323458
  hypo
actcaattttatctatcgatccatccatcca

SEQ ID NO: 15330 - DNA, 39 bp, Homo sapiens
  chr8:6361544-6361583
  hypo
ttctataagcaggggccgggcgcagtggctcacgcctgt

SEQ ID NO: 15331 - DNA, 75 bp, Homo sapiens
  chr8:6434437-6434512
  hypo
cagataaaagcaatggcgcctcctttgaaatctgagagacgcagggccctgcccattctgcggaattccttctcc

SEQ ID NO: 15332 - DNA, 74 bp, Homo sapiens
  chr8:6434529-6434603
  hypo
gaggccccctttgccacggaacctgaaattcctgccactggaattacgctctggacaagcggcaagatactcct

SEQ ID NO: 15333 - DNA, 47 bp, Homo sapiens
  chr8:6434653-6434700
  hypo
aacctgctctcagccccgggcaaagggaatctcgttaatccaggtgg

SEQ ID NO: 15334 - DNA, 31 bp, Homo sapiens
  chr8:6594590-6594621
  hypo
gtctggttatgggctacgagaatagcctccc

SEQ ID NO: 15335 - DNA, 17 bp, Homo sapiens
  chr8:6619645-6619662
  hypo
tccgtattaaaaaaaaa

SEQ ID NO: 15336 - DNA, 31 bp, Homo sapiens
  chr8:6636291-6636322
  hypo
atgtggactcactgctcgcaggccgccagcc

SEQ ID NO: 15337 - DNA, 31 bp, Homo sapiens
  chr8:6636483-6636514
  hypo
ctccttggggtctgtccgatgggaagaggcc

SEQ ID NO: 15338 - DNA, 31 bp, Homo sapiens; identical to SEQ ID NO: 3221
  chr8:8313040-8313071
  hypo

SEQ ID NO: 15339 - DNA, 31 bp, Homo sapiens
  chr8:8436500-8436531
  hypo
ccgtacccagcctggacgtttatattattgg

SEQ ID NO: 15340 - DNA, 31 bp, Homo sapiens
  chr8:8437500-8437531
  hypo
ccattatccatcttggcgagtaccacaaagg

SEQ ID NO: 15341 - DNA, 94 bp, Homo sapiens
  chr8:8456540-8456634
  hypo
gccaaatatactactacgactacgaccgttactactgctaataataataataacgactgctaatattcatatagaactacgccagatatttaac

SEQ ID NO: 15342 - DNA, 31 bp, Homo sapiens
  chr8:8456660-8456691
  hypo
ggaaagattggctgggcgtggtggctcatgt

SEQ ID NO: 15343 - DNA, 26 bp, Homo sapiens
  chr8:8624330-8624356
  hypo
gagggagactccgtctcaaaaaaaaa

SEQ ID NO: 15344 - DNA, 21 bp, Homo sapiens
  chr8:8644604-8644625
  hypo
ttttgagacagagtctcgctc

SEQ ID NO: 15345 - DNA, 49 bp, Homo sapiens
  chr8:8651863-8651912
  hypo
tgccagctatcctaaccgatccccccaaatctcccgcttccaatccact

SEQ ID NO: 15346 - DNA, 43 bp, Homo sapiens
  chr8:8651924-8651967
  hypo
tgaatgggaccttccccggagcctggcccggcctccacatgag

SEQ ID NO: 15347 - DNA, 60 bp, Homo sapiens
  chr8:8651999-8652059
  hypo
ctgtgggtgcttaaggcggtgaaggtgggggaacactgggcagctcgagcacaggcttca

SEQ ID NO: 15348 - DNA, 31 bp, Homo sapiens
  chr8:8669150-8669181
  hypo
gtctcctctgcagggacgtaagctccacaag

SEQ ID NO: 15349 - DNA, 69 bp, Homo sapiens
  chr8:8673404-8673473
  hypo
aaggaatacaagtgtccgttaaaaggtcggcacataaacaaattgtggcatattcgtacaatagactac

SEQ ID NO: 15350 - DNA, 40 bp, Homo sapiens
  chr8:8673494-8673534
  hypo
gagccatggatatatacgccaacatcgatgacctgggaat

SEQ ID NO: 15351 - DNA, 45 bp, Homo sapiens
  chr8:8680436-8680481
  hypo
tcaggacaggaggtaccgacaggctggtggcgggaagggagggta

SEQ ID NO: 15352 - DNA, 56 bp, Homo sapiens
  chr8:8680486-8680542
  hypo
gccaggcatgggatcccgcacagaggacacagacagaagaccgggaaggagagaca

SEQ ID NO: 15353 - DNA, 31 bp, Homo sapiens
  chr8:8680545-8680576
  hypo
ggacacaggacagtctcgaattctagtccat

SEQ ID NO: 15354 - DNA, 31 bp, Homo sapiens
  chr8:8681181-8681212
  hypo
acttccctaattctcccgtcttcagtctttg

SEQ ID NO: 15355 - DNA, 66 bp, Homo sapiens
  chr8:8681222-8681288
  hypo
tgaacccacaggtcaccgagaagagcatcacctgcgaaatttcaagacccacggtggctgtgctcc

SEQ ID NO: 15356 - DNA, 31 bp, Homo sapiens
  chr8:8682667-8682698
  hypo
ttaaagaaaagggttgcggtttttttgtttt

SEQ ID NO: 15357 - DNA, 31 bp, Homo sapiens
  chr8:8687219-8687250
  hypo
ttgagaaaggagattgcgtggggtatcctca

SEQ ID NO: 15358 - DNA, 30 bp, Homo sapiens
  chr8:8689405-8689435
  hypo
gctaccgcccccagccgtcaattgattttt

SEQ ID NO: 15359 - DNA, 49 bp, Homo sapiens
  chr8:8690236-8690285
  hypo
caagcgttcctcccacttcagcctcctgactcgccgagactacaggcac

SEQ ID NO: 15360 - DNA, 36 bp, Homo sapiens
  chr8:8690311-8690347
  hypo
acttttaattttttgtcgaggcgaggtctcttttag

SEQ ID NO: 15361 - DNA, 31 bp, Homo sapiens
  chr8:8690365-8690396
  hypo
tttacaaactattggtcgaattgtgtagtag

SEQ ID NO: 15362 - DNA, 31 bp, Homo sapiens
  chr8:8692862-8692893
  hypo
acactatcctgtcccacgggtcttgagcatc

SEQ ID NO: 15363 - DNA, 64 bp, Homo sapiens
  chr8:8692897-8692961
  hypo
tagatggtgggcatcccggagcagagttacgagatacccatcatgcagccgccatctcagtgac

SEQ ID NO: 15364 - DNA, 31 bp, Homo sapiens
  chr8:8693006-8693037
  hypo
tccctcattttcctcacgatgaagatgtttc

SEQ ID NO: 15365 - DNA, 20 bp, Homo sapiens
  chr8:8696336-8696356
  hypo
atccacgtaccttcaagctt

SEQ ID NO: 15366 - DNA, 31 bp, Homo sapiens
  chr8:8698201-8698232
  hypo
tccattagttagatgccgttggttcttagaa

SEQ ID NO: 15367 - DNA, 13 bp, Homo sapiens
  chr8:8712565-8712578
  hypo
tggtcctccctca

SEQ ID NO: 15368 - DNA, 44 bp, Homo sapiens
  chr8:8712642-8712686
  hypo
ttgttgagagaggtctcgccatgtcgcccaggctggtctcgaac

SEQ ID NO: 15369 - DNA, 31 bp, Homo sapiens
  chr8:8712745-8712776
  hypo
agccaccacactcagccgacatcctgtattt

SEQ ID NO: 15370 - DNA, 31 bp, Homo sapiens
  chr8:8712793-8712824
  hypo
attgtattaggacaagcggaaaacagatgaa

SEQ ID NO: 15371 - DNA, 30 bp, Homo sapiens
  chr8:8725340-8725370
  hypo
acaggcgtgagccaccgtgcctggccataa

SEQ ID NO: 15372 - DNA, 80 bp, Homo sapiens; identical to SEQ ID NO: 3222
  chr8:8750283-8750363
  hypo

SEQ ID NO: 15373 - DNA, 73 bp, Homo sapiens; identical to SEQ ID NO: 3223
  chr8:8750475-8750548
  hypo

SEQ ID NO: 15374 - DNA, 105 bp, Homo sapiens; identical to SEQ ID NO: 3224
  chr8:8750554-8750659
  hypo

SEQ ID NO: 15375 - DNA, 31 bp, Homo sapiens
  chr8:8768214-8768245
  hypo
acatatctattcacatcggtctctctgacat

SEQ ID NO: 15376 - DNA, 26 bp, Homo sapiens
  chr8:8780058-8780084
  hypo
ccgcacccagccgggtgtttctttac

SEQ ID NO: 15377 - DNA, 31 bp, Homo sapiens
  chr8:8780185-8780216
  hypo
acaagaagacggaagacgcctgtcttctcag

SEQ ID NO: 15378 - DNA, 31 bp, Homo sapiens
  chr8:8806386-8806417
  hypo
gaaggctcccgtgtcacgtaaaacttatact

SEQ ID NO: 15379 - DNA, 31 bp, Homo sapiens; identical to SEQ ID NO: 3225
  chr8:8820809-8820840
  hypo

SEQ ID NO: 15380 - DNA, 31 bp, Homo sapiens
  chr8:8842048-8842079
  hypo
gtgtgtcttccatctccgttaatgagaggtc

SEQ ID NO: 15381 - DNA, 33 bp, Homo sapiens
  chr8:8850262-8850295
  hypo
ataaagaatagtcagccgggcgtggtggctcac

SEQ ID NO: 15382 - DNA, 31 bp, Homo sapiens
  chr8:8851528-8851559
  hypo
ataataaacaaagacacgaccagatgtgagc

SEQ ID NO: 15383 - DNA, 31 bp, Homo sapiens
  chr8:8922914-8922945
  hypo
ctgactgccagctgggcgcagtggctcacac

SEQ ID NO: 15384 - DNA, 31 bp, Homo sapiens
  chr8:8926654-8926685
  hypo
agggttgtggggttaacggtttgaacatctt

SEQ ID NO: 15385 - DNA, 31 bp, Homo sapiens
  chr8:9686535-9686566
  hypo
ttcatttaatgggatccggatacaccttcgt

SEQ ID NO: 15386 - DNA, 31 bp, Homo sapiens; identical to SEQ ID NO: 3226
  chr8:10058671-10058702
  hypo

SEQ ID NO: 15387 - DNA, 58 bp, Homo sapiens; identical to SEQ ID NO: 3227
  chr8:10058735-10058793
  hypo

SEQ ID NO: 15388 - DNA, 56 bp, Homo sapiens; identical to SEQ ID NO: 3228
  chr8:10058801-10058857
  hypo

SEQ ID NO: 15389 - DNA, 31 bp, Homo sapiens
  chr8:10466916-10466947
  hypo
acgtcctgctgcagctcggccgccatctggt

SEQ ID NO: 15390 - DNA, 31 bp, Homo sapiens
  chr8:10467118-10467149
  hypo
gggtgggttgggcctgcgtgtgctcttggcc

SEQ ID NO: 15391 - DNA, 31 bp, Homo sapiens
  chr8:10695375-10695406
  hypo
ggcctgaggaggcctccgtacttgagtcctt

SEQ ID NO: 15392 - DNA, 41 bp, Homo sapiens; identical to SEQ ID NO: 3230
  chr8:10873483-10873524
  hypo

SEQ ID NO: 15393 - DNA, 164 bp, Homo sapiens; identical to SEQ ID NO: 3231
  chr8:10873572-10873736
  hypo

SEQ ID NO: 15394 - DNA, 35 bp, Homo sapiens; identical to SEQ ID NO: 3236
  chr8:11058961-11058996
  hypo

SEQ ID NO: 15395 - DNA, 31 bp, Homo sapiens
  chr8:11612346-11612377
  hypo
acatcacacaggtgctcgataagttttttaa

SEQ ID NO: 15396 - DNA, 31 bp, Homo sapiens
  chr8:11612382-11612413
  hypo
gaattgatttctttctcgctgagttccaggg

SEQ ID NO: 15397 - DNA, 31 bp, Homo sapiens
  chr8:11637202-11637233
  hypo
cagaaggaaggggctgcggacccaaagcagg

SEQ ID NO: 15398 - DNA, 31 bp, Homo sapiens
  chr8:11704539-11704570
  hypo
ccatcagccatcagcacgcacctgacttgta

SEQ ID NO: 15399 - DNA, 74 bp, Homo sapiens
  chr8:11705916-11705990
  hypo
ataccagaccaggctacgagtgcccttccgggtagaacactgattctcaactgagcagacgctaaacttcccta

SEQ ID NO: 15400 - DNA, 31 bp, Homo sapiens
  chr8:11706013-11706044
  hypo
tctctgaaatgagaatcgccagtgattccca

SEQ ID NO: 15401 - DNA, 75 bp, Homo sapiens
  chr8:11706080-11706155
  hypo
aagccctcaggcatttcggatctgcagccgccagtgaacaccgctactgcggaaccaaggcgaggctgcaggcag

SEQ ID NO: 15402 - DNA, 60 bp, Homo sapiens
  chr8:11706666-11706726
  hypo
cgaaggcctgcaggaacgagccccaccgggtgaggctgccatgtccgggctgggccctct

SEQ ID NO: 15403 - DNA, 39 bp, Homo sapiens
  chr8:11708329-11708368
  hypo
cccactttctctccagcgcttccccgccagccagcaggg

SEQ ID NO: 15404 - DNA, 65 bp, Homo sapiens
  chr8:11708425-11708490
  hypo
ctgtggccattgttcccgtgcatcgaagcttgcaggcagcttcaggtcctcggtaaacataactc

SEQ ID NO: 15405 - DNA, 31 bp, Homo sapiens; identical to SEQ ID NO: 3239
  chr8:11726003-11726034
  hypo

SEQ ID NO: 15406 - DNA, 31 bp, Homo sapiens; identical to SEQ ID NO: 3240
  chr8:11726134-11726165
  hypo

SEQ ID NO: 15407 - DNA, 38 bp, Homo sapiens; identical to SEQ ID NO: 3244
  chr8:17434663-17434701
  hypo

SEQ ID NO: 15408 - DNA, 31 bp, Homo sapiens
  chr8:17489660-17489691
  hypo
acctccctcctcctcccgatcctttctactt

SEQ ID NO: 15409 - DNA, 37 bp, Homo sapiens
  chr8:18381896-18381933
  hypo
tgcacatgctctgtttcgtgtacgtgccaagtctcaa

SEQ ID NO: 15410 - DNA, 38 bp, Homo sapiens
  chr8:18474404-18474442
  hypo
ttacaggcgtgagccaccgcgcccggccatcttcctct

SEQ ID NO: 15411 - DNA, 31 bp, Homo sapiens
  chr8:18797737-18797768
  hypo
tgtgaaccactgctctcgaccaatggtcttc

SEQ ID NO: 15412 - DNA, 29 bp, Homo sapiens
  chr8:18867070-18867099
  hypo
ccaggaaaatatcactcgaaataagcgtt

SEQ ID NO: 15413 - DNA, 31 bp, Homo sapiens; identical to SEQ ID NO: 3252
  chr8:18870815-18870846
  hypo

SEQ ID NO: 15414 - DNA, 31 bp, Homo sapiens
  chr8:19068612-19068643
  hypo
gtgttagggggaggagcggctccaggacaga

SEQ ID NO: 15415 - DNA, 36 bp, Homo sapiens
  chr8:19094993-19095029
  hypo
gcggctcgtccttccccggcccggctgctgaggtgg

SEQ ID NO: 15416 - DNA, 47 bp, Homo sapiens
  chr8:19095053-19095100
  hypo
gtgcacgtctggagaccgcccgggcgctggccgcggctggaccccgg

SEQ ID NO: 15417 - DNA, 31 bp, Homo sapiens
  chr8:19192505-19192536
  hypo
tcctccagggcaggcacggtggctcatgcct

SEQ ID NO: 15418 - DNA, 31 bp, Homo sapiens; identical to SEQ ID NO: 3260
  chr8:19797405-19797436
  hypo

SEQ ID NO: 15419 - DNA, 31 bp, Homo sapiens
  chr8:20793600-20793631
  hypo
ttcaaattccatgtgtcgcaaactattatat

SEQ ID NO: 15420 - DNA, 35 bp, Homo sapiens
  chr8:20793724-20793759
  hypo
ctgtatcaaatgttaccggaaataaaatgctcaag

SEQ ID NO: 15421 - DNA, 31 bp, Homo sapiens
  chr8:21590920-21590951
  hypo
cattcttccccagcatcggcttagaatgaaa

SEQ ID NO: 15422 - DNA, 31 bp, Homo sapiens
  chr8:21590958-21590989
  hypo
acccatagtcccaccacggaggtgtcatcct

SEQ ID NO: 15423 - DNA, 59 bp, Homo sapiens
  chr8:21591024-21591083
  hypo
ttgaggagagagagggcgaagggagagaaagccccagcccttcccgcattttaaacacc

SEQ ID NO: 15424 - DNA, 31 bp, Homo sapiens
  chr8:21591085-21591116
  hypo
gcaggttatcccaggccgaataggacccgtg

SEQ ID NO: 15425 - DNA, 31 bp, Homo sapiens
  chr8:21842213-21842244
  hypo
gctgtccaccattgggcgttgtgaatatgag

SEQ ID NO: 15426 - DNA, 125 bp, Homo sapiens; identical to SEQ ID NO: 3261
  chr8:21906318-21906443
  hypo

SEQ ID NO: 15427 - DNA, 31 bp, Homo sapiens
  chr8:21910413-21910444
  hypo
cactctagattctgcccggcttccacacttt

SEQ ID NO: 15428 - DNA, 31 bp, Homo sapiens
  chr8:21931502-21931533
  hypo
tgataaatgagagaatcggctaaaatagaat

SEQ ID NO: 15429 - DNA, 31 bp, Homo sapiens
  chr8:21932330-21932361
  hypo
cttcctcagagcttggcggctggagaggaga

SEQ ID NO: 15430 - DNA, 31 bp, Homo sapiens
  chr8:21940765-21940796
  hypo
tgggcacatgaagaggcgtgcagtcagaggg

SEQ ID NO: 15431 - DNA, 40 bp, Homo sapiens
  chr8:21961869-21961909
  hypo
ataaatggtgtgattgcgtggacaccgtggctctgttctt

SEQ ID NO: 15432 - DNA, 44 bp, Homo sapiens
  chr8:21977901-21977945
  hypo
ctgggctggggaggtccgagggggctcagcgcctgcacctggcc

SEQ ID NO: 15433 - DNA, 34 bp, Homo sapiens
  chr8:21978252-21978286
  hypo
gaagaggtggaagccacgccgagggcaaggctgg

SEQ ID NO: 15434 - DNA, 60 bp, Homo sapiens
  chr8:21978418-21978478
  hypo
cgttccaccacctgtgcgataatgctgtccaggatgttggtgatgcggtcatcctgcaga

SEQ ID NO: 15435 - DNA, 31 bp, Homo sapiens
  chr8:21979170-21979201
  hypo
gttgtggagttgggggcgttttctgtgttga

SEQ ID NO: 15436 - DNA, 71 bp, Homo sapiens
  chr8:21981255-21981326
  hypo
gagtccatggtggcaacggctgcagcagcgtggaatgcctgggctgtcctctgtcacggctggcccttggc

SEQ ID NO: 15437 - DNA, 53 bp, Homo sapiens
  chr8:22006312-22006365
  hypo
cggaaggcttctaggtcgttaggcttgcgcacgcgctgcgggtcaatgtcttg

SEQ ID NO: 15438 - DNA, 41 bp, Homo sapiens
  chr8:22052965-22053006
  hypo
ccaccacagaggtggacgagtgctctcggcccaaccgcggg

SEQ ID NO: 15439 - DNA, 31 bp, Homo sapiens
  chr8:22071496-22071527
  hypo
ccccggccaccgtgggcgctcccaacccacc

SEQ ID NO: 15440 - DNA, 41 bp, Homo sapiens
  chr8:22073145-22073186
  hypo
tttcctttcctctgctcgctcccagacgactccactcctgt

SEQ ID NO: 15441 - DNA, 31 bp, Homo sapiens
  chr8:22088363-22088394
  hypo
acacgtccacgcacaccgcctcacaagccat

SEQ ID NO: 15442 - DNA, 31 bp, Homo sapiens
  chr8:22396803-22396834
  hypo
ccccaattgagtctctcgcaataatcttctc

SEQ ID NO: 15443 - DNA, 31 bp, Homo sapiens
  chr8:22432576-22432607
  hypo
acagggaccagctctccgctttgcccccacg

SEQ ID NO: 15444 - DNA, 31 bp, Homo sapiens
  chr8:22482549-22482580
  hypo
gctctgccattggaaccgccaaagttccaac

SEQ ID NO: 15445 - DNA, 31 bp, Homo sapiens
  chr8:22854457-22854488
  hypo
agcagagtgggggtcccggggcagtcctggc

SEQ ID NO: 15446 - DNA, 31 bp, Homo sapiens; identical to SEQ ID NO: 3265
  chr8:22857229-22857260
  hypo

SEQ ID NO: 15447 - DNA, 31 bp, Homo sapiens
  chr8:22874764-22874795
  hypo
aaaaccaggagtatttcgagaagcatcggtg

SEQ ID NO: 15448 - DNA, 31 bp, Homo sapiens
  chr8:22874952-22874983
  hypo
tccccatcttcctcctcggctgtggtctgag

SEQ ID NO: 15449 - DNA, 53 bp, Homo sapiens
  chr8:22875009-22875062
  hypo
tgctgttgtccccatccgccttcacccctctgctcttccgcatcaccccatcc

SEQ ID NO: 15450 - DNA, 31 bp, Homo sapiens
  chr8:22875070-22875101
  hypo
gggaccagggggcccacgtaaccaggaccca

SEQ ID NO: 15451 - DNA, 31 bp, Homo sapiens
  chr8:22875112-22875143
  hypo
tcttcttaccagccaccgtggctcagccaga

SEQ ID NO: 15452 - DNA, 31 bp, Homo sapiens
  chr8:22875153-22875184
  hypo
gccctgtggagcagaacgggaaccacctgca

SEQ ID NO: 15453 - DNA, 31 bp, Homo sapiens
  chr8:22875192-22875223
  hypo
cagacccaaagcaggacgggagacaactgct

SEQ ID NO: 15454 - DNA, 54 bp, Homo sapiens
  chr8:22984119-22984173
  hypo
ttttatattctttaaacgaggctgtacaaaacataagctcgtattcctggccct

SEQ ID NO: 15455 - DNA, 6 bp, Homo sapiens
  chr8:23020932-23020938
  hypo
cgaacg

SEQ ID NO: 15456 - DNA, 31 bp, Homo sapiens
  chr8:23177355-23177386
  hypo
gcatggggggtgaatgcggggtctgaggccg

SEQ ID NO: 15457 - DNA, 53 bp, Homo sapiens; identical to SEQ ID NO: 3267
  chr8:23386070-23386123
  hypo

SEQ ID NO: 15458 - DNA, 31 bp, Homo sapiens; identical to SEQ ID NO: 3268
  chr8:23386137-23386168
  hypo

SEQ ID NO: 15459 - DNA, 31 bp, Homo sapiens; identical to SEQ ID NO: 3269
  chr8:23386169-23386200
  hypo

SEQ ID NO: 15460 - DNA, 39 bp, Homo sapiens
  chr8:23399593-23399632
  hypo
agtcagcaccacataacgatgtttcggtcaactatggac

SEQ ID NO: 15461 - DNA, 47 bp, Homo sapiens
  chr8:23399691-23399738
  hypo
cctaggggcatcacaacgcattgcatttcgcccgtgtttgggatgat

SEQ ID NO: 15462 - DNA, 57 bp, Homo sapiens
  chr8:23423917-23423974
  hypo
ctccctgtgacccagccgcctcgacttcggcccgcttgctcacgaataaagaactca

SEQ ID NO: 15463 - DNA, 48 bp, Homo sapiens
  chr8:23423989-23424037
  hypo
tgcacacccagacacacgcacgcacacacacgcgcgcgcacacacatg

SEQ ID NO: 15464 - DNA, 31 bp, Homo sapiens
  chr8:23424039-23424070
  hypo
tttttctgttcccctccgctttctgaagcct

SEQ ID NO: 15465 - DNA, 31 bp, Homo sapiens
  chr8:25107886-25107917
  hypo
taaggactgaagcgagcgttcttgcctttct

SEQ ID NO: 15466 - DNA, 56 bp, Homo sapiens
  chr8:25107974-25108030
  hypo
ggaatgtatttggcagcgaggtagctgtttattactgtgaacgttcctttccaccc

SEQ ID NO: 15467 - DNA, 35 bp, Homo sapiens
  chr8:25108054-25108089
  hypo
gacttctggagatgcccggccgtgaggtcatttat

SEQ ID NO: 15468 - DNA, 29 bp, Homo sapiens
  chr8:25138961-25138990
  hypo
aaaaaaaaagtgaacggggatgaagaatt

SEQ ID NO: 15469 - DNA, 31 bp, Homo sapiens
  chr8:25159882-25159913
  hypo
gtgtgccagattgtccgcgtgggccatatgg

SEQ ID NO: 15470 - DNA, 31 bp, Homo sapiens
  chr8:25206371-25206402
  hypo
ttatgtaccactcacccgcacccccacaata

SEQ ID NO: 15471 - DNA, 31 bp, Homo sapiens
  chr8:25212178-25212209
  hypo
acagacacagacagtcgcgaagagagatgtg

SEQ ID NO: 15472 - DNA, 31 bp, Homo sapiens
  chr8:25246525-25246556
  hypo
tggctacctcagtacccggaactccagttgc

SEQ ID NO: 15473 - DNA, 40 bp, Homo sapiens
  chr8:25249435-25249475
  hypo
gcagttcagatactcccggccgttccggaaaggagaaaag

SEQ ID NO: 15474 - DNA, 1 bp, Homo sapiens
  chr8:25249519-25249520
  hypo
t

SEQ ID NO: 15475 - DNA, 31 bp, Homo sapiens
  chr8:25252861-25252892
  hypo
gtttcctaataggccacggactgatactggc

SEQ ID NO: 15476 - DNA, 35 bp, Homo sapiens
  chr8:25338911-25338946
  hypo
aacatttacaactggccgggcgtggtggcttatgc

SEQ ID NO: 15477 - DNA, 53 bp, Homo sapiens
  chr8:26053987-26054040
  hypo
ggccccagcatgatcccgcttcctgcccaccctcctcccgccccatctccagc

SEQ ID NO: 15478 - DNA, 38 bp, Homo sapiens
  chr8:26267633-26267671
  hypo
actacccctttgctgtcgagccccgatatttaatgagt

SEQ ID NO: 15479 - DNA, 31 bp, Homo sapiens
  chr8:26267683-26267714
  hypo
ataaaaccagtttggccgggctggtgactgg

SEQ ID NO: 15480 - DNA, 45 bp, Homo sapiens
  chr8:26267724-26267769
  hypo
gtcagtgatgatttcacggtgtttggggagcggtacccacaaacc

SEQ ID NO: 15481 - DNA, 65 bp, Homo sapiens; identical to SEQ ID NO: 3278
  chr8:26435019-26435084
  hypo

SEQ ID NO: 15482 - DNA, 31 bp, Homo sapiens
  chr8:26509696-26509727
  hypo
gggcagtgggtgctgccgggtggattgagtc

SEQ ID NO: 15483 - DNA, 31 bp, Homo sapiens
  chr8:26513962-26513993
  hypo
ttttaccatttttctgcgtgctctcactctc

SEQ ID NO: 15484 - DNA, 31 bp, Homo sapiens
  chr8:27525306-27525337
  hypo
tccgccagccgtgacacgggcagcgagggag

SEQ ID NO: 15485 - DNA, 31 bp, Homo sapiens
  chr8:27778322-27778353
  hypo
aaaacagaaaacaaaacgacaacaacaaaaa

SEQ ID NO: 15486 - DNA, 28 bp, Homo sapiens
  chr8:27914783-27914811
  hypo
atgctattgataaatacggtgccgtatt

SEQ ID NO: 15487 - DNA, 31 bp, Homo sapiens
  chr8:27931083-27931114
  hypo
gttatatccctgtcatcgtcctatagggaag

SEQ ID NO: 15488 - DNA, 55 bp, Homo sapiens
  chr8:28208921-28208976
  hypo
cttccatcagggtggtcggtagcctgtaatcaagctggcccgtgatgagtcagct

SEQ ID NO: 15489 - DNA, 38 bp, Homo sapiens
  chr8:28208978-28209016
  hypo
gagcctgagcctccagcgagccccgccccatacctggt

SEQ ID NO: 15490 - DNA, 51 bp, Homo sapiens
  chr8:28209076-28209127
  hypo
agggcagggaggactccgggccaggatgttctgggccggaggactgggctt

SEQ ID NO: 15491 - DNA, 31 bp, Homo sapiens; identical to SEQ ID NO: 3285
  chr8:28242820-28242851
  hypo

SEQ ID NO: 15492 - DNA, 31 bp, Homo sapiens; identical to SEQ ID NO: 3286
  chr8:28242854-28242885
  hypo

SEQ ID NO: 15493 - DNA, 31 bp, Homo sapiens
  chr8:28266308-28266339
  hypo
cagcatgggccaggcacggtggctcacacct

SEQ ID NO: 15494 - DNA, 53 bp, Homo sapiens
  chr8:29212821-29212874
  hypo
tttagtcacgtgctaacgtcccaagcattttgataaaacgtcttcaaaatttc

SEQ ID NO: 15495 - DNA, 48 bp, Homo sapiens
  chr8:29212892-29212940
  hypo
gaaacacttctccaaacgggataaaaatgaactcggaggctgggcatg

SEQ ID NO: 15496 - DNA, 2 bp, Homo sapiens
  chr8:29212969-29212971
  hypo
ca

SEQ ID NO: 15497 - DNA, 28 bp, Homo sapiens
  chr8:29596407-29596435
  hypo
atttttaggctgggcacggtagttcatg

SEQ ID NO: 15498 - DNA, 94 bp, Homo sapiens
  chr8:29949230-29949324
  hypo
caggcacacacaaacacgcccacaacacagacacgcacgcacacaaacacacatgcacgcacaaacgcatacacagacacgcacacaaacgcac

SEQ ID NO: 15499 - DNA, 20 bp, Homo sapiens
  chr8:29958254-29958274
  hypo
gcactcggctatcatttatt

SEQ ID NO: 15500 - DNA, 31 bp, Homo sapiens
  chr8:29958323-29958354
  hypo
tgtttctattcactaacgtgagagcacctta

SEQ ID NO: 15501 - DNA, 31 bp, Homo sapiens
  chr8:30092821-30092852
  hypo
caggcacagtggctcacgcttgtaatcccag

SEQ ID NO: 15502 - DNA, 31 bp, Homo sapiens
  chr8:30161182-30161213
  hypo
attataggcatgccaccgggccctgcctcag

SEQ ID NO: 15503 - DNA, 31 bp, Homo sapiens
  chr8:30162575-30162606
  hypo
tttagaaacctggcagcgactgatctatttc

SEQ ID NO: 15504 - DNA, 134 bp, Homo sapiens; identical to SEQ ID NO: 3290
  chr8:30241764-30241898
  hypo

SEQ ID NO: 15505 - DNA, 60 bp, Homo sapiens; identical to SEQ ID NO: 3291
  chr8:30241907-30241967
  hypo

SEQ ID NO: 15506 - DNA, 31 bp, Homo sapiens; identical to SEQ ID NO: 3292
  chr8:30241968-30241999
  hypo

SEQ ID NO: 15507 - DNA, 57 bp, Homo sapiens; identical to SEQ ID NO: 3293
  chr8:30242004-30242061
  hypo

SEQ ID NO: 15508 - DNA, 2 bp, Homo sapiens
  chr8:30661354-30661356
  hypo
cg

SEQ ID NO: 15509 - DNA, 31 bp, Homo sapiens
  chr8:32621345-32621376
  hypo
cggaaatgtctccacccgtgtccagcatgac

SEQ ID NO: 15510 - DNA, 31 bp, Homo sapiens
  chr8:33417651-33417682
  hypo
acctagccaggacctacgttttaacaagctc

SEQ ID NO: 15511 - DNA, 309 bp, Homo sapiens; identical to SEQ ID NO: 3298
  chr8:37553217-37553526
  hypo

SEQ ID NO: 15512 - DNA, 43 bp, Homo sapiens; identical to SEQ ID NO: 3299
  chr8:37553607-37553650
  hypo

SEQ ID NO: 15513 - DNA, 223 bp, Homo sapiens; identical to SEQ ID NO: 3300
  chr8:37553677-37553900
  hypo

SEQ ID NO: 15514 - DNA, 34 bp, Homo sapiens
  chr8:37673306-37673340
  hypo
tctaagtcacctgctccgtcggtacaatccaggg

SEQ ID NO: 15515 - DNA, 24 bp, Homo sapiens
  chr8:37815901-37815925
  hypo
ctgggactacgggtgtgtgccacc

SEQ ID NO: 15516 - DNA, 31 bp, Homo sapiens
  chr8:37914602-37914633
  hypo
caggatcatctatgaccggaaattcctgatg

SEQ ID NO: 15517 - DNA, 55 bp, Homo sapiens
  chr8:37946121-37946176
  hypo
agcagtcttttgataacgacccaattgtttgagtcacaaccgagtgttcagcacc

SEQ ID NO: 15518 - DNA, 63 bp, Homo sapiens
  chr8:37946241-37946304
  hypo
ctaatgagatggagcccggtctgtctcagtcttcaaggtagccgttggcgcctgccagcccaa

SEQ ID NO: 15519 - DNA, 12 bp, Homo sapiens
  chr8:37961843-37961855
  hypo
gactctgtctca

SEQ ID NO: 15520 - DNA, 61 bp, Homo sapiens
  chr8:37961871-37961932
  hypo
aaaacacaaaattctgcgaccatatgttaaaactgctacaatactacgtatttgggaggag

SEQ ID NO: 15521 - DNA, 31 bp, Homo sapiens
  chr8:38223413-38223444
  hypo
aaaaagatttaaattacggtttactcaagta

SEQ ID NO: 15522 - DNA, 14 bp, Homo sapiens
  chr8:38223504-38223518
  hypo
actgaaatggaact

SEQ ID NO: 15523 - DNA, 35 bp, Homo sapiens
  chr8:38279096-38279131
  hypo
acgggtgggaggcctccgtgcgcctgcaaaactag

SEQ ID NO: 15524 - DNA, 279 bp, Homo sapiens; identical to SEQ ID NO: 3306
  chr8:38325348-38325627
  hypo

SEQ ID NO: 15525 - DNA, 107 bp, Homo sapiens; identical to SEQ ID NO: 3308
  chr8:38325943-38326050
  hypo

SEQ ID NO: 15526 - DNA, 18 bp, Homo sapiens
  chr8:38487422-38487440
  hypo
atttaaaaaaattggccg

SEQ ID NO: 15527 - DNA, 54 bp, Homo sapiens
  chr8:38786220-38786274
  hypo
aaaaacattaagcccacgcagcagaggatgatatagaatcgacttctcctgaag

SEQ ID NO: 15528 - DNA, 31 bp, Homo sapiens
  chr8:40157533-40157564
  hypo
tttgctccactcccaacgcatgcacacagat

SEQ ID NO: 15529 - DNA, 31 bp, Homo sapiens
  chr8:41141360-41141391
  hypo
tgtgagccaccacgcccggccaaactcctcc

SEQ ID NO: 15530 - DNA, 31 bp, Homo sapiens
  chr8:41325382-41325413
  hypo
tctcacagtcaagatccgaattagatataag

SEQ ID NO: 15531 - DNA, 31 bp, Homo sapiens
  chr8:41325415-41325446
  hypo
cacagcaacaagagatcgcaggtccacagta

SEQ ID NO: 15532 - DNA, 38 bp, Homo sapiens
  chr8:41488145-41488183
  hypo
tggagggcgtgggcctcgggggccggcacagccagccc

SEQ ID NO: 15533 - DNA, 28 bp, Homo sapiens
  chr8:42004492-42004520
  hypo
ttgggattacaggcgtgagccactgtgc

SEQ ID NO: 15534 - DNA, 76 bp, Homo sapiens
  chr8:42147391-42147467
  hypo
gagcagtttggcagcacgatgaggacttgggatgtggcacgcacaaaaaactgaagttacacgcagttgtgccctc

SEQ ID NO: 15535 - DNA, 63 bp, Homo sapiens
  chr8:42147490-42147553
  hypo
agtggggctgggtgagcgccactgacccaggcattgcggttggccacccgtcctgggctctgt

SEQ ID NO: 15536 - DNA, 31 bp, Homo sapiens
  chr8:42255792-42255823
  hypo
ttgagctgtctcactccgttgcccaggctag

SEQ ID NO: 15537 - DNA, 31 bp, Homo sapiens
  chr8:42293858-42293889
  hypo
ctgcatccagggcctccgtcatccctaacag

SEQ ID NO: 15538 - DNA, 35 bp, Homo sapiens
  chr8:42350486-42350521
  hypo
ccacgcccagccttggttttcgattaagtttaagg

SEQ ID NO: 15539 - DNA, 41 bp, Homo sapiens
  chr8:42399255-42399296
  hypo
tcaatatgtcaaataccggccgggcgcggtggctcacgctt

SEQ ID NO: 15540 - DNA, 31 bp, Homo sapiens
  chr8:48092297-48092328
  hypo
gctcagaggctggcggcgggaggcctgtggc

SEQ ID NO: 15541 - DNA, 31 bp, Homo sapiens
  chr8:48294167-48294198
  hypo
ctcagaagatcctattcgggcaggtctgggc

SEQ ID NO: 15542 - DNA, 31 bp, Homo sapiens
  chr8:48585926-48585957
  hypo
cagcttttctcagtatcgagcatccacacaa

SEQ ID NO: 15543 - DNA, 292 bp, Homo sapiens; identical to SEQ ID NO: 3319
  chr8:48649724-48650016
  hypo

SEQ ID NO: 15544 - DNA, 37 bp, Homo sapiens; identical to SEQ ID NO: 3320
  chr8:48650189-48650226
  hypo

SEQ ID NO: 15545 - DNA, 48 bp, Homo sapiens; identical to SEQ ID NO: 3321
  chr8:48650239-48650287
  hypo

SEQ ID NO: 15546 - DNA, 31 bp, Homo sapiens; identical to SEQ ID NO: 3322
  chr8:48650303-48650334
  hypo

SEQ ID NO: 15547 - DNA, 107 bp, Homo sapiens; identical to SEQ ID NO: 3323
  chr8:48650382-48650489
  hypo

SEQ ID NO: 15548 - DNA, 71 bp, Homo sapiens; identical to SEQ ID NO: 3325
  chr8:48650937-48651008
  hypo

SEQ ID NO: 15549 - DNA, 38 bp, Homo sapiens; identical to SEQ ID NO: 3326
  chr8:48651054-48651092
  hypo

SEQ ID NO: 15550 - DNA, 31 bp, Homo sapiens
  chr8:48744145-48744176
  hypo
gccacacttccacccgcggagagaactgggc

SEQ ID NO: 15551 - DNA, 31 bp, Homo sapiens
  chr8:48744183-48744214
  hypo
tggacccccaccagagcgccatgagggctgc

SEQ ID NO: 15552 - DNA, 31 bp, Homo sapiens
  chr8:48744502-48744533
  hypo
aggcccagttactccccgccgcccagacact

SEQ ID NO: 15553 - DNA, 31 bp, Homo sapiens
  chr8:48744542-48744573
  hypo
tggttcattttcacctcgggtttcctcaaag

SEQ ID NO: 15554 - DNA, 31 bp, Homo sapiens
  chr8:48854639-48854670
  hypo
ccctctgcacacattccggacactcctcctt

SEQ ID NO: 15555 - DNA, 56 bp, Homo sapiens
  chr8:49055452-49055508
  hypo
gcgtgggagaaggaagcgcaacctcatgatgcttttggatgcgggtaaaataaacc

SEQ ID NO: 15556 - DNA, 31 bp, Homo sapiens
  chr8:49055538-49055569
  hypo
actggtgatctattgccgacattctagaaat

SEQ ID NO: 15557 - DNA, 31 bp, Homo sapiens
  chr8:49055591-49055622
  hypo
tgagacaccaccatgtcgccaaggccccagg

SEQ ID NO: 15558 - DNA, 44 bp, Homo sapiens
  chr8:49172891-49172935
  hypo
ccgtccttggaagaggcgaggggtgctgccgtgggaggtagaga

SEQ ID NO: 15559 - DNA, 78 bp, Homo sapiens
  chr8:49172985-49173063
  hypo
cattgccacttttatccgttttgtgccgcgagctcttacctactcttgttggttggcggctttcgggcagggaaacgg

SEQ ID NO: 15560 - DNA, 31 bp, Homo sapiens
  chr8:49527632-49527663
  hypo
cgggctgcggagcaaacgctgctgccacacg

SEQ ID NO: 15561 - DNA, 31 bp, Homo sapiens
  chr8:52143268-52143299
  hypo
gcgacttccgggtgcgcgtgggctgggctgg

SEQ ID NO: 15562 - DNA, 31 bp, Homo sapiens
  chr8:53757576-53757607
  hypo
acagtgccaggccccacggccttccagttag

SEQ ID NO: 15563 - DNA, 31 bp, Homo sapiens
  chr8:54416852-54416883
  hypo
acacacttggaggtgcgcgtgtgtgcatgcc

SEQ ID NO: 15564 - DNA, 31 bp, Homo sapiens
  chr8:54645444-54645475
  hypo
ggggaggatcagagccgcgagaggccaggga

SEQ ID NO: 15565 - DNA, 90 bp, Homo sapiens
  chr8:54645499-54645589
  hypo
cagtctcaaatctggccgtgctcgagctatgcaaatgcccctgacggagcagtgatatactggggtagacaaggacgggcatatggtaga

SEQ ID NO: 15566 - DNA, 18 bp, Homo sapiens
  chr8:54870411-54870429
  hypo
taaaaaacaacaaggccg

SEQ ID NO: 15567 - DNA, 2 bp, Homo sapiens
  chr8:54925424-54925426
  hypo
tt

SEQ ID NO: 15568 - DNA, 38 bp, Homo sapiens
  chr8:54925430-54925468
  hypo
ttacatgaaccatgatcgtgccacggcagtctagcctg

SEQ ID NO: 15569 - DNA, 31 bp, Homo sapiens
  chr8:54925496-54925527
  hypo
aataaaaattaaaaaacgacgacgacaaaaa

SEQ ID NO: 15570 - DNA, 31 bp, Homo sapiens
  chr8:54935857-54935888
  hypo
gacaagagcgaaactccgtctcaaaaaaaat

SEQ ID NO: 15571 - DNA, 59 bp, Homo sapiens; identical to SEQ ID NO: 3332
  chr8:56791950-56792009
  hypo

SEQ ID NO: 15572 - DNA, 31 bp, Homo sapiens
  chr8:56860458-56860489
  hypo
gattttccttttaagtcggtctgtgagcaca

SEQ ID NO: 15573 - DNA, 18 bp, Homo sapiens
  chr8:59408078-59408096
  hypo
gcccggcctggtcagggc

SEQ ID NO: 15574 - DNA, 31 bp, Homo sapiens
  chr8:62034028-62034059
  hypo
tgcgtgtatctgtttgcgtgtattggaatat

SEQ ID NO: 15575 - DNA, 31 bp, Homo sapiens; identical to SEQ ID NO: 3338
  chr8:62626392-62626423
  hypo

SEQ ID NO: 15576 - DNA, 31 bp, Homo sapiens; identical to SEQ ID NO: 3339
  chr8:62626692-62626723
  hypo

SEQ ID NO: 15577 - DNA, 70 bp, Homo sapiens; identical to SEQ ID NO: 3340
  chr8:62627198-62627268
  hypo

SEQ ID NO: 15578 - DNA, 40 bp, Homo sapiens; identical to SEQ ID NO: 3341
  chr8:62627303-62627343
  hypo

SEQ ID NO: 15579 - DNA, 28 bp, Homo sapiens
  chr8:66548716-66548744
  hypo
aatgtctaaacttggccgggcgtggtgg

SEQ ID NO: 15580 - DNA, 19 bp, Homo sapiens
  chr8:66560526-66560545
  hypo
caggcgtgagtcaccatgc

SEQ ID NO: 15581 - DNA, 26 bp, Homo sapiens
  chr8:66565448-66565474
  hypo
tgagtttatttaagatcgagcacagt

SEQ ID NO: 15582 - DNA, 31 bp, Homo sapiens; identical to SEQ ID NO: 3345
  chr8:67025402-67025433
  hypo

SEQ ID NO: 15583 - DNA, 31 bp, Homo sapiens; identical to SEQ ID NO: 3346
  chr8:67417700-67417731
  hypo

SEQ ID NO: 15584 - DNA, 31 bp, Homo sapiens; identical to SEQ ID NO: 3347
  chr8:67417787-67417818
  hypo

SEQ ID NO: 15585 - DNA, 31 bp, Homo sapiens; identical to SEQ ID NO: 3348
  chr8:67417831-67417862
  hypo

SEQ ID NO: 15586 - DNA, 22 bp, Homo sapiens
  chr8:67956847-67956869
  hypo
tttggagacagagtttcgctct

SEQ ID NO: 15587 - DNA, 31 bp, Homo sapiens
  chr8:68115287-68115318
  hypo
aacattaaatgtgaggcgtgtgcagcttacc

SEQ ID NO: 15588 - DNA, 31 bp, Homo sapiens
  chr8:68115461-68115492
  hypo
gaacatcaaagtccaccgcatctctctttgg

SEQ ID NO: 15589 - DNA, 88 bp, Homo sapiens
  chr8:71017205-71017293
  hypo
aggcgtgagccaccgcgcccagatgatttggcttcttaatcacgcatccagaggtgctggctggctcctgagccgggagacatctgtg

SEQ ID NO: 15590 - DNA, 31 bp, Homo sapiens
  chr8:71059337-71059368
  hypo
aaatctttcgcgcgcgcgcgcgcgcgtgtgt

SEQ ID NO: 15591 - DNA, 60 bp, Homo sapiens
  chr8:74673151-74673211
  hypo
ataaagcagaggtcagcgaatcaaatctggtctgctgcctgttttcgtaaataaagggct

SEQ ID NO: 15592 - DNA, 24 bp, Homo sapiens
  chr8:74759372-74759396
  hypo
cagcctgggcgacagagtgagact

SEQ ID NO: 15593 - DNA, 31 bp, Homo sapiens
  chr8:74759432-74759463
  hypo
gcaaaagtctagaattcgtaattcacaaaaa

SEQ ID NO: 15594 - DNA, 31 bp, Homo sapiens
  chr8:80673151-80673182
  hypo
gcctctccccaccccccgccccagagcagaa

SEQ ID NO: 15595 - DNA, 42 bp, Homo sapiens; identical to SEQ ID NO: 3357
  chr8:80803676-80803718
  hypo

SEQ ID NO: 15596 - DNA, 77 bp, Homo sapiens; identical to SEQ ID NO: 3358
  chr8:81490276-81490353
  hypo

SEQ ID NO: 15597 - DNA, 104 bp, Homo sapiens; identical to SEQ ID NO: 3359
  chr8:81490360-81490464
  hypo

SEQ ID NO: 15598 - DNA, 31 bp, Homo sapiens
  chr8:81615050-81615081
  hypo
gtgaaagtcgctggatcggaaatggcgaggc

SEQ ID NO: 15599 - DNA, 31 bp, Homo sapiens; identical to SEQ ID NO: 3363
  chr8:81785309-81785340
  hypo

SEQ ID NO: 15600 - DNA, 474 bp, Homo sapiens; identical to SEQ ID NO: 3364
  chr8:81785543-81786017
  hypo

SEQ ID NO: 15601 - DNA, 257 bp, Homo sapiens; identical to SEQ ID NO: 3366
  chr8:81786400-81786657
  hypo

SEQ ID NO: 15602 - DNA, 141 bp, Homo sapiens; identical to SEQ ID NO: 3368
  chr8:82192694-82192835
  hypo

SEQ ID NO: 15603 - DNA, 31 bp, Homo sapiens; identical to SEQ ID NO: 3369
  chr8:82192847-82192878
  hypo

SEQ ID NO: 15604 - DNA, 138 bp, Homo sapiens; identical to SEQ ID NO: 3372
  chr8:82193378-82193516
  hypo

SEQ ID NO: 15605 - DNA, 71 bp, Homo sapiens; identical to SEQ ID NO: 3373
  chr8:82193520-82193591
  hypo

SEQ ID NO: 15606 - DNA, 49 bp, Homo sapiens; identical to SEQ ID NO: 3374
  chr8:82193601-82193650
  hypo

SEQ ID NO: 15607 - DNA, 82 bp, Homo sapiens; identical to SEQ ID NO: 3375
  chr8:82193658-82193740
  hypo

SEQ ID NO: 15608 - DNA, 30 bp, Homo sapiens
  chr8:82680453-82680483
  hypo
gaggagccaagatggccgaataggaagagc

SEQ ID NO: 15609 - DNA, 90 bp, Homo sapiens; identical to SEQ ID NO: 3376
  chr8:87527031-87527121
  hypo

SEQ ID NO: 15610 - DNA, 25 bp, Homo sapiens
  chr8:90912939-90912964
  hypo
tatatatttaaaaatacggaacgct

SEQ ID NO: 15611 - DNA, 31 bp, Homo sapiens
  chr8:90913559-90913590
  hypo
ctgttatgtatgttaacggaaaagtaactac

SEQ ID NO: 15612 - DNA, 41 bp, Homo sapiens
  chr8:90913612-90913653
  hypo
attcaaatgaaatgaacgtgtcaaatcgacaaaagctcaaa

SEQ ID NO: 15613 - DNA, 31 bp, Homo sapiens; identical to SEQ ID NO: 3377
  chr8:91657492-91657523
  hypo

SEQ ID NO: 15614 - DNA, 31 bp, Homo sapiens
  chr8:92083522-92083553
  hypo
tgaaataaatgtttgtcgttgcctacaccat

SEQ ID NO: 15615 - DNA, 26 bp, Homo sapiens
  chr8:92083859-92083885
  hypo
gccaccgtgcccggccctgttaaact

SEQ ID NO: 15616 - DNA, 38 bp, Homo sapiens
  chr8:95650754-95650792
  hypo
ttacaggcgtgagccaccgcgcccggcccagaaagatt

SEQ ID NO: 15617 - DNA, 121 bp, Homo sapiens; identical to SEQ ID NO: 3380
  chr8:95654216-95654337
  hypo

SEQ ID NO: 15618 - DNA, 56 bp, Homo sapiens; identical to SEQ ID NO: 3381
  chr8:95654442-95654498
  hypo

SEQ ID NO: 15619 - DNA, 48 bp, Homo sapiens; identical to SEQ ID NO: 3382
  chr8:95654507-95654555
  hypo

SEQ ID NO: 15620 - DNA, 31 bp, Homo sapiens
  chr8:96145223-96145254
  hypo
gctgttctccctacttcgcccccatccctag

SEQ ID NO: 15621 - DNA, 58 bp, Homo sapiens
  chr8:96145255-96145313
  hypo
ctaccctaagcaacttcgttacctctctacgaacccatcagagcgcttagctatcaga

SEQ ID NO: 15622 - DNA, 31 bp, Homo sapiens
  chr8:96145380-96145411
  hypo
tgatggggttttgtgtcgtcaaagttttggg

SEQ ID NO: 15623 - DNA, 49 bp, Homo sapiens; identical to SEQ ID NO: 3383
  chr8:96145957-96146006
  hypo

SEQ ID NO: 15624 - DNA, 370 bp, Homo sapiens; identical to SEQ ID NO: 3384
  chr8:96146109-96146479
  hypo

SEQ ID NO: 15625 - DNA, 31 bp, Homo sapiens
  chr8:96208804-96208835
  hypo
cagaatgcctggattccggggacttccaggt

SEQ ID NO: 15626 - DNA, 39 bp, Homo sapiens
  chr8:96229504-96229543
  hypo
gctcatatgagcctgtcgcccaggctggagtgcaatggc

SEQ ID NO: 15627 - DNA, 31 bp, Homo sapiens
  chr8:96232002-96232033
  hypo
ctgaagcagactgtcccgagcaggtaattta

SEQ ID NO: 15628 - DNA, 42 bp, Homo sapiens; identical to SEQ ID NO: 3391
  chr8:97657754-97657796
  hypo

SEQ ID NO: 15629 - DNA, 140 bp, Homo sapiens; identical to SEQ ID NO: 3392
  chr8:97657816-97657956
  hypo

SEQ ID NO: 15630 - DNA, 31 bp, Homo sapiens
  chr8:99440634-99440665
  hypo
gcaccacgtcttccttcgatgagatccttgc

SEQ ID NO: 15631 - DNA, 23 bp, Homo sapiens
  chr8:101591222-101591245
  hypo
tacaggcacgagacactgtgccc

SEQ ID NO: 15632 - DNA, 24 bp, Homo sapiens
  chr8:101955919-101955943
  hypo
aagacactgtccaggccgggcgcg

SEQ ID NO: 15633 - DNA, 31 bp, Homo sapiens
  chr8:102039314-102039345
  hypo
ttcttcatgtcaccaacgcttgctacatgca

SEQ ID NO: 15634 - DNA, 31 bp, Homo sapiens
  chr8:102039359-102039390
  hypo
cctgcagccaatgcctcggtcagccagtgca

SEQ ID NO: 15635 - DNA, 31 bp, Homo sapiens
  chr8:102039435-102039466
  hypo
acaatatatgggaaatcgaggggtggccttt

SEQ ID NO: 15636 - DNA, 90 bp, Homo sapiens
  chr8:102039470-102039560
  hypo
cagctgtcttagtcaccgcattcttcaggtcactaaccgccccattggagagggttcacgcagctcacgtgtaaacggacccctctttcc

SEQ ID NO: 15637 - DNA, 41 bp, Homo sapiens
  chr8:102190374-102190415
  hypo
attgctctgtgtcatacgttttcttacgaataacagggctt

SEQ ID NO: 15638 - DNA, 57 bp, Homo sapiens
  chr8:102190507-102190564
  hypo
cagtcttcacagggcacgcttcggcccttgctaggagtccatcgttctgccataaca

SEQ ID NO: 15639 - DNA, 31 bp, Homo sapiens
  chr8:102450881-102450912
  hypo
cgaaacttcctcgaggcgctggggtggggag

SEQ ID NO: 15640 - DNA, 31 bp, Homo sapiens
  chr8:102450920-102450951
  hypo
ctgcaggcctgcttagcgcccttctcaacaa

SEQ ID NO: 15641 - DNA, 58 bp, Homo sapiens
  chr8:102450954-102451012
  hypo
ctgtcatcagggagagcgagcagagtgcgtgcactccgggcggcgaagccccagcaga

SEQ ID NO: 15642 - DNA, 59 bp, Homo sapiens
  chr8:102451041-102451100
  hypo
tcattcatgagggctgcgctgcgctgcgggcaccacgattcccacggaggggctgtagg

SEQ ID NO: 15643 - DNA, 43 bp, Homo sapiens
  chr8:102451103-102451146
  hypo
ttaaggggccctcagacgtcaggacaaacggacacttctcttt

SEQ ID NO: 15644 - DNA, 41 bp, Homo sapiens
  chr8:103403084-103403125
  hypo
gagaaattcaacaaaacgtacatacacgtcagtgagaaaca

SEQ ID NO: 15645 - DNA, 31 bp, Homo sapiens
  chr8:103403149-103403180
  hypo
aaaagacaatgaatatcgaggctgggtgtgg

SEQ ID NO: 15646 - DNA, 34 bp, Homo sapiens
  chr8:103629515-103629549
  hypo
aaacccctctctcttccgggtgcggtggctcacg

SEQ ID NO: 15647 - DNA, 31 bp, Homo sapiens
  chr8:103629851-103629882
  hypo
aggctttgctggatcacgtagacctaacaaa

SEQ ID NO: 15648 - DNA, 31 bp, Homo sapiens
  chr8:103757770-103757801
  hypo
gtggctcccctccctccgccccctcactccc

SEQ ID NO: 15649 - DNA, 38 bp, Homo sapiens
  chr8:103833089-103833127
  hypo
taaaaatgatgtctgtcgggcgcggtggctcacgcctg

SEQ ID NO: 15650 - DNA, 31 bp, Homo sapiens
  chr8:103916555-103916586
  hypo
aaccactggatgggcccggtggctcacacct

SEQ ID NO: 15651 - DNA, 46 bp, Homo sapiens
  chr8:103932059-103932105
  hypo
tgtgataggaggggtacggtttcagcaagagcgaaggcttagaggt

SEQ ID NO: 15652 - DNA, 31 bp, Homo sapiens
  chr8:104086526-104086557
  hypo
tatgtgtgtgcatgtgcgtgtgcatatataa

SEQ ID NO: 15653 - DNA, 54 bp, Homo sapiens
  chr8:104086565-104086619
  hypo
tcagttgctgagcatgcgctatgaaccaggcgtgttaggcgctggggatttaat

SEQ ID NO: 15654 - DNA, 31 bp, Homo sapiens
  chr8:104086646-104086677
  hypo
acctaccttgatggggcgtgcagcctggtga

SEQ ID NO: 15655 - DNA, 31 bp, Homo sapiens
  chr8:104086695-104086726
  hypo
ggacaaaacacaaacccggcagccctaagtt

SEQ ID NO: 15656 - DNA, 31 bp, Homo sapiens; identical to SEQ ID NO: 3399
  chr8:107669717-107669748
  hypo

SEQ ID NO: 15657 - DNA, 15 bp, Homo sapiens
  chr8:109799888-109799903
  hypo
cgggagttgtaggcc

SEQ ID NO: 15658 - DNA, 31 bp, Homo sapiens
  chr8:110459065-110459096
  hypo
agcacactgagaacaacgctgttccatttga

SEQ ID NO: 15659 - DNA, 22 bp, Homo sapiens
  chr8:117421306-117421328
  hypo
cttccactctcaaaagcgtctt

SEQ ID NO: 15660 - DNA, 31 bp, Homo sapiens
  chr8:117824013-117824044
  hypo
aaacattgtgcactcacgttttgccaggctc

SEQ ID NO: 15661 - DNA, 31 bp, Homo sapiens
  chr8:118531586-118531617
  hypo
aacttttgcttcaagacgctcatcacaatag

SEQ ID NO: 15662 - DNA, 31 bp, Homo sapiens
  chr8:118531659-118531690
  hypo
cctggtttgttcagtacgctatcttcactcc

SEQ ID NO: 15663 - DNA, 55 bp, Homo sapiens
  chr8:118531713-118531768
  hypo
ctcagccaatatttgtcgaatggtaattaccgaagacctgcgaattactatgttt

SEQ ID NO: 15664 - DNA, 31 bp, Homo sapiens
  chr8:118531806-118531837
  hypo
tatttcctggaaagtccgtacaatggagcat

SEQ ID NO: 15665 - DNA, 36 bp, Homo sapiens
  chr8:118532127-118532163
  hypo
atatcagacagtaggccgggcgcggtggcttatgcc

SEQ ID NO: 15666 - DNA, 31 bp, Homo sapiens; identical to SEQ ID NO: 3403
  chr8:119123497-119123528
  hypo

SEQ ID NO: 15667 - DNA, 31 bp, Homo sapiens; identical to SEQ ID NO: 3404
  chr8:119123674-119123705
  hypo

SEQ ID NO: 15668 - DNA, 23 bp, Homo sapiens
  chr8:120844121-120844144
  hypo
ctggtgcggtggctcacgcctgt

SEQ ID NO: 15669 - DNA, 39 bp, Homo sapiens
  chr8:122245399-122245438
  hypo
gattgggaggcagaggcgagttgattacctgaggtcagg

SEQ ID NO: 15670 - DNA, 84 bp, Homo sapiens
  chr8:123695488-123695572
  hypo
tgagaaatttaaagggcgagagatggcggcaggccagttgcgccgaaggtggagtgagacgaggtgatcgcgttgagggagact

SEQ ID NO: 15671 - DNA, 74 bp, Homo sapiens
  chr8:123966177-123966251
  hypo
agctggagtcaggctgcggcagaaggtgtgtcggaactggctgaatcagactccgactgcgtccctgcagaggc

SEQ ID NO: 15672 - DNA, 49 bp, Homo sapiens
  chr8:123966288-123966337
  hypo
aggcagcaggggagaacgcagcttgctttcttttcgttgccagggttaa

SEQ ID NO: 15673 - DNA, 31 bp, Homo sapiens
  chr8:123966361-123966392
  hypo
ttgacacagatggtggcgtctttttcttgta

SEQ ID NO: 15674 - DNA, 31 bp, Homo sapiens
  chr8:124055129-124055160
  hypo
atgcacagagaaaagccgctctaactaggtt

SEQ ID NO: 15675 - DNA, 31 bp, Homo sapiens
  chr8:124163978-124164009
  hypo
ataaatgctgtatcaccgctaacatcagaaa

SEQ ID NO: 15676 - DNA, 31 bp, Homo sapiens
  chr8:124164019-124164050
  hypo
tctaaattttaaatttcgttttcaagtttct

SEQ ID NO: 15677 - DNA, 31 bp, Homo sapiens
  chr8:124164065-124164096
  hypo
gtagaatgggacaccacgggacagaatctta

SEQ ID NO: 15678 - DNA, 55 bp, Homo sapiens
  chr8:124164100-124164155
  hypo
gaaagtgagaaatcttcgccagagactcactgcccgggctcgtcacagatgtcaa

SEQ ID NO: 15679 - DNA, 19 bp, Homo sapiens
  chr8:124172061-124172080
  hypo
aatacgctgaggggtggca

SEQ ID NO: 15680 - DNA, 31 bp, Homo sapiens
  chr8:124247664-124247695
  hypo
agctagtaacaaaaggcgagggtcctcaggt

SEQ ID NO: 15681 - DNA, 71 bp, Homo sapiens
  chr8:124247735-124247806
  hypo
caggaaatgagaatgccgtgcagacacgcaaggtccgctgagatcatgtgtgaagccgacagaaaggggcg

SEQ ID NO: 15682 - DNA, 35 bp, Homo sapiens
  chr8:124374929-124374964
  hypo
aaggtgtgagtcatcacgcccggccaaaaatatca

SEQ ID NO: 15683 - DNA, 31 bp, Homo sapiens
  chr8:124532973-124533004
  hypo
aaaatccatcagttcacgttacttctttgct

SEQ ID NO: 15684 - DNA, 31 bp, Homo sapiens
  chr8:124533014-124533045
  hypo
aaatggcttctccttgcgcttaggaaaaaac

SEQ ID NO: 15685 - DNA, 31 bp, Homo sapiens
  chr8:124553866-124553897
  hypo
tatcaggatcgacctccgcagccagatcagc

SEQ ID NO: 15686 - DNA, 31 bp, Homo sapiens
  chr8:125452301-125452332
  hypo
ttgccaaacacactcacgcacctgactatcc

SEQ ID NO: 15687 - DNA, 27 bp, Homo sapiens
  chr8:125452365-125452392
  hypo
gttttttgtttttgttcgtttgttttg

SEQ ID NO: 15688 - DNA, 31 bp, Homo sapiens
  chr8:125680996-125681027
  hypo
ccattcttagctatatcgacaggatctcacc

SEQ ID NO: 15689 - DNA, 19 bp, Homo sapiens
  chr8:126007661-126007680
  hypo
tgggtgtggtggctcacgc

SEQ ID NO: 15690 - DNA, 31 bp, Homo sapiens
  chr8:126008020-126008051
  hypo
tatttagaatgctacccgtactatatgtgtg

SEQ ID NO: 15691 - DNA, 39 bp, Homo sapiens
  chr8:126042841-126042880
  hypo
tgcactccaacctgggcgacagagcgactctttctcata

SEQ ID NO: 15692 - DNA, 31 bp, Homo sapiens
  chr8:126044383-126044414
  hypo
cccatctctattagggcgataagaggaattt

SEQ ID NO: 15693 - DNA, 31 bp, Homo sapiens
  chr8:126044722-126044753
  hypo
ttggggcccatattctcgctggcagatgata

SEQ ID NO: 15694 - DNA, 31 bp, Homo sapiens; identical to SEQ ID NO: 3411
  chr8:127570026-127570057
  hypo

SEQ ID NO: 15695 - DNA, 163 bp, Homo sapiens; identical to SEQ ID NO: 3414
  chr8:127570640-127570803
  hypo

SEQ ID NO: 15696 - DNA, 31 bp, Homo sapiens
  chr8:128861839-128861870
  hypo
gaaaagagaaagactgcgtgcatgtgcatgg

SEQ ID NO: 15697 - DNA, 37 bp, Homo sapiens
  chr8:128861890-128861927
  hypo
tgtgtgtgtgcccctgcgtgcacgtgcatgggtgcac

SEQ ID NO: 15698 - DNA, 37 bp, Homo sapiens
  chr8:128861941-128861978
  hypo
tgtgtgtgtgcccctgcgtgcacgtgcgtgggtgcac

SEQ ID NO: 15699 - DNA, 31 bp, Homo sapiens
  chr8:128872593-128872624
  hypo
acagggctgagcactccggagaggagccttt

SEQ ID NO: 15700 - DNA, 36 bp, Homo sapiens
  chr8:128888982-128889018
  hypo
cacaactcctgtcctccgtggcgcttgggtgacagc

SEQ ID NO: 15701 - DNA, 42 bp, Homo sapiens
  chr8:128889206-128889248
  hypo
attccaaagtcaggagcgtgacctccccggaagcccagctaa

SEQ ID NO: 15702 - DNA, 71 bp, Homo sapiens
  chr8:129069802-129069873
  hypo
ccctggcactggctgacgtgggaggtacagaatgaggtgtccgtccctccaaggcacggtgacctagaatc

SEQ ID NO: 15703 - DNA, 31 bp, Homo sapiens
  chr8:131412441-131412472
  hypo
acacactttccactacgcggacttcttagaa

SEQ ID NO: 15704 - DNA, 20 bp, Homo sapiens
  chr8:132122691-132122711
  hypo
gtttgagatggagtttcgtt

SEQ ID NO: 15705 - DNA, 31 bp, Homo sapiens
  chr8:133182608-133182639
  hypo
cataaaatctccatgtcgccaccaggtcaat

SEQ ID NO: 15706 - DNA, 37 bp, Homo sapiens
  chr8:133686744-133686781
  hypo
atggggagctcaaaaacgttgtcgatatcaaaatggt

SEQ ID NO: 15707 - DNA, 31 bp, Homo sapiens
  chr8:133686788-133686819
  hypo
atataaataacttacccgcatcaccttgcag

SEQ ID NO: 15708 - DNA, 5 bp, Homo sapiens
  chr8:133686829-133686834
  hypo
tattc

SEQ ID NO: 15709 - DNA, 133 bp, Homo sapiens; identical to SEQ ID NO: 3419
  chr8:134308982-134309115
  hypo

SEQ ID NO: 15710 - DNA, 133 bp, Homo sapiens; identical to SEQ ID NO: 3420
  chr8:134309262-134309395
  hypo

SEQ ID NO: 15711 - DNA, 31 bp, Homo sapiens; identical to SEQ ID NO: 3421
  chr8:134581318-134581349
  hypo

SEQ ID NO: 15712 - DNA, 103 bp, Homo sapiens; identical to SEQ ID NO: 3422
  chr8:134583262-134583365
  hypo

SEQ ID NO: 15713 - DNA, 76 bp, Homo sapiens; identical to SEQ ID NO: 3423
  chr8:134583478-134583554
  hypo

SEQ ID NO: 15714 - DNA, 25 bp, Homo sapiens
  chr8:135670281-135670306
  hypo
gtaaaaaataaatatgcggccgggc

SEQ ID NO: 15715 - DNA, 31 bp, Homo sapiens; identical to SEQ ID NO: 3424
  chr8:135703767-135703798
  hypo

SEQ ID NO: 15716 - DNA, 31 bp, Homo sapiens
  chr8:140818839-140818870
  hypo
tgggtccggcagtagccgagcctcctgaacc

SEQ ID NO: 15717 - DNA, 31 bp, Homo sapiens
  chr8:140920091-140920122
  hypo
ggcagcatgtgctgggcggggactgcaggct

SEQ ID NO: 15718 - DNA, 42 bp, Homo sapiens
  chr8:141106959-141107001
  hypo
aggactaggacagggacgtggactggacgtgagacattccta

SEQ ID NO: 15719 - DNA, 31 bp, Homo sapiens
  chr8:141107013-141107044
  hypo
aagaagaatgtgtcctcgcagctcctcctgc

SEQ ID NO: 15720 - DNA, 31 bp, Homo sapiens
  chr8:141107048-141107079
  hypo
cctcacagtgcacaaccggctgggccagccc

SEQ ID NO: 15721 - DNA, 58 bp, Homo sapiens
  chr8:141107096-141107154
  hypo
gaaaacctgtccaggtcgctggtgtatagccagaacaatggcacggggcagggcaaag

SEQ ID NO: 15722 - DNA, 31 bp, Homo sapiens
  chr8:141107642-141107673
  hypo
aacgcccgtctgggtccgtagtgtgcagccg

SEQ ID NO: 15723 - DNA, 31 bp, Homo sapiens
  chr8:141159978-141160009
  hypo
tacatacatgcatgtacgtatgtctaggtgt

SEQ ID NO: 15724 - DNA, 31 bp, Homo sapiens
  chr8:141231022-141231053
  hypo
tgaagactcaaaaccccggagcacttgtgta

SEQ ID NO: 15725 - DNA, 31 bp, Homo sapiens
  chr8:141577474-141577505
  hypo
gcaggtggtccacacccgagacactgccgcc

SEQ ID NO: 15726 - DNA, 79 bp, Homo sapiens
  chr8:141588007-141588086
  hypo
tcctgcacacccagcacggcgtgcggcttgggctgggcggatctctcaagagaaggaggctgttcggtcatgccagtga

SEQ ID NO: 15727 - DNA, 39 bp, Homo sapiens
  chr8:141588101-141588140
  hypo
ggctacaatgcacacccgtggagtcggctggcagacaat

SEQ ID NO: 15728 - DNA, 31 bp, Homo sapiens
  chr8:141588428-141588459
  hypo
taagtgttcagttcagcggcattgagtgtgt

SEQ ID NO: 15729 - DNA, 81 bp, Homo sapiens
  chr8:141589814-141589895
  hypo
agactgagaaggagaacgggtgggtcagagggtacacgatgtttctgctttaatacctgcaatacccgcaccagactgtct

SEQ ID NO: 15730 - DNA, 31 bp, Homo sapiens
  chr8:141589908-141589939
  hypo
ggtccacctgcattcccgtgagtggctcatg

SEQ ID NO: 15731 - DNA, 31 bp, Homo sapiens
  chr8:141589945-141589976
  hypo
gtcacagagctctaggcgcaaggctgagtgt

SEQ ID NO: 15732 - DNA, 31 bp, Homo sapiens
  chr8:141594856-141594887
  hypo
acacacatcagaatgccgtgactttaggggc

SEQ ID NO: 15733 - DNA, 54 bp, Homo sapiens
  chr8:141596968-141597022
  hypo
tcgggcacgctcctctcggggaggagagtcactgtccttcggtgactcccagct

SEQ ID NO: 15734 - DNA, 31 bp, Homo sapiens
  chr8:141597033-141597064
  hypo
catgcagttacttaaccgagcctcacaacca

SEQ ID NO: 15735 - DNA, 31 bp, Homo sapiens
  chr8:141597066-141597097
  hypo
ccacaaaggggcacaccgctggctgcaagaa

SEQ ID NO: 15736 - DNA, 31 bp, Homo sapiens
  chr8:141613217-141613248
  hypo
ggagcctcggatggtgcgggttgactcaggc

SEQ ID NO: 15737 - DNA, 31 bp, Homo sapiens
  chr8:141634056-141634087
  hypo
ggaaccaagatgatcccggggcaaggaggtc

SEQ ID NO: 15738 - DNA, 82 bp, Homo sapiens; identical to SEQ ID NO: 3426
  chr8:141644413-141644495
  hypo

SEQ ID NO: 15739 - DNA, 31 bp, Homo sapiens
  chr8:141704909-141704940
  hypo
taaggaccataaagcacgtgtgctcataacc

SEQ ID NO: 15740 - DNA, 31 bp, Homo sapiens
  chr8:141705098-141705129
  hypo
aaatctgcatctccagcgcagaccacctcct

SEQ ID NO: 15741 - DNA, 27 bp, Homo sapiens
  chr8:141721472-141721499
  hypo
tggggttacaggcgtgagccaccatgc

SEQ ID NO: 15742 - DNA, 31 bp, Homo sapiens
  chr8:141745320-141745351
  hypo
cccaggccctctctcccgccaactcctacct

SEQ ID NO: 15743 - DNA, 60 bp, Homo sapiens
  chr8:141745366-141745426
  hypo
ttcagtaaacctgggccgcctgctggggtcataggcccagcatttcgtcataaggctgta

SEQ ID NO: 15744 - DNA, 35 bp, Homo sapiens
  chr8:141745462-141745497
  hypo
ttccccattttcaattcgaccgattacatcattgt

SEQ ID NO: 15745 - DNA, 31 bp, Homo sapiens
  chr8:141761240-141761271
  hypo
ctgaggtctcttcttgcgtgaagttttcttt

SEQ ID NO: 15746 - DNA, 31 bp, Homo sapiens; identical to SEQ ID NO: 3427
  chr8:142010383-142010414
  hypo

SEQ ID NO: 15747 - DNA, 48 bp, Homo sapiens; identical to SEQ ID NO: 3428
  chr8:142010549-142010597
  hypo

SEQ ID NO: 15748 - DNA, 39 bp, Homo sapiens; identical to SEQ ID NO: 3429
  chr8:142010629-142010668
  hypo

SEQ ID NO: 15749 - DNA, 109 bp, Homo sapiens; identical to SEQ ID NO: 3430
  chr8:142010702-142010811
  hypo

SEQ ID NO: 15750 - DNA, 38 bp, Homo sapiens; identical to SEQ ID NO: 3431
  chr8:142011006-142011044
  hypo

SEQ ID NO: 15751 - DNA, 14 bp, Homo sapiens
  chr8:142011048-142011062
  hypo
aacccgggccgggg

SEQ ID NO: 15752 - DNA, 31 bp, Homo sapiens; identical to SEQ ID NO: 3433
  chr8:142011161-142011192
  hypo

SEQ ID NO: 15753 - DNA, 397 bp, Homo sapiens; identical to SEQ ID NO: 3434
  chr8:142011193-142011590
  hypo

SEQ ID NO: 15754 - DNA, 73 bp, Homo sapiens; identical to SEQ ID NO: 3435
  chr8:142011606-142011679
  hypo

SEQ ID NO: 15755 - DNA, 44 bp, Homo sapiens; identical to SEQ ID NO: 3436
  chr8:142011876-142011920
  hypo

SEQ ID NO: 15756 - DNA, 182 bp, Homo sapiens; identical to SEQ ID NO: 3437
  chr8:142012050-142012232
  hypo

SEQ ID NO: 15757 - DNA, 31 bp, Homo sapiens
  chr8:142030712-142030743
  hypo
atccgcactttactcacgtggaaccagggtt

SEQ ID NO: 15758 - DNA, 31 bp, Homo sapiens
  chr8:142078609-142078640
  hypo
agaacacagggaggttcggcaatttgtccga

SEQ ID NO: 15759 - DNA, 63 bp, Homo sapiens
  chr8:142227489-142227552
  hypo
acgtgactctgccaccgcggcaagaggcggagggttctgtgtgtctcccggtccccagtctgg

SEQ ID NO: 15760 - DNA, 49 bp, Homo sapiens
  chr8:142227560-142227609
  hypo
ggacttgcagaagtgacgctcccgcagcctctgccgtggccctctcgga

SEQ ID NO: 15761 - DNA, 31 bp, Homo sapiens
  chr8:142240706-142240737
  hypo
ccagtgctgcctctgccgcccggccttgctg

SEQ ID NO: 15762 - DNA, 31 bp, Homo sapiens
  chr8:142243947-142243978
  hypo
aggtccagcaggtctgcggctggacctgact

SEQ ID NO: 15763 - DNA, 46 bp, Homo sapiens
  chr8:142290790-142290836
  hypo
catgggggtttttgttcgtgtaatgcgacagcgtgcagctccacac

SEQ ID NO: 15764 - DNA, 31 bp, Homo sapiens
  chr8:142290855-142290886
  hypo
aggacagagcctgactcgcacaggtaactgg

SEQ ID NO: 15765 - DNA, 57 bp, Homo sapiens
  chr8:142292570-142292627
  hypo
tgccctccctccaggccgccgctcagggcacgccgcctccatcgctgccctctctcc

SEQ ID NO: 15766 - DNA, 50 bp, Homo sapiens; identical to SEQ ID NO: 3440
  chr8:142297707-142297757
  hypo

SEQ ID NO: 15767 - DNA, 43 bp, Homo sapiens
  chr8:142349884-142349927
  hypo
tgagctgcaggctggccgccccccaccccgctgcacccccata

SEQ ID NO: 15768 - DNA, 31 bp, Homo sapiens
  chr8:142349956-142349987
  hypo
cacagctgggccctgacgcctctgtgccttg

SEQ ID NO: 15769 - DNA, 31 bp, Homo sapiens
  chr8:142350117-142350148
  hypo
gggccttgctccacctcgctctcctccattc

SEQ ID NO: 15770 - DNA, 53 bp, Homo sapiens
  chr8:142359674-142359727
  hypo
tacacatgaatgcctgcgtacatgtagacacacagacacgcaggcatgcataa

SEQ ID NO: 15771 - DNA, 60 bp, Homo sapiens
  chr8:142359752-142359812
  hypo
acactcacttaattctcgcaaccttgccttaaggcagagggtgtccgcaatctccccttg

SEQ ID NO: 15772 - DNA, 31 bp, Homo sapiens
  chr8:142359828-142359859
  hypo
aggcttaggaaagacacgtaacttgctgagg

SEQ ID NO: 15773 - DNA, 31 bp, Homo sapiens
  chr8:142374614-142374645
  hypo
ttctccctgtcccccacgcccacaggccagg

SEQ ID NO: 15774 - DNA, 31 bp, Homo sapiens
  chr8:142374657-142374688
  hypo
ccagtgcagagagagacgtcactggtgggca

SEQ ID NO: 15775 - DNA, 31 bp, Homo sapiens
  chr8:142374716-142374747
  hypo
tgggccccatctgacccgactctgcctcagt

SEQ ID NO: 15776 - DNA, 40 bp, Homo sapiens
  chr8:142374763-142374803
  hypo
cctcttgctgagactgcggctctaacggaaacaccagtgt

SEQ ID NO: 15777 - DNA, 31 bp, Homo sapiens
  chr8:142383100-142383131
  hypo
caaggaccccacagcccgggaaccccagggg

SEQ ID NO: 15778 - DNA, 39 bp, Homo sapiens
  chr8:142383152-142383191
  hypo
ccctcctgggcccaggcgcctgcccggggtggcccaggc

SEQ ID NO: 15779 - DNA, 47 bp, Homo sapiens
  chr8:142383258-142383305
  hypo
ggtcaagaacaggccacgtccccagcagggctcgggacctgctttct

SEQ ID NO: 15780 - DNA, 31 bp, Homo sapiens
  chr8:143353856-143353887
  hypo
ccatccatccaccacccgtctacagcttcct

SEQ ID NO: 15781 - DNA, 31 bp, Homo sapiens
  chr8:143360666-143360697
  hypo
caggcctccggccacacgacaccaggcggga

SEQ ID NO: 15782 - DNA, 31 bp, Homo sapiens
  chr8:143367814-143367845
  hypo
gtgatgcagaggcaggcggtccctctgcagg

SEQ ID NO: 15783 - DNA, 48 bp, Homo sapiens
  chr8:143369008-143369056
  hypo
gggctgccctccaggtcgtggaacccaggaccccggccagatctcagg

SEQ ID NO: 15784 - DNA, 43 bp, Homo sapiens
  chr8:143369085-143369128
  hypo
ctcagggacagtgggccgccctccaggtcgtgaaacccaggac

SEQ ID NO: 15785 - DNA, 31 bp, Homo sapiens
  chr8:143369222-143369253
  hypo
gtggaacccaggacctcggccagatctcagg

SEQ ID NO: 15786 - DNA, 71 bp, Homo sapiens
  chr8:143397306-143397377
  hypo
gtgcacccaccaagccgcgtgaaggagccattcgcttcacgaggaaactgcctgcacggaccacccaactc

SEQ ID NO: 15787 - DNA, 44 bp, Homo sapiens
  chr8:143397380-143397424
  hypo
tctcaccccacagaaacgcctctcagaatcgcaaccctccacca

SEQ ID NO: 15788 - DNA, 37 bp, Homo sapiens
  chr8:143397432-143397469
  hypo
cttgctcagcacctcacgtaagcgcagcgcctcccgt

SEQ ID NO: 15789 - DNA, 31 bp, Homo sapiens
  chr8:143400345-143400376
  hypo
gacacccagcaagagacgggggagacgggca

SEQ ID NO: 15790 - DNA, 31 bp, Homo sapiens
  chr8:143405791-143405822
  hypo
gtgactgaggagtctgcgaggcctgcctggg

SEQ ID NO: 15791 - DNA, 64 bp, Homo sapiens
  chr8:143410615-143410679
  hypo
acctaagagctaaggccggcccaggggagagccaaggtgccgggatactcggtcctcagaccag

SEQ ID NO: 15792 - DNA, 31 bp, Homo sapiens
  chr8:143410680-143410711
  hypo
acagtctcctactccacgctggggtcccctc

SEQ ID NO: 15793 - DNA, 31 bp, Homo sapiens
  chr8:143425489-143425520
  hypo
gacggctcgtaggtcccgccacttgtgcttc

SEQ ID NO: 15794 - DNA, 42 bp, Homo sapiens; identical to SEQ ID NO: 3441
  chr8:143429132-143429174
  hypo

SEQ ID NO: 15795 - DNA, 31 bp, Homo sapiens
  chr8:143557848-143557879
  hypo
ggtggcccagtgctgccgaactcagagcact

SEQ ID NO: 15796 - DNA, 59 bp, Homo sapiens
  chr8:143558485-143558544
  hypo
gccgaggagtggtccccgtggagcgtgtgctccagcacctgcggcgagggctggcagac

SEQ ID NO: 15797 - DNA, 97 bp, Homo sapiens
  chr8:143660375-143660472
  hypo
ctggaaatagggatgacgtcagagagagcctcaaaccgtcagcgttggccaccgccttgcactgcgcccatgcttggagccccgagccccaggccag

SEQ ID NO: 15798 - DNA, 37 bp, Homo sapiens
  chr8:143660651-143660688
  hypo
tgccggggccagagctcgactccgagggacccccagt

SEQ ID NO: 15799 - DNA, 31 bp, Homo sapiens
  chr8:143699027-143699058
  hypo
gagtcagctctctccccgcagccccagactg

SEQ ID NO: 15800 - DNA, 59 bp, Homo sapiens
  chr8:143699065-143699124
  hypo
cctggctgacccactccggcagggcctttctgggttgccaggagcgttcacagggcagc

SEQ ID NO: 15801 - DNA, 31 bp, Homo sapiens
  chr8:143699157-143699188
  hypo
ctggccctgctgatctcgggtgccggcagtt

SEQ ID NO: 15802 - DNA, 31 bp, Homo sapiens
  chr8:143843555-143843586
  hypo
gccacaggaatggtgtcggaattgaattgag

SEQ ID NO: 15803 - DNA, 31 bp, Homo sapiens
  chr8:143856622-143856653
  hypo
ccagggccagggtggccggggtggcaaggcc

SEQ ID NO: 15804 - DNA, 31 bp, Homo sapiens
  chr8:144093515-144093546
  hypo
tttccatcccagctgtcgcaaaatacaagga

SEQ ID NO: 15805 - DNA, 52 bp, Homo sapiens
  chr8:144292670-144292722
  hypo
tagggcagcaggaaagcggggcaccagggaagcggggcgacagggaggcggg

SEQ ID NO: 15806 - DNA, 101 bp, Homo sapiens
  chr8:144293589-144293690
  hypo
gccgagggcgagagggcgcagggaggcgggtgggggtggggccacgcgcggaggggcagggaagggcggggcggggcggggcgggacggggctggggggga

SEQ ID NO: 15807 - DNA, 51 bp, Homo sapiens
  chr8:144293705-144293756
  hypo
aagagtttggggctggcggggcgtgtccggctgtggcgtgggcaccactat

SEQ ID NO: 15808 - DNA, 31 bp, Homo sapiens
  chr8:144293862-144293893
  hypo
ggaaggatggttgactcggtggctgggacat

SEQ ID NO: 15809 - DNA, 31 bp, Homo sapiens
  chr8:144331530-144331561
  hypo
gtggagaaggagactacggcaggaaccaggg

SEQ ID NO: 15810 - DNA, 31 bp, Homo sapiens
  chr8:144333711-144333742
  hypo
ttttcagctgtttagacgtgaaacactaatc

SEQ ID NO: 15811 - DNA, 31 bp, Homo sapiens
  chr8:144334637-144334668
  hypo
gggggggttctgctctcgggaccacacacac

SEQ ID NO: 15812 - DNA, 31 bp, Homo sapiens
  chr8:144334669-144334700
  hypo
ggaggggcctccccagcgcaggtgagcaggt

SEQ ID NO: 15813 - DNA, 43 bp, Homo sapiens
  chr8:144335406-144335449
  hypo
cactgaggctcttggccgcagagcgtggcgtctgcagttcatg

SEQ ID NO: 15814 - DNA, 31 bp, Homo sapiens
  chr8:144343556-144343587
  hypo
agggctcctgagaagccggggcagggcaggg

SEQ ID NO: 15815 - DNA, 40 bp, Homo sapiens
  chr8:144343771-144343811
  hypo
acagaatccccagggtcgtgcgtggcggtgggggcgactt

SEQ ID NO: 15816 - DNA, 31 bp, Homo sapiens
  chr8:144343871-144343902
  hypo
cagggctctggcctgacgggggttcctggac

SEQ ID NO: 15817 - DNA, 99 bp, Homo sapiens
  chr8:144343912-144344011
  hypo
gccggcagcccctacccgcacccgtgcaccttccacgcccgtctccagcagcccctgcccccacccgcacccctgcacctgccacgcctgtctccggca

SEQ ID NO: 15818 - DNA, 31 bp, Homo sapiens
  chr8:144344707-144344738
  hypo
cgtttgttttcagctgcgctttctgtgactt

SEQ ID NO: 15819 - DNA, 55 bp, Homo sapiens
  chr8:144347180-144347235
  hypo
agctgcagcctgtcatcgagtcaattgcattgtcgtccgccgctctcctgatgta

SEQ ID NO: 15820 - DNA, 31 bp, Homo sapiens
  chr8:144347775-144347806
  hypo
tcacagttcagatcagcgttcagagggtgct

SEQ ID NO: 15821 - DNA, 31 bp, Homo sapiens
  chr8:144359678-144359709
  hypo
aggggagtctgggccacgaagctctgggaga

SEQ ID NO: 15822 - DNA, 31 bp, Homo sapiens
  chr8:144359867-144359898
  hypo
gactcatccagaaccccgggcctggccccca

SEQ ID NO: 15823 - DNA, 31 bp, Homo sapiens
  chr8:144360140-144360171
  hypo
gcccctgctgagacagcgggacctcgtttcc

SEQ ID NO: 15824 - DNA, 54 bp, Homo sapiens
  chr8:144360233-144360287
  hypo
agccccttggggaagacggccccaggctctgccagcccccgccaccctctccag

SEQ ID NO: 15825 - DNA, 102 bp, Homo sapiens
  chr8:144360301-144360403
  hypo
gccctatggccaccagcgctctggacgccccactctgccaggtgagaacgagtttaggggtgcgggctggaggtcagtgtgtctgtccgaagtcagctggga

SEQ ID NO: 15826 - DNA, 47 bp, Homo sapiens
  chr8:144360406-144360453
  hypo
aggcgcctacttgaggcgtccttgctggtgtgcggtgggcctggggt

SEQ ID NO: 15827 - DNA, 50 bp, Homo sapiens
  chr8:144360600-144360650
  hypo
gtcacctcggagcctccgggttcttctctggaaaacgggcttgctggggg

SEQ ID NO: 15828 - DNA, 31 bp, Homo sapiens
  chr8:144361757-144361788
  hypo
cacttatccttcctcacggagcctgtttctg

SEQ ID NO: 15829 - DNA, 69 bp, Homo sapiens
  chr8:144361792-144361861
  hypo
tgacaatggtggttagcgcagcccgctccgcaccgcacatggcggctgcaaggacggcatgggtggggt

SEQ ID NO: 15830 - DNA, 31 bp, Homo sapiens
  chr8:144361913-144361944
  hypo
agggctctgtcaacagcgtgagtggacagtc

SEQ ID NO: 15831 - DNA, 31 bp, Homo sapiens
  chr8:144386879-144386910
  hypo
acggtgcttctgtggccgcaggcgtgaggac

SEQ ID NO: 15832 - DNA, 55 bp, Homo sapiens
  chr8:144398062-144398117
  hypo
caccctacgtgcccaccgcagctggctcccaggcctgtgccgaggctctggggag

SEQ ID NO: 15833 - DNA, 31 bp, Homo sapiens
  chr8:144399475-144399506
  hypo
gaagctgagacagggccgtggacagaggccc

SEQ ID NO: 15834 - DNA, 36 bp, Homo sapiens
  chr8:144414247-144414283
  hypo
ggggggacacagccagcgtggcggctacagcccatc

SEQ ID NO: 15835 - DNA, 43 bp, Homo sapiens
  chr8:144414334-144414377
  hypo
ccctgaaccagcactgcgctgggtcctgcggatgcagatcacc

SEQ ID NO: 15836 - DNA, 31 bp, Homo sapiens
  chr8:144446233-144446264
  hypo
tcagttgtataaaacacgccacaggtgcatc

SEQ ID NO: 15837 - DNA, 31 bp, Homo sapiens
  chr8:144449873-144449904
  hypo
ctcagctccaaggctccgctgggcctgtggt

SEQ ID NO: 15838 - DNA, 31 bp, Homo sapiens
  chr8:144461394-144461425
  hypo
agcatccctagctggccgccctgagtgctgc

SEQ ID NO: 15839 - DNA, 31 bp, Homo sapiens
  chr8:144461463-144461494
  hypo
tgagcacccctccctccgcaggggccttcag

SEQ ID NO: 15840 - DNA, 34 bp, Homo sapiens
  chr8:144461504-144461538
  hypo
gagaacttctcccatgcgccgagcccagacatga

SEQ ID NO: 15841 - DNA, 31 bp, Homo sapiens
  chr8:144574934-144574965
  hypo
tccctcctcagggtcccgtgtcctggcccag

SEQ ID NO: 15842 - DNA, 31 bp, Homo sapiens
  chr8:144590272-144590303
  hypo
tgcagcctctgagaggcgggcaccagccccg

SEQ ID NO: 15843 - DNA, 191 bp, Homo sapiens; identical to SEQ ID NO: 3447
  chr8:144636577-144636768
  hypo

SEQ ID NO: 15844 - DNA, 101 bp, Homo sapiens; identical to SEQ ID NO: 3448
  chr8:144636785-144636886
  hypo

SEQ ID NO: 15845 - DNA, 31 bp, Homo sapiens; identical to SEQ ID NO: 3449
  chr8:144640707-144640738
  hypo

SEQ ID NO: 15846 - DNA, 31 bp, Homo sapiens
  chr8:144661900-144661931
  hypo
ggtctcagtctttaatcgtggcagggcctca

SEQ ID NO: 15847 - DNA, 45 bp, Homo sapiens
  chr8:144668813-144668858
  hypo
ctggcctggctgaatccgctttgtgtgccccggccactcctgtcg

SEQ ID NO: 15848 - DNA, 49 bp, Homo sapiens
  chr8:144668868-144668917
  hypo
ccgcccagccgccccacgtgcagctctcacctggcgggaggcacctgcc

SEQ ID NO: 15849 - DNA, 31 bp, Homo sapiens
  chr8:144676005-144676036
  hypo
tcatttccccgcttcccgcattcccaagcat

SEQ ID NO: 15850 - DNA, 76 bp, Homo sapiens
  chr8:144681633-144681709
  hypo
tacaagtgcctggctccggaggaggttgcggagtggctgcacctggacgatgatgggggtccgcccgagggctgca

SEQ ID NO: 15851 - DNA, 85 bp, Homo sapiens
  chr8:144681766-144681851
  hypo
cctctgccatggggggcggagaggacgaggaggaggccaccgactatggagggacctcagtgccgactgccggggaggccgtgcg

SEQ ID NO: 15852 - DNA, 54 bp, Homo sapiens; identical to SEQ ID NO: 3451
  chr8:144691795-144691849
  hypo

SEQ ID NO: 15853 - DNA, 31 bp, Homo sapiens
  chr8:145161407-145161438
  hypo
tttgtggggcacttggcgcctcacaccacct

SEQ ID NO: 15854 - DNA, 31 bp, Homo sapiens
  chr8:145161471-145161502
  hypo
tggactcagatcccttcggggaggatggtag

SEQ ID NO: 15855 - DNA, 84 bp, Homo sapiens
  chr8:145161520-145161604
  hypo
cttcttctacaacaagcggctcaagcgaatcgtcttctttagctgccgttccatcaggtgggcaccccccgcctcctcccccac

SEQ ID NO: 15856 - DNA, 31 bp, Homo sapiens; identical to SEQ ID NO: 3454
  chr8:145697428-145697459
  hypo

SEQ ID NO: 15857 - DNA, 31 bp, Homo sapiens; identical to SEQ ID NO: 3455
  chr8:145697478-145697509
  hypo

SEQ ID NO: 15858 - DNA, 65 bp, Homo sapiens; identical to SEQ ID NO: 3456
  chr8:145697521-145697586
  hypo

SEQ ID NO: 15859 - DNA, 31 bp, Homo sapiens
  chr8:145706678-145706709
  hypo
cccaggcaatagtgatcgctttctattactg

SEQ ID NO: 15860 - DNA, 31 bp, Homo sapiens
  chr8:145709415-145709446
  hypo
cttactgtgtcacctgcgccctaggttggtt

SEQ ID NO: 15861 - DNA, 31 bp, Homo sapiens
  chr8:145715362-145715393
  hypo
atctgcctggctccctcggtccttcacaaag

SEQ ID NO: 15862 - DNA, 39 bp, Homo sapiens
  chr8:145719388-145719427
  hypo
tgagaaacaagacaggcgttccgtcgggagtgtggctgc

SEQ ID NO: 15863 - DNA, 31 bp, Homo sapiens
  chr8:145728371-145728402
  hypo
ctcccttgccagggggcgggcaggggctggc

SEQ ID NO: 15864 - DNA, 31 bp, Homo sapiens
  chr8:145736699-145736730
  hypo
cattttggagcctcctcgttcccacaccctg

SEQ ID NO: 15865 - DNA, 31 bp, Homo sapiens
  chr8:145737999-145738030
  hypo
ctccaactgggcagggcgtgcttacctgtgg

SEQ ID NO: 15866 - DNA, 51 bp, Homo sapiens
  chr8:145738056-145738107
  hypo
cccagggcagttcagacggcaatgggtataggtggtcgccagcagctccag

SEQ ID NO: 15867 - DNA, 37 bp, Homo sapiens
  chr8:145738382-145738419
  hypo
cggccccttcctgctccgagggcggcctggtgcaggt

SEQ ID NO: 15868 - DNA, 31 bp, Homo sapiens
  chr8:145738424-145738455
  hypo
tgcaggctgggaacacgcgctgtaccagcct

SEQ ID NO: 15869 - DNA, 75 bp, Homo sapiens
  chr8:145738457-145738532
  hypo
tcacagccaggaagtccgtgctgtcggcgtgcacatgtctgcgcagctctcgcaggtcttcgccctgcagggcaa

SEQ ID NO: 15870 - DNA, 31 bp, Homo sapiens
  chr8:145738661-145738692
  hypo
gcctgcacgtagctctcgaagcttgggggca

SEQ ID NO: 15871 - DNA, 69 bp, Homo sapiens
  chr8:145738696-145738765
  hypo
cagatgcagcacagcccgcacatctggccggtccagccccatcccaaaggccaccgtggccaccaccac

SEQ ID NO: 15872 - DNA, 31 bp, Homo sapiens
  chr8:145751952-145751983
  hypo
atccgctgggcaggggcggggtgtcacacgc

SEQ ID NO: 15873 - DNA, 107 bp, Homo sapiens
  chr8:145753460-145753567
  hypo
agatagagggccaggccgtgataagtcccagcgtgcaggtgggggcggggaagctcaggaggtcctgaagctcgggaggtcctgaaccggcccgagcccacttttcc

SEQ ID NO: 15874 - DNA, 31 bp, Homo sapiens
  chr8:145753664-145753695
  hypo
tcagccaattctttcccgcaccttttccctc

SEQ ID NO: 15875 - DNA, 58 bp, Homo sapiens
  chr8:145763000-145763058
  hypo
cccccccgcccagaagcggttagagaagagaaggccaggcggccgaggctggagagca

SEQ ID NO: 15876 - DNA, 42 bp, Homo sapiens
  chr8:145770757-145770799
  hypo
tccaggcggaagttctcggtggtctgccggcacagctggatg

SEQ ID NO: 15877 - DNA, 100 bp, Homo sapiens
  chr8:145772640-145772740
  hypo
gccagcgcctcgtcctcgctgaaggcccgcaccaccggcccgggcatgggcagtggcagggcgccgtcgctctcgtagccagagccgtcctgctgggagt

SEQ ID NO: 15878 - DNA, 47 bp, Homo sapiens
  chr8:145772764-145772811
  hypo
ggaagtgggcctgctgcgcctcccaggccagccgagcctgcgccagg

SEQ ID NO: 15879 - DNA, 55 bp, Homo sapiens
  chr8:145772823-145772878
  hypo
gcgccccgcgccccttcggcctcaccttccgctcgcttcacgggggcgaggctgg

SEQ ID NO: 15880 - DNA, 31 bp, Homo sapiens
  chr8:145777265-145777296
  hypo
tcatagcccctcttcccgagcccagctcgtt

SEQ ID NO: 15881 - DNA, 36 bp, Homo sapiens
  chr8:145779198-145779234
  hypo
gggctgggccgcccaacgcagcggcaaggcctcttc

SEQ ID NO: 15882 - DNA, 31 bp, Homo sapiens
  chr8:145780239-145780270
  hypo
aatcgtctgtgcagaacgccagagccccctc

SEQ ID NO: 15883 - DNA, 47 bp, Homo sapiens
  chr8:145811090-145811137
  hypo
ggcctcccgaggatgtcgctggttgtggcagtcggctgtacacacca

SEQ ID NO: 15884 - DNA, 31 bp, Homo sapiens
  chr8:145811230-145811261
  hypo
gttgaaaggggctggacgggtgccctgcctt

SEQ ID NO: 15885 - DNA, 36 bp, Homo sapiens
  chr8:145813605-145813641
  hypo
caagacagagcagggccgccccgagggctcctgagc

SEQ ID NO: 15886 - DNA, 31 bp, Homo sapiens
  chr8:145813758-145813789
  hypo
tgagcctgcacctcctcgaacacttctctgc

SEQ ID NO: 15887 - DNA, 43 bp, Homo sapiens
  chr8:145813964-145814007
  hypo
gccatctggagaaactcggcccagggcccgaaggggaaggtaa

SEQ ID NO: 15888 - DNA, 31 bp, Homo sapiens
  chr8:145814033-145814064
  hypo
ggccacctgaagcccacggcctgtctccgtc

SEQ ID NO: 15889 - DNA, 51 bp, Homo sapiens
  chr8:145814543-145814594
  hypo
ggacacagaggctctgcgctgcctgtgccatttccacgtaaatctaagatt

SEQ ID NO: 15890 - DNA, 78 bp, Homo sapiens
  chr8:145814672-145814750
  hypo
atataagtagcacagtcggcctcatttcggagccagcagctgctcctccatgcaggcgtgtcccggcagggcctaccc

SEQ ID NO: 15891 - DNA, 48 bp, Homo sapiens
  chr8:145814777-145814825
  hypo
gctcaggggacaggagcgcccagagcagggcagcgggaagcccctcct

SEQ ID NO: 15892 - DNA, 31 bp, Homo sapiens
  chr8:145815416-145815447
  hypo
gccaacaagggtctctcgcctgtcatcctgc

SEQ ID NO: 15893 - DNA, 114 bp, Homo sapiens
  chr8:145815478-145815592
  hypo
gggacaccacatggcacgtgggacagaggccagagaagccttcccgacagggcctgacagaagatgccatcgacactgcggttggggcagggccatctccggaagatgccattg

SEQ ID NO: 15894 - DNA, 31 bp, Homo sapiens
  chr8:145823325-145823356
  hypo
aaatggaagaaaaggccggaggagattccca

SEQ ID NO: 15895 - DNA, 31 bp, Homo sapiens
  chr8:145823369-145823400
  hypo
gagggctaagaacacacggagatgctcaaac

SEQ ID NO: 15896 - DNA, 31 bp, Homo sapiens
  chr8:145823402-145823433
  hypo
accaggtaggaagccacgcagacccacccgc

SEQ ID NO: 15897 - DNA, 65 bp, Homo sapiens
  chr8:145826422-145826487
  hypo
tgtgtgcacatggaggcgtgcgtgcgagctcgtgtacctgtgtgcatgtgcgtggaggtgtgtgt

SEQ ID NO: 15898 - DNA, 19 bp, Homo sapiens
  chr8:145826500-145826519
  hypo
tgtgtgtgcatggaggcgt

SEQ ID NO: 15899 - DNA, 37 bp, Homo sapiens
  chr8:145826578-145826615
  hypo
tgtgtgcatgtgcgtggaggtgcgtgtgcaagctcat

SEQ ID NO: 15900 - DNA, 31 bp, Homo sapiens
  chr8:145827337-145827368
  hypo
tacctgtgttcatgtgcgtggaggtgcgtgt

SEQ ID NO: 15901 - DNA, 31 bp, Homo sapiens
  chr8:145828363-145828394
  hypo
tacctgtgtgcatgtgcgtggaggtgtgtgt

SEQ ID NO: 15902 - DNA, 31 bp, Homo sapiens
  chr8:145828567-145828598
  hypo
tgtgtgtgcgtggaggcgtgtgtgtgctcat

SEQ ID NO: 15903 - DNA, 65 bp, Homo sapiens
  chr8:145828605-145828670
  hypo
tgtgtgtgcctggaggcgtgcgtgtgtgctcgtgtacctgtgtgcatgtgcgtggaggtgtgtgt

SEQ ID NO: 15904 - DNA, 31 bp, Homo sapiens
  chr8:145829405-145829436
  hypo
atgaagaacgaacaaacgaatgaacaaggag

SEQ ID NO: 15905 - DNA, 31 bp, Homo sapiens
  chr8:145830861-145830892
  hypo
agcagttccacccactcgtgaggcccgggca

SEQ ID NO: 15906 - DNA, 38 bp, Homo sapiens
  chr8:145831494-145831532
  hypo
cagctgtccacacaggcgacactcgccggcagtcactg

SEQ ID NO: 15907 - DNA, 79 bp, Homo sapiens
  chr8:145843551-145843630
  hypo
cctttcaagaacccctcgcctgcctgcatggcaaagcccacccgagcccagtgccccttgtccccgccctctcccagac

SEQ ID NO: 15908 - DNA, 64 bp, Homo sapiens
  chr8:145844222-145844286
  hypo
tggcgtgagcaggaccgcgggcgcacagccaccgtggcgggcacagttgcgcactggtgacagc

SEQ ID NO: 15909 - DNA, 31 bp, Homo sapiens
  chr8:145844495-145844526
  hypo
ccccacctcacattgccggaaagttccagtc

SEQ ID NO: 15910 - DNA, 75 bp, Homo sapiens
  chr8:145844672-145844747
  hypo
ggtgccagaggcccctcgctccgagaagcgcgggtccccatccccgctccagggccggcacgcagcatgcatgtg

SEQ ID NO: 15911 - DNA, 49 bp, Homo sapiens
  chr8:145844887-145844936
  hypo
tgtgtccctgagaaagcgtgtgtgcctgtgtgcacgtgagcctgtgtcc

SEQ ID NO: 15912 - DNA, 31 bp, Homo sapiens
  chr8:145844937-145844968
  hypo
agacagcgtgagtacccgtgtgtgtgtgaga

SEQ ID NO: 15913 - DNA, 71 bp, Homo sapiens
  chr8:145845804-145845875
  hypo
agggagcgtgtgtgcccgtgtctgttagcctgtgtgtccaagggagcgtgtgtgcccgtgtctgttagcct

SEQ ID NO: 15914 - DNA, 46 bp, Homo sapiens
  chr8:145849041-145849087
  hypo
ttgcaggtgtgcagaacgccgacccaagaaacggaaaacacagatt

SEQ ID NO: 15915 - DNA, 53 bp, Homo sapiens
  chr8:145849123-145849176
  hypo
gcagggcatgaagcaacgtctgggcaaatgtcagaggccgcagcacccaggca

SEQ ID NO: 15916 - DNA, 31 bp, Homo sapiens
  chr8:145849178-145849209
  hypo
cctctgtcaaatgcaccgcccagaatcagga

SEQ ID NO: 15917 - DNA, 4 bp, Homo sapiens
  chr8:145852007-145852011
  hypo
ctgc

SEQ ID NO: 15918 - DNA, 97 bp, Homo sapiens
  chr8:145852063-145852160
  hypo
agtcctgacctccccacgtacaaggtggacccccacggcccgtctccaagaccaaggtctgccctcctaccggggacacgcccgcggctctgctggg

SEQ ID NO: 15919 - DNA, 31 bp, Homo sapiens
  chr8:145852645-145852676
  hypo
aagggggtccactggccgggcgcggtggctc

SEQ ID NO: 15920 - DNA, 70 bp, Homo sapiens
  chr8:145854281-145854351
  hypo
caccgaaatccagcttcgcattgccgcaccccatcacttttgcgcccgggaggacgcgtgcgattcttgt

SEQ ID NO: 15921 - DNA, 114 bp, Homo sapiens
  chr8:145854688-145854802
  hypo
gacccgcaggctctagcgggccgaaggcagagcacggccgtgagacctccagggctccaagagcagacccgcaggctccagcggggctgaggcggagcacggctgtgagacctc

SEQ ID NO: 15922 - DNA, 96 bp, Homo sapiens; identical to SEQ ID NO: 3462
  chr8:145911309-145911405
  hypo

SEQ ID NO: 15923 - DNA, 31 bp, Homo sapiens; identical to SEQ ID NO: 3463
  chr8:145911410-145911441
  hypo

SEQ ID NO: 15924 - DNA, 31 bp, Homo sapiens
  chr8:145979451-145979482
  hypo
agatcagactgatacccggggacaaggggca

SEQ ID NO: 15925 - DNA, 31 bp, Homo sapiens
  chr8:145979531-145979562
  hypo
tcagaggcccccactgcgaaccaggccaagt

SEQ ID NO: 15926 - DNA, 72 bp, Homo sapiens
  chr8:145979572-145979644
  hypo
tcacccagagaggccacgttcccatagttctccagcatcacatcccggtagagcgcccgctgctgggggccc

SEQ ID NO: 15927 - DNA, 17 bp, Homo sapiens
  chr8:146009536-146009553
  hypo
tacgtctccagaaaaaa

SEQ ID NO: 15928 - DNA, 31 bp, Homo sapiens
  chr8:146046146-146046177
  hypo
catggtctgaaaccctcgtatgaaggaggag

SEQ ID NO: 15929 - DNA, 31 bp, Homo sapiens
  chr8:146046220-146046251
  hypo
gcacaggtagggcccacggagtccttgaggc

SEQ ID NO: 15930 - DNA, 31 bp, Homo sapiens; identical to SEQ ID NO: 3465
  chr8:146052175-146052206
  hypo

SEQ ID NO: 15931 - DNA, 37 bp, Homo sapiens; identical to SEQ ID NO: 3466
  chr8:146078070-146078107
  hypo

SEQ ID NO: 15932 - DNA, 44 bp, Homo sapiens
  chr8:146079240-146079284
  hypo
ggctattagagaaatgcgaatggaagccacggggaggtgccatt

SEQ ID NO: 15933 - DNA, 68 bp, Homo sapiens
  chr8:146079311-146079379
  hypo
aatgacaggttgggtgcggtggctcacgcctgtaatcccagcactttgggaggcggaggtggacaacc

SEQ ID NO: 15934 - DNA, 58 bp, Homo sapiens
  chr8:146176521-146176579
  hypo
ccagaatcggaacagacggtagtttgataaaaacctaaggatacgttttttggaagaa

SEQ ID NO: 15935 - DNA, 31 bp, Homo sapiens
  chr9:377163-377194
  hypo
agctcttccagctgtccgtgcagcccatggt

SEQ ID NO: 15936 - DNA, 31 bp, Homo sapiens
  chr9:792361-792392
  hypo
aaggaaggcatggagccgccagggtgaacaa

SEQ ID NO: 15937 - DNA, 79 bp, Homo sapiens
  chr9:2718778-2718857
  hypo
accttcagctgctgctcgagtgcttcacgggcgagggccaccaacgcggccagacggtgggcagcgtgggtaaggtggg

SEQ ID NO: 15938 - DNA, 31 bp, Homo sapiens
  chr9:4622942-4622973
  hypo
acattcctctctggtccgagtatctacattt

SEQ ID NO: 15939 - DNA, 31 bp, Homo sapiens
  chr9:4714887-4714918
  hypo
gtctcgctgagttctacgtgtgggagctgag

SEQ ID NO: 15940 - DNA, 35 bp, Homo sapiens
  chr9:4714919-4714954
  hypo
atgaaaagactgaattcggccgggtgtggtggctc

SEQ ID NO: 15941 - DNA, 31 bp, Homo sapiens
  chr9:4771251-4771282
  hypo
tgctatcttctttggccgggtgcagtggctc

SEQ ID NO: 15942 - DNA, 31 bp, Homo sapiens
  chr9:4864559-4864590
  hypo
tcaggtaccctgagcacgggcctgggatcgg

SEQ ID NO: 15943 - DNA, 44 bp, Homo sapiens
  chr9:4987436-4987480
  hypo
agagttgcattatttacggctggtcatggtggctcacgcctgta

SEQ ID NO: 15944 - DNA, 42 bp, Homo sapiens
  chr9:5418575-5418617
  hypo
atggtcaccacagtgacggacttctgccggttcctgggcagc

SEQ ID NO: 15945 - DNA, 280 bp, Homo sapiens; identical to SEQ ID NO: 3472
  chr9:6412570-6412850
  hypo

SEQ ID NO: 15946 - DNA, 31 bp, Homo sapiens; identical to SEQ ID NO: 3473
  chr9:6412869-6412900
  hypo

SEQ ID NO: 15947 - DNA, 55 bp, Homo sapiens; identical to SEQ ID NO: 3474
  chr9:6412929-6412984
  hypo

SEQ ID NO: 15948 - DNA, 29 bp, Homo sapiens
  chr9:6462993-6463022
  hypo
tgagtgggccaggtgccgtggctcacgcc

SEQ ID NO: 15949 - DNA, 31 bp, Homo sapiens
  chr9:7164554-7164585
  hypo
gtgtctttagaagggccgtgctaaacaggac

SEQ ID NO: 15950 - DNA, 34 bp, Homo sapiens
  chr9:7164588-7164622
  hypo
cccacccagctccacccgccgtgctgcaggtgct

SEQ ID NO: 15951 - DNA, 45 bp, Homo sapiens
  chr9:7164643-7164688
  hypo
tattggcaagtcctaccggcttcaatcgcacgccatttgtcccct

SEQ ID NO: 15952 - DNA, 31 bp, Homo sapiens
  chr9:10964598-10964629
  hypo
cacggtggacacacagcgtgattacgatttt

SEQ ID NO: 15953 - DNA, 24 bp, Homo sapiens
  chr9:12725577-12725601
  hypo
caccgcgcccggcctccatcattt

SEQ ID NO: 15954 - DNA, 31 bp, Homo sapiens; identical to SEQ ID NO: 3476
  chr9:12776574-12776605
  hypo

SEQ ID NO: 15955 - DNA, 31 bp, Homo sapiens
  chr9:12776617-12776648
  hypo
aaaacaatggcctactcgtccttgatgtact

SEQ ID NO: 15956 - DNA, 155 bp, Homo sapiens; identical to SEQ ID NO: 3477
  chr9:13279298-13279453
  hypo

SEQ ID NO: 15957 - DNA, 31 bp, Homo sapiens; identical to SEQ ID NO: 3478
  chr9:13279546-13279577
  hypo

SEQ ID NO: 15958 - DNA, 173 bp, Homo sapiens; identical to SEQ ID NO: 3479
  chr9:13279597-13279770
  hypo

SEQ ID NO: 15959 - DNA, 31 bp, Homo sapiens
  chr9:13753040-13753071
  hypo
ctccaactctgggacacgatgccagggcttc

SEQ ID NO: 15960 - DNA, 83 bp, Homo sapiens
  chr9:13753090-13753173
  hypo
accacatctgtccatccgtgtctctccagcccaacctccctgggccgtgattttctagctactttcaccgagcacctggttgt

SEQ ID NO: 15961 - DNA, 31 bp, Homo sapiens
  chr9:13753202-13753233
  hypo
gactttttaaagcattcggtcttaagccagg

SEQ ID NO: 15962 - DNA, 22 bp, Homo sapiens
  chr9:14053523-14053545
  hypo
ctcggggcggggtgggaagtgt

SEQ ID NO: 15963 - DNA, 31 bp, Homo sapiens
  chr9:14232122-14232153
  hypo
gtagcgagggaaggagcgacaccatggctag

SEQ ID NO: 15964 - DNA, 31 bp, Homo sapiens
  chr9:14232178-14232209
  hypo
gttaggaagaaaaaaacgtatgccatggtgg

SEQ ID NO: 15965 - DNA, 61 bp, Homo sapiens
  chr9:14232273-14232334
  hypo
gacaataatgagaccccgtaaagcatctgcttagggattacgaccccgtcacactgggaat

SEQ ID NO: 15966 - DNA, 105 bp, Homo sapiens; identical to SEQ ID NO: 3481
  chr9:14313927-14314032
  hypo

SEQ ID NO: 15967 - DNA, 135 bp, Homo sapiens; identical to SEQ ID NO: 3482
  chr9:14314038-14314173
  hypo

SEQ ID NO: 15968 - DNA, 86 bp, Homo sapiens; identical to SEQ ID NO: 3483
  chr9:14314196-14314282
  hypo

SEQ ID NO: 15969 - DNA, 31 bp, Homo sapiens; identical to SEQ ID NO: 3484
  chr9:14314538-14314569
  hypo

SEQ ID NO: 15970 - DNA, 39 bp, Homo sapiens; identical to SEQ ID NO: 3485
  chr9:14315070-14315109
  hypo

SEQ ID NO: 15971 - DNA, 411 bp, Homo sapiens; identical to SEQ ID NO: 3486
  chr9:14315263-14315674
  hypo

SEQ ID NO: 15972 - DNA, 31 bp, Homo sapiens; identical to SEQ ID NO: 3487
  chr9:14315779-14315810
  hypo

SEQ ID NO: 15973 - DNA, 43 bp, Homo sapiens; identical to SEQ ID NO: 3488
  chr9:14322292-14322335
  hypo

SEQ ID NO: 15974 - DNA, 181 bp, Homo sapiens; identical to SEQ ID NO: 3489
  chr9:14322352-14322533
  hypo

SEQ ID NO: 15975 - DNA, 383 bp, Homo sapiens; identical to SEQ ID NO: 3490
  chr9:14322614-14322997
  hypo

SEQ ID NO: 15976 - DNA, 31 bp, Homo sapiens; identical to SEQ ID NO: 3491
  chr9:14323107-14323138
  hypo

SEQ ID NO: 15977 - DNA, 31 bp, Homo sapiens
  chr9:14428822-14428853
  hypo
cttcagaaaacagagacgtctggtaagatta

SEQ ID NO: 15978 - DNA, 22 bp, Homo sapiens
  chr9:15200707-15200729
  hypo
agatgctctggctgggcgtggt

SEQ ID NO: 15979 - DNA, 31 bp, Homo sapiens; identical to SEQ ID NO: 3493
  chr9:15306648-15306679
  hypo

SEQ ID NO: 15980 - DNA, 113 bp, Homo sapiens; identical to SEQ ID NO: 3494
  chr9:15306719-15306832
  hypo

SEQ ID NO: 15981 - DNA, 31 bp, Homo sapiens; identical to SEQ ID NO: 3495
  chr9:15306895-15306926
  hypo

SEQ ID NO: 15982 - DNA, 134 bp, Homo sapiens; identical to SEQ ID NO: 3496
  chr9:15306998-15307132
  hypo

SEQ ID NO: 15983 - DNA, 31 bp, Homo sapiens
  chr9:15343233-15343264
  hypo
tttttttttttttttgcgaaggactttagct

SEQ ID NO: 15984 - DNA, 64 bp, Homo sapiens
  chr9:15527747-15527811
  hypo
ggggcagtcccagggcgcggtgaagaggtgacggagggctggctatgggcggctggccggggta

SEQ ID NO: 15985 - DNA, 31 bp, Homo sapiens
  chr9:15701646-15701677
  hypo
ggctcactgcaacctccgcctctccggagta

SEQ ID NO: 15986 - DNA, 29 bp, Homo sapiens
  chr9:15810502-15810531
  hypo
tggggctcgggcatggcgggctgcaggtc

SEQ ID NO: 15987 - DNA, 28 bp, Homo sapiens
  chr9:15810710-15810738
  hypo
gcccacgcccacccggaactcgcgctgc

SEQ ID NO: 15988 - DNA, 34 bp, Homo sapiens
  chr9:16828976-16829010
  hypo
tgtgtgagcaggggggcggcggggtgggctgggc

SEQ ID NO: 15989 - DNA, 31 bp, Homo sapiens
  chr9:18527897-18527928
  hypo
tggagtcttgctctgtcgcccaggctggaat

SEQ ID NO: 15990 - DNA, 22 bp, Homo sapiens
  chr9:19223394-19223416
  hypo
ccagctatgggccgggcgcagt

SEQ ID NO: 15991 - DNA, 31 bp, Homo sapiens
  chr9:19289482-19289513
  hypo
ataaaaataatggcaacgactaacgtataaa

SEQ ID NO: 15992 - DNA, 18 bp, Homo sapiens
  chr9:19396542-19396560
  hypo
gcccgatgagaaagatta

SEQ ID NO: 15993 - DNA, 31 bp, Homo sapiens
  chr9:19414879-19414910
  hypo
tattctacaatttcagcgaccaatacaattt

SEQ ID NO: 15994 - DNA, 21 bp, Homo sapiens
  chr9:20514950-20514971
  hypo
ttttttttttttgagacggag

SEQ ID NO: 15995 - DNA, 170 bp, Homo sapiens; identical to SEQ ID NO: 3499
  chr9:20621047-20621217
  hypo

SEQ ID NO: 15996 - DNA, 34 bp, Homo sapiens; identical to SEQ ID NO: 3500
  chr9:20621272-20621306
  hypo

SEQ ID NO: 15997 - DNA, 276 bp, Homo sapiens; identical to SEQ ID NO: 3501
  chr9:20621639-20621915
  hypo

SEQ ID NO: 15998 - DNA, 31 bp, Homo sapiens; identical to SEQ ID NO: 3502
  chr9:20622091-20622122
  hypo

SEQ ID NO: 15999 - DNA, 70 bp, Homo sapiens; identical to SEQ ID NO: 3503
  chr9:20622136-20622206
  hypo

SEQ ID NO: 16000 - DNA, 41 bp, Homo sapiens; identical to SEQ ID NO: 3504
  chr9:20622217-20622258
  hypo

SEQ ID NO: 16001 - DNA, 42 bp, Homo sapiens; identical to SEQ ID NO: 3505
  chr9:21031411-21031453
  hypo

SEQ ID NO: 16002 - DNA, 31 bp, Homo sapiens; identical to SEQ ID NO: 3506
  chr9:21802621-21802652
  hypo

SEQ ID NO: 16003 - DNA, 31 bp, Homo sapiens
  chr9:26936773-26936804
  hypo
gttgttgcacctcccccggttgatgcaagcc

SEQ ID NO: 16004 - DNA, 31 bp, Homo sapiens
  chr9:33000028-33000059
  hypo
caatatagaacagtggcgaagatcaaggtct

SEQ ID NO: 16005 - DNA, 31 bp, Homo sapiens
  chr9:33409492-33409523
  hypo
agctccctccatgtaacgtgtcagaatttcc

SEQ ID NO: 16006 - DNA, 16 bp, Homo sapiens
  chr9:33411412-33411428
  hypo
tcgcaggccaagcccc

SEQ ID NO: 16007 - DNA, 39 bp, Homo sapiens
  chr9:33411487-33411526
  hypo
tttcccctttttgagacggagtctcgctctgttgcccag

SEQ ID NO: 16008 - DNA, 6 bp, Homo sapiens
  chr9:33411527-33411533
  hypo
ctggag

SEQ ID NO: 16009 - DNA, 32 bp, Homo sapiens
  chr9:33438854-33438886
  hypo
gagccaccgtgcccggccgggagaagacacct

SEQ ID NO: 16010 - DNA, 54 bp, Homo sapiens
  chr9:33442911-33442965
  hypo
ctgtgccattggggcccgaaacaaaaagctggttgtcggcgaagtgccagattg

SEQ ID NO: 16011 - DNA, 31 bp, Homo sapiens
  chr9:33466348-33466379
  hypo
gggcagcagtgaggaccgctcccgcagagtc

SEQ ID NO: 16012 - DNA, 31 bp, Homo sapiens
  chr9:34063264-34063295
  hypo
gctattgaaggttgtacgctttcagagagaa

SEQ ID NO: 16013 - DNA, 35 bp, Homo sapiens
  chr9:34148341-34148376
  hypo
agaaaaaaaggcaggccgggcgtggtggctcacac

SEQ ID NO: 16014 - DNA, 31 bp, Homo sapiens
  chr9:34372617-34372648
  hypo
ctctcccttctgattgcggatggagaagccg

SEQ ID NO: 16015 - DNA, 36 bp, Homo sapiens
  chr9:34372947-34372983
  hypo
gctgctaagaaaggagcgggccgtggggccatctga

SEQ ID NO: 16016 - DNA, 31 bp, Homo sapiens
  chr9:34583938-34583969
  hypo
ctggagagaggggctacgcaaagacctggga

SEQ ID NO: 16017 - DNA, 34 bp, Homo sapiens; identical to SEQ ID NO: 3510
  chr9:35072283-35072317
  hypo

SEQ ID NO: 16018 - DNA, 167 bp, Homo sapiens; identical to SEQ ID NO: 3511
  chr9:35161858-35162025
  hypo

SEQ ID NO: 16019 - DNA, 31 bp, Homo sapiens
  chr9:35608229-35608260
  hypo
ccatccactgctgcaacgtaagagcctcaca

SEQ ID NO: 16020 - DNA, 31 bp, Homo sapiens
  chr9:35608272-35608303
  hypo
ccaccctgcccccatccgtaagctgccatgg

SEQ ID NO: 16021 - DNA, 105 bp, Homo sapiens
  chr9:35609215-35609320
  hypo
caggtcctggccctcccgctgtgggcccctcggctgaagagaagatggagtgcgagggcagcagccctgagccggaacctccagggccagcgccccagctgcctc

SEQ ID NO: 16022 - DNA, 31 bp, Homo sapiens
  chr9:35694371-35694402
  hypo
tgtaacaccgtgcattcgtcatatggaaaat

SEQ ID NO: 16023 - DNA, 31 bp, Homo sapiens; identical to SEQ ID NO: 3519
  chr9:35700411-35700442
  hypo

SEQ ID NO: 16024 - DNA, 71 bp, Homo sapiens
  chr9:35712950-35713021
  hypo
gcactgcaggatctgacgtcagtgcagcgactcccctagcggcctgggccagtgaccgcagcccacctgcc

SEQ ID NO: 16025 - DNA, 54 bp, Homo sapiens; identical to SEQ ID NO: 3520
  chr9:36257375-36257429
  hypo

SEQ ID NO: 16026 - DNA, 43 bp, Homo sapiens; identical to SEQ ID NO: 3521
  chr9:36258085-36258128
  hypo

SEQ ID NO: 16027 - DNA, 62 bp, Homo sapiens; identical to SEQ ID NO: 3522
  chr9:36258154-36258216
  hypo

SEQ ID NO: 16028 - DNA, 41 bp, Homo sapiens; identical to SEQ ID NO: 3523
  chr9:36258271-36258312
  hypo

SEQ ID NO: 16029 - DNA, 26 bp, Homo sapiens
  chr9:36274725-36274751
  hypo
tttttttctcttgagacggagtctcg

SEQ ID NO: 16030 - DNA, 51 bp, Homo sapiens
  chr9:36303886-36303937
  hypo
ataatccttcatttcccgatcatagcacacttcatccgcctttgccatttc

SEQ ID NO: 16031 - DNA, 30 bp, Homo sapiens
  chr9:36483383-36483413
  hypo
aaaaaaaaagaaaagcgtacctgggcaatg

SEQ ID NO: 16032 - DNA, 31 bp, Homo sapiens
  chr9:36880260-36880291
  hypo
gtgtggacacccagcccgcacatccaagctc

SEQ ID NO: 16033 - DNA, 31 bp, Homo sapiens; identical to SEQ ID NO: 3526
  chr9:37026621-37026652
  hypo

SEQ ID NO: 16034 - DNA, 56 bp, Homo sapiens; identical to SEQ ID NO: 3527
  chr9:37026766-37026822
  hypo

SEQ ID NO: 16035 - DNA, 120 bp, Homo sapiens; identical to SEQ ID NO: 3528
  chr9:37026830-37026950
  hypo

SEQ ID NO: 16036 - DNA, 224 bp, Homo sapiens; identical to SEQ ID NO: 3529
  chr9:37027047-37027271
  hypo

SEQ ID NO: 16037 - DNA, 115 bp, Homo sapiens; identical to SEQ ID NO: 3530
  chr9:37027324-37027439
  hypo

SEQ ID NO: 16038 - DNA, 339 bp, Homo sapiens; identical to SEQ ID NO: 3531
  chr9:37027531-37027870
  hypo

SEQ ID NO: 16039 - DNA, 47 bp, Homo sapiens; identical to SEQ ID NO: 3538
  chr9:37036567-37036614
  hypo

SEQ ID NO: 16040 - DNA, 31 bp, Homo sapiens; identical to SEQ ID NO: 3539
  chr9:37036615-37036646
  hypo

SEQ ID NO: 16041 - DNA, 31 bp, Homo sapiens; identical to SEQ ID NO: 3540
  chr9:37036669-37036700
  hypo

SEQ ID NO: 16042 - DNA, 38 bp, Homo sapiens
  chr9:37122904-37122942
  hypo
acctgggggacagaacgagactccgtctcaagggggaa

SEQ ID NO: 16043 - DNA, 31 bp, Homo sapiens
  chr9:37377485-37377516
  hypo
aatggagccttgaggccgggtgcggtggctc

SEQ ID NO: 16044 - DNA, 31 bp, Homo sapiens
  chr9:37414528-37414559
  hypo
gctggccaaggggtcccgactgggctctctg

SEQ ID NO: 16045 - DNA, 31 bp, Homo sapiens
  chr9:37414578-37414609
  hypo
gctcatgtctcttgtacgagagcatcagctt

SEQ ID NO: 16046 - DNA, 83 bp, Homo sapiens
  chr9:37414623-37414706
  hypo
aaagcccaggcagggccggggtgaaagccacactgcgccttgcctgctgcgcgtcatcggaaaatgttcgccccatctgggct

SEQ ID NO: 16047 - DNA, 31 bp, Homo sapiens
  chr9:37432302-37432333
  hypo
aggagcagtcctcttgcgcatgctctgctgg

SEQ ID NO: 16048 - DNA, 17 bp, Homo sapiens
  chr9:37432385-37432402
  hypo
aaaagagtgggccaggc

SEQ ID NO: 16049 - DNA, 31 bp, Homo sapiens
  chr9:37918142-37918173
  hypo
ggccagggatgacagtcgtcaaacttctagt

SEQ ID NO: 16050 - DNA, 31 bp, Homo sapiens
  chr9:37919798-37919829
  hypo
cagggcaggtctggtccgctcacagggtcct

SEQ ID NO: 16051 - DNA, 76 bp, Homo sapiens
  chr9:37935348-37935424
  hypo
aggttgtgttcggcctcggtggggcatacgcctttagtgccaggaggaaatgacgggcacacggcttgctctctgg

SEQ ID NO: 16052 - DNA, 31 bp, Homo sapiens
  chr9:37935503-37935534
  hypo
ctcatctctctgagcccgtctccttcagcgt

SEQ ID NO: 16053 - DNA, 39 bp, Homo sapiens
  chr9:37935688-37935727
  hypo
catacagctagtaagacgcagaatcgagatctgaaccag

SEQ ID NO: 16054 - DNA, 31 bp, Homo sapiens
  chr9:37935750-37935781
  hypo
tctaccttcttagccacgatactctatgctt

SEQ ID NO: 16055 - DNA, 31 bp, Homo sapiens
  chr9:37948877-37948908
  hypo
atgggtacccactgcccgcctgctgctgccg

SEQ ID NO: 16056 - DNA, 31 bp, Homo sapiens
  chr9:37948935-37948966
  hypo
acccagtctcttttcacgggaagcttatgct

SEQ ID NO: 16057 - DNA, 31 bp, Homo sapiens
  chr9:37955882-37955913
  hypo
tgcttctccagggggacggcaggatccaccc

SEQ ID NO: 16058 - DNA, 31 bp, Homo sapiens
  chr9:37973846-37973877
  hypo
cagggctagctcagctcgcagcactgggtgg

SEQ ID NO: 16059 - DNA, 31 bp, Homo sapiens
  chr9:37974529-37974560
  hypo
tggagtttgtcctgagcgcaggtggggacca

SEQ ID NO: 16060 - DNA, 35 bp, Homo sapiens
  chr9:37985464-37985499
  hypo
ccagtgactgcctttgcgtgcggaggcctctaagc

SEQ ID NO: 16061 - DNA, 31 bp, Homo sapiens
  chr9:37985848-37985879
  hypo
agtgagcgcctgcctgcgccaggcactgtcc

SEQ ID NO: 16062 - DNA, 31 bp, Homo sapiens; identical to SEQ ID NO: 3541
  chr9:37998734-37998765
  hypo

SEQ ID NO: 16063 - DNA, 74 bp, Homo sapiens
  chr9:38012922-38012996
  hypo
cccaccatctccccttcgaaaagcttcacgtcagctctgcaagcctcctggagcatctacgcactgatggctca

SEQ ID NO: 16064 - DNA, 31 bp, Homo sapiens
  chr9:38013020-38013051
  hypo
tcaatcactggggtgacgccacaaagaatta

SEQ ID NO: 16065 - DNA, 31 bp, Homo sapiens
  chr9:38013076-38013107
  hypo
gagcttcagcaaggatcgttacaaacagaaa

SEQ ID NO: 16066 - DNA, 22 bp, Homo sapiens
  chr9:38033454-38033476
  hypo
aagatcacttgagcccgcgagt

SEQ ID NO: 16067 - DNA, 31 bp, Homo sapiens
  chr9:38033550-38033581
  hypo
agttgaccaatcatttcggaagggcttggag

SEQ ID NO: 16068 - DNA, 31 bp, Homo sapiens
  chr9:38033585-38033616
  hypo
tccacctgagtggtctcgttacactccccct

SEQ ID NO: 16069 - DNA, 37 bp, Homo sapiens
  chr9:38042760-38042797
  hypo
cgacctggcccagcctcgaagtcgaattcctgttaat

SEQ ID NO: 16070 - DNA, 31 bp, Homo sapiens
  chr9:38042804-38042835
  hypo
atccccaccaaatgtccgccccaggccaggc

SEQ ID NO: 16071 - DNA, 44 bp, Homo sapiens
  chr9:38042924-38042968
  hypo
gctgctcaaactcccccggtctgccagaccgcccacaaccccac

SEQ ID NO: 16072 - DNA, 34 bp, Homo sapiens; identical to SEQ ID NO: 3542
  chr9:38067950-38067984
  hypo

SEQ ID NO: 16073 - DNA, 96 bp, Homo sapiens; identical to SEQ ID NO: 3543
  chr9:38067990-38068086
  hypo

SEQ ID NO: 16074 - DNA, 106 bp, Homo sapiens; identical to SEQ ID NO: 3544
  chr9:38068491-38068597
  hypo

SEQ ID NO: 16075 - DNA, 76 bp, Homo sapiens; identical to SEQ ID NO: 3545
  chr9:38068628-38068704
  hypo

SEQ ID NO: 16076 - DNA, 75 bp, Homo sapiens; identical to SEQ ID NO: 3546
  chr9:38068832-38068907
  hypo

SEQ ID NO: 16077 - DNA, 31 bp, Homo sapiens
  chr9:38131871-38131902
  hypo
aatggagcacttgtctcgcgccaggccctgt

SEQ ID NO: 16078 - DNA, 31 bp, Homo sapiens
  chr9:38290208-38290239
  hypo
acccaagccagaggcccgcaagtagtccaag

SEQ ID NO: 16079 - DNA, 45 bp, Homo sapiens
  chr9:38290342-38290387
  hypo
ggcttcatcctcttatcgggacctccatagcggccttcttattgg

SEQ ID NO: 16080 - DNA, 31 bp, Homo sapiens
  chr9:38425342-38425373
  hypo
catcctttggttaatacgaataatgctttga

SEQ ID NO: 16081 - DNA, 21 bp, Homo sapiens
  chr9:66494098-66494119
  hypo
agtcggcggagcatggtctgg

SEQ ID NO: 16082 - DNA, 35 bp, Homo sapiens; identical to SEQ ID NO: 3553
  chr9:66494122-66494157
  hypo

SEQ ID NO: 16083 - DNA, 65 bp, Homo sapiens; identical to SEQ ID NO: 3554
  chr9:66494170-66494235
  hypo

SEQ ID NO: 16084 - DNA, 36 bp, Homo sapiens
  chr9:71655283-71655319
  hypo
tatgtaaatatttatacgctgccgggcgcggtggct

SEQ ID NO: 16085 - DNA, 31 bp, Homo sapiens
  chr9:71734815-71734846
  hypo
caaccagttctgccatcgcagataggaacag

SEQ ID NO: 16086 - DNA, 38 bp, Homo sapiens
  chr9:71734852-71734890
  hypo
tatgaaaacctaacttcgacccccgcctgattccatct

SEQ ID NO: 16087 - DNA, 43 bp, Homo sapiens; identical to SEQ ID NO: 3556
  chr9:71736562-71736605
  hypo

SEQ ID NO: 16088 - DNA, 41 bp, Homo sapiens; identical to SEQ ID NO: 3559
  chr9:71788700-71788741
  hypo

SEQ ID NO: 16089 - DNA, 31 bp, Homo sapiens; identical to SEQ ID NO: 3560
  chr9:71788789-71788820
  hypo

SEQ ID NO: 16090 - DNA, 49 bp, Homo sapiens; identical to SEQ ID NO: 3561
  chr9:71788827-71788876
  hypo

SEQ ID NO: 16091 - DNA, 36 bp, Homo sapiens
  chr9:71800809-71800845
  hypo
tttctttttttggagacggagtctcggttgcgcctg

SEQ ID NO: 16092 - DNA, 31 bp, Homo sapiens
  chr9:71836312-71836343
  hypo
cgcagccgcgagcacccgcactcacggagcc

SEQ ID NO: 16093 - DNA, 31 bp, Homo sapiens; identical to SEQ ID NO: 3567
  chr9:71881715-71881746
  hypo

SEQ ID NO: 16094 - DNA, 31 bp, Homo sapiens
  chr9:71884367-71884398
  hypo
atctattccaattacacgtttccaaaatggg

SEQ ID NO: 16095 - DNA, 31 bp, Homo sapiens
  chr9:72271625-72271656
  hypo
actattcaagttacatcgcaatttaaaaaca

SEQ ID NO: 16096 - DNA, 31 bp, Homo sapiens; identical to SEQ ID NO: 3573
  chr9:72374873-72374904
  hypo

SEQ ID NO: 16097 - DNA, 31 bp, Homo sapiens; identical to SEQ ID NO: 3574
  chr9:72874087-72874118
  hypo

SEQ ID NO: 16098 - DNA, 72 bp, Homo sapiens; identical to SEQ ID NO: 3575
  chr9:73027930-73028002
  hypo

SEQ ID NO: 16099 - DNA, 40 bp, Homo sapiens; identical to SEQ ID NO: 3578
  chr9:73028998-73029038
  hypo

SEQ ID NO: 16100 - DNA, 31 bp, Homo sapiens; identical to SEQ ID NO: 3579
  chr9:73035699-73035730
  hypo

SEQ ID NO: 16101 - DNA, 31 bp, Homo sapiens
  chr9:73152152-73152183
  hypo
tttgttggactcggcccgctccagacctgtc

SEQ ID NO: 16102 - DNA, 31 bp, Homo sapiens
  chr9:73220268-73220299
  hypo
aaagggtgaagtatgtcggagttaaataaga

SEQ ID NO: 16103 - DNA, 31 bp, Homo sapiens
  chr9:73984602-73984633
  hypo
cagtcaatttttcaatcggggttatggttga

SEQ ID NO: 16104 - DNA, 17 bp, Homo sapiens
  chr9:74249330-74249347
  hypo
ggcgtgagcccctccat

SEQ ID NO: 16105 - DNA, 31 bp, Homo sapiens
  chr9:74418834-74418865
  hypo
gagttggtcagtcaaccgggagtatgacttg

SEQ ID NO: 16106 - DNA, 31 bp, Homo sapiens
  chr9:74622982-74623013
  hypo
gcagcgtgtatttccgcgtgaagcaccggga

SEQ ID NO: 16107 - DNA, 59 bp, Homo sapiens; identical to SEQ ID NO: 3581
  chr9:74639986-74640045
  hypo

SEQ ID NO: 16108 - DNA, 47 bp, Homo sapiens; identical to SEQ ID NO: 3582
  chr9:74640069-74640116
  hypo

SEQ ID NO: 16109 - DNA, 31 bp, Homo sapiens; identical to SEQ ID NO: 3583
  chr9:74640148-74640179
  hypo

SEQ ID NO: 16110 - DNA, 31 bp, Homo sapiens
  chr9:74794875-74794906
  hypo
cattctgaattactggcggggggggttagga

SEQ ID NO: 16111 - DNA, 36 bp, Homo sapiens
  chr9:74794979-74795015
  hypo
tttaaaaatggccatccgggcgcggtggctcacacc

SEQ ID NO: 16112 - DNA, 31 bp, Homo sapiens
  chr9:75005075-75005106
  hypo
aagttgccctgaagaacgctggagaaacttt

SEQ ID NO: 16113 - DNA, 31 bp, Homo sapiens
  chr9:75005113-75005144
  hypo
gagctggagcctcagtcgaagatgtccaata

SEQ ID NO: 16114 - DNA, 31 bp, Homo sapiens
  chr9:75005174-75005205
  hypo
acactcatgatagagacgaaggaattgtcaa

SEQ ID NO: 16115 - DNA, 1 bp, Homo sapiens
  chr9:75005237-75005238
  hypo
t

SEQ ID NO: 16116 - DNA, 25 bp, Homo sapiens
  chr9:75042116-75042141
  hypo
ttttttttttttgagacgacggagt

SEQ ID NO: 16117 - DNA, 31 bp, Homo sapiens
  chr9:75049395-75049426
  hypo
aggagaaatccatagacgctcaagtggcttc

SEQ ID NO: 16118 - DNA, 20 bp, Homo sapiens
  chr9:75049473-75049493
  hypo
ttctaattttttttttcgag

SEQ ID NO: 16119 - DNA, 31 bp, Homo sapiens
  chr9:75083051-75083082
  hypo
agcatatccatagtgccggagaacctaggcc

SEQ ID NO: 16120 - DNA, 31 bp, Homo sapiens
  chr9:75083127-75083158
  hypo
atttaggtaattgtggcgagaccagactact

SEQ ID NO: 16121 - DNA, 51 bp, Homo sapiens
  chr9:75083163-75083214
  hypo
attgacccctctcttacgatgggttggttcctccttcggaagcatatcctt

SEQ ID NO: 16122 - DNA, 31 bp, Homo sapiens
  chr9:75083227-75083258
  hypo
gtccactgatctcagtcgagaccatttaaaa

SEQ ID NO: 16123 - DNA, 27 bp, Homo sapiens
  chr9:75095638-75095665
  hypo
gagggagggctgcgagggctgccagca

SEQ ID NO: 16124 - DNA, 21 bp, Homo sapiens
  chr9:75118600-75118621
  hypo
agactccgtctcaaaaaaaaa

SEQ ID NO: 16125 - DNA, 31 bp, Homo sapiens
  chr9:75130857-75130888
  hypo
atgattttcaaatgtacgttttatgtctaca

SEQ ID NO: 16126 - DNA, 31 bp, Homo sapiens
  chr9:75136041-75136072
  hypo
gtctcctcagaaggcccgcagtagcaccagc

SEQ ID NO: 16127 - DNA, 31 bp, Homo sapiens
  chr9:75136095-75136126
  hypo
caccagttttctaggccgggcacagtggctc

SEQ ID NO: 16128 - DNA, 10 bp, Homo sapiens
  chr9:75136132-75136142
  hypo
gtaatcccag

SEQ ID NO: 16129 - DNA, 31 bp, Homo sapiens
  chr9:75160821-75160852
  hypo
ggctttcaaatgtcatcgctcaaaaaagttc

SEQ ID NO: 16130 - DNA, 27 bp, Homo sapiens
  chr9:75255822-75255849
  hypo
aggtgtgagccacggtgcctggccttt

SEQ ID NO: 16131 - DNA, 31 bp, Homo sapiens
  chr9:75256673-75256704
  hypo
ccactgtgttcactatcggaaataaaaatat

SEQ ID NO: 16132 - DNA, 47 bp, Homo sapiens
  chr9:75429002-75429049
  hypo
aaacaggcatttaaaacgttgagttttctccacgttcagtagtttgg

SEQ ID NO: 16133 - DNA, 31 bp, Homo sapiens
  chr9:75429064-75429095
  hypo
taccattctaaggaggcgaaggcttaagatt

SEQ ID NO: 16134 - DNA, 40 bp, Homo sapiens
  chr9:75429130-75429170
  hypo
aggcaacagatgggtacgggccaaccgagtaagcattttt

SEQ ID NO: 16135 - DNA, 24 bp, Homo sapiens
  chr9:78983257-78983281
  hypo
tgggcacagtggttcacgcctgta

SEQ ID NO: 16136 - DNA, 41 bp, Homo sapiens
  chr9:79012635-79012676
  hypo
gatcattttccaccaccgctcaatagcgttcaatggctcct

SEQ ID NO: 16137 - DNA, 31 bp, Homo sapiens
  chr9:79651146-79651177
  hypo
gtaagaaggcaaaactcgaaattgactgtat

SEQ ID NO: 16138 - DNA, 57 bp, Homo sapiens
  chr9:80076051-80076108
  hypo
ctctcaccaggcccccgcggagggctgcagggggtggcatccgcgctgtgagtgctg

SEQ ID NO: 16139 - DNA, 31 bp, Homo sapiens
  chr9:80076180-80076211
  hypo
taacaatgcagaatctcggctcccaccccag

SEQ ID NO: 16140 - DNA, 47 bp, Homo sapiens
  chr9:80076213-80076260
  hypo
aatgactctgaagctgcgccttagcaagatcccgggtagttcatttg

SEQ ID NO: 16141 - DNA, 31 bp, Homo sapiens
  chr9:80113570-80113601
  hypo
atggctcttgagagaacgccatccaatcagt

SEQ ID NO: 16142 - DNA, 31 bp, Homo sapiens
  chr9:80116553-80116584
  hypo
ttgtagcttgtctttccgtccttttgatata

SEQ ID NO: 16143 - DNA, 31 bp, Homo sapiens
  chr9:80137053-80137084
  hypo
ttataaacaaagcctacgctttcaacctgtt

SEQ ID NO: 16144 - DNA, 31 bp, Homo sapiens
  chr9:80137117-80137148
  hypo
catcagaaggaaattacgctttctatgtagc

SEQ ID NO: 16145 - DNA, 86 bp, Homo sapiens
  chr9:80137159-80137245
  hypo
aaggcaggcaagaaggcgccattgatgagaccttgagagaatgcgctgcagcttcttcctctgcccccatccgcatctcagagctg

SEQ ID NO: 16146 - DNA, 31 bp, Homo sapiens
  chr9:80141356-80141387
  hypo
caagataaggtcataccggattagggtcgac

SEQ ID NO: 16147 - DNA, 10 bp, Homo sapiens
  chr9:80193189-80193199
  hypo
caaacaaaac

SEQ ID NO: 16148 - DNA, 31 bp, Homo sapiens
  chr9:80272559-80272590
  hypo
gtttttttttttgagacggagtctcgctctg

SEQ ID NO: 16149 - DNA, 31 bp, Homo sapiens
  chr9:80272888-80272919
  hypo
catgattccactgtaccgtgggagaagaagg

SEQ ID NO: 16150 - DNA, 31 bp, Homo sapiens
  chr9:80304156-80304187
  hypo
tacaggtgtgagctaccgtgccagccctata

SEQ ID NO: 16151 - DNA, 35 bp, Homo sapiens
  chr9:80315385-80315420
  hypo
cgtgagccaccatgcccggccgattttctgtctag

SEQ ID NO: 16152 - DNA, 21 bp, Homo sapiens
  chr9:80401003-80401024
  hypo
agttaacaagccaggcgcggt

SEQ ID NO: 16153 - DNA, 31 bp, Homo sapiens
  chr9:80475685-80475716
  hypo
atttccctggctcttccgtggaggttgcctc

SEQ ID NO: 16154 - DNA, 31 bp, Homo sapiens
  chr9:80488591-80488622
  hypo
cttctgggccaggcaacgaggggaagcaaga

SEQ ID NO: 16155 - DNA, 38 bp, Homo sapiens
  chr9:80501725-80501763
  hypo
ccaaaaaaataaaatacgcagccgggcacggtggctca

SEQ ID NO: 16156 - DNA, 22 bp, Homo sapiens
  chr9:80505318-80505340
  hypo
atatgagaattagaaacgtgtc

SEQ ID NO: 16157 - DNA, 49 bp, Homo sapiens
  chr9:80533773-80533822
  hypo
atttgaataatcatttcgacaagtttagggcagacgaggagactctcaa

SEQ ID NO: 16158 - DNA, 30 bp, Homo sapiens
  chr9:80534762-80534792
  hypo
agaattgacatgaggccgggagaggtggct

SEQ ID NO: 16159 - DNA, 28 bp, Homo sapiens
  chr9:80544457-80544485
  hypo
tgcaacaggctgggtgcggtggctcatg

SEQ ID NO: 16160 - DNA, 14 bp, Homo sapiens
  chr9:80544724-80544738
  hypo
gacaaagcaagacc

SEQ ID NO: 16161 - DNA, 31 bp, Homo sapiens
  chr9:80544781-80544812
  hypo
ctttattgttatttttcgcttaacatactat

SEQ ID NO: 16162 - DNA, 31 bp, Homo sapiens
  chr9:80546151-80546182
  hypo
acacaaccagcaggtccgcatttccatccct

SEQ ID NO: 16163 - DNA, 23 bp, Homo sapiens
  chr9:80555584-80555607
  hypo
tttaaaatttgcaagtcggctgc

SEQ ID NO: 16164 - DNA, 31 bp, Homo sapiens
  chr9:80563223-80563254
  hypo
tccaaatcttgctcctcgcaggaacctcact

SEQ ID NO: 16165 - DNA, 31 bp, Homo sapiens
  chr9:80570420-80570451
  hypo
cactttttgtacataacgctatactttgtgt

SEQ ID NO: 16166 - DNA, 21 bp, Homo sapiens
  chr9:80582605-80582626
  hypo
ttcaggtctgctgggcgcggt

SEQ ID NO: 16167 - DNA, 31 bp, Homo sapiens
  chr9:80591630-80591661
  hypo
atagttttaagcttttcgattagttggcaac

SEQ ID NO: 16168 - DNA, 31 bp, Homo sapiens
  chr9:80642698-80642729
  hypo
ttgcctgtttcaatagcgataattcaatcaa

SEQ ID NO: 16169 - DNA, 87 bp, Homo sapiens; identical to SEQ ID NO: 3589
  chr9:80646055-80646142
  hypo

SEQ ID NO: 16170 - DNA, 164 bp, Homo sapiens; identical to SEQ ID NO: 3590
  chr9:80646151-80646315
  hypo

SEQ ID NO: 16171 - DNA, 401 bp, Homo sapiens; identical to SEQ ID NO: 3591
  chr9:80646445-80646846
  hypo

SEQ ID NO: 16172 - DNA, 73 bp, Homo sapiens; identical to SEQ ID NO: 3592
  chr9:80646862-80646935
  hypo

SEQ ID NO: 16173 - DNA, 413 bp, Homo sapiens; identical to SEQ ID NO: 3593
  chr9:80647103-80647516
  hypo

SEQ ID NO: 16174 - DNA, 322 bp, Homo sapiens; identical to SEQ ID NO: 3595
  chr9:82185537-82185859
  hypo

SEQ ID NO: 16175 - DNA, 72 bp, Homo sapiens; identical to SEQ ID NO: 3596
  chr9:82185989-82186061
  hypo

SEQ ID NO: 16176 - DNA, 21 bp, Homo sapiens
  chr9:84130017-84130038
  hypo
cgcgcccggccccttttaact

SEQ ID NO: 16177 - DNA, 37 bp, Homo sapiens
  chr9:84130101-84130138
  hypo
atcatacaaggcctgccgggcacggtggctcacgcct

SEQ ID NO: 16178 - DNA, 31 bp, Homo sapiens
  chr9:84205670-84205701
  hypo
ccagctgctaaagaagcgaacccctccttag

SEQ ID NO: 16179 - DNA, 31 bp, Homo sapiens
  chr9:84291856-84291887
  hypo
aacttacaaatttggccgggcatggtggctc

SEQ ID NO: 16180 - DNA, 53 bp, Homo sapiens; identical to SEQ ID NO: 3605
  chr9:84303002-84303055
  hypo

SEQ ID NO: 16181 - DNA, 59 bp, Homo sapiens; identical to SEQ ID NO: 3606
  chr9:84303106-84303165
  hypo

SEQ ID NO: 16182 - DNA, 167 bp, Homo sapiens; identical to SEQ ID NO: 3607
  chr9:84303313-84303480
  hypo

SEQ ID NO: 16183 - DNA, 31 bp, Homo sapiens
  chr9:84456245-84456276
  hypo
atcagcatcatctgggcgcttgatggaaatg

SEQ ID NO: 16184 - DNA, 31 bp, Homo sapiens
  chr9:84460617-84460648
  hypo
taccggcgtgagccaccgtgagatgtttcaa

SEQ ID NO: 16185 - DNA, 60 bp, Homo sapiens
  chr9:84530342-84530402
  hypo
gcatcatgataccacccgctttcatcgactgttatgcccagaccccgtctgtcaggtgtg

SEQ ID NO: 16186 - DNA, 31 bp, Homo sapiens
  chr9:84530411-84530442
  hypo
aactgctgatatccagcgactgctgtcttgg

SEQ ID NO: 16187 - DNA, 31 bp, Homo sapiens
  chr9:84530481-84530512
  hypo
gcttcttcagcttctgcgactgagtcatcat

SEQ ID NO: 16188 - DNA, 31 bp, Homo sapiens
  chr9:84640507-84640538
  hypo
ttctttttttgaccatcgcctagtctggagt

SEQ ID NO: 16189 - DNA, 31 bp, Homo sapiens
  chr9:85076174-85076205
  hypo
tcctttaaattatgcacgaaacaaacaaaaa

SEQ ID NO: 16190 - DNA, 31 bp, Homo sapiens
  chr9:85485585-85485616
  hypo
agtctgatgaaggggtcgagaaaaatgttgc

SEQ ID NO: 16191 - DNA, 41 bp, Homo sapiens
  chr9:85673369-85673410
  hypo
tacaggcgtgagccaccgcgcccggccgtatttatgtcttt

SEQ ID NO: 16192 - DNA, 31 bp, Homo sapiens
  chr9:85673438-85673469
  hypo
ctatcttgtcaagcaccgtttcatgtaaatt

SEQ ID NO: 16193 - DNA, 31 bp, Homo sapiens
  chr9:85683069-85683100
  hypo
agccgccatacctggtcgctgtttcatatta

SEQ ID NO: 16194 - DNA, 31 bp, Homo sapiens; identical to SEQ ID NO: 3613
  chr9:85834937-85834968
  hypo

SEQ ID NO: 16195 - DNA, 31 bp, Homo sapiens
  chr9:85927653-85927684
  hypo
accactccccctccgccgccctgcgccccgc

SEQ ID NO: 16196 - DNA, 31 bp, Homo sapiens
  chr9:85944983-85945014
  hypo
aagaacagaggactggcgaggcatggtggct

SEQ ID NO: 16197 - DNA, 31 bp, Homo sapiens
  chr9:85948467-85948498
  hypo
ccaagtctggctgcaacgcctctcatgactc

SEQ ID NO: 16198 - DNA, 31 bp, Homo sapiens
  chr9:86036211-86036242
  hypo
accagactaaggcaatcgtgtatacagggtg

SEQ ID NO: 16199 - DNA, 31 bp, Homo sapiens
  chr9:86518262-86518293
  hypo
atcaggactcccttctcgattgatctgggta

SEQ ID NO: 16200 - DNA, 35 bp, Homo sapiens
  chr9:86590360-86590395
  hypo
aactgttgggacataccgctcggggccactgctgt

SEQ ID NO: 16201 - DNA, 31 bp, Homo sapiens
  chr9:86691067-86691098
  hypo
ctaaaatttcttggcacgctttgccactggg

SEQ ID NO: 16202 - DNA, 25 bp, Homo sapiens
  chr9:86964436-86964461
  hypo
ccaccacgtccggcttacttgtttt

SEQ ID NO: 16203 - DNA, 29 bp, Homo sapiens
  chr9:88232863-88232892
  hypo
taaatttctagctgggcgcactggctcac

SEQ ID NO: 16204 - DNA, 17 bp, Homo sapiens
  chr9:88307210-88307227
  hypo
gacggagtcttgctgtc

SEQ ID NO: 16205 - DNA, 31 bp, Homo sapiens
  chr9:88490934-88490965
  hypo
tattctttcttggttccgctccaatagctaa

SEQ ID NO: 16206 - DNA, 21 bp, Homo sapiens
  chr9:88490995-88491016
  hypo
ttttgagacagagtctcgctc

SEQ ID NO: 16207 - DNA, 42 bp, Homo sapiens
  chr9:88672700-88672742
  hypo
aaacactggagactggcggctctgtcccgagagggccagggt

SEQ ID NO: 16208 - DNA, 22 bp, Homo sapiens
  chr9:88680656-88680678
  hypo
ttaaatatgttcatgtcgggct

SEQ ID NO: 16209 - DNA, 31 bp, Homo sapiens
  chr9:89699519-89699550
  hypo
ccctgctgaagctgtgcgatgatgatctgcc

SEQ ID NO: 16210 - DNA, 31 bp, Homo sapiens
  chr9:90439261-90439292
  hypo
ttggaaaccttcgtagcggggctggtggccc

SEQ ID NO: 16211 - DNA, 31 bp, Homo sapiens
  chr9:90483185-90483216
  hypo
tcctgcccatctccctcgctgttcccattgc

SEQ ID NO: 16212 - DNA, 31 bp, Homo sapiens
  chr9:90483232-90483263
  hypo
tctcagacctaagactcgccttccagggaag

SEQ ID NO: 16213 - DNA, 70 bp, Homo sapiens
  chr9:90483321-90483391
  hypo
gcctgtgggaaccccccgaatccagggcaagggtccgcatgccccctgggccctgcgtgtaaaatggagc

SEQ ID NO: 16214 - DNA, 31 bp, Homo sapiens
  chr9:90492074-90492105
  hypo
tcagtcagaggtctctcgatgtgagtctctg

SEQ ID NO: 16215 - DNA, 31 bp, Homo sapiens
  chr9:90500051-90500082
  hypo
caaccctgagtgcctccgggccaccagagcc

SEQ ID NO: 16216 - DNA, 38 bp, Homo sapiens
  chr9:90583823-90583861
  hypo
cagaaacctgcactcccggacacgcgctctcctgagag

SEQ ID NO: 16217 - DNA, 23 bp, Homo sapiens
  chr9:90755738-90755761
  hypo
aaaaaaaaggatcagccgggcgc

SEQ ID NO: 16218 - DNA, 31 bp, Homo sapiens
  chr9:90849822-90849853
  hypo
cctccaggcagcagaacggaggacaggtcta

SEQ ID NO: 16219 - DNA, 31 bp, Homo sapiens
  chr9:91114317-91114348
  hypo
aatggggcttatgagacggcagaactgaatt

SEQ ID NO: 16220 - DNA, 31 bp, Homo sapiens
  chr9:91119033-91119064
  hypo
cacccattctcttgttcggaaagtcaccacc

SEQ ID NO: 16221 - DNA, 31 bp, Homo sapiens
  chr9:91119079-91119110
  hypo
attgcagtgggagactcgaaagctggaccct

SEQ ID NO: 16222 - DNA, 47 bp, Homo sapiens
  chr9:91119146-91119193
  hypo
gcaagcaaagcactagcgagatagcgcagccacggggatgccaggac

SEQ ID NO: 16223 - DNA, 31 bp, Homo sapiens
  chr9:91119249-91119280
  hypo
gtgtgctgtgtgtttacgctatgtatagtat

SEQ ID NO: 16224 - DNA, 31 bp, Homo sapiens
  chr9:91119294-91119325
  hypo
cagtgtgtgcagtgtgcgaggggtgtgtgtg

SEQ ID NO: 16225 - DNA, 31 bp, Homo sapiens
  chr9:91138736-91138767
  hypo
atccctaatgacctttcgtgtggcatggagg

SEQ ID NO: 16226 - DNA, 48 bp, Homo sapiens
  chr9:91140237-91140285
  hypo
accacacacacacttacgtacagatgcatgctacgttaaagactgaat

SEQ ID NO: 16227 - DNA, 31 bp, Homo sapiens
  chr9:91366824-91366855
  hypo
gggcccagggtgggcacgggcacagggctgg

SEQ ID NO: 16228 - DNA, 87 bp, Homo sapiens
  chr9:91614961-91615048
  hypo
gtgagtccactgaaagcggtttctaccttgatagttgggtgtgtggcgtcatcaacatcacagaaggctgatcgatattaccaggtg

SEQ ID NO: 16229 - DNA, 110 bp, Homo sapiens
  chr9:91616950-91617060
  hypo
aggctcagtggttcatcgtgttggctgtgctcaactccgccatgaacccggtcatctacacgctggccagcaaggagatgcggcgggccttcttccgtctggtctgcaac

SEQ ID NO: 16230 - DNA, 34 bp, Homo sapiens
  chr9:91617284-91617318
  hypo
tcttatttattgcatgcgtcgcttccacaggggc

SEQ ID NO: 16231 - DNA, 31 bp, Homo sapiens
  chr9:91781635-91781666
  hypo
tgggaaggaaaggatgcgcaagggaagagag

SEQ ID NO: 16232 - DNA, 31 bp, Homo sapiens
  chr9:91943296-91943327
  hypo
gaccatcatatgtggcgcgtgactatacata

SEQ ID NO: 16233 - DNA, 37 bp, Homo sapiens
  chr9:91997125-91997162
  hypo
gcacccacctgaagctcgggggcgtgcaacagacctg

SEQ ID NO: 16234 - DNA, 31 bp, Homo sapiens
  chr9:91997530-91997561
  hypo
ggccatgtgtgagccacgtttgtgggaagga

SEQ ID NO: 16235 - DNA, 31 bp, Homo sapiens
  chr9:91997742-91997773
  hypo
gtggccaagtggggcccgcctgactcctcac

SEQ ID NO: 16236 - DNA, 22 bp, Homo sapiens
  chr9:92045870-92045892
  hypo
gacagagcgagactccatcttg

SEQ ID NO: 16237 - DNA, 31 bp, Homo sapiens
  chr9:92238057-92238088
  hypo
gtgggatgttctgaaccgtgcagatggggat

SEQ ID NO: 16238 - DNA, 58 bp, Homo sapiens
  chr9:92249013-92249071
  hypo
gcacagaagggtcccacgcagagtctcagagggagtgtggccccgcagacccctgggt

SEQ ID NO: 16239 - DNA, 31 bp, Homo sapiens
  chr9:92249113-92249144
  hypo
gttgtttgagctgccccgtgtgtgatacttt

SEQ ID NO: 16240 - DNA, 54 bp, Homo sapiens
  chr9:92249172-92249226
  hypo
accccatggtatgacacgtccttgtgctctcctgggccacggttatacccgctg

SEQ ID NO: 16241 - DNA, 31 bp, Homo sapiens
  chr9:92720565-92720596
  hypo
ggcaggggaaggggggcgagttctgtgttta

SEQ ID NO: 16242 - DNA, 58 bp, Homo sapiens
  chr9:92725473-92725531
  hypo
tgtccacaccaagggccgatgatcatgtggcgctcattttcagcggtgagcacagggg

SEQ ID NO: 16243 - DNA, 31 bp, Homo sapiens
  chr9:92725558-92725589
  hypo
ccacagggtaagtgctcgtttccaggcaccc

SEQ ID NO: 16244 - DNA, 31 bp, Homo sapiens
  chr9:92725643-92725674
  hypo
tggtaatcctactcttcgccctgaagccccc

SEQ ID NO: 16245 - DNA, 31 bp, Homo sapiens; identical to SEQ ID NO: 3622
  chr9:92859700-92859731
  hypo

SEQ ID NO: 16246 - DNA, 31 bp, Homo sapiens
  chr9:92897185-92897216
  hypo
cccatcccgctggctgcgggctgctggcaag

SEQ ID NO: 16247 - DNA, 31 bp, Homo sapiens
  chr9:92929514-92929545
  hypo
gaaatacccacaggtgcggaggggctggccc

SEQ ID NO: 16248 - DNA, 222 bp, Homo sapiens; identical to SEQ ID NO: 3623
  chr9:93955658-93955880
  hypo

SEQ ID NO: 16249 - DNA, 67 bp, Homo sapiens; identical to SEQ ID NO: 3625
  chr9:93955928-93955995
  hypo

SEQ ID NO: 16250 - DNA, 68 bp, Homo sapiens; identical to SEQ ID NO: 3626
  chr9:93956158-93956226
  hypo

SEQ ID NO: 16251 - DNA, 86 bp, Homo sapiens; identical to SEQ ID NO: 3627
  chr9:93956242-93956328
  hypo

SEQ ID NO: 16252 - DNA, 31 bp, Homo sapiens; identical to SEQ ID NO: 3628
  chr9:93956429-93956460
  hypo

SEQ ID NO: 16253 - DNA, 22 bp, Homo sapiens
  chr9:94863553-94863575
  hypo
aaacaaacaggccaggcgtggt

SEQ ID NO: 16254 - DNA, 55 bp, Homo sapiens
  chr9:94904616-94904671
  hypo
ggagaaccatttttagcgtctgagttggggtgagatggcccgtgaaggggaccct

SEQ ID NO: 16255 - DNA, 31 bp, Homo sapiens
  chr9:94904676-94904707
  hypo
gggcagctgtcctgtccgtctggctcacagg

SEQ ID NO: 16256 - DNA, 31 bp, Homo sapiens
  chr9:94904725-94904756
  hypo
gagggctgggggctctcgctgcttaccacat

SEQ ID NO: 16257 - DNA, 45 bp, Homo sapiens
  chr9:94904782-94904827
  hypo
ttccaggccacctacccgcacccccagccccgctctggggaaagg

SEQ ID NO: 16258 - DNA, 31 bp, Homo sapiens
  chr9:95381362-95381393
  hypo
ggtaaaaaggcaggtgcgccatgctgccact

SEQ ID NO: 16259 - DNA, 31 bp, Homo sapiens
  chr9:95417481-95417512
  hypo
gctttgcctaactcaccgacacatctgttct

SEQ ID NO: 16260 - DNA, 49 bp, Homo sapiens
  chr9:95417532-95417581
  hypo
ggccctgcagatgcagcgaccctgaggggtgcatcgtcagcctggaatg

SEQ ID NO: 16261 - DNA, 31 bp, Homo sapiens
  chr9:95417589-95417620
  hypo
acctactttcccactgcgccagagcccagcg

SEQ ID NO: 16262 - DNA, 31 bp, Homo sapiens
  chr9:95482914-95482945
  hypo
cgcctcctccagctgccgctctgagatctcc

SEQ ID NO: 16263 - DNA, 46 bp, Homo sapiens
  chr9:95492297-95492343
  hypo
ccagccagcctcccatcgtgtacaccccaggcgagtggcccagcct

SEQ ID NO: 16264 - DNA, 31 bp, Homo sapiens
  chr9:95492385-95492416
  hypo
acccccacatagctggcgtggcaggacaggg

SEQ ID NO: 16265 - DNA, 31 bp, Homo sapiens
  chr9:95492421-95492452
  hypo
atgggtagagggcagacgggccgcagtgtgt

SEQ ID NO: 16266 - DNA, 34 bp, Homo sapiens
  chr9:95501275-95501309
  hypo
cccagcctcctgggaacggcgggcctgggcatcc

SEQ ID NO: 16267 - DNA, 31 bp, Homo sapiens
  chr9:95501325-95501356
  hypo
cctagcctggctgcctcggttgggccctccc

SEQ ID NO: 16268 - DNA, 34 bp, Homo sapiens
  chr9:95501421-95501455
  hypo
ctgatcctcatccactcgacgggctgtgaatacc

SEQ ID NO: 16269 - DNA, 29 bp, Homo sapiens
  chr9:95534117-95534146
  hypo
taagccactgtgcccggttgacccacacc

SEQ ID NO: 16270 - DNA, 70 bp, Homo sapiens
  chr9:95687861-95687931
  hypo
gagtttggtgtaaatacgtggagggtattcttggcggggaacccaaagtgagcagcgaggcttggaggtg

SEQ ID NO: 16271 - DNA, 31 bp, Homo sapiens
  chr9:95687989-95688020
  hypo
catactgtaggttgttcgtggatagtatatt

SEQ ID NO: 16272 - DNA, 31 bp, Homo sapiens
  chr9:95688034-95688065
  hypo
ggtgtgtccttgtgcccgaggttaaagggaa

SEQ ID NO: 16273 - DNA, 20 bp, Homo sapiens
  chr9:95698338-95698358
  hypo
ctggccgcagtattcttatt

SEQ ID NO: 16274 - DNA, 31 bp, Homo sapiens
  chr9:95707428-95707459
  hypo
gaacaaaccagaaatgcggacccacaggagg

SEQ ID NO: 16275 - DNA, 31 bp, Homo sapiens
  chr9:95771842-95771873
  hypo
cctgggcaggaggacccgattggggagcaca

SEQ ID NO: 16276 - DNA, 31 bp, Homo sapiens
  chr9:95913666-95913697
  hypo
ccactctcccagtggccgttggacatgagtg

SEQ ID NO: 16277 - DNA, 35 bp, Homo sapiens
  chr9:95952713-95952748
  hypo
aggccaccatgggactcgagcgtacctgtgctgct

SEQ ID NO: 16278 - DNA, 35 bp, Homo sapiens
  chr9:96070698-96070733
  hypo
aagaagggtaccttcacggacgacctgcacaagct

SEQ ID NO: 16279 - DNA, 31 bp, Homo sapiens
  chr9:96081613-96081644
  hypo
gggtgctgaggggctgcgggtgctgggctgg

SEQ ID NO: 16280 - DNA, 24 bp, Homo sapiens
  chr9:96206327-96206351
  hypo
tttttgttttttgagacggagttt

SEQ ID NO: 16281 - DNA, 38 bp, Homo sapiens
  chr9:96230168-96230206
  hypo
tcttttttttttgagacggagtttcgctcttgtcgccc

SEQ ID NO: 16282 - DNA, 37 bp, Homo sapiens
  chr9:96687052-96687089
  hypo
ctggagaagggtcacacggggccgcttacctcatggt

SEQ ID NO: 16283 - DNA, 31 bp, Homo sapiens
  chr9:96688196-96688227
  hypo
ctccatgacaccccagcgctgggcaagtgtc

SEQ ID NO: 16284 - DNA, 31 bp, Homo sapiens
  chr9:97087289-97087320
  hypo
ggattggctggactcacgggacagtgacagg

SEQ ID NO: 16285 - DNA, 31 bp, Homo sapiens
  chr9:97088741-97088772
  hypo
cactggataggccgggcgtgctggttcatgc

SEQ ID NO: 16286 - DNA, 42 bp, Homo sapiens
  chr9:97107979-97108021
  hypo
attacagccgtgagccgccatgccagccggcctttttaacta

SEQ ID NO: 16287 - DNA, 31 bp, Homo sapiens
  chr9:97162004-97162035
  hypo
agaaatgccaggtggtcgatctaggtcttgt

SEQ ID NO: 16288 - DNA, 38 bp, Homo sapiens
  chr9:97317330-97317368
  hypo
catgcagtctaggaaccggcatgcgcataacctcagga

SEQ ID NO: 16289 - DNA, 82 bp, Homo sapiens
  chr9:97317513-97317595
  hypo
gcttgagccgcggcaccgtggcgcggctcgcctcgctgcggttggtggtggcggtggacattgcagcgcggctggaggggta

SEQ ID NO: 16290 - DNA, 58 bp, Homo sapiens
  chr9:97317654-97317712
  hypo
agggaaaaaaggatagcgaggaggagaaggcgttgcaaaaagacgatggggaaaagat

SEQ ID NO: 16291 - DNA, 31 bp, Homo sapiens
  chr9:97367816-97367847
  hypo
catggagcccacataccgggccccataagga

SEQ ID NO: 16292 - DNA, 31 bp, Homo sapiens
  chr9:97474709-97474740
  hypo
tctggaggtgacctcccggggcctaggggaa

SEQ ID NO: 16293 - DNA, 88 bp, Homo sapiens
  chr9:97474834-97474922
  hypo
agaatgtatgctcattcggggtggctgacaacgattatagggctgctaagcttcctccgagctatttccataacgctgctttgtatct

SEQ ID NO: 16294 - DNA, 17 bp, Homo sapiens
  chr9:97500869-97500886
  hypo
ttttgagatggagtctc

SEQ ID NO: 16295 - DNA, 31 bp, Homo sapiens
  chr9:97674943-97674974
  hypo
taaagagtaggaatctcggctatgggctccc

SEQ ID NO: 16296 - DNA, 70 bp, Homo sapiens
  chr9:97674989-97675059
  hypo
tcctgatgaaagggatcgttgttgctggcacagcgcgtttcttccatgttaaacacgaacatggtgcatg

SEQ ID NO: 16297 - DNA, 31 bp, Homo sapiens
  chr9:97679313-97679344
  hypo
ttttgatgaccataaccggcagaacctgccc

SEQ ID NO: 16298 - DNA, 65 bp, Homo sapiens
  chr9:97679411-97679476
  hypo
cagtgctgccctgttccgtatgcagggctgaggtctccacaacgttctctcgggatgtgttgccc

SEQ ID NO: 16299 - DNA, 31 bp, Homo sapiens
  chr9:97679481-97679512
  hypo
tcagaagggatgtatccgctgctctgctggt

SEQ ID NO: 16300 - DNA, 31 bp, Homo sapiens
  chr9:97719454-97719485
  hypo
aaactgttcagttcttcgtttgcttctctct

SEQ ID NO: 16301 - DNA, 113 bp, Homo sapiens; identical to SEQ ID NO: 3634
  chr9:97767418-97767531
  hypo

SEQ ID NO: 16302 - DNA, 92 bp, Homo sapiens; identical to SEQ ID NO: 3635
  chr9:97767681-97767773
  hypo

SEQ ID NO: 16303 - DNA, 31 bp, Homo sapiens
  chr9:97807797-97807828
  hypo
cccgcaccttccagtgcggtcaaggatgctg

SEQ ID NO: 16304 - DNA, 54 bp, Homo sapiens
  chr9:97847399-97847453
  hypo
ttgctagcataacaggcgtgaaggcggcagtgtcgccggcgtccttccgcggaa

SEQ ID NO: 16305 - DNA, 31 bp, Homo sapiens
  chr9:97848253-97848284
  hypo
gagctcccagctgaggcgctgcttctccggg

SEQ ID NO: 16306 - DNA, 34 bp, Homo sapiens
  chr9:97848638-97848672
  hypo
gggcccagctctcccacggcgaggtgagctgaga

SEQ ID NO: 16307 - DNA, 31 bp, Homo sapiens
  chr9:97863867-97863898
  hypo
cattctcacagcccagcgagggcacttactc

SEQ ID NO: 16308 - DNA, 31 bp, Homo sapiens
  chr9:97864981-97865012
  hypo
tttactgcctcaggtccgacagcccaggaca

SEQ ID NO: 16309 - DNA, 37 bp, Homo sapiens
  chr9:97865050-97865087
  hypo
aaagggagcctcttgtcgcatgcgcactgtgtgaatg

SEQ ID NO: 16310 - DNA, 37 bp, Homo sapiens
  chr9:97867403-97867440
  hypo
ggccaccctcatgactcggattcgtcttagctgagac

SEQ ID NO: 16311 - DNA, 31 bp, Homo sapiens
  chr9:97891725-97891756
  hypo
tcttcatgagtgatgacgcaggcatctaacc

SEQ ID NO: 16312 - DNA, 51 bp, Homo sapiens
  chr9:97891774-97891825
  hypo
gtaaggtggggcactccggtaacacaccagaggtcacgctgcaagccaggg

SEQ ID NO: 16313 - DNA, 55 bp, Homo sapiens
  chr9:97891828-97891883
  hypo
tgaagccccatgactgcggccattatcttttctataaaagcggggaaataaaata

SEQ ID NO: 16314 - DNA, 21 bp, Homo sapiens
  chr9:98076961-98076982
  hypo
ctttatcgataaaaaaaattt

SEQ ID NO: 16315 - DNA, 9 bp, Homo sapiens
  chr9:98196381-98196390
  hypo
ccaccgcgc

SEQ ID NO: 16316 - DNA, 47 bp, Homo sapiens; identical to SEQ ID NO: 3637
  chr9:98268139-98268186
  hypo

SEQ ID NO: 16317 - DNA, 117 bp, Homo sapiens; identical to SEQ ID NO: 3638
  chr9:98273073-98273190
  hypo

SEQ ID NO: 16318 - DNA, 59 bp, Homo sapiens; identical to SEQ ID NO: 3639
  chr9:98273462-98273521
  hypo

SEQ ID NO: 16319 - DNA, 31 bp, Homo sapiens; identical to SEQ ID NO: 3640
  chr9:98273570-98273601
  hypo

SEQ ID NO: 16320 - DNA, 56 bp, Homo sapiens; identical to SEQ ID NO: 3641
  chr9:98273637-98273693
  hypo

SEQ ID NO: 16321 - DNA, 31 bp, Homo sapiens
  chr9:98356425-98356456
  hypo
agaagttgcaggctggcgactggggccacct

SEQ ID NO: 16322 - DNA, 31 bp, Homo sapiens
  chr9:98369372-98369403
  hypo
tttatatatattatctcgcttaattcttgca

SEQ ID NO: 16323 - DNA, 31 bp, Homo sapiens; identical to SEQ ID NO: 3643
  chr9:99145683-99145714
  hypo

SEQ ID NO: 16324 - DNA, 31 bp, Homo sapiens
  chr9:99199880-99199911
  hypo
cctgatgttacatcaccggtgaccttgggca

SEQ ID NO: 16325 - DNA, 37 bp, Homo sapiens; identical to SEQ ID NO: 3651
  chr9:99416949-99416986
  hypo

SEQ ID NO: 16326 - DNA, 31 bp, Homo sapiens; identical to SEQ ID NO: 3652
  chr9:99417008-99417039
  hypo

SEQ ID NO: 16327 - DNA, 31 bp, Homo sapiens; identical to SEQ ID NO: 3653
  chr9:99417052-99417083
  hypo

SEQ ID NO: 16328 - DNA, 38 bp, Homo sapiens; identical to SEQ ID NO: 3654
  chr9:99417086-99417124
  hypo

SEQ ID NO: 16329 - DNA, 31 bp, Homo sapiens; identical to SEQ ID NO: 3655
  chr9:99417159-99417190
  hypo

SEQ ID NO: 16330 - DNA, 174 bp, Homo sapiens; identical to SEQ ID NO: 3656
  chr9:99417396-99417570
  hypo

SEQ ID NO: 16331 - DNA, 31 bp, Homo sapiens
  chr9:99803892-99803923
  hypo
tgtactgcaaatttgccgtctcaaaaaaaaa

SEQ ID NO: 16332 - DNA, 85 bp, Homo sapiens
  chr9:100297535-100297620
  hypo
gcttctctgctggtcccggcaagactcacaagggctggaacgagggtgatgcccacagaaggagacatttcggaacactgcagcc

SEQ ID NO: 16333 - DNA, 31 bp, Homo sapiens
  chr9:100297637-100297668
  hypo
ccctagcaggccatgccgccctcatctgctg

SEQ ID NO: 16334 - DNA, 31 bp, Homo sapiens
  chr9:100297685-100297716
  hypo
gctttctctctccctgcgatgcccctgcact

SEQ ID NO: 16335 - DNA, 31 bp, Homo sapiens
  chr9:100308891-100308922
  hypo
cctgattatttttttacgcaaacctaaacag

SEQ ID NO: 16336 - DNA, 31 bp, Homo sapiens
  chr9:100308937-100308968
  hypo
aagaaactgttaataacgacatcaggacttt

SEQ ID NO: 16337 - DNA, 31 bp, Homo sapiens
  chr9:100397700-100397731
  hypo
ttttttttttctgagacggagtgtcattctt

SEQ ID NO: 16338 - DNA, 2 bp, Homo sapiens
  chr9:100397737-100397739
  hypo
gc

SEQ ID NO: 16339 - DNA, 38 bp, Homo sapiens
  chr9:100397978-100398016
  hypo
cagatgtgagctactgcgcccgccgataatacaatttt

SEQ ID NO: 16340 - DNA, 40 bp, Homo sapiens; identical to SEQ ID NO: 3661
  chr9:100565761-100565801
  hypo

SEQ ID NO: 16341 - DNA, 220 bp, Homo sapiens; identical to SEQ ID NO: 3662
  chr9:100565845-100566065
  hypo

SEQ ID NO: 16342 - DNA, 18 bp, Homo sapiens
  chr9:100610200-100610218
  hypo
cggcgaaacctagagaga

SEQ ID NO: 16343 - DNA, 31 bp, Homo sapiens
  chr9:100820495-100820526
  hypo
gcccttgctgttccttcgggactggttttat

SEQ ID NO: 16344 - DNA, 62 bp, Homo sapiens
  chr9:100843257-100843319
  hypo
agcctggagaactggccgagctggtgcggtcagtgcgtcttgtggagcgtgccctgggctcc

SEQ ID NO: 16345 - DNA, 54 bp, Homo sapiens
  chr9:100843359-100843413
  hypo
agaaggtgtgtcctgccggactctactcggttctgctgccgtgtgtggaaaaag

SEQ ID NO: 16346 - DNA, 50 bp, Homo sapiens
  chr9:100890702-100890752
  hypo
aagaacagaggtggaccgagacccaggactcctgacgcccactgatgtca

SEQ ID NO: 16347 - DNA, 76 bp, Homo sapiens
  chr9:100890755-100890831
  hypo
tggctgtgagaaaggccgctctgtggctgccccatgaacgtgggctccaggctctggtgcccgacagccctgggtc

SEQ ID NO: 16348 - DNA, 67 bp, Homo sapiens
  chr9:100933033-100933100
  hypo
aattctgacaccaattcgctccgtcaccttgggcaaatctcgtcccctctcccgctttctgagtttc

SEQ ID NO: 16349 - DNA, 31 bp, Homo sapiens
  chr9:100933128-100933159
  hypo
tgcccacctgttaggacggtctgtggagggt

SEQ ID NO: 16350 - DNA, 31 bp, Homo sapiens
  chr9:100933185-100933216
  hypo
cacaggaccacaagggcgacagagctgtcca

SEQ ID NO: 16351 - DNA, 17 bp, Homo sapiens
  chr9:101019665-101019682
  hypo
atatttcttttcttttc

SEQ ID NO: 16352 - DNA, 31 bp, Homo sapiens
  chr9:101052971-101053002
  hypo
atggatgggaggtaggcgtggtggaggatgg

SEQ ID NO: 16353 - DNA, 31 bp, Homo sapiens
  chr9:101053059-101053090
  hypo
gtgaagggtagctgggcgcttaccagaaagt

SEQ ID NO: 16354 - DNA, 31 bp, Homo sapiens
  chr9:101065558-101065589
  hypo
ctgtaggccctccaggcgggatgtgctggct

SEQ ID NO: 16355 - DNA, 31 bp, Homo sapiens
  chr9:101280571-101280602
  hypo
ctgtttcttgccaggacgctaatactgtaga

SEQ ID NO: 16356 - DNA, 31 bp, Homo sapiens
  chr9:101280697-101280728
  hypo
cactgaccatgcatgcgcgaatccccttaag

SEQ ID NO: 16357 - DNA, 62 bp, Homo sapiens
  chr9:101557773-101557835
  hypo
ctactcatacattctacgcatacctcattctaccagtcctaccagctcgtgcacccaagcct

SEQ ID NO: 16358 - DNA, 43 bp, Homo sapiens
  chr9:101557886-101557929
  hypo
ctaattctcaggtatccgcaggtctccacgtggatataaacat

SEQ ID NO: 16359 - DNA, 31 bp, Homo sapiens
  chr9:101557938-101557969
  hypo
cagaaaccttcccccacgtctccaaaatggg

SEQ ID NO: 16360 - DNA, 31 bp, Homo sapiens
  chr9:102591226-102591257
  hypo
ccagcactacggcgtgcgaacctgcgagggc

SEQ ID NO: 16361 - DNA, 22 bp, Homo sapiens
  chr9:103174619-103174641
  hypo
gaggttgaggctgcagcgagca

SEQ ID NO: 16362 - DNA, 85 bp, Homo sapiens
  chr9:103174700-103174785
  hypo
aaacaaacaaaagcccgggggaaacaaatcaaatgtccccgtataaatgataaacaaaatgtggtatatacggaaccttattcag

SEQ ID NO: 16363 - DNA, 31 bp, Homo sapiens
  chr9:104365591-104365622
  hypo
atatgtattttttctgcgtgcatggttctat

SEQ ID NO: 16364 - DNA, 40 bp, Homo sapiens
  chr9:104365644-104365684
  hypo
tgtcaagccaggtgttcgccataaacgatctcattaaata

SEQ ID NO: 16365 - DNA, 31 bp, Homo sapiens
  chr9:104365704-104365735
  hypo
gccctattattattcccgggtttggaggaag

SEQ ID NO: 16366 - DNA, 31 bp, Homo sapiens
  chr9:104365748-104365779
  hypo
gaagttgcacagcttgcgtagacacacagtg

SEQ ID NO: 16367 - DNA, 17 bp, Homo sapiens
  chr9:107064994-107065011
  hypo
ggcgtgacccactgcgc

SEQ ID NO: 16368 - DNA, 36 bp, Homo sapiens
  chr9:107144261-107144297
  hypo
acaggcatgagccaccgcgcccggctctggtggttt

SEQ ID NO: 16369 - DNA, 31 bp, Homo sapiens
  chr9:109606635-109606666
  hypo
aaatgcttgctcaaatcggcttaatcaaacc

SEQ ID NO: 16370 - DNA, 31 bp, Homo sapiens
  chr9:109686799-109686830
  hypo
ccagaccctgtggttccgcccgtatcactgc

SEQ ID NO: 16371 - DNA, 23 bp, Homo sapiens
  chr9:109835379-109835402
  hypo
attacaggcgtgagccaccgcgc

SEQ ID NO: 16372 - DNA, 31 bp, Homo sapiens
  chr9:109865316-109865347
  hypo
gtcacaatgtgccccgcgcggtggctcaagc

SEQ ID NO: 16373 - DNA, 42 bp, Homo sapiens
  chr9:109894934-109894976
  hypo
tggatgctctgtagggcgggggtccctgacccccaggccacg

SEQ ID NO: 16374 - DNA, 31 bp, Homo sapiens
  chr9:109895285-109895316
  hypo
tcaaatatgtcatttccgtgattgcaagaca

SEQ ID NO: 16375 - DNA, 21 bp, Homo sapiens
  chr9:110012769-110012790
  hypo
agccaccgtgcctggccccca

SEQ ID NO: 16376 - DNA, 35 bp, Homo sapiens
  chr9:110160587-110160622
  hypo
tgggcatggtggcccacgcctgtaatcccagcact

SEQ ID NO: 16377 - DNA, 31 bp, Homo sapiens
  chr9:110177580-110177611
  hypo
gagtggggtaattatgcgctctgttttttag

SEQ ID NO: 16378 - DNA, 20 bp, Homo sapiens
  chr9:110312666-110312686
  hypo
ttttgagatggaggctcgct

SEQ ID NO: 16379 - DNA, 31 bp, Homo sapiens
  chr9:110328591-110328622
  hypo
tgtgagccaccgcgcccggcccccagtgctt

SEQ ID NO: 16380 - DNA, 31 bp, Homo sapiens
  chr9:110335014-110335045
  hypo
aataaaaagacaatgtcggccatagacatca

SEQ ID NO: 16381 - DNA, 21 bp, Homo sapiens
  chr9:110353020-110353041
  hypo
ttgggggacagagtttcgctc

SEQ ID NO: 16382 - DNA, 77 bp, Homo sapiens
  chr9:110478887-110478964
  hypo
gacgtgaagggcccagcgctggagatgtgaagggcccagcgctggagttgtgaagggcccagcgctggagatataaa

SEQ ID NO: 16383 - DNA, 60 bp, Homo sapiens
  chr9:110531374-110531434
  hypo
gacttgcctggggttacggaggtcataacttagaaaacaggggagcgggggactagaatc

SEQ ID NO: 16384 - DNA, 31 bp, Homo sapiens
  chr9:110531442-110531473
  hypo
ctcctcttacttgtcacgctagaggctgggg

SEQ ID NO: 16385 - DNA, 55 bp, Homo sapiens
  chr9:110531503-110531558
  hypo
ccccctcccataccctcggtgtctctttcatctcacagtgcgacaggcagcaaag

SEQ ID NO: 16386 - DNA, 31 bp, Homo sapiens
  chr9:110558849-110558880
  hypo
tagtccattttcacaccgctgataaagacct

SEQ ID NO: 16387 - DNA, 31 bp, Homo sapiens
  chr9:110780063-110780094
  hypo
atgacactgaaatggacgagaacaaaaggct

SEQ ID NO: 16388 - DNA, 38 bp, Homo sapiens
  chr9:110842927-110842965
  hypo
ctttgggaatctacagcgtctgccgcatgccagatatg

SEQ ID NO: 16389 - DNA, 31 bp, Homo sapiens
  chr9:110842976-110843007
  hypo
ataaaagtaagatcatcgcttgatccaatca

SEQ ID NO: 16390 - DNA, 73 bp, Homo sapiens
  chr9:110843040-110843113
  hypo
cacatgcacctatgtgcgcattttacagactaatcagttgaagctcgcaaaagagaagcgatggccccaaagc

SEQ ID NO: 16391 - DNA, 20 bp, Homo sapiens
  chr9:110976599-110976619
  hypo
acaagtcggccagatgcggg

SEQ ID NO: 16392 - DNA, 31 bp, Homo sapiens
  chr9:111212068-111212099
  hypo
ttcaagagatattggccgggcaggatggttc

SEQ ID NO: 16393 - DNA, 31 bp, Homo sapiens
  chr9:111446305-111446336
  hypo
tgggcaaggtggctcacgcctgtaatcccag

SEQ ID NO: 16394 - DNA, 50 bp, Homo sapiens
  chr9:111617455-111617505
  hypo
atgatgtgcaggtggtcgtccgtgaatgcgtggcccgcctcattgagcag

SEQ ID NO: 16395 - DNA, 67 bp, Homo sapiens
  chr9:111617923-111617990
  hypo
gtccacttgcgggtgtcgccagcgtcggccgcctcggggcagcgtttgcccacggtggaggagatga

SEQ ID NO: 16396 - DNA, 31 bp, Homo sapiens
  chr9:111951146-111951177
  hypo
agccccaaagagaaagcgtaaagaacacaga

SEQ ID NO: 16397 - DNA, 60 bp, Homo sapiens
  chr9:111951208-111951268
  hypo
gggagggaagctagcacggtagacttggagtagcgtgcaggactccgcattctagggtga

SEQ ID NO: 16398 - DNA, 42 bp, Homo sapiens
  chr9:111951292-111951334
  hypo
ctcccccaactcccctcgctcagtcaacgccaatgcccccaa

SEQ ID NO: 16399 - DNA, 59 bp, Homo sapiens
  chr9:111952370-111952429
  hypo
acgctcggctaggttacgctggttctgatagtgtcttggtggaacgttgctgaatgaag

SEQ ID NO: 16400 - DNA, 31 bp, Homo sapiens
  chr9:112029751-112029782
  hypo
ccttgtaaactcctcacgaaggttgtttggt

SEQ ID NO: 16401 - DNA, 40 bp, Homo sapiens
  chr9:112040327-112040367
  hypo
gagacaccaaaggcctcgagggatgcgaaggacagtcatg

SEQ ID NO: 16402 - DNA, 51 bp, Homo sapiens
  chr9:112040374-112040425
  hypo
agggtaggacactggtcggcccaacctcaaaggaagcggaattggactcag

SEQ ID NO: 16403 - DNA, 44 bp, Homo sapiens
  chr9:112040444-112040488
  hypo
tgttctgcccttctcccgggtccggtggacggagtgagagtctc

SEQ ID NO: 16404 - DNA, 31 bp, Homo sapiens
  chr9:112040495-112040526
  hypo
gaaatgagaaggaacccgggagggttcgagg

SEQ ID NO: 16405 - DNA, 31 bp, Homo sapiens
  chr9:112040564-112040595
  hypo
gggtggcataacaggacgtcctgaagatgca

SEQ ID NO: 16406 - DNA, 493 bp, Homo sapiens; identical to SEQ ID NO: 3672
  chr9:112082580-112083073
  hypo

SEQ ID NO: 16407 - DNA, 249 bp, Homo sapiens; identical to SEQ ID NO: 3673
  chr9:112083164-112083413
  hypo

SEQ ID NO: 16408 - DNA, 79 bp, Homo sapiens; identical to SEQ ID NO: 3674
  chr9:112083423-112083502
  hypo

SEQ ID NO: 16409 - DNA, 19 bp, Homo sapiens
  chr9:113785035-113785054
  hypo
aaaaccctgctattgccgg

SEQ ID NO: 16410 - DNA, 10 bp, Homo sapiens
  chr9:114247608-114247618
  hypo
caaaaagaaa

SEQ ID NO: 16411 - DNA, 31 bp, Homo sapiens
  chr9:114320409-114320440
  hypo
gagcaaaactctgtctcggaaaaaaaaacta

SEQ ID NO: 16412 - DNA, 26 bp, Homo sapiens
  chr9:114326074-114326100
  hypo
cgtgcccagagcgattaagcaatttc

SEQ ID NO: 16413 - DNA, 31 bp, Homo sapiens
  chr9:114352193-114352224
  hypo
cgtgagccactgcccccggcatgaataaata

SEQ ID NO: 16414 - DNA, 23 bp, Homo sapiens
  chr9:114649574-114649597
  hypo
aagtgctgggattacacgcatga

SEQ ID NO: 16415 - DNA, 10 bp, Homo sapiens
  chr9:114670202-114670212
  hypo
ccagcctacc

SEQ ID NO: 16416 - DNA, 20 bp, Homo sapiens
  chr9:114747964-114747984
  hypo
ttttctctcggctgggcgag

SEQ ID NO: 16417 - DNA, 22 bp, Homo sapiens
  chr9:114765804-114765826
  hypo
ctgtaagcgtgtattctatggt

SEQ ID NO: 16418 - DNA, 31 bp, Homo sapiens
  chr9:114802062-114802093
  hypo
attcttcccaatagagcggatacactctgga

SEQ ID NO: 16419 - DNA, 31 bp, Homo sapiens
  chr9:114830991-114831022
  hypo
aaaaaatatttttagccgttctgcacttcaa

SEQ ID NO: 16420 - DNA, 41 bp, Homo sapiens
  chr9:114831080-114831121
  hypo
gtccaataatccaggtcggaagtgctcgaggtctgctgcaa

SEQ ID NO: 16421 - DNA, 55 bp, Homo sapiens
  chr9:114831139-114831194
  hypo
gagaagagggaacaaacggaaaccttgctcaggggagagacggcaggaatctggc

SEQ ID NO: 16422 - DNA, 31 bp, Homo sapiens
  chr9:114889345-114889376
  hypo
tacacccacagcttctcgaaagttggccggg

SEQ ID NO: 16423 - DNA, 21 bp, Homo sapiens
  chr9:114917241-114917262
  hypo
agggcagggccaggtgcggtg

SEQ ID NO: 16424 - DNA, 79 bp, Homo sapiens
  chr9:114931838-114931917
  hypo
gagtgccattcatttacgccacaccctacggttcacgtcaggcagtcactcacttaacccctaccggttcttttcacac

SEQ ID NO: 16425 - DNA, 32 bp, Homo sapiens
  chr9:115067925-115067957
  hypo
tataagagctttcagccgggcacggtggctca

SEQ ID NO: 16426 - DNA, 31 bp, Homo sapiens
  chr9:115087415-115087446
  hypo
gataagagtcaagagacggcaaaatgcctag

SEQ ID NO: 16427 - DNA, 31 bp, Homo sapiens
  chr9:115087449-115087480
  hypo
aagagggaagggtccccggagaaccttcgac

SEQ ID NO: 16428 - DNA, 31 bp, Homo sapiens
  chr9:115478931-115478962
  hypo
aaagatacatttgtgccgggcgcggtggctc

SEQ ID NO: 16429 - DNA, 31 bp, Homo sapiens
  chr9:115479325-115479356
  hypo
agcatttaattaaatacggcattgtttattc

SEQ ID NO: 16430 - DNA, 36 bp, Homo sapiens
  chr9:116076766-116076802
  hypo
acaggcatgagccaacgcgtccggcagaatggtaaa

SEQ ID NO: 16431 - DNA, 31 bp, Homo sapiens
  chr9:116091907-116091938
  hypo
ttaaactatgatacttcgatgcatcctgatt

SEQ ID NO: 16432 - DNA, 31 bp, Homo sapiens
  chr9:116104971-116105002
  hypo
gttattatgcagcatacgactttatcctcag

SEQ ID NO: 16433 - DNA, 31 bp, Homo sapiens
  chr9:116118819-116118850
  hypo
tagaagtgattataggcggcaaaggttaaag

SEQ ID NO: 16434 - DNA, 54 bp, Homo sapiens
  chr9:116269882-116269936
  hypo
tacatcatcctggccccgctgaatcctgggagccaggtacggacagctggtgtg

SEQ ID NO: 16435 - DNA, 55 bp, Homo sapiens; identical to SEQ ID NO: 3685
  chr9:116639070-116639125
  hypo

SEQ ID NO: 16436 - DNA, 31 bp, Homo sapiens
  chr9:116671456-116671487
  hypo
gagggaatggtcctgtcgcctgttgcagttg

SEQ ID NO: 16437 - DNA, 43 bp, Homo sapiens
  chr9:116671495-116671538
  hypo
gatgctaatggaagatcgaggcatgtcccggcctgatacctgc

SEQ ID NO: 16438 - DNA, 31 bp, Homo sapiens
  chr9:116671887-116671918
  hypo
agcttgaaggtgccaccgtctcagggcctgg

SEQ ID NO: 16439 - DNA, 67 bp, Homo sapiens
  chr9:116671958-116672025
  hypo
gttcattcctttctcccgagtccagcgcctcctggcctctggtgcttgcatgcggatgctcccatgc

SEQ ID NO: 16440 - DNA, 31 bp, Homo sapiens
  chr9:116698062-116698093
  hypo
ctcaggacctgctcggcgaaagttttgagtg

SEQ ID NO: 16441 - DNA, 31 bp, Homo sapiens
  chr9:116708991-116709022
  hypo
cctcgcaggatgtagacgggagtgtgtgtgt

SEQ ID NO: 16442 - DNA, 31 bp, Homo sapiens
  chr9:116728290-116728321
  hypo
ggctggctctgcgactcgttcatcttataca

SEQ ID NO: 16443 - DNA, 31 bp, Homo sapiens
  chr9:116730184-116730215
  hypo
gagaaggtggagatctcgccttttttcagtg

SEQ ID NO: 16444 - DNA, 31 bp, Homo sapiens
  chr9:116750071-116750102
  hypo
gtttgtgttctgcctgcgcaacatagtgaga

SEQ ID NO: 16445 - DNA, 37 bp, Homo sapiens
  chr9:116750815-116750852
  hypo
agatctgcgtggtgatcggcggcgtccgcaaccagca

SEQ ID NO: 16446 - DNA, 39 bp, Homo sapiens
  chr9:116750915-116750954
  hypo
gagtcctggggaaaagcggcctggcgcctctgccccctt

SEQ ID NO: 16447 - DNA, 42 bp, Homo sapiens
  chr9:116761524-116761566
  hypo
tgggttttaggctgatcgaggggcaggcggggccctgggttt

SEQ ID NO: 16448 - DNA, 55 bp, Homo sapiens
  chr9:116761570-116761625
  hypo
ctgagctaggggcaggcggggccctgggttttaggctgagcgaggggcaggtggg

SEQ ID NO: 16449 - DNA, 31 bp, Homo sapiens
  chr9:116761657-116761688
  hypo
ggggccctgggttttacgctgcatgaggggc

SEQ ID NO: 16450 - DNA, 31 bp, Homo sapiens
  chr9:116762417-116762448
  hypo
ggtgttaggatgacagcggcccttggagtga

SEQ ID NO: 16451 - DNA, 31 bp, Homo sapiens
  chr9:116762623-116762654
  hypo
aaaaaaaggatgtgtccgagatcaaacagat

SEQ ID NO: 16452 - DNA, 31 bp, Homo sapiens
  chr9:116770636-116770667
  hypo
aggggcccctgagaaccgggcaggtaagtcc

SEQ ID NO: 16453 - DNA, 131 bp, Homo sapiens
  chr9:116770723-116770854
  hypo
ccagggtgctaagggccgtgtgttctcccacagaccccttcgaccaaggtgtcgtggccacggacgaggtgaaggaggagcccccggagccattccagaaaatcgggccaagtatgcgggattccctctgg

SEQ ID NO: 16454 - DNA, 152 bp, Homo sapiens
  chr9:116791110-116791262
  hypo
acccagacgaaccagtcggggaaaaaagctccggcctccgtggtccgatgtgccaccctcttacaccgcacccctccagccacccaaacccagacgttccgcactccaaattcgggatctccggcgagcaaggcaaccgcaggtaccaatgg

SEQ ID NO: 16455 - DNA, 31 bp, Homo sapiens
  chr9:116797924-116797955
  hypo
ctctgccaggcactgacgtgagtgctaagag

SEQ ID NO: 16456 - DNA, 50 bp, Homo sapiens
  chr9:116798286-116798336
  hypo
acccccatctcaagtgcgccgaacagtggctggcacgcagtaagcactca

SEQ ID NO: 16457 - DNA, 77 bp, Homo sapiens
  chr9:116798415-116798492
  hypo
ctcatgggtctagtgacgggggaggcaggcaggctgggcccggagccctgagcacagagacccggtgtgtgtttggg

SEQ ID NO: 16458 - DNA, 58 bp, Homo sapiens
  chr9:116798519-116798577
  hypo
cagcagaaggtgtctgcgtcggttccacccctcacgtggctgccgcatttctccctcc

SEQ ID NO: 16459 - DNA, 31 bp, Homo sapiens
  chr9:116798579-116798610
  hypo
aaccctacacctgcggcgcctgtgggatcca

SEQ ID NO: 16460 - DNA, 57 bp, Homo sapiens
  chr9:116800990-116801047
  hypo
gtgagtgctttctatgcgtcacttgtggcactgagagctttacgcaggttatttcat

SEQ ID NO: 16461 - DNA, 31 bp, Homo sapiens
  chr9:116801056-116801087
  hypo
ctgattaggtagttgacgttttcatccccat

SEQ ID NO: 16462 - DNA, 31 bp, Homo sapiens
  chr9:116801088-116801119
  hypo
atgcagatgatgaaaccgaggctcagagaac

SEQ ID NO: 16463 - DNA, 59 bp, Homo sapiens
  chr9:116810951-116811010
  hypo
ccaacagcatgatccccgaaaaggagcggcagaacatcgcagagcggctgttgagggtc

SEQ ID NO: 16464 - DNA, 225 bp, Homo sapiens
  chr9:116811490-116811715
  hypo
gcctgtgccttgaactcggtggtgcagagcgtgctgagcaagcggacactgcaggcccgcagcatgcacgaggtcatcgagctgctcaacgtgtgcgaggacctggcgggctccacgggcctggccaaggagaccttcgggtcgctggaggagacgtctccaccaccctgctggaactcggtgacggactcactgttgctggtgcatgagcgctatgagcagatc

SEQ ID NO: 16465 - DNA, 31 bp, Homo sapiens
  chr9:116812103-116812134
  hypo
ccgaggaggccgacttcgagcccgctgccaa

SEQ ID NO: 16466 - DNA, 35 bp, Homo sapiens
  chr9:116823828-116823863
  hypo
attcccatgcagggaccggccgagtagcccagctg

SEQ ID NO: 16467 - DNA, 44 bp, Homo sapiens
  chr9:116832917-116832961
  hypo
ggggctgggcctggggcgtggagctggggcgtagccttgggacc

SEQ ID NO: 16468 - DNA, 60 bp, Homo sapiens
  chr9:116856484-116856544
  hypo
aactcctgtagcatcccgtacaggttccgctgggcccaggccacccgggctccactgagc

SEQ ID NO: 16469 - DNA, 34 bp, Homo sapiens
  chr9:116856651-116856685
  hypo
cagctggaactgcaggcgacggttctcctcctgg

SEQ ID NO: 16470 - DNA, 31 bp, Homo sapiens
  chr9:116857251-116857282
  hypo
tcccccagcatctccacgcctgtccctcagc

SEQ ID NO: 16471 - DNA, 64 bp, Homo sapiens
  chr9:116857302-116857366
  hypo
cttgggggcctgtggtcgggtggtgacccgctgagctcggcttgcatatcgcagggtgctgaga

SEQ ID NO: 16472 - DNA, 31 bp, Homo sapiens
  chr9:116857381-116857412
  hypo
tgggctgagggggacacgcaggccacctggg

SEQ ID NO: 16473 - DNA, 31 bp, Homo sapiens
  chr9:116857414-116857445
  hypo
gtgcactccccctgagcgctcctctctgagg

SEQ ID NO: 16474 - DNA, 31 bp, Homo sapiens
  chr9:116857466-116857497
  hypo
cttccctgccaggccccgcttaagtaccatg

SEQ ID NO: 16475 - DNA, 31 bp, Homo sapiens
  chr9:116894967-116894998
  hypo
gctgcgtgaccttgagcgagtggctcagctt

SEQ ID NO: 16476 - DNA, 31 bp, Homo sapiens
  chr9:116930483-116930514
  hypo
agtatctaccctgtgacgcaggtcgctcaca

SEQ ID NO: 16477 - DNA, 41 bp, Homo sapiens
  chr9:116971681-116971722
  hypo
gcgggcctcctgccggcgagcgcctgcgcccttccctggcg

SEQ ID NO: 16478 - DNA, 31 bp, Homo sapiens
  chr9:116971908-116971939
  hypo
cacctcactgcttgaccgctctgaccccctt

SEQ ID NO: 16479 - DNA, 31 bp, Homo sapiens
  chr9:116971964-116971995
  hypo
ggctcccagggctcttcggcctgccagggtc

SEQ ID NO: 16480 - DNA, 68 bp, Homo sapiens
  chr9:116973313-116973381
  hypo
ttttccgtgtctattacgcagactctagcggggaaccccacctcccacggccacgctgccctggccac

SEQ ID NO: 16481 - DNA, 31 bp, Homo sapiens
  chr9:116973413-116973444
  hypo
ctttgagtgtgggggccgcatgtggggttgt

SEQ ID NO: 16482 - DNA, 34 bp, Homo sapiens
  chr9:116973455-116973489
  hypo
acctgctgctggcacacggcgtgactggggcctg

SEQ ID NO: 16483 - DNA, 31 bp, Homo sapiens
  chr9:116995057-116995088
  hypo
agaagcttgcttgggccgggcacagtggctc

SEQ ID NO: 16484 - DNA, 31 bp, Homo sapiens
  chr9:117031993-117032024
  hypo
tgtcgagcacttttctcgaggcacaaggagc

SEQ ID NO: 16485 - DNA, 31 bp, Homo sapiens
  chr9:117038569-117038600
  hypo
ttctggccttcatttacgtctttaacagtgc

SEQ ID NO: 16486 - DNA, 31 bp, Homo sapiens
  chr9:118222147-118222178
  hypo
aaatggtatggcaggccgggcgcgggggctc

SEQ ID NO: 16487 - DNA, 31 bp, Homo sapiens
  chr9:123150786-123150817
  hypo
gagggtagtgggaagccgctaaagtgttttg

SEQ ID NO: 16488 - DNA, 31 bp, Homo sapiens
  chr9:123150827-123150858
  hypo
tcttggtcagaggcagcgatgtggatggctg

SEQ ID NO: 16489 - DNA, 99 bp, Homo sapiens
  chr9:123176126-123176225
  hypo
ggagggagggagagggcgagatggagccattcggtttcccttgcaagctgcagcatgcacggtacttgggaaagatgtccctcccggctggtagctatg

SEQ ID NO: 16490 - DNA, 31 bp, Homo sapiens
  chr9:123176251-123176282
  hypo
caagggtccaaggactcgggtgctgctgcca

SEQ ID NO: 16491 - DNA, 72 bp, Homo sapiens
  chr9:123295276-123295348
  hypo
aggctctgtacctttacgtgctgttctctctgctaggcaaagcgtcctcacccaactcgcaggactccttgt

SEQ ID NO: 16492 - DNA, 31 bp, Homo sapiens
  chr9:123367535-123367566
  hypo
catcttccaacaatcccgaaacatctgcatt

SEQ ID NO: 16493 - DNA, 60 bp, Homo sapiens
  chr9:123367600-123367660
  hypo
ttgtcttctttcagctcgatggtccaaaagggggcattgagtttccggttttggtactcg

SEQ ID NO: 16494 - DNA, 31 bp, Homo sapiens
  chr9:123965026-123965057
  hypo
attgatataaacatgacgtatcaatattata

SEQ ID NO: 16495 - DNA, 21 bp, Homo sapiens
  chr9:123965105-123965126
  hypo
ttaaaagaatgtaagccggcc

SEQ ID NO: 16496 - DNA, 65 bp, Homo sapiens
  chr9:124095119-124095184
  hypo
gtactctagtgtggctcgtttccttgtgcccatctgacagtgagagccggcgtcttctctgcctg

SEQ ID NO: 16497 - DNA, 31 bp, Homo sapiens
  chr9:124422090-124422121
  hypo
agaaaaagaaagaaaacgtgatgccagtggg

SEQ ID NO: 16498 - DNA, 31 bp, Homo sapiens
  chr9:124422130-124422161
  hypo
cacctaggtggtttctcggcatccctaccct

SEQ ID NO: 16499 - DNA, 31 bp, Homo sapiens
  chr9:124422197-124422228
  hypo
agcagcagagctttagcgagccacctagtat

SEQ ID NO: 16500 - DNA, 37 bp, Homo sapiens
  chr9:124422259-124422296
  hypo
agatatagccagcccccgccctcgggagctcagaggc

SEQ ID NO: 16501 - DNA, 31 bp, Homo sapiens
  chr9:124443386-124443417
  hypo
gtgaggaaacaggttccgagaggtaaagtca

SEQ ID NO: 16502 - DNA, 44 bp, Homo sapiens
  chr9:124443434-124443478
  hypo
aactgctactaagtggcggaaccaagattcgaccccaggtctct

SEQ ID NO: 16503 - DNA, 31 bp, Homo sapiens
  chr9:124443505-124443536
  hypo
tcctcaggctaggaggcggatccattgcccc

SEQ ID NO: 16504 - DNA, 39 bp, Homo sapiens
  chr9:124443546-124443585
  hypo
agaaccccatcagcatcgcttttccggctatttcccttt

SEQ ID NO: 16505 - DNA, 54 bp, Homo sapiens
  chr9:124545861-124545915
  hypo
ggccttttaagttgagcgtgcgcactgcatgggaaatagcggccctggaggatg

SEQ ID NO: 16506 - DNA, 31 bp, Homo sapiens
  chr9:124548589-124548620
  hypo
aagccagatggagctccgggtctgtcaccta

SEQ ID NO: 16507 - DNA, 31 bp, Homo sapiens
  chr9:124548653-124548684
  hypo
ccccagagagaagcctcgggcctgtccctgt

SEQ ID NO: 16508 - DNA, 75 bp, Homo sapiens
  chr9:124548699-124548774
  hypo
cagctggaagcaagtacggcagagccacacaccggagcagggctgcaccgtcaccctcaccggtggcccttgtgt

SEQ ID NO: 16509 - DNA, 31 bp, Homo sapiens
  chr9:124549334-124549365
  hypo
ccccctctcctcaggccgaccaccagcacag

SEQ ID NO: 16510 - DNA, 31 bp, Homo sapiens
  chr9:124549368-124549399
  hypo
ccccagctctcagcagcggcaggagaggagg

SEQ ID NO: 16511 - DNA, 69 bp, Homo sapiens
  chr9:124549445-124549514
  hypo
tgcctcttgctgcctccgtggcctctaaacctccagcctcccccgcccccaccccgctctttcctacag

SEQ ID NO: 16512 - DNA, 31 bp, Homo sapiens
  chr9:124581115-124581146
  hypo
gtgcaggggtcaggtgcgggccttaggatgg

SEQ ID NO: 16513 - DNA, 31 bp, Homo sapiens
  chr9:124581147-124581178
  hypo
aagaagggaagggtgccgataagggctgctt

SEQ ID NO: 16514 - DNA, 31 bp, Homo sapiens; identical to SEQ ID NO: 3691
  chr9:124622035-124622066
  hypo

SEQ ID NO: 16515 - DNA, 31 bp, Homo sapiens; identical to SEQ ID NO: 3692
  chr9:124622092-124622123
  hypo

SEQ ID NO: 16516 - DNA, 71 bp, Homo sapiens; identical to SEQ ID NO: 3693
  chr9:124622146-124622217
  hypo

SEQ ID NO: 16517 - DNA, 31 bp, Homo sapiens
  chr9:124751430-124751461
  hypo
cggtcaaggctggaaacgcaggctgggaact

SEQ ID NO: 16518 - DNA, 31 bp, Homo sapiens
  chr9:124961781-124961812
  hypo
tgtctcctagcaccaccggcaaggcctagac

SEQ ID NO: 16519 - DNA, 31 bp, Homo sapiens; identical to SEQ ID NO: 3694
  chr9:125587779-125587810
  hypo

SEQ ID NO: 16520 - DNA, 29 bp, Homo sapiens
  chr9:125859123-125859152
  hypo
caggcgtgagccaccgcacctggcccagt

SEQ ID NO: 16521 - DNA, 58 bp, Homo sapiens
  chr9:125870567-125870625
  hypo
ggtctggtgcctggctcgtcagggctgctgggttctcctgtgacgcccttggctcttt

SEQ ID NO: 16522 - DNA, 25 bp, Homo sapiens
  chr9:126010837-126010862
  hypo
cgcgcccagccgaattattttttta

SEQ ID NO: 16523 - DNA, 31 bp, Homo sapiens
  chr9:126092517-126092548
  hypo
gtgttctaatcggatgcgtttgttaaatcag

SEQ ID NO: 16524 - DNA, 53 bp, Homo sapiens
  chr9:126100874-126100927
  hypo
ttgcagggagagcactcgagcaggttaatggcagcgtccggccagtggaggag

SEQ ID NO: 16525 - DNA, 31 bp, Homo sapiens
  chr9:126100999-126101030
  hypo
cagcagggatggagatcggccctgttgaggc

SEQ ID NO: 16526 - DNA, 31 bp, Homo sapiens
  chr9:126101039-126101070
  hypo
agcaggtcagcttggccgaggctcagagatc

SEQ ID NO: 16527 - DNA, 81 bp, Homo sapiens
  chr9:126154253-126154334
  hypo
cccccacggctgctcccgcctctgcccaccttgtctccgcgtggagttcccatgcagatgacttcccgaaccccttctaat

SEQ ID NO: 16528 - DNA, 41 bp, Homo sapiens
  chr9:126162176-126162217
  hypo
ggcctgagctcccactcgggaagaaacgatgctagcccaag

SEQ ID NO: 16529 - DNA, 31 bp, Homo sapiens
  chr9:126162230-126162261
  hypo
caatgggtgctccaccgcgccccctgctgac

SEQ ID NO: 16530 - DNA, 45 bp, Homo sapiens
  chr9:126162288-126162333
  hypo
aggatccctcctaccccgatccctgccccacggaagcccctgggc

SEQ ID NO: 16531 - DNA, 31 bp, Homo sapiens
  chr9:126169182-126169213
  hypo
cttgctacaataaaggcgggttaagaatgtg

SEQ ID NO: 16532 - DNA, 31 bp, Homo sapiens
  chr9:126169371-126169402
  hypo
tggcaatcagcgggatcggtggaggagactg

SEQ ID NO: 16533 - DNA, 45 bp, Homo sapiens
  chr9:126169446-126169491
  hypo
gggggggtggggagcacggagctggagcctcggaggctggggagg

SEQ ID NO: 16534 - DNA, 45 bp, Homo sapiens
  chr9:126348945-126348990
  hypo
gaattggagcccagctcgctggacagtgcccggtcccccaaagga

SEQ ID NO: 16535 - DNA, 31 bp, Homo sapiens
  chr9:126349143-126349174
  hypo
gggaaccaagtgggggcgcagagaggtcaaa

SEQ ID NO: 16536 - DNA, 31 bp, Homo sapiens; identical to SEQ ID NO: 3695
  chr9:127061459-127061490
  hypo

SEQ ID NO: 16537 - DNA, 31 bp, Homo sapiens
  chr9:127230036-127230067
  hypo
catttgtgggctgtggcgtgtccttctgcgc

SEQ ID NO: 16538 - DNA, 52 bp, Homo sapiens
  chr9:127230410-127230462
  hypo
tctccctggcctctgccgagggcttcctcatgaccagcgagtgggccaaggc

SEQ ID NO: 16539 - DNA, 37 bp, Homo sapiens
  chr9:127237565-127237602
  hypo
ggcacgagggcagggccgacttcgtgcccatcagcct

SEQ ID NO: 16540 - DNA, 31 bp, Homo sapiens
  chr9:127260203-127260234
  hypo
tcccctctgccccttccgtggctctcagagc

SEQ ID NO: 16541 - DNA, 31 bp, Homo sapiens
  chr9:127262947-127262978
  hypo
cggcccaaacttgttccggccacccctcata

SEQ ID NO: 16542 - DNA, 31 bp, Homo sapiens
  chr9:127270139-127270170
  hypo
ggaggcaaggccatggcgacttgactaggcg

SEQ ID NO: 16543 - DNA, 31 bp, Homo sapiens
  chr9:127282290-127282321
  hypo
tttctctccttccactcgcaaaaaggctacc

SEQ ID NO: 16544 - DNA, 56 bp, Homo sapiens
  chr9:127308401-127308457
  hypo
tgttcatcttcttcctcgaccccacccagagtaacaaaatacgtatatgatagaaa

SEQ ID NO: 16545 - DNA, 31 bp, Homo sapiens
  chr9:127312606-127312637
  hypo
agtaggttttgcttgtcgcaattattactgt

SEQ ID NO: 16546 - DNA, 62 bp, Homo sapiens
  chr9:127361828-127361890
  hypo
ggtcttcctgagtgtccgtggcagccgccatgagggcgcggcggcggcggccgctcggctga

SEQ ID NO: 16547 - DNA, 31 bp, Homo sapiens
  chr9:127420614-127420645
  hypo
cagggaccagcaaatccgctttcttccagtg

SEQ ID NO: 16548 - DNA, 31 bp, Homo sapiens
  chr9:127420683-127420714
  hypo
catatatagttcaatgcgagctgagcagaca

SEQ ID NO: 16549 - DNA, 31 bp, Homo sapiens
  chr9:127420718-127420749
  hypo
tgcaaggaaatctggcgcggttcaatacctc

SEQ ID NO: 16550 - DNA, 22 bp, Homo sapiens
  chr9:127468805-127468827
  hypo
ttttttgagatagtctcgccct

SEQ ID NO: 16551 - DNA, 31 bp, Homo sapiens
  chr9:127481036-127481067
  hypo
accacaatccatttatcgagtcccctattaa

SEQ ID NO: 16552 - DNA, 31 bp, Homo sapiens
  chr9:127481334-127481365
  hypo
aggataaattcctagacgtatgaattgttca

SEQ ID NO: 16553 - DNA, 31 bp, Homo sapiens
  chr9:127481369-127481400
  hypo
aagttttcttttgtggcggggagggtggaga

SEQ ID NO: 16554 - DNA, 9 bp, Homo sapiens
  chr9:127481424-127481433
  hypo
ctggagtgc

SEQ ID NO: 16555 - DNA, 31 bp, Homo sapiens
  chr9:127482310-127482341
  hypo
ttttgaaactcttgaacgtttttgggttttt

SEQ ID NO: 16556 - DNA, 32 bp, Homo sapiens
  chr9:127500845-127500877
  hypo
tactgaaaaaaggacacgggggccgggcacaa

SEQ ID NO: 16557 - DNA, 24 bp, Homo sapiens
  chr9:127504546-127504570
  hypo
aaaaaataaaagaggccgggcacg

SEQ ID NO: 16558 - DNA, 17 bp, Homo sapiens
  chr9:127507664-127507681
  hypo
tcctggcagggcacagc

SEQ ID NO: 16559 - DNA, 94 bp, Homo sapiens; identical to SEQ ID NO: 3696
  chr9:127534415-127534509
  hypo

SEQ ID NO: 16560 - DNA, 31 bp, Homo sapiens
  chr9:127538142-127538173
  hypo
tttttaacaagttatccgatgatgcggaggc

SEQ ID NO: 16561 - DNA, 31 bp, Homo sapiens
  chr9:127570204-127570235
  hypo
cagcctggtggagttccgcaacctggaaaac

SEQ ID NO: 16562 - DNA, 31 bp, Homo sapiens
  chr9:127570241-127570272
  hypo
caaggtcagggacccccggaggtggagaggg

SEQ ID NO: 16563 - DNA, 31 bp, Homo sapiens
  chr9:127571889-127571920
  hypo
taagcagatgggatgacgatagacctccttc

SEQ ID NO: 16564 - DNA, 37 bp, Homo sapiens
  chr9:127572287-127572324
  hypo
cggacattgactttgccgtggacgagagcggcctgtg

SEQ ID NO: 16565 - DNA, 232 bp, Homo sapiens
  chr9:127572392-127572624
  hypo
accccggcgatctctccgtgcaccgggagaccacgtggaagacacggctgcggcggaactcctacgggaactgcttcctggtgtgcggcatcctgtatgccgtggacacgtacaaccagcaggaaggccaggtcgcctacgctttcgacacgcacacgggcaccgacgcacgcccccagctgccgttcctcaacgagcacgcctacaccacccagatcgactacaaccccaa

SEQ ID NO: 16566 - DNA, 31 bp, Homo sapiens
  chr9:127573454-127573485
  hypo
tattcttcatcagtgccgtcatttgtttctg

SEQ ID NO: 16567 - DNA, 40 bp, Homo sapiens
  chr9:127577753-127577793
  hypo
gatgggagattaagtacgctgttagctgaatgggaattgg

SEQ ID NO: 16568 - DNA, 31 bp, Homo sapiens
  chr9:127577921-127577952
  hypo
aacaaaagtagccaggcgttgtggcatgcaa

SEQ ID NO: 16569 - DNA, 37 bp, Homo sapiens
  chr9:127623916-127623953
  hypo
gactcgccatcgactacgagtgcgccggagccccaac

SEQ ID NO: 16570 - DNA, 78 bp, Homo sapiens
  chr9:127657865-127657943
  hypo
gacagagaccctccacgacagagagcctccacgacagggagcctccacgacagagagcctccacgacagagaaccatc

SEQ ID NO: 16571 - DNA, 34 bp, Homo sapiens
  chr9:127955074-127955108
  hypo
ggacaacagagcgagactccgtctcaaaaaaaag

SEQ ID NO: 16572 - DNA, 31 bp, Homo sapiens; identical to SEQ ID NO: 3697
  chr9:128024544-128024575
  hypo

SEQ ID NO: 16573 - DNA, 31 bp, Homo sapiens; identical to SEQ ID NO: 3698
  chr9:128138375-128138406
  hypo

SEQ ID NO: 16574 - DNA, 46 bp, Homo sapiens
  chr9:128168026-128168072
  hypo
ttctgaaggaggccctcgcccttgccgggtgcgcactttctaaaac

SEQ ID NO: 16575 - DNA, 35 bp, Homo sapiens
  chr9:128168151-128168186
  hypo
gcttggcactcagtgtcgctcgaggcccaactgac

SEQ ID NO: 16576 - DNA, 31 bp, Homo sapiens
  chr9:128173739-128173770
  hypo
gtgaactgggttcttccgagccctccagccc

SEQ ID NO: 16577 - DNA, 31 bp, Homo sapiens
  chr9:128178251-128178282
  hypo
ggccccgggcttgggtcggttctaggccttt

SEQ ID NO: 16578 - DNA, 31 bp, Homo sapiens
  chr9:128186652-128186683
  hypo
taccccctgtgatgggcgggattctatctcc

SEQ ID NO: 16579 - DNA, 41 bp, Homo sapiens
  chr9:128274067-128274108
  hypo
taaaaagtcacagctgcgcatgaagccgcataccctccatt

SEQ ID NO: 16580 - DNA, 34 bp, Homo sapiens
  chr9:128274145-128274179
  hypo
agcagttactctgcagcgacgggaaaacctgctt

SEQ ID NO: 16581 - DNA, 31 bp, Homo sapiens
  chr9:128274205-128274236
  hypo
agtaataccatgtcaccgaatggcctaggaa

SEQ ID NO: 16582 - DNA, 31 bp, Homo sapiens
  chr9:128399988-128400019
  hypo
aggattaaatgagaaacgatgtattaaagta

SEQ ID NO: 16583 - DNA, 23 bp, Homo sapiens
  chr9:128400059-128400082
  hypo
attttttgttctgagacggaatc

SEQ ID NO: 16584 - DNA, 47 bp, Homo sapiens
  chr9:128407605-128407652
  hypo
cccaacacctgagaaacgaagctcagtgagaacgcagatgacaatgg

SEQ ID NO: 16585 - DNA, 39 bp, Homo sapiens
  chr9:128407726-128407765
  hypo
ccaaattggccaggtacggtggctcacgcctatgatccc

SEQ ID NO: 16586 - DNA, 31 bp, Homo sapiens
  chr9:128479563-128479594
  hypo
tcttttctccatgatacgttattagtaaccc

SEQ ID NO: 16587 - DNA, 6 bp, Homo sapiens
  chr9:128479639-128479645
  hypo
ttttga

SEQ ID NO: 16588 - DNA, 41 bp, Homo sapiens
  chr9:128752497-128752538
  hypo
cctgcccctcagggttcgtttcctaccgcctggcctaccct

SEQ ID NO: 16589 - DNA, 31 bp, Homo sapiens
  chr9:128757172-128757203
  hypo
ttctccagggacagggcgtccgctccttttc

SEQ ID NO: 16590 - DNA, 112 bp, Homo sapiens
  chr9:128925325-128925437
  hypo
gtgctggggagaccctcgcctcccatggttgttagcatgaactgaggcgatgcatgtgggtgctgagcacgaagcctggtgcatggtcaaccctcagcgaatgcatctagct

SEQ ID NO: 16591 - DNA, 36 bp, Homo sapiens
  chr9:128926860-128926896
  hypo
ggcctgtatgtgtctttcttgcgtaccctgatggct

SEQ ID NO: 16592 - DNA, 31 bp, Homo sapiens
  chr9:129219830-129219861
  hypo
acctgtatgttgtgtacgggtagagattggg

SEQ ID NO: 16593 - DNA, 31 bp, Homo sapiens
  chr9:129222036-129222067
  hypo
ccatccttgcctgccccgctcacttggacct

SEQ ID NO: 16594 - DNA, 31 bp, Homo sapiens
  chr9:129224279-129224310
  hypo
atgctcccatcactcacgactagataatttc

SEQ ID NO: 16595 - DNA, 31 bp, Homo sapiens
  chr9:129242473-129242504
  hypo
ctgacttcggggctccgcgtccctgcactca

SEQ ID NO: 16596 - DNA, 31 bp, Homo sapiens
  chr9:129265131-129265162
  hypo
ggcagatgggcggcaccgtggttttacacac

SEQ ID NO: 16597 - DNA, 31 bp, Homo sapiens
  chr9:129265612-129265643
  hypo
ctcctcctgccgcctccgccagccctccctc

SEQ ID NO: 16598 - DNA, 31 bp, Homo sapiens
  chr9:129266741-129266772
  hypo
tggaggcttgatgctgcggttgggggctgca

SEQ ID NO: 16599 - DNA, 31 bp, Homo sapiens
  chr9:129267624-129267655
  hypo
cgctgcaggcccctgtcgagctggggtccca

SEQ ID NO: 16600 - DNA, 31 bp, Homo sapiens
  chr9:129287199-129287230
  hypo
ggcctctggcctgggacgtgttccctgtgca

SEQ ID NO: 16601 - DNA, 31 bp, Homo sapiens
  chr9:129316509-129316540
  hypo
gaggaagaccttttccgcggggtgccctgga

SEQ ID NO: 16602 - DNA, 31 bp, Homo sapiens
  chr9:129316558-129316589
  hypo
accagctgggttcattcggcttggcagtgag

SEQ ID NO: 16603 - DNA, 31 bp, Homo sapiens
  chr9:129423386-129423417
  hypo
ctaaccgtagtagacacgcccatacacagga

SEQ ID NO: 16604 - DNA, 31 bp, Homo sapiens
  chr9:129455945-129455976
  hypo
actacggtccagggggcgtggggctggctgt

SEQ ID NO: 16605 - DNA, 31 bp, Homo sapiens
  chr9:129562213-129562244
  hypo
gcatgaatcatgcactcgctcttaaagtgcc

SEQ ID NO: 16606 - DNA, 31 bp, Homo sapiens
  chr9:129562269-129562300
  hypo
aatacattagtgaggccgggagcagtggctc

SEQ ID NO: 16607 - DNA, 31 bp, Homo sapiens
  chr9:129633596-129633627
  hypo
gaaaaaaataggtcagcgtgtatgtgctgct

SEQ ID NO: 16608 - DNA, 15 bp, Homo sapiens
  chr9:129679037-129679052
  hypo
cgatggagtgagact

SEQ ID NO: 16609 - DNA, 41 bp, Homo sapiens
  chr9:129834458-129834499
  hypo
taatattccattgtaccgatgcaccacgtttaatttatcca

SEQ ID NO: 16610 - DNA, 63 bp, Homo sapiens; identical to SEQ ID NO: 3703
  chr9:130159224-130159287
  hypo

SEQ ID NO: 16611 - DNA, 141 bp, Homo sapiens; identical to SEQ ID NO: 3704
  chr9:130159302-130159443
  hypo

SEQ ID NO: 16612 - DNA, 31 bp, Homo sapiens
  chr9:130241845-130241876
  hypo
ttgggccaaggtccctcggatgtggaaaggc

SEQ ID NO: 16613 - DNA, 22 bp, Homo sapiens
  chr9:130247370-130247392
  hypo
gccaccacgcctggcctatttt

SEQ ID NO: 16614 - DNA, 31 bp, Homo sapiens
  chr9:130265600-130265631
  hypo
ggccttcctgggaaggcgtgtggtgcaggcc

SEQ ID NO: 16615 - DNA, 31 bp, Homo sapiens
  chr9:130265673-130265704
  hypo
ctgctccccagaaccccggggccctcctgct

SEQ ID NO: 16616 - DNA, 36 bp, Homo sapiens
  chr9:130265721-130265757
  hypo
cttaccccatgtagctcgatccgaagcaggagtgtc

SEQ ID NO: 16617 - DNA, 31 bp, Homo sapiens
  chr9:130265760-130265791
  hypo
aaacctgtcttcagtgcgcttctggcctgag

SEQ ID NO: 16618 - DNA, 40 bp, Homo sapiens
  chr9:130269316-130269356
  hypo
tggggactctccccagcgggggccccgttgagcagggggc

SEQ ID NO: 16619 - DNA, 96 bp, Homo sapiens
  chr9:130269494-130269590
  hypo
agaccacctgcttggcgcgccgtcgcttttccgagagggtggctgactccggggtgctggggctggggctgccgcccccgccgctgttgctgtact

SEQ ID NO: 16620 - DNA, 31 bp, Homo sapiens
  chr9:130270527-130270558
  hypo
ggccctgagggtaggacgaggccagtggtct

SEQ ID NO: 16621 - DNA, 31 bp, Homo sapiens
  chr9:130270566-130270597
  hypo
cctccgagtcctcatccgcacaagaggacca

SEQ ID NO: 16622 - DNA, 31 bp, Homo sapiens
  chr9:130270619-130270650
  hypo
caatcctggtggtggccggggatgaggctcg

SEQ ID NO: 16623 - DNA, 85 bp, Homo sapiens
  chr9:130271242-130271327
  hypo
cctcgggtctacctcccgcatgtggatctgggctcgctgcttgaacacggacgtgctggacacatcaaatcgctgctgcagcccg

SEQ ID NO: 16624 - DNA, 35 bp, Homo sapiens
  chr9:130272562-130272597
  hypo
gggctggacatggttccgcacgcacacctctgcct

SEQ ID NO: 16625 - DNA, 40 bp, Homo sapiens
  chr9:130272604-130272644
  hypo
gatgaaggctgtgccccgagggagccgggtcagcaggggc

SEQ ID NO: 16626 - DNA, 5 bp, Homo sapiens
  chr9:130272721-130272726
  hypo
tatat

SEQ ID NO: 16627 - DNA, 31 bp, Homo sapiens
  chr9:130278829-130278860
  hypo
agctatacttgctgaacgtaaatgtacttta

SEQ ID NO: 16628 - DNA, 31 bp, Homo sapiens
  chr9:130278870-130278901
  hypo
tggtaaaaatctgtgacgagtcagagatgaa

SEQ ID NO: 16629 - DNA, 70 bp, Homo sapiens
  chr9:130279230-130279300
  hypo
ttggacagcacctcctcgaagcgcgccttggcctgctcgtacaccatgtggtacacggcgtccgagatct

SEQ ID NO: 16630 - DNA, 31 bp, Homo sapiens
  chr9:130279562-130279593
  hypo
ttcccacaagccaggccgctgcagcccccac

SEQ ID NO: 16631 - DNA, 31 bp, Homo sapiens
  chr9:130279873-130279904
  hypo
ctgcaccccagtgcctcgtccagggtaggtg

SEQ ID NO: 16632 - DNA, 43 bp, Homo sapiens
  chr9:130279920-130279963
  hypo
gtgatgaataagacagcgagtatctccacgtgcactggccctg

SEQ ID NO: 16633 - DNA, 37 bp, Homo sapiens
  chr9:130279985-130280022
  hypo
tcatctccttccaaaccggcagcgccccagagcccca

SEQ ID NO: 16634 - DNA, 31 bp, Homo sapiens
  chr9:130290388-130290419
  hypo
gcataatgcacaggaccgccatgaccactac

SEQ ID NO: 16635 - DNA, 58 bp, Homo sapiens
  chr9:130296358-130296416
  hypo
taagaagctgcagctcgcgtcccaactgggatttgtgctggcccgctgtgcggctccc

SEQ ID NO: 16636 - DNA, 31 bp, Homo sapiens
  chr9:130297781-130297812
  hypo
gggagtgcagggaccccgctgcctgtcaggg

SEQ ID NO: 16637 - DNA, 59 bp, Homo sapiens
  chr9:130297839-130297898
  hypo
caggtccctggaccagcgcagtgctgcccacaggcctagggcctcgggctgaggggacc

SEQ ID NO: 16638 - DNA, 56 bp, Homo sapiens
  chr9:130297929-130297985
  hypo
ccctctaggtttgtcacgttggccccaggtggggctggagtcgctcactatccagg

SEQ ID NO: 16639 - DNA, 31 bp, Homo sapiens
  chr9:130305368-130305399
  hypo
gcccgacaatgacagccgtgtgaccctgcgt

SEQ ID NO: 16640 - DNA, 31 bp, Homo sapiens
  chr9:130311543-130311574
  hypo
tcttcccaagttgcctcgtgacccctgctca

SEQ ID NO: 16641 - DNA, 31 bp, Homo sapiens
  chr9:130327792-130327823
  hypo
tgggcgtggtggctcacgcctataatcttgg

SEQ ID NO: 16642 - DNA, 36 bp, Homo sapiens; identical to SEQ ID NO: 3707
  chr9:130331223-130331259
  hypo

SEQ ID NO: 16643 - DNA, 159 bp, Homo sapiens; identical to SEQ ID NO: 3708
  chr9:130374195-130374354
  hypo

SEQ ID NO: 16644 - DNA, 37 bp, Homo sapiens; identical to SEQ ID NO: 3709
  chr9:130374656-130374693
  hypo

SEQ ID NO: 16645 - DNA, 31 bp, Homo sapiens
  chr9:130415924-130415955
  hypo
gatgcggtaagctgagcgagaatcacagcag

SEQ ID NO: 16646 - DNA, 35 bp, Homo sapiens
  chr9:130444668-130444703
  hypo
tctctctctttctcagcgcccgctatgggcactgg

SEQ ID NO: 16647 - DNA, 31 bp, Homo sapiens
  chr9:130444800-130444831
  hypo
aggtgacccaggccaacggaaagtgggaggt

SEQ ID NO: 16648 - DNA, 31 bp, Homo sapiens
  chr9:130446344-130446375
  hypo
ttgaggttccatatatcgggaggtgggaacc

SEQ ID NO: 16649 - DNA, 49 bp, Homo sapiens
  chr9:130446401-130446450
  hypo
ttcatggaggggcctcgcgcagacagctgacgtccgctgtgtggcctcc

SEQ ID NO: 16650 - DNA, 56 bp, Homo sapiens
  chr9:130446480-130446536
  hypo
ccatgtgtgttcatgcgcgcttgtgtgtgtgtgtatgcatgcgcacacatgtgtgt

SEQ ID NO: 16651 - DNA, 34 bp, Homo sapiens
  chr9:130448209-130448243
  hypo
gtgagccaccgcgcccagccgactatccaaattt

SEQ ID NO: 16652 - DNA, 31 bp, Homo sapiens
  chr9:130467717-130467748
  hypo
ctcgtccctcttgccacgtggtgctgacaaa

SEQ ID NO: 16653 - DNA, 40 bp, Homo sapiens
  chr9:130494891-130494931
  hypo
caggaggatctcctcgcggtcccgccggctgcgccacgcc

SEQ ID NO: 16654 - DNA, 52 bp, Homo sapiens
  chr9:130550915-130550967
  hypo
cggagcagcaccaactcgccctcatcagtcagctctgcggctccatcacccc

SEQ ID NO: 16655 - DNA, 31 bp, Homo sapiens
  chr9:130551135-130551166
  hypo
ggctgtgcgccagtctcggttccatcagctg

SEQ ID NO: 16656 - DNA, 31 bp, Homo sapiens
  chr9:130561819-130561850
  hypo
aaaaagatgggggtctcgctatgtcacccag

SEQ ID NO: 16657 - DNA, 31 bp, Homo sapiens
  chr9:130563063-130563094
  hypo
tttgcgaagggctgggcgtggtggctcaagc

SEQ ID NO: 16658 - DNA, 31 bp, Homo sapiens
  chr9:130570904-130570935
  hypo
ggagggggagcaccagcggtccaacgccgcc

SEQ ID NO: 16659 - DNA, 41 bp, Homo sapiens
  chr9:130589224-130589265
  hypo
attcaacccacatctacgccatcctgcggctgtctctccct

SEQ ID NO: 16660 - DNA, 24 bp, Homo sapiens
  chr9:130622503-130622527
  hypo
ggaaaactccgtttcaaaaaaaaa

SEQ ID NO: 16661 - DNA, 94 bp, Homo sapiens
  chr9:130630678-130630772
  hypo
atggtctcctcattgtcgtccacacgcccgctggtctctccacgtttcaagagccgctgggtcatggtctcagggcctgcgtccacatacagca

SEQ ID NO: 16662 - DNA, 31 bp, Homo sapiens
  chr9:130634873-130634904
  hypo
agctttgcctgtgtgccgtgggctttgctgc

SEQ ID NO: 16663 - DNA, 52 bp, Homo sapiens
  chr9:130635123-130635175
  hypo
caggcccacctgcaaacgcccacccattcataaaccccgagacacagggtcc

SEQ ID NO: 16664 - DNA, 31 bp, Homo sapiens
  chr9:130635228-130635259
  hypo
ggtgcagccccaggcccgggctccctccagt

SEQ ID NO: 16665 - DNA, 39 bp, Homo sapiens
  chr9:130635270-130635309
  hypo
cccttgctgcaccacccgcctgcccgcaactcacccacc

SEQ ID NO: 16666 - DNA, 31 bp, Homo sapiens
  chr9:130637315-130637346
  hypo
ccagacaccttgacaacgctccccagggcca

SEQ ID NO: 16667 - DNA, 164 bp, Homo sapiens; identical to SEQ ID NO: 3710
  chr9:130639866-130640030
  hypo

SEQ ID NO: 16668 - DNA, 31 bp, Homo sapiens; identical to SEQ ID NO: 3713
  chr9:130674858-130674889
  hypo

SEQ ID NO: 16669 - DNA, 46 bp, Homo sapiens
  chr9:130868764-130868810
  hypo
tcccctatgccggcatcgaccttgcagtctacgaggtgaggcccaa

SEQ ID NO: 16670 - DNA, 36 bp, Homo sapiens
  chr9:130868853-130868889
  hypo
ctgtctccctccttgacggacgcgtggttagtgcag

SEQ ID NO: 16671 - DNA, 52 bp, Homo sapiens
  chr9:130906606-130906658
  hypo
ggtctctgggtgttctcggcatctcctgctgctctgccgctggcactgccct

SEQ ID NO: 16672 - DNA, 47 bp, Homo sapiens
  chr9:130906702-130906749
  hypo
cttttgaaggtggacacgctttccctttggagcgagatctggtcctc

SEQ ID NO: 16673 - DNA, 31 bp, Homo sapiens
  chr9:130907015-130907046
  hypo
tctcatttgacccttccggaacctattaccc

SEQ ID NO: 16674 - DNA, 85 bp, Homo sapiens
  chr9:130907048-130907133
  hypo
ccccctgggctgggcacgctcctggactgtcctgggctctcgggagaaccagctttcaggagagccagaccggtcctctcaccca

SEQ ID NO: 16675 - DNA, 31 bp, Homo sapiens
  chr9:130907137-130907168
  hypo
cctctgatggtgccagcggaggcccagccaa

SEQ ID NO: 16676 - DNA, 61 bp, Homo sapiens
  chr9:130907173-130907234
  hypo
tggagagcagggagcacgggagcatgtggggtaacgcaggggtggccgcagtggagatgcc

SEQ ID NO: 16677 - DNA, 31 bp, Homo sapiens
  chr9:130907247-130907278
  hypo
gctgggggctgcagtccgggcaggaggggtg

SEQ ID NO: 16678 - DNA, 31 bp, Homo sapiens
  chr9:130910752-130910783
  hypo
atccatcgctgcctcccgaggatgccagcca

SEQ ID NO: 16679 - DNA, 31 bp, Homo sapiens
  chr9:130914349-130914380
  hypo
tagtgggaggggaggccggtcccccatgagg

SEQ ID NO: 16680 - DNA, 31 bp, Homo sapiens
  chr9:130914489-130914520
  hypo
aaaggagaacttcatccgcttctccaaatct

SEQ ID NO: 16681 - DNA, 76 bp, Homo sapiens
  chr9:130914527-130914603
  hypo
tccctgaaaaccacatcgtcttccctgtcccaatcggtaatggccagtctggatgaggggacggggacatggggac

SEQ ID NO: 16682 - DNA, 31 bp, Homo sapiens
  chr9:130914636-130914667
  hypo
gggagaggagggactccgtcctcagcttcag

SEQ ID NO: 16683 - DNA, 31 bp, Homo sapiens
  chr9:130915766-130915797
  hypo
cgaggaaggggaggggcgggaggctcccact

SEQ ID NO: 16684 - DNA, 31 bp, Homo sapiens
  chr9:130917060-130917091
  hypo
aggcaggatggccagccgcagtggttcacac

SEQ ID NO: 16685 - DNA, 1 bp, Homo sapiens
  chr9:131060965-131060966
  hypo
g

SEQ ID NO: 16686 - DNA, 31 bp, Homo sapiens
  chr9:131060976-131061007
  hypo
ctacattgctctgtgcgcgtaccttgatggt

SEQ ID NO: 16687 - DNA, 20 bp, Homo sapiens
  chr9:131125693-131125713
  hypo
gcacccggccctatggagca

SEQ ID NO: 16688 - DNA, 31 bp, Homo sapiens
  chr9:131196570-131196601
  hypo
tgcttgggaccctggccggcccatcccctga

SEQ ID NO: 16689 - DNA, 57 bp, Homo sapiens
  chr9:131217227-131217284
  hypo
cagtatactgtgaaagcgaggcggaaaagcaggttttgtttgcgagtctgactttag

SEQ ID NO: 16690 - DNA, 31 bp, Homo sapiens
  chr9:131217320-131217351
  hypo
tgtggctaaggtgctgcggggtcactggaga

SEQ ID NO: 16691 - DNA, 31 bp, Homo sapiens
  chr9:131217364-131217395
  hypo
tgtggcccagttggcccggaggtggttcagg

SEQ ID NO: 16692 - DNA, 31 bp, Homo sapiens
  chr9:131411488-131411519
  hypo
ctgagtgggaggctcacgtgaggccagttgt

SEQ ID NO: 16693 - DNA, 31 bp, Homo sapiens
  chr9:131477221-131477252
  hypo
ctccctggctccctggcgggtgcgctgactg

SEQ ID NO: 16694 - DNA, 31 bp, Homo sapiens
  chr9:131483896-131483927
  hypo
accctccctctacacccgggcagcagcaccc

SEQ ID NO: 16695 - DNA, 62 bp, Homo sapiens
  chr9:131483954-131484016
  hypo
gcaccaccagctgcagcgccaggtagaccacaaagagtgggtggttgcgctctcccacacag

SEQ ID NO: 16696 - DNA, 69 bp, Homo sapiens
  chr9:131484025-131484094
  hypo
caggggcagtggtggtcgtagcggcggacgcaacggcggcactcacggcagtgccgagccctcaggggc

SEQ ID NO: 16697 - DNA, 31 bp, Homo sapiens
  chr9:131504890-131504921
  hypo
atccgctggatagactcgtcctgccgcgtgg

SEQ ID NO: 16698 - DNA, 24 bp, Homo sapiens
  chr9:131580092-131580116
  hypo
ctttgccaatctgggccgggcgcg

SEQ ID NO: 16699 - DNA, 80 bp, Homo sapiens
  chr9:131600338-131600418
  hypo
ggacacaaacacaggacgaccccctgccatcattgtcatgggctcgtagcagtcaaaaaagggttcgatgatgatgacct

SEQ ID NO: 16700 - DNA, 31 bp, Homo sapiens
  chr9:131600482-131600513
  hypo
tcttgcccactcacctcgtctccttcgtcca

SEQ ID NO: 16701 - DNA, 31 bp, Homo sapiens
  chr9:131604667-131604698
  hypo
ctctttcttactcgcacgatatcccatcctc

SEQ ID NO: 16702 - DNA, 31 bp, Homo sapiens
  chr9:131652715-131652746
  hypo
tcacgtgccacctggacgccgtcagagtgcc

SEQ ID NO: 16703 - DNA, 38 bp, Homo sapiens; identical to SEQ ID NO: 3716
  chr9:131709587-131709625
  hypo

SEQ ID NO: 16704 - DNA, 31 bp, Homo sapiens
  chr9:131796484-131796515
  hypo
agcttatcatcccatgcgcctcctcccctgt

SEQ ID NO: 16705 - DNA, 74 bp, Homo sapiens; identical to SEQ ID NO: 3718
  chr9:131842915-131842989
  hypo

SEQ ID NO: 16706 - DNA, 101 bp, Homo sapiens; identical to SEQ ID NO: 3719
  chr9:131842992-131843093
  hypo

SEQ ID NO: 16707 - DNA, 70 bp, Homo sapiens
  chr9:131854115-131854185
  hypo
acaggaaactataaggcgagccctggcctcgaatcatagctaaaaaacaaggatccgagaggtagattta

SEQ ID NO: 16708 - DNA, 98 bp, Homo sapiens
  chr9:131854230-131854328
  hypo
gtgtcagaagacatcccggctgcagtgtggagtgggaaagctaccgggagcagcttcaggcgcacccgcccccgctaactcatcgccttcacttcatc

SEQ ID NO: 16709 - DNA, 52 bp, Homo sapiens
  chr9:131854337-131854389
  hypo
ctgcttaccctgaccccgctccaacctgcccaaggtgcggtgctgggcagaa

SEQ ID NO: 16710 - DNA, 42 bp, Homo sapiens
  chr9:131854421-131854463
  hypo
gaaatatccacttttcgcggctgggcgcggtggctcacgcct

SEQ ID NO: 16711 - DNA, 31 bp, Homo sapiens
  chr9:131919403-131919434
  hypo
agcatggtggggtacccggagctgggcaagg

SEQ ID NO: 16712 - DNA, 31 bp, Homo sapiens
  chr9:131919437-131919468
  hypo
agattggctatggccacgtggctccttgttc

SEQ ID NO: 16713 - DNA, 59 bp, Homo sapiens
  chr9:131919474-131919533
  hypo
aggcagtctgtctctgcggacagccatcaggccccaaatccaggcgtcatcctttttat

SEQ ID NO: 16714 - DNA, 68 bp, Homo sapiens; identical to SEQ ID NO: 3720
  chr9:131940268-131940336
  hypo

SEQ ID NO: 16715 - DNA, 94 bp, Homo sapiens; identical to SEQ ID NO: 3721
  chr9:131940343-131940437
  hypo

SEQ ID NO: 16716 - DNA, 100 bp, Homo sapiens; identical to SEQ ID NO: 3722
  chr9:131940695-131940795
  hypo

SEQ ID NO: 16717 - DNA, 31 bp, Homo sapiens
  chr9:131978870-131978901
  hypo
aaggaaggggtgcatccgctcctctcccagg

SEQ ID NO: 16718 - DNA, 31 bp, Homo sapiens
  chr9:131987004-131987035
  hypo
cctgatggcctggagacgcaagaggaggctg

SEQ ID NO: 16719 - DNA, 31 bp, Homo sapiens
  chr9:132004479-132004510
  hypo
tacctggtcacaattacggaagacaaggtgg

SEQ ID NO: 16720 - DNA, 31 bp, Homo sapiens
  chr9:132004676-132004707
  hypo
tcccatccactggagccgcagagtgggggca

SEQ ID NO: 16721 - DNA, 31 bp, Homo sapiens
  chr9:132089110-132089141
  hypo
gcaagagaacgggggacgaggagcatctagc

SEQ ID NO: 16722 - DNA, 31 bp, Homo sapiens
  chr9:132112538-132112569
  hypo
aggttgctaagccaggcggcccacctttccc

SEQ ID NO: 16723 - DNA, 39 bp, Homo sapiens
  chr9:132112574-132112613
  hypo
ccataagacatgaagacgcccctccgtgtggcacagggc

SEQ ID NO: 16724 - DNA, 53 bp, Homo sapiens
  chr9:132112682-132112735
  hypo
tgctgtatggggcaaccgtagggccctggttcggagcccggtgtggggaggat

SEQ ID NO: 16725 - DNA, 31 bp, Homo sapiens
  chr9:132142032-132142063
  hypo
catttttatatgccagcgtgtgcatgtatat

SEQ ID NO: 16726 - DNA, 69 bp, Homo sapiens; identical to SEQ ID NO: 3726
  chr9:132145664-132145733
  hypo

SEQ ID NO: 16727 - DNA, 59 bp, Homo sapiens
  chr9:132163278-132163337
  hypo
ctgggctccaaccctgcgggccactcccggcctggccaccccaccgcatctccaagccc

SEQ ID NO: 16728 - DNA, 31 bp, Homo sapiens
  chr9:132163339-132163370
  hypo
tctccctcttggggaccgtgtctctgggttt

SEQ ID NO: 16729 - DNA, 40 bp, Homo sapiens
  chr9:132163422-132163462
  hypo
aggcctccctgagccccggcccccacgatgatcctgctgg

SEQ ID NO: 16730 - DNA, 31 bp, Homo sapiens
  chr9:132163466-132163497
  hypo
ctctctcctcctcaggcggctctgggtttct

SEQ ID NO: 16731 - DNA, 31 bp, Homo sapiens
  chr9:132166917-132166948
  hypo
tcctgggtttgaatctcgccccctttcacaa

SEQ ID NO: 16732 - DNA, 31 bp, Homo sapiens
  chr9:132166951-132166982
  hypo
gtgcaactttgaggggcgactgaccccctcc

SEQ ID NO: 16733 - DNA, 31 bp, Homo sapiens
  chr9:132166986-132167017
  hypo
ccctaagggggtgatgcggccacctgccctc

SEQ ID NO: 16734 - DNA, 31 bp, Homo sapiens
  chr9:132167031-132167062
  hypo
cctccatatagccagtcgggggggtggggac

SEQ ID NO: 16735 - DNA, 31 bp, Homo sapiens
  chr9:132167065-132167096
  hypo
ccagtgcttccaggtacggctgtagagtcag

SEQ ID NO: 16736 - DNA, 31 bp, Homo sapiens
  chr9:132167158-132167189
  hypo
tcgccccgtgtgggcccgggccctcccctgc

SEQ ID NO: 16737 - DNA, 52 bp, Homo sapiens
  chr9:132189583-132189635
  hypo
ggctctgaagcaggggcgtggtgagactggcgggcggcgggggggttagatg

SEQ ID NO: 16738 - DNA, 31 bp, Homo sapiens
  chr9:132189722-132189753
  hypo
aggctggggggggtggcggtcatggggatct

SEQ ID NO: 16739 - DNA, 31 bp, Homo sapiens
  chr9:132204052-132204083
  hypo
catttgtgagtgttccgcgtgggctacatcc

SEQ ID NO: 16740 - DNA, 48 bp, Homo sapiens
  chr9:132211771-132211819
  hypo
gtctaatggagagaaccggagcaaggaaacgggcgctggtgagagctg

SEQ ID NO: 16741 - DNA, 35 bp, Homo sapiens; identical to SEQ ID NO: 3729
  chr9:132222863-132222898
  hypo

SEQ ID NO: 16742 - DNA, 31 bp, Homo sapiens
  chr9:132230760-132230791
  hypo
gtgtgcatgtgtgtctcgtgtaggtgtgtgc

SEQ ID NO: 16743 - DNA, 31 bp, Homo sapiens
  chr9:132230955-132230986
  hypo
tgtgtctagtgtgcaccgtgtacctgtgtgt

SEQ ID NO: 16744 - DNA, 31 bp, Homo sapiens
  chr9:132230991-132231022
  hypo
tgtggacagtgtgcaccgtgtacctgtgtgt

SEQ ID NO: 16745 - DNA, 31 bp, Homo sapiens
  chr9:132231041-132231072
  hypo
cggcgtgacactgtgtcgaatgtgtgtgcac

SEQ ID NO: 16746 - DNA, 34 bp, Homo sapiens
  chr9:132231092-132231126
  hypo
tgtggacagtgtgcaccggcgtgacactgtgtct

SEQ ID NO: 16747 - DNA, 31 bp, Homo sapiens
  chr9:132231192-132231223
  hypo
ggacagtgtgcaccagcgtgacactgtgtca

SEQ ID NO: 16748 - DNA, 34 bp, Homo sapiens; identical to SEQ ID NO: 16746
  chr9:132231256-132231290
  hypo

SEQ ID NO: 16749 - DNA, 78 bp, Homo sapiens; identical to SEQ ID NO: 3735
  chr9:132245407-132245485
  hypo

SEQ ID NO: 16750 - DNA, 57 bp, Homo sapiens; identical to SEQ ID NO: 3736
  chr9:132250697-132250754
  hypo

SEQ ID NO: 16751 - DNA, 41 bp, Homo sapiens; identical to SEQ ID NO: 3737
  chr9:132258285-132258326
  hypo

SEQ ID NO: 16752 - DNA, 80 bp, Homo sapiens; identical to SEQ ID NO: 3738
  chr9:132258337-132258417
  hypo

SEQ ID NO: 16753 - DNA, 44 bp, Homo sapiens; identical to SEQ ID NO: 3739
  chr9:132258503-132258547
  hypo

SEQ ID NO: 16754 - DNA, 56 bp, Homo sapiens; identical to SEQ ID NO: 3740
  chr9:132258618-132258674
  hypo

SEQ ID NO: 16755 - DNA, 188 bp, Homo sapiens; identical to SEQ ID NO: 3741
  chr9:132258690-132258878
  hypo

SEQ ID NO: 16756 - DNA, 39 bp, Homo sapiens; identical to SEQ ID NO: 3742
  chr9:132258891-132258930
  hypo

SEQ ID NO: 16757 - DNA, 37 bp, Homo sapiens
  chr9:132285634-132285671
  hypo
cccacagcatctaatccggagccggcagaggcccctt

SEQ ID NO: 16758 - DNA, 78 bp, Homo sapiens; identical to SEQ ID NO: 3743
  chr9:132331031-132331109
  hypo

SEQ ID NO: 16759 - DNA, 44 bp, Homo sapiens; identical to SEQ ID NO: 3744
  chr9:132331472-132331516
  hypo

SEQ ID NO: 16760 - DNA, 31 bp, Homo sapiens
  chr9:132378412-132378443
  hypo
aagaaaggaaatgggccgtacaagcatccag

SEQ ID NO: 16761 - DNA, 31 bp, Homo sapiens
  chr9:132381768-132381799
  hypo
taccctacccttatcccgcccatcactcact

SEQ ID NO: 16762 - DNA, 42 bp, Homo sapiens; identical to SEQ ID NO: 3745
  chr9:132382285-132382327
  hypo

SEQ ID NO: 16763 - DNA, 31 bp, Homo sapiens
  chr9:132401945-132401976
  hypo
gatactagagggccctcggggtgttctagtg

SEQ ID NO: 16764 - DNA, 68 bp, Homo sapiens
  chr9:132403148-132403216
  hypo
agtagagagagggccacgctgcatctcttaatacgggagcagactgggatttgcggagaatgggctgg

SEQ ID NO: 16765 - DNA, 31 bp, Homo sapiens
  chr9:132411515-132411546
  hypo
gcctgggacgggatgccgcaggacccctctt

SEQ ID NO: 16766 - DNA, 31 bp, Homo sapiens
  chr9:132411576-132411607
  hypo
ggccctgcctggtccccgcctctcccaggtg

SEQ ID NO: 16767 - DNA, 52 bp, Homo sapiens
  chr9:132411632-132411684
  hypo
gtgggaaggtgctgagcgccccgggggtctcgccctgcgtctggagggaggc

SEQ ID NO: 16768 - DNA, 31 bp, Homo sapiens
  chr9:132482544-132482575
  hypo
caagcgcctctccccccgagtgctcagcaag

SEQ ID NO: 16769 - DNA, 31 bp, Homo sapiens
  chr9:132501745-132501776
  hypo
gcccagagacccacacgcgcagcaggctgcc

SEQ ID NO: 16770 - DNA, 34 bp, Homo sapiens
  chr9:132501823-132501857
  hypo
tccccaggtatagccacggcggctcttggcccat

SEQ ID NO: 16771 - DNA, 31 bp, Homo sapiens
  chr9:132509499-132509530
  hypo
caacatggaaagtgttcgcaaaataatgtta

SEQ ID NO: 16772 - DNA, 31 bp, Homo sapiens
  chr9:132574946-132574977
  hypo
tgcttaccttagtctacggcactgttcctgc

SEQ ID NO: 16773 - DNA, 95 bp, Homo sapiens
  chr9:132604071-132604166
  hypo
cttagatctcaggaagcgcaccaagaatccgtgcatgagtcccctgcggtgtgtctgactccatcaccatggcgcctgttcgttgctgggctggt

SEQ ID NO: 16774 - DNA, 31 bp, Homo sapiens
  chr9:132661151-132661182
  hypo
ctttacaagacaggagcgctatagatactag

SEQ ID NO: 16775 - DNA, 31 bp, Homo sapiens
  chr9:132750114-132750145
  hypo
agtttcactttactgtcgtttgtactgttaa

SEQ ID NO: 16776 - DNA, 31 bp, Homo sapiens; identical to SEQ ID NO: 3748
  chr9:132804331-132804362
  hypo

SEQ ID NO: 16777 - DNA, 31 bp, Homo sapiens; identical to SEQ ID NO: 3749
  chr9:132804366-132804397
  hypo

SEQ ID NO: 16778 - DNA, 64 bp, Homo sapiens
  chr9:133223967-133224031
  hypo
acgtgtcgggtatggccgggcagtccctgacgctggagtgtgacgcgaacggctttccagtccc

SEQ ID NO: 16779 - DNA, 31 bp, Homo sapiens
  chr9:133238734-133238765
  hypo
gtcactttgcttctctcggccaccatttctt

SEQ ID NO: 16780 - DNA, 31 bp, Homo sapiens
  chr9:133264507-133264538
  hypo
cgtccacagcaggggccggcactgccagcca

SEQ ID NO: 16781 - DNA, 31 bp, Homo sapiens
  chr9:133266639-133266670
  hypo
ggaagggcaggaggtgcggctggactgtgag

SEQ ID NO: 16782 - DNA, 31 bp, Homo sapiens
  chr9:133267499-133267530
  hypo
cctcaggtaggggagacggtggacaggcctt

SEQ ID NO: 16783 - DNA, 31 bp, Homo sapiens
  chr9:133274947-133274978
  hypo
cagcccagtttgaatgcgtggtgagcaatga

SEQ ID NO: 16784 - DNA, 31 bp, Homo sapiens
  chr9:133303021-133303052
  hypo
ggaggagggaggagacgcgctcctcagacct

SEQ ID NO: 16785 - DNA, 31 bp, Homo sapiens
  chr9:133303705-133303736
  hypo
atcatgttcacacagccgtctgccctgatct

SEQ ID NO: 16786 - DNA, 43 bp, Homo sapiens
  chr9:133304500-133304543
  hypo
gggctctcctgcctgccgcccttcctgccgcctttcctccttt

SEQ ID NO: 16787 - DNA, 81 bp, Homo sapiens
  chr9:133305059-133305140
  hypo
ctgccctgcctaggtacggggacacccaccctctggccacaccgctgcagctgccccaggggttaccggatgcagggcccc

SEQ ID NO: 16788 - DNA, 31 bp, Homo sapiens
  chr9:133305961-133305992
  hypo
gtttcatcaggcagaacggagtctgcacagg

SEQ ID NO: 16789 - DNA, 38 bp, Homo sapiens
  chr9:133314398-133314436
  hypo
ccttgggtggcagaggcgagaaacggaggcaggaggaa

SEQ ID NO: 16790 - DNA, 31 bp, Homo sapiens
  chr9:133314479-133314510
  hypo
ggtggctgggggcattcgatgaggtcacatc

SEQ ID NO: 16791 - DNA, 31 bp, Homo sapiens
  chr9:133337714-133337745
  hypo
tcagcatgcggacactcgtgtgtgagacact

SEQ ID NO: 16792 - DNA, 44 bp, Homo sapiens
  chr9:133345458-133345502
  hypo
gtcatcaagggtggtgcgggtccccagggcgacaagcctcatct

SEQ ID NO: 16793 - DNA, 31 bp, Homo sapiens
  chr9:133351149-133351180
  hypo
gtgggggggtgggggacggaatcttgctctc

SEQ ID NO: 16794 - DNA, 31 bp, Homo sapiens
  chr9:133352248-133352279
  hypo
ttttttcagaaccaagcgcctccaggtctct

SEQ ID NO: 16795 - DNA, 31 bp, Homo sapiens
  chr9:133364355-133364386
  hypo
gggctctgggctctaccgtagtcgctttaat

SEQ ID NO: 16796 - DNA, 31 bp, Homo sapiens
  chr9:133364922-133364953
  hypo
gcctggccctcccctccgtatcagcaccttc

SEQ ID NO: 16797 - DNA, 31 bp, Homo sapiens
  chr9:133365220-133365251
  hypo
tgcagctccttgtacacgaggaaactgaggc

SEQ ID NO: 16798 - DNA, 31 bp, Homo sapiens
  chr9:133367502-133367533
  hypo
agtgcttattccagtgcgtgaaataactgcg

SEQ ID NO: 16799 - DNA, 31 bp, Homo sapiens
  chr9:133370322-133370353
  hypo
ggaaagtgcaggtgtccgtcctcaagggcca

SEQ ID NO: 16800 - DNA, 31 bp, Homo sapiens
  chr9:133376591-133376622
  hypo
gggtggggggcagctgcggtggggagctata

SEQ ID NO: 16801 - DNA, 25 bp, Homo sapiens
  chr9:133381108-133381133
  hypo
agcgagactccgtctcaagaaaaca

SEQ ID NO: 16802 - DNA, 31 bp, Homo sapiens
  chr9:133408938-133408969
  hypo
ccaatgcttgtgactacgacttgcagaacag

SEQ ID NO: 16803 - DNA, 31 bp, Homo sapiens
  chr9:133421533-133421564
  hypo
aagataaagtcttcgccgaggagtggtgccc

SEQ ID NO: 16804 - DNA, 31 bp, Homo sapiens
  chr9:133450276-133450307
  hypo
aggccaaaggtggaatcggggagatatacag

SEQ ID NO: 16805 - DNA, 459 bp, Homo sapiens; identical to SEQ ID NO: 3756
  chr9:133710381-133710840
  hypo

SEQ ID NO: 16806 - DNA, 41 bp, Homo sapiens
  chr9:133738194-133738235
  hypo
gttcatcatcattcaacggtggccgacgggctcatcaccac

SEQ ID NO: 16807 - DNA, 35 bp, Homo sapiens
  chr9:133755898-133755933
  hypo
agctggggaaacaaggcgtccgtggggctgtgagt

SEQ ID NO: 16808 - DNA, 31 bp, Homo sapiens
  chr9:133761341-133761372
  hypo
caggacccgccagccccgctcccacctagtg

SEQ ID NO: 16809 - DNA, 52 bp, Homo sapiens
  chr9:133767826-133767878
  hypo
ggcctgcagccactcccggctgagcgtgggctctccccggggcagagaagtt

SEQ ID NO: 16810 - DNA, 31 bp, Homo sapiens
  chr9:133773571-133773602
  hypo
ggccaggccccggcctcgcagacccctttaa

SEQ ID NO: 16811 - DNA, 68 bp, Homo sapiens
  chr9:133773824-133773892
  hypo
ttggcaactgccgctccggttctgctggccgaacccctcctgccctgggaagccgcttcccatgctgt

SEQ ID NO: 16812 - DNA, 31 bp, Homo sapiens
  chr9:133799330-133799361
  hypo
caaactgtctgtccatcgataatgcatgtgg

SEQ ID NO: 16813 - DNA, 31 bp, Homo sapiens
  chr9:133799382-133799413
  hypo
cactggccttggagtccgaccttggctctgc

SEQ ID NO: 16814 - DNA, 31 bp, Homo sapiens
  chr9:133799467-133799498
  hypo
catctggagaatggaccgagagggcttcagc

SEQ ID NO: 16815 - DNA, 31 bp, Homo sapiens
  chr9:133800540-133800571
  hypo
agtttctggggctctccgatgtccatgacct

SEQ ID NO: 16816 - DNA, 31 bp, Homo sapiens
  chr9:133802285-133802316
  hypo
caaagtgcctattaacgcggagcccagcaca

SEQ ID NO: 16817 - DNA, 31 bp, Homo sapiens
  chr9:133914586-133914617
  hypo
gtgaccgctgtctgcccgggttccactcgct

SEQ ID NO: 16818 - DNA, 31 bp, Homo sapiens
  chr9:133927487-133927518
  hypo
tgttccctaggaatttcgtgctcatgggcat

SEQ ID NO: 16819 - DNA, 55 bp, Homo sapiens
  chr9:133951049-133951104
  hypo
gtcagtccttgaagtgcgtaacacagaaaggtggaaaaggcgtacctgtctttgt

SEQ ID NO: 16820 - DNA, 31 bp, Homo sapiens
  chr9:134126678-134126709
  hypo
gtgattgcggttaacacggatcaaaccttag

SEQ ID NO: 16821 - DNA, 31 bp, Homo sapiens
  chr9:134126710-134126741
  hypo
cactggctgcccacctcggtcaggctgcaac

SEQ ID NO: 16822 - DNA, 51 bp, Homo sapiens
  chr9:134126757-134126808
  hypo
caccctccaagggacacgtggtccacatgagcagctcggccaggggccttt

SEQ ID NO: 16823 - DNA, 32 bp, Homo sapiens
  chr9:134132751-134132783
  hypo
cgctgagattacaggtgcgagctaccacacct

SEQ ID NO: 16824 - DNA, 42 bp, Homo sapiens
  chr9:134136230-134136272
  hypo
accaccagcggctgcccgtacttgggccgccacatgaggacc

SEQ ID NO: 16825 - DNA, 31 bp, Homo sapiens
  chr9:134146005-134146036
  hypo
accccgcccttgcctccgccagggcccagca

SEQ ID NO: 16826 - DNA, 44 bp, Homo sapiens; identical to SEQ ID NO: 3762
  chr9:134151975-134152019
  hypo

SEQ ID NO: 16827 - DNA, 75 bp, Homo sapiens; identical to SEQ ID NO: 3763
  chr9:134152263-134152338
  hypo

SEQ ID NO: 16828 - DNA, 31 bp, Homo sapiens
  chr9:134190317-134190348
  hypo
attacaggcatgagcccgctccaggctgggg

SEQ ID NO: 16829 - DNA, 31 bp, Homo sapiens
  chr9:134195947-134195978
  hypo
ggaacagggtgaatttcgttaagcaatcatc

SEQ ID NO: 16830 - DNA, 56 bp, Homo sapiens
  chr9:134400375-134400431
  hypo
ccctgaacacacatgccgggcgggagacctgccctgaggctcggcagcccctcagt

SEQ ID NO: 16831 - DNA, 54 bp, Homo sapiens
  chr9:134406194-134406248
  hypo
cccaacggggttagcacggacttggggctccgaggagcccggccggcggagagg

SEQ ID NO: 16832 - DNA, 113 bp, Homo sapiens
  chr9:134746533-134746646
  hypo
gtcctgctgtacgccccggattcggtgctcaccctaccatacaccccacattcggtatgcagcacccacacgctttttcctactcaggccctctcctgcggtgggggcaaaga

SEQ ID NO: 16833 - DNA, 31 bp, Homo sapiens
  chr9:134929559-134929590
  hypo
gaggtgtttgggtgagcggggcggatccctc

SEQ ID NO: 16834 - DNA, 31 bp, Homo sapiens
  chr9:135021247-135021278
  hypo
atgggatgtgctgtcacgcccattttagaga

SEQ ID NO: 16835 - DNA, 298 bp, Homo sapiens; identical to SEQ ID NO: 3764
  chr9:135036697-135036995
  hypo

SEQ ID NO: 16836 - DNA, 39 bp, Homo sapiens; identical to SEQ ID NO: 3765
  chr9:135036998-135037037
  hypo

SEQ ID NO: 16837 - DNA, 113 bp, Homo sapiens; identical to SEQ ID NO: 3766
  chr9:135037133-135037246
  hypo

SEQ ID NO: 16838 - DNA, 31 bp, Homo sapiens
  chr9:135338501-135338532
  hypo
ctgggcgggctgggaacggatggaaggtggc

SEQ ID NO: 16839 - DNA, 54 bp, Homo sapiens
  chr9:135338538-135338592
  hypo
caggtgctgtggatgacgtcgcaagtcagccaatctttgcgaaaggcacttttc

SEQ ID NO: 16840 - DNA, 31 bp, Homo sapiens
  chr9:135338680-135338711
  hypo
tacaaacatgttcttgcggtgtggttttaga

SEQ ID NO: 16841 - DNA, 34 bp, Homo sapiens; identical to SEQ ID NO: 3769
  chr9:135395348-135395382
  hypo

SEQ ID NO: 16842 - DNA, 31 bp, Homo sapiens; identical to SEQ ID NO: 3770
  chr9:135395479-135395510
  hypo

SEQ ID NO: 16843 - DNA, 35 bp, Homo sapiens
  chr9:135447835-135447870
  hypo
accgggaagagtgtgccgtgcgccaggggaccctg

SEQ ID NO: 16844 - DNA, 31 bp, Homo sapiens
  chr9:135512979-135513010
  hypo
caaaagtcattactgccgtgtgtggaaagcc

SEQ ID NO: 16845 - DNA, 57 bp, Homo sapiens
  chr9:135513014-135513071
  hypo
gcagggtccaggcccccgttgtccgggtgacagattgggctgcgtaatcagaggagg

SEQ ID NO: 16846 - DNA, 51 bp, Homo sapiens
  chr9:135513083-135513134
  hypo
cagaagctgtcagaggcgagagatcttggctggagccgccaaaaaactggc

SEQ ID NO: 16847 - DNA, 28 bp, Homo sapiens
  chr9:135548292-135548320
  hypo
cgggcgcggtggctcacgcctgtaatcc

SEQ ID NO: 16848 - DNA, 36 bp, Homo sapiens
  chr9:135600715-135600751
  hypo
tcccacagccaccctgcgaggcggctacggttttta

SEQ ID NO: 16849 - DNA, 31 bp, Homo sapiens
  chr9:135624733-135624764
  hypo
gggttcaggtgctggacgctctggcctgcca

SEQ ID NO: 16850 - DNA, 64 bp, Homo sapiens
  chr9:135624938-135625002
  hypo
atgaggcagcttgccccgatatcggctggtgagtgacccagaagaactcgcgactcacagctgc

SEQ ID NO: 16851 - DNA, 31 bp, Homo sapiens
  chr9:135625105-135625136
  hypo
agacagatttgttcatcgataatttttattt

SEQ ID NO: 16852 - DNA, 50 bp, Homo sapiens
  chr9:135626042-135626092
  hypo
ttcaaaggactccatccggtgaatcccaccagggcgcgagctcccccatg

SEQ ID NO: 16853 - DNA, 31 bp, Homo sapiens
  chr9:135626134-135626165
  hypo
ccaaatctgcacctaacgtcaggctgcatcc

SEQ ID NO: 16854 - DNA, 43 bp, Homo sapiens
  chr9:135626203-135626246
  hypo
gacttgactttgcaatcggaagaaacctcgatttgtgggggta

SEQ ID NO: 16855 - DNA, 31 bp, Homo sapiens
  chr9:135653270-135653301
  hypo
tttcacccttgtccaccgacactgtggaaac

SEQ ID NO: 16856 - DNA, 31 bp, Homo sapiens
  chr9:135654706-135654737
  hypo
tgtatttattcattttcggagagacaaggtc

SEQ ID NO: 16857 - DNA, 31 bp, Homo sapiens
  chr9:135713051-135713082
  hypo
tccacatggagtgctacggctctgtatgcag

SEQ ID NO: 16858 - DNA, 34 bp, Homo sapiens
  chr9:135735332-135735366
  hypo
tccctttcacggtgttcggcgagaggactggggc

SEQ ID NO: 16859 - DNA, 31 bp, Homo sapiens
  chr9:135735367-135735398
  hypo
attttgacattcatttcgatggctctgacca

SEQ ID NO: 16860 - DNA, 31 bp, Homo sapiens
  chr9:135744759-135744790
  hypo
catgtgggcatggtgccgccatcaaccatgc

SEQ ID NO: 16861 - DNA, 31 bp, Homo sapiens
  chr9:135781270-135781301
  hypo
ctttcatcagcactgccgcagggcaggtcta

SEQ ID NO: 16862 - DNA, 31 bp, Homo sapiens
  chr9:135862918-135862949
  hypo
gtcactggatgcagcccgggctctgtggctt

SEQ ID NO: 16863 - DNA, 61 bp, Homo sapiens
  chr9:135898910-135898971
  hypo
gcccactgcagggaaacggttaaaatgcgctgggcttcgtttttcccggaagccctcatta

SEQ ID NO: 16864 - DNA, 31 bp, Homo sapiens
  chr9:135908015-135908046
  hypo
gtttgtctgaataaggcggggggaaattgga

SEQ ID NO: 16865 - DNA, 31 bp, Homo sapiens
  chr9:135908049-135908080
  hypo
tagtgagagctgtctccgtaagtctttgtat

SEQ ID NO: 16866 - DNA, 133 bp, Homo sapiens
  chr9:135908099-135908232
  hypo
atgatacaacatcctacgagaataaacacgtttattacaatggcaagggacataaggatcgaggacataagtcctttccacctgccgaacaatcttcccgttagatcagtgaagagatcgtttatcccagaat

SEQ ID NO: 16867 - DNA, 31 bp, Homo sapiens
  chr9:135908535-135908566
  hypo
acatagactcaaatcccgcagctatttgatt

SEQ ID NO: 16868 - DNA, 100 bp, Homo sapiens
  chr9:135908578-135908678
  hypo
ttcatcaggtacccctcggggaactccagtggcatctgtataaacacgagggtcaaaggaaccacggggggcatctcttactctacggtgtcttgttttt

SEQ ID NO: 16869 - DNA, 149 bp, Homo sapiens
  chr9:135945846-135945995
  hypo
ggagtgccaagacctacgcctacctgttttcccatccctctcggatgcccgtctaccccaaatgggtgggggccgaccatgcagatgacattcagtacgttttcgggaagcccttcgccacccccacgggctaccggccccaagacagg

SEQ ID NO: 16870 - DNA, 31 bp, Homo sapiens
  chr9:135946053-135946084
  hypo
tgggttgagtgcagggcggagggccacagcc

SEQ ID NO: 16871 - DNA, 54 bp, Homo sapiens
  chr9:135962403-135962457
  hypo
ccccgacaggcaactccgagtctgcccccgtccctgcaacgggtgactctcagg

SEQ ID NO: 16872 - DNA, 31 bp, Homo sapiens
  chr9:135978311-135978342
  hypo
cggtgacaaggccccccgggcagcacagggg

SEQ ID NO: 16873 - DNA, 35 bp, Homo sapiens
  chr9:135979101-135979136
  hypo
ggccctactccagccccgcccggcacactcacata

SEQ ID NO: 16874 - DNA, 58 bp, Homo sapiens
  chr9:135979158-135979216
  hypo
tccagcatcaccaggtcggtgaggaacgtgcccaggtagggaacggtgccctggatga

SEQ ID NO: 16875 - DNA, 22 bp, Homo sapiens
  chr9:136000829-136000851
  hypo
aagaaaaatggccagacgcagt

SEQ ID NO: 16876 - DNA, 31 bp, Homo sapiens
  chr9:136376887-136376918
  hypo
tgtgtatatatgtgcacgtgtgtatgtgtgg

SEQ ID NO: 16877 - DNA, 31 bp, Homo sapiens
  chr9:136376927-136376958
  hypo
tgtgtacatgtgtgcacgtgtatgtgtggtg

SEQ ID NO: 16878 - DNA, 31 bp, Homo sapiens
  chr9:136377821-136377852
  hypo
tcaggtggactggaagcgtacagaggcagtg

SEQ ID NO: 16879 - DNA, 43 bp, Homo sapiens
  chr9:136575548-136575591
  hypo
gagcccagacaggccccgcacccagggacggctcaggctgcct

SEQ ID NO: 16880 - DNA, 75 bp, Homo sapiens
  chr9:136641168-136641243
  hypo
cgatctcccgggatggcggccggctgatgggcggctggtggcagagcacaagagtgttaacggccccccagggcc

SEQ ID NO: 16881 - DNA, 31 bp, Homo sapiens
  chr9:136642035-136642066
  hypo
cacagagccgagaattcgctccatatccctc

SEQ ID NO: 16882 - DNA, 37 bp, Homo sapiens
  chr9:136645035-136645072
  hypo
tcacctggtcccgctccggaggcgtcctgtgaggaca

SEQ ID NO: 16883 - DNA, 38 bp, Homo sapiens
  chr9:136645112-136645150
  hypo
gtggcccatgcatcaacgcaccccgccctccctgtccc

SEQ ID NO: 16884 - DNA, 31 bp, Homo sapiens
  chr9:136645201-136645232
  hypo
actgttccctatgggacgcccccaccctggc

SEQ ID NO: 16885 - DNA, 31 bp, Homo sapiens
  chr9:136646294-136646325
  hypo
tgaggaggcattggtacgcatgctacctgct

SEQ ID NO: 16886 - DNA, 31 bp, Homo sapiens
  chr9:136648155-136648186
  hypo
gtgccatgtgtgtatgcgtgcatgtgtgtgt

SEQ ID NO: 16887 - DNA, 53 bp, Homo sapiens
  chr9:136648223-136648276
  hypo
atggccaggcctcacccgccgggagaacccagggtgaccggtgtttctgtgat

SEQ ID NO: 16888 - DNA, 31 bp, Homo sapiens
  chr9:136648297-136648328
  hypo
tgagaatgttctgtgccgtgtttgggggtgg

SEQ ID NO: 16889 - DNA, 93 bp, Homo sapiens
  chr9:136655687-136655780
  hypo
tgtacgcatttgtgaccgcctcgcgcaggagctcacggcagcacggacccgccaggtgctgatggtgcagggtgcggccgtccttggcctcct

SEQ ID NO: 16890 - DNA, 70 bp, Homo sapiens
  chr9:136655857-136655927
  hypo
tttttttttctttcatcgccgacgtatcgcaggtgcttttccgtgccccacgttcgcggagggcattctc

SEQ ID NO: 16891 - DNA, 31 bp, Homo sapiens
  chr9:136656439-136656470
  hypo
cgactgccggccccaccgagcctgggcccaa

SEQ ID NO: 16892 - DNA, 75 bp, Homo sapiens
  chr9:136664523-136664598
  hypo
ggacacctctggcatgcgaggctgacagtccacgactctgataaaggacctgaatctgctcgaagctcacctgac

SEQ ID NO: 16893 - DNA, 31 bp, Homo sapiens
  chr9:136664612-136664643
  hypo
gcaaagcacccatggccggtcccacatggcc

SEQ ID NO: 16894 - DNA, 31 bp, Homo sapiens
  chr9:136664656-136664687
  hypo
ccccatggggggatcccgtgtccacagacct

SEQ ID NO: 16895 - DNA, 34 bp, Homo sapiens
  chr9:136669112-136669146
  hypo
ctgggctctccagcaacgccgcagctccccccgg

SEQ ID NO: 16896 - DNA, 172 bp, Homo sapiens
  chr9:136672018-136672190
  hypo
actgagttcagacacccgcagggcaggcgagggggtccgctcaaaggggtggagggacacgtttctctctggccgctgacaaaaacttcatttacattctcagcgtcatccgtgcctccagccacgcacgtcagtgctgccctcacccgcagacaagcggagcccagaaacc

SEQ ID NO: 16897 - DNA, 31 bp, Homo sapiens
  chr9:136672213-136672244
  hypo
aagaccctggagagagcggtgggggctcctc

SEQ ID NO: 16898 - DNA, 31 bp, Homo sapiens
  chr9:136672779-136672810
  hypo
aggcagggccatcacccgtggggactctctg

SEQ ID NO: 16899 - DNA, 31 bp, Homo sapiens
  chr9:136674468-136674499
  hypo
cggggaggggatgtgacgtggggacagtgcc

SEQ ID NO: 16900 - DNA, 31 bp, Homo sapiens
  chr9:136675284-136675315
  hypo
ccccagcctccccttccgggccactcacctg

SEQ ID NO: 16901 - DNA, 31 bp, Homo sapiens
  chr9:136676240-136676271
  hypo
aagggccaccatccctcgggggagacccccc

SEQ ID NO: 16902 - DNA, 31 bp, Homo sapiens
  chr9:136677204-136677235
  hypo
ggaagggagggaggagcggggcagggctcac

SEQ ID NO: 16903 - DNA, 251 bp, Homo sapiens
  chr9:136677254-136677505
  hypo
accttgatgatgtcctcgtagatgtcgtcccctccatcctcacacgggacgcagtcgtagatgtcctcccccaggtcatgctcgctgcacaggaggaggcgggttagaggggaggggaggctcccgccaccctgaccggggagccgcagagcacgagggtccacgagggacgcaggcggctggggccacagcgaggtcacctgcccgggcctcagtctacaaagtggggtgggccccgcctgcagggcgtc

SEQ ID NO: 16904 - DNA, 35 bp, Homo sapiens
  chr9:136680292-136680327
  hypo
ggaaggcagagtcccccgcccgcctccctcttccc

SEQ ID NO: 16905 - DNA, 31 bp, Homo sapiens
  chr9:136680459-136680490
  hypo
tttaaggatcaaaatacgcccttagtggtac

SEQ ID NO: 16906 - DNA, 31 bp, Homo sapiens
  chr9:136680541-136680572
  hypo
agtattttcatctcaccggagctcctgccct

SEQ ID NO: 16907 - DNA, 36 bp, Homo sapiens
  chr9:136680575-136680611
  hypo
ccatcagtctccttcccgccccgagcaaccaccctt

SEQ ID NO: 16908 - DNA, 31 bp, Homo sapiens
  chr9:136680616-136680647
  hypo
tgttcttcaccacagacgagccttgtctgta

SEQ ID NO: 16909 - DNA, 31 bp, Homo sapiens
  chr9:136686468-136686499
  hypo
cctggaggggaggcagcgagggaaactaggg

SEQ ID NO: 16910 - DNA, 31 bp, Homo sapiens
  chr9:136691770-136691801
  hypo
gccacctaggatgaagcggtggctaaataaa

SEQ ID NO: 16911 - DNA, 31 bp, Homo sapiens
  chr9:136691855-136691886
  hypo
gctttcaaatttctcccgtgtcccttcaatt

SEQ ID NO: 16912 - DNA, 55 bp, Homo sapiens
  chr9:136694924-136694979
  hypo
ttcttatgattaatttcgtttgtcccttcttattttttgacgtggctccgctgta

SEQ ID NO: 16913 - DNA, 31 bp, Homo sapiens
  chr9:136696894-136696925
  hypo
aaacttgccctcacaccggccaggagctccc

SEQ ID NO: 16914 - DNA, 37 bp, Homo sapiens
  chr9:136698780-136698817
  hypo
tggtcacagattcccacggtcccgatggggccctggt

SEQ ID NO: 16915 - DNA, 31 bp, Homo sapiens
  chr9:136698869-136698900
  hypo
aggaatgaggtggacacggagaagagcagag

SEQ ID NO: 16916 - DNA, 110 bp, Homo sapiens
  chr9:136699683-136699793
  hypo
ggcaaggaatgtgtcacgcccactccgggctccgggtgtccagtgggaagacgagaggcccaggtcagggctgcagaaagcgttcatctgctgggcgacctgccttcccc

SEQ ID NO: 16917 - DNA, 31 bp, Homo sapiens
  chr9:136699827-136699858
  hypo
tggagatgaggctcctcgcacacctcctggt

SEQ ID NO: 16918 - DNA, 31 bp, Homo sapiens
  chr9:136714184-136714215
  hypo
acagttgctgaagaggcggccttggtttgtt

SEQ ID NO: 16919 - DNA, 31 bp, Homo sapiens
  chr9:136714226-136714257
  hypo
agagtaaaaccatcttcgctccctaaaggga

SEQ ID NO: 16920 - DNA, 41 bp, Homo sapiens
  chr9:136714452-136714493
  hypo
gggcctcctcctgggccgggagttctcgtggatgccagggc

SEQ ID NO: 16921 - DNA, 31 bp, Homo sapiens
  chr9:136719371-136719402
  hypo
catctgcacacacacacgcacatacccatat

SEQ ID NO: 16922 - DNA, 63 bp, Homo sapiens
  chr9:136722068-136722131
  hypo
caaggaccaggtgctgcgctgcacgatgcacagacacagagcaaccccgcgaggcagagtcat

SEQ ID NO: 16923 - DNA, 31 bp, Homo sapiens
  chr9:136722226-136722257
  hypo
gcctgaggacacctttcggtttccttctcag

SEQ ID NO: 16924 - DNA, 46 bp, Homo sapiens
  chr9:136723289-136723335
  hypo
ctttgtatacctgaggcgttgggccacgcagcgtatgctcacaatg

SEQ ID NO: 16925 - DNA, 31 bp, Homo sapiens
  chr9:136723369-136723400
  hypo
gtgtggcctctgcaggcgctggggatggagt

SEQ ID NO: 16926 - DNA, 49 bp, Homo sapiens
  chr9:136723420-136723469
  hypo
gcatgcccaaccccaccggccaccagtgaggacccgcactccagggctt

SEQ ID NO: 16927 - DNA, 31 bp, Homo sapiens
  chr9:136723744-136723775
  hypo
gagcccttctctgggccgagccctgagccct

SEQ ID NO: 16928 - DNA, 22 bp, Homo sapiens
  chr9:136725133-136725155
  hypo
tctatccatggccgggcgaggt

SEQ ID NO: 16929 - DNA, 41 bp, Homo sapiens
  chr9:136725494-136725535
  hypo
tctgagaatccaacaacggaagtccccgtgggtttaggaac

SEQ ID NO: 16930 - DNA, 31 bp, Homo sapiens
  chr9:136729691-136729722
  hypo
cacaaccttttaaaggcggcactttaaaaga

SEQ ID NO: 16931 - DNA, 31 bp, Homo sapiens
  chr9:136729726-136729757
  hypo
ccctaggtcctacccccgccaccccacaggc

SEQ ID NO: 16932 - DNA, 48 bp, Homo sapiens
  chr9:136729988-136730036
  hypo
cacaggaaagggcatgcggtctgtgagctcctccggggtaggaacaaa

SEQ ID NO: 16933 - DNA, 36 bp, Homo sapiens
  chr9:136731600-136731636
  hypo
agtgtgggggcaactgcgctgcgatgattttaaaga

SEQ ID NO: 16934 - DNA, 60 bp, Homo sapiens
  chr9:136732401-136732461
  hypo
atctcgccaggtggtgcgtgcgcaactctagctttctctttctggcgccttggagagatg

SEQ ID NO: 16935 - DNA, 58 bp, Homo sapiens
  chr9:136732516-136732574
  hypo
gcccccatggtggggccgcctggggccctagggaagggtgccacgtgctctgaaaagg

SEQ ID NO: 16936 - DNA, 49 bp, Homo sapiens
  chr9:136733333-136733382
  hypo
tgagctacccggggctcgggtctgtgtggcaacacgaggggcaacctgc

SEQ ID NO: 16937 - DNA, 125 bp, Homo sapiens
  chr9:136733577-136733702
  hypo
gataacagtgtctacccgtgtggctgtaggtgaatgagacggagcctggcccaaagcagggactcgcgcacagcttgcggaaaggggactgtgcccgatcagaaggtccacggagggactcatgg

SEQ ID NO: 16938 - DNA, 31 bp, Homo sapiens
  chr9:136733709-136733740
  hypo
ccatcctccacttgctcgaatgaagaaacaa

SEQ ID NO: 16939 - DNA, 31 bp, Homo sapiens
  chr9:136733758-136733789
  hypo
ggctcagggccagaagcgtgcatgtttgtta

SEQ ID NO: 16940 - DNA, 31 bp, Homo sapiens
  chr9:136737402-136737433
  hypo
ttcctccctgcatgctcggctcccagcaccc

SEQ ID NO: 16941 - DNA, 31 bp, Homo sapiens
  chr9:136737612-136737643
  hypo
gggcacagcctctcctcggcttgaagggtcg

SEQ ID NO: 16942 - DNA, 31 bp, Homo sapiens
  chr9:136737646-136737677
  hypo
tcctaggcccagttcccgacacctccagagg

SEQ ID NO: 16943 - DNA, 31 bp, Homo sapiens
  chr9:136737707-136737738
  hypo
gctggcagggaagccccgggggtcagagtcg

SEQ ID NO: 16944 - DNA, 65 bp, Homo sapiens
  chr9:136743437-136743502
  hypo
aactgcgacccaagcacgatcgaggctgtgtgtttctgaaaggatctgaccgaactgagcactaa

SEQ ID NO: 16945 - DNA, 31 bp, Homo sapiens
  chr9:136743507-136743538
  hypo
ttcagaatctggccaacgcagctccccatcc

SEQ ID NO: 16946 - DNA, 48 bp, Homo sapiens
  chr9:136743949-136743997
  hypo
acagcagctgagcactcggagtggaagcgccctcggcccgggcagcct

SEQ ID NO: 16947 - DNA, 31 bp, Homo sapiens
  chr9:136758976-136759007
  hypo
gagagtcgggcgcccacgtgtaccacacaca

SEQ ID NO: 16948 - DNA, 62 bp, Homo sapiens
  chr9:136759016-136759078
  hypo
gctttactggacctcacggatcctcacagacctctggaaagttctgtcgtaatctccacctt

SEQ ID NO: 16949 - DNA, 31 bp, Homo sapiens
  chr9:136759083-136759114
  hypo
tgcagaaactgaggctcggggagaaggaaga

SEQ ID NO: 16950 - DNA, 78 bp, Homo sapiens
  chr9:136762225-136762303
  hypo
cccaaccgaaacagatgttgggcttgtgagaacgcagcactaggaagcgactcgggagcctatcggcacatgctggtt

SEQ ID NO: 16951 - DNA, 60 bp, Homo sapiens
  chr9:136763772-136763832
  hypo
atcatcagttgaatggcgaggtagctggactttttatgtggtgcccggggaagcttccag

SEQ ID NO: 16952 - DNA, 31 bp, Homo sapiens
  chr9:136766706-136766737
  hypo
gaggctggccctgagccgcaggggcctctcc

SEQ ID NO: 16953 - DNA, 61 bp, Homo sapiens
  chr9:136766739-136766800
  hypo
ccctccagcaagggcccggagctgccctgaggggctcctgccggcccggcctggtgactct

SEQ ID NO: 16954 - DNA, 31 bp, Homo sapiens
  chr9:136766864-136766895
  hypo
tgacaccaggccctcccgtaagcacagacag

SEQ ID NO: 16955 - DNA, 31 bp, Homo sapiens
  chr9:136766908-136766939
  hypo
gactctggaaccccagcgcccactgccacat

SEQ ID NO: 16956 - DNA, 36 bp, Homo sapiens
  chr9:136766942-136766978
  hypo
accttttcccaggagacgggccgatggggtcagtgg

SEQ ID NO: 16957 - DNA, 31 bp, Homo sapiens
  chr9:136766979-136767010
  hypo
aatgtgccaccaccatcggagggggctgggg

SEQ ID NO: 16958 - DNA, 31 bp, Homo sapiens
  chr9:136771808-136771839
  hypo
acccatgacctcacgccgcagaacctggcac

SEQ ID NO: 16959 - DNA, 31 bp, Homo sapiens
  chr9:136771861-136771892
  hypo
acacaaaacccagtggcgcctggagagctgg

SEQ ID NO: 16960 - DNA, 54 bp, Homo sapiens
  chr9:136772078-136772132
  hypo
ctgccactgggcccagcgagcccctccgtgagtgatggccgctatgctgctcgg

SEQ ID NO: 16961 - DNA, 31 bp, Homo sapiens
  chr9:136772146-136772177
  hypo
cctcagcctggctggccggcggcggggggag

SEQ ID NO: 16962 - DNA, 73 bp, Homo sapiens
  chr9:136773824-136773897
  hypo
ggaaccgctgggagggcgtccccacgcccttgccagcgctgcacccctctgaggcagacgcagctacaaacca

SEQ ID NO: 16963 - DNA, 49 bp, Homo sapiens
  chr9:136773902-136773951
  hypo
caggagcaggccccctcgggagcggacttccaaccgcttgcctggtttg

SEQ ID NO: 16964 - DNA, 31 bp, Homo sapiens
  chr9:136777464-136777495
  hypo
aacacgaggctatgtccgtccaaatccccac

SEQ ID NO: 16965 - DNA, 58 bp, Homo sapiens
  chr9:136785102-136785160
  hypo
tctctgcgctgagccacgtgccaggaggccagacaggcctgggcgtgggccccagtgt

SEQ ID NO: 16966 - DNA, 40 bp, Homo sapiens
  chr9:136786009-136786049
  hypo
tctaactcatacccctcggcccacccgcttcctggctggc

SEQ ID NO: 16967 - DNA, 58 bp, Homo sapiens
  chr9:136802013-136802071
  hypo
tgcagcccctcagagccgcagccgcctcactggaaaccatggacgatgacaagggctg

SEQ ID NO: 16968 - DNA, 51 bp, Homo sapiens
  chr9:136802124-136802175
  hypo
aatccaaatttatgtacgtcttacatcactgcattccgccatagcaaatta

SEQ ID NO: 16969 - DNA, 31 bp, Homo sapiens
  chr9:136808205-136808236
  hypo
aagaatgaagccatgtcgacatcggccaggg

SEQ ID NO: 16970 - DNA, 26 bp, Homo sapiens
  chr9:136817742-136817768
  hypo
cctgaggctctcgagataagataatc

SEQ ID NO: 16971 - DNA, 31 bp, Homo sapiens
  chr9:136852076-136852107
  hypo
ggaggcacaaagcctgcgtggcacacagcag

SEQ ID NO: 16972 - DNA, 37 bp, Homo sapiens
  chr9:136852628-136852665
  hypo
accatcgccaggctggcgtgtccgggaagaggcaggg

SEQ ID NO: 16973 - DNA, 31 bp, Homo sapiens
  chr9:136852711-136852742
  hypo
cagggccaagcctttgcgtggtgtccagcaa

SEQ ID NO: 16974 - DNA, 79 bp, Homo sapiens
  chr9:136852746-136852825
  hypo
tgcctgatgtgttttacgaggaggaggccaccaggacgatgtgggcaagtcagaggctgggcggcgggtggtaccttaa

SEQ ID NO: 16975 - DNA, 31 bp, Homo sapiens; identical to SEQ ID NO: 3773
  chr9:136856910-136856941
  hypo

SEQ ID NO: 16976 - DNA, 31 bp, Homo sapiens
  chr9:136911190-136911221
  hypo
ctacagcaaaacccaccgcaggtcccacctg

SEQ ID NO: 16977 - DNA, 31 bp, Homo sapiens
  chr9:136915348-136915379
  hypo
gcctgagctcccagggcgcagagagaaacac

SEQ ID NO: 16978 - DNA, 35 bp, Homo sapiens
  chr9:136915610-136915645
  hypo
ggggtggcagcgatgacgggcgtctgggagacggt

SEQ ID NO: 16979 - DNA, 37 bp, Homo sapiens
  chr9:136993425-136993462
  hypo
cctcttaacaacatgtcgctgccgttgctctgtggca

SEQ ID NO: 16980 - DNA, 35 bp, Homo sapiens
  chr9:136993475-136993510
  hypo
taccttatccttttggcggccgtggactgttccag

SEQ ID NO: 16981 - DNA, 31 bp, Homo sapiens
  chr9:136999527-136999558
  hypo
gagggttctggggtctcgccccttatcttgc

SEQ ID NO: 16982 - DNA, 108 bp, Homo sapiens
  chr9:137287804-137287912
  hypo
ctggaggtgacaggcccgagtctttgcctgcccctgcggggaggcgggaaacagatgtgcagcaggtacggagagcccaccccgccgagggcccgtagggcccatctt

SEQ ID NO: 16983 - DNA, 37 bp, Homo sapiens
  chr9:137583039-137583076
  hypo
gcccctctcacgagcccggcttcgtttcactgtagtg

SEQ ID NO: 16984 - DNA, 31 bp, Homo sapiens
  chr9:137599728-137599759
  hypo
cttcccggcacacaggcgggcgagactgggt

SEQ ID NO: 16985 - DNA, 31 bp, Homo sapiens
  chr9:137609683-137609714
  hypo
ccctgtttcggttggacgaggagggggcctg

SEQ ID NO: 16986 - DNA, 31 bp, Homo sapiens
  chr9:137609798-137609829
  hypo
ggaggcactgagcatgcgattagagggagca

SEQ ID NO: 16987 - DNA, 38 bp, Homo sapiens
  chr9:137609845-137609883
  hypo
cctgggctggggggccgcggccacgggagcctctaatt

SEQ ID NO: 16988 - DNA, 31 bp, Homo sapiens
  chr9:137621458-137621489
  hypo
agcctgtgtgtgtgagcgtgtgtgagcgtgt

SEQ ID NO: 16989 - DNA, 31 bp, Homo sapiens
  chr9:137657115-137657146
  hypo
gaggggaattcaggagcgagccggtaatgag

SEQ ID NO: 16990 - DNA, 31 bp, Homo sapiens
  chr9:137693755-137693786
  hypo
caggccactgcagcaccgtcagtgcagtgac

SEQ ID NO: 16991 - DNA, 31 bp, Homo sapiens
  chr9:137698684-137698715
  hypo
ggggatgggtggataacggaaagacaaggcg

SEQ ID NO: 16992 - DNA, 34 bp, Homo sapiens
  chr9:137727554-137727588
  hypo
ggaatggaggccggagcggcgggaggcttgctga

SEQ ID NO: 16993 - DNA, 31 bp, Homo sapiens
  chr9:138156950-138156981
  hypo
cctcgctgtggacaggcgtgggtgccatgaa

SEQ ID NO: 16994 - DNA, 31 bp, Homo sapiens
  chr9:138357660-138357691
  hypo
cccagctgcccatggccgtcacccttccact

SEQ ID NO: 16995 - DNA, 94 bp, Homo sapiens; identical to SEQ ID NO: 3779
  chr9:138372194-138372288
  hypo

SEQ ID NO: 16996 - DNA, 45 bp, Homo sapiens
  chr9:138507284-138507329
  hypo
cgctctccactccatccggaccagggacggcggggacgtggactt

SEQ ID NO: 16997 - DNA, 31 bp, Homo sapiens
  chr9:138547729-138547760
  hypo
gcatcctcccctctgacgtctcaggaggagg

SEQ ID NO: 16998 - DNA, 38 bp, Homo sapiens
  chr9:138654777-138654815
  hypo
aggtgtcactgtagctcgagctccgtgtccacagtggg

SEQ ID NO: 16999 - DNA, 47 bp, Homo sapiens
  chr9:138666572-138666619
  hypo
gtgttgtgtgtgtgtccgggtgtgtccatttccgtgtgcctgtatgg

SEQ ID NO: 17000 - DNA, 31 bp, Homo sapiens
  chr9:138712991-138713022
  hypo
tggagcctgtaactgtcgaagagacacttcc

SEQ ID NO: 17001 - DNA, 31 bp, Homo sapiens
  chr9:138743696-138743727
  hypo
tctatgcgtgtacagacgggtgttgcccagg

SEQ ID NO: 17002 - DNA, 31 bp, Homo sapiens
  chr9:138743730-138743761
  hypo
actctgagaggggactcgctgggccacgagc

SEQ ID NO: 17003 - DNA, 31 bp, Homo sapiens
  chr9:138774202-138774233
  hypo
tggccctgacccagaacgctctggaaaaggc

SEQ ID NO: 17004 - DNA, 67 bp, Homo sapiens
  chr9:138831935-138832002
  hypo
cctttcaggtttgtcccgatgactgtgtggataagactgtctcggcagccaccgcaggtttacccca

SEQ ID NO: 17005 - DNA, 31 bp, Homo sapiens
  chr9:138836302-138836333
  hypo
aggaggaagtaaaacccgaatcaaagaacag

SEQ ID NO: 17006 - DNA, 59 bp, Homo sapiens
  chr9:138836347-138836406
  hypo
aatggggagatgaggcgcgggcgaggaaggtccacacacacaggcgcagggacccttca

SEQ ID NO: 17007 - DNA, 74 bp, Homo sapiens
  chr9:138836414-138836488
  hypo
gactgtgccatggaggcggctggcagcctgagcggcccctcgctcatggacacccccgacggcaaatgaccctc

SEQ ID NO: 17008 - DNA, 44 bp, Homo sapiens
  chr9:138877591-138877635
  hypo
ggcaatcagaaaggacgcgctgagggctgcgcttacccccatct

SEQ ID NO: 17009 - DNA, 31 bp, Homo sapiens
  chr9:138877673-138877704
  hypo
tgaatgctggcacctgcgcagccctctgcca

SEQ ID NO: 17010 - DNA, 31 bp, Homo sapiens
  chr9:138877811-138877842
  hypo
tgggggccaacagcagcggcctgttccccaa

SEQ ID NO: 17011 - DNA, 45 bp, Homo sapiens
  chr9:138878498-138878543
  hypo
tgcaggggtgccgtgccgggtcctcagcaccggctcccaggcagc

SEQ ID NO: 17012 - DNA, 31 bp, Homo sapiens
  chr9:138888187-138888218
  hypo
gactctgaaagtcccccggccaggacatgga

SEQ ID NO: 17013 - DNA, 44 bp, Homo sapiens
  chr9:138901583-138901627
  hypo
catggtcctcccctagcggaggcggcctccgcttgatgggttgt

SEQ ID NO: 17014 - DNA, 123 bp, Homo sapiens
  chr9:138902148-138902271
  hypo
cacccctcaaggcagacggggagcccagcaccgggaggaccgactctcgccctggcccagccctggccgctgcctcctgcccgagcggagtcccccgctccccaggtccggccctgagctcag

SEQ ID NO: 17015 - DNA, 49 bp, Homo sapiens
  chr9:138906091-138906140
  hypo
aaactccaagctctcccggccatgctgcggtccccggcctcagctccct

SEQ ID NO: 17016 - DNA, 56 bp, Homo sapiens
  chr9:138907130-138907186
  hypo
caggggcccacccagccgccccggcagcccagcactgcgctcgccatccagaagca

SEQ ID NO: 17017 - DNA, 31 bp, Homo sapiens
  chr9:138908323-138908354
  hypo
ctgctctgtgcctgcccgcctgccctccatg

SEQ ID NO: 17018 - DNA, 31 bp, Homo sapiens
  chr9:138908900-138908931
  hypo
gactgtgctggcctgacgaggagcaactcca

SEQ ID NO: 17019 - DNA, 40 bp, Homo sapiens
  chr9:138909963-138910003
  hypo
atgcagagcccacctgcggccgcaccgcaccaggacgctc

SEQ ID NO: 17020 - DNA, 31 bp, Homo sapiens
  chr9:138910982-138911013
  hypo
gcagcctccacctccccggcccccagctcac

SEQ ID NO: 17021 - DNA, 40 bp, Homo sapiens
  chr9:138911045-138911085
  hypo
tacaactgggctttaacggagaacccgcagagagacttgt

SEQ ID NO: 17022 - DNA, 31 bp, Homo sapiens
  chr9:138911086-138911117
  hypo
catggcagagacaggacggctcatccctcgt

SEQ ID NO: 17023 - DNA, 31 bp, Homo sapiens
  chr9:138911136-138911167
  hypo
cagaggccccgtgagtcggggccagagctgg

SEQ ID NO: 17024 - DNA, 31 bp, Homo sapiens
  chr9:138911433-138911464
  hypo
atggaggtgaacaaccgcgcccccacacagg

SEQ ID NO: 17025 - DNA, 44 bp, Homo sapiens
  chr9:138911466-138911510
  hypo
aggtgcaccagggtcacgacgagagggcccggagcagcagcctc

SEQ ID NO: 17026 - DNA, 31 bp, Homo sapiens
  chr9:138911817-138911848
  hypo
aacagagggtgggtgccggggctgggtgggg

SEQ ID NO: 17027 - DNA, 32 bp, Homo sapiens
  chr9:138922160-138922192
  hypo
agagggtactggaggccgggcgcggtggctca

SEQ ID NO: 17028 - DNA, 31 bp, Homo sapiens
  chr9:138950819-138950850
  hypo
tctggcccctgggccccgccctcctgtctgc

SEQ ID NO: 17029 - DNA, 31 bp, Homo sapiens
  chr9:138950893-138950924
  hypo
aggggcaggggagaagcgtgatctggaaccc

SEQ ID NO: 17030 - DNA, 86 bp, Homo sapiens
  chr9:138954963-138955049
  hypo
tgtgggccaggtctgtcgatctgtctctctcctgtcaaacgtgtggtttgagccgcattcccattacgtggcggggaccagggatg

SEQ ID NO: 17031 - DNA, 37 bp, Homo sapiens
  chr9:138970474-138970511
  hypo
ggggccagcccagccccgacatcgggacagaaagggg

SEQ ID NO: 17032 - DNA, 45 bp, Homo sapiens
  chr9:138976373-138976418
  hypo
aaactggcccagaccccggagtcagggtcacgaaggccatggaaa

SEQ ID NO: 17033 - DNA, 38 bp, Homo sapiens
  chr9:138976594-138976632
  hypo
cagcctggagaagggacgggctccgccactccctgcaa

SEQ ID NO: 17034 - DNA, 31 bp, Homo sapiens
  chr9:138979535-138979566
  hypo
tttgcccagcttccaccgcagcacgggggga

SEQ ID NO: 17035 - DNA, 31 bp, Homo sapiens
  chr9:138979873-138979904
  hypo
gaggtgacctggaagacgggcacccccagtg

SEQ ID NO: 17036 - DNA, 235 bp, Homo sapiens; identical to SEQ ID NO: 3781
  chr9:138986453-138986688
  hypo

SEQ ID NO: 17037 - DNA, 464 bp, Homo sapiens; identical to SEQ ID NO: 3782
  chr9:138986692-138987156
  hypo

SEQ ID NO: 17038 - DNA, 32 bp, Homo sapiens; identical to SEQ ID NO: 3783
  chr9:138987167-138987199
  hypo

SEQ ID NO: 17039 - DNA, 143 bp, Homo sapiens; identical to SEQ ID NO: 3784
  chr9:138987368-138987511
  hypo

SEQ ID NO: 17040 - DNA, 35 bp, Homo sapiens; identical to SEQ ID NO: 3785
  chr9:138987585-138987620
  hypo

SEQ ID NO: 17041 - DNA, 51 bp, Homo sapiens; identical to SEQ ID NO: 3786
  chr9:138987676-138987727
  hypo

SEQ ID NO: 17042 - DNA, 42 bp, Homo sapiens
  chr9:139000600-139000642
  hypo
aagcggcaagaatgcccgtccccatgtcgtgagccatggtca

SEQ ID NO: 17043 - DNA, 60 bp, Homo sapiens
  chr9:139043907-139043967
  hypo
cctcagcagctttgggcgagggggtctggtcagctgccctgtggccgaagccccaccttc

SEQ ID NO: 17044 - DNA, 31 bp, Homo sapiens
  chr9:139044755-139044786
  hypo
ctcgaccacagcagaacgtgggctgaggagg

SEQ ID NO: 17045 - DNA, 31 bp, Homo sapiens
  chr9:139044791-139044822
  hypo
ctgccaggccaggtcacgggtgagcctcgtc

SEQ ID NO: 17046 - DNA, 35 bp, Homo sapiens
  chr9:139103913-139103948
  hypo
ccagagtttgtgccaccgaacgtattaacagacat

SEQ ID NO: 17047 - DNA, 31 bp, Homo sapiens
  chr9:139111267-139111298
  hypo
tgtggggaccttaaggcgttttgtaaagctg

SEQ ID NO: 17048 - DNA, 64 bp, Homo sapiens
  chr9:139111319-139111383
  hypo
agctttattctgactgcgatttccaacacgcctaagagccttcaccgacgcgcccacaatctgc

SEQ ID NO: 17049 - DNA, 47 bp, Homo sapiens
  chr9:139111393-139111440
  hypo
tgaggcatctggaagtcggggcctggggtggacgtcagcccctccct

SEQ ID NO: 17050 - DNA, 31 bp, Homo sapiens
  chr9:139111448-139111479
  hypo
gcccctgagctccctgcgtgcccaccctgtg

SEQ ID NO: 17051 - DNA, 31 bp, Homo sapiens
  chr9:139114782-139114813
  hypo
tctggaggcagcctggcgtcaccatcaaacc

SEQ ID NO: 17052 - DNA, 31 bp, Homo sapiens
  chr9:139115298-139115329
  hypo
ctcaaggtgagctgggcgtgtcataaaaatg

SEQ ID NO: 17053 - DNA, 90 bp, Homo sapiens
  chr9:139130638-139130728
  hypo
tgcatctgcctgctgccgggccctcagggacctcgtggttgcccccttgagcgaccaagaccctatcaaagtccttttagccgggcgtgg

SEQ ID NO: 17054 - DNA, 31 bp, Homo sapiens
  chr9:139133519-139133550
  hypo
tcacctgcaacatgagcgcccccgcactcct

SEQ ID NO: 17055 - DNA, 31 bp, Homo sapiens
  chr9:139253100-139253131
  hypo
ctggtcttgggatggccgtgtgacaggcatg

SEQ ID NO: 17056 - DNA, 31 bp, Homo sapiens
  chr9:139261466-139261497
  hypo
ggaggtgggcactgtccgtgccttaccttac

SEQ ID NO: 17057 - DNA, 81 bp, Homo sapiens
  chr9:139264124-139264205
  hypo
aactgccctcaagggccgtggccctggtgcacccacccgcgagtggggtgctttgtcctgcccctgcgagtgcccacctgg

SEQ ID NO: 17058 - DNA, 31 bp, Homo sapiens
  chr9:139273917-139273948
  hypo
ccagatggcaatgctccggccaaagccaggg

SEQ ID NO: 17059 - DNA, 31 bp, Homo sapiens; identical to SEQ ID NO: 3788
  chr9:139294770-139294801
  hypo

SEQ ID NO: 17060 - DNA, 31 bp, Homo sapiens
  chr9:139300479-139300510
  hypo
agggcgtgtgcttctgcggtgtggctccaga

SEQ ID NO: 17061 - DNA, 31 bp, Homo sapiens
  chr9:139302238-139302269
  hypo
cgtcccacagagccatcgcccacagtgccgt

SEQ ID NO: 17062 - DNA, 51 bp, Homo sapiens
  chr9:139317751-139317802
  hypo
agctggagcccgttcccgtgcgtgttagtttggacacgaatttagtctaaa

SEQ ID NO: 17063 - DNA, 59 bp, Homo sapiens; identical to SEQ ID NO: 3789
  chr9:139334258-139334317
  hypo

SEQ ID NO: 17064 - DNA, 36 bp, Homo sapiens
  chr9:139375863-139375899
  hypo
acaggcatgagccaccgcgcccggcccagggaattt

SEQ ID NO: 17065 - DNA, 90 bp, Homo sapiens
  chr9:139384887-139384977
  hypo
tgctgggattacaggcgtgagccaccacgcctggccaacgccagcactttcaacgcaccgggaccaagctggacccggttttgttttgaa

SEQ ID NO: 17066 - DNA, 31 bp, Homo sapiens
  chr9:139388144-139388175
  hypo
atctcagactccccaccgctctggtttgaag

SEQ ID NO: 17067 - DNA, 53 bp, Homo sapiens
  chr9:139421771-139421824
  hypo
tccttcacagctttggcgctggccacacccccggtacccgggccactctgtct

SEQ ID NO: 17068 - DNA, 112 bp, Homo sapiens
  chr9:139421894-139422006
  hypo
gcacccaacagctgccgcgcccacggggatcctcagggcttccatgagtgacccgcaccccaccttccaccgtccccgcatctcctcctatcaggggcggtggggagacccc

SEQ ID NO: 17069 - DNA, 52 bp, Homo sapiens
  chr9:139422024-139422076
  hypo
ggcttgagatagggaacgccagtctcccccgactggacgagagagctgccct

SEQ ID NO: 17070 - DNA, 52 bp, Homo sapiens; identical to SEQ ID NO: 3790
  chr9:139440853-139440905
  hypo

SEQ ID NO: 17071 - DNA, 31 bp, Homo sapiens
  chr9:139449119-139449150
  hypo
ggagcacaggggttgccggcacccaacagaa

SEQ ID NO: 17072 - DNA, 31 bp, Homo sapiens
  chr9:139465108-139465139
  hypo
ccctgctggagcccttcgccctgtcccccag

SEQ ID NO: 17073 - DNA, 31 bp, Homo sapiens
  chr9:139484034-139484065
  hypo
gcagcggctcaaagagcggaggaaatctgtg

SEQ ID NO: 17074 - DNA, 40 bp, Homo sapiens
  chr9:139484146-139484186
  hypo
cactgttcagtgctcccgccaccacgcgatgccctctcat

SEQ ID NO: 17075 - DNA, 72 bp, Homo sapiens
  chr9:139484212-139484284
  hypo
gtgctccccccaccacgcgatgcccccctccacagtgcggtgcccccctccacagtgcgatgccccctactg

SEQ ID NO: 17076 - DNA, 31 bp, Homo sapiens
  chr9:139501901-139501932
  hypo
caggtgtttggggaggcggagcagagggttc

SEQ ID NO: 17077 - DNA, 52 bp, Homo sapiens
  chr9:139501990-139502042
  hypo
caccagggaggctgtgcggggagggcccggacagtgacgcccccacggctgt

SEQ ID NO: 17078 - DNA, 40 bp, Homo sapiens
  chr9:139506448-139506488
  hypo
tgggtgacggatgaaccgggtagaccgtctgtacaatgga

SEQ ID NO: 17079 - DNA, 73 bp, Homo sapiens
  chr9:139509480-139509553
  hypo
gaaacccaggcaggaccgtaaaacccaggcctcgacccgtcagcctccagccgctctccgaggcaccttgcag

SEQ ID NO: 17080 - DNA, 59 bp, Homo sapiens
  chr9:139509595-139509654
  hypo
ggtcccagatgctgcccggagcctggaactgcgagtggccgtggcggtggctgtgctgc

SEQ ID NO: 17081 - DNA, 31 bp, Homo sapiens
  chr9:139570934-139570965
  hypo
tcaagggtcctcagctcggctggtggtcacc

SEQ ID NO: 17082 - DNA, 38 bp, Homo sapiens
  chr9:139571843-139571881
  hypo
ccccagaagccacccccgaggcccggcctacccatcat

SEQ ID NO: 17083 - DNA, 45 bp, Homo sapiens
  chr9:139571891-139571936
  hypo
ctctggtggttggagacgatgacacagggacgggcctcctgcagc

SEQ ID NO: 17084 - DNA, 31 bp, Homo sapiens
  chr9:139579045-139579076
  hypo
caggggcaagatggagcgcccctcccagagc

SEQ ID NO: 17085 - DNA, 31 bp, Homo sapiens; identical to SEQ ID NO: 3793
  chr9:139580673-139580704
  hypo

SEQ ID NO: 17086 - DNA, 97 bp, Homo sapiens; identical to SEQ ID NO: 3794
  chr9:139581778-139581875
  hypo

SEQ ID NO: 17087 - DNA, 31 bp, Homo sapiens
  chr9:139586083-139586114
  hypo
aggcagcccgacccagcgaggagaccctggg

SEQ ID NO: 17088 - DNA, 58 bp, Homo sapiens
  chr9:139586515-139586573
  hypo
tcccaaccccagcaagcgggggcaggggggcctgggctgcagtcggctcctccttcac

SEQ ID NO: 17089 - DNA, 31 bp, Homo sapiens
  chr9:139586604-139586635
  hypo
tccccagtttccccaccggcagtggtgtcca

SEQ ID NO: 17090 - DNA, 31 bp, Homo sapiens
  chr9:139586679-139586710
  hypo
ctgcccatgatgtggtcggaagggcctttgg

SEQ ID NO: 17091 - DNA, 103 bp, Homo sapiens
  chr9:139586958-139587061
  hypo
tgaagcgtccgagggccggctctggcgcctacaggggcttccgacgctgggtccttctcaggctgagcgccgcactcccacggccacccgggtggtgcacaca

SEQ ID NO: 17092 - DNA, 110 bp, Homo sapiens
  chr9:139587088-139587198
  hypo
gtggacctggtgtccacgtcctcctctgaaccatgccaggcctgggccgtgggcatccgtgctgccgtgtggggcaggggcctgtgtcctggggccgtgtcaggcctggg

SEQ ID NO: 17093 - DNA, 85 bp, Homo sapiens
  chr9:139598242-139598327
  hypo
ccagaaagtccaatatcgaggtgcaggcagattccgtgtctggtgagcgcccgcctcctgatagacgtcacgtggtgaatgcagt

SEQ ID NO: 17094 - DNA, 31 bp, Homo sapiens
  chr9:139598329-139598360
  hypo
ggggtctcctggcagccggggtgggggtctc

SEQ ID NO: 17095 - DNA, 31 bp, Homo sapiens
  chr9:139598371-139598402
  hypo
ttttgagatggagtttcgctcttgttgccca

SEQ ID NO: 17096 - DNA, 31 bp, Homo sapiens
  chr9:139641115-139641146
  hypo
gtgcagggggaaggcacgctggtgaggaggg

SEQ ID NO: 17097 - DNA, 32 bp, Homo sapiens
  chr9:139666884-139666916
  hypo
agaagtgatctacagtcgggtgcggtggctca

SEQ ID NO: 17098 - DNA, 19 bp, Homo sapiens
  chr9:139684617-139684636
  hypo
ccaccgcacctggccaaga

SEQ ID NO: 17099 - DNA, 31 bp, Homo sapiens
  chr9:139698657-139698688
  hypo
aggctgaatgcacttccgtgagttctaggtg

SEQ ID NO: 17100 - DNA, 50 bp, Homo sapiens
  chr9:139698701-139698751
  hypo
ggcagctgggggccagcggctggagggcagcagagcgtctgggctggcac

SEQ ID NO: 17101 - DNA, 132 bp, Homo sapiens
  chr9:139698959-139699091
  hypo
atgaggcaaagggaggcgtccttcatcgaggagcgccgggcaagggagaaccggctcaaccagcagaagaagctgatcgacaagatccacacgaaggagaccagcgagaagtaccgccgggtaagccccagg

SEQ ID NO: 17102 - DNA, 42 bp, Homo sapiens
  chr9:139703928-139703970
  hypo
tatgaaagttggtgtccgggccgggcacggtggctcatgcct

SEQ ID NO: 17103 - DNA, 40 bp, Homo sapiens
  chr9:139704089-139704129
  hypo
gaaagttgatgtccgaaccaagggccgtattggcttttct

SEQ ID NO: 17104 - DNA, 108 bp, Homo sapiens
  chr9:139704171-139704279
  hypo
ttcaaattagagtcagcgtgctcatcagaaagaaagcgcagccaacacgtttaggaacagaaacggattatgttgaagacaaacaatccattgcgtttgtgttcagta

SEQ ID NO: 17105 - DNA, 79 bp, Homo sapiens
  chr9:139704351-139704430
  hypo
ggagctcccagactcccgtggagtggaagcctgggggctcgctgaagaagtcacgtgactggaacgtgcttaatgcttg

SEQ ID NO: 17106 - DNA, 31 bp, Homo sapiens
  chr9:139705002-139705033
  hypo
ttgagacagagttttgcgttttgctgtgtct

SEQ ID NO: 17107 - DNA, 58 bp, Homo sapiens
  chr9:139734918-139734976
  hypo
ggggcggggccccgggcggccgccaccctgggggtggcgactacgaggagctctaggc

SEQ ID NO: 17108 - DNA, 31 bp, Homo sapiens
  chr9:139735214-139735245
  hypo
gacaccctggccctctcggggcagagccgcc

SEQ ID NO: 17109 - DNA, 37 bp, Homo sapiens
  chr9:139735531-139735568
  hypo
acagtggcctcagctgcgcccccgctcaggtgagccc

SEQ ID NO: 17110 - DNA, 59 bp, Homo sapiens
  chr9:139809956-139810015
  hypo
ttttttattgacacagcgttcacgttgtattggtcatgagtcaccgagagctgatttca

SEQ ID NO: 17111 - DNA, 31 bp, Homo sapiens
  chr9:139810060-139810091
  hypo
tcttccatcagggactcgagcatccttgggt

SEQ ID NO: 17112 - DNA, 31 bp, Homo sapiens
  chr9:139846908-139846939
  hypo
cggaaggagaagcagccggctgggtctgagt

SEQ ID NO: 17113 - DNA, 53 bp, Homo sapiens
  chr9:139846983-139847036
  hypo
gagagccaggaccagccgtgcttccaggagcccccaggcgggcccctgacctc

SEQ ID NO: 17114 - DNA, 31 bp, Homo sapiens
  chr9:139847038-139847069
  hypo
gcagaggagggcccagcgcagaccttcctgg

SEQ ID NO: 17115 - DNA, 24 bp, Homo sapiens
  chr9:139856856-139856880
  hypo
caccttgcccggccctcaaattca

SEQ ID NO: 17116 - DNA, 31 bp, Homo sapiens
  chr9:139858923-139858954
  hypo
gcagaggaaggagactcgggccacacccagg

SEQ ID NO: 17117 - DNA, 31 bp, Homo sapiens
  chr9:139885997-139886028
  hypo
cttcttccctggagatcgctctgtactgtga

SEQ ID NO: 17118 - DNA, 58 bp, Homo sapiens
  chr9:139888842-139888900
  hypo
gcaccccgccccaccccggcctgactggtttgggagcccagtccggtcctggagatcc

SEQ ID NO: 17119 - DNA, 31 bp, Homo sapiens
  chr9:139888918-139888949
  hypo
ggaggcctggagtctgcgccttcttagcgtg

SEQ ID NO: 17120 - DNA, 34 bp, Homo sapiens
  chr9:139888956-139888990
  hypo
ggaccggcccgacccccggcgctcctgcccctgt

SEQ ID NO: 17121 - DNA, 31 bp, Homo sapiens
  chr9:139889032-139889063
  hypo
ggatgggaagtgatcccgagacctctggccc

SEQ ID NO: 17122 - DNA, 44 bp, Homo sapiens
  chr9:139910703-139910747
  hypo
gtcagcagatgcccaccgccctgcccctccgacactcacatggt

SEQ ID NO: 17123 - DNA, 31 bp, Homo sapiens
  chr9:139934674-139934705
  hypo
gggaggtgaaggttagcgtgcaggtgagggt

SEQ ID NO: 17124 - DNA, 31 bp, Homo sapiens
  chr9:139945423-139945454
  hypo
actcggtagtgctggccgtagagatgcagct

SEQ ID NO: 17125 - DNA, 34 bp, Homo sapiens; identical to SEQ ID NO: 3798
  chr9:139948372-139948406
  hypo

SEQ ID NO: 17126 - DNA, 55 bp, Homo sapiens; identical to SEQ ID NO: 3799
  chr9:139948416-139948471
  hypo

SEQ ID NO: 17127 - DNA, 105 bp, Homo sapiens; identical to SEQ ID NO: 3800
  chr9:140024587-140024692
  hypo

SEQ ID NO: 17128 - DNA, 31 bp, Homo sapiens; identical to SEQ ID NO: 3801
  chr9:140024723-140024754
  hypo

SEQ ID NO: 17129 - DNA, 31 bp, Homo sapiens; identical to SEQ ID NO: 3802
  chr9:140025041-140025072
  hypo

SEQ ID NO: 17130 - DNA, 34 bp, Homo sapiens
  chr9:140078704-140078738
  hypo
agacacagagcagacacggcgaaggcacagggag

SEQ ID NO: 17131 - DNA, 31 bp, Homo sapiens
  chr9:140081899-140081930
  hypo
gcaagggcatggccatcgggacagactactc

SEQ ID NO: 17132 - DNA, 31 bp, Homo sapiens
  chr9:140088446-140088477
  hypo
cacagctggggggccacgctttgtgcccaaa

SEQ ID NO: 17133 - DNA, 31 bp, Homo sapiens
  chr9:140108362-140108393
  hypo
gtctggtctggccacacgcagggtccgctca

SEQ ID NO: 17134 - DNA, 31 bp, Homo sapiens
  chr9:140124090-140124121
  hypo
cactgtgtgtcgggtgcggttctgggagggt

SEQ ID NO: 17135 - DNA, 39 bp, Homo sapiens
  chr9:140137587-140137626
  hypo
ccatggccgctacctgacggttgccgccgtgttcagggg

SEQ ID NO: 17136 - DNA, 55 bp, Homo sapiens
  chr9:140218252-140218307
  hypo
gccttcagggagcagtcgaccgagaggcagcgcccagccccgacctgggcccgga

SEQ ID NO: 17137 - DNA, 31 bp, Homo sapiens
  chr9:140244415-140244446
  hypo
tgtgtgtctggggtggcgtgtgtgcccagag

SEQ ID NO: 17138 - DNA, 31 bp, Homo sapiens
  chr9:140260841-140260872
  hypo
ggagagctctcccacgcgcctgctgcccccc

SEQ ID NO: 17139 - DNA, 47 bp, Homo sapiens
  chr9:140263677-140263724
  hypo
ctgggaggtgggcttacggctgtgagcatgggcgcaggggccaccac

SEQ ID NO: 17140 - DNA, 31 bp, Homo sapiens
  chr9:140263734-140263765
  hypo
ccccagcagtgacacccgcagcttcacacaa

SEQ ID NO: 17141 - DNA, 31 bp, Homo sapiens
  chr9:140269908-140269939
  hypo
cgagttctaactctagcgagttctaggtcta

SEQ ID NO: 17142 - DNA, 31 bp, Homo sapiens
  chr9:140361288-140361319
  hypo
tccatcacctcagacccgggcacggatcaga

SEQ ID NO: 17143 - DNA, 31 bp, Homo sapiens
  chr9:140373388-140373419
  hypo
aggaagggcccaggagcgcaggtgtcaggga

SEQ ID NO: 17144 - DNA, 31 bp, Homo sapiens
  chr9:140375091-140375122
  hypo
agggcctaggcagtcacgcagaggctgcagt

SEQ ID NO: 17145 - DNA, 31 bp, Homo sapiens
  chr9:140378940-140378971
  hypo
caccgccgcgtcccctcgaagacagagggca

SEQ ID NO: 17146 - DNA, 31 bp, Homo sapiens
  chr9:140396596-140396627
  hypo
gctcccagaggtgacccgggagtgcccaaca

SEQ ID NO: 17147 - DNA, 31 bp, Homo sapiens
  chr9:140396646-140396677
  hypo
gaggttgcagtggacccggagcctgtggaga

SEQ ID NO: 17148 - DNA, 52 bp, Homo sapiens
  chr9:140396690-140396742
  hypo
accaagggtgagggagcgtctgcgggcaccacacccacgaaggtttgaaaca

SEQ ID NO: 17149 - DNA, 31 bp, Homo sapiens
  chr9:140396804-140396835
  hypo
atctttggaaaatgatcgaaaaacaaaccat

SEQ ID NO: 17150 - DNA, 31 bp, Homo sapiens
  chr9:140396838-140396869
  hypo
acttcccaaaccctgacggtgaagggggtga

SEQ ID NO: 17151 - DNA, 31 bp, Homo sapiens
  chr9:140396891-140396922
  hypo
aaatgacatcacatgtcgccaaaagtttgtc

SEQ ID NO: 17152 - DNA, 116 bp, Homo sapiens
  chr9:140396981-140397097
  hypo
gctctcaggcagaggacggccgctgacggagaggccgcatcgccccagggcgcgttgtcagcccgaggaggagccgtgggaggttcttcaggagaagaaagcggcctccctgagga

SEQ ID NO: 17153 - DNA, 31 bp, Homo sapiens
  chr9:140397111-140397142
  hypo
agaaagtcagagccttcgggagatgaggggg

SEQ ID NO: 17154 - DNA, 47 bp, Homo sapiens
  chr9:140397156-140397203
  hypo
ggggacgcgggggacgcgggggacgggggggacgagagggatgtggg

SEQ ID NO: 17155 - DNA, 31 bp, Homo sapiens
  chr9:140416957-140416988
  hypo
taaccttcattattcccgaacccactcagaa

SEQ ID NO: 17156 - DNA, 38 bp, Homo sapiens
  chr9:140418787-140418825
  hypo
agtcgagattcccccacggtggcgcgtctgccagaggc

SEQ ID NO: 17157 - DNA, 31 bp, Homo sapiens; identical to SEQ ID NO: 3809
  chr9:140445801-140445832
  hypo

SEQ ID NO: 17158 - DNA, 191 bp, Homo sapiens; identical to SEQ ID NO: 3810
  chr9:140445936-140446127
  hypo

SEQ ID NO: 17159 - DNA, 69 bp, Homo sapiens; identical to SEQ ID NO: 3812
  chr9:140473436-140473505
  hypo

SEQ ID NO: 17160 - DNA, 31 bp, Homo sapiens; identical to SEQ ID NO: 3813
  chr9:140473528-140473559
  hypo

SEQ ID NO: 17161 - DNA, 31 bp, Homo sapiens
  chr9:140507427-140507458
  hypo
ttcaacagttccctgtcgctggcagacaagg

SEQ ID NO: 17162 - DNA, 31 bp, Homo sapiens
  chr9:140538197-140538228
  hypo
cacgttgctcctctgtcgctgcttttgagag

SEQ ID NO: 17163 - DNA, 24 bp, Homo sapiens
  chr9:140576695-140576719
  hypo
ggccaaaatcgtcctctttaaagc

SEQ ID NO: 17164 - DNA, 31 bp, Homo sapiens
  chr9:140587421-140587452
  hypo
cttggaatcggctggacggcacctctgcctg

SEQ ID NO: 17165 - DNA, 31 bp, Homo sapiens
  chr9:140592396-140592427
  hypo
gagggcggcgtggctcgcggaggcctcactc

SEQ ID NO: 17166 - DNA, 37 bp, Homo sapiens
  chr9:140592629-140592666
  hypo
tggtttgttgacaaaacgtggacgcattttgtcttat

SEQ ID NO: 17167 - DNA, 31 bp, Homo sapiens
  chr9:140592679-140592710
  hypo
gaaaagcagggattgccgtggaaactccaca

SEQ ID NO: 17168 - DNA, 87 bp, Homo sapiens
  chr9:140606077-140606164
  hypo
gtgaggggagttggggcgaggggagtcggcggggctgcacccctctgtaaggcgtggcgcacacatagggttcggatgttcttggag

SEQ ID NO: 17169 - DNA, 31 bp, Homo sapiens
  chr9:140606166-140606197
  hypo
cctgcaccaccaagagcgcccccaggaaatg

SEQ ID NO: 17170 - DNA, 31 bp, Homo sapiens
  chr9:140611203-140611234
  hypo
agcacactcaggacagcgcaagggtcaaccc

SEQ ID NO: 17171 - DNA, 38 bp, Homo sapiens
  chr9:140611243-140611281
  hypo
caccaacacactaactcggatagcggaaaatggggttt

SEQ ID NO: 17172 - DNA, 31 bp, Homo sapiens
  chr9:140611412-140611443
  hypo
agcactctggcctcttcgctgcctggccatg

SEQ ID NO: 17173 - DNA, 36 bp, Homo sapiens
  chr9:140612586-140612622
  hypo
gcgcctgcccctcacacgcaccgtgctgattttcac

SEQ ID NO: 17174 - DNA, 31 bp, Homo sapiens
  chr9:140612707-140612738
  hypo
tgatcaccagatcttacgtggtgcatacacg

SEQ ID NO: 17175 - DNA, 46 bp, Homo sapiens
  chr9:140615446-140615492
  hypo
tttctcccctcctcgccggcgtcctcgccagcgttagctcttaccc

SEQ ID NO: 17176 - DNA, 31 bp, Homo sapiens
  chr9:140620042-140620073
  hypo
agtagggagcccaggtcgttctatgtctgtt

SEQ ID NO: 17177 - DNA, 31 bp, Homo sapiens
  chr9:140620769-140620800
  hypo
gtgtccatcagttggacgactctagggacct

SEQ ID NO: 17178 - DNA, 31 bp, Homo sapiens
  chr9:140620805-140620836
  hypo
aagtggaatggtacaacgtttgttcttttgt

SEQ ID NO: 17179 - DNA, 67 bp, Homo sapiens
  chr9:140620837-140620904
  hypo
gctgacttacttcattcggcacagtgtccccgaggctcatccacgctgcagcgcgggccccagcttc

SEQ ID NO: 17180 - DNA, 31 bp, Homo sapiens
  chr9:140653936-140653967
  hypo
ctgtctctggtgaggtcgggggaaggtagct

SEQ ID NO: 17181 - DNA, 31 bp, Homo sapiens
  chr9:140654116-140654147
  hypo
ccgattggtcagtcagcgattggcctgttca

SEQ ID NO: 17182 - DNA, 55 bp, Homo sapiens
  chr9:140654329-140654384
  hypo
tgtggagtgtgctgagcgggtcagtgggggcaggtgatgccgctggttgtgggtc

SEQ ID NO: 17183 - DNA, 31 bp, Homo sapiens
  chr9:140657886-140657917
  hypo
cttgttggcaccaggccgagaggcaccacat

SEQ ID NO: 17184 - DNA, 31 bp, Homo sapiens
  chr9:140657932-140657963
  hypo
aggtgtctggctgccccgggcttgcatttgc

SEQ ID NO: 17185 - DNA, 24 bp, Homo sapiens
  chr9:140664574-140664598
  hypo
cactgtgcccggcccactttattt

SEQ ID NO: 17186 - DNA, 31 bp, Homo sapiens
  chr9:140664629-140664660
  hypo
ggattccttgtacacacgttagattgtttga

SEQ ID NO: 17187 - DNA, 31 bp, Homo sapiens
  chr9:140665996-140666027
  hypo
acgtctctgtgctcctcggagtcctggtctt

SEQ ID NO: 17188 - DNA, 31 bp, Homo sapiens
  chr9:140708691-140708722
  hypo
ccctcccacaggcactcgacatgtttctgcc

SEQ ID NO: 17189 - DNA, 31 bp, Homo sapiens
  chr9:140708740-140708771
  hypo
agaggccacacactcacgtggtgcctttgag

SEQ ID NO: 17190 - DNA, 63 bp, Homo sapiens
  chr9:140709016-140709079
  hypo
gcaaaaacagtgcaggcgtctgtgaccccagcgctgtcgtggcagcgtcgggaaggagttgga

SEQ ID NO: 17191 - DNA, 31 bp, Homo sapiens
  chr9:140852045-140852076
  hypo
gcagtgctgaagagagcggccaccaagaaga

SEQ ID NO: 17192 - DNA, 31 bp, Homo sapiens
  chr9:140938683-140938714
  hypo
gcacctgtgttgcctgcgtgtgtgcactgtg

SEQ ID NO: 17193 - DNA, 31 bp, Homo sapiens
  chr9:141015037-141015068
  hypo
ctgccttgggcctggccgtgctaacttcttc

SEQ ID NO: 17194 - DNA, 114 bp, Homo sapiens
  chr9:141022613-141022727
  hypo
gcatcagaacaggggtcgcagaactgacctggcccccagtccctgagcgctcccacctgctgccctctcccgcccagcccagcccagctgcctgcgttgcggcctccacctgca

SEQ ID NO: 17195 - DNA, 31 bp, Homo sapiens
  chr9:141069526-141069557
  hypo
agtgcgggaaccagatcggggccaaggttgg

SEQ ID NO: 17196 - DNA, 31 bp, Homo sapiens
  chr9:141069670-141069701
  hypo
ggaactgggtggctggcgaggcggccggggt

SEQ ID NO: 17197 - DNA, 31 bp, Homo sapiens
  chr9:141069702-141069733
  hypo
gaccccagggacagggcggcctagggatggg

SEQ ID NO: 17198 - DNA, 31 bp, Homo sapiens
  chr9:141070600-141070631
  hypo
ggtgaccactgatgaccgtatacctggccat

SEQ ID NO: 17199 - DNA, 31 bp, Homo sapiens
  chr10:326506-326537
  hypo
cctactgctgaatctccggcagcaccattga

SEQ ID NO: 17200 - DNA, 31 bp, Homo sapiens
  chr10:327401-327432
  hypo
ttgtttccttctgccacggagctccttggca

SEQ ID NO: 17201 - DNA, 31 bp, Homo sapiens
  chr10:338152-338183
  hypo
gcccaaatcggctccacgaaccattactgct

SEQ ID NO: 17202 - DNA, 31 bp, Homo sapiens
  chr10:387526-387557
  hypo
gacacccgggacaatacggggctgcactgaa

SEQ ID NO: 17203 - DNA, 31 bp, Homo sapiens
  chr10:391367-391398
  hypo
cacacccagacacatcgcgcacagttctccc

SEQ ID NO: 17204 - DNA, 31 bp, Homo sapiens
  chr10:410433-410464
  hypo
aggcctccgggacccacgaaccccagcaagc

SEQ ID NO: 17205 - DNA, 31 bp, Homo sapiens
  chr10:431729-431760
  hypo
acggggtgggggcagacgagagggcagagac

SEQ ID NO: 17206 - DNA, 45 bp, Homo sapiens
  chr10:463656-463701
  hypo
cctccctgtctgcctgcgcctgtcagggctcggataggcatccct

SEQ ID NO: 17207 - DNA, 45 bp, Homo sapiens
  chr10:545442-545487
  hypo
ttacatggcggcaggtgagagggaggtgtgcgagggggaggacag

SEQ ID NO: 17208 - DNA, 31 bp, Homo sapiens
  chr10:545533-545564
  hypo
gctggtggctgcaggtcgcaggaagggaaca

SEQ ID NO: 17209 - DNA, 31 bp, Homo sapiens
  chr10:545570-545601
  hypo
ccaaaaaaacagatctcgtgagatctcccaa

SEQ ID NO: 17210 - DNA, 55 bp, Homo sapiens
  chr10:583335-583390
  hypo
ataaggatcaccctggcgcagactccggttcctttcaattcgcctcttttcttcc

SEQ ID NO: 17211 - DNA, 31 bp, Homo sapiens
  chr10:583424-583455
  hypo
acaacacaagtaactacgacctggctccagc

SEQ ID NO: 17212 - DNA, 31 bp, Homo sapiens
  chr10:583487-583518
  hypo
ccagcatcctgccccccgtccccctcccccg

SEQ ID NO: 17213 - DNA, 50 bp, Homo sapiens
  chr10:583713-583763
  hypo
agttatctttcgtctgcgaatttttttttttcccccgagaccgagtctcg

SEQ ID NO: 17214 - DNA, 69 bp, Homo sapiens
  chr10:603005-603074
  hypo
tggtcagtgtggcccacgggacacggccaggagaccggccaccttgacactgggcgtaagaccagcact

SEQ ID NO: 17215 - DNA, 64 bp, Homo sapiens
  chr10:603122-603186
  hypo
agccccacagagggaccggtgtggaggaccaggcctccgccagcagacacgtcagcacagcatc

SEQ ID NO: 17216 - DNA, 78 bp, Homo sapiens
  chr10:630293-630371
  hypo
gacagattccaaatctcggagcccacgacctgacacccactcacgcgcatcacctctcaatctcggggcccacaacct

SEQ ID NO: 17217 - DNA, 31 bp, Homo sapiens
  chr10:630561-630592
  hypo
cctgacccccactcacgcgcatcacctctca

SEQ ID NO: 17218 - DNA, 31 bp, Homo sapiens
  chr10:644048-644079
  hypo
ggatcacggcctcccacgaggaaagtgccag

SEQ ID NO: 17219 - DNA, 31 bp, Homo sapiens
  chr10:661289-661320
  hypo
gaaactcgcagccacccgcataggggccacg

SEQ ID NO: 17220 - DNA, 31 bp, Homo sapiens
  chr10:682647-682678
  hypo
atctgtgatgacttttcgagagtctggggcc

SEQ ID NO: 17221 - DNA, 71 bp, Homo sapiens
  chr10:685211-685282
  hypo
gtccacacgtggggacgcgtcaggtcgggagggtgctgcccggctcacggtccacacgtggggatgtgtca

SEQ ID NO: 17222 - DNA, 80 bp, Homo sapiens
  chr10:685291-685371
  hypo
ggtgctgcccggctcacggtccacacatggggatgtgtcaggtcgggagagtgctgtccggctcacggtccacacatggg

SEQ ID NO: 17223 - DNA, 31 bp, Homo sapiens
  chr10:685731-685762
  hypo
ggtacacacaaatcagcgacatcactagaac

SEQ ID NO: 17224 - DNA, 46 bp, Homo sapiens
  chr10:851259-851305
  hypo
acccccgggctgctgcgcggaaaaaggcggacggggatccagggcg

SEQ ID NO: 17225 - DNA, 73 bp, Homo sapiens
  chr10:851431-851504
  hypo
ggcctggcggcctctgcggagcgccctctgcggagctgcctctggcacctgtccacagcgtctggacaccggg

SEQ ID NO: 17226 - DNA, 76 bp, Homo sapiens
  chr10:851601-851677
  hypo
aagtagaccaattagacgactacaaacggtgctcagtgctgcagaagcagccggggacaggcggctgtcggagagg

SEQ ID NO: 17227 - DNA, 31 bp, Homo sapiens
  chr10:868645-868676
  hypo
catcactgtgacacccgcgactctgaatgca

SEQ ID NO: 17228 - DNA, 31 bp, Homo sapiens
  chr10:868742-868773
  hypo
caaggcagccacctggcgcctggggctcctc

SEQ ID NO: 17229 - DNA, 47 bp, Homo sapiens
  chr10:868779-868826
  hypo
ttcaacccagctgggccgtgccctgccatggccgccatgcaagggta

SEQ ID NO: 17230 - DNA, 53 bp, Homo sapiens
  chr10:1007454-1007507
  hypo
gcttctggtgaggcctcgggaaggtccactcatggcggcgtggtgccagcatc

SEQ ID NO: 17231 - DNA, 31 bp, Homo sapiens
  chr10:1148513-1148544
  hypo
aggagtaaggcgggggcggggggtgccccac

SEQ ID NO: 17232 - DNA, 31 bp, Homo sapiens
  chr10:1156841-1156872
  hypo
ggactgcctgctcatccgggaagtagctctg

SEQ ID NO: 17233 - DNA, 31 bp, Homo sapiens
  chr10:1671647-1671678
  hypo
tcaagcaccccgccagcgcccaaccccgccc

SEQ ID NO: 17234 - DNA, 55 bp, Homo sapiens
  chr10:3146042-3146097
  hypo
atgatttctgcggcaccgacatgaccatcggcacggactccgccctgcacaggat

SEQ ID NO: 17235 - DNA, 31 bp, Homo sapiens
  chr10:3150920-3150951
  hypo
cacgtgtgaccatcctcgggcacgtgcagag

SEQ ID NO: 17236 - DNA, 45 bp, Homo sapiens
  chr10:3151619-3151664
  hypo
cactgaacgggaaccacgccgtgcgcctgccgctgatggagtgcg

SEQ ID NO: 17237 - DNA, 31 bp, Homo sapiens
  chr10:3192624-3192655
  hypo
atacaaacatgacaagcgctgtcagaagaca

SEQ ID NO: 17238 - DNA, 31 bp, Homo sapiens
  chr10:3216520-3216551
  hypo
gggctgcaggtaaacacgtacctccttattg

SEQ ID NO: 17239 - DNA, 31 bp, Homo sapiens
  chr10:3277175-3277206
  hypo
gtcgagtggtggaagccgatgttgcataggg

SEQ ID NO: 17240 - DNA, 31 bp, Homo sapiens
  chr10:3277209-3277240
  hypo
tacaacccagtgtgggcgtctcctggaggag

SEQ ID NO: 17241 - DNA, 56 bp, Homo sapiens
  chr10:3277259-3277315
  hypo
tgttgcagtggtgtcacgcatgccagctggggacctggcaccgagtggagaactgg

SEQ ID NO: 17242 - DNA, 31 bp, Homo sapiens
  chr10:3277333-3277364
  hypo
aggggcagagggtgccgcggctctcctaaaa

SEQ ID NO: 17243 - DNA, 31 bp, Homo sapiens
  chr10:3641660-3641691
  hypo
gaggaaaactgccagtcgcctgactagtttg

SEQ ID NO: 17244 - DNA, 54 bp, Homo sapiens
  chr10:3712902-3712956
  hypo
gaggtcagggacctgccggccagtctcagtaagatgaaacgtagaaaattcact

SEQ ID NO: 17245 - DNA, 48 bp, Homo sapiens
  chr10:3712977-3713025
  hypo
ggcttagggtgtccatcggggagtggctgctcacggggtcaatggggc

SEQ ID NO: 17246 - DNA, 31 bp, Homo sapiens
  chr10:4500574-4500605
  hypo
gctgcatccacgttgccgtaaaggacataat

SEQ ID NO: 17247 - DNA, 31 bp, Homo sapiens
  chr10:5512031-5512062
  hypo
acagggctctcagccgcgaaagcaggcagcc

SEQ ID NO: 17248 - DNA, 19 bp, Homo sapiens
  chr10:5518992-5519011
  hypo
tctccgtttctgcatcaca

SEQ ID NO: 17249 - DNA, 31 bp, Homo sapiens
  chr10:5527429-5527460
  hypo
ctggtggggtgggaagcgtgggtggatggaa

SEQ ID NO: 17250 - DNA, 31 bp, Homo sapiens
  chr10:5527499-5527530
  hypo
gagctaagaggggtctcgtagtaaaggggga

SEQ ID NO: 17251 - DNA, 66 bp, Homo sapiens
  chr10:5527539-5527605
  hypo
agcttttattagagatcgagtcagcgtctctgagggatgacgtttatgctgcgaactcggtgacaa

SEQ ID NO: 17252 - DNA, 48 bp, Homo sapiens
  chr10:5530662-5530710
  hypo
tttaaatagacccccacgcctgggcgcccccaccgctgacccaccagg

SEQ ID NO: 17253 - DNA, 35 bp, Homo sapiens
  chr10:5531084-5531119
  hypo
cgcagcctaggcactgcggccgtggttcacatgca

SEQ ID NO: 17254 - DNA, 12 bp, Homo sapiens
  chr10:5536520-5536532
  hypo
ctcaaaaaaaaa

SEQ ID NO: 17255 - DNA, 31 bp, Homo sapiens
  chr10:5536562-5536593
  hypo
tgactcccatttccctcgaagtgtgtgagtt

SEQ ID NO: 17256 - DNA, 61 bp, Homo sapiens
  chr10:5536598-5536659
  hypo
acaggtttttagccaccgggcaccattccctcatcctcatctgggtcgatcagctcagccc

SEQ ID NO: 17257 - DNA, 31 bp, Homo sapiens
  chr10:5537075-5537106
  hypo
gttggaccttggtccacggttgcaaggagag

SEQ ID NO: 17258 - DNA, 31 bp, Homo sapiens
  chr10:5537147-5537178
  hypo
accctagagttggtaacgctactgtagaaaa

SEQ ID NO: 17259 - DNA, 31 bp, Homo sapiens
  chr10:5549565-5549596
  hypo
gagggcaggaagatcccgctcccaaaaccac

SEQ ID NO: 17260 - DNA, 31 bp, Homo sapiens
  chr10:5571209-5571240
  hypo
tgactcagttcacccacggcagtgagtgtgt

SEQ ID NO: 17261 - DNA, 31 bp, Homo sapiens
  chr10:5640942-5640973
  hypo
ccaggaccctgccacccggacctgcactcag

SEQ ID NO: 17262 - DNA, 41 bp, Homo sapiens
  chr10:5680698-5680739
  hypo
tccctggcaagcacagcgctgccaaacgacctgggacacag

SEQ ID NO: 17263 - DNA, 59 bp, Homo sapiens
  chr10:5681053-5681112
  hypo
tcttctcagtttaggacgaagacccgccatgacaatggcgggaacgctggagtaaaacc

SEQ ID NO: 17264 - DNA, 83 bp, Homo sapiens; identical to SEQ ID NO: 3820
  chr10:5708184-5708267
  hypo

SEQ ID NO: 17265 - DNA, 56 bp, Homo sapiens; identical to SEQ ID NO: 3821
  chr10:5708425-5708481
  hypo

SEQ ID NO: 17266 - DNA, 66 bp, Homo sapiens; identical to SEQ ID NO: 3822
  chr10:5708499-5708565
  hypo

SEQ ID NO: 17267 - DNA, 31 bp, Homo sapiens
  chr10:5796212-5796243
  hypo
gtgctcccagcctgcccgacagagtgagact

SEQ ID NO: 17268 - DNA, 31 bp, Homo sapiens
  chr10:5863341-5863372
  hypo
gcaggggttcctaactcgagtataattgtac

SEQ ID NO: 17269 - DNA, 59 bp, Homo sapiens
  chr10:5875037-5875096
  hypo
ttccctgagaaccagtcggaccaggacaggcccctgaccacacccggcaaactggagtc

SEQ ID NO: 17270 - DNA, 31 bp, Homo sapiens
  chr10:5962671-5962702
  hypo
aaggctgtacacaccccgagtgtagggaaga

SEQ ID NO: 17271 - DNA, 31 bp, Homo sapiens
  chr10:5962710-5962741
  hypo
ttgccagctggaggggcgaaggaagcagggt

SEQ ID NO: 17272 - DNA, 54 bp, Homo sapiens
  chr10:5962786-5962840
  hypo
agtcagacagaaaaccgcgtgggctgaggcagggcagcacggacaatgtgcagg

SEQ ID NO: 17273 - DNA, 31 bp, Homo sapiens
  chr10:6003401-6003432
  hypo
tgtcaaagatctgagtcgttcagcttgttta

SEQ ID NO: 17274 - DNA, 31 bp, Homo sapiens
  chr10:6003435-6003466
  hypo
gagaaggcaggcccaacgctggaggctcagc

SEQ ID NO: 17275 - DNA, 120 bp, Homo sapiens
  chr10:6003468-6003588
  hypo
agagcaggtgaagctgcgctggccgaggacgctcggagcggctgcgtgtgaaacacgggaagcctgggctctggcctgaactctccgggctgtgtgggaggaaagcgtcctgatgagctt

SEQ ID NO: 17276 - DNA, 31 bp, Homo sapiens; identical to SEQ ID NO: 3825
  chr10:6019532-6019563
  hypo

SEQ ID NO: 17277 - DNA, 31 bp, Homo sapiens
  chr10:6024477-6024508
  hypo
aataagtgtaagaaaacgattgtttgtaagg

SEQ ID NO: 17278 - DNA, 81 bp, Homo sapiens
  chr10:6024544-6024625
  hypo
ggtgatgccaatcatccgcagatgttcacgtgggtgactgcagtggcaacaacgttgctttctgggcgttcaatagacaca

SEQ ID NO: 17279 - DNA, 31 bp, Homo sapiens
  chr10:6041768-6041799
  hypo
ggggacatttggatctcgttcaggccacgtt

SEQ ID NO: 17280 - DNA, 49 bp, Homo sapiens
  chr10:6135598-6135647
  hypo
tttctggtggcactaacgtattcataaacactttcggtaaagttctcaa

SEQ ID NO: 17281 - DNA, 31 bp, Homo sapiens
  chr10:6159900-6159931
  hypo
ctgatcagaccggcaccgcagtgtgggagag

SEQ ID NO: 17282 - DNA, 31 bp, Homo sapiens
  chr10:6161977-6162008
  hypo
gagaatcccaacatcccgcctccacctcctt

SEQ ID NO: 17283 - DNA, 88 bp, Homo sapiens
  chr10:6162137-6162225
  hypo
gttttatggcacttgacgctggtaaccactcccttcccgaggacggagaccgcggccctgccagtatcgctcacgctttacctcttcc

SEQ ID NO: 17284 - DNA, 31 bp, Homo sapiens
  chr10:6164389-6164420
  hypo
ctgtctggaagtttcacgactatgccgtgga

SEQ ID NO: 17285 - DNA, 29 bp, Homo sapiens
  chr10:6199195-6199224
  hypo
ctttttttttttgagacggagtctcgctc

SEQ ID NO: 17286 - DNA, 31 bp, Homo sapiens
  chr10:7212954-7212985
  hypo
tgaccgtccactccaacgggttgctctccag

SEQ ID NO: 17287 - DNA, 31 bp, Homo sapiens
  chr10:7212996-7213027
  hypo
cctcctcctcctgtttcgtgtcctgcagaga

SEQ ID NO: 17288 - DNA, 31 bp, Homo sapiens
  chr10:7213033-7213064
  hypo
aggaggagctcagctgcggcacagtcagctg

SEQ ID NO: 17289 - DNA, 55 bp, Homo sapiens
  chr10:7213940-7213995
  hypo
cctctctgggggtggccggcgcacgggctctgagccgctccgcagggtgacggcc

SEQ ID NO: 17290 - DNA, 54 bp, Homo sapiens
  chr10:7216520-7216574
  hypo
tttattatatgagatccggagacatctctgagttcatttcggcaatgctgaatg

SEQ ID NO: 17291 - DNA, 31 bp, Homo sapiens
  chr10:7236486-7236517
  hypo
aagttcctaataacaccgatggccaggaaaa

SEQ ID NO: 17292 - DNA, 31 bp, Homo sapiens
  chr10:7236532-7236563
  hypo
tttacttccattacctcgttctctttaacta

SEQ ID NO: 17293 - DNA, 31 bp, Homo sapiens
  chr10:7239773-7239804
  hypo
ctgatggggagtcaggcgtaataaaagcaat

SEQ ID NO: 17294 - DNA, 46 bp, Homo sapiens
  chr10:7239812-7239858
  hypo
aaatgaacacaataaccgtgacagccagtgtcgttagaactgtaat

SEQ ID NO: 17295 - DNA, 31 bp, Homo sapiens
  chr10:7239868-7239899
  hypo
cactctagttccaaatcgtgacaaagcagca

SEQ ID NO: 17296 - DNA, 31 bp, Homo sapiens
  chr10:7239920-7239951
  hypo
tcttttgagaaagaggcgctgtgtcctaata

SEQ ID NO: 17297 - DNA, 31 bp, Homo sapiens
  chr10:7246892-7246923
  hypo
cacatgtatgaatgggcgtttactgctgggt

SEQ ID NO: 17298 - DNA, 27 bp, Homo sapiens
  chr10:7288387-7288414
  hypo
agaatgtgagagaggccgggtgcagtg

SEQ ID NO: 17299 - DNA, 38 bp, Homo sapiens
  chr10:7290468-7290506
  hypo
actctaggggctgggtcgaagagcgagggaggaaaacc

SEQ ID NO: 17300 - DNA, 31 bp, Homo sapiens
  chr10:7381914-7381945
  hypo
tgaaagactctcattacgcaaatgagtgctt

SEQ ID NO: 17301 - DNA, 31 bp, Homo sapiens
  chr10:7381964-7381995
  hypo
attcacacaggtctgacggggcatgagtgtg

SEQ ID NO: 17302 - DNA, 31 bp, Homo sapiens
  chr10:7382017-7382048
  hypo
ctgagacagccacagtcggtggggatccatc

SEQ ID NO: 17303 - DNA, 37 bp, Homo sapiens
  chr10:7401230-7401267
  hypo
gagccctccatgcacccgaggccgtgatcatctgagc

SEQ ID NO: 17304 - DNA, 201 bp, Homo sapiens; identical to SEQ ID NO: 3826
  chr10:7450516-7450717
  hypo

SEQ ID NO: 17305 - DNA, 43 bp, Homo sapiens; identical to SEQ ID NO: 3827
  chr10:7450725-7450768
  hypo

SEQ ID NO: 17306 - DNA, 264 bp, Homo sapiens; identical to SEQ ID NO: 3828
  chr10:7450786-7451050
  hypo

SEQ ID NO: 17307 - DNA, 65 bp, Homo sapiens; identical to SEQ ID NO: 3829
  chr10:7451074-7451139
  hypo

SEQ ID NO: 17308 - DNA, 89 bp, Homo sapiens; identical to SEQ ID NO: 3830
  chr10:7451144-7451233
  hypo

SEQ ID NO: 17309 - DNA, 93 bp, Homo sapiens; identical to SEQ ID NO: 3831
  chr10:7451235-7451328
  hypo

SEQ ID NO: 17310 - DNA, 94 bp, Homo sapiens; identical to SEQ ID NO: 3832
  chr10:7451353-7451447
  hypo

SEQ ID NO: 17311 - DNA, 37 bp, Homo sapiens; identical to SEQ ID NO: 3833
  chr10:7451455-7451492
  hypo

SEQ ID NO: 17312 - DNA, 58 bp, Homo sapiens; identical to SEQ ID NO: 3834
  chr10:7451493-7451551
  hypo

SEQ ID NO: 17313 - DNA, 45 bp, Homo sapiens; identical to SEQ ID NO: 3835
  chr10:7451586-7451631
  hypo

SEQ ID NO: 17314 - DNA, 39 bp, Homo sapiens; identical to SEQ ID NO: 3836
  chr10:7451637-7451676
  hypo

SEQ ID NO: 17315 - DNA, 136 bp, Homo sapiens; identical to SEQ ID NO: 3837
  chr10:7451753-7451889
  hypo

SEQ ID NO: 17316 - DNA, 41 bp, Homo sapiens; identical to SEQ ID NO: 3841
  chr10:7452154-7452195
  hypo

SEQ ID NO: 17317 - DNA, 82 bp, Homo sapiens; identical to SEQ ID NO: 3842
  chr10:7452225-7452307
  hypo

SEQ ID NO: 17318 - DNA, 308 bp, Homo sapiens; identical to SEQ ID NO: 3843
  chr10:7452330-7452638
  hypo

SEQ ID NO: 17319 - DNA, 101 bp, Homo sapiens; identical to SEQ ID NO: 3845
  chr10:7452728-7452829
  hypo

SEQ ID NO: 17320 - DNA, 109 bp, Homo sapiens; identical to SEQ ID NO: 3846
  chr10:7452874-7452983
  hypo

SEQ ID NO: 17321 - DNA, 31 bp, Homo sapiens; identical to SEQ ID NO: 3847
  chr10:7452995-7453026
  hypo

SEQ ID NO: 17322 - DNA, 57 bp, Homo sapiens; identical to SEQ ID NO: 3848
  chr10:7453081-7453138
  hypo

SEQ ID NO: 17323 - DNA, 144 bp, Homo sapiens; identical to SEQ ID NO: 3849
  chr10:7453139-7453283
  hypo

SEQ ID NO: 17324 - DNA, 56 bp, Homo sapiens
  chr10:7985138-7985194
  hypo
ccagcgctgcctttgccgttgccttgaatgaaacaggcgctcgatgttggcctcac

SEQ ID NO: 17325 - DNA, 31 bp, Homo sapiens
  chr10:11520400-11520431
  hypo
agaaaacaaacctcaacgactgtaaaataaa

SEQ ID NO: 17326 - DNA, 31 bp, Homo sapiens
  chr10:11870931-11870962
  hypo
aacaccagctggagaacgtagcatttgagct

SEQ ID NO: 17327 - DNA, 69 bp, Homo sapiens
  chr10:11871015-11871084
  hypo
gagtcagttattatgccgcaaggggttagccttccagtcgggggcatggaccagcgaagctttctgagt

SEQ ID NO: 17328 - DNA, 31 bp, Homo sapiens
  chr10:11871094-11871125
  hypo
ggcagatcttgtttcccggctctcctgtgga

SEQ ID NO: 17329 - DNA, 36 bp, Homo sapiens
  chr10:11878793-11878829
  hypo
gtctataaacctataccgaagtcctctcttatacac

SEQ ID NO: 17330 - DNA, 16 bp, Homo sapiens
  chr10:11894858-11894874
  hypo
ccggccactcaagctg

SEQ ID NO: 17331 - DNA, 42 bp, Homo sapiens
  chr10:11894967-11895009
  hypo
gaagttaagaggatctcgtgccttccccggtgaggacattca

SEQ ID NO: 17332 - DNA, 29 bp, Homo sapiens
  chr10:11897183-11897212
  hypo
aagataaggccaggtgcggtggctcacgc

SEQ ID NO: 17333 - DNA, 47 bp, Homo sapiens
  chr10:11898438-11898485
  hypo
ggctgctcggaaagggcggagagctctgcactcgcatggttctcaag

SEQ ID NO: 17334 - DNA, 24 bp, Homo sapiens
  chr10:11899444-11899468
  hypo
agtaaccattattggccgggtgca

SEQ ID NO: 17335 - DNA, 31 bp, Homo sapiens
  chr10:11914997-11915028
  hypo
gtactgggattacaggcgtaagccactgccc

SEQ ID NO: 17336 - DNA, 31 bp, Homo sapiens
  chr10:11920972-11921003
  hypo
aatgtcaggtgcttggcgtgtgcctggctta

SEQ ID NO: 17337 - DNA, 78 bp, Homo sapiens
  chr10:11921011-11921089
  hypo
tcatccccatcatcaccgcagggaattcctacatggccctgggaactcgggagcaagaccagacgcaggagtgaaagc

SEQ ID NO: 17338 - DNA, 31 bp, Homo sapiens
  chr10:11923031-11923062
  hypo
atggcagagcatgcaccggggaatctgagag

SEQ ID NO: 17339 - DNA, 38 bp, Homo sapiens
  chr10:11923065-11923103
  hypo
cacacatgatcagactcgcctcacgcctgatggatcag

SEQ ID NO: 17340 - DNA, 31 bp, Homo sapiens
  chr10:11923152-11923183
  hypo
gcaaacagaacccagcgcgctcccccgaggt

SEQ ID NO: 17341 - DNA, 51 bp, Homo sapiens
  chr10:11941265-11941316
  hypo
cctctgggactccagccgactccaccacgggatgggcgaagggggaggctc

SEQ ID NO: 17342 - DNA, 31 bp, Homo sapiens
  chr10:11951074-11951105
  hypo
gtacacgtcccactggcgaccaagcccactc

SEQ ID NO: 17343 - DNA, 25 bp, Homo sapiens
  chr10:12117184-12117209
  hypo
tttcttttttttgagacggagtctc

SEQ ID NO: 17344 - DNA, 25 bp, Homo sapiens
  chr10:12341300-12341325
  hypo
agtgaaactccgtctcaaaaaaaaa

SEQ ID NO: 17345 - DNA, 245 bp, Homo sapiens; identical to SEQ ID NO: 3862
  chr10:12390765-12391010
  hypo

SEQ ID NO: 17346 - DNA, 31 bp, Homo sapiens; identical to SEQ ID NO: 3863
  chr10:12392296-12392327
  hypo

SEQ ID NO: 17347 - DNA, 67 bp, Homo sapiens
  chr10:12485159-12485226
  hypo
agtagtgaaactgactcgaggaggaaagacgtttatgtgcggcagatcttctcggggtttgcctatt

SEQ ID NO: 17348 - DNA, 31 bp, Homo sapiens
  chr10:12545390-12545421
  hypo
gcaggtcccctcttggcgtgtgtcacagctg

SEQ ID NO: 17349 - DNA, 31 bp, Homo sapiens
  chr10:12545453-12545484
  hypo
gagagagcaggtgaggcgaagaggccagaag

SEQ ID NO: 17350 - DNA, 43 bp, Homo sapiens
  chr10:12671579-12671622
  hypo
tcctgattatagtcatcgcagacaaggacgtgttctccacctg

SEQ ID NO: 17351 - DNA, 31 bp, Homo sapiens; identical to SEQ ID NO: 3864
  chr10:13341451-13341482
  hypo

SEQ ID NO: 17352 - DNA, 67 bp, Homo sapiens; identical to SEQ ID NO: 3865
  chr10:13341505-13341572
  hypo

SEQ ID NO: 17353 - DNA, 36 bp, Homo sapiens
  chr10:13516621-13516657
  hypo
tcatcgctgttggactcgggtcgatacccgtcatcg

SEQ ID NO: 17354 - DNA, 31 bp, Homo sapiens
  chr10:13531358-13531389
  hypo
acagtgactgagtgttcgtcacacacaggca

SEQ ID NO: 17355 - DNA, 31 bp, Homo sapiens
  chr10:13630040-13630071
  hypo
gttggcattctgcggacgtgccccagtgctc

SEQ ID NO: 17356 - DNA, 38 bp, Homo sapiens
  chr10:13715560-13715598
  hypo
tgcacacatgtgcatgcgtgcgcgcgcgcacacacaca

SEQ ID NO: 17357 - DNA, 31 bp, Homo sapiens
  chr10:13735187-13735218
  hypo
taacatttccaaaccacggctgcctcccttc

SEQ ID NO: 17358 - DNA, 31 bp, Homo sapiens
  chr10:13737502-13737533
  hypo
gtttgcatttcccacacgtgtgtccaatgtt

SEQ ID NO: 17359 - DNA, 31 bp, Homo sapiens
  chr10:13741937-13741968
  hypo
gaaattctctgtcctgcgctcattcatccca

SEQ ID NO: 17360 - DNA, 38 bp, Homo sapiens
  chr10:13769491-13769529
  hypo
gggtcatcctagcttccgagtttcgtctaggttgaggg

SEQ ID NO: 17361 - DNA, 72 bp, Homo sapiens; identical to SEQ ID NO: 3869
  chr10:14646261-14646333
  hypo

SEQ ID NO: 17362 - DNA, 101 bp, Homo sapiens; identical to SEQ ID NO: 3870
  chr10:14646653-14646754
  hypo

SEQ ID NO: 17363 - DNA, 31 bp, Homo sapiens
  chr10:14966087-14966118
  hypo
ggacacacatcaagtacgaagcagagaaaga

SEQ ID NO: 17364 - DNA, 84 bp, Homo sapiens
  chr10:14966128-14966212
  hypo
caaggtactgagctgccgcaggctgtgtgctcacgctaacgggagtgcttgctctctctcactcgcgtgcgctctctctcaata

SEQ ID NO: 17365 - DNA, 29 bp, Homo sapiens
  chr10:14996910-14996939
  hypo
caacccagaacactttcgctttattttat

SEQ ID NO: 17366 - DNA, 31 bp, Homo sapiens
  chr10:15000458-15000489
  hypo
ggcttgtatttaacaacgagctcagaaaaat

SEQ ID NO: 17367 - DNA, 8 bp, Homo sapiens
  chr10:15000600-15000608
  hypo
aaacatgt

SEQ ID NO: 17368 - DNA, 31 bp, Homo sapiens
  chr10:15009036-15009067
  hypo
tctctcatcttattaacggggagaggcccag

SEQ ID NO: 17369 - DNA, 26 bp, Homo sapiens
  chr10:15203628-15203654
  hypo
gattacaggtgcgagccaccacgcct

SEQ ID NO: 17370 - DNA, 65 bp, Homo sapiens; identical to SEQ ID NO: 3872
  chr10:17270206-17270271
  hypo

SEQ ID NO: 17371 - DNA, 59 bp, Homo sapiens; identical to SEQ ID NO: 3873
  chr10:17270283-17270342
  hypo

SEQ ID NO: 17372 - DNA, 176 bp, Homo sapiens; identical to SEQ ID NO: 3874
  chr10:17270665-17270841
  hypo

SEQ ID NO: 17373 - DNA, 169 bp, Homo sapiens; identical to SEQ ID NO: 3875
  chr10:17270851-17271020
  hypo

SEQ ID NO: 17374 - DNA, 31 bp, Homo sapiens; identical to SEQ ID NO: 3876
  chr10:17271034-17271065
  hypo

SEQ ID NO: 17375 - DNA, 31 bp, Homo sapiens; identical to SEQ ID NO: 3877
  chr10:17271073-17271104
  hypo

SEQ ID NO: 17376 - DNA, 80 bp, Homo sapiens; identical to SEQ ID NO: 3878
  chr10:17271134-17271214
  hypo

SEQ ID NO: 17377 - DNA, 22 bp, Homo sapiens
  chr10:17412265-17412287
  hypo
gccaccacgccctgcctgacaa

SEQ ID NO: 17378 - DNA, 35 bp, Homo sapiens
  chr10:21606053-21606088
  hypo
agagtgcattttcaggcgcccggcctctgttgtgt

SEQ ID NO: 17379 - DNA, 154 bp, Homo sapiens; identical to SEQ ID NO: 3882
  chr10:21805906-21806060
  hypo

SEQ ID NO: 17380 - DNA, 31 bp, Homo sapiens; identical to SEQ ID NO: 3883
  chr10:21816421-21816452
  hypo

SEQ ID NO: 17381 - DNA, 18 bp, Homo sapiens
  chr10:21998445-21998463
  hypo
caccgcatctggctgcag

SEQ ID NO: 17382 - DNA, 31 bp, Homo sapiens
  chr10:22033211-22033242
  hypo
gtctcttctcccaaggcgaaggattaccttc

SEQ ID NO: 17383 - DNA, 31 bp, Homo sapiens
  chr10:22033263-22033294
  hypo
catccatcaactcctgcgagtttaattcctc

SEQ ID NO: 17384 - DNA, 31 bp, Homo sapiens
  chr10:22033318-22033349
  hypo
catgtttgtaagtgtccgcttctgtagctct

SEQ ID NO: 17385 - DNA, 45 bp, Homo sapiens
  chr10:22033351-22033396
  hypo
ggcttcctggaggctccgggacgtcgacctcgtcatcctgggttg

SEQ ID NO: 17386 - DNA, 42 bp, Homo sapiens; identical to SEQ ID NO: 3889
  chr10:22540629-22540671
  hypo

SEQ ID NO: 17387 - DNA, 15 bp, Homo sapiens
  chr10:22540691-22540706
  hypo
aaaaagagaaagtat

SEQ ID NO: 17388 - DNA, 98 bp, Homo sapiens; identical to SEQ ID NO: 3891
  chr10:22540740-22540838
  hypo

SEQ ID NO: 17389 - DNA, 200 bp, Homo sapiens; identical to SEQ ID NO: 3892
  chr10:22540892-22541092
  hypo

SEQ ID NO: 17390 - DNA, 111 bp, Homo sapiens; identical to SEQ ID NO: 3893
  chr10:22541099-22541210
  hypo

SEQ ID NO: 17391 - DNA, 113 bp, Homo sapiens; identical to SEQ ID NO: 3894
  chr10:22541214-22541327
  hypo

SEQ ID NO: 17392 - DNA, 49 bp, Homo sapiens; identical to SEQ ID NO: 3895
  chr10:22541390-22541439
  hypo

SEQ ID NO: 17393 - DNA, 361 bp, Homo sapiens; identical to SEQ ID NO: 3896
  chr10:22541440-22541801
  hypo

SEQ ID NO: 17394 - DNA, 31 bp, Homo sapiens
  chr10:22567377-22567408
  hypo
gtgttcgagcgggcagcgggagtgagcatag

SEQ ID NO: 17395 - DNA, 31 bp, Homo sapiens; identical to SEQ ID NO: 3897
  chr10:22605455-22605486
  hypo

SEQ ID NO: 17396 - DNA, 31 bp, Homo sapiens
  chr10:24988588-24988619
  hypo
actacattatatccttcggtaaagagaaggc

SEQ ID NO: 17397 - DNA, 165 bp, Homo sapiens; identical to SEQ ID NO: 3898
  chr10:25012545-25012710
  hypo

SEQ ID NO: 17398 - DNA, 43 bp, Homo sapiens; identical to SEQ ID NO: 3903
  chr10:26727517-26727560
  hypo

SEQ ID NO: 17399 - DNA, 73 bp, Homo sapiens; identical to SEQ ID NO: 3904
  chr10:26727581-26727654
  hypo

SEQ ID NO: 17400 - DNA, 159 bp, Homo sapiens; identical to SEQ ID NO: 3905
  chr10:26727657-26727816
  hypo

SEQ ID NO: 17401 - DNA, 137 bp, Homo sapiens; identical to SEQ ID NO: 3906
  chr10:26727867-26728004
  hypo

SEQ ID NO: 17402 - DNA, 31 bp, Homo sapiens
  chr10:27020993-27021024
  hypo
aaacaaaacagtcagccgagctccactttct

SEQ ID NO: 17403 - DNA, 31 bp, Homo sapiens
  chr10:27021042-27021073
  hypo
atgctccacccatttccggaaagatgtgagg

SEQ ID NO: 17404 - DNA, 31 bp, Homo sapiens
  chr10:27021075-27021106
  hypo
tccctctgatgctgagcgcaagtctgtgcac

SEQ ID NO: 17405 - DNA, 31 bp, Homo sapiens
  chr10:27021122-27021153
  hypo
atgttgtgctatgttgcgtccaatttgtggc

SEQ ID NO: 17406 - DNA, 30 bp, Homo sapiens
  chr10:27096988-27097018
  hypo
ccagcctgggcgtcacgagactctgttcaa

SEQ ID NO: 17407 - DNA, 25 bp, Homo sapiens
  chr10:27846957-27846982
  hypo
agcgatacaccgtctcaaacaaaca

SEQ ID NO: 17408 - DNA, 31 bp, Homo sapiens
  chr10:28557287-28557318
  hypo
gttacatcatagagtacgttgtaagccactt

SEQ ID NO: 17409 - DNA, 26 bp, Homo sapiens
  chr10:28791005-28791031
  hypo
gtgagccaccacgccctgccagtatg

SEQ ID NO: 17410 - DNA, 66 bp, Homo sapiens; identical to SEQ ID NO: 3907
  chr10:28966235-28966301
  hypo

SEQ ID NO: 17411 - DNA, 97 bp, Homo sapiens; identical to SEQ ID NO: 3908
  chr10:28966597-28966694
  hypo

SEQ ID NO: 17412 - DNA, 31 bp, Homo sapiens
  chr10:29581545-29581576
  hypo
ttcgcgtggtgcagacgcggaaagctgaagg

SEQ ID NO: 17413 - DNA, 31 bp, Homo sapiens
  chr10:29581579-29581610
  hypo
acaaccactgccatgtcgcctgctcaggtga

SEQ ID NO: 17414 - DNA, 31 bp, Homo sapiens
  chr10:29581632-29581663
  hypo
catcctcaggactaggcgagaaagccgacaa

SEQ ID NO: 17415 - DNA, 40 bp, Homo sapiens; identical to SEQ ID NO: 3910
  chr10:29738054-29738094
  hypo

SEQ ID NO: 17416 - DNA, 31 bp, Homo sapiens; identical to SEQ ID NO: 3911
  chr10:29738102-29738133
  hypo

SEQ ID NO: 17417 - DNA, 31 bp, Homo sapiens
  chr10:29784320-29784351
  hypo
gtagtggctgacaagccgatattccaaaatg

SEQ ID NO: 17418 - DNA, 31 bp, Homo sapiens
  chr10:29805521-29805552
  hypo
ttcaaacaactgtcagcgcttctaacaactg

SEQ ID NO: 17419 - DNA, 71 bp, Homo sapiens
  chr10:29805622-29805693
  hypo
aacccagagagaggcacgacactggcccgctcacccaacgcctggcccagggccaccgtgacaggtgcctg

SEQ ID NO: 17420 - DNA, 38 bp, Homo sapiens
  chr10:29815840-29815878
  hypo
ttcggcacctttgcaccgggtgccgcatgcatctgtat

SEQ ID NO: 17421 - DNA, 97 bp, Homo sapiens
  chr10:29815889-29815986
  hypo
ctggcaggctgcacagcgctcctagctacagtggggctaggaagtctcgccattacagggtgggtgcccccagaacacgaagcggggataggttcac

SEQ ID NO: 17422 - DNA, 31 bp, Homo sapiens
  chr10:29821665-29821696
  hypo
ggaccttgcgctttttcgaggcttccctgtt

SEQ ID NO: 17423 - DNA, 31 bp, Homo sapiens
  chr10:29821697-29821728
  hypo
tgaccagttggtttggcgtcttgggacacag

SEQ ID NO: 17424 - DNA, 85 bp, Homo sapiens
  chr10:29821739-29821824
  hypo
atgtagagaaccatctcgctcctgcctgtcctctcagtgggctggtgcggagcttgagggggttgtgccacgttttccagttcct

SEQ ID NO: 17425 - DNA, 40 bp, Homo sapiens
  chr10:29840086-29840126
  hypo
ccatagggtgagtcaccgtggacaccggaggtttctgtgc

SEQ ID NO: 17426 - DNA, 36 bp, Homo sapiens
  chr10:29857036-29857072
  hypo
cccattaaaaaagtgacgtttcgtgagtcagttaag

SEQ ID NO: 17427 - DNA, 31 bp, Homo sapiens
  chr10:29884471-29884502
  hypo
cattcatttcactaatcgttttcttaatgga

SEQ ID NO: 17428 - DNA, 31 bp, Homo sapiens
  chr10:29884543-29884574
  hypo
ggtaggcaaacccttacgactcctctttcaa

SEQ ID NO: 17429 - DNA, 47 bp, Homo sapiens
  chr10:29884632-29884679
  hypo
tgagccaggcccatatcgtccaagcaggcaacgcggtcttcggtgcc

SEQ ID NO: 17430 - DNA, 31 bp, Homo sapiens
  chr10:29993108-29993139
  hypo
ctaccatgctcaaaatcgtaaccactcctcc

SEQ ID NO: 17431 - DNA, 56 bp, Homo sapiens; identical to SEQ ID NO: 3912
  chr10:30025021-30025077
  hypo

SEQ ID NO: 17432 - DNA, 49 bp, Homo sapiens; identical to SEQ ID NO: 3913
  chr10:30025084-30025133
  hypo

SEQ ID NO: 17433 - DNA, 31 bp, Homo sapiens
  chr10:30102454-30102485
  hypo
tggtcatagggccgggcgcagtgactcacgc

SEQ ID NO: 17434 - DNA, 48 bp, Homo sapiens
  chr10:30280768-30280816
  hypo
acctaaaattaaccatcgcactaacgctttatgcggtcaatattttaa

SEQ ID NO: 17435 - DNA, 31 bp, Homo sapiens
  chr10:30336420-30336451
  hypo
ctgagtcaaaagaaaacggtgggttcacagt

SEQ ID NO: 17436 - DNA, 31 bp, Homo sapiens
  chr10:30471109-30471140
  hypo
tgggacctctatacaacgcagaattgtggaa

SEQ ID NO: 17437 - DNA, 19 bp, Homo sapiens
  chr10:30733374-30733393
  hypo
agaacgaaactccatcaca

SEQ ID NO: 17438 - DNA, 35 bp, Homo sapiens
  chr10:30981746-30981781
  hypo
tattgggagatcgcttcgctcggtctgctcaccga

SEQ ID NO: 17439 - DNA, 31 bp, Homo sapiens
  chr10:31006068-31006099
  hypo
ctcctttcactgagtcgcggggcgcttctcc

SEQ ID NO: 17440 - DNA, 31 bp, Homo sapiens
  chr10:31076407-31076438
  hypo
tattccttgttcatgtcgccatgcaggctag

SEQ ID NO: 17441 - DNA, 31 bp, Homo sapiens
  chr10:31137749-31137780
  hypo
tgtattcatgtggtctcgaaggtgctgtttg

SEQ ID NO: 17442 - DNA, 87 bp, Homo sapiens; identical to SEQ ID NO: 3920
  chr10:31608554-31608641
  hypo

SEQ ID NO: 17443 - DNA, 485 bp, Homo sapiens; identical to SEQ ID NO: 3921
  chr10:31608645-31609130
  hypo

SEQ ID NO: 17444 - DNA, 323 bp, Homo sapiens; identical to SEQ ID NO: 3922
  chr10:31609132-31609455
  hypo

SEQ ID NO: 17445 - DNA, 39 bp, Homo sapiens; identical to SEQ ID NO: 3923
  chr10:31609544-31609583
  hypo

SEQ ID NO: 17446 - DNA, 123 bp, Homo sapiens; identical to SEQ ID NO: 3924
  chr10:31609585-31609708
  hypo

SEQ ID NO: 17447 - DNA, 345 bp, Homo sapiens; identical to SEQ ID NO: 3925
  chr10:31609719-31610064
  hypo

SEQ ID NO: 17448 - DNA, 37 bp, Homo sapiens; identical to SEQ ID NO: 3926
  chr10:31610069-31610106
  hypo

SEQ ID NO: 17449 - DNA, 60 bp, Homo sapiens
  chr10:31892880-31892940
  hypo
tcatgctgcaaattcccgtggccagcacccgaggcctgctggctccgatctgggccacgt

SEQ ID NO: 17450 - DNA, 31 bp, Homo sapiens
  chr10:32042434-32042465
  hypo
cctcctttggcccaatcgggtgttgcaggcc

SEQ ID NO: 17451 - DNA, 31 bp, Homo sapiens
  chr10:32062806-32062837
  hypo
ccccaggctcagcccacggtggttgtggggc

SEQ ID NO: 17452 - DNA, 27 bp, Homo sapiens
  chr10:32587052-32587079
  hypo
tctggtacaaaccgtggtatttaaagt

SEQ ID NO: 17453 - DNA, 31 bp, Homo sapiens
  chr10:33432804-33432835
  hypo
cccctctggagtgaagcgcagagatccaggc

SEQ ID NO: 17454 - DNA, 5 bp, Homo sapiens
  chr10:33432904-33432909
  hypo
aggag

SEQ ID NO: 17455 - DNA, 18 bp, Homo sapiens
  chr10:33433526-33433544
  hypo
aaatttatttctaggccg

SEQ ID NO: 17456 - DNA, 31 bp, Homo sapiens
  chr10:33780120-33780151
  hypo
aaccatccaatcatgacgttagcgatgtgtt

SEQ ID NO: 17457 - DNA, 31 bp, Homo sapiens
  chr10:34063104-34063135
  hypo
acaagtagctggacatcgtgaggaacacatc

SEQ ID NO: 17458 - DNA, 31 bp, Homo sapiens
  chr10:34276836-34276867
  hypo
gtcacatcctcactcccgctattttagcttc

SEQ ID NO: 17459 - DNA, 31 bp, Homo sapiens
  chr10:34276901-34276932
  hypo
ctgtggctctgccattcggacctttgccttt

SEQ ID NO: 17460 - DNA, 42 bp, Homo sapiens
  chr10:34276936-34276978
  hypo
gttagttaactgagtacgctcctgtaccgacaagatgcagcc

SEQ ID NO: 17461 - DNA, 31 bp, Homo sapiens
  chr10:34276988-34277019
  hypo
ttttccatccccatcccgtataactaacact

SEQ ID NO: 17462 - DNA, 31 bp, Homo sapiens
  chr10:34318438-34318469
  hypo
ttgcttctcagttcctcgggttgacctgatg

SEQ ID NO: 17463 - DNA, 31 bp, Homo sapiens
  chr10:34532762-34532793
  hypo
catcaaatttgacctgcgccataattaaata

SEQ ID NO: 17464 - DNA, 31 bp, Homo sapiens
  chr10:34777861-34777892
  hypo
ggttcccagcagccagcgcccacagcccagc

SEQ ID NO: 17465 - DNA, 250 bp, Homo sapiens; identical to SEQ ID NO: 3940
  chr10:35103598-35103848
  hypo

SEQ ID NO: 17466 - DNA, 43 bp, Homo sapiens; identical to SEQ ID NO: 3946
  chr10:35929746-35929789
  hypo

SEQ ID NO: 17467 - DNA, 17 bp, Homo sapiens
  chr10:38078894-38078911
  hypo
aaaacctgcctggggcc

SEQ ID NO: 17468 - DNA, 31 bp, Homo sapiens
  chr10:43265222-43265253
  hypo
ggcctcctggcgcgggcgtggcagggcagca

SEQ ID NO: 17469 - DNA, 31 bp, Homo sapiens
  chr10:43265284-43265315
  hypo
ctgcaactgctggctccgtggccttgggaag

SEQ ID NO: 17470 - DNA, 67 bp, Homo sapiens
  chr10:43265361-43265428
  hypo
gactgcaaatgcaaggcgtgccttgccttccactgaacatgcgcagtgttggcgctgttttactgtt

SEQ ID NO: 17471 - DNA, 31 bp, Homo sapiens
  chr10:43627021-43627052
  hypo
ggcaacgctgagtcgtcgagaaagtctatca

SEQ ID NO: 17472 - DNA, 31 bp, Homo sapiens
  chr10:43858253-43858284
  hypo
gggcccgaggaatctgcggagagacgggaag

SEQ ID NO: 17473 - DNA, 61 bp, Homo sapiens
  chr10:43858288-43858349
  hypo
ggggacactcacagggcgggggtccaggcgggagtccagtagtcctcgtggagacagctgg

SEQ ID NO: 17474 - DNA, 31 bp, Homo sapiens; identical to SEQ ID NO: 3956
  chr10:44420042-44420073
  hypo

SEQ ID NO: 17475 - DNA, 31 bp, Homo sapiens
  chr10:45419799-45419830
  hypo
tcctgggtgagtccctcgtccagcttgggtt

SEQ ID NO: 17476 - DNA, 31 bp, Homo sapiens
  chr10:46009847-46009878
  hypo
tccctgtgcttgatgccggggaacaggcgct

SEQ ID NO: 17477 - DNA, 51 bp, Homo sapiens; identical to SEQ ID NO: 3957
  chr10:49514478-49514529
  hypo

SEQ ID NO: 17478 - DNA, 41 bp, Homo sapiens
  chr10:49658431-49658472
  hypo
gctgttgctggcacccgcgcccgcctcgtccatgctgtggt

SEQ ID NO: 17479 - DNA, 60 bp, Homo sapiens
  chr10:50680405-50680465
  hypo
cactgtgtgcactgaccggtggtagatcttttcttcaatggtgcccgcagtcaggagcct

SEQ ID NO: 17480 - DNA, 37 bp, Homo sapiens
  chr10:50680489-50680526
  hypo
gcctattctccatgctcgctcccgggcctgcaacaga

SEQ ID NO: 17481 - DNA, 31 bp, Homo sapiens
  chr10:50680528-50680559
  hypo
gagagagacctctcaacgagaatccttccca

SEQ ID NO: 17482 - DNA, 31 bp, Homo sapiens
  chr10:52429237-52429268
  hypo
acatgaagctgagatgcgcttgccactccag

SEQ ID NO: 17483 - DNA, 31 bp, Homo sapiens
  chr10:62662662-62662693
  hypo
acaccaggccacgtatcggggatagaaaata

SEQ ID NO: 17484 - DNA, 50 bp, Homo sapiens
  chr10:62662756-62662806
  hypo
aaggagccaattttcccgcaatacagttattgctacgatagggatttgca

SEQ ID NO: 17485 - DNA, 31 bp, Homo sapiens
  chr10:62662811-62662842
  hypo
gtcctatgggaacatacggagagacacctca

SEQ ID NO: 17486 - DNA, 42 bp, Homo sapiens
  chr10:63757868-63757910
  hypo
gctaaacatctccatccgtggaaaagccgccagcctgaggaa

SEQ ID NO: 17487 - DNA, 95 bp, Homo sapiens; identical to SEQ ID NO: 3958
  chr10:64028002-64028097
  hypo

SEQ ID NO: 17488 - DNA, 124 bp, Homo sapiens; identical to SEQ ID NO: 3960
  chr10:64574943-64575067
  hypo

SEQ ID NO: 17489 - DNA, 77 bp, Homo sapiens; identical to SEQ ID NO: 3961
  chr10:64575127-64575204
  hypo

SEQ ID NO: 17490 - DNA, 44 bp, Homo sapiens
  chr10:64945156-64945200
  hypo
gctgggattataggcgtgagccactatgacgctcagcctcaagt

SEQ ID NO: 17491 - DNA, 31 bp, Homo sapiens
  chr10:64945229-64945260
  hypo
ctacaggtcacatttacggttacttatccta

SEQ ID NO: 17492 - DNA, 11 bp, Homo sapiens
  chr10:64997097-64997108
  hypo
aaacactcact

SEQ ID NO: 17493 - DNA, 31 bp, Homo sapiens
  chr10:64997149-64997180
  hypo
caaattaataccacatcgaagttttttgggc

SEQ ID NO: 17494 - DNA, 24 bp, Homo sapiens
  chr10:65031223-65031247
  hypo
caccatgcccggatgtaaatagtc

SEQ ID NO: 17495 - DNA, 30 bp, Homo sapiens
  chr10:65313563-65313593
  hypo
taaaacttagattggccgggggcggtggct

SEQ ID NO: 17496 - DNA, 23 bp, Homo sapiens
  chr10:65313892-65313915
  hypo
aactttcacgttatctttaagtc

SEQ ID NO: 17497 - DNA, 31 bp, Homo sapiens
  chr10:69853921-69853952
  hypo
tgaaaccaatcctgcccgccttctgtctcat

SEQ ID NO: 17498 - DNA, 34 bp, Homo sapiens
  chr10:70232451-70232485
  hypo
cctgggtagagcgagactccgtctccaaaaaaaa

SEQ ID NO: 17499 - DNA, 9 bp, Homo sapiens
  chr10:70483310-70483319
  hypo
ttaaaagta

SEQ ID NO: 17500 - DNA, 23 bp, Homo sapiens
  chr10:70586517-70586540
  hypo
tgagactccgcctcaaaaaaaaa

SEQ ID NO: 17501 - DNA, 31 bp, Homo sapiens
  chr10:70987006-70987037
  hypo
tttggacatcatgaggcggttccgggctgag

SEQ ID NO: 17502 - DNA, 160 bp, Homo sapiens
  chr10:71007177-71007337
  hypo
aggctgactgcattgccgtccagcatgtctgtaccatcgtctccttccgctcggccaatctctgtgcagcagctctggcggccatcctgacacgcctccgggagaacaagaaggtggaacggctccggaccacagtgggcatggacggcaccctctacaa

SEQ ID NO: 17503 - DNA, 31 bp, Homo sapiens
  chr10:71008307-71008338
  hypo
cccagcggaagcagatcgacagggtgctggc

SEQ ID NO: 17504 - DNA, 31 bp, Homo sapiens
  chr10:71014928-71014959
  hypo
agaaggaggggagacccgtgggcagctaaaa

SEQ ID NO: 17505 - DNA, 17 bp, Homo sapiens
  chr10:71108277-71108294
  hypo
tcattgaggctgggcac

SEQ ID NO: 17506 - DNA, 49 bp, Homo sapiens
  chr10:71154728-71154777
  hypo
tgtacctgggtgaaatcgtccgcaacatcttaatcgacttcaccaagaa

SEQ ID NO: 17507 - DNA, 51 bp, Homo sapiens
  chr10:71174692-71174743
  hypo
ggccttacaggaggagcgtcttgcccccgctgtcttcgggccaggccacca

SEQ ID NO: 17508 - DNA, 31 bp, Homo sapiens
  chr10:71245587-71245618
  hypo
gcctgggccaaaaaggcgatttgatgtatat

SEQ ID NO: 17509 - DNA, 31 bp, Homo sapiens
  chr10:71245634-71245665
  hypo
tcagaggctgttatgccggctagaggagtga

SEQ ID NO: 17510 - DNA, 67 bp, Homo sapiens
  chr10:71245711-71245778
  hypo
cagggtttgcagaatccgggccccttagagccagaaaggttctcgtggctcccggctccagctcctt

SEQ ID NO: 17511 - DNA, 31 bp, Homo sapiens
  chr10:71566070-71566101
  hypo
gagggggcagagactgcgtgtatgaggcaga

SEQ ID NO: 17512 - DNA, 31 bp, Homo sapiens
  chr10:71566110-71566141
  hypo
gagctgcagggagggccggccaaggggaccc

SEQ ID NO: 17513 - DNA, 31 bp, Homo sapiens
  chr10:71568580-71568611
  hypo
ctcctcgcagcgtccccggccctggacccag

SEQ ID NO: 17514 - DNA, 31 bp, Homo sapiens
  chr10:71581897-71581928
  hypo
ctccaaagacatcagacgctgtgattaccgg

SEQ ID NO: 17515 - DNA, 31 bp, Homo sapiens
  chr10:71639772-71639803
  hypo
gccagatgggtatttgcggagggggagctgg

SEQ ID NO: 17516 - DNA, 31 bp, Homo sapiens
  chr10:71639806-71639837
  hypo
gcatcctgggctgggccggggagagactcag

SEQ ID NO: 17517 - DNA, 66 bp, Homo sapiens
  chr10:71639873-71639939
  hypo
gtgtctccctgtttcccgccactccaatggatcctgttcttctcgcttccccggcctggggtccca

SEQ ID NO: 17518 - DNA, 31 bp, Homo sapiens
  chr10:71848017-71848048
  hypo
acacacagtacattcacgcacacgcacacat

SEQ ID NO: 17519 - DNA, 73 bp, Homo sapiens
  chr10:72491961-72492034
  hypo
cacctgccctccacctcgctctccaccttttctttctctcttcggcagggtatgcacccgtcactggcatgtg

SEQ ID NO: 17520 - DNA, 55 bp, Homo sapiens
  chr10:72492072-72492127
  hypo
gcttctcctcagccttcgtgatagctcatgagaccggccacgtgtaagtggcagc

SEQ ID NO: 17521 - DNA, 31 bp, Homo sapiens
  chr10:72503154-72503185
  hypo
agggattttcagcccccgtgccacacccagt

SEQ ID NO: 17522 - DNA, 38 bp, Homo sapiens
  chr10:72503443-72503481
  hypo
gcacccccagccaccccgactaccggcacagggagact

SEQ ID NO: 17523 - DNA, 57 bp, Homo sapiens
  chr10:72509554-72509611
  hypo
gaccctctccccccaccggtcagtggtgaagaaccaggtcaccggcagcttcatcct

SEQ ID NO: 17524 - DNA, 31 bp, Homo sapiens
  chr10:72537207-72537238
  hypo
aatcccagcatcacagcgttgccagggtccc

SEQ ID NO: 17525 - DNA, 31 bp, Homo sapiens
  chr10:72838754-72838785
  hypo
tcccctgttagatgtccgtcctcatcttgtc

SEQ ID NO: 17526 - DNA, 31 bp, Homo sapiens
  chr10:72838793-72838824
  hypo
gaccacacccctagcgcgcgtcctcatcacc

SEQ ID NO: 17527 - DNA, 31 bp, Homo sapiens
  chr10:72838936-72838967
  hypo
tcttttgaaaacccttcgataatagactctt

SEQ ID NO: 17528 - DNA, 79 bp, Homo sapiens
  chr10:72887225-72887304
  hypo
cccctcattctgtttccgtgtgcgcacgtgtgtgcttacgtgcacacatgtgtatacacacatacgagtctcccaagct

SEQ ID NO: 17529 - DNA, 31 bp, Homo sapiens
  chr10:72887397-72887428
  hypo
accagaaatggaacaccgttttctttcaaat

SEQ ID NO: 17530 - DNA, 19 bp, Homo sapiens
  chr10:73002694-73002713
  hypo
caagagtctggggagccgg

SEQ ID NO: 17531 - DNA, 35 bp, Homo sapiens
  chr10:73326699-73326734
  hypo
ctccatgctggggccccggccgtcccagctgcctc

SEQ ID NO: 17532 - DNA, 31 bp, Homo sapiens
  chr10:73822605-73822636
  hypo
tcctcatcctcccagccgacaccgcttccaa

SEQ ID NO: 17533 - DNA, 31 bp, Homo sapiens; identical to SEQ ID NO: 3970
  chr10:74032649-74032680
  hypo

SEQ ID NO: 17534 - DNA, 76 bp, Homo sapiens; identical to SEQ ID NO: 3971
  chr10:74032778-74032854
  hypo

SEQ ID NO: 17535 - DNA, 31 bp, Homo sapiens
  chr10:74100514-74100545
  hypo
cccgcgctgtccctggcgccctcctcactca

SEQ ID NO: 17536 - DNA, 68 bp, Homo sapiens
  chr10:74100549-74100617
  hypo
accctggttgtccctgcggtcctgcctttgctggtaggtatagcgcatgcggccgttgctgtagacgt

SEQ ID NO: 17537 - DNA, 26 bp, Homo sapiens
  chr10:74153530-74153556
  hypo
tttgtttgttttgagacggagtcttg

SEQ ID NO: 17538 - DNA, 19 bp, Homo sapiens
  chr10:75344163-75344182
  hypo
ttgacgtagtttgtgatcc

SEQ ID NO: 17539 - DNA, 33 bp, Homo sapiens
  chr10:75384237-75384270
  hypo
ttacaggcgtgagtcaccgcgcccagccaaaaa

SEQ ID NO: 17540 - DNA, 36 bp, Homo sapiens; identical to SEQ ID NO: 3975
  chr10:75408168-75408204
  hypo

SEQ ID NO: 17541 - DNA, 93 bp, Homo sapiens
  chr10:75491398-75491491
  hypo
ccatggtcggcgcagccgagctggcgagggcagcgcgggtcccccggaacgccccccgaggcgagcgctaacgaggtccggcaccatgtgcta

SEQ ID NO: 17542 - DNA, 27 bp, Homo sapiens
  chr10:75749181-75749208
  hypo
acagattacaggcgtgagctactgctc

SEQ ID NO: 17543 - DNA, 31 bp, Homo sapiens
  chr10:75832422-75832453
  hypo
ctgagaaagccagacccgggattgtttcact

SEQ ID NO: 17544 - DNA, 31 bp, Homo sapiens
  chr10:75832499-75832530
  hypo
tggccaagatgattgacgagagacagcagga

SEQ ID NO: 17545 - DNA, 60 bp, Homo sapiens
  chr10:75832533-75832593
  hypo
cactcaccaggagcaccgagtgatgttggtgaactcgatgaacaccgtgaaagagttgct

SEQ ID NO: 17546 - DNA, 31 bp, Homo sapiens
  chr10:75893786-75893817
  hypo
gatttatctataattgcgtctatttcttcaa

SEQ ID NO: 17547 - DNA, 31 bp, Homo sapiens
  chr10:75966599-75966630
  hypo
aggatccttagggtgtcgcttttccagccag

SEQ ID NO: 17548 - DNA, 27 bp, Homo sapiens
  chr10:75966745-75966772
  hypo
acctgccaagggcgagccaggtgcaga

SEQ ID NO: 17549 - DNA, 62 bp, Homo sapiens
  chr10:76585430-76585492
  hypo
aggttagccggggacccgggtggccggaggcagcggcgagcggtgcacgtgcttgcagacac

SEQ ID NO: 17550 - DNA, 31 bp, Homo sapiens
  chr10:76655265-76655296
  hypo
catagtttcaccaaaacgctcttcttcttaa

SEQ ID NO: 17551 - DNA, 37 bp, Homo sapiens
  chr10:76784729-76784766
  hypo
aaagaagaaaaggggtcgtaaacgcaggaggatcaac

SEQ ID NO: 17552 - DNA, 36 bp, Homo sapiens
  chr10:76845052-76845088
  hypo
acagtcctggatccatcgacccgccatcctcccaaa

SEQ ID NO: 17553 - DNA, 31 bp, Homo sapiens
  chr10:76857398-76857429
  hypo
ctcatgcccccattcccgtgtgaacctcaca

SEQ ID NO: 17554 - DNA, 26 bp, Homo sapiens
  chr10:76898723-76898749
  hypo
ttttttttttttgagacggagtttcg

SEQ ID NO: 17555 - DNA, 31 bp, Homo sapiens
  chr10:76997775-76997806
  hypo
gaatccattttaacaacgctgactaggcatt

SEQ ID NO: 17556 - DNA, 98 bp, Homo sapiens; identical to SEQ ID NO: 3978
  chr10:77160052-77160150
  hypo

SEQ ID NO: 17557 - DNA, 52 bp, Homo sapiens
  chr10:77242294-77242346
  hypo
aagttctgtgaaggtacgcccaggtctgttactgtgcgcgtatttcctggct

SEQ ID NO: 17558 - DNA, 53 bp, Homo sapiens
  chr10:77242420-77242473
  hypo
tcaactatgtccctatcgtaggagtttactggttctggcgaaatcagcccact

SEQ ID NO: 17559 - DNA, 20 bp, Homo sapiens
  chr10:77635472-77635492
  hypo
agccacggtgcccagccagc

SEQ ID NO: 17560 - DNA, 31 bp, Homo sapiens
  chr10:77663258-77663289
  hypo
accacattactgcctgcgttttagggctaaa

SEQ ID NO: 17561 - DNA, 31 bp, Homo sapiens
  chr10:77838045-77838076
  hypo
catgagccacggctcccggccaatattaact

SEQ ID NO: 17562 - DNA, 45 bp, Homo sapiens
  chr10:79540285-79540330
  hypo
tgtcctggatggagcccgagacaccctgtgcgatcttcaccttat

SEQ ID NO: 17563 - DNA, 23 bp, Homo sapiens
  chr10:79547018-79547041
  hypo
accgcgcccggccagactttgct

SEQ ID NO: 17564 - DNA, 31 bp, Homo sapiens
  chr10:79565637-79565668
  hypo
tgctgggcagggccatcgagaccctgctgcc

SEQ ID NO: 17565 - DNA, 31 bp, Homo sapiens
  chr10:79581128-79581159
  hypo
agagtggcttctgactcggagctagtctcca

SEQ ID NO: 17566 - DNA, 31 bp, Homo sapiens
  chr10:79581167-79581198
  hypo
tggaacttaatggagtcgctccttctgggag

SEQ ID NO: 17567 - DNA, 31 bp, Homo sapiens
  chr10:79581204-79581235
  hypo
ggggtgtcagaggccccgccctcttggaggg

SEQ ID NO: 17568 - DNA, 32 bp, Homo sapiens
  chr10:79670434-79670466
  hypo
cttaagaaatgtaggccgggcgtcgtggttca

SEQ ID NO: 17569 - DNA, 46 bp, Homo sapiens; identical to SEQ ID NO: 3991
  chr10:79686267-79686313
  hypo

SEQ ID NO: 17570 - DNA, 42 bp, Homo sapiens; identical to SEQ ID NO: 3992
  chr10:79686574-79686616
  hypo

SEQ ID NO: 17571 - DNA, 63 bp, Homo sapiens; identical to SEQ ID NO: 3993
  chr10:79686617-79686680
  hypo

SEQ ID NO: 17572 - DNA, 86 bp, Homo sapiens; identical to SEQ ID NO: 3994
  chr10:79686714-79686800
  hypo

SEQ ID NO: 17573 - DNA, 89 bp, Homo sapiens; identical to SEQ ID NO: 3995
  chr10:79686955-79687044
  hypo

SEQ ID NO: 17574 - DNA, 43 bp, Homo sapiens
  chr10:79713477-79713520
  hypo
agacttcaaggtaaagcgtattacccttcgtcacttgcaactt

SEQ ID NO: 17575 - DNA, 31 bp, Homo sapiens
  chr10:79739250-79739281
  hypo
tggggagagttcccctcgtgctccctctccc

SEQ ID NO: 17576 - DNA, 31 bp, Homo sapiens
  chr10:79788120-79788151
  hypo
ttgtcattgcacttgtcgtacccagtgttga

SEQ ID NO: 17577 - DNA, 31 bp, Homo sapiens
  chr10:79814428-79814459
  hypo
gacatgtggcagattgcggaggggctgtggc

SEQ ID NO: 17578 - DNA, 50 bp, Homo sapiens
  chr10:80540447-80540497
  hypo
tctgagcactccatcccggaagtgccagagtgctacgcagggttgggcca

SEQ ID NO: 17579 - DNA, 81 bp, Homo sapiens
  chr10:80540579-80540660
  hypo
cttgggcctgcactgccgcatggtgttggtgtcagccagcggcctgtgagagccctgccaggtcatcgggaggtgtgtgag

SEQ ID NO: 17580 - DNA, 31 bp, Homo sapiens
  chr10:80588138-80588169
  hypo
agcctcaagccagcagcggcccacactctgg

SEQ ID NO: 17581 - DNA, 31 bp, Homo sapiens
  chr10:80638009-80638040
  hypo
cgtgagccaccgcgcccggccagttcccagg

SEQ ID NO: 17582 - DNA, 31 bp, Homo sapiens
  chr10:80714408-80714439
  hypo
ctagtcaggggtctagcgaagaggggtctgg

SEQ ID NO: 17583 - DNA, 38 bp, Homo sapiens; identical to SEQ ID NO: 3996
  chr10:80733745-80733783
  hypo

SEQ ID NO: 17584 - DNA, 64 bp, Homo sapiens
  chr10:80739955-80740019
  hypo
gcaagagacaggagcacggtttatgcgtactgggacagtcagtgagattcggtgaaggacatga

SEQ ID NO: 17585 - DNA, 31 bp, Homo sapiens
  chr10:80763088-80763119
  hypo
cattccagtagtatctcgtgctgatgctggg

SEQ ID NO: 17586 - DNA, 31 bp, Homo sapiens
  chr10:80766187-80766218
  hypo
tttgttactccaggcacgtccctgacccctg

SEQ ID NO: 17587 - DNA, 40 bp, Homo sapiens
  chr10:80766239-80766279
  hypo
gagcagagcataaatccgctcagtgcgagcaagctctgct

SEQ ID NO: 17588 - DNA, 46 bp, Homo sapiens
  chr10:80766336-80766382
  hypo
agaggcccctgggggccgagtgggcctgttgcgcctccttggatac

SEQ ID NO: 17589 - DNA, 24 bp, Homo sapiens
  chr10:80769677-80769701
  hypo
ccctggttcaaaccaccgctctgg

SEQ ID NO: 17590 - DNA, 34 bp, Homo sapiens; identical to SEQ ID NO: 3997
  chr10:80827232-80827266
  hypo

SEQ ID NO: 17591 - DNA, 121 bp, Homo sapiens; identical to SEQ ID NO: 3998
  chr10:80828531-80828652
  hypo

SEQ ID NO: 17592 - DNA, 39 bp, Homo sapiens
  chr10:80870192-80870231
  hypo
agacttgatgtccatccgtcccaccgaagaagagttcaa

SEQ ID NO: 17593 - DNA, 31 bp, Homo sapiens
  chr10:80882132-80882163
  hypo
cccatttaccttccagcgctgcccctgtcta

SEQ ID NO: 17594 - DNA, 31 bp, Homo sapiens
  chr10:80882864-80882895
  hypo
tggcctgggctgcaaccgcaggcaaaggctg

SEQ ID NO: 17595 - DNA, 25 bp, Homo sapiens
  chr10:80900499-80900524
  hypo
cacaccaggccaggcccgcattaag

SEQ ID NO: 17596 - DNA, 54 bp, Homo sapiens
  chr10:80921745-80921799
  hypo
gcctcatggtcagtgccgggcctctactgtgggtagacccgctgacctcccact

SEQ ID NO: 17597 - DNA, 45 bp, Homo sapiens
  chr10:80921823-80921868
  hypo
agtgaggtggaggggccgcaagctgctgaccggcgtgtggaacac

SEQ ID NO: 17598 - DNA, 56 bp, Homo sapiens
  chr10:80921886-80921942
  hypo
tgaggtaggtgtgccacggggctggcgggaggtggctgggtcggacgcaggtgagt

SEQ ID NO: 17599 - DNA, 73 bp, Homo sapiens
  chr10:80921955-80922028
  hypo
ggtgctagccctagcacgctggacctttgactcgggcctcagccctgaggggcaggagcgggcacaagccacc

SEQ ID NO: 17600 - DNA, 31 bp, Homo sapiens
  chr10:80927517-80927548
  hypo
gcgcatacaccctagacggagctaggagggt

SEQ ID NO: 17601 - DNA, 31 bp, Homo sapiens
  chr10:80928562-80928593
  hypo
gacccccacaggtgtccgtccaccctggctg

SEQ ID NO: 17602 - DNA, 31 bp, Homo sapiens
  chr10:80930707-80930738
  hypo
catctcaggacaggtccgaggggctgcctgc

SEQ ID NO: 17603 - DNA, 31 bp, Homo sapiens
  chr10:80930749-80930780
  hypo
ggtcccttcttggacccgcactgtcagccta

SEQ ID NO: 17604 - DNA, 31 bp, Homo sapiens
  chr10:80930974-80931005
  hypo
tgtcctgatgagatctcgtttgaggcagctg

SEQ ID NO: 17605 - DNA, 47 bp, Homo sapiens
  chr10:80931026-80931073
  hypo
aggaattcttcactgccgggccttcactccaccggggatgaggccag

SEQ ID NO: 17606 - DNA, 45 bp, Homo sapiens
  chr10:80931088-80931133
  hypo
gactggcctgggctgtcgctcagaggatgccgggggccagagctt

SEQ ID NO: 17607 - DNA, 31 bp, Homo sapiens
  chr10:80953591-80953622
  hypo
gcagggagcagccccacgttggggacaaggg

SEQ ID NO: 17608 - DNA, 60 bp, Homo sapiens
  chr10:80956203-80956263
  hypo
accagttgaggcagagcgggtagataggggacctgaaagcaccttcggcccttaatattc

SEQ ID NO: 17609 - DNA, 18 bp, Homo sapiens
  chr10:80958772-80958790
  hypo
gagcgagactcagtctca

SEQ ID NO: 17610 - DNA, 37 bp, Homo sapiens
  chr10:80961550-80961587
  hypo
ctgaccacctacctatcgaggccgttattggcatgct

SEQ ID NO: 17611 - DNA, 31 bp, Homo sapiens
  chr10:80969928-80969959
  hypo
tgggaaccttgtgtgacgtgtgtccagccag

SEQ ID NO: 17612 - DNA, 31 bp, Homo sapiens
  chr10:80969970-80970001
  hypo
ctccagcacattgccccgagcctgaccctgt

SEQ ID NO: 17613 - DNA, 31 bp, Homo sapiens
  chr10:80970033-80970064
  hypo
agagagtggccctcaccggcctggatggacc

SEQ ID NO: 17614 - DNA, 48 bp, Homo sapiens
  chr10:80970065-80970113
  hypo
ggaactggctctgcctcggtcctcttgtccatgcgttcattcatgaac

SEQ ID NO: 17615 - DNA, 34 bp, Homo sapiens
  chr10:80971585-80971619
  hypo
ccgtgggcttagggaacggcggaagacagaggag

SEQ ID NO: 17616 - DNA, 31 bp, Homo sapiens
  chr10:80971632-80971663
  hypo
aggtccaggagggaaccgggtttcacatcag

SEQ ID NO: 17617 - DNA, 31 bp, Homo sapiens
  chr10:80971677-80971708
  hypo
atctccccaatgaggacgccctgcagcttca

SEQ ID NO: 17618 - DNA, 38 bp, Homo sapiens
  chr10:80971719-80971757
  hypo
agtcagaaagacttttcgggtcccgccccctgccagta

SEQ ID NO: 17619 - DNA, 31 bp, Homo sapiens
  chr10:80974592-80974623
  hypo
ctgttcatgaggaaggcgggtgtgagggagc

SEQ ID NO: 17620 - DNA, 31 bp, Homo sapiens
  chr10:80974662-80974693
  hypo
cagagtgaagccagagcggcaacagcttgca

SEQ ID NO: 17621 - DNA, 81 bp, Homo sapiens
  chr10:80974701-80974782
  hypo
caagggtcccctggagcgccccgtcccacactgccccccaggggaccgatggccctcccagtctgccgcctctcaccctgc

SEQ ID NO: 17622 - DNA, 44 bp, Homo sapiens
  chr10:80974888-80974932
  hypo
cagaccccaggctgagcgtgggagtcctgcggtttctagctgag

SEQ ID NO: 17623 - DNA, 74 bp, Homo sapiens
  chr10:80974943-80975017
  hypo
tgcagggtgcttggcacggagcagcattacaatgcctgccccatcccggaagccttagtcgattaagcagctct

SEQ ID NO: 17624 - DNA, 31 bp, Homo sapiens
  chr10:80975040-80975071
  hypo
gcttgttctaaatcaccgctttttttttttt

SEQ ID NO: 17625 - DNA, 31 bp, Homo sapiens
  chr10:80975873-80975904
  hypo
cattggctctgggctccgtgactcacctgcc

SEQ ID NO: 17626 - DNA, 31 bp, Homo sapiens
  chr10:80975918-80975949
  hypo
ctttcaggtggtcagtcgggtggcagcccag

SEQ ID NO: 17627 - DNA, 31 bp, Homo sapiens
  chr10:80976754-80976785
  hypo
cctgctagctttaagccggacagacctgtca

SEQ ID NO: 17628 - DNA, 29 bp, Homo sapiens
  chr10:80991615-80991644
  hypo
tgagccaccgtgcccggtcatgcctggtg

SEQ ID NO: 17629 - DNA, 33 bp, Homo sapiens
  chr10:81017843-81017876
  hypo
atgaagttaaatgggccgggcacggtggctcat

SEQ ID NO: 17630 - DNA, 31 bp, Homo sapiens
  chr10:81032442-81032473
  hypo
gtaggttagaatggatcgaggtgagggagtc

SEQ ID NO: 17631 - DNA, 31 bp, Homo sapiens
  chr10:81032681-81032712
  hypo
aaggccccaaggtcctcggcaccagcccctg

SEQ ID NO: 17632 - DNA, 31 bp, Homo sapiens
  chr10:81035987-81036018
  hypo
caagatggtgactgagcgcagccagttcccc

SEQ ID NO: 17633 - DNA, 91 bp, Homo sapiens
  chr10:81036050-81036141
  hypo
caggccagctgagacacgatggacagcccaggctgagacacgctggcctgggaggcgcttttggctcctgtggccacgtggggacagtgaa

SEQ ID NO: 17634 - DNA, 31 bp, Homo sapiens
  chr10:81036183-81036214
  hypo
tggggctctcttatcccggatgtggatggct

SEQ ID NO: 17635 - DNA, 51 bp, Homo sapiens
  chr10:81036656-81036707
  hypo
cccctctttgcctccacggaccactacttcctgcacgcgggccattctgac

SEQ ID NO: 17636 - DNA, 38 bp, Homo sapiens
  chr10:81036796-81036834
  hypo
tgagtaagtcttctggcgtcacacgaatctgggagcaa

SEQ ID NO: 17637 - DNA, 54 bp, Homo sapiens
  chr10:81036968-81037022
  hypo
ccgcctgctgctgctccgacatcagaagagccgccagagcgatccccctgggaa

SEQ ID NO: 17638 - DNA, 31 bp, Homo sapiens
  chr10:81037059-81037090
  hypo
atgaaacccactctgtcgcacaggtaagtgg

SEQ ID NO: 17639 - DNA, 48 bp, Homo sapiens
  chr10:81050746-81050794
  hypo
accccatgaatccaggcggcaaccccatggcgtcgggcatgaccacca

SEQ ID NO: 17640 - DNA, 31 bp, Homo sapiens
  chr10:81050808-81050839
  hypo
aactccccacagtttgcggggcagcagcagc

SEQ ID NO: 17641 - DNA, 31 bp, Homo sapiens
  chr10:81050845-81050876
  hypo
cagccaaggctggccccgctcagccctacat

SEQ ID NO: 17642 - DNA, 51 bp, Homo sapiens
  chr10:81050879-81050930
  hypo
gcagagcatgtatggccggcccaactaccccggcagcgggggctttggggc

SEQ ID NO: 17643 - DNA, 31 bp, Homo sapiens
  chr10:81050951-81050982
  hypo
tggcagaagccatggacgccacccctcttcc

SEQ ID NO: 17644 - DNA, 31 bp, Homo sapiens
  chr10:81051006-81051037
  hypo
ttaaatcccagctccacgctttctgccctga

SEQ ID NO: 17645 - DNA, 31 bp, Homo sapiens
  chr10:81057999-81058030
  hypo
gcaggacagagatctgcgagagagaagagtt

SEQ ID NO: 17646 - DNA, 31 bp, Homo sapiens
  chr10:81058036-81058067
  hypo
gaggaggctctcctcccgaggggcatggctc

SEQ ID NO: 17647 - DNA, 31 bp, Homo sapiens
  chr10:81058070-81058101
  hypo
gcccctgggatgagtgcggtgtatgtccata

SEQ ID NO: 17648 - DNA, 50 bp, Homo sapiens
  chr10:81058105-81058155
  hypo
tggccccttctgtctccgtaatcccataactcgtgcgtgtcttttctttc

SEQ ID NO: 17649 - DNA, 31 bp, Homo sapiens
  chr10:81058156-81058187
  hypo
ctccagcctcccaggccggttcctgtggcaa

SEQ ID NO: 17650 - DNA, 31 bp, Homo sapiens
  chr10:81059002-81059033
  hypo
atggcttccttgggcccgagtggggccctgg

SEQ ID NO: 17651 - DNA, 31 bp, Homo sapiens
  chr10:81059049-81059080
  hypo
tcttctgacaccttcacgtgttcagcatcat

SEQ ID NO: 17652 - DNA, 112 bp, Homo sapiens
  chr10:81060508-81060620
  hypo
tcaagtgctaccaccacgaggaccggcagatgaacaccaactggcccgcctcggtgcaggtcagcgtgaacgccacgcccctcaccattgagcgcggcgacaacaagacctc

SEQ ID NO: 17653 - DNA, 31 bp, Homo sapiens
  chr10:81063476-81063507
  hypo
gacatgccccttcctcgcgaaggcagggcct

SEQ ID NO: 17654 - DNA, 111 bp, Homo sapiens
  chr10:81063750-81063861
  hypo
tctgtgcctcctgccccgcagtcaagcggaatttcagcagcgtggctgcctcctcgggcaacacgaccctcaacggggaggatggggtggagcagacggccatcaaggtgt

SEQ ID NO: 17655 - DNA, 84 bp, Homo sapiens
  chr10:81063868-81063952
  hypo
gtgccccatcacattccggcgcatccagctgcctgctcgaggacacgattgcaagcatgtgcaggtgagcggccccagaaagca

SEQ ID NO: 17656 - DNA, 31 bp, Homo sapiens
  chr10:81065767-81065798
  hypo
tcacctgggtgtctgtcggagctggaggtgc

SEQ ID NO: 17657 - DNA, 31 bp, Homo sapiens
  chr10:81065806-81065837
  hypo
ccaaagccaggcaccccggagcctcagctct

SEQ ID NO: 17658 - DNA, 134 bp, Homo sapiens
  chr10:81065843-81065977
  hypo
cttcctcccccagctccgagtttgaagaggtcaccatcgatcccacgtgcagctggcggccggtgcccatcaagtcggacttacacatcaaggacgaccctgatggcatcccctccaagcggttcaagaccatg

SEQ ID NO: 17659 - DNA, 97 bp, Homo sapiens
  chr10:81066002-81066099
  hypo
atgtcatggagatgatcgcagccctgggccccggcccgtccccctatcccctcccgcctcccccagggggcaccaactccaacgactacagcagcca

SEQ ID NO: 17660 - DNA, 31 bp, Homo sapiens
  chr10:81067466-81067497
  hypo
ctaactgaggctacgtcgtgccctgtcagtg

SEQ ID NO: 17661 - DNA, 31 bp, Homo sapiens
  chr10:81070816-81070847
  hypo
ggcagccgccacaggccgctcccagcagcca

SEQ ID NO: 17662 - DNA, 43 bp, Homo sapiens
  chr10:81072191-81072234
  hypo
gggggtgccccacactcggtgcagtggccggggtatgtgtggg

SEQ ID NO: 17663 - DNA, 31 bp, Homo sapiens
  chr10:81072581-81072612
  hypo
gcctgtgccctcagaccgccccgcaccagag

SEQ ID NO: 17664 - DNA, 35 bp, Homo sapiens
  chr10:81146093-81146128
  hypo
cagcccgtcactgcacgcgacggcagtagtagccc

SEQ ID NO: 17665 - DNA, 35 bp, Homo sapiens
  chr10:81966478-81966513
  hypo
gcacactgcgcgccatcgtgcgcttcaccattctt

SEQ ID NO: 17666 - DNA, 29 bp, Homo sapiens
  chr10:81966602-81966631
  hypo
ttttttttttctgagacggagtctcgatc

SEQ ID NO: 17667 - DNA, 30 bp, Homo sapiens
  chr10:82131762-82131792
  hypo
agagacagacattagccgggcgtggtggct

SEQ ID NO: 17668 - DNA, 53 bp, Homo sapiens; identical to SEQ ID NO: 4001
  chr10:82213690-82213743
  hypo

SEQ ID NO: 17669 - DNA, 31 bp, Homo sapiens
  chr10:82329515-82329546
  hypo
cctcccattgttagctcggcctatgtgcgga

SEQ ID NO: 17670 - DNA, 2 bp, Homo sapiens
  chr10:86016116-86016118
  hypo
gt

SEQ ID NO: 17671 - DNA, 31 bp, Homo sapiens
  chr10:86016119-86016150
  hypo
ttcttatccctgtgtcgcggactaaaaaatt

SEQ ID NO: 17672 - DNA, 43 bp, Homo sapiens; identical to SEQ ID NO: 4002
  chr10:86088146-86088189
  hypo

SEQ ID NO: 17673 - DNA, 31 bp, Homo sapiens
  chr10:87965963-87965994
  hypo
cctgactcatgaagctcgaggtttgacccta

SEQ ID NO: 17674 - DNA, 31 bp, Homo sapiens
  chr10:87966015-87966046
  hypo
acagaccacccctgaccggtccagggcccca

SEQ ID NO: 17675 - DNA, 56 bp, Homo sapiens
  chr10:87966085-87966141
  hypo
ccaagcagccccagctcgcctgccggacaactcaccatactcgctgtcgtagaaca

SEQ ID NO: 17676 - DNA, 31 bp, Homo sapiens
  chr10:88098234-88098265
  hypo
ctttgtcctgtacaaccgaagaaaccacagc

SEQ ID NO: 17677 - DNA, 31 bp, Homo sapiens
  chr10:88108300-88108331
  hypo
cacaggggcctggtgtcgggaagatgccctg

SEQ ID NO: 17678 - DNA, 24 bp, Homo sapiens
  chr10:88237802-88237826
  hypo
actctgtctcggaaaaaaaaaaaa

SEQ ID NO: 17679 - DNA, 31 bp, Homo sapiens
  chr10:88282806-88282837
  hypo
ctccctccggtataatcggggaaactccaaa

SEQ ID NO: 17680 - DNA, 31 bp, Homo sapiens
  chr10:88422750-88422781
  hypo
aggcttctcagatcaacgctgtccaggtgtg

SEQ ID NO: 17681 - DNA, 31 bp, Homo sapiens
  chr10:88422790-88422821
  hypo
gggtgtcaaccttcctcggggccaggtgtgc

SEQ ID NO: 17682 - DNA, 41 bp, Homo sapiens
  chr10:88422874-88422915
  hypo
gtccccaggaaagctccgtgcgccaccggctcctgttccca

SEQ ID NO: 17683 - DNA, 31 bp, Homo sapiens
  chr10:88441322-88441353
  hypo
ccttctcctcactcgccgaggcctctgaccc

SEQ ID NO: 17684 - DNA, 31 bp, Homo sapiens
  chr10:88441552-88441583
  hypo
ccaggagggtaggtaacggacatacagctct

SEQ ID NO: 17685 - DNA, 66 bp, Homo sapiens
  chr10:88441596-88441662
  hypo
gggccacctgggtcctcggtgctcggcagagacctggtcaggtggtcagagcgaggcactggcccc

SEQ ID NO: 17686 - DNA, 31 bp, Homo sapiens
  chr10:89420153-89420184
  hypo
ttctgccaggtctggtcgctggggttttgtc

SEQ ID NO: 17687 - DNA, 31 bp, Homo sapiens
  chr10:89605950-89605981
  hypo
aaacgtcattatgtcacgcaagactagataa

SEQ ID NO: 17688 - DNA, 31 bp, Homo sapiens
  chr10:89762183-89762214
  hypo
catgagccaccatgcccggcccaaaatcctc

SEQ ID NO: 17689 - DNA, 56 bp, Homo sapiens; identical to SEQ ID NO: 4006
  chr10:90750729-90750785
  hypo

SEQ ID NO: 17690 - DNA, 31 bp, Homo sapiens; identical to SEQ ID NO: 4007
  chr10:91295738-91295769
  hypo

SEQ ID NO: 17691 - DNA, 196 bp, Homo sapiens; identical to SEQ ID NO: 4010
  chr10:94449965-94450161
  hypo

SEQ ID NO: 17692 - DNA, 104 bp, Homo sapiens; identical to SEQ ID NO: 4011
  chr10:94450388-94450492
  hypo

SEQ ID NO: 17693 - DNA, 28 bp, Homo sapiens
  chr10:94676999-94677027
  hypo
gtgtgggccactgcgcccaaatctaatt

SEQ ID NO: 17694 - DNA, 31 bp, Homo sapiens
  chr10:94819875-94819906
  hypo
attcggtccttgagaccggaaaggtgctcgt

SEQ ID NO: 17695 - DNA, 23 bp, Homo sapiens
  chr10:94939631-94939654
  hypo
caggtgcggtggctcacgcctgt

SEQ ID NO: 17696 - DNA, 31 bp, Homo sapiens
  chr10:94973477-94973508
  hypo
ctcgaactcctgacctcgtgatctgcccaaa

SEQ ID NO: 17697 - DNA, 31 bp, Homo sapiens
  chr10:94981204-94981235
  hypo
ggcaatgggattccatcgggtactcaggttg

SEQ ID NO: 17698 - DNA, 61 bp, Homo sapiens; identical to SEQ ID NO: 4020
  chr10:96122755-96122816
  hypo

SEQ ID NO: 17699 - DNA, 31 bp, Homo sapiens
  chr10:96154780-96154811
  hypo
gctctcagcaaagaggcgtcctagagagggt

SEQ ID NO: 17700 - DNA, 31 bp, Homo sapiens
  chr10:96154816-96154847
  hypo
ctctctgcaggcaggtcgttccaagaggata

SEQ ID NO: 17701 - DNA, 31 bp, Homo sapiens
  chr10:96154876-96154907
  hypo
cctgctcagctctggccgagctgggggcttt

SEQ ID NO: 17702 - DNA, 17 bp, Homo sapiens
  chr10:96154922-96154939
  hypo
tggagtctaactctgtc

SEQ ID NO: 17703 - DNA, 31 bp, Homo sapiens; identical to SEQ ID NO: 4022
  chr10:96162214-96162245
  hypo

SEQ ID NO: 17704 - DNA, 35 bp, Homo sapiens; identical to SEQ ID NO: 4023
  chr10:96162262-96162297
  hypo

SEQ ID NO: 17705 - DNA, 154 bp, Homo sapiens; identical to SEQ ID NO: 4024
  chr10:96162305-96162459
  hypo

SEQ ID NO: 17706 - DNA, 138 bp, Homo sapiens; identical to SEQ ID NO: 4025
  chr10:96162567-96162705
  hypo

SEQ ID NO: 17707 - DNA, 34 bp, Homo sapiens; identical to SEQ ID NO: 4026
  chr10:96162849-96162883
  hypo

SEQ ID NO: 17708 - DNA, 59 bp, Homo sapiens; identical to SEQ ID NO: 4027
  chr10:96162906-96162965
  hypo

SEQ ID NO: 17709 - DNA, 51 bp, Homo sapiens; identical to SEQ ID NO: 4028
  chr10:96162989-96163040
  hypo

SEQ ID NO: 17710 - DNA, 100 bp, Homo sapiens; identical to SEQ ID NO: 4029
  chr10:96163043-96163143
  hypo

SEQ ID NO: 17711 - DNA, 112 bp, Homo sapiens; identical to SEQ ID NO: 4030
  chr10:96163250-96163362
  hypo

SEQ ID NO: 17712 - DNA, 67 bp, Homo sapiens; identical to SEQ ID NO: 4031
  chr10:96163378-96163445
  hypo

SEQ ID NO: 17713 - DNA, 31 bp, Homo sapiens; identical to SEQ ID NO: 4032
  chr10:96163506-96163537
  hypo

SEQ ID NO: 17714 - DNA, 93 bp, Homo sapiens
  chr10:97096179-97096272
  hypo
gcattcacttggcctccgtagatggaccaggggcgagacgtgcagcccaccctgccaagtgagacgccaagtgcacacgcggcatgctgcagt

SEQ ID NO: 17715 - DNA, 59 bp, Homo sapiens; identical to SEQ ID NO: 4033
  chr10:97321333-97321392
  hypo

SEQ ID NO: 17716 - DNA, 223 bp, Homo sapiens
  chr10:98129780-98130003
  hypo
tcatcacactctgccccggccccagcgtctccgggacttaccccagagccacagaagcggccgagcctgggcgctgagctgtcgtagccgtcgtaggcttccatgtagtcgtagccgcagtcggcctcctcctcaacctcaaaggtccggaatgtcagctccacgccgtagccgtcctctgccacgatcacccagtcacagcgggcctcgctcgggtagttgt

SEQ ID NO: 17717 - DNA, 31 bp, Homo sapiens
  chr10:98292765-98292796
  hypo
tattgtgtgaaacaatcgcataagatttagc

SEQ ID NO: 17718 - DNA, 31 bp, Homo sapiens
  chr10:98403875-98403906
  hypo
cactgccccctgggggcgtttggaaaatcta

SEQ ID NO: 17719 - DNA, 7 bp, Homo sapiens
  chr10:98526398-98526405
  hypo
catctca

SEQ ID NO: 17720 - DNA, 31 bp, Homo sapiens
  chr10:98528155-98528186
  hypo
ggttcctaacagaccacggactgatacaggt

SEQ ID NO: 17721 - DNA, 31 bp, Homo sapiens
  chr10:98528195-98528226
  hypo
ctggtttaatgggtaccgggtttcagcttgg

SEQ ID NO: 17722 - DNA, 23 bp, Homo sapiens
  chr10:99042885-99042908
  hypo
cacccgcccggctgttactatgt

SEQ ID NO: 17723 - DNA, 38 bp, Homo sapiens
  chr10:99108578-99108616
  hypo
ttacaggcgtgagccaccgcgcccggccaacactatcc

SEQ ID NO: 17724 - DNA, 31 bp, Homo sapiens
  chr10:99233071-99233102
  hypo
tgtgagccactgcgcccggcctagaatttct

SEQ ID NO: 17725 - DNA, 31 bp, Homo sapiens
  chr10:99358762-99358793
  hypo
catgctgaggcaccttcgcttggcccagtgt

SEQ ID NO: 17726 - DNA, 108 bp, Homo sapiens
  chr10:99358854-99358962
  hypo
ccacagtggagatgaccgtcagcatggcccaggtcggggctgacgcggccatggtggtgaccccttgctactatcgtggccgcatgagcagtgcggccctcattcacc

SEQ ID NO: 17727 - DNA, 47 bp, Homo sapiens
  chr10:99359044-99359091
  hypo
tggtgcttcacatgaacggcagctataggaaacgggtggactgccac

SEQ ID NO: 17728 - DNA, 31 bp, Homo sapiens
  chr10:99375942-99375973
  hypo
attcatttgttcacctcgaatcaacaacagg

SEQ ID NO: 17729 - DNA, 97 bp, Homo sapiens; identical to SEQ ID NO: 4037
  chr10:99447291-99447388
  hypo

SEQ ID NO: 17730 - DNA, 22 bp, Homo sapiens
  chr10:99451149-99451171
  hypo
aatggtacaagctgggcgccgt

SEQ ID NO: 17731 - DNA, 31 bp, Homo sapiens
  chr10:99626198-99626229
  hypo
aagagacatagccatgcggggcctgaatctc

SEQ ID NO: 17732 - DNA, 87 bp, Homo sapiens
  chr10:99626303-99626390
  hypo
gtgtaagtgcagtgtgcgtaaatgtgtgagtctgcgtgtgttagcatgcctgtatgtgagcgcgtgtgtgagcgcatgtgtgtgcac

SEQ ID NO: 17733 - DNA, 31 bp, Homo sapiens
  chr10:99656697-99656728
  hypo
ccgggattgagctcctcgatgagggggtctc

SEQ ID NO: 17734 - DNA, 31 bp, Homo sapiens
  chr10:100078103-100078134
  hypo
ttgctatggcagctgtcggaaatggatccag

SEQ ID NO: 17735 - DNA, 31 bp, Homo sapiens
  chr10:101873876-101873907
  hypo
ctgtcctaagagactgcgtttactaggaaat

SEQ ID NO: 17736 - DNA, 43 bp, Homo sapiens; identical to SEQ ID NO: 4042
  chr10:102430816-102430859
  hypo

SEQ ID NO: 17737 - DNA, 31 bp, Homo sapiens; identical to SEQ ID NO: 4043
  chr10:102484026-102484057
  hypo

SEQ ID NO: 17738 - DNA, 27 bp, Homo sapiens
  chr10:102668241-102668268
  hypo
ttaaacaactcttggccgggtgcagca

SEQ ID NO: 17739 - DNA, 31 bp, Homo sapiens
  chr10:102762723-102762754
  hypo
gtgggcctgggtagaacgggagtcctcgctt

SEQ ID NO: 17740 - DNA, 70 bp, Homo sapiens
  chr10:102770158-102770228
  hypo
ctccccatccagaggtcgtggcagagggggtctggccttccgaggcttgtggtagcgcccattggtcatg

SEQ ID NO: 17741 - DNA, 31 bp, Homo sapiens
  chr10:102770232-102770263
  hypo
gggcaggggtaggcaccggggatggggagcg

SEQ ID NO: 17742 - DNA, 43 bp, Homo sapiens; identical to SEQ ID NO: 4045
  chr10:102802795-102802838
  hypo

SEQ ID NO: 17743 - DNA, 31 bp, Homo sapiens; identical to SEQ ID NO: 4046
  chr10:102802860-102802891
  hypo

SEQ ID NO: 17744 - DNA, 62 bp, Homo sapiens
  chr10:102872321-102872383
  hypo
gtgggcaggagggctgcggcagtgaggagagccttgatttggacaggcgtctcacattgagg

SEQ ID NO: 17745 - DNA, 58 bp, Homo sapiens; identical to SEQ ID NO: 4049
  chr10:102973586-102973644
  hypo

SEQ ID NO: 17746 - DNA, 31 bp, Homo sapiens
  chr10:103817632-103817663
  hypo
cttggactagccatagcgccagtgcctggga

SEQ ID NO: 17747 - DNA, 43 bp, Homo sapiens
  chr10:104198521-104198564
  hypo
cccaagacttctaggccgggcacagtggctcacgcctgtaatc

SEQ ID NO: 17748 - DNA, 35 bp, Homo sapiens
  chr10:104230569-104230604
  hypo
tatgatggcttcctgacgctcgtggacctgcacca

SEQ ID NO: 17749 - DNA, 41 bp, Homo sapiens
  chr10:104239033-104239074
  hypo
ggcaatgtggtttgtgcgaggctgtgcgagggacaggcttg

SEQ ID NO: 17750 - DNA, 55 bp, Homo sapiens
  chr10:104239088-104239143
  hypo
aggtgagttggttaagcgcactgcagtccgcggggcgctacgttgctttcacaca

SEQ ID NO: 17751 - DNA, 34 bp, Homo sapiens
  chr10:104239174-104239208
  hypo
gcctttggtcataggacggcgtgggggagaatac

SEQ ID NO: 17752 - DNA, 31 bp, Homo sapiens
  chr10:104239242-104239273
  hypo
tcacaggtgagggtgccggtgaagacaggct

SEQ ID NO: 17753 - DNA, 42 bp, Homo sapiens
  chr10:104793214-104793256
  hypo
gggattacaaataggcgtgagccaccacgcctggacaatcta

SEQ ID NO: 17754 - DNA, 24 bp, Homo sapiens
  chr10:105119650-105119674
  hypo
taaaattgaacacagccgggcgtg

SEQ ID NO: 17755 - DNA, 13 bp, Homo sapiens
  chr10:105127014-105127027
  hypo
tctcaaaagttaa

SEQ ID NO: 17756 - DNA, 31 bp, Homo sapiens
  chr10:105127045-105127076
  hypo
tgtaatgcatgcagctcgattaacttttaca

SEQ ID NO: 17757 - DNA, 31 bp, Homo sapiens
  chr10:105127130-105127161
  hypo
aaaactaccagtatctcggaagcctccctct

SEQ ID NO: 17758 - DNA, 31 bp, Homo sapiens
  chr10:105413584-105413615
  hypo
tcctccccacacagcccggagggcttgcctc

SEQ ID NO: 17759 - DNA, 47 bp, Homo sapiens
  chr10:105413626-105413673
  hypo
ttctcagggagttctccggctcaccagcttcccgaggccccaccctc

SEQ ID NO: 17760 - DNA, 31 bp, Homo sapiens
  chr10:105413679-105413710
  hypo
cctgctgcccagctcccgcttttcttctgct

SEQ ID NO: 17761 - DNA, 31 bp, Homo sapiens
  chr10:105413753-105413784
  hypo
cacgccctgtactcctcgctctgcctgtcta

SEQ ID NO: 17762 - DNA, 37 bp, Homo sapiens
  chr10:106199913-106199950
  hypo
ccctttaaacatttaccgtctacgcatgctaacgtct

SEQ ID NO: 17763 - DNA, 35 bp, Homo sapiens
  chr10:111674529-111674564
  hypo
ggtgaccaagggcgagactccgtctcaaaaaaaaa

SEQ ID NO: 17764 - DNA, 33 bp, Homo sapiens
  chr10:111696449-111696482
  hypo
ggcatgagccactgcgcccggccagcaagttgg

SEQ ID NO: 17765 - DNA, 145 bp, Homo sapiens; identical to SEQ ID NO: 4063
  chr10:111767171-111767316
  hypo

SEQ ID NO: 17766 - DNA, 40 bp, Homo sapiens; identical to SEQ ID NO: 4064
  chr10:111767322-111767362
  hypo

SEQ ID NO: 17767 - DNA, 31 bp, Homo sapiens; identical to SEQ ID NO: 4065
  chr10:111767389-111767420
  hypo

SEQ ID NO: 17768 - DNA, 31 bp, Homo sapiens
  chr10:111946089-111946120
  hypo
gaaactgctggctgggcgtggtggctcatgc

SEQ ID NO: 17769 - DNA, 31 bp, Homo sapiens
  chr10:112030558-112030589
  hypo
aggtgttggccggttgcggtggctcatgcct

SEQ ID NO: 17770 - DNA, 93 bp, Homo sapiens; identical to SEQ ID NO: 4066
  chr10:112431949-112432042
  hypo

SEQ ID NO: 17771 - DNA, 284 bp, Homo sapiens; identical to SEQ ID NO: 4067
  chr10:112432155-112432439
  hypo

SEQ ID NO: 17772 - DNA, 31 bp, Homo sapiens
  chr10:112459871-112459902
  hypo
ctgaaagtttggaaagcgaaactgtgggtaa

SEQ ID NO: 17773 - DNA, 42 bp, Homo sapiens
  chr10:112553604-112553646
  hypo
aaagaaattcaaagtacgatctcaactcgcatttttcaatgt

SEQ ID NO: 17774 - DNA, 61 bp, Homo sapiens
  chr10:112553705-112553766
  hypo
ggcttataagagagcccgggttgggaattactgcgtagcatggtgacgcttgctcaagagc

SEQ ID NO: 17775 - DNA, 47 bp, Homo sapiens
  chr10:114200390-114200437
  hypo
tggaagaggatctctccgggctgcactcatgtcgatcttcactgtgt

SEQ ID NO: 17776 - DNA, 31 bp, Homo sapiens
  chr10:114200459-114200490
  hypo
cagcaacaatagcacacgcacaaaatgtttg

SEQ ID NO: 17777 - DNA, 78 bp, Homo sapiens
  chr10:114200506-114200584
  hypo
agactctactgtgacacgtaaaacaacttgatcaaagagataacaacgtggccctgtggccaacgcaaacacagctat

SEQ ID NO: 17778 - DNA, 41 bp, Homo sapiens; identical to SEQ ID NO: 4069
  chr10:114571158-114571199
  hypo

SEQ ID NO: 17779 - DNA, 13 bp, Homo sapiens
  chr10:114571438-114571451
  hypo
tctcaaaaaaaaa

SEQ ID NO: 17780 - DNA, 31 bp, Homo sapiens
  chr10:114571506-114571537
  hypo
gctattggagaacactcgtaatgcctgttcc

SEQ ID NO: 17781 - DNA, 34 bp, Homo sapiens; identical to SEQ ID NO: 4072
  chr10:114709863-114709897
  hypo

SEQ ID NO: 17782 - DNA, 31 bp, Homo sapiens; identical to SEQ ID NO: 4073
  chr10:114710140-114710171
  hypo

SEQ ID NO: 17783 - DNA, 31 bp, Homo sapiens; identical to SEQ ID NO: 4075
  chr10:114710919-114710950
  hypo

SEQ ID NO: 17784 - DNA, 47 bp, Homo sapiens; identical to SEQ ID NO: 4076
  chr10:114711333-114711380
  hypo

SEQ ID NO: 17785 - DNA, 31 bp, Homo sapiens
  chr10:114817202-114817233
  hypo
tataggcgtgagtcaccgagcctggccccag

SEQ ID NO: 17786 - DNA, 31 bp, Homo sapiens
  chr10:114878743-114878774
  hypo
atcaggcgctgtcattcgttccttcctattt

SEQ ID NO: 17787 - DNA, 42 bp, Homo sapiens
  chr10:114913257-114913299
  hypo
cggtgaagcagcttgacgtataggggtcgaggtcgttaaatt

SEQ ID NO: 17788 - DNA, 22 bp, Homo sapiens
  chr10:114987697-114987719
  hypo
tgggcacagtggctcacgccta

SEQ ID NO: 17789 - DNA, 31 bp, Homo sapiens
  chr10:115201244-115201275
  hypo
cttgtcttccctggcacggcataatcaacct

SEQ ID NO: 17790 - DNA, 31 bp, Homo sapiens
  chr10:115201364-115201395
  hypo
ttaatgacagctggggcgcacacacatgcat

SEQ ID NO: 17791 - DNA, 50 bp, Homo sapiens
  chr10:115201399-115201449
  hypo
gtgcacacacatgtgcgcgtgcacacatacacacacgccactgctaatga

SEQ ID NO: 17792 - DNA, 31 bp, Homo sapiens
  chr10:115350627-115350658
  hypo
gaaagcctctttgtaccggaactgcaagtca

SEQ ID NO: 17793 - DNA, 80 bp, Homo sapiens; identical to SEQ ID NO: 4077
  chr10:115804799-115804879
  hypo

SEQ ID NO: 17794 - DNA, 31 bp, Homo sapiens; identical to SEQ ID NO: 4078
  chr10:115804906-115804937
  hypo

SEQ ID NO: 17795 - DNA, 27 bp, Homo sapiens
  chr10:116006272-116006299
  hypo
aaaaaaaaaaaacgagtatcatgggtt

SEQ ID NO: 17796 - DNA, 31 bp, Homo sapiens
  chr10:116011527-116011558
  hypo
caggagttggcatggtcgtgatctctgaatg

SEQ ID NO: 17797 - DNA, 22 bp, Homo sapiens
  chr10:116011848-116011870
  hypo
gccaccccgctggcctgttttt

SEQ ID NO: 17798 - DNA, 31 bp, Homo sapiens
  chr10:116028356-116028387
  hypo
ttcctcgtttgttaaacgtagaaatagaccc

SEQ ID NO: 17799 - DNA, 31 bp, Homo sapiens
  chr10:116028416-116028447
  hypo
tgcttcctggagtaagcggagggatttcttt

SEQ ID NO: 17800 - DNA, 3 bp, Homo sapiens
  chr10:116028459-116028462
  hypo
ttt

SEQ ID NO: 17801 - DNA, 31 bp, Homo sapiens
  chr10:116105879-116105910
  hypo
cccagggttgaaggagcgcaggcctggggat

SEQ ID NO: 17802 - DNA, 31 bp, Homo sapiens
  chr10:116123045-116123076
  hypo
cagaattcacgacacacgctctgaggcagcg

SEQ ID NO: 17803 - DNA, 31 bp, Homo sapiens
  chr10:116203665-116203696
  hypo
cccacacttcctttcccgtggaatactctgt

SEQ ID NO: 17804 - DNA, 31 bp, Homo sapiens
  chr10:116203738-116203769
  hypo
gcaggtggctggctctcgaatcagggaaggt

SEQ ID NO: 17805 - DNA, 63 bp, Homo sapiens
  chr10:116203789-116203852
  hypo
gagttgatgggagaatcgtagcgactggctaacagagatgacctttcccggctctctttctcc

SEQ ID NO: 17806 - DNA, 31 bp, Homo sapiens
  chr10:116228469-116228500
  hypo
gactctgacaaagttccggggagattctggt

SEQ ID NO: 17807 - DNA, 20 bp, Homo sapiens
  chr10:116495235-116495255
  hypo
tgttgttgttttgagacgga

SEQ ID NO: 17808 - DNA, 31 bp, Homo sapiens; identical to SEQ ID NO: 4080
  chr10:116527399-116527430
  hypo

SEQ ID NO: 17809 - DNA, 31 bp, Homo sapiens; identical to SEQ ID NO: 4081
  chr10:116527433-116527464
  hypo

SEQ ID NO: 17810 - DNA, 137 bp, Homo sapiens; identical to SEQ ID NO: 4082
  chr10:116527508-116527645
  hypo

SEQ ID NO: 17811 - DNA, 38 bp, Homo sapiens; identical to SEQ ID NO: 4083
  chr10:116527656-116527694
  hypo

SEQ ID NO: 17812 - DNA, 484 bp, Homo sapiens; identical to SEQ ID NO: 4084
  chr10:116527747-116528231
  hypo

SEQ ID NO: 17813 - DNA, 18 bp, Homo sapiens
  chr10:117472085-117472103
  hypo
gaaatttgtggctgggcg

SEQ ID NO: 17814 - DNA, 36 bp, Homo sapiens
  chr10:118740911-118740947
  hypo
catcagccccaccacacgcaccgcaagaactaagta

SEQ ID NO: 17815 - DNA, 31 bp, Homo sapiens
  chr10:118741274-118741305
  hypo
aaaccatgatctcagccgggtgcggtggctc

SEQ ID NO: 17816 - DNA, 34 bp, Homo sapiens
  chr10:118742172-118742206
  hypo
aagagattaatctggccgggcgcagtggctcacg

SEQ ID NO: 17817 - DNA, 158 bp, Homo sapiens; identical to SEQ ID NO: 4085
  chr10:118764376-118764534
  hypo

SEQ ID NO: 17818 - DNA, 118 bp, Homo sapiens; identical to SEQ ID NO: 4087
  chr10:118764979-118765097
  hypo

SEQ ID NO: 17819 - DNA, 31 bp, Homo sapiens
  chr10:119180986-119181017
  hypo
cttgggaggccttcccgcgtgtaatccccac

SEQ ID NO: 17820 - DNA, 49 bp, Homo sapiens; identical to SEQ ID NO: 4089
  chr10:119256305-119256354
  hypo

SEQ ID NO: 17821 - DNA, 30 bp, Homo sapiens
  chr10:119374700-119374730
  hypo
gagacggggtttcaccgtattagccaggat

SEQ ID NO: 17822 - DNA, 31 bp, Homo sapiens
  chr10:119374772-119374803
  hypo
tgtgctttgagacatgcgctctggagttaga

SEQ ID NO: 17823 - DNA, 56 bp, Homo sapiens
  chr10:119806964-119807020
  hypo
ccggccgcgcctctgccgctatcagtgtgtgtgaccttggccgagtcatttcacct

SEQ ID NO: 17824 - DNA, 31 bp, Homo sapiens
  chr10:119807025-119807056
  hypo
agcctcagtgttttcacgagtaaaaaagcca

SEQ ID NO: 17825 - DNA, 31 bp, Homo sapiens
  chr10:120518463-120518494
  hypo
tcaagaaagacataaccggccaggcagtgtc

SEQ ID NO: 17826 - DNA, 31 bp, Homo sapiens
  chr10:120526070-120526101
  hypo
agagagagagagagggcggggttgataatga

SEQ ID NO: 17827 - DNA, 35 bp, Homo sapiens
  chr10:120584842-120584877
  hypo
aaatgctgcgattacaggcccgaactcatgatctc

SEQ ID NO: 17828 - DNA, 31 bp, Homo sapiens
  chr10:120601820-120601851
  hypo
gcatagctgcagccaccgaaactgcagctgc

SEQ ID NO: 17829 - DNA, 53 bp, Homo sapiens
  chr10:120601876-120601929
  hypo
tcaggcaggagcccagcgcccccgggtgcagctgcagccgcccaaaccatggc

SEQ ID NO: 17830 - DNA, 31 bp, Homo sapiens
  chr10:120840485-120840516
  hypo
ggcctgtcctggatagcgttagggagacagt

SEQ ID NO: 17831 - DNA, 31 bp, Homo sapiens
  chr10:120840519-120840550
  hypo
caggctcttcaatcttcgagcgagaattagg

SEQ ID NO: 17832 - DNA, 31 bp, Homo sapiens
  chr10:120841509-120841540
  hypo
ttacacatttaatagacgagatatgtgaatt

SEQ ID NO: 17833 - DNA, 69 bp, Homo sapiens
  chr10:120926966-120927035
  hypo
aaagcaggggtttgtccgttgttcgctcttgtgcctggaaaacagcacctggtgcggggtaggcactca

SEQ ID NO: 17834 - DNA, 31 bp, Homo sapiens
  chr10:120927036-120927067
  hypo
ggatttactgaaacaacgagaaaatgtttcc

SEQ ID NO: 17835 - DNA, 46 bp, Homo sapiens
  chr10:120927072-120927118
  hypo
tgtcttgcccctaaaccgagttccttgagtgcggaaccagcatctt

SEQ ID NO: 17836 - DNA, 31 bp, Homo sapiens
  chr10:121088294-121088325
  hypo
gcagggcggtgcttcccggccctggctaaac

SEQ ID NO: 17837 - DNA, 31 bp, Homo sapiens
  chr10:121128015-121128046
  hypo
cccactgtgaagctaccgaaatgggaggcat

SEQ ID NO: 17838 - DNA, 31 bp, Homo sapiens
  chr10:121265439-121265470
  hypo
atgaaagtttaattagcgggatatcatatct

SEQ ID NO: 17839 - DNA, 99 bp, Homo sapiens
  chr10:121265472-121265571
  hypo
tttaagaacttggtttcgcttgtatatgaaaatcgctgaaagaaggtggaagcaccgccgtctctgaattgcggctctagaatgcgtcctctcttcaca

SEQ ID NO: 17840 - DNA, 31 bp, Homo sapiens
  chr10:121265789-121265820
  hypo
acagcagatgagcagacgaagcagctcaagt

SEQ ID NO: 17841 - DNA, 31 bp, Homo sapiens; identical to SEQ ID NO: 4093
  chr10:121301493-121301524
  hypo

SEQ ID NO: 17842 - DNA, 45 bp, Homo sapiens; identical to SEQ ID NO: 4094
  chr10:121301668-121301713
  hypo

SEQ ID NO: 17843 - DNA, 31 bp, Homo sapiens; identical to SEQ ID NO: 4095
  chr10:121301808-121301839
  hypo

SEQ ID NO: 17844 - DNA, 31 bp, Homo sapiens; identical to SEQ ID NO: 4096
  chr10:121301848-121301879
  hypo

SEQ ID NO: 17845 - DNA, 44 bp, Homo sapiens; identical to SEQ ID NO: 4097
  chr10:121356078-121356122
  hypo

SEQ ID NO: 17846 - DNA, 31 bp, Homo sapiens
  chr10:121429663-121429694
  hypo
agcccccagcctcccacggacctgaggtaag

SEQ ID NO: 17847 - DNA, 48 bp, Homo sapiens
  chr10:121429714-121429762
  hypo
ctgctggggagcaagccgctgtgcttcccaggccgggcccatcccctc

SEQ ID NO: 17848 - DNA, 31 bp, Homo sapiens
  chr10:121507663-121507694
  hypo
agccaggtgtgccagccgtggcagggcaggc

SEQ ID NO: 17849 - DNA, 31 bp, Homo sapiens
  chr10:121508292-121508323
  hypo
gctcacggactccacccggaacctgcagctc

SEQ ID NO: 17850 - DNA, 74 bp, Homo sapiens
  chr10:121550360-121550434
  hypo
cttctcttaacatagccgtattcacgctcccacgcccttccttacccttgtcagctgtgcggcacttctcctgc

SEQ ID NO: 17851 - DNA, 31 bp, Homo sapiens
  chr10:121550456-121550487
  hypo
aagtttaactaatctccggacccaaagtgta

SEQ ID NO: 17852 - DNA, 31 bp, Homo sapiens
  chr10:121550504-121550535
  hypo
cattagtgcatgtgagcgtaggaggagaggg

SEQ ID NO: 17853 - DNA, 11 bp, Homo sapiens
  chr10:121691374-121691385
  hypo
tttatggtatt

SEQ ID NO: 17854 - DNA, 31 bp, Homo sapiens
  chr10:123554225-123554256
  hypo
taagaccttaaacatacgaatggccccattt

SEQ ID NO: 17855 - DNA, 31 bp, Homo sapiens
  chr10:123706878-123706909
  hypo
cgtgagccactgtgcccggcctgcttcctat

SEQ ID NO: 17856 - DNA, 31 bp, Homo sapiens
  chr10:123757356-123757387
  hypo
cactctgatgcgatcccgatccaatgctctg

SEQ ID NO: 17857 - DNA, 31 bp, Homo sapiens
  chr10:123757451-123757482
  hypo
cccccaaaggcaggcacgaagaccaagactt

SEQ ID NO: 17858 - DNA, 31 bp, Homo sapiens
  chr10:123757495-123757526
  hypo
caagggagcagccagacgctgctcaaggaac

SEQ ID NO: 17859 - DNA, 26 bp, Homo sapiens
  chr10:123757527-123757553
  hypo
gacaaggaagactcctcggctgggca

SEQ ID NO: 17860 - DNA, 31 bp, Homo sapiens
  chr10:123842297-123842328
  hypo
ctgcccagcccaccaccgtcccaggagcgag

SEQ ID NO: 17861 - DNA, 31 bp, Homo sapiens
  chr10:123842505-123842536
  hypo
accaagagattgctgccgtccccagtgctgg

SEQ ID NO: 17862 - DNA, 31 bp, Homo sapiens
  chr10:123865057-123865088
  hypo
gctggtgttttggttccgtattcctgcttct

SEQ ID NO: 17863 - DNA, 31 bp, Homo sapiens
  chr10:123910180-123910211
  hypo
atggtacgagcatgtgcggctcaggacccca

SEQ ID NO: 17864 - DNA, 31 bp, Homo sapiens
  chr10:123910387-123910418
  hypo
ggttgattctatgccacggactattcggaag

SEQ ID NO: 17865 - DNA, 62 bp, Homo sapiens
  chr10:123952374-123952436
  hypo
gaggaagctgggttcccggggcagcacccggggcagcacccagggctcgccaggctgatctg

SEQ ID NO: 17866 - DNA, 77 bp, Homo sapiens
  chr10:123952474-123952551
  hypo
cttttgttttccacaccgataaacagatgcttcaggtacctcgatctgttgttgtgcaagtgcggatctttccttct

SEQ ID NO: 17867 - DNA, 31 bp, Homo sapiens
  chr10:123954597-123954628
  hypo
acccctgtcaaagctccgccagctccacccc

SEQ ID NO: 17868 - DNA, 31 bp, Homo sapiens
  chr10:123958278-123958309
  hypo
agctggtgcctttgtgcgcctagcctggggc

SEQ ID NO: 17869 - DNA, 31 bp, Homo sapiens
  chr10:123961235-123961266
  hypo
cagcccattatcctcccgggaagacaggggt

SEQ ID NO: 17870 - DNA, 43 bp, Homo sapiens
  chr10:123971194-123971237
  hypo
gccaagaagaagaagacgcccctaaagacgtaagttcaggggt

SEQ ID NO: 17871 - DNA, 40 bp, Homo sapiens
  chr10:123977731-123977771
  hypo
acacgtgtgagccaccgcgcctgaccgatttctaacagtt

SEQ ID NO: 17872 - DNA, 89 bp, Homo sapiens
  chr10:123988939-123989028
  hypo
ttgactatctggagcccgacttagcagaaaagaaccccccactattcgctcagaaactccaggtttgtagcccacgtgtgaccttttgg

SEQ ID NO: 17873 - DNA, 31 bp, Homo sapiens
  chr10:123989046-123989077
  hypo
gtagagaatgaacccccgaggcccaaatgaa

SEQ ID NO: 17874 - DNA, 31 bp, Homo sapiens
  chr10:123989088-123989119
  hypo
tttgatgaggaactgccgagaacgttcccag

SEQ ID NO: 17875 - DNA, 31 bp, Homo sapiens
  chr10:124001600-124001631
  hypo
tgggtttctggtagagcgtgaagcctttcag

SEQ ID NO: 17876 - DNA, 31 bp, Homo sapiens
  chr10:124050740-124050771
  hypo
cgggcctgggggaaatcggaagggcaattcc

SEQ ID NO: 17877 - DNA, 148 bp, Homo sapiens; identical to SEQ ID NO: 4109
  chr10:124134524-124134672
  hypo

SEQ ID NO: 17878 - DNA, 88 bp, Homo sapiens; identical to SEQ ID NO: 4110
  chr10:124134743-124134831
  hypo

SEQ ID NO: 17879 - DNA, 37 bp, Homo sapiens; identical to SEQ ID NO: 4111
  chr10:124134847-124134884
  hypo

SEQ ID NO: 17880 - DNA, 31 bp, Homo sapiens
  chr10:124311934-124311965
  hypo
agaaaaaaaaagcagccggactgggacctgt

SEQ ID NO: 17881 - DNA, 3 bp, Homo sapiens
  chr10:124738943-124738946
  hypo
ctc

SEQ ID NO: 17882 - DNA, 120 bp, Homo sapiens
  chr10:126198957-126199077
  hypo
acccagccggccctggcgtcccggcccccagcctccgcctccctcgccgacagcttcccggggctctgcctggaggcagcctcgctttatcccgcagaacctccacgctgttcctgcatg

SEQ ID NO: 17883 - DNA, 31 bp, Homo sapiens
  chr10:126199084-126199115
  hypo
ttcctccaagagaccacgttcctctggtcct

SEQ ID NO: 17884 - DNA, 31 bp, Homo sapiens
  chr10:126237288-126237319
  hypo
cgggcaggtggatcttcgagaatggagctcc

SEQ ID NO: 17885 - DNA, 35 bp, Homo sapiens
  chr10:126240417-126240452
  hypo
gacctcaccacggaggcgcacgcaggatgtccgca

SEQ ID NO: 17886 - DNA, 56 bp, Homo sapiens
  chr10:126265355-126265411
  hypo
tgcaaagccctgccctcgtgcacctgtccttccgtagcccacgatacctcatccag

SEQ ID NO: 17887 - DNA, 31 bp, Homo sapiens
  chr10:126276742-126276773
  hypo
gccacaggcacaacacgcgtccctcagcctt

SEQ ID NO: 17888 - DNA, 18 bp, Homo sapiens
  chr10:126287148-126287166
  hypo
gaggccagggccagcacg

SEQ ID NO: 17889 - DNA, 49 bp, Homo sapiens
  chr10:126287254-126287303
  hypo
cagttcctgccatccacgtgtccatctgtctacccgtacacctgttcat

SEQ ID NO: 17890 - DNA, 31 bp, Homo sapiens
  chr10:126287859-126287890
  hypo
cacccatccacccaggcgagcacctgccatg

SEQ ID NO: 17891 - DNA, 31 bp, Homo sapiens
  chr10:126290723-126290754
  hypo
acgtgagcccagatttcgattcttgtgcgag

SEQ ID NO: 17892 - DNA, 31 bp, Homo sapiens
  chr10:126305775-126305806
  hypo
gtccccctgcctgctccgcaaccccagggcc

SEQ ID NO: 17893 - DNA, 31 bp, Homo sapiens
  chr10:126306137-126306168
  hypo
cggttcctgcccctctcggggaggttggctg

SEQ ID NO: 17894 - DNA, 31 bp, Homo sapiens
  chr10:126309855-126309886
  hypo
caacaactgccctggccgcctccacatttgc

SEQ ID NO: 17895 - DNA, 46 bp, Homo sapiens
  chr10:126317367-126317413
  hypo
tgtccctcctcttgggcgggatcaagtcccacgtgctagtcacact

SEQ ID NO: 17896 - DNA, 31 bp, Homo sapiens
  chr10:126317482-126317513
  hypo
gttcatgggcttccctcgcctccctgaaggt

SEQ ID NO: 17897 - DNA, 53 bp, Homo sapiens
  chr10:126317532-126317585
  hypo
ctctgtgtcactggcacgagaatccccggctcaggccccgcttctagagaccc

SEQ ID NO: 17898 - DNA, 31 bp, Homo sapiens
  chr10:126323262-126323293
  hypo
tatggcaacgtgaggacgcactaatacaccc

SEQ ID NO: 17899 - DNA, 31 bp, Homo sapiens
  chr10:126325796-126325827
  hypo
tgggcctcacagggtccgcaggtggcaggag

SEQ ID NO: 17900 - DNA, 84 bp, Homo sapiens
  chr10:126325835-126325919
  hypo
acatgccatgaggcagcgcaggtccaggacgtacctggcaggacgtgggtgcctggctttggctccagccgccttgtgctgggc

SEQ ID NO: 17901 - DNA, 31 bp, Homo sapiens
  chr10:126325956-126325987
  hypo
gcacaatgagggtcttcggcttgagccccgg

SEQ ID NO: 17902 - DNA, 31 bp, Homo sapiens
  chr10:126334816-126334847
  hypo
ctgtgtgagtgcagctcgctttctttaggca

SEQ ID NO: 17903 - DNA, 29 bp, Homo sapiens
  chr10:126380993-126381022
  hypo
aaagcataggccaggcgcggtggctcatg

SEQ ID NO: 17904 - DNA, 31 bp, Homo sapiens
  chr10:126435115-126435146
  hypo
gctaacctgattaagccggagaacaccctgg

SEQ ID NO: 17905 - DNA, 22 bp, Homo sapiens
  chr10:126479603-126479625
  hypo
ttacaggcgtaagccaccacgc

SEQ ID NO: 17906 - DNA, 31 bp, Homo sapiens
  chr10:126686478-126686509
  hypo
acaccagccccagtgtcggaggggttggggg

SEQ ID NO: 17907 - DNA, 31 bp, Homo sapiens
  chr10:126691067-126691098
  hypo
ggctgccctcccagaacgggaggcccaggtt

SEQ ID NO: 17908 - DNA, 79 bp, Homo sapiens
  chr10:126691114-126691193
  hypo
cctagagctgtgcacacggcaggggcagtttaggggacacacacggcaggggtcatttaggggacgcacccagcagggg

SEQ ID NO: 17909 - DNA, 31 bp, Homo sapiens
  chr10:126691201-126691232
  hypo
aggacatgtggccagtcgcattctcccctct

SEQ ID NO: 17910 - DNA, 50 bp, Homo sapiens
  chr10:126691354-126691404
  hypo
catgtgaaggcagggccgcaaggtgctccacagcccggcctggaggcagc

SEQ ID NO: 17911 - DNA, 31 bp, Homo sapiens
  chr10:126691408-126691439
  hypo
ttgctacagccagaagcggctgctccgtggt

SEQ ID NO: 17912 - DNA, 31 bp, Homo sapiens
  chr10:126697016-126697047
  hypo
cattcatgagaagaaccgctgctcagagtca

SEQ ID NO: 17913 - DNA, 37 bp, Homo sapiens
  chr10:126709395-126709432
  hypo
gtgtggagggggtctgcgctgtcgagggggacacact

SEQ ID NO: 17914 - DNA, 31 bp, Homo sapiens
  chr10:126714617-126714648
  hypo
ccccaggcagggcaggcggggaggatgtatt

SEQ ID NO: 17915 - DNA, 31 bp, Homo sapiens
  chr10:126715000-126715031
  hypo
gtgggagagctgtacccggagttggagggga

SEQ ID NO: 17916 - DNA, 114 bp, Homo sapiens
  chr10:126715036-126715150
  hypo
ggggcatgggtgcccacgccaggggcagaataggtggctgccgtctccaggaggtgctgagatggtgcgctggagggacggcgagccgggtctccagctcggggggatgctgtc

SEQ ID NO: 17917 - DNA, 31 bp, Homo sapiens
  chr10:126720966-126720997
  hypo
gaaggtcccaggatgccgtccttcctctggt

SEQ ID NO: 17918 - DNA, 41 bp, Homo sapiens
  chr10:126726952-126726993
  hypo
cactcacccctaaacccgaacccacacgctggtttcttacc

SEQ ID NO: 17919 - DNA, 31 bp, Homo sapiens
  chr10:126732715-126732746
  hypo
agcctgggatcccaaacgacaggactcactc

SEQ ID NO: 17920 - DNA, 31 bp, Homo sapiens
  chr10:126732748-126732779
  hypo
ggaaagcttccttcaccgcagcctacagggc

SEQ ID NO: 17921 - DNA, 31 bp, Homo sapiens
  chr10:126732991-126733022
  hypo
actctgacttttcatccggagttaacagcca

SEQ ID NO: 17922 - DNA, 31 bp, Homo sapiens
  chr10:126752457-126752488
  hypo
gcaactccatcaggcacggttttcccccacc

SEQ ID NO: 17923 - DNA, 31 bp, Homo sapiens
  chr10:126776897-126776928
  hypo
gaaaaagggatgggagcgggatgacctgtgc

SEQ ID NO: 17924 - DNA, 31 bp, Homo sapiens
  chr10:126792359-126792390
  hypo
gtgtccgggaaagaggcgagcttcccccagg

SEQ ID NO: 17925 - DNA, 31 bp, Homo sapiens
  chr10:126807512-126807543
  hypo
aacctgccagaaggagcggacataggagatg

SEQ ID NO: 17926 - DNA, 31 bp, Homo sapiens
  chr10:126819308-126819339
  hypo
aagcatatttagagaccgactgtactgccag

SEQ ID NO: 17927 - DNA, 31 bp, Homo sapiens
  chr10:126830137-126830168
  hypo
agaagtcacaggagcacggaacaggaagcag

SEQ ID NO: 17928 - DNA, 31 bp, Homo sapiens
  chr10:126830197-126830228
  hypo
gcacacagtaaacacacggcaagtacatggc

SEQ ID NO: 17929 - DNA, 31 bp, Homo sapiens; identical to SEQ ID NO: 4118
  chr10:126847583-126847614
  hypo

SEQ ID NO: 17930 - DNA, 53 bp, Homo sapiens; identical to SEQ ID NO: 4119
  chr10:126847634-126847687
  hypo

SEQ ID NO: 17931 - DNA, 126 bp, Homo sapiens; identical to SEQ ID NO: 4120
  chr10:126847692-126847818
  hypo

SEQ ID NO: 17932 - DNA, 38 bp, Homo sapiens; identical to SEQ ID NO: 4121
  chr10:126847830-126847868
  hypo

SEQ ID NO: 17933 - DNA, 123 bp, Homo sapiens; identical to SEQ ID NO: 4122
  chr10:126847900-126848023
  hypo

SEQ ID NO: 17934 - DNA, 161 bp, Homo sapiens; identical to SEQ ID NO: 4130
  chr10:126849984-126850145
  hypo

SEQ ID NO: 17935 - DNA, 38 bp, Homo sapiens
  chr10:127277449-127277487
  hypo
gctgggattgcaggcgtgagccacggcacccaacaacc

SEQ ID NO: 17936 - DNA, 83 bp, Homo sapiens
  chr10:127452036-127452119
  hypo
agtgactgcacagagccgtgtcccagacacgctgtcagtgccttcaacacggagccggtttgttcattcggtgctttgtttca

SEQ ID NO: 17937 - DNA, 109 bp, Homo sapiens
  chr10:127463305-127463414
  hypo
tcgcgggggaggaagacgctccccccggccttgcggggcaggtcgcgcagggcaggtcgtgcggggcaggtggggggtgccaaggaagtccgggcgtggccacaccgca

SEQ ID NO: 17938 - DNA, 31 bp, Homo sapiens
  chr10:127616431-127616462
  hypo
taccttttggtgcacacgtgtgtactttaat

SEQ ID NO: 17939 - DNA, 31 bp, Homo sapiens
  chr10:127616486-127616517
  hypo
tgctttatagagtgtacgtacagttttagga

SEQ ID NO: 17940 - DNA, 31 bp, Homo sapiens
  chr10:128595435-128595466
  hypo
cagccctgggtcctaccgggcctgcacttag

SEQ ID NO: 17941 - DNA, 31 bp, Homo sapiens
  chr10:128600072-128600103
  hypo
gtcgcttgtcaagatgcggttgtcaagatgt

SEQ ID NO: 17942 - DNA, 31 bp, Homo sapiens
  chr10:128602214-128602245
  hypo
cacatgcccacatgcacgtgggaaactgagt

SEQ ID NO: 17943 - DNA, 31 bp, Homo sapiens
  chr10:128767290-128767321
  hypo
aaaagaattcaggtagcggtagacatcttga

SEQ ID NO: 17944 - DNA, 31 bp, Homo sapiens
  chr10:128767344-128767375
  hypo
aaaggaaggccttcaccgttacctgagtgtt

SEQ ID NO: 17945 - DNA, 35 bp, Homo sapiens
  chr10:128767589-128767624
  hypo
gaacaccaggaggctgcgtgcgcctgaaattctgg

SEQ ID NO: 17946 - DNA, 45 bp, Homo sapiens
  chr10:128779078-128779123
  hypo
aatctcatgcaggaagcggtagctgggctgcgttgcactgcccaa

SEQ ID NO: 17947 - DNA, 31 bp, Homo sapiens
  chr10:128783518-128783549
  hypo
acaggcgtgagccaccgcgtggagccccatt

SEQ ID NO: 17948 - DNA, 31 bp, Homo sapiens
  chr10:128804388-128804419
  hypo
aggccagcccctgcagcggagttgctgactc

SEQ ID NO: 17949 - DNA, 38 bp, Homo sapiens
  chr10:128804955-128804993
  hypo
gctcaggctctgattgcgtttcccgcttgtttgctgcc

SEQ ID NO: 17950 - DNA, 61 bp, Homo sapiens
  chr10:128816342-128816403
  hypo
tcttggagaaaagagccgagagcggctggggctttgttttcttttgcggtggcactgtggt

SEQ ID NO: 17951 - DNA, 31 bp, Homo sapiens
  chr10:128816428-128816459
  hypo
gcacctgtcctggctgcggagggctgtcctg

SEQ ID NO: 17952 - DNA, 31 bp, Homo sapiens
  chr10:128818999-128819030
  hypo
cgagtaatcactggccgcgctgtgggcacca

SEQ ID NO: 17953 - DNA, 20 bp, Homo sapiens
  chr10:128819443-128819463
  hypo
gaggctgtgggagtttcgcc

SEQ ID NO: 17954 - DNA, 20 bp, Homo sapiens
  chr10:128819702-128819722
  hypo
acaggcgtgagccactgcac

SEQ ID NO: 17955 - DNA, 31 bp, Homo sapiens
  chr10:128851343-128851374
  hypo
aaagcattggcgatgacgcaggtgcaatcct

SEQ ID NO: 17956 - DNA, 31 bp, Homo sapiens
  chr10:128862778-128862809
  hypo
aacacaaatggaggacgcgtgggccagtttt

SEQ ID NO: 17957 - DNA, 31 bp, Homo sapiens
  chr10:128867668-128867699
  hypo
aatgagatgttggcaccgtcatagaccagca

SEQ ID NO: 17958 - DNA, 31 bp, Homo sapiens
  chr10:128891890-128891921
  hypo
tacaggtgtgagccatcgcacccatggcctt

SEQ ID NO: 17959 - DNA, 31 bp, Homo sapiens
  chr10:128898685-128898716
  hypo
gaatccctagggaaggcgaggcagcggtggc

SEQ ID NO: 17960 - DNA, 31 bp, Homo sapiens
  chr10:128899123-128899154
  hypo
tcgtgtgggaagtggacgcaggccttgccca

SEQ ID NO: 17961 - DNA, 31 bp, Homo sapiens
  chr10:128899934-128899965
  hypo
cgattcacacagtgtccggcagcccaagggg

SEQ ID NO: 17962 - DNA, 31 bp, Homo sapiens
  chr10:128899992-128900023
  hypo
ctgtcttgtttgtggccgattcaccctggtg

SEQ ID NO: 17963 - DNA, 31 bp, Homo sapiens
  chr10:128900034-128900065
  hypo
atgaacttgctacaggcggttgatgctttgc

SEQ ID NO: 17964 - DNA, 49 bp, Homo sapiens
  chr10:128900080-128900129
  hypo
atgcatgaagccagttcgtgcctcaccctctgggcgttcgcaagcgaaa

SEQ ID NO: 17965 - DNA, 31 bp, Homo sapiens
  chr10:128904394-128904425
  hypo
cttctcagtatttctgcggttcttctcataa

SEQ ID NO: 17966 - DNA, 41 bp, Homo sapiens
  chr10:128904503-128904544
  hypo
ctgaaatacttaccaacgatcgtcaacgatgtgaaattggt

SEQ ID NO: 17967 - DNA, 31 bp, Homo sapiens
  chr10:128904567-128904598
  hypo
aagtatgcagcccaggcgaatgcttgtcacg

SEQ ID NO: 17968 - DNA, 31 bp, Homo sapiens
  chr10:128905316-128905347
  hypo
cctcaagcacccctcccgcctctgccttcaa

SEQ ID NO: 17969 - DNA, 31 bp, Homo sapiens
  chr10:128905986-128906017
  hypo
taacaacctccctccccgtgcaggtgcttcc

SEQ ID NO: 17970 - DNA, 46 bp, Homo sapiens
  chr10:128936061-128936107
  hypo
gttctaaagacggcctcgagactccagacaccgtgagtgttaaagg

SEQ ID NO: 17971 - DNA, 31 bp, Homo sapiens
  chr10:128936110-128936141
  hypo
cagagtttccatcttccgtgctttttagatt

SEQ ID NO: 17972 - DNA, 31 bp, Homo sapiens
  chr10:128936177-128936208
  hypo
tctcctgagagtaaggcgaaggtatgacctg

SEQ ID NO: 17973 - DNA, 31 bp, Homo sapiens
  chr10:128936225-128936256
  hypo
ggagttttcttagaaccggctggagtttgtc

SEQ ID NO: 17974 - DNA, 28 bp, Homo sapiens
  chr10:128999160-128999188
  hypo
ctcaaaatggagtcgctgtggttcggat

SEQ ID NO: 17975 - DNA, 31 bp, Homo sapiens
  chr10:128999334-128999365
  hypo
cttcgacctgtagggtcgagatcattccctt

SEQ ID NO: 17976 - DNA, 42 bp, Homo sapiens
  chr10:129057987-129058029
  hypo
catgtcgctcctactccgagggtctcccgtttaggagggaat

SEQ ID NO: 17977 - DNA, 31 bp, Homo sapiens
  chr10:129059291-129059322
  hypo
tctgtatgtgtgtacccgtgctcatgtgtgt

SEQ ID NO: 17978 - DNA, 31 bp, Homo sapiens
  chr10:129145541-129145572
  hypo
gacacagacctcgtgacgaagaaggtcatgg

SEQ ID NO: 17979 - DNA, 31 bp, Homo sapiens
  chr10:129145797-129145828
  hypo
acatgatctgggttgtcgaagtgtaagggag

SEQ ID NO: 17980 - DNA, 31 bp, Homo sapiens
  chr10:129159705-129159736
  hypo
ctatcaaacaatagctcgaaaaggtagaatc

SEQ ID NO: 17981 - DNA, 31 bp, Homo sapiens
  chr10:129165712-129165743
  hypo
gggactctctgtccagcgctgcagtgagtgc

SEQ ID NO: 17982 - DNA, 47 bp, Homo sapiens
  chr10:129165749-129165796
  hypo
tcagcttgacagcactcgctctggggaggtggcgatgaagctccaca

SEQ ID NO: 17983 - DNA, 31 bp, Homo sapiens
  chr10:129165833-129165864
  hypo
gcctgctgtgaagtgtcgtgttctgcaggag

SEQ ID NO: 17984 - DNA, 31 bp, Homo sapiens
  chr10:129165896-129165927
  hypo
ccccagatgtgcacagcggccttgaattctt

SEQ ID NO: 17985 - DNA, 31 bp, Homo sapiens
  chr10:129176710-129176741
  hypo
gaggagtgggagcaccgcgtgaacctttacg

SEQ ID NO: 17986 - DNA, 31 bp, Homo sapiens
  chr10:129186940-129186971
  hypo
cacagaggaacacagccggagaggacagcaa

SEQ ID NO: 17987 - DNA, 31 bp, Homo sapiens
  chr10:129187397-129187428
  hypo
atgggctcctgacccccgtgactgcgatgtg

SEQ ID NO: 17988 - DNA, 31 bp, Homo sapiens
  chr10:129189357-129189388
  hypo
aggaatatttaaacagcgaaaatatttctga

SEQ ID NO: 17989 - DNA, 31 bp, Homo sapiens
  chr10:129195280-129195311
  hypo
ctgagcatgagttacacgggcggcgactcct

SEQ ID NO: 17990 - DNA, 74 bp, Homo sapiens
  chr10:129195432-129195506
  hypo
ctgagcatgagttacacgggcagcgtctcctgtgatctgagcatcagttacacgggcagcgactcctatgtgat

SEQ ID NO: 17991 - DNA, 35 bp, Homo sapiens
  chr10:129195772-129195807
  hypo
ctgagcatgagttacacgggcggtgtctcctatgt

SEQ ID NO: 17992 - DNA, 31 bp, Homo sapiens
  chr10:129236891-129236922
  hypo
catttctttgcattgacgtctatttttcccc

SEQ ID NO: 17993 - DNA, 31 bp, Homo sapiens
  chr10:129236949-129236980
  hypo
ataaatctctaaaagacgagggttccccttt

SEQ ID NO: 17994 - DNA, 31 bp, Homo sapiens
  chr10:129236994-129237025
  hypo
aataccatcctcccatcgtaaatgaacaatt

SEQ ID NO: 17995 - DNA, 56 bp, Homo sapiens
  chr10:129237032-129237088
  hypo
atcatcatcaaatatccggtcagacttcacatttgccctatcgtgctaagtgttct

SEQ ID NO: 17996 - DNA, 58 bp, Homo sapiens
  chr10:129237714-129237772
  hypo
tccgcagggcctggggcgaggccgctctgctgctaggctctgccgctctgttggactt

SEQ ID NO: 17997 - DNA, 31 bp, Homo sapiens
  chr10:129237831-129237862
  hypo
aacagtccttggtgtccgctaatgccttccc

SEQ ID NO: 17998 - DNA, 31 bp, Homo sapiens
  chr10:129237884-129237915
  hypo
tcttctaagctagttacggcccaagtgttaa

SEQ ID NO: 17999 - DNA, 43 bp, Homo sapiens
  chr10:129241060-129241103
  hypo
tttgttcttgaccgcacggatgttgccccgtgtgtccttgctg

SEQ ID NO: 18000 - DNA, 31 bp, Homo sapiens
  chr10:129241147-129241178
  hypo
atattcaggtcacctgcgatgtgctgtccag

SEQ ID NO: 18001 - DNA, 31 bp, Homo sapiens
  chr10:129241196-129241227
  hypo
agcagtgccagcccctcgtgtgggggaggtc

SEQ ID NO: 18002 - DNA, 31 bp, Homo sapiens
  chr10:129241231-129241262
  hypo
gtaaccacatgctgggcggctccaaccccag

SEQ ID NO: 18003 - DNA, 31 bp, Homo sapiens
  chr10:129245848-129245879
  hypo
cctccacaaagtaggacgagtccctcattcc

SEQ ID NO: 18004 - DNA, 35 bp, Homo sapiens
  chr10:129249787-129249822
  hypo
tgtgatgttaacatttcgtgcgactgctttttctt

SEQ ID NO: 18005 - DNA, 31 bp, Homo sapiens
  chr10:129249847-129249878
  hypo
agtgagtggcctttagcgtcatggagcaagg

SEQ ID NO: 18006 - DNA, 20 bp, Homo sapiens
  chr10:129716803-129716823
  hypo
cagagcgagactccatctca

SEQ ID NO: 18007 - DNA, 31 bp, Homo sapiens
  chr10:129833477-129833508
  hypo
gctcaaagcgatctgtcggcctgggcatcca

SEQ ID NO: 18008 - DNA, 31 bp, Homo sapiens; identical to SEQ ID NO: 4136
  chr10:130009066-130009097
  hypo

SEQ ID NO: 18009 - DNA, 31 bp, Homo sapiens
  chr10:131577564-131577595
  hypo
cgccctgcagtgtgggcgtgagtgcccgtgt

SEQ ID NO: 18010 - DNA, 31 bp, Homo sapiens
  chr10:131718519-131718550
  hypo
gctgtgcagtctagggcgagtatctccagga

SEQ ID NO: 18011 - DNA, 31 bp, Homo sapiens
  chr10:131821309-131821340
  hypo
cactggggggccctgccggtctggctctggc

SEQ ID NO: 18012 - DNA, 58 bp, Homo sapiens
  chr10:131844258-131844316
  hypo
gggaggtggggctgggcgtggggcacgtggcacagagggatgcgcgtggtagggctca

SEQ ID NO: 18013 - DNA, 109 bp, Homo sapiens
  chr10:131844468-131844577
  hypo
gcggagtggggtggagcgggtggggcgaggctcggcgtgggacacgagggacgggacgcgggggcacggcaatgggtggcgcagggcgcactctcgggctccctgcagg

SEQ ID NO: 18014 - DNA, 46 bp, Homo sapiens
  chr10:132237996-132238042
  hypo
cagtgaatccccgcaccgagtttagaaactgcgctagccagtccct

SEQ ID NO: 18015 - DNA, 56 bp, Homo sapiens
  chr10:132238131-132238187
  hypo
agtgcagagtgtgccccgaaactgtctggtttctagaagcccgctggacccgtgcc

SEQ ID NO: 18016 - DNA, 39 bp, Homo sapiens
  chr10:132251718-132251757
  hypo
tcagctgctccgtgaacggccgtgcgctttcatctgtgc

SEQ ID NO: 18017 - DNA, 31 bp, Homo sapiens
  chr10:133004437-133004468
  hypo
ctgccaatcgggtgtacgccaaggtccgcaa

SEQ ID NO: 18018 - DNA, 31 bp, Homo sapiens
  chr10:133441393-133441424
  hypo
tttcccacgccctgttcgggccccactgtgc

SEQ ID NO: 18019 - DNA, 19 bp, Homo sapiens
  chr10:133783402-133783421
  hypo
ccaggaaaggccaggcgcg

SEQ ID NO: 18020 - DNA, 49 bp, Homo sapiens
  chr10:134002755-134002804
  hypo
gagggaaaagcgttgccgagtccagcccgtgggcgcgtccttctccacc

SEQ ID NO: 18021 - DNA, 31 bp, Homo sapiens
  chr10:134019459-134019490
  hypo
cagccaacatccagggcgggacagaggcccc

SEQ ID NO: 18022 - DNA, 31 bp, Homo sapiens
  chr10:134024096-134024127
  hypo
acaccctgtaaacccacgaacagagtgtggg

SEQ ID NO: 18023 - DNA, 31 bp, Homo sapiens
  chr10:134038356-134038387
  hypo
aggacccccagcctcccggtctccaggactg

SEQ ID NO: 18024 - DNA, 31 bp, Homo sapiens
  chr10:134043176-134043207
  hypo
agtcacatcctggctccggggcccttactgg

SEQ ID NO: 18025 - DNA, 31 bp, Homo sapiens
  chr10:134044631-134044662
  hypo
tgctctccccgtcacacgcatcccatcaccc

SEQ ID NO: 18026 - DNA, 59 bp, Homo sapiens
  chr10:134044678-134044737
  hypo
gacagaagagccacctcgagacagggcctggcctcgcacacccacggctctgctgtcca

SEQ ID NO: 18027 - DNA, 31 bp, Homo sapiens
  chr10:134049933-134049964
  hypo
gcagccccaccgtgcacgggccccacacaca

SEQ ID NO: 18028 - DNA, 31 bp, Homo sapiens
  chr10:134057212-134057243
  hypo
ccgagagcggcggccccgagggtggagccat

SEQ ID NO: 18029 - DNA, 42 bp, Homo sapiens
  chr10:134164630-134164672
  hypo
ctcccacatcacccagcgatgggattccgacctgctgcagca

SEQ ID NO: 18030 - DNA, 52 bp, Homo sapiens
  chr10:134164683-134164735
  hypo
acctgaactccaggcacgtcacatcgtccagcccgggcgagctgctggccag

SEQ ID NO: 18031 - DNA, 45 bp, Homo sapiens
  chr10:134171805-134171850
  hypo
gagcgtggggaggagccgaggtgatggagcagcgtggggaggagc

SEQ ID NO: 18032 - DNA, 31 bp, Homo sapiens
  chr10:134176770-134176801
  hypo
cagctgctcgggggtccggggttcacccctc

SEQ ID NO: 18033 - DNA, 31 bp, Homo sapiens
  chr10:134198071-134198102
  hypo
ttcttctcccctgcctcggctgaggccttta

SEQ ID NO: 18034 - DNA, 41 bp, Homo sapiens; identical to SEQ ID NO: 4138
  chr10:134210376-134210417
  hypo

SEQ ID NO: 18035 - DNA, 116 bp, Homo sapiens; identical to SEQ ID NO: 4139
  chr10:134210546-134210662
  hypo

SEQ ID NO: 18036 - DNA, 135 bp, Homo sapiens; identical to SEQ ID NO: 4140
  chr10:134210747-134210882
  hypo

SEQ ID NO: 18037 - DNA, 31 bp, Homo sapiens
  chr10:134242153-134242184
  hypo
gtggaggggagaatgccgcctttggagaggt

SEQ ID NO: 18038 - DNA, 31 bp, Homo sapiens
  chr10:134252926-134252957
  hypo
acgtggtgggctcctgcgtcaacagcatggg

SEQ ID NO: 18039 - DNA, 31 bp, Homo sapiens
  chr10:134253239-134253270
  hypo
tgtctgtgtgtgcctgcgtgtggatgcatgt

SEQ ID NO: 18040 - DNA, 47 bp, Homo sapiens
  chr10:134269925-134269972
  hypo
gcggccaccttggccacggcctccccaagacacgacatgctttgagg

SEQ ID NO: 18041 - DNA, 81 bp, Homo sapiens
  chr10:134269997-134270078
  hypo
gtggctgccaccacaccgcttccagaccatgaggcccctcacacacgtgtggccagagtgtccgcacggcccagggacagg

SEQ ID NO: 18042 - DNA, 31 bp, Homo sapiens
  chr10:134270096-134270127
  hypo
ggctgttctgaggctgcgtggcagggcatgg

SEQ ID NO: 18043 - DNA, 44 bp, Homo sapiens
  chr10:134276611-134276655
  hypo
cgtggccagtggggatcgggtcaattccacgaggctccacatct

SEQ ID NO: 18044 - DNA, 31 bp, Homo sapiens
  chr10:134279497-134279528
  hypo
ccaggcacccggaccacgcagggggccttgt

SEQ ID NO: 18045 - DNA, 31 bp, Homo sapiens
  chr10:134279572-134279603
  hypo
gtgagacgcccgggcccgcaggttgaggccg

SEQ ID NO: 18046 - DNA, 107 bp, Homo sapiens
  chr10:134280449-134280556
  hypo
aagccagtggggccatcgccttggtgcaggttccgtgggaaagggtcctttttccaacggggcgggaagaggtgccaggcagatggaagtctcggtttccccaaagg

SEQ ID NO: 18047 - DNA, 54 bp, Homo sapiens
  chr10:134302491-134302545
  hypo
cagtgtggagacccaacgcacacctcagccaggtgaccccgcctagggcagggt

SEQ ID NO: 18048 - DNA, 54 bp, Homo sapiens
  chr10:134304826-134304880
  hypo
agaacctgcatggacacggaacttgtgtggacacaaaaccgcccaaagcccatg

SEQ ID NO: 18049 - DNA, 31 bp, Homo sapiens
  chr10:134304881-134304912
  hypo
tttgcatcagtgttcacgcttgcttttttct

SEQ ID NO: 18050 - DNA, 31 bp, Homo sapiens
  chr10:134344093-134344124
  hypo
tcttaatctattaatacgatatattaaattg

SEQ ID NO: 18051 - DNA, 52 bp, Homo sapiens; identical to SEQ ID NO: 4145
  chr10:134351008-134351060
  hypo

SEQ ID NO: 18052 - DNA, 44 bp, Homo sapiens; identical to SEQ ID NO: 4146
  chr10:134351257-134351301
  hypo

SEQ ID NO: 18053 - DNA, 56 bp, Homo sapiens
  chr10:134427567-134427623
  hypo
cagtcgtgagcaccctcgacgcctttgggacccacggctttcgaagattaggtcca

SEQ ID NO: 18054 - DNA, 37 bp, Homo sapiens
  chr10:134457708-134457745
  hypo
gtgcccggggagcccacgcccacgcccaggagggagg

SEQ ID NO: 18055 - DNA, 31 bp, Homo sapiens
  chr10:134459628-134459659
  hypo
cccagacgtgtggccacgagcctccttgggg

SEQ ID NO: 18056 - DNA, 31 bp, Homo sapiens
  chr10:134466578-134466609
  hypo
ccgacagaaggcacccgcgtgctgggccctg

SEQ ID NO: 18057 - DNA, 40 bp, Homo sapiens
  chr10:134467310-134467350
  hypo
acggcagccttcagcgcggggagcacggcgccccccgtca

SEQ ID NO: 18058 - DNA, 31 bp, Homo sapiens
  chr10:134481124-134481155
  hypo
ataatgacatttgaatcgagcattaacaggc

SEQ ID NO: 18059 - DNA, 35 bp, Homo sapiens
  chr10:134503462-134503497
  hypo
tggtccactcaatgcccggccggtgggacctgcgc

SEQ ID NO: 18060 - DNA, 39 bp, Homo sapiens
  chr10:134503580-134503619
  hypo
ctgctggagccagcaccggctgcacggctcacctgggaa

SEQ ID NO: 18061 - DNA, 42 bp, Homo sapiens
  chr10:134503629-134503671
  hypo
cactcaatgcctggcccgtgggacttgcgtccctgctggagc

SEQ ID NO: 18062 - DNA, 31 bp, Homo sapiens
  chr10:134504488-134504519
  hypo
ttgtgcgatgacttcccgtctgacgctatcg

SEQ ID NO: 18063 - DNA, 50 bp, Homo sapiens
  chr10:134540683-134540733
  hypo
ggagctgctggagtgccgtcacagcgccaccccctcgatgcccacagagc

SEQ ID NO: 18064 - DNA, 43 bp, Homo sapiens
  chr10:134566299-134566342
  hypo
attttgacacagagcacgcccctgctgtcggtagccaccatac

SEQ ID NO: 18065 - DNA, 59 bp, Homo sapiens
  chr10:134575251-134575310
  hypo
caagacccaccaaagacgatcttacagttgcaaactgtgaaccacgtaaggacacattc

SEQ ID NO: 18066 - DNA, 57 bp, Homo sapiens
  chr10:134583321-134583378
  hypo
tgatacgtgtggctcccggtacagcccaggctcaggtggcggcgatttggacacccc

SEQ ID NO: 18067 - DNA, 31 bp, Homo sapiens
  chr10:134583391-134583422
  hypo
agctgctgcctttttgcgcatcctagctaga

SEQ ID NO: 18068 - DNA, 49 bp, Homo sapiens
  chr10:134588907-134588956
  hypo
cagcgtccaggccccgcgtcctgctgctctgcagcgtggccccgccagc

SEQ ID NO: 18069 - DNA, 34 bp, Homo sapiens
  chr10:134590302-134590336
  hypo
ttgcgtgttccagactcggcgggtagtgggggcc

SEQ ID NO: 18070 - DNA, 31 bp, Homo sapiens
  chr10:134663731-134663762
  hypo
aagcaggagcacctaccgaggggcccgcctc

SEQ ID NO: 18071 - DNA, 52 bp, Homo sapiens
  chr10:134671587-134671639
  hypo
ctgcaaggacaatgtacgacatccacagtaacagacacggctcaggtcagac

SEQ ID NO: 18072 - DNA, 50 bp, Homo sapiens
  chr10:134671647-134671697
  hypo
gggttatgcttccctcgcgcaggcttctacacgcccgcactgggcccgcc

SEQ ID NO: 18073 - DNA, 31 bp, Homo sapiens
  chr10:134722344-134722375
  hypo
ctggacacgggactggcgtgtgcagcccttg

SEQ ID NO: 18074 - DNA, 179 bp, Homo sapiens
  chr10:134724607-134724786
  hypo
ccacagctgcctgagccgcccacggcgccctcccctccgcagcctccagcctgatccctgtaggtccccggagccggccccttgtcccttctcggaagaacgacctgcacctgatgccacagccggtgttcctggccggcccacactgactgcccagggccagccgtccccactgggag

SEQ ID NO: 18075 - DNA, 31 bp, Homo sapiens
  chr10:134817361-134817392
  hypo
aagcagccagggctcccgatcctatgactgg

SEQ ID NO: 18076 - DNA, 31 bp, Homo sapiens
  chr10:134941089-134941120
  hypo
gcctggggacaaatagcgatttggcaacagc

SEQ ID NO: 18077 - DNA, 44 bp, Homo sapiens
  chr10:134941134-134941178
  hypo
agaagggaaaccccatcgagtaggaacggcggtccagccatcag

SEQ ID NO: 18078 - DNA, 72 bp, Homo sapiens
  chr10:134941212-134941284
  hypo
ccctcagttccttctgcggccccaggatggcccgcccgtctgccctccgccttgccccgcccacccagctcc

SEQ ID NO: 18079 - DNA, 31 bp, Homo sapiens
  chr10:134941646-134941677
  hypo
tagggccaatagggcccggttcccatccaca

SEQ ID NO: 18080 - DNA, 74 bp, Homo sapiens
  chr10:134941760-134941834
  hypo
tttgctctgcagggggcgtcctgagtcctggccgtgctggccccgctgacactgacgtgcgtctccccacagct

SEQ ID NO: 18081 - DNA, 31 bp, Homo sapiens
  chr10:134941846-134941877
  hypo
gggagcccagcctgggcgccttctacggccc

SEQ ID NO: 18082 - DNA, 106 bp, Homo sapiens
  chr10:134942434-134942540
  hypo
aggccgcgcagggccacgccagttgcctgtcaccggccaccccgtgctgcgccaagatgcactgcgagccactgacggcggacgaggcgcacgtgcacctgcagga

SEQ ID NO: 18083 - DNA, 31 bp, Homo sapiens
  chr10:134942623-134942654
  hypo
cagaggagcccgagtacgcctaccacatccc

SEQ ID NO: 18084 - DNA, 31 bp, Homo sapiens
  chr10:134942668-134942699
  hypo
gcagcccccgcagctcgcgcacagacagccc

SEQ ID NO: 18085 - DNA, 95 bp, Homo sapiens
  chr10:134942703-134942798
  hypo
agctctctggatggcccggcggggacacacacgctggcctgctgcacccagggcgaccccttccccatggtcacccagcccgagggcagtgatgg

SEQ ID NO: 18086 - DNA, 81 bp, Homo sapiens
  chr10:134942808-134942889
  hypo
ctctacagctgccccacgcagccgggcagggaggcagcgctcgggcccggccacttggagatgctgcggaggacacagtcc

SEQ ID NO: 18087 - DNA, 31 bp, Homo sapiens
  chr10:134942899-134942930
  hypo
gtggccccagccagaacgggctgcccaaggg

SEQ ID NO: 18088 - DNA, 28 bp, Homo sapiens
  chr10:134997772-134997800
  hypo
ccatgcacacacacgctgcacacacacc

SEQ ID NO: 18089 - DNA, 31 bp, Homo sapiens
  chr10:135002171-135002202
  hypo
atcccatcccccccgccgtccccacccccca

SEQ ID NO: 18090 - DNA, 31 bp, Homo sapiens
  chr10:135075452-135075483
  hypo
gacaagggcatggggccggaagaggcggggc

SEQ ID NO: 18091 - DNA, 31 bp, Homo sapiens
  chr10:135106411-135106442
  hypo
atgagctttggccacacgcccctgccctggg

SEQ ID NO: 18092 - DNA, 46 bp, Homo sapiens
  chr10:135124037-135124083
  hypo
ggggtgtgggaatgagcgggcgcagcgcctccgcactcacacccct

SEQ ID NO: 18093 - DNA, 45 bp, Homo sapiens
  chr10:135124097-135124142
  hypo
tacctcctgcagcagtcggccgtggtcatccgcactcacacccct

SEQ ID NO: 18094 - DNA, 31 bp, Homo sapiens
  chr10:135180194-135180225
  hypo
ttctgtggggctcccacgagggagacaactg

SEQ ID NO: 18095 - DNA, 31 bp, Homo sapiens
  chr10:135198047-135198078
  hypo
acaccatctgcccatacgtggggagacaata

SEQ ID NO: 18096 - DNA, 31 bp, Homo sapiens
  chr10:135204298-135204329
  hypo
tcttcctctgcccacccgactcccagatccc

SEQ ID NO: 18097 - DNA, 31 bp, Homo sapiens
  chr11:232947-232978
  hypo
agaaaaagaatgtgtgcgactcacagagggc

SEQ ID NO: 18098 - DNA, 80 bp, Homo sapiens; identical to SEQ ID NO: 4157
  chr11:327112-327192
  hypo

SEQ ID NO: 18099 - DNA, 54 bp, Homo sapiens
  chr11:372117-372171
  hypo
agctgaccagtgagaccgacggccggggggtccacgctgcgccatccacacaga

SEQ ID NO: 18100 - DNA, 37 bp, Homo sapiens
  chr11:381323-381360
  hypo
accacctctccgcccccggccccggggtcctgaccac

SEQ ID NO: 18101 - DNA, 31 bp, Homo sapiens
  chr11:393253-393284
  hypo
aggggccccccaccctcgctccctctccatc

SEQ ID NO: 18102 - DNA, 31 bp, Homo sapiens
  chr11:394126-394157
  hypo
tccccgcccccagctgcgctcagggctgggc

SEQ ID NO: 18103 - DNA, 31 bp, Homo sapiens
  chr11:394929-394960
  hypo
acgggaatgagcagaacgggaaagcggggag

SEQ ID NO: 18104 - DNA, 53 bp, Homo sapiens
  chr11:405078-405131
  hypo
gctggcacctcagggccgagaggggacagggtggacagcgggtgcaccacagg

SEQ ID NO: 18105 - DNA, 66 bp, Homo sapiens; identical to SEQ ID NO: 4159
  chr11:417263-417329
  hypo

SEQ ID NO: 18106 - DNA, 116 bp, Homo sapiens; identical to SEQ ID NO: 4160
  chr11:417386-417502
  hypo

SEQ ID NO: 18107 - DNA, 55 bp, Homo sapiens
  chr11:419275-419330
  hypo
atcagaagaggacatgcggaacctcacatcgggagggagccgttctggcagggcc

SEQ ID NO: 18108 - DNA, 31 bp, Homo sapiens
  chr11:419356-419387
  hypo
acttcacccccaactgcggtcctggccagtt

SEQ ID NO: 18109 - DNA, 31 bp, Homo sapiens
  chr11:419398-419429
  hypo
ccagcccagggcctgccgtcagtgggcgcag

SEQ ID NO: 18110 - DNA, 34 bp, Homo sapiens
  chr11:429639-429673
  hypo
aggaacaccgtggctgcggcgggggcaaggaggg

SEQ ID NO: 18111 - DNA, 74 bp, Homo sapiens
  chr11:429685-429759
  hypo
tacgccaggtggacctcggagcttgggctggcacttcccctggccccgcagaggcgtcccgcagcaactcaccc

SEQ ID NO: 18112 - DNA, 31 bp, Homo sapiens
  chr11:438116-438147
  hypo
tggggtgatgaccccacgcctctgcaaacag

SEQ ID NO: 18113 - DNA, 31 bp, Homo sapiens
  chr11:438179-438210
  hypo
aagcccccatcactgacgtgggctgacaggg

SEQ ID NO: 18114 - DNA, 31 bp, Homo sapiens
  chr11:438220-438251
  hypo
ccagggcagagctacacgcacacctggggcg

SEQ ID NO: 18115 - DNA, 31 bp, Homo sapiens; identical to SEQ ID NO: 4161
  chr11:450246-450277
  hypo

SEQ ID NO: 18116 - DNA, 31 bp, Homo sapiens
  chr11:455952-455983
  hypo
tccgggccccaccccccgccttgctgcatga

SEQ ID NO: 18117 - DNA, 43 bp, Homo sapiens
  chr11:475000-475043
  hypo
acgagtttgtgtgatacggacatattcacgtgtttgtgtgata

SEQ ID NO: 18118 - DNA, 50 bp, Homo sapiens
  chr11:476444-476494
  hypo
agggaagaaaagctgccggaagctcaacccatggccgtccttgcttggag

SEQ ID NO: 18119 - DNA, 54 bp, Homo sapiens; identical to SEQ ID NO: 4162
  chr11:485972-486026
  hypo

SEQ ID NO: 18120 - DNA, 89 bp, Homo sapiens; identical to SEQ ID NO: 4163
  chr11:486035-486124
  hypo

SEQ ID NO: 18121 - DNA, 31 bp, Homo sapiens
  chr11:486143-486174
  hypo
tgtaaacctcccttgacgtcaggcccaaaag

SEQ ID NO: 18122 - DNA, 42 bp, Homo sapiens
  chr11:489181-489223
  hypo
ctgggtggccagacctcggagaacagccgggcagcagctggg

SEQ ID NO: 18123 - DNA, 37 bp, Homo sapiens
  chr11:528727-528764
  hypo
agaagaaacacacacacgcacacgttcacccacatac

SEQ ID NO: 18124 - DNA, 37 bp, Homo sapiens
  chr11:534209-534246
  hypo
acctctatagtggggtcgtattcgtccacaaaatggt

SEQ ID NO: 18125 - DNA, 37 bp, Homo sapiens
  chr11:539724-539761
  hypo
aggtaagcctgatgcacgtagtcgagggacacactgg

SEQ ID NO: 18126 - DNA, 31 bp, Homo sapiens
  chr11:562193-562224
  hypo
ccagtttgtcctgaggcgcacagggcccagc

SEQ ID NO: 18127 - DNA, 148 bp, Homo sapiens
  chr11:562245-562393
  hypo
gacagctgtccacccccggaacgctgcctaattcgtgccagcctccctgtaaagccacgggctgcgctgggctgtgagccccgcaaaacactgacccccgagccagcccccagcctctcacgccctgggcctgcggcccctgtgacac

SEQ ID NO: 18128 - DNA, 31 bp, Homo sapiens
  chr11:562403-562434
  hypo
ctgctgcacagacctgcggggcctggagctc

SEQ ID NO: 18129 - DNA, 34 bp, Homo sapiens
  chr11:562475-562509
  hypo
ctgggagcaagagctgcgccgggagcaggcccgg

SEQ ID NO: 18130 - DNA, 62 bp, Homo sapiens
  chr11:562580-562642
  hypo
cctggacgctcaggcccgtgccctggaggctgagctgcagctggcagcggaggcccctgggc

SEQ ID NO: 18131 - DNA, 31 bp, Homo sapiens
  chr11:562655-562686
  hypo
ggcatctgccactgagcgcctgcaccaggac

SEQ ID NO: 18132 - DNA, 71 bp, Homo sapiens
  chr11:562727-562798
  hypo
cctggctctggtgagccgggccctggaggcagcagagcgagccttgcaggtgagcccggggacctgatccc

SEQ ID NO: 18133 - DNA, 69 bp, Homo sapiens
  chr11:562815-562884
  hypo
ctgatatgggcagatacggggatcacagggtcccactcgggaggcaggtgagcccggggacctgatccc

SEQ ID NO: 18134 - DNA, 31 bp, Homo sapiens
  chr11:562889-562920
  hypo
actcccccacccctgacgtgggcagatatgg

SEQ ID NO: 18135 - DNA, 31 bp, Homo sapiens; identical to SEQ ID NO: 4164
  chr11:568368-568399
  hypo

SEQ ID NO: 18136 - DNA, 199 bp, Homo sapiens; identical to SEQ ID NO: 4167
  chr11:575603-575802
  hypo

SEQ ID NO: 18137 - DNA, 61 bp, Homo sapiens
  chr11:609530-609591
  hypo
agttccccggatgtggcgcctgcggggaaggaagacagcccctctgcgagtgggagggtac

SEQ ID NO: 18138 - DNA, 3 bp, Homo sapiens
  chr11:615793-615796
  hypo
cgc

SEQ ID NO: 18139 - DNA, 36 bp, Homo sapiens; identical to SEQ ID NO: 4170
  chr11:706175-706211
  hypo

SEQ ID NO: 18140 - DNA, 31 bp, Homo sapiens; identical to SEQ ID NO: 4171
  chr11:706385-706416
  hypo

SEQ ID NO: 18141 - DNA, 31 bp, Homo sapiens
  chr11:724960-724991
  hypo
ctttctccagggtccccgcccttggactctg

SEQ ID NO: 18142 - DNA, 149 bp, Homo sapiens
  chr11:733217-733366
  hypo
cacaccacccagtgtgcggcgtttgccatggcagccccgtgaaacacagaagcctgccttctcaaccgcactcacctttgctcgaatatgagcagcccccattcttccccgacacacacagtcaaatcagcaaacgtcactgatttgat

SEQ ID NO: 18143 - DNA, 49 bp, Homo sapiens
  chr11:733367-733416
  hypo
cagtctcacctggaagcgtaagcatccggcgtcccgggcgcctgctgcc

SEQ ID NO: 18144 - DNA, 110 bp, Homo sapiens
  chr11:763286-763396
  hypo
cgccctcacctgtccccgccctcacctgccccgccctcacctgtccccgccccgcagggagctcgaggagcagcacggcatccactgcaacatgacgttactcttctcct

SEQ ID NO: 18145 - DNA, 31 bp, Homo sapiens
  chr11:763468-763499
  hypo
ggcatgtggcaaacaccgacaagaaatccta

SEQ ID NO: 18146 - DNA, 50 bp, Homo sapiens
  chr11:763636-763686
  hypo
gggcaggcaggggtggcggctcaaggtagtgcagccggcaggcactggga

SEQ ID NO: 18147 - DNA, 34 bp, Homo sapiens
  chr11:782433-782467
  hypo
caggccctgctctgcccgtcgagcctccagggca

SEQ ID NO: 18148 - DNA, 98 bp, Homo sapiens
  chr11:782478-782576
  hypo
agcctgggcctggagacggcggatcggagcgtgtccaggtgctcagggactggtcaccgaaaggcaaggagccctccctgggacgagggagacaccca

SEQ ID NO: 18149 - DNA, 40 bp, Homo sapiens
  chr11:824851-824891
  hypo
tggggctgtgagaccccgaccctctcgaggaaccctgcct

SEQ ID NO: 18150 - DNA, 31 bp, Homo sapiens
  chr11:826058-826089
  hypo
gggatctgggactgggcgagccggccaggca

SEQ ID NO: 18151 - DNA, 35 bp, Homo sapiens; identical to SEQ ID NO: 4172
  chr11:832780-832815
  hypo

SEQ ID NO: 18152 - DNA, 31 bp, Homo sapiens
  chr11:850358-850389
  hypo
ctcttctgggtgagtccgggggccggggtgg

SEQ ID NO: 18153 - DNA, 49 bp, Homo sapiens
  chr11:850734-850783
  hypo
gttttgcgcggggccccggtgcctcctctgcgcccgctccctcctcggt

SEQ ID NO: 18154 - DNA, 31 bp, Homo sapiens
  chr11:850792-850823
  hypo
atccttgcctcggccccgcccctccaggcag

SEQ ID NO: 18155 - DNA, 31 bp, Homo sapiens
  chr11:851076-851107
  hypo
gagctgaggtagagggcggacagggttccac

SEQ ID NO: 18156 - DNA, 44 bp, Homo sapiens
  chr11:858810-858854
  hypo
cccacccccgctcacacgcacccccggctcgcatcctgggctcc

SEQ ID NO: 18157 - DNA, 98 bp, Homo sapiens
  chr11:859259-859357
  hypo
cacaccctggcccacacgcaccttggctcacgtgcaccccggctcacacgcaccccccctttcacacgcaccccgggctcacacgcaccccgggctca

SEQ ID NO: 18158 - DNA, 87 bp, Homo sapiens
  chr11:859361-859448
  hypo
caccccccctttcacacgcaccccgggctcacatgcaccccggctcacacgcaccccctctcacacgcaccccggctcacacgcacc

SEQ ID NO: 18159 - DNA, 31 bp, Homo sapiens
  chr11:859627-859658
  hypo
cagctcccatgcatcccgggctcacacacaa

SEQ ID NO: 18160 - DNA, 34 bp, Homo sapiens
  chr11:862649-862683
  hypo
acttgctcatcatcaccggcgcctttgtcatggc

SEQ ID NO: 18161 - DNA, 31 bp, Homo sapiens
  chr11:862820-862851
  hypo
gcagtgaccccccagacgtgggcaccacctc

SEQ ID NO: 18162 - DNA, 34 bp, Homo sapiens
  chr11:907517-907551
  hypo
ctggggttgggggcagcggcggtgggagctgaac

SEQ ID NO: 18163 - DNA, 87 bp, Homo sapiens
  chr11:985373-985460
  hypo
ggggcagggtgggctgcgggccactggagactggtgagcaccgttctgtcttgcccagaagaccctgcagtgcgaggccgcctgact

SEQ ID NO: 18164 - DNA, 31 bp, Homo sapiens
  chr11:986982-987013
  hypo
ctccctgagcaggtgccgtgggtcttcctgt

SEQ ID NO: 18165 - DNA, 31 bp, Homo sapiens
  chr11:991641-991672
  hypo
tgccctggaagtgtcacggagtcaggttggg

SEQ ID NO: 18166 - DNA, 42 bp, Homo sapiens
  chr11:991962-992004
  hypo
gctgggcaggtgcctccggggggcacccgtgagagtgagcca

SEQ ID NO: 18167 - DNA, 31 bp, Homo sapiens
  chr11:998036-998067
  hypo
ggccgatggcttcccacgcagctcacagctt

SEQ ID NO: 18168 - DNA, 34 bp, Homo sapiens
  chr11:998092-998126
  hypo
tggcgggcgctgtccccggcgtagggagcaaagc

SEQ ID NO: 18169 - DNA, 62 bp, Homo sapiens
  chr11:998238-998300
  hypo
tcttgcagaggtgctccgtcacaagagcagagcctgggagcctgccccgtttctgactgccc

SEQ ID NO: 18170 - DNA, 31 bp, Homo sapiens
  chr11:1025409-1025440
  hypo
cggcccctggcacagccgtgctggaccgagc

SEQ ID NO: 18171 - DNA, 31 bp, Homo sapiens
  chr11:1043835-1043866
  hypo
ttagaacacgtgtgtccgtgtctcagaggag

SEQ ID NO: 18172 - DNA, 31 bp, Homo sapiens
  chr11:1055802-1055833
  hypo
ataagaacacatccaacgtccccaacaaggg

SEQ ID NO: 18173 - DNA, 39 bp, Homo sapiens
  chr11:1056098-1056137
  hypo
tgccattccccagggacgggtcctcgcctgcctcgccgg

SEQ ID NO: 18174 - DNA, 51 bp, Homo sapiens
  chr11:1082739-1082790
  hypo
tcctggggatggggtccgggctttgagctcctgggacggggctgggggccc

SEQ ID NO: 18175 - DNA, 31 bp, Homo sapiens; identical to SEQ ID NO: 4173
  chr11:1139541-1139572
  hypo

SEQ ID NO: 18176 - DNA, 31 bp, Homo sapiens
  chr11:1158948-1158979
  hypo
cagggacggtgcttgacgacatcggccagac

SEQ ID NO: 18177 - DNA, 38 bp, Homo sapiens
  chr11:1221702-1221740
  hypo
gtgctgccaggagctgcggacctcgctgaggaatgtga

SEQ ID NO: 18178 - DNA, 46 bp, Homo sapiens
  chr11:1255096-1255142
  hypo
ctgccctgccctgccccgccccgcatcaccccgcctggcctggccc

SEQ ID NO: 18179 - DNA, 31 bp, Homo sapiens
  chr11:1255165-1255196
  hypo
cccacctgaaccctgccgggccaggtcagtc

SEQ ID NO: 18180 - DNA, 36 bp, Homo sapiens
  chr11:1275652-1275688
  hypo
ggggtgacccaggtgccgcagcgatggcccagtgcc

SEQ ID NO: 18181 - DNA, 31 bp, Homo sapiens
  chr11:1276455-1276486
  hypo
ccatgcccaccacagccgctctgtgatctga

SEQ ID NO: 18182 - DNA, 31 bp, Homo sapiens
  chr11:1276707-1276738
  hypo
agagcctggaggcttacgcagagctctgccg

SEQ ID NO: 18183 - DNA, 59 bp, Homo sapiens
  chr11:1390810-1390869
  hypo
cagagccgctgtagcacgaggttttgcggctcaggccccagctgcgtaccagggtctgg

SEQ ID NO: 18184 - DNA, 88 bp, Homo sapiens
  chr11:1433175-1433263
  hypo
cttaacagcagtcctgcggtgggtggagtctcagctgcgccgccccgtcctgcggtgggtggagtctcagctgcgccgccccgtcctg

SEQ ID NO: 18185 - DNA, 38 bp, Homo sapiens
  chr11:1433636-1433674
  hypo
ctgagctgcgctgccccgtcctgcggtgggtggagtct

SEQ ID NO: 18186 - DNA, 31 bp, Homo sapiens
  chr11:1433708-1433739
  hypo
ctcagctgtgctgccccgtcctgtgattggt

SEQ ID NO: 18187 - DNA, 37 bp, Homo sapiens
  chr11:1433783-1433820
  hypo
tgagctgtttggtaggcggggccgagggagcaggcgc

SEQ ID NO: 18188 - DNA, 58 bp, Homo sapiens
  chr11:1464502-1464560
  hypo
ggccctccaaggcccccgccctgccctgcgccccccaacagcccgggcactgctgtcc

SEQ ID NO: 18189 - DNA, 73 bp, Homo sapiens
  chr11:1464562-1464635
  hypo
agggggagaagtatgacggccggaaggcggacgtgtggagctgcggcgtcatcctgttcgccttgctggtggt

SEQ ID NO: 18190 - DNA, 133 bp, Homo sapiens
  chr11:1464673-1464806
  hypo
caaacctgcccccccacgctgacccccacacccggccgcccgcagggggctctgcccttcgacgatgacaacttgcgacagctgctggagaaggtgaagcggggcgtgttccacatgccgcactttatcccgc

SEQ ID NO: 18191 - DNA, 31 bp, Homo sapiens
  chr11:1464881-1464912
  hypo
cggggcggccccagagcgtggcgggggggcg

SEQ ID NO: 18192 - DNA, 31 bp, Homo sapiens
  chr11:1467133-1467164
  hypo
agaggtgtgtgtgccccgaggctgctgggcc

SEQ ID NO: 18193 - DNA, 31 bp, Homo sapiens
  chr11:1477649-1477680
  hypo
gccgtgttccagaagccggtcaagttccagg

SEQ ID NO: 18194 - DNA, 56 bp, Homo sapiens
  chr11:1478288-1478344
  hypo
ccggcctgtgctggggcggggaggggctgcgggcaggtcctcggcggagccaggct

SEQ ID NO: 18195 - DNA, 60 bp, Homo sapiens
  chr11:1482006-1482066
  hypo
gccgcccgccctgccccgagtggacccgcggccgcgccgcccgtccgtccagactgttct

SEQ ID NO: 18196 - DNA, 31 bp, Homo sapiens
  chr11:1494353-1494384
  hypo
tcatgtgtgccctgtgcggggctgactcagc

SEQ ID NO: 18197 - DNA, 31 bp, Homo sapiens
  chr11:1494484-1494515
  hypo
ctctgcatgaccttcacgcccaccttcccag

SEQ ID NO: 18198 - DNA, 128 bp, Homo sapiens
  chr11:1497230-1497358
  hypo
aagagcaacctgagcacgagcaccctggcactgcggcagtggatccacacgggggccgaggcacagctgggccgagggaggaggaggcacacctggagcaggacggtggagaccgcatcacactgctc

SEQ ID NO: 18199 - DNA, 31 bp, Homo sapiens
  chr11:1497381-1497412
  hypo
tattaactgtttatttcgggaattttccatt

SEQ ID NO: 18200 - DNA, 31 bp, Homo sapiens
  chr11:1497429-1497460
  hypo
agttgactgtgggtaacggaaactgtagata

SEQ ID NO: 18201 - DNA, 37 bp, Homo sapiens
  chr11:1521375-1521412
  hypo
gttcacactgtgattccgttcacgggaaattccagga

SEQ ID NO: 18202 - DNA, 31 bp, Homo sapiens
  chr11:1579098-1579129
  hypo
ccagccagacagtggacgatgacttggcagc

SEQ ID NO: 18203 - DNA, 40 bp, Homo sapiens
  chr11:1584968-1585008
  hypo
tgtatggagatccccccgtgcccagcggacacctccctga

SEQ ID NO: 18204 - DNA, 39 bp, Homo sapiens
  chr11:1586816-1586855
  hypo
gctgggtacctggctgcgtgcagccggctggatgagctc

SEQ ID NO: 18205 - DNA, 62 bp, Homo sapiens; identical to SEQ ID NO: 4177
  chr11:1592746-1592808
  hypo

SEQ ID NO: 18206 - DNA, 82 bp, Homo sapiens; identical to SEQ ID NO: 4178
  chr11:1592947-1593029
  hypo

SEQ ID NO: 18207 - DNA, 31 bp, Homo sapiens; identical to SEQ ID NO: 4179
  chr11:1593214-1593245
  hypo

SEQ ID NO: 18208 - DNA, 118 bp, Homo sapiens; identical to SEQ ID NO: 4180
  chr11:1594038-1594156
  hypo

SEQ ID NO: 18209 - DNA, 31 bp, Homo sapiens
  chr11:1634888-1634919
  hypo
tccctttctgcctgaccgctccagctggcac

SEQ ID NO: 18210 - DNA, 31 bp, Homo sapiens
  chr11:1787100-1787131
  hypo
gtgtcccctgcccaagcgcccactctccacc

SEQ ID NO: 18211 - DNA, 31 bp, Homo sapiens
  chr11:1826978-1827009
  hypo
caccagtgtagggaggcgtgataaccaccct

SEQ ID NO: 18212 - DNA, 31 bp, Homo sapiens
  chr11:1919471-1919502
  hypo
tttttttttttgagaccgagtctcgctccgt

SEQ ID NO: 18213 - DNA, 51 bp, Homo sapiens
  chr11:1980679-1980730
  hypo
agcccacagaagggaccggctggacgcgccagctcccgtgacccgctcctg

SEQ ID NO: 18214 - DNA, 31 bp, Homo sapiens
  chr11:1987802-1987833
  hypo
tcgccctgagggtccccgcccccgataccca

SEQ ID NO: 18215 - DNA, 31 bp, Homo sapiens
  chr11:2026840-2026871
  hypo
gggtgggacacgggtacggcacgtcacccgg

SEQ ID NO: 18216 - DNA, 55 bp, Homo sapiens
  chr11:2051190-2051245
  hypo
tgccaggacggcaagccgggagtatgtgctccttggggagcggggcccaggtctg

SEQ ID NO: 18217 - DNA, 35 bp, Homo sapiens
  chr11:2051347-2051382
  hypo
ctcacaccactgcccccgggcgcaggaccagcaca

SEQ ID NO: 18218 - DNA, 31 bp, Homo sapiens
  chr11:2219692-2219723
  hypo
ccagagacctggcaggcggcacctttctagg

SEQ ID NO: 18219 - DNA, 42 bp, Homo sapiens
  chr11:2221374-2221416
  hypo
ggggctggacagggagcgggcacagaacgaccagggctctgg

SEQ ID NO: 18220 - DNA, 31 bp, Homo sapiens
  chr11:2237235-2237266
  hypo
cttgcccccactgccccgggccttctcctgc

SEQ ID NO: 18221 - DNA, 37 bp, Homo sapiens
  chr11:2237643-2237680
  hypo
tgggagagcagggtgccgtgggcggtcagcaatgggt

SEQ ID NO: 18222 - DNA, 31 bp, Homo sapiens
  chr11:2257967-2257998
  hypo
cagctgctgggccagacgaggttccatcgct

SEQ ID NO: 18223 - DNA, 47 bp, Homo sapiens
  chr11:2269905-2269952
  hypo
cattcccagagcgggacgcttccaccggaagacgctattaagacagc

SEQ ID NO: 18224 - DNA, 31 bp, Homo sapiens
  chr11:2278321-2278352
  hypo
caaaggtggtttcaggcgctcaggtgaagtg

SEQ ID NO: 18225 - DNA, 39 bp, Homo sapiens
  chr11:2278368-2278407
  hypo
tggaatccagccccagcgggcgggcggcagcagcagtgc

SEQ ID NO: 18226 - DNA, 76 bp, Homo sapiens
  chr11:2278537-2278613
  hypo
caacgaccgcccctgccggagacccccgccccacccgctgtggttctgctggcccaggtttcgctgggcccactcc

SEQ ID NO: 18227 - DNA, 80 bp, Homo sapiens
  chr11:2294684-2294764
  hypo
cgaagctggtgaacctcgagaacacgaggccgcgtgaacgaagccagacaccgaggaccacgtagcgtgagactctcagt

SEQ ID NO: 18228 - DNA, 55 bp, Homo sapiens
  chr11:2328965-2329020
  hypo
cgtttccaccagagaacgccccactccacgactaggggcacgggcatcagtgaga

SEQ ID NO: 18229 - DNA, 31 bp, Homo sapiens
  chr11:2329024-2329055
  hypo
ggggacagtggttggccgggccatggagacc

SEQ ID NO: 18230 - DNA, 22 bp, Homo sapiens
  chr11:2409425-2409447
  hypo
gctaccacgcccagccccctct

SEQ ID NO: 18231 - DNA, 31 bp, Homo sapiens
  chr11:2413089-2413120
  hypo
cccggccagcatcctccgatctccaagggtg

SEQ ID NO: 18232 - DNA, 31 bp, Homo sapiens
  chr11:2413142-2413173
  hypo
tgggcctcttgctccccgcttcccagatcat

SEQ ID NO: 18233 - DNA, 34 bp, Homo sapiens
  chr11:2413398-2413432
  hypo
tcactctccaggcacccggcggccaaggcttgtg

SEQ ID NO: 18234 - DNA, 31 bp, Homo sapiens
  chr11:2441828-2441859
  hypo
cagtcaggggcaggggcggtggggagcgggt

SEQ ID NO: 18235 - DNA, 59 bp, Homo sapiens
  chr11:2560750-2560809
  hypo
agcctgggagccaagccgatggctgtgctggccgaagggaacaccgccatggtgctctg

SEQ ID NO: 18236 - DNA, 39 bp, Homo sapiens
  chr11:2562213-2562252
  hypo
cacagacatatgtgcacggatgggcgtgtggacgtatgc

SEQ ID NO: 18237 - DNA, 42 bp, Homo sapiens
  chr11:2579780-2579822
  hypo
tgtcaggtggctgctgcgccctgtgtccgcctcctgaccttg

SEQ ID NO: 18238 - DNA, 44 bp, Homo sapiens
  chr11:2581753-2581797
  hypo
gttccttctgggggggcgggggggggtgacgtccatcctggggg

SEQ ID NO: 18239 - DNA, 31 bp, Homo sapiens
  chr11:2594925-2594956
  hypo
tgcagcaggcagatcccgcactggaacaccg

SEQ ID NO: 18240 - DNA, 31 bp, Homo sapiens
  chr11:2595669-2595700
  hypo
aggcctgggggccgcacgggggctggaggtg

SEQ ID NO: 18241 - DNA, 61 bp, Homo sapiens
  chr11:2596283-2596344
  hypo
cagtgggtactggccccggcacggctgataagcagtgcccagccttcgctgctgccctgcc

SEQ ID NO: 18242 - DNA, 31 bp, Homo sapiens
  chr11:2597547-2597578
  hypo
tggatgtgagaactctcgaatcccctgagtg

SEQ ID NO: 18243 - DNA, 67 bp, Homo sapiens
  chr11:2610096-2610163
  hypo
caggcagttgggggccgcggggccgggaaggtcactgccttttttgggagcccgagcaagccagtga

SEQ ID NO: 18244 - DNA, 31 bp, Homo sapiens
  chr11:2753854-2753885
  hypo
ctgacctttccggccacggggcagcagttgc

SEQ ID NO: 18245 - DNA, 31 bp, Homo sapiens
  chr11:2832257-2832288
  hypo
ggcttagactcacccccgcccagtcttggca

SEQ ID NO: 18246 - DNA, 31 bp, Homo sapiens
  chr11:2842364-2842395
  hypo
gggtctgtcaagtgttcggtggcccctggct

SEQ ID NO: 18247 - DNA, 31 bp, Homo sapiens
  chr11:2874226-2874257
  hypo
cctgagtgaggcagagcgtaaaggagatgga

SEQ ID NO: 18248 - DNA, 31 bp, Homo sapiens
  chr11:2896187-2896218
  hypo
aaggattggatcatgccgaaggtagccacag

SEQ ID NO: 18249 - DNA, 144 bp, Homo sapiens; identical to SEQ ID NO: 4188
  chr11:2906271-2906415
  hypo

SEQ ID NO: 18250 - DNA, 35 bp, Homo sapiens; identical to SEQ ID NO: 4189
  chr11:2906692-2906727
  hypo

SEQ ID NO: 18251 - DNA, 116 bp, Homo sapiens; identical to SEQ ID NO: 4190
  chr11:2906936-2907052
  hypo

SEQ ID NO: 18252 - DNA, 31 bp, Homo sapiens
  chr11:2910402-2910433
  hypo
agccctcactgctgtgcgttccttctaggaa

SEQ ID NO: 18253 - DNA, 42 bp, Homo sapiens
  chr11:2910463-2910505
  hypo
aatcctggtggatcttcgtgctggaatcgttaagccagctgt

SEQ ID NO: 18254 - DNA, 31 bp, Homo sapiens
  chr11:2934241-2934272
  hypo
tgagcagtgtcccatacgacccagggcaccc

SEQ ID NO: 18255 - DNA, 31 bp, Homo sapiens
  chr11:2938037-2938068
  hypo
ctccagccaaggggtacggggggcctgaggg

SEQ ID NO: 18256 - DNA, 74 bp, Homo sapiens
  chr11:2939100-2939174
  hypo
ggaagctttaccctggcgggcgcaacagggccctccgaatggcgaggcctgcagccgggcgaggggtgggcatt

SEQ ID NO: 18257 - DNA, 105 bp, Homo sapiens
  chr11:2939193-2939298
  hypo
gcctgaatggcctctccgtgccaggcggcccccgggccagtgtgttcgacctgaaggccatcgcctccctgctgcggctgccagacgtcccgaggatcttcctgg

SEQ ID NO: 18258 - DNA, 31 bp, Homo sapiens
  chr11:2942533-2942564
  hypo
aaaccatttatggttccggttggaagcagtt

SEQ ID NO: 18259 - DNA, 45 bp, Homo sapiens
  chr11:2942679-2942724
  hypo
ccctgcactcccaggcgcgttggcccagcacgccctgcttagtgg

SEQ ID NO: 18260 - DNA, 101 bp, Homo sapiens
  chr11:2942737-2942838
  hypo
accagatagagagcctcgccctggcctgggagcagcctgcggccaagcctgtcccaccgagcccatccccgggagcagcctgcggccgagcctgtcccacc

SEQ ID NO: 18261 - DNA, 53 bp, Homo sapiens
  chr11:3060354-3060407
  hypo
gtagcctacaaaggaccgagaacagaaagcaaagggctcggtttctagagcag

SEQ ID NO: 18262 - DNA, 21 bp, Homo sapiens
  chr11:3098286-3098307
  hypo
agccaccgtgcctggcctctc

SEQ ID NO: 18263 - DNA, 31 bp, Homo sapiens
  chr11:3102364-3102395
  hypo
aaggttccaaaatttccgttagacaggagga

SEQ ID NO: 18264 - DNA, 54 bp, Homo sapiens
  chr11:3109134-3109188
  hypo
cggacagggggtgacacggcaagatggccaggagtgcgtcgcacagcagaagct

SEQ ID NO: 18265 - DNA, 31 bp, Homo sapiens
  chr11:3111263-3111294
  hypo
agggtcatatccagctcgggcctccacccca

SEQ ID NO: 18266 - DNA, 31 bp, Homo sapiens
  chr11:3111798-3111829
  hypo
tcaccatcctgctcctcgtctgagagctctg

SEQ ID NO: 18267 - DNA, 31 bp, Homo sapiens
  chr11:3127013-3127044
  hypo
cccggagccccaggctcgcacctgcagcagc

SEQ ID NO: 18268 - DNA, 98 bp, Homo sapiens; identical to SEQ ID NO: 4195
  chr11:3186352-3186450
  hypo

SEQ ID NO: 18269 - DNA, 47 bp, Homo sapiens
  chr11:3212406-3212453
  hypo
aaagatagagagagggcggggctggatgaactcgcaggtttggggtc

SEQ ID NO: 18270 - DNA, 31 bp, Homo sapiens
  chr11:3219913-3219944
  hypo
agccacccacacaaagcgtcagattatgtgc

SEQ ID NO: 18271 - DNA, 35 bp, Homo sapiens
  chr11:3247716-3247751
  hypo
ccaggcctgctgggcacgtgcgggagcctgaggtg

SEQ ID NO: 18272 - DNA, 243 bp, Homo sapiens; identical to SEQ ID NO: 4197
  chr11:3444552-3444795
  hypo

SEQ ID NO: 18273 - DNA, 31 bp, Homo sapiens
  chr11:3511140-3511171
  hypo
ccacatagtattcttacgggttaaattgagt

SEQ ID NO: 18274 - DNA, 27 bp, Homo sapiens
  chr11:3602557-3602584
  hypo
ccgcggacacgccgggccctggcctgc

SEQ ID NO: 18275 - DNA, 31 bp, Homo sapiens
  chr11:3658467-3658498
  hypo
ctggcagagggagggacgccccggcctcccg

SEQ ID NO: 18276 - DNA, 31 bp, Homo sapiens
  chr11:3661448-3661479
  hypo
tgcctcccaggattcccgcagcagggcatgg

SEQ ID NO: 18277 - DNA, 31 bp, Homo sapiens
  chr11:3697421-3697452
  hypo
ggactgggtaaggctgcgcagttcgtccatg

SEQ ID NO: 18278 - DNA, 31 bp, Homo sapiens
  chr11:3697460-3697491
  hypo
ctcaggcatgggaagccggccaatgtgggga

SEQ ID NO: 18279 - DNA, 29 bp, Homo sapiens
  chr11:3828813-3828842
  hypo
aggcgtgagctaccgcgcctggccctcac

SEQ ID NO: 18280 - DNA, 35 bp, Homo sapiens
  chr11:6432991-6433026
  hypo
actgactgcccctctccggccgcacttccatccca

SEQ ID NO: 18281 - DNA, 14 bp, Homo sapiens
  chr11:6497208-6497222
  hypo
gcacctggccaggt

SEQ ID NO: 18282 - DNA, 31 bp, Homo sapiens
  chr11:6497278-6497309
  hypo
ctttgtgctcccacagcgccctctgtacttc

SEQ ID NO: 18283 - DNA, 31 bp, Homo sapiens; identical to SEQ ID NO: 4203
  chr11:6502786-6502817
  hypo

SEQ ID NO: 18284 - DNA, 31 bp, Homo sapiens
  chr11:6730929-6730960
  hypo
aaataaatctgataatcgtacaaacttagaa

SEQ ID NO: 18285 - DNA, 31 bp, Homo sapiens
  chr11:6730988-6731019
  hypo
gagtgaggattttgaacgcaggtgtctcccc

SEQ ID NO: 18286 - DNA, 31 bp, Homo sapiens; identical to SEQ ID NO: 4204
  chr11:7534832-7534863
  hypo

SEQ ID NO: 18287 - DNA, 31 bp, Homo sapiens
  chr11:7619001-7619032
  hypo
ccatcctgcctgggggcgggattggctgctc

SEQ ID NO: 18288 - DNA, 31 bp, Homo sapiens
  chr11:8255581-8255612
  hypo
cacactcagatgcatgcgctgggcccagcag

SEQ ID NO: 18289 - DNA, 31 bp, Homo sapiens
  chr11:8269569-8269600
  hypo
tctgggtcttaacttacgtgaccagggctca

SEQ ID NO: 18290 - DNA, 31 bp, Homo sapiens
  chr11:8269642-8269673
  hypo
gtagagcaagattgcccgtgatctcacagtc

SEQ ID NO: 18291 - DNA, 54 bp, Homo sapiens
  chr11:8269718-8269772
  hypo
ctacccctgcagcaagcggtcaggccctcatgccgctgccgtcaatttcaaaga

SEQ ID NO: 18292 - DNA, 41 bp, Homo sapiens; identical to SEQ ID NO: 4205
  chr11:8615429-8615470
  hypo

SEQ ID NO: 18293 - DNA, 105 bp, Homo sapiens; identical to SEQ ID NO: 4206
  chr11:8615506-8615611
  hypo

SEQ ID NO: 18294 - DNA, 85 bp, Homo sapiens; identical to SEQ ID NO: 4207
  chr11:8615614-8615699
  hypo

SEQ ID NO: 18295 - DNA, 31 bp, Homo sapiens
  chr11:8724437-8724468
  hypo
ctgctctcgtagcactcgaacacccagcctg

SEQ ID NO: 18296 - DNA, 31 bp, Homo sapiens
  chr11:8725355-8725386
  hypo
tgtccactgtctctcccgcctgatggtgtac

SEQ ID NO: 18297 - DNA, 31 bp, Homo sapiens
  chr11:8725390-8725421
  hypo
agaaggcccagtgatccgccagatgctgggt

SEQ ID NO: 18298 - DNA, 31 bp, Homo sapiens
  chr11:8725426-8725457
  hypo
ccaaatggtcagtgaacgtggactcacagaa

SEQ ID NO: 18299 - DNA, 31 bp, Homo sapiens
  chr11:8725494-8725525
  hypo
ctccaggccctgtccccgccccaaaattcgc

SEQ ID NO: 18300 - DNA, 32 bp, Homo sapiens
  chr11:8735204-8735236
  hypo
gcatgagccaccgcgcccggctgagatctaca

SEQ ID NO: 18301 - DNA, 42 bp, Homo sapiens
  chr11:8751525-8751567
  hypo
gtccttcttgggtctccgggtgactggcggggctggggtgga

SEQ ID NO: 18302 - DNA, 62 bp, Homo sapiens
  chr11:8752346-8752408
  hypo
tgcccaggctgtgggcgcgggtaccggtacgggtcagcaagacgccccgggggccagctgct

SEQ ID NO: 18303 - DNA, 31 bp, Homo sapiens
  chr11:8752682-8752713
  hypo
tttcactatcactgagcgggtagatgggact

SEQ ID NO: 18304 - DNA, 31 bp, Homo sapiens
  chr11:8756389-8756420
  hypo
agaaatagtacctgtcgcgcattgagcttgg

SEQ ID NO: 18305 - DNA, 62 bp, Homo sapiens
  chr11:8759789-8759851
  hypo
tccctatgctgctttacgcttcagttgatcactccctgtttcttgagcgtctcaggacatca

SEQ ID NO: 18306 - DNA, 90 bp, Homo sapiens
  chr11:8759879-8759969
  hypo
aaatgctcttctcagtcggtttccttggctagttcttcttcctcgtccagacctcaaaacactggaacgtcccagcgcttggacttctct

SEQ ID NO: 18307 - DNA, 36 bp, Homo sapiens
  chr11:8791119-8791155
  hypo
taaaaactcccataagcgtctcgtcttagaaaaaag

SEQ ID NO: 18308 - DNA, 18 bp, Homo sapiens
  chr11:8801353-8801371
  hypo
gcccggccaaggtttcca

SEQ ID NO: 18309 - DNA, 31 bp, Homo sapiens
  chr11:8959627-8959658
  hypo
cctggtcagtggcaagcgggcagaatcaggg

SEQ ID NO: 18310 - DNA, 17 bp, Homo sapiens
  chr11:9014178-9014195
  hypo
cgggcgcagtggctcac

SEQ ID NO: 18311 - DNA, 31 bp, Homo sapiens
  chr11:9049167-9049198
  hypo
ctagcttgccgagccccgcagcacccctgtt

SEQ ID NO: 18312 - DNA, 50 bp, Homo sapiens
  chr11:9074511-9074561
  hypo
tggacctctcaaagcacggtggtcggggcatctggcggaggacctggaag

SEQ ID NO: 18313 - DNA, 31 bp, Homo sapiens
  chr11:9074608-9074639
  hypo
gtgtgaggacctgccccgggaactgggcccc

SEQ ID NO: 18314 - DNA, 31 bp, Homo sapiens
  chr11:9074671-9074702
  hypo
catctgaggaagcacccgtctcctccaccac

SEQ ID NO: 18315 - DNA, 16 bp, Homo sapiens
  chr11:9206714-9206730
  hypo
gcgacagtgtgagact

SEQ ID NO: 18316 - DNA, 21 bp, Homo sapiens
  chr11:9347579-9347600
  hypo
aatatacagccaggcacggtg

SEQ ID NO: 18317 - DNA, 31 bp, Homo sapiens
  chr11:9405391-9405422
  hypo
ttggtaattactaatacgtaatgtgataaaa

SEQ ID NO: 18318 - DNA, 31 bp, Homo sapiens
  chr11:9405437-9405468
  hypo
agttcatttaatcttccgtgttattgcctta

SEQ ID NO: 18319 - DNA, 4 bp, Homo sapiens
  chr11:9405499-9405503
  hypo
caga

SEQ ID NO: 18320 - DNA, 24 bp, Homo sapiens
  chr11:9405802-9405826
  hypo
caccgcgcccggcagtttaaatat

SEQ ID NO: 18321 - DNA, 37 bp, Homo sapiens
  chr11:9418900-9418937
  hypo
atatatatatattagtcgggcacggtggcaggtgcct

SEQ ID NO: 18322 - DNA, 31 bp, Homo sapiens
  chr11:9422436-9422467
  hypo
tactaaaatagctgggcgcaggtggctcccc

SEQ ID NO: 18323 - DNA, 35 bp, Homo sapiens
  chr11:9540961-9540996
  hypo
ggattacaggcgtgagccaccgcacccagcttggt

SEQ ID NO: 18324 - DNA, 31 bp, Homo sapiens
  chr11:9548318-9548349
  hypo
aattgcaggccaggcacggcaggctgggagt

SEQ ID NO: 18325 - DNA, 14 bp, Homo sapiens
  chr11:9554671-9554685
  hypo
gtgcccagccacca

SEQ ID NO: 18326 - DNA, 31 bp, Homo sapiens
  chr11:9554706-9554737
  hypo
atttgactgttgtaggcgcctcatattatat

SEQ ID NO: 18327 - DNA, 31 bp, Homo sapiens
  chr11:9554964-9554995
  hypo
ggggatttaaatttcccggtaactcctggag

SEQ ID NO: 18328 - DNA, 31 bp, Homo sapiens; identical to SEQ ID NO: 4210
  chr11:9596557-9596588
  hypo

SEQ ID NO: 18329 - DNA, 88 bp, Homo sapiens; identical to SEQ ID NO: 4211
  chr11:9596679-9596767
  hypo

SEQ ID NO: 18330 - DNA, 31 bp, Homo sapiens
  chr11:9629900-9629931
  hypo
aaatgttctttattatcgacaccagtttgaa

SEQ ID NO: 18331 - DNA, 74 bp, Homo sapiens; identical to SEQ ID NO: 4212
  chr11:9685558-9685632
  hypo

SEQ ID NO: 18332 - DNA, 101 bp, Homo sapiens; identical to SEQ ID NO: 4213
  chr11:9685634-9685735
  hypo

SEQ ID NO: 18333 - DNA, 61 bp, Homo sapiens; identical to SEQ ID NO: 4214
  chr11:9685751-9685812
  hypo

SEQ ID NO: 18334 - DNA, 146 bp, Homo sapiens; identical to SEQ ID NO: 4215
  chr11:9685848-9685994
  hypo

SEQ ID NO: 18335 - DNA, 44 bp, Homo sapiens; identical to SEQ ID NO: 4216
  chr11:9685997-9686041
  hypo

SEQ ID NO: 18336 - DNA, 18 bp, Homo sapiens
  chr11:9751051-9751069
  hypo
ttttttttttctgagacg

SEQ ID NO: 18337 - DNA, 36 bp, Homo sapiens
  chr11:9771062-9771098
  hypo
aattacaggcgtgagccaccacgccctgcccatata

SEQ ID NO: 18338 - DNA, 18 bp, Homo sapiens
  chr11:9863100-9863118
  hypo
agagtcttgctctgtccg

SEQ ID NO: 18339 - DNA, 31 bp, Homo sapiens
  chr11:10712068-10712099
  hypo
ggctgccctggactgtcgcctgaactcagag

SEQ ID NO: 18340 - DNA, 31 bp, Homo sapiens
  chr11:10712134-10712165
  hypo
cccctttccctctattcgtgattttcctgtg

SEQ ID NO: 18341 - DNA, 62 bp, Homo sapiens
  chr11:10712200-10712262
  hypo
ctaagttactaactagcggcagggtgacatctaatgcaggaagcgcccgctttggaccaagg

SEQ ID NO: 18342 - DNA, 18 bp, Homo sapiens
  chr11:10815867-10815885
  hypo
acatttgaagctgggcgc

SEQ ID NO: 18343 - DNA, 31 bp, Homo sapiens
  chr11:11398889-11398920
  hypo
ccggttctccttgatgcgggtgagtacaggt

SEQ ID NO: 18344 - DNA, 51 bp, Homo sapiens
  chr11:11534253-11534304
  hypo
gctacggagagtctggcggcacctgaggcctgggctcgttatgtgccttaa

SEQ ID NO: 18345 - DNA, 60 bp, Homo sapiens
  chr11:11534352-11534412
  hypo
tggacaccaggacacacgggtgctgcctagaaaaaggatgcctctcgacaaagtcccata

SEQ ID NO: 18346 - DNA, 31 bp, Homo sapiens
  chr11:11534429-11534460
  hypo
catcactcaggtggcccgtgtgtgtgatctg

SEQ ID NO: 18347 - DNA, 31 bp, Homo sapiens
  chr11:11601779-11601810
  hypo
ccttggtgaaatacctcggcagactcagggc

SEQ ID NO: 18348 - DNA, 31 bp, Homo sapiens
  chr11:11601815-11601846
  hypo
tcatgtgttctcaatccgacagcaaggaagg

SEQ ID NO: 18349 - DNA, 31 bp, Homo sapiens
  chr11:11601854-11601885
  hypo
tattccttctccctcccgccacccccaaaga

SEQ ID NO: 18350 - DNA, 31 bp, Homo sapiens
  chr11:11601910-11601941
  hypo
tttgctttcctaagaccgtccctgagatgta

SEQ ID NO: 18351 - DNA, 31 bp, Homo sapiens
  chr11:11601956-11601987
  hypo
ggcttctcatgtttcccggcttttgcccaga

SEQ ID NO: 18352 - DNA, 31 bp, Homo sapiens
  chr11:11614845-11614876
  hypo
ctagcatttcagtttgcggaccctggaatag

SEQ ID NO: 18353 - DNA, 31 bp, Homo sapiens
  chr11:11990980-11991011
  hypo
tctctatattgccagccgggaaatggaggca

SEQ ID NO: 18354 - DNA, 31 bp, Homo sapiens
  chr11:12073850-12073881
  hypo
atccaggtgggcctaacgtaatcacaagggt

SEQ ID NO: 18355 - DNA, 43 bp, Homo sapiens
  chr11:12073904-12073947
  hypo
gtcagagaaggaggtgcgaggatggacacggggttctaagtga

SEQ ID NO: 18356 - DNA, 49 bp, Homo sapiens
  chr11:12073970-12074019
  hypo
atggaggaagaggccacgacccaaggaaagcaagcggcctgtagaagct

SEQ ID NO: 18357 - DNA, 31 bp, Homo sapiens
  chr11:12083039-12083070
  hypo
aatcaaggtgatgccacgctggagtagaggg

SEQ ID NO: 18358 - DNA, 31 bp, Homo sapiens
  chr11:12091296-12091327
  hypo
gctgaataaaataccccgagtcatttcttat

SEQ ID NO: 18359 - DNA, 31 bp, Homo sapiens
  chr11:12106315-12106346
  hypo
tgatcagatagggccacgcaaggggtttggg

SEQ ID NO: 18360 - DNA, 35 bp, Homo sapiens
  chr11:12115884-12115919
  hypo
atgagtgaagtcagagcgatcgactaggaatccac

SEQ ID NO: 18361 - DNA, 121 bp, Homo sapiens; identical to SEQ ID NO: 4220
  chr11:12132015-12132136
  hypo

SEQ ID NO: 18362 - DNA, 56 bp, Homo sapiens; identical to SEQ ID NO: 4221
  chr11:12132188-12132244
  hypo

SEQ ID NO: 18363 - DNA, 34 bp, Homo sapiens; identical to SEQ ID NO: 4222
  chr11:12132269-12132303
  hypo

SEQ ID NO: 18364 - DNA, 31 bp, Homo sapiens
  chr11:12145917-12145948
  hypo
cttctctgacctaagacgcctttctgaagct

SEQ ID NO: 18365 - DNA, 74 bp, Homo sapiens
  chr11:12209617-12209691
  hypo
tgggagtcacaagccacgtggctagggcacttgaaatgtggtaagtccgcattgagctgcgctgtacatataaa

SEQ ID NO: 18366 - DNA, 52 bp, Homo sapiens
  chr11:12209729-12209781
  hypo
ttatcaaatattttatcgatactttttatattgattacgtgttgcaatgata

SEQ ID NO: 18367 - DNA, 31 bp, Homo sapiens
  chr11:12209862-12209893
  hypo
aaaatttaaaattgcacgtgtggctcacctt

SEQ ID NO: 18368 - DNA, 31 bp, Homo sapiens
  chr11:12209928-12209959
  hypo
ttttgccttccagggacgtttgataatattt

SEQ ID NO: 18369 - DNA, 64 bp, Homo sapiens
  chr11:12209981-12210045
  hypo
gctgttgggagagtggcgtggttggcacgagcacctagttggaagaggccggggaagctgctga

SEQ ID NO: 18370 - DNA, 42 bp, Homo sapiens
  chr11:12214007-12214049
  hypo
tctgatttcacttaaacgatttctcctcagaagcaaggcacg

SEQ ID NO: 18371 - DNA, 31 bp, Homo sapiens
  chr11:12225813-12225844
  hypo
aggaccctgtggcttgcgcactgccattgaa

SEQ ID NO: 18372 - DNA, 31 bp, Homo sapiens
  chr11:12230961-12230992
  hypo
tctcatagccaccacacggggggtataatca

SEQ ID NO: 18373 - DNA, 31 bp, Homo sapiens
  chr11:12238924-12238955
  hypo
gagcctgagttgtagacggaggctgtgaatg

SEQ ID NO: 18374 - DNA, 37 bp, Homo sapiens
  chr11:12240001-12240038
  hypo
actctcctgcatgaggcgtccacgccaggcactgtct

SEQ ID NO: 18375 - DNA, 62 bp, Homo sapiens
  chr11:12240126-12240188
  hypo
ccccatctcacctccacgccttcggagagagaagtgatcatgtgaccgcggaaacagggatc

SEQ ID NO: 18376 - DNA, 31 bp, Homo sapiens
  chr11:12240258-12240289
  hypo
ctggatgcaatttgggcggtttggtttgaat

SEQ ID NO: 18377 - DNA, 31 bp, Homo sapiens
  chr11:12247646-12247677
  hypo
ctgaaggtgctcagctcgccacacctctgcc

SEQ ID NO: 18378 - DNA, 78 bp, Homo sapiens
  chr11:12247749-12247827
  hypo
tggagaacaaccagctcgcatttgatgtggccgagcgagagtttgggatccctccagtgaccacgggcaaagagatgg

SEQ ID NO: 18379 - DNA, 61 bp, Homo sapiens
  chr11:12247866-12247927
  hypo
acctctccaagttctacgagctcttccggggcaccccactgaggcccgtgggtaagcacct

SEQ ID NO: 18380 - DNA, 31 bp, Homo sapiens
  chr11:12248537-12248568
  hypo
ttccaaatcacagttgcgctttatttcccaa

SEQ ID NO: 18381 - DNA, 55 bp, Homo sapiens
  chr11:12253011-12253066
  hypo
ccacctgcacactttccgaagagccgggtggcattacgtgcgaaggtgcctcttc

SEQ ID NO: 18382 - DNA, 31 bp, Homo sapiens
  chr11:12253366-12253397
  hypo
tatcccctccaggtgcgcgcaggtcatggct

SEQ ID NO: 18383 - DNA, 31 bp, Homo sapiens
  chr11:12260725-12260756
  hypo
gataagaaatgagagtcgggattcaaacccc

SEQ ID NO: 18384 - DNA, 59 bp, Homo sapiens
  chr11:12260785-12260844
  hypo
ccatcctttggaaagacgcatccctcctgtgagcattgcctctgcgggggtggccctgc

SEQ ID NO: 18385 - DNA, 31 bp, Homo sapiens
  chr11:12276799-12276830
  hypo
tattaaatacatccttcgtgtgcaaccctca

SEQ ID NO: 18386 - DNA, 31 bp, Homo sapiens
  chr11:12276906-12276937
  hypo
ctactgcctgtctctacgattttgactactc

SEQ ID NO: 18387 - DNA, 31 bp, Homo sapiens
  chr11:12276965-12276996
  hypo
agtacttgtgtttttgcggccacagggtttt

SEQ ID NO: 18388 - DNA, 31 bp, Homo sapiens
  chr11:12277013-12277044
  hypo
cacctccagaatccccgcgttctgctcctgg

SEQ ID NO: 18389 - DNA, 31 bp, Homo sapiens
  chr11:12277049-12277080
  hypo
tttgcttctcctgggtcgtggggtgctattt

SEQ ID NO: 18390 - DNA, 31 bp, Homo sapiens
  chr11:12278212-12278243
  hypo
aggaagcagaagcccacgaggtccccagcat

SEQ ID NO: 18391 - DNA, 31 bp, Homo sapiens
  chr11:12278271-12278302
  hypo
ctggcatttgaaggctcgggataagccataa

SEQ ID NO: 18392 - DNA, 50 bp, Homo sapiens
  chr11:12278305-12278355
  hypo
acccactcttctctcccgatccccaggaatctatgcgaaagtcatttccc

SEQ ID NO: 18393 - DNA, 41 bp, Homo sapiens
  chr11:12278389-12278430
  hypo
gtaagaaacgtgtgtacgtgatggaacggctgagcgccgag

SEQ ID NO: 18394 - DNA, 57 bp, Homo sapiens
  chr11:12278468-12278525
  hypo
ctgtgccaccaccttgcgcctggccgcctacacctttgactgcgatgaaggtaaccc

SEQ ID NO: 18395 - DNA, 31 bp, Homo sapiens
  chr11:12278563-12278594
  hypo
aggtgtgaccttggctcgggttcctgtccct

SEQ ID NO: 18396 - DNA, 31 bp, Homo sapiens
  chr11:12279380-12279411
  hypo
aggcttgtctggaaggcgcacagtggtcctg

SEQ ID NO: 18397 - DNA, 38 bp, Homo sapiens
  chr11:12279416-12279454
  hypo
tggcagtttcccagtgcgtgccccgtctgggtcttttc

SEQ ID NO: 18398 - DNA, 31 bp, Homo sapiens
  chr11:12279479-12279510
  hypo
ctcagcatttcccacccgccaggtattccac

SEQ ID NO: 18399 - DNA, 31 bp, Homo sapiens
  chr11:12279520-12279551
  hypo
tgagggtgttcatactcgaagctgtccattt

SEQ ID NO: 18400 - DNA, 31 bp, Homo sapiens
  chr11:12281235-12281266
  hypo
tggttgcagggtctggcgagttcagtttgta

SEQ ID NO: 18401 - DNA, 31 bp, Homo sapiens
  chr11:12283738-12283769
  hypo
aagaatgaatgggagacgctagagtaaaatg

SEQ ID NO: 18402 - DNA, 31 bp, Homo sapiens
  chr11:12283995-12284026
  hypo
tctctttccaatcttacgccatggccatcag

SEQ ID NO: 18403 - DNA, 54 bp, Homo sapiens
  chr11:12284117-12284171
  hypo
gtactaacccccaacccgctttccgcaccccgtcctctccgccagcagtactgg

SEQ ID NO: 18404 - DNA, 31 bp, Homo sapiens
  chr11:12294621-12294652
  hypo
cagcacaaaggtcatgcgcaacagtgtccat

SEQ ID NO: 18405 - DNA, 39 bp, Homo sapiens
  chr11:12298407-12298446
  hypo
aaaagcatcacctatgcgccaggtcgataaataaaatag

SEQ ID NO: 18406 - DNA, 66 bp, Homo sapiens
  chr11:12298544-12298610
  hypo
caaaccagccccaaagcgagtgacttaaaccagccaccgttcattacaccacgattgtgtaaaaaa

SEQ ID NO: 18407 - DNA, 31 bp, Homo sapiens
  chr11:12298706-12298737
  hypo
tctgctctggagcctgcgtgtcagctggggt

SEQ ID NO: 18408 - DNA, 31 bp, Homo sapiens
  chr11:12298739-12298770
  hypo
cagagggctattgggccgtgggtctttcatc

SEQ ID NO: 18409 - DNA, 31 bp, Homo sapiens
  chr11:12315586-12315617
  hypo
cctcaaagctggggagcgaatttcccagaaa

SEQ ID NO: 18410 - DNA, 49 bp, Homo sapiens
  chr11:12315625-12315674
  hypo
gaatggtagaggaggccgtgtgctaaaaccagtccgccccctgctgctc

SEQ ID NO: 18411 - DNA, 56 bp, Homo sapiens
  chr11:12315722-12315778
  hypo
aagatggggacccctgcggaacaagctcaaggggagcgaaacgtgcctccacccaa

SEQ ID NO: 18412 - DNA, 31 bp, Homo sapiens
  chr11:12366726-12366757
  hypo
attactagaaaccactcgtgtttcgtgagaa

SEQ ID NO: 18413 - DNA, 27 bp, Homo sapiens
  chr11:12501480-12501507
  hypo
tatattgaggctgggcgcggtggctca

SEQ ID NO: 18414 - DNA, 34 bp, Homo sapiens
  chr11:12554119-12554153
  hypo
aaaaataactatgaatcgacgttagttacaaatt

SEQ ID NO: 18415 - DNA, 39 bp, Homo sapiens; identical to SEQ ID NO: 4223
  chr11:12695572-12695611
  hypo

SEQ ID NO: 18416 - DNA, 37 bp, Homo sapiens; identical to SEQ ID NO: 4224
  chr11:12695622-12695659
  hypo

SEQ ID NO: 18417 - DNA, 65 bp, Homo sapiens; identical to SEQ ID NO: 4225
  chr11:12695675-12695740
  hypo

SEQ ID NO: 18418 - DNA, 260 bp, Homo sapiens; identical to SEQ ID NO: 4226
  chr11:12695856-12696116
  hypo

SEQ ID NO: 18419 - DNA, 36 bp, Homo sapiens; identical to SEQ ID NO: 4227
  chr11:12696120-12696156
  hypo

SEQ ID NO: 18420 - DNA, 86 bp, Homo sapiens; identical to SEQ ID NO: 4228
  chr11:12696404-12696490
  hypo

SEQ ID NO: 18421 - DNA, 84 bp, Homo sapiens; identical to SEQ ID NO: 4229
  chr11:12696669-12696753
  hypo

SEQ ID NO: 18422 - DNA, 11 bp, Homo sapiens
  chr11:12769803-12769814
  hypo
tggtctaatcc

SEQ ID NO: 18423 - DNA, 31 bp, Homo sapiens
  chr11:12769912-12769943
  hypo
gagtggagtaggtggccggctgtgtccaggc

SEQ ID NO: 18424 - DNA, 31 bp, Homo sapiens
  chr11:12794317-12794348
  hypo
acacaacccagtgatacgactcagattttcc

SEQ ID NO: 18425 - DNA, 31 bp, Homo sapiens
  chr11:12838688-12838719
  hypo
gaattggattctgccacgctgatattattat

SEQ ID NO: 18426 - DNA, 34 bp, Homo sapiens
  chr11:12841277-12841311
  hypo
gtgaaccaccaagcccggccggtaacaaagtctt

SEQ ID NO: 18427 - DNA, 31 bp, Homo sapiens
  chr11:12944976-12945007
  hypo
ccctggtgcttagttccgtgtggtatgttcc

SEQ ID NO: 18428 - DNA, 31 bp, Homo sapiens
  chr11:12945011-12945042
  hypo
ttaattgtaagcctcacgagagcaggccctg

SEQ ID NO: 18429 - DNA, 57 bp, Homo sapiens
  chr11:12945049-12945106
  hypo
ttttgctttttttatccgcagctctgagcattgtgccggatgcggagcagggggttg

SEQ ID NO: 18430 - DNA, 31 bp, Homo sapiens
  chr11:13114152-13114183
  hypo
gctatcatgagactctcgtgtcatctttgtg

SEQ ID NO: 18431 - DNA, 5 bp, Homo sapiens
  chr11:13114234-13114239
  hypo
ttttt

SEQ ID NO: 18432 - DNA, 71 bp, Homo sapiens
  chr11:13185769-13185840
  hypo
gaggcatagatgaagccgttgactctatgcgcttcacctactcctccaactcactacgctgttctaaggat

SEQ ID NO: 18433 - DNA, 61 bp, Homo sapiens; identical to SEQ ID NO: 4232
  chr11:13298715-13298776
  hypo

SEQ ID NO: 18434 - DNA, 31 bp, Homo sapiens; identical to SEQ ID NO: 4233
  chr11:13298792-13298823
  hypo

SEQ ID NO: 18435 - DNA, 31 bp, Homo sapiens
  chr11:14520357-14520388
  hypo
attctcaaaataatatcgaagtttacctaga

SEQ ID NO: 18436 - DNA, 62 bp, Homo sapiens
  chr11:14520418-14520480
  hypo
tctgaatccattggcacgttaattaacgtgtagcatacgttctcagccgccgtcatggtttc

SEQ ID NO: 18437 - DNA, 31 bp, Homo sapiens; identical to SEQ ID NO: 4236
  chr11:15671896-15671927
  hypo

SEQ ID NO: 18438 - DNA, 31 bp, Homo sapiens
  chr11:15921681-15921712
  hypo
gggctgagactgcctccgcttagtcactgat

SEQ ID NO: 18439 - DNA, 31 bp, Homo sapiens
  chr11:16050845-16050876
  hypo
aagcaggatgtgagaccgagagacagttcct

SEQ ID NO: 18440 - DNA, 31 bp, Homo sapiens
  chr11:16828576-16828607
  hypo
tgcgggaagcctggggcggtcaggagagcaa

SEQ ID NO: 18441 - DNA, 31 bp, Homo sapiens
  chr11:16877365-16877396
  hypo
gcctccagggtggaggcggtcccagccgtgg

SEQ ID NO: 18442 - DNA, 20 bp, Homo sapiens
  chr11:16880044-16880064
  hypo
ttttttttttttgagacgga

SEQ ID NO: 18443 - DNA, 31 bp, Homo sapiens; identical to SEQ ID NO: 4239
  chr11:17035598-17035629
  hypo

SEQ ID NO: 18444 - DNA, 83 bp, Homo sapiens; identical to SEQ ID NO: 4240
  chr11:17035645-17035728
  hypo

SEQ ID NO: 18445 - DNA, 35 bp, Homo sapiens; identical to SEQ ID NO: 4241
  chr11:17035837-17035872
  hypo

SEQ ID NO: 18446 - DNA, 105 bp, Homo sapiens; identical to SEQ ID NO: 4242
  chr11:17035880-17035985
  hypo

SEQ ID NO: 18447 - DNA, 88 bp, Homo sapiens; identical to SEQ ID NO: 4244
  chr11:17036267-17036355
  hypo

SEQ ID NO: 18448 - DNA, 31 bp, Homo sapiens
  chr11:17037338-17037369
  hypo
gcaacctgtgcaacagcgagactcagtctaa

SEQ ID NO: 18449 - DNA, 46 bp, Homo sapiens
  chr11:17100560-17100606
  hypo
aagactgactcagtgccggtacacaacaatgcgttgaaagaatggg

SEQ ID NO: 18450 - DNA, 31 bp, Homo sapiens
  chr11:17285257-17285288
  hypo
gagctaccgtgcacggcgagtagtgctatgt

SEQ ID NO: 18451 - DNA, 31 bp, Homo sapiens; identical to SEQ ID NO: 4245
  chr11:17498406-17498437
  hypo

SEQ ID NO: 18452 - DNA, 39 bp, Homo sapiens; identical to SEQ ID NO: 4246
  chr11:18610705-18610744
  hypo

SEQ ID NO: 18453 - DNA, 31 bp, Homo sapiens; identical to SEQ ID NO: 4247
  chr11:18720185-18720216
  hypo

SEQ ID NO: 18454 - DNA, 31 bp, Homo sapiens
  chr11:19247081-19247112
  hypo
agaccattagcttcaacggtgttacatgaaa

SEQ ID NO: 18455 - DNA, 78 bp, Homo sapiens
  chr11:27495266-27495344
  hypo
ttacctgtaccaactacggctttaagggtacttcgtttcttgctctctgccatggcgttgagtcgttttactctataa

SEQ ID NO: 18456 - DNA, 31 bp, Homo sapiens
  chr11:31533744-31533775
  hypo
tgttatggtgttagaacggtaaaactatact

SEQ ID NO: 18457 - DNA, 68 bp, Homo sapiens
  chr11:31533826-31533894
  hypo
taaatattatagcttccgtgtagtacggtgacattttactactgccaccgtgacgtcattgtaatttt

SEQ ID NO: 18458 - DNA, 114 bp, Homo sapiens
  chr11:32851223-32851337
  hypo
ttaggatcattgagaacgccgagtgcagacacaaatcgaaaagcagccacccgcgccgccaaggcggggccagaactggcggcaggcggctggcccgcccggggatggggcaga

SEQ ID NO: 18459 - DNA, 94 bp, Homo sapiens; identical to SEQ ID NO: 4257
  chr11:32851552-32851646
  hypo

SEQ ID NO: 18460 - DNA, 55 bp, Homo sapiens
  chr11:32912158-32912213
  hypo
tgaagcagcttggttacgaatcatttgagagatcccgaaacgttcacagagctgg

SEQ ID NO: 18461 - DNA, 13 bp, Homo sapiens
  chr11:32935046-32935059
  hypo
tccttttaatact

SEQ ID NO: 18462 - DNA, 42 bp, Homo sapiens
  chr11:33181223-33181265
  hypo
tggcaggatcacagagcgcagggaggtcgaagctatggtgag

SEQ ID NO: 18463 - DNA, 31 bp, Homo sapiens
  chr11:33277373-33277404
  hypo
gaaaacaactgtcattcgaaagtgttatttc

SEQ ID NO: 18464 - DNA, 31 bp, Homo sapiens
  chr11:34133735-34133766
  hypo
tcctgggcaataccttcggcatgtgtgtgct

SEQ ID NO: 18465 - DNA, 31 bp, Homo sapiens
  chr11:34184136-34184167
  hypo
tccatggtgatgtccacgtagccgtgctcag

SEQ ID NO: 18466 - DNA, 31 bp, Homo sapiens
  chr11:34186712-34186743
  hypo
taaagagacccctgcacgtccagctacatgc

SEQ ID NO: 18467 - DNA, 39 bp, Homo sapiens
  chr11:34192313-34192352
  hypo
attcagggaggtagcccgccttttcgaagtacagagctg

SEQ ID NO: 18468 - DNA, 31 bp, Homo sapiens
  chr11:34206116-34206147
  hypo
tcctcgctttcccacacggcagggagagctc

SEQ ID NO: 18469 - DNA, 31 bp, Homo sapiens
  chr11:34219692-34219723
  hypo
tgggcacagtggctcacgctgtaatcccaag

SEQ ID NO: 18470 - DNA, 17 bp, Homo sapiens
  chr11:34242794-34242811
  hypo
ggcgtgagccaccacgc

SEQ ID NO: 18471 - DNA, 27 bp, Homo sapiens
  chr11:34258968-34258995
  hypo
cgtgagccactgcgcctggcctttcct

SEQ ID NO: 18472 - DNA, 30 bp, Homo sapiens
  chr11:34270688-34270718
  hypo
aaaatgaaagacactcgcaacatgaatttg

SEQ ID NO: 18473 - DNA, 39 bp, Homo sapiens
  chr11:34270725-34270764
  hypo
tcatgacttgcaccctcgtgaatgcgcagccttgagggg

SEQ ID NO: 18474 - DNA, 31 bp, Homo sapiens
  chr11:34378939-34378970
  hypo
cggctgttcatggagccggagtagcaccacc

SEQ ID NO: 18475 - DNA, 31 bp, Homo sapiens
  chr11:34407581-34407612
  hypo
ccaaatttatttttaccgtttttttttattg

SEQ ID NO: 18476 - DNA, 31 bp, Homo sapiens
  chr11:34511229-34511260
  hypo
gcatctacactggtggcgcatgctgggctct

SEQ ID NO: 18477 - DNA, 31 bp, Homo sapiens
  chr11:34511272-34511303
  hypo
tttctcaaacttaccacgacccacaagggtc

SEQ ID NO: 18478 - DNA, 31 bp, Homo sapiens
  chr11:34511322-34511353
  hypo
ggaatggagtctcagacgataagcaatccat

SEQ ID NO: 18479 - DNA, 59 bp, Homo sapiens
  chr11:34511371-34511430
  hypo
tacagacccacacccacgctctttctgtcacactctttccaccacgcttttccccactg

SEQ ID NO: 18480 - DNA, 31 bp, Homo sapiens
  chr11:34527363-34527394
  hypo
ggagcccctagcagggcgatacttgtttttt

SEQ ID NO: 18481 - DNA, 55 bp, Homo sapiens
  chr11:34535068-34535123
  hypo
cgtgtcaaacagctcccggaggccctgggactgcacccagcgcaggtgccggccc

SEQ ID NO: 18482 - DNA, 50 bp, Homo sapiens
  chr11:36248991-36249041
  hypo
atggaagagattgaggcgggagaggtcatccattgcggggaggggaatag

SEQ ID NO: 18483 - DNA, 31 bp, Homo sapiens
  chr11:36277914-36277945
  hypo
catctgaaggctcaagcggggctggagcatc

SEQ ID NO: 18484 - DNA, 31 bp, Homo sapiens
  chr11:36277951-36277982
  hypo
caagttgtctcactcacgtggctgttggcca

SEQ ID NO: 18485 - DNA, 31 bp, Homo sapiens
  chr11:36278006-36278037
  hypo
ggctgcaccatgggaccgcctaagtgtcctc

SEQ ID NO: 18486 - DNA, 42 bp, Homo sapiens
  chr11:36278080-36278122
  hypo
accaagggggaagtcacgatgcactggcgtcacacaggtcac

SEQ ID NO: 18487 - DNA, 46 bp, Homo sapiens
  chr11:38195081-38195127
  hypo
gatacattctgagaaacgtgttaggtgattttgtttgttacgtgaa

SEQ ID NO: 18488 - DNA, 31 bp, Homo sapiens; identical to SEQ ID NO: 4260
  chr11:43600671-43600702
  hypo

SEQ ID NO: 18489 - DNA, 31 bp, Homo sapiens
  chr11:44096836-44096867
  hypo
cctccacaccttcaggcgagaccctctaaat

SEQ ID NO: 18490 - DNA, 31 bp, Homo sapiens
  chr11:44616400-44616431
  hypo
gacgaactatctccaacggaacctagttggg

SEQ ID NO: 18491 - DNA, 95 bp, Homo sapiens
  chr11:44621699-44621794
  hypo
ccttccagatcctgggcgcagtgatcctgggcttcggggtgtggatcctggccgacaagagcagtttcatctctgtcctgcgtaaggacccctca

SEQ ID NO: 18492 - DNA, 31 bp, Homo sapiens
  chr11:44637569-44637600
  hypo
tcctttcttgtggtcccggatgctgcatgtg

SEQ ID NO: 18493 - DNA, 31 bp, Homo sapiens
  chr11:44637629-44637660
  hypo
tgcaatcctgtgagggcgcaggacacagtgg

SEQ ID NO: 18494 - DNA, 69 bp, Homo sapiens
  chr11:44640083-44640152
  hypo
cctctgtaggggcttccgggctgggactggggggctctcggtggttctgcatggcggggtgggatggtg

SEQ ID NO: 18495 - DNA, 50 bp, Homo sapiens
  chr11:44640810-44640860
  hypo
gctttctggggcctagcgatctctcctggcctatccgctgccagccttga

SEQ ID NO: 18496 - DNA, 31 bp, Homo sapiens
  chr11:44640875-44640906
  hypo
tggttcctctgctcaccgcccatcagggttc

SEQ ID NO: 18497 - DNA, 40 bp, Homo sapiens
  chr11:44640923-44640963
  hypo
aaaatgctccccacagcgtccctggcgcaggtgggctgga

SEQ ID NO: 18498 - DNA, 31 bp, Homo sapiens
  chr11:44675158-44675189
  hypo
ggagaggccaggaacacggggctgagcctcc

SEQ ID NO: 18499 - DNA, 31 bp, Homo sapiens
  chr11:44675229-44675260
  hypo
aaagtggggggctcttcgctcttttccctgt

SEQ ID NO: 18500 - DNA, 69 bp, Homo sapiens
  chr11:44675296-44675365
  hypo
ctggttctctcctctccggcttttccacttatgaaagccggaagccatgggttgcgcacactgtctggg

SEQ ID NO: 18501 - DNA, 49 bp, Homo sapiens; identical to SEQ ID NO: 4267
  chr11:44748794-44748843
  hypo

SEQ ID NO: 18502 - DNA, 105 bp, Homo sapiens; identical to SEQ ID NO: 4268
  chr11:44748849-44748954
  hypo

SEQ ID NO: 18503 - DNA, 31 bp, Homo sapiens
  chr11:44968587-44968618
  hypo
actgtgctgaagagggcgagaggtcagggca

SEQ ID NO: 18504 - DNA, 34 bp, Homo sapiens
  chr11:44993089-44993123
  hypo
ttatgatactgtgtatcggcgagttcagcacaaa

SEQ ID NO: 18505 - DNA, 62 bp, Homo sapiens
  chr11:45248079-45248141
  hypo
tcctcatccatcacatcgcccgggccctgcgggaagacctggtggagcgcatccgccagtca

SEQ ID NO: 18506 - DNA, 31 bp, Homo sapiens
  chr11:45417058-45417089
  hypo
gcagttcttgaccatccgcagtaactggcct

SEQ ID NO: 18507 - DNA, 79 bp, Homo sapiens
  chr11:45417171-45417250
  hypo
aaagagtatgtgtctgcgtgtgtgtgtgtgtgcgtgcgtgtgtctctgtttgtagggagcaggccgggattagccagaa

SEQ ID NO: 18508 - DNA, 52 bp, Homo sapiens; identical to SEQ ID NO: 4272
  chr11:45684298-45684350
  hypo

SEQ ID NO: 18509 - DNA, 31 bp, Homo sapiens; identical to SEQ ID NO: 4273
  chr11:45684364-45684395
  hypo

SEQ ID NO: 18510 - DNA, 21 bp, Homo sapiens
  chr11:45838622-45838643
  hypo
caagtacagtagctcacgcct

SEQ ID NO: 18511 - DNA, 41 bp, Homo sapiens
  chr11:45951098-45951139
  hypo
tgacctctggcctgcccgtcccatcccgcctgactgcagct

SEQ ID NO: 18512 - DNA, 38 bp, Homo sapiens
  chr11:45951143-45951181
  hypo
ctgggctgaggacccacggacaccggagagaggtgagg

SEQ ID NO: 18513 - DNA, 60 bp, Homo sapiens
  chr11:45951234-45951294
  hypo
gccttgtgggagggggcgccaagtggaactggagagccctgcttccgtttagaggaggta

SEQ ID NO: 18514 - DNA, 31 bp, Homo sapiens
  chr11:45956741-45956772
  hypo
ggtgtggaagaaagagcgagggagggccgta

SEQ ID NO: 18515 - DNA, 31 bp, Homo sapiens
  chr11:45956836-45956867
  hypo
tcagtgtcaggtgaggcgctacactcccccc

SEQ ID NO: 18516 - DNA, 31 bp, Homo sapiens
  chr11:45956868-45956899
  hypo
cacactgtcaggaatacgcagggccatggct

SEQ ID NO: 18517 - DNA, 63 bp, Homo sapiens; identical to SEQ ID NO: 4275
  chr11:46264957-46265020
  hypo

SEQ ID NO: 18518 - DNA, 31 bp, Homo sapiens
  chr11:46298482-46298513
  hypo
gttacaagctgaaaatcggctgggcatggtg

SEQ ID NO: 18519 - DNA, 45 bp, Homo sapiens; identical to SEQ ID NO: 4276
  chr11:46299546-46299591
  hypo

SEQ ID NO: 18520 - DNA, 31 bp, Homo sapiens
  chr11:46337892-46337923
  hypo
gaccttacaagatggccgccacccagactgg

SEQ ID NO: 18521 - DNA, 31 bp, Homo sapiens
  chr11:46338009-46338040
  hypo
gcagagctttaaggatcggtaacatcgtggg

SEQ ID NO: 18522 - DNA, 31 bp, Homo sapiens
  chr11:46343982-46344013
  hypo
acatggaggggacctgcgaagatgagagacc

SEQ ID NO: 18523 - DNA, 8 bp, Homo sapiens
  chr11:46390758-46390766
  hypo
accatggt

SEQ ID NO: 18524 - DNA, 31 bp, Homo sapiens
  chr11:46390769-46390800
  hypo
atgttagtgggggagacggacccaaagctcc

SEQ ID NO: 18525 - DNA, 49 bp, Homo sapiens; identical to SEQ ID NO: 4277
  chr11:46413560-46413609
  hypo

SEQ ID NO: 18526 - DNA, 20 bp, Homo sapiens
  chr11:46542428-46542448
  hypo
acaggcgtgagccaccgcgc

SEQ ID NO: 18527 - DNA, 21 bp, Homo sapiens
  chr11:46866488-46866509
  hypo
gccaccgcgcccagcctaaaa

SEQ ID NO: 18528 - DNA, 31 bp, Homo sapiens
  chr11:46898129-46898160
  hypo
tgtccagtatactttccggccaatggcatca

SEQ ID NO: 18529 - DNA, 31 bp, Homo sapiens
  chr11:46907965-46907996
  hypo
aagggccacagcactgcgcacgtcagccagt

SEQ ID NO: 18530 - DNA, 25 bp, Homo sapiens
  chr11:47029795-47029820
  hypo
gtgagccaccgcgcccagccaactc

SEQ ID NO: 18531 - DNA, 31 bp, Homo sapiens
  chr11:47169577-47169608
  hypo
tgacctggacaccccacgccacttcaaggcc

SEQ ID NO: 18532 - DNA, 31 bp, Homo sapiens
  chr11:47169618-47169649
  hypo
ggcagcttgtgcagcacgagtgtgcctccaa

SEQ ID NO: 18533 - DNA, 31 bp, Homo sapiens
  chr11:47169686-47169717
  hypo
caggacaccttcatagcggcctttttcctcc

SEQ ID NO: 18534 - DNA, 39 bp, Homo sapiens
  chr11:47169725-47169764
  hypo
gaaggtaaccagacatcgtgtcatcgctgcttctctcat

SEQ ID NO: 18535 - DNA, 58 bp, Homo sapiens
  chr11:47215891-47215949
  hypo
ccgcctcagcaggagacgccccaggagttgccattgtgtactccgggtttcagctctg

SEQ ID NO: 18536 - DNA, 62 bp, Homo sapiens
  chr11:47358894-47358956
  hypo
ttaactggggagggggcggggggcaggaccaggccaggcaggctcaccgataggcatgaagg

SEQ ID NO: 18537 - DNA, 153 bp, Homo sapiens
  chr11:47358976-47359129
  hypo
ctggacatgccgatggcgttgaccgcgtagacgcgcatctcgtacaccacgccctcgatcatgcgccgcgcttcatgactcagctcctgaatcaggtcgaagttcagccgcatccaccggtagctcttcttcttcttgcgctccaggatgtag

SEQ ID NO: 18538 - DNA, 31 bp, Homo sapiens
  chr11:48001803-48001834
  hypo
gtgaggctggggagcccgtcctgaggggtgc

SEQ ID NO: 18539 - DNA, 51 bp, Homo sapiens; identical to SEQ ID NO: 4280
  chr11:48002695-48002746
  hypo

SEQ ID NO: 18540 - DNA, 31 bp, Homo sapiens
  chr11:57010846-57010877
  hypo
attcaaactatgccctcggtttcctgcactt

SEQ ID NO: 18541 - DNA, 31 bp, Homo sapiens
  chr11:57010889-57010920
  hypo
tggaagagagacaaaacgatgaaagttagat

SEQ ID NO: 18542 - DNA, 31 bp, Homo sapiens
  chr11:57058716-57058747
  hypo
ttcaaactgcaagagtcgaaaaaaaaaaaag

SEQ ID NO: 18543 - DNA, 31 bp, Homo sapiens
  chr11:57071639-57071670
  hypo
gtgggaaagcctggcacggcagtgcctggaa

SEQ ID NO: 18544 - DNA, 31 bp, Homo sapiens
  chr11:57115641-57115672
  hypo
agggatcctcactggccgctgcgtgaactac

SEQ ID NO: 18545 - DNA, 31 bp, Homo sapiens
  chr11:57116315-57116346
  hypo
attcccaatctcccagcgggccttggccact

SEQ ID NO: 18546 - DNA, 2 bp, Homo sapiens
  chr11:57206941-57206943
  hypo
tt

SEQ ID NO: 18547 - DNA, 44 bp, Homo sapiens
  chr11:57207063-57207107
  hypo
cagcaaggatgggagacggcgaagagatacgcttcatgggagag

SEQ ID NO: 18548 - DNA, 31 bp, Homo sapiens
  chr11:57254650-57254681
  hypo
actgcaggcctgtcagcgtcccaaagtggtt

SEQ ID NO: 18549 - DNA, 31 bp, Homo sapiens
  chr11:57423906-57423937
  hypo
ttactattattataaccggactcagaaactc

SEQ ID NO: 18550 - DNA, 31 bp, Homo sapiens; identical to SEQ ID NO: 4284
  chr11:57434948-57434979
  hypo

SEQ ID NO: 18551 - DNA, 41 bp, Homo sapiens
  chr11:57500992-57501033
  hypo
tgctgcgattacaggcgtgagtcaccgcgcccagcctatag

SEQ ID NO: 18552 - DNA, 31 bp, Homo sapiens
  chr11:57501037-57501068
  hypo
gaatttacagatgaaacgatatagctggaat

SEQ ID NO: 18553 - DNA, 27 bp, Homo sapiens
  chr11:57550844-57550871
  hypo
gaagccatagaaaggccgggctcacgc

SEQ ID NO: 18554 - DNA, 31 bp, Homo sapiens
  chr11:58835156-58835187
  hypo
tgtaaatagaggagacgcgtttgccgacttt

SEQ ID NO: 18555 - DNA, 43 bp, Homo sapiens
  chr11:58949203-58949246
  hypo
cctggcaggaactctccgcccagttcgccgcaactactacgac

SEQ ID NO: 18556 - DNA, 31 bp, Homo sapiens
  chr11:58949531-58949562
  hypo
cctgggccagccacctcgccccccatgtccc

SEQ ID NO: 18557 - DNA, 31 bp, Homo sapiens
  chr11:59031571-59031602
  hypo
gccattgggaggacagcggagtcagcagata

SEQ ID NO: 18558 - DNA, 31 bp, Homo sapiens
  chr11:59329209-59329240
  hypo
caaaaagaaaggacctcgggtctccagggac

SEQ ID NO: 18559 - DNA, 31 bp, Homo sapiens
  chr11:59443884-59443915
  hypo
acaaatgttctttttgcgggcagggggcaaa

SEQ ID NO: 18560 - DNA, 36 bp, Homo sapiens; identical to SEQ ID NO: 4291
  chr11:59523185-59523221
  hypo

SEQ ID NO: 18561 - DNA, 31 bp, Homo sapiens; identical to SEQ ID NO: 4292
  chr11:59523285-59523316
  hypo

SEQ ID NO: 18562 - DNA, 31 bp, Homo sapiens
  chr11:60515940-60515971
  hypo
caaggccgcccagccccgaggtgtagcaggg

SEQ ID NO: 18563 - DNA, 50 bp, Homo sapiens; identical to SEQ ID NO: 4293
  chr11:60692120-60692170
  hypo

SEQ ID NO: 18564 - DNA, 108 bp, Homo sapiens
  chr11:60696095-60696203
  hypo
cacagccatccctgggcgcctgcgtggtggagctggagcttccctcgcactggttctcacaggcctccaccacacgggccgagctggcctacacgcttgagcctgcag

SEQ ID NO: 18565 - DNA, 43 bp, Homo sapiens
  chr11:60696212-60696255
  hypo
ctgggggctgtggctccggcgaggagaacgaccctggggagca

SEQ ID NO: 18566 - DNA, 61 bp, Homo sapiens
  chr11:60703903-60703964
  hypo
tcaatggtgtggtcttcgtcctgcgctatcagcgcaaagaacctcccgacagtgccactga

SEQ ID NO: 18567 - DNA, 59 bp, Homo sapiens
  chr11:60704009-60704068
  hypo
ccaggaggaactgagccgccagctggaccggcagtcccctggcccgcccaagggggagg

SEQ ID NO: 18568 - DNA, 53 bp, Homo sapiens
  chr11:60897861-60897914
  hypo
acatttggtaaagaaccggcagcgctgacctagcgtcacgcggatggcacata

SEQ ID NO: 18569 - DNA, 7 bp, Homo sapiens
  chr11:60920710-60920717
  hypo
tgaatga

SEQ ID NO: 18570 - DNA, 46 bp, Homo sapiens
  chr11:60920768-60920814
  hypo
acactgtctcacctgccgccattaagacgaacgcacttcaccttct

SEQ ID NO: 18571 - DNA, 31 bp, Homo sapiens
  chr11:60926975-60927006
  hypo
ctcacttgtggccagacgcagtggctcacac

SEQ ID NO: 18572 - DNA, 15 bp, Homo sapiens
  chr11:60927367-60927382
  hypo
cgtctcaaaaaaaaa

SEQ ID NO: 18573 - DNA, 31 bp, Homo sapiens
  chr11:60927439-60927470
  hypo
ggttatctaacatctccgcaactcacttcat

SEQ ID NO: 18574 - DNA, 31 bp, Homo sapiens
  chr11:61039291-61039322
  hypo
ggacagatgcctcatgcgcacaaacacacac

SEQ ID NO: 18575 - DNA, 64 bp, Homo sapiens
  chr11:61049496-61049560
  hypo
gggtccatgcctgccccgaggtgcgggatgtgactcagacagctgggagcggggctgaaatcta

SEQ ID NO: 18576 - DNA, 48 bp, Homo sapiens
  chr11:61049573-61049621
  hypo
taataggttcacacatcgagcaggtatttaatgcgagtatcagagact

SEQ ID NO: 18577 - DNA, 47 bp, Homo sapiens
  chr11:61049624-61049671
  hypo
ccccagcactatgcagcggtaattaattgctgcgtggtaggggtaag

SEQ ID NO: 18578 - DNA, 38 bp, Homo sapiens
  chr11:61056996-61057034
  hypo
caggcgtgagccaccaagcctagcgaaaaaaaaaatta

SEQ ID NO: 18579 - DNA, 31 bp, Homo sapiens
  chr11:61076199-61076230
  hypo
gaccataggtctcactcgtttctcaagtccc

SEQ ID NO: 18580 - DNA, 84 bp, Homo sapiens
  chr11:61076438-61076522
  hypo
gtggtccaggcctcaccgtgctattgatgctggctaacagcttcccgttaaattccaccatagagtacacggcccctttcactt

SEQ ID NO: 18581 - DNA, 31 bp, Homo sapiens
  chr11:61106796-61106827
  hypo
cgggctgaaggcatcccggtggagatggtgg

SEQ ID NO: 18582 - DNA, 52 bp, Homo sapiens
  chr11:61108935-61108987
  hypo
tggggctggaggagatcgcaaagcaggtgaacgtggtcgccaaggccatggg

SEQ ID NO: 18583 - DNA, 60 bp, Homo sapiens
  chr11:61109027-61109087
  hypo
ttggacagccctggggcgaggagcaggttcctgttggctgcctagcggtgctccccaggt

SEQ ID NO: 18584 - DNA, 54 bp, Homo sapiens
  chr11:61118454-61118508
  hypo
acccatacctgtctgtcggtcaggatccccggctctgggcgcttccaagatgaa

SEQ ID NO: 18585 - DNA, 37 bp, Homo sapiens
  chr11:61122608-61122645
  hypo
ggattacaggcgtgagccaccacgcctggcctggcct

SEQ ID NO: 18586 - DNA, 31 bp, Homo sapiens; identical to SEQ ID NO: 4299
  chr11:61160872-61160903
  hypo

SEQ ID NO: 18587 - DNA, 31 bp, Homo sapiens
  chr11:61292903-61292934
  hypo
tggcccttcaacaccccgactcctcccgcct

SEQ ID NO: 18588 - DNA, 31 bp, Homo sapiens
  chr11:61305489-61305520
  hypo
cttccgctccagcatccgctgaaggcaccac

SEQ ID NO: 18589 - DNA, 99 bp, Homo sapiens; identical to SEQ ID NO: 4300
  chr11:61348493-61348592
  hypo

SEQ ID NO: 18590 - DNA, 31 bp, Homo sapiens
  chr11:61416205-61416236
  hypo
ctgagctttggggtgacgtacagcattatca

SEQ ID NO: 18591 - DNA, 31 bp, Homo sapiens
  chr11:61423922-61423953
  hypo
tgagggtgcaggggtgcggggtggtgagagt

SEQ ID NO: 18592 - DNA, 31 bp, Homo sapiens
  chr11:61458298-61458329
  hypo
tgcgaaggccaggccccgctcccaggaagcc

SEQ ID NO: 18593 - DNA, 31 bp, Homo sapiens
  chr11:61473668-61473699
  hypo
actgagaagttgggggcggggaagggactca

SEQ ID NO: 18594 - DNA, 51 bp, Homo sapiens
  chr11:61474396-61474447
  hypo
gctggtctctctcagacgttgccgtcagctccttcacggaaaggttcatcc

SEQ ID NO: 18595 - DNA, 45 bp, Homo sapiens
  chr11:61476224-61476269
  hypo
catcctattttatagacgaggagagggctgcgttgtatattgaag

SEQ ID NO: 18596 - DNA, 57 bp, Homo sapiens
  chr11:61478511-61478568
  hypo
gccaccccctccaagtcgatgcctttgagagagtcgcgttcccgggagagtggggta

SEQ ID NO: 18597 - DNA, 34 bp, Homo sapiens
  chr11:61479891-61479925
  hypo
agcctaagaccctgggcggcgggtaggaggggac

SEQ ID NO: 18598 - DNA, 31 bp, Homo sapiens
  chr11:61479978-61480009
  hypo
catccctaggcctgggcgtgtgaggacctat

SEQ ID NO: 18599 - DNA, 51 bp, Homo sapiens
  chr11:61480030-61480081
  hypo
agtcctgggcaggctccgctctgccttctgctctagcgcagctgatgtgtg

SEQ ID NO: 18600 - DNA, 87 bp, Homo sapiens
  chr11:61488283-61488370
  hypo
atctggctgagcatgcgcgggggcatcctctacacggagccccgtgactccatgcagtacgtgctctacgtgcgcctgggtaagggc

SEQ ID NO: 18601 - DNA, 31 bp, Homo sapiens
  chr11:61488419-61488450
  hypo
cagccagtatttactgcgcacatgttgcgag

SEQ ID NO: 18602 - DNA, 31 bp, Homo sapiens
  chr11:61490186-61490217
  hypo
gggtctgctaatggcccgctgcctctgcctt

SEQ ID NO: 18603 - DNA, 49 bp, Homo sapiens
  chr11:61490227-61490276
  hypo
ctggctgaaagcccagcgataggaaaggccaggccggggttctaggccc

SEQ ID NO: 18604 - DNA, 49 bp, Homo sapiens
  chr11:61490327-61490376
  hypo
cagccatcctggtgatcgagttcatctacgccatcgtgggcatcgtctg

SEQ ID NO: 18605 - DNA, 31 bp, Homo sapiens
  chr11:61490854-61490885
  hypo
agagaggtgtccccagcgcccctacctaatg

SEQ ID NO: 18606 - DNA, 36 bp, Homo sapiens
  chr11:61494079-61494115
  hypo
tcatccaggggtgccccgcagcgggcagggacctta

SEQ ID NO: 18607 - DNA, 131 bp, Homo sapiens
  chr11:61495639-61495770
  hypo
atcgcctacctctttgcggagttcttccgggaccttgacattgtgccatccgacatcattgctggcctggtgctgctccggcagcggcagcgggccaagcgcaacgccgtgctggacgaggtgagcaccac

SEQ ID NO: 18608 - DNA, 31 bp, Homo sapiens
  chr11:61498683-61498714
  hypo
tgccaggggttgggtccgcaggctcccaccc

SEQ ID NO: 18609 - DNA, 62 bp, Homo sapiens
  chr11:61502321-61502383
  hypo
tgttgcctgtgtcctgcgaggccgcggttcgcccctggagtcaccatcgaggaagacaactg

SEQ ID NO: 18610 - DNA, 104 bp, Homo sapiens
  chr11:61502392-61502496
  hypo
taatgccattgccatccggcgccacttcctggacgagaacatgactgcggtggacatcgtctatacctcctgccatgatgcggtgaggccgggcagggctgggg

SEQ ID NO: 18611 - DNA, 31 bp, Homo sapiens
  chr11:61508799-61508830
  hypo
accaccgcaacagcagcgtcaggtgagcctt

SEQ ID NO: 18612 - DNA, 44 bp, Homo sapiens
  chr11:61511516-61511560
  hypo
ggcgctgcacaatgggcgcctgggggactcgcccagtcctcagg

SEQ ID NO: 18613 - DNA, 31 bp, Homo sapiens
  chr11:61511566-61511597
  hypo
aattcgccgagttcatcgacagcctcttcaa

SEQ ID NO: 18614 - DNA, 52 bp, Homo sapiens
  chr11:61511632-61511684
  hypo
actgcatggtggtgcccgagagccccaccagtgactacgctgagggccccaa

SEQ ID NO: 18615 - DNA, 31 bp, Homo sapiens
  chr11:61511707-61511738
  hypo
tgctccgtgcccagttcgagcccaacctggt

SEQ ID NO: 18616 - DNA, 58 bp, Homo sapiens
  chr11:61511805-61511863
  hypo
ttcccgctcagctcctcgggtgagctcatggacctgacgcccacgggcctcagtagcc

SEQ ID NO: 18617 - DNA, 31 bp, Homo sapiens
  chr11:61512092-61512123
  hypo
tgctgagctgggggtccgcatccctacctca

SEQ ID NO: 18618 - DNA, 240 bp, Homo sapiens; identical to SEQ ID NO: 4307
  chr11:61520127-61520367
  hypo

SEQ ID NO: 18619 - DNA, 69 bp, Homo sapiens
  chr11:61525592-61525661
  hypo
ggagtacagttgggtccggagccccctgccggcctagagtatggagggggctcccggacattctgtcct

SEQ ID NO: 18620 - DNA, 31 bp, Homo sapiens
  chr11:61533319-61533350
  hypo
cagccactgactcctccgaaatctccatagt

SEQ ID NO: 18621 - DNA, 31 bp, Homo sapiens
  chr11:61592290-61592321
  hypo
gaattatttctgctagcgtagcttagcaaat

SEQ ID NO: 18622 - DNA, 47 bp, Homo sapiens
  chr11:61615509-61615556
  hypo
cctgaagtgctatccccgagggttgaaggttccgggaactgctccta

SEQ ID NO: 18623 - DNA, 31 bp, Homo sapiens
  chr11:61619675-61619706
  hypo
taactcattggaagctcgtagtggggtgcct

SEQ ID NO: 18624 - DNA, 31 bp, Homo sapiens
  chr11:61621920-61621951
  hypo
aggcaacaccactgtccgaacccaaaccatc

SEQ ID NO: 18625 - DNA, 31 bp, Homo sapiens
  chr11:61624801-61624832
  hypo
tggctgcttctgcccacgtctgcagggctgg

SEQ ID NO: 18626 - DNA, 96 bp, Homo sapiens
  chr11:61632398-61632494
  hypo
ctccatagagcacaaacgccctcctgctcacggagggctgcaccctcccctccacacacgtggcaccccactgggcacacacgaggagccacactt

SEQ ID NO: 18627 - DNA, 31 bp, Homo sapiens
  chr11:61632579-61632610
  hypo
gccctctgagtcctcacgctctgcccaccct

SEQ ID NO: 18628 - DNA, 56 bp, Homo sapiens
  chr11:61632626-61632682
  hypo
cttccccaccatgccccggcacaacttacacaagatcgccccgctggtgaagtctc

SEQ ID NO: 18629 - DNA, 31 bp, Homo sapiens
  chr11:61632702-61632733
  hypo
gaataccaggagaagccgctactgagggccc

SEQ ID NO: 18630 - DNA, 51 bp, Homo sapiens
  chr11:61632755-61632806
  hypo
ggtggaggtccacaggcgctgggccctgggatcacccgtggtgcagacagt

SEQ ID NO: 18631 - DNA, 40 bp, Homo sapiens
  chr11:61634596-61634636
  hypo
tcagaatgggggctttcggggagggcgcctagtcccccca

SEQ ID NO: 18632 - DNA, 38 bp, Homo sapiens
  chr11:61634702-61634740
  hypo
agctactgtatgcccccgacccccgcagaggcagaatg

SEQ ID NO: 18633 - DNA, 31 bp, Homo sapiens
  chr11:61634742-61634773
  hypo
cccatagggagctgatcgtaatgtttatcat

SEQ ID NO: 18634 - DNA, 37 bp, Homo sapiens
  chr11:61635270-61635307
  hypo
aggggctggagaaggccgggagcggtggctcatgcct

SEQ ID NO: 18635 - DNA, 61 bp, Homo sapiens
  chr11:61640642-61640703
  hypo
ggtcaagaggcacaaccgtctttcccagtccatgtccagaagcgtccgcagacatggcccc

SEQ ID NO: 18636 - DNA, 31 bp, Homo sapiens
  chr11:61646080-61646111
  hypo
aagttccaccagtgggcggagaagccctgtg

SEQ ID NO: 18637 - DNA, 62 bp, Homo sapiens
  chr11:61646130-61646192
  hypo
gggcaggctgtgcccccgactgtgcccacacacttgggcagacccagcgccacccagcacct

SEQ ID NO: 18638 - DNA, 31 bp, Homo sapiens
  chr11:61647048-61647079
  hypo
cagccgctcctcccatcgccaggcccaaggg

SEQ ID NO: 18639 - DNA, 43 bp, Homo sapiens
  chr11:61653515-61653558
  hypo
aatttggcctgtgtagcggagcccaagtcgaaggcagacaccc

SEQ ID NO: 18640 - DNA, 31 bp, Homo sapiens
  chr11:61667862-61667893
  hypo
aagtgagaggggcacccgcaggctggggagt

SEQ ID NO: 18641 - DNA, 31 bp, Homo sapiens
  chr11:61668804-61668835
  hypo
cctggtctgggtcactcggcaggggagggtg

SEQ ID NO: 18642 - DNA, 31 bp, Homo sapiens
  chr11:61669003-61669034
  hypo
gaatgacagaggggggcgatgtcatcccatg

SEQ ID NO: 18643 - DNA, 121 bp, Homo sapiens
  chr11:61672908-61673029
  hypo
gctccccaggtgggagcggccaggccggctcgtaggtgaggtgaaccgccttgctggggaccacgcagaggagcagggagagcagcggggccagcccgggctgggccggatggacagacag

SEQ ID NO: 18644 - DNA, 31 bp, Homo sapiens
  chr11:61673121-61673152
  hypo
tggatgagggcctgctcgtcttccctggagg

SEQ ID NO: 18645 - DNA, 53 bp, Homo sapiens
  chr11:61674006-61674059
  hypo
gctggtgctcttgtggcgagagtggccctttcggggcccggccttggtggggc

SEQ ID NO: 18646 - DNA, 67 bp, Homo sapiens
  chr11:61674065-61674132
  hypo
gctgggggtgaagctcgcggttgggagaggctggtgtggacgtgatgaccagcgtcttcaaggctgt

SEQ ID NO: 18647 - DNA, 31 bp, Homo sapiens
  chr11:61679897-61679928
  hypo
tggctcccctagagagcggccaagtcttcag

SEQ ID NO: 18648 - DNA, 47 bp, Homo sapiens
  chr11:61679944-61679991
  hypo
atgtcaggttcccaagcgctaggccacatccacgccagcccaccact

SEQ ID NO: 18649 - DNA, 52 bp, Homo sapiens
  chr11:61680000-61680052
  hypo
tcatggcctggaagctcgggacaattgcagggagatgcgctcctccacctgg

SEQ ID NO: 18650 - DNA, 31 bp, Homo sapiens
  chr11:61713859-61713890
  hypo
tgtgtctggcacccccgcgcatctccccagc

SEQ ID NO: 18651 - DNA, 31 bp, Homo sapiens
  chr11:61713916-61713947
  hypo
tctctgctggggagctcgagagcttggaatc

SEQ ID NO: 18652 - DNA, 31 bp, Homo sapiens
  chr11:61727795-61727826
  hypo
cagtgatgcagtggaacgttaggacctggct

SEQ ID NO: 18653 - DNA, 31 bp, Homo sapiens
  chr11:61736670-61736701
  hypo
ttgcctggggctgggcgcggtggctcatgcc

SEQ ID NO: 18654 - DNA, 31 bp, Homo sapiens
  chr11:61747021-61747052
  hypo
tgagccagtactgccccgtgagagatggttc

SEQ ID NO: 18655 - DNA, 31 bp, Homo sapiens
  chr11:61765125-61765156
  hypo
atgagagcagaagctccgtgggtctacaaga

SEQ ID NO: 18656 - DNA, 10 bp, Homo sapiens
  chr11:61770025-61770035
  hypo
catgtaaatg

SEQ ID NO: 18657 - DNA, 31 bp, Homo sapiens
  chr11:61770071-61770102
  hypo
ttccatgagcatccccgcgagtaaccagatg

SEQ ID NO: 18658 - DNA, 31 bp, Homo sapiens
  chr11:61770720-61770751
  hypo
gctgatattctccctacgctgggccaggcag

SEQ ID NO: 18659 - DNA, 31 bp, Homo sapiens
  chr11:61770752-61770783
  hypo
tggagtctccttcagccgagatgtttctggg

SEQ ID NO: 18660 - DNA, 64 bp, Homo sapiens
  chr11:61770805-61770869
  hypo
catcctttacttaaaccggaagactcccagcccctgtgaacaagtccgtcggaagttctctgtc

SEQ ID NO: 18661 - DNA, 31 bp, Homo sapiens
  chr11:61779428-61779459
  hypo
aaggtgtagcagtcatcgataccagctatca

SEQ ID NO: 18662 - DNA, 34 bp, Homo sapiens
  chr11:61795461-61795495
  hypo
aagcaaggggtccaggcgaggcgtggtggctcac

SEQ ID NO: 18663 - DNA, 45 bp, Homo sapiens
  chr11:61825692-61825737
  hypo
agcatttgtcttagcacggtgtgggcgacacgtgctccagagtct

SEQ ID NO: 18664 - DNA, 31 bp, Homo sapiens
  chr11:61826063-61826094
  hypo
accgcgagggtgcgaccggccaaatccagat

SEQ ID NO: 18665 - DNA, 18 bp, Homo sapiens
  chr11:61880293-61880311
  hypo
tcttttttttttttcccg

SEQ ID NO: 18666 - DNA, 31 bp, Homo sapiens
  chr11:62242405-62242436
  hypo
gggacccaggagaagccgctgcactggcagg

SEQ ID NO: 18667 - DNA, 60 bp, Homo sapiens
  chr11:62258006-62258066
  hypo
ctgtttatatgctgaacggacattcaccccaggctatgggtggagcgctgggcaaggaag

SEQ ID NO: 18668 - DNA, 149 bp, Homo sapiens; identical to SEQ ID NO: 4308
  chr11:62313645-62313794
  hypo

SEQ ID NO: 18669 - DNA, 201 bp, Homo sapiens; identical to SEQ ID NO: 4309
  chr11:62313806-62314007
  hypo

SEQ ID NO: 18670 - DNA, 91 bp, Homo sapiens; identical to SEQ ID NO: 4310
  chr11:62314023-62314114
  hypo

SEQ ID NO: 18671 - DNA, 56 bp, Homo sapiens; identical to SEQ ID NO: 4311
  chr11:62369473-62369529
  hypo

SEQ ID NO: 18672 - DNA, 31 bp, Homo sapiens
  chr11:62370822-62370853
  hypo
catgtgatctggtcaccgtagtagcatcacc

SEQ ID NO: 18673 - DNA, 25 bp, Homo sapiens
  chr11:62450078-62450103
  hypo
aggctggtctcgaacttgtgagctc

SEQ ID NO: 18674 - DNA, 31 bp, Homo sapiens
  chr11:62450120-62450151
  hypo
gtgctggaattacaggcgtgagccaccatgc

SEQ ID NO: 18675 - DNA, 73 bp, Homo sapiens
  chr11:62450154-62450227
  hypo
gtgctggaattacaggcgtgagtgctgtaattacaggcgtgagtgctggaattacaggcgtgagtgctggaat

SEQ ID NO: 18676 - DNA, 31 bp, Homo sapiens
  chr11:62484618-62484649
  hypo
acctcatccatatagtcgcatttttcaggca

SEQ ID NO: 18677 - DNA, 31 bp, Homo sapiens
  chr11:62700323-62700354
  hypo
tgcttcactcactctacgctagtcttggccc

SEQ ID NO: 18678 - DNA, 16 bp, Homo sapiens
  chr11:63432100-63432116
  hypo
ttttttttttttgaga

SEQ ID NO: 18679 - DNA, 30 bp, Homo sapiens
  chr11:63442644-63442674
  hypo
taatagtggccaggctcggtggctcacgcc

SEQ ID NO: 18680 - DNA, 31 bp, Homo sapiens
  chr11:63444189-63444220
  hypo
aagagacctagcacagcgcctcaggtgttca

SEQ ID NO: 18681 - DNA, 34 bp, Homo sapiens
  chr11:63609979-63610013
  hypo
attcctgtattctttaaaacgggaaaaaagacaa

SEQ ID NO: 18682 - DNA, 31 bp, Homo sapiens
  chr11:63610045-63610076
  hypo
atcaaacactggcctccgagaatagatcatg

SEQ ID NO: 18683 - DNA, 27 bp, Homo sapiens
  chr11:63641123-63641150
  hypo
ttatttttttctgagacggagtcttgc

SEQ ID NO: 18684 - DNA, 31 bp, Homo sapiens
  chr11:63714456-63714487
  hypo
agaaatatgatagaaacgggtgagtcacatt

SEQ ID NO: 18685 - DNA, 31 bp, Homo sapiens
  chr11:63743820-63743851
  hypo
acctgaccagccccaccggcccatcctggtc

SEQ ID NO: 18686 - DNA, 31 bp, Homo sapiens
  chr11:63776021-63776052
  hypo
gaggagcgctcgggcccgggagcagcatgtg

SEQ ID NO: 18687 - DNA, 22 bp, Homo sapiens
  chr11:63811296-63811318
  hypo
ttttatgacggagtttcgctct

SEQ ID NO: 18688 - DNA, 32 bp, Homo sapiens
  chr11:63814028-63814060
  hypo
ttttttctttttgagacggagttttgttctcg

SEQ ID NO: 18689 - DNA, 32 bp, Homo sapiens
  chr11:63814239-63814271
  hypo
ggattacaggcgtgagccgctgcgcctggcct

SEQ ID NO: 18690 - DNA, 31 bp, Homo sapiens
  chr11:63818820-63818851
  hypo
tgggtgcgtgtggtcacgagctagagaggca

SEQ ID NO: 18691 - DNA, 31 bp, Homo sapiens
  chr11:63830016-63830047
  hypo
gactcttgtacaagctcggtctctgtttcct

SEQ ID NO: 18692 - DNA, 31 bp, Homo sapiens
  chr11:63849154-63849185
  hypo
accatgcaggtgagggcgtgtggctgaagcc

SEQ ID NO: 18693 - DNA, 31 bp, Homo sapiens
  chr11:63871582-63871613
  hypo
ctttggcaggggcctccggaccagtgacccc

SEQ ID NO: 18694 - DNA, 40 bp, Homo sapiens
  chr11:63871620-63871660
  hypo
cccagagggtcttgggcggcagcgacgaaggaggtaaggc

SEQ ID NO: 18695 - DNA, 28 bp, Homo sapiens
  chr11:63892467-63892495
  hypo
tccacgtctcccccggagacccctgcct

SEQ ID NO: 18696 - DNA, 53 bp, Homo sapiens
  chr11:63892559-63892612
  hypo
tgtcactgtcccctcccgccccttgtcactgaaatgcccggcctgtgccagga

SEQ ID NO: 18697 - DNA, 31 bp, Homo sapiens
  chr11:63905994-63906025
  hypo
ttgatgatgtttaaaccgtacctgaaataca

SEQ ID NO: 18698 - DNA, 31 bp, Homo sapiens
  chr11:63916438-63916469
  hypo
gttcagaccctgcctccgtcattccctggga

SEQ ID NO: 18699 - DNA, 31 bp, Homo sapiens
  chr11:63917114-63917145
  hypo
tgcctcattttccctccggccactttgcagc

SEQ ID NO: 18700 - DNA, 31 bp, Homo sapiens
  chr11:63917484-63917515
  hypo
cagaaactcctgcctacgtgtaacctgtcac

SEQ ID NO: 18701 - DNA, 31 bp, Homo sapiens
  chr11:63923020-63923051
  hypo
tgtgtgctgcaaagtgcggtctacacgccag

SEQ ID NO: 18702 - DNA, 5 bp, Homo sapiens
  chr11:63934614-63934619
  hypo
ttttt

SEQ ID NO: 18703 - DNA, 31 bp, Homo sapiens
  chr11:63934668-63934699
  hypo
tataatgaatacaggccgggccattataata

SEQ ID NO: 18704 - DNA, 10 bp, Homo sapiens
  chr11:63963858-63963868
  hypo
ctccatctca

SEQ ID NO: 18705 - DNA, 31 bp, Homo sapiens
  chr11:63963918-63963949
  hypo
agcaaagagtgagctgcgggagttgcccttc

SEQ ID NO: 18706 - DNA, 31 bp, Homo sapiens
  chr11:63964099-63964130
  hypo
tgtggttgggagtgtccgctaagcagcactc

SEQ ID NO: 18707 - DNA, 79 bp, Homo sapiens
  chr11:63978731-63978810
  hypo
caacctgcactccaggcgtggcacctgcactgttccgggggatgccagctcacttctcggacagcgcccagactgaggc

SEQ ID NO: 18708 - DNA, 48 bp, Homo sapiens
  chr11:63978813-63978861
  hypo
ctaccacatgctgagccggccccagccgccacccgaccccctcctgct

SEQ ID NO: 18709 - DNA, 30 bp, Homo sapiens
  chr11:63990014-63990044
  hypo
aacaaagcgacactccgtctcaaaaaaaaa

SEQ ID NO: 18710 - DNA, 55 bp, Homo sapiens
  chr11:63990121-63990176
  hypo
tgtctgggcctgggttcgccggtccgcaagacagggctagcggtggatgctgtta

SEQ ID NO: 18711 - DNA, 31 bp, Homo sapiens
  chr11:64019237-64019268
  hypo
tgctccgcccaaatcccgggactctttcagt

SEQ ID NO: 18712 - DNA, 62 bp, Homo sapiens
  chr11:64055230-64055292
  hypo
tctttctgctggtgaacgtgctgtgtgctgtgctctcccatcggcgccgggcacagccctgg

SEQ ID NO: 18713 - DNA, 31 bp, Homo sapiens
  chr11:64056036-64056067
  hypo
ggacaggagtaagtatcgatgatggcttcct

SEQ ID NO: 18714 - DNA, 49 bp, Homo sapiens
  chr11:64056097-64056146
  hypo
gcaggtctttgcctctcggtcctacttctttgaccgggctgggcactgt

SEQ ID NO: 18715 - DNA, 56 bp, Homo sapiens
  chr11:64056160-64056216
  hypo
ctcctgggagcacagccggggtgagagcaccaggtaggagccgtggcactgcctca

SEQ ID NO: 18716 - DNA, 31 bp, Homo sapiens
  chr11:64069274-64069305
  hypo
agctgggaggacaggccggcaccatcctgct

SEQ ID NO: 18717 - DNA, 31 bp, Homo sapiens
  chr11:64069322-64069353
  hypo
tttgtagagaaaatttcgacatgttgcccca

SEQ ID NO: 18718 - DNA, 27 bp, Homo sapiens
  chr11:64078901-64078928
  hypo
ttttgagacggagtctcgctttgttgc

SEQ ID NO: 18719 - DNA, 31 bp, Homo sapiens
  chr11:64105953-64105984
  hypo
ccataaaacagccaggcgctcttaagccagc

SEQ ID NO: 18720 - DNA, 31 bp, Homo sapiens
  chr11:64118935-64118966
  hypo
acttctgggcagaatgcgatgctggtggcag

SEQ ID NO: 18721 - DNA, 82 bp, Homo sapiens
  chr11:64119012-64119094
  hypo
ggggagcctgcagggccgtgcccaggagctgctgctgcagagccagcgggcgcaggagcacagcagccgcctgcaggtgggt

SEQ ID NO: 18722 - DNA, 39 bp, Homo sapiens
  chr11:64120221-64120260
  hypo
gcagctgcaggcccagcgggccagcgtggaggcacagga

SEQ ID NO: 18723 - DNA, 31 bp, Homo sapiens
  chr11:64140407-64140438
  hypo
caagacgggtgccaggcgctccagggactcc

SEQ ID NO: 18724 - DNA, 31 bp, Homo sapiens
  chr11:64143232-64143263
  hypo
aaatattccatatgaacgtagagattgcaaa

SEQ ID NO: 18725 - DNA, 53 bp, Homo sapiens
  chr11:64319241-64319294
  hypo
acagtccaagtggccacgaacgggagggcggttaaatgcgtgatggtaaatcc

SEQ ID NO: 18726 - DNA, 31 bp, Homo sapiens
  chr11:64324827-64324858
  hypo
gacaaaagcaaggttgcgaggggtgaggagc

SEQ ID NO: 18727 - DNA, 31 bp, Homo sapiens
  chr11:64347187-64347218
  hypo
gatgaacatctcaccccgggttttcagcagc

SEQ ID NO: 18728 - DNA, 60 bp, Homo sapiens
  chr11:64367836-64367896
  hypo
agaaatgggggctctgcgctcagccttggccgtgctggggctgggcggggtgggggctgc

SEQ ID NO: 18729 - DNA, 31 bp, Homo sapiens
  chr11:64367907-64367938
  hypo
tcaccatctacagcagcgagctcttccccac

SEQ ID NO: 18730 - DNA, 50 bp, Homo sapiens
  chr11:64390386-64390436
  hypo
caggtgaccctcagtccgcacattggggtcgctctcggcggccagcgcca

SEQ ID NO: 18731 - DNA, 59 bp, Homo sapiens
  chr11:64418854-64418913
  hypo
tgccaggtagctgctgcgactcttgaaggtgacgggatcggccacgatggcacgcaggc

SEQ ID NO: 18732 - DNA, 31 bp, Homo sapiens
  chr11:64434773-64434804
  hypo
cttgcggctggatgcccgcagcttgatgccc

SEQ ID NO: 18733 - DNA, 31 bp, Homo sapiens; identical to SEQ ID NO: 4319
  chr11:64513474-64513505
  hypo

SEQ ID NO: 18734 - DNA, 24 bp, Homo sapiens
  chr11:64578576-64578600
  hypo
tgtttgttttgagacacggtcttt

SEQ ID NO: 18735 - DNA, 31 bp, Homo sapiens
  chr11:64597831-64597862
  hypo
ggggtggcaataatcccgctgtccctgcctc

SEQ ID NO: 18736 - DNA, 100 bp, Homo sapiens
  chr11:64600134-64600234
  hypo
gtcaaacagcagcaggcgtgagtcactcagggcagcaaacacgcgctgccagccccgccggacacctgagggccgcggcacctggcggaaaggcaagcat

SEQ ID NO: 18737 - DNA, 31 bp, Homo sapiens
  chr11:64600281-64600312
  hypo
ctcggcccccactcaccgacagaaagccctc

SEQ ID NO: 18738 - DNA, 31 bp, Homo sapiens
  chr11:64600772-64600803
  hypo
tgggaagctccgggggcgcagcgtgtgtgag

SEQ ID NO: 18739 - DNA, 31 bp, Homo sapiens
  chr11:64601738-64601769
  hypo
cactggccctcgggcccgcagctcctcccgc

SEQ ID NO: 18740 - DNA, 31 bp, Homo sapiens
  chr11:64607056-64607087
  hypo
ggcagggagagtgaggcgtttgacctgtgtg

SEQ ID NO: 18741 - DNA, 49 bp, Homo sapiens
  chr11:64607091-64607140
  hypo
tggccatttaggcacacgcccaggtgcacatgcacggtgtgtgccagca

SEQ ID NO: 18742 - DNA, 87 bp, Homo sapiens
  chr11:64624926-64625013
  hypo
aaaaataagaaaaacacgcagccctctgtcctccagagccggcatctgacccacgcccgtgcacacagctcacggaggttcaggcca

SEQ ID NO: 18743 - DNA, 24 bp, Homo sapiens
  chr11:64635185-64635209
  hypo
ctccatctccgtacccccacctcc

SEQ ID NO: 18744 - DNA, 31 bp, Homo sapiens; identical to SEQ ID NO: 4320
  chr11:64698944-64698975
  hypo

SEQ ID NO: 18745 - DNA, 31 bp, Homo sapiens; identical to SEQ ID NO: 4321
  chr11:64698988-64699019
  hypo

SEQ ID NO: 18746 - DNA, 31 bp, Homo sapiens; identical to SEQ ID NO: 4322
  chr11:64699020-64699051
  hypo

SEQ ID NO: 18747 - DNA, 55 bp, Homo sapiens; identical to SEQ ID NO: 4323
  chr11:64699088-64699143
  hypo

SEQ ID NO: 18748 - DNA, 31 bp, Homo sapiens; identical to SEQ ID NO: 4324
  chr11:64759021-64759052
  hypo

SEQ ID NO: 18749 - DNA, 31 bp, Homo sapiens
  chr11:64809968-64809999
  hypo
agatactttctatgggcgatgcattccaata

SEQ ID NO: 18750 - DNA, 169 bp, Homo sapiens
  chr11:64875618-64875787
  hypo
catccaccggcagccccggccctgcccttcactacctctccctcgtgcagggagggcggctcaggcgccccggagcaggcagagtgcgtggagctgctgctggccctgggcgagcctgcggaggagctgtgcgaggagttcctggcgcacgcccgcggccggctggaga

SEQ ID NO: 18751 - DNA, 109 bp, Homo sapiens
  chr11:64876064-64876173
  hypo
cttccaccggcgcttgcgggctcccggggccctgctggccgctgccgggctcgcagacgctgccacggagatcgtggaacgagtggcccgcgagcgcctgggccaccac

SEQ ID NO: 18752 - DNA, 31 bp, Homo sapiens
  chr11:64876330-64876361
  hypo
cagtgcaccttttcaccgccaaagaggtgtc

SEQ ID NO: 18753 - DNA, 31 bp, Homo sapiens
  chr11:64898550-64898581
  hypo
cagagggacccaggaccgagcttgggacagc

SEQ ID NO: 18754 - DNA, 31 bp, Homo sapiens
  chr11:64950291-64950322
  hypo
ggattatgagcagctgcgggtgcgatgcctg

SEQ ID NO: 18755 - DNA, 43 bp, Homo sapiens
  chr11:64950869-64950912
  hypo
gattctccctagcacccgcttccccccccggggcaggttggta

SEQ ID NO: 18756 - DNA, 146 bp, Homo sapiens
  chr11:64951748-64951894
  hypo
ctcggaacccagggtgcggaacccacagtgcggatccactttggcccagcgccacacccacctgctccagtctgcaggggcgcagtctcgcccccttccctcgctcctccaatccgctcctccctggcctccgattggccagttca

SEQ ID NO: 18757 - DNA, 78 bp, Homo sapiens
  chr11:64955442-64955520
  hypo
ggtggtgagcctgatccggatgcggaacccctggggcgaggtggagtggacgggagcctggagcgacaggtgaggggc

SEQ ID NO: 18758 - DNA, 31 bp, Homo sapiens
  chr11:64977149-64977180
  hypo
gagaataaggcaagcccggctgtgggctgac

SEQ ID NO: 18759 - DNA, 119 bp, Homo sapiens
  chr11:64977481-64977600
  hypo
acctcagtccatcttccggaagtttgacctggacaagtcgggcagcatgagtgcctacgagatgcggatggccattgagtcggcaggtgagactccaaggctgacggcacctgtggggc

SEQ ID NO: 18760 - DNA, 43 bp, Homo sapiens
  chr11:65023026-65023069
  hypo
ctgttacttacagcttcgtgacctccagcgaatcacctctctt

SEQ ID NO: 18761 - DNA, 42 bp, Homo sapiens
  chr11:65028519-65028561
  hypo
aatgctgggattacaggcgtgagtgaccgcacctggcctggg

SEQ ID NO: 18762 - DNA, 73 bp, Homo sapiens
  chr11:65028591-65028664
  hypo
tgctaaattgttttctcgaaacgctctataccatcccaccagcattgtatgacgcctacggttgagatttttg

SEQ ID NO: 18763 - DNA, 31 bp, Homo sapiens; identical to SEQ ID NO: 4325
  chr11:65082127-65082158
  hypo

SEQ ID NO: 18764 - DNA, 37 bp, Homo sapiens
  chr11:65124377-65124414
  hypo
cccggcaaaacgcccccgtcctcgcacaaaacctctg

SEQ ID NO: 18765 - DNA, 45 bp, Homo sapiens
  chr11:65306380-65306425
  hypo
aaccggggaggggggccggtaggggcgcctcgggtctcaaggcgc

SEQ ID NO: 18766 - DNA, 38 bp, Homo sapiens
  chr11:65306767-65306805
  hypo
cccctgcccccacccccgaagcccggctcacccacgca

SEQ ID NO: 18767 - DNA, 31 bp, Homo sapiens
  chr11:65309027-65309058
  hypo
ggggagttgtccagtccgagggaggagctgg

SEQ ID NO: 18768 - DNA, 51 bp, Homo sapiens
  chr11:65375070-65375121
  hypo
gagacactcgttccaacgctgggtcccttgattcctcgcaccttttccttg

SEQ ID NO: 18769 - DNA, 31 bp, Homo sapiens
  chr11:65385209-65385240
  hypo
gctagaccagctgtttcgttgttgaatcccc

SEQ ID NO: 18770 - DNA, 233 bp, Homo sapiens
  chr11:65413880-65414113
  hypo
gggcatggagtcctgccgcccctcactaacgcctccctccccgcagggtggccgtgagccgcacccaggacacccctgccttcgggccagctctgcctgctggcggaggccccttcgcagccaacgccgacttccgggccttcctgctggccaaagcgctgaatggtgagcaggcggccggccacgcgcgccagttccacgccatggccacgcgcacccgccagcagtacctg

SEQ ID NO: 18771 - DNA, 107 bp, Homo sapiens
  chr11:65629449-65629556
  hypo
cagctactggccagctcggcactcaggagcccgagtgatactgctggtgctctaccgggagcacctggtgagcactgggctacaccgggaggcggaaccatggcagt

SEQ ID NO: 18772 - DNA, 31 bp, Homo sapiens
  chr11:65685226-65685257
  hypo
gccttcaaccacggcccgggcaatgccagcc

SEQ ID NO: 18773 - DNA, 31 bp, Homo sapiens
  chr11:65698361-65698392
  hypo
tgttctcatttgggctcgccttgacctctca

SEQ ID NO: 18774 - DNA, 37 bp, Homo sapiens
  chr11:65722777-65722814
  hypo
aaaagagttaggtactcggctgtacgccgtggctcac

SEQ ID NO: 18775 - DNA, 40 bp, Homo sapiens
  chr11:65754936-65754976
  hypo
ccctctccctgagccccggacacatcgatgctgtcattgc

SEQ ID NO: 18776 - DNA, 35 bp, Homo sapiens
  chr11:65787644-65787679
  hypo
cagcttctcttggatccgggcggccctctgggaag

SEQ ID NO: 18777 - DNA, 31 bp, Homo sapiens
  chr11:65935758-65935789
  hypo
tttggaggagaatcaacgtatcaatgctaga

SEQ ID NO: 18778 - DNA, 31 bp, Homo sapiens
  chr11:65935828-65935859
  hypo
caatgacatttgtatacgtacagtataactt

SEQ ID NO: 18779 - DNA, 81 bp, Homo sapiens
  chr11:65935877-65935958
  hypo
tgcacatcttatggagcgagacagtgtagagacagcgtagagtagtggttttaagagcaaaggcttcggaaccaggctgcc

SEQ ID NO: 18780 - DNA, 31 bp, Homo sapiens
  chr11:65935969-65936000
  hypo
ctcacttagctgcttacggtgtcatcttggg

SEQ ID NO: 18781 - DNA, 91 bp, Homo sapiens
  chr11:66052173-66052264
  hypo
caggtagagctggagacgctgccgggggacggggccccccatgctgtcggggcccagggctgctgtccgcaaagagcgcacctggaagaaa

SEQ ID NO: 18782 - DNA, 31 bp, Homo sapiens
  chr11:66061846-66061877
  hypo
aagtgcctgctcctcacgctgctcatccacg

SEQ ID NO: 18783 - DNA, 38 bp, Homo sapiens
  chr11:66099977-66100015
  hypo
aggccactccgcccggcggtagacgaggtagccagtgg

SEQ ID NO: 18784 - DNA, 31 bp, Homo sapiens
  chr11:66100034-66100065
  hypo
ggccccagggggcaggcggtggtagccctgc

SEQ ID NO: 18785 - DNA, 31 bp, Homo sapiens
  chr11:66100091-66100122
  hypo
gttgggctgggtcactcggaacttggtggca

SEQ ID NO: 18786 - DNA, 31 bp, Homo sapiens
  chr11:66100146-66100177
  hypo
gaggcttctgggggcacggccagggtcttgg

SEQ ID NO: 18787 - DNA, 31 bp, Homo sapiens
  chr11:66101068-66101099
  hypo
tcacagtgggccaagacgaggctcagcagag

SEQ ID NO: 18788 - DNA, 34 bp, Homo sapiens
  chr11:66113510-66113544
  hypo
gggaagggctcagcagcgtcggggagagttgggg

SEQ ID NO: 18789 - DNA, 31 bp, Homo sapiens
  chr11:66128652-66128683
  hypo
gattatgtgagccaccgcgcctggcttctag

SEQ ID NO: 18790 - DNA, 31 bp, Homo sapiens; identical to SEQ ID NO: 4333
  chr11:66176412-66176443
  hypo

SEQ ID NO: 18791 - DNA, 68 bp, Homo sapiens; identical to SEQ ID NO: 4334
  chr11:66176499-66176567
  hypo

SEQ ID NO: 18792 - DNA, 61 bp, Homo sapiens; identical to SEQ ID NO: 4335
  chr11:66176660-66176721
  hypo

SEQ ID NO: 18793 - DNA, 21 bp, Homo sapiens
  chr11:66205042-66205063
  hypo
caagaaaaaaataaatcgggg

SEQ ID NO: 18794 - DNA, 31 bp, Homo sapiens
  chr11:66333945-66333976
  hypo
caggcaggggtttccccggggagcaggtagg

SEQ ID NO: 18795 - DNA, 31 bp, Homo sapiens
  chr11:66373084-66373115
  hypo
aggaggctgtgctctgcggatggtgcatgag

SEQ ID NO: 18796 - DNA, 71 bp, Homo sapiens
  chr11:66373247-66373318
  hypo
caccatctgggaggagcgaggccggcccatcgctggcaagggccgaaaggagtcagcgcagccccctgccc

SEQ ID NO: 18797 - DNA, 57 bp, Homo sapiens
  chr11:66411298-66411355
  hypo
tcacctccacctctctcgatccctacgatagacacctgttgccgacctcaggagctg

SEQ ID NO: 18798 - DNA, 31 bp, Homo sapiens
  chr11:66411367-66411398
  hypo
ctgctgcagcagcagccgctgctgctgttac

SEQ ID NO: 18799 - DNA, 57 bp, Homo sapiens
  chr11:66411403-66411460
  hypo
cttccacttcatattacgggcgggatcggagccccctgcgtcgcgctacagccccag

SEQ ID NO: 18800 - DNA, 37 bp, Homo sapiens
  chr11:66411466-66411503
  hypo
ctgttggagagggctacggttacgggcatgagagtga

SEQ ID NO: 18801 - DNA, 57 bp, Homo sapiens
  chr11:66411510-66411567
  hypo
caagcttcagcagccgcgcggaattctctgtacgacatggcccggtatgagcgggag

SEQ ID NO: 18802 - DNA, 31 bp, Homo sapiens
  chr11:66454423-66454454
  hypo
aactctcctcccatcccgagagcactgttcc

SEQ ID NO: 18803 - DNA, 35 bp, Homo sapiens
  chr11:66457264-66457299
  hypo
gcctcacccacctcctcggccgcatagtggctcct

SEQ ID NO: 18804 - DNA, 48 bp, Homo sapiens
  chr11:66457306-66457354
  hypo
agctccttccccatgtcgatgcaggaggagaagcggtctgcccgggcc

SEQ ID NO: 18805 - DNA, 67 bp, Homo sapiens
  chr11:66457463-66457530
  hypo
gcccagccacacaacccgtggaggccctgagccctgggattctcaccggggacgctcctgggcatcc

SEQ ID NO: 18806 - DNA, 82 bp, Homo sapiens
  chr11:66511193-66511275
  hypo
attcagtgcagtcaaacgtggaaaggggcctggatagggaggggtcgactcccaggtcccacctttgcgggggaagctggtc

SEQ ID NO: 18807 - DNA, 26 bp, Homo sapiens
  chr11:66511308-66511334
  hypo
gttgtaaggtaaaagacggggggtcg

SEQ ID NO: 18808 - DNA, 21 bp, Homo sapiens
  chr11:66511633-66511654
  hypo
gggcgtcgtttttaatttcag

SEQ ID NO: 18809 - DNA, 31 bp, Homo sapiens
  chr11:66513181-66513212
  hypo
aggctagaacccagggcgctgactcataggc

SEQ ID NO: 18810 - DNA, 42 bp, Homo sapiens
  chr11:66513216-66513258
  hypo
gttcttttcccaactgcgctgtcataccgacatgagaatatc

SEQ ID NO: 18811 - DNA, 77 bp, Homo sapiens
  chr11:66513569-66513646
  hypo
tgcccggcccgatatgggaatatcgtaacagaggacgtgtgaaggaatagttagactctacacgtacctggaaacca

SEQ ID NO: 18812 - DNA, 26 bp, Homo sapiens
  chr11:66515369-66515395
  hypo
cataagctaccgcgcagggcagcatt

SEQ ID NO: 18813 - DNA, 31 bp, Homo sapiens
  chr11:66557366-66557397
  hypo
tacttattcatccagacgtgtgtttgttcaa

SEQ ID NO: 18814 - DNA, 44 bp, Homo sapiens
  chr11:66557794-66557838
  hypo
gatcaagaagtaaacacgtaattacaatacggtgtgattcccag

SEQ ID NO: 18815 - DNA, 150 bp, Homo sapiens
  chr11:66625239-66625389
  hypo
ctgctggccagtggagcggccgcctgcccgctgccctgcgtctgccagaacctgtccgagtcgctcagcaccctctgtgcccaccgaggcctgctgtttgtgccgcccaacgtggaccggcgcacagtggagctgcggctggctgacaac

SEQ ID NO: 18816 - DNA, 198 bp, Homo sapiens
  chr11:66625454-66625652
  hypo
tcgcaatgccatcacccgcattggggcccgcgcctttggggacctcgagagcctgcgttccctccaccttgacggcaacaggctggtggagctgggcaccgggagcctccggggccccgtcaatctgcagcacctcatcctcagcggcaaccagctgggccgcatcgcgccgggagccttcgacgacttcctagagag

SEQ ID NO: 18817 - DNA, 57 bp, Homo sapiens
  chr11:66625670-66625727
  hypo
gtcctacaacaacctccggcaggtgccctgggccggcatcggcgccatgcctgccct

SEQ ID NO: 18818 - DNA, 181 bp, Homo sapiens
  chr11:66625744-66625925
  hypo
accataaccttattgacgcactgcccccaggcgccttcgcccagctcggtcagctctcccgcctggacctcacctccaaccgcctggccacgctggctccggacccgcttttctctcgtgggcgtgatgcagaggcctctcccgcccccctggtgctgagctttagcgggaaccccctgca

SEQ ID NO: 18819 - DNA, 78 bp, Homo sapiens
  chr11:66625934-66626012
  hypo
tgagctgctgtggctgcggcggctggcgcggccggacgacctggaaacgtgcgcctccccgcccggcctggccggccg

SEQ ID NO: 18820 - DNA, 60 bp, Homo sapiens
  chr11:66626058-66626118
  hypo
ctcattgcccgccacacgcagcgcctctgggtgctggaaggccagcgggccacgctgcgg

SEQ ID NO: 18821 - DNA, 85 bp, Homo sapiens
  chr11:66626143-66626228
  hypo
ctaccatgcactgggtcggtcctgacgaccggttggttggcaactcctcccgagcccgggctttccccaacgggaccttagagat

SEQ ID NO: 18822 - DNA, 31 bp, Homo sapiens
  chr11:66629458-66629489
  hypo
gagggagcagaggaaccgggcacaaccccag

SEQ ID NO: 18823 - DNA, 45 bp, Homo sapiens
  chr11:66629497-66629542
  hypo
caggaccacagagcaacgggcaggggcaggcgagggggatggcct

SEQ ID NO: 18824 - DNA, 98 bp, Homo sapiens
  chr11:66637737-66637835
  hypo
ggctcctgtcccaacacgggaagcccacccttcacctgtttagcgagtttcacagagtcgctggtgagccgagtccgaagctgcgggtccaggtgggc

SEQ ID NO: 18825 - DNA, 56 bp, Homo sapiens
  chr11:66652535-66652591
  hypo
gaggccttggggacttcgggacctgtcaagctcaggacaagcgggtgtcacccggt

SEQ ID NO: 18826 - DNA, 51 bp, Homo sapiens
  chr11:66655509-66655560
  hypo
cacttgtgatggcattcggggcccacctggatgatccgggatcacctttcc

SEQ ID NO: 18827 - DNA, 31 bp, Homo sapiens
  chr11:66664018-66664049
  hypo
tccctgggagagggcacgccaagggagcaga

SEQ ID NO: 18828 - DNA, 31 bp, Homo sapiens
  chr11:66665004-66665035
  hypo
tgcactccagcctgggcgacagagagagacc

SEQ ID NO: 18829 - DNA, 49 bp, Homo sapiens
  chr11:66665047-66665096
  hypo
ataaataaacaaaaagcgaataaaatacaacatgcgaaaagctatcctc

SEQ ID NO: 18830 - DNA, 31 bp, Homo sapiens
  chr11:66676019-66676050
  hypo
ggtaccaccccaccatcgcaaggaagcaaaa

SEQ ID NO: 18831 - DNA, 73 bp, Homo sapiens
  chr11:66676111-66676184
  hypo
cttttgcttggcctcccgaacccgaggctaattggtcggaggtcttgcatggttcggcgcgctcactgtgtga

SEQ ID NO: 18832 - DNA, 51 bp, Homo sapiens
  chr11:66676191-66676242
  hypo
tggcatctgaagagagcgggtaggctgagcctgctacgggaacgtaagtgc

SEQ ID NO: 18833 - DNA, 59 bp, Homo sapiens
  chr11:66676877-66676936
  hypo
tgcaggacatgatcttcggaacaggtgtccctgccgctcccccccgaagagaagctgcc

SEQ ID NO: 18834 - DNA, 31 bp, Homo sapiens
  chr11:66683035-66683066
  hypo
cagctgtggaccactccgtgccctgtgatcc

SEQ ID NO: 18835 - DNA, 26 bp, Homo sapiens
  chr11:66695177-66695203
  hypo
gagcgaaagtccgtctcaaaaaaaaa

SEQ ID NO: 18836 - DNA, 59 bp, Homo sapiens
  chr11:66695455-66695514
  hypo
atctgcttgttggtttcggccacagacatgaagccacaaagggacgtgtggatttcaga

SEQ ID NO: 18837 - DNA, 31 bp, Homo sapiens
  chr11:66695563-66695594
  hypo
cccacctgtggcaggccgggtatggtgtctc

SEQ ID NO: 18838 - DNA, 31 bp, Homo sapiens
  chr11:66701353-66701384
  hypo
gtctcaaatcccaacacgcagctggggttca

SEQ ID NO: 18839 - DNA, 31 bp, Homo sapiens
  chr11:66701399-66701430
  hypo
gccctaatgctcactacgccccaccagcaca

SEQ ID NO: 18840 - DNA, 60 bp, Homo sapiens
  chr11:66701489-66701549
  hypo
caacctccacccttgccggcttcccactgccttcctccacgccagcgaggctggggcatc

SEQ ID NO: 18841 - DNA, 31 bp, Homo sapiens
  chr11:66701669-66701700
  hypo
tcatcttgcagggcctcggattcacatattc

SEQ ID NO: 18842 - DNA, 31 bp, Homo sapiens
  chr11:66706996-66707027
  hypo
tggacacagtggttcacgcctgtaatcctaa

SEQ ID NO: 18843 - DNA, 45 bp, Homo sapiens
  chr11:66710159-66710204
  hypo
ataccactgaactgtacgctggaaaatggttaagaaagtttcggc

SEQ ID NO: 18844 - DNA, 31 bp, Homo sapiens
  chr11:66718615-66718646
  hypo
ataatgggtggaaaaccgagaaaaactccta

SEQ ID NO: 18845 - DNA, 31 bp, Homo sapiens
  chr11:66744189-66744220
  hypo
tgatggtgggccagggcgcaggtctccctcc

SEQ ID NO: 18846 - DNA, 31 bp, Homo sapiens
  chr11:66749830-66749861
  hypo
cttatcttctctgcctcggtttcctcatttg

SEQ ID NO: 18847 - DNA, 22 bp, Homo sapiens
  chr11:66752027-66752049
  hypo
gccacagcgcctggcagtcgag

SEQ ID NO: 18848 - DNA, 31 bp, Homo sapiens
  chr11:66817389-66817420
  hypo
ttgagttccctagaagcgaaatctgagaggg

SEQ ID NO: 18849 - DNA, 61 bp, Homo sapiens; identical to SEQ ID NO: 4339
  chr11:66886094-66886155
  hypo

SEQ ID NO: 18850 - DNA, 31 bp, Homo sapiens
  chr11:67051192-67051223
  hypo
agagagcccctttttccgctccctggactgg

SEQ ID NO: 18851 - DNA, 31 bp, Homo sapiens
  chr11:67051239-67051270
  hypo
agaaggtaacagtctgcggcagggactgggg

SEQ ID NO: 18852 - DNA, 55 bp, Homo sapiens
  chr11:67072100-67072155
  hypo
tccactctagacctatcgaccgcgtgggggcccatgaatccgtgtagacaagggc

SEQ ID NO: 18853 - DNA, 39 bp, Homo sapiens
  chr11:67072238-67072277
  hypo
gccaggcagagctttgcggtgctccgtggggctgtcctg

SEQ ID NO: 18854 - DNA, 68 bp, Homo sapiens
  chr11:67072328-67072396
  hypo
ccaacagagaaggccccgagtgaggaggagctccacggggaccagacagacttcgggcaaggatccca

SEQ ID NO: 18855 - DNA, 37 bp, Homo sapiens
  chr11:67150730-67150767
  hypo
aaaaattcatcctggccgggcgcggtggctcacgcct

SEQ ID NO: 18856 - DNA, 64 bp, Homo sapiens
  chr11:67203569-67203633
  hypo
gctggcccagagcaggcgccgcgtgcggccccacagcgcggcacctaggcgggccgggtggtag

SEQ ID NO: 18857 - DNA, 35 bp, Homo sapiens
  chr11:67208821-67208856
  hypo
acgggggtcgatgatgcgcacgctcttgtccttgc

SEQ ID NO: 18858 - DNA, 95 bp, Homo sapiens; identical to SEQ ID NO: 4342
  chr11:67210850-67210945
  hypo

SEQ ID NO: 18859 - DNA, 42 bp, Homo sapiens; identical to SEQ ID NO: 4343
  chr11:67210962-67211004
  hypo

SEQ ID NO: 18860 - DNA, 31 bp, Homo sapiens
  chr11:67406910-67406941
  hypo
cacctctgcttcagaacgtagcctacctgcc

SEQ ID NO: 18861 - DNA, 31 bp, Homo sapiens
  chr11:67430154-67430185
  hypo
gggtgagtgcagggtgcggtgtgaaccagag

SEQ ID NO: 18862 - DNA, 31 bp, Homo sapiens
  chr11:67430257-67430288
  hypo
gcagagatggaagtgcgcgtgtgcctagagg

SEQ ID NO: 18863 - DNA, 41 bp, Homo sapiens
  chr11:67430298-67430339
  hypo
ggcctggagggctccacgctctcaaccgttcagggctgatg

SEQ ID NO: 18864 - DNA, 31 bp, Homo sapiens
  chr11:67431647-67431678
  hypo
ggacagaggatggacccgctaagtgtctggt

SEQ ID NO: 18865 - DNA, 42 bp, Homo sapiens
  chr11:67432664-67432706
  hypo
ggtgcgagtccagactcgtggcccagccgtgggccctccatt

SEQ ID NO: 18866 - DNA, 31 bp, Homo sapiens
  chr11:67432757-67432788
  hypo
atgtagcgatcgctctcgttgctctggcccc

SEQ ID NO: 18867 - DNA, 67 bp, Homo sapiens
  chr11:67432865-67432932
  hypo
ggggagctctgggggtcgtcgccatagaaacgggtgatggtgctctgcagggcgggcagcagcctct

SEQ ID NO: 18868 - DNA, 112 bp, Homo sapiens
  chr11:67764061-67764173
  hypo
gctgtacttaccaaggcgataccagtgcaggcaaagagcacctcgaagccgctgtagataaagaaaggcacgaggtggcgcaggcggtagtcacgcacgtgcttgaagggca

SEQ ID NO: 18869 - DNA, 92 bp, Homo sapiens
  chr11:67764181-67764273
  hypo
atgttgccccagcccacgctgcgcagatcgatctcctccgtgggccggtaagcggctccgcacaaacccagcacctgcgaacccattacttg

SEQ ID NO: 18870 - DNA, 37 bp, Homo sapiens
  chr11:67764344-67764381
  hypo
gggccttgccccagctcggccccgcctcccaaaccag

SEQ ID NO: 18871 - DNA, 31 bp, Homo sapiens; identical to SEQ ID NO: 4346
  chr11:67777601-67777632
  hypo

SEQ ID NO: 18872 - DNA, 31 bp, Homo sapiens
  chr11:67781449-67781480
  hypo
gggccatcctgcagaccggagcaggtcccgc

SEQ ID NO: 18873 - DNA, 31 bp, Homo sapiens
  chr11:67795519-67795550
  hypo
gcacccctcaaagcagcgcctgcctcctccc

SEQ ID NO: 18874 - DNA, 31 bp, Homo sapiens
  chr11:67795576-67795607
  hypo
agcctcctccctcagccgctcccaaccatga

SEQ ID NO: 18875 - DNA, 73 bp, Homo sapiens
  chr11:67808796-67808869
  hypo
cggctgcctacacctgcgtgagtcggctgggcgagctgggcctcgtggagttcagagacgtgagttgggtggg

SEQ ID NO: 18876 - DNA, 66 bp, Homo sapiens
  chr11:67808888-67808954
  hypo
actgccaaggttagcccggaggccggtccaggatggggactgccccccctccgccatagggccctg

SEQ ID NO: 18877 - DNA, 31 bp, Homo sapiens
  chr11:67808956-67808987
  hypo
cccatttgaaccccagcggcccctgccatgg

SEQ ID NO: 18878 - DNA, 31 bp, Homo sapiens
  chr11:67808990-67809021
  hypo
ctgctcatgggaagcccgcagctgaggcccc

SEQ ID NO: 18879 - DNA, 31 bp, Homo sapiens
  chr11:67809064-67809095
  hypo
tctgtgctctgatctgcgtcttgtggctccc

SEQ ID NO: 18880 - DNA, 30 bp, Homo sapiens
  chr11:67813259-67813289
  hypo
tccacccacacaggccgttgggggcccaag

SEQ ID NO: 18881 - DNA, 18 bp, Homo sapiens
  chr11:67865093-67865111
  hypo
ctccgtctcaaaaaaaaa

SEQ ID NO: 18882 - DNA, 44 bp, Homo sapiens
  chr11:67984062-67984106
  hypo
ccctgctatgctctctcgctccctttcctcgagtgccaggttca

SEQ ID NO: 18883 - DNA, 37 bp, Homo sapiens
  chr11:67984319-67984356
  hypo
cggagggagagtggggcgtacccggctttcccagtgg

SEQ ID NO: 18884 - DNA, 111 bp, Homo sapiens; identical to SEQ ID NO: 4347
  chr11:68080103-68080214
  hypo

SEQ ID NO: 18885 - DNA, 131 bp, Homo sapiens; identical to SEQ ID NO: 4348
  chr11:68080740-68080871
  hypo

SEQ ID NO: 18886 - DNA, 31 bp, Homo sapiens
  chr11:68086448-68086479
  hypo
cctgaggcctctggatcgctagagattgggg

SEQ ID NO: 18887 - DNA, 31 bp, Homo sapiens
  chr11:68093171-68093202
  hypo
gcaggcccccctcacccgttcctgcctgacc

SEQ ID NO: 18888 - DNA, 31 bp, Homo sapiens
  chr11:68118342-68118373
  hypo
agtgggaggatgtgagcgtgtgtgtgtgtgt

SEQ ID NO: 18889 - DNA, 55 bp, Homo sapiens
  chr11:68119116-68119171
  hypo
catttgtgagcccttgcgcctggtcctgctccccacgcagcgggtatagcccagt

SEQ ID NO: 18890 - DNA, 37 bp, Homo sapiens
  chr11:68119211-68119248
  hypo
tagtatttgaaagggacgtgtgcgtagggggataaag

SEQ ID NO: 18891 - DNA, 45 bp, Homo sapiens
  chr11:68119251-68119296
  hypo
tgcttgggtgctgtggcgaggggcttccgtcggagctcaggtgct

SEQ ID NO: 18892 - DNA, 31 bp, Homo sapiens
  chr11:68119795-68119826
  hypo
cttgtctgtacagaggcgtgaccatgctgca

SEQ ID NO: 18893 - DNA, 31 bp, Homo sapiens
  chr11:68121252-68121283
  hypo
tccacctcagtgtgcacgtggccaaaaggat

SEQ ID NO: 18894 - DNA, 31 bp, Homo sapiens
  chr11:68131492-68131523
  hypo
gggggcgtgggggtgcgcgggcgtgggtggg

SEQ ID NO: 18895 - DNA, 31 bp, Homo sapiens
  chr11:68143934-68143965
  hypo
agccaccatgcctggccggccctacttctta

SEQ ID NO: 18896 - DNA, 31 bp, Homo sapiens
  chr11:68153339-68153370
  hypo
gtgggcatgctggggacgctgagcagcatgg

SEQ ID NO: 18897 - DNA, 34 bp, Homo sapiens
  chr11:68153382-68153416
  hypo
tctgcagcctggtacccggcgggacttgtggttg

SEQ ID NO: 18898 - DNA, 18 bp, Homo sapiens
  chr11:68158723-68158741
  hypo
accgcgcccagcctctgt

SEQ ID NO: 18899 - DNA, 39 bp, Homo sapiens
  chr11:68158779-68158818
  hypo
ttacatgtgtccccatcgcaccatcgtcacccattgagg

SEQ ID NO: 18900 - DNA, 55 bp, Homo sapiens
  chr11:68161388-68161443
  hypo
tcagcactttgagatacgtcgcacagtccccatttgcgaacgagaaatgaggttt

SEQ ID NO: 18901 - DNA, 31 bp, Homo sapiens
  chr11:68161457-68161488
  hypo
gtgtcatgtcacacagcgagcagggggtctc

SEQ ID NO: 18902 - DNA, 31 bp, Homo sapiens
  chr11:68161613-68161644
  hypo
gtccacattggatacacgatgtctgtggttt

SEQ ID NO: 18903 - DNA, 48 bp, Homo sapiens
  chr11:68162350-68162398
  hypo
tcaggaggtagaagggcggagagagggaacaggcggaggtcacatcct

SEQ ID NO: 18904 - DNA, 32 bp, Homo sapiens
  chr11:68162464-68162496
  hypo
acacattgagagcaaccgaggtggctgggcgt

SEQ ID NO: 18905 - DNA, 34 bp, Homo sapiens
  chr11:68165098-68165132
  hypo
cccgagttcccatcaccgtcgtcatcatcaccat

SEQ ID NO: 18906 - DNA, 31 bp, Homo sapiens
  chr11:68172055-68172086
  hypo
ccttcatggccttcatcgcaccctgcagtcc

SEQ ID NO: 18907 - DNA, 81 bp, Homo sapiens
  chr11:68177517-68177598
  hypo
aagtggcgcggctggacgggcagttccggcaagtcctcgtgtggagggacttggacaacccgaggtcgctggccctggatc

SEQ ID NO: 18908 - DNA, 35 bp, Homo sapiens
  chr11:68177610-68177645
  hypo
aagtgtttgcctgtcccgtgcgtccttgtgttcac

SEQ ID NO: 18909 - DNA, 31 bp, Homo sapiens
  chr11:68178044-68178075
  hypo
ctgactttgaggtccccggacctcaggctcc

SEQ ID NO: 18910 - DNA, 69 bp, Homo sapiens
  chr11:68189964-68190033
  hypo
ctgtcctctcctcctacgtcagctcagtaagagcccttcgaagggatgctgtgtcggaggccccaaaag

SEQ ID NO: 18911 - DNA, 44 bp, Homo sapiens
  chr11:68190241-68190285
  hypo
acccccacatctgtaccgatccctttacccgcaccttccctacc

SEQ ID NO: 18912 - DNA, 31 bp, Homo sapiens
  chr11:68190309-68190340
  hypo
acctcccccactcacccgcccctgcaccctc

SEQ ID NO: 18913 - DNA, 40 bp, Homo sapiens
  chr11:68190456-68190496
  hypo
tgcagagaaaacagtacgtgagggccgcagtccaaaagct

SEQ ID NO: 18914 - DNA, 58 bp, Homo sapiens
  chr11:68190546-68190604
  hypo
gtcttggatcccttctcgactgtcaatggggccttcatgggagcgccagtctagtgat

SEQ ID NO: 18915 - DNA, 80 bp, Homo sapiens
  chr11:68190853-68190933
  hypo
ggtctccaccagtgcccgggggtctccgccagtgccaggggtctccgccagtgcccaggggtctccgccagtgctcagga

SEQ ID NO: 18916 - DNA, 31 bp, Homo sapiens
  chr11:68191211-68191242
  hypo
ccgccgtgtcttctgccgaatgccagcctct

SEQ ID NO: 18917 - DNA, 51 bp, Homo sapiens
  chr11:68191536-68191587
  hypo
tcctcccagaggcccccgacgctcccacctgttggtcgtcagagcttctgg

SEQ ID NO: 18918 - DNA, 31 bp, Homo sapiens
  chr11:68191634-68191665
  hypo
agggaaagagggagaccgaaacccatgtgac

SEQ ID NO: 18919 - DNA, 54 bp, Homo sapiens
  chr11:68191675-68191729
  hypo
ggctccaaactgagcacgggaacgtttggggacaggagcgcgatggccttcctc

SEQ ID NO: 18920 - DNA, 31 bp, Homo sapiens
  chr11:68191769-68191800
  hypo
agcacaggtcctgggccgggagcccagagat

SEQ ID NO: 18921 - DNA, 53 bp, Homo sapiens
  chr11:68192526-68192579
  hypo
acgccatccccacacccgtccttcacccgccaccctcccgcaggtacctgtac

SEQ ID NO: 18922 - DNA, 50 bp, Homo sapiens
  chr11:68192581-68192631
  hypo
caccaacatgcaggaccgggcagccaagatcgaacgcgcagccctggacg

SEQ ID NO: 18923 - DNA, 43 bp, Homo sapiens
  chr11:68192707-68192750
  hypo
gctgttctgggtggacgcggacctgaagcgcattgagagctgt

SEQ ID NO: 18924 - DNA, 31 bp, Homo sapiens
  chr11:68192959-68192990
  hypo
tctcagagagggtgagcgagctgcttggggc

SEQ ID NO: 18925 - DNA, 31 bp, Homo sapiens
  chr11:68193065-68193096
  hypo
ggactgtgttaggctgcgagggctggagaga

SEQ ID NO: 18926 - DNA, 31 bp, Homo sapiens
  chr11:68193463-68193494
  hypo
tggaggacgccaacatcgtgcagcctctggg

SEQ ID NO: 18927 - DNA, 35 bp, Homo sapiens
  chr11:68193511-68193546
  hypo
agcatctctactggatcgaccgccagcagcagatg

SEQ ID NO: 18928 - DNA, 36 bp, Homo sapiens
  chr11:68193581-68193617
  hypo
gactcgcatccagggccgtgtcgcccacctcactgg

SEQ ID NO: 18929 - DNA, 31 bp, Homo sapiens
  chr11:68193642-68193673
  hypo
ctggaggagttctgtacgtgggggctggcag

SEQ ID NO: 18930 - DNA, 31 bp, Homo sapiens
  chr11:68193684-68193715
  hypo
gggtggcctctaaacccgacccctggaggag

SEQ ID NO: 18931 - DNA, 31 bp, Homo sapiens
  chr11:68194429-68194460
  hypo
ccacaggtccttgccccgtggccctctctgc

SEQ ID NO: 18932 - DNA, 42 bp, Homo sapiens
  chr11:68196104-68196146
  hypo
gcccacccaaatcatccgagatgacctcgtcttgagatcctt

SEQ ID NO: 18933 - DNA, 78 bp, Homo sapiens
  chr11:68199349-68199427
  hypo
cctggccctcctggctcgggaactccaggccccttcctcacggctcgagagacgtgtatttaccgcacaggtgcttgt

SEQ ID NO: 18934 - DNA, 101 bp, Homo sapiens
  chr11:68201208-68201309
  hypo
ccagttcccctgcgcgcggggtcagtgtgtggacctgcgcctgcgctgcgacggcgaggcagactgtcaggaccgctcagacgaggcggactgtgacggtg

SEQ ID NO: 18935 - DNA, 11 bp, Homo sapiens
  chr11:68203448-68203459
  hypo
ctcccaaagtg

SEQ ID NO: 18936 - DNA, 121 bp, Homo sapiens
  chr11:68203468-68203589
  hypo
cagatgtgagtcactgcgcccagtgagggtcacatttccgttgagatttggaggggcagacgttggagccatctgagccccctcgtcccgctctagcttctcctcccgtgtgccccgcggt

SEQ ID NO: 18937 - DNA, 63 bp, Homo sapiens
  chr11:68206025-68206088
  hypo
gcgcgtggtgtgccagcgctatgcgggggccaacgggcccttcccgcacgagtatgtcagcgg

SEQ ID NO: 18938 - DNA, 31 bp, Homo sapiens
  chr11:68216739-68216770
  hypo
agaactgccattctttcgtgccctgtgtgca

SEQ ID NO: 18939 - DNA, 96 bp, Homo sapiens
  chr11:68216771-68216867
  hypo
ttgagttgtgtgtccccgtggagggaatgccgacccccggaccaccatgagagtcctcctgcacccgggcgtccctctgtccggctcctgcaggga

SEQ ID NO: 18940 - DNA, 76 bp, Homo sapiens
  chr11:68385503-68385579
  hypo
cccccatggcatgcaccgtggccccgggactgcctttcctaccccgccaaggaggagagaccgaggagcagggcat

SEQ ID NO: 18941 - DNA, 58 bp, Homo sapiens
  chr11:68385589-68385647
  hypo
ccagcctggatttgcccgcccatggagaggacacgttccggatcgtcctcttccacac

SEQ ID NO: 18942 - DNA, 31 bp, Homo sapiens
  chr11:68385648-68385679
  hypo
gtagactctgtcctgccgaagggagaagtct

SEQ ID NO: 18943 - DNA, 52 bp, Homo sapiens
  chr11:68385681-68385733
  hypo
atccctgggttagacacgtctcatggagtcctctgcccgtgaccaggggggg

SEQ ID NO: 18944 - DNA, 34 bp, Homo sapiens
  chr11:68408312-68408346
  hypo
ggaatgtcctgttcatcggcgtagaagggctcac

SEQ ID NO: 18945 - DNA, 37 bp, Homo sapiens
  chr11:68505094-68505131
  hypo
actcctgcaggcaggccgggcacgcctgtaatcccag

SEQ ID NO: 18946 - DNA, 31 bp, Homo sapiens
  chr11:68549944-68549975
  hypo
tattttgaggcagagtcggaacccaggccat

SEQ ID NO: 18947 - DNA, 37 bp, Homo sapiens
  chr11:68564344-68564381
  hypo
caccatgagcggccctcgtcctcggaggtagatgtac

SEQ ID NO: 18948 - DNA, 88 bp, Homo sapiens
  chr11:68727155-68727243
  hypo
ggcgagggtgacctgacggaccactgggtgtgcaagtgcgcggagagccgtcggaccccacacgagggagcgccgttcttactccatc

SEQ ID NO: 18949 - DNA, 31 bp, Homo sapiens
  chr11:68728005-68728036
  hypo
tgctctcatccacctccgtgcctgacccaca

SEQ ID NO: 18950 - DNA, 49 bp, Homo sapiens
  chr11:68728253-68728302
  hypo
ccccgcctggcagatccgggcccccaggggctcccgcagcctctgcctc

SEQ ID NO: 18951 - DNA, 31 bp, Homo sapiens
  chr11:68747918-68747949
  hypo
gtccaccctgaagcaccgatcttcattgaat

SEQ ID NO: 18952 - DNA, 31 bp, Homo sapiens
  chr11:68785782-68785813
  hypo
cggatccgtgatgtcccgtcattagaccttc

SEQ ID NO: 18953 - DNA, 106 bp, Homo sapiens
  chr11:68838711-68838817
  hypo
tccatttgataggggacgcccccggcgctgtgctatcctgtgccggccacccttgcgttggttttgctgctgtactggtggcgcccctgaccgtggctgtctcctc

SEQ ID NO: 18954 - DNA, 31 bp, Homo sapiens
  chr11:68838857-68838888
  hypo
catctacagtcagttccggggctacctgatg

SEQ ID NO: 18955 - DNA, 31 bp, Homo sapiens
  chr11:68968787-68968818
  hypo
tgtgtggctatacatgcgtgcacacacacat

SEQ ID NO: 18956 - DNA, 47 bp, Homo sapiens
  chr11:68968831-68968878
  hypo
gttcatgttgtgtgtgcgtttgtgtgcacacacgtgtgtctgggcag

SEQ ID NO: 18957 - DNA, 40 bp, Homo sapiens
  chr11:68968944-68968984
  hypo
tgcacatgtgtgcatacgtgtttggcggggtgcatacttg

SEQ ID NO: 18958 - DNA, 31 bp, Homo sapiens
  chr11:68970084-68970115
  hypo
tggcatttcaccaaaccgagggttccctctc

SEQ ID NO: 18959 - DNA, 37 bp, Homo sapiens
  chr11:68972047-68972084
  hypo
gtcctcatggccttggcgggctcgggtggcagggggg

SEQ ID NO: 18960 - DNA, 43 bp, Homo sapiens
  chr11:68972179-68972222
  hypo
cagaaggagtggcttccgatggcacaggcgtccagggcagatg

SEQ ID NO: 18961 - DNA, 31 bp, Homo sapiens
  chr11:69464228-69464259
  hypo
atcagctagtgaccaacgtagctgagcccag

SEQ ID NO: 18962 - DNA, 31 bp, Homo sapiens
  chr11:69593279-69593310
  hypo
tagttgtataaccttacgctatttcacttct

SEQ ID NO: 18963 - DNA, 31 bp, Homo sapiens
  chr11:69593340-69593371
  hypo
gggcatgagctgatgtcggccttagcaagac

SEQ ID NO: 18964 - DNA, 31 bp, Homo sapiens
  chr11:69944883-69944914
  hypo
tgagggtctaggccctcgggccacgggggct

SEQ ID NO: 18965 - DNA, 62 bp, Homo sapiens
  chr11:69946371-69946433
  hypo
atgctcctggagcctgcgaacgtggccttgtttggaagaagggtcttcgcagagggaatgaa

SEQ ID NO: 18966 - DNA, 31 bp, Homo sapiens
  chr11:69960316-69960347
  hypo
accacttgcccaggggcgcacagcccagaag

SEQ ID NO: 18967 - DNA, 31 bp, Homo sapiens
  chr11:69972004-69972035
  hypo
ccccaacctgatggggcggcccaggacccca

SEQ ID NO: 18968 - DNA, 31 bp, Homo sapiens
  chr11:69977942-69977973
  hypo
ttctcccaggccagctcggcacccaggaggt

SEQ ID NO: 18969 - DNA, 38 bp, Homo sapiens
  chr11:69978049-69978087
  hypo
aatatcaccatgtgcccgctttgcgacaagacctgcag

SEQ ID NO: 18970 - DNA, 31 bp, Homo sapiens
  chr11:69978274-69978305
  hypo
ctcaggcaggggttgtcgggaaaaaacatag

SEQ ID NO: 18971 - DNA, 31 bp, Homo sapiens
  chr11:69979712-69979743
  hypo
ctgtccctacacagctcggcagcctcctccc

SEQ ID NO: 18972 - DNA, 31 bp, Homo sapiens
  chr11:69995207-69995238
  hypo
tccgaaccggggcccccgagagcaatggggg

SEQ ID NO: 18973 - DNA, 31 bp, Homo sapiens; identical to SEQ ID NO: 4352
  chr11:70016124-70016155
  hypo

SEQ ID NO: 18974 - DNA, 48 bp, Homo sapiens
  chr11:70020577-70020625
  hypo
gccgtctttgcacacccgctctcaagagcaaggcgagattgcacccca

SEQ ID NO: 18975 - DNA, 31 bp, Homo sapiens
  chr11:70269021-70269052
  hypo
gtgttgtgttttgccacgtttcagactactc

SEQ ID NO: 18976 - DNA, 8 bp, Homo sapiens
  chr11:70270219-70270227
  hypo
ggccgggt

SEQ ID NO: 18977 - DNA, 31 bp, Homo sapiens
  chr11:71192422-71192453
  hypo
ctgggattttttaagacgaagtcaacaggta

SEQ ID NO: 18978 - DNA, 31 bp, Homo sapiens
  chr11:71192647-71192678
  hypo
acctttggaggctcagcggaacccagcccat

SEQ ID NO: 18979 - DNA, 35 bp, Homo sapiens
  chr11:71192798-71192833
  hypo
tccattcatcctgccacgtgcgggtatttgtcctg

SEQ ID NO: 18980 - DNA, 47 bp, Homo sapiens
  chr11:71192842-71192889
  hypo
aaagtgctaacacccacgtgcatttctgtggacgcctccttgaggtc

SEQ ID NO: 18981 - DNA, 31 bp, Homo sapiens
  chr11:71282210-71282241
  hypo
ggtcctccatgaagagcggcagcctgaagcc

SEQ ID NO: 18982 - DNA, 27 bp, Homo sapiens
  chr11:71496103-71496130
  hypo
agagcgaaactccgtctcaaaaaaata

SEQ ID NO: 18983 - DNA, 31 bp, Homo sapiens
  chr11:71507972-71508003
  hypo
tccacgtggggcagcccgttaactacagagc

SEQ ID NO: 18984 - DNA, 31 bp, Homo sapiens
  chr11:71724723-71724754
  hypo
ctctgcctgcagcaggcgcagcctctcctcc

SEQ ID NO: 18985 - DNA, 45 bp, Homo sapiens
  chr11:71724760-71724805
  hypo
tggctcttctctgactcggccatcaccagccgcttcaactccttg

SEQ ID NO: 18986 - DNA, 50 bp, Homo sapiens
  chr11:72006578-72006628
  hypo
ctgcctcagctgcagcgcgtgctgtgcgatctcgtcgctggccacattgg

SEQ ID NO: 18987 - DNA, 31 bp, Homo sapiens
  chr11:72109421-72109452
  hypo
tcaagtcgcccgagagcggatactcagccat

SEQ ID NO: 18988 - DNA, 70 bp, Homo sapiens
  chr11:72109515-72109585
  hypo
ctaagtaaagcatcaccgagaggttgtaacatcaaagtgccttccaccgtctgtccgtgtttggtaaaat

SEQ ID NO: 18989 - DNA, 31 bp, Homo sapiens
  chr11:72355681-72355712
  hypo
gaccctggcctggcaccgccaccatctcttg

SEQ ID NO: 18990 - DNA, 31 bp, Homo sapiens
  chr11:72408212-72408243
  hypo
ttgcggtagatgccctcggaggtcaggccta

SEQ ID NO: 18991 - DNA, 52 bp, Homo sapiens
  chr11:72408276-72408328
  hypo
gcatagagtcatggggcggggccgcgcagctctggggcgggaggcggctctc

SEQ ID NO: 18992 - DNA, 69 bp, Homo sapiens
  chr11:72437782-72437851
  hypo
tggtgaagcaggtgggcggaaggcagctcctccggggcgggatgggtggggcagcggggagcccctcat

SEQ ID NO: 18993 - DNA, 36 bp, Homo sapiens
  chr11:72437854-72437890
  hypo
ctgtagtggtgggcagcggctcgggtggagtggcag

SEQ ID NO: 18994 - DNA, 35 bp, Homo sapiens
  chr11:72475676-72475711
  hypo
cccatctttgttcctgcgggcggcggtggccacgc

SEQ ID NO: 18995 - DNA, 31 bp, Homo sapiens
  chr11:72475840-72475871
  hypo
ccacaccagatgttgccgtcaggtgttgcct

SEQ ID NO: 18996 - DNA, 31 bp, Homo sapiens
  chr11:72532173-72532204
  hypo
ccaaatctcttagctacgtgactttgggcaa

SEQ ID NO: 18997 - DNA, 31 bp, Homo sapiens
  chr11:72532207-72532238
  hypo
acttaaacctctctgtcggtgtccttgtctg

SEQ ID NO: 18998 - DNA, 105 bp, Homo sapiens
  chr11:72532273-72532378
  hypo
gtgaggatggaaggagcgtgtagcctgctgggaacatcatggcgcccgagggccggatgggcatttggcagcctctgcgcgaggagtcctcgcagtggttatgca

SEQ ID NO: 18999 - DNA, 43 bp, Homo sapiens
  chr11:72532612-72532655
  hypo
cgggcaggtgagcagccgactcccttagcgccttcggccccgg

SEQ ID NO: 19000 - DNA, 39 bp, Homo sapiens
  chr11:73057917-73057956
  hypo
gtccccacaggacatgcggaagcacgtggccatgaccct

SEQ ID NO: 19001 - DNA, 31 bp, Homo sapiens
  chr11:73068913-73068944
  hypo
gcttcctcataactcccgtgatcagacccag

SEQ ID NO: 19002 - DNA, 31 bp, Homo sapiens
  chr11:73093211-73093242
  hypo
tgaccccagtcctcagcgtagctccactggg

SEQ ID NO: 19003 - DNA, 49 bp, Homo sapiens
  chr11:73093255-73093304
  hypo
gggatggccctgggggcgcctctttccccagcaccgcaagtctggggag

SEQ ID NO: 19004 - DNA, 31 bp, Homo sapiens
  chr11:73310291-73310322
  hypo
tttcaggaaagaggttcgccaaaatattagc

SEQ ID NO: 19005 - DNA, 56 bp, Homo sapiens
  chr11:73310341-73310397
  hypo
agggtgtcagattgcacgtaggttttttttgttttttgagacggagtctggatcta

SEQ ID NO: 19006 - DNA, 34 bp, Homo sapiens
  chr11:73310406-73310440
  hypo
tggagtaaagtgggggcgatcgcaggtcactgca

SEQ ID NO: 19007 - DNA, 19 bp, Homo sapiens
  chr11:73491526-73491545
  hypo
cgagcgaaacaccatttca

SEQ ID NO: 19008 - DNA, 31 bp, Homo sapiens
  chr11:73491597-73491628
  hypo
tggagatggggcaggtcgggaaggagagaca

SEQ ID NO: 19009 - DNA, 22 bp, Homo sapiens
  chr11:73662972-73662994
  hypo
gagtcaccgcacctggccaaaa

SEQ ID NO: 19010 - DNA, 31 bp, Homo sapiens
  chr11:73663011-73663042
  hypo
acaaatatttattgagcgtctaccacaaggg

SEQ ID NO: 19011 - DNA, 44 bp, Homo sapiens
  chr11:73663077-73663121
  hypo
agctggagataaatgtcggaatccgacatcgacactcccttacc

SEQ ID NO: 19012 - DNA, 34 bp, Homo sapiens
  chr11:73883501-73883535
  hypo
gtagatctgagggaagcgacgtactggcctaaga

SEQ ID NO: 19013 - DNA, 31 bp, Homo sapiens
  chr11:73883546-73883577
  hypo
tgaagcattgggagttcgagaaatagtttgc

SEQ ID NO: 19014 - DNA, 31 bp, Homo sapiens
  chr11:73883611-73883642
  hypo
ttttggaattttagatcgttaaatggcttgt

SEQ ID NO: 19015 - DNA, 31 bp, Homo sapiens
  chr11:73883649-73883680
  hypo
taggggatacttgggccgaggagaaagaatg

SEQ ID NO: 19016 - DNA, 14 bp, Homo sapiens
  chr11:74107758-74107772
  hypo
ggaaattcattctt

SEQ ID NO: 19017 - DNA, 31 bp, Homo sapiens
  chr11:74136875-74136906
  hypo
ggcccatttaaaggaacgaaatagttagaca

SEQ ID NO: 19018 - DNA, 45 bp, Homo sapiens
  chr11:74168143-74168188
  hypo
tctcccaccccagtgacgacctcccttaaccgtgtttcttgttga

SEQ ID NO: 19019 - DNA, 49 bp, Homo sapiens
  chr11:74168434-74168483
  hypo
gtaggagttgtcatcacggccaggtaggctggcccgcctctcttcagtc

SEQ ID NO: 19020 - DNA, 31 bp, Homo sapiens
  chr11:74168497-74168528
  hypo
cagccctggccctggccggcagagcaaattg

SEQ ID NO: 19021 - DNA, 31 bp, Homo sapiens
  chr11:74246353-74246384
  hypo
tgttttgttttgagcccgagtcttgctctgt

SEQ ID NO: 19022 - DNA, 32 bp, Homo sapiens
  chr11:74246624-74246656
  hypo
attacgggtatgagccacggcacccagcccaa

SEQ ID NO: 19023 - DNA, 31 bp, Homo sapiens
  chr11:74264083-74264114
  hypo
agccaaacaggagagacgagggttggtggga

SEQ ID NO: 19024 - DNA, 50 bp, Homo sapiens
  chr11:74424485-74424535
  hypo
aggcggacagtggaggcggtaacaactcacatgggcgccctgaaggggac

SEQ ID NO: 19025 - DNA, 31 bp, Homo sapiens
  chr11:74424549-74424580
  hypo
tggttcaaagaaccatcgtcttccacctgta

SEQ ID NO: 19026 - DNA, 31 bp, Homo sapiens
  chr11:74424613-74424644
  hypo
agaagtctgaacttgtcgtaagcctgtgatt

SEQ ID NO: 19027 - DNA, 31 bp, Homo sapiens
  chr11:74424652-74424683
  hypo
aacaattaagtgtgcccggttcctccccatt

SEQ ID NO: 19028 - DNA, 13 bp, Homo sapiens
  chr11:74664273-74664286
  hypo
ttttgagacagag

SEQ ID NO: 19029 - DNA, 31 bp, Homo sapiens
  chr11:74988583-74988614
  hypo
ggttccccagaccttgcgcagaccttcagaa

SEQ ID NO: 19030 - DNA, 31 bp, Homo sapiens
  chr11:74994441-74994472
  hypo
cacaaacaggtccttgcgaaaggtcaggccc

SEQ ID NO: 19031 - DNA, 78 bp, Homo sapiens
  chr11:74994474-74994552
  hypo
gacatccaggtcctcccggccatagcggaaggcgcaggtcagcgtcacatagactgtggggagcgaggagcactgagg

SEQ ID NO: 19032 - DNA, 65 bp, Homo sapiens
  chr11:74994558-74994623
  hypo
ctgggagagcagcaagcgagccccccagagtgccggcagcagccctgggacgggccccactggag

SEQ ID NO: 19033 - DNA, 31 bp, Homo sapiens
  chr11:74998667-74998698
  hypo
tgaggacactgaggcccggagagatcttcat

SEQ ID NO: 19034 - DNA, 31 bp, Homo sapiens
  chr11:74998711-74998742
  hypo
gccagtggagcagcagcggcagagaagctgg

SEQ ID NO: 19035 - DNA, 68 bp, Homo sapiens
  chr11:75001249-75001317
  hypo
cactggtaagcctccacgatagccattagagctctcctgggctacgcaacagccgccttgcagtcagg

SEQ ID NO: 19036 - DNA, 31 bp, Homo sapiens
  chr11:75021190-75021221
  hypo
atggggaatggggtctcgctctctcccctgg

SEQ ID NO: 19037 - DNA, 31 bp, Homo sapiens
  chr11:75026126-75026157
  hypo
gatgggggagatcacccgctgtagtgaattt

SEQ ID NO: 19038 - DNA, 31 bp, Homo sapiens
  chr11:75026191-75026222
  hypo
gtatgtcagactttctcgtaccagaagcagg

SEQ ID NO: 19039 - DNA, 53 bp, Homo sapiens
  chr11:75035740-75035793
  hypo
actccacctgcctcctcgggccccttccctttctgctgcgactttgcctgttt

SEQ ID NO: 19040 - DNA, 430 bp, Homo sapiens; identical to SEQ ID NO: 4358
  chr11:75062272-75062702
  hypo

SEQ ID NO: 19041 - DNA, 70 bp, Homo sapiens; identical to SEQ ID NO: 4359
  chr11:75062708-75062778
  hypo

SEQ ID NO: 19042 - DNA, 181 bp, Homo sapiens; identical to SEQ ID NO: 4360
  chr11:75062806-75062987
  hypo

SEQ ID NO: 19043 - DNA, 22 bp, Homo sapiens
  chr11:75085063-75085085
  hypo
ttttgagacaaagtctcgctct

SEQ ID NO: 19044 - DNA, 41 bp, Homo sapiens
  chr11:75088629-75088670
  hypo
ttaaaattagctgtatcggctgggcacggtggctcacacct

SEQ ID NO: 19045 - DNA, 15 bp, Homo sapiens
  chr11:75095705-75095720
  hypo
cgccccctagcggcg

SEQ ID NO: 19046 - DNA, 31 bp, Homo sapiens
  chr11:75147837-75147868
  hypo
ccggtgggtttatgtacgtctgtgcccttgt

SEQ ID NO: 19047 - DNA, 31 bp, Homo sapiens; identical to SEQ ID NO: 4362
  chr11:75237128-75237159
  hypo

SEQ ID NO: 19048 - DNA, 51 bp, Homo sapiens
  chr11:75242018-75242069
  hypo
ggtgacaaggagaggcgcgggtctgagcctgggccccggctgtggcccaag

SEQ ID NO: 19049 - DNA, 52 bp, Homo sapiens
  chr11:75242094-75242146
  hypo
tacagggaaagaggctcgagctactgatttgtgtccacgtagggcaagagtg

SEQ ID NO: 19050 - DNA, 70 bp, Homo sapiens
  chr11:75285549-75285619
  hypo
tacagtcagtgggggccgagctgggactagatcctagtcggttgggtagttgcttcgccacataggaagg

SEQ ID NO: 19051 - DNA, 31 bp, Homo sapiens
  chr11:75285683-75285714
  hypo
catgttaacttgcatacgatctgtatccatc

SEQ ID NO: 19052 - DNA, 31 bp, Homo sapiens
  chr11:75285721-75285752
  hypo
atccttgcaatagccccgttaggtgggaagt

SEQ ID NO: 19053 - DNA, 31 bp, Homo sapiens
  chr11:75414896-75414927
  hypo
caggcctgagccaccacgcccagtctccagg

SEQ ID NO: 19054 - DNA, 18 bp, Homo sapiens
  chr11:75438021-75438039
  hypo
accgcgcctggctggaac

SEQ ID NO: 19055 - DNA, 44 bp, Homo sapiens
  chr11:75459472-75459516
  hypo
acagataaacaaaaggcgttaggttggtgcgaaagtcattgagg

SEQ ID NO: 19056 - DNA, 37 bp, Homo sapiens
  chr11:75799382-75799419
  hypo
tttataatgagaaaaacgaggacgaggggtgggaagt

SEQ ID NO: 19057 - DNA, 31 bp, Homo sapiens
  chr11:75882507-75882538
  hypo
ggtgtgtgggctaccccgactcctcccagtg

SEQ ID NO: 19058 - DNA, 60 bp, Homo sapiens
  chr11:75882545-75882605
  hypo
agggcccctcctcaggcgtcccaccctggcagtggggatggcaggcgggaggttctgcag

SEQ ID NO: 19059 - DNA, 38 bp, Homo sapiens
  chr11:75882637-75882675
  hypo
ggacccactgacactgcgctgaccgccagtggtgccag

SEQ ID NO: 19060 - DNA, 46 bp, Homo sapiens
  chr11:75993074-75993120
  hypo
tacccacttcctcccccgggctccccacctccgaatctgcctcact

SEQ ID NO: 19061 - DNA, 31 bp, Homo sapiens
  chr11:75993130-75993161
  hypo
ggatgcagacatcacccgcaaacaaacaggg

SEQ ID NO: 19062 - DNA, 31 bp, Homo sapiens
  chr11:76001208-76001239
  hypo
taccaatgcaatgccccggaacgcagagttg

SEQ ID NO: 19063 - DNA, 31 bp, Homo sapiens
  chr11:76010247-76010278
  hypo
catacccggaagcccccgagttttgatctgg

SEQ ID NO: 19064 - DNA, 55 bp, Homo sapiens
  chr11:76315099-76315154
  hypo
gccccttggtccaggacggaggcctgaaggagggtgtcctcgagccaggtgtgca

SEQ ID NO: 19065 - DNA, 31 bp, Homo sapiens
  chr11:76315155-76315186
  hypo
gtctgggtccctgctccgggaggaggcagct

SEQ ID NO: 19066 - DNA, 31 bp, Homo sapiens
  chr11:76315202-76315233
  hypo
gtgggcaagagctaaccgttctggtatgacc

SEQ ID NO: 19067 - DNA, 31 bp, Homo sapiens
  chr11:76315260-76315291
  hypo
tggggaccacctgggccgagactccccctgt

SEQ ID NO: 19068 - DNA, 244 bp, Homo sapiens; identical to SEQ ID NO: 4367
  chr11:76382020-76382264
  hypo

SEQ ID NO: 19069 - DNA, 48 bp, Homo sapiens
  chr11:76408272-76408320
  hypo
ttaatttggagaggaccgtatatatttagaggacgcctccaattttcc

SEQ ID NO: 19070 - DNA, 65 bp, Homo sapiens
  chr11:76408400-76408465
  hypo
ctgccatttacctggacgacttcacctgggcgagcctcagtttcctcttacgtggaatgaatgtt

SEQ ID NO: 19071 - DNA, 31 bp, Homo sapiens
  chr11:76450420-76450451
  hypo
tgcttaagcagccggacgcggtggtgcacgc

SEQ ID NO: 19072 - DNA, 56 bp, Homo sapiens
  chr11:76463184-76463240
  hypo
ctctgccttgccctctcgtgcctgggttctcttatatccctcgggctgggttctgg

SEQ ID NO: 19073 - DNA, 31 bp, Homo sapiens; identical to SEQ ID NO: 4368
  chr11:76466226-76466257
  hypo

SEQ ID NO: 19074 - DNA, 39 bp, Homo sapiens
  chr11:76506254-76506293
  hypo
gctggagaggccagcccgagaaaccgtctagtctggtgg

SEQ ID NO: 19075 - DNA, 31 bp, Homo sapiens
  chr11:76506327-76506358
  hypo
gatggtgggcagaagtcgagggcttcaggtc

SEQ ID NO: 19076 - DNA, 31 bp, Homo sapiens
  chr11:76506367-76506398
  hypo
tcagccagaccaggcccgccttcatctgctg

SEQ ID NO: 19077 - DNA, 31 bp, Homo sapiens
  chr11:76507126-76507157
  hypo
agggccgggcactacacgtggacctctccca

SEQ ID NO: 19078 - DNA, 31 bp, Homo sapiens
  chr11:76516214-76516245
  hypo
actgtcctgtttccatcggaccaagggactc

SEQ ID NO: 19079 - DNA, 31 bp, Homo sapiens; identical to SEQ ID NO: 4372
  chr11:76682667-76682698
  hypo

SEQ ID NO: 19080 - DNA, 31 bp, Homo sapiens
  chr11:76902656-76902687
  hypo
gaggctggagcctcctcggctgagcgggacc

SEQ ID NO: 19081 - DNA, 62 bp, Homo sapiens
  chr11:76905509-76905571
  hypo
atcacgcccctgaagacgctggagaagtgggcccagctggccatcgccgcccacaagaaggt

SEQ ID NO: 19082 - DNA, 31 bp, Homo sapiens
  chr11:76905645-76905676
  hypo
ctctctgttggggctgcgggggatgggatgg

SEQ ID NO: 19083 - DNA, 31 bp, Homo sapiens
  chr11:76910510-76910541
  hypo
tgtctgagctgggccacgtctcccactggtt

SEQ ID NO: 19084 - DNA, 31 bp, Homo sapiens
  chr11:76912236-76912267
  hypo
aggagtctgggaggcccgctcacaacaggcc

SEQ ID NO: 19085 - DNA, 31 bp, Homo sapiens
  chr11:76924553-76924584
  hypo
gcctgctcctgtacaccgtgtttcccaaggt

SEQ ID NO: 19086 - DNA, 31 bp, Homo sapiens
  chr11:76924630-76924661
  hypo
catctcattcaggccacggtgtcagttccct

SEQ ID NO: 19087 - DNA, 112 bp, Homo sapiens; identical to SEQ ID NO: 4373
  chr11:77184394-77184506
  hypo

SEQ ID NO: 19088 - DNA, 167 bp, Homo sapiens; identical to SEQ ID NO: 4374
  chr11:77184508-77184675
  hypo

SEQ ID NO: 19089 - DNA, 31 bp, Homo sapiens; identical to SEQ ID NO: 4375
  chr11:77184749-77184780
  hypo

SEQ ID NO: 19090 - DNA, 31 bp, Homo sapiens; identical to SEQ ID NO: 4378
  chr11:77184952-77184983
  hypo

SEQ ID NO: 19091 - DNA, 133 bp, Homo sapiens; identical to SEQ ID NO: 4379
  chr11:77185040-77185173
  hypo

SEQ ID NO: 19092 - DNA, 40 bp, Homo sapiens
  chr11:77383204-77383244
  hypo
ctgatttctccttgaccgccttcgccgagtttctacaaaa

SEQ ID NO: 19093 - DNA, 22 bp, Homo sapiens
  chr11:77534247-77534269
  hypo
aagactccgtctcaaaaaaaaa

SEQ ID NO: 19094 - DNA, 31 bp, Homo sapiens
  chr11:77728163-77728194
  hypo
gcggtcgatgaagaagcggccctccgcgtcc

SEQ ID NO: 19095 - DNA, 31 bp, Homo sapiens
  chr11:77883308-77883339
  hypo
gactgcaggggaaggccgccttcctgagggc

SEQ ID NO: 19096 - DNA, 20 bp, Homo sapiens
  chr11:78255540-78255560
  hypo
atcaagaatgagttaccggc

SEQ ID NO: 19097 - DNA, 31 bp, Homo sapiens
  chr11:78984744-78984775
  hypo
taaaggcctgagatctcgaggttggctggct

SEQ ID NO: 19098 - DNA, 31 bp, Homo sapiens
  chr11:82843542-82843573
  hypo
caatgaaaatctagttcgtatgattgaacac

SEQ ID NO: 19099 - DNA, 13 bp, Homo sapiens
  chr11:82843633-82843646
  hypo
tctccctctccct

SEQ ID NO: 19100 - DNA, 29 bp, Homo sapiens
  chr11:82998000-82998029
  hypo
cactgggatggctgggcgtggtggctcat

SEQ ID NO: 19101 - DNA, 31 bp, Homo sapiens
  chr11:85319010-85319041
  hypo
tacattggatttttctcggtcctctttgtgg

SEQ ID NO: 19102 - DNA, 19 bp, Homo sapiens
  chr11:86120513-86120532
  hypo
agatggagtcttgctccgt

SEQ ID NO: 19103 - DNA, 31 bp, Homo sapiens
  chr11:86218735-86218766
  hypo
ttaacatcactaggcacggtggctcacgcct

SEQ ID NO: 19104 - DNA, 69 bp, Homo sapiens
  chr11:86408235-86408304
  hypo
tctagttgacctgaagcggcagggatctgcagtaaaaacttcggagcatagttccgtagctgttgttcc

SEQ ID NO: 19105 - DNA, 31 bp, Homo sapiens
  chr11:86408306-86408337
  hypo
tgcagctggttagatccgactatcctaagct

SEQ ID NO: 19106 - DNA, 31 bp, Homo sapiens
  chr11:86408379-86408410
  hypo
caaggacagacagttacgcacagggagttgt

SEQ ID NO: 19107 - DNA, 32 bp, Homo sapiens
  chr11:86464894-86464926
  hypo
ataagcactttttggtcgtccttccattctct

SEQ ID NO: 19108 - DNA, 162 bp, Homo sapiens; identical to SEQ ID NO: 4384
  chr11:86511242-86511404
  hypo

SEQ ID NO: 19109 - DNA, 363 bp, Homo sapiens; identical to SEQ ID NO: 4385
  chr11:86511408-86511771
  hypo

SEQ ID NO: 19110 - DNA, 34 bp, Homo sapiens; identical to SEQ ID NO: 4386
  chr11:86511868-86511902
  hypo

SEQ ID NO: 19111 - DNA, 31 bp, Homo sapiens; identical to SEQ ID NO: 4387
  chr11:86511916-86511947
  hypo

SEQ ID NO: 19112 - DNA, 62 bp, Homo sapiens; identical to SEQ ID NO: 4388
  chr11:86511979-86512041
  hypo

SEQ ID NO: 19113 - DNA, 52 bp, Homo sapiens; identical to SEQ ID NO: 4390
  chr11:86666228-86666280
  hypo

SEQ ID NO: 19114 - DNA, 31 bp, Homo sapiens; identical to SEQ ID NO: 4391
  chr11:86666306-86666337
  hypo

SEQ ID NO: 19115 - DNA, 196 bp, Homo sapiens; identical to SEQ ID NO: 4392
  chr11:86666339-86666535
  hypo

SEQ ID NO: 19116 - DNA, 31 bp, Homo sapiens
  chr11:92648667-92648698
  hypo
cctcccaaagtcagtccgatgccccctcccg

SEQ ID NO: 19117 - DNA, 31 bp, Homo sapiens; identical to SEQ ID NO: 4393
  chr11:92931155-92931186
  hypo

SEQ ID NO: 19118 - DNA, 44 bp, Homo sapiens
  chr11:93065698-93065742
  hypo
ctaagggtggtggatgcggaggcaggcctcgtgtgctcttctgt

SEQ ID NO: 19119 - DNA, 53 bp, Homo sapiens
  chr11:93065747-93065800
  hypo
caatgcaacctttcttcgccagcttgctccttttttgccgcattgagtatctc

SEQ ID NO: 19120 - DNA, 223 bp, Homo sapiens
  chr11:93476546-93476769
  hypo
attcctctgaccccttcgtgggtcttgcggctgcggtgcctcacttacttagcccacggctctcaactcctcgcgggagggggggcgcgagtgaatgaggcgggaactggagtgctggaagccacgaactccagtcacccaggcctgctgcgctccaccctttatgggagggtgcgtgggggtgagcagatgctggagccggagcgagcgcttttggtcgccg

SEQ ID NO: 19121 - DNA, 31 bp, Homo sapiens
  chr11:94554946-94554977
  hypo
aacttcagggttactacgacaatgccgacaa

SEQ ID NO: 19122 - DNA, 34 bp, Homo sapiens; identical to SEQ ID NO: 4395
  chr11:95523018-95523052
  hypo

SEQ ID NO: 19123 - DNA, 39 bp, Homo sapiens
  chr11:95658583-95658622
  hypo
ccagacagatcttcatcggaatcccggttctgtctctac

SEQ ID NO: 19124 - DNA, 74 bp, Homo sapiens
  chr11:95658677-95658751
  hypo
ggaataaaaatatctacgtaataggttgtttttctctgtgcagagtcggttgcacagtacggtctcactaagta

SEQ ID NO: 19125 - DNA, 31 bp, Homo sapiens
  chr11:95999750-95999781
  hypo
aaacaacatattggtgcgattctgagcttca

SEQ ID NO: 19126 - DNA, 31 bp, Homo sapiens
  chr11:101951409-101951440
  hypo
catgagccaccgcgaccggcccacaaatagt

SEQ ID NO: 19127 - DNA, 31 bp, Homo sapiens
  chr11:101952328-101952359
  hypo
agaatgccacaaatgtcgccgggcccggtgg

SEQ ID NO: 19128 - DNA, 31 bp, Homo sapiens
  chr11:101977377-101977408
  hypo
aacagtataacagattcggttcattaaaatc

SEQ ID NO: 19129 - DNA, 31 bp, Homo sapiens
  chr11:102325404-102325435
  hypo
aagatgtgaggctttccggaggtgatttggt

SEQ ID NO: 19130 - DNA, 97 bp, Homo sapiens; identical to SEQ ID NO: 4401
  chr11:104034583-104034680
  hypo

SEQ ID NO: 19131 - DNA, 109 bp, Homo sapiens; identical to SEQ ID NO: 4402
  chr11:104034694-104034803
  hypo

SEQ ID NO: 19132 - DNA, 48 bp, Homo sapiens; identical to SEQ ID NO: 4403
  chr11:104034808-104034856
  hypo

SEQ ID NO: 19133 - DNA, 240 bp, Homo sapiens; identical to SEQ ID NO: 4404
  chr11:104034861-104035101
  hypo

SEQ ID NO: 19134 - DNA, 185 bp, Homo sapiens; identical to SEQ ID NO: 4405
  chr11:107799620-107799805
  hypo

SEQ ID NO: 19135 - DNA, 28 bp, Homo sapiens
  chr11:108031056-108031084
  hypo
atggaaaaacatacgtaaatttgatttt

SEQ ID NO: 19136 - DNA, 59 bp, Homo sapiens; identical to SEQ ID NO: 4407
  chr11:108368878-108368937
  hypo

SEQ ID NO: 19137 - DNA, 53 bp, Homo sapiens; identical to SEQ ID NO: 4408
  chr11:108368986-108369039
  hypo

SEQ ID NO: 19138 - DNA, 141 bp, Homo sapiens; identical to SEQ ID NO: 4409
  chr11:108369108-108369249
  hypo

SEQ ID NO: 19139 - DNA, 40 bp, Homo sapiens
  chr11:109963224-109963264
  hypo
acctgccctaagaaggcggcccgtcgatctccttgactgc

SEQ ID NO: 19140 - DNA, 31 bp, Homo sapiens
  chr11:109963349-109963380
  hypo
gcggggaggtcgggaccgctgggttgggccg

SEQ ID NO: 19141 - DNA, 31 bp, Homo sapiens
  chr11:111154358-111154389
  hypo
ccttatccagacatagcgatctcagataaca

SEQ ID NO: 19142 - DNA, 31 bp, Homo sapiens
  chr11:111154423-111154454
  hypo
tatggagaggtagctccgatgttgtgaaaaa

SEQ ID NO: 19143 - DNA, 41 bp, Homo sapiens
  chr11:111154501-111154542
  hypo
tgtcttcctagcacagcgccggtcaccgggaaggtactcag

SEQ ID NO: 19144 - DNA, 31 bp, Homo sapiens; identical to SEQ ID NO: 4416
  chr11:111945412-111945443
  hypo

SEQ ID NO: 19145 - DNA, 31 bp, Homo sapiens
  chr11:113552906-113552937
  hypo
caccttcctagcctcccgcaaattgccagag

SEQ ID NO: 19146 - DNA, 31 bp, Homo sapiens
  chr11:113560971-113561002
  hypo
ccgtccaggtagccagcgcaaagcatgcggg

SEQ ID NO: 19147 - DNA, 30 bp, Homo sapiens
  chr11:113752457-113752487
  hypo
aggcatgagccactgcgcccagcctataag

SEQ ID NO: 19148 - DNA, 29 bp, Homo sapiens
  chr11:113790259-113790288
  hypo
caaggtttaggcagggcgctgtggctcac

SEQ ID NO: 19149 - DNA, 38 bp, Homo sapiens
  chr11:116365359-116365397
  hypo
ggttaatgccttccaacgtttttccttctaaaaccttc

SEQ ID NO: 19150 - DNA, 57 bp, Homo sapiens
  chr11:116591712-116591769
  hypo
gctctgccacttaaatcgcctcaacacccctgtcccttcccccgactgtggtcctca

SEQ ID NO: 19151 - DNA, 53 bp, Homo sapiens
  chr11:116591782-116591835
  hypo
ccttactgctccaccacgtgcttagtattcaagccatgcgctgccaccatgct

SEQ ID NO: 19152 - DNA, 31 bp, Homo sapiens
  chr11:116591852-116591883
  hypo
caaagcagagccttccgcggtgtgccctgca

SEQ ID NO: 19153 - DNA, 22 bp, Homo sapiens
  chr11:116666252-116666274
  hypo
gacggagcgggactccatttca

SEQ ID NO: 19154 - DNA, 31 bp, Homo sapiens
  chr11:116672909-116672940
  hypo
ggatattgaccaggcacggtggctcatgcct

SEQ ID NO: 19155 - DNA, 67 bp, Homo sapiens
  chr11:116691976-116692043
  hypo
ctctgccgcagctcctcggcactggccgagatcctggccttgagctcctcggcgttcttcttcatct

SEQ ID NO: 19156 - DNA, 31 bp, Homo sapiens
  chr11:116692067-116692098
  hypo
ggttgagcttctcctgcgtgtcctgagcata

SEQ ID NO: 19157 - DNA, 27 bp, Homo sapiens
  chr11:116890017-116890044
  hypo
agccaccgcacacggtctttattgtaa

SEQ ID NO: 19158 - DNA, 23 bp, Homo sapiens
  chr11:117020434-117020457
  hypo
accgtgcccggccaaaagttttc

SEQ ID NO: 19159 - DNA, 31 bp, Homo sapiens
  chr11:117068431-117068462
  hypo
tctgcccacctggccccgcccaccagactga

SEQ ID NO: 19160 - DNA, 31 bp, Homo sapiens
  chr11:117068470-117068501
  hypo
tcacctctgacctgagcggcccccagctcac

SEQ ID NO: 19161 - DNA, 34 bp, Homo sapiens
  chr11:117068517-117068551
  hypo
gcagtgctccctgatgcggcgtttataatccgct

SEQ ID NO: 19162 - DNA, 31 bp, Homo sapiens
  chr11:117097880-117097911
  hypo
cggctcccgtaggccacgcccacggcacaga

SEQ ID NO: 19163 - DNA, 81 bp, Homo sapiens
  chr11:117097915-117097996
  hypo
gttgttgggcacagccgcgatctctcctgcacatcgcgtgccatggtggttgccattctccacatccgggtggggcatggg

SEQ ID NO: 19164 - DNA, 262 bp, Homo sapiens; identical to SEQ ID NO: 4421
  chr11:117186648-117186910
  hypo

SEQ ID NO: 19165 - DNA, 34 bp, Homo sapiens
  chr11:117380435-117380469
  hypo
ctgacctgtgagtcagcggcgccctctccagtgc

SEQ ID NO: 19166 - DNA, 31 bp, Homo sapiens
  chr11:117380512-117380543
  hypo
gggaaagccatcctcccggaggtggggtctg

SEQ ID NO: 19167 - DNA, 41 bp, Homo sapiens
  chr11:117380593-117380634
  hypo
cctacagatctgcccccgagtcccagcgtgtccctagcagg

SEQ ID NO: 19168 - DNA, 31 bp, Homo sapiens
  chr11:117941634-117941665
  hypo
gcatcctgggttacaccgacctggatctcaa

SEQ ID NO: 19169 - DNA, 33 bp, Homo sapiens
  chr11:117977481-117977514
  hypo
agccactgcacccagccccgtgcatctttttat

SEQ ID NO: 19170 - DNA, 37 bp, Homo sapiens
  chr11:117994511-117994548
  hypo
tacaggggtgagccaccgtgcccggccaattactgtt

SEQ ID NO: 19171 - DNA, 31 bp, Homo sapiens
  chr11:118088741-118088772
  hypo
ttaaatatcatttcctcgggaaacctctctt

SEQ ID NO: 19172 - DNA, 31 bp, Homo sapiens
  chr11:118193731-118193762
  hypo
gcctcaagtggccagccgatccctgacccat

SEQ ID NO: 19173 - DNA, 34 bp, Homo sapiens; identical to SEQ ID NO: 4427
  chr11:118662850-118662884
  hypo

SEQ ID NO: 19174 - DNA, 31 bp, Homo sapiens; identical to SEQ ID NO: 4428
  chr11:118662982-118663013
  hypo

SEQ ID NO: 19175 - DNA, 45 bp, Homo sapiens
  chr11:118772065-118772110
  hypo
tcagcatctgctgctgcggggtcatctgcacgttcaggttcatgt

SEQ ID NO: 19176 - DNA, 31 bp, Homo sapiens
  chr11:118780997-118781028
  hypo
aaggtgccgtgtggggcggctgtgaggtctc

SEQ ID NO: 19177 - DNA, 31 bp, Homo sapiens
  chr11:118983356-118983387
  hypo
ggggatgggcagtctccgaggctctgtctct

SEQ ID NO: 19178 - DNA, 41 bp, Homo sapiens
  chr11:119019635-119019676
  hypo
acctcctccggcccccgcgccgcaagcgctgctctctcctt

SEQ ID NO: 19179 - DNA, 31 bp, Homo sapiens
  chr11:119029537-119029568
  hypo
gtccccttagagatggcggtcttcatgaggg

SEQ ID NO: 19180 - DNA, 31 bp, Homo sapiens
  chr11:119032604-119032635
  hypo
cccaaccctcctttctcgctgcccctaacgc

SEQ ID NO: 19181 - DNA, 31 bp, Homo sapiens
  chr11:119058471-119058502
  hypo
cgcctccttccccatgcgcctaacctcctta

SEQ ID NO: 19182 - DNA, 31 bp, Homo sapiens
  chr11:119058917-119058948
  hypo
acacctttcagtgcaccgaagaggtgtccct

SEQ ID NO: 19183 - DNA, 31 bp, Homo sapiens
  chr11:119216683-119216714
  hypo
tgggaggctgggagagcggctcatggagttt

SEQ ID NO: 19184 - DNA, 31 bp, Homo sapiens
  chr11:119243047-119243078
  hypo
gtggtctgggcccccccgcatccagcccagg

SEQ ID NO: 19185 - DNA, 31 bp, Homo sapiens
  chr11:119243135-119243166
  hypo
agagtggttcattgggcgcagcagagcattc

SEQ ID NO: 19186 - DNA, 38 bp, Homo sapiens
  chr11:119243174-119243212
  hypo
actactggactatcctcgagtgcgcgggccctgagtgg

SEQ ID NO: 19187 - DNA, 31 bp, Homo sapiens
  chr11:119243325-119243356
  hypo
cagtcaggttgggagtcgagccctcagcctg

SEQ ID NO: 19188 - DNA, 77 bp, Homo sapiens
  chr11:119244099-119244176
  hypo
tgtaggcaccatagcccgacttggcatagtgggcatctgtgtagcgggccgattctgtgtagcgcttcagggtggag

SEQ ID NO: 19189 - DNA, 31 bp, Homo sapiens
  chr11:119244259-119244290
  hypo
gggccctgccaggtgtcgggctcccacagac

SEQ ID NO: 19190 - DNA, 31 bp, Homo sapiens
  chr11:119286647-119286678
  hypo
agacaccttcacagcacgaaagctgcagatt

SEQ ID NO: 19191 - DNA, 31 bp, Homo sapiens
  chr11:119287463-119287494
  hypo
tctctgggtaggtttgcgttgtgaggcctga

SEQ ID NO: 19192 - DNA, 56 bp, Homo sapiens
  chr11:119352935-119352991
  hypo
gctgggcgttggggtccgacccaaggggctgccccaggccccgcatgttcatgcat

SEQ ID NO: 19193 - DNA, 31 bp, Homo sapiens
  chr11:119405864-119405895
  hypo
atgtctctggcatccccgagcagtggtcctg

SEQ ID NO: 19194 - DNA, 31 bp, Homo sapiens
  chr11:119493274-119493305
  hypo
gctgtcctgagggtgccggctcctgtcccca

SEQ ID NO: 19195 - DNA, 31 bp, Homo sapiens
  chr11:119493729-119493760
  hypo
tgcccagaagaggttacgttctggtctgagt

SEQ ID NO: 19196 - DNA, 43 bp, Homo sapiens
  chr11:119524219-119524262
  hypo
caacaggctggtgggtcgtggtgcgagacgacgtcaatcagag

SEQ ID NO: 19197 - DNA, 31 bp, Homo sapiens
  chr11:119532000-119532031
  hypo
agaagagcagcagcaccgagtgggacagggg

SEQ ID NO: 19198 - DNA, 47 bp, Homo sapiens
  chr11:119532427-119532474
  hypo
aggctctcttgcagcccgggcactgggaaattcgtttctccttaatg

SEQ ID NO: 19199 - DNA, 106 bp, Homo sapiens
  chr11:119535583-119535689
  hypo
gcctcggcctcatccacggtgaagtagggccgcttggcgtcctcgtcatatttggggtgggggccgcccaccttgcgctcgccccctccaccgccctcctcctcct

SEQ ID NO: 19200 - DNA, 44 bp, Homo sapiens
  chr11:119535941-119535985
  hypo
tgatggccgtgggcaccggcccggcgcgccgcccatgttcggga

SEQ ID NO: 19201 - DNA, 31 bp, Homo sapiens
  chr11:119536027-119536058
  hypo
gaggggacagcatcagcgtgtgctcctgggg

SEQ ID NO: 19202 - DNA, 37 bp, Homo sapiens
  chr11:119541000-119541037
  hypo
tgtctttcctcctatgcgaaaacgtaagctccacaag

SEQ ID NO: 19203 - DNA, 31 bp, Homo sapiens
  chr11:119541073-119541104
  hypo
taccaagcacctagaccgcttgtcatgtggt

SEQ ID NO: 19204 - DNA, 31 bp, Homo sapiens
  chr11:119541113-119541144
  hypo
agaagtatctgttggacgacagaatgaattc

SEQ ID NO: 19205 - DNA, 31 bp, Homo sapiens
  chr11:119541698-119541729
  hypo
tgggaccaaagaaccccggttattttgttta

SEQ ID NO: 19206 - DNA, 31 bp, Homo sapiens
  chr11:119547317-119547348
  hypo
ggtgggccgcagggcacgtgctccatgagca

SEQ ID NO: 19207 - DNA, 31 bp, Homo sapiens
  chr11:119548208-119548239
  hypo
ggaggagggacagtggcgcccaccccaggag

SEQ ID NO: 19208 - DNA, 57 bp, Homo sapiens
  chr11:119548254-119548311
  hypo
ccctgctcacactgcacgttgagagtgaggctttccttgaagcggtccatgtggtag

SEQ ID NO: 19209 - DNA, 31 bp, Homo sapiens
  chr11:119548508-119548539
  hypo
ctgccccttcttggctcgaagcactgcctgg

SEQ ID NO: 19210 - DNA, 31 bp, Homo sapiens
  chr11:119548554-119548585
  hypo
ttggtgggtttggctgcgaggaagcagagag

SEQ ID NO: 19211 - DNA, 52 bp, Homo sapiens
  chr11:119548608-119548660
  hypo
cttgtccaagatgcaccggccaaaagggcgtggcatccgtcaggccttgtct

SEQ ID NO: 19212 - DNA, 81 bp, Homo sapiens
  chr11:119549115-119549196
  hypo
gcagcttacccatcaccgtgagattgagctggctttctcgattgcccgtagggaaggtagcaaactcgcagatgtagacac

SEQ ID NO: 19213 - DNA, 110 bp, Homo sapiens
  chr11:119549200-119549310
  hypo
atcctccagctccaggcgggagaggcggatagtgccatcggtgaaggagggccgcaggaattccacacgctcgcggtagggagccagcacggacacgcccatggatgggt

SEQ ID NO: 19214 - DNA, 31 bp, Homo sapiens
  chr11:119549861-119549892
  hypo
atttttggttgcttttcgagcagagccccag

SEQ ID NO: 19215 - DNA, 31 bp, Homo sapiens
  chr11:119574676-119574707
  hypo
tttcacactcggagtacgtgttagtgtgcct

SEQ ID NO: 19216 - DNA, 39 bp, Homo sapiens
  chr11:119574757-119574796
  hypo
gctttacccaggaacacggttctccgggcaagaagctgc

SEQ ID NO: 19217 - DNA, 31 bp, Homo sapiens
  chr11:119574824-119574855
  hypo
ctgggtgcacccctcacgccccaccatcatt

SEQ ID NO: 19218 - DNA, 74 bp, Homo sapiens
  chr11:119576249-119576323
  hypo
gcaggtgcaaaggccccgtggcgggagagcgtctggtaactgtggccggtgtagctagacggaggagactgatg

SEQ ID NO: 19219 - DNA, 31 bp, Homo sapiens
  chr11:119579304-119579335
  hypo
agtggttgtcaggggccgggggagggaaaat

SEQ ID NO: 19220 - DNA, 34 bp, Homo sapiens; identical to SEQ ID NO: 4430
  chr11:119587837-119587871
  hypo

SEQ ID NO: 19221 - DNA, 51 bp, Homo sapiens; identical to SEQ ID NO: 4431
  chr11:119587875-119587926
  hypo

SEQ ID NO: 19222 - DNA, 136 bp, Homo sapiens; identical to SEQ ID NO: 4432
  chr11:119587931-119588067
  hypo

SEQ ID NO: 19223 - DNA, 31 bp, Homo sapiens
  chr11:119588119-119588150
  hypo
taggagggtgcctcaacggcagggctggcca

SEQ ID NO: 19224 - DNA, 31 bp, Homo sapiens
  chr11:119588397-119588428
  hypo
aaccctcaaaggggcccggtcccagagggca

SEQ ID NO: 19225 - DNA, 50 bp, Homo sapiens
  chr11:119588449-119588499
  hypo
gctaagcttgggagcccggcaggcacctgcaggcccgggggtaggggggc

SEQ ID NO: 19226 - DNA, 52 bp, Homo sapiens
  chr11:119588504-119588556
  hypo
gcaatgctggtcccttcgtgctggctgggcaatgctccggcttggatgggag

SEQ ID NO: 19227 - DNA, 31 bp, Homo sapiens
  chr11:119590697-119590728
  hypo
cacggaggcaggaaagcgctgggcatggaaa

SEQ ID NO: 19228 - DNA, 31 bp, Homo sapiens; identical to SEQ ID NO: 4433
  chr11:119598324-119598355
  hypo

SEQ ID NO: 19229 - DNA, 104 bp, Homo sapiens; identical to SEQ ID NO: 4434
  chr11:119598366-119598470
  hypo

SEQ ID NO: 19230 - DNA, 31 bp, Homo sapiens; identical to SEQ ID NO: 4435
  chr11:119598481-119598512
  hypo

SEQ ID NO: 19231 - DNA, 57 bp, Homo sapiens; identical to SEQ ID NO: 4438
  chr11:119599093-119599150
  hypo

SEQ ID NO: 19232 - DNA, 166 bp, Homo sapiens; identical to SEQ ID NO: 4439
  chr11:119599159-119599325
  hypo

SEQ ID NO: 19233 - DNA, 58 bp, Homo sapiens; identical to SEQ ID NO: 4440
  chr11:119600031-119600089
  hypo

SEQ ID NO: 19234 - DNA, 31 bp, Homo sapiens
  chr11:119602221-119602252
  hypo
catgagccactgtacccggctgcactctctc

SEQ ID NO: 19235 - DNA, 31 bp, Homo sapiens
  chr11:119683416-119683447
  hypo
tgcatgtgtgtgtatgcgtgtgtgtatgtgt

SEQ ID NO: 19236 - DNA, 59 bp, Homo sapiens
  chr11:119757772-119757831
  hypo
agaactccagctgggccgagtgaccttgtaggttttgaggaacacgggcagctgggaaa

SEQ ID NO: 19237 - DNA, 31 bp, Homo sapiens
  chr11:119757872-119757903
  hypo
ggagggaggtgggagccgggcctcttctgag

SEQ ID NO: 19238 - DNA, 31 bp, Homo sapiens
  chr11:120041662-120041693
  hypo
gactcactgactccaccgaggcagcactggc

SEQ ID NO: 19239 - DNA, 31 bp, Homo sapiens
  chr11:120041709-120041740
  hypo
ccagacatttaagagccgaggactaagcaat

SEQ ID NO: 19240 - DNA, 62 bp, Homo sapiens
  chr11:120043748-120043810
  hypo
ccactcagtaagtcagcggtggccataggatcctgatcccaatctagcgattctcccaagaa

SEQ ID NO: 19241 - DNA, 59 bp, Homo sapiens
  chr11:120043843-120043902
  hypo
tgaacctagtccagggcgttgaaagggcacagaacagagatcctcgggaggaggaggaa

SEQ ID NO: 19242 - DNA, 31 bp, Homo sapiens
  chr11:120178423-120178454
  hypo
cacctgctctgggacacgatcagaaaacaca

SEQ ID NO: 19243 - DNA, 31 bp, Homo sapiens; identical to SEQ ID NO: 4444
  chr11:120206517-120206548
  hypo

SEQ ID NO: 19244 - DNA, 31 bp, Homo sapiens
  chr11:120298674-120298705
  hypo
gatcttttagaactatcgaagattaagtagt

SEQ ID NO: 19245 - DNA, 31 bp, Homo sapiens
  chr11:120338502-120338533
  hypo
attagtagctttagtacggggtatatcaaac

SEQ ID NO: 19246 - DNA, 37 bp, Homo sapiens
  chr11:120338583-120338620
  hypo
tttattggagcacagccgtgctcgtctgtttatgtac

SEQ ID NO: 19247 - DNA, 44 bp, Homo sapiens
  chr11:120338639-120338683
  hypo
attataacagcagagtcgagtagttttatcggtgcccatttggc

SEQ ID NO: 19248 - DNA, 31 bp, Homo sapiens
  chr11:120367602-120367633
  hypo
tccctctactgtccatcgtgagccctcttcc

SEQ ID NO: 19249 - DNA, 36 bp, Homo sapiens
  chr11:120950503-120950539
  hypo
ccttgggaaacaaactcgataaatgttttgtttttt

SEQ ID NO: 19250 - DNA, 31 bp, Homo sapiens
  chr11:121000903-121000934
  hypo
gacctatgacttctgccgtaagttggggttg

SEQ ID NO: 19251 - DNA, 65 bp, Homo sapiens
  chr11:121023610-121023675
  hypo
gccattacgagagctgcgtgagtgtctgccagccccgctgcgccgccatccgcctgaagagtgac

SEQ ID NO: 19252 - DNA, 12 bp, Homo sapiens
  chr11:121516993-121517005
  hypo
ttgagaccagga

SEQ ID NO: 19253 - DNA, 31 bp, Homo sapiens
  chr11:121517066-121517097
  hypo
cagggaatcaactttccgattacagagagcc

SEQ ID NO: 19254 - DNA, 31 bp, Homo sapiens
  chr11:122933146-122933177
  hypo
cctcagttaccccgggcgggggaggggagcg

SEQ ID NO: 19255 - DNA, 40 bp, Homo sapiens
  chr11:123027336-123027376
  hypo
agctggaagaaggaagcgtcatttgcgagtctttacctgt

SEQ ID NO: 19256 - DNA, 31 bp, Homo sapiens; identical to SEQ ID NO: 4447
  chr11:123084067-123084098
  hypo

SEQ ID NO: 19257 - DNA, 31 bp, Homo sapiens; identical to SEQ ID NO: 4451
  chr11:123228946-123228977
  hypo

SEQ ID NO: 19258 - DNA, 38 bp, Homo sapiens; identical to SEQ ID NO: 4452
  chr11:123228995-123229033
  hypo

SEQ ID NO: 19259 - DNA, 80 bp, Homo sapiens; identical to SEQ ID NO: 4453
  chr11:123229184-123229264
  hypo

SEQ ID NO: 19260 - DNA, 31 bp, Homo sapiens; identical to SEQ ID NO: 4454
  chr11:123300895-123300926
  hypo

SEQ ID NO: 19261 - DNA, 31 bp, Homo sapiens; identical to SEQ ID NO: 4455
  chr11:123300946-123300977
  hypo

SEQ ID NO: 19262 - DNA, 15 bp, Homo sapiens
  chr11:123301013-123301028
  hypo
cactgcctcttcctc

SEQ ID NO: 19263 - DNA, 214 bp, Homo sapiens; identical to SEQ ID NO: 4457
  chr11:123301082-123301296
  hypo

SEQ ID NO: 19264 - DNA, 31 bp, Homo sapiens; identical to SEQ ID NO: 4458
  chr11:123326582-123326613
  hypo

SEQ ID NO: 19265 - DNA, 18 bp, Homo sapiens
  chr11:125804572-125804590
  hypo
ggccgcatttctacacat

SEQ ID NO: 19266 - DNA, 31 bp, Homo sapiens
  chr11:125817157-125817188
  hypo
agggtcaccatcgtcacgggactgatcatca

SEQ ID NO: 19267 - DNA, 42 bp, Homo sapiens
  chr11:125817623-125817665
  hypo
gtctgtccagggagtgcgaggtggctccgtggagctggcctg

SEQ ID NO: 19268 - DNA, 31 bp, Homo sapiens
  chr11:125817778-125817809
  hypo
cctcggctctgggagtcgtgagtctgaggaa

SEQ ID NO: 19269 - DNA, 79 bp, Homo sapiens
  chr11:125824156-125824235
  hypo
catcgagccagagagccgaggacggcggctggggggcttggaccccggggtcctttatgccttccgcatcctggctctg

SEQ ID NO: 19270 - DNA, 31 bp, Homo sapiens
  chr11:125824304-125824335
  hypo
caccttttctccaaagcgctggcccctggtt

SEQ ID NO: 19271 - DNA, 31 bp, Homo sapiens
  chr11:125836034-125836065
  hypo
aaaaaaaaaaaaaattcgataaaaagtactg

SEQ ID NO: 19272 - DNA, 31 bp, Homo sapiens
  chr11:125836293-125836324
  hypo
agaggattgctgaccacgaagcacatcagtt

SEQ ID NO: 19273 - DNA, 23 bp, Homo sapiens
  chr11:125840354-125840377
  hypo
accgcacccggccagtagtttat

SEQ ID NO: 19274 - DNA, 31 bp, Homo sapiens
  chr11:125843433-125843464
  hypo
aaaacaaaaacaaaaacgaattcctgcttaa

SEQ ID NO: 19275 - DNA, 31 bp, Homo sapiens
  chr11:125902448-125902479
  hypo
cgtacctttgaaaaatcgctgacactgcaat

SEQ ID NO: 19276 - DNA, 57 bp, Homo sapiens
  chr11:125902513-125902570
  hypo
gctatggtgagagatacggggacctgtactggagaaatatcacgggataaatttgaa

SEQ ID NO: 19277 - DNA, 48 bp, Homo sapiens
  chr11:125902579-125902627
  hypo
aaaaatttttaagacacggtcatatttaaaagacgtaagaggccagga

SEQ ID NO: 19278 - DNA, 45 bp, Homo sapiens; identical to SEQ ID NO: 4463
  chr11:125932493-125932538
  hypo

SEQ ID NO: 19279 - DNA, 10 bp, Homo sapiens
  chr11:125932539-125932549
  hypo
ggtcatcccc

SEQ ID NO: 19280 - DNA, 186 bp, Homo sapiens; identical to SEQ ID NO: 4465
  chr11:125932556-125932742
  hypo

SEQ ID NO: 19281 - DNA, 125 bp, Homo sapiens; identical to SEQ ID NO: 4466
  chr11:125932778-125932903
  hypo

SEQ ID NO: 19282 - DNA, 88 bp, Homo sapiens; identical to SEQ ID NO: 4467
  chr11:125932904-125932992
  hypo

SEQ ID NO: 19283 - DNA, 31 bp, Homo sapiens; identical to SEQ ID NO: 4468
  chr11:125933297-125933328
  hypo

SEQ ID NO: 19284 - DNA, 41 bp, Homo sapiens
  chr11:125945775-125945816
  hypo
aaagttgttacccacccgccaggtgcggtggctcacgcctg

SEQ ID NO: 19285 - DNA, 43 bp, Homo sapiens
  chr11:125971128-125971171
  hypo
tcaccccatcatcactcgagggccacagcggggcagttgggca

SEQ ID NO: 19286 - DNA, 72 bp, Homo sapiens
  chr11:125971174-125971246
  hypo
acagcttggggatgtgcggctcccccaaggcggggctgggatatcaaagttggaagcgcgggggcatgtcag

SEQ ID NO: 19287 - DNA, 36 bp, Homo sapiens
  chr11:125971290-125971326
  hypo
ctctacaaactgcattcgctgcgctcccaacctgca

SEQ ID NO: 19288 - DNA, 31 bp, Homo sapiens
  chr11:125988782-125988813
  hypo
ctctggctgtctggcccgagctgccgtccat

SEQ ID NO: 19289 - DNA, 31 bp, Homo sapiens
  chr11:126030446-126030477
  hypo
gagggccaggcagggccgcagagcctcaggg

SEQ ID NO: 19290 - DNA, 99 bp, Homo sapiens
  chr11:126055440-126055539
  hypo
ctcacccccagcccaccgcacgcatccccacacccggtccctcccgctcagccctggccggcacagagaggctgggttggagatcgagtggtccagaga

SEQ ID NO: 19291 - DNA, 31 bp, Homo sapiens
  chr11:126055545-126055576
  hypo
ggtgacctgctggacacgcccacccataccc

SEQ ID NO: 19292 - DNA, 38 bp, Homo sapiens
  chr11:126273041-126273079
  hypo
ccccacaaggggagggcgtggctcgtgaaattcctgat

SEQ ID NO: 19293 - DNA, 31 bp, Homo sapiens
  chr11:126273091-126273122
  hypo
agcaagccccaagactcgcccagtttgctta

SEQ ID NO: 19294 - DNA, 66 bp, Homo sapiens; identical to SEQ ID NO: 4469
  chr11:128392687-128392753
  hypo

SEQ ID NO: 19295 - DNA, 205 bp, Homo sapiens; identical to SEQ ID NO: 4472
  chr11:128562980-128563185
  hypo

SEQ ID NO: 19296 - DNA, 59 bp, Homo sapiens; identical to SEQ ID NO: 4473
  chr11:128563336-128563395
  hypo

SEQ ID NO: 19297 - DNA, 31 bp, Homo sapiens; identical to SEQ ID NO: 4474
  chr11:128563425-128563456
  hypo

SEQ ID NO: 19298 - DNA, 39 bp, Homo sapiens; identical to SEQ ID NO: 4475
  chr11:128563497-128563536
  hypo

SEQ ID NO: 19299 - DNA, 36 bp, Homo sapiens; identical to SEQ ID NO: 4476
  chr11:128563886-128563922
  hypo

SEQ ID NO: 19300 - DNA, 31 bp, Homo sapiens; identical to SEQ ID NO: 4477
  chr11:128563939-128563970
  hypo

SEQ ID NO: 19301 - DNA, 362 bp, Homo sapiens; identical to SEQ ID NO: 4478
  chr11:128564034-128564396
  hypo

SEQ ID NO: 19302 - DNA, 4 bp, Homo sapiens
  chr11:128564539-128564543
  hypo
gctc

SEQ ID NO: 19303 - DNA, 38 bp, Homo sapiens; identical to SEQ ID NO: 4480
  chr11:128564602-128564640
  hypo

SEQ ID NO: 19304 - DNA, 82 bp, Homo sapiens; identical to SEQ ID NO: 4481
  chr11:128564650-128564732
  hypo

SEQ ID NO: 19305 - DNA, 60 bp, Homo sapiens; identical to SEQ ID NO: 4482
  chr11:128564816-128564876
  hypo

SEQ ID NO: 19306 - DNA, 46 bp, Homo sapiens; identical to SEQ ID NO: 4483
  chr11:128564991-128565037
  hypo

SEQ ID NO: 19307 - DNA, 37 bp, Homo sapiens; identical to SEQ ID NO: 4484
  chr11:128565041-128565078
  hypo

SEQ ID NO: 19308 - DNA, 31 bp, Homo sapiens
  chr11:128634800-128634831
  hypo
tctccctaaggacacccgcctgcaggtccta

SEQ ID NO: 19309 - DNA, 31 bp, Homo sapiens
  chr11:128634832-128634863
  hypo
tgcagaagcctgggaccgaggacagggccat

SEQ ID NO: 19310 - DNA, 31 bp, Homo sapiens
  chr11:128737283-128737314
  hypo
tagtttactttataaccggatccaacaagag

SEQ ID NO: 19311 - DNA, 31 bp, Homo sapiens
  chr11:128781365-128781396
  hypo
cgtccaggagacctaccggtacctgagtgac

SEQ ID NO: 19312 - DNA, 145 bp, Homo sapiens; identical to SEQ ID NO: 4486
  chr11:129148572-129148717
  hypo

SEQ ID NO: 19313 - DNA, 83 bp, Homo sapiens; identical to SEQ ID NO: 4487
  chr11:129148740-129148823
  hypo

SEQ ID NO: 19314 - DNA, 111 bp, Homo sapiens; identical to SEQ ID NO: 4488
  chr11:129148827-129148938
  hypo

SEQ ID NO: 19315 - DNA, 35 bp, Homo sapiens; identical to SEQ ID NO: 4489
  chr11:129149096-129149131
  hypo

SEQ ID NO: 19316 - DNA, 253 bp, Homo sapiens; identical to SEQ ID NO: 4490
  chr11:129149291-129149544
  hypo

SEQ ID NO: 19317 - DNA, 145 bp, Homo sapiens; identical to SEQ ID NO: 4491
  chr11:129149553-129149698
  hypo

SEQ ID NO: 19318 - DNA, 31 bp, Homo sapiens
  chr11:129207797-129207828
  hypo
ccatggagttggagtgcgccaccctcctggc

SEQ ID NO: 19319 - DNA, 8 bp, Homo sapiens
  chr11:129207869-129207877
  hypo
ctatcatt

SEQ ID NO: 19320 - DNA, 19 bp, Homo sapiens
  chr11:129207936-129207955
  hypo
tggcgcgatcttggctctt

SEQ ID NO: 19321 - DNA, 31 bp, Homo sapiens
  chr11:129324012-129324043
  hypo
ctctccctcctcccaccgtcctccctctggt

SEQ ID NO: 19322 - DNA, 71 bp, Homo sapiens; identical to SEQ ID NO: 4493
  chr11:129765559-129765630
  hypo

SEQ ID NO: 19323 - DNA, 31 bp, Homo sapiens; identical to SEQ ID NO: 4494
  chr11:129765636-129765667
  hypo

SEQ ID NO: 19324 - DNA, 80 bp, Homo sapiens; identical to SEQ ID NO: 4495
  chr11:129765696-129765776
  hypo

SEQ ID NO: 19325 - DNA, 38 bp, Homo sapiens
  chr11:129785493-129785531
  hypo
tccttaagagattcctcgcatggcggttttgaccttag

SEQ ID NO: 19326 - DNA, 43 bp, Homo sapiens
  chr11:129785576-129785619
  hypo
cagtggggacagcagacgggaggggtggcgatggtgcccgtca

SEQ ID NO: 19327 - DNA, 31 bp, Homo sapiens
  chr11:129849604-129849635
  hypo
catcccttcccagcctcggattctgcccctc

SEQ ID NO: 19328 - DNA, 5 bp, Homo sapiens
  chr11:129897978-129897983
  hypo
gtgta

SEQ ID NO: 19329 - DNA, 31 bp, Homo sapiens
  chr11:129897989-129898020
  hypo
agatgaaaagttacagcgctcaccactattt

SEQ ID NO: 19330 - DNA, 29 bp, Homo sapiens
  chr11:129975900-129975929
  hypo
gcctgtgcttttctcgtgcatgtctgcag

SEQ ID NO: 19331 - DNA, 31 bp, Homo sapiens
  chr11:129994925-129994956
  hypo
tggatgagatttgcctcggagaagctttgtg

SEQ ID NO: 19332 - DNA, 31 bp, Homo sapiens
  chr11:130005549-130005580
  hypo
agtgaggagatcccaccgttccaccccttcc

SEQ ID NO: 19333 - DNA, 31 bp, Homo sapiens
  chr11:130060257-130060288
  hypo
ctgaggtccacacccacggggtctcagggtc

SEQ ID NO: 19334 - DNA, 31 bp, Homo sapiens
  chr11:130074762-130074793
  hypo
gggctcgggtgggcacgcgagtgatgtggag

SEQ ID NO: 19335 - DNA, 31 bp, Homo sapiens
  chr11:130082174-130082205
  hypo
tgaggttggagagcaccgttttagcagtggg

SEQ ID NO: 19336 - DNA, 31 bp, Homo sapiens; identical to SEQ ID NO: 4498
  chr11:130083143-130083174
  hypo

SEQ ID NO: 19337 - DNA, 21 bp, Homo sapiens
  chr11:130109950-130109971
  hypo
ttttgagactgagtctcgctc

SEQ ID NO: 19338 - DNA, 65 bp, Homo sapiens
  chr11:130250619-130250684
  hypo
tcagtgaggtgggtgccggagcagcgcactggagcagcacactggagcaccgcaccagtgtttgt

SEQ ID NO: 19339 - DNA, 31 bp, Homo sapiens
  chr11:130250704-130250735
  hypo
aatgggtgcagccatgcgaagagcagtgtcc

SEQ ID NO: 19340 - DNA, 31 bp, Homo sapiens
  chr11:130250762-130250793
  hypo
acccttccagagcacccgtggggtgcctggg

SEQ ID NO: 19341 - DNA, 45 bp, Homo sapiens
  chr11:130264260-130264305
  hypo
atgcgcatttacggagcgtccactatgggccgtgctgacccatta

SEQ ID NO: 19342 - DNA, 31 bp, Homo sapiens
  chr11:130275555-130275586
  hypo
gttcgcctctgccagccggccccgcaggtgc

SEQ ID NO: 19343 - DNA, 45 bp, Homo sapiens
  chr11:130785376-130785421
  hypo
gcatgactgtccatcacgctcatccttctccgaagctcctggacc

SEQ ID NO: 19344 - DNA, 93 bp, Homo sapiens
  chr11:130785457-130785550
  hypo
gctggctcctggctcacggaacggtaccaagataacacaaaatctcgaataatcatctggatggtgcggttgatctcccgttccagctgcctt

SEQ ID NO: 19345 - DNA, 56 bp, Homo sapiens
  chr11:130785566-130785622
  hypo
gaggacaggtggccaacgggatgaagcgttccagatgcagtcgacctgaagccact

SEQ ID NO: 19346 - DNA, 31 bp, Homo sapiens
  chr11:131794182-131794213
  hypo
cctggctctgtcccaacgcatcatgtggggc

SEQ ID NO: 19347 - DNA, 31 bp, Homo sapiens
  chr11:133735295-133735326
  hypo
ccagttctgcacggagcggttgatcttgggg

SEQ ID NO: 19348 - DNA, 55 bp, Homo sapiens
  chr11:133795667-133795722
  hypo
gtgccggggatgccatcgtcgagcaactcccagcgctctgcgacacggaactcca

SEQ ID NO: 19349 - DNA, 36 bp, Homo sapiens
  chr11:133800384-133800420
  hypo
aaggtcctgggacacgcgcttcgggcaatcggaaac

SEQ ID NO: 19350 - DNA, 72 bp, Homo sapiens
  chr11:133805839-133805911
  hypo
ccagctccaagagccacgggcagcctgcccgtgcaatttctgctcaggggccctgcccgtgggggctggggt

SEQ ID NO: 19351 - DNA, 31 bp, Homo sapiens
  chr11:134015726-134015757
  hypo
ggaagctgaaagcaagcgagcaggtgtcgac

SEQ ID NO: 19352 - DNA, 53 bp, Homo sapiens
  chr11:134027874-134027927
  hypo
tcctaagctccgactccgatgcctgctctttgactccacggctttcttgacag

SEQ ID NO: 19353 - DNA, 54 bp, Homo sapiens
  chr11:134212828-134212882
  hypo
ttgaacaccctcaccacgtaggtgctgcccctgtccccccggagcctggttcct

SEQ ID NO: 19354 - DNA, 37 bp, Homo sapiens
  chr11:134252932-134252969
  hypo
gcactgcagatgaggacggccgcgcgtgcccaaggga

SEQ ID NO: 19355 - DNA, 31 bp, Homo sapiens
  chr11:134260004-134260035
  hypo
cgtgtgtgtctgtgtccgcccgtaaactcct

SEQ ID NO: 19356 - DNA, 41 bp, Homo sapiens
  chr11:134378731-134378772
  hypo
tgggaggtgcatgtgccgcacgggtgcgggaagtgtgtgaa

SEQ ID NO: 19357 - DNA, 38 bp, Homo sapiens
  chr11:134378890-134378928
  hypo
catggttctgagcccacgctttccgtaatgtggattca

SEQ ID NO: 19358 - DNA, 46 bp, Homo sapiens
  chr11:134458504-134458550
  hypo
gtgctggattccctgccgagagctgcacctgcgatgtgaacctgtg

SEQ ID NO: 19359 - DNA, 34 bp, Homo sapiens
  chr11:134534371-134534405
  hypo
gggcaggtcgcccactcgccgtccaccgagggca

SEQ ID NO: 19360 - DNA, 31 bp, Homo sapiens
  chr12:417386-417417
  hypo
cctcttctgtagggtgcggtacaaagatggc

SEQ ID NO: 19361 - DNA, 31 bp, Homo sapiens
  chr12:562775-562806
  hypo
tccccagtccgggtggcggcagagctcaaag

SEQ ID NO: 19362 - DNA, 31 bp, Homo sapiens
  chr12:631679-631710
  hypo
agggaaagtggcagttcgtgtttaatgggta

SEQ ID NO: 19363 - DNA, 18 bp, Homo sapiens
  chr12:658056-658074
  hypo
agacgctgcctcaaaagc

SEQ ID NO: 19364 - DNA, 109 bp, Homo sapiens
  chr12:658732-658841
  hypo
ggctggcagagggggccgaaggcagatgaatcgtgaagccaccgctgtggcgggggccagagggagtgtggctgcgcacatcctacaccgtcgccgctggagtcaggag

SEQ ID NO: 19365 - DNA, 31 bp, Homo sapiens
  chr12:667261-667292
  hypo
gcctggatggggcctgcgagatggaattcaa

SEQ ID NO: 19366 - DNA, 31 bp, Homo sapiens
  chr12:674437-674468
  hypo
cctgttttatgtgccccgaaggctgtaatga

SEQ ID NO: 19367 - DNA, 50 bp, Homo sapiens; identical to SEQ ID NO: 4504
  chr12:694939-694989
  hypo

SEQ ID NO: 19368 - DNA, 47 bp, Homo sapiens; identical to SEQ ID NO: 4505
  chr12:695005-695052
  hypo

SEQ ID NO: 19369 - DNA, 31 bp, Homo sapiens; identical to SEQ ID NO: 4506
  chr12:695118-695149
  hypo

SEQ ID NO: 19370 - DNA, 49 bp, Homo sapiens
  chr12:718309-718358
  hypo
acgctaggggctgtacgcgcacgcacggcgccacgcgctaggtgctgaa

SEQ ID NO: 19371 - DNA, 31 bp, Homo sapiens
  chr12:885904-885935
  hypo
atgtgttcttgctctgcgtggtgtttgtacc

SEQ ID NO: 19372 - DNA, 54 bp, Homo sapiens
  chr12:934132-934186
  hypo
ttcaatatgcttcacccgtaaacccttcagtatgcatttcgttagagttccagt

SEQ ID NO: 19373 - DNA, 62 bp, Homo sapiens
  chr12:934234-934296
  hypo
ataaattattattgtacgattgaatgagttttgacaaggcattcattcgtgtaaccaaaact

SEQ ID NO: 19374 - DNA, 31 bp, Homo sapiens
  chr12:934308-934339
  hypo
aacatttccatcatatcggaaaatgccctta

SEQ ID NO: 19375 - DNA, 31 bp, Homo sapiens
  chr12:1079111-1079142
  hypo
ctgttgacagactttgcgtcagtgtgaagtg

SEQ ID NO: 19376 - DNA, 31 bp, Homo sapiens; identical to SEQ ID NO: 4508
  chr12:1639403-1639434
  hypo

SEQ ID NO: 19377 - DNA, 31 bp, Homo sapiens
  chr12:1650731-1650762
  hypo
gtgctggctcaaccctcgccccaaaacctca

SEQ ID NO: 19378 - DNA, 100 bp, Homo sapiens
  chr12:1716716-1716816
  hypo
cactttctcagggtcacgggaacaattcaggttgaacgcatctctcctccgacatgccgagcgtctttgagtctcctcacccaggcgcacactcaggatt

SEQ ID NO: 19379 - DNA, 14 bp, Homo sapiens
  chr12:1716838-1716852
  hypo
tttatttattttga

SEQ ID NO: 19380 - DNA, 36 bp, Homo sapiens
  chr12:1766310-1766346
  hypo
ggctgtgccctaggaccggcccggaatccagctggg

SEQ ID NO: 19381 - DNA, 31 bp, Homo sapiens
  chr12:1980942-1980973
  hypo
tgtgtgcatattcatgcgtggactccagtca

SEQ ID NO: 19382 - DNA, 222 bp, Homo sapiens
  chr12:2017664-2017886
  hypo
cctcggcctctcccacgcggtgttggagggcgtgctaggattgcctccggtggagccccggccccgtttcctccacacgaccgggttcacacctgaacaccccccaggactgcgtcacggacatccccacgccaactcccacgccggactgcctcacggacatccccacgccaactcccacgccggactgcgtcacggacatccccacgccaactcccacgc

SEQ ID NO: 19383 - DNA, 31 bp, Homo sapiens
  chr12:2046151-2046182
  hypo
tggagaagggaggaggcggcacatgtctgaa

SEQ ID NO: 19384 - DNA, 31 bp, Homo sapiens
  chr12:2047230-2047261
  hypo
actggagcatggcccccgcaccacagtcatg

SEQ ID NO: 19385 - DNA, 31 bp, Homo sapiens
  chr12:2048956-2048987
  hypo
ctgcgaacataaaactcgatctgctacacag

SEQ ID NO: 19386 - DNA, 22 bp, Homo sapiens
  chr12:2088759-2088781
  hypo
gagccaccgtgcccagcccatt

SEQ ID NO: 19387 - DNA, 54 bp, Homo sapiens
  chr12:2088784-2088838
  hypo
cttaagtaaataactacgaacggaacttgttggatcatacgctagttatatgtt

SEQ ID NO: 19388 - DNA, 31 bp, Homo sapiens
  chr12:2516314-2516345
  hypo
atggtgaatgtcctggcgctcccttagacct

SEQ ID NO: 19389 - DNA, 31 bp, Homo sapiens
  chr12:2632289-2632320
  hypo
aagagcggagatggggcgggagggcgggggc

SEQ ID NO: 19390 - DNA, 113 bp, Homo sapiens
  chr12:2964498-2964611
  hypo
ctggtggtaggcttgccgggtgaagccagggaactcccaggactcgctggggaggaagaactcacgctgagcccacgtttgggagggtgggagggactcgctggcctggacca

SEQ ID NO: 19391 - DNA, 49 bp, Homo sapiens
  chr12:2964667-2964716
  hypo
ggtgggtgaggcactccgctctccttcccaggcacgacctctgccagcc

SEQ ID NO: 19392 - DNA, 95 bp, Homo sapiens
  chr12:2964717-2964812
  hypo
aggattctcatgaggacgcagaagtcctggcagggccgcatctccatccctctccttcccggcggaagttatggctgctgcgtatcatcttcaca

SEQ ID NO: 19393 - DNA, 9 bp, Homo sapiens
  chr12:3014650-3014659
  hypo
tataaaatg

SEQ ID NO: 19394 - DNA, 23 bp, Homo sapiens
  chr12:3073922-3073945
  hypo
ccaccgtgcgcctggccatgggg

SEQ ID NO: 19395 - DNA, 31 bp, Homo sapiens
  chr12:3116195-3116226
  hypo
aaaacaaaaaagaagacggctgagcttgcct

SEQ ID NO: 19396 - DNA, 31 bp, Homo sapiens
  chr12:3118650-3118681
  hypo
aagggaagagacttaccgtgctcccaaagct

SEQ ID NO: 19397 - DNA, 48 bp, Homo sapiens
  chr12:3118737-3118785
  hypo
tacttcattcacccaccggtgatgacttagacccgagatgctgcatgg

SEQ ID NO: 19398 - DNA, 47 bp, Homo sapiens
  chr12:3118800-3118847
  hypo
cctggggtagaactgtcgaccgttcactggaccgccaaagcctttcc

SEQ ID NO: 19399 - DNA, 31 bp, Homo sapiens
  chr12:3119177-3119208
  hypo
gttccgcagcacagggcgggctggcacctgc

SEQ ID NO: 19400 - DNA, 31 bp, Homo sapiens
  chr12:3129380-3129411
  hypo
aacgtccccgtctctccgggatgatgccata

SEQ ID NO: 19401 - DNA, 31 bp, Homo sapiens
  chr12:3129426-3129457
  hypo
catctggttatttccccgactggaacagaag

SEQ ID NO: 19402 - DNA, 31 bp, Homo sapiens; identical to SEQ ID NO: 4522
  chr12:3129486-3129517
  hypo

SEQ ID NO: 19403 - DNA, 75 bp, Homo sapiens; identical to SEQ ID NO: 4523
  chr12:3129530-3129605
  hypo

SEQ ID NO: 19404 - DNA, 31 bp, Homo sapiens
  chr12:3131347-3131378
  hypo
gagccgaggagcggggcggtgatcccagaga

SEQ ID NO: 19405 - DNA, 37 bp, Homo sapiens
  chr12:3147029-3147066
  hypo
ttcccagccctagagccgggaccgggaccctgaggtc

SEQ ID NO: 19406 - DNA, 31 bp, Homo sapiens
  chr12:3181109-3181140
  hypo
agggttggagttcatccgcttgtggaggaag

SEQ ID NO: 19407 - DNA, 40 bp, Homo sapiens; identical to SEQ ID NO: 4526
  chr12:3186500-3186540
  hypo

SEQ ID NO: 19408 - DNA, 268 bp, Homo sapiens; identical to SEQ ID NO: 4527
  chr12:3186576-3186844
  hypo

SEQ ID NO: 19409 - DNA, 71 bp, Homo sapiens; identical to SEQ ID NO: 4528
  chr12:3186910-3186981
  hypo

SEQ ID NO: 19410 - DNA, 47 bp, Homo sapiens
  chr12:3215226-3215273
  hypo
acatagcatgcacactcgctcttgtgcgcgcacgcacacacacacat

SEQ ID NO: 19411 - DNA, 31 bp, Homo sapiens
  chr12:3266174-3266205
  hypo
agtacaaattctcccccgctgagcctcatag

SEQ ID NO: 19412 - DNA, 2 bp, Homo sapiens
  chr12:3266271-3266273
  hypo
tt

SEQ ID NO: 19413 - DNA, 31 bp, Homo sapiens
  chr12:3292083-3292114
  hypo
gagacagggtcagggccgcatggtcggagac

SEQ ID NO: 19414 - DNA, 37 bp, Homo sapiens
  chr12:3302734-3302771
  hypo
tctgacaagggctgaccgtagccggggggcagctttg

SEQ ID NO: 19415 - DNA, 31 bp, Homo sapiens
  chr12:3302778-3302809
  hypo
gctttgagaggtgacacgcaacactagggaa

SEQ ID NO: 19416 - DNA, 31 bp, Homo sapiens
  chr12:3302850-3302881
  hypo
gctcctggctgtgctccgtggagcccctcca

SEQ ID NO: 19417 - DNA, 31 bp, Homo sapiens
  chr12:3302882-3302913
  hypo
gaggcccagcccactccgaatgggcagaggt

SEQ ID NO: 19418 - DNA, 55 bp, Homo sapiens
  chr12:3316790-3316845
  hypo
tacctcctctcctgtgcgccccagcaaactttgaggctcccgggagaactggaga

SEQ ID NO: 19419 - DNA, 42 bp, Homo sapiens
  chr12:3316889-3316931
  hypo
agtggctagctcactgcgtcaggaccacgcagagaggccctg

SEQ ID NO: 19420 - DNA, 31 bp, Homo sapiens
  chr12:3316943-3316974
  hypo
gtggggggtgggtgaccggccaaggaggaga

SEQ ID NO: 19421 - DNA, 46 bp, Homo sapiens
  chr12:3333940-3333986
  hypo
cccctgacagatttcccggttctgtcagcttcgcttcagcagtgct

SEQ ID NO: 19422 - DNA, 27 bp, Homo sapiens
  chr12:3344031-3344058
  hypo
tataggtaagtgaggccgggcgtggtg

SEQ ID NO: 19423 - DNA, 31 bp, Homo sapiens
  chr12:3361965-3361996
  hypo
tgcagggctgagtgagcgggctgctgggggc

SEQ ID NO: 19424 - DNA, 55 bp, Homo sapiens
  chr12:3370678-3370733
  hypo
aatagatggagaactgcgtctccaaagtaggggacacaggcggagaagcatgttc

SEQ ID NO: 19425 - DNA, 44 bp, Homo sapiens
  chr12:3370744-3370788
  hypo
acagacactttgcctccgaagatgtgactcggggcatgcatgac

SEQ ID NO: 19426 - DNA, 31 bp, Homo sapiens
  chr12:3389521-3389552
  hypo
tctcactgtgtccctccgcctggcaggtgaa

SEQ ID NO: 19427 - DNA, 79 bp, Homo sapiens
  chr12:3389718-3389797
  hypo
tccccggtgacctggccgggcacctgtgctttctggattttagccgggagtggagtggtacccacgggggcatttgcct

SEQ ID NO: 19428 - DNA, 112 bp, Homo sapiens
  chr12:3390416-3390528
  hypo
gaacacggttcccgaccgctgctgcatggagaactcccagggctgcgggcgcaacgccaccacgcctttgtggagaacggtgaggctggggatggaccgcttgggtccaaga

SEQ ID NO: 19429 - DNA, 31 bp, Homo sapiens
  chr12:3392413-3392444
  hypo
taccctgcctcagcctcggacttctcagtgg

SEQ ID NO: 19430 - DNA, 83 bp, Homo sapiens
  chr12:3392501-3392584
  hypo
cctgcatctgcatatgcgtatttgccaaagacgacagggtgggctggggtgcgctccggaggaacccccggcactgatgggct

SEQ ID NO: 19431 - DNA, 64 bp, Homo sapiens
  chr12:3392630-3392694
  hypo
tggggagcagagtgcccgccccgtggagataccgccccagcgggggctgcgacatccatggcca

SEQ ID NO: 19432 - DNA, 60 bp, Homo sapiens
  chr12:3409752-3409812
  hypo
gtctgcctgctggcgacgatgactgcgagccctttctcaagacttcggcccacctgggtc

SEQ ID NO: 19433 - DNA, 69 bp, Homo sapiens
  chr12:3409819-3409888
  hypo
atgtagtgcccagcatcggccgcgagagggagctctaacctgagacttggcggccgcagggctggctca

SEQ ID NO: 19434 - DNA, 31 bp, Homo sapiens; identical to SEQ ID NO: 4530
  chr12:3474950-3474981
  hypo

SEQ ID NO: 19435 - DNA, 31 bp, Homo sapiens; identical to SEQ ID NO: 4531
  chr12:4377793-4377824
  hypo

SEQ ID NO: 19436 - DNA, 69 bp, Homo sapiens; identical to SEQ ID NO: 4532
  chr12:4377855-4377924
  hypo

SEQ ID NO: 19437 - DNA, 31 bp, Homo sapiens; identical to SEQ ID NO: 4533
  chr12:4378029-4378060
  hypo

SEQ ID NO: 19438 - DNA, 70 bp, Homo sapiens; identical to SEQ ID NO: 4534
  chr12:4378070-4378140
  hypo

SEQ ID NO: 19439 - DNA, 54 bp, Homo sapiens; identical to SEQ ID NO: 4535
  chr12:4378141-4378195
  hypo

SEQ ID NO: 19440 - DNA, 80 bp, Homo sapiens; identical to SEQ ID NO: 4536
  chr12:4378201-4378281
  hypo

SEQ ID NO: 19441 - DNA, 49 bp, Homo sapiens; identical to SEQ ID NO: 4537
  chr12:4378287-4378336
  hypo

SEQ ID NO: 19442 - DNA, 191 bp, Homo sapiens; identical to SEQ ID NO: 4538
  chr12:4378350-4378541
  hypo

SEQ ID NO: 19443 - DNA, 211 bp, Homo sapiens; identical to SEQ ID NO: 4539
  chr12:4378560-4378771
  hypo

SEQ ID NO: 19444 - DNA, 44 bp, Homo sapiens; identical to SEQ ID NO: 4540
  chr12:4378801-4378845
  hypo

SEQ ID NO: 19445 - DNA, 56 bp, Homo sapiens; identical to SEQ ID NO: 4541
  chr12:4378853-4378909
  hypo

SEQ ID NO: 19446 - DNA, 304 bp, Homo sapiens; identical to SEQ ID NO: 4542
  chr12:4378915-4379219
  hypo

SEQ ID NO: 19447 - DNA, 86 bp, Homo sapiens; identical to SEQ ID NO: 4550
  chr12:4380199-4380285
  hypo

SEQ ID NO: 19448 - DNA, 82 bp, Homo sapiens; identical to SEQ ID NO: 4557
  chr12:4381418-4381500
  hypo

SEQ ID NO: 19449 - DNA, 87 bp, Homo sapiens; identical to SEQ ID NO: 4558
  chr12:4381924-4382011
  hypo

SEQ ID NO: 19450 - DNA, 31 bp, Homo sapiens; identical to SEQ ID NO: 4559
  chr12:4382204-4382235
  hypo

SEQ ID NO: 19451 - DNA, 48 bp, Homo sapiens; identical to SEQ ID NO: 4569
  chr12:5540931-5540979
  hypo

SEQ ID NO: 19452 - DNA, 21 bp, Homo sapiens
  chr12:6141391-6141412
  hypo
gaaaaacagagtgtgtcgctt

SEQ ID NO: 19453 - DNA, 31 bp, Homo sapiens
  chr12:6185879-6185910
  hypo
gaggaaagaaacgacccgttttgaggagagg

SEQ ID NO: 19454 - DNA, 13 bp, Homo sapiens
  chr12:6220746-6220759
  hypo
cccaggctggtct

SEQ ID NO: 19455 - DNA, 40 bp, Homo sapiens
  chr12:6220827-6220867
  hypo
tggtatcggtcgagtgcggtggctcacgcctgtaatccca

SEQ ID NO: 19456 - DNA, 31 bp, Homo sapiens
  chr12:6247504-6247535
  hypo
tcccacccttcacccccgcttttcctgcctt

SEQ ID NO: 19457 - DNA, 24 bp, Homo sapiens
  chr12:6272593-6272617
  hypo
cactgtgcccggcctgtttaatat

SEQ ID NO: 19458 - DNA, 31 bp, Homo sapiens
  chr12:6284863-6284894
  hypo
gctgccttcatccctacgtgaaaaaagcaag

SEQ ID NO: 19459 - DNA, 31 bp, Homo sapiens
  chr12:6284916-6284947
  hypo
tgtttccacttatccacgaaaagaggggtaa

SEQ ID NO: 19460 - DNA, 81 bp, Homo sapiens
  chr12:6294431-6294512
  hypo
cccataaaaactgcagcgtgtatctctaagagatacggttttctcagaaacataaccatggccgggcgcagtggctcatgc

SEQ ID NO: 19461 - DNA, 132 bp, Homo sapiens; identical to SEQ ID NO: 4571
  chr12:6309397-6309529
  hypo

SEQ ID NO: 19462 - DNA, 95 bp, Homo sapiens; identical to SEQ ID NO: 4572
  chr12:6309534-6309629
  hypo

SEQ ID NO: 19463 - DNA, 31 bp, Homo sapiens; identical to SEQ ID NO: 4573
  chr12:6309653-6309684
  hypo

SEQ ID NO: 19464 - DNA, 31 bp, Homo sapiens; identical to SEQ ID NO: 4574
  chr12:6309693-6309724
  hypo

SEQ ID NO: 19465 - DNA, 31 bp, Homo sapiens
  chr12:6350370-6350401
  hypo
ctgaagggtaggttagcgtggaacagactgc

SEQ ID NO: 19466 - DNA, 22 bp, Homo sapiens
  chr12:6372615-6372637
  hypo
aagatttaaggctgggcgcagt

SEQ ID NO: 19467 - DNA, 42 bp, Homo sapiens; identical to SEQ ID NO: 4578
  chr12:6387949-6387991
  hypo

SEQ ID NO: 19468 - DNA, 64 bp, Homo sapiens; identical to SEQ ID NO: 4579
  chr12:6388070-6388134
  hypo

SEQ ID NO: 19469 - DNA, 51 bp, Homo sapiens
  chr12:6422990-6423041
  hypo
ccaattgtgatggctccgcagatgaccagcaagctccgggagctgagaaca

SEQ ID NO: 19470 - DNA, 31 bp, Homo sapiens
  chr12:6425105-6425136
  hypo
ggaccctggcacagcccgacctctgagcctg

SEQ ID NO: 19471 - DNA, 40 bp, Homo sapiens
  chr12:6425446-6425486
  hypo
tgtccccagcctgattcgaacccaccggagcttttgggat

SEQ ID NO: 19472 - DNA, 31 bp, Homo sapiens
  chr12:6425661-6425692
  hypo
ctgtgatttgaggggccgcaggacacagccc

SEQ ID NO: 19473 - DNA, 31 bp, Homo sapiens
  chr12:6464387-6464418
  hypo
cctctgcaatctgaggcgctccttccaggcc

SEQ ID NO: 19474 - DNA, 39 bp, Homo sapiens
  chr12:6464447-6464486
  hypo
ctgatggaggtctccacgccaggccgcaagttaaagcca

SEQ ID NO: 19475 - DNA, 45 bp, Homo sapiens
  chr12:6464501-6464546
  hypo
gcaggttcatcctgcccgtgcaccattacccgggccccagtcact

SEQ ID NO: 19476 - DNA, 31 bp, Homo sapiens
  chr12:6475367-6475398
  hypo
agaatataaaatgatacgatcattttggaaa

SEQ ID NO: 19477 - DNA, 31 bp, Homo sapiens
  chr12:6490845-6490876
  hypo
aggaacattctggggccgggtgccgtggctc

SEQ ID NO: 19478 - DNA, 31 bp, Homo sapiens; identical to SEQ ID NO: 4582
  chr12:6493330-6493361
  hypo

SEQ ID NO: 19479 - DNA, 31 bp, Homo sapiens; identical to SEQ ID NO: 4583
  chr12:6493590-6493621
  hypo

SEQ ID NO: 19480 - DNA, 30 bp, Homo sapiens
  chr12:6516224-6516254
  hypo
tgctggcattataggcgtgagccaccacgc

SEQ ID NO: 19481 - DNA, 58 bp, Homo sapiens
  chr12:6637924-6637982
  hypo
tgaaggggcaggtcagcgagatggcggtgctgctcatcgaccccgagcctcagattgc

SEQ ID NO: 19482 - DNA, 39 bp, Homo sapiens
  chr12:6749346-6749385
  hypo
ccgtacaaatccagcccgtaaaagcggcctgattctggg

SEQ ID NO: 19483 - DNA, 31 bp, Homo sapiens
  chr12:6757458-6757489
  hypo
gtttccaagggagaatcgagtaagacagtcc

SEQ ID NO: 19484 - DNA, 48 bp, Homo sapiens
  chr12:6868197-6868245
  hypo
gactgtttggaaactcgcgactgtgtggctatccgggataactgacct

SEQ ID NO: 19485 - DNA, 32 bp, Homo sapiens
  chr12:8180904-8180936
  hypo
tttgagatggagtctccgatctgtcgcccagg

SEQ ID NO: 19486 - DNA, 31 bp, Homo sapiens
  chr12:8386002-8386033
  hypo
cagccagcctcctgtgcgaggttgtgcggga

SEQ ID NO: 19487 - DNA, 31 bp, Homo sapiens
  chr12:8808504-8808535
  hypo
gaagcatagtgcccagcggagttgagtatcc

SEQ ID NO: 19488 - DNA, 31 bp, Homo sapiens
  chr12:8936108-8936139
  hypo
ctgtagacaattgcaacgcaatggcaactat

SEQ ID NO: 19489 - DNA, 9 bp, Homo sapiens
  chr12:8936142-8936151
  hypo
attaaaatt

SEQ ID NO: 19490 - DNA, 31 bp, Homo sapiens
  chr12:9071260-9071291
  hypo
tttgtttattttcacccgatctagtctttgc

SEQ ID NO: 19491 - DNA, 20 bp, Homo sapiens
  chr12:9084000-9084020
  hypo
aagactaatggagaggcggg

SEQ ID NO: 19492 - DNA, 31 bp, Homo sapiens
  chr12:9574344-9574375
  hypo
tattacccacagaaaacgggggccagaacct

SEQ ID NO: 19493 - DNA, 31 bp, Homo sapiens
  chr12:10363277-10363308
  hypo
cagtttaattttcagtcgctcatgttaggtt

SEQ ID NO: 19494 - DNA, 31 bp, Homo sapiens
  chr12:11720902-11720933
  hypo
cacatttagtatactacggggtagcatttct

SEQ ID NO: 19495 - DNA, 45 bp, Homo sapiens; identical to SEQ ID NO: 4593
  chr12:11801642-11801687
  hypo

SEQ ID NO: 19496 - DNA, 31 bp, Homo sapiens
  chr12:12208458-12208489
  hypo
agccacctgcagtcctcggataccactcagt

SEQ ID NO: 19497 - DNA, 37 bp, Homo sapiens
  chr12:12504472-12504509
  hypo
ccattattagaaacttcgtattcggtgctttaataca

SEQ ID NO: 19498 - DNA, 40 bp, Homo sapiens
  chr12:12605389-12605429
  hypo
ttgttaagattaggatcgccttgatcgtggctgggtcggg

SEQ ID NO: 19499 - DNA, 31 bp, Homo sapiens
  chr12:12764238-12764269
  hypo
cagtaaaggacatttgcgttgtttccacttt

SEQ ID NO: 19500 - DNA, 31 bp, Homo sapiens; identical to SEQ ID NO: 4597
  chr12:12848340-12848371
  hypo

SEQ ID NO: 19501 - DNA, 49 bp, Homo sapiens; identical to SEQ ID NO: 4598
  chr12:12848389-12848438
  hypo

SEQ ID NO: 19502 - DNA, 31 bp, Homo sapiens
  chr12:12848466-12848497
  hypo
gattggtcagatccctcgagacagttcccaa

SEQ ID NO: 19503 - DNA, 43 bp, Homo sapiens
  chr12:12848500-12848543
  hypo
cctgacttctgttaccgcgactgttcttcgcaattccacctcg

SEQ ID NO: 19504 - DNA, 20 bp, Homo sapiens
  chr12:13029903-13029923
  hypo
cgctccgtctcaaaaaacaa

SEQ ID NO: 19505 - DNA, 31 bp, Homo sapiens
  chr12:13035994-13036025
  hypo
acaacgtgtttaaggccgggcgcggtggctc

SEQ ID NO: 19506 - DNA, 35 bp, Homo sapiens; identical to SEQ ID NO: 4599
  chr12:13069192-13069227
  hypo

SEQ ID NO: 19507 - DNA, 15 bp, Homo sapiens
  chr12:13069248-13069263
  hypo
cttgcattgtgagat

SEQ ID NO: 19508 - DNA, 15 bp, Homo sapiens
  chr12:13069316-13069331
  hypo
cggccatgccccatg

SEQ ID NO: 19509 - DNA, 44 bp, Homo sapiens
  chr12:13079829-13079873
  hypo
aaacagtactcagatgcgttccctctccccgtagggatcttgct

SEQ ID NO: 19510 - DNA, 127 bp, Homo sapiens; identical to SEQ ID NO: 4602
  chr12:13153040-13153167
  hypo

SEQ ID NO: 19511 - DNA, 38 bp, Homo sapiens; identical to SEQ ID NO: 4603
  chr12:13153354-13153392
  hypo

SEQ ID NO: 19512 - DNA, 94 bp, Homo sapiens; identical to SEQ ID NO: 4604
  chr12:13154240-13154334
  hypo

SEQ ID NO: 19513 - DNA, 31 bp, Homo sapiens
  chr12:13173188-13173219
  hypo
agttaagcccaacattcgaatcatcctagcc

SEQ ID NO: 19514 - DNA, 31 bp, Homo sapiens
  chr12:13173238-13173269
  hypo
tgaagaagacttcatccgcagacatttgaga

SEQ ID NO: 19515 - DNA, 31 bp, Homo sapiens
  chr12:13173286-13173317
  hypo
acctttccagtggcatcgcccagacattgtg

SEQ ID NO: 19516 - DNA, 39 bp, Homo sapiens
  chr12:13173326-13173365
  hypo
cttgctatcctcactgcgctttgtcggaattcttgaccc

SEQ ID NO: 19517 - DNA, 31 bp, Homo sapiens
  chr12:13173391-13173422
  hypo
gctgttttatggcattcgtgtgaaggaggat

SEQ ID NO: 19518 - DNA, 18 bp, Homo sapiens
  chr12:13199068-13199086
  hypo
agaaaatgttcacttgcg

SEQ ID NO: 19519 - DNA, 31 bp, Homo sapiens
  chr12:13222375-13222406
  hypo
atcatcacctctaatgcgtgccaacttctat

SEQ ID NO: 19520 - DNA, 102 bp, Homo sapiens
  chr12:13222448-13222550
  hypo
acatagctctaccatgcggtggaaagtgctgttgtggaggttcgcacaggggtccaccgggaacacagggagcagatggagtgcaggcgagctggagggcca

SEQ ID NO: 19521 - DNA, 31 bp, Homo sapiens
  chr12:13237736-13237767
  hypo
aaccatgctcaagagacggatgttggcttaa

SEQ ID NO: 19522 - DNA, 31 bp, Homo sapiens
  chr12:13237897-13237928
  hypo
ttgaaatcccttgttccgcagctcggagtag

SEQ ID NO: 19523 - DNA, 37 bp, Homo sapiens
  chr12:14469617-14469654
  hypo
caccatacctggcctcagtctgcgttttaaattgatt

SEQ ID NO: 19524 - DNA, 19 bp, Homo sapiens
  chr12:14719972-14719991
  hypo
gagccgagatcacaccatt

SEQ ID NO: 19525 - DNA, 113 bp, Homo sapiens; identical to SEQ ID NO: 4607
  chr12:15941833-15941946
  hypo

SEQ ID NO: 19526 - DNA, 391 bp, Homo sapiens; identical to SEQ ID NO: 4608
  chr12:15941963-15942354
  hypo

SEQ ID NO: 19527 - DNA, 184 bp, Homo sapiens; identical to SEQ ID NO: 4609
  chr12:15942443-15942627
  hypo

SEQ ID NO: 19528 - DNA, 23 bp, Homo sapiens
  chr12:19230438-19230461
  hypo
accgcgcccggctaaaatatgtt

SEQ ID NO: 19529 - DNA, 31 bp, Homo sapiens
  chr12:19260899-19260930
  hypo
cggcaggcgtactccacggtgtagatggctc

SEQ ID NO: 19530 - DNA, 31 bp, Homo sapiens
  chr12:19261247-19261278
  hypo
aaccatcactaccaaccgtttccagaagttt

SEQ ID NO: 19531 - DNA, 79 bp, Homo sapiens; identical to SEQ ID NO: 4610
  chr12:19282572-19282651
  hypo

SEQ ID NO: 19532 - DNA, 184 bp, Homo sapiens; identical to SEQ ID NO: 4611
  chr12:19282815-19282999
  hypo

SEQ ID NO: 19533 - DNA, 100 bp, Homo sapiens; identical to SEQ ID NO: 4612
  chr12:19283279-19283379
  hypo

SEQ ID NO: 19534 - DNA, 101 bp, Homo sapiens; identical to SEQ ID NO: 4613
  chr12:19283482-19283583
  hypo

SEQ ID NO: 19535 - DNA, 138 bp, Homo sapiens; identical to SEQ ID NO: 4614
  chr12:19283697-19283835
  hypo

SEQ ID NO: 19536 - DNA, 21 bp, Homo sapiens
  chr12:19425383-19425404
  hypo
agctttaggctgagcacggtg

SEQ ID NO: 19537 - DNA, 31 bp, Homo sapiens
  chr12:19459335-19459366
  hypo
ggtagagaaaaggtggcgacggcgactggag

SEQ ID NO: 19538 - DNA, 53 bp, Homo sapiens
  chr12:19459368-19459421
  hypo
gcagaggctgtagcatcggatacccacctcccacgaaccggttcctcttcccc

SEQ ID NO: 19539 - DNA, 111 bp, Homo sapiens
  chr12:19459536-19459647
  hypo
gtagcggaggtggtggcggcggtggaggcggcggcatcgaggtaataggtgactgatctccccgggcgctagctctgagcagatgcggactctcttcggtttcctaggcaa

SEQ ID NO: 19540 - DNA, 26 bp, Homo sapiens
  chr12:19493203-19493229
  hypo
actcaaattactaacacgtgtttgaa

SEQ ID NO: 19541 - DNA, 31 bp, Homo sapiens
  chr12:19497743-19497774
  hypo
ttaaaatatgtgaaatcggccaggcgtggtt

SEQ ID NO: 19542 - DNA, 31 bp, Homo sapiens
  chr12:19512468-19512499
  hypo
ttcagcaaagaggtagcgagattattttatg

SEQ ID NO: 19543 - DNA, 18 bp, Homo sapiens
  chr12:19512602-19512620
  hypo
aaataagctttctggccg

SEQ ID NO: 19544 - DNA, 37 bp, Homo sapiens
  chr12:19539886-19539923
  hypo
tgtcaaaatggagtggcgcccacgaaaaaaatccatg

SEQ ID NO: 19545 - DNA, 27 bp, Homo sapiens
  chr12:22247464-22247491
  hypo
agccaccgcgcccggccaactaatata

SEQ ID NO: 19546 - DNA, 31 bp, Homo sapiens
  chr12:22529505-22529536
  hypo
gacatagagaccttcacggggatggtgacaa

SEQ ID NO: 19547 - DNA, 122 bp, Homo sapiens; identical to SEQ ID NO: 4621
  chr12:25101374-25101496
  hypo

SEQ ID NO: 19548 - DNA, 183 bp, Homo sapiens; identical to SEQ ID NO: 4622
  chr12:25101591-25101774
  hypo

SEQ ID NO: 19549 - DNA, 67 bp, Homo sapiens; identical to SEQ ID NO: 4623
  chr12:25101785-25101852
  hypo

SEQ ID NO: 19550 - DNA, 142 bp, Homo sapiens; identical to SEQ ID NO: 4624
  chr12:25101855-25101997
  hypo

SEQ ID NO: 19551 - DNA, 77 bp, Homo sapiens; identical to SEQ ID NO: 4625
  chr12:25102009-25102086
  hypo

SEQ ID NO: 19552 - DNA, 112 bp, Homo sapiens; identical to SEQ ID NO: 4626
  chr12:25102098-25102210
  hypo

SEQ ID NO: 19553 - DNA, 39 bp, Homo sapiens; identical to SEQ ID NO: 4627
  chr12:25404450-25404489
  hypo

SEQ ID NO: 19554 - DNA, 47 bp, Homo sapiens; identical to SEQ ID NO: 4628
  chr12:25404551-25404598
  hypo

SEQ ID NO: 19555 - DNA, 24 bp, Homo sapiens
  chr12:25428814-25428838
  hypo
agaaggatataatgaccgggcgtg

SEQ ID NO: 19556 - DNA, 31 bp, Homo sapiens
  chr12:26265814-26265845
  hypo
agaagaaagaggagaccgtgagtaggaattg

SEQ ID NO: 19557 - DNA, 31 bp, Homo sapiens
  chr12:26278876-26278907
  hypo
cccgcgcgataagagacgcccggagtgtgca

SEQ ID NO: 19558 - DNA, 31 bp, Homo sapiens; identical to SEQ ID NO: 4630
  chr12:27485803-27485834
  hypo

SEQ ID NO: 19559 - DNA, 31 bp, Homo sapiens
  chr12:27523815-27523846
  hypo
cataagccaccgcacccggctggagagctgg

SEQ ID NO: 19560 - DNA, 26 bp, Homo sapiens
  chr12:27673412-27673438
  hypo
ccacgcccaaccgagaaagatcttta

SEQ ID NO: 19561 - DNA, 31 bp, Homo sapiens
  chr12:27749980-27750011
  hypo
atccgttgaggggaaccgcatgttctaaaag

SEQ ID NO: 19562 - DNA, 31 bp, Homo sapiens
  chr12:29373866-29373897
  hypo
ttgtgtcccttctccccgattcttcccttgg

SEQ ID NO: 19563 - DNA, 31 bp, Homo sapiens
  chr12:29374069-29374100
  hypo
tacccgtaaaatcagccgctttacctcttag

SEQ ID NO: 19564 - DNA, 46 bp, Homo sapiens
  chr12:29889830-29889876
  hypo
tctcagaaatgccacacgtaaagcagttccacgaagagcagcacaa

SEQ ID NO: 19565 - DNA, 31 bp, Homo sapiens
  chr12:30861037-30861068
  hypo
ctggcctttaatcattcgtgcacaggactgc

SEQ ID NO: 19566 - DNA, 52 bp, Homo sapiens
  chr12:30861077-30861129
  hypo
gggtgggggaggggagcgggcatgttaattacccacacgtgtgttgactcaa

SEQ ID NO: 19567 - DNA, 50 bp, Homo sapiens
  chr12:30861178-30861228
  hypo
attggggcttcactctcgctgtactctctcgtcagcggtgctgagcagtg

SEQ ID NO: 19568 - DNA, 31 bp, Homo sapiens
  chr12:31381945-31381976
  hypo
cttgggcaggctgtgtcgcatgtctaggctg

SEQ ID NO: 19569 - DNA, 31 bp, Homo sapiens
  chr12:31385501-31385532
  hypo
gccagacacaagcaggcggggaaagatgcag

SEQ ID NO: 19570 - DNA, 37 bp, Homo sapiens
  chr12:31986809-31986846
  hypo
ctgaatctgggccaagcgcagtcactcacacctgtaa

SEQ ID NO: 19571 - DNA, 2 bp, Homo sapiens
  chr12:32140932-32140934
  hypo
tg

SEQ ID NO: 19572 - DNA, 31 bp, Homo sapiens
  chr12:32140941-32140972
  hypo
tacagacatgagacaccgtgcctggcctcta

SEQ ID NO: 19573 - DNA, 46 bp, Homo sapiens
  chr12:32831139-32831185
  hypo
tttttttcatgaacaccgccccccgctgctccgacccctgcttttt

SEQ ID NO: 19574 - DNA, 4 bp, Homo sapiens
  chr12:32831273-32831277
  hypo
cttc

SEQ ID NO: 19575 - DNA, 31 bp, Homo sapiens
  chr12:32995456-32995487
  hypo
gagccattgcctggcccgcctcattatcttt

SEQ ID NO: 19576 - DNA, 31 bp, Homo sapiens; identical to SEQ ID NO: 4635
  chr12:33049889-33049920
  hypo

SEQ ID NO: 19577 - DNA, 166 bp, Homo sapiens; identical to SEQ ID NO: 4636
  chr12:33049945-33050111
  hypo

SEQ ID NO: 19578 - DNA, 50 bp, Homo sapiens; identical to SEQ ID NO: 4641
  chr12:40618248-40618298
  hypo

SEQ ID NO: 19579 - DNA, 31 bp, Homo sapiens
  chr12:42661936-42661967
  hypo
gccagtgtctttgcagcggctgctccagatg

SEQ ID NO: 19580 - DNA, 31 bp, Homo sapiens
  chr12:47629081-47629112
  hypo
tccgcgagttccgctccgaccaccatctggt

SEQ ID NO: 19581 - DNA, 36 bp, Homo sapiens; identical to SEQ ID NO: 4645
  chr12:48576834-48576870
  hypo

SEQ ID NO: 19582 - DNA, 76 bp, Homo sapiens; identical to SEQ ID NO: 4646
  chr12:48576883-48576959
  hypo

SEQ ID NO: 19583 - DNA, 80 bp, Homo sapiens; identical to SEQ ID NO: 4647
  chr12:48576996-48577076
  hypo

SEQ ID NO: 19584 - DNA, 72 bp, Homo sapiens; identical to SEQ ID NO: 4648
  chr12:48577359-48577431
  hypo

SEQ ID NO: 19585 - DNA, 186 bp, Homo sapiens; identical to SEQ ID NO: 4649
  chr12:48577434-48577620
  hypo

SEQ ID NO: 19586 - DNA, 33 bp, Homo sapiens
  chr12:48727660-48727693
  hypo
ccggcggtcgggcggcggcggctgccaagtctt

SEQ ID NO: 19587 - DNA, 31 bp, Homo sapiens
  chr12:48745137-48745168
  hypo
taccctctagttttcacgataggataaaggg

SEQ ID NO: 19588 - DNA, 19 bp, Homo sapiens
  chr12:49111678-49111697
  hypo
ttcccagctcctttgccgg

SEQ ID NO: 19589 - DNA, 31 bp, Homo sapiens
  chr12:49150047-49150078
  hypo
ttccaggaaatggcctcgttgctataacctg

SEQ ID NO: 19590 - DNA, 70 bp, Homo sapiens; identical to SEQ ID NO: 4650
  chr12:49182446-49182516
  hypo

SEQ ID NO: 19591 - DNA, 54 bp, Homo sapiens; identical to SEQ ID NO: 4651
  chr12:49182531-49182585
  hypo

SEQ ID NO: 19592 - DNA, 56 bp, Homo sapiens; identical to SEQ ID NO: 4652
  chr12:49182603-49182659
  hypo

SEQ ID NO: 19593 - DNA, 94 bp, Homo sapiens; identical to SEQ ID NO: 4653
  chr12:49182688-49182782
  hypo

SEQ ID NO: 19594 - DNA, 51 bp, Homo sapiens; identical to SEQ ID NO: 4654
  chr12:49183195-49183246
  hypo

SEQ ID NO: 19595 - DNA, 31 bp, Homo sapiens; identical to SEQ ID NO: 4655
  chr12:49183299-49183330
  hypo

SEQ ID NO: 19596 - DNA, 60 bp, Homo sapiens; identical to SEQ ID NO: 4657
  chr12:49351295-49351355
  hypo

SEQ ID NO: 19597 - DNA, 95 bp, Homo sapiens; identical to SEQ ID NO: 4658
  chr12:49371750-49371845
  hypo

SEQ ID NO: 19598 - DNA, 31 bp, Homo sapiens
  chr12:49566959-49566990
  hypo
agggttagctcctcttcgtcttattacattg

SEQ ID NO: 19599 - DNA, 19 bp, Homo sapiens
  chr12:49575837-49575856
  hypo
actccgtctcaaaaaaaaa

SEQ ID NO: 19600 - DNA, 31 bp, Homo sapiens
  chr12:49657606-49657637
  hypo
gaagggtttaattcctcggagctctactttc

SEQ ID NO: 19601 - DNA, 5 bp, Homo sapiens
  chr12:49657704-49657709
  hypo
tgaaa

SEQ ID NO: 19602 - DNA, 49 bp, Homo sapiens; identical to SEQ ID NO: 4664
  chr12:49761540-49761589
  hypo

SEQ ID NO: 19603 - DNA, 31 bp, Homo sapiens; identical to SEQ ID NO: 4665
  chr12:49761771-49761802
  hypo

SEQ ID NO: 19604 - DNA, 31 bp, Homo sapiens; identical to SEQ ID NO: 4666
  chr12:49761811-49761842
  hypo

SEQ ID NO: 19605 - DNA, 48 bp, Homo sapiens
  chr12:50037802-50037850
  hypo
cctaggccagtcagcacgctggtcaagcttccacggcccttagtgcag

SEQ ID NO: 19606 - DNA, 31 bp, Homo sapiens
  chr12:50185745-50185776
  hypo
ggggtgcggctacccccgaaaggtgggccct

SEQ ID NO: 19607 - DNA, 31 bp, Homo sapiens
  chr12:50185863-50185894
  hypo
gctcctctccacctttcggcccagcctcaga

SEQ ID NO: 19608 - DNA, 31 bp, Homo sapiens
  chr12:50185897-50185928
  hypo
actgagctctgaggggcgtctgtgcacctga

SEQ ID NO: 19609 - DNA, 39 bp, Homo sapiens
  chr12:50262262-50262301
  hypo
ggggtttcaggaaagacgggaggccgggtggcactgagg

SEQ ID NO: 19610 - DNA, 31 bp, Homo sapiens
  chr12:50262514-50262545
  hypo
acggacatgagcagagcgctgtctctggagg

SEQ ID NO: 19611 - DNA, 41 bp, Homo sapiens
  chr12:50269010-50269051
  hypo
tcaccataagcctctgcggcaggtgtcgcactatcagctcc

SEQ ID NO: 19612 - DNA, 31 bp, Homo sapiens
  chr12:50269082-50269113
  hypo
gtgtaagtgacttgcccgcatcacccagccc

SEQ ID NO: 19613 - DNA, 34 bp, Homo sapiens
  chr12:50269170-50269204
  hypo
gccatatgtccaggtgcgccgactgggctgcagg

SEQ ID NO: 19614 - DNA, 21 bp, Homo sapiens
  chr12:50270257-50270278
  hypo
aaagctgggctgggtgcggtg

SEQ ID NO: 19615 - DNA, 47 bp, Homo sapiens
  chr12:50282792-50282839
  hypo
tcctggccttccctggcggataggggagggaacggcaccttgggcca

SEQ ID NO: 19616 - DNA, 31 bp, Homo sapiens
  chr12:50290502-50290533
  hypo
cacttcctcttaggaccgaggtctgggtctc

SEQ ID NO: 19617 - DNA, 31 bp, Homo sapiens
  chr12:50296426-50296457
  hypo
gagttctccatgtttacggaactgaacactc

SEQ ID NO: 19618 - DNA, 86 bp, Homo sapiens
  chr12:50296486-50296572
  hypo
agcccccctcatcacccggatctgaaggatcatgtccacctaaatcgagttcagcctccaccctgccactccgccccccagagcct

SEQ ID NO: 19619 - DNA, 31 bp, Homo sapiens
  chr12:50296580-50296611
  hypo
ctaatgcccaggcccccgacacacatacggc

SEQ ID NO: 19620 - DNA, 31 bp, Homo sapiens
  chr12:50370399-50370430
  hypo
aacattttctcaggctcgtagagaggtggga

SEQ ID NO: 19621 - DNA, 109 bp, Homo sapiens
  chr12:50400183-50400292
  hypo
catcactgttctagcacggaaaacaatacacaccagcttttcgcagtcagcctcagctctctgtctccgtttgatctctacatccacctgattacgtgcatgcttcagc

SEQ ID NO: 19622 - DNA, 31 bp, Homo sapiens
  chr12:50400294-50400325
  hypo
aacatccagagcacttcgctcagtctctgct

SEQ ID NO: 19623 - DNA, 51 bp, Homo sapiens
  chr12:50400366-50400417
  hypo
cctctgccactttttacggaaatcctcaaagtccttcgccaactggataaa

SEQ ID NO: 19624 - DNA, 22 bp, Homo sapiens
  chr12:50422260-50422282
  hypo
tgcaattatggctgggcgaggt

SEQ ID NO: 19625 - DNA, 31 bp, Homo sapiens
  chr12:50470988-50471019
  hypo
tcgccaggtcttcacacgctatggaaagtgc

SEQ ID NO: 19626 - DNA, 31 bp, Homo sapiens
  chr12:50472154-50472185
  hypo
tttggggagaagtccccgcactcccccagct

SEQ ID NO: 19627 - DNA, 31 bp, Homo sapiens
  chr12:50499947-50499978
  hypo
atggggcaggacctgtcgggagggacacaga

SEQ ID NO: 19628 - DNA, 43 bp, Homo sapiens; identical to SEQ ID NO: 4674
  chr12:50677370-50677413
  hypo

SEQ ID NO: 19629 - DNA, 25 bp, Homo sapiens
  chr12:50897741-50897766
  hypo
ttttcttttctttagacggagtgtt

SEQ ID NO: 19630 - DNA, 25 bp, Homo sapiens
  chr12:51376083-51376108
  hypo
cctgcatcagaatcaccgaagctgc

SEQ ID NO: 19631 - DNA, 31 bp, Homo sapiens
  chr12:51421370-51421401
  hypo
agtttcagcctcacaccgtatcttttgctct

SEQ ID NO: 19632 - DNA, 49 bp, Homo sapiens
  chr12:51421438-51421487
  hypo
tggcctaacaaattaccgtaattttctgcaatgtcgtttacagccacca

SEQ ID NO: 19633 - DNA, 55 bp, Homo sapiens
  chr12:51421488-51421543
  hypo
aaacattagatcctcccgccaccctcactccccgacccctcgcactgcttacagc

SEQ ID NO: 19634 - DNA, 31 bp, Homo sapiens
  chr12:51421555-51421586
  hypo
tgagcttctttattcacgtaaaaacagctag

SEQ ID NO: 19635 - DNA, 31 bp, Homo sapiens
  chr12:51421615-51421646
  hypo
gaaatgaggaaaggagcgtgaactgcaaaga

SEQ ID NO: 19636 - DNA, 31 bp, Homo sapiens
  chr12:51421649-51421680
  hypo
aaatccaaataaagtgcgaagtaaaaacaaa

SEQ ID NO: 19637 - DNA, 18 bp, Homo sapiens
  chr12:51441350-51441368
  hypo
gggcgacagagcaaaact

SEQ ID NO: 19638 - DNA, 51 bp, Homo sapiens
  chr12:51478164-51478215
  hypo
atagaaaaggggttttcgccatgttgccccggctggtcttgcactcctggg

SEQ ID NO: 19639 - DNA, 28 bp, Homo sapiens
  chr12:51565446-51565474
  hypo
caccgcacccggccgaaaggagattttt

SEQ ID NO: 19640 - DNA, 31 bp, Homo sapiens
  chr12:51565517-51565548
  hypo
catcttaagttttcttcgtcactttttcatt

SEQ ID NO: 19641 - DNA, 31 bp, Homo sapiens
  chr12:51919653-51919684
  hypo
cactggtttctatggccgtgtcatgtcatgg

SEQ ID NO: 19642 - DNA, 38 bp, Homo sapiens; identical to SEQ ID NO: 4675
  chr12:52345763-52345801
  hypo

SEQ ID NO: 19643 - DNA, 35 bp, Homo sapiens
  chr12:52462475-52462510
  hypo
aagaatgcctcctggccggtcgcggtggctcacgc

SEQ ID NO: 19644 - DNA, 31 bp, Homo sapiens
  chr12:52467637-52467668
  hypo
ttctgaggaactggatcgtgccctgcgcaag

SEQ ID NO: 19645 - DNA, 57 bp, Homo sapiens
  chr12:52477807-52477864
  hypo
gtatttactgagtgaccgctctgtgccaggcatactctgggacgtggggatgaggag

SEQ ID NO: 19646 - DNA, 31 bp, Homo sapiens
  chr12:52539825-52539856
  hypo
agacgatagaggtgtgcggtgctcctgggct

SEQ ID NO: 19647 - DNA, 31 bp, Homo sapiens
  chr12:52566972-52567003
  hypo
aggggcagctcagtgccgctcccagcacttg

SEQ ID NO: 19648 - DNA, 31 bp, Homo sapiens
  chr12:52567343-52567374
  hypo
tgtccaggctgcttctcgtgccctgtgtggt

SEQ ID NO: 19649 - DNA, 31 bp, Homo sapiens
  chr12:52567612-52567643
  hypo
acagtcactttgtccccggggtgagcggaga

SEQ ID NO: 19650 - DNA, 31 bp, Homo sapiens
  chr12:52635223-52635254
  hypo
ctaagtcctgatgtcccgtctggtccctaca

SEQ ID NO: 19651 - DNA, 31 bp, Homo sapiens
  chr12:52742300-52742331
  hypo
gggggcgccgagaccccgctccatacacctg

SEQ ID NO: 19652 - DNA, 60 bp, Homo sapiens
  chr12:52750115-52750175
  hypo
agggcgggacgcggggcgtctcgggcaggggtgaaggagggcagccggggcccaggcgtg

SEQ ID NO: 19653 - DNA, 31 bp, Homo sapiens
  chr12:52793640-52793671
  hypo
tgtgtctgtggcatggcgtggctctcattag

SEQ ID NO: 19654 - DNA, 31 bp, Homo sapiens
  chr12:53183639-53183670
  hypo
aagagcctgaaattctcgtgactgggcttgg

SEQ ID NO: 19655 - DNA, 84 bp, Homo sapiens
  chr12:53214327-53214411
  hypo
aggtgataccaagagacgcatggagggaggagcagtaagatttggcgagtgatggaggcaggagtaggacggaggtagcttctg

SEQ ID NO: 19656 - DNA, 38 bp, Homo sapiens
  chr12:53214493-53214531
  hypo
aggtcacttctgtgagcgtgaatcgcctcacctgtaaa

SEQ ID NO: 19657 - DNA, 31 bp, Homo sapiens
  chr12:53215666-53215697
  hypo
ggctggacgtcttgaccgtagtggtcttccg

SEQ ID NO: 19658 - DNA, 31 bp, Homo sapiens; identical to SEQ ID NO: 4676
  chr12:53272442-53272473
  hypo

SEQ ID NO: 19659 - DNA, 59 bp, Homo sapiens
  chr12:53547965-53548024
  hypo
gagatatggaccaaaacgaacaagacgtgatcttgagggagtttcgttatggctctagc

SEQ ID NO: 19660 - DNA, 31 bp, Homo sapiens
  chr12:53641241-53641272
  hypo
cactaagaattcaggccgggtgcagtggctc

SEQ ID NO: 19661 - DNA, 73 bp, Homo sapiens
  chr12:53662983-53663056
  hypo
agtgtctaccccacagcgtcctcccctctacctggaacgaattctctttgtcttactgcggaatgctgctgca

SEQ ID NO: 19662 - DNA, 31 bp, Homo sapiens
  chr12:53663064-53663095
  hypo
cccagaggccacactccgccttgctcagccc

SEQ ID NO: 19663 - DNA, 31 bp, Homo sapiens
  chr12:53663107-53663138
  hypo
ttggtgcagtgctctcgcgaggctgctcccc

SEQ ID NO: 19664 - DNA, 23 bp, Homo sapiens
  chr12:53667919-53667942
  hypo
aagccaccgcgctgggcaagaac

SEQ ID NO: 19665 - DNA, 58 bp, Homo sapiens
  chr12:53668185-53668243
  hypo
aactgaagcagctgcacgagggatggaatgcagtggatcggtgcgagaagccaaggat

SEQ ID NO: 19666 - DNA, 17 bp, Homo sapiens
  chr12:53780780-53780797
  hypo
ctggagtgcagtggtgc

SEQ ID NO: 19667 - DNA, 31 bp, Homo sapiens
  chr12:53796887-53796918
  hypo
tactgcactcccactccgtctcaagaaagaa

SEQ ID NO: 19668 - DNA, 31 bp, Homo sapiens
  chr12:53822881-53822912
  hypo
aagagggaggaagagccgggcacggtggctc

SEQ ID NO: 19669 - DNA, 44 bp, Homo sapiens
  chr12:53823276-53823320
  hypo
ccagaatgtgctcattcgggaagatggatcgtgtgccattggag

SEQ ID NO: 19670 - DNA, 68 bp, Homo sapiens
  chr12:53832349-53832417
  hypo
ccaagatcgtgccactgcactccagcctggacaacggggccagggcgagactccgtctcaaaaaaaaa

SEQ ID NO: 19671 - DNA, 23 bp, Homo sapiens
  chr12:53885487-53885510
  hypo
attacaggcgtgagccaccgcgc

SEQ ID NO: 19672 - DNA, 29 bp, Homo sapiens
  chr12:53966366-53966395
  hypo
gtagcctccccttacccgtggtttcactt

SEQ ID NO: 19673 - DNA, 31 bp, Homo sapiens
  chr12:54051790-54051821
  hypo
ttctgtctcagtctctcgagtagctgggatt

SEQ ID NO: 19674 - DNA, 126 bp, Homo sapiens; identical to SEQ ID NO: 4687
  chr12:54399540-54399666
  hypo

SEQ ID NO: 19675 - DNA, 27 bp, Homo sapiens
  chr12:54720205-54720232
  hypo
gagccactgcgccgggccaggaattct

SEQ ID NO: 19676 - DNA, 31 bp, Homo sapiens
  chr12:54720272-54720303
  hypo
acatgagaattgtggtcgctaaagggctgta

SEQ ID NO: 19677 - DNA, 42 bp, Homo sapiens; identical to SEQ ID NO: 4694
  chr12:56390555-56390597
  hypo

SEQ ID NO: 19678 - DNA, 31 bp, Homo sapiens; identical to SEQ ID NO: 4695
  chr12:56390676-56390707
  hypo

SEQ ID NO: 19679 - DNA, 33 bp, Homo sapiens
  chr12:56441276-56441309
  hypo
aacctgccagataggccgggcgcggtggctcac

SEQ ID NO: 19680 - DNA, 43 bp, Homo sapiens; identical to SEQ ID NO: 4697
  chr12:56472776-56472819
  hypo

SEQ ID NO: 19681 - DNA, 60 bp, Homo sapiens
  chr12:56601394-56601454
  hypo
acatgaaatcactccacgtcctgagtgacactcactctaggatctcgttgtattcaattg

SEQ ID NO: 19682 - DNA, 70 bp, Homo sapiens
  chr12:56601473-56601543
  hypo
gttggggttgacactgcggattgcacgcatgtatgcctttagcagctggatgtctcgcttctgttgtggg

SEQ ID NO: 19683 - DNA, 31 bp, Homo sapiens; identical to SEQ ID NO: 4700
  chr12:56958137-56958168
  hypo

SEQ ID NO: 19684 - DNA, 12 bp, Homo sapiens
  chr12:56976738-56976750
  hypo
gatctgggtttt

SEQ ID NO: 19685 - DNA, 31 bp, Homo sapiens
  chr12:57213866-57213897
  hypo
aaaattgtgatatagtcgtatggtggaaaat

SEQ ID NO: 19686 - DNA, 31 bp, Homo sapiens
  chr12:57403584-57403615
  hypo
taaatctgatactcatcgtgcaaagcactgt

SEQ ID NO: 19687 - DNA, 31 bp, Homo sapiens
  chr12:57422731-57422762
  hypo
tggcccccccatcatgcgagtcagaggactt

SEQ ID NO: 19688 - DNA, 31 bp, Homo sapiens
  chr12:57431636-57431667
  hypo
ccccatggggtcttaccggtctcccccattc

SEQ ID NO: 19689 - DNA, 43 bp, Homo sapiens
  chr12:57431669-57431712
  hypo
gtgaggccaggtgctccggctcagcaatcggtacctttccagg

SEQ ID NO: 19690 - DNA, 31 bp, Homo sapiens
  chr12:57431714-57431745
  hypo
gggcccataaccctggcggtgggcatagcct

SEQ ID NO: 19691 - DNA, 23 bp, Homo sapiens
  chr12:57462656-57462679
  hypo
tttctttacgtctgaacaaaatg

SEQ ID NO: 19692 - DNA, 75 bp, Homo sapiens
  chr12:57499241-57499316
  hypo
ggggaatacctggtgacgagggttctcaggacttcatccagccggccagtcagcgatgcccgggtcttgggctca

SEQ ID NO: 19693 - DNA, 31 bp, Homo sapiens
  chr12:57539050-57539081
  hypo
cagaacatcttggccacgtacctgagtgggg

SEQ ID NO: 19694 - DNA, 31 bp, Homo sapiens
  chr12:57552057-57552088
  hypo
agcctcgcatccctaacgtctcctgacccat

SEQ ID NO: 19695 - DNA, 46 bp, Homo sapiens
  chr12:57571126-57571172
  hypo
tcccaccctctacctacgatcccaccacagtcgctccctgagggcc

SEQ ID NO: 19696 - DNA, 36 bp, Homo sapiens
  chr12:57572147-57572183
  hypo
tgccatttactcagcccgttacgacggctctggcca

SEQ ID NO: 19697 - DNA, 31 bp, Homo sapiens
  chr12:57572885-57572916
  hypo
aaggcagagtcccagtcgggagggtcccgat

SEQ ID NO: 19698 - DNA, 31 bp, Homo sapiens
  chr12:57574072-57574103
  hypo
cctgggccagactccccggcagtgactcccc

SEQ ID NO: 19699 - DNA, 31 bp, Homo sapiens
  chr12:57582407-57582438
  hypo
ccctcgtcccagaggacgtgaccccctggct

SEQ ID NO: 19700 - DNA, 31 bp, Homo sapiens
  chr12:57583523-57583554
  hypo
ttagggaactggagaacggagctggcttttg

SEQ ID NO: 19701 - DNA, 31 bp, Homo sapiens
  chr12:57583577-57583608
  hypo
cactgtgcctaaggatcgcctaggagcaaga

SEQ ID NO: 19702 - DNA, 31 bp, Homo sapiens
  chr12:57583612-57583643
  hypo
gtggagtcccctgccccgccctgggcctagc

SEQ ID NO: 19703 - DNA, 59 bp, Homo sapiens
  chr12:57583647-57583706
  hypo
tgacaagctctgggaccgaggacccagggctcaccatccaatgccggtggtccaaggac

SEQ ID NO: 19704 - DNA, 31 bp, Homo sapiens
  chr12:57591466-57591497
  hypo
gcgaccaacactggcccgcctcagatgactg

SEQ ID NO: 19705 - DNA, 42 bp, Homo sapiens
  chr12:57593154-57593196
  hypo
tgtcttccatgccctgcgccagccagacggtgagcaggcaag

SEQ ID NO: 19706 - DNA, 31 bp, Homo sapiens
  chr12:57596872-57596903
  hypo
ggatgggccttgggctcgggactgtggcact

SEQ ID NO: 19707 - DNA, 70 bp, Homo sapiens
  chr12:57596952-57597022
  hypo
gtccttcccagcccctcggccctgctccgagagtgagttctcctgtgccaacggccgctgcatcgcgggg

SEQ ID NO: 19708 - DNA, 31 bp, Homo sapiens
  chr12:57881145-57881176
  hypo
actctaaaactctgaccgttaagagcttgca

SEQ ID NO: 19709 - DNA, 97 bp, Homo sapiens
  chr12:57881229-57881326
  hypo
aacaagagaagcagccgcggcttcagtcaccgccctccagcagcgtaagaggataaaagtgcgacttgccctaaaacctaaacgtctcttctggatc

SEQ ID NO: 19710 - DNA, 31 bp, Homo sapiens
  chr12:57986078-57986109
  hypo
gccattgcccatcttccgtcaggtctggagt

SEQ ID NO: 19711 - DNA, 31 bp, Homo sapiens; identical to SEQ ID NO: 4706
  chr12:59313599-59313630
  hypo

SEQ ID NO: 19712 - DNA, 42 bp, Homo sapiens; identical to SEQ ID NO: 4707
  chr12:59314238-59314280
  hypo

SEQ ID NO: 19713 - DNA, 31 bp, Homo sapiens
  chr12:63014932-63014963
  hypo
ctctctaactggtctccgtggcttctcttgc

SEQ ID NO: 19714 - DNA, 31 bp, Homo sapiens
  chr12:63014964-63014995
  hypo
ttcctccagtcttgcccgtgaaccttgatta

SEQ ID NO: 19715 - DNA, 42 bp, Homo sapiens
  chr12:63015048-63015090
  hypo
ttgagttagaggctctcgtaacacctgcgtcttcccctttgt

SEQ ID NO: 19716 - DNA, 41 bp, Homo sapiens
  chr12:63033700-63033741
  hypo
ccgtgcccggccaggccacattcttacgagttaattcttct

SEQ ID NO: 19717 - DNA, 57 bp, Homo sapiens
  chr12:63195712-63195769
  hypo
gcgcagggaggctgcccgggtcagagtccggctgttggcgggcgtgttctcaggctc

SEQ ID NO: 19718 - DNA, 31 bp, Homo sapiens
  chr12:63318526-63318557
  hypo
aagaaatgcaattagccgggtgtggtggctc

SEQ ID NO: 19719 - DNA, 34 bp, Homo sapiens
  chr12:63397757-63397791
  hypo
tatcacagcaggtgcacgccgagaaaagggagaa

SEQ ID NO: 19720 - DNA, 158 bp, Homo sapiens; identical to SEQ ID NO: 4708
  chr12:64237614-64237772
  hypo

SEQ ID NO: 19721 - DNA, 52 bp, Homo sapiens; identical to SEQ ID NO: 4709
  chr12:64237892-64237944
  hypo

SEQ ID NO: 19722 - DNA, 111 bp, Homo sapiens; identical to SEQ ID NO: 4710
  chr12:64238194-64238305
  hypo

SEQ ID NO: 19723 - DNA, 22 bp, Homo sapiens
  chr12:64317643-64317665
  hypo
tgggcatggtggctcacgcctg

SEQ ID NO: 19724 - DNA, 37 bp, Homo sapiens
  chr12:64373752-64373789
  hypo
tgcctctagctgcagccgcctgcggccccatggcagg

SEQ ID NO: 19725 - DNA, 31 bp, Homo sapiens
  chr12:64373791-64373822
  hypo
tcatgcagtgtggggccgagtgcaccatggg

SEQ ID NO: 19726 - DNA, 31 bp, Homo sapiens
  chr12:64383904-64383935
  hypo
taaccaggactgagaacggtatctgaaaaat

SEQ ID NO: 19727 - DNA, 31 bp, Homo sapiens
  chr12:64458621-64458652
  hypo
gctccatcgcaggaaccgccccattcttacc

SEQ ID NO: 19728 - DNA, 31 bp, Homo sapiens
  chr12:64521628-64521659
  hypo
gtgaatgtctaggcaacgaaaaagaggagag

SEQ ID NO: 19729 - DNA, 62 bp, Homo sapiens
  chr12:64521661-64521723
  hypo
accccctccagtaaggcgtcctggcaggaccagtgatggccattgcccgctccaccctccac

SEQ ID NO: 19730 - DNA, 31 bp, Homo sapiens
  chr12:64521873-64521904
  hypo
actccctcaagaagatcgacagccctcccat

SEQ ID NO: 19731 - DNA, 31 bp, Homo sapiens
  chr12:64543910-64543941
  hypo
cttgtgtgcatgtgcacgtgtgtgggtggga

SEQ ID NO: 19732 - DNA, 62 bp, Homo sapiens
  chr12:64783040-64783102
  hypo
taaatctattcctggacgaaaggggtacaggaacagcacccgaaaaccggcgacaggctgtg

SEQ ID NO: 19733 - DNA, 41 bp, Homo sapiens
  chr12:64797362-64797403
  hypo
tgacatttagtagcatcgaaagatcccgtgagtaggacttc

SEQ ID NO: 19734 - DNA, 23 bp, Homo sapiens
  chr12:64797449-64797472
  hypo
aaaataaattttggaccggacac

SEQ ID NO: 19735 - DNA, 31 bp, Homo sapiens; identical to SEQ ID NO: 4713
  chr12:64845174-64845205
  hypo

SEQ ID NO: 19736 - DNA, 52 bp, Homo sapiens; identical to SEQ ID NO: 4714
  chr12:64845222-64845274
  hypo

SEQ ID NO: 19737 - DNA, 50 bp, Homo sapiens; identical to SEQ ID NO: 4715
  chr12:64845320-64845370
  hypo

SEQ ID NO: 19738 - DNA, 36 bp, Homo sapiens; identical to SEQ ID NO: 4716
  chr12:64845434-64845470
  hypo

SEQ ID NO: 19739 - DNA, 63 bp, Homo sapiens; identical to SEQ ID NO: 4717
  chr12:64845507-64845570
  hypo

SEQ ID NO: 19740 - DNA, 33 bp, Homo sapiens
  chr12:65030350-65030383
  hypo
caaaaattaaagtagccgggcgcggtggctcac

SEQ ID NO: 19741 - DNA, 48 bp, Homo sapiens
  chr12:65516499-65516547
  hypo
ctcctgcctaattcctcggatgcacaaagaaaacggaagcaaaagggt

SEQ ID NO: 19742 - DNA, 31 bp, Homo sapiens
  chr12:65557470-65557501
  hypo
agcctgggcaacagagcgaagtgataacatc

SEQ ID NO: 19743 - DNA, 24 bp, Homo sapiens
  chr12:65562062-65562086
  hypo
tttgactaacgtttttctgtacag

SEQ ID NO: 19744 - DNA, 31 bp, Homo sapiens
  chr12:68978218-68978249
  hypo
caaatctcatagtctccgaggtcactaagag

SEQ ID NO: 19745 - DNA, 31 bp, Homo sapiens
  chr12:68978253-68978284
  hypo
atttccttgccaggagcggtggctcacacct

SEQ ID NO: 19746 - DNA, 24 bp, Homo sapiens
  chr12:68978597-68978621
  hypo
ctttttttccgttttcactagaaa

SEQ ID NO: 19747 - DNA, 28 bp, Homo sapiens
  chr12:69225857-69225885
  hypo
aacaacaaaatctcgtttttcaggttaa

SEQ ID NO: 19748 - DNA, 40 bp, Homo sapiens; identical to SEQ ID NO: 4725
  chr12:69241506-69241546
  hypo

SEQ ID NO: 19749 - DNA, 31 bp, Homo sapiens
  chr12:69644223-69644254
  hypo
gtggaaaagtaggtttcgttatatagaaatt

SEQ ID NO: 19750 - DNA, 31 bp, Homo sapiens
  chr12:69644282-69644313
  hypo
cctatatttgggaggccgaggcaggaggatt

SEQ ID NO: 19751 - DNA, 12 bp, Homo sapiens
  chr12:69644314-69644326
  hypo
cttgaactcagg

SEQ ID NO: 19752 - DNA, 31 bp, Homo sapiens
  chr12:69999223-69999254
  hypo
tttcttgccagggctccgaataatagaagtc

SEQ ID NO: 19753 - DNA, 31 bp, Homo sapiens
  chr12:69999284-69999315
  hypo
aaagtctgctgtgtgccgtattagcatatta

SEQ ID NO: 19754 - DNA, 23 bp, Homo sapiens
  chr12:69999349-69999372
  hypo
aatcacaattactggccgggcgc

SEQ ID NO: 19755 - DNA, 31 bp, Homo sapiens
  chr12:70023345-70023376
  hypo
agaactccaatggcttcgtactgcccctgga

SEQ ID NO: 19756 - DNA, 31 bp, Homo sapiens
  chr12:70173244-70173275
  hypo
ttgaactccaattactcgaacattttctctt

SEQ ID NO: 19757 - DNA, 24 bp, Homo sapiens
  chr12:70640966-70640990
  hypo
acgaagttttgctcgtcgctgagg

SEQ ID NO: 19758 - DNA, 31 bp, Homo sapiens
  chr12:70648186-70648217
  hypo
cccaggtgggatggagcgggatgtcagaaaa

SEQ ID NO: 19759 - DNA, 31 bp, Homo sapiens
  chr12:70648238-70648269
  hypo
ggtgcccaatttaaaacgtatgaattattta

SEQ ID NO: 19760 - DNA, 31 bp, Homo sapiens
  chr12:70648287-70648318
  hypo
taatatttttgtactgcggttcaccatgaat

SEQ ID NO: 19761 - DNA, 31 bp, Homo sapiens
  chr12:70648327-70648358
  hypo
tgaagaagaagaaaccgcggataaggggaga

SEQ ID NO: 19762 - DNA, 31 bp, Homo sapiens
  chr12:70765936-70765967
  hypo
tgaggaactatgagggcgaaagtgaggttgg

SEQ ID NO: 19763 - DNA, 36 bp, Homo sapiens
  chr12:70766004-70766040
  hypo
agggtcctaaagaacacgatacggactttggatttt

SEQ ID NO: 19764 - DNA, 31 bp, Homo sapiens
  chr12:70766057-70766088
  hypo
aatctgtgacattaagcggggctgaaatatc

SEQ ID NO: 19765 - DNA, 31 bp, Homo sapiens
  chr12:70766111-70766142
  hypo
tgcaaatgatccctctcgctgctgagttgaa

SEQ ID NO: 19766 - DNA, 31 bp, Homo sapiens
  chr12:70954497-70954528
  hypo
gttaccacccacagcacgtacttccttccag

SEQ ID NO: 19767 - DNA, 39 bp, Homo sapiens
  chr12:70954529-70954568
  hypo
aacaaggccttgaaaccgccactccgtcaggtccttgtc

SEQ ID NO: 19768 - DNA, 38 bp, Homo sapiens
  chr12:70954654-70954692
  hypo
accaaaggctgtctgtcgtgttccgattggaccccctg

SEQ ID NO: 19769 - DNA, 31 bp, Homo sapiens
  chr12:72147562-72147593
  hypo
ttggaggcaggccgggcgtggtggctcacac

SEQ ID NO: 19770 - DNA, 29 bp, Homo sapiens
  chr12:72150915-72150944
  hypo
ttgagtcttgccctgtcgcccaggctgaa

SEQ ID NO: 19771 - DNA, 31 bp, Homo sapiens
  chr12:72165404-72165435
  hypo
ttgttatctccctctcgcgttttgcatgaaa

SEQ ID NO: 19772 - DNA, 29 bp, Homo sapiens
  chr12:72165474-72165503
  hypo
caggcacagtggctcacgcctgtaatccc

SEQ ID NO: 19773 - DNA, 20 bp, Homo sapiens
  chr12:74691583-74691603
  hypo
ccaccgcgcccggcctactc

SEQ ID NO: 19774 - DNA, 31 bp, Homo sapiens
  chr12:76417874-76417905
  hypo
actatactgttcttaccgttgaaaaagaagt

SEQ ID NO: 19775 - DNA, 43 bp, Homo sapiens; identical to SEQ ID NO: 4735
  chr12:77272815-77272858
  hypo

SEQ ID NO: 19776 - DNA, 28 bp, Homo sapiens
  chr12:77317341-77317369
  hypo
gtctctgttgcccacacgggagggcagt

SEQ ID NO: 19777 - DNA, 33 bp, Homo sapiens
  chr12:77453496-77453529
  hypo
gggaggccaaggcaggcggatcacgaggtcagg

SEQ ID NO: 19778 - DNA, 31 bp, Homo sapiens; identical to SEQ ID NO: 4737
  chr12:80083437-80083468
  hypo

SEQ ID NO: 19779 - DNA, 78 bp, Homo sapiens; identical to SEQ ID NO: 4738
  chr12:80084656-80084734
  hypo

SEQ ID NO: 19780 - DNA, 72 bp, Homo sapiens; identical to SEQ ID NO: 4739
  chr12:80084905-80084977
  hypo

SEQ ID NO: 19781 - DNA, 109 bp, Homo sapiens; identical to SEQ ID NO: 4740
  chr12:80084980-80085089
  hypo

SEQ ID NO: 19782 - DNA, 38 bp, Homo sapiens; identical to SEQ ID NO: 4743
  chr12:83080990-83081028
  hypo

SEQ ID NO: 19783 - DNA, 192 bp, Homo sapiens; identical to SEQ ID NO: 4744
  chr12:83081030-83081222
  hypo

SEQ ID NO: 19784 - DNA, 41 bp, Homo sapiens
  chr12:89020038-89020079
  hypo
aacaaatccggctgggcgaggtggctcacgcctgtaatgtc

SEQ ID NO: 19785 - DNA, 31 bp, Homo sapiens; identical to SEQ ID NO: 4754
  chr12:89747141-89747172
  hypo

SEQ ID NO: 19786 - DNA, 34 bp, Homo sapiens; identical to SEQ ID NO: 4756
  chr12:89747338-89747372
  hypo

SEQ ID NO: 19787 - DNA, 66 bp, Homo sapiens; identical to SEQ ID NO: 4757
  chr12:89747400-89747466
  hypo

SEQ ID NO: 19788 - DNA, 42 bp, Homo sapiens; identical to SEQ ID NO: 4758
  chr12:89747549-89747591
  hypo

SEQ ID NO: 19789 - DNA, 24 bp, Homo sapiens
  chr12:89789130-89789154
  hypo
tatggggagggtaggccgggcgcg

SEQ ID NO: 19790 - DNA, 31 bp, Homo sapiens
  chr12:89919632-89919663
  hypo
ccccccacctccaacccgtccttaccgtggc

SEQ ID NO: 19791 - DNA, 48 bp, Homo sapiens
  chr12:90313457-90313505
  hypo
ttctccaacacagacccggtgagaggtactgggcgatgaggaagtaca

SEQ ID NO: 19792 - DNA, 31 bp, Homo sapiens
  chr12:90313511-90313542
  hypo
actccatgagaggcaccgggcctcaggtgga

SEQ ID NO: 19793 - DNA, 157 bp, Homo sapiens
  chr12:90313544-90313701
  hypo
aggcctcctccttggccgggcgctgggcgggaggcgggagcgagcgtgctagccaagcatgtgggccgcgctgaggcttgacgaggccggcgtcccttttcctgaggcacgtgcgccgccgccgccatcatgccgtgcgcgccgccctaatgctttt

SEQ ID NO: 19794 - DNA, 45 bp, Homo sapiens
  chr12:93710943-93710988
  hypo
tcatgtcttctaacatcgacccaggactcccgcttctctttacac

SEQ ID NO: 19795 - DNA, 31 bp, Homo sapiens
  chr12:93710993-93711024
  hypo
actgttctttatgtgccgctgtttttctctt

SEQ ID NO: 19796 - DNA, 34 bp, Homo sapiens
  chr12:93711080-93711114
  hypo
tttacagtccaatgaccgccgtgggtcataatcc

SEQ ID NO: 19797 - DNA, 25 bp, Homo sapiens
  chr12:93720902-93720927
  hypo
agcaaaactccgtctcaaaaaaaaa

SEQ ID NO: 19798 - DNA, 31 bp, Homo sapiens
  chr12:93738882-93738913
  hypo
acatgacatatgccaccgcaagtacattcat

SEQ ID NO: 19799 - DNA, 24 bp, Homo sapiens
  chr12:93807642-93807666
  hypo
agtcatagtcctgagccgggtgcg

SEQ ID NO: 19800 - DNA, 37 bp, Homo sapiens; identical to SEQ ID NO: 4761
  chr12:94541896-94541933
  hypo

SEQ ID NO: 19801 - DNA, 169 bp, Homo sapiens; identical to SEQ ID NO: 4762
  chr12:94542775-94542944
  hypo

SEQ ID NO: 19802 - DNA, 103 bp, Homo sapiens; identical to SEQ ID NO: 4763
  chr12:94542961-94543064
  hypo

SEQ ID NO: 19803 - DNA, 416 bp, Homo sapiens; identical to SEQ ID NO: 4764
  chr12:94543068-94543484
  hypo

SEQ ID NO: 19804 - DNA, 144 bp, Homo sapiens; identical to SEQ ID NO: 4765
  chr12:94543491-94543635
  hypo

SEQ ID NO: 19805 - DNA, 99 bp, Homo sapiens; identical to SEQ ID NO: 4766
  chr12:94543642-94543741
  hypo

SEQ ID NO: 19806 - DNA, 172 bp, Homo sapiens; identical to SEQ ID NO: 4767
  chr12:94543745-94543917
  hypo

SEQ ID NO: 19807 - DNA, 77 bp, Homo sapiens; identical to SEQ ID NO: 4768
  chr12:94543936-94544013
  hypo

SEQ ID NO: 19808 - DNA, 30 bp, Homo sapiens; identical to SEQ ID NO: 12076
  chr12:95492651-95492681
  hypo

SEQ ID NO: 19809 - DNA, 31 bp, Homo sapiens
  chr12:95802944-95802975
  hypo
aagtgcctgagttatacggctacgtggctac

SEQ ID NO: 19810 - DNA, 17 bp, Homo sapiens
  chr12:95863738-95863755
  hypo
tggagtgttgctctgtc

SEQ ID NO: 19811 - DNA, 28 bp, Homo sapiens
  chr12:95901842-95901870
  hypo
caccgcacccagccgattcacatattct

SEQ ID NO: 19812 - DNA, 31 bp, Homo sapiens
  chr12:96043430-96043461
  hypo
aatgttttctgcaggccgggcatggtggctc

SEQ ID NO: 19813 - DNA, 31 bp, Homo sapiens
  chr12:96437260-96437291
  hypo
tgtagtcccagctactcgggaggctgaggca

SEQ ID NO: 19814 - DNA, 31 bp, Homo sapiens
  chr12:96437474-96437505
  hypo
agagaataaaagtaggcgctgcagcaattct

SEQ ID NO: 19815 - DNA, 31 bp, Homo sapiens
  chr12:98815582-98815613
  hypo
caagccactgattgagcgatataatggactc

SEQ ID NO: 19816 - DNA, 19 bp, Homo sapiens
  chr12:98825880-98825899
  hypo
gaattccagctgggggcgg

SEQ ID NO: 19817 - DNA, 18 bp, Homo sapiens
  chr12:98826138-98826156
  hypo
agccggggtgacagagtg

SEQ ID NO: 19818 - DNA, 39 bp, Homo sapiens
  chr12:98895874-98895913
  hypo
aagtttatagccaggcgcggtggctcacgcctgtaatcc

SEQ ID NO: 19819 - DNA, 46 bp, Homo sapiens
  chr12:98947860-98947906
  hypo
gtgctaggattacaggcgtgagccaccgcgccgggccaatatctag

SEQ ID NO: 19820 - DNA, 25 bp, Homo sapiens
  chr12:98948340-98948365
  hypo
agtgagactccgtctcaaaaaaaaa

SEQ ID NO: 19821 - DNA, 31 bp, Homo sapiens
  chr12:98948387-98948418
  hypo
tttagtgaagctattgcgtaccagtttatga

SEQ ID NO: 19822 - DNA, 31 bp, Homo sapiens
  chr12:98983723-98983754
  hypo
tgaggtggttgcctggcgggatctgctgatt

SEQ ID NO: 19823 - DNA, 31 bp, Homo sapiens
  chr12:98983770-98983801
  hypo
gtccactttgggaggccgaggcaggtggatc

SEQ ID NO: 19824 - DNA, 7 bp, Homo sapiens
  chr12:98983802-98983809
  hypo
cctgagg

SEQ ID NO: 19825 - DNA, 31 bp, Homo sapiens
  chr12:100352715-100352746
  hypo
atgttcaataggacaccggggataacatgtc

SEQ ID NO: 19826 - DNA, 31 bp, Homo sapiens
  chr12:100710890-100710921
  hypo
aagaaaaaatttcttccgaatattcttccct

SEQ ID NO: 19827 - DNA, 27 bp, Homo sapiens
  chr12:100712398-100712425
  hypo
tgggcgtggccacgtgtgcctttttct

SEQ ID NO: 19828 - DNA, 31 bp, Homo sapiens
  chr12:102457127-102457158
  hypo
aaaggaagatttggcccgcaatcagtctgat

SEQ ID NO: 19829 - DNA, 31 bp, Homo sapiens; identical to SEQ ID NO: 4778
  chr12:104322965-104322996
  hypo

SEQ ID NO: 19830 - DNA, 45 bp, Homo sapiens; identical to SEQ ID NO: 4779
  chr12:104323001-104323046
  hypo

SEQ ID NO: 19831 - DNA, 129 bp, Homo sapiens; identical to SEQ ID NO: 4780
  chr12:104323047-104323176
  hypo

SEQ ID NO: 19832 - DNA, 173 bp, Homo sapiens; identical to SEQ ID NO: 4781
  chr12:104323184-104323357
  hypo

SEQ ID NO: 19833 - DNA, 19 bp, Homo sapiens
  chr12:104671660-104671679
  hypo
ttttttttttttgagacga

SEQ ID NO: 19834 - DNA, 27 bp, Homo sapiens
  chr12:104692475-104692502
  hypo
tgggcaaccaagcgagactctatctaa

SEQ ID NO: 19835 - DNA, 28 bp, Homo sapiens
  chr12:104695396-104695424
  hypo
gagccaccgtgcccggctgcttttgttg

SEQ ID NO: 19836 - DNA, 31 bp, Homo sapiens
  chr12:104695443-104695474
  hypo
aagctcctaagaatatcgttcactgtaaaag

SEQ ID NO: 19837 - DNA, 31 bp, Homo sapiens
  chr12:104696545-104696576
  hypo
cgtgagccaccgcgcccggccattcccattg

SEQ ID NO: 19838 - DNA, 31 bp, Homo sapiens
  chr12:104696607-104696638
  hypo
gacagataaggagtcacgtctttaactgcac

SEQ ID NO: 19839 - DNA, 106 bp, Homo sapiens; identical to SEQ ID NO: 4786
  chr12:104850237-104850343
  hypo

SEQ ID NO: 19840 - DNA, 162 bp, Homo sapiens; identical to SEQ ID NO: 4787
  chr12:104850374-104850536
  hypo

SEQ ID NO: 19841 - DNA, 204 bp, Homo sapiens; identical to SEQ ID NO: 4788
  chr12:104850577-104850781
  hypo

SEQ ID NO: 19842 - DNA, 286 bp, Homo sapiens; identical to SEQ ID NO: 4789
  chr12:104850787-104851073
  hypo

SEQ ID NO: 19843 - DNA, 137 bp, Homo sapiens; identical to SEQ ID NO: 4790
  chr12:104851077-104851214
  hypo

SEQ ID NO: 19844 - DNA, 31 bp, Homo sapiens; identical to SEQ ID NO: 4791
  chr12:104851218-104851249
  hypo

SEQ ID NO: 19845 - DNA, 313 bp, Homo sapiens; identical to SEQ ID NO: 4796
  chr12:104851694-104852007
  hypo

SEQ ID NO: 19846 - DNA, 31 bp, Homo sapiens
  chr12:105056938-105056969
  hypo
cttccagaggcctgggcgagccctgtctaac

SEQ ID NO: 19847 - DNA, 31 bp, Homo sapiens
  chr12:105955872-105955903
  hypo
gagaagggtggattgccgggagaaagtgtgg

SEQ ID NO: 19848 - DNA, 31 bp, Homo sapiens
  chr12:105955913-105955944
  hypo
agactgtaggtggcctcgccattgggtcaag

SEQ ID NO: 19849 - DNA, 59 bp, Homo sapiens
  chr12:105955964-105956023
  hypo
gtatggagggggcacacgggccttctcaggcagcccaagaaggacgaggccttatagga

SEQ ID NO: 19850 - DNA, 31 bp, Homo sapiens
  chr12:105956046-105956077
  hypo
ccagaaagggccactccgtcaccagccttgt

SEQ ID NO: 19851 - DNA, 37 bp, Homo sapiens
  chr12:106460687-106460724
  hypo
cttcaggtactggggccggggccggttctggagcccc

SEQ ID NO: 19852 - DNA, 52 bp, Homo sapiens
  chr12:106460753-106460805
  hypo
tgcagagacgcagctgcggatgcgctggcgggcagggcgattctcctgcaaa

SEQ ID NO: 19853 - DNA, 31 bp, Homo sapiens; identical to SEQ ID NO: 4803
  chr12:106532782-106532813
  hypo

SEQ ID NO: 19854 - DNA, 31 bp, Homo sapiens
  chr12:106537677-106537708
  hypo
gctccaacccctatcccgagctcatgtcaat

SEQ ID NO: 19855 - DNA, 181 bp, Homo sapiens; identical to SEQ ID NO: 4806
  chr12:106640991-106641172
  hypo

SEQ ID NO: 19856 - DNA, 59 bp, Homo sapiens; identical to SEQ ID NO: 4807
  chr12:106641197-106641256
  hypo

SEQ ID NO: 19857 - DNA, 55 bp, Homo sapiens; identical to SEQ ID NO: 4808
  chr12:106641514-106641569
  hypo

SEQ ID NO: 19858 - DNA, 45 bp, Homo sapiens
  chr12:106881471-106881516
  hypo
acatgtgcatctgtcccgctcaagcctgatcgcttcaaaggtggt

SEQ ID NO: 19859 - DNA, 31 bp, Homo sapiens
  chr12:106881541-106881572
  hypo
aaacataaagaggaagcggaacagtggtagt

SEQ ID NO: 19860 - DNA, 51 bp, Homo sapiens
  chr12:106881610-106881661
  hypo
tgaagggggcagaatgcgtgggtcagctggaataagcgagtcaatactgag

SEQ ID NO: 19861 - DNA, 44 bp, Homo sapiens; identical to SEQ ID NO: 4809
  chr12:107167935-107167979
  hypo

SEQ ID NO: 19862 - DNA, 59 bp, Homo sapiens; identical to SEQ ID NO: 4810
  chr12:107167981-107168040
  hypo

SEQ ID NO: 19863 - DNA, 190 bp, Homo sapiens; identical to SEQ ID NO: 4811
  chr12:107168227-107168417
  hypo

SEQ ID NO: 19864 - DNA, 65 bp, Homo sapiens
  chr12:107436702-107436767
  hypo
tacaaagtccagctgacggaattacctggagtccacgtaactgtgctcaccgtagagaaaaagca

SEQ ID NO: 19865 - DNA, 42 bp, Homo sapiens
  chr12:107436789-107436831
  hypo
agctacagggctactacgctatgccatcgtagaattggaact

SEQ ID NO: 19866 - DNA, 42 bp, Homo sapiens
  chr12:107436840-107436882
  hypo
gggtgtcttgctctggcggtgagtagccgtgactctccttca

SEQ ID NO: 19867 - DNA, 31 bp, Homo sapiens
  chr12:108012257-108012288
  hypo
cgcacatgcacacacacgtgcacacacacac

SEQ ID NO: 19868 - DNA, 33 bp, Homo sapiens
  chr12:108963689-108963722
  hypo
aaaacattcatccagccgggcgcagtggctcac

SEQ ID NO: 19869 - DNA, 29 bp, Homo sapiens
  chr12:109107871-109107900
  hypo
aaagaacaacctgggccgggcacagtggc

SEQ ID NO: 19870 - DNA, 31 bp, Homo sapiens
  chr12:109208576-109208607
  hypo
actgaagtcggggtgccgaggggaggcaaag

SEQ ID NO: 19871 - DNA, 31 bp, Homo sapiens
  chr12:109506483-109506514
  hypo
taacttttttaaggtccgacttctccatcaa

SEQ ID NO: 19872 - DNA, 31 bp, Homo sapiens
  chr12:109520626-109520657
  hypo
cgatttctcttccacccgcagctccctcagt

SEQ ID NO: 19873 - DNA, 31 bp, Homo sapiens
  chr12:109717148-109717179
  hypo
gaagtctcactcaacacgggcaggcattgcg

SEQ ID NO: 19874 - DNA, 31 bp, Homo sapiens
  chr12:109717328-109717359
  hypo
cgcttccctgtccagccggcaacttcgccac

SEQ ID NO: 19875 - DNA, 31 bp, Homo sapiens
  chr12:109873229-109873260
  hypo
aaacttcacttgtctgcgtgtctgatgttgg

SEQ ID NO: 19876 - DNA, 31 bp, Homo sapiens
  chr12:109916249-109916280
  hypo
aatagtctctttaagtcgtgtttcctattct

SEQ ID NO: 19877 - DNA, 31 bp, Homo sapiens
  chr12:109916586-109916617
  hypo
aaaaaacaaagattatcgagaactgatagag

SEQ ID NO: 19878 - DNA, 76 bp, Homo sapiens
  chr12:110019851-110019927
  hypo
tctcctcctacggggccgtctccacggagggcgtgtcacctctctgcgttcctattgaccacgtgagtcagtgagg

SEQ ID NO: 19879 - DNA, 42 bp, Homo sapiens
  chr12:110019982-110020024
  hypo
gagaaaccacccagtgcgcagaggttacgcagtttgtcccag

SEQ ID NO: 19880 - DNA, 31 bp, Homo sapiens
  chr12:110169314-110169345
  hypo
agggcttccagctccacgtgagctgaggcat

SEQ ID NO: 19881 - DNA, 31 bp, Homo sapiens
  chr12:110224373-110224404
  hypo
ggaaatgaactctgctcgggcctcttggggc

SEQ ID NO: 19882 - DNA, 83 bp, Homo sapiens
  chr12:110224629-110224712
  hypo
tggtggtggcccactgcggggagggagggtcaggagggacatcggtgagcctcacagcctgcgcctgccgctctggtggcaga

SEQ ID NO: 19883 - DNA, 31 bp, Homo sapiens
  chr12:110250927-110250958
  hypo
aagatgaggcgggatgcggtggctcacacct

SEQ ID NO: 19884 - DNA, 20 bp, Homo sapiens
  chr12:110323293-110323313
  hypo
ttttttttttttgagacgga

SEQ ID NO: 19885 - DNA, 57 bp, Homo sapiens
  chr12:110353037-110353094
  hypo
acagcctttcaagtcccgcatgctcccttccgttccttggcacgtgcattgctgttg

SEQ ID NO: 19886 - DNA, 31 bp, Homo sapiens
  chr12:110353108-110353139
  hypo
ccagtctgggtagggccgcaggcttaccttc

SEQ ID NO: 19887 - DNA, 31 bp, Homo sapiens
  chr12:110782523-110782554
  hypo
tgctctggctaccaggcgtgagcaggtggtg

SEQ ID NO: 19888 - DNA, 70 bp, Homo sapiens
  chr12:110782587-110782657
  hypo
ccatgtctttgatcttcgtccttgtggggactggcctgcatggcctcggtggcagcgagccctgcagagg

SEQ ID NO: 19889 - DNA, 46 bp, Homo sapiens
  chr12:110782678-110782724
  hypo
gtttgttcccaggttacgtcggcgctgctaccgtgggtgctgctgc

SEQ ID NO: 19890 - DNA, 31 bp, Homo sapiens
  chr12:110782729-110782760
  hypo
ggttcattgctgctgacggtggtccaagagt

SEQ ID NO: 19891 - DNA, 31 bp, Homo sapiens
  chr12:110784091-110784122
  hypo
gctcaagtttgtggcccgcaactacctggaa

SEQ ID NO: 19892 - DNA, 36 bp, Homo sapiens
  chr12:110784842-110784878
  hypo
ctccccaccttacccccgccccgcttggcttcttct

SEQ ID NO: 19893 - DNA, 73 bp, Homo sapiens
  chr12:110784879-110784952
  hypo
taggattgtgatggttcgttctgtttacatcagttttaacgagaggtatgcctgtactcgcttgtgcagaaaa

SEQ ID NO: 19894 - DNA, 31 bp, Homo sapiens
  chr12:110784954-110784985
  hypo
ttgttccagattcaatcgactgggtttatgt

SEQ ID NO: 19895 - DNA, 29 bp, Homo sapiens
  chr12:110915436-110915465
  hypo
aggcgtgagtcaacgcgcccagtcttgtc

SEQ ID NO: 19896 - DNA, 31 bp, Homo sapiens
  chr12:111590541-111590572
  hypo
ttggcaggcaggggtgcggtgctgcgggagc

SEQ ID NO: 19897 - DNA, 131 bp, Homo sapiens; identical to SEQ ID NO: 4824
  chr12:111844274-111844405
  hypo

SEQ ID NO: 19898 - DNA, 31 bp, Homo sapiens; identical to SEQ ID NO: 4825
  chr12:111844407-111844438
  hypo

SEQ ID NO: 19899 - DNA, 93 bp, Homo sapiens; identical to SEQ ID NO: 4826
  chr12:111844495-111844588
  hypo

SEQ ID NO: 19900 - DNA, 42 bp, Homo sapiens
  chr12:112015341-112015383
  hypo
tacaggcatgagccaccgggcccggcccgcatgtttcaatta

SEQ ID NO: 19901 - DNA, 31 bp, Homo sapiens
  chr12:112430857-112430888
  hypo
gtggacgatggcctcacggacctccacagcg

SEQ ID NO: 19902 - DNA, 31 bp, Homo sapiens
  chr12:112628548-112628579
  hypo
cccccaccctagattccgatccccagggaag

SEQ ID NO: 19903 - DNA, 61 bp, Homo sapiens
  chr12:112628600-112628661
  hypo
accacctgcaggaggacggatgtcggaatggtgtcaggctcatcttcggacttcccttcac

SEQ ID NO: 19904 - DNA, 31 bp, Homo sapiens
  chr12:112628678-112628709
  hypo
gacagcagctgctctgcgaaggccatagcca

SEQ ID NO: 19905 - DNA, 39 bp, Homo sapiens; identical to SEQ ID NO: 4829
  chr12:112689850-112689889
  hypo

SEQ ID NO: 19906 - DNA, 18 bp, Homo sapiens
  chr12:112821838-112821856
  hypo
cgggcacagtggctcacg

SEQ ID NO: 19907 - DNA, 31 bp, Homo sapiens
  chr12:112919570-112919601
  hypo
caggcatgagccactgcgccccagctgattc

SEQ ID NO: 19908 - DNA, 31 bp, Homo sapiens; identical to SEQ ID NO: 4830
  chr12:113494534-113494565
  hypo

SEQ ID NO: 19909 - DNA, 108 bp, Homo sapiens; identical to SEQ ID NO: 4831
  chr12:113494664-113494772
  hypo

SEQ ID NO: 19910 - DNA, 37 bp, Homo sapiens; identical to SEQ ID NO: 4832
  chr12:113494952-113494989
  hypo

SEQ ID NO: 19911 - DNA, 31 bp, Homo sapiens
  chr12:113595320-113595351
  hypo
cctttcggcctcccccgcgtgttgaggggtg

SEQ ID NO: 19912 - DNA, 31 bp, Homo sapiens
  chr12:113598990-113599021
  hypo
tgcacctgtgcctcagcgttaccctaatctg

SEQ ID NO: 19913 - DNA, 97 bp, Homo sapiens
  chr12:113599066-113599163
  hypo
gctctcaccttggccacggtctcgcttcccacctcttcgctctgggcctcgccggtcagatgccccttcttcgtccgagtcacgatcatcaattttc

SEQ ID NO: 19914 - DNA, 31 bp, Homo sapiens
  chr12:113609784-113609815
  hypo
tcatcccacacatagccgattttaaaataaa

SEQ ID NO: 19915 - DNA, 22 bp, Homo sapiens
  chr12:113783671-113783693
  hypo
gccacctcgcccggcctttgag

SEQ ID NO: 19916 - DNA, 204 bp, Homo sapiens; identical to SEQ ID NO: 4834
  chr12:113796496-113796700
  hypo

SEQ ID NO: 19917 - DNA, 159 bp, Homo sapiens; identical to SEQ ID NO: 4835
  chr12:113796701-113796860
  hypo

SEQ ID NO: 19918 - DNA, 31 bp, Homo sapiens
  chr12:113872021-113872052
  hypo
aatatggtaaggctgacgcccctctccccag

SEQ ID NO: 19919 - DNA, 171 bp, Homo sapiens
  chr12:114273732-114273903
  hypo
aaaacacagggttctgcgcacggatttcttccataccattatattctctcggctgcgctcgcaggtactgtggcctgccgcggccctgaaagcttctcgatgccgtgaccctgctggtttgtaacacgctcaggaagaaaaggacacagccagcggcggactttcctcttt

SEQ ID NO: 19920 - DNA, 42 bp, Homo sapiens
  chr12:114273956-114273998
  hypo
agcacttcacctaccacggggctgctgcgctggagatgagaa

SEQ ID NO: 19921 - DNA, 31 bp, Homo sapiens
  chr12:114290637-114290668
  hypo
taaccagcgtgcagcacgttcctcctctgca

SEQ ID NO: 19922 - DNA, 31 bp, Homo sapiens
  chr12:114294979-114295010
  hypo
tgcagtggagaaaagacgctgccctgtactc

SEQ ID NO: 19923 - DNA, 31 bp, Homo sapiens
  chr12:114337760-114337791
  hypo
ggttagagtgagctgccgcggctgcttgggg

SEQ ID NO: 19924 - DNA, 75 bp, Homo sapiens
  chr12:114337922-114337997
  hypo
aaaacgccagctgcagcggaagcccgagcctgcgaaatctcaaaggaaggacgaaaacaacggcaagaaaaccct

SEQ ID NO: 19925 - DNA, 80 bp, Homo sapiens
  chr12:114349903-114349983
  hypo
gtggtgcactgaggcccgagtggaaggctggtggcctccgggaagggccccaggcactgctgcctcgggctaggaggctg

SEQ ID NO: 19926 - DNA, 31 bp, Homo sapiens
  chr12:114349988-114350019
  hypo
tctcccctccagcaggcggggtagcttgagg

SEQ ID NO: 19927 - DNA, 31 bp, Homo sapiens
  chr12:114350024-114350055
  hypo
cccagagaatgctctccggagccctgcactc

SEQ ID NO: 19928 - DNA, 31 bp, Homo sapiens
  chr12:114393632-114393663
  hypo
tgtgactgcgcttgaccgtggggtgctgcct

SEQ ID NO: 19929 - DNA, 31 bp, Homo sapiens
  chr12:115192171-115192202
  hypo
gaaaataagattgtatcgcatatactttttt

SEQ ID NO: 19930 - DNA, 11 bp, Homo sapiens
  chr12:115192249-115192260
  hypo
ttgcccaggct

SEQ ID NO: 19931 - DNA, 18 bp, Homo sapiens
  chr12:115263647-115263665
  hypo
gcacgcgcgcacacacac

SEQ ID NO: 19932 - DNA, 47 bp, Homo sapiens
  chr12:116756041-116756088
  hypo
tcacgcgtgcggcaagcggctgccgtgtttaccgaccgtcctgtgac

SEQ ID NO: 19933 - DNA, 42 bp, Homo sapiens
  chr12:116756163-116756205
  hypo
tcttctgaaggaaaggcgtggctgttccgaggtgccttgtga

SEQ ID NO: 19934 - DNA, 64 bp, Homo sapiens
  chr12:116842261-116842325
  hypo
gttggtgtctggtcaccgcacgtcgttattcagttcacacacagctaagcgtgcagctgtgttg

SEQ ID NO: 19935 - DNA, 9 bp, Homo sapiens
  chr12:116842395-116842404
  hypo
aacaaagat

SEQ ID NO: 19936 - DNA, 31 bp, Homo sapiens
  chr12:117136041-117136072
  hypo
gaggaagaaaatgtgacgtcgatgcagagat

SEQ ID NO: 19937 - DNA, 31 bp, Homo sapiens
  chr12:117408105-117408136
  hypo
catgaggaagcctggacgggacagccagcag

SEQ ID NO: 19938 - DNA, 31 bp, Homo sapiens
  chr12:117408283-117408314
  hypo
acgtatcaacaatggacgggggtgggtctct

SEQ ID NO: 19939 - DNA, 31 bp, Homo sapiens
  chr12:117466360-117466391
  hypo
cttacctcttttcctccgagggcctttggat

SEQ ID NO: 19940 - DNA, 31 bp, Homo sapiens
  chr12:117472594-117472625
  hypo
agcccgaggcacagaccgcagtgcccagatg

SEQ ID NO: 19941 - DNA, 31 bp, Homo sapiens
  chr12:117472627-117472658
  hypo
ggggctgactgagatccgtgcccggggcagc

SEQ ID NO: 19942 - DNA, 31 bp, Homo sapiens
  chr12:117588695-117588726
  hypo
gtgtgtgtgtgtcaggcgggaggactgtatg

SEQ ID NO: 19943 - DNA, 29 bp, Homo sapiens
  chr12:117588798-117588827
  hypo
gtgtgtgtgtcgggcggggaggactgtat

SEQ ID NO: 19944 - DNA, 38 bp, Homo sapiens
  chr12:117588864-117588902
  hypo
tggaaaagggaaccaacgtttgtcgaggacatgccatg

SEQ ID NO: 19945 - DNA, 31 bp, Homo sapiens
  chr12:117597669-117597700
  hypo
taattacccccaccttcgctggatgtgtggc

SEQ ID NO: 19946 - DNA, 31 bp, Homo sapiens
  chr12:118293459-118293490
  hypo
ctagaggagaacactccgcagtgtaaacgct

SEQ ID NO: 19947 - DNA, 31 bp, Homo sapiens
  chr12:118293654-118293685
  hypo
ttactaccctgtctggcgtcaacactgtgcc

SEQ ID NO: 19948 - DNA, 58 bp, Homo sapiens
  chr12:118318418-118318476
  hypo
taccctaggccaaggacgacccagaaaacctgccggaggaagccgtaaacatccacta

SEQ ID NO: 19949 - DNA, 28 bp, Homo sapiens
  chr12:118473719-118473747
  hypo
aatgaaccaggccaggcgcagtggctca

SEQ ID NO: 19950 - DNA, 39 bp, Homo sapiens
  chr12:118474261-118474300
  hypo
atggccctctagcttccgaattaacgtgtaggacctcat

SEQ ID NO: 19951 - DNA, 13 bp, Homo sapiens
  chr12:118481548-118481561
  hypo
gccacataagact

SEQ ID NO: 19952 - DNA, 31 bp, Homo sapiens
  chr12:118481571-118481602
  hypo
gaaacaagctggccttcggtgaaatctgctg

SEQ ID NO: 19953 - DNA, 31 bp, Homo sapiens
  chr12:118481630-118481661
  hypo
gttgatgtaggccaggcgtggtggctcatgc

SEQ ID NO: 19954 - DNA, 49 bp, Homo sapiens
  chr12:118533280-118533329
  hypo
ctcctttccaaggctccgagcacctctccagccccggtccctgccagcc

SEQ ID NO: 19955 - DNA, 31 bp, Homo sapiens
  chr12:118583594-118583625
  hypo
tcataaaatgtgaggccgagtcttattgccc

SEQ ID NO: 19956 - DNA, 31 bp, Homo sapiens
  chr12:118583834-118583865
  hypo
atgccatctgatgtaccgaaagaaaggaaag

SEQ ID NO: 19957 - DNA, 31 bp, Homo sapiens
  chr12:118583889-118583920
  hypo
tgtgatttggtctctgcgatgcaaagggggg

SEQ ID NO: 19958 - DNA, 10 bp, Homo sapiens
  chr12:118860471-118860481
  hypo
cagagtcttg

SEQ ID NO: 19959 - DNA, 31 bp, Homo sapiens
  chr12:118870538-118870569
  hypo
tgacagagtgagaattcgtctcaaaaaaaaa

SEQ ID NO: 19960 - DNA, 62 bp, Homo sapiens
  chr12:119626327-119626389
  hypo
caggtgtgagccactgcgcctggcccctaaactcttttccaagccatcgttgcatttagcct

SEQ ID NO: 19961 - DNA, 31 bp, Homo sapiens
  chr12:119626392-119626423
  hypo
cagcaaaagtgtgcatcggagaggagacatg

SEQ ID NO: 19962 - DNA, 31 bp, Homo sapiens
  chr12:120148308-120148339
  hypo
ccagacaccagctggccgtgcccatgcaagc

SEQ ID NO: 19963 - DNA, 50 bp, Homo sapiens
  chr12:120148346-120148396
  hypo
ggtcactgaagggcagcgtgcagttcatgtctagacggtcatcaccttcc

SEQ ID NO: 19964 - DNA, 31 bp, Homo sapiens
  chr12:120148730-120148761
  hypo
aaggagatttcacctgcgcagggttaataag

SEQ ID NO: 19965 - DNA, 55 bp, Homo sapiens
  chr12:120148794-120148849
  hypo
agcagaagtgcaaaggcgccgtgttagcagcgagccagcacgcctctgcatctct

SEQ ID NO: 19966 - DNA, 40 bp, Homo sapiens
  chr12:120148922-120148962
  hypo
tttcagtaaaagctcacgtgtgaaacgaccaacaagtcat

SEQ ID NO: 19967 - DNA, 98 bp, Homo sapiens
  chr12:120214486-120214584
  hypo
tatgctgacattctgtcgctttccgcttgaattcttcagcagcaagccgagactctctcagctcagattcgtagagatcactccgtcttcttgctgag

SEQ ID NO: 19968 - DNA, 31 bp, Homo sapiens
  chr12:120234817-120234848
  hypo
ctttcaggaagtttgtcggagagaggtcagg

SEQ ID NO: 19969 - DNA, 36 bp, Homo sapiens
  chr12:120545352-120545388
  hypo
cacttctacagaaacacgtgcacaagaataagtatc

SEQ ID NO: 19970 - DNA, 31 bp, Homo sapiens
  chr12:120571412-120571443
  hypo
gataggccctttagctcggcaaatgtttcac

SEQ ID NO: 19971 - DNA, 41 bp, Homo sapiens
  chr12:120574315-120574356
  hypo
aagaggctgagtgtctcgagcagagccgccttcacattcca

SEQ ID NO: 19972 - DNA, 23 bp, Homo sapiens
  chr12:120868613-120868636
  hypo
ttttttttttttgagacggagtt

SEQ ID NO: 19973 - DNA, 37 bp, Homo sapiens
  chr12:120927817-120927854
  hypo
taggattacaggcgtaagccaccgtgcctggcctatt

SEQ ID NO: 19974 - DNA, 41 bp, Homo sapiens
  chr12:120983606-120983647
  hypo
gctgggattacaggcgtgagccattgcgcccagcccccagt

SEQ ID NO: 19975 - DNA, 22 bp, Homo sapiens
  chr12:121031704-121031726
  hypo
gagccaccgcacccagccagca

SEQ ID NO: 19976 - DNA, 36 bp, Homo sapiens
  chr12:121328590-121328626
  hypo
catatacacacaaacacggagcgaaaagtcaacagg

SEQ ID NO: 19977 - DNA, 59 bp, Homo sapiens
  chr12:121328642-121328701
  hypo
gaatcaagaatgtctccgaggtatctagctgtgaagccgaaacccgatgctctcaacag

SEQ ID NO: 19978 - DNA, 18 bp, Homo sapiens
  chr12:121653375-121653393
  hypo
agccgggatttttattgg

SEQ ID NO: 19979 - DNA, 51 bp, Homo sapiens
  chr12:121653406-121653457
  hypo
gtaggattccttatgacgtattcactgtctcagtcacgagaatctttaaag

SEQ ID NO: 19980 - DNA, 31 bp, Homo sapiens
  chr12:121667859-121667890
  hypo
gccaggtaaatttccacgtaccctttgttgc

SEQ ID NO: 19981 - DNA, 31 bp, Homo sapiens
  chr12:121691829-121691860
  hypo
atgatgatgatgaagacgatttcagtgaaag

SEQ ID NO: 19982 - DNA, 31 bp, Homo sapiens
  chr12:121740281-121740312
  hypo
cttatcttcacaggtgcgggggacataggac

SEQ ID NO: 19983 - DNA, 31 bp, Homo sapiens
  chr12:122192853-122192884
  hypo
tgacagatacagtgagcgtgacaggagctac

SEQ ID NO: 19984 - DNA, 36 bp, Homo sapiens; identical to SEQ ID NO: 4838
  chr12:122214227-122214263
  hypo

SEQ ID NO: 19985 - DNA, 77 bp, Homo sapiens; identical to SEQ ID NO: 4839
  chr12:122231545-122231622
  hypo

SEQ ID NO: 19986 - DNA, 55 bp, Homo sapiens
  chr12:122246167-122246222
  hypo
agaccctcccagtgggcgagctggacgctgtctctccaatcgtgaatgagaccct

SEQ ID NO: 19987 - DNA, 47 bp, Homo sapiens
  chr12:122246223-122246270
  hypo
caggtgggtttatggccgtcagtctgccccatcgccagctctttgat

SEQ ID NO: 19988 - DNA, 42 bp, Homo sapiens
  chr12:122282338-122282380
  hypo
aaactgaggcatgaaacgattaaggatctattaggccgagtg

SEQ ID NO: 19989 - DNA, 20 bp, Homo sapiens
  chr12:122312672-122312692
  hypo
ttttttttttttgagacgta

SEQ ID NO: 19990 - DNA, 31 bp, Homo sapiens
  chr12:122319020-122319051
  hypo
tttctgctctgctccacgctctgcccaggta

SEQ ID NO: 19991 - DNA, 35 bp, Homo sapiens
  chr12:122425315-122425350
  hypo
ttaaaaagaatgcaggcgatagagtccaggcctgg

SEQ ID NO: 19992 - DNA, 59 bp, Homo sapiens
  chr12:122438022-122438081
  hypo
agtaatgggagggacccggagctagaaagcaaaagaatgtgattcgtgttgcaactacc

SEQ ID NO: 19993 - DNA, 31 bp, Homo sapiens
  chr12:122444564-122444595
  hypo
agcccatggacttgccgcgctcctgttcagc

SEQ ID NO: 19994 - DNA, 25 bp, Homo sapiens
  chr12:122455086-122455111
  hypo
ccactgtacccggcctctcttttac

SEQ ID NO: 19995 - DNA, 19 bp, Homo sapiens
  chr12:122455989-122456008
  hypo
actccgtctcaatcaaaaa

SEQ ID NO: 19996 - DNA, 198 bp, Homo sapiens; identical to SEQ ID NO: 4843
  chr12:122459881-122460079
  hypo

SEQ ID NO: 19997 - DNA, 31 bp, Homo sapiens; identical to SEQ ID NO: 4844
  chr12:122461112-122461143
  hypo

SEQ ID NO: 19998 - DNA, 31 bp, Homo sapiens; identical to SEQ ID NO: 4845
  chr12:122461164-122461195
  hypo

SEQ ID NO: 19999 - DNA, 102 bp, Homo sapiens; identical to SEQ ID NO: 4846
  chr12:122461278-122461380
  hypo

SEQ ID NO: 20000 - DNA, 77 bp, Homo sapiens
  chr12:122463062-122463139
  hypo
agagaagaccccagggcgatggtaggagacgaaagcttgggctgcagcgtaagcttggaggcccgctgcggtggctc

SEQ ID NO: 20001 - DNA, 31 bp, Homo sapiens
  chr12:122472063-122472094
  hypo
ctggtggtgaggctcacgtatcctgcatctt

SEQ ID NO: 20002 - DNA, 31 bp, Homo sapiens
  chr12:122472661-122472692
  hypo
gaaaaaaggaatggcacgaaaagcatcccca

SEQ ID NO: 20003 - DNA, 31 bp, Homo sapiens
  chr12:122472715-122472746
  hypo
cctccctcctttctcccggggtcttccttcc

SEQ ID NO: 20004 - DNA, 21 bp, Homo sapiens
  chr12:122474141-122474162
  hypo
aatgttgtaacttagccgggt

SEQ ID NO: 20005 - DNA, 31 bp, Homo sapiens
  chr12:122474626-122474657
  hypo
ttttaaggcagagtctcgctcctgtcaccca

SEQ ID NO: 20006 - DNA, 31 bp, Homo sapiens; identical to SEQ ID NO: 4847
  chr12:122478893-122478924
  hypo

SEQ ID NO: 20007 - DNA, 70 bp, Homo sapiens
  chr12:122481848-122481918
  hypo
gcagcaactccagccccgctccagagcccaactcggctgtgcccagcgacggcaccgaggccaaggtgga

SEQ ID NO: 20008 - DNA, 46 bp, Homo sapiens
  chr12:122481972-122482018
  hypo
ggaggtggggctctgacggcctccctgtaaccggccttcaggcagt

SEQ ID NO: 20009 - DNA, 17 bp, Homo sapiens
  chr12:122483262-122483279
  hypo
ggcgatagagcaagact

SEQ ID NO: 20010 - DNA, 71 bp, Homo sapiens
  chr12:122483299-122483370
  hypo
aaagttaataataatacggggtcagacagcaggcagcgcctcaggtgtggggggctcgtaaggccactgcc

SEQ ID NO: 20011 - DNA, 31 bp, Homo sapiens
  chr12:122483377-122483408
  hypo
ggttttcatggtaagacgggagccactgggg

SEQ ID NO: 20012 - DNA, 23 bp, Homo sapiens
  chr12:122491188-122491211
  hypo
gccgcgcccggccagggctccta

SEQ ID NO: 20013 - DNA, 31 bp, Homo sapiens
  chr12:122491262-122491293
  hypo
tgctgtcccgttcccccgccctctgtgtccc

SEQ ID NO: 20014 - DNA, 31 bp, Homo sapiens
  chr12:122492518-122492549
  hypo
tggctgctggaaacagcgccactgaaaaatc

SEQ ID NO: 20015 - DNA, 31 bp, Homo sapiens
  chr12:122493938-122493969
  hypo
ctgagacagactagggcgcagccatctagaa

SEQ ID NO: 20016 - DNA, 66 bp, Homo sapiens
  chr12:122493996-122494062
  hypo
ataaacattcttgcagcgtgcagtgagaaaagcaagctgcagatccgcaggcgtagcatgagccca

SEQ ID NO: 20017 - DNA, 31 bp, Homo sapiens
  chr12:122494103-122494134
  hypo
ttaagaccaaagttgtcggctgggatctctg

SEQ ID NO: 20018 - DNA, 24 bp, Homo sapiens
  chr12:122596890-122596914
  hypo
aaatgtatgtacaggccgggcgtg

SEQ ID NO: 20019 - DNA, 31 bp, Homo sapiens
  chr12:122602776-122602807
  hypo
tattccaaatggtgcacggtttaggatttat

SEQ ID NO: 20020 - DNA, 78 bp, Homo sapiens
  chr12:122602835-122602913
  hypo
taatattttcagacagcggttgatcatgggtaaagcacaataccgcagaaaagggaggaatgccgtacattccagtgt

SEQ ID NO: 20021 - DNA, 31 bp, Homo sapiens
  chr12:122623938-122623969
  hypo
cacctctaggggctctcgtgccaaggccacc

SEQ ID NO: 20022 - DNA, 103 bp, Homo sapiens
  chr12:122623980-122624083
  hypo
cttccaggtggcagcacggctctcacggggagtggttcccgcctggtcactccccaccctgccaccgctctgcctctgagtaaacggtcggcacatgtgttgg

SEQ ID NO: 20023 - DNA, 31 bp, Homo sapiens
  chr12:122667355-122667386
  hypo
actggctggttggagtcgagatgtttgacct

SEQ ID NO: 20024 - DNA, 35 bp, Homo sapiens
  chr12:122691181-122691216
  hypo
tggtcacgtggagcgacgtgcggctatccgcagca

SEQ ID NO: 20025 - DNA, 31 bp, Homo sapiens
  chr12:122712136-122712167
  hypo
cgccctctgcctgtgtcgccaccacagccca

SEQ ID NO: 20026 - DNA, 31 bp, Homo sapiens
  chr12:122970497-122970528
  hypo
ttccccagtacatccacgttctaagcacttc

SEQ ID NO: 20027 - DNA, 59 bp, Homo sapiens
  chr12:123129064-123129123
  hypo
tgactatgtgctcttccgccagcgtgctaccctcgatgtcctctcgatgtccagccacc

SEQ ID NO: 20028 - DNA, 14 bp, Homo sapiens
  chr12:123129128-123129142
  hypo
ctgcctgctagggt

SEQ ID NO: 20029 - DNA, 20 bp, Homo sapiens
  chr12:123136709-123136729
  hypo
cagagtcttgctctttcgcc

SEQ ID NO: 20030 - DNA, 138 bp, Homo sapiens; identical to SEQ ID NO: 4849
  chr12:123380520-123380658
  hypo

SEQ ID NO: 20031 - DNA, 31 bp, Homo sapiens
  chr12:123400986-123401017
  hypo
ctggaacagaaaagggcgttggggaaaaact

SEQ ID NO: 20032 - DNA, 31 bp, Homo sapiens
  chr12:123401349-123401380
  hypo
agtccagccgacgctccgacaggtcacgggg

SEQ ID NO: 20033 - DNA, 31 bp, Homo sapiens; identical to SEQ ID NO: 4851
  chr12:123414419-123414450
  hypo

SEQ ID NO: 20034 - DNA, 53 bp, Homo sapiens
  chr12:123481906-123481959
  hypo
cgggcagggcaccaggcggatggcaaggcggcccagggcgctggggtagtgca

SEQ ID NO: 20035 - DNA, 31 bp, Homo sapiens
  chr12:123485544-123485575
  hypo
gctgaagccctgcaaccgccctccccaggct

SEQ ID NO: 20036 - DNA, 31 bp, Homo sapiens
  chr12:123490025-123490056
  hypo
ctcagcccataccactcgtcctgccagcacc

SEQ ID NO: 20037 - DNA, 31 bp, Homo sapiens; identical to SEQ ID NO: 4852
  chr12:123497425-123497456
  hypo

SEQ ID NO: 20038 - DNA, 31 bp, Homo sapiens
  chr12:123751043-123751074
  hypo
agggagagcatcttcccgctgggaccttccc

SEQ ID NO: 20039 - DNA, 31 bp, Homo sapiens; identical to SEQ ID NO: 4853
  chr12:123754991-123755022
  hypo

SEQ ID NO: 20040 - DNA, 31 bp, Homo sapiens
  chr12:123775023-123775054
  hypo
attttgatgaaccatccgggtcttcccaact

SEQ ID NO: 20041 - DNA, 31 bp, Homo sapiens; identical to SEQ ID NO: 4856
  chr12:123920696-123920727
  hypo

SEQ ID NO: 20042 - DNA, 31 bp, Homo sapiens; identical to SEQ ID NO: 4857
  chr12:123920746-123920777
  hypo

SEQ ID NO: 20043 - DNA, 24 bp, Homo sapiens
  chr12:124108088-124108112
  hypo
tctgcctgcagacctccgcctccc

SEQ ID NO: 20044 - DNA, 55 bp, Homo sapiens
  chr12:124111671-124111726
  hypo
accactctggagtaggcgtgagtcaatattgtctgtggaccgagaaagctttgtc

SEQ ID NO: 20045 - DNA, 44 bp, Homo sapiens
  chr12:124111753-124111797
  hypo
cacaccctctgcactgcggcacgtgttcccgacaccctaagcat

SEQ ID NO: 20046 - DNA, 31 bp, Homo sapiens
  chr12:124141810-124141841
  hypo
atagcctagcatcatacgttgactaaaaccc

SEQ ID NO: 20047 - DNA, 69 bp, Homo sapiens
  chr12:124141889-124141958
  hypo
tgggaaccttttgccccgcatcttccacactctccctcttcagtccggccccaccgcccccttgctatt

SEQ ID NO: 20048 - DNA, 31 bp, Homo sapiens; identical to SEQ ID NO: 4858
  chr12:124156317-124156348
  hypo

SEQ ID NO: 20049 - DNA, 31 bp, Homo sapiens
  chr12:124195918-124195949
  hypo
aggagtcttgcgaggtcggtgggaaatgttt

SEQ ID NO: 20050 - DNA, 31 bp, Homo sapiens
  chr12:124330450-124330481
  hypo
gggaccctttgtggtccgctgatctgtctca

SEQ ID NO: 20051 - DNA, 46 bp, Homo sapiens
  chr12:124335327-124335373
  hypo
taccatgaaaatgaatcgccacgcagctcgccgcaggccccctttc

SEQ ID NO: 20052 - DNA, 36 bp, Homo sapiens
  chr12:124335504-124335540
  hypo
gccgcacggagctgcccgagtcggtgaaggcgctgt

SEQ ID NO: 20053 - DNA, 31 bp, Homo sapiens
  chr12:124341872-124341903
  hypo
tatgtacagtaaaatacgcataagtttcacc

SEQ ID NO: 20054 - DNA, 31 bp, Homo sapiens
  chr12:124423711-124423742
  hypo
taactccagacctgcacgcccagtttccctg

SEQ ID NO: 20055 - DNA, 50 bp, Homo sapiens
  chr12:124423764-124423814
  hypo
ctgcctaggcactggacgccactggacgtctttcccgggcttctgtctgt

SEQ ID NO: 20056 - DNA, 37 bp, Homo sapiens
  chr12:124444124-124444161
  hypo
tacaggtgtgagccaccgcatgcggccttaggtgcca

SEQ ID NO: 20057 - DNA, 31 bp, Homo sapiens
  chr12:124716558-124716589
  hypo
ggctccggatggggtgcgttggaggcctggt

SEQ ID NO: 20058 - DNA, 31 bp, Homo sapiens; identical to SEQ ID NO: 4861
  chr12:124790623-124790654
  hypo

SEQ ID NO: 20059 - DNA, 130 bp, Homo sapiens
  chr12:124869875-124870005
  hypo
gggcaggggagccactcgctcaggacccatttgcctccgggtcctcattccaacgcgctgacagcccgaattcctggctgagtcagtctggtccaccgcgctccttcccccacaccgtgagacagggctg

SEQ ID NO: 20060 - DNA, 46 bp, Homo sapiens
  chr12:124870095-124870141
  hypo
ctcatagcagcattgccgcctgcagccatctcggggtactcccggg

SEQ ID NO: 20061 - DNA, 52 bp, Homo sapiens
  chr12:124881336-124881388
  hypo
caactacagtggaggacggggccgggcccaggagccccgtgatccaggctgt

SEQ ID NO: 20062 - DNA, 31 bp, Homo sapiens
  chr12:124929888-124929919
  hypo
gccccggtggtctgagcgctccctcctgcag

SEQ ID NO: 20063 - DNA, 31 bp, Homo sapiens
  chr12:124967299-124967330
  hypo
cccatggagatgcagacgagcctgaagttgt

SEQ ID NO: 20064 - DNA, 129 bp, Homo sapiens
  chr12:124971792-124971921
  hypo
tggtggcaagtgatggcgacaaacacccgacagccagcgaggcccaaagaccaggtttcagaacaaagcgacccctgaccccaaggccgccctgtaaaagaggaactccccgctcgtatcacagccaga

SEQ ID NO: 20065 - DNA, 56 bp, Homo sapiens
  chr12:124979223-124979279
  hypo
cctcagagcctcgagccgcaccaaggtgaatacacacggaacgggaggacaggaag

SEQ ID NO: 20066 - DNA, 31 bp, Homo sapiens
  chr12:124979284-124979315
  hypo
ggagctgtgacctatccggcccccttgcccc

SEQ ID NO: 20067 - DNA, 37 bp, Homo sapiens
  chr12:124979330-124979367
  hypo
atcctacccaatactgcggcagcgggggagcagaggt

SEQ ID NO: 20068 - DNA, 31 bp, Homo sapiens
  chr12:124979396-124979427
  hypo
caggagctccacattcgcgtgccaatcccac

SEQ ID NO: 20069 - DNA, 31 bp, Homo sapiens
  chr12:124979541-124979572
  hypo
ccaggggtctctgtggcggcctcccctctgc

SEQ ID NO: 20070 - DNA, 31 bp, Homo sapiens
  chr12:124979653-124979684
  hypo
caaaggtagccccaggcgcacacatgtgcac

SEQ ID NO: 20071 - DNA, 31 bp, Homo sapiens
  chr12:124979935-124979966
  hypo
aaaacaagatcagccacggggcagctggctc

SEQ ID NO: 20072 - DNA, 31 bp, Homo sapiens
  chr12:124980536-124980567
  hypo
cagaatgacagccagtcgggccctgcagcct

SEQ ID NO: 20073 - DNA, 31 bp, Homo sapiens
  chr12:124980569-124980600
  hypo
ggataggtaccccaaacggctcctggggcag

SEQ ID NO: 20074 - DNA, 31 bp, Homo sapiens
  chr12:124989318-124989349
  hypo
ccgctcagaaaggccacgcactgcatgattc

SEQ ID NO: 20075 - DNA, 31 bp, Homo sapiens
  chr12:125009056-125009087
  hypo
gtctgagaacaaggcccgcatggaaggaggc

SEQ ID NO: 20076 - DNA, 41 bp, Homo sapiens
  chr12:125009125-125009166
  hypo
agcacctagatccagccgtgcctgaacgtgtcctaccctgg

SEQ ID NO: 20077 - DNA, 51 bp, Homo sapiens
  chr12:125009175-125009226
  hypo
ggacccatcaactccccgtcatagcctaactcggctcgagtgtgtctctgc

SEQ ID NO: 20078 - DNA, 31 bp, Homo sapiens
  chr12:125009275-125009306
  hypo
ctccccttgaatgactcgtccctggacgcct

SEQ ID NO: 20079 - DNA, 31 bp, Homo sapiens
  chr12:125012455-125012486
  hypo
cgtgtccttcccatctcgccctccagggcgt

SEQ ID NO: 20080 - DNA, 31 bp, Homo sapiens
  chr12:125123326-125123357
  hypo
attgaaggcaaggctgcgcattgtctgatgg

SEQ ID NO: 20081 - DNA, 22 bp, Homo sapiens
  chr12:125128936-125128958
  hypo
ccgtgcccggcctgattccatt

SEQ ID NO: 20082 - DNA, 31 bp, Homo sapiens
  chr12:125128990-125129021
  hypo
tagtgttaggggtgcacgcttgggtggaaaa

SEQ ID NO: 20083 - DNA, 40 bp, Homo sapiens
  chr12:125223878-125223918
  hypo
agcccatgaatgagaccggaaatggcgaataaaattcagg

SEQ ID NO: 20084 - DNA, 31 bp, Homo sapiens
  chr12:125276597-125276628
  hypo
atcaccctacagaggacgaaacacgatgggg

SEQ ID NO: 20085 - DNA, 31 bp, Homo sapiens
  chr12:125298971-125299002
  hypo
agtgtcagaggctggacgtggctggcccatc

SEQ ID NO: 20086 - DNA, 31 bp, Homo sapiens
  chr12:125299401-125299432
  hypo
gtgagtccccacgctccgaccacctcaggga

SEQ ID NO: 20087 - DNA, 50 bp, Homo sapiens
  chr12:125299578-125299628
  hypo
ctggaactggaaggtgcggtactcgaggaaggacacggtgtcgttgttgt

SEQ ID NO: 20088 - DNA, 31 bp, Homo sapiens
  chr12:125301968-125301999
  hypo
atgacttgcctgcttccggaacaatctctgg

SEQ ID NO: 20089 - DNA, 31 bp, Homo sapiens
  chr12:125302008-125302039
  hypo
agcagcctccccatcccgtccactctgagac

SEQ ID NO: 20090 - DNA, 31 bp, Homo sapiens
  chr12:125447399-125447430
  hypo
aaagtgctggtgaggacgtgaagaaactgaa

SEQ ID NO: 20091 - DNA, 31 bp, Homo sapiens
  chr12:125621160-125621191
  hypo
actgaggggccccctgcgtgaatgtgcaccc

SEQ ID NO: 20092 - DNA, 15 bp, Homo sapiens
  chr12:125636432-125636447
  hypo
cgagtcttttaggag

SEQ ID NO: 20093 - DNA, 31 bp, Homo sapiens
  chr12:128570491-128570522
  hypo
aaccctaaagcaactacgtttaaaaaataac

SEQ ID NO: 20094 - DNA, 31 bp, Homo sapiens
  chr12:130700589-130700620
  hypo
ccccagtgatagacaacgagcatgtgaacac

SEQ ID NO: 20095 - DNA, 31 bp, Homo sapiens; identical to SEQ ID NO: 4864
  chr12:130709678-130709709
  hypo

SEQ ID NO: 20096 - DNA, 31 bp, Homo sapiens
  chr12:130910644-130910675
  hypo
gcgggaatgagtgaaccgggccagcgggggc

SEQ ID NO: 20097 - DNA, 31 bp, Homo sapiens
  chr12:131173698-131173729
  hypo
ctcccgtgtcctgggccgggcacagtggctc

SEQ ID NO: 20098 - DNA, 31 bp, Homo sapiens
  chr12:131268400-131268431
  hypo
acccctgggaagcagacgtaaaatagaaaca

SEQ ID NO: 20099 - DNA, 57 bp, Homo sapiens
  chr12:131271975-131272032
  hypo
aagcagctggagagtccgctgcccacaccaccccgggctccacggcctcacccccag

SEQ ID NO: 20100 - DNA, 31 bp, Homo sapiens
  chr12:131272749-131272780
  hypo
gaggagggccaagtgccgccttgaatttctc

SEQ ID NO: 20101 - DNA, 48 bp, Homo sapiens
  chr12:131572759-131572807
  hypo
ggcgcttgctggtggtcgcccgtcgttcaacagcgtgttattgaatta

SEQ ID NO: 20102 - DNA, 35 bp, Homo sapiens
  chr12:131615308-131615343
  hypo
gcgaagctggccatcccgtgcggggccccagtggc

SEQ ID NO: 20103 - DNA, 31 bp, Homo sapiens
  chr12:132043901-132043932
  hypo
cagaagccgggcgaggcggctgagttcagtg

SEQ ID NO: 20104 - DNA, 60 bp, Homo sapiens
  chr12:132197184-132197244
  hypo
ttttggaattagagctcgaaaacgagaactggtgaagggagggccgcggaatcagatcat

SEQ ID NO: 20105 - DNA, 31 bp, Homo sapiens
  chr12:132197246-132197277
  hypo
ctggatctgatggctccgtgctgtgctcaag

SEQ ID NO: 20106 - DNA, 50 bp, Homo sapiens
  chr12:132218743-132218793
  hypo
aggacttgaaggctgacgttgggctgggtgtggctcgtacataggacagg

SEQ ID NO: 20107 - DNA, 31 bp, Homo sapiens
  chr12:132218845-132218876
  hypo
agactttggattcttacgaagacaagaatga

SEQ ID NO: 20108 - DNA, 44 bp, Homo sapiens
  chr12:132221601-132221645
  hypo
tagcaaaagactgaggcgacgcacatcctcggtggaggactaat

SEQ ID NO: 20109 - DNA, 31 bp, Homo sapiens
  chr12:132221651-132221682
  hypo
cctctggtgtgctctcgcggtgggctgcaga

SEQ ID NO: 20110 - DNA, 80 bp, Homo sapiens
  chr12:132221688-132221768
  hypo
ggggtgggccagggcccgagcgctgcagggccacccaccggaatggctcttcctgagggtggaggcgaggtgactcaagg

SEQ ID NO: 20111 - DNA, 31 bp, Homo sapiens
  chr12:132221818-132221849
  hypo
tgtagtgcttctgtatcggcacctaaaaggg

SEQ ID NO: 20112 - DNA, 31 bp, Homo sapiens
  chr12:132221880-132221911
  hypo
aggggaactggaaggacgaggtcgcagacag

SEQ ID NO: 20113 - DNA, 31 bp, Homo sapiens
  chr12:132222045-132222076
  hypo
ctgtattttaataatacgtgcttttatcatt

SEQ ID NO: 20114 - DNA, 31 bp, Homo sapiens
  chr12:132278453-132278484
  hypo
cgggggagagtgggcacgggcccagcggctg

SEQ ID NO: 20115 - DNA, 173 bp, Homo sapiens
  chr12:132284410-132284583
  hypo
tgggcccccagccctccgacagcagccactggactccccttccccgtctccacgcctcctgcggtcaccgcacaccccttcttcccaggccgtcagctccccgtgggcatgtgtccctgccggcacccatgctgcaactgccggacaggccctccctgcggcagtggtgcaca

SEQ ID NO: 20116 - DNA, 51 bp, Homo sapiens
  chr12:132284587-132284638
  hypo
gggagcagcccagccccgcctcaccatgctgagcaccgcatgttgccttga

SEQ ID NO: 20117 - DNA, 40 bp, Homo sapiens
  chr12:132286007-132286047
  hypo
catgtttgccgtggctcgtgtttgccgtggctcgtgtttg

SEQ ID NO: 20118 - DNA, 31 bp, Homo sapiens
  chr12:132326327-132326358
  hypo
gcgtctggcagctgtacggtgagtgtctccc

SEQ ID NO: 20119 - DNA, 31 bp, Homo sapiens
  chr12:132326974-132327005
  hypo
tctgacatccatgcatcgtttccactgtagt

SEQ ID NO: 20120 - DNA, 43 bp, Homo sapiens
  chr12:132349936-132349979
  hypo
aggacagtgactcactcgtcaggaacgacggggcacctgccag

SEQ ID NO: 20121 - DNA, 89 bp, Homo sapiens
  chr12:132377941-132378030
  hypo
agccattccaactagcgcgcaacgtgtacggtgaacagcactaacttttccccggtcctctctcccagagcaatcgctgttggctgtgt

SEQ ID NO: 20122 - DNA, 51 bp, Homo sapiens
  chr12:132378032-132378083
  hypo
tctgtgagtgagcccccgggctcttttggctgccggcggtgtgactttgga

SEQ ID NO: 20123 - DNA, 31 bp, Homo sapiens
  chr12:132378087-132378118
  hypo
ttctccaacttttctccgccttgatttcctc

SEQ ID NO: 20124 - DNA, 43 bp, Homo sapiens
  chr12:132378163-132378206
  hypo
gaatggatgcactaatcgctggaaagtgcgctgcttggcctaa

SEQ ID NO: 20125 - DNA, 38 bp, Homo sapiens; identical to SEQ ID NO: 4866
  chr12:132380827-132380865
  hypo

SEQ ID NO: 20126 - DNA, 46 bp, Homo sapiens
  chr12:132423549-132423595
  hypo
tactgggattacaggcgtgagccactatgcccggccctccagatgc

SEQ ID NO: 20127 - DNA, 68 bp, Homo sapiens
  chr12:132423611-132423679
  hypo
ttcatgtgtgaaatgacgtaaggtccgcgtagtccttctttctcagagaccagcgtgcgaggcccaag

SEQ ID NO: 20128 - DNA, 30 bp, Homo sapiens
  chr12:132468722-132468752
  hypo
gtgagtcaccgcacccggcctacaggttct

SEQ ID NO: 20129 - DNA, 51 bp, Homo sapiens; identical to SEQ ID NO: 4867
  chr12:132480345-132480396
  hypo

SEQ ID NO: 20130 - DNA, 31 bp, Homo sapiens
  chr12:132549671-132549702
  hypo
gggggtggagagtgagcgaggtgagatgcag

SEQ ID NO: 20131 - DNA, 31 bp, Homo sapiens
  chr12:132556449-132556480
  hypo
tgagtacaggtgtgtccgagggctgttagta

SEQ ID NO: 20132 - DNA, 57 bp, Homo sapiens
  chr12:132556612-132556669
  hypo
tgtgtgtgtgacctcacggcatcggggcagctcagcctcgttcgtgcgctctgcctg

SEQ ID NO: 20133 - DNA, 37 bp, Homo sapiens
  chr12:132567749-132567786
  hypo
gaaaatcaaagctggccgggcacggtggctcacactt

SEQ ID NO: 20134 - DNA, 70 bp, Homo sapiens
  chr12:132593164-132593234
  hypo
atagcaacccagctaccgccgaggacttctgcggcttttccagcccagcagcagccgctccaggtacttt

SEQ ID NO: 20135 - DNA, 45 bp, Homo sapiens
  chr12:132593258-132593303
  hypo
ccagactttcctcactcggatttgaggactcgatgtgctgaggca

SEQ ID NO: 20136 - DNA, 85 bp, Homo sapiens
  chr12:132601573-132601658
  hypo
cgctcctctctgccctcgggacaggaggtggtcagggaaggtggtcccgtgtcctcaaggcggagtccctcgcagatggtgctga

SEQ ID NO: 20137 - DNA, 34 bp, Homo sapiens
  chr12:132617157-132617191
  hypo
gcctcccacccctgcccggcgcagcccctgggag

SEQ ID NO: 20138 - DNA, 159 bp, Homo sapiens
  chr12:132617401-132617560
  hypo
actgtgctgcctgccccggcctggcggcctctccgtagcagagctgaggctgggacgcaggtgggggagcctggatgcgcctccttcctcagccacgggaggatgaggtccaggagcgcagcggggcccacgggggagcgccttcgggtgcggctcgtc

SEQ ID NO: 20139 - DNA, 71 bp, Homo sapiens
  chr12:132643454-132643525
  hypo
gtgtcctagtcagaggcgtgaagaggagggcggaggccggaactatccatcggctccgagggtggagcagg

SEQ ID NO: 20140 - DNA, 31 bp, Homo sapiens
  chr12:132643565-132643596
  hypo
gagtctctgagggccccgcctgcccacacct

SEQ ID NO: 20141 - DNA, 31 bp, Homo sapiens
  chr12:132643845-132643876
  hypo
ctgaggatggtgcctcgcggagcctccactg

SEQ ID NO: 20142 - DNA, 60 bp, Homo sapiens
  chr12:132643911-132643971
  hypo
cgcccctcgaagacctcgggaagctccccgttcgctgtggccccccggggtctgtcccct

SEQ ID NO: 20143 - DNA, 38 bp, Homo sapiens
  chr12:132643977-132644015
  hypo
ctgttctctgggggctcgtggtccgagttctgatactg

SEQ ID NO: 20144 - DNA, 39 bp, Homo sapiens
  chr12:132653030-132653069
  hypo
gagacggggtctaggccgggataacgggatagtccattg

SEQ ID NO: 20145 - DNA, 59 bp, Homo sapiens
  chr12:132666119-132666178
  hypo
gtacccacccagcacacgttcactcgcaccctgcacagcccagcgcgcacacacccagc

SEQ ID NO: 20146 - DNA, 31 bp, Homo sapiens; identical to SEQ ID NO: 4868
  chr12:132982486-132982517
  hypo

SEQ ID NO: 20147 - DNA, 62 bp, Homo sapiens
  chr12:133002956-133003018
  hypo
cctagagctgcggtttcgtcaggttcatggtccaacttccaagttgccgagtccagtctgac

SEQ ID NO: 20148 - DNA, 31 bp, Homo sapiens
  chr12:133158012-133158043
  hypo
tgccccccccaggtgccgcccatcctgcctc

SEQ ID NO: 20149 - DNA, 31 bp, Homo sapiens
  chr12:133199965-133199996
  hypo
ccactactcaaatgcccgcagctagcctcac

SEQ ID NO: 20150 - DNA, 50 bp, Homo sapiens
  chr12:133200000-133200050
  hypo
aacccaggctgactggcgcccacggctgcaccgggcgacccctggtcctg

SEQ ID NO: 20151 - DNA, 31 bp, Homo sapiens
  chr12:133209329-133209360
  hypo
gcactgcgcctcagcccgtccttcatgcagt

SEQ ID NO: 20152 - DNA, 31 bp, Homo sapiens
  chr12:133226343-133226374
  hypo
gctctcccaaagaactcgcttcctcttcaca

SEQ ID NO: 20153 - DNA, 37 bp, Homo sapiens
  chr12:133226389-133226426
  hypo
gggtgaggcagctttacgaggccgaagtcctccatgt

SEQ ID NO: 20154 - DNA, 5 bp, Homo sapiens
  chr12:133308292-133308297
  hypo
cctaa

SEQ ID NO: 20155 - DNA, 32 bp, Homo sapiens
  chr12:133348834-133348866
  hypo
agactgggtgacaggccgggcgcaggggctca

SEQ ID NO: 20156 - DNA, 59 bp, Homo sapiens
  chr12:133381357-133381416
  hypo
ctctggtactgctcctcggccacctgcaagtcgttgttggacgacgccaggctggcatt

SEQ ID NO: 20157 - DNA, 48 bp, Homo sapiens
  chr12:133381437-133381485
  hypo
caggtcagtcatggctcgctccaggtcccagcacgactgcttcagggt

SEQ ID NO: 20158 - DNA, 31 bp, Homo sapiens
  chr12:133412378-133412409
  hypo
catgctcccagcacagcgcacggccctcaca

SEQ ID NO: 20159 - DNA, 30 bp, Homo sapiens
  chr12:133412413-133412443
  hypo
caggctcccagcacagcgcacggccctcac

SEQ ID NO: 20160 - DNA, 42 bp, Homo sapiens
  chr12:133421486-133421528
  hypo
gggattacaggcgtgagcctccacgcccggccccacatggat

SEQ ID NO: 20161 - DNA, 103 bp, Homo sapiens; identical to SEQ ID NO: 4870
  chr12:133706913-133707016
  hypo

SEQ ID NO: 20162 - DNA, 48 bp, Homo sapiens
  chr12:133716925-133716973
  hypo
cgcactccggcctaggtgacaagaatgaggcctcgactttggaaaaaa

SEQ ID NO: 20163 - DNA, 31 bp, Homo sapiens
  chr12:133716994-133717025
  hypo
ttactgggtcactagacgtcttttttttttt

SEQ ID NO: 20164 - DNA, 31 bp, Homo sapiens
  chr12:133717031-133717062
  hypo
taaataagtcttaccacgtgtcaggcaccat

SEQ ID NO: 20165 - DNA, 31 bp, Homo sapiens
  chr12:133721474-133721505
  hypo
tttgttgttgtttagacggagtcttgctctg

SEQ ID NO: 20166 - DNA, 35 bp, Homo sapiens
  chr13:20265762-20265797
  hypo
agagatttacaaaggccgggcgtggtgagtcattg

SEQ ID NO: 20167 - DNA, 29 bp, Homo sapiens
  chr13:20306777-20306806
  hypo
aaacttttggcagggcgcggtggctcacg

SEQ ID NO: 20168 - DNA, 56 bp, Homo sapiens
  chr13:20392389-20392445
  hypo
agtcatagtaaggcaccgaggggtggctcctctccctgcagcggctgtcgcttacc

SEQ ID NO: 20169 - DNA, 87 bp, Homo sapiens; identical to SEQ ID NO: 4874
  chr13:20766767-20766854
  hypo

SEQ ID NO: 20170 - DNA, 60 bp, Homo sapiens
  chr13:21057335-21057395
  hypo
cacaataaaagataaacgtgtgaggttctggatatcctaatacaccgggattttaccatg

SEQ ID NO: 20171 - DNA, 179 bp, Homo sapiens; identical to SEQ ID NO: 4876
  chr13:21099486-21099665
  hypo

SEQ ID NO: 20172 - DNA, 57 bp, Homo sapiens; identical to SEQ ID NO: 4877
  chr13:21099698-21099755
  hypo

SEQ ID NO: 20173 - DNA, 31 bp, Homo sapiens; identical to SEQ ID NO: 4878
  chr13:21099808-21099839
  hypo

SEQ ID NO: 20174 - DNA, 36 bp, Homo sapiens; identical to SEQ ID NO: 4879
  chr13:21099858-21099894
  hypo

SEQ ID NO: 20175 - DNA, 53 bp, Homo sapiens; identical to SEQ ID NO: 4880
  chr13:21099936-21099989
  hypo

SEQ ID NO: 20176 - DNA, 22 bp, Homo sapiens
  chr13:21363547-21363569
  hypo
ttttgagacagagtctcgctct

SEQ ID NO: 20177 - DNA, 31 bp, Homo sapiens
  chr13:21562938-21562969
  hypo
tggtgggccgcgggaccggcctgcttgtggt

SEQ ID NO: 20178 - DNA, 184 bp, Homo sapiens; identical to SEQ ID NO: 4884
  chr13:21635571-21635755
  hypo

SEQ ID NO: 20179 - DNA, 143 bp, Homo sapiens; identical to SEQ ID NO: 4885
  chr13:21635777-21635920
  hypo

SEQ ID NO: 20180 - DNA, 50 bp, Homo sapiens
  chr13:21677729-21677779
  hypo
catgcgtgacatcactcgagaaaggaataaacccacgttttggcttaatc

SEQ ID NO: 20181 - DNA, 30 bp, Homo sapiens
  chr13:21752068-21752098
  hypo
gagccgagagcatgccgctgcactccagcc

SEQ ID NO: 20182 - DNA, 44 bp, Homo sapiens
  chr13:21894156-21894200
  hypo
gccgtcttctacgtcccgagatctgcttgcggtctggaggacct

SEQ ID NO: 20183 - DNA, 24 bp, Homo sapiens
  chr13:21944175-21944199
  hypo
aatacaaataaaaagtcgggtgcg

SEQ ID NO: 20184 - DNA, 35 bp, Homo sapiens
  chr13:22048999-22049034
  hypo
ctttttttttttgagacggagtctcgctctgtcgc

SEQ ID NO: 20185 - DNA, 187 bp, Homo sapiens; identical to SEQ ID NO: 4888
  chr13:22245212-22245399
  hypo

SEQ ID NO: 20186 - DNA, 97 bp, Homo sapiens; identical to SEQ ID NO: 4889
  chr13:22247844-22247941
  hypo

SEQ ID NO: 20187 - DNA, 117 bp, Homo sapiens; identical to SEQ ID NO: 4890
  chr13:24040544-24040661
  hypo

SEQ ID NO: 20188 - DNA, 31 bp, Homo sapiens
  chr13:24289639-24289670
  hypo
gcggtggggccagctgcggtatggcggtggc

SEQ ID NO: 20189 - DNA, 36 bp, Homo sapiens
  chr13:24527675-24527711
  hypo
gccccgaatagctccccgacccgtccctgccatggg

SEQ ID NO: 20190 - DNA, 31 bp, Homo sapiens
  chr13:24631435-24631466
  hypo
acttctcggcctgtggcgctttgcactccca

SEQ ID NO: 20191 - DNA, 36 bp, Homo sapiens
  chr13:24718838-24718874
  hypo
ttcagactttggccagcgtggcgtagttggtgtttt

SEQ ID NO: 20192 - DNA, 370 bp, Homo sapiens; identical to SEQ ID NO: 4891
  chr13:24734819-24735189
  hypo

SEQ ID NO: 20193 - DNA, 353 bp, Homo sapiens; identical to SEQ ID NO: 4892
  chr13:24735198-24735551
  hypo

SEQ ID NO: 20194 - DNA, 31 bp, Homo sapiens
  chr13:24797365-24797396
  hypo
ccacatggaacaccctcgcctccttccggaa

SEQ ID NO: 20195 - DNA, 61 bp, Homo sapiens
  chr13:24797651-24797712
  hypo
gagcacacaccgctcccgcagcctccgcagagcctacggcctgggccgcatctgcctgctg

SEQ ID NO: 20196 - DNA, 49 bp, Homo sapiens
  chr13:24815547-24815596
  hypo
aggcgcatttgtgagacggcattactcagcgaaacgcagagtgttttgc

SEQ ID NO: 20197 - DNA, 31 bp, Homo sapiens
  chr13:24860470-24860501
  hypo
ggactggtggtggggccgcagtgaagataag

SEQ ID NO: 20198 - DNA, 61 bp, Homo sapiens
  chr13:24868947-24869008
  hypo
gcaagctggagagcatcgacaagatagctcgctggcaggtgtctatcgtgggctgggaggt

SEQ ID NO: 20199 - DNA, 31 bp, Homo sapiens
  chr13:24869026-24869057
  hypo
atgatcccatgccactcgcccttcccgcacc

SEQ ID NO: 20200 - DNA, 31 bp, Homo sapiens
  chr13:24966169-24966200
  hypo
cacgctcctttgagagcgcacagcagaactg

SEQ ID NO: 20201 - DNA, 35 bp, Homo sapiens
  chr13:25668696-25668731
  hypo
ctactctaggctaggcgcggcggctcacgcctgta

SEQ ID NO: 20202 - DNA, 31 bp, Homo sapiens
  chr13:27058903-27058934
  hypo
catggtctagaaggccgcgagtatctgccaa

SEQ ID NO: 20203 - DNA, 31 bp, Homo sapiens
  chr13:27556410-27556441
  hypo
caaaaccatctcactgcgctttatgggggat

SEQ ID NO: 20204 - DNA, 43 bp, Homo sapiens
  chr13:27620502-27620545
  hypo
atctacggcatcaccccgaaagcacttgcggggagaagcctcc

SEQ ID NO: 20205 - DNA, 31 bp, Homo sapiens
  chr13:27620587-27620618
  hypo
tagagggctggccaagcgagctcctgattcc

SEQ ID NO: 20206 - DNA, 36 bp, Homo sapiens
  chr13:27620645-27620681
  hypo
ctgaattatccagacacgcttcgtgtggaaccctgt

SEQ ID NO: 20207 - DNA, 38 bp, Homo sapiens; identical to SEQ ID NO: 4894
  chr13:27744843-27744881
  hypo

SEQ ID NO: 20208 - DNA, 31 bp, Homo sapiens; identical to SEQ ID NO: 4895
  chr13:27744945-27744976
  hypo

SEQ ID NO: 20209 - DNA, 31 bp, Homo sapiens
  chr13:27915231-27915262
  hypo
gaagcgcattgttaggcgattgagtcattat

SEQ ID NO: 20210 - DNA, 31 bp, Homo sapiens
  chr13:27934849-27934880
  hypo
aatagtgcctgcacctcggaggcactcagta

SEQ ID NO: 20211 - DNA, 31 bp, Homo sapiens
  chr13:28239908-28239939
  hypo
atgaacaaaaagagggcgataaggaaccagc

SEQ ID NO: 20212 - DNA, 108 bp, Homo sapiens
  chr13:28239991-28240099
  hypo
tacaagcacagcttccgcgctcgaggttccgccagttactccccgccacgaaagcggagcagccaggacaagtacgaaaagcggtccaaccggcggtgaggctggaac

SEQ ID NO: 20213 - DNA, 59 bp, Homo sapiens
  chr13:28745529-28745588
  hypo
ctacttggagttagtgcggactccagaggttaagagctcagtcacgcaagactgctctc

SEQ ID NO: 20214 - DNA, 71 bp, Homo sapiens
  chr13:28745597-28745668
  hypo
taccagtgacatgtagcgggtcctcagattatccacacttctatccgacttggctacaaattgggagttcc

SEQ ID NO: 20215 - DNA, 55 bp, Homo sapiens; identical to SEQ ID NO: 4896
  chr13:29292807-29292862
  hypo

SEQ ID NO: 20216 - DNA, 92 bp, Homo sapiens; identical to SEQ ID NO: 4897
  chr13:29293054-29293146
  hypo

SEQ ID NO: 20217 - DNA, 66 bp, Homo sapiens; identical to SEQ ID NO: 4898
  chr13:29293161-29293227
  hypo

SEQ ID NO: 20218 - DNA, 53 bp, Homo sapiens; identical to SEQ ID NO: 4899
  chr13:29293228-29293281
  hypo

SEQ ID NO: 20219 - DNA, 31 bp, Homo sapiens
  chr13:30079839-30079870
  hypo
ataccacctgtctcttcgtggcatttgggag

SEQ ID NO: 20220 - DNA, 31 bp, Homo sapiens
  chr13:30087321-30087352
  hypo
gggtggggaggatgctcgggtctctcccact

SEQ ID NO: 20221 - DNA, 87 bp, Homo sapiens
  chr13:30106971-30107058
  hypo
agaattatgatcactgcgaatatgtcggggttttcagccagcacgccgggggcgttcagagtcatgtgtgtccgtgagaactccccg

SEQ ID NO: 20222 - DNA, 53 bp, Homo sapiens
  chr13:30141665-30141718
  hypo
tcccacactgaatgttcggaatgctcaaagggcttggccgcagccttttctct

SEQ ID NO: 20223 - DNA, 25 bp, Homo sapiens
  chr13:30149063-30149088
  hypo
agccaccgtgcgtggccagagcagc

SEQ ID NO: 20224 - DNA, 37 bp, Homo sapiens
  chr13:30314400-30314437
  hypo
gaatgccatgtgaacacgaaatcggagactggggtga

SEQ ID NO: 20225 - DNA, 31 bp, Homo sapiens
  chr13:30547747-30547778
  hypo
gtgggcaaggtgaacacgttgggcggttaca

SEQ ID NO: 20226 - DNA, 31 bp, Homo sapiens
  chr13:30573485-30573516
  hypo
ggtcgcattgactttccgagtctcagtttta

SEQ ID NO: 20227 - DNA, 15 bp, Homo sapiens
  chr13:30707188-30707203
  hypo
catagcgacggggac

SEQ ID NO: 20228 - DNA, 31 bp, Homo sapiens
  chr13:30707330-30707361
  hypo
ctttccccagagccagcgggctggggttctt

SEQ ID NO: 20229 - DNA, 31 bp, Homo sapiens
  chr13:30707390-30707421
  hypo
aggaccagccatttgacgcccttgtccactg

SEQ ID NO: 20230 - DNA, 31 bp, Homo sapiens
  chr13:30714428-30714459
  hypo
tctcccaatgcacaggcgcatgtcctgagct

SEQ ID NO: 20231 - DNA, 43 bp, Homo sapiens; identical to SEQ ID NO: 4900
  chr13:30982668-30982711
  hypo

SEQ ID NO: 20232 - DNA, 31 bp, Homo sapiens
  chr13:30999761-30999792
  hypo
acacttaccatagtaccgtttaggtgttcat

SEQ ID NO: 20233 - DNA, 31 bp, Homo sapiens
  chr13:31185333-31185364
  hypo
tgctttttttttgagacgcagtctcgcttta

SEQ ID NO: 20234 - DNA, 31 bp, Homo sapiens
  chr13:31208406-31208437
  hypo
acgaagggaagattcacgttgccagtggaac

SEQ ID NO: 20235 - DNA, 51 bp, Homo sapiens
  chr13:31208502-31208553
  hypo
tgtttctggaattttccgcttaatattttcagaccacggttgagttcaggt

SEQ ID NO: 20236 - DNA, 51 bp, Homo sapiens
  chr13:31208562-31208613
  hypo
cataggaagcaaaacacggatgaagagggaccacttcgtattgcctaattt

SEQ ID NO: 20237 - DNA, 34 bp, Homo sapiens
  chr13:31742916-31742950
  hypo
gcccaggcagataacccgccggctggtgcctccc

SEQ ID NO: 20238 - DNA, 62 bp, Homo sapiens
  chr13:31742952-31743014
  hypo
ctcccaaagctcctttcgcctgggttctggtgtgccatccatgcttacgcatctctctgtgc

SEQ ID NO: 20239 - DNA, 31 bp, Homo sapiens
  chr13:31743146-31743177
  hypo
tgctcccaatcattcccggtcatatgaaaaa

SEQ ID NO: 20240 - DNA, 74 bp, Homo sapiens
  chr13:32526647-32526721
  hypo
ttccttaggcgtcctgcgtcccccgattcctgctccctggttgccgcgtccttggctggcgtcagaaaaatggc

SEQ ID NO: 20241 - DNA, 64 bp, Homo sapiens
  chr13:32526756-32526820
  hypo
acaagttcaaatatggcgatgcagaaaggagattctacgaacagatgaacgggcctgtggccgg

SEQ ID NO: 20242 - DNA, 31 bp, Homo sapiens
  chr13:32527132-32527163
  hypo
ttgacctgtttggcagcgacaatgaggcaac

SEQ ID NO: 20243 - DNA, 80 bp, Homo sapiens
  chr13:32885595-32885675
  hypo
gccttgctctccgcttcgtccccatctctccgcaggcggatcaagcccctgcggccggtggcgggcgaagtgaccccaca

SEQ ID NO: 20244 - DNA, 31 bp, Homo sapiens; identical to SEQ ID NO: 4901
  chr13:33000976-33001007
  hypo

SEQ ID NO: 20245 - DNA, 49 bp, Homo sapiens; identical to SEQ ID NO: 4902
  chr13:33001026-33001075
  hypo

SEQ ID NO: 20246 - DNA, 31 bp, Homo sapiens; identical to SEQ ID NO: 4903
  chr13:33001096-33001127
  hypo

SEQ ID NO: 20247 - DNA, 138 bp, Homo sapiens; identical to SEQ ID NO: 4904
  chr13:33001234-33001372
  hypo

SEQ ID NO: 20248 - DNA, 31 bp, Homo sapiens
  chr13:33103875-33103906
  hypo
tttttagacaagagtccgactctattgccca

SEQ ID NO: 20249 - DNA, 31 bp, Homo sapiens
  chr13:33113988-33114019
  hypo
ttacgtgaggttgtggcgttctcagtgtgtt

SEQ ID NO: 20250 - DNA, 31 bp, Homo sapiens; identical to SEQ ID NO: 4905
  chr13:33162267-33162298
  hypo

SEQ ID NO: 20251 - DNA, 34 bp, Homo sapiens; identical to SEQ ID NO: 4906
  chr13:39612008-39612042
  hypo

SEQ ID NO: 20252 - DNA, 31 bp, Homo sapiens
  chr13:40956513-40956544
  hypo
ggcagaggccaggcagcgttttggggtggga

SEQ ID NO: 20253 - DNA, 67 bp, Homo sapiens; identical to SEQ ID NO: 4907
  chr13:41364042-41364109
  hypo

SEQ ID NO: 20254 - DNA, 51 bp, Homo sapiens; identical to SEQ ID NO: 4908
  chr13:41364149-41364200
  hypo

SEQ ID NO: 20255 - DNA, 8 bp, Homo sapiens
  chr13:41561357-41561365
  hypo
cacagcac

SEQ ID NO: 20256 - DNA, 24 bp, Homo sapiens
  chr13:41687832-41687856
  hypo
ttttttttttttgaaacggggtct

SEQ ID NO: 20257 - DNA, 84 bp, Homo sapiens; identical to SEQ ID NO: 4909
  chr13:42615144-42615228
  hypo

SEQ ID NO: 20258 - DNA, 57 bp, Homo sapiens; identical to SEQ ID NO: 4910
  chr13:42615948-42616005
  hypo

SEQ ID NO: 20259 - DNA, 31 bp, Homo sapiens
  chr13:43179216-43179247
  hypo
ccatgtgtttctttctcgatgaggctctcat

SEQ ID NO: 20260 - DNA, 94 bp, Homo sapiens
  chr13:43543175-43543269
  hypo
gatccataggtggccccgccctccctcattccggcagcggctgtgcttgcttacctagccgtctgggcaccaggtgaaccggtttagctctgtt

SEQ ID NO: 20261 - DNA, 46 bp, Homo sapiens
  chr13:43543292-43543338
  hypo
tggccagctcctgctccgcaactaagccaggcgagaaatatcaaat

SEQ ID NO: 20262 - DNA, 101 bp, Homo sapiens; identical to SEQ ID NO: 4916
  chr13:43566058-43566159
  hypo

SEQ ID NO: 20263 - DNA, 203 bp, Homo sapiens; identical to SEQ ID NO: 4917
  chr13:43566176-43566379
  hypo

SEQ ID NO: 20264 - DNA, 136 bp, Homo sapiens; identical to SEQ ID NO: 4918
  chr13:43566384-43566520
  hypo

SEQ ID NO: 20265 - DNA, 46 bp, Homo sapiens; identical to SEQ ID NO: 4919
  chr13:43566530-43566576
  hypo

SEQ ID NO: 20266 - DNA, 42 bp, Homo sapiens
  chr13:43598747-43598789
  hypo
gggattacaggcgtgagccaccgcgtccggcatatttttaag

SEQ ID NO: 20267 - DNA, 70 bp, Homo sapiens
  chr13:43621004-43621074
  hypo
gtgaggtgcacattgccgcacctgatcaggctaaaggctcgcctttgttactgcacggctaagtgcccta

SEQ ID NO: 20268 - DNA, 31 bp, Homo sapiens
  chr13:44543380-44543411
  hypo
agggcctgaggagggccgctggagacccttc

SEQ ID NO: 20269 - DNA, 100 bp, Homo sapiens
  chr13:44543797-44543897
  hypo
cgtggtacagctggaccgctgggacctccacgctgagcccaaccccgaggcagggcctgaggaccgagatgaaggcgccaccgaccggttgcccctggat

SEQ ID NO: 20270 - DNA, 62 bp, Homo sapiens
  chr13:44543913-44543975
  hypo
tcagcctgggctttgacgcccacgtcaccctggagttccacgagtctcgagaggccaaccca

SEQ ID NO: 20271 - DNA, 31 bp, Homo sapiens; identical to SEQ ID NO: 4921
  chr13:44544528-44544559
  hypo

SEQ ID NO: 20272 - DNA, 36 bp, Homo sapiens
  chr13:44544878-44544914
  hypo
tcaccctgctcacccacgccccggtcactgcaaggg

SEQ ID NO: 20273 - DNA, 115 bp, Homo sapiens
  chr13:44544948-44545063
  hypo
aggctgccaagaggaacgacttctgtaagctccaggagctgcaccgagctgggggcgacatcatgcaccgagacaagcagagtcgcacgctcctgcaccacgcagtcagcactgg

SEQ ID NO: 20274 - DNA, 21 bp, Homo sapiens
  chr13:44935631-44935652
  hypo
tataggcgtgaaccaccatgc

SEQ ID NO: 20275 - DNA, 38 bp, Homo sapiens
  chr13:44947060-44947098
  hypo
ccagtgtctgggaggcgcgtaaacgcttccatttttat

SEQ ID NO: 20276 - DNA, 31 bp, Homo sapiens
  chr13:44947133-44947164
  hypo
agacactcagacccctcgggacaagggtggc

SEQ ID NO: 20277 - DNA, 24 bp, Homo sapiens
  chr13:44950895-44950919
  hypo
gcaagactccgtctaaaaaaaaaa

SEQ ID NO: 20278 - DNA, 18 bp, Homo sapiens
  chr13:44955224-44955242
  hypo
gggtagcatttggcagcg

SEQ ID NO: 20279 - DNA, 17 bp, Homo sapiens
  chr13:44955661-44955678
  hypo
agcgagactgcgtctca

SEQ ID NO: 20280 - DNA, 25 bp, Homo sapiens
  chr13:44969723-44969748
  hypo
aggaagactccgtctcaaaaaaaaa

SEQ ID NO: 20281 - DNA, 31 bp, Homo sapiens; identical to SEQ ID NO: 4922
  chr13:44991618-44991649
  hypo

SEQ ID NO: 20282 - DNA, 31 bp, Homo sapiens; identical to SEQ ID NO: 4923
  chr13:44991670-44991701
  hypo

SEQ ID NO: 20283 - DNA, 31 bp, Homo sapiens; identical to SEQ ID NO: 4924
  chr13:44991733-44991764
  hypo

SEQ ID NO: 20284 - DNA, 38 bp, Homo sapiens; identical to SEQ ID NO: 4925
  chr13:44991786-44991824
  hypo

SEQ ID NO: 20285 - DNA, 31 bp, Homo sapiens
  chr13:44994997-44995028
  hypo
gtggcatgggctgccccggtcctggagccca

SEQ ID NO: 20286 - DNA, 31 bp, Homo sapiens
  chr13:45302393-45302424
  hypo
caaattggggttcccacgactccctctttgc

SEQ ID NO: 20287 - DNA, 23 bp, Homo sapiens
  chr13:45459147-45459170
  hypo
ataatgaacaagaaaacgactta

SEQ ID NO: 20288 - DNA, 31 bp, Homo sapiens
  chr13:45465264-45465295
  hypo
ggtcacattgctacaccgaaagacagctcca

SEQ ID NO: 20289 - DNA, 46 bp, Homo sapiens
  chr13:45500373-45500419
  hypo
tgcaagagagaagctacgcagcagatgaatccgaaccaccagcagc

SEQ ID NO: 20290 - DNA, 31 bp, Homo sapiens
  chr13:45500453-45500484
  hypo
tgagaaaagttaaaagcggtttattcagaac

SEQ ID NO: 20291 - DNA, 31 bp, Homo sapiens
  chr13:45500496-45500527
  hypo
gggagccagccaccatcgcttgtgttttggt

SEQ ID NO: 20292 - DNA, 31 bp, Homo sapiens
  chr13:45500535-45500566
  hypo
aaggcaggcagaggagcgggaaagctttaaa

SEQ ID NO: 20293 - DNA, 31 bp, Homo sapiens
  chr13:45564772-45564803
  hypo
atttgtagactagcaccgacacccagttgga

SEQ ID NO: 20294 - DNA, 31 bp, Homo sapiens
  chr13:45564850-45564881
  hypo
ttcttcctggtctacccggaggctatgtttc

SEQ ID NO: 20295 - DNA, 26 bp, Homo sapiens
  chr13:45926320-45926346
  hypo
agaatagcgaacgcttccttgtgcca

SEQ ID NO: 20296 - DNA, 46 bp, Homo sapiens
  chr13:45926360-45926406
  hypo
gtcatgactcaggcttcgggagcctcaggctcgcagctacaggctt

SEQ ID NO: 20297 - DNA, 31 bp, Homo sapiens
  chr13:45926421-45926452
  hypo
aaatgctaatggggcccgagtcagaaagaaa

SEQ ID NO: 20298 - DNA, 31 bp, Homo sapiens
  chr13:45938927-45938958
  hypo
aatggcctcgtacacacgctagagtggaaag

SEQ ID NO: 20299 - DNA, 42 bp, Homo sapiens
  chr13:45939904-45939946
  hypo
tcctcttaaacatatccgggcctggcatggtggctcacgcct

SEQ ID NO: 20300 - DNA, 31 bp, Homo sapiens
  chr13:46048626-46048657
  hypo
atacagacagtgtatccgtatcagctaagag

SEQ ID NO: 20301 - DNA, 31 bp, Homo sapiens
  chr13:48759963-48759994
  hypo
ttacactgaaagagcccgattttcattagct

SEQ ID NO: 20302 - DNA, 31 bp, Homo sapiens
  chr13:49922187-49922218
  hypo
cagggagaccataggacgctggcaggctgaa

SEQ ID NO: 20303 - DNA, 31 bp, Homo sapiens
  chr13:49922220-49922251
  hypo
gaggcctgtggacacccgagcaggctgcaaa

SEQ ID NO: 20304 - DNA, 35 bp, Homo sapiens
  chr13:49922252-49922287
  hypo
tccttcccttcaaacccggacgctagaggccttgt

SEQ ID NO: 20305 - DNA, 31 bp, Homo sapiens
  chr13:49922316-49922347
  hypo
ggaaatgatggcattgcggttcctttcctct

SEQ ID NO: 20306 - DNA, 22 bp, Homo sapiens
  chr13:50367841-50367863
  hypo
gataaagagctgctttcggccg

SEQ ID NO: 20307 - DNA, 36 bp, Homo sapiens
  chr13:50411346-50411382
  hypo
gacagccccaactgctcgagacgtgcccaaaggtga

SEQ ID NO: 20308 - DNA, 49 bp, Homo sapiens
  chr13:50411441-50411490
  hypo
agggatccccaggccccgatagatgctagagattcgacaggaggctgag

SEQ ID NO: 20309 - DNA, 31 bp, Homo sapiens
  chr13:50411498-50411529
  hypo
tggatggggtatcagccgaacccactgccac

SEQ ID NO: 20310 - DNA, 31 bp, Homo sapiens
  chr13:52390198-52390229
  hypo
acacggcgctgcactccgcaatgcctgtagc

SEQ ID NO: 20311 - DNA, 31 bp, Homo sapiens
  chr13:52390971-52391002
  hypo
ctgagcgccaggactccgactgcaaagaggt

SEQ ID NO: 20312 - DNA, 40 bp, Homo sapiens
  chr13:52532585-52532625
  hypo
atgcttgtggccaggacgatgagcacgtccatgttggctg

SEQ ID NO: 20313 - DNA, 49 bp, Homo sapiens
  chr13:52532639-52532688
  hypo
gatttgtaggcctgaacgtagaagtaccacccaccgaggagctgaaaga

SEQ ID NO: 20314 - DNA, 31 bp, Homo sapiens
  chr13:52532719-52532750
  hypo
aggagagttcaatgagcgacacagggccaag

SEQ ID NO: 20315 - DNA, 31 bp, Homo sapiens
  chr13:52532773-52532804
  hypo
tagctttgtgcacagtcgtgacagtacttct

SEQ ID NO: 20316 - DNA, 31 bp, Homo sapiens; identical to SEQ ID NO: 4939
  chr13:52702935-52702966
  hypo

SEQ ID NO: 20317 - DNA, 33 bp, Homo sapiens
  chr13:52770511-52770544
  hypo
tagtcataaagagggccgggcgcggtggctgac

SEQ ID NO: 20318 - DNA, 31 bp, Homo sapiens
  chr13:53171462-53171493
  hypo
agtctctgcagcctcccgttctctaggcctg

SEQ ID NO: 20319 - DNA, 61 bp, Homo sapiens
  chr13:73636815-73636876
  hypo
atagaaggagtaaccccgatttggagaaacgacgcatccactactgcgattaccctggtat

SEQ ID NO: 20320 - DNA, 18 bp, Homo sapiens
  chr13:73636956-73636974
  hypo
acgcgcgtgcccttttca

SEQ ID NO: 20321 - DNA, 31 bp, Homo sapiens
  chr13:73824307-73824338
  hypo
acaagatgagggtttacgttgatctcattta

SEQ ID NO: 20322 - DNA, 31 bp, Homo sapiens
  chr13:73824356-73824387
  hypo
ctggtctgttatatggcggctccctgatgtc

SEQ ID NO: 20323 - DNA, 31 bp, Homo sapiens
  chr13:73824429-73824460
  hypo
atggttgttgcagctccggcaatcacaacca

SEQ ID NO: 20324 - DNA, 40 bp, Homo sapiens
  chr13:73824471-73824511
  hypo
gaaaaaagaggaagagcggcatgagcgaagaggatctgct

SEQ ID NO: 20325 - DNA, 185 bp, Homo sapiens; identical to SEQ ID NO: 4947
  chr13:74709333-74709518
  hypo

SEQ ID NO: 20326 - DNA, 36 bp, Homo sapiens; identical to SEQ ID NO: 4948
  chr13:75794020-75794056
  hypo

SEQ ID NO: 20327 - DNA, 31 bp, Homo sapiens
  chr13:76043220-76043251
  hypo
gataaaaaactaagctcgcaaagaatggcag

SEQ ID NO: 20328 - DNA, 218 bp, Homo sapiens; identical to SEQ ID NO: 4950
  chr13:76055017-76055235
  hypo

SEQ ID NO: 20329 - DNA, 86 bp, Homo sapiens; identical to SEQ ID NO: 4951
  chr13:76055318-76055404
  hypo

SEQ ID NO: 20330 - DNA, 76 bp, Homo sapiens; identical to SEQ ID NO: 4952
  chr13:76055407-76055483
  hypo

SEQ ID NO: 20331 - DNA, 154 bp, Homo sapiens; identical to SEQ ID NO: 4953
  chr13:76055484-76055638
  hypo

SEQ ID NO: 20332 - DNA, 82 bp, Homo sapiens; identical to SEQ ID NO: 4954
  chr13:76055648-76055730
  hypo

SEQ ID NO: 20333 - DNA, 326 bp, Homo sapiens; identical to SEQ ID NO: 4955
  chr13:76055734-76056060
  hypo

SEQ ID NO: 20334 - DNA, 33 bp, Homo sapiens
  chr13:76291200-76291233
  hypo
gtaagaacactcttctcggccgggcgcggtggc

SEQ ID NO: 20335 - DNA, 73 bp, Homo sapiens
  chr13:77553617-77553690
  hypo
ttttttgtctgaagcccggctgggtcgctggagatccagcggagtgtgcggagggaggcgtgttggatacctt

SEQ ID NO: 20336 - DNA, 17 bp, Homo sapiens
  chr13:78081917-78081934
  hypo
ggcgtaactcatagtaa

SEQ ID NO: 20337 - DNA, 42 bp, Homo sapiens; identical to SEQ ID NO: 4957
  chr13:78272093-78272135
  hypo

SEQ ID NO: 20338 - DNA, 92 bp, Homo sapiens; identical to SEQ ID NO: 4958
  chr13:78272140-78272232
  hypo

SEQ ID NO: 20339 - DNA, 243 bp, Homo sapiens; identical to SEQ ID NO: 4959
  chr13:78272373-78272616
  hypo

SEQ ID NO: 20340 - DNA, 24 bp, Homo sapiens
  chr13:80902405-80902429
  hypo
caccgcgcccggccctgcctggct

SEQ ID NO: 20341 - DNA, 215 bp, Homo sapiens; identical to SEQ ID NO: 4972
  chr13:80916946-80917161
  hypo

SEQ ID NO: 20342 - DNA, 85 bp, Homo sapiens; identical to SEQ ID NO: 4973
  chr13:80917191-80917276
  hypo

SEQ ID NO: 20343 - DNA, 31 bp, Homo sapiens
  chr13:86086567-86086598
  hypo
agggaagacttctcaccgataaaggatctga

SEQ ID NO: 20344 - DNA, 31 bp, Homo sapiens
  chr13:86086624-86086655
  hypo
agaggagtgcattctccggtgtctggaaagg

SEQ ID NO: 20345 - DNA, 58 bp, Homo sapiens
  chr13:86086656-86086714
  hypo
aatatataaggcatgtcggttgatctgcatctgggagagttcacggggagtatgcagg

SEQ ID NO: 20346 - DNA, 31 bp, Homo sapiens
  chr13:86086738-86086769
  hypo
actcataaaaatatgacgttaagcctgtttg

SEQ ID NO: 20347 - DNA, 31 bp, Homo sapiens; identical to SEQ ID NO: 4976
  chr13:90384876-90384907
  hypo

SEQ ID NO: 20348 - DNA, 144 bp, Homo sapiens; identical to SEQ ID NO: 4977
  chr13:95201518-95201662
  hypo

SEQ ID NO: 20349 - DNA, 21 bp, Homo sapiens
  chr13:95990699-95990720
  hypo
ttttgagatagagtttcgctc

SEQ ID NO: 20350 - DNA, 31 bp, Homo sapiens
  chr13:96126086-96126117
  hypo
ccaggctgttaagcttcggagggaacaaacc

SEQ ID NO: 20351 - DNA, 31 bp, Homo sapiens
  chr13:96126118-96126149
  hypo
ctgccctgaaggggctcgcccacagtgaagg

SEQ ID NO: 20352 - DNA, 31 bp, Homo sapiens
  chr13:96353303-96353334
  hypo
cctattccagccttttcgacaaaggtagcat

SEQ ID NO: 20353 - DNA, 56 bp, Homo sapiens
  chr13:96353367-96353423
  hypo
cttcaggggaatcccccgagggctgtccagtggaactttccgcgatgatgggagat

SEQ ID NO: 20354 - DNA, 31 bp, Homo sapiens
  chr13:96353457-96353488
  hypo
gttggagcttaggtcacgctaccccaaaata

SEQ ID NO: 20355 - DNA, 90 bp, Homo sapiens
  chr13:96409577-96409667
  hypo
gtaagaaagtgaaaaacgtgctttccttcctccgttcttctctgtcctttcacgtgcctacatgtatttgcttcccggtaagtttttggg

SEQ ID NO: 20356 - DNA, 31 bp, Homo sapiens
  chr13:96409700-96409731
  hypo
tgctcatggaccatatcggtagaaatcaagg

SEQ ID NO: 20357 - DNA, 61 bp, Homo sapiens; identical to SEQ ID NO: 4980
  chr13:96705466-96705527
  hypo

SEQ ID NO: 20358 - DNA, 240 bp, Homo sapiens; identical to SEQ ID NO: 4981
  chr13:96705577-96705817
  hypo

SEQ ID NO: 20359 - DNA, 120 bp, Homo sapiens; identical to SEQ ID NO: 4982
  chr13:96705823-96705943
  hypo

SEQ ID NO: 20360 - DNA, 31 bp, Homo sapiens
  chr13:97668667-97668698
  hypo
agaaaaagtgttgacacgttgctgctctgtt

SEQ ID NO: 20361 - DNA, 48 bp, Homo sapiens
  chr13:98528397-98528445
  hypo
tttgttaccatgtgtacggtaataaaaaaatggcgcaactcaggcaga

SEQ ID NO: 20362 - DNA, 31 bp, Homo sapiens
  chr13:98528478-98528509
  hypo
ggctaccagatattcacgccctatgcaaatg

SEQ ID NO: 20363 - DNA, 31 bp, Homo sapiens
  chr13:98688093-98688124
  hypo
gactggcccaagcccacgcaagagcactttc

SEQ ID NO: 20364 - DNA, 40 bp, Homo sapiens
  chr13:98695034-98695074
  hypo
acaggcgtgagccaccgcgcccggccggattcaaaaatta

SEQ ID NO: 20365 - DNA, 59 bp, Homo sapiens
  chr13:98761015-98761074
  hypo
ttcatcatcgcaaacacgtatcacttctttgtattgggaacattcgctatcccccttct

SEQ ID NO: 20366 - DNA, 4 bp, Homo sapiens
  chr13:98761104-98761108
  hypo
atag

SEQ ID NO: 20367 - DNA, 31 bp, Homo sapiens
  chr13:98768944-98768975
  hypo
ccatcccagactatggcgctttttacagcag

SEQ ID NO: 20368 - DNA, 31 bp, Homo sapiens
  chr13:98769016-98769047
  hypo
tccctctggatatctgcgtctttttcacact

SEQ ID NO: 20369 - DNA, 6 bp, Homo sapiens
  chr13:98769085-98769091
  hypo
tggagt

SEQ ID NO: 20370 - DNA, 148 bp, Homo sapiens; identical to SEQ ID NO: 4985
  chr13:98795358-98795506
  hypo

SEQ ID NO: 20371 - DNA, 37 bp, Homo sapiens; identical to SEQ ID NO: 4986
  chr13:98795538-98795575
  hypo

SEQ ID NO: 20372 - DNA, 52 bp, Homo sapiens; identical to SEQ ID NO: 4987
  chr13:98795635-98795687
  hypo

SEQ ID NO: 20373 - DNA, 53 bp, Homo sapiens
  chr13:98829227-98829280
  hypo
tcaggcgccgcctcctcgcccctcctgtcgccgtgagccgccttctgccagct

SEQ ID NO: 20374 - DNA, 67 bp, Homo sapiens
  chr13:98829314-98829381
  hypo
ggctgagccactgtgtcgccctcgtccccgctgctgctgctctctccgtgctcggggtcgcaggccg

SEQ ID NO: 20375 - DNA, 22 bp, Homo sapiens
  chr13:98829879-98829901
  hypo
gacagagcgagaccctgtctca

SEQ ID NO: 20376 - DNA, 31 bp, Homo sapiens
  chr13:98861198-98861229
  hypo
aatgagatttggaaaccggatggttttcctg

SEQ ID NO: 20377 - DNA, 31 bp, Homo sapiens
  chr13:98969018-98969049
  hypo
tggtttgagcagccaccgctgtgatggaacc

SEQ ID NO: 20378 - DNA, 31 bp, Homo sapiens
  chr13:98981024-98981055
  hypo
aggtggcccttgagcacggacagcctggatc

SEQ ID NO: 20379 - DNA, 62 bp, Homo sapiens
  chr13:98981084-98981146
  hypo
ggtgggacagagaggacggcgagagatttcctcactactcagaacagcgggaaattcaaaac

SEQ ID NO: 20380 - DNA, 31 bp, Homo sapiens
  chr13:98981181-98981212
  hypo
ttctatttaaaattgacgaagggtaactgaa

SEQ ID NO: 20381 - DNA, 31 bp, Homo sapiens
  chr13:99045547-99045578
  hypo
tcagagcatgggagggcgcagccacatcctc

SEQ ID NO: 20382 - DNA, 171 bp, Homo sapiens
  chr13:99047502-99047673
  hypo
catttggagaaggtgccgaatctccagggggccagagctgccggcgaggaaaggaaccgaaggtttccgccggggagccggggtcgcacccgagccctgcgccgaggagaagccccgcgggtaacaagcaggcggacggagccgcctcggcgcccacggaggaagaggagg

SEQ ID NO: 20383 - DNA, 49 bp, Homo sapiens
  chr13:99047821-99047870
  hypo
acaagcgtcccgatcccggtcccgatcccggtcccggtcccaaacaaat

SEQ ID NO: 20384 - DNA, 31 bp, Homo sapiens
  chr13:99054006-99054037
  hypo
agtgaaagcaattaaacgtcttggtagatgc

SEQ ID NO: 20385 - DNA, 31 bp, Homo sapiens
  chr13:99074470-99074501
  hypo
tgagcttggagggccacgcagtggggccgac

SEQ ID NO: 20386 - DNA, 31 bp, Homo sapiens; identical to SEQ ID NO: 4989
  chr13:99129086-99129117
  hypo

SEQ ID NO: 20387 - DNA, 115 bp, Homo sapiens; identical to SEQ ID NO: 4990
  chr13:99229763-99229878
  hypo

SEQ ID NO: 20388 - DNA, 46 bp, Homo sapiens; identical to SEQ ID NO: 4991
  chr13:99229888-99229934
  hypo

SEQ ID NO: 20389 - DNA, 42 bp, Homo sapiens; identical to SEQ ID NO: 4992
  chr13:99229937-99229979
  hypo

SEQ ID NO: 20390 - DNA, 31 bp, Homo sapiens
  chr13:99336418-99336449
  hypo
taagacagtgtgtgtacgtgtggcttaaata

SEQ ID NO: 20391 - DNA, 53 bp, Homo sapiens
  chr13:99376080-99376133
  hypo
agttcaaggaaaaagacgaagacttaaggcatcaaatgcgcacaaggtgggag

SEQ ID NO: 20392 - DNA, 49 bp, Homo sapiens
  chr13:99376150-99376199
  hypo
tgagcaccaactcacacgtgcacaggaaggctgtcgggggtgccatcat

SEQ ID NO: 20393 - DNA, 31 bp, Homo sapiens
  chr13:99376256-99376287
  hypo
tgtagacaatggagagcgacacaatggtcct

SEQ ID NO: 20394 - DNA, 43 bp, Homo sapiens
  chr13:99427800-99427843
  hypo
ccaacaagagcttagacggaggcttctccgccgtggctgtact

SEQ ID NO: 20395 - DNA, 31 bp, Homo sapiens; identical to SEQ ID NO: 4993
  chr13:99739097-99739128
  hypo

SEQ ID NO: 20396 - DNA, 1 bp, Homo sapiens
  chr13:99851416-99851417
  hypo
g

SEQ ID NO: 20397 - DNA, 18 bp, Homo sapiens
  chr13:99851656-99851674
  hypo
aaacgaacaaaacaagac

SEQ ID NO: 20398 - DNA, 31 bp, Homo sapiens
  chr13:99851675-99851706
  hypo
gtgaaaatgaactttacgaataaagcctaaa

SEQ ID NO: 20399 - DNA, 31 bp, Homo sapiens
  chr13:99851786-99851817
  hypo
ggactgtgttgatctacgaatcacagattta

SEQ ID NO: 20400 - DNA, 31 bp, Homo sapiens
  chr13:99863150-99863181
  hypo
ccaccatgctgggccccgctttttccctttg

SEQ ID NO: 20401 - DNA, 31 bp, Homo sapiens
  chr13:99870196-99870227
  hypo
ttcttgccactaaccacgcatttccccactt

SEQ ID NO: 20402 - DNA, 31 bp, Homo sapiens
  chr13:100042130-100042161
  hypo
tgaaacatagggggctcgcaggtttgtagaa

SEQ ID NO: 20403 - DNA, 79 bp, Homo sapiens
  chr13:100068638-100068717
  hypo
ctttgctcattgatgtcggtagacatgaggacgcagggcactgacagctcccggactgtgctgcgcgggctgtggcccc

SEQ ID NO: 20404 - DNA, 40 bp, Homo sapiens
  chr13:100068733-100068773
  hypo
gagctcctctgcaccccgtgttctgcgtctccaccccatg

SEQ ID NO: 20405 - DNA, 21 bp, Homo sapiens
  chr13:100151880-100151901
  hypo
ttttttttttttgagacggag

SEQ ID NO: 20406 - DNA, 38 bp, Homo sapiens; identical to SEQ ID NO: 4997
  chr13:100634142-100634180
  hypo

SEQ ID NO: 20407 - DNA, 31 bp, Homo sapiens
  chr13:100678150-100678181
  hypo
atcggaatcataggttcgttacacacagtgc

SEQ ID NO: 20408 - DNA, 7 bp, Homo sapiens
  chr13:100678239-100678246
  hypo
ctgaaag

SEQ ID NO: 20409 - DNA, 81 bp, Homo sapiens
  chr13:101317802-101317883
  hypo
tctgggcccccacctcgcgtgaccagttcctgattccaacaggtgggcgcacctgatgggacagcccgtctgtaccagctc

SEQ ID NO: 20410 - DNA, 45 bp, Homo sapiens
  chr13:101317967-101318012
  hypo
gtccacagccaccatgcgacttagcacctgcgacttaagtgcttg

SEQ ID NO: 20411 - DNA, 68 bp, Homo sapiens
  chr13:101327900-101327968
  hypo
ccagtatcgcagaatccgatccgttgctccctctggactggaatccgtatcctcggcatttcatcatt

SEQ ID NO: 20412 - DNA, 31 bp, Homo sapiens
  chr13:101327970-101328001
  hypo
aagattctctactccacgtacccttgctgcc

SEQ ID NO: 20413 - DNA, 52 bp, Homo sapiens
  chr13:101328004-101328056
  hypo
ctcttctactttccatcgctgaagttggtgaaagaggcgcctgcccccagtt

SEQ ID NO: 20414 - DNA, 49 bp, Homo sapiens
  chr13:101328059-101328108
  hypo
tggtctctcaactccacgtgttcgttttcacactcggtgaaattgcctt

SEQ ID NO: 20415 - DNA, 31 bp, Homo sapiens; identical to SEQ ID NO: 5000
  chr13:103450907-103450938
  hypo

SEQ ID NO: 20416 - DNA, 52 bp, Homo sapiens; identical to SEQ ID NO: 5001
  chr13:103451012-103451064
  hypo

SEQ ID NO: 20417 - DNA, 147 bp, Homo sapiens; identical to SEQ ID NO: 5002
  chr13:103451071-103451218
  hypo

SEQ ID NO: 20418 - DNA, 29 bp, Homo sapiens
  chr13:103458965-103458994
  hypo
tgggctatttgctggccgggcatggtggc

SEQ ID NO: 20419 - DNA, 23 bp, Homo sapiens
  chr13:103464143-103464166
  hypo
attacaggcgtgagccaccgtgc

SEQ ID NO: 20420 - DNA, 34 bp, Homo sapiens
  chr13:106788530-106788564
  hypo
gcatgcccttgatcatcgccggtgaatagggtca

SEQ ID NO: 20421 - DNA, 31 bp, Homo sapiens
  chr13:106788570-106788601
  hypo
cttgcagtcagaacatcgcagtctaaaattc

SEQ ID NO: 20422 - DNA, 31 bp, Homo sapiens
  chr13:106788657-106788688
  hypo
tcaactttttcatctgcgaaatggagctaaa

SEQ ID NO: 20423 - DNA, 31 bp, Homo sapiens
  chr13:106788701-106788732
  hypo
ggaattgttgtaaatgcggtagtgtatatta

SEQ ID NO: 20424 - DNA, 31 bp, Homo sapiens
  chr13:106886316-106886347
  hypo
agggaggtttaccagccgcaatgggggagca

SEQ ID NO: 20425 - DNA, 31 bp, Homo sapiens
  chr13:108210141-108210172
  hypo
agtgaaaaagcaagcacggacacccatgcag

SEQ ID NO: 20426 - DNA, 125 bp, Homo sapiens; identical to SEQ ID NO: 5008
  chr13:108518547-108518672
  hypo

SEQ ID NO: 20427 - DNA, 31 bp, Homo sapiens
  chr13:109318504-109318535
  hypo
ataagaaagaaggacccgttttctgatgtga

SEQ ID NO: 20428 - DNA, 135 bp, Homo sapiens; identical to SEQ ID NO: 5009
  chr13:110434423-110434558
  hypo

SEQ ID NO: 20429 - DNA, 211 bp, Homo sapiens; identical to SEQ ID NO: 5010
  chr13:110434612-110434823
  hypo

SEQ ID NO: 20430 - DNA, 54 bp, Homo sapiens; identical to SEQ ID NO: 5011
  chr13:110434872-110434926
  hypo

SEQ ID NO: 20431 - DNA, 66 bp, Homo sapiens; identical to SEQ ID NO: 5012
  chr13:110435192-110435258
  hypo

SEQ ID NO: 20432 - DNA, 82 bp, Homo sapiens; identical to SEQ ID NO: 5013
  chr13:110435389-110435471
  hypo

SEQ ID NO: 20433 - DNA, 31 bp, Homo sapiens
  chr13:110435668-110435699
  hypo
ggtggcagtgggtactcgtgcatgctgggca

SEQ ID NO: 20434 - DNA, 101 bp, Homo sapiens
  chr13:110435710-110435811
  hypo
ccctccagggacaggcgcgtgggcctcaccgcccggccgcgctggcccaagaagccctccgggcggccgccgctaggccgcacgggcgaaggcactacagg

SEQ ID NO: 20435 - DNA, 75 bp, Homo sapiens
  chr13:110435852-110435927
  hypo
cctggctgggccctggcgtggcctgaggctccagacgctcctcctccaggatgcgccccacgggggagctcatga

SEQ ID NO: 20436 - DNA, 226 bp, Homo sapiens
  chr13:110436218-110436444
  hypo
tgtagccgcccccgctcgccgggaatgtcctgcccgccgcagaggtgggtgctggccccgcaggccccgcagaaggcacggcggcggcggcggcggcggcggccctgggctgcaagatctgcttgggggcggacacgctggcggggctcatgggcatgtagtcgtcgctcctgcagctgccgctcccactgcccgcgagggccgcgccgggcgtcatgggcatgta

SEQ ID NO: 20437 - DNA, 46 bp, Homo sapiens
  chr13:110436472-110436518
  hypo
gagctcctgtgggagccgatctcgatgtctccgtagtcctctgggt

SEQ ID NO: 20438 - DNA, 31 bp, Homo sapiens; identical to SEQ ID NO: 5014
  chr13:110439117-110439148
  hypo

SEQ ID NO: 20439 - DNA, 35 bp, Homo sapiens
  chr13:111109169-111109204
  hypo
tgcgtggaaccccaggcgtccgtggggctgatgcc

SEQ ID NO: 20440 - DNA, 39 bp, Homo sapiens
  chr13:111122537-111122576
  hypo
caggcgtgagccactgtgccaggccgcacacatcttcaa

SEQ ID NO: 20441 - DNA, 31 bp, Homo sapiens
  chr13:111122610-111122641
  hypo
tggacaactttccacccgagatgaaacatcc

SEQ ID NO: 20442 - DNA, 31 bp, Homo sapiens
  chr13:111135307-111135338
  hypo
aaacatgaagagggggcggtgaaaagcaggg

SEQ ID NO: 20443 - DNA, 46 bp, Homo sapiens
  chr13:111135397-111135443
  hypo
gtggaaggacataacacggtgccagagagaacgtggtccacacatg

SEQ ID NO: 20444 - DNA, 31 bp, Homo sapiens
  chr13:111135447-111135478
  hypo
gggttcaaaccctcacgcggacaggcatctc

SEQ ID NO: 20445 - DNA, 31 bp, Homo sapiens
  chr13:111171237-111171268
  hypo
cagagcttcataaccacgcaaggacgcttgc

SEQ ID NO: 20446 - DNA, 31 bp, Homo sapiens
  chr13:111171957-111171988
  hypo
cacagaagggaagatacgacctggactccac

SEQ ID NO: 20447 - DNA, 317 bp, Homo sapiens; identical to SEQ ID NO: 5015
  chr13:111213551-111213868
  hypo

SEQ ID NO: 20448 - DNA, 150 bp, Homo sapiens; identical to SEQ ID NO: 5016
  chr13:111213877-111214027
  hypo

SEQ ID NO: 20449 - DNA, 38 bp, Homo sapiens; identical to SEQ ID NO: 5017
  chr13:111214222-111214260
  hypo

SEQ ID NO: 20450 - DNA, 106 bp, Homo sapiens; identical to SEQ ID NO: 5018
  chr13:111214274-111214380
  hypo

SEQ ID NO: 20451 - DNA, 31 bp, Homo sapiens; identical to SEQ ID NO: 5019
  chr13:111268136-111268167
  hypo

SEQ ID NO: 20452 - DNA, 74 bp, Homo sapiens; identical to SEQ ID NO: 5020
  chr13:111268234-111268308
  hypo

SEQ ID NO: 20453 - DNA, 31 bp, Homo sapiens
  chr13:111277594-111277625
  hypo
acagcccggagctgatcgtccacccagttct

SEQ ID NO: 20454 - DNA, 66 bp, Homo sapiens
  chr13:111278360-111278426
  hypo
cacaccagagaggagccggcgcggagctccaggtgcggtgctgtgatgtgtcgggtgaccaagagg

SEQ ID NO: 20455 - DNA, 31 bp, Homo sapiens
  chr13:111289247-111289278
  hypo
ggcagcctcaccactgcgtgtcttggtttcc

SEQ ID NO: 20456 - DNA, 39 bp, Homo sapiens
  chr13:111306358-111306397
  hypo
ctcccagagcccaggccggaggaccggattggccttcag

SEQ ID NO: 20457 - DNA, 31 bp, Homo sapiens
  chr13:111306421-111306452
  hypo
agccccagtgagctcacgaggtaacagggtg

SEQ ID NO: 20458 - DNA, 54 bp, Homo sapiens
  chr13:111306453-111306507
  hypo
acactcacagggagcccgctgggtacacatgccagttgccgagggacttcctat

SEQ ID NO: 20459 - DNA, 31 bp, Homo sapiens
  chr13:111307807-111307838
  hypo
ccatatggtagaaaaccgactgaggccaaga

SEQ ID NO: 20460 - DNA, 31 bp, Homo sapiens
  chr13:111337749-111337780
  hypo
gatcctcagggcctcacgtgctcatcttacg

SEQ ID NO: 20461 - DNA, 38 bp, Homo sapiens
  chr13:111363565-111363603
  hypo
tttttctctttttttccggagatagtcttgctctgtcg

SEQ ID NO: 20462 - DNA, 28 bp, Homo sapiens
  chr13:111363842-111363870
  hypo
gagccaccgcgtccggccaagtgttata

SEQ ID NO: 20463 - DNA, 31 bp, Homo sapiens
  chr13:111363941-111363972
  hypo
gccaagactagaatagcgtgatctgtaagta

SEQ ID NO: 20464 - DNA, 31 bp, Homo sapiens
  chr13:111409606-111409637
  hypo
gtggccacccaaggacgcggcaaactctacg

SEQ ID NO: 20465 - DNA, 31 bp, Homo sapiens
  chr13:111481866-111481897
  hypo
ggctgcagagctagtacgcggcagagagagg

SEQ ID NO: 20466 - DNA, 98 bp, Homo sapiens
  chr13:112559679-112559777
  hypo
cagtggactagcaaggcgggaggagcacgtgtttggagtgtggccccacgtccccgcccccttctgcgtccccgcccccttccgcgtccccgccccct

SEQ ID NO: 20467 - DNA, 31 bp, Homo sapiens
  chr13:112559877-112559908
  hypo
tcaagctgccctctcacgcctgtgtgccagt

SEQ ID NO: 20468 - DNA, 31 bp, Homo sapiens
  chr13:112559942-112559973
  hypo
cacttcagtggcttcacgtgacacaagtttt

SEQ ID NO: 20469 - DNA, 54 bp, Homo sapiens
  chr13:112904338-112904392
  hypo
agcaacacccaggggacgcatgcatcgcccacctccatccgagggtctgctgct

SEQ ID NO: 20470 - DNA, 70 bp, Homo sapiens
  chr13:112904421-112904491
  hypo
tgtcagaggcactggtcgtgcccttagcgtgtctgcaccagagcgcgtgctcacacgaggatggccactg

SEQ ID NO: 20471 - DNA, 31 bp, Homo sapiens
  chr13:113097958-113097989
  hypo
cccaagggcagccccacgcctgcagtggtga

SEQ ID NO: 20472 - DNA, 31 bp, Homo sapiens
  chr13:113357650-113357681
  hypo
ctaatcgtaagtacctcgtaaaggcccaatc

SEQ ID NO: 20473 - DNA, 31 bp, Homo sapiens
  chr13:113364197-113364228
  hypo
ctgcaaataggagctgcgcccatgagggcat

SEQ ID NO: 20474 - DNA, 54 bp, Homo sapiens
  chr13:113366792-113366846
  hypo
tctgggggtgggggatcgtgaggtgagggacagcaaccccgtcctgtccttgtc

SEQ ID NO: 20475 - DNA, 31 bp, Homo sapiens
  chr13:113366849-113366880
  hypo
gcctctgagacaggcccgaaggacaggcttt

SEQ ID NO: 20476 - DNA, 46 bp, Homo sapiens
  chr13:113366888-113366934
  hypo
ctgtgggtgatggtcccggctggtcagctagcgtccacagcccctc

SEQ ID NO: 20477 - DNA, 104 bp, Homo sapiens
  chr13:113382653-113382757
  hypo
ttacctgtatgtaccacgttgtcagtgtccacgtgtggaggggccatgagactgtgcggcccggctccctgtgttacctgtatgtaccacgttgtcagtatcca

SEQ ID NO: 20478 - DNA, 31 bp, Homo sapiens
  chr13:113382872-113382903
  hypo
gttacctgtatgtaccgcgttgtcactatcc

SEQ ID NO: 20479 - DNA, 31 bp, Homo sapiens
  chr13:113418566-113418597
  hypo
gacacctgcggggccccggcctgttccttat

SEQ ID NO: 20480 - DNA, 31 bp, Homo sapiens
  chr13:113448116-113448147
  hypo
gtgcccgggttcgtctcgcagccagaggcca

SEQ ID NO: 20481 - DNA, 31 bp, Homo sapiens
  chr13:113463034-113463065
  hypo
ctccgctgggcactgacgggcatctcactgt

SEQ ID NO: 20482 - DNA, 112 bp, Homo sapiens
  chr13:113472457-113472569
  hypo
gcggtgaccgtgtgtgcgcttggtgacagggcggtgaccgtcggtgcgcttggtgacgggcagtgactgttggtgcgcttggtgacggggcggtgaccgttggtgcgcttgg

SEQ ID NO: 20483 - DNA, 38 bp, Homo sapiens
  chr13:113482706-113482744
  hypo
tgagtaggggggaaagcgcccagcggtgttgagtgggg

SEQ ID NO: 20484 - DNA, 36 bp, Homo sapiens
  chr13:113493551-113493587
  hypo
gcagtacacagaagaccgactcgaaagaagaaaagg

SEQ ID NO: 20485 - DNA, 48 bp, Homo sapiens
  chr13:113497307-113497355
  hypo
ctaaagccgggcaacacgtggctggggtggacacgctccctcctgtca

SEQ ID NO: 20486 - DNA, 55 bp, Homo sapiens
  chr13:113499308-113499363
  hypo
cagtccagttgccagccgctagcagtactagtccagttaccgggcactagccata

SEQ ID NO: 20487 - DNA, 46 bp, Homo sapiens
  chr13:113500587-113500633
  hypo
ccatgtactcaactgccggatgttgtctcaccgcttacaaaggctt

SEQ ID NO: 20488 - DNA, 31 bp, Homo sapiens
  chr13:113507107-113507138
  hypo
atctcagtggctttttcgtgatgatacttgc

SEQ ID NO: 20489 - DNA, 31 bp, Homo sapiens
  chr13:113507255-113507286
  hypo
caggcccggtggagcacgcttgtaatcctcg

SEQ ID NO: 20490 - DNA, 77 bp, Homo sapiens
  chr13:113508798-113508875
  hypo
cggtcctgcgccacagcgggagcctgaccagagacaacctgtccgggtaggcagcgcgtccccgcccccacccccac

SEQ ID NO: 20491 - DNA, 39 bp, Homo sapiens
  chr13:113508905-113508944
  hypo
gccttcacctgcaagtcggggagccgcattgtctctact

SEQ ID NO: 20492 - DNA, 76 bp, Homo sapiens
  chr13:113516325-113516401
  hypo
caggcgtaaggcgtcacgtcaggcgtaaggtgtcacagcaggcgtaaggcatcacgtcaggcgtaaggcgtcacgt

SEQ ID NO: 20493 - DNA, 49 bp, Homo sapiens
  chr13:113536447-113536496
  hypo
tcacaggccttgccctcgagcatggcaccctggccgcctggacccagca

SEQ ID NO: 20494 - DNA, 39 bp, Homo sapiens
  chr13:113536518-113536557
  hypo
gtggcctctgggcattcggctcaacgcaggagggacatt

SEQ ID NO: 20495 - DNA, 31 bp, Homo sapiens
  chr13:113536558-113536589
  hypo
tgctggcccaccctgcgcgctgtcatgcaga

SEQ ID NO: 20496 - DNA, 181 bp, Homo sapiens
  chr13:113537190-113537371
  hypo
gcaccagaacctgtctcgggctgacgggggtggcacacaggacacgggtggatcccaacaggcagcaccgcacctctgcccgcctcccgcactgcagctccgcccgccgggctctgcgtccccacgtcccctcgtcccatccccacgtcccctcatcccgtcacctcgtccccacatcccc

SEQ ID NO: 20497 - DNA, 53 bp, Homo sapiens
  chr13:113539437-113539490
  hypo
acatgcagaacatgcacgtgtacacataccacagacacgcgtgtgcatgctcc

SEQ ID NO: 20498 - DNA, 51 bp, Homo sapiens
  chr13:113539505-113539556
  hypo
cacatatcatgaacagcgtaagttcctacacacggacgtgtgatacacaca

SEQ ID NO: 20499 - DNA, 52 bp, Homo sapiens
  chr13:113539594-113539646
  hypo
ggcttgctctcacacacgtgtatgcacagcagagagacgtatgagcttctac

SEQ ID NO: 20500 - DNA, 31 bp, Homo sapiens; identical to SEQ ID NO: 5025
  chr13:113548669-113548700
  hypo

SEQ ID NO: 20501 - DNA, 41 bp, Homo sapiens; identical to SEQ ID NO: 5026
  chr13:113597574-113597615
  hypo

SEQ ID NO: 20502 - DNA, 44 bp, Homo sapiens; identical to SEQ ID NO: 5027
  chr13:113597655-113597699
  hypo

SEQ ID NO: 20503 - DNA, 63 bp, Homo sapiens; identical to SEQ ID NO: 5028
  chr13:113597781-113597844
  hypo

SEQ ID NO: 20504 - DNA, 39 bp, Homo sapiens
  chr13:113648423-113648462
  hypo
acgtcactgtctgtgccggtgtctcgggcaggggcaggt

SEQ ID NO: 20505 - DNA, 65 bp, Homo sapiens
  chr13:113648566-113648631
  hypo
ctcgggcaggggctggcgtggctgtcggcgtgacggggcgcggcgcgtgggacgccaagctgacg

SEQ ID NO: 20506 - DNA, 31 bp, Homo sapiens
  chr13:113666494-113666525
  hypo
gtggatggtggacaggcggtgtggacggtgg

SEQ ID NO: 20507 - DNA, 37 bp, Homo sapiens
  chr13:113666830-113666867
  hypo
gacactgcaatgaggacggtggacactgcgatgagga

SEQ ID NO: 20508 - DNA, 31 bp, Homo sapiens
  chr13:113673343-113673374
  hypo
ctcctcccgggaagaacgctggagaccttcg

SEQ ID NO: 20509 - DNA, 37 bp, Homo sapiens
  chr13:113684750-113684787
  hypo
tggactctcaggtgtccgctgacgcaggtgtgggccc

SEQ ID NO: 20510 - DNA, 31 bp, Homo sapiens
  chr13:113703692-113703723
  hypo
ctctgtccatgagccacgcactccttggaga

SEQ ID NO: 20511 - DNA, 101 bp, Homo sapiens
  chr13:113703774-113703875
  hypo
ggtgcagttgacctgacgtggggacaccaagtagtggctgcagcggggcacctggacgccaacccctgggctccaggccttgacagcgagctttggctggc

SEQ ID NO: 20512 - DNA, 31 bp, Homo sapiens
  chr13:113720175-113720206
  hypo
ggcccccacatcaccccgcctgcccgcacga

SEQ ID NO: 20513 - DNA, 31 bp, Homo sapiens
  chr13:113731261-113731292
  hypo
taaagcgggggttgggcgtgccccggcacgt

SEQ ID NO: 20514 - DNA, 31 bp, Homo sapiens
  chr13:113745595-113745626
  hypo
ctaagggggatgctctcgtgggtctttatgc

SEQ ID NO: 20515 - DNA, 37 bp, Homo sapiens
  chr13:113825962-113825999
  hypo
gcacatgcggtatgacgcggacgcgggggagaatgac

SEQ ID NO: 20516 - DNA, 81 bp, Homo sapiens
  chr13:113950840-113950921
  hypo
gcgagactccgtctcaaaaaaaaaaacaaagtgctcgacaggaactttctgtaagccaaagagtatcgccatcgcaccttc

SEQ ID NO: 20517 - DNA, 59 bp, Homo sapiens; identical to SEQ ID NO: 5031
  chr13:113951224-113951283
  hypo

SEQ ID NO: 20518 - DNA, 21 bp, Homo sapiens
  chr13:113969598-113969619
  hypo
aaccagcgtggagatgccggt

SEQ ID NO: 20519 - DNA, 34 bp, Homo sapiens
  chr13:113985852-113985886
  hypo
tttcctgagaagacttcggcgtggcacagccctt

SEQ ID NO: 20520 - DNA, 31 bp, Homo sapiens
  chr13:113986523-113986554
  hypo
cacctccctatctgcacgcacaccacacaca

SEQ ID NO: 20521 - DNA, 31 bp, Homo sapiens
  chr13:113987422-113987453
  hypo
aggagaggggcccagccggagggcgctgggg

SEQ ID NO: 20522 - DNA, 31 bp, Homo sapiens
  chr13:113990085-113990116
  hypo
catgctgctgaaatgacgggatttttttttt

SEQ ID NO: 20523 - DNA, 26 bp, Homo sapiens
  chr13:114002278-114002304
  hypo
acctctgtggccgagagcagacctgg

SEQ ID NO: 20524 - DNA, 55 bp, Homo sapiens
  chr13:114002307-114002362
  hypo
gacctgtgtggctgagcggacctgggaggacctgtctggccgagtggacccggga

SEQ ID NO: 20525 - DNA, 98 bp, Homo sapiens
  chr13:114003075-114003173
  hypo
aaggcctgggacagtccgtccgtcacagcctcagaaagaacccgccccgcagacgccgcgacctcacctgccccgcagatgccgcgacctctgatgca

SEQ ID NO: 20526 - DNA, 92 bp, Homo sapiens
  chr13:114009703-114009795
  hypo
gattctggtccatctgcgcctgggccccactcagcaccatccagacgcgggcacggtgctccagcgggacccctttccggacatagcgcttc

SEQ ID NO: 20527 - DNA, 20 bp, Homo sapiens
  chr13:114012194-114012214
  hypo
catatatttaaaactgcggc

SEQ ID NO: 20528 - DNA, 347 bp, Homo sapiens; identical to SEQ ID NO: 5033
  chr13:114017991-114018338
  hypo

SEQ ID NO: 20529 - DNA, 31 bp, Homo sapiens; identical to SEQ ID NO: 5035
  chr13:114048391-114048422
  hypo

SEQ ID NO: 20530 - DNA, 31 bp, Homo sapiens
  chr13:114074573-114074604
  hypo
tgccagcttttgtttacgatgcttgtggatt

SEQ ID NO: 20531 - DNA, 31 bp, Homo sapiens
  chr13:114074716-114074747
  hypo
ccgcgccctgctcatgcgagctggccttctc

SEQ ID NO: 20532 - DNA, 62 bp, Homo sapiens
  chr13:114075017-114075079
  hypo
attcggaagctcagcacggagccacattgctgcagcatagaaggccacggattcctccatca

SEQ ID NO: 20533 - DNA, 62 bp, Homo sapiens
  chr13:114075087-114075149
  hypo
tacacttcccacaaaacgaacggggcatctctatggaaaaagcaaagcgtgtccctatccct

SEQ ID NO: 20534 - DNA, 57 bp, Homo sapiens
  chr13:114075173-114075230
  hypo
acctagccccaggacccgcccacccccgggacccgctcaccccgggacaccactacc

SEQ ID NO: 20535 - DNA, 31 bp, Homo sapiens
  chr13:114075253-114075284
  hypo
acaaccctaccccccccgacacgccctggga

SEQ ID NO: 20536 - DNA, 31 bp, Homo sapiens
  chr13:114081077-114081108
  hypo
tcaacatggacctgggcgcagactgaaagca

SEQ ID NO: 20537 - DNA, 60 bp, Homo sapiens
  chr13:114108108-114108168
  hypo
agcagatgtgtgcaggcgtgcctgtcactgccgcccgctgcggggcgtgccctcacccct

SEQ ID NO: 20538 - DNA, 97 bp, Homo sapiens
  chr13:114115111-114115208
  hypo
cctgagaggagcttcccgtgactgccaagaagccacgttctgaggaggccccggagtggccccagctcagccctgcagtctccggcaaggtgacaga

SEQ ID NO: 20539 - DNA, 31 bp, Homo sapiens
  chr13:114115218-114115249
  hypo
aacctgtctggacctgcggatctttgtgtgg

SEQ ID NO: 20540 - DNA, 87 bp, Homo sapiens
  chr13:114122928-114123015
  hypo
ctctccttcagacaagcggcctatgaggacgcagcactaaagggggcgggggagggccctggacaggcggggcggaggcagcacagt

SEQ ID NO: 20541 - DNA, 55 bp, Homo sapiens
  chr13:114123157-114123212
  hypo
tgccagcaacaggacccgtgtgttgccgtcatgccggggacgtggggggcacagg

SEQ ID NO: 20542 - DNA, 50 bp, Homo sapiens
  chr13:114123241-114123291
  hypo
ctcagaggtgcctacacgccgggaccaggtaaggacgagcctgaagtagg

SEQ ID NO: 20543 - DNA, 31 bp, Homo sapiens
  chr13:114185373-114185404
  hypo
catagtgggaggcacccggctcccttagtga

SEQ ID NO: 20544 - DNA, 31 bp, Homo sapiens
  chr13:114189825-114189856
  hypo
ttatagcagctttattcgtattagccataaa

SEQ ID NO: 20545 - DNA, 31 bp, Homo sapiens
  chr13:114190102-114190133
  hypo
ggctggggatggcactcgctgtcttcgctgt

SEQ ID NO: 20546 - DNA, 30 bp, Homo sapiens
  chr13:114190393-114190423
  hypo
caaaataaaaagtttccggctgggcgcggt

SEQ ID NO: 20547 - DNA, 46 bp, Homo sapiens
  chr13:114193106-114193152
  hypo
ggctgccataagcctgcgtttcgcagagctgcgctgaggctcccgt

SEQ ID NO: 20548 - DNA, 53 bp, Homo sapiens
  chr13:114202768-114202821
  hypo
tgagtggcttccccccgcggagcgcttctcgggcggcacgggctgcactctgg

SEQ ID NO: 20549 - DNA, 43 bp, Homo sapiens
  chr13:114203957-114204000
  hypo
cagccctctagcagagcgtcagtgcagtcgtgttatcccggct

SEQ ID NO: 20550 - DNA, 31 bp, Homo sapiens
  chr13:114206580-114206611
  hypo
agccattctcaaccagcgaggcctctgtgtc

SEQ ID NO: 20551 - DNA, 31 bp, Homo sapiens; identical to SEQ ID NO: 5036
  chr13:114238865-114238896
  hypo

SEQ ID NO: 20552 - DNA, 43 bp, Homo sapiens
  chr13:114244324-114244367
  hypo
ttttgctgtaagacttcgggatgtagcccgtgtggggctgttt

SEQ ID NO: 20553 - DNA, 31 bp, Homo sapiens
  chr13:114246190-114246221
  hypo
gatgattctggttgttcgggtactggccatg

SEQ ID NO: 20554 - DNA, 84 bp, Homo sapiens
  chr13:114246252-114246336
  hypo
agcctggaaaagcatccgccctttgtacctttttcccgactggctgagattcccgcagcatcccgactccgcttcagggctcct

SEQ ID NO: 20555 - DNA, 46 bp, Homo sapiens
  chr13:114258209-114258255
  hypo
caatatgttaaaaacacgaagctaggccaggcgtggtagcttacac

SEQ ID NO: 20556 - DNA, 37 bp, Homo sapiens
  chr13:114258258-114258295
  hypo
cttgagcccaggagttcgagaccagcctgggcagcgt

SEQ ID NO: 20557 - DNA, 31 bp, Homo sapiens
  chr13:114264680-114264711
  hypo
atcacacgtgtgaccccgctgtgtggttgtg

SEQ ID NO: 20558 - DNA, 20 bp, Homo sapiens
  chr13:114286822-114286842
  hypo
tggtgcttggggctcacgcc

SEQ ID NO: 20559 - DNA, 31 bp, Homo sapiens
  chr13:114287596-114287627
  hypo
gtcagtaagtgtgtgccgggggccgagaggc

SEQ ID NO: 20560 - DNA, 42 bp, Homo sapiens
  chr13:114288212-114288254
  hypo
ccagaaaaacataagacggcgcgtctacgatgccttaaacgt

SEQ ID NO: 20561 - DNA, 101 bp, Homo sapiens
  chr13:114290174-114290275
  hypo
gtccaggccaactcctcgctgtcacgtggacgcagggagggctgtgaggacccctcgagcacaggggctgcgttcttgtgccgccacgggccacctggctc

SEQ ID NO: 20562 - DNA, 31 bp, Homo sapiens
  chr13:114293924-114293955
  hypo
ctttaaacattaggaacgtagtgagctctgg

SEQ ID NO: 20563 - DNA, 81 bp, Homo sapiens
  chr13:114300499-114300580
  hypo
agaaaataaacattggcgaggatgtggagaaggcagagccctgtacacggtggggatgtaaagagccgcagccactatgaa

SEQ ID NO: 20564 - DNA, 71 bp, Homo sapiens
  chr13:114302295-114302366
  hypo
tcttctgtgctggtgtcgcacccgccggccaccgccaccctgcgtcttagacgtcccgccgcagctgtgtt

SEQ ID NO: 20565 - DNA, 74 bp, Homo sapiens
  chr13:114304751-114304825
  hypo
tgcagactgaaggtgccgttgggagggtagtacttgacctgcagcggctggccgagctcgcggggctggtcctg

SEQ ID NO: 20566 - DNA, 89 bp, Homo sapiens
  chr13:114304837-114304926
  hypo
cactgcctgagtcaggcgggagctggtgtgtgccggtgtctgtgtgttgcgtttgtgtgcgtgtgtgcacacacgcgctgtgtaggtgc

SEQ ID NO: 20567 - DNA, 31 bp, Homo sapiens
  chr13:114305025-114305056
  hypo
tgcccagtgacccctccgtgtgcctctaaca

SEQ ID NO: 20568 - DNA, 31 bp, Homo sapiens
  chr13:114440432-114440463
  hypo
cccatagatcccacgtcggccacaccctggg

SEQ ID NO: 20569 - DNA, 160 bp, Homo sapiens
  chr13:114497844-114498004
  hypo
gttgcttctcagaggcgcgtgccgagggcccggggatggcaacgcccttccgtgcagaaggcgcctgggtgggtcttgcggaatagacgcgtgaggacgacccgcagggtggagtccggcctggccagggctggaagtcataggacgaaaggtagaggtg

SEQ ID NO: 20570 - DNA, 62 bp, Homo sapiens
  chr13:114498016-114498078
  hypo
tctgtgaaagaagccccgacctcgagctgggactttgaattggtttgcgtttgaaaaccggg

SEQ ID NO: 20571 - DNA, 56 bp, Homo sapiens
  chr13:114498222-114498278
  hypo
tcattgtgtgcacagtcgctttccggggctgaaagagtcgacgtgaaaaaagtaca

SEQ ID NO: 20572 - DNA, 31 bp, Homo sapiens
  chr13:114502930-114502961
  hypo
ctctcatcctcagcacgcgtgtcagaggagg

SEQ ID NO: 20573 - DNA, 105 bp, Homo sapiens
  chr13:114515795-114515900
  hypo
agtgggtcacaggtcccgggtgggtcacaggcatcccgggtgggtcacaggtcccgagtgggtcacaggccccgggtgagtcacaggccccgggtgagtcacggg

SEQ ID NO: 20574 - DNA, 31 bp, Homo sapiens
  chr13:114746821-114746852
  hypo
gccactgtcagagcagcgctgcccatcacca

SEQ ID NO: 20575 - DNA, 31 bp, Homo sapiens
  chr13:114748177-114748208
  hypo
ggaatcaaacgaacctcgaaagtggaacagg

SEQ ID NO: 20576 - DNA, 31 bp, Homo sapiens
  chr13:114748398-114748429
  hypo
aggtgcatgtcacagtcgactagacgggccg

SEQ ID NO: 20577 - DNA, 43 bp, Homo sapiens
  chr13:114748968-114749011
  hypo
ggaaccacagtgcccccggaagcacccacggtgactctgatgt

SEQ ID NO: 20578 - DNA, 78 bp, Homo sapiens
  chr13:114749015-114749093
  hypo
gcacaggtgggtcaggcgtgcaagtacatgtgcacgtgtgctctccctgtggcacgtgtgtagcgcatatacatgtgc

SEQ ID NO: 20579 - DNA, 76 bp, Homo sapiens
  chr13:114751038-114751114
  hypo
cgcccactacactggccgtccagggcaggcacgggagtggcactcactggcttccatatttcgtcttcttgaactt

SEQ ID NO: 20580 - DNA, 31 bp, Homo sapiens
  chr13:114751115-114751146
  hypo
tccctcttatactgggcgtgctcctgctcca

SEQ ID NO: 20581 - DNA, 31 bp, Homo sapiens
  chr13:114764645-114764676
  hypo
aagtacttgttctactcgtgcaacttctata

SEQ ID NO: 20582 - DNA, 31 bp, Homo sapiens
  chr13:114765043-114765074
  hypo
gggggccccacactcacgtttttcattttga

SEQ ID NO: 20583 - DNA, 31 bp, Homo sapiens
  chr13:114765097-114765128
  hypo
actgccaggatgttctcgatgggaatgctgt

SEQ ID NO: 20584 - DNA, 81 bp, Homo sapiens
  chr13:114765156-114765237
  hypo
ggactgtcagtgggtgcgggccccgctgtcccggctggggtccgggtggggctgaggggtctctgccggggggtctcccag

SEQ ID NO: 20585 - DNA, 44 bp, Homo sapiens
  chr13:114767507-114767551
  hypo
agggccctctgaggctcggccttcattgccgggcaggggtccct

SEQ ID NO: 20586 - DNA, 31 bp, Homo sapiens
  chr13:114767688-114767719
  hypo
aagcgcactcagaaatcggaaagaggggctt

SEQ ID NO: 20587 - DNA, 61 bp, Homo sapiens
  chr13:114767821-114767882
  hypo
ggagccgccaggacagcgcagttcacaaccagtggatgccgaacgccgttcattccaggga

SEQ ID NO: 20588 - DNA, 38 bp, Homo sapiens
  chr13:114767925-114767963
  hypo
aggacccagtgggatgcgcagggcggggcctacacaga

SEQ ID NO: 20589 - DNA, 136 bp, Homo sapiens
  chr13:114769985-114770121
  hypo
ctgtgaccccacctcacgccaggcagaacgaagccacctgcgaccccagctcacgccaggcagaatggagccgcctgaacccagctcacgccgggcagaatggctgggatcaaataaaacacggaaaaatgacaga

SEQ ID NO: 20590 - DNA, 69 bp, Homo sapiens
  chr13:114770139-114770208
  hypo
gacgtgagcgcttgcacgctgtggggaatggaaattagcgcttaaggaaacccacggagatttctcaag

SEQ ID NO: 20591 - DNA, 31 bp, Homo sapiens
  chr13:114773206-114773237
  hypo
caagtgagtccttccccgagggctgtggggc

SEQ ID NO: 20592 - DNA, 31 bp, Homo sapiens
  chr13:114773250-114773281
  hypo
tgtgccaccccagccccggcactgccacaga

SEQ ID NO: 20593 - DNA, 59 bp, Homo sapiens
  chr13:114774946-114775005
  hypo
tgaaacggagatcactcgaggacagcccgaagtacctcggctcacggcccaaatctgaa

SEQ ID NO: 20594 - DNA, 89 bp, Homo sapiens; identical to SEQ ID NO: 5039
  chr13:114776259-114776348
  hypo

SEQ ID NO: 20595 - DNA, 31 bp, Homo sapiens; identical to SEQ ID NO: 5040
  chr13:114776351-114776382
  hypo

SEQ ID NO: 20596 - DNA, 42 bp, Homo sapiens; identical to SEQ ID NO: 5041
  chr13:114776458-114776500
  hypo

SEQ ID NO: 20597 - DNA, 41 bp, Homo sapiens
  chr13:114777009-114777050
  hypo
ggtcatggctctggggcgctgagtctcggggtgctgagtct

SEQ ID NO: 20598 - DNA, 31 bp, Homo sapiens
  chr13:114777571-114777602
  hypo
ctgttgactcaatacacggatgatacgccga

SEQ ID NO: 20599 - DNA, 126 bp, Homo sapiens
  chr13:114778696-114778822
  hypo
actgcagtgtacctgacgtccgggtcatctgcgggagagagaagcagggtgaccgttttcctcgggcacaatggcctcgtggggacaccatgccccggccccctgagggtccgcagggaagtccag

SEQ ID NO: 20600 - DNA, 56 bp, Homo sapiens
  chr13:114780560-114780616
  hypo
ctggggttcacgaccccgcagttctagtctagccagggctgcggggggttctgcct

SEQ ID NO: 20601 - DNA, 31 bp, Homo sapiens
  chr13:114780622-114780653
  hypo
gagtcaccctgcacagcgctatggcagtttc

SEQ ID NO: 20602 - DNA, 279 bp, Homo sapiens
  chr13:114780676-114780955
  hypo
gcactcaccctggaagcgcttggccgccgcctcccggagggagaagaagatgtcacacatgacggtcgggcagctcaccccagactcagtgatggcgtggaagacgcggtccacatactgccgtaggttctcctgcaacgggacacggcactgggacccactcccgaggctgcccacaggtgcgtgtagcaccagggcacgcccagggaggggcgcgtggggaggggctgagggcgggcgcagggcagctgcggcagtgagacacgtgtgaacagccac

SEQ ID NO: 20603 - DNA, 107 bp, Homo sapiens
  chr13:114780976-114781083
  hypo
agctgtggcaattcacgcgtgaaaatcactacacaggcaccacgtcggctccccggctcggccccgacctcgtttactgagtggggaatggacgttcactagaatgt

SEQ ID NO: 20604 - DNA, 31 bp, Homo sapiens
  chr13:114785670-114785701
  hypo
gggtggagcctgtgtccgaggcattagcagc

SEQ ID NO: 20605 - DNA, 22 bp, Homo sapiens
  chr13:114802295-114802317
  hypo
agccaccgcgcccagcctggag

SEQ ID NO: 20606 - DNA, 31 bp, Homo sapiens
  chr13:114802591-114802622
  hypo
ggtacgcagcctcgggcgttaattatgagat

SEQ ID NO: 20607 - DNA, 31 bp, Homo sapiens
  chr13:114802664-114802695
  hypo
ctttgtggagatgcaacgtctgagtcctgat

SEQ ID NO: 20608 - DNA, 109 bp, Homo sapiens
  chr13:114807622-114807731
  hypo
gaaacattcccgaggcgcggcaaacgtgtgcccatcccatccccggcaggacagggcttgtcaggcgctgggcaccgagccatctcccatcctgcgtcccttcatggca

SEQ ID NO: 20609 - DNA, 72 bp, Homo sapiens
  chr13:114807743-114807815
  hypo
ccctgccagtggcctccgcacactgcggaccacgccacccaccacggtgagcacccacggcagcacatgcac

SEQ ID NO: 20610 - DNA, 31 bp, Homo sapiens
  chr13:114847130-114847161
  hypo
ctctcctccacagagacgtgtccaccaggag

SEQ ID NO: 20611 - DNA, 40 bp, Homo sapiens
  chr13:114855473-114855513
  hypo
atgatatttcatgtcacggatggaacgcattctgtgtatt

SEQ ID NO: 20612 - DNA, 31 bp, Homo sapiens
  chr13:114855555-114855586
  hypo
ttgttgtgaatggtgccgctgtgaagtgtgc

SEQ ID NO: 20613 - DNA, 31 bp, Homo sapiens
  chr13:114855589-114855620
  hypo
agttcccatgtgaacacggacagctttggga

SEQ ID NO: 20614 - DNA, 45 bp, Homo sapiens
  chr13:114855624-114855669
  hypo
cttgattatttaccaacgggtggggccgcacggcaacaggtttaa

SEQ ID NO: 20615 - DNA, 31 bp, Homo sapiens
  chr13:114869699-114869730
  hypo
acacccacccctgatgcgtccacactgccac

SEQ ID NO: 20616 - DNA, 31 bp, Homo sapiens
  chr13:114869753-114869784
  hypo
gcgtccacgctgtccccggccacggacaccc

SEQ ID NO: 20617 - DNA, 31 bp, Homo sapiens; identical to SEQ ID NO: 5042
  chr13:114976825-114976856
  hypo

SEQ ID NO: 20618 - DNA, 42 bp, Homo sapiens
  chr13:114989884-114989926
  hypo
ctggagcctgagatgccggcatcgggccgggaggagctgggc

SEQ ID NO: 20619 - DNA, 31 bp, Homo sapiens
  chr14:20146797-20146828
  hypo
agccctgcgttcgtaccgatactactgaaaa

SEQ ID NO: 20620 - DNA, 31 bp, Homo sapiens
  chr14:21548996-21549027
  hypo
gaggaccaggtctgagcgcagcctcccttct

SEQ ID NO: 20621 - DNA, 29 bp, Homo sapiens
  chr14:21657874-21657903
  hypo
aagctttcccactggccgggcgcggtggc

SEQ ID NO: 20622 - DNA, 42 bp, Homo sapiens
  chr14:21688655-21688697
  hypo
gggattacaggcgtcagccaccactctcggcctctatttctt

SEQ ID NO: 20623 - DNA, 24 bp, Homo sapiens
  chr14:21714428-21714452
  hypo
gcctcaaaggctgggcgcggtggc

SEQ ID NO: 20624 - DNA, 55 bp, Homo sapiens; identical to SEQ ID NO: 5048
  chr14:21769029-21769084
  hypo

SEQ ID NO: 20625 - DNA, 63 bp, Homo sapiens; identical to SEQ ID NO: 5049
  chr14:21769209-21769272
  hypo

SEQ ID NO: 20626 - DNA, 31 bp, Homo sapiens
  chr14:21876123-21876154
  hypo
gaaataagctcaccaccgcatggattaagtg

SEQ ID NO: 20627 - DNA, 31 bp, Homo sapiens
  chr14:21943009-21943040
  hypo
tattttgtactctcaccgtatcccagatttg

SEQ ID NO: 20628 - DNA, 4 bp, Homo sapiens
  chr14:21980068-21980072
  hypo
acac

SEQ ID NO: 20629 - DNA, 31 bp, Homo sapiens
  chr14:21980160-21980191
  hypo
ttggtttgtttccatgcgttcatttacaaaa

SEQ ID NO: 20630 - DNA, 31 bp, Homo sapiens
  chr14:21980304-21980335
  hypo
tgatgaaggaaaaatccgagaggtcttcaaa

SEQ ID NO: 20631 - DNA, 18 bp, Homo sapiens
  chr14:23183108-23183126
  hypo
gggggtgtacaccccccg

SEQ ID NO: 20632 - DNA, 47 bp, Homo sapiens
  chr14:23183245-23183292
  hypo
tactcccaatatcgcaggtggggaaaacaccccgcctgtgatattgt

SEQ ID NO: 20633 - DNA, 80 bp, Homo sapiens; identical to SEQ ID NO: 5051
  chr14:23355356-23355436
  hypo

SEQ ID NO: 20634 - DNA, 31 bp, Homo sapiens; identical to SEQ ID NO: 5052
  chr14:23355453-23355484
  hypo

SEQ ID NO: 20635 - DNA, 31 bp, Homo sapiens
  chr14:23400198-23400229
  hypo
aagagcaaaataatgtcggggcagggggagg

SEQ ID NO: 20636 - DNA, 31 bp, Homo sapiens
  chr14:23427027-23427058
  hypo
ctgtcccaatagctctcggaaggaaccttcc

SEQ ID NO: 20637 - DNA, 31 bp, Homo sapiens
  chr14:23457305-23457336
  hypo
ttgaatgggaggttggcgatcactacttaga

SEQ ID NO: 20638 - DNA, 34 bp, Homo sapiens
  chr14:23518258-23518292
  hypo
atgatggcaagcagggcgccggtgctgagcccag

SEQ ID NO: 20639 - DNA, 45 bp, Homo sapiens
  chr14:23518318-23518363
  hypo
caggatgccacagagccgtcaggctggcagcggcacacactaaca

SEQ ID NO: 20640 - DNA, 31 bp, Homo sapiens
  chr14:23536685-23536716
  hypo
agagtcctcccaggggcgcagggggggcggg

SEQ ID NO: 20641 - DNA, 31 bp, Homo sapiens
  chr14:23634538-23634569
  hypo
agcaggtggggaagagcggctgcagcacgta

SEQ ID NO: 20642 - DNA, 103 bp, Homo sapiens
  chr14:23707516-23707619
  hypo
cgaacaaataggacaacgaagctcgtggcactgtgggatgcgtttgcgttgagctgtttattcagtacattttttatcgtaaatcttacgaagtttgtatccc

SEQ ID NO: 20643 - DNA, 74 bp, Homo sapiens; identical to SEQ ID NO: 5063
  chr14:23776070-23776144
  hypo

SEQ ID NO: 20644 - DNA, 78 bp, Homo sapiens; identical to SEQ ID NO: 5064
  chr14:23776181-23776259
  hypo

SEQ ID NO: 20645 - DNA, 68 bp, Homo sapiens
  chr14:23776953-23777021
  hypo
ccttgcctcttatagccgcccggatggcgaccccagcctcggccccagacacacgggctctggtggca

SEQ ID NO: 20646 - DNA, 126 bp, Homo sapiens
  chr14:23777058-23777184
  hypo
tctgtggagctggccccggggagggcccagcagctgacccgctgcaccaagccatgcgggcagctggagatgagttcgagacccgcttccggcgcaccttctctgatctggcggctcagctgcatg

SEQ ID NO: 20647 - DNA, 48 bp, Homo sapiens
  chr14:23777191-23777239
  hypo
aggctcagcccaacaacgcttcacccaggtctccgatgaactttttca

SEQ ID NO: 20648 - DNA, 31 bp, Homo sapiens
  chr14:23777242-23777273
  hypo
gggccccaactggggccgccttgtagccttc

SEQ ID NO: 20649 - DNA, 47 bp, Homo sapiens
  chr14:24108493-24108540
  hypo
gaggggctgagtgtggcgggcattgtgtgccacgtggggaaggctga

SEQ ID NO: 20650 - DNA, 25 bp, Homo sapiens
  chr14:24456361-24456386
  hypo
cagagtctccatctgtcgctcaggt

SEQ ID NO: 20651 - DNA, 39 bp, Homo sapiens
  chr14:24542843-24542882
  hypo
gaaatgataccttcctcggctctacggagtgcaccttgg

SEQ ID NO: 20652 - DNA, 31 bp, Homo sapiens
  chr14:24546649-24546680
  hypo
ccccaaatctgaccttcgtcttccaccattt

SEQ ID NO: 20653 - DNA, 31 bp, Homo sapiens
  chr14:24722548-24722579
  hypo
cttgaaggagagaagtcgcttgcccaagggc

SEQ ID NO: 20654 - DNA, 51 bp, Homo sapiens
  chr14:24722592-24722643
  hypo
gtgctagagctgaacccgtatcattaggattccaaaacttcgcttgtgtgt

SEQ ID NO: 20655 - DNA, 31 bp, Homo sapiens
  chr14:24859466-24859497
  hypo
gtgctgggattacaggcgtgagcccccgccc

SEQ ID NO: 20656 - DNA, 31 bp, Homo sapiens
  chr14:24877468-24877499
  hypo
gcaaggaagacatcatcgagtggctcagccg

SEQ ID NO: 20657 - DNA, 38 bp, Homo sapiens
  chr14:30790493-30790531
  hypo
tgggctcctgcttccccgactcacgttcaacccctgca

SEQ ID NO: 20658 - DNA, 35 bp, Homo sapiens
  chr14:31027392-31027427
  hypo
caggcgtgagccaccgcgcccggccctcaaactgt

SEQ ID NO: 20659 - DNA, 31 bp, Homo sapiens
  chr14:31027462-31027493
  hypo
ttggtttgtactgatccgtttaggtaattca

SEQ ID NO: 20660 - DNA, 31 bp, Homo sapiens
  chr14:31478709-31478740
  hypo
cacttttgcatttgtacggaaaaaattctga

SEQ ID NO: 20661 - DNA, 12 bp, Homo sapiens
  chr14:31512415-31512427
  hypo
gactctttcaaa

SEQ ID NO: 20662 - DNA, 34 bp, Homo sapiens
  chr14:31629127-31629161
  hypo
gagtcactgtgcctggcgccggtttttattactg

SEQ ID NO: 20663 - DNA, 31 bp, Homo sapiens
  chr14:31707415-31707446
  hypo
taatggtgataataagcgtttgtataatttt

SEQ ID NO: 20664 - DNA, 39 bp, Homo sapiens
  chr14:32597740-32597779
  hypo
ggtgctgaggctggcccgcctctgcgtgggcaggatctt

SEQ ID NO: 20665 - DNA, 65 bp, Homo sapiens
  chr14:32597785-32597850
  hypo
ccttttgctccatggacgctgcctccctgggctcgccgcgcctggccgcccggcaggcagcccca

SEQ ID NO: 20666 - DNA, 31 bp, Homo sapiens
  chr14:32606878-32606909
  hypo
aaaatatttagccttccgggccaggtggggt

SEQ ID NO: 20667 - DNA, 31 bp, Homo sapiens
  chr14:34567013-34567044
  hypo
atgtgctcacttcctccggcattcccatccc

SEQ ID NO: 20668 - DNA, 27 bp, Homo sapiens
  chr14:34920639-34920666
  hypo
caattctaggctgggcgcggtagctca

SEQ ID NO: 20669 - DNA, 19 bp, Homo sapiens
  chr14:34920905-34920924
  hypo
agaacgagactctgtttca

SEQ ID NO: 20670 - DNA, 24 bp, Homo sapiens
  chr14:34921198-34921222
  hypo
taaagaaagtgcctagcgtggtgg

SEQ ID NO: 20671 - DNA, 57 bp, Homo sapiens
  chr14:35023179-35023236
  hypo
acaataaagaagaattcgtccattcaacaaccgttcactgagcgcatagcctgtgcc

SEQ ID NO: 20672 - DNA, 33 bp, Homo sapiens
  chr14:35136956-35136989
  hypo
aaaaaaaaaaaacaaaaacggtatgtttatctt

SEQ ID NO: 20673 - DNA, 36 bp, Homo sapiens
  chr14:35507692-35507728
  hypo
tcctcctcaagacttacgaatagagcgccgcccggg

SEQ ID NO: 20674 - DNA, 31 bp, Homo sapiens
  chr14:37611523-37611554
  hypo
catcacagactatcatcgaggtagaaaccat

SEQ ID NO: 20675 - DNA, 24 bp, Homo sapiens
  chr14:37639248-37639272
  hypo
tttttttttttgagaccgagtctc

SEQ ID NO: 20676 - DNA, 31 bp, Homo sapiens; identical to SEQ ID NO: 5072
  chr14:38678113-38678144
  hypo

SEQ ID NO: 20677 - DNA, 31 bp, Homo sapiens; identical to SEQ ID NO: 5073
  chr14:39735664-39735695
  hypo

SEQ ID NO: 20678 - DNA, 44 bp, Homo sapiens; identical to SEQ ID NO: 5074
  chr14:39735734-39735778
  hypo

SEQ ID NO: 20679 - DNA, 31 bp, Homo sapiens
  chr14:39911464-39911495
  hypo
tctccgggcttttgggcgccaccttgttccc

SEQ ID NO: 20680 - DNA, 31 bp, Homo sapiens
  chr14:39914487-39914518
  hypo
aacaaaagggaaaatccgtctctcaagaaaa

SEQ ID NO: 20681 - DNA, 64 bp, Homo sapiens
  chr14:50233125-50233189
  hypo
gcctgggggacaagagcgagacttctctcgaacaaacaaaaaacaaaaacgatgatagaagggt

SEQ ID NO: 20682 - DNA, 84 bp, Homo sapiens
  chr14:50233657-50233741
  hypo
gactcgatcagattcacgaggttggttcacaaggaacttcgataaccccaaagtctagtgagcataattcgactgggagaagac

SEQ ID NO: 20683 - DNA, 34 bp, Homo sapiens
  chr14:50333645-50333679
  hypo
cagttatgcacaacctcgaatcagccgtttgctt

SEQ ID NO: 20684 - DNA, 15 bp, Homo sapiens
  chr14:50333978-50333993
  hypo
gcgcccggccagccg

SEQ ID NO: 20685 - DNA, 17 bp, Homo sapiens
  chr14:50334338-50334355
  hypo
tccgtctcaaaaaaaaa

SEQ ID NO: 20686 - DNA, 29 bp, Homo sapiens
  chr14:50434015-50434044
  hypo
catttatgcataaacgatcacatgacatg

SEQ ID NO: 20687 - DNA, 31 bp, Homo sapiens
  chr14:50681832-50681863
  hypo
cgtgagccaccgcgcccggcaaggttgtttc

SEQ ID NO: 20688 - DNA, 24 bp, Homo sapiens
  chr14:50888265-50888289
  hypo
caccgcgcccggcaacaaaataaa

SEQ ID NO: 20689 - DNA, 31 bp, Homo sapiens
  chr14:51171101-51171132
  hypo
ggcttgagctgccccacggagaccatggtgc

SEQ ID NO: 20690 - DNA, 52 bp, Homo sapiens; identical to SEQ ID NO: 5076
  chr14:51561647-51561699
  hypo

SEQ ID NO: 20691 - DNA, 12 bp, Homo sapiens
  chr14:52939949-52939961
  hypo
acaacttgtgtg

SEQ ID NO: 20692 - DNA, 18 bp, Homo sapiens
  chr14:52940020-52940038
  hypo
caacgctgctgctttgat

SEQ ID NO: 20693 - DNA, 31 bp, Homo sapiens
  chr14:52940066-52940097
  hypo
tttatacaaagtgccacgttacatattttgc

SEQ ID NO: 20694 - DNA, 31 bp, Homo sapiens
  chr14:55517488-55517519
  hypo
caccatataattatcacgacatctttattgc

SEQ ID NO: 20695 - DNA, 117 bp, Homo sapiens
  chr14:55765335-55765452
  hypo
ggcgttgaaggctggcgcggcgagcgctgttcggggctggagggggtaaggccggcaagggcggcctgaccctccaggaggccatccagcggctgcgggacacggaggagatgttaa

SEQ ID NO: 20696 - DNA, 24 bp, Homo sapiens
  chr14:56255319-56255343
  hypo
ttttttttttttaagacggagtct

SEQ ID NO: 20697 - DNA, 31 bp, Homo sapiens
  chr14:57045519-57045550
  hypo
gtgctggccccatgaccgtcaaggtaggtat

SEQ ID NO: 20698 - DNA, 39 bp, Homo sapiens
  chr14:57045576-57045615
  hypo
gtctctatcaaattgcgcgtaacacgtttgagattgtca

SEQ ID NO: 20699 - DNA, 79 bp, Homo sapiens
  chr14:57045708-57045787
  hypo
ttaaaaagcttaactgcgctgttatgtagttgtccttattaacggctccgattctttttttttgcgttacagctcattg

SEQ ID NO: 20700 - DNA, 31 bp, Homo sapiens; identical to SEQ ID NO: 5085
  chr14:57734480-57734511
  hypo

SEQ ID NO: 20701 - DNA, 37 bp, Homo sapiens
  chr14:59113232-59113269
  hypo
ggaggaagagtgggggcgggcccgaggctggtgttcc

SEQ ID NO: 20702 - DNA, 31 bp, Homo sapiens
  chr14:59113294-59113325
  hypo
agggcggggagcagggcgcatggccacggac

SEQ ID NO: 20703 - DNA, 6 bp, Homo sapiens
  chr14:59821077-59821083
  hypo
tggtga

SEQ ID NO: 20704 - DNA, 45 bp, Homo sapiens
  chr14:59821158-59821203
  hypo
tgcactgccctagtctcggagctcacagcacgcctcctgggctcc

SEQ ID NO: 20705 - DNA, 31 bp, Homo sapiens
  chr14:59821211-59821242
  hypo
gttgggcttttgactacgagggtgttggtga

SEQ ID NO: 20706 - DNA, 31 bp, Homo sapiens
  chr14:59935187-59935218
  hypo
tagcatccccatcttcgcgttaaggttagtc

SEQ ID NO: 20707 - DNA, 44 bp, Homo sapiens
  chr14:59935230-59935274
  hypo
ctcccttgactgataccgtcctttccccacgtattgggccatgt

SEQ ID NO: 20708 - DNA, 31 bp, Homo sapiens
  chr14:59935326-59935357
  hypo
ggtctataattttttgcgtgattatctaagc

SEQ ID NO: 20709 - DNA, 31 bp, Homo sapiens; identical to SEQ ID NO: 5088
  chr14:61736456-61736487
  hypo

SEQ ID NO: 20710 - DNA, 29 bp, Homo sapiens
  chr14:61903530-61903559
  hypo
tgagccgccacacccggccttgctgccat

SEQ ID NO: 20711 - DNA, 63 bp, Homo sapiens
  chr14:62015168-62015231
  hypo
tggtggccttcctgagcgtggtcccgcttgtggtctgagagctgagctcgtgctcatctgtgg

SEQ ID NO: 20712 - DNA, 61 bp, Homo sapiens
  chr14:62015256-62015317
  hypo
agagaagcaaggctagcgatagatcaagagtgatggggagacctggcgtggtggctcatgc

SEQ ID NO: 20713 - DNA, 89 bp, Homo sapiens; identical to SEQ ID NO: 5089
  chr14:62161812-62161901
  hypo

SEQ ID NO: 20714 - DNA, 93 bp, Homo sapiens; identical to SEQ ID NO: 5090
  chr14:62162323-62162416
  hypo

SEQ ID NO: 20715 - DNA, 203 bp, Homo sapiens; identical to SEQ ID NO: 5091
  chr14:62162425-62162628
  hypo

SEQ ID NO: 20716 - DNA, 38 bp, Homo sapiens; identical to SEQ ID NO: 5093
  chr14:62162926-62162964
  hypo

SEQ ID NO: 20717 - DNA, 23 bp, Homo sapiens
  chr14:62207098-62207121
  hypo
gataaacacgatggacttggttg

SEQ ID NO: 20718 - DNA, 66 bp, Homo sapiens
  chr14:64061917-64061983
  hypo
ggccagtactgactgcgcgctgcggccgcacggcaccccggaaagcgcggcgcgccaggcgtttcc

SEQ ID NO: 20719 - DNA, 31 bp, Homo sapiens; identical to SEQ ID NO: 5094
  chr14:64182959-64182990
  hypo

SEQ ID NO: 20720 - DNA, 36 bp, Homo sapiens
  chr14:64227544-64227580
  hypo
gtttacaggcgtgagccaccacgcctggccttgtac

SEQ ID NO: 20721 - DNA, 37 bp, Homo sapiens
  chr14:64992808-64992845
  hypo
tacaggcatgagccaccgtgcccggccacctcaattt

SEQ ID NO: 20722 - DNA, 1 bp, Homo sapiens
  chr14:65005599-65005600
  hypo
g

SEQ ID NO: 20723 - DNA, 9 bp, Homo sapiens
  chr14:65005779-65005788
  hypo
tttcaaagt

SEQ ID NO: 20724 - DNA, 31 bp, Homo sapiens; identical to SEQ ID NO: 5098
  chr14:65005802-65005833
  hypo

SEQ ID NO: 20725 - DNA, 31 bp, Homo sapiens
  chr14:65005911-65005942
  hypo
caggaggaagtgaatcgcgctccttttcatc

SEQ ID NO: 20726 - DNA, 69 bp, Homo sapiens
  chr14:65194542-65194611
  hypo
ccagcagctggttgaacgtgaaggggcccctctccccgttcaacagccgggcagcggcagggcctgcac

SEQ ID NO: 20727 - DNA, 39 bp, Homo sapiens
  chr14:65194627-65194666
  hypo
cctgggccgagtggtgcgggagatcgtggagacagagcg

SEQ ID NO: 20728 - DNA, 31 bp, Homo sapiens
  chr14:65194803-65194834
  hypo
tggggtctcccaccctcgctgactgcactgt

SEQ ID NO: 20729 - DNA, 31 bp, Homo sapiens
  chr14:65195784-65195815
  hypo
catagaaaatatctacgcgctgaacaggtgt

SEQ ID NO: 20730 - DNA, 31 bp, Homo sapiens
  chr14:65199533-65199564
  hypo
ccgctgcagcccagagcggctgaagaaggct

SEQ ID NO: 20731 - DNA, 31 bp, Homo sapiens
  chr14:65203193-65203224
  hypo
tggagccagggacctccggagatgttgctag

SEQ ID NO: 20732 - DNA, 76 bp, Homo sapiens
  chr14:65208027-65208103
  hypo
tgctggaccaggccagcgtcattgcggagcgatttgtcagcagcttctctcggcggagcagcgtggcacaggagga

SEQ ID NO: 20733 - DNA, 76 bp, Homo sapiens
  chr14:65208114-65208190
  hypo
gtggctttgggagcccgcggctggtcagccggagcagcagcgtgctcagcctggagggcagcgagaagggcctggc

SEQ ID NO: 20734 - DNA, 54 bp, Homo sapiens
  chr14:65209827-65209881
  hypo
agccagaggaccacctcgcctgggggccggccctccgcccggagccccctcagc

SEQ ID NO: 20735 - DNA, 79 bp, Homo sapiens
  chr14:65209888-65209967
  hypo
agaccttcagctggcccgacgtccgtgagctctgctccaagtatgcctcccgcgatgaggcacgccgagcagggggcgg

SEQ ID NO: 20736 - DNA, 31 bp, Homo sapiens
  chr14:65210331-65210362
  hypo
gagggttccagggacccggcagacccgagcc

SEQ ID NO: 20737 - DNA, 75 bp, Homo sapiens
  chr14:65215873-65215948
  hypo
agcttttgcagtgcagcgtggggcccgggggcccggcccgcgactcgactcatctcgattcgaccggcgggcggc

SEQ ID NO: 20738 - DNA, 31 bp, Homo sapiens
  chr14:65217132-65217163
  hypo
atattcaattttatatcgtgtttctaagcat

SEQ ID NO: 20739 - DNA, 31 bp, Homo sapiens
  chr14:65220229-65220260
  hypo
agccagcagcctctcccgcactcacctgttg

SEQ ID NO: 20740 - DNA, 31 bp, Homo sapiens
  chr14:65220280-65220311
  hypo
ctccaggtcatgcttgcggcccaggtagcct

SEQ ID NO: 20741 - DNA, 49 bp, Homo sapiens
  chr14:65220323-65220372
  hypo
ctctgcccatggtcccgcggggccggcagcgttgcgggctcatcaccct

SEQ ID NO: 20742 - DNA, 47 bp, Homo sapiens
  chr14:65236249-65236296
  hypo
gctggcacagtggggacggagacggaggagctcgcctccatccttgc

SEQ ID NO: 20743 - DNA, 85 bp, Homo sapiens
  chr14:65237646-65237731
  hypo
ccaggagaggaggtcacgggccatgctgaagaagcggaatttatccgccgtgtccactagctgggtccggcgcccggcacaggca

SEQ ID NO: 20744 - DNA, 31 bp, Homo sapiens
  chr14:65240158-65240189
  hypo
aaaaggccctcagagacggcagccacgaacc

SEQ ID NO: 20745 - DNA, 55 bp, Homo sapiens
  chr14:65248986-65249041
  hypo
gtctacaacccactcacgtgccttcagcttagccaacatccgattgacactggtc

SEQ ID NO: 20746 - DNA, 46 bp, Homo sapiens
  chr14:65271601-65271647
  hypo
tttgctgaagaggggccgatggcagcagccccggggcccacagaag

SEQ ID NO: 20747 - DNA, 65 bp, Homo sapiens
  chr14:65406322-65406387
  hypo
ccaggccacatctgagcggcgcacagggctccaaatgatgagcttgggatcggtcatgagggaaa

SEQ ID NO: 20748 - DNA, 46 bp, Homo sapiens
  chr14:65406413-65406459
  hypo
ttgtccttcaggtaggcgaagacaggatgctcgttctgcccattca

SEQ ID NO: 20749 - DNA, 31 bp, Homo sapiens
  chr14:65532530-65532561
  hypo
gtccctcctgttctaccgcctctcatttgat

SEQ ID NO: 20750 - DNA, 31 bp, Homo sapiens
  chr14:67860125-67860156
  hypo
catcttgaagtgaagccgccatgatgattga

SEQ ID NO: 20751 - DNA, 110 bp, Homo sapiens
  chr14:67864420-67864530
  hypo
gccatccaggaggatccggcccttgggaggggtcactctccgacccccctcaagcttgtagtacaccagcgtgttctgccgaaggatgaaccatcgcgccttccagttgt

SEQ ID NO: 20752 - DNA, 31 bp, Homo sapiens
  chr14:67864559-67864590
  hypo
aagccctgaggtgaggcggtcagtgggaggg

SEQ ID NO: 20753 - DNA, 31 bp, Homo sapiens
  chr14:67888348-67888379
  hypo
ggagggcctataggaacgatcctagccatta

SEQ ID NO: 20754 - DNA, 59 bp, Homo sapiens
  chr14:67888395-67888454
  hypo
tctagagatgtgcattcggagccattggtaagagcatggaattacgtggaaactgcaga

SEQ ID NO: 20755 - DNA, 39 bp, Homo sapiens
  chr14:67888489-67888528
  hypo
aggctattgtgctttgcgggttctcggtctgctttccct

SEQ ID NO: 20756 - DNA, 70 bp, Homo sapiens
  chr14:68067617-68067687
  hypo
cttttgcttggcaagccgatttctctaagccagagtgagccgcaaggagagcccacgggtattcatttca

SEQ ID NO: 20757 - DNA, 31 bp, Homo sapiens
  chr14:68067689-68067720
  hypo
tactcttttcctgtgccgggtagtttgaggt

SEQ ID NO: 20758 - DNA, 56 bp, Homo sapiens
  chr14:68067725-68067781
  hypo
aggatgcagcagtgaacgatgttgatgacagtctctgccctcgggcagcttccttt

SEQ ID NO: 20759 - DNA, 31 bp, Homo sapiens
  chr14:68621852-68621883
  hypo
atataaaaggaaattacgcaaggggagctgg

SEQ ID NO: 20760 - DNA, 44 bp, Homo sapiens
  chr14:69153994-69154038
  hypo
cctaaaaaaagttgggcgggaggccgagatgggtggatcacaag

SEQ ID NO: 20761 - DNA, 31 bp, Homo sapiens
  chr14:69218774-69218805
  hypo
agtggatctggatagacgcaagttaagctga

SEQ ID NO: 20762 - DNA, 31 bp, Homo sapiens
  chr14:69218837-69218868
  hypo
ttccccaggatcagcccgatggcaattctgg

SEQ ID NO: 20763 - DNA, 31 bp, Homo sapiens
  chr14:69229175-69229206
  hypo
tgccttggccatgattcgtagactcacttac

SEQ ID NO: 20764 - DNA, 31 bp, Homo sapiens; identical to SEQ ID NO: 5112
  chr14:69258877-69258908
  hypo

SEQ ID NO: 20765 - DNA, 31 bp, Homo sapiens; identical to SEQ ID NO: 5114
  chr14:69259383-69259414
  hypo

SEQ ID NO: 20766 - DNA, 31 bp, Homo sapiens; identical to SEQ ID NO: 5115
  chr14:69259419-69259450
  hypo

SEQ ID NO: 20767 - DNA, 31 bp, Homo sapiens; identical to SEQ ID NO: 5116
  chr14:69259474-69259505
  hypo

SEQ ID NO: 20768 - DNA, 18 bp, Homo sapiens
  chr14:69312385-69312403
  hypo
acagtgtcaggccaggcg

SEQ ID NO: 20769 - DNA, 37 bp, Homo sapiens
  chr14:69337468-69337505
  hypo
tacaggcatgggccaccgtgcccggcccagagtcttt

SEQ ID NO: 20770 - DNA, 98 bp, Homo sapiens
  chr14:69345630-69345728
  hypo
agagaaaaaggaaaaacgcattatttcttgccccagacgccacccctgagcgtgctccatgcaggaggcgagtacctgggggtcgttgccaatatcat

SEQ ID NO: 20771 - DNA, 46 bp, Homo sapiens
  chr14:69345745-69345791
  hypo
caggctttgaactcctcgggacccagtgtgccggagtgatcctggg

SEQ ID NO: 20772 - DNA, 64 bp, Homo sapiens
  chr14:69347539-69347603
  hypo
ttggtgtgcttgttgtcgaagatgagcgcctcctggatgagctggtggtcgccctccagctgat

SEQ ID NO: 20773 - DNA, 51 bp, Homo sapiens
  chr14:69347608-69347659
  hypo
tttggcttgtagttgacgatgctcttctcatactgccgcaggtggctgagc

SEQ ID NO: 20774 - DNA, 31 bp, Homo sapiens
  chr14:69347683-69347714
  hypo
tcaatggagatcctcccgatctcctgctcac

SEQ ID NO: 20775 - DNA, 54 bp, Homo sapiens
  chr14:69352138-69352192
  hypo
tacttgagctcctgtgcgatggcggcaatctgctccacacggtcctggtgggca

SEQ ID NO: 20776 - DNA, 39 bp, Homo sapiens
  chr14:69352453-69352492
  hypo
tagaacatccaccaaccggcgcaacggggaaaagcactc

SEQ ID NO: 20777 - DNA, 31 bp, Homo sapiens
  chr14:69352511-69352542
  hypo
gccatgaaagtgtctacgcaggaaggctatg

SEQ ID NO: 20778 - DNA, 45 bp, Homo sapiens
  chr14:69352556-69352601
  hypo
aatgcatagggcatgacgctatacacacagcgggaaacacagcca

SEQ ID NO: 20779 - DNA, 31 bp, Homo sapiens
  chr14:69369341-69369372
  hypo
gaggcagaaagaagctcgcagcaccaccaag

SEQ ID NO: 20780 - DNA, 36 bp, Homo sapiens
  chr14:69385003-69385039
  hypo
atgtgaaagttctggccgggcgcggtggctcacgcc

SEQ ID NO: 20781 - DNA, 31 bp, Homo sapiens
  chr14:69396464-69396495
  hypo
agagtctctgaggacccgggacagagggagg

SEQ ID NO: 20782 - DNA, 112 bp, Homo sapiens; identical to SEQ ID NO: 5117
  chr14:69444742-69444854
  hypo

SEQ ID NO: 20783 - DNA, 112 bp, Homo sapiens; identical to SEQ ID NO: 5118
  chr14:69444880-69444992
  hypo

SEQ ID NO: 20784 - DNA, 102 bp, Homo sapiens; identical to SEQ ID NO: 5119
  chr14:69445111-69445213
  hypo

SEQ ID NO: 20785 - DNA, 37 bp, Homo sapiens
  chr14:69445327-69445364
  hypo
ccagcctgaagaccaccgcccccgagcacagcccacg

SEQ ID NO: 20786 - DNA, 31 bp, Homo sapiens; identical to SEQ ID NO: 5120
  chr14:69445726-69445757
  hypo

SEQ ID NO: 20787 - DNA, 31 bp, Homo sapiens; identical to SEQ ID NO: 5121
  chr14:69445764-69445795
  hypo

SEQ ID NO: 20788 - DNA, 31 bp, Homo sapiens; identical to SEQ ID NO: 5122
  chr14:69445827-69445858
  hypo

SEQ ID NO: 20789 - DNA, 156 bp, Homo sapiens; identical to SEQ ID NO: 5123
  chr14:69445870-69446026
  hypo

SEQ ID NO: 20790 - DNA, 62 bp, Homo sapiens
  chr14:69470453-69470515
  hypo
actcgtcccagtgactcggccctgcctgcccctcactctgttcaccacggcactctgttgtc

SEQ ID NO: 20791 - DNA, 31 bp, Homo sapiens
  chr14:69470535-69470566
  hypo
cctccttgccacacctcgtgtgtgtcaaggt

SEQ ID NO: 20792 - DNA, 39 bp, Homo sapiens
  chr14:69470607-69470646
  hypo
ctgaaacacccttccccgcagatccgcaggtttccccat

SEQ ID NO: 20793 - DNA, 31 bp, Homo sapiens
  chr14:69550072-69550103
  hypo
ctgtactgtctggccccgtggtctagacact

SEQ ID NO: 20794 - DNA, 31 bp, Homo sapiens
  chr14:69550125-69550156
  hypo
gctgatgaaactcctacgcaagaagatcaag

SEQ ID NO: 20795 - DNA, 31 bp, Homo sapiens
  chr14:69550158-69550189
  hypo
gtggaacctcaaactgcggcagtggaaccta

SEQ ID NO: 20796 - DNA, 31 bp, Homo sapiens
  chr14:69550205-69550236
  hypo
caaatctgaccctgtccgaaactcaaaatac

SEQ ID NO: 20797 - DNA, 31 bp, Homo sapiens; identical to SEQ ID NO: 5128
  chr14:69618276-69618307
  hypo

SEQ ID NO: 20798 - DNA, 49 bp, Homo sapiens; identical to SEQ ID NO: 5129
  chr14:69658737-69658786
  hypo

SEQ ID NO: 20799 - DNA, 31 bp, Homo sapiens; identical to SEQ ID NO: 5130
  chr14:69658802-69658833
  hypo

SEQ ID NO: 20800 - DNA, 21 bp, Homo sapiens
  chr14:69712707-69712728
  hypo
agccatcgcacccggccccta

SEQ ID NO: 20801 - DNA, 31 bp, Homo sapiens
  chr14:70078067-70078098
  hypo
gccccatccactccagcgcagagggactgtc

SEQ ID NO: 20802 - DNA, 31 bp, Homo sapiens
  chr14:70236263-70236294
  hypo
tgtgggttatcctaatcgttgtcttggtcac

SEQ ID NO: 20803 - DNA, 31 bp, Homo sapiens; identical to SEQ ID NO: 5132
  chr14:70826438-70826469
  hypo

SEQ ID NO: 20804 - DNA, 54 bp, Homo sapiens; identical to SEQ ID NO: 5133
  chr14:70826504-70826558
  hypo

SEQ ID NO: 20805 - DNA, 61 bp, Homo sapiens; identical to SEQ ID NO: 5134
  chr14:71108797-71108858
  hypo

SEQ ID NO: 20806 - DNA, 31 bp, Homo sapiens
  chr14:72732621-72732652
  hypo
taactatcagtcctatcgcttttttgggggg

SEQ ID NO: 20807 - DNA, 31 bp, Homo sapiens
  chr14:73033095-73033126
  hypo
atgatcacggactcatcggaatggcctcctc

SEQ ID NO: 20808 - DNA, 31 bp, Homo sapiens
  chr14:73140381-73140412
  hypo
tgcctcattgatctatcggggtctcttctgt

SEQ ID NO: 20809 - DNA, 31 bp, Homo sapiens
  chr14:73482874-73482905
  hypo
gagattatagatgactcgtcagcatgaatca

SEQ ID NO: 20810 - DNA, 39 bp, Homo sapiens
  chr14:73482925-73482964
  hypo
aataatggatctgggccgggcacggtgttcacgcctgta

SEQ ID NO: 20811 - DNA, 31 bp, Homo sapiens; identical to SEQ ID NO: 5135
  chr14:73485669-73485700
  hypo

SEQ ID NO: 20812 - DNA, 31 bp, Homo sapiens
  chr14:73971262-73971293
  hypo
taatgctcctaggtgacgcctgtgctgctgg

SEQ ID NO: 20813 - DNA, 27 bp, Homo sapiens
  chr14:74020157-74020184
  hypo
tgagccgggatcgcgccactgcactcc

SEQ ID NO: 20814 - DNA, 63 bp, Homo sapiens; identical to SEQ ID NO: 5136
  chr14:74180609-74180672
  hypo

SEQ ID NO: 20815 - DNA, 31 bp, Homo sapiens
  chr14:74185751-74185782
  hypo
cccgggggcccccagcgcgggtgcgcgagga

SEQ ID NO: 20816 - DNA, 31 bp, Homo sapiens
  chr14:74196563-74196594
  hypo
gagtagacgggaggggcgatgaaagtgcccg

SEQ ID NO: 20817 - DNA, 40 bp, Homo sapiens
  chr14:74244736-74244776
  hypo
gaagaacctgacagaacgcaccttataaaccatgataggg

SEQ ID NO: 20818 - DNA, 31 bp, Homo sapiens
  chr14:74273408-74273439
  hypo
cttgacacacccatctcggtgccagctgggc

SEQ ID NO: 20819 - DNA, 82 bp, Homo sapiens
  chr14:75062986-75063068
  hypo
ggagcagaacttggtacgtgagggatggaggagacagtcgagggcccaagatccagaagaacaaggccggtgggggccactc

SEQ ID NO: 20820 - DNA, 28 bp, Homo sapiens
  chr14:75173766-75173794
  hypo
ttatcaaaattatacacgatctggtcgg

SEQ ID NO: 20821 - DNA, 31 bp, Homo sapiens
  chr14:75189113-75189144
  hypo
ttggcccaatagactccgttcaaatgttggc

SEQ ID NO: 20822 - DNA, 31 bp, Homo sapiens
  chr14:75332118-75332149
  hypo
tggaaactggagagagcggttggggagaagg

SEQ ID NO: 20823 - DNA, 29 bp, Homo sapiens
  chr14:75337378-75337407
  hypo
aggcaggggatatatgcgaaatctctgta

SEQ ID NO: 20824 - DNA, 40 bp, Homo sapiens
  chr14:75416061-75416101
  hypo
gcatggtgacattggccgtctccaccggcacacagtgcag

SEQ ID NO: 20825 - DNA, 31 bp, Homo sapiens
  chr14:75446327-75446358
  hypo
tggcaagaaggcaagacggattgcatttcag

SEQ ID NO: 20826 - DNA, 31 bp, Homo sapiens
  chr14:75636943-75636974
  hypo
agtggaactaagtgaacggacaccatgaaaa

SEQ ID NO: 20827 - DNA, 31 bp, Homo sapiens
  chr14:75725465-75725496
  hypo
aattatggccaactgacggtggagggagtgg

SEQ ID NO: 20828 - DNA, 31 bp, Homo sapiens
  chr14:75732469-75732500
  hypo
tatttgtaaagcacttcgcataattcctgag

SEQ ID NO: 20829 - DNA, 31 bp, Homo sapiens
  chr14:75739620-75739651
  hypo
atctgtcctttgtggccgggtggtgtggctc

SEQ ID NO: 20830 - DNA, 55 bp, Homo sapiens; identical to SEQ ID NO: 5140
  chr14:75743667-75743722
  hypo

SEQ ID NO: 20831 - DNA, 31 bp, Homo sapiens; identical to SEQ ID NO: 5141
  chr14:75743729-75743760
  hypo

SEQ ID NO: 20832 - DNA, 91 bp, Homo sapiens; identical to SEQ ID NO: 5142
  chr14:75743971-75744062
  hypo

SEQ ID NO: 20833 - DNA, 31 bp, Homo sapiens
  chr14:75760178-75760209
  hypo
ccaactggagtggcagcgctggaattagagt

SEQ ID NO: 20834 - DNA, 31 bp, Homo sapiens
  chr14:76013065-76013096
  hypo
agagctgcgcccatcccgcagaggcccctgt

SEQ ID NO: 20835 - DNA, 31 bp, Homo sapiens
  chr14:76128608-76128639
  hypo
gatggcatcttgtcagcgtgcttgtcataga

SEQ ID NO: 20836 - DNA, 29 bp, Homo sapiens
  chr14:76128673-76128702
  hypo
ttttttttttttgagacggagttcactct

SEQ ID NO: 20837 - DNA, 17 bp, Homo sapiens
  chr14:76377380-76377397
  hypo
ttttgagtcagagtctc

SEQ ID NO: 20838 - DNA, 36 bp, Homo sapiens
  chr14:76431241-76431277
  hypo
agcctctgacctcaggcgttccgcagttacccaaaa

SEQ ID NO: 20839 - DNA, 59 bp, Homo sapiens
  chr14:76431358-76431417
  hypo
cagaaatgactctcaacgacttcgccatctctacccaaacaccccggggacaaacaccc

SEQ ID NO: 20840 - DNA, 31 bp, Homo sapiens
  chr14:76628414-76628445
  hypo
acaatgaatactttatcgcttggaatctgag

SEQ ID NO: 20841 - DNA, 31 bp, Homo sapiens
  chr14:76628466-76628497
  hypo
tggttcagtcttctcacgaggttatagtcta

SEQ ID NO: 20842 - DNA, 31 bp, Homo sapiens
  chr14:77119608-77119639
  hypo
gcatggctctcgtgctcgcagccaggctgca

SEQ ID NO: 20843 - DNA, 37 bp, Homo sapiens
  chr14:77242416-77242453
  hypo
agctcgtgctggacttcgaggccgcctacggccgctg

SEQ ID NO: 20844 - DNA, 31 bp, Homo sapiens
  chr14:77242482-77242513
  hypo
gccagagcgtgtcacacgacccgcacagcgt

SEQ ID NO: 20845 - DNA, 48 bp, Homo sapiens
  chr14:77433609-77433657
  hypo
tctaaggcagagggtacgcaggtgggactacagcgctttttgggggac

SEQ ID NO: 20846 - DNA, 35 bp, Homo sapiens
  chr14:77433666-77433701
  hypo
aaatccatcccattgccgggcgcagtggctcatgc

SEQ ID NO: 20847 - DNA, 232 bp, Homo sapiens; identical to SEQ ID NO: 5146
  chr14:77493527-77493759
  hypo

SEQ ID NO: 20848 - DNA, 31 bp, Homo sapiens
  chr14:77937150-77937181
  hypo
taggggtgcaaaatgacgccttttgatgaag

SEQ ID NO: 20849 - DNA, 31 bp, Homo sapiens
  chr14:77949054-77949085
  hypo
ctgcattccaaagagacgagggatgatgggg

SEQ ID NO: 20850 - DNA, 27 bp, Homo sapiens
  chr14:77968364-77968391
  hypo
actgcgcctggccggcctatttttcct

SEQ ID NO: 20851 - DNA, 44 bp, Homo sapiens
  chr14:78165391-78165435
  hypo
aggcctgagccactgcgcttgcccttattcggtctctttagcac

SEQ ID NO: 20852 - DNA, 26 bp, Homo sapiens
  chr14:78166108-78166134
  hypo
taggttctggctgggcgcggtggctc

SEQ ID NO: 20853 - DNA, 34 bp, Homo sapiens
  chr14:78247789-78247823
  hypo
taaaaataattaggtgcggccgggtgcggtggct

SEQ ID NO: 20854 - DNA, 18 bp, Homo sapiens
  chr14:78387390-78387408
  hypo
caggcgcggtggctcacg

SEQ ID NO: 20855 - DNA, 31 bp, Homo sapiens
  chr14:78397856-78397887
  hypo
tcaggacttagagattcgcaacaacgcggcc

SEQ ID NO: 20856 - DNA, 31 bp, Homo sapiens
  chr14:87963379-87963410
  hypo
aaggatactgcagccacgctttatcttcttc

SEQ ID NO: 20857 - DNA, 44 bp, Homo sapiens
  chr14:87963411-87963455
  hypo
tagtttttcttcagggcggtcatcagggtcgtttttatcctttc

SEQ ID NO: 20858 - DNA, 31 bp, Homo sapiens; identical to SEQ ID NO: 5151
  chr14:88459618-88459649
  hypo

SEQ ID NO: 20859 - DNA, 49 bp, Homo sapiens; identical to SEQ ID NO: 5152
  chr14:88789941-88789990
  hypo

SEQ ID NO: 20860 - DNA, 168 bp, Homo sapiens; identical to SEQ ID NO: 5153
  chr14:88789998-88790166
  hypo

SEQ ID NO: 20861 - DNA, 399 bp, Homo sapiens; identical to SEQ ID NO: 5156
  chr14:89020844-89021243
  hypo

SEQ ID NO: 20862 - DNA, 31 bp, Homo sapiens; identical to SEQ ID NO: 5157
  chr14:89021244-89021275
  hypo

SEQ ID NO: 20863 - DNA, 36 bp, Homo sapiens; identical to SEQ ID NO: 5158
  chr14:89021377-89021413
  hypo

SEQ ID NO: 20864 - DNA, 62 bp, Homo sapiens; identical to SEQ ID NO: 5159
  chr14:89290984-89291046
  hypo

SEQ ID NO: 20865 - DNA, 31 bp, Homo sapiens; identical to SEQ ID NO: 5160
  chr14:89291184-89291215
  hypo

SEQ ID NO: 20866 - DNA, 20 bp, Homo sapiens
  chr14:89293029-89293049
  hypo
ctgggcgacagagagactct

SEQ ID NO: 20867 - DNA, 31 bp, Homo sapiens; identical to SEQ ID NO: 5161
  chr14:89506987-89507018
  hypo

SEQ ID NO: 20868 - DNA, 42 bp, Homo sapiens; identical to SEQ ID NO: 5162
  chr14:89507057-89507099
  hypo

SEQ ID NO: 20869 - DNA, 31 bp, Homo sapiens
  chr14:89657652-89657683
  hypo
agaacatctgccccagcgcagcgtcccagct

SEQ ID NO: 20870 - DNA, 31 bp, Homo sapiens
  chr14:89657805-89657836
  hypo
ttactgcctctgtgtccgccaaacccaatga

SEQ ID NO: 20871 - DNA, 31 bp, Homo sapiens
  chr14:89657843-89657874
  hypo
tgggggacaaggggctcgcacttgtcagttt

SEQ ID NO: 20872 - DNA, 38 bp, Homo sapiens
  chr14:89875688-89875726
  hypo
tgggggacgggggggtcgcatggcgggagaacagctcc

SEQ ID NO: 20873 - DNA, 30 bp, Homo sapiens; identical to SEQ ID NO: 5164
  chr14:90849827-90849857
  hypo

SEQ ID NO: 20874 - DNA, 38 bp, Homo sapiens; identical to SEQ ID NO: 5165
  chr14:90849897-90849935
  hypo

SEQ ID NO: 20875 - DNA, 31 bp, Homo sapiens
  chr14:91288493-91288524
  hypo
caggtttatcagacctcgagtctgcaggttt

SEQ ID NO: 20876 - DNA, 42 bp, Homo sapiens
  chr14:91700729-91700771
  hypo
cggctcttctgggtgccgtggctccggcgcacggcgcgcagg

SEQ ID NO: 20877 - DNA, 56 bp, Homo sapiens
  chr14:91739012-91739068
  hypo
cgggctccggggaggccggactgctctttgagacgctccctcgactgcagtcctcc

SEQ ID NO: 20878 - DNA, 27 bp, Homo sapiens
  chr14:91789563-91789590
  hypo
tagtgcaaatctcgtcagcacccccca

SEQ ID NO: 20879 - DNA, 49 bp, Homo sapiens; identical to SEQ ID NO: 5166
  chr14:91976435-91976484
  hypo

SEQ ID NO: 20880 - DNA, 26 bp, Homo sapiens
  chr14:91984187-91984213
  hypo
gccactgtgcccggccttttgtccta

SEQ ID NO: 20881 - DNA, 26 bp, Homo sapiens
  chr14:92081552-92081578
  hypo
ccacctcctgtcacatcggcggcagc

SEQ ID NO: 20882 - DNA, 31 bp, Homo sapiens
  chr14:92403222-92403253
  hypo
gcatgccagatacagacgatgtcttcaccaa

SEQ ID NO: 20883 - DNA, 31 bp, Homo sapiens
  chr14:93077330-93077361
  hypo
tatgaggtggtgtagtcgcttcttatggctg

SEQ ID NO: 20884 - DNA, 31 bp, Homo sapiens
  chr14:93115302-93115333
  hypo
ggggcagcgcatggcacgtggaggaaggagt

SEQ ID NO: 20885 - DNA, 31 bp, Homo sapiens
  chr14:93115497-93115528
  hypo
aatggagtagagggggcggctacagccgtga

SEQ ID NO: 20886 - DNA, 31 bp, Homo sapiens
  chr14:93454281-93454312
  hypo
cggcaacgcacctacccggcctggtctgcag

SEQ ID NO: 20887 - DNA, 31 bp, Homo sapiens
  chr14:93522012-93522043
  hypo
tgcctccctcccacagcgcctttccaaagtc

SEQ ID NO: 20888 - DNA, 31 bp, Homo sapiens
  chr14:93568563-93568594
  hypo
ggcttccccagagcagcgagaggatggggca

SEQ ID NO: 20889 - DNA, 21 bp, Homo sapiens
  chr14:93695624-93695645
  hypo
aaaatgcaggcagggcgcggt

SEQ ID NO: 20890 - DNA, 31 bp, Homo sapiens
  chr14:93706751-93706782
  hypo
ttttgggagaaatcagcgttgttgacaccca

SEQ ID NO: 20891 - DNA, 69 bp, Homo sapiens
  chr14:93706809-93706878
  hypo
atgtaattcatttacccggtagctcataaacgctccctagccctgcatagttttcgagtgagtgtgagt

SEQ ID NO: 20892 - DNA, 46 bp, Homo sapiens
  chr14:94187581-94187627
  hypo
ggctcagcctggtgtccgagctgcctgggcccgcaggctgaccagg

SEQ ID NO: 20893 - DNA, 31 bp, Homo sapiens
  chr14:94196048-94196079
  hypo
cagtaggtgtgtcctgcggggaggaagaaga

SEQ ID NO: 20894 - DNA, 99 bp, Homo sapiens; identical to SEQ ID NO: 5171
  chr14:94406083-94406182
  hypo

SEQ ID NO: 20895 - DNA, 31 bp, Homo sapiens
  chr14:94583280-94583311
  hypo
ggatggacccacaggccgatggccatgggca

SEQ ID NO: 20896 - DNA, 36 bp, Homo sapiens; identical to SEQ ID NO: 5176
  chr14:94640375-94640411
  hypo

SEQ ID NO: 20897 - DNA, 35 bp, Homo sapiens; identical to SEQ ID NO: 5177
  chr14:94640412-94640447
  hypo

SEQ ID NO: 20898 - DNA, 31 bp, Homo sapiens
  chr14:94829567-94829598
  hypo
ccgccgtcgcctctgacgggctgctttgcac

SEQ ID NO: 20899 - DNA, 31 bp, Homo sapiens
  chr14:94829623-94829654
  hypo
atgctgccactgagaacgggaggctcagcaa

SEQ ID NO: 20900 - DNA, 31 bp, Homo sapiens
  chr14:94829669-94829700
  hypo
tcacacagtgccacagcgttctagcactcag

SEQ ID NO: 20901 - DNA, 31 bp, Homo sapiens
  chr14:94829712-94829743
  hypo
ctctctctgggtgacccgcacttggcggccg

SEQ ID NO: 20902 - DNA, 31 bp, Homo sapiens
  chr14:95109946-95109977
  hypo
tgctgcggatggaccacgctgggaacaccac

SEQ ID NO: 20903 - DNA, 31 bp, Homo sapiens
  chr14:95157711-95157742
  hypo
atccctcagggttatccggtggagtgggcac

SEQ ID NO: 20904 - DNA, 31 bp, Homo sapiens
  chr14:95200598-95200629
  hypo
aaatggtgtcttgcaacggttatgcctaact

SEQ ID NO: 20905 - DNA, 31 bp, Homo sapiens; identical to SEQ ID NO: 5178
  chr14:95932616-95932647
  hypo

SEQ ID NO: 20906 - DNA, 31 bp, Homo sapiens
  chr14:96022242-96022273
  hypo
actaccaggcagacttcgtgattcttggacc

SEQ ID NO: 20907 - DNA, 31 bp, Homo sapiens; identical to SEQ ID NO: 5179
  chr14:96499773-96499804
  hypo

SEQ ID NO: 20908 - DNA, 39 bp, Homo sapiens
  chr14:96547951-96547990
  hypo
ttttgagacagggtctcgctggcacgcagactggaaagc

SEQ ID NO: 20909 - DNA, 11 bp, Homo sapiens
  chr14:96548021-96548032
  hypo
atttcctgggc

SEQ ID NO: 20910 - DNA, 46 bp, Homo sapiens
  chr14:96653270-96653316
  hypo
tgtgttggtgcgtgtgcgctggtatgtgcgacgtgtgtttctgtgt

SEQ ID NO: 20911 - DNA, 39 bp, Homo sapiens
  chr14:96653333-96653372
  hypo
tgttgtgggctacttccgattgggcggtcaggcaggctt

SEQ ID NO: 20912 - DNA, 31 bp, Homo sapiens
  chr14:96653398-96653429
  hypo
aagtggccaggggacccggctatggaagatg

SEQ ID NO: 20913 - DNA, 31 bp, Homo sapiens
  chr14:96653442-96653473
  hypo
gatggttggaactggccgcccccaggattag

SEQ ID NO: 20914 - DNA, 31 bp, Homo sapiens
  chr14:96694176-96694207
  hypo
caaattgtctcagggacggaacacccatcag

SEQ ID NO: 20915 - DNA, 20 bp, Homo sapiens
  chr14:96923681-96923701
  hypo
gccaccgtgccaagcctgaa

SEQ ID NO: 20916 - DNA, 22 bp, Homo sapiens
  chr14:96939127-96939149
  hypo
tgttctctgggctgggcgtggt

SEQ ID NO: 20917 - DNA, 78 bp, Homo sapiens
  chr14:97045353-97045431
  hypo
gtgtcaatgagttagccgaagcctgtcccctcttccacttgccacgacgtgctcttctgtgtgcgtggaagttcttgc

SEQ ID NO: 20918 - DNA, 38 bp, Homo sapiens
  chr14:97338412-97338450
  hypo
attgtaggcgtgagctactgcgccgggcctctagcagg

SEQ ID NO: 20919 - DNA, 62 bp, Homo sapiens
  chr14:99651821-99651883
  hypo
gccagacacagagaaccggaggtgcccaggccaaggagggaaaggtccgcaaggtagggagc

SEQ ID NO: 20920 - DNA, 46 bp, Homo sapiens
  chr14:99651893-99651939
  hypo
cactcaaggtgcagggcgctgggccacgcgacgcagaaagcagctc

SEQ ID NO: 20921 - DNA, 18 bp, Homo sapiens
  chr14:99716739-99716757
  hypo
gggcgacagcgagactct

SEQ ID NO: 20922 - DNA, 31 bp, Homo sapiens
  chr14:99785811-99785842
  hypo
ctataaaatcatagaccgggcatggtgggtc

SEQ ID NO: 20923 - DNA, 31 bp, Homo sapiens
  chr14:99889361-99889392
  hypo
ttttctctattccccacgctcaaagagtgtt

SEQ ID NO: 20924 - DNA, 31 bp, Homo sapiens
  chr14:99987054-99987085
  hypo
cacacaggcaccaggacgcactcaccatggg

SEQ ID NO: 20925 - DNA, 281 bp, Homo sapiens; identical to SEQ ID NO: 5191
  chr14:100070244-100070525
  hypo

SEQ ID NO: 20926 - DNA, 240 bp, Homo sapiens; identical to SEQ ID NO: 5192
  chr14:100070680-100070920
  hypo

SEQ ID NO: 20927 - DNA, 79 bp, Homo sapiens; identical to SEQ ID NO: 5194
  chr14:100071305-100071384
  hypo

SEQ ID NO: 20928 - DNA, 31 bp, Homo sapiens; identical to SEQ ID NO: 5195
  chr14:100071387-100071418
  hypo

SEQ ID NO: 20929 - DNA, 92 bp, Homo sapiens; identical to SEQ ID NO: 5196
  chr14:100071435-100071527
  hypo

SEQ ID NO: 20930 - DNA, 41 bp, Homo sapiens; identical to SEQ ID NO: 5197
  chr14:100071548-100071589
  hypo

SEQ ID NO: 20931 - DNA, 31 bp, Homo sapiens
  chr14:100104269-100104300
  hypo
catgaccaacccacatcgcctctcacactga

SEQ ID NO: 20932 - DNA, 54 bp, Homo sapiens
  chr14:100118138-100118192
  hypo
aaggtactagagggtgcggacggggtggtcagggaggatcggaggtgagccttg

SEQ ID NO: 20933 - DNA, 37 bp, Homo sapiens
  chr14:100118224-100118261
  hypo
tgtgctgatgtaggggcggaggcgcactgttaacaca

SEQ ID NO: 20934 - DNA, 31 bp, Homo sapiens
  chr14:100118285-100118316
  hypo
gactcttcctggcatacggcaggtgctccag

SEQ ID NO: 20935 - DNA, 141 bp, Homo sapiens; identical to SEQ ID NO: 5198
  chr14:100150247-100150388
  hypo

SEQ ID NO: 20936 - DNA, 154 bp, Homo sapiens; identical to SEQ ID NO: 5199
  chr14:100150582-100150736
  hypo

SEQ ID NO: 20937 - DNA, 31 bp, Homo sapiens
  chr14:100268030-100268061
  hypo
gattctgcaccccaaacgtctcatcatccat

SEQ ID NO: 20938 - DNA, 31 bp, Homo sapiens
  chr14:100587317-100587348
  hypo
ctcccaccatccccatcgccctgactcctgt

SEQ ID NO: 20939 - DNA, 31 bp, Homo sapiens
  chr14:100587349-100587380
  hypo
gaatccaagctcagctcgggcgacgagaggt

SEQ ID NO: 20940 - DNA, 38 bp, Homo sapiens
  chr14:100615562-100615600
  hypo
gttgagcacctccatgcgggtcacggccttggggtgga

SEQ ID NO: 20941 - DNA, 71 bp, Homo sapiens
  chr14:100615675-100615746
  hypo
accagccctccagacgcgtgggcacgtccacgtccagcccgtcgccgcccaggtagcggtggtggtccacg

SEQ ID NO: 20942 - DNA, 60 bp, Homo sapiens
  chr14:100644399-100644459
  hypo
agcccagcccagtgccgcgcctgtcctcgaacctggcccaacgctcgccgggagcaggga

SEQ ID NO: 20943 - DNA, 31 bp, Homo sapiens
  chr14:100725479-100725510
  hypo
ttagccttgaaaatttcggagtacctatttc

SEQ ID NO: 20944 - DNA, 31 bp, Homo sapiens
  chr14:100731699-100731730
  hypo
agggaaactccttccccgcctcccccaccaa

SEQ ID NO: 20945 - DNA, 31 bp, Homo sapiens
  chr14:100749348-100749379
  hypo
ctcaggagcaagagggcgttttaaagagagc

SEQ ID NO: 20946 - DNA, 37 bp, Homo sapiens
  chr14:100749404-100749441
  hypo
cccagtgaaatgcccacgcagccggacctatgagccc

SEQ ID NO: 20947 - DNA, 52 bp, Homo sapiens
  chr14:100749444-100749496
  hypo
tcagccctggaagctccggagctaactgggatggactcggaagaacttgacc

SEQ ID NO: 20948 - DNA, 41 bp, Homo sapiens; identical to SEQ ID NO: 5200
  chr14:100772012-100772053
  hypo

SEQ ID NO: 20949 - DNA, 63 bp, Homo sapiens; identical to SEQ ID NO: 5201
  chr14:100772055-100772118
  hypo

SEQ ID NO: 20950 - DNA, 31 bp, Homo sapiens; identical to SEQ ID NO: 5202
  chr14:100773414-100773445
  hypo

SEQ ID NO: 20951 - DNA, 31 bp, Homo sapiens; identical to SEQ ID NO: 5203
  chr14:100773473-100773504
  hypo

SEQ ID NO: 20952 - DNA, 31 bp, Homo sapiens
  chr14:100966491-100966522
  hypo
gcctgactggatggggcggctccctcctagt

SEQ ID NO: 20953 - DNA, 31 bp, Homo sapiens
  chr14:101133881-101133912
  hypo
agactcagcctttcagcgtaggagggagact

SEQ ID NO: 20954 - DNA, 31 bp, Homo sapiens
  chr14:101274010-101274041
  hypo
gagtgccaggctcgctcggcccaccggtcac

SEQ ID NO: 20955 - DNA, 31 bp, Homo sapiens
  chr14:101377501-101377532
  hypo
gcagttacacagctcacgagtgcctgctggg

SEQ ID NO: 20956 - DNA, 51 bp, Homo sapiens
  chr14:101638847-101638898
  hypo
gatgatggaaggtgaacggacagcaggaacatcaaccggtgagagagggag

SEQ ID NO: 20957 - DNA, 31 bp, Homo sapiens
  chr14:101838210-101838241
  hypo
attagccaacaatgttcgccagccccaccat

SEQ ID NO: 20958 - DNA, 31 bp, Homo sapiens
  chr14:101985982-101986013
  hypo
agaggaaggagggcggcgagggaggcgcgga

SEQ ID NO: 20959 - DNA, 31 bp, Homo sapiens
  chr14:102293899-102293930
  hypo
gctgttgctttctctcgcgaagcttctacca

SEQ ID NO: 20960 - DNA, 31 bp, Homo sapiens
  chr14:102293960-102293991
  hypo
tcttgtcaattttggtcgtcaaaaagattga

SEQ ID NO: 20961 - DNA, 51 bp, Homo sapiens
  chr14:102294015-102294066
  hypo
ttttcctaaattatctcgttttgggaaatcagttctcggccataagtgcag

SEQ ID NO: 20962 - DNA, 25 bp, Homo sapiens
  chr14:102300430-102300455
  hypo
ccaccacacccggcctgaatcagtt

SEQ ID NO: 20963 - DNA, 31 bp, Homo sapiens
  chr14:102302074-102302105
  hypo
acgccgcctgcacagccgtcccctcacgggg

SEQ ID NO: 20964 - DNA, 31 bp, Homo sapiens
  chr14:102303817-102303848
  hypo
agcttacagaggaaaccgatgtgatttccaa

SEQ ID NO: 20965 - DNA, 59 bp, Homo sapiens
  chr14:102355906-102355965
  hypo
cacagagggtagggtgcgtgtcctggggctcccctagaagcaggcgcagtggacagaga

SEQ ID NO: 20966 - DNA, 80 bp, Homo sapiens
  chr14:102355977-102356057
  hypo
agggagctgggtctgtcgcagatgggtgcttcagaaagatcgcacctgagacagcacggaggatgcgtgtgggtgtcagt

SEQ ID NO: 20967 - DNA, 31 bp, Homo sapiens
  chr14:102356115-102356146
  hypo
actgtgctaaatattgcgggctttaaaatta

SEQ ID NO: 20968 - DNA, 31 bp, Homo sapiens
  chr14:102396670-102396701
  hypo
agtggctcccgttcctcggaggctattgttt

SEQ ID NO: 20969 - DNA, 37 bp, Homo sapiens
  chr14:102418519-102418556
  hypo
ctgccttggcccaggagttgctcgcatgagccaccac

SEQ ID NO: 20970 - DNA, 31 bp, Homo sapiens
  chr14:102521601-102521632
  hypo
gctcctcctgcatcagcgccccacccaacag

SEQ ID NO: 20971 - DNA, 31 bp, Homo sapiens
  chr14:102530257-102530288
  hypo
ccaggcatggtgggtgcgtcaggattcagaa

SEQ ID NO: 20972 - DNA, 34 bp, Homo sapiens
  chr14:102682193-102682227
  hypo
cctcactcttgacagacgacgtagctgatctgag

SEQ ID NO: 20973 - DNA, 31 bp, Homo sapiens
  chr14:102686190-102686221
  hypo
aggacaggtttgagggcggttgattcaagat

SEQ ID NO: 20974 - DNA, 48 bp, Homo sapiens
  chr14:102909002-102909050
  hypo
ctgctcaggagtgtgtcgtgtaagaagtcctgccggtgattcccacct

SEQ ID NO: 20975 - DNA, 47 bp, Homo sapiens
  chr14:102909081-102909128
  hypo
tgcaatactataggtgcgtctgtgattagtcacggagcatatttgag

SEQ ID NO: 20976 - DNA, 31 bp, Homo sapiens
  chr14:102909161-102909192
  hypo
aatacagggttgtaggcgacagttggtctgt

SEQ ID NO: 20977 - DNA, 48 bp, Homo sapiens
  chr14:102939220-102939268
  hypo
aggaaggcgcttctcccgggctgctggcactgacgattgtttgctgag

SEQ ID NO: 20978 - DNA, 147 bp, Homo sapiens; identical to SEQ ID NO: 5207
  chr14:102975680-102975827
  hypo

SEQ ID NO: 20979 - DNA, 31 bp, Homo sapiens; identical to SEQ ID NO: 5208
  chr14:102975895-102975926
  hypo

SEQ ID NO: 20980 - DNA, 114 bp, Homo sapiens; identical to SEQ ID NO: 5209
  chr14:102975944-102976058
  hypo

SEQ ID NO: 20981 - DNA, 32 bp, Homo sapiens
  chr14:103055785-103055817
  hypo
ttttgttttatacagacgggatctcgctatgt

SEQ ID NO: 20982 - DNA, 31 bp, Homo sapiens
  chr14:103216391-103216422
  hypo
cctgcagccgcagtggcgcctgcatggaggg

SEQ ID NO: 20983 - DNA, 31 bp, Homo sapiens
  chr14:103216427-103216458
  hypo
cctaatcatggtgcctcggctgtggaatgtt

SEQ ID NO: 20984 - DNA, 53 bp, Homo sapiens; identical to SEQ ID NO: 5212
  chr14:103242510-103242563
  hypo

SEQ ID NO: 20985 - DNA, 31 bp, Homo sapiens; identical to SEQ ID NO: 5213
  chr14:103263057-103263088
  hypo

SEQ ID NO: 20986 - DNA, 31 bp, Homo sapiens
  chr14:103364278-103364309
  hypo
ttctcctgtcttctgtcgtcacaggtgtctg

SEQ ID NO: 20987 - DNA, 31 bp, Homo sapiens
  chr14:103391459-103391490
  hypo
agccactcctgggctgcgtcctcatcctgtc

SEQ ID NO: 20988 - DNA, 39 bp, Homo sapiens
  chr14:103391530-103391569
  hypo
cactggtgagctgggtcggggtgtcggctccagatgtgg

SEQ ID NO: 20989 - DNA, 31 bp, Homo sapiens
  chr14:103391573-103391604
  hypo
caggcctggggcccccgcgtgtgcgggtggg

SEQ ID NO: 20990 - DNA, 31 bp, Homo sapiens
  chr14:103407233-103407264
  hypo
caagcgaggctaagggcgtcctgcagggagc

SEQ ID NO: 20991 - DNA, 31 bp, Homo sapiens
  chr14:103408675-103408706
  hypo
gccctgggtatgatgccgtctcagcaaggct

SEQ ID NO: 20992 - DNA, 31 bp, Homo sapiens
  chr14:103408776-103408807
  hypo
tgttacccccatatgcgcggctcgtcttcct

SEQ ID NO: 20993 - DNA, 31 bp, Homo sapiens
  chr14:103419854-103419885
  hypo
aagcacaggcagaggccgtgtctacattaac

SEQ ID NO: 20994 - DNA, 31 bp, Homo sapiens
  chr14:103421193-103421224
  hypo
tccactcccagctggccggcctgccctgagg

SEQ ID NO: 20995 - DNA, 31 bp, Homo sapiens
  chr14:103421245-103421276
  hypo
agctgagtggtgattgcgtgggcaggtggag

SEQ ID NO: 20996 - DNA, 31 bp, Homo sapiens
  chr14:103421281-103421312
  hypo
caagtcacagtcaccccgctgaggtgagaat

SEQ ID NO: 20997 - DNA, 57 bp, Homo sapiens
  chr14:103421336-103421393
  hypo
cagccctgagcatacccgccccctcctgcagcctccttgccccggtcactgaaaggg

SEQ ID NO: 20998 - DNA, 31 bp, Homo sapiens
  chr14:103442024-103442055
  hypo
tattttattcttcaagcgttcgatttcttca

SEQ ID NO: 20999 - DNA, 31 bp, Homo sapiens
  chr14:103442295-103442326
  hypo
gctgtgctccaggtcccgctgcacatcctca

SEQ ID NO: 21000 - DNA, 31 bp, Homo sapiens
  chr14:103442355-103442386
  hypo
gctcttcagagagcctcgatcagaaaaacag

SEQ ID NO: 21001 - DNA, 31 bp, Homo sapiens
  chr14:103442415-103442446
  hypo
tctactgaaaatttagcgatttcattagcat

SEQ ID NO: 21002 - DNA, 31 bp, Homo sapiens
  chr14:103453475-103453506
  hypo
gaagactgctgcaaaccgccccataccccca

SEQ ID NO: 21003 - DNA, 31 bp, Homo sapiens
  chr14:103453553-103453584
  hypo
cagttacagagcagcacgtgctggagcagga

SEQ ID NO: 21004 - DNA, 75 bp, Homo sapiens
  chr14:103453594-103453669
  hypo
aggtctgtcccactaacgcctgtttctaaactactttctgtgcgctctcaaacacatgtgcgggtgcagggcacc

SEQ ID NO: 21005 - DNA, 31 bp, Homo sapiens
  chr14:103474513-103474544
  hypo
aatgctgaaactctcccgatgctttttattt

SEQ ID NO: 21006 - DNA, 48 bp, Homo sapiens; identical to SEQ ID NO: 5214
  chr14:103523057-103523105
  hypo

SEQ ID NO: 21007 - DNA, 229 bp, Homo sapiens; identical to SEQ ID NO: 5215
  chr14:103523110-103523339
  hypo

SEQ ID NO: 21008 - DNA, 136 bp, Homo sapiens; identical to SEQ ID NO: 5216
  chr14:103523340-103523476
  hypo

SEQ ID NO: 21009 - DNA, 252 bp, Homo sapiens; identical to SEQ ID NO: 5217
  chr14:103523477-103523729
  hypo

SEQ ID NO: 21010 - DNA, 31 bp, Homo sapiens; identical to SEQ ID NO: 5218
  chr14:103523757-103523788
  hypo

SEQ ID NO: 21011 - DNA, 222 bp, Homo sapiens; identical to SEQ ID NO: 5219
  chr14:103523852-103524074
  hypo

SEQ ID NO: 21012 - DNA, 43 bp, Homo sapiens; identical to SEQ ID NO: 5220
  chr14:103524178-103524221
  hypo

SEQ ID NO: 21013 - DNA, 309 bp, Homo sapiens; identical to SEQ ID NO: 5221
  chr14:103524235-103524544
  hypo

SEQ ID NO: 21014 - DNA, 31 bp, Homo sapiens
  chr14:103525031-103525062
  hypo
taggagtgggcctggcgcggtggctcacacc

SEQ ID NO: 21015 - DNA, 37 bp, Homo sapiens; identical to SEQ ID NO: 5222
  chr14:103541956-103541993
  hypo

SEQ ID NO: 21016 - DNA, 36 bp, Homo sapiens; identical to SEQ ID NO: 5223
  chr14:103541998-103542034
  hypo

SEQ ID NO: 21017 - DNA, 31 bp, Homo sapiens; identical to SEQ ID NO: 5224
  chr14:103542258-103542289
  hypo

SEQ ID NO: 21018 - DNA, 38 bp, Homo sapiens; identical to SEQ ID NO: 5225
  chr14:103593883-103593921
  hypo

SEQ ID NO: 21019 - DNA, 36 bp, Homo sapiens; identical to SEQ ID NO: 5226
  chr14:103593973-103594009
  hypo

SEQ ID NO: 21020 - DNA, 96 bp, Homo sapiens; identical to SEQ ID NO: 5227
  chr14:103594011-103594107
  hypo

SEQ ID NO: 21021 - DNA, 31 bp, Homo sapiens
  chr14:103693881-103693912
  hypo
ctcggttgctgaaatccgcctaaataggcgt

SEQ ID NO: 21022 - DNA, 73 bp, Homo sapiens
  chr14:103697778-103697851
  hypo
accacaggggtccaggcggtgcgaggtgggagagactgaggagtcccgggtccttgagcgaggagacgggcgc

SEQ ID NO: 21023 - DNA, 31 bp, Homo sapiens
  chr14:103845496-103845527
  hypo
ctaagcacaggaggttcgagggctctccact

SEQ ID NO: 21024 - DNA, 31 bp, Homo sapiens
  chr14:104047705-104047736
  hypo
gatctgatcaccgagacggctgctgagtaac

SEQ ID NO: 21025 - DNA, 31 bp, Homo sapiens
  chr14:104048663-104048694
  hypo
ctgccactccctgtaacgggctgtgggtcct

SEQ ID NO: 21026 - DNA, 31 bp, Homo sapiens
  chr14:104048704-104048735
  hypo
cttcctacctctcttgcgtgtgggtgagcct

SEQ ID NO: 21027 - DNA, 31 bp, Homo sapiens
  chr14:104048911-104048942
  hypo
tggctcccagttcctccgcagaacctgcagg

SEQ ID NO: 21028 - DNA, 31 bp, Homo sapiens
  chr14:104048982-104049013
  hypo
acatacctgcctgggtcgtaatcacttgtga

SEQ ID NO: 21029 - DNA, 31 bp, Homo sapiens
  chr14:104049028-104049059
  hypo
ctgtgacctttagatacgattcacataccat

SEQ ID NO: 21030 - DNA, 31 bp, Homo sapiens
  chr14:104049092-104049123
  hypo
gatggagtctccttgtcgtgccctgcctaaa

SEQ ID NO: 21031 - DNA, 31 bp, Homo sapiens
  chr14:104061734-104061765
  hypo
gaacggtgtgctacagcgccttcattccttt

SEQ ID NO: 21032 - DNA, 45 bp, Homo sapiens
  chr14:104061799-104061844
  hypo
gtggatcagcttttgtcgtggatggctgagcgtgaggctgagcca

SEQ ID NO: 21033 - DNA, 31 bp, Homo sapiens
  chr14:104061853-104061884
  hypo
cctggtggatgtgggccgcacccctccagct

SEQ ID NO: 21034 - DNA, 31 bp, Homo sapiens
  chr14:104062201-104062232
  hypo
tttttttttttgagaccgagtctcgctctgt

SEQ ID NO: 21035 - DNA, 72 bp, Homo sapiens
  chr14:104121127-104121199
  hypo
tggagatgttggagctcggcctgagtgaggcacaggtacgagtgagaatgactcagacgttatcaggaactt

SEQ ID NO: 21036 - DNA, 11 bp, Homo sapiens
  chr14:104121266-104121277
  hypo
aataacagatc

SEQ ID NO: 21037 - DNA, 31 bp, Homo sapiens
  chr14:104159316-104159347
  hypo
gagttttcatccactccgccctttggtgtgg

SEQ ID NO: 21038 - DNA, 78 bp, Homo sapiens
  chr14:104159980-104160058
  hypo
cttgggagtgtgagaccgccccgccctgccacgcccctcaccgccctgcccggaggcgccagccgcactccttggctt

SEQ ID NO: 21039 - DNA, 31 bp, Homo sapiens
  chr14:104160059-104160090
  hypo
ctttcctagatagtgacgtccaccaaccttg

SEQ ID NO: 21040 - DNA, 61 bp, Homo sapiens
  chr14:104160095-104160156
  hypo
gccttttcaaaacacccgggaggccgtgcctcagcattctgttactcggcctgcagcccca

SEQ ID NO: 21041 - DNA, 55 bp, Homo sapiens
  chr14:104194427-104194482
  hypo
ttcagaggcggaatgtcgtctaaaatgttggtgctgactccgctgggcacgtcca

SEQ ID NO: 21042 - DNA, 31 bp, Homo sapiens
  chr14:104195284-104195315
  hypo
tgaaactatgacttgtcgtctttccaataac

SEQ ID NO: 21043 - DNA, 55 bp, Homo sapiens
  chr14:104202704-104202759
  hypo
cgatacctcccctgcccggcccagctgctgctcctgctgccggccctttctaagt

SEQ ID NO: 21044 - DNA, 31 bp, Homo sapiens
  chr14:104202765-104202796
  hypo
ggacagacaggacaaacgagctcctgagccc

SEQ ID NO: 21045 - DNA, 31 bp, Homo sapiens
  chr14:104202810-104202841
  hypo
gctgttcttaaggtgacgcttagcaatcaca

SEQ ID NO: 21046 - DNA, 19 bp, Homo sapiens
  chr14:104231445-104231464
  hypo
tgcccggccaacacagctg

SEQ ID NO: 21047 - DNA, 31 bp, Homo sapiens
  chr14:104231503-104231534
  hypo
tttgtcacattttgttcgtgatgtcttattt

SEQ ID NO: 21048 - DNA, 83 bp, Homo sapiens
  chr14:104349423-104349506
  hypo
ccctgacgggacattgcgcttgtcgaggcgacacagacagacctgatgcagcccctgccgctgctctgcgacccagttccctg

SEQ ID NO: 21049 - DNA, 67 bp, Homo sapiens
  chr14:104353833-104353900
  hypo
tgccagggccatgagacgaaagctcagagctcctggtgggagctcggtctcccgccccatccagctg

SEQ ID NO: 21050 - DNA, 31 bp, Homo sapiens
  chr14:104353932-104353963
  hypo
ctcatctacccagacacgctgtgccctcctc

SEQ ID NO: 21051 - DNA, 18 bp, Homo sapiens
  chr14:104391675-104391693
  hypo
gcccggccaaaaaaacct

SEQ ID NO: 21052 - DNA, 31 bp, Homo sapiens
  chr14:104548507-104548538
  hypo
tcccctcaccaagccccgggacttcacgtga

SEQ ID NO: 21053 - DNA, 31 bp, Homo sapiens
  chr14:104577438-104577469
  hypo
ctgctcggcaggtgggcgtgcatatgtgtgt

SEQ ID NO: 21054 - DNA, 31 bp, Homo sapiens
  chr14:104650284-104650315
  hypo
tccaggcctgccctgacggccctgcccacac

SEQ ID NO: 21055 - DNA, 31 bp, Homo sapiens
  chr14:104696053-104696084
  hypo
ccgggtgtttccaccccgggcctgttattta

SEQ ID NO: 21056 - DNA, 44 bp, Homo sapiens
  chr14:104761169-104761213
  hypo
ctccagcttactgactcggtgcaggtctgcggactcagcctcca

SEQ ID NO: 21057 - DNA, 31 bp, Homo sapiens
  chr14:104761239-104761270
  hypo
taaatctctctttccacggcctgttgattct

SEQ ID NO: 21058 - DNA, 68 bp, Homo sapiens
  chr14:105119950-105120018
  hypo
tggcgaggcggctgggcgaacctggtgtatccaggccgggcgaggcggctgggcgaacctggtgtatc

SEQ ID NO: 21059 - DNA, 31 bp, Homo sapiens
  chr14:105173532-105173563
  hypo
cccatccctccctctccggctcccttctccc

SEQ ID NO: 21060 - DNA, 84 bp, Homo sapiens; identical to SEQ ID NO: 5232
  chr14:105195821-105195905
  hypo

SEQ ID NO: 21061 - DNA, 39 bp, Homo sapiens
  chr14:105201186-105201225
  hypo
gcccacatcccagtcccgcacagacgcatcagagctggc

SEQ ID NO: 21062 - DNA, 59 bp, Homo sapiens
  chr14:105201259-105201318
  hypo
gccctgcagggacagacgaagccccatgtgggtcagtccatgtccggggggtcctcagt

SEQ ID NO: 21063 - DNA, 61 bp, Homo sapiens
  chr14:105201324-105201385
  hypo
gtgccttcagctcagccgggtttctgttccaggggggcaacaacgccggccacacggtggt

SEQ ID NO: 21064 - DNA, 44 bp, Homo sapiens
  chr14:105204797-105204841
  hypo
ttgccctgtcccagacgcggtgccctgagcggttgttggctgga

SEQ ID NO: 21065 - DNA, 31 bp, Homo sapiens
  chr14:105204847-105204878
  hypo
ctgagggtttctcccacggaggggactggca

SEQ ID NO: 21066 - DNA, 55 bp, Homo sapiens
  chr14:105204900-105204955
  hypo
ggcccagctcatcacccgccggctctacccgcgcagaaagcgagtgagctgggca

SEQ ID NO: 21067 - DNA, 31 bp, Homo sapiens
  chr14:105206348-105206379
  hypo
tgcacactgtccttgccggctgccactgcca

SEQ ID NO: 21068 - DNA, 31 bp, Homo sapiens
  chr14:105208946-105208977
  hypo
gctgggaaagccaacacggggaggggcggac

SEQ ID NO: 21069 - DNA, 31 bp, Homo sapiens
  chr14:105210188-105210219
  hypo
ctcactttccttgtgcgcgatgcagggttca

SEQ ID NO: 21070 - DNA, 31 bp, Homo sapiens
  chr14:105211493-105211524
  hypo
agggggacagactactcgcctgggaccctgg

SEQ ID NO: 21071 - DNA, 31 bp, Homo sapiens
  chr14:105240936-105240967
  hypo
tctgcaggacagagcccgggcctcaacaaaa

SEQ ID NO: 21072 - DNA, 31 bp, Homo sapiens
  chr14:105241002-105241033
  hypo
gggcctcctggagcctcggcagagtgcaagg

SEQ ID NO: 21073 - DNA, 46 bp, Homo sapiens
  chr14:105241049-105241095
  hypo
gccccacccacctgcccgcacacgggagcagcgagcacagccccta

SEQ ID NO: 21074 - DNA, 83 bp, Homo sapiens
  chr14:105241134-105241217
  hypo
aggcctgtctcaccagcggcggagtccacggtgtgtaaagccctcacgtgcccaagaagacaggacatcgtcccctagagaca

SEQ ID NO: 21075 - DNA, 90 bp, Homo sapiens
  chr14:105268706-105268796
  hypo
ctgccggtggtgtgagcgccgtttcacgcagtccggggacctctaccgccacgtccgcaagtttcactgtggcctcgtcaagtcccttct

SEQ ID NO: 21076 - DNA, 31 bp, Homo sapiens
  chr14:105269021-105269052
  hypo
actctccaactcattccggcccccaggctgt

SEQ ID NO: 21077 - DNA, 31 bp, Homo sapiens; identical to SEQ ID NO: 5233
  chr14:105269070-105269101
  hypo

SEQ ID NO: 21078 - DNA, 31 bp, Homo sapiens
  chr14:105269308-105269339
  hypo
ggacactcctggggagcggcagcaggaaccc

SEQ ID NO: 21079 - DNA, 31 bp, Homo sapiens
  chr14:105277932-105277963
  hypo
agcctgaatgacagagcgagacagtgtcttg

SEQ ID NO: 21080 - DNA, 328 bp, Homo sapiens; identical to SEQ ID NO: 5236
  chr14:105330980-105331308
  hypo

SEQ ID NO: 21081 - DNA, 85 bp, Homo sapiens; identical to SEQ ID NO: 5237
  chr14:105331418-105331503
  hypo

SEQ ID NO: 21082 - DNA, 31 bp, Homo sapiens; identical to SEQ ID NO: 5238
  chr14:105331549-105331580
  hypo

SEQ ID NO: 21083 - DNA, 101 bp, Homo sapiens; identical to SEQ ID NO: 5239
  chr14:105331605-105331706
  hypo

SEQ ID NO: 21084 - DNA, 154 bp, Homo sapiens; identical to SEQ ID NO: 5240
  chr14:105331744-105331898
  hypo

SEQ ID NO: 21085 - DNA, 61 bp, Homo sapiens
  chr14:105335726-105335787
  hypo
tgcaacgtgctactgccgcacatgcccgggccatgccaggctctgacgaggtgggcaggcc

SEQ ID NO: 21086 - DNA, 59 bp, Homo sapiens
  chr14:105335856-105335915
  hypo
ccagggcagccccacccgatattgctgcatgtgtcctgctgtggcgggaaggtttgtgt

SEQ ID NO: 21087 - DNA, 31 bp, Homo sapiens
  chr14:105337646-105337677
  hypo
caaacctgtcaccctccgtcccttccacccg

SEQ ID NO: 21088 - DNA, 31 bp, Homo sapiens
  chr14:105346091-105346122
  hypo
gggcccctgtggggggcgtgagggtcctagg

SEQ ID NO: 21089 - DNA, 31 bp, Homo sapiens
  chr14:105349523-105349554
  hypo
gcacacgagatgcccacgaaggatgcagagg

SEQ ID NO: 21090 - DNA, 31 bp, Homo sapiens
  chr14:105349745-105349776
  hypo
ctggtgcagaatgacccgagcctgctgcacc

SEQ ID NO: 21091 - DNA, 42 bp, Homo sapiens
  chr14:105350161-105350203
  hypo
ccccaggccacaagcacgaggacggcacgcagagtgactcag

SEQ ID NO: 21092 - DNA, 65 bp, Homo sapiens
  chr14:105350205-105350270
  hypo
gaccccctggccaaggcggcctcggccgctggggtgcccttggaggccagcggggagcaggtgcg

SEQ ID NO: 21093 - DNA, 31 bp, Homo sapiens
  chr14:105351132-105351163
  hypo
ggggtggaggtgatgccgggggtggcgagtg

SEQ ID NO: 21094 - DNA, 31 bp, Homo sapiens
  chr14:105351164-105351195
  hypo
gagccctcgtggggaacgggggggtggaggt

SEQ ID NO: 21095 - DNA, 34 bp, Homo sapiens
  chr14:105355230-105355264
  hypo
gcctgctgtccctacccgacgtggtgcactggtg

SEQ ID NO: 21096 - DNA, 36 bp, Homo sapiens
  chr14:105355266-105355302
  hypo
gtttgacccaagcatgcggctcgccatcatgccccg

SEQ ID NO: 21097 - DNA, 43 bp, Homo sapiens; identical to SEQ ID NO: 5245
  chr14:105511966-105512009
  hypo

SEQ ID NO: 21098 - DNA, 281 bp, Homo sapiens; identical to SEQ ID NO: 5246
  chr14:105512039-105512320
  hypo

SEQ ID NO: 21099 - DNA, 31 bp, Homo sapiens; identical to SEQ ID NO: 5247
  chr14:105512328-105512359
  hypo

SEQ ID NO: 21100 - DNA, 31 bp, Homo sapiens; identical to SEQ ID NO: 5248
  chr14:105512364-105512395
  hypo

SEQ ID NO: 21101 - DNA, 39 bp, Homo sapiens
  chr14:105516267-105516306
  hypo
ccccatgcaggtgctgcgtctgcccggctctgtgctctg

SEQ ID NO: 21102 - DNA, 91 bp, Homo sapiens
  chr14:105517982-105518073
  hypo
gcggagatgaggatggcggtcctccggcggcggcggccccgactctccagcgcgtacaccacggccacgaagcggtcgcaggagatgcagc

SEQ ID NO: 21103 - DNA, 51 bp, Homo sapiens
  chr14:105533294-105533345
  hypo
actgggtggtctgtcacgttcaccaggcctcctctgcgcccccggtgaggg

SEQ ID NO: 21104 - DNA, 31 bp, Homo sapiens
  chr14:105562583-105562614
  hypo
caggcacaggccagcacgcacggaggctggc

SEQ ID NO: 21105 - DNA, 46 bp, Homo sapiens
  chr14:105610436-105610482
  hypo
ggtgtgtggccccattcgctgacacctgctccgtgatggccatccc

SEQ ID NO: 21106 - DNA, 85 bp, Homo sapiens
  chr14:105612251-105612336
  hypo
tgggcgctcagggcctcgggctggccggccagcagacaaggcttccatccgcaccacacctgggcaggcacgcacaggagggtca

SEQ ID NO: 21107 - DNA, 31 bp, Homo sapiens
  chr14:105625471-105625502
  hypo
ccccgccccacacctccgactgtccctcaaa

SEQ ID NO: 21108 - DNA, 58 bp, Homo sapiens
  chr14:105639400-105639458
  hypo
gagacaccaaagatgacgccgagggtcttggggatgtccgggtcgtctgcaaaggcct

SEQ ID NO: 21109 - DNA, 48 bp, Homo sapiens; identical to SEQ ID NO: 5250
  chr14:105647608-105647656
  hypo

SEQ ID NO: 21110 - DNA, 70 bp, Homo sapiens; identical to SEQ ID NO: 5251
  chr14:105647694-105647764
  hypo

SEQ ID NO: 21111 - DNA, 92 bp, Homo sapiens
  chr14:105688165-105688257
  hypo
gttcaggtggctggccgcggcttccagctcctcgtcctctgtgtcctcctcgccacacaagctggacgcggtgtcctcggtggagcctaggt

SEQ ID NO: 21112 - DNA, 76 bp, Homo sapiens
  chr14:105714257-105714333
  hypo
gaggccccacaaggagcgagcctgcgactgcgatccacaggcagagccacagaggcagggcgcgccctggggccca

SEQ ID NO: 21113 - DNA, 79 bp, Homo sapiens; identical to SEQ ID NO: 5252
  chr14:105714362-105714441
  hypo

SEQ ID NO: 21114 - DNA, 31 bp, Homo sapiens
  chr14:105715843-105715874
  hypo
gtgggtccgttttaggcggcctccggaggct

SEQ ID NO: 21115 - DNA, 31 bp, Homo sapiens
  chr14:105717869-105717900
  hypo
aaacctgtatgacccccgaaaagagggatgg

SEQ ID NO: 21116 - DNA, 73 bp, Homo sapiens
  chr14:105717915-105717988
  hypo
gggagagggcatgggccgagtgtatagcctcagccggtgcccctctgctgctgcagcccgtgttgctcagtcc

SEQ ID NO: 21117 - DNA, 31 bp, Homo sapiens
  chr14:105718019-105718050
  hypo
ctacccaaaggacatacgctcctagatgcaa

SEQ ID NO: 21118 - DNA, 31 bp, Homo sapiens
  chr14:105739465-105739496
  hypo
ctctgagtggcgtgtgcggtgtggctgaatg

SEQ ID NO: 21119 - DNA, 94 bp, Homo sapiens; identical to SEQ ID NO: 5253
  chr14:105781804-105781898
  hypo

SEQ ID NO: 21120 - DNA, 34 bp, Homo sapiens; identical to SEQ ID NO: 5254
  chr14:105781903-105781937
  hypo

SEQ ID NO: 21121 - DNA, 31 bp, Homo sapiens; identical to SEQ ID NO: 5256
  chr15:20478122-20478153
  hypo

SEQ ID NO: 21122 - DNA, 31 bp, Homo sapiens; identical to SEQ ID NO: 5257
  chr15:20478176-20478207
  hypo

SEQ ID NO: 21123 - DNA, 60 bp, Homo sapiens; identical to SEQ ID NO: 5258
  chr15:20478212-20478272
  hypo

SEQ ID NO: 21124 - DNA, 31 bp, Homo sapiens; identical to SEQ ID NO: 5259
  chr15:20478294-20478325
  hypo

SEQ ID NO: 21125 - DNA, 27 bp, Homo sapiens
  chr15:22822347-22822374
  hypo
gtaaagttccaggatacggccgggcgc

SEQ ID NO: 21126 - DNA, 59 bp, Homo sapiens
  chr15:22877137-22877196
  hypo
tccaggaactttatgtcgaaaaaaaagccagacttaaaaggatccgttattattccatt

SEQ ID NO: 21127 - DNA, 46 bp, Homo sapiens; identical to SEQ ID NO: 5261
  chr15:22892152-22892198
  hypo

SEQ ID NO: 21128 - DNA, 45 bp, Homo sapiens; identical to SEQ ID NO: 5262
  chr15:22892280-22892325
  hypo

SEQ ID NO: 21129 - DNA, 101 bp, Homo sapiens; identical to SEQ ID NO: 5263
  chr15:22892341-22892442
  hypo

SEQ ID NO: 21130 - DNA, 31 bp, Homo sapiens
  chr15:22966141-22966172
  hypo
tccaatcccctttagacgtattacactaaaa

SEQ ID NO: 21131 - DNA, 48 bp, Homo sapiens
  chr15:22966202-22966250
  hypo
acagacagtggaggcacgtcagacagacacccacggaccatggaaact

SEQ ID NO: 21132 - DNA, 31 bp, Homo sapiens
  chr15:23666806-23666837
  hypo
tgatcgcacatccatccgtcaaaattttggg

SEQ ID NO: 21133 - DNA, 31 bp, Homo sapiens
  chr15:23692315-23692346
  hypo
gttggggccacatcagcgtgattcagacgag

SEQ ID NO: 21134 - DNA, 31 bp, Homo sapiens
  chr15:25896683-25896714
  hypo
tgtatgtcacatataccgtatatcatatata

SEQ ID NO: 21135 - DNA, 36 bp, Homo sapiens
  chr15:25940036-25940072
  hypo
gaccgacagcagaggacggagcggcactgcttggca

SEQ ID NO: 21136 - DNA, 31 bp, Homo sapiens
  chr15:28427419-28427450
  hypo
ataatgtcttttagttcgtgtaaagaaacaa

SEQ ID NO: 21137 - DNA, 31 bp, Homo sapiens
  chr15:29404344-29404375
  hypo
gcctggggcagccactcggcaccttgtatcc

SEQ ID NO: 21138 - DNA, 48 bp, Homo sapiens
  chr15:29411053-29411101
  hypo
agccaggtagcaagcacgggctttgttcagaggcggtggcctggggtc

SEQ ID NO: 21139 - DNA, 31 bp, Homo sapiens
  chr15:29411240-29411271
  hypo
cttactctcacctagccgcccagagggtgtg

SEQ ID NO: 21140 - DNA, 31 bp, Homo sapiens
  chr15:29415789-29415820
  hypo
aggtatctgggtcccccgctggtgaaagctg

SEQ ID NO: 21141 - DNA, 31 bp, Homo sapiens
  chr15:29418631-29418662
  hypo
atgggctggaacctggcgtagcagtgccctc

SEQ ID NO: 21142 - DNA, 31 bp, Homo sapiens
  chr15:29650110-29650141
  hypo
ctgggactggagatgccgtggcacactcacc

SEQ ID NO: 21143 - DNA, 19 bp, Homo sapiens
  chr15:29893412-29893431
  hypo
gatacgttctaatgcttgt

SEQ ID NO: 21144 - DNA, 31 bp, Homo sapiens
  chr15:29998410-29998441
  hypo
acaggcgtgagccaccgcgcctggcgagaat

SEQ ID NO: 21145 - DNA, 73 bp, Homo sapiens
  chr15:30022824-30022897
  hypo
gaagaagaggcgagaacgacccccggaccgaccaaagcccgcgtgccgctgcatcccacgtccagcacctacg

SEQ ID NO: 21146 - DNA, 38 bp, Homo sapiens
  chr15:30024946-30024984
  hypo
tctccagaagtcagcacggtctccgcctgctgtttttg

SEQ ID NO: 21147 - DNA, 232 bp, Homo sapiens; identical to SEQ ID NO: 5273
  chr15:30113809-30114041
  hypo

SEQ ID NO: 21148 - DNA, 31 bp, Homo sapiens; identical to SEQ ID NO: 5274
  chr15:30114043-30114074
  hypo

SEQ ID NO: 21149 - DNA, 35 bp, Homo sapiens; identical to SEQ ID NO: 5275
  chr15:30114349-30114384
  hypo

SEQ ID NO: 21150 - DNA, 98 bp, Homo sapiens; identical to SEQ ID NO: 5276
  chr15:30114665-30114763
  hypo

SEQ ID NO: 21151 - DNA, 31 bp, Homo sapiens
  chr15:30400068-30400099
  hypo
aattcattctgaaatgcgatagatgttgaag

SEQ ID NO: 21152 - DNA, 26 bp, Homo sapiens
  chr15:30779249-30779275
  hypo
agaattgtctaaaatccggccgggcg

SEQ ID NO: 21153 - DNA, 31 bp, Homo sapiens
  chr15:31115691-31115722
  hypo
agtaaaaatgaggaaacgcctcagtgcgtgc

SEQ ID NO: 21154 - DNA, 31 bp, Homo sapiens
  chr15:31564299-31564330
  hypo
caccggaaaggctctgcgtggcccaaggttt

SEQ ID NO: 21155 - DNA, 44 bp, Homo sapiens
  chr15:31564347-31564391
  hypo
tttttgtctttggcttcgaaaacctcaatcgtaaaatggagcta

SEQ ID NO: 21156 - DNA, 31 bp, Homo sapiens
  chr15:31564403-31564434
  hypo
agcccagattggaggacgaaatggcatatgg

SEQ ID NO: 21157 - DNA, 31 bp, Homo sapiens
  chr15:31564436-31564467
  hypo
ctggtggggactccaccgggggggaggcatg

SEQ ID NO: 21158 - DNA, 31 bp, Homo sapiens
  chr15:31564470-31564501
  hypo
caaaaggcttgggttgcgtcaatgattccca

SEQ ID NO: 21159 - DNA, 31 bp, Homo sapiens
  chr15:31668807-31668838
  hypo
tgtctgagacacattccggagacctttgtac

SEQ ID NO: 21160 - DNA, 31 bp, Homo sapiens
  chr15:31668860-31668891
  hypo
ccttactactgatacacgcctgagcaccctt

SEQ ID NO: 21161 - DNA, 24 bp, Homo sapiens
  chr15:31977846-31977870
  hypo
gcgagactccgtctcaaaaaaaga

SEQ ID NO: 21162 - DNA, 141 bp, Homo sapiens; identical to SEQ ID NO: 5278
  chr15:32162834-32162975
  hypo

SEQ ID NO: 21163 - DNA, 178 bp, Homo sapiens; identical to SEQ ID NO: 5279
  chr15:32162989-32163167
  hypo

SEQ ID NO: 21164 - DNA, 39 bp, Homo sapiens
  chr15:32942575-32942614
  hypo
acaggcgtgagccaccacgcccggcgccccagtcttatt

SEQ ID NO: 21165 - DNA, 31 bp, Homo sapiens
  chr15:34634353-34634384
  hypo
atggggtggggccagcgcgaaaaagggcaaa

SEQ ID NO: 21166 - DNA, 29 bp, Homo sapiens
  chr15:34634443-34634472
  hypo
taaaatttaaaaaggccgagcgcggtggc

SEQ ID NO: 21167 - DNA, 37 bp, Homo sapiens
  chr15:34636129-34636166
  hypo
taagaatatggtttggcggggcgcggtggctcacgcc

SEQ ID NO: 21168 - DNA, 31 bp, Homo sapiens
  chr15:34812800-34812831
  hypo
gacaggacagcaaggccgaggagaatggctc

SEQ ID NO: 21169 - DNA, 31 bp, Homo sapiens
  chr15:34879898-34879929
  hypo
gagccaccgcatccggcgtgagtgcattctt

SEQ ID NO: 21170 - DNA, 31 bp, Homo sapiens
  chr15:35213343-35213374
  hypo
caacaaactgttggaccgggtgcagtgtctc

SEQ ID NO: 21171 - DNA, 130 bp, Homo sapiens
  chr15:35385318-35385448
  hypo
gtggcggtggcggtggcggtggcccaggcggcggcggcggacgggagcgtgacaggaggcggttgagagatcgtgaaagatctgggcgattctgagccatgccatttttaccttacgtctgctagaaagt

SEQ ID NO: 21172 - DNA, 31 bp, Homo sapiens
  chr15:35389042-35389073
  hypo
cttttgaaaggccaggcgcggttgctcatgc

SEQ ID NO: 21173 - DNA, 51 bp, Homo sapiens
  chr15:35414091-35414142
  hypo
cagcggggcatcctgtcggtcttggtcatgagtcgccgggacagcagtttc

SEQ ID NO: 21174 - DNA, 58 bp, Homo sapiens
  chr15:35414144-35414202
  hypo
gtcaggggtcacctcccggtgtactatgtcttccgtcaagatacgtttgccacaggga

SEQ ID NO: 21175 - DNA, 31 bp, Homo sapiens
  chr15:35591336-35591367
  hypo
aacataggatcatattcgtcagctaagggaa

SEQ ID NO: 21176 - DNA, 31 bp, Homo sapiens
  chr15:36905527-36905558
  hypo
tgctatatattgatgacgtaaagttaaaaag

SEQ ID NO: 21177 - DNA, 19 bp, Homo sapiens
  chr15:37212638-37212657
  hypo
cgcccggtctatactgatc

SEQ ID NO: 21178 - DNA, 31 bp, Homo sapiens; identical to SEQ ID NO: 5280
  chr15:37393697-37393728
  hypo

SEQ ID NO: 21179 - DNA, 35 bp, Homo sapiens; identical to SEQ ID NO: 5281
  chr15:38365201-38365236
  hypo

SEQ ID NO: 21180 - DNA, 31 bp, Homo sapiens; identical to SEQ ID NO: 5286
  chr15:38545321-38545352
  hypo

SEQ ID NO: 21181 - DNA, 31 bp, Homo sapiens; identical to SEQ ID NO: 5287
  chr15:39140581-39140612
  hypo

SEQ ID NO: 21182 - DNA, 25 bp, Homo sapiens
  chr15:39267347-39267372
  hypo
ccgcgcccggcgaaaaatttatttt

SEQ ID NO: 21183 - DNA, 31 bp, Homo sapiens
  chr15:39415394-39415425
  hypo
catgtagtaaataaaacgaaaggcactaaga

SEQ ID NO: 21184 - DNA, 37 bp, Homo sapiens
  chr15:39415442-39415479
  hypo
acagtgtcttcttggccgggcgcggtggctcacgcct

SEQ ID NO: 21185 - DNA, 31 bp, Homo sapiens
  chr15:39628282-39628313
  hypo
caggtgtgagccactgcgcctagcccgtaaa

SEQ ID NO: 21186 - DNA, 83 bp, Homo sapiens
  chr15:39703027-39703110
  hypo
ttggaagtgataaaaccggaaagatacaacagaataattgaacgcctcttcttgtatcccagcaccaccgggtcttcctcagc

SEQ ID NO: 21187 - DNA, 31 bp, Homo sapiens
  chr15:39703165-39703196
  hypo
ggctcacttctcctcacgacctttaacttgc

SEQ ID NO: 21188 - DNA, 31 bp, Homo sapiens
  chr15:39703214-39703245
  hypo
gtgctcccccaaaaaacggctgtggcattcc

SEQ ID NO: 21189 - DNA, 55 bp, Homo sapiens
  chr15:39742867-39742922
  hypo
atgcaggctccaaatgcgagcctcgaagacggcatgaacacggccatgacagctg

SEQ ID NO: 21190 - DNA, 36 bp, Homo sapiens
  chr15:39742957-39742993
  hypo
aggctgagagaatgcacgaggcgcaggagctacatt

SEQ ID NO: 21191 - DNA, 31 bp, Homo sapiens
  chr15:39743011-39743042
  hypo
tctacacagaaacaaacgtcaggtgaatcca

SEQ ID NO: 21192 - DNA, 31 bp, Homo sapiens
  chr15:39743055-39743086
  hypo
aaaacagtaacagccacgtaaaagtaggaaa

SEQ ID NO: 21193 - DNA, 31 bp, Homo sapiens
  chr15:39853006-39853037
  hypo
cgggtgtggtggctcacgcctgtaatcccac

SEQ ID NO: 21194 - DNA, 31 bp, Homo sapiens
  chr15:39986668-39986699
  hypo
actttatacatatttacgtgcaaagtttgaa

SEQ ID NO: 21195 - DNA, 31 bp, Homo sapiens
  chr15:40532790-40532821
  hypo
tgcctgaagggagtgccgcttcctgggctag

SEQ ID NO: 21196 - DNA, 31 bp, Homo sapiens
  chr15:40548271-40548302
  hypo
atttcccagctgggcacggtggtatgctcct

SEQ ID NO: 21197 - DNA, 31 bp, Homo sapiens
  chr15:40557125-40557156
  hypo
tgcggcgccccaagcccgtggtggacccttc

SEQ ID NO: 21198 - DNA, 31 bp, Homo sapiens
  chr15:40558265-40558296
  hypo
tctacctcagctgcaacgggggcacaccagc

SEQ ID NO: 21199 - DNA, 54 bp, Homo sapiens
  chr15:40558297-40558351
  hypo
ggccacaagcagatgccgtggcccgagccacagagcccacgggtcctgcccaat

SEQ ID NO: 21200 - DNA, 31 bp, Homo sapiens
  chr15:40676636-40676667
  hypo
tgttgtcttgtgttgccgcagaacacctgaa

SEQ ID NO: 21201 - DNA, 31 bp, Homo sapiens
  chr15:40676669-40676700
  hypo
gtaatcctggcaccagcggggactaggagtt

SEQ ID NO: 21202 - DNA, 31 bp, Homo sapiens
  chr15:40701401-40701432
  hypo
atcagattgtattttacggaagaaagaggca

SEQ ID NO: 21203 - DNA, 39 bp, Homo sapiens
  chr15:40701466-40701505
  hypo
gtgggctcctataatccgagtgactcgggaggccaaggc

SEQ ID NO: 21204 - DNA, 31 bp, Homo sapiens
  chr15:40701577-40701608
  hypo
taagagagtgagagcccgcctcttgaaaaaa

SEQ ID NO: 21205 - DNA, 48 bp, Homo sapiens
  chr15:40716011-40716059
  hypo
acttttttcacttcctcgggccagccctgtccacgggccagtgtttgg

SEQ ID NO: 21206 - DNA, 68 bp, Homo sapiens
  chr15:40716133-40716201
  hypo
ccagagcctacagccacgctagtgccgagtgggagctctcctctccctgtgtgcgccacttggttact

SEQ ID NO: 21207 - DNA, 34 bp, Homo sapiens
  chr15:40766006-40766040
  hypo
gagctaccacgcctggccccggaccattttcaaa

SEQ ID NO: 21208 - DNA, 21 bp, Homo sapiens
  chr15:40848757-40848778
  hypo
caggtgcagtggctcccgctt

SEQ ID NO: 21209 - DNA, 20 bp, Homo sapiens
  chr15:40849017-40849037
  hypo
cagagcgagattccatctca

SEQ ID NO: 21210 - DNA, 57 bp, Homo sapiens; identical to SEQ ID NO: 5289
  chr15:41046992-41047049
  hypo

SEQ ID NO: 21211 - DNA, 46 bp, Homo sapiens
  chr15:41059487-41059533
  hypo
cgtgtgctgagcatgacgggggtgggccagacgctggtgtggtgtc

SEQ ID NO: 21212 - DNA, 38 bp, Homo sapiens
  chr15:41091111-41091149
  hypo
gtgtgtaagaatttggcgcttgctggctgggcgcggtg

SEQ ID NO: 21213 - DNA, 72 bp, Homo sapiens
  chr15:41165424-41165496
  hypo
caggctcggatcttctcggccagaccctgagcctggggttggggcacggggccctcccggcccccctggtcc

SEQ ID NO: 21214 - DNA, 42 bp, Homo sapiens
  chr15:41840740-41840782
  hypo
gcacctatagtcctagcgatgcagcggcgggggaatagcttg

SEQ ID NO: 21215 - DNA, 31 bp, Homo sapiens
  chr15:41862231-41862262
  hypo
gggccctcctcacagccgcacatcctgggta

SEQ ID NO: 21216 - DNA, 31 bp, Homo sapiens
  chr15:41872409-41872440
  hypo
gaaaaatgcaaaaaatcggctgggcgcagtg

SEQ ID NO: 21217 - DNA, 77 bp, Homo sapiens; identical to SEQ ID NO: 5293
  chr15:42112222-42112299
  hypo

SEQ ID NO: 21218 - DNA, 31 bp, Homo sapiens; identical to SEQ ID NO: 5294
  chr15:42112324-42112355
  hypo

SEQ ID NO: 21219 - DNA, 31 bp, Homo sapiens; identical to SEQ ID NO: 5295
  chr15:42112392-42112423
  hypo

SEQ ID NO: 21220 - DNA, 31 bp, Homo sapiens
  chr15:42148468-42148499
  hypo
cactgagtggaggagacgaaaggtgcccagg

SEQ ID NO: 21221 - DNA, 31 bp, Homo sapiens
  chr15:42153324-42153355
  hypo
ctaggcatttgggaagcgaggagggcagggg

SEQ ID NO: 21222 - DNA, 31 bp, Homo sapiens
  chr15:42153396-42153427
  hypo
aagctccttggtgttcgcggtggggcctgcc

SEQ ID NO: 21223 - DNA, 31 bp, Homo sapiens
  chr15:42153440-42153471
  hypo
gaactgctctagatgacgggtaagtaactgc

SEQ ID NO: 21224 - DNA, 56 bp, Homo sapiens
  chr15:42160235-42160291
  hypo
gagcggagtgtgagggcgggaggggacctgcctcctgggccgcgaggatctcctcc

SEQ ID NO: 21225 - DNA, 31 bp, Homo sapiens
  chr15:42160910-42160941
  hypo
acctgggtcagggcctcgggtgaggcacatg

SEQ ID NO: 21226 - DNA, 31 bp, Homo sapiens
  chr15:42166942-42166973
  hypo
ggaggtctggacaccccggtcctgtgggtgc

SEQ ID NO: 21227 - DNA, 31 bp, Homo sapiens
  chr15:42167405-42167436
  hypo
ttcccctgttccctcacgcttcttcttccct

SEQ ID NO: 21228 - DNA, 31 bp, Homo sapiens
  chr15:42167446-42167477
  hypo
agtggtgctgaccacccgctgggcacacagg

SEQ ID NO: 21229 - DNA, 47 bp, Homo sapiens
  chr15:42171429-42171476
  hypo
cccaatgccaccactgcgctggccgtactttacgaccacactttgga

SEQ ID NO: 21230 - DNA, 31 bp, Homo sapiens
  chr15:42171514-42171545
  hypo
tgggccagctgcagggcgtggcaggtgtcct

SEQ ID NO: 21231 - DNA, 36 bp, Homo sapiens
  chr15:42171568-42171604
  hypo
tccagctggaggagcacgtctcgcagctggacctgt

SEQ ID NO: 21232 - DNA, 38 bp, Homo sapiens
  chr15:42280069-42280107
  hypo
agccatgagggaaagccgggggccgccccccatcaccc

SEQ ID NO: 21233 - DNA, 44 bp, Homo sapiens
  chr15:42284448-42284492
  hypo
gatactgaggctggcccgttctgggagacgcgggactcctgtga

SEQ ID NO: 21234 - DNA, 31 bp, Homo sapiens
  chr15:42284541-42284572
  hypo
tggtctgggatgctgccgcctgacctttctt

SEQ ID NO: 21235 - DNA, 41 bp, Homo sapiens
  chr15:42284582-42284623
  hypo
cccctagggtcagactcgcttcatggcgtcactgctctcca

SEQ ID NO: 21236 - DNA, 46 bp, Homo sapiens
  chr15:42362297-42362343
  hypo
tggggagaaggtggcccggagagaaccagcccggcccaggtcaatg

SEQ ID NO: 21237 - DNA, 51 bp, Homo sapiens
  chr15:42362996-42363047
  hypo
gtgttgatgaagtaggcggcgtccaccaggcagagccggggctccttgggg

SEQ ID NO: 21238 - DNA, 31 bp, Homo sapiens
  chr15:42363076-42363107
  hypo
gtagtctggtgggaatcgcaggatggtcaga

SEQ ID NO: 21239 - DNA, 31 bp, Homo sapiens
  chr15:42379547-42379578
  hypo
gactggtgtcggtgagcgtcttggtcttaaa

SEQ ID NO: 21240 - DNA, 45 bp, Homo sapiens
  chr15:42388223-42388268
  hypo
ccctgtcatccccatacgcccgccgggatccgctgggggaaccta

SEQ ID NO: 21241 - DNA, 31 bp, Homo sapiens
  chr15:42434609-42434640
  hypo
caggcccaccaggaggcgtgcttagtgacat

SEQ ID NO: 21242 - DNA, 31 bp, Homo sapiens
  chr15:42434651-42434682
  hypo
cccaccctcagaacagcgtcccatcaccatc

SEQ ID NO: 21243 - DNA, 40 bp, Homo sapiens
  chr15:42434726-42434766
  hypo
tggggccaggtgtgtgcggaaggtacggttaaccaggggg

SEQ ID NO: 21244 - DNA, 31 bp, Homo sapiens
  chr15:42434771-42434802
  hypo
cagcacaatgggggagcgggggtcctcagcc

SEQ ID NO: 21245 - DNA, 31 bp, Homo sapiens
  chr15:42562621-42562652
  hypo
taaacacttcaaaatacgcagttagggctgg

SEQ ID NO: 21246 - DNA, 41 bp, Homo sapiens
  chr15:42684672-42684713
  hypo
agggccactgaaggtccgttcgtggtcgtgaggcacacttt

SEQ ID NO: 21247 - DNA, 31 bp, Homo sapiens
  chr15:42696331-42696362
  hypo
gaaagtaagctggtgccggacctggtgttga

SEQ ID NO: 21248 - DNA, 31 bp, Homo sapiens
  chr15:42696369-42696400
  hypo
atcctccacttaccagcggggtgacctggac

SEQ ID NO: 21249 - DNA, 31 bp, Homo sapiens
  chr15:43020218-43020249
  hypo
cactgctcagaacctgcgaaacagaactaca

SEQ ID NO: 21250 - DNA, 61 bp, Homo sapiens
  chr15:43527645-43527706
  hypo
acaaactgtgcacatgcgtaccttctttaggagagagtgtgatgaacgctgtgtcctgcca

SEQ ID NO: 21251 - DNA, 31 bp, Homo sapiens
  chr15:43527713-43527744
  hypo
gacagggggctgccatcgtgcagcagagact

SEQ ID NO: 21252 - DNA, 36 bp, Homo sapiens
  chr15:43527816-43527852
  hypo
cctggcccatgttgggcgggtcgagcagcttgaatt

SEQ ID NO: 21253 - DNA, 31 bp, Homo sapiens
  chr15:43820126-43820157
  hypo
acacctggggcctgcccgacccagtctggac

SEQ ID NO: 21254 - DNA, 35 bp, Homo sapiens
  chr15:43820213-43820248
  hypo
ctctccagctgaaccccgctcggcaccctgtggct

SEQ ID NO: 21255 - DNA, 31 bp, Homo sapiens
  chr15:43820252-43820283
  hypo
tgccttctctggggatcgagctctggctctg

SEQ ID NO: 21256 - DNA, 31 bp, Homo sapiens
  chr15:43820291-43820322
  hypo
accccccaccagaacccggcatgatgaatac

SEQ ID NO: 21257 - DNA, 31 bp, Homo sapiens
  chr15:44037567-44037598
  hypo
aaagacattgagcagtcgaccaagtggccag

SEQ ID NO: 21258 - DNA, 9 bp, Homo sapiens
  chr15:44037652-44037661
  hypo
aaaaaaaaa

SEQ ID NO: 21259 - DNA, 33 bp, Homo sapiens
  chr15:44037900-44037933
  hypo
cgcgccactgcactccagcgtgggggacagagc

SEQ ID NO: 21260 - DNA, 158 bp, Homo sapiens; identical to SEQ ID NO: 5297
  chr15:44038551-44038709
  hypo

SEQ ID NO: 21261 - DNA, 31 bp, Homo sapiens
  chr15:44191954-44191985
  hypo
ctcttcagcctctctgcgtccaatgatggac

SEQ ID NO: 21262 - DNA, 44 bp, Homo sapiens; identical to SEQ ID NO: 5299
  chr15:44487114-44487158
  hypo

SEQ ID NO: 21263 - DNA, 31 bp, Homo sapiens; identical to SEQ ID NO: 5300
  chr15:44487214-44487245
  hypo

SEQ ID NO: 21264 - DNA, 18 bp, Homo sapiens
  chr15:45206207-45206225
  hypo
tggagtctcactctgtcg

SEQ ID NO: 21265 - DNA, 31 bp, Homo sapiens
  chr15:45387030-45387061
  hypo
gccagctcagcctggccgtccacccacctgc

SEQ ID NO: 21266 - DNA, 38 bp, Homo sapiens
  chr15:45391479-45391517
  hypo
ttacaggcgtgagccaccgcgcccggcctgcctatttc

SEQ ID NO: 21267 - DNA, 49 bp, Homo sapiens
  chr15:45439951-45440000
  hypo
ccagaagtgcccaggccgaggtcaggaagcagagcgacccttgctgtgt

SEQ ID NO: 21268 - DNA, 31 bp, Homo sapiens
  chr15:45440050-45440081
  hypo
ggttcaggcaggcaggcgggggctctcctta

SEQ ID NO: 21269 - DNA, 43 bp, Homo sapiens
  chr15:45440105-45440148
  hypo
tcctgaggaaaagtctcgccttatgttccgcatgtacgacttt

SEQ ID NO: 21270 - DNA, 41 bp, Homo sapiens
  chr15:45465161-45465202
  hypo
tccccaggcacacatgcgcacgtgcacgtacggacagacac

SEQ ID NO: 21271 - DNA, 31 bp, Homo sapiens
  chr15:45471644-45471675
  hypo
ggcccttcacttcctacgctgcccctttctc

SEQ ID NO: 21272 - DNA, 31 bp, Homo sapiens
  chr15:47410608-47410639
  hypo
gagtgattatcacagacgtatgttctgtaca

SEQ ID NO: 21273 - DNA, 36 bp, Homo sapiens
  chr15:48003205-48003241
  hypo
tgtaaaaatgtataggcgtggccgggcgcggtggct

SEQ ID NO: 21274 - DNA, 31 bp, Homo sapiens
  chr15:50516711-50516742
  hypo
ttgaataattgttagccgtaatgatgataat

SEQ ID NO: 21275 - DNA, 17 bp, Homo sapiens
  chr15:50657055-50657072
  hypo
ctcggcctcccaaagtg

SEQ ID NO: 21276 - DNA, 31 bp, Homo sapiens
  chr15:50709664-50709695
  hypo
agccaggcctgatgcacgtgtaggagctgta

SEQ ID NO: 21277 - DNA, 23 bp, Homo sapiens
  chr15:50928670-50928693
  hypo
agccagcacgcccagcccattct

SEQ ID NO: 21278 - DNA, 31 bp, Homo sapiens
  chr15:51059307-51059338
  hypo
catgagccaccgcacccggcctgtccagtca

SEQ ID NO: 21279 - DNA, 31 bp, Homo sapiens
  chr15:51350224-51350255
  hypo
cctgggcgtcaggtgccgctgcaccagttca

SEQ ID NO: 21280 - DNA, 31 bp, Homo sapiens; identical to SEQ ID NO: 5305
  chr15:51812127-51812158
  hypo

SEQ ID NO: 21281 - DNA, 23 bp, Homo sapiens
  chr15:51946188-51946211
  hypo
ctttcctggccaggtgcggtggc

SEQ ID NO: 21282 - DNA, 19 bp, Homo sapiens
  chr15:51949284-51949303
  hypo
acttcgtgtcaaaataagt

SEQ ID NO: 21283 - DNA, 2 bp, Homo sapiens
  chr15:52276807-52276809
  hypo
at

SEQ ID NO: 21284 - DNA, 60 bp, Homo sapiens
  chr15:52276837-52276897
  hypo
gatgtgtacagtgatgcgctagtaaaagcttaacaaccagttctccgggggggaagaaaa

SEQ ID NO: 21285 - DNA, 19 bp, Homo sapiens
  chr15:52324103-52324122
  hypo
ttttttttttttgaggcgg

SEQ ID NO: 21286 - DNA, 38 bp, Homo sapiens; identical to SEQ ID NO: 5310
  chr15:52587620-52587658
  hypo

SEQ ID NO: 21287 - DNA, 101 bp, Homo sapiens; identical to SEQ ID NO: 5311
  chr15:52587760-52587861
  hypo

SEQ ID NO: 21288 - DNA, 55 bp, Homo sapiens; identical to SEQ ID NO: 5312
  chr15:52588029-52588084
  hypo

SEQ ID NO: 21289 - DNA, 35 bp, Homo sapiens; identical to SEQ ID NO: 5314
  chr15:52820647-52820682
  hypo

SEQ ID NO: 21290 - DNA, 152 bp, Homo sapiens; identical to SEQ ID NO: 5315
  chr15:52820687-52820839
  hypo

SEQ ID NO: 21291 - DNA, 31 bp, Homo sapiens
  chr15:55699122-55699153
  hypo
atgaattaacgcccgcgcggtgggtcacgcc

SEQ ID NO: 21292 - DNA, 49 bp, Homo sapiens; identical to SEQ ID NO: 5317
  chr15:55699899-55699948
  hypo

SEQ ID NO: 21293 - DNA, 31 bp, Homo sapiens; identical to SEQ ID NO: 5318
  chr15:55699958-55699989
  hypo

SEQ ID NO: 21294 - DNA, 31 bp, Homo sapiens
  chr15:55723598-55723629
  hypo
tacatacagggatgaccgaagaagctctctg

SEQ ID NO: 21295 - DNA, 45 bp, Homo sapiens; identical to SEQ ID NO: 5319
  chr15:56034885-56034930
  hypo

SEQ ID NO: 21296 - DNA, 31 bp, Homo sapiens
  chr15:56105154-56105185
  hypo
catgagccaccatgcccggcctctcaaacac

SEQ ID NO: 21297 - DNA, 26 bp, Homo sapiens
  chr15:56133124-56133150
  hypo
caaagttttgtttgttcgtttgtttt

SEQ ID NO: 21298 - DNA, 31 bp, Homo sapiens
  chr15:56137949-56137980
  hypo
atttccagggaaatttcgacacaaagttatt

SEQ ID NO: 21299 - DNA, 50 bp, Homo sapiens
  chr15:56140360-56140410
  hypo
cccctcactgctattgcgtagggtaaggataatgacgttatagaatcttt

SEQ ID NO: 21300 - DNA, 31 bp, Homo sapiens
  chr15:56140441-56140472
  hypo
gggggagaggagagaacggccaatgtgcttt

SEQ ID NO: 21301 - DNA, 31 bp, Homo sapiens
  chr15:56140482-56140513
  hypo
cctgtagggttatgcccgtgactatctgctc

SEQ ID NO: 21302 - DNA, 31 bp, Homo sapiens
  chr15:56140514-56140545
  hypo
tgaagagacaggtgagcggacagtcccatca

SEQ ID NO: 21303 - DNA, 31 bp, Homo sapiens
  chr15:56220529-56220560
  hypo
tctttcgtactgtaatcggacttacctagaa

SEQ ID NO: 21304 - DNA, 103 bp, Homo sapiens; identical to SEQ ID NO: 5320
  chr15:56285863-56285966
  hypo

SEQ ID NO: 21305 - DNA, 51 bp, Homo sapiens; identical to SEQ ID NO: 5321
  chr15:56286050-56286101
  hypo

SEQ ID NO: 21306 - DNA, 41 bp, Homo sapiens; identical to SEQ ID NO: 5322
  chr15:56286123-56286164
  hypo

SEQ ID NO: 21307 - DNA, 95 bp, Homo sapiens; identical to SEQ ID NO: 5323
  chr15:56286174-56286269
  hypo

SEQ ID NO: 21308 - DNA, 31 bp, Homo sapiens
  chr15:56510268-56510299
  hypo
caatatagtataaaaacgatttgcacagcat

SEQ ID NO: 21309 - DNA, 31 bp, Homo sapiens
  chr15:57625821-57625852
  hypo
ggctgtggctactaaacgtgtgaattgtggt

SEQ ID NO: 21310 - DNA, 44 bp, Homo sapiens
  chr15:57731149-57731193
  hypo
aatgtgccatccatgccgacaacgtcaatcgtcatgaaaacaga

SEQ ID NO: 21311 - DNA, 31 bp, Homo sapiens
  chr15:57731207-57731238
  hypo
cctgccaggaactggacgggatattgataca

SEQ ID NO: 21312 - DNA, 31 bp, Homo sapiens
  chr15:57731303-57731334
  hypo
aggaaggtctgggaagcgaaacagaattaat

SEQ ID NO: 21313 - DNA, 31 bp, Homo sapiens
  chr15:57763916-57763947
  hypo
caaaccactcagatttcgtgttcaatagtca

SEQ ID NO: 21314 - DNA, 31 bp, Homo sapiens
  chr15:57905026-57905057
  hypo
taatccagagattctgcgtatgtgttgggag

SEQ ID NO: 21315 - DNA, 58 bp, Homo sapiens
  chr15:57923146-57923204
  hypo
ggggaagaggggctgccggtccaccgcccggtctctgtattgccgccctggggatctg

SEQ ID NO: 21316 - DNA, 31 bp, Homo sapiens
  chr15:57923272-57923303
  hypo
ggcagctcttcttttccgtgtaagagttact

SEQ ID NO: 21317 - DNA, 24 bp, Homo sapiens
  chr15:58504154-58504178
  hypo
caccacagccggcccaggctagct

SEQ ID NO: 21318 - DNA, 31 bp, Homo sapiens
  chr15:58652177-58652208
  hypo
aaggggactctggcaccggctgtgtgcctgg

SEQ ID NO: 21319 - DNA, 50 bp, Homo sapiens
  chr15:59158487-59158537
  hypo
cacagcaggtatgggccgactcactgtctggggcccgcccagcccagccc

SEQ ID NO: 21320 - DNA, 17 bp, Homo sapiens
  chr15:59158780-59158797
  hypo
cgggcgcggtggctcac

SEQ ID NO: 21321 - DNA, 31 bp, Homo sapiens
  chr15:59291813-59291844
  hypo
tgtcagccactgtgcccggcctattactgca

SEQ ID NO: 21322 - DNA, 31 bp, Homo sapiens
  chr15:59454913-59454944
  hypo
atagtcctcaagcccccggaggctctaccaa

SEQ ID NO: 21323 - DNA, 31 bp, Homo sapiens
  chr15:59474905-59474936
  hypo
tcagagtgcggcacagcgtaaagtacagcat

SEQ ID NO: 21324 - DNA, 42 bp, Homo sapiens
  chr15:59474945-59474987
  hypo
aagctggcatggcactcgagacagatccggataatcaacaga

SEQ ID NO: 21325 - DNA, 31 bp, Homo sapiens
  chr15:59474991-59475022
  hypo
gttcacacctcatgcacgtatcacagggtcc

SEQ ID NO: 21326 - DNA, 31 bp, Homo sapiens
  chr15:59490728-59490759
  hypo
atcaggctgggtgcaacggctcactcctgta

SEQ ID NO: 21327 - DNA, 31 bp, Homo sapiens
  chr15:59524090-59524121
  hypo
tgaggggccccacacccgtgtgtcactggtg

SEQ ID NO: 21328 - DNA, 35 bp, Homo sapiens
  chr15:59525451-59525486
  hypo
cattcatccatccatccgtccgtccatatgtattc

SEQ ID NO: 21329 - DNA, 31 bp, Homo sapiens
  chr15:59561664-59561695
  hypo
ttgacggtgttaagtccggataaagtaagca

SEQ ID NO: 21330 - DNA, 2 bp, Homo sapiens
  chr15:59561765-59561767
  hypo
aa

SEQ ID NO: 21331 - DNA, 31 bp, Homo sapiens
  chr15:59580023-59580054
  hypo
atgctccctgagctgccgggatagactctgg

SEQ ID NO: 21332 - DNA, 31 bp, Homo sapiens
  chr15:59580079-59580110
  hypo
agtggatcagaaaatgcgtgaatgaatgatt

SEQ ID NO: 21333 - DNA, 49 bp, Homo sapiens; identical to SEQ ID NO: 5327
  chr15:59664056-59664105
  hypo

SEQ ID NO: 21334 - DNA, 110 bp, Homo sapiens; identical to SEQ ID NO: 5328
  chr15:59664434-59664544
  hypo

SEQ ID NO: 21335 - DNA, 80 bp, Homo sapiens; identical to SEQ ID NO: 5329
  chr15:59664618-59664698
  hypo

SEQ ID NO: 21336 - DNA, 31 bp, Homo sapiens
  chr15:59679645-59679676
  hypo
ataagcagtggcagggcgcaatggctcatgc

SEQ ID NO: 21337 - DNA, 10 bp, Homo sapiens
  chr15:59685906-59685916
  hypo
ctacattctg

SEQ ID NO: 21338 - DNA, 55 bp, Homo sapiens
  chr15:59685919-59685974
  hypo
catctctctctctcgccgagaagcccttgaatgtggatatcgtaaatcacacaag

SEQ ID NO: 21339 - DNA, 31 bp, Homo sapiens
  chr15:59686040-59686071
  hypo
gccagataaaatattgcgcacctgtattttt

SEQ ID NO: 21340 - DNA, 21 bp, Homo sapiens
  chr15:59950342-59950363
  hypo
aaactccgtctcaaaaaaaaa

SEQ ID NO: 21341 - DNA, 31 bp, Homo sapiens
  chr15:61711645-61711676
  hypo
gtctcctctggccgggcgtggtggctcatgc

SEQ ID NO: 21342 - DNA, 31 bp, Homo sapiens
  chr15:61726879-61726910
  hypo
gccactgtctttaatgcgttttgcacttttt

SEQ ID NO: 21343 - DNA, 31 bp, Homo sapiens
  chr15:62702852-62702883
  hypo
gctactgagggatgggcgcagcctcttatcc

SEQ ID NO: 21344 - DNA, 31 bp, Homo sapiens
  chr15:62752764-62752795
  hypo
gccacgtggtcttgtacgaagaggcaggtgt

SEQ ID NO: 21345 - DNA, 42 bp, Homo sapiens
  chr15:62753886-62753928
  hypo
atggtctctaaagagtcgacatttcagcgagggcttgaagga

SEQ ID NO: 21346 - DNA, 44 bp, Homo sapiens
  chr15:62753938-62753982
  hypo
gccaacaggtaagaggcgcctactccatgcgaggggaagagcat

SEQ ID NO: 21347 - DNA, 31 bp, Homo sapiens
  chr15:62754017-62754048
  hypo
agagtggcctggtgagcgcagagtgaccagc

SEQ ID NO: 21348 - DNA, 31 bp, Homo sapiens
  chr15:62791805-62791836
  hypo
ttctttgtttttgagacggagttttgctctt

SEQ ID NO: 21349 - DNA, 28 bp, Homo sapiens
  chr15:62792077-62792105
  hypo
aggcataagccaccgctcctggctgcaa

SEQ ID NO: 21350 - DNA, 57 bp, Homo sapiens
  chr15:62799428-62799485
  hypo
ctgtttttaatgagatcgtgcttcgaggttggtttctcaagacgaagttatcagtca

SEQ ID NO: 21351 - DNA, 64 bp, Homo sapiens
  chr15:62799545-62799609
  hypo
atctcattgagacccccgtgtgatgcttgagttgcccacctcccgcaaccgagtccccatcaag

SEQ ID NO: 21352 - DNA, 74 bp, Homo sapiens
  chr15:62828094-62828168
  hypo
atgtgtgtgtatgaaccgttctcacttttgacaaatgcgcaaagtcttgtgactgctaccgctctcaacatttc

SEQ ID NO: 21353 - DNA, 31 bp, Homo sapiens
  chr15:62880085-62880116
  hypo
cttttttttttggagacggagtctcactctg

SEQ ID NO: 21354 - DNA, 31 bp, Homo sapiens
  chr15:62896942-62896973
  hypo
tggagctcatattatgcgataagggatttat

SEQ ID NO: 21355 - DNA, 53 bp, Homo sapiens
  chr15:62898022-62898075
  hypo
ctccccaagctgcaagcgaactacccttcccatcttcacgaaatgtctcttca

SEQ ID NO: 21356 - DNA, 31 bp, Homo sapiens
  chr15:62930017-62930048
  hypo
tttatggaagcaaagccggatgctgggctga

SEQ ID NO: 21357 - DNA, 31 bp, Homo sapiens
  chr15:62959084-62959115
  hypo
gcttgttacaagatgccgggcctcaccccca

SEQ ID NO: 21358 - DNA, 31 bp, Homo sapiens
  chr15:62967378-62967409
  hypo
atgcaataactggtcccgaccactgtcactt

SEQ ID NO: 21359 - DNA, 31 bp, Homo sapiens
  chr15:62967413-62967444
  hypo
aggagcataagaactgcggagagatgagtga

SEQ ID NO: 21360 - DNA, 31 bp, Homo sapiens
  chr15:62968123-62968154
  hypo
cctcaggaaagtgatacgctgtttagttgtt

SEQ ID NO: 21361 - DNA, 41 bp, Homo sapiens
  chr15:62968193-62968234
  hypo
gacccctttggcctctcgcctggggccgtggagaaagctct

SEQ ID NO: 21362 - DNA, 38 bp, Homo sapiens
  chr15:62968270-62968308
  hypo
atggaagcaaaccagccgtgttgcggctgcatccaggg

SEQ ID NO: 21363 - DNA, 31 bp, Homo sapiens
  chr15:62970008-62970039
  hypo
ttttttttttttgagacggagattcacccag

SEQ ID NO: 21364 - DNA, 40 bp, Homo sapiens
  chr15:62978881-62978921
  hypo
gggatcaccaaagactcggtgatgcgcgtggatgagaaga

SEQ ID NO: 21365 - DNA, 38 bp, Homo sapiens
  chr15:62978939-62978977
  hypo
agtggcccctcaccaccgtcaagcgctgggcagcctca

SEQ ID NO: 21366 - DNA, 31 bp, Homo sapiens
  chr15:62979012-62979043
  hypo
gcaaggagagcactagcgtggccttgagtga

SEQ ID NO: 21367 - DNA, 31 bp, Homo sapiens
  chr15:62993096-62993127
  hypo
caagggagaatttgcacgccattgagtatct

SEQ ID NO: 21368 - DNA, 31 bp, Homo sapiens
  chr15:62993167-62993198
  hypo
aacttaagggccctgtcggtgctggcctcat

SEQ ID NO: 21369 - DNA, 45 bp, Homo sapiens
  chr15:63000891-63000936
  hypo
gcggcagtttgccagccgaggcgagcccatcggccgctacgacca

SEQ ID NO: 21370 - DNA, 58 bp, Homo sapiens
  chr15:63000947-63001005
  hypo
ccatcatgtgtgtcaccgagagcatcttcagctccatgggtgacgctggtaaggcact

SEQ ID NO: 21371 - DNA, 73 bp, Homo sapiens
  chr15:63012432-63012505
  hypo
gccattgttcatggaccgggaaaagaaatgttaagtgcgtcttctccaaagatatgatcgttctttgtggcaa

SEQ ID NO: 21372 - DNA, 31 bp, Homo sapiens
  chr15:63012552-63012583
  hypo
ttttaaggaaaataaacgaaaatattaagtt

SEQ ID NO: 21373 - DNA, 31 bp, Homo sapiens
  chr15:63012586-63012617
  hypo
gaaaaattcccctttacgtgcttcttatatt

SEQ ID NO: 21374 - DNA, 31 bp, Homo sapiens
  chr15:63017544-63017575
  hypo
tgaagtattttatttacgaagtgggtagcaa

SEQ ID NO: 21375 - DNA, 41 bp, Homo sapiens
  chr15:63017645-63017686
  hypo
gcactaggatggacaacggcaaagtgcgtccatacaggaaa

SEQ ID NO: 21376 - DNA, 27 bp, Homo sapiens
  chr15:63022558-63022585
  hypo
tattttcatctccgcaatacagtctca

SEQ ID NO: 21377 - DNA, 31 bp, Homo sapiens
  chr15:63024967-63024998
  hypo
gagatggtaacatgaacggttccaagtgttt

SEQ ID NO: 21378 - DNA, 31 bp, Homo sapiens
  chr15:63028631-63028662
  hypo
catatgtaccaattcacggagctgcacatgt

SEQ ID NO: 21379 - DNA, 45 bp, Homo sapiens
  chr15:63029314-63029359
  hypo
tcatggtcatcattaacgtggacatgtggtcgggctgtctcctgg

SEQ ID NO: 21380 - DNA, 73 bp, Homo sapiens
  chr15:63060545-63060618
  hypo
gcactccttgactgtcgcgctgatccctgctttcgtaatcacattgtcacctgctcttcggtgtctcttctgt

SEQ ID NO: 21381 - DNA, 36 bp, Homo sapiens
  chr15:63060637-63060673
  hypo
tattggatttagagcccgtcccggtaactcaggaca

SEQ ID NO: 21382 - DNA, 31 bp, Homo sapiens
  chr15:63068832-63068863
  hypo
aagaaatagaatagatcgctgtgctccattg

SEQ ID NO: 21383 - DNA, 31 bp, Homo sapiens
  chr15:63068902-63068933
  hypo
ttagaagactgagcaccgctctcttctgctt

SEQ ID NO: 21384 - DNA, 94 bp, Homo sapiens
  chr15:63068963-63069057
  hypo
cacaacacacccatgacgccatcacagaggccgcccagttgatgaaggaagccgtggatgacatcatggtgacgctgaacgaagctgccagtga

SEQ ID NO: 21385 - DNA, 31 bp, Homo sapiens
  chr15:63069068-63069099
  hypo
ttgggggcatggtggacgccattgcagaagc

SEQ ID NO: 21386 - DNA, 31 bp, Homo sapiens
  chr15:63069148-63069179
  hypo
ctcacccatgggcctcgcgtgcttttctcta

SEQ ID NO: 21387 - DNA, 21 bp, Homo sapiens
  chr15:63069713-63069734
  hypo
aacgagcgaaactctcaaaaa

SEQ ID NO: 21388 - DNA, 37 bp, Homo sapiens
  chr15:63075602-63075639
  hypo
tgaccccccagggctgcgctggcgaggggctggcaca

SEQ ID NO: 21389 - DNA, 31 bp, Homo sapiens
  chr15:63077574-63077605
  hypo
ggaaaagtgggctgggcgtgatggctcacgc

SEQ ID NO: 21390 - DNA, 51 bp, Homo sapiens
  chr15:63084844-63084895
  hypo
attccagattcgcactcgtgtgcaggacctgggccacggctgtatcttcct

SEQ ID NO: 21391 - DNA, 40 bp, Homo sapiens
  chr15:63089566-63089606
  hypo
cagccagcctgggctccgacgaccccgagacccaggtacc

SEQ ID NO: 21392 - DNA, 31 bp, Homo sapiens
  chr15:63089608-63089639
  hypo
cagggcctggggagtgcgtcctcccggtctt

SEQ ID NO: 21393 - DNA, 31 bp, Homo sapiens
  chr15:63089744-63089775
  hypo
gaggcagtcatccaagcgagatagtggcaca

SEQ ID NO: 21394 - DNA, 31 bp, Homo sapiens
  chr15:63089792-63089823
  hypo
tggggatggagacaagcggagggatttgaga

SEQ ID NO: 21395 - DNA, 48 bp, Homo sapiens
  chr15:63089836-63089884
  hypo
aaggcttggcctggcccggtgaaggctggagcacggcatacctgaggg

SEQ ID NO: 21396 - DNA, 31 bp, Homo sapiens
  chr15:63089886-63089917
  hypo
gggaaggagtgaaaggcggctccttgtgggc

SEQ ID NO: 21397 - DNA, 31 bp, Homo sapiens
  chr15:63089973-63090004
  hypo
gaggagattgaagtgccggagccacacacag

SEQ ID NO: 21398 - DNA, 31 bp, Homo sapiens
  chr15:63090160-63090191
  hypo
caagtggcacaggagacggagaagcagcagc

SEQ ID NO: 21399 - DNA, 31 bp, Homo sapiens
  chr15:63090194-63090225
  hypo
tgcagggaggaaagccgcgggcatcatgttg

SEQ ID NO: 21400 - DNA, 51 bp, Homo sapiens
  chr15:63090286-63090337
  hypo
ggttattggcctgttccggtaaccatcgagtgccatcgaggacattggtgt

SEQ ID NO: 21401 - DNA, 65 bp, Homo sapiens
  chr15:63111786-63111851
  hypo
acagagctcatccaggcggcggaagccatgaaaggtaggctggattctcacgtcttggtggaggg

SEQ ID NO: 21402 - DNA, 25 bp, Homo sapiens
  chr15:63118207-63118232
  hypo
gagtgagactcggtctcaaaaacat

SEQ ID NO: 21403 - DNA, 31 bp, Homo sapiens
  chr15:63129978-63130009
  hypo
aaatattaattggttcgcgtcccaccctgtg

SEQ ID NO: 21404 - DNA, 67 bp, Homo sapiens
  chr15:63130084-63130151
  hypo
ctcaactttctgatggcgaaccctcaagcacaagccttcgactctgagggggcgctggacaagaaat

SEQ ID NO: 21405 - DNA, 31 bp, Homo sapiens; identical to SEQ ID NO: 5335
  chr15:63130478-63130509
  hypo

SEQ ID NO: 21406 - DNA, 54 bp, Homo sapiens; identical to SEQ ID NO: 5336
  chr15:63130537-63130591
  hypo

SEQ ID NO: 21407 - DNA, 46 bp, Homo sapiens
  chr15:63130621-63130667
  hypo
agctaagggagacaagcgaaagtgatgtctgcgccaagtcctcaag

SEQ ID NO: 21408 - DNA, 31 bp, Homo sapiens
  chr15:63132462-63132493
  hypo
cacaggccagaaccagcgtgttttcatggct

SEQ ID NO: 21409 - DNA, 31 bp, Homo sapiens
  chr15:63133221-63133252
  hypo
tcctctcaggagaagacggaagctggagttg

SEQ ID NO: 21410 - DNA, 31 bp, Homo sapiens
  chr15:63148262-63148293
  hypo
ccggtcactgctcgagcgatcacatacacta

SEQ ID NO: 21411 - DNA, 34 bp, Homo sapiens
  chr15:63245890-63245924
  hypo
aggccaggcccaacaacgccggccctacggcggc

SEQ ID NO: 21412 - DNA, 31 bp, Homo sapiens
  chr15:63245949-63245980
  hypo
gagaccctatgggtgtcgaccacagcattcc

SEQ ID NO: 21413 - DNA, 1 bp, Homo sapiens
  chr15:63282595-63282596
  hypo
t

SEQ ID NO: 21414 - DNA, 61 bp, Homo sapiens
  chr15:63282627-63282688
  hypo
gagcacattctttaagcgtttgcacatgcacacacatacacacttacgcacaacatttact

SEQ ID NO: 21415 - DNA, 48 bp, Homo sapiens
  chr15:63321675-63321723
  hypo
cgcgtccatgaaaacacgtgtagtgatgtctcccgcttggatttgccg

SEQ ID NO: 21416 - DNA, 17 bp, Homo sapiens
  chr15:63329447-63329464
  hypo
gccgtctcaaaaataat

SEQ ID NO: 21417 - DNA, 31 bp, Homo sapiens
  chr15:63712164-63712195
  hypo
gagtgagttgaagccccgtgggtgaactttg

SEQ ID NO: 21418 - DNA, 31 bp, Homo sapiens
  chr15:63753341-63753372
  hypo
taaaagaatgttactgcggggcctccctaaa

SEQ ID NO: 21419 - DNA, 44 bp, Homo sapiens; identical to SEQ ID NO: 5339
  chr15:63795900-63795944
  hypo

SEQ ID NO: 21420 - DNA, 31 bp, Homo sapiens; identical to SEQ ID NO: 5340
  chr15:63795981-63796012
  hypo

SEQ ID NO: 21421 - DNA, 31 bp, Homo sapiens; identical to SEQ ID NO: 5341
  chr15:63796025-63796056
  hypo

SEQ ID NO: 21422 - DNA, 35 bp, Homo sapiens
  chr15:64234811-64234846
  hypo
agggccatgtttcccccgcccgagtctcatctgtc

SEQ ID NO: 21423 - DNA, 59 bp, Homo sapiens
  chr15:64443255-64443314
  hypo
gatgagcaaaggtctacggagctcctgaaatccaggcagtctgacgtccaaatcggagt

SEQ ID NO: 21424 - DNA, 31 bp, Homo sapiens; identical to SEQ ID NO: 5342
  chr15:64454727-64454758
  hypo

SEQ ID NO: 21425 - DNA, 31 bp, Homo sapiens
  chr15:64649885-64649916
  hypo
aaataaactttcataccgacactatggataa

SEQ ID NO: 21426 - DNA, 41 bp, Homo sapiens
  chr15:64674696-64674737
  hypo
aggaaatgaaatgaaacgaaacgaaacgaaaagaccctgcc

SEQ ID NO: 21427 - DNA, 15 bp, Homo sapiens
  chr15:64715654-64715669
  hypo
cgtctcaaaaaaaaa

SEQ ID NO: 21428 - DNA, 31 bp, Homo sapiens
  chr15:64715708-64715739
  hypo
gaagagtaaagataagcgtttttatttactt

SEQ ID NO: 21429 - DNA, 31 bp, Homo sapiens
  chr15:65035875-65035906
  hypo
tatagtgaccaggttccgagagggctgcttc

SEQ ID NO: 21430 - DNA, 40 bp, Homo sapiens
  chr15:65041215-65041255
  hypo
aagtgtgctcctagggcggggtgcacgttgctgggatttg

SEQ ID NO: 21431 - DNA, 43 bp, Homo sapiens
  chr15:65127718-65127761
  hypo
taggattacgggcgtgagccaccgcgcccggcctggatttatg

SEQ ID NO: 21432 - DNA, 31 bp, Homo sapiens
  chr15:65385856-65385887
  hypo
caggaggggggcagaccgtacacctgcacct

SEQ ID NO: 21433 - DNA, 31 bp, Homo sapiens
  chr15:65499416-65499447
  hypo
agccgtgatcctggtgcgctccagttctcct

SEQ ID NO: 21434 - DNA, 31 bp, Homo sapiens
  chr15:65862163-65862194
  hypo
agtattctttagactgcgtttgaacatgtgt

SEQ ID NO: 21435 - DNA, 40 bp, Homo sapiens
  chr15:66596943-66596983
  hypo
taagatattttatggccgggcgtgacggcttatgcctata

SEQ ID NO: 21436 - DNA, 82 bp, Homo sapiens
  chr15:66929156-66929238
  hypo
ttcagtctgacatgggcgccaccgagccatggaaatgcacttttaattacagcgtggatgtagccggctggacccgagtgtt

SEQ ID NO: 21437 - DNA, 31 bp, Homo sapiens
  chr15:66946040-66946071
  hypo
gccctggcatctctctcggggggccctgcca

SEQ ID NO: 21438 - DNA, 17 bp, Homo sapiens
  chr15:66961541-66961558
  hypo
ttttttttttttgagac

SEQ ID NO: 21439 - DNA, 31 bp, Homo sapiens
  chr15:66962085-66962116
  hypo
agggcaggtgagaaatcgcctggtctgctgg

SEQ ID NO: 21440 - DNA, 31 bp, Homo sapiens
  chr15:66963540-66963571
  hypo
cgcccttcctctgccccgcccctctcctctg

SEQ ID NO: 21441 - DNA, 53 bp, Homo sapiens
  chr15:66963577-66963630
  hypo
tcctcccacagcttcccgctacctgccccagccactcccgcctcctggcttgg

SEQ ID NO: 21442 - DNA, 41 bp, Homo sapiens
  chr15:66963671-66963712
  hypo
tccagcctgaggtgcccgcctcccaccgcaccgcctgctgt

SEQ ID NO: 21443 - DNA, 31 bp, Homo sapiens; identical to SEQ ID NO: 5344
  chr15:66994355-66994386
  hypo

SEQ ID NO: 21444 - DNA, 71 bp, Homo sapiens; identical to SEQ ID NO: 5349
  chr15:66995599-66995670
  hypo

SEQ ID NO: 21445 - DNA, 74 bp, Homo sapiens; identical to SEQ ID NO: 5350
  chr15:66995817-66995891
  hypo

SEQ ID NO: 21446 - DNA, 31 bp, Homo sapiens
  chr15:67011790-67011821
  hypo
ctggccttccatctcccggagttctgggggt

SEQ ID NO: 21447 - DNA, 31 bp, Homo sapiens
  chr15:67011850-67011881
  hypo
agtgtcctgggatgtacgtcatccccaaaca

SEQ ID NO: 21448 - DNA, 59 bp, Homo sapiens
  chr15:67049570-67049629
  hypo
tccaatacgcagggtacgggaggaggcgtggtgtgcagccccgacgtctccctctgaag

SEQ ID NO: 21449 - DNA, 31 bp, Homo sapiens
  chr15:67049658-67049689
  hypo
acatagcaagaaatgccgctttcctttcagc

SEQ ID NO: 21450 - DNA, 31 bp, Homo sapiens
  chr15:67049753-67049784
  hypo
tggactcaggagacagcggacacattattta

SEQ ID NO: 21451 - DNA, 31 bp, Homo sapiens
  chr15:67071084-67071115
  hypo
tggcctagcaccaaggcggccccagcattca

SEQ ID NO: 21452 - DNA, 31 bp, Homo sapiens
  chr15:67073253-67073284
  hypo
cagcagtgcccacctccgctcctcggtgcct

SEQ ID NO: 21453 - DNA, 35 bp, Homo sapiens
  chr15:67073291-67073326
  hypo
ccccacccagaataacgcggcggtccctgtgcttg

SEQ ID NO: 21454 - DNA, 201 bp, Homo sapiens
  chr15:67073491-67073692
  hypo
gctcaacctggagcagcgcagcgagtcggtgcggcgaacgcgcagcaagatcggcttcggcatcctgctcagcaaggagcccgacggcgtgtgggcctacaaccgcggcgagcaccccatcttcgtcaactccccgacgctggacgcgcccggcggccgcgccctggtcgtgcgcaaggtgccccccggctactccatcaa

SEQ ID NO: 21455 - DNA, 31 bp, Homo sapiens
  chr15:67073797-67073828
  hypo
ggggccctgctactcccggcagttcatcacc

SEQ ID NO: 21456 - DNA, 31 bp, Homo sapiens
  chr15:67100496-67100527
  hypo
acggagtgtgcaggagcggaagtgcccattg

SEQ ID NO: 21457 - DNA, 31 bp, Homo sapiens
  chr15:67100820-67100851
  hypo
gggtgacctgggggatcgtgctgatctccat

SEQ ID NO: 21458 - DNA, 53 bp, Homo sapiens
  chr15:67100935-67100988
  hypo
gatgccatcacctcagcggttggcctgtgaggccggagcgctggcacacagtg

SEQ ID NO: 21459 - DNA, 31 bp, Homo sapiens
  chr15:67130300-67130331
  hypo
attctcataaaaagcacgaaacctaaatccc

SEQ ID NO: 21460 - DNA, 31 bp, Homo sapiens
  chr15:67137811-67137842
  hypo
gggggatagcaaggaacgcagtgtggctgga

SEQ ID NO: 21461 - DNA, 31 bp, Homo sapiens
  chr15:67137844-67137875
  hypo
gagggggacagatgagcgcgtgggcagggat

SEQ ID NO: 21462 - DNA, 45 bp, Homo sapiens
  chr15:67149349-67149394
  hypo
caagttacttctgaagcgaatcctagatgtcgtatcatttcattc

SEQ ID NO: 21463 - DNA, 51 bp, Homo sapiens
  chr15:67545404-67545455
  hypo
tactatgtgccagactcggggataagcacaatcttgcgaaaattatcccta

SEQ ID NO: 21464 - DNA, 72 bp, Homo sapiens; identical to SEQ ID NO: 5354
  chr15:68177207-68177279
  hypo

SEQ ID NO: 21465 - DNA, 31 bp, Homo sapiens
  chr15:68394336-68394367
  hypo
acactgagattatgggcgtgagccacagtgc

SEQ ID NO: 21466 - DNA, 31 bp, Homo sapiens
  chr15:68394407-68394438
  hypo
gagatttttttttcctcgaaagtttttattt

SEQ ID NO: 21467 - DNA, 31 bp, Homo sapiens
  chr15:68502908-68502939
  hypo
tcccagctgcagccttcggagccctcctccc

SEQ ID NO: 21468 - DNA, 44 bp, Homo sapiens
  chr15:68506852-68506896
  hypo
taattcttcctgtgatcgctggaccttctcggcagccttgggac

SEQ ID NO: 21469 - DNA, 34 bp, Homo sapiens
  chr15:68614577-68614611
  hypo
tgcaactggtaggagtcgccgaatgcctcaggca

SEQ ID NO: 21470 - DNA, 31 bp, Homo sapiens
  chr15:68614671-68614702
  hypo
tgagaagatggaggctcgaggcagggagacc

SEQ ID NO: 21471 - DNA, 54 bp, Homo sapiens
  chr15:68614709-68614763
  hypo
aggctgccacaacattcgggcaagagatgacgctggtgtcggtgtggtagtggg

SEQ ID NO: 21472 - DNA, 44 bp, Homo sapiens
  chr15:68854100-68854144
  hypo
catgtgcctgtgtgagcggagcatgtttccgtgggtctgagagt

SEQ ID NO: 21473 - DNA, 31 bp, Homo sapiens
  chr15:68854173-68854204
  hypo
ttggtgagcctgtgtgcgtagttgtgcatgg

SEQ ID NO: 21474 - DNA, 62 bp, Homo sapiens
  chr15:68854228-68854290
  hypo
tgcctgtgagcatgaccgtgagtgtgtgttgtgagtgtgtacacatgcgtatgaatgtggat

SEQ ID NO: 21475 - DNA, 31 bp, Homo sapiens
  chr15:68899867-68899898
  hypo
ttctttgggccaggcacggtggctcatgcct

SEQ ID NO: 21476 - DNA, 3 bp, Homo sapiens
  chr15:68899905-68899908
  hypo
caa

SEQ ID NO: 21477 - DNA, 42 bp, Homo sapiens
  chr15:68937518-68937560
  hypo
ccgtagctccaagttccggaatgtctacgggaaggtggccaa

SEQ ID NO: 21478 - DNA, 31 bp, Homo sapiens
  chr15:69004017-69004048
  hypo
tgagccccgctctggccgtgttctgcaggtg

SEQ ID NO: 21479 - DNA, 53 bp, Homo sapiens
  chr15:69011589-69011642
  hypo
ctccacagagcacaggcggctgcagcctttgccttcagcgcagctcaccccag

SEQ ID NO: 21480 - DNA, 68 bp, Homo sapiens
  chr15:69011702-69011770
  hypo
tgacagtccatgggatcgtcagtgagagcgtttcccttgccttctttagatcccgtgctgatgtcttt

SEQ ID NO: 21481 - DNA, 31 bp, Homo sapiens
  chr15:69076662-69076693
  hypo
tctgcaaagccaaggacgagccccaaggcct

SEQ ID NO: 21482 - DNA, 31 bp, Homo sapiens
  chr15:69240580-69240611
  hypo
aacaaccaaacccactcgctgcagttttgga

SEQ ID NO: 21483 - DNA, 31 bp, Homo sapiens
  chr15:69277654-69277685
  hypo
ctttcagtcatagaaacgtcctctctgccca

SEQ ID NO: 21484 - DNA, 31 bp, Homo sapiens
  chr15:69285805-69285836
  hypo
tcctgagctctgcagccggtaggctgtgtgt

SEQ ID NO: 21485 - DNA, 36 bp, Homo sapiens
  chr15:69322603-69322639
  hypo
aattagttaacttacgcgcgacggggagccatcaaa

SEQ ID NO: 21486 - DNA, 31 bp, Homo sapiens
  chr15:69322642-69322673
  hypo
tgttgagcaagggattcgcagggatggacct

SEQ ID NO: 21487 - DNA, 31 bp, Homo sapiens
  chr15:69322714-69322745
  hypo
ccctggtgccagagggcggaaaacaggtagc

SEQ ID NO: 21488 - DNA, 31 bp, Homo sapiens
  chr15:69322966-69322997
  hypo
aggaaagcagaacaggcggtgtgactggaga

SEQ ID NO: 21489 - DNA, 48 bp, Homo sapiens
  chr15:69323012-69323060
  hypo
ctaattgattctgcatcgtaatgtgatttgggccggaatgatgatcac

SEQ ID NO: 21490 - DNA, 52 bp, Homo sapiens
  chr15:69323095-69323147
  hypo
cttctcccagatactgcgttaggtgttttaccattatcgagtttccttgagc

SEQ ID NO: 21491 - DNA, 31 bp, Homo sapiens; identical to SEQ ID NO: 5357
  chr15:69351241-69351272
  hypo

SEQ ID NO: 21492 - DNA, 33 bp, Homo sapiens
  chr15:69369616-69369649
  hypo
gagtgagattgagggccgggcgcagtggctcaa

SEQ ID NO: 21493 - DNA, 55 bp, Homo sapiens
  chr15:69387166-69387221
  hypo
aatcttgtgctgagcccggagcacaatgggagcgggctggcggggtgggttcaca

SEQ ID NO: 21494 - DNA, 31 bp, Homo sapiens
  chr15:69387234-69387265
  hypo
cagcagacatacaggccgtaggcacagacat

SEQ ID NO: 21495 - DNA, 41 bp, Homo sapiens
  chr15:69387310-69387351
  hypo
ctcacatgcacaaatacgtgcatgatcgccagtgtgcatcc

SEQ ID NO: 21496 - DNA, 31 bp, Homo sapiens
  chr15:69461189-69461220
  hypo
aaaatttgataggactcgaagaaaaaatata

SEQ ID NO: 21497 - DNA, 38 bp, Homo sapiens
  chr15:69566085-69566123
  hypo
ttacaggcgtgagccaccgcgcccggctggataaattc

SEQ ID NO: 21498 - DNA, 56 bp, Homo sapiens
  chr15:69577240-69577296
  hypo
tacaacactttgccatcggcagaggtctttgggctggctctcgatgcctctgggcc

SEQ ID NO: 21499 - DNA, 31 bp, Homo sapiens
  chr15:69577305-69577336
  hypo
gagaacaaatggaggccgcccaccatgtgtc

SEQ ID NO: 21500 - DNA, 31 bp, Homo sapiens
  chr15:69577356-69577387
  hypo
ttaattaggggctgagcgcagtggctcatgc

SEQ ID NO: 21501 - DNA, 17 bp, Homo sapiens
  chr15:69584194-69584211
  hypo
cgggcatggtggctcac

SEQ ID NO: 21502 - DNA, 20 bp, Homo sapiens
  chr15:69598756-69598776
  hypo
ttttttttttttgatacgga

SEQ ID NO: 21503 - DNA, 31 bp, Homo sapiens
  chr15:69672049-69672080
  hypo
attttagaagctactgcgagggaaggagaga

SEQ ID NO: 21504 - DNA, 21 bp, Homo sapiens
  chr15:69694938-69694959
  hypo
accaccgcgcctggcctaaac

SEQ ID NO: 21505 - DNA, 31 bp, Homo sapiens
  chr15:69793873-69793904
  hypo
acggttcctggcttgccgcccccaaagcact

SEQ ID NO: 21506 - DNA, 53 bp, Homo sapiens
  chr15:69793952-69794005
  hypo
ggaagcagaatccctccgaccttctcctgccctcccttcggcaaccccaagcc

SEQ ID NO: 21507 - DNA, 31 bp, Homo sapiens
  chr15:69879204-69879235
  hypo
caaggggaagcaggggcgatgtccaccctgg

SEQ ID NO: 21508 - DNA, 31 bp, Homo sapiens
  chr15:69879263-69879294
  hypo
aagaggcaggccctggcggtggtcagagcca

SEQ ID NO: 21509 - DNA, 31 bp, Homo sapiens
  chr15:69879329-69879360
  hypo
ttgggaccaactgtaccgggttgtcatggag

SEQ ID NO: 21510 - DNA, 31 bp, Homo sapiens
  chr15:69879374-69879405
  hypo
aggggaaggcacctgcgcgtggtaggtgctg

SEQ ID NO: 21511 - DNA, 73 bp, Homo sapiens
  chr15:70339878-70339951
  hypo
agcctggggaccgccccgggaatgggcaccagcattctcctcttcccgcccagccccccgactccctccctgg

SEQ ID NO: 21512 - DNA, 44 bp, Homo sapiens
  chr15:70340034-70340078
  hypo
agattgaagatctcctcgtcccacctaaacgtgttaagcttaaa

SEQ ID NO: 21513 - DNA, 31 bp, Homo sapiens
  chr15:70539034-70539065
  hypo
gagccagctcctcagccgcatgaccttaggt

SEQ ID NO: 21514 - DNA, 37 bp, Homo sapiens
  chr15:70707943-70707980
  hypo
caatgaaactcacagccgtaaacgagtttattattgt

SEQ ID NO: 21515 - DNA, 31 bp, Homo sapiens
  chr15:70921645-70921676
  hypo
tccctgcatctgacagcgctgcaggcggccc

SEQ ID NO: 21516 - DNA, 31 bp, Homo sapiens
  chr15:70926694-70926725
  hypo
gaggcgctggatgctgcggtaaggccttggc

SEQ ID NO: 21517 - DNA, 17 bp, Homo sapiens
  chr15:71047984-71048001
  hypo
agcgacaagagggagac

SEQ ID NO: 21518 - DNA, 31 bp, Homo sapiens
  chr15:71048053-71048084
  hypo
caatccccaagctgcacgccctctaactccc

SEQ ID NO: 21519 - DNA, 31 bp, Homo sapiens
  chr15:71113899-71113930
  hypo
caggcatgagccaccccgcctggccactatt

SEQ ID NO: 21520 - DNA, 36 bp, Homo sapiens
  chr15:71124500-71124536
  hypo
gggagagcaggggactcgtaccggggcttttctcct

SEQ ID NO: 21521 - DNA, 31 bp, Homo sapiens
  chr15:71152148-71152179
  hypo
tatggtgtggcagctgcgtgagtaccaggag

SEQ ID NO: 21522 - DNA, 44 bp, Homo sapiens; identical to SEQ ID NO: 5368
  chr15:71184310-71184354
  hypo

SEQ ID NO: 21523 - DNA, 43 bp, Homo sapiens; identical to SEQ ID NO: 5369
  chr15:71184362-71184405
  hypo

SEQ ID NO: 21524 - DNA, 31 bp, Homo sapiens
  chr15:71509041-71509072
  hypo
tgagcaccctctaggacggtctgctcctaaa

SEQ ID NO: 21525 - DNA, 39 bp, Homo sapiens
  chr15:71880350-71880389
  hypo
agaatcttgtcatggccgggcgcggtggctcacgcctgt

SEQ ID NO: 21526 - DNA, 3 bp, Homo sapiens
  chr15:71966263-71966266
  hypo
tac

SEQ ID NO: 21527 - DNA, 31 bp, Homo sapiens
  chr15:71966332-71966363
  hypo
gcacccaactgtctgtcggagtagttgcctc

SEQ ID NO: 21528 - DNA, 56 bp, Homo sapiens
  chr15:72042475-72042531
  hypo
tggatcttaggagacacgatgcagcccatgagcccccaccccgtccccactcccag

SEQ ID NO: 21529 - DNA, 31 bp, Homo sapiens
  chr15:72042567-72042598
  hypo
aagaaggaccctttcacgcagtttggggata

SEQ ID NO: 21530 - DNA, 31 bp, Homo sapiens
  chr15:72042601-72042632
  hypo
gcagacatgccccatacggccacattggctg

SEQ ID NO: 21531 - DNA, 31 bp, Homo sapiens
  chr15:72042644-72042675
  hypo
cagtgtccattctgaccggtcaatggccacc

SEQ ID NO: 21532 - DNA, 31 bp, Homo sapiens
  chr15:72462557-72462588
  hypo
ccagtgccaggcagctcgtaggccaggctga

SEQ ID NO: 21533 - DNA, 40 bp, Homo sapiens
  chr15:72462629-72462669
  hypo
ggaggaccctgagactcgcttatgccgagaacaaaagtgt

SEQ ID NO: 21534 - DNA, 36 bp, Homo sapiens
  chr15:72471188-72471224
  hypo
acagttgtgagccacccggcccggctgtcttgcact

SEQ ID NO: 21535 - DNA, 63 bp, Homo sapiens; identical to SEQ ID NO: 5377
  chr15:72564619-72564682
  hypo

SEQ ID NO: 21536 - DNA, 126 bp, Homo sapiens; identical to SEQ ID NO: 5378
  chr15:72564700-72564826
  hypo

SEQ ID NO: 21537 - DNA, 333 bp, Homo sapiens; identical to SEQ ID NO: 5379
  chr15:72564845-72565178
  hypo

SEQ ID NO: 21538 - DNA, 31 bp, Homo sapiens; identical to SEQ ID NO: 5380
  chr15:72827182-72827213
  hypo

SEQ ID NO: 21539 - DNA, 31 bp, Homo sapiens
  chr15:72967696-72967727
  hypo
atgctctgtacttttccgtatcttaaaaaat

SEQ ID NO: 21540 - DNA, 89 bp, Homo sapiens; identical to SEQ ID NO: 5381
  chr15:73344007-73344096
  hypo

SEQ ID NO: 21541 - DNA, 31 bp, Homo sapiens
  chr15:73996272-73996303
  hypo
gcagcttcacctgcttcgtgagcatccggga

SEQ ID NO: 21542 - DNA, 31 bp, Homo sapiens
  chr15:74043427-74043458
  hypo
tcgtcactgggctgcccgaggtccggggcgc

SEQ ID NO: 21543 - DNA, 31 bp, Homo sapiens
  chr15:74067232-74067263
  hypo
ggatgcttgaaggctccgtctttgcaattaa

SEQ ID NO: 21544 - DNA, 31 bp, Homo sapiens
  chr15:74185285-74185316
  hypo
gaagctaattatatggcggtgttggtggcag

SEQ ID NO: 21545 - DNA, 31 bp, Homo sapiens
  chr15:74188045-74188076
  hypo
gctgtctctttacgtacgggcatggctgaca

SEQ ID NO: 21546 - DNA, 71 bp, Homo sapiens
  chr15:74188134-74188205
  hypo
aagaggagggattgttcggacacctggcttgccgatgctctgctctgagaaatctgcgcaaagatgtctgt

SEQ ID NO: 21547 - DNA, 31 bp, Homo sapiens
  chr15:74188216-74188247
  hypo
gatattcttctctgcccgggctcctcactca

SEQ ID NO: 21548 - DNA, 31 bp, Homo sapiens
  chr15:74230145-74230176
  hypo
tttgggtggtgagacccgccccagcctaccc

SEQ ID NO: 21549 - DNA, 31 bp, Homo sapiens
  chr15:74246982-74247013
  hypo
ttgctgtcacctggctcgggcccctccctag

SEQ ID NO: 21550 - DNA, 31 bp, Homo sapiens
  chr15:74634325-74634356
  hypo
tgtttgttgtttaaatcgcccagtcaatgcc

SEQ ID NO: 21551 - DNA, 31 bp, Homo sapiens
  chr15:74636045-74636076
  hypo
gcgcccattgacatagcgtgggacaaaggag

SEQ ID NO: 21552 - DNA, 44 bp, Homo sapiens; identical to SEQ ID NO: 5398
  chr15:74725611-74725655
  hypo

SEQ ID NO: 21553 - DNA, 31 bp, Homo sapiens
  chr15:74911444-74911475
  hypo
cctcttcaggagcaaccgggaagccccagca

SEQ ID NO: 21554 - DNA, 47 bp, Homo sapiens
  chr15:75091222-75091269
  hypo
caactacgtccagaagcgggagggcgtgaaggcgggtaccaaactca

SEQ ID NO: 21555 - DNA, 37 bp, Homo sapiens
  chr15:75091393-75091430
  hypo
gaggaggtgcagggtgcgggtgcgggacctcacagag

SEQ ID NO: 21556 - DNA, 31 bp, Homo sapiens
  chr15:75094849-75094880
  hypo
tgtgacggctggcctccgcctgggtcatggg

SEQ ID NO: 21557 - DNA, 18 bp, Homo sapiens
  chr15:75205463-75205481
  hypo
tgccgtctcaaacaaaac

SEQ ID NO: 21558 - DNA, 31 bp, Homo sapiens
  chr15:75205520-75205551
  hypo
agcaacacactaaacccgtttaagacaaagg

SEQ ID NO: 21559 - DNA, 33 bp, Homo sapiens
  chr15:75413014-75413047
  hypo
ggcttgagccaccgcgcccggcctattgttttt

SEQ ID NO: 21560 - DNA, 31 bp, Homo sapiens
  chr15:75498357-75498388
  hypo
ggggcctaggagggctcgaagccttcacagc

SEQ ID NO: 21561 - DNA, 31 bp, Homo sapiens
  chr15:75498430-75498461
  hypo
gtatggcaagctgccccgcttagagacagac

SEQ ID NO: 21562 - DNA, 31 bp, Homo sapiens
  chr15:75594677-75594708
  hypo
cagctctggtctggaccgtgcccctctccct

SEQ ID NO: 21563 - DNA, 42 bp, Homo sapiens
  chr15:75594785-75594827
  hypo
ccctgcccccatgaggcggtgcacgcacgttgttgatcatga

SEQ ID NO: 21564 - DNA, 99 bp, Homo sapiens; identical to SEQ ID NO: 5400
  chr15:75640557-75640656
  hypo

SEQ ID NO: 21565 - DNA, 37 bp, Homo sapiens; identical to SEQ ID NO: 5401
  chr15:75640774-75640811
  hypo

SEQ ID NO: 21566 - DNA, 31 bp, Homo sapiens; identical to SEQ ID NO: 5402
  chr15:75745114-75745145
  hypo

SEQ ID NO: 21567 - DNA, 59 bp, Homo sapiens
  chr15:75761008-75761067
  hypo
tgatccatggcttcagcgtaactgatggcaacctataggctcagcggtgtccagggtag

SEQ ID NO: 21568 - DNA, 31 bp, Homo sapiens
  chr15:75790554-75790585
  hypo
tttctcccttcctatacgaatatgcctagtg

SEQ ID NO: 21569 - DNA, 31 bp, Homo sapiens
  chr15:75949259-75949290
  hypo
gatcagagccctcacacgctgtcctctgctc

SEQ ID NO: 21570 - DNA, 42 bp, Homo sapiens
  chr15:75949423-75949465
  hypo
gaaccacttccaccagcgccgtgagctcgacttcaagcacat

SEQ ID NO: 21571 - DNA, 31 bp, Homo sapiens
  chr15:75968616-75968647
  hypo
cggcacactgcctgtgcggttggccagctcg

SEQ ID NO: 21572 - DNA, 31 bp, Homo sapiens; identical to SEQ ID NO: 5407
  chr15:75976253-75976284
  hypo

SEQ ID NO: 21573 - DNA, 60 bp, Homo sapiens; identical to SEQ ID NO: 5408
  chr15:75976296-75976356
  hypo

SEQ ID NO: 21574 - DNA, 44 bp, Homo sapiens
  chr15:75981459-75981503
  hypo
ctggcctgcagtccatcgctgacccggaacgtcaagtcctgtgc

SEQ ID NO: 21575 - DNA, 31 bp, Homo sapiens
  chr15:75990979-75991010
  hypo
tgtgggccctggataccgagacataactggg

SEQ ID NO: 21576 - DNA, 31 bp, Homo sapiens
  chr15:75997149-75997180
  hypo
ccggatttctgctcctcgtgatgcagccacc

SEQ ID NO: 21577 - DNA, 31 bp, Homo sapiens
  chr15:75997226-75997257
  hypo
caggtgagctgtcccacgtccctgggccctg

SEQ ID NO: 21578 - DNA, 31 bp, Homo sapiens
  chr15:75997272-75997303
  hypo
ctccagagagggactcgcgaggggttggtag

SEQ ID NO: 21579 - DNA, 21 bp, Homo sapiens
  chr15:75999581-75999602
  hypo
gccaccgcgcctggcctccac

SEQ ID NO: 21580 - DNA, 44 bp, Homo sapiens
  chr15:76083846-76083890
  hypo
ccagccctggtacctgcgtcgggctgggacgctctgcacttaca

SEQ ID NO: 21581 - DNA, 31 bp, Homo sapiens
  chr15:76083897-76083928
  hypo
gtcatccatgggcccccgtgggcatgctgac

SEQ ID NO: 21582 - DNA, 104 bp, Homo sapiens
  chr15:76083929-76084033
  hypo
atggttgttttgatgtcgccgatgatgttgggcgcctccctcagcacatggtgcatgcacagcgtctcgttgcaccattttgcctgctccgtggaatcctccat

SEQ ID NO: 21583 - DNA, 38 bp, Homo sapiens
  chr15:76197435-76197473
  hypo
ttacaggcgtgagccaccgcgcccggcatgttgggcct

SEQ ID NO: 21584 - DNA, 31 bp, Homo sapiens
  chr15:76197490-76197521
  hypo
tcactattaacaacaacgctgtgcagaacct

SEQ ID NO: 21585 - DNA, 31 bp, Homo sapiens
  chr15:76197552-76197583
  hypo
ttgttgtctgttttaccgggaagacaactgg

SEQ ID NO: 21586 - DNA, 31 bp, Homo sapiens
  chr15:76845087-76845118
  hypo
cacccccagccaggaacgtcaagcactgcta

SEQ ID NO: 21587 - DNA, 31 bp, Homo sapiens
  chr15:77321762-77321793
  hypo
ttccccccagggtggccggggaagcttgaca

SEQ ID NO: 21588 - DNA, 31 bp, Homo sapiens
  chr15:77322039-77322070
  hypo
cattccagatatgtgccgtcaaagtaaacgc

SEQ ID NO: 21589 - DNA, 31 bp, Homo sapiens
  chr15:77322084-77322115
  hypo
cgccagcccttcttggcgcttcatgtgttca

SEQ ID NO: 21590 - DNA, 31 bp, Homo sapiens
  chr15:77331121-77331152
  hypo
aggtgaggagtgacttcggagcccagacttg

SEQ ID NO: 21591 - DNA, 31 bp, Homo sapiens
  chr15:77333017-77333048
  hypo
gggcaagactctgtctcggggaaaaaaaaaa

SEQ ID NO: 21592 - DNA, 20 bp, Homo sapiens
  chr15:77729918-77729938
  hypo
tttttgttttttgagacgga

SEQ ID NO: 21593 - DNA, 31 bp, Homo sapiens
  chr15:77841399-77841430
  hypo
tgaaacggagccaatgcgttctgcttcctaa

SEQ ID NO: 21594 - DNA, 56 bp, Homo sapiens
  chr15:77880952-77881008
  hypo
atggctccctggaatgcgtcttaagcagattttgtaaactacgtggggaaggaggg

SEQ ID NO: 21595 - DNA, 42 bp, Homo sapiens
  chr15:77881026-77881068
  hypo
cccaaaacttgacctacgaggctatgtcggcaaagagcaggg

SEQ ID NO: 21596 - DNA, 31 bp, Homo sapiens
  chr15:77881131-77881162
  hypo
gccagcttcttctgggcgctggctgaaggaa

SEQ ID NO: 21597 - DNA, 31 bp, Homo sapiens
  chr15:77937833-77937864
  hypo
gcgaggtggacgtgcacgcctcatggctaaa

SEQ ID NO: 21598 - DNA, 31 bp, Homo sapiens
  chr15:78165452-78165483
  hypo
ttcctgcaaggtcaagcgagaaccccctgag

SEQ ID NO: 21599 - DNA, 81 bp, Homo sapiens
  chr15:78165484-78165565
  hypo
tgttcagaaggggccacgcagcagttggccagacctggaaggccgtgcctgaccttctgcaggtcacgtctctgggggcac

SEQ ID NO: 21600 - DNA, 38 bp, Homo sapiens
  chr15:78165566-78165604
  hypo
accacaggaaaggcaacgtcaagcgatgggactgcttc

SEQ ID NO: 21601 - DNA, 59 bp, Homo sapiens
  chr15:78193840-78193899
  hypo
cctgtacctgcactcccgccctgaggcctggagcgatgccttctcgctggatgtggcct

SEQ ID NO: 21602 - DNA, 107 bp, Homo sapiens
  chr15:78267622-78267729
  hypo
ccagccgggcctgggccgccctccccagggcccccgcctccatgctcactgcctcgtggtgttggggctgggcagccttgtcttcgccacaccgcagcagcaggagt

SEQ ID NO: 21603 - DNA, 37 bp, Homo sapiens
  chr15:78267758-78267795
  hypo
tgtctgccagtttccccgccatcgctgccagggaatg

SEQ ID NO: 21604 - DNA, 31 bp, Homo sapiens
  chr15:78268479-78268510
  hypo
agtgccgcctccagtacggggcctactctgc

SEQ ID NO: 21605 - DNA, 38 bp, Homo sapiens
  chr15:78285343-78285381
  hypo
gctctccgcccagccacggcgcccgctcccgaggccat

SEQ ID NO: 21606 - DNA, 38 bp, Homo sapiens
  chr15:78487123-78487161
  hypo
tgccctgggcagagctcgcagcccgtctggtgctgaca

SEQ ID NO: 21607 - DNA, 39 bp, Homo sapiens
  chr15:78498324-78498363
  hypo
atctggaactcacccacgctgtagcgcagaggctccccc

SEQ ID NO: 21608 - DNA, 31 bp, Homo sapiens
  chr15:78498403-78498434
  hypo
ggcagagcatggcccccgagccaggtctgtg

SEQ ID NO: 21609 - DNA, 31 bp, Homo sapiens
  chr15:78498469-78498500
  hypo
agcacctggggtccctcggtggcctccgctc

SEQ ID NO: 21610 - DNA, 31 bp, Homo sapiens
  chr15:78510230-78510261
  hypo
tgcgcatatattaaatcgtaatccaggtgtt

SEQ ID NO: 21611 - DNA, 53 bp, Homo sapiens
  chr15:78526012-78526065
  hypo
tggggtcctggagttccgtgtgtgtgcgtgtgcgcgtgcgcctgccttcttcc

SEQ ID NO: 21612 - DNA, 31 bp, Homo sapiens
  chr15:78554756-78554787
  hypo
gatcttaaggatgtgacgttgaattattaga

SEQ ID NO: 21613 - DNA, 150 bp, Homo sapiens
  chr15:78566543-78566693
  hypo
ggtgggaagaagggatcggtggagaagtgcccgctgtgcaaggggcgggggatgcagatccacatccagcagatcgggccgggcatggtacagcagatccagaccgtgtgcatcgagtgcaagggccagggtgagcgcatcaaccccaag

SEQ ID NO: 21614 - DNA, 33 bp, Homo sapiens
  chr15:78570999-78571032
  hypo
tcttttttttttgagacggagtctcgctctgtc

SEQ ID NO: 21615 - DNA, 31 bp, Homo sapiens
  chr15:78577625-78577656
  hypo
tgtgaacacaagtcctcgttccaacatccca

SEQ ID NO: 21616 - DNA, 83 bp, Homo sapiens
  chr15:78577661-78577744
  hypo
ttacacttttgtcagacgaactattttaaaaagtgaacattagtatcggtttgaagttggaaggacttcgaccaaaaatcctt

SEQ ID NO: 21617 - DNA, 26 bp, Homo sapiens
  chr15:78596057-78596083
  hypo
gccaccgcgcccggccactgtttaca

SEQ ID NO: 21618 - DNA, 38 bp, Homo sapiens
  chr15:78596095-78596133
  hypo
tagctgctgccatcaccgggctgcggcagggaggcaca

SEQ ID NO: 21619 - DNA, 31 bp, Homo sapiens
  chr15:78596187-78596218
  hypo
caggtgctgctgcagccgcccaaacagcagt

SEQ ID NO: 21620 - DNA, 31 bp, Homo sapiens
  chr15:78605856-78605887
  hypo
accggggaggcagaggcggggtgggtgctgg

SEQ ID NO: 21621 - DNA, 31 bp, Homo sapiens
  chr15:78612008-78612039
  hypo
acatttcccaaacagacgcttccttctccca

SEQ ID NO: 21622 - DNA, 31 bp, Homo sapiens
  chr15:78615520-78615551
  hypo
gattgagcacccgtgacgagctggcattgtg

SEQ ID NO: 21623 - DNA, 34 bp, Homo sapiens
  chr15:78698063-78698097
  hypo
ggctgtgaggggataccgccggggctgcatgctc

SEQ ID NO: 21624 - DNA, 31 bp, Homo sapiens
  chr15:78698098-78698129
  hypo
acagagccaggaggagcgggcaacaggcagc

SEQ ID NO: 21625 - DNA, 62 bp, Homo sapiens
  chr15:78698142-78698204
  hypo
tgggtgcagctgcagccgcccaagttgggtttgtggacccagacttccgtgtgctcttgggg

SEQ ID NO: 21626 - DNA, 31 bp, Homo sapiens
  chr15:78698221-78698252
  hypo
actgcccttgcaggctcggaagtgcctcttt

SEQ ID NO: 21627 - DNA, 50 bp, Homo sapiens
  chr15:78699263-78699313
  hypo
tcgctcagcttgctcacgtacccctgaccactccacgcctgactccagtc

SEQ ID NO: 21628 - DNA, 31 bp, Homo sapiens
  chr15:78699374-78699405
  hypo
acctgagtgggtggaacgagcccagcagccc

SEQ ID NO: 21629 - DNA, 37 bp, Homo sapiens
  chr15:78699415-78699452
  hypo
tgggcaaaggcaccatcggccacggctctctggccag

SEQ ID NO: 21630 - DNA, 31 bp, Homo sapiens
  chr15:78832918-78832949
  hypo
ccgctttcccattgggcgggggtcgtgaacg

SEQ ID NO: 21631 - DNA, 48 bp, Homo sapiens
  chr15:79050494-79050542
  hypo
ggctacattcacctttcgtccagggttgtcatacgctggagagtagaa

SEQ ID NO: 21632 - DNA, 31 bp, Homo sapiens
  chr15:79050556-79050587
  hypo
cctgtaggctgcagggcgagctctctgaacc

SEQ ID NO: 21633 - DNA, 31 bp, Homo sapiens
  chr15:79050597-79050628
  hypo
ccacctggagaaggggcgtaacaccttccag

SEQ ID NO: 21634 - DNA, 31 bp, Homo sapiens
  chr15:79066666-79066697
  hypo
tcagcaacagctggggcgggagtatggaggc

SEQ ID NO: 21635 - DNA, 31 bp, Homo sapiens
  chr15:79138735-79138766
  hypo
ttgaaaagtctgctatcgatttaattgtttt

SEQ ID NO: 21636 - DNA, 27 bp, Homo sapiens
  chr15:79152040-79152067
  hypo
agccaccgcgcccggcctttgtttttt

SEQ ID NO: 21637 - DNA, 31 bp, Homo sapiens
  chr15:79163911-79163942
  hypo
tggagacaaaggtttgcgtaggaggataaag

SEQ ID NO: 21638 - DNA, 31 bp, Homo sapiens
  chr15:79164005-79164036
  hypo
ggactttgagatttatcgtctaaagttcatt

SEQ ID NO: 21639 - DNA, 31 bp, Homo sapiens
  chr15:79218011-79218042
  hypo
ggaccacggggtacagcgtggacctactcat

SEQ ID NO: 21640 - DNA, 72 bp, Homo sapiens
  chr15:79218146-79218218
  hypo
ggttataaaccatggacgggtaggtcccagatggcggtggaaacgagaagacccatccgagggctgtgtgac

SEQ ID NO: 21641 - DNA, 88 bp, Homo sapiens; identical to SEQ ID NO: 5416
  chr15:79237307-79237395
  hypo

SEQ ID NO: 21642 - DNA, 31 bp, Homo sapiens
  chr15:79240714-79240745
  hypo
agcataggagaagagtcggagagagggggca

SEQ ID NO: 21643 - DNA, 31 bp, Homo sapiens
  chr15:79288611-79288642
  hypo
aggagagtggtacacacggtggggaatgagg

SEQ ID NO: 21644 - DNA, 31 bp, Homo sapiens
  chr15:79891742-79891773
  hypo
gtgattagatttgacacggagagaaagtgga

SEQ ID NO: 21645 - DNA, 37 bp, Homo sapiens
  chr15:80451293-80451330
  hypo
aaattaaaaaacctctcggctcacgcctgtaacccca

SEQ ID NO: 21646 - DNA, 31 bp, Homo sapiens
  chr15:80907326-80907357
  hypo
ctccctcagaatctgtcgtccagcctttgag

SEQ ID NO: 21647 - DNA, 31 bp, Homo sapiens; identical to SEQ ID NO: 5426
  chr15:81294106-81294137
  hypo

SEQ ID NO: 21648 - DNA, 50 bp, Homo sapiens; identical to SEQ ID NO: 5427
  chr15:81294176-81294226
  hypo

SEQ ID NO: 21649 - DNA, 40 bp, Homo sapiens
  chr15:81605678-81605718
  hypo
ttctgtgggaggtaaccgctgaggtcggtatggaagaatg

SEQ ID NO: 21650 - DNA, 67 bp, Homo sapiens; identical to SEQ ID NO: 5428
  chr15:82339903-82339970
  hypo

SEQ ID NO: 21651 - DNA, 31 bp, Homo sapiens
  chr15:83459216-83459247
  hypo
cctgcttcttggagaacgagattaacacagt

SEQ ID NO: 21652 - DNA, 64 bp, Homo sapiens
  chr15:83523580-83523644
  hypo
ggggtgggtgctgtcccgtctggctccgcccgcgtggggaaggggactccgccatccctcagca

SEQ ID NO: 21653 - DNA, 31 bp, Homo sapiens
  chr15:83523645-83523676
  hypo
acccctggggggcccacgccctctccccaca

SEQ ID NO: 21654 - DNA, 4 bp, Homo sapiens
  chr15:83655930-83655934
  hypo
agtg

SEQ ID NO: 21655 - DNA, 31 bp, Homo sapiens
  chr15:83665102-83665133
  hypo
aaataataaagctggcgcggtggctcacgcc

SEQ ID NO: 21656 - DNA, 30 bp, Homo sapiens
  chr15:84683975-84684005
  hypo
atgaaccactgcgcccggtcagatgttagt

SEQ ID NO: 21657 - DNA, 31 bp, Homo sapiens
  chr15:84862581-84862612
  hypo
cctggtgatggtgctgcgtggcatcttggca

SEQ ID NO: 21658 - DNA, 83 bp, Homo sapiens
  chr15:85401075-85401158
  hypo
cctcccgccgcctcaccggcctcctggaccgtgaggtgcaggctggccgccaggcccttgctgctgcccgaggctcctggggt

SEQ ID NO: 21659 - DNA, 31 bp, Homo sapiens
  chr15:85436148-85436179
  hypo
tagctcaggtcctgcccgtccccaaaccaat

SEQ ID NO: 21660 - DNA, 65 bp, Homo sapiens; identical to SEQ ID NO: 5430
  chr15:85525135-85525200
  hypo

SEQ ID NO: 21661 - DNA, 105 bp, Homo sapiens; identical to SEQ ID NO: 5431
  chr15:85525286-85525391
  hypo

SEQ ID NO: 21662 - DNA, 31 bp, Homo sapiens
  chr15:85695658-85695689
  hypo
gtaagtaaagtgttttcgtgagttttgtgag

SEQ ID NO: 21663 - DNA, 31 bp, Homo sapiens
  chr15:85695690-85695721
  hypo
tattctagcaaattatcgaatctgaggaggg

SEQ ID NO: 21664 - DNA, 41 bp, Homo sapiens
  chr15:85695767-85695808
  hypo
gagacccaggtgggcacggtggctcacgcctataatcccag

SEQ ID NO: 21665 - DNA, 31 bp, Homo sapiens
  chr15:85725527-85725558
  hypo
cagcagtgaactctggcggaacaccaaagat

SEQ ID NO: 21666 - DNA, 31 bp, Homo sapiens
  chr15:85725564-85725595
  hypo
aataagagaagagatacgtccaattaaagga

SEQ ID NO: 21667 - DNA, 9 bp, Homo sapiens
  chr15:85774089-85774098
  hypo
aaaaaaaaa

SEQ ID NO: 21668 - DNA, 31 bp, Homo sapiens
  chr15:85774101-85774132
  hypo
aaagtccaggtgtcttcgcctagctttgtca

SEQ ID NO: 21669 - DNA, 33 bp, Homo sapiens
  chr15:85886326-85886359
  hypo
cttagcaaatacttggcgaattaaagaatgtat

SEQ ID NO: 21670 - DNA, 31 bp, Homo sapiens
  chr15:86332521-86332552
  hypo
ctcagccctgcttccccgtgggaggagccat

SEQ ID NO: 21671 - DNA, 31 bp, Homo sapiens
  chr15:86332565-86332596
  hypo
caggctggtgctcagtcgcctcctcctgccc

SEQ ID NO: 21672 - DNA, 31 bp, Homo sapiens
  chr15:89404007-89404038
  hypo
gcgggtcacacctctccgctcctggtgagga

SEQ ID NO: 21673 - DNA, 31 bp, Homo sapiens
  chr15:89404047-89404078
  hypo
tggggccatcttgtatcgtgcagagtgaacc

SEQ ID NO: 21674 - DNA, 31 bp, Homo sapiens
  chr15:89404091-89404122
  hypo
tccatgcttgggtctgcgtggggtttgggtc

SEQ ID NO: 21675 - DNA, 55 bp, Homo sapiens
  chr15:89404139-89404194
  hypo
gaaatgacacaaacaacggtaatcacccagcacagggattcgtggatgtagggca

SEQ ID NO: 21676 - DNA, 31 bp, Homo sapiens
  chr15:89421231-89421262
  hypo
aagcggctctgcgggtcggggaagccaaagc

SEQ ID NO: 21677 - DNA, 31 bp, Homo sapiens
  chr15:89460438-89460469
  hypo
ccatctgccctttttgcggaaattgacaagt

SEQ ID NO: 21678 - DNA, 31 bp, Homo sapiens
  chr15:89538331-89538362
  hypo
accaagtttacagcaccgagctgggtgcagt

SEQ ID NO: 21679 - DNA, 19 bp, Homo sapiens
  chr15:89714323-89714342
  hypo
gcaacgagcaaaactccat

SEQ ID NO: 21680 - DNA, 19 bp, Homo sapiens
  chr15:90109241-90109260
  hypo
tgcccggcccattctcgct

SEQ ID NO: 21681 - DNA, 34 bp, Homo sapiens
  chr15:90192227-90192261
  hypo
gggtatgtggctgccccggcgctgagggtccccc

SEQ ID NO: 21682 - DNA, 96 bp, Homo sapiens
  chr15:90192555-90192651
  hypo
tcatccaggccctccacgtcgacctccttcaccccgcacagcactgcgggcacagaaggccgtgagccccagggcaggggccgccagactgaccag

SEQ ID NO: 21683 - DNA, 54 bp, Homo sapiens
  chr15:90192707-90192761
  hypo
tccctccccatgcccacggggtactgcccttcctagttccggcttgaggggctc

SEQ ID NO: 21684 - DNA, 59 bp, Homo sapiens
  chr15:90192965-90193024
  hypo
cctcaccaacattcccgcgctcatcttcccggagctggatgtcacggctggcagtgccc

SEQ ID NO: 21685 - DNA, 31 bp, Homo sapiens
  chr15:90193326-90193357
  hypo
cttggccatgctccagcgtggtcaggcagaa

SEQ ID NO: 21686 - DNA, 31 bp, Homo sapiens
  chr15:90214506-90214537
  hypo
ccagaaaccccacctccgtttagcttcacag

SEQ ID NO: 21687 - DNA, 31 bp, Homo sapiens
  chr15:90214565-90214596
  hypo
gggagcaggcactctccgccagccttggagg

SEQ ID NO: 21688 - DNA, 31 bp, Homo sapiens
  chr15:90214611-90214642
  hypo
cacagacttccagtcacggcatcagcagccc

SEQ ID NO: 21689 - DNA, 58 bp, Homo sapiens
  chr15:90214648-90214706
  hypo
tctcctccctgagaggcggtgacgacagagtgcagggaggcttcgagaggtgggaagg

SEQ ID NO: 21690 - DNA, 31 bp, Homo sapiens
  chr15:90214719-90214750
  hypo
ggggggtactggagggcggggatcttttcct

SEQ ID NO: 21691 - DNA, 31 bp, Homo sapiens
  chr15:90342640-90342671
  hypo
ggtggcagacactcaccgagtggtctctctg

SEQ ID NO: 21692 - DNA, 34 bp, Homo sapiens
  chr15:90342687-90342721
  hypo
ttcctccagttctcttcgtcgtagttcacccggt

SEQ ID NO: 21693 - DNA, 31 bp, Homo sapiens
  chr15:90344911-90344942
  hypo
attctcgcctcgaccccggggggccacttgt

SEQ ID NO: 21694 - DNA, 31 bp, Homo sapiens
  chr15:90346603-90346634
  hypo
aggcccgggtcaagggcgaggggcagaagga

SEQ ID NO: 21695 - DNA, 31 bp, Homo sapiens
  chr15:90448918-90448949
  hypo
acaccttcccatccctcggacctttcagtgg

SEQ ID NO: 21696 - DNA, 31 bp, Homo sapiens
  chr15:90451517-90451548
  hypo
acgacatgaggaagcccgtgttcaccttcct

SEQ ID NO: 21697 - DNA, 84 bp, Homo sapiens
  chr15:90451570-90451654
  hypo
atttcatttcccttggcgtcgaatttacggcgatggatgtgactgggccggatatacagcacgtagtagcgctcctggggccag

SEQ ID NO: 21698 - DNA, 31 bp, Homo sapiens; identical to SEQ ID NO: 5434
  chr15:90455904-90455935
  hypo

SEQ ID NO: 21699 - DNA, 135 bp, Homo sapiens; identical to SEQ ID NO: 5435
  chr15:90456073-90456208
  hypo

SEQ ID NO: 21700 - DNA, 31 bp, Homo sapiens
  chr15:90590717-90590748
  hypo
ttaaagtccatttctacgcctcacagactaa

SEQ ID NO: 21701 - DNA, 21 bp, Homo sapiens
  chr15:90741432-90741453
  hypo
gccaccgcgcctggctggtaa

SEQ ID NO: 21702 - DNA, 31 bp, Homo sapiens
  chr15:90753832-90753863
  hypo
atgacatgacttaatccgtttaaagggctga

SEQ ID NO: 21703 - DNA, 31 bp, Homo sapiens
  chr15:90755833-90755864
  hypo
ggagtgagtgcgcaagcgtggacaagccctg

SEQ ID NO: 21704 - DNA, 74 bp, Homo sapiens; identical to SEQ ID NO: 5436
  chr15:90792592-90792666
  hypo

SEQ ID NO: 21705 - DNA, 75 bp, Homo sapiens; identical to SEQ ID NO: 5437
  chr15:90792735-90792810
  hypo

SEQ ID NO: 21706 - DNA, 31 bp, Homo sapiens
  chr15:90806188-90806219
  hypo
accttgtagctgctgccgggacagctggaca

SEQ ID NO: 21707 - DNA, 31 bp, Homo sapiens
  chr15:90806244-90806275
  hypo
agaggaggagctggagcggatgaaggccctg

SEQ ID NO: 21708 - DNA, 61 bp, Homo sapiens
  chr15:90806280-90806341
  hypo
aagggagactctcatccgaagcctgggtattgtagagcagctcacccgtctgcagcaccct

SEQ ID NO: 21709 - DNA, 31 bp, Homo sapiens
  chr15:90806358-90806389
  hypo
aaaacttcatgagagtcgggtgagggtccct

SEQ ID NO: 21710 - DNA, 31 bp, Homo sapiens
  chr15:90835325-90835356
  hypo
acaacaagaccgttgccggagtccataccac

SEQ ID NO: 21711 - DNA, 27 bp, Homo sapiens
  chr15:90896204-90896231
  hypo
cttttttttttttagacggaatttcgc

SEQ ID NO: 21712 - DNA, 31 bp, Homo sapiens
  chr15:91166197-91166228
  hypo
ccaaaactccacagttcgcccagtcctactt

SEQ ID NO: 21713 - DNA, 31 bp, Homo sapiens
  chr15:91166886-91166917
  hypo
ccaagtctgttagccacgctgtcctaagaaa

SEQ ID NO: 21714 - DNA, 54 bp, Homo sapiens
  chr15:91189345-91189399
  hypo
ctgggccagctcccgccgtgtcccagctgctccccattccgtcccatggcccgt

SEQ ID NO: 21715 - DNA, 31 bp, Homo sapiens
  chr15:91192933-91192964
  hypo
gcctggcaaaggaacacgtgttttttttttc

SEQ ID NO: 21716 - DNA, 28 bp, Homo sapiens
  chr15:91313687-91313715
  hypo
gagccaccgtgcccggccaatccccaca

SEQ ID NO: 21717 - DNA, 26 bp, Homo sapiens
  chr15:91328773-91328799
  hypo
tttttttttttttttccggagacaga

SEQ ID NO: 21718 - DNA, 44 bp, Homo sapiens
  chr15:91365250-91365294
  hypo
tcctacctgtgcagaacgtcagtcccagccgagaaagcaagggc

SEQ ID NO: 21719 - DNA, 31 bp, Homo sapiens
  chr15:91419630-91419661
  hypo
tctcaggagcccctctcgcctcctgctccac

SEQ ID NO: 21720 - DNA, 62 bp, Homo sapiens
  chr15:91425021-91425083
  hypo
tggcaggaggagtgcccgtctgactcagaagaggacgagggccggggcgagaggaccgcctt

SEQ ID NO: 21721 - DNA, 70 bp, Homo sapiens
  chr15:91840255-91840325
  hypo
gcttcttctgcctgatcgttgggcgcacgctccttctgcctgatcgttgggcgcacgctccttctgcctg

SEQ ID NO: 21722 - DNA, 31 bp, Homo sapiens
  chr15:92006983-92007014
  hypo
cttgtacagatatcttcgtatacatgtttga

SEQ ID NO: 21723 - DNA, 18 bp, Homo sapiens
  chr15:92238882-92238900
  hypo
actcgttggtgctgtcct

SEQ ID NO: 21724 - DNA, 31 bp, Homo sapiens
  chr15:92279572-92279603
  hypo
aaaaaaatagtgcacccggcttgatgaatag

SEQ ID NO: 21725 - DNA, 31 bp, Homo sapiens
  chr15:92621960-92621991
  hypo
tgtctcagtttccttacgttaaaatgggagt

SEQ ID NO: 21726 - DNA, 31 bp, Homo sapiens
  chr15:92979028-92979059
  hypo
ctttgatcagggacaccgtggagtcagcaac

SEQ ID NO: 21727 - DNA, 31 bp, Homo sapiens
  chr15:93153519-93153550
  hypo
ggctctgctcaaatgacgcaaggacagtcac

SEQ ID NO: 21728 - DNA, 108 bp, Homo sapiens
  chr15:93153598-93153706
  hypo
atactctggtcctgatcgctgggcttggcagggagcaggcgctccctggttgccatgcagaaacaatgacgggtcacagcaagtggggcccagcgcctaggcgggctg

SEQ ID NO: 21729 - DNA, 40 bp, Homo sapiens
  chr15:93176137-93176177
  hypo
cctaagactctctgcacgaaggctgcgatatgtatcagaa

SEQ ID NO: 21730 - DNA, 31 bp, Homo sapiens
  chr15:93176181-93176212
  hypo
gctggaaggtctaggacgccactgggaataa

SEQ ID NO: 21731 - DNA, 31 bp, Homo sapiens
  chr15:93206673-93206704
  hypo
ccagcgagcaaccccacggagtgttccagcc

SEQ ID NO: 21732 - DNA, 18 bp, Homo sapiens
  chr15:93364650-93364668
  hypo
tctcgggggaaaaaaaaa

SEQ ID NO: 21733 - DNA, 31 bp, Homo sapiens
  chr15:93433861-93433892
  hypo
ctaaaatcctaaacttcgttgccttctaaaa

SEQ ID NO: 21734 - DNA, 31 bp, Homo sapiens
  chr15:94048804-94048835
  hypo
gcctgggttttacttgcgtccactgggcttg

SEQ ID NO: 21735 - DNA, 31 bp, Homo sapiens
  chr15:95019574-95019605
  hypo
gagcgtgtgtttctgtcgccctgctgctggg

SEQ ID NO: 21736 - DNA, 31 bp, Homo sapiens; identical to SEQ ID NO: 5439
  chr15:96873708-96873739
  hypo

SEQ ID NO: 21737 - DNA, 71 bp, Homo sapiens; identical to SEQ ID NO: 5440
  chr15:96873742-96873813
  hypo

SEQ ID NO: 21738 - DNA, 83 bp, Homo sapiens; identical to SEQ ID NO: 5441
  chr15:96873909-96873992
  hypo

SEQ ID NO: 21739 - DNA, 36 bp, Homo sapiens; identical to SEQ ID NO: 5442
  chr15:96874394-96874430
  hypo

SEQ ID NO: 21740 - DNA, 31 bp, Homo sapiens
  chr15:97308493-97308524
  hypo
tgacactgcccagacccgtttctaaaaatca

SEQ ID NO: 21741 - DNA, 74 bp, Homo sapiens
  chr15:98292426-98292500
  hypo
agtggacacgaacacccgccattgctatgcagcgggatgtctgcttagcaccagcaaagcgtttgggaataagt

SEQ ID NO: 21742 - DNA, 31 bp, Homo sapiens
  chr15:98292553-98292584
  hypo
aggtctccaacagctccgctcacactgaata

SEQ ID NO: 21743 - DNA, 31 bp, Homo sapiens
  chr15:98292608-98292639
  hypo
ttacatctgctgcaggcggcagggaaaatga

SEQ ID NO: 21744 - DNA, 19 bp, Homo sapiens
  chr15:98503857-98503876
  hypo
gcagctgaccaatggccgc

SEQ ID NO: 21745 - DNA, 31 bp, Homo sapiens
  chr15:98512522-98512553
  hypo
acatggaatgggaaaacgctaaaaatcccac

SEQ ID NO: 21746 - DNA, 31 bp, Homo sapiens
  chr15:99107215-99107246
  hypo
cattccagagctaccacgtatcagctacata

SEQ ID NO: 21747 - DNA, 36 bp, Homo sapiens; identical to SEQ ID NO: 5449
  chr15:99191461-99191497
  hypo

SEQ ID NO: 21748 - DNA, 97 bp, Homo sapiens; identical to SEQ ID NO: 5450
  chr15:99191541-99191638
  hypo

SEQ ID NO: 21749 - DNA, 49 bp, Homo sapiens; identical to SEQ ID NO: 5451
  chr15:99192944-99192993
  hypo

SEQ ID NO: 21750 - DNA, 31 bp, Homo sapiens; identical to SEQ ID NO: 5452
  chr15:99193404-99193435
  hypo

SEQ ID NO: 21751 - DNA, 31 bp, Homo sapiens
  chr15:99222035-99222066
  hypo
gagccaccatgcctggcgtaaaaagatggtt

SEQ ID NO: 21752 - DNA, 31 bp, Homo sapiens
  chr15:99947375-99947406
  hypo
aggcccgtccccacctcgtgcccatcatggt

SEQ ID NO: 21753 - DNA, 39 bp, Homo sapiens; identical to SEQ ID NO: 5453
  chr15:99955138-99955177
  hypo

SEQ ID NO: 21754 - DNA, 61 bp, Homo sapiens; identical to SEQ ID NO: 5454
  chr15:100273843-100273904
  hypo

SEQ ID NO: 21755 - DNA, 31 bp, Homo sapiens; identical to SEQ ID NO: 5455
  chr15:100273945-100273976
  hypo

SEQ ID NO: 21756 - DNA, 31 bp, Homo sapiens
  chr15:100274138-100274169
  hypo
aggcattgccccaccccgagaagaaaacaga

SEQ ID NO: 21757 - DNA, 31 bp, Homo sapiens
  chr15:100519845-100519876
  hypo
ctggcaaaccgacaggcgactcaaagtggag

SEQ ID NO: 21758 - DNA, 41 bp, Homo sapiens
  chr15:100649030-100649071
  hypo
caccaggcaacactggcggcaggaggcggcatcactgggtg

SEQ ID NO: 21759 - DNA, 82 bp, Homo sapiens
  chr15:100649158-100649240
  hypo
aagccccaccaaggaccgaaggagaagtacgtcacctggcacttgccgtgcacgcagagatcagtctcgtagggcccgcagg

SEQ ID NO: 21760 - DNA, 31 bp, Homo sapiens
  chr15:100726605-100726636
  hypo
aaatgaaatgcaatcacgcattgctgcattt

SEQ ID NO: 21761 - DNA, 58 bp, Homo sapiens
  chr15:100726665-100726723
  hypo
atggactctgaattgccgcatacccttttccctcccatcttggcgccatctcaatgtc

SEQ ID NO: 21762 - DNA, 35 bp, Homo sapiens
  chr15:100726775-100726810
  hypo
caagcagtgattccagcgcccggggcaggcaggaa

SEQ ID NO: 21763 - DNA, 31 bp, Homo sapiens
  chr15:100740119-100740150
  hypo
gcgcctcctcacaatgcgcatcccgggcgtg

SEQ ID NO: 21764 - DNA, 31 bp, Homo sapiens
  chr15:100791526-100791557
  hypo
caaagtatcaaatgagcggtgctatggattg

SEQ ID NO: 21765 - DNA, 31 bp, Homo sapiens
  chr15:100796879-100796910
  hypo
cctggtggtgcagcttcgggccagctgtgtc

SEQ ID NO: 21766 - DNA, 35 bp, Homo sapiens
  chr15:100851743-100851778
  hypo
agttactaaagtggggcgggcgtgtgttgcataag

SEQ ID NO: 21767 - DNA, 31 bp, Homo sapiens
  chr15:100851787-100851818
  hypo
gagaactgggaagagccgacaccacttcttg

SEQ ID NO: 21768 - DNA, 31 bp, Homo sapiens
  chr15:100851858-100851889
  hypo
gattcagacacatatgcgcacacacaaaaaa

SEQ ID NO: 21769 - DNA, 36 bp, Homo sapiens
  chr15:101194865-101194901
  hypo
ccctgagcccccatggcgctacgagcccccaaagga

SEQ ID NO: 21770 - DNA, 31 bp, Homo sapiens
  chr15:101246102-101246133
  hypo
gccacagaaagggagtcgggctacggaaatg

SEQ ID NO: 21771 - DNA, 31 bp, Homo sapiens
  chr15:101251437-101251468
  hypo
attaggtgcatgctttcgtcccagttgctca

SEQ ID NO: 21772 - DNA, 41 bp, Homo sapiens
  chr15:101266999-101267040
  hypo
tgctccctcctcactgcgtggagcagcggctttgctgggct

SEQ ID NO: 21773 - DNA, 69 bp, Homo sapiens
  chr15:101267124-101267193
  hypo
gtgccatagagtagcacggataccagcacacacacagagtactcggcatgaacccggctctgttccact

SEQ ID NO: 21774 - DNA, 120 bp, Homo sapiens; identical to SEQ ID NO: 5457
  chr15:101459069-101459189
  hypo

SEQ ID NO: 21775 - DNA, 104 bp, Homo sapiens; identical to SEQ ID NO: 5458
  chr15:101459229-101459333
  hypo

SEQ ID NO: 21776 - DNA, 65 bp, Homo sapiens; identical to SEQ ID NO: 5459
  chr15:101459976-101460041
  hypo

SEQ ID NO: 21777 - DNA, 222 bp, Homo sapiens; identical to SEQ ID NO: 5460
  chr15:101460043-101460265
  hypo

SEQ ID NO: 21778 - DNA, 71 bp, Homo sapiens
  chr15:101785783-101785854
  hypo
ttaacagacaggggaacgtgaagctgccggtgcaatggaaacagtcacgcacaatccgctattgacagcca

SEQ ID NO: 21779 - DNA, 31 bp, Homo sapiens
  chr15:101785859-101785890
  hypo
atccctggaatcaatccgctattgacagcca

SEQ ID NO: 21780 - DNA, 31 bp, Homo sapiens
  chr15:101785910-101785941
  hypo
tggaatattgtttgagcgcttcaagatcttg

SEQ ID NO: 21781 - DNA, 31 bp, Homo sapiens
  chr15:101801703-101801734
  hypo
acgtataattgatatacgataaactgcacat

SEQ ID NO: 21782 - DNA, 31 bp, Homo sapiens
  chr15:101818141-101818172
  hypo
ccaagaaagtccccaccgatcctcaaggttc

SEQ ID NO: 21783 - DNA, 31 bp, Homo sapiens
  chr15:101818188-101818219
  hypo
gccttttaggaaagaacgatcatagtaactg

SEQ ID NO: 21784 - DNA, 31 bp, Homo sapiens
  chr15:101818243-101818274
  hypo
gtatcaccacaagacacgatcacagagttac

SEQ ID NO: 21785 - DNA, 34 bp, Homo sapiens
  chr15:101818295-101818329
  hypo
gttcctctgcctgcaacgccgtcccgcaccctct

SEQ ID NO: 21786 - DNA, 134 bp, Homo sapiens; identical to SEQ ID NO: 5461
  chr15:101835657-101835791
  hypo

SEQ ID NO: 21787 - DNA, 55 bp, Homo sapiens; identical to SEQ ID NO: 5462
  chr15:101835797-101835852
  hypo

SEQ ID NO: 21788 - DNA, 34 bp, Homo sapiens
  chr15:101845351-101845385
  hypo
gctgtcaggtgcagggcgccgctcctgaaacaga

SEQ ID NO: 21789 - DNA, 31 bp, Homo sapiens
  chr15:101850401-101850432
  hypo
gtgcttctccaagacccggtgtgtcagcccc

SEQ ID NO: 21790 - DNA, 31 bp, Homo sapiens
  chr15:101850558-101850589
  hypo
ggcaaagagaggtttgcggtggggctgcctg

SEQ ID NO: 21791 - DNA, 31 bp, Homo sapiens
  chr15:101859003-101859034
  hypo
gtgttggcatttatggcgtgtgacggggctg

SEQ ID NO: 21792 - DNA, 59 bp, Homo sapiens
  chr15:101862666-101862725
  hypo
aacacactccaagcagcgccaccgccctgacattcctcaggtttcgagggggttttacc

SEQ ID NO: 21793 - DNA, 31 bp, Homo sapiens
  chr15:101862751-101862782
  hypo
ttctcaggttcatccacgcactttttacagc

SEQ ID NO: 21794 - DNA, 53 bp, Homo sapiens
  chr15:101862810-101862863
  hypo
acctggagaaaaatagcgagataagaaaagagaagggacgacactgacaggaa

SEQ ID NO: 21795 - DNA, 31 bp, Homo sapiens
  chr15:101865528-101865559
  hypo
tgacttttggaactgtcggctctggcaaaac

SEQ ID NO: 21796 - DNA, 31 bp, Homo sapiens
  chr15:101911510-101911541
  hypo
tggcatttggccagctcgtttctcagttgcc

SEQ ID NO: 21797 - DNA, 31 bp, Homo sapiens
  chr15:101922353-101922384
  hypo
ttctttgcctccacaacgagagcttctgcgt

SEQ ID NO: 21798 - DNA, 31 bp, Homo sapiens
  chr15:101949372-101949403
  hypo
agcagggaggctgagcgcgggggctcatgcc

SEQ ID NO: 21799 - DNA, 33 bp, Homo sapiens
  chr15:101949765-101949798
  hypo
ggcgacagagtaagactccgtctcaaaaaaaaa

SEQ ID NO: 21800 - DNA, 31 bp, Homo sapiens
  chr15:102004884-102004915
  hypo
ctggagggatctactgcgtgacaccctgtta

SEQ ID NO: 21801 - DNA, 75 bp, Homo sapiens
  chr15:102004982-102005057
  hypo
cctgggggagggtcagcgtcctcctaaagaagtccatggaggctgtccgctctatcccgccggtgacaagggatg

SEQ ID NO: 21802 - DNA, 31 bp, Homo sapiens
  chr15:102030589-102030620
  hypo
ggtgaacccccaggccgcgcaggtgaacccc

SEQ ID NO: 21803 - DNA, 35 bp, Homo sapiens
  chr15:102030630-102030665
  hypo
aggtgaacccccaggccgtccgcttagcctcgctg

SEQ ID NO: 21804 - DNA, 31 bp, Homo sapiens
  chr15:102031395-102031426
  hypo
gtgggagaacaggaggcgtggtgggaggccc

SEQ ID NO: 21805 - DNA, 31 bp, Homo sapiens
  chr15:102076806-102076837
  hypo
agagctgtgggagcagcgtggggacagaccc

SEQ ID NO: 21806 - DNA, 31 bp, Homo sapiens
  chr16:84432-84463
  hypo
ggcacacacaggcaaacgtgtctacaggcac

SEQ ID NO: 21807 - DNA, 31 bp, Homo sapiens
  chr16:94565-94596
  hypo
ccaaggtgtacattaacggagatcaggaggc

SEQ ID NO: 21808 - DNA, 31 bp, Homo sapiens
  chr16:109540-109571
  hypo
ttgctggcatccagggcgagtttcagccgca

SEQ ID NO: 21809 - DNA, 55 bp, Homo sapiens
  chr16:112972-113027
  hypo
tcatcagcgctgcggccgcccggaagctcatcttggccaccgactctcgcttgcg

SEQ ID NO: 21810 - DNA, 64 bp, Homo sapiens
  chr16:189553-189617
  hypo
caggagatctttgagaccttgggcgaggcagtgacactaaaggcaggagcgactacagaagaat

SEQ ID NO: 21811 - DNA, 40 bp, Homo sapiens
  chr16:189634-189674
  hypo
attaaaaactttactgcggccgggcgcggtggctcacgcc

SEQ ID NO: 21812 - DNA, 24 bp, Homo sapiens
  chr16:192027-192051
  hypo
caccgtgcccggcctgcataacat

SEQ ID NO: 21813 - DNA, 10 bp, Homo sapiens
  chr16:232155-232165
  hypo
tgtaatccca

SEQ ID NO: 21814 - DNA, 14 bp, Homo sapiens
  chr16:234181-234195
  hypo
gtctcaaaaaaaaa

SEQ ID NO: 21815 - DNA, 28 bp, Homo sapiens
  chr16:299950-299978
  hypo
aatttttctttttagacggagtctcgct

SEQ ID NO: 21816 - DNA, 31 bp, Homo sapiens
  chr16:300287-300318
  hypo
ttgctgaattaatggccgtctcctcttcttc

SEQ ID NO: 21817 - DNA, 36 bp, Homo sapiens
  chr16:310515-310551
  hypo
aacatgaaccagcactcggcccgtcaggggagatcg

SEQ ID NO: 21818 - DNA, 31 bp, Homo sapiens
  chr16:323417-323448
  hypo
agcacgctgacccctgcgctggccagcgacc

SEQ ID NO: 21819 - DNA, 31 bp, Homo sapiens
  chr16:323591-323622
  hypo
cacacagcagcccctccgcccccaccctcag

SEQ ID NO: 21820 - DNA, 136 bp, Homo sapiens
  chr16:339476-339612
  hypo
ggcccagggtgacagcgcggcccctcaccagggtgcggtaggggatgggttccccgcagaagtagtacgccacaacgatgctgtcacacggctgggcactcccgccgcccaccttcctctgcgatcttgtcctggg

SEQ ID NO: 21821 - DNA, 31 bp, Homo sapiens
  chr16:356088-356119
  hypo
tttatcatccccttaccggcaggcacatgcg

SEQ ID NO: 21822 - DNA, 38 bp, Homo sapiens
  chr16:360131-360169
  hypo
atagagctcctggccccgaccgccggtcagcaggcaat

SEQ ID NO: 21823 - DNA, 31 bp, Homo sapiens
  chr16:360188-360219
  hypo
caccaccactgagacacgtgcacacaggtga

SEQ ID NO: 21824 - DNA, 61 bp, Homo sapiens
  chr16:360253-360314
  hypo
cacacaaaggttcacacgtgatggtaaagcccaggtgcccagccacgcgtcttcctagctg

SEQ ID NO: 21825 - DNA, 39 bp, Homo sapiens
  chr16:410311-410350
  hypo
ccccaggcccctttgtcgccgcggcgtctgtcgtggcaa

SEQ ID NO: 21826 - DNA, 31 bp, Homo sapiens
  chr16:410438-410469
  hypo
tttgaacccccagggcgcgcctgccaggcca

SEQ ID NO: 21827 - DNA, 118 bp, Homo sapiens
  chr16:411360-411478
  hypo
aatgggcagaggaggcgcgtccacctgtccgcccggccgcctgcccggcttacctcacctgcctggctccgtgtgcctgctcacgccccaccgtcccgctgtccgccatgatgggctt

SEQ ID NO: 21828 - DNA, 58 bp, Homo sapiens
  chr16:428959-429017
  hypo
ctcacccccagccccccgtgccagctccagcctcgtgcccttgcgaccttgggcatcc

SEQ ID NO: 21829 - DNA, 36 bp, Homo sapiens
  chr16:429364-429400
  hypo
ctccaggggaacctggcgtggcgactgggcaggggc

SEQ ID NO: 21830 - DNA, 38 bp, Homo sapiens
  chr16:501345-501383
  hypo
cacctcaccctccccacgcttcccgtatcagggagctt

SEQ ID NO: 21831 - DNA, 50 bp, Homo sapiens
  chr16:512664-512714
  hypo
gtcccttccccggcaccgtcccttccccagtcccccggcaccgtcccttc

SEQ ID NO: 21832 - DNA, 31 bp, Homo sapiens
  chr16:514975-515006
  hypo
ttggtacttgctgggccggctgggtggtttt

SEQ ID NO: 21833 - DNA, 31 bp, Homo sapiens
  chr16:515007-515038
  hypo
atgcatgtgatgggtacgcctgagaggatgc

SEQ ID NO: 21834 - DNA, 31 bp, Homo sapiens
  chr16:515061-515092
  hypo
tgagttcatggaggtgcgagctggagactca

SEQ ID NO: 21835 - DNA, 31 bp, Homo sapiens
  chr16:515250-515281
  hypo
cagaactggttgtcatcggagaggcctcagt

SEQ ID NO: 21836 - DNA, 31 bp, Homo sapiens
  chr16:517376-517407
  hypo
tgcagagtggagtgggcgtcagggaggaggt

SEQ ID NO: 21837 - DNA, 4 bp, Homo sapiens
  chr16:521899-521903
  hypo
tggt

SEQ ID NO: 21838 - DNA, 46 bp, Homo sapiens
  chr16:567190-567236
  hypo
ccatgacaggcctgctcgacaccgtcaaggtcggaaaacacaggaa

SEQ ID NO: 21839 - DNA, 66 bp, Homo sapiens
  chr16:573425-573491
  hypo
gcggactgtgcatctgcggctctcgctctcccgccccccgcgcgagatgcccgcctgcctgtcact

SEQ ID NO: 21840 - DNA, 40 bp, Homo sapiens; identical to SEQ ID NO: 5466
  chr16:577639-577679
  hypo

SEQ ID NO: 21841 - DNA, 45 bp, Homo sapiens
  chr16:584706-584751
  hypo
gggtgcagttttagggcgcagtggggttgccgtggggcaaggcca

SEQ ID NO: 21842 - DNA, 31 bp, Homo sapiens
  chr16:611329-611360
  hypo
ggatgggttgtggcatcggctggcacagctg

SEQ ID NO: 21843 - DNA, 92 bp, Homo sapiens
  chr16:612096-612188
  hypo
tgcaccccacacaggcgcgtgctggggcggtggacagcccaggtggcggcccagatggagtgtggcgcgcataccagcgccgtgtggggcgt

SEQ ID NO: 21844 - DNA, 58 bp, Homo sapiens
  chr16:612202-612260
  hypo
cttggctgagtgtggccgctgcaggctcggccgctgacctgcccgaagccacccagat

SEQ ID NO: 21845 - DNA, 31 bp, Homo sapiens
  chr16:614856-614887
  hypo
gggacagttggggcccgcggggggcctggcc

SEQ ID NO: 21846 - DNA, 31 bp, Homo sapiens
  chr16:615333-615364
  hypo
tctgcctgcagcatgccggcccctctcctgc

SEQ ID NO: 21847 - DNA, 63 bp, Homo sapiens
  chr16:643931-643994
  hypo
agtgtgggtggtgcacgcggcggggaggagaaagctgcagttcaggagcgaacctgcagtcag

SEQ ID NO: 21848 - DNA, 46 bp, Homo sapiens
  chr16:660722-660768
  hypo
gctcctccctctaccccgccctgccccaccccgtcacctgcttgcc

SEQ ID NO: 21849 - DNA, 81 bp, Homo sapiens
  chr16:666692-666773
  hypo
ctgggctgcagtaagccgagacttggaaatacattcgccttggagaattcaacttcaaaatgcatacgaagtaggtcaggg

SEQ ID NO: 21850 - DNA, 14 bp, Homo sapiens
  chr16:666892-666906
  hypo
cccattccaggcaa

SEQ ID NO: 21851 - DNA, 31 bp, Homo sapiens
  chr16:667483-667514
  hypo
ccggaaaacctgattccgtggtggctgtgag

SEQ ID NO: 21852 - DNA, 46 bp, Homo sapiens
  chr16:667518-667564
  hypo
ttccctccccttctgtcggcttcaccttaaaaagcatttcccagcg

SEQ ID NO: 21853 - DNA, 51 bp, Homo sapiens
  chr16:677436-677487
  hypo
cacctcaagtccttctcgatggccaacggcatgaacgcggtcatgatgcac

SEQ ID NO: 21854 - DNA, 42 bp, Homo sapiens
  chr16:716020-716062
  hypo
cggtgacggctccctgcgcatcttcagcgtctcccgcacggc

SEQ ID NO: 21855 - DNA, 51 bp, Homo sapiens; identical to SEQ ID NO: 5468
  chr16:717959-718010
  hypo

SEQ ID NO: 21856 - DNA, 31 bp, Homo sapiens
  chr16:726579-726610
  hypo
ggggggcttgtggatgcggggagctgggtga

SEQ ID NO: 21857 - DNA, 31 bp, Homo sapiens
  chr16:726625-726656
  hypo
gtgccatggggaggtccgtggcccacactca

SEQ ID NO: 21858 - DNA, 92 bp, Homo sapiens
  chr16:726667-726759
  hypo
ccagatcagcagcaagcgctccagcagtttcaagcgggccattgctaacggacagcgggcactgccccgggacgggccgctggatgagccag

SEQ ID NO: 21859 - DNA, 252 bp, Homo sapiens
  chr16:726760-727012
  hypo
cctaggtgtctacaagcggtttgtgcgttacgtggcctacgagatcctgccttgtgaggtggaccgccgctggtacttctaccgtcaccgcagctgcccaccccccgtgttcatggcctcggtcactcttgcccaggtgggccccccggccgctgccccgggagcctcccgcgctcctggccatgaccagcctaacactcgtgtccccagatcatcgtgttcctgtgttacggggcccgcctcaacaagtgg

SEQ ID NO: 21860 - DNA, 31 bp, Homo sapiens
  chr16:727016-727047
  hypo
tgcagacctaccaccccgagtacatgaagag

SEQ ID NO: 21861 - DNA, 90 bp, Homo sapiens
  chr16:731352-731442
  hypo
tggctgacaagctgcccggttgtggggcctctggggccaggcgggtggactggccagagagtgacgtgaagcccccgttccccagcttac

SEQ ID NO: 21862 - DNA, 31 bp, Homo sapiens
  chr16:731444-731475
  hypo
cctggccaaggagcagcggctgaacttcggg

SEQ ID NO: 21863 - DNA, 42 bp, Homo sapiens
  chr16:731487-731529
  hypo
agcgctcttcgaatcgcgaagaagaagcgctggaacagcatt

SEQ ID NO: 21864 - DNA, 31 bp, Homo sapiens
  chr16:731539-731570
  hypo
gcatccaccaggagagcgagctgcactccta

SEQ ID NO: 21865 - DNA, 144 bp, Homo sapiens
  chr16:734917-735061
  hypo
agggagggtgcctcagcgggggctgctgcgctgcctgcaggcccctgccccacctcccgaccccactgccccacctgtcgcagacccagccccggctgctcatgggccgcttgcagtggctgcagttgacgtgcagggtggtgg

SEQ ID NO: 21866 - DNA, 87 bp, Homo sapiens
  chr16:735066-735153
  hypo
tggttgaggcagctgacggcgcggctggtgctcagcttgaccacctcgttggacacgttccagaggcggaagcgctgcagcaggtcg

SEQ ID NO: 21867 - DNA, 505 bp, Homo sapiens
  chr16:735173-735678
  hypo
ctcctgggggagggagcgcccggcagtcaggatctgggtgccaggggcggcgctgcaggggggaggccccgcccaccacacacctgggtctgctcgtcgatgtccttgcgcacccgttcacccaggacgatgagcacagacacagccatctgcacgtcgccctgctcagcgtagaagtgcagcatgtcgcgcaccagcacgccgaagaagtcgggcggcaggcggctgtcgtagagcgcgtgtgagacagacaggagcgagaaggaggagtccacgggggccagggaggccacatccgcctcgctgccgctcacgtgcggggagtcggccttgtcctgcaggtgctcgggcccgggaggcgtgtccacgatctcgtggcgcagcggaaaggcctcctgcggcagcacgcactcagggtcctcggctggaaggcagggaccagcggaggctctgagtctgtcctccatccgcctctgaaccccaccctgcccggacccccactcac

SEQ ID NO: 21868 - DNA, 31 bp, Homo sapiens
  chr16:735920-735951
  hypo
tgcatctcctttgctgcggtccagccgcgtc

SEQ ID NO: 21869 - DNA, 25 bp, Homo sapiens
  chr16:740888-740913
  hypo
gtgagccaccgcgcctggcctgttt

SEQ ID NO: 21870 - DNA, 31 bp, Homo sapiens
  chr16:741168-741199
  hypo
cccaactcctggcctccgccttcccctgccc

SEQ ID NO: 21871 - DNA, 41 bp, Homo sapiens
  chr16:741375-741416
  hypo
gtttactggttgttgtcggtcacatacgagtgtgaattcca

SEQ ID NO: 21872 - DNA, 31 bp, Homo sapiens
  chr16:741435-741466
  hypo
ctggctcaatccccaccgaatgcccagtgcc

SEQ ID NO: 21873 - DNA, 68 bp, Homo sapiens
  chr16:741477-741545
  hypo
ttcaaccagttgctctcgttcttttttttaaaaaactttttgagacggagtttcgctcttgttgccca

SEQ ID NO: 21874 - DNA, 112 bp, Homo sapiens; identical to SEQ ID NO: 5469
  chr16:765206-765318
  hypo

SEQ ID NO: 21875 - DNA, 63 bp, Homo sapiens; identical to SEQ ID NO: 5470
  chr16:765585-765648
  hypo

SEQ ID NO: 21876 - DNA, 87 bp, Homo sapiens
  chr16:771851-771938
  hypo
aacccctggctggtggcgctggcgcggctgcacgcctggagggccggctgtgccggcagcgtctgctatcgccgcaaggatctctgg

SEQ ID NO: 21877 - DNA, 49 bp, Homo sapiens
  chr16:771949-771998
  hypo
gggatccctggccacccgctgacagcccaaggtgcggctgacacctgcg

SEQ ID NO: 21878 - DNA, 48 bp, Homo sapiens
  chr16:772044-772092
  hypo
caggcctctccccggccggggcgacttctcttccggcaggtgagcctg

SEQ ID NO: 21879 - DNA, 31 bp, Homo sapiens
  chr16:796912-796943
  hypo
tgctattgttggttctcgccatagaacctgg

SEQ ID NO: 21880 - DNA, 40 bp, Homo sapiens
  chr16:809695-809735
  hypo
tttacctgtgagttcccgcccaagccggctgccttctgtc

SEQ ID NO: 21881 - DNA, 31 bp, Homo sapiens
  chr16:809786-809817
  hypo
tttcagttgttctctgcggaagggagttttt

SEQ ID NO: 21882 - DNA, 31 bp, Homo sapiens
  chr16:809839-809870
  hypo
gacatttgtaagttgacgcttacacctggca

SEQ ID NO: 21883 - DNA, 31 bp, Homo sapiens
  chr16:809874-809905
  hypo
tgctgaattctgtgtgcgtgaaggtccgatt

SEQ ID NO: 21884 - DNA, 31 bp, Homo sapiens
  chr16:835960-835991
  hypo
gttccagcgtccactccgacagccactgcag

SEQ ID NO: 21885 - DNA, 31 bp, Homo sapiens
  chr16:837307-837338
  hypo
gaatcctgagtccccacgccccaccccagga

SEQ ID NO: 21886 - DNA, 31 bp, Homo sapiens
  chr16:845954-845985
  hypo
acagctgtacagcacccgtgaaaagcaacag

SEQ ID NO: 21887 - DNA, 48 bp, Homo sapiens
  chr16:846014-846062
  hypo
ttacagcctgacctaccgccaggagcgcacgcccgatggccagtacat

SEQ ID NO: 21888 - DNA, 31 bp, Homo sapiens
  chr16:846354-846385
  hypo
ccaacactccgtttcccgctgtgggatggcc

SEQ ID NO: 21889 - DNA, 86 bp, Homo sapiens
  chr16:846406-846492
  hypo
catggggcagtggccccggggtcctgctgccccagcgacggcaccaacttgcaggacgctgagtcactctccgtggcagccatcgg

SEQ ID NO: 21890 - DNA, 70 bp, Homo sapiens
  chr16:943517-943587
  hypo
gcggcacaaagggagccgaggcgcaggccccgtgtgtctcccacacactgcagctcgcctgctgtgagga

SEQ ID NO: 21891 - DNA, 36 bp, Homo sapiens
  chr16:969857-969893
  hypo
ccccaccccacagctccgccccgggacccccttcct

SEQ ID NO: 21892 - DNA, 37 bp, Homo sapiens
  chr16:1095306-1095343
  hypo
ctgtgctgaggggccccgccgacggtggggtccagac

SEQ ID NO: 21893 - DNA, 31 bp, Homo sapiens
  chr16:1196743-1196774
  hypo
ttttcagtgcacccagcggtgcagccgtctc

SEQ ID NO: 21894 - DNA, 31 bp, Homo sapiens
  chr16:1217194-1217225
  hypo
ccccgtggggatgaaacgggctctttgcggg

SEQ ID NO: 21895 - DNA, 40 bp, Homo sapiens
  chr16:1217265-1217305
  hypo
ggtgggtggggcttgccggccgcccgcgaatgtcaggaac

SEQ ID NO: 21896 - DNA, 37 bp, Homo sapiens
  chr16:1217306-1217343
  hypo
ttggattcctgacacacgggtgcgggggcgatatcgg

SEQ ID NO: 21897 - DNA, 31 bp, Homo sapiens
  chr16:1217472-1217503
  hypo
attaatgagcttggtgcggttgccatgggaa

SEQ ID NO: 21898 - DNA, 31 bp, Homo sapiens
  chr16:1237321-1237352
  hypo
tacagagaggggagcacgtggctaagagtcc

SEQ ID NO: 21899 - DNA, 37 bp, Homo sapiens
  chr16:1248723-1248760
  hypo
ctgggctggcctcctgcggaaccgctgcttcctggac

SEQ ID NO: 21900 - DNA, 31 bp, Homo sapiens
  chr16:1248776-1248807
  hypo
gcccaggccccacccccgtgaggcccctgcc

SEQ ID NO: 21901 - DNA, 205 bp, Homo sapiens
  chr16:1248819-1249024
  hypo
cccaccatgcagataacgcaccatgtggctccaccgccccacgtggctctgcccaccgtgcagtcacccgccccgccactgctgtccccgtcatggctccgtccaccatgctgtctcccgcccccaccccccatcatggctccgcccagctggcagtcaccgccccacatggctccgcccacggtgcagtcgctgcacatatgcc

SEQ ID NO: 21902 - DNA, 31 bp, Homo sapiens
  chr16:1273478-1273509
  hypo
gcacacgtgcaccctccgcaggcggaggctg

SEQ ID NO: 21903 - DNA, 31 bp, Homo sapiens
  chr16:1308372-1308403
  hypo
cctaactgcaggcgggcgtggtcagctggga

SEQ ID NO: 21904 - DNA, 39 bp, Homo sapiens
  chr16:1369254-1369293
  hypo
cacattccacagcagcgcgctcacgcgtgttcgcactca

SEQ ID NO: 21905 - DNA, 37 bp, Homo sapiens
  chr16:1374350-1374387
  hypo
ggaccagacttggcatcggcaacgatgttgcaggccc

SEQ ID NO: 21906 - DNA, 31 bp, Homo sapiens
  chr16:1395998-1396029
  hypo
gccaccctcttctatacggagctgcttcgga

SEQ ID NO: 21907 - DNA, 31 bp, Homo sapiens
  chr16:1397421-1397452
  hypo
aaactgcagccccacacgggctgtgtccttg

SEQ ID NO: 21908 - DNA, 57 bp, Homo sapiens
  chr16:1397453-1397510
  hypo
gcatgaggtggccccacgggcagtcaggtctccaagtgccagcgctgaccaccagca

SEQ ID NO: 21909 - DNA, 31 bp, Homo sapiens
  chr16:1397514-1397545
  hypo
ggggcccctcctgatgcgcttccccctgcag

SEQ ID NO: 21910 - DNA, 63 bp, Homo sapiens
  chr16:1397547-1397610
  hypo
gctgaaggaggagctgcggctgcacaaatgttccacccgcgagtgcatcgagcagttctacct

SEQ ID NO: 21911 - DNA, 31 bp, Homo sapiens
  chr16:1397712-1397743
  hypo
gcagaaccggtttggacgcctgagcgtccgt

SEQ ID NO: 21912 - DNA, 100 bp, Homo sapiens
  chr16:1397759-1397859
  hypo
ctgagcagcggctggccgtggaggtgctgcacgccgcggacctgctccccctggacgccaacggtgagttgcagcggggacgggtcgggtggtggtggga

SEQ ID NO: 21913 - DNA, 58 bp, Homo sapiens
  chr16:1398083-1398141
  hypo
cctctgtccgcagttccgtgcctgccgaggcgtgccgccgccgcgcggcctgtgtgtt

SEQ ID NO: 21914 - DNA, 31 bp, Homo sapiens
  chr16:1407318-1407349
  hypo
gaacagaaggccaggccgggccagcacccca

SEQ ID NO: 21915 - DNA, 31 bp, Homo sapiens
  chr16:1407369-1407400
  hypo
ctctgccctccgggggcgggggccaggctga

SEQ ID NO: 21916 - DNA, 42 bp, Homo sapiens
  chr16:1407452-1407494
  hypo
cagtcacccagcacctcgtgtgtatttcgactttattattat

SEQ ID NO: 21917 - DNA, 44 bp, Homo sapiens
  chr16:1407499-1407543
  hypo
ttattattattagagccgagtgtcgctgtgtcgcccaggctgga

SEQ ID NO: 21918 - DNA, 57 bp, Homo sapiens
  chr16:1414644-1414701
  hypo
gggaccacagcagagccgggacctggggggggtcgcttcccccgtgtgctccaggcc

SEQ ID NO: 21919 - DNA, 57 bp, Homo sapiens
  chr16:1417075-1417132
  hypo
cccagagcaggactcacgccgtccaccgcctccaggtccaggcgcagctgactctgc

SEQ ID NO: 21920 - DNA, 39 bp, Homo sapiens
  chr16:1417164-1417203
  hypo
gatgtccccacagccccgcagccccggcagtgtggaggc

SEQ ID NO: 21921 - DNA, 31 bp, Homo sapiens
  chr16:1417327-1417358
  hypo
tctcgctgccaggcatcgcagacctgaaacc

SEQ ID NO: 21922 - DNA, 86 bp, Homo sapiens
  chr16:1417674-1417760
  hypo
ggactcctcccactgccggatcttcctcttggcctcgtccagctgccgcctgacccgggccagctcagctccgtttggacttgcac

SEQ ID NO: 21923 - DNA, 36 bp, Homo sapiens
  chr16:1417928-1417964
  hypo
atgccccaggccccaccgctacgtgggcaccctctg

SEQ ID NO: 21924 - DNA, 31 bp, Homo sapiens
  chr16:1424438-1424469
  hypo
tgtcctcacctgggaccgatggtccctccat

SEQ ID NO: 21925 - DNA, 44 bp, Homo sapiens
  chr16:1428211-1428255
  hypo
cactgaggacaggcaccgaccccccaacccgcaggcctgcccac

SEQ ID NO: 21926 - DNA, 31 bp, Homo sapiens
  chr16:1428436-1428467
  hypo
tcatgaaaatcaaagacgcaaagaagttggg

SEQ ID NO: 21927 - DNA, 59 bp, Homo sapiens; identical to SEQ ID NO: 5473
  chr16:1429111-1429170
  hypo

SEQ ID NO: 21928 - DNA, 31 bp, Homo sapiens
  chr16:1472211-1472242
  hypo
gaaatatttagcagagcgtgcactggatgga

SEQ ID NO: 21929 - DNA, 42 bp, Homo sapiens
  chr16:1472246-1472288
  hypo
ctggtaccacccagaccggtcatctggcccaaccggttctgc

SEQ ID NO: 21930 - DNA, 57 bp, Homo sapiens
  chr16:1484607-1484664
  hypo
ccccagccctgaaccccggcccaaaggcccaggaggccgcgccgggatccctgctgc

SEQ ID NO: 21931 - DNA, 31 bp, Homo sapiens
  chr16:1484668-1484699
  hypo
ctcacagcctggtacacgccccagcagttca

SEQ ID NO: 21932 - DNA, 31 bp, Homo sapiens
  chr16:1484702-1484733
  hypo
gcaccaccttgccaggcgccatgtccttgat

SEQ ID NO: 21933 - DNA, 117 bp, Homo sapiens
  chr16:1493574-1493691
  hypo
agccctgcagctgcacgcgggcccgcacctggagcagctcccgcagcaggctccgcgtggcgcgctcacagcgctgcttgtgctcccgcaggcaggccacctcggcctgcagctcca

SEQ ID NO: 21934 - DNA, 31 bp, Homo sapiens
  chr16:1496408-1496439
  hypo
ggcctgcgcaaggaggcgccaaggggggaga

SEQ ID NO: 21935 - DNA, 31 bp, Homo sapiens
  chr16:1510690-1510721
  hypo
acacagccagcctggccgggccgcctccacc

SEQ ID NO: 21936 - DNA, 25 bp, Homo sapiens
  chr16:1524069-1524094
  hypo
agtgaaactccgtctcaaaaaaaaa

SEQ ID NO: 21937 - DNA, 43 bp, Homo sapiens
  chr16:1575250-1575293
  hypo
cgtagagctccagggacggcaggtcctccgacagcatcctggg

SEQ ID NO: 21938 - DNA, 47 bp, Homo sapiens
  chr16:1579422-1579469
  hypo
ctggcagcttcctggacgctcagtcggcgctgcggtgaaggtgacac

SEQ ID NO: 21939 - DNA, 31 bp, Homo sapiens
  chr16:1580681-1580712
  hypo
ccacgcggaggccacccgtggggagcgggag

SEQ ID NO: 21940 - DNA, 68 bp, Homo sapiens
  chr16:1613976-1614044
  hypo
aatacaacaggcagagcgtaccgcagggccagcgcgcccatcttggggctgcccgtttgcagactgag

SEQ ID NO: 21941 - DNA, 31 bp, Homo sapiens
  chr16:1615013-1615044
  hypo
tcccgtgaggtgagaccggcctggtacggga

SEQ ID NO: 21942 - DNA, 153 bp, Homo sapiens; identical to SEQ ID NO: 5474
  chr16:1660448-1660601
  hypo

SEQ ID NO: 21943 - DNA, 155 bp, Homo sapiens; identical to SEQ ID NO: 5475
  chr16:1660659-1660814
  hypo

SEQ ID NO: 21944 - DNA, 31 bp, Homo sapiens; identical to SEQ ID NO: 5476
  chr16:1660852-1660883
  hypo

SEQ ID NO: 21945 - DNA, 116 bp, Homo sapiens; identical to SEQ ID NO: 5478
  chr16:1664480-1664596
  hypo

SEQ ID NO: 21946 - DNA, 31 bp, Homo sapiens; identical to SEQ ID NO: 5479
  chr16:1664614-1664645
  hypo

SEQ ID NO: 21947 - DNA, 17 bp, Homo sapiens
  chr16:1698314-1698331
  hypo
tagaattgacttgagcc

SEQ ID NO: 21948 - DNA, 31 bp, Homo sapiens
  chr16:1701257-1701288
  hypo
cggtggactgagatcacggagagctggactg

SEQ ID NO: 21949 - DNA, 31 bp, Homo sapiens
  chr16:1701298-1701329
  hypo
caggttatggagaggtcgactgagaggtcac

SEQ ID NO: 21950 - DNA, 42 bp, Homo sapiens
  chr16:1701344-1701386
  hypo
gggtggatttaggtcacgcacaggtcacggaaaggtggactg

SEQ ID NO: 21951 - DNA, 31 bp, Homo sapiens
  chr16:1705538-1705569
  hypo
gcctgtgtctggcccacggggtgtggccaaa

SEQ ID NO: 21952 - DNA, 37 bp, Homo sapiens
  chr16:1730132-1730169
  hypo
aaactagtgctcagagcgaatccggtttctggttcct

SEQ ID NO: 21953 - DNA, 86 bp, Homo sapiens
  chr16:1730305-1730391
  hypo
ttattatcaccctgagcgacgccgatgtttttatattgactttcacgctccagaagttagctgcacagggccgcactaaagtcata

SEQ ID NO: 21954 - DNA, 31 bp, Homo sapiens
  chr16:1730462-1730493
  hypo
ggtgaggaaggaaagccggtctgaactggat

SEQ ID NO: 21955 - DNA, 115 bp, Homo sapiens
  chr16:1730518-1730633
  hypo
cttggggtccaccagacgctgcacatttgccactcatctgaacggggtcgagtcgcagggcgggcgccttgtaagcgtcacatttagttttgctgtgaagcgagtcaggtggtgg

SEQ ID NO: 21956 - DNA, 54 bp, Homo sapiens
  chr16:1730706-1730760
  hypo
tgtgttaaaggggtttcgtaaaagcgttatgctttagccgcgattaacctgagg

SEQ ID NO: 21957 - DNA, 31 bp, Homo sapiens
  chr16:1730849-1730880
  hypo
catcctttctgaaactcggggacaaactatt

SEQ ID NO: 21958 - DNA, 31 bp, Homo sapiens
  chr16:1742081-1742112
  hypo
gaatcatggtgggtgccgtagattatcctgg

SEQ ID NO: 21959 - DNA, 31 bp, Homo sapiens
  chr16:1762443-1762474
  hypo
cggccactcccaccgccgccactttgccagc

SEQ ID NO: 21960 - DNA, 18 bp, Homo sapiens
  chr16:1788170-1788188
  hypo
gtccgtgtgagcgtccgt

SEQ ID NO: 21961 - DNA, 58 bp, Homo sapiens
  chr16:1807852-1807910
  hypo
ctgccctcctgatgggcgatgggagcagagggcagcaggcttccgggtcagggctcgg

SEQ ID NO: 21962 - DNA, 50 bp, Homo sapiens
  chr16:1810313-1810363
  hypo
tggcaaggccccttcacgtacctgtatgccgcgcccgtggcactcccatc

SEQ ID NO: 21963 - DNA, 31 bp, Homo sapiens
  chr16:1810367-1810398
  hypo
tgctttttcaaagaaacgccttgaatgtggt

SEQ ID NO: 21964 - DNA, 31 bp, Homo sapiens
  chr16:1810406-1810437
  hypo
acctgattgccaaggtcgaccagctgtccgg

SEQ ID NO: 21965 - DNA, 31 bp, Homo sapiens
  chr16:1813397-1813428
  hypo
agagcagcctctgggtcgagcaggggccagc

SEQ ID NO: 21966 - DNA, 31 bp, Homo sapiens
  chr16:1813439-1813470
  hypo
agcccaggggcatagccggtgccaggaaagc

SEQ ID NO: 21967 - DNA, 31 bp, Homo sapiens
  chr16:1813481-1813512
  hypo
gctgggcacccagtgccgggaaagccaccct

SEQ ID NO: 21968 - DNA, 31 bp, Homo sapiens
  chr16:1813597-1813628
  hypo
ggggcactgtgggggccgctcaccctggaca

SEQ ID NO: 21969 - DNA, 31 bp, Homo sapiens
  chr16:1813641-1813672
  hypo
tcattcttccactcagcgactgcacgtcctc

SEQ ID NO: 21970 - DNA, 31 bp, Homo sapiens
  chr16:1813895-1813926
  hypo
aggacggcgggtggggcggggcctggcaggt

SEQ ID NO: 21971 - DNA, 56 bp, Homo sapiens
  chr16:1813945-1814001
  hypo
caggggtctggagggtcggagaaggagccccgcggctcccacgcccccacctgcct

SEQ ID NO: 21972 - DNA, 31 bp, Homo sapiens
  chr16:1814006-1814037
  hypo
cttgaagtggctgtgccgccagaagctggca

SEQ ID NO: 21973 - DNA, 31 bp, Homo sapiens
  chr16:1814297-1814328
  hypo
gcagctgtggtgtgccgcgggcgtcaacctg

SEQ ID NO: 21974 - DNA, 31 bp, Homo sapiens
  chr16:1831183-1831214
  hypo
agagtcttactgaatgcggtgcatccaggag

SEQ ID NO: 21975 - DNA, 31 bp, Homo sapiens
  chr16:1854038-1854069
  hypo
cctaagtgtgtgttctcgtttccatgctagt

SEQ ID NO: 21976 - DNA, 32 bp, Homo sapiens
  chr16:1895225-1895257
  hypo
tacatatataagggaccgggcgcagtggctca

SEQ ID NO: 21977 - DNA, 37 bp, Homo sapiens
  chr16:1938627-1938664
  hypo
ttcgagcgggctctgccgccaacggctgatgctttag

SEQ ID NO: 21978 - DNA, 31 bp, Homo sapiens
  chr16:1944318-1944349
  hypo
tgccccttctgccatgcgaggacagtgaaaa

SEQ ID NO: 21979 - DNA, 31 bp, Homo sapiens
  chr16:1982770-1982801
  hypo
gggtcagtcgctgcagcgggcctgctctcac

SEQ ID NO: 21980 - DNA, 19 bp, Homo sapiens
  chr16:1985414-1985433
  hypo
cagtcggcttctgtctatt

SEQ ID NO: 21981 - DNA, 40 bp, Homo sapiens
  chr16:1997450-1997490
  hypo
cagcagtgacccctgccgccttccacgcatgcattcattc

SEQ ID NO: 21982 - DNA, 37 bp, Homo sapiens
  chr16:1997524-1997561
  hypo
gttgtgctaggcactgcggatccggtgcagaatgagg

SEQ ID NO: 21983 - DNA, 42 bp, Homo sapiens
  chr16:2000905-2000947
  hypo
tgtagctgctttttcccgtctgtgtcccgccacctcttgcag

SEQ ID NO: 21984 - DNA, 31 bp, Homo sapiens
  chr16:2028576-2028607
  hypo
ggaccctccaggccgccgctttcttggactt

SEQ ID NO: 21985 - DNA, 87 bp, Homo sapiens
  chr16:2028620-2028707
  hypo
atgaagctccctgtgccggccgccgcccccaccccctgggaaacccataaaggcgcactgccctagccggtccggcctctctccagt

SEQ ID NO: 21986 - DNA, 43 bp, Homo sapiens
  chr16:2028723-2028766
  hypo
gaaaacccataaaggccgctctcctggccggctctgtctctct

SEQ ID NO: 21987 - DNA, 50 bp, Homo sapiens
  chr16:2028873-2028923
  hypo
ggcagagatccagcccgcggctccgcacgcttagacggtgggggtcatgc

SEQ ID NO: 21988 - DNA, 251 bp, Homo sapiens
  chr16:2028971-2029222
  hypo
gctggccagggagatccgccctccccgctcctccccagccctgggatggcgcggtccatcccctcatcgggatcctcgcgctcactgctccgtcgtggggtgcggcacagagtccacgcaccctcgagggcggccctggcgccgtgggcgccgctccagggccctgcgtgtgacggtgcagcagcggctctggatggcgcccggcgaaggtcgggtgggcacggtggggggaggggcggtggcctgggagg

SEQ ID NO: 21989 - DNA, 36 bp, Homo sapiens
  chr16:2035810-2035846
  hypo
gcaggggcagtggagccgctgcgtcctctcattctt

SEQ ID NO: 21990 - DNA, 40 bp, Homo sapiens; identical to SEQ ID NO: 5492
  chr16:2041810-2041850
  hypo

SEQ ID NO: 21991 - DNA, 43 bp, Homo sapiens; identical to SEQ ID NO: 5493
  chr16:2041941-2041984
  hypo

SEQ ID NO: 21992 - DNA, 31 bp, Homo sapiens
  chr16:2051261-2051292
  hypo
ggcccagtgtgtggggcgatcatctggggtc

SEQ ID NO: 21993 - DNA, 124 bp, Homo sapiens
  chr16:2105004-2105128
  hypo
tctgaggtgacgtggccggcagccaagtgtgcacacgtctcctccgagccactctctgctgggggtggggaacgcccaggagtctggtgatgtcggcgtctcccagcctcgggttgggccctga

SEQ ID NO: 21994 - DNA, 42 bp, Homo sapiens
  chr16:2105230-2105272
  hypo
ctcccctgagcctcttcgggcccagtgcgtggtctgtctgtt

SEQ ID NO: 21995 - DNA, 56 bp, Homo sapiens
  chr16:2105293-2105349
  hypo
gggtttctggcagtgacgggtttggacacactgtcctgcggcgggagggggaggtg

SEQ ID NO: 21996 - DNA, 80 bp, Homo sapiens
  chr16:2106689-2106769
  hypo
ccggctgagagcctcccgctgttcatcgttaccctctgtcgcaccatcaacgtcaaggagctctgcgagccttgctggaa

SEQ ID NO: 21997 - DNA, 40 bp, Homo sapiens
  chr16:2106972-2107012
  hypo
tgggaggagatggtggcgagctggccggaccttgggtggc

SEQ ID NO: 21998 - DNA, 31 bp, Homo sapiens
  chr16:2107211-2107242
  hypo
aggccagcacagccctcggggcagctccagt

SEQ ID NO: 21999 - DNA, 62 bp, Homo sapiens
  chr16:2129117-2129179
  hypo
ctccacctggagctcacggaaacctgtctggacatgatggctcgatacgtcttctccaactt

SEQ ID NO: 22000 - DNA, 45 bp, Homo sapiens
  chr16:2129272-2129317
  hypo
ctaggtctcctgtgggcgagttcctcctagcgggtggcaggacca

SEQ ID NO: 22001 - DNA, 111 bp, Homo sapiens
  chr16:2131667-2131778
  hypo
tgcaggagctgtctaacgccctcatggcggctgagcgcttcaaggagcaccgggacacagccctgtacaagtcactgtcggtgccggcagccagcacggccaaaccccctc

SEQ ID NO: 22002 - DNA, 56 bp, Homo sapiens
  chr16:2141908-2141964
  hypo
tgccggagaggggtggcgtgggtgccgcaccccagcccttccggcaccccggagcc

SEQ ID NO: 22003 - DNA, 31 bp, Homo sapiens
  chr16:2142597-2142628
  hypo
cacagcatcagtcacacgctccagcccctac

SEQ ID NO: 22004 - DNA, 100 bp, Homo sapiens
  chr16:2146362-2146462
  hypo
agggcatggcagagcccggggtcacacgcgtgggaacacgccgtgggtgcgctccgccgccggctgccatgtgcgtgactatgtgcgtgactacatacaa

SEQ ID NO: 22005 - DNA, 66 bp, Homo sapiens
  chr16:2212715-2212781
  hypo
tcctcatggggtgctgcgcatgggcctcgaggtggacagtgcaggtgggcccggggcaggagtcct

SEQ ID NO: 22006 - DNA, 53 bp, Homo sapiens
  chr16:2213670-2213723
  hypo
gagccgcctgcctgcccgggcctctgcatacctgggatcggggtgaaggacct

SEQ ID NO: 22007 - DNA, 306 bp, Homo sapiens
  chr16:2229599-2229905
  hypo
tgccagggcctggcagcggcaccttcttggaggtgggtgtgggcgagccctggagcttgggcacaggctgcgtcaggacgggcttgggagagacaggcggcttggccggcttccgggcttcgccctcgggcgggggcaatgggggtaggtgcgccaggtcggtgggcgggggttcggcaggcgggggcggtggaggcagctccggaggcccagcctgctccgaggccggtcggcggcgcacggtgccagtgccattatggtacacggacagtggcggtggtggctcaggcccggcctcccgctcct

SEQ ID NO: 22008 - DNA, 31 bp, Homo sapiens
  chr16:2230013-2230044
  hypo
ccaccttggccaagggcgggccttcgacacc

SEQ ID NO: 22009 - DNA, 123 bp, Homo sapiens
  chr16:2230100-2230223
  hypo
aggggcctgggtctgccgactccccaggcccccggcgggcagtggccagaagtccggtgactggcccgctgagcgtgcggcgccggttcaccacctccccgccaggcccgatggcctctttgt

SEQ ID NO: 22010 - DNA, 40 bp, Homo sapiens
  chr16:2230290-2230330
  hypo
gccctcaggaggcctgcgggcagcccggcccccaccccca

SEQ ID NO: 22011 - DNA, 229 bp, Homo sapiens
  chr16:2230441-2230670
  hypo
aggccatcctcaggctcggcgtcaggcaccggctcatccgccaggttggcactagccagggccgagctggagcgcttgggtgggggcggcgggggccccttctttcggggccgcacggcaaaggactggctgcggttgacgttcttgtcggcacctgcgggcgccctcactgagtggctgcggcccacgcgccgctggaccgtggcataggggccggcagccgcaggca

SEQ ID NO: 22012 - DNA, 77 bp, Homo sapiens
  chr16:2230698-2230775
  hypo
gtcggacgccgcatagcgattcaggctgtgggcccgcttcttgggccgccccggctccgcgtcggcctcagggggca

SEQ ID NO: 22013 - DNA, 169 bp, Homo sapiens
  chr16:2230778-2230947
  hypo
acagtgtgggcacagccgtcggcacgggtgggggcgcaggccccggggcagccggccccacctcgccctccacgggctggggcagcacgtaggcaaagccgcggtgcgtcggtgactgaggcagggagcggggtgacatggggcgctctgtcggcggcagcagctgcgg

SEQ ID NO: 22014 - DNA, 122 bp, Homo sapiens
  chr16:2231061-2231183
  hypo
tggtgggaggacctgccgtggcttgccaggcacggggggcacgctggccctcttgatgctgtggccgtggcggccgggccgggcctccctgggcggggtgccgggggcggggccctcatcca

SEQ ID NO: 22015 - DNA, 31 bp, Homo sapiens
  chr16:2231184-2231215
  hypo
gaggtactcctggcttcgagacatggggctg

SEQ ID NO: 22016 - DNA, 91 bp, Homo sapiens
  chr16:2231234-2231325
  hypo
ctcccagcagctcctgcgagctgctcatgtgccgtgcccgaccacccaggctggagtcctgccgcgtggtggccctcggggtgggtggcag

SEQ ID NO: 22017 - DNA, 31 bp, Homo sapiens
  chr16:2231348-2231379
  hypo
tgggccccacctcagccgggccagtcatggc

SEQ ID NO: 22018 - DNA, 31 bp, Homo sapiens
  chr16:2241313-2241344
  hypo
gcagcccctgctgccccggcctcagtcccag

SEQ ID NO: 22019 - DNA, 46 bp, Homo sapiens
  chr16:2278348-2278394
  hypo
ctgctgacagcaggctcgttgcagatgaggacgatgtgcacagatg

SEQ ID NO: 22020 - DNA, 31 bp, Homo sapiens
  chr16:2278402-2278433
  hypo
gccaggcagagttcaccgccttggaggattt

SEQ ID NO: 22021 - DNA, 41 bp, Homo sapiens
  chr16:2278448-2278489
  hypo
tcagaaggcctgccagcgggcccctccggaggccctgcctg

SEQ ID NO: 22022 - DNA, 31 bp, Homo sapiens
  chr16:2278491-2278522
  hypo
acccctgccaccacagcgttgctgggccagg

SEQ ID NO: 22023 - DNA, 62 bp, Homo sapiens
  chr16:2278539-2278601
  hypo
ctcccccatcccctcccgggttcacctgacaggtgggggaggtggccgcgcttcaggatgga

SEQ ID NO: 22024 - DNA, 84 bp, Homo sapiens
  chr16:2278701-2278785
  hypo
cgtcctggagggcctgcggtggcccagccttcttggcagcctctggtcgaagcccgtgctgttgggggccgggatctcttcttt

SEQ ID NO: 22025 - DNA, 31 bp, Homo sapiens
  chr16:2281202-2281233
  hypo
tgcgggtgcaggggtgcggtcagctgtgtgg

SEQ ID NO: 22026 - DNA, 40 bp, Homo sapiens
  chr16:2281408-2281448
  hypo
tgtttctgagtcaccacgcttttgtcgtgtttcaagagaa

SEQ ID NO: 22027 - DNA, 46 bp, Homo sapiens
  chr16:2281623-2281669
  hypo
tcgcctcaggctgtcccgggtgtctggagagcgttcactctcccag

SEQ ID NO: 22028 - DNA, 31 bp, Homo sapiens
  chr16:2281671-2281702
  hypo
caagcctgccttgggacggggctctggccag

SEQ ID NO: 22029 - DNA, 31 bp, Homo sapiens
  chr16:2286026-2286057
  hypo
gagcctcggcctccaccgcagggtgagcagg

SEQ ID NO: 22030 - DNA, 31 bp, Homo sapiens
  chr16:2286091-2286122
  hypo
tggctggtcctacctgcgctgccttgctttc

SEQ ID NO: 22031 - DNA, 51 bp, Homo sapiens
  chr16:2294341-2294392
  hypo
ctgtcccaccccctggcgctggcccagaacagccagcgaggccacctggga

SEQ ID NO: 22032 - DNA, 48 bp, Homo sapiens
  chr16:2475884-2475932
  hypo
ccctgggtttccagggcgtacagaggcagctctcgacctagctagctc

SEQ ID NO: 22033 - DNA, 31 bp, Homo sapiens
  chr16:2475947-2475978
  hypo
ccctaactgcagtgcacggagcagagtgggg

SEQ ID NO: 22034 - DNA, 49 bp, Homo sapiens
  chr16:2475985-2476034
  hypo
gagaacttaagaggcccgctggagaacccaggtgcgtttccttagaaag

SEQ ID NO: 22035 - DNA, 69 bp, Homo sapiens
  chr16:2498003-2498072
  hypo
aggggaaggtgccttgcggggggccgctggagcagcgtgttccctgatagttggcgctggttgacaaca

SEQ ID NO: 22036 - DNA, 31 bp, Homo sapiens
  chr16:2498073-2498104
  hypo
agaacagggtgaccatcgcctagagacagtc

SEQ ID NO: 22037 - DNA, 31 bp, Homo sapiens
  chr16:2531771-2531802
  hypo
gcccctgctcaggctccgagcagcaggctca

SEQ ID NO: 22038 - DNA, 69 bp, Homo sapiens
  chr16:2531803-2531872
  hypo
cagccacagttaggcacgtttgcacttccaaccatcacaggcaggcgggccaaccggcccatggtgtgg

SEQ ID NO: 22039 - DNA, 210 bp, Homo sapiens
  chr16:2546249-2546459
  hypo
aactgaagcagctggcgcgccagggctactgggcccaaagccacgccctgcggggaaaggtgtaccagcgcctgatccgggacattccctgccgcacggtcacgcctgacgccagcgtgtacagcgacatcgtgggcaagatcgtgggcaagcacagcagcagctgcctgccgctgcccgagttcgtggacaacacgcaggtgcccagct

SEQ ID NO: 22040 - DNA, 61 bp, Homo sapiens
  chr16:2546510-2546571
  hypo
tggccaaccagttccccgacatctccttctgccccgccctgccggccgtggtggccctgct

SEQ ID NO: 22041 - DNA, 31 bp, Homo sapiens
  chr16:2760239-2760270
  hypo
acatgcaggtgccctgcgtgggtgcccgtcc

SEQ ID NO: 22042 - DNA, 31 bp, Homo sapiens
  chr16:2764407-2764438
  hypo
ctcctctggccaccaccgtgccccacacctc

SEQ ID NO: 22043 - DNA, 51 bp, Homo sapiens
  chr16:2770027-2770078
  hypo
gagtagggggctgagccggagccccaggcagtgcagcggagcctggtgggg

SEQ ID NO: 22044 - DNA, 148 bp, Homo sapiens
  chr16:2770091-2770239
  hypo
ggaccctgcaccttcacgactcaccaaaacacagcagcagcaggagcggcaccgccgccggccgcctcatgtcctcaggcctggctggggcgcagggccgtggtcggcggtggcagaagcgttggagcacgagcgaggtgcaggctcc

SEQ ID NO: 22045 - DNA, 57 bp, Homo sapiens
  chr16:2770260-2770317
  hypo
gagatgagcacaggcccggctatgcggcccaacccgtcggcccggcctgcccagctc

SEQ ID NO: 22046 - DNA, 124 bp, Homo sapiens
  chr16:2770319-2770443
  hypo
ctcctcaggaaggaagcgcccagagccgactcctccgtgacctagccctgaaccccgagaccccagggcagacccctcaccccagcgcagcacggggtgccgttggcctcggttcctggaccct

SEQ ID NO: 22047 - DNA, 50 bp, Homo sapiens
  chr16:2770455-2770505
  hypo
accccccagcagaccccgagctgaccgcggtgcacgcgaagtccgtccag

SEQ ID NO: 22048 - DNA, 107 bp, Homo sapiens
  chr16:2806295-2806402
  hypo
ggccaggggcctgacccgtgtctccccgctccccctcaggagcggtggtgccccccccgggcacggggccatgtacaacgggatcgggctgccgacgccccggggca

SEQ ID NO: 22049 - DNA, 31 bp, Homo sapiens
  chr16:2819786-2819817
  hypo
tgaggctcttcaccaacgggccttgcccgcc

SEQ ID NO: 22050 - DNA, 26 bp, Homo sapiens
  chr16:2828851-2828877
  hypo
acatcgcctggcgacagagtgagact

SEQ ID NO: 22051 - DNA, 31 bp, Homo sapiens
  chr16:2861515-2861546
  hypo
cggttcaggggctcagcgtaactcagggttc

SEQ ID NO: 22052 - DNA, 31 bp, Homo sapiens
  chr16:2946522-2946553
  hypo
ggcacagaagtcatcccggcagcccccagga

SEQ ID NO: 22053 - DNA, 34 bp, Homo sapiens
  chr16:2959165-2959199
  hypo
gcactttgggaggctgcggcgggtgaataacttg

SEQ ID NO: 22054 - DNA, 31 bp, Homo sapiens; identical to SEQ ID NO: 5496
  chr16:2969679-2969710
  hypo

SEQ ID NO: 22055 - DNA, 31 bp, Homo sapiens
  chr16:2974642-2974673
  hypo
gccacgctgtgggtcacgcaacccccccagg

SEQ ID NO: 22056 - DNA, 31 bp, Homo sapiens
  chr16:2979897-2979928
  hypo
ctggccccgccaccctcgccagcaccttgca

SEQ ID NO: 22057 - DNA, 31 bp, Homo sapiens
  chr16:3051090-3051121
  hypo
ggaacgagggccatcacggactcagttctcc

SEQ ID NO: 22058 - DNA, 31 bp, Homo sapiens
  chr16:3051125-3051156
  hypo
tctgtccctctccccccggtcctctgagaaa

SEQ ID NO: 22059 - DNA, 53 bp, Homo sapiens
  chr16:3052304-3052357
  hypo
ttccctaaatattttgcgtgccttaaatgcctgattaacgaaatagccttaga

SEQ ID NO: 22060 - DNA, 31 bp, Homo sapiens
  chr16:3052369-3052400
  hypo
caattagaaacataatcgacttgactctctt

SEQ ID NO: 22061 - DNA, 31 bp, Homo sapiens; identical to SEQ ID NO: 5498
  chr16:3071261-3071292
  hypo

SEQ ID NO: 22062 - DNA, 23 bp, Homo sapiens
  chr16:3158300-3158323
  hypo
accgcgcccggcctatagtcagt

SEQ ID NO: 22063 - DNA, 62 bp, Homo sapiens
  chr16:3165155-3165217
  hypo
accggcactgtggaggcggcttggtgaatattcctcctcttgccgcccgtccttgctggggt

SEQ ID NO: 22064 - DNA, 50 bp, Homo sapiens
  chr16:3167168-3167218
  hypo
gctgccccaggaagtccgcttttcctgggttcatccgcagggctcactcc

SEQ ID NO: 22065 - DNA, 38 bp, Homo sapiens
  chr16:3167264-3167302
  hypo
gcagcaagcttggcttcggggcccgagggctgcttgcc

SEQ ID NO: 22066 - DNA, 68 bp, Homo sapiens
  chr16:3169008-3169076
  hypo
gtgcacaggtgagggacgggcgcgcgcctttgtctgcgggagtggggcgcagacgcaggccttctggc

SEQ ID NO: 22067 - DNA, 38 bp, Homo sapiens
  chr16:3169419-3169457
  hypo
gccggctgagccagatcgcaccccggatgcagctccgc

SEQ ID NO: 22068 - DNA, 35 bp, Homo sapiens
  chr16:3170503-3170538
  hypo
ggccttggacttgaagcgcccgcctacacagcttt

SEQ ID NO: 22069 - DNA, 46 bp, Homo sapiens
  chr16:3170539-3170585
  hypo
tctcctggtgccctggcgctgattccccgagcgtgggggagctcct

SEQ ID NO: 22070 - DNA, 31 bp, Homo sapiens
  chr16:3170601-3170632
  hypo
ctcattgaggcatccccgcatcaccactctt

SEQ ID NO: 22071 - DNA, 31 bp, Homo sapiens
  chr16:3170903-3170934
  hypo
tctcccactcaggcatcggtggctgggtttt

SEQ ID NO: 22072 - DNA, 22 bp, Homo sapiens
  chr16:3171178-3171200
  hypo
cagagtcttgctctgtcgccca

SEQ ID NO: 22073 - DNA, 30 bp, Homo sapiens
  chr16:3196500-3196530
  hypo
gaaaagggcttctggccgggtgcagtggct

SEQ ID NO: 22074 - DNA, 112 bp, Homo sapiens; identical to SEQ ID NO: 5501
  chr16:3200662-3200774
  hypo

SEQ ID NO: 22075 - DNA, 116 bp, Homo sapiens; identical to SEQ ID NO: 5502
  chr16:3200795-3200911
  hypo

SEQ ID NO: 22076 - DNA, 55 bp, Homo sapiens; identical to SEQ ID NO: 5503
  chr16:3200930-3200985
  hypo

SEQ ID NO: 22077 - DNA, 101 bp, Homo sapiens; identical to SEQ ID NO: 5505
  chr16:3209093-3209194
  hypo

SEQ ID NO: 22078 - DNA, 170 bp, Homo sapiens; identical to SEQ ID NO: 5506
  chr16:3209203-3209373
  hypo

SEQ ID NO: 22079 - DNA, 66 bp, Homo sapiens
  chr16:3211683-3211749
  hypo
gctcccgtggtgcgcccgggggaaatgtggttggaaatcgcggcggccgggcatggtggctcacgc

SEQ ID NO: 22080 - DNA, 43 bp, Homo sapiens
  chr16:3492712-3492755
  hypo
actgtggtatgcgcgcctctcagatactcgagaggctgaggcg

SEQ ID NO: 22081 - DNA, 31 bp, Homo sapiens
  chr16:3613740-3613771
  hypo
tgtccccaccatcttgcggccaccatgggcc

SEQ ID NO: 22082 - DNA, 74 bp, Homo sapiens
  chr16:3635038-3635112
  hypo
ttcccaatgatagcatcggtgacacgcactgaggaccacaccttgtataacacgggtgccgggtgaacagagct

SEQ ID NO: 22083 - DNA, 36 bp, Homo sapiens
  chr16:3635121-3635157
  hypo
actgaacccaacagcccggcacgtgactaaaactta

SEQ ID NO: 22084 - DNA, 56 bp, Homo sapiens
  chr16:3696693-3696749
  hypo
tctaattacacatttgcgagatgttctgagagctgtggggacggctgggacatgta

SEQ ID NO: 22085 - DNA, 31 bp, Homo sapiens
  chr16:3696771-3696802
  hypo
ggagaggcagtgatgacgggtggtatggagg

SEQ ID NO: 22086 - DNA, 75 bp, Homo sapiens
  chr16:3696803-3696878
  hypo
tgcagaatctggaggacgtgcaggctcagggtgcatggtgcgggcggggctgagggggagcggggcctaggatga

SEQ ID NO: 22087 - DNA, 31 bp, Homo sapiens
  chr16:3706728-3706759
  hypo
tgtcaggttcttctcccggttcacaggtggg

SEQ ID NO: 22088 - DNA, 39 bp, Homo sapiens
  chr16:3706767-3706806
  hypo
gggccagggtggggctcggcttggcgcttatggcctcca

SEQ ID NO: 22089 - DNA, 31 bp, Homo sapiens
  chr16:3721594-3721625
  hypo
gcaggccgggcttccccgaccacctctgctc

SEQ ID NO: 22090 - DNA, 31 bp, Homo sapiens
  chr16:3776073-3776104
  hypo
tcactgtaacagggaccggagctggtgctcc

SEQ ID NO: 22091 - DNA, 61 bp, Homo sapiens
  chr16:3776217-3776278
  hypo
ctcagattctgggagtcgtgtacggggggggggagccgcctgaacacgggaagaagcgccg

SEQ ID NO: 22092 - DNA, 56 bp, Homo sapiens
  chr16:3776372-3776428
  hypo
aatcacctgtgagcctcgaatgtgtggggccaacgctgagccgcccacctcagtcg

SEQ ID NO: 22093 - DNA, 31 bp, Homo sapiens
  chr16:3781041-3781072
  hypo
gccttctgccttgtgacgctgtcctagttct

SEQ ID NO: 22094 - DNA, 76 bp, Homo sapiens
  chr16:3781097-3781173
  hypo
ggtacagacaccaacccgggcacccatgcaaagggacaggatgcttcgtcagaccccaggccggctgtgggggtgg

SEQ ID NO: 22095 - DNA, 34 bp, Homo sapiens; identical to SEQ ID NO: 5518
  chr16:3781397-3781431
  hypo

SEQ ID NO: 22096 - DNA, 46 bp, Homo sapiens; identical to SEQ ID NO: 5519
  chr16:3781433-3781479
  hypo

SEQ ID NO: 22097 - DNA, 31 bp, Homo sapiens; identical to SEQ ID NO: 5520
  chr16:3781527-3781558
  hypo

SEQ ID NO: 22098 - DNA, 54 bp, Homo sapiens
  chr16:3782088-3782142
  hypo
taggtgctgcagccttcgggacagagcagggcctgtcctcggccaggctggtgt

SEQ ID NO: 22099 - DNA, 31 bp, Homo sapiens
  chr16:3782145-3782176
  hypo
tatcagctttatgccacgctgcctctaaagg

SEQ ID NO: 22100 - DNA, 43 bp, Homo sapiens
  chr16:3782241-3782284
  hypo
gtgccacaaccagatgcggaagattccacgtcacaactgtggt

SEQ ID NO: 22101 - DNA, 31 bp, Homo sapiens
  chr16:3782304-3782335
  hypo
gaaggctctacacacccgagaaagcatgaga

SEQ ID NO: 22102 - DNA, 51 bp, Homo sapiens
  chr16:3782393-3782444
  hypo
gactctgaggcccctgcggggtccactcaaggcccacggagagcaggctgg

SEQ ID NO: 22103 - DNA, 31 bp, Homo sapiens
  chr16:3782453-3782484
  hypo
ggggccatcagtgctgcgcctgactggctga

SEQ ID NO: 22104 - DNA, 31 bp, Homo sapiens
  chr16:3782512-3782543
  hypo
cctcctctggaaagaacgcaggattaccact

SEQ ID NO: 22105 - DNA, 31 bp, Homo sapiens
  chr16:3784365-3784396
  hypo
cgacacctcagcatcccgcctcctaacacat

SEQ ID NO: 22106 - DNA, 62 bp, Homo sapiens
  chr16:3784502-3784564
  hypo
gggtggaactcagctgcgcaaagcctgtctcggacgcggtaacctcccgtgtcacccttagg

SEQ ID NO: 22107 - DNA, 43 bp, Homo sapiens
  chr16:3784603-3784646
  hypo
accagctacactccagcgggagcaagtccgaagacaacaggcc

SEQ ID NO: 22108 - DNA, 56 bp, Homo sapiens
  chr16:3784658-3784714
  hypo
taggagccacctagggcgtaaacccacgccaccccctgcccgcgcctcctctgtcc

SEQ ID NO: 22109 - DNA, 44 bp, Homo sapiens
  chr16:3784763-3784807
  hypo
acctgtgcagtgagcacgagtgtgtgtggcggaagcggcccagg

SEQ ID NO: 22110 - DNA, 37 bp, Homo sapiens
  chr16:3784999-3785036
  hypo
tgcagccttcaacgttcgtcatcgctctccctgcacc

SEQ ID NO: 22111 - DNA, 100 bp, Homo sapiens
  chr16:3785041-3785141
  hypo
ctacagcccacacccacgccaccatcatctcttccccagacagccgcacaaacccgcacacagcgcgcctcctcccaccgcctggcgggtcctcttccag

SEQ ID NO: 22112 - DNA, 31 bp, Homo sapiens
  chr16:3785795-3785826
  hypo
tcctctcttccctctccgagtctaagtggac

SEQ ID NO: 22113 - DNA, 31 bp, Homo sapiens
  chr16:3785871-3785902
  hypo
cactgctgcccaccaacgccctgtgctgcag

SEQ ID NO: 22114 - DNA, 31 bp, Homo sapiens
  chr16:3802016-3802047
  hypo
agacacagaggtaagacgcagacaccaagac

SEQ ID NO: 22115 - DNA, 31 bp, Homo sapiens
  chr16:3802072-3802103
  hypo
agcattgattagcattcggtctcattgcaca

SEQ ID NO: 22116 - DNA, 45 bp, Homo sapiens
  chr16:3802112-3802157
  hypo
ccatcatcactaacaacgacaggctcggtccggctccaagaggca

SEQ ID NO: 22117 - DNA, 45 bp, Homo sapiens
  chr16:3803029-3803074
  hypo
gagtgtcaggtagcgacggcagcacgaatgcggtttagtgctcaa

SEQ ID NO: 22118 - DNA, 31 bp, Homo sapiens
  chr16:3892676-3892707
  hypo
atgagatggcagtgcacggtggctcatgcct

SEQ ID NO: 22119 - DNA, 56 bp, Homo sapiens; identical to SEQ ID NO: 5521
  chr16:3931081-3931137
  hypo

SEQ ID NO: 22120 - DNA, 31 bp, Homo sapiens; identical to SEQ ID NO: 5522
  chr16:3931160-3931191
  hypo

SEQ ID NO: 22121 - DNA, 31 bp, Homo sapiens
  chr16:3931902-3931933
  hypo
accagagttaacatcccgaaaagagagggag

SEQ ID NO: 22122 - DNA, 31 bp, Homo sapiens
  chr16:3931949-3931980
  hypo
aactccctggccaggcgcggtggcagatcac

SEQ ID NO: 22123 - DNA, 31 bp, Homo sapiens
  chr16:4007727-4007758
  hypo
gggggcggttcaggtgcgtcttggcacaagc

SEQ ID NO: 22124 - DNA, 35 bp, Homo sapiens
  chr16:4016325-4016360
  hypo
ggcccatggttgaagccgacgcggagcttgaagtt

SEQ ID NO: 22125 - DNA, 31 bp, Homo sapiens
  chr16:4016370-4016401
  hypo
atgttgttgttgaagtcgtccaccacgcgca

SEQ ID NO: 22126 - DNA, 31 bp, Homo sapiens
  chr16:4043268-4043299
  hypo
ggaggacccgcgggtgcggagtgctgttacc

SEQ ID NO: 22127 - DNA, 31 bp, Homo sapiens
  chr16:4043834-4043865
  hypo
acagcatggtgaacctcgaaaacattatgct

SEQ ID NO: 22128 - DNA, 31 bp, Homo sapiens
  chr16:4047660-4047691
  hypo
tcccagcaggtttgtccgggaagtgggagta

SEQ ID NO: 22129 - DNA, 221 bp, Homo sapiens; identical to SEQ ID NO: 5523
  chr16:4166050-4166271
  hypo

SEQ ID NO: 22130 - DNA, 119 bp, Homo sapiens; identical to SEQ ID NO: 5524
  chr16:4166386-4166505
  hypo

SEQ ID NO: 22131 - DNA, 173 bp, Homo sapiens; identical to SEQ ID NO: 5525
  chr16:4166639-4166812
  hypo

SEQ ID NO: 22132 - DNA, 48 bp, Homo sapiens
  chr16:4183951-4183999
  hypo
ggctccttaagtctcccgagaaggtgcaaattgcgttaattgccactg

SEQ ID NO: 22133 - DNA, 31 bp, Homo sapiens
  chr16:4184000-4184031
  hypo
tgaggccaggccatggcgccctgctgggggc

SEQ ID NO: 22134 - DNA, 31 bp, Homo sapiens
  chr16:4228477-4228508
  hypo
ccacacactcgagccccggggatacaagtaa

SEQ ID NO: 22135 - DNA, 31 bp, Homo sapiens; identical to SEQ ID NO: 5528
  chr16:4233704-4233735
  hypo

SEQ ID NO: 22136 - DNA, 40 bp, Homo sapiens; identical to SEQ ID NO: 5529
  chr16:4233745-4233785
  hypo

SEQ ID NO: 22137 - DNA, 92 bp, Homo sapiens; identical to SEQ ID NO: 5530
  chr16:4234086-4234178
  hypo

SEQ ID NO: 22138 - DNA, 35 bp, Homo sapiens
  chr16:4310571-4310606
  hypo
acatgtgggcctccagcgagcgcacctggaggcag

SEQ ID NO: 22139 - DNA, 31 bp, Homo sapiens
  chr16:4310615-4310646
  hypo
ggctcagggccaaggccgggagcacaccctg

SEQ ID NO: 22140 - DNA, 31 bp, Homo sapiens; identical to SEQ ID NO: 5531
  chr16:4366576-4366607
  hypo

SEQ ID NO: 22141 - DNA, 31 bp, Homo sapiens
  chr16:4411851-4411882
  hypo
aggatcacaggacaggcgggcaggagcctga

SEQ ID NO: 22142 - DNA, 31 bp, Homo sapiens
  chr16:4414186-4414217
  hypo
aaaaaaaaaaaaaggccgttcagccggtgaa

SEQ ID NO: 22143 - DNA, 31 bp, Homo sapiens
  chr16:4414526-4414557
  hypo
ttggcacacagccacacggggctaccaggga

SEQ ID NO: 22144 - DNA, 124 bp, Homo sapiens
  chr16:4430995-4431119
  hypo
gcccgccaggggaccacggtgccccgagacgtgccacccgacacggtggggctgtacgtctttgagaacggcatcaccatgctcgacgcaggcagctttgccggcctgccgggcctgcagctcc

SEQ ID NO: 22145 - DNA, 64 bp, Homo sapiens
  chr16:4431125-4431189
  hypo
tgtcacagaaccagatcgccagcctgcccagcggggtcttccagccactcgccaacctcagcaa

SEQ ID NO: 22146 - DNA, 79 bp, Homo sapiens
  chr16:4431222-4431301
  hypo
caccaatgagaccttccgtggcctgcggcgcctcgagcgcctctacctgggcaagaaccgcatccgccacatccagcct

SEQ ID NO: 22147 - DNA, 31 bp, Homo sapiens
  chr16:4644650-4644681
  hypo
cgggggcagatcgggtcgggggctccctaac

SEQ ID NO: 22148 - DNA, 39 bp, Homo sapiens
  chr16:4723592-4723631
  hypo
gcctctgtacctcctgcgccgacacgctgcgctaccagg

SEQ ID NO: 22149 - DNA, 31 bp, Homo sapiens
  chr16:4807248-4807279
  hypo
acccgaacgggttgcccgtgaatttcatctc

SEQ ID NO: 22150 - DNA, 31 bp, Homo sapiens
  chr16:4846368-4846399
  hypo
aagccttcagtcagcacgactgtgccaggtc

SEQ ID NO: 22151 - DNA, 31 bp, Homo sapiens
  chr16:4920296-4920327
  hypo
ggatgccctgctcaagcgtgctcggaaactt

SEQ ID NO: 22152 - DNA, 31 bp, Homo sapiens
  chr16:4920695-4920726
  hypo
tctcggtgtgtactgccgtttcccaaggagc

SEQ ID NO: 22153 - DNA, 31 bp, Homo sapiens
  chr16:4964117-4964148
  hypo
ggctccaatgaggacacgccatagagagagg

SEQ ID NO: 22154 - DNA, 31 bp, Homo sapiens
  chr16:4971776-4971807
  hypo
attagaggtggcaactcgaggctgaggaccc

SEQ ID NO: 22155 - DNA, 59 bp, Homo sapiens
  chr16:4971833-4971892
  hypo
gtggagagctgggactcgaacctaggactgtgtgctgtcctggccgccaggacagcaca

SEQ ID NO: 22156 - DNA, 40 bp, Homo sapiens
  chr16:4980310-4980350
  hypo
ccaactctctgctcaccgtcctgcacgcaggaggtgactg

SEQ ID NO: 22157 - DNA, 31 bp, Homo sapiens
  chr16:4980370-4980401
  hypo
cagcctgctcaggcctcgcactcctttccac

SEQ ID NO: 22158 - DNA, 59 bp, Homo sapiens
  chr16:4980419-4980478
  hypo
cattcatccccacctccgggctctgctggtcctggggtgtgaagcgcagggcaatgtat

SEQ ID NO: 22159 - DNA, 29 bp, Homo sapiens
  chr16:5004699-5004728
  hypo
tgagccactgtgctcggaccattttgcca

SEQ ID NO: 22160 - DNA, 48 bp, Homo sapiens; identical to SEQ ID NO: 5532
  chr16:5007928-5007976
  hypo

SEQ ID NO: 22161 - DNA, 81 bp, Homo sapiens; identical to SEQ ID NO: 5533
  chr16:5007999-5008080
  hypo

SEQ ID NO: 22162 - DNA, 31 bp, Homo sapiens; identical to SEQ ID NO: 5537
  chr16:5121975-5122006
  hypo

SEQ ID NO: 22163 - DNA, 31 bp, Homo sapiens; identical to SEQ ID NO: 5541
  chr16:8768189-8768220
  hypo

SEQ ID NO: 22164 - DNA, 37 bp, Homo sapiens; identical to SEQ ID NO: 5542
  chr16:8768282-8768319
  hypo

SEQ ID NO: 22165 - DNA, 31 bp, Homo sapiens
  chr16:8870108-8870139
  hypo
tcttcaagagaggaggcggggcgcctggggt

SEQ ID NO: 22166 - DNA, 27 bp, Homo sapiens
  chr16:8963898-8963925
  hypo
tacttgaggccgggtgcggtggctcac

SEQ ID NO: 22167 - DNA, 31 bp, Homo sapiens
  chr16:9005488-9005519
  hypo
tttacaggctgcagcccggagaaggcaaacc

SEQ ID NO: 22168 - DNA, 31 bp, Homo sapiens
  chr16:9005545-9005576
  hypo
gaggagctcaagggagcgggaacctgctggg

SEQ ID NO: 22169 - DNA, 58 bp, Homo sapiens
  chr16:9005594-9005652
  hypo
aatgctgcccagaaagcgagatctggggatgtgcagtttcttccgaagctgtcagtga

SEQ ID NO: 22170 - DNA, 31 bp, Homo sapiens
  chr16:9005653-9005684
  hypo
aactgatcagtgaactcgaggaaattacctg

SEQ ID NO: 22171 - DNA, 31 bp, Homo sapiens
  chr16:9005727-9005758
  hypo
caaccttcagagctcacgacaggctgggaag

SEQ ID NO: 22172 - DNA, 31 bp, Homo sapiens
  chr16:9005762-9005793
  hypo
tgttcccaccagccaccgtggaaaaaccgct

SEQ ID NO: 22173 - DNA, 31 bp, Homo sapiens
  chr16:9009859-9009890
  hypo
tgtgtgtgtgcttctgcgtcttttatcacaa

SEQ ID NO: 22174 - DNA, 78 bp, Homo sapiens
  chr16:9009911-9009989
  hypo
agtgattagtgatggcgcggggagagtaatcaccgcatgctgaggtctgctcaatgagaacctcgctgcacaggaggg

SEQ ID NO: 22175 - DNA, 31 bp, Homo sapiens
  chr16:9010028-9010059
  hypo
agtgactcaggaccaacgggacagccaacaa

SEQ ID NO: 22176 - DNA, 6 bp, Homo sapiens
  chr16:9062110-9062116
  hypo
caacct

SEQ ID NO: 22177 - DNA, 31 bp, Homo sapiens
  chr16:9062166-9062197
  hypo
accataaaatatcaaacgcttcaaaatccac

SEQ ID NO: 22178 - DNA, 33 bp, Homo sapiens
  chr16:9062198-9062231
  hypo
ggttggccagtgcattcgctcacgcctgtaatc

SEQ ID NO: 22179 - DNA, 26 bp, Homo sapiens
  chr16:9063641-9063667
  hypo
gtatagtggttggagtcgtgttcatt

SEQ ID NO: 22180 - DNA, 72 bp, Homo sapiens; identical to SEQ ID NO: 5544
  chr16:9186866-9186938
  hypo

SEQ ID NO: 22181 - DNA, 56 bp, Homo sapiens; identical to SEQ ID NO: 5545
  chr16:9186974-9187030
  hypo

SEQ ID NO: 22182 - DNA, 31 bp, Homo sapiens
  chr16:9222466-9222497
  hypo
gccccaaacatcttcccgtttccacactacc

SEQ ID NO: 22183 - DNA, 31 bp, Homo sapiens
  chr16:9222516-9222547
  hypo
ccctgggcctgcccttcggggctctgttcta

SEQ ID NO: 22184 - DNA, 31 bp, Homo sapiens
  chr16:9242311-9242342
  hypo
agttcacaatagggttcgagctatgacgatc

SEQ ID NO: 22185 - DNA, 31 bp, Homo sapiens
  chr16:10617155-10617186
  hypo
catcttgtggtgatggcggtggttttctttt

SEQ ID NO: 22186 - DNA, 31 bp, Homo sapiens
  chr16:10625824-10625855
  hypo
atgtagacagctgtggcgatggaggccaagg

SEQ ID NO: 22187 - DNA, 31 bp, Homo sapiens
  chr16:10631324-10631355
  hypo
gcaagactccatggggcgtggccctgcctgc

SEQ ID NO: 22188 - DNA, 54 bp, Homo sapiens
  chr16:10631387-10631441
  hypo
ccactgggcagctctccgtccctcctgtcacagggcttccgtcatgctgttccc

SEQ ID NO: 22189 - DNA, 37 bp, Homo sapiens
  chr16:10631474-10631511
  hypo
tgagacacaacactgtcgacagcgactcctactcacc

SEQ ID NO: 22190 - DNA, 31 bp, Homo sapiens; identical to SEQ ID NO: 5549
  chr16:10674032-10674063
  hypo

SEQ ID NO: 22191 - DNA, 348 bp, Homo sapiens; identical to SEQ ID NO: 5550
  chr16:10674137-10674485
  hypo

SEQ ID NO: 22192 - DNA, 191 bp, Homo sapiens; identical to SEQ ID NO: 5551
  chr16:10674486-10674677
  hypo

SEQ ID NO: 22193 - DNA, 31 bp, Homo sapiens
  chr16:10823652-10823683
  hypo
caagcacgggaggcaacgtgatattccgagg

SEQ ID NO: 22194 - DNA, 55 bp, Homo sapiens
  chr16:11072430-11072485
  hypo
gactgaggctttgagccggagggagactcctttcaaagcacgctgcttttccttt

SEQ ID NO: 22195 - DNA, 31 bp, Homo sapiens
  chr16:11178654-11178685
  hypo
gcctgcccttgttcagcgcctctcgaagaca

SEQ ID NO: 22196 - DNA, 31 bp, Homo sapiens
  chr16:11219552-11219583
  hypo
cagcttccattccactcgaggagcccaggct

SEQ ID NO: 22197 - DNA, 59 bp, Homo sapiens
  chr16:11219600-11219659
  hypo
ggtctcaaccttggcccgaagccctcacttggcttccgcttgtgcgttgagcctcagtg

SEQ ID NO: 22198 - DNA, 42 bp, Homo sapiens
  chr16:11219688-11219730
  hypo
gcttgaggctgcctgccgcccacttggcgtctcccaagtgat

SEQ ID NO: 22199 - DNA, 31 bp, Homo sapiens
  chr16:11219739-11219770
  hypo
agggccacagccactacgatgtccccccccc

SEQ ID NO: 22200 - DNA, 45 bp, Homo sapiens
  chr16:11219923-11219968
  hypo
cttctacgaccaggggcgccggggcagcagcgaccccacagtgca

SEQ ID NO: 22201 - DNA, 31 bp, Homo sapiens
  chr16:11220138-11220169
  hypo
atttgtcaaagcacagcgcaagattaaacac

SEQ ID NO: 22202 - DNA, 31 bp, Homo sapiens
  chr16:11342006-11342037
  hypo
cagtgtgacccaagcccgttatttaaccctg

SEQ ID NO: 22203 - DNA, 29 bp, Homo sapiens
  chr16:11500579-11500608
  hypo
gcccggccttcccccggattttcaaatgg

SEQ ID NO: 22204 - DNA, 31 bp, Homo sapiens
  chr16:11541943-11541974
  hypo
aggctgaagagagggacgggccagcaggacc

SEQ ID NO: 22205 - DNA, 31 bp, Homo sapiens
  chr16:11542034-11542065
  hypo
cccagaaatgactatccgagaatggctactg

SEQ ID NO: 22206 - DNA, 31 bp, Homo sapiens
  chr16:11703493-11703524
  hypo
ttcccggctgcgtgaccgtgagcaagttact

SEQ ID NO: 22207 - DNA, 31 bp, Homo sapiens
  chr16:11831366-11831397
  hypo
tggaaaacaaggagcacgaaggtagacttaa

SEQ ID NO: 22208 - DNA, 24 bp, Homo sapiens
  chr16:11843359-11843383
  hypo
ggaggcaggagaatggcgtgagcc

SEQ ID NO: 22209 - DNA, 31 bp, Homo sapiens
  chr16:11853673-11853704
  hypo
aaaaaaggtcccgggccgggcacggtggctc

SEQ ID NO: 22210 - DNA, 31 bp, Homo sapiens
  chr16:11879890-11879921
  hypo
tggaaaaggggtaggacgaggtcttttcaat

SEQ ID NO: 22211 - DNA, 30 bp, Homo sapiens
  chr16:12011432-12011462
  hypo
gtgagccaccgcgcccggccgatctgtatt

SEQ ID NO: 22212 - DNA, 39 bp, Homo sapiens
  chr16:12012092-12012131
  hypo
cttatcggtgtgagccaccacacccggcagagtttgcct

SEQ ID NO: 22213 - DNA, 26 bp, Homo sapiens
  chr16:12018077-12018103
  hypo
gggattacaggcgtgagccactgcgc

SEQ ID NO: 22214 - DNA, 31 bp, Homo sapiens
  chr16:12142576-12142607
  hypo
gagtccagtgcacttgcgttttccatttgtg

SEQ ID NO: 22215 - DNA, 31 bp, Homo sapiens
  chr16:12410419-12410450
  hypo
ctcttcttacccaaatcgggatcttgctctc

SEQ ID NO: 22216 - DNA, 31 bp, Homo sapiens
  chr16:12497523-12497554
  hypo
tgcccagaggccttgccgaagaagtctgtgg

SEQ ID NO: 22217 - DNA, 44 bp, Homo sapiens
  chr16:12497560-12497604
  hypo
gttgggcagggggatacggtgggcctcttcgtgccagtcaggct

SEQ ID NO: 22218 - DNA, 76 bp, Homo sapiens
  chr16:12498044-12498120
  hypo
atggatactggacaagcgggacctgtagacatcgcctctgcttccttggggtacggatagccgcacccaggtgggc

SEQ ID NO: 22219 - DNA, 31 bp, Homo sapiens
  chr16:12498122-12498153
  hypo
tgagtgtctggggcagcgaaatgtgtgtctg

SEQ ID NO: 22220 - DNA, 31 bp, Homo sapiens
  chr16:12498179-12498210
  hypo
ggggactccagttctccgtctcctctctgat

SEQ ID NO: 22221 - DNA, 31 bp, Homo sapiens
  chr16:12800883-12800914
  hypo
cttctttagccgaacccggactgcaggcatc

SEQ ID NO: 22222 - DNA, 38 bp, Homo sapiens; identical to SEQ ID NO: 5552
  chr16:13877529-13877567
  hypo

SEQ ID NO: 22223 - DNA, 31 bp, Homo sapiens; identical to SEQ ID NO: 5553
  chr16:13877603-13877634
  hypo

SEQ ID NO: 22224 - DNA, 43 bp, Homo sapiens; identical to SEQ ID NO: 5554
  chr16:13877664-13877707
  hypo

SEQ ID NO: 22225 - DNA, 31 bp, Homo sapiens
  chr16:13977141-13977172
  hypo
atcccgcagtgagagacgaatctctattctc

SEQ ID NO: 22226 - DNA, 31 bp, Homo sapiens
  chr16:13977197-13977228
  hypo
taatcatcctccttccgcggaggtttatcat

SEQ ID NO: 22227 - DNA, 31 bp, Homo sapiens
  chr16:13977317-13977348
  hypo
aacatcgttaaggaaccgcagcgtaaaagcc

SEQ ID NO: 22228 - DNA, 31 bp, Homo sapiens
  chr16:14095398-14095429
  hypo
agtagtgaacaatgatcgcccagagcaaaat

SEQ ID NO: 22229 - DNA, 52 bp, Homo sapiens; identical to SEQ ID NO: 5555
  chr16:14396963-14397015
  hypo

SEQ ID NO: 22230 - DNA, 31 bp, Homo sapiens
  chr16:14728322-14728353
  hypo
attctgttaataatgccgatcagccccacac

SEQ ID NO: 22231 - DNA, 35 bp, Homo sapiens
  chr16:14728389-14728424
  hypo
aaacctcacagcagggcggggctccgcagctcacg

SEQ ID NO: 22232 - DNA, 31 bp, Homo sapiens
  chr16:14728493-14728524
  hypo
aggcaacatagggagacgctgtctcttaaaa

SEQ ID NO: 22233 - DNA, 31 bp, Homo sapiens
  chr16:15191524-15191555
  hypo
acacctgtgaacatatcgcccaatttaagaa

SEQ ID NO: 22234 - DNA, 31 bp, Homo sapiens
  chr16:15541439-15541470
  hypo
tctcagtaaatggtggcgatcatgttaatag

SEQ ID NO: 22235 - DNA, 69 bp, Homo sapiens
  chr16:15541562-15541631
  hypo
ggaagaatggaggtgacgatgagcgtggagatttctggaggcgtgcatgagcttcgctgcattggagga

SEQ ID NO: 22236 - DNA, 31 bp, Homo sapiens
  chr16:15609051-15609082
  hypo
caaggtgtatgatggtcgcagagcaaggctg

SEQ ID NO: 22237 - DNA, 31 bp, Homo sapiens
  chr16:15649665-15649696
  hypo
aagctcatgaatcctacgaaagctgaaccaa

SEQ ID NO: 22238 - DNA, 11 bp, Homo sapiens
  chr16:15649746-15649757
  hypo
cacatgctggc

SEQ ID NO: 22239 - DNA, 31 bp, Homo sapiens
  chr16:15680991-15681022
  hypo
gctgtatctaacccaccgtgtgaatgaactg

SEQ ID NO: 22240 - DNA, 40 bp, Homo sapiens
  chr16:15798617-15798657
  hypo
tgatcgtggaacataccgcacatggcgtaaaacaggtgcc

SEQ ID NO: 22241 - DNA, 31 bp, Homo sapiens
  chr16:15798668-15798699
  hypo
agaaaaggaaattatacgtgttaatccaagg

SEQ ID NO: 22242 - DNA, 31 bp, Homo sapiens
  chr16:15799466-15799497
  hypo
agacttttgctccccacgcaagggttggata

SEQ ID NO: 22243 - DNA, 10 bp, Homo sapiens
  chr16:15799539-15799549
  hypo
gtcaaaagga

SEQ ID NO: 22244 - DNA, 30 bp, Homo sapiens
  chr16:16095331-16095361
  hypo
caagcgtgagccaccgcgcccagccagggt

SEQ ID NO: 22245 - DNA, 7 bp, Homo sapiens
  chr16:16219543-16219550
  hypo
cctccca

SEQ ID NO: 22246 - DNA, 31 bp, Homo sapiens
  chr16:16259431-16259462
  hypo
ctgagttgacctcagccggtcccggaagcct

SEQ ID NO: 22247 - DNA, 82 bp, Homo sapiens
  chr16:16259629-16259711
  hypo
tgtctccttggagaagcggtttagcaggtgaccaatgggtgtccgctcaaagaagctgatgggagatcgcaccacatcccac

SEQ ID NO: 22248 - DNA, 74 bp, Homo sapiens
  chr16:16282898-16282972
  hypo
agctgtggtgcctgcacggtccatgtggcccacccgccatgtccgcatgtgcttccctccgtagatcccactcc

SEQ ID NO: 22249 - DNA, 31 bp, Homo sapiens
  chr16:16282981-16283012
  hypo
taacacatgtcctctccgcagtcataagcta

SEQ ID NO: 22250 - DNA, 64 bp, Homo sapiens
  chr16:16283021-16283085
  hypo
ctctctaaagacacagcgcattgctaatggtgatgagtgcgcagccccacggctctaggcatca

SEQ ID NO: 22251 - DNA, 51 bp, Homo sapiens
  chr16:18076375-18076426
  hypo
ttcatcagaggcaagacgctaggcccagcccatactcgaggggaggaaatc

SEQ ID NO: 22252 - DNA, 52 bp, Homo sapiens
  chr16:18802536-18802588
  hypo
gcacccatgtaccagacgctagcaaggccctggggtacgaggtgcccacaca

SEQ ID NO: 22253 - DNA, 80 bp, Homo sapiens
  chr16:18802600-18802680
  hypo
ccagttctgtccctgccggttcttccagcttcgtcctctctcacacgtcaatgcccctgctcattcgttgcatttcctct

SEQ ID NO: 22254 - DNA, 38 bp, Homo sapiens
  chr16:18804504-18804542
  hypo
gatagtacagcagaaacggttcccggggcaatgggtgc

SEQ ID NO: 22255 - DNA, 27 bp, Homo sapiens
  chr16:18950991-18951018
  hypo
agtcaccgtgcccggccctcctgcaac

SEQ ID NO: 22256 - DNA, 31 bp, Homo sapiens
  chr16:19026859-19026890
  hypo
agcaacaatgctgctacgaacactcaagaca

(The sequence listing continues in the following parts.)

1. A composition comprising a plurality of different bait oligonucleotides, wherein:
a) each bait oligonucleotide in the plurality of different bait oligonucleotides is at least 45 nucleotides in length;
b) the plurality of different bait oligonucleotides collectively hybridize to at least 100 target genomic regions;
c) the at least 100 target genomic regions are differentially methylated in at least one hematological disorder (HD) relative to a different HD or relative to a non-HD cancer;
d) the at least one HD and the different HD are selected from leukemia, lymphoid neoplasms, multiple myeloma, and a myeloid neoplasm.

2. The composition of claim 1, wherein the at least 100 target genomic regions comprise at least 20% of the target genomic regions of any one of Lists 1-8, or complements thereof.

3. The composition of claim 1, wherein the at least 100 target genomic regions comprise at least 20%, of the target genomic regions of Lists 1-8, or complements thereof.

4. The composition of claim 1, wherein:
a) the at least 100 target genomic regions comprise at least 20% of the target genomic regions of Lists 1 or 8, or complements thereof;
b) at least 100 target genomic regions comprise at least 20% of the target genomic regions of Lists 2-4, or complements thereof; or
c) at least 100 target genomic regions comprise at least 20% of the target genomic regions of Lists 5-7, or complements thereof.

5.-33. (canceled)

34. The composition of claim 1, wherein the total size of the of the at least 100 target genomic regions comprises 10 kb to 2000 kb.

35. The composition of claim 1, further comprising converted cell-free DNA (cfDNA) fragments hybridized to the plurality of different bait oligonucleotides.

36.-43. (canceled)

44. The composition of claim 1, wherein:
a) the plurality of different bait oligonucleotides comprises pairs of bait oligonucleotides;
b) each pair of bait oligonucleotides comprises a first bait oligonucleotide and a second bait oligonucleotide;
c) each bait oligonucleotide comprises a 5′ end and a 3′ end;
d) for each pair of bait oligonucleotides, a sequence of at least X nucleotide bases at the 3′ end of the first bait oligonucleotide is identical to a sequence of X nucleotide bases at the 5′ end the second bait oligonucleotide; and
e) X is at least 25, 30, 35, 40, 45, 50, 60, 70, 75 or 100.

45. The composition of claim 44, wherein, for each pair of bait oligonucleotides, the first bait oligonucleotide comprises a sequence of at least 31, 40, 50 or 60 nucleotide bases that does not overlap a sequence of the second bait oligonucleotide.

46.-50. (canceled)

51. A method for detecting cells of a hematological disorder (HD) in a subject, the method comprising
a) capturing cell-free DNA (cfDNA) fragments from the test-subject or amplification products thereof with a bait oligonucleotide composition, wherein:
i) the bait oligonucleotide composition comprises a plurality of different bait oligonucleotides that collectively hybridize to at least 100 target genomic regions;
ii) each bait oligonucleotide of the plurality of different bait oligonucleotides is at least 45 nucleotides in length;
iii) the at least 100 target genomic regions are differentially methylated in at least one HD relative to a different HD or relative to a non-HD cancer;
iv) the at least one HD and the different HD are selected from leukemia, lymphoid neoplasm, multiple myeloma, and myeloid neoplasm; and
v) capturing comprises separating bait-bound DNA from unbound DNA;
b) sequencing the captured cfDNA fragments or amplification products thereof to produce sequencing reads, and
c) applying-detecting cells of the first HD with a trained classifier, wherein the trained classifier detects a number of sequencing reads above a threshold for a plurality of the at least 100 target genomic regions that are identified as hypermethylated or hypomethylated in the ctDNA fragments.

52. (canceled)

53. The method of claim 51, the at least 100 target genomic regions comprise a total length of 200,000 to 2 million nucleotides.

54.-57. (canceled)

58. The method of claim 51, wherein the trained classifier is a mixture model classifier.

59. The method of claim 51, wherein the classifier was trained on converted DNA sequences derived from the at least 100 target genomic regions.

60. The method of claim 59, wherein the at least one HD and the different HD are types of cancer, and wherein the trained classifier detects cells of the first HD by:
generating a set of features for the sample, wherein each feature in the set of features comprises a numerical value;
inputting the set of features into the classifier, wherein the classifier comprises a multinomial classifier;
based on the set of features, determining, at the classifier, a set of probability scores, wherein the set of probability scores comprises one probability score per cancer type class and per non-cancer type class; and
thresholding the set of probability scores based on one or more values determined during training of the classifier to detect cfDNA in the sample from cells of the first HD.

61. The method of claim 60, wherein
a) the set of features comprises a set of binarized features;
b) the numerical value comprises a single binary value;
c) the multinomial classifier comprises a multinomial logistic regression ensemble trained to predict a source tissue for the cancer; or
d) the method further comprises determining a final cancer classification based on a top-two probability score differential relative to a minimum value, wherein the minimum value corresponds to a predefined percentage of training cancer samples that had been assigned the correct cancer type as their highest score during training of the classifier.

62.-67. (canceled)

68. The method of claim 51, wherein the first HD is a type of cancer, and wherein cells of the first HD are detected with a specificity of at least 0.990.

69. The method of claim 68, wherein
a) the ratio of the likelihood of accurately determining a hematological disorder to the likelihood of inaccurately determining a solid tumor is at least 25:1 or at least 50:1;
b) the ratio of the likelihood of accurately determining a hematological disorder to the likelihood of inaccurately determining a hematological disorder is at least 8:1, at least 12.1, or at least 16:1;
c) the likelihood of accurately determining a cancer type is at least 80%, at least 85% or at least 89%;
d) the first HD is a stage I cancer and the likelihood of accurately determining a cancer type is at least 65%;
e) the first HD is a stage II cancer and the likelihood of accurately determining a cancer type is at least 75%: or
f) the first HD is a stage III cancer and the likelihood of accurately determining a cancer type is at least 85%.

70.-75. (canceled)

76. The method of claim 51, wherein the at least 100 target genomic regions are selected from Lists 1-8, or complements thereof.

77. The method of claim 51, wherein the at least 100 genomic regions comprise at least 20% of target genomic regions of any one of Lists 1-8, or complements thereof.

78. The method of claim 51, wherein
a) the at least 100 target genomic regions are selected from target genomic regions of list 3 or list 6, or complements thereof; or
b) the at least 100 target genomic regions are selected from target genomic regions of list 2 or list 5, or complements thereof.

79.-82. (canceled)

83. A hematological disorder (HD) assay panel, comprising:
at least 500 pairs of probes, wherein each pair of the at least 500 pairs comprise two probes configured to overlap each other by an overlapping sequence,
wherein the overlapping sequence comprises a sequence of at least 30-nucleotides,
wherein the at least 30-nucleotide sequence is configured to hybridize to a converted cfDNA molecule corresponding to, or derived from one or more of genomic regions,
wherein each of the genomic regions comprises at least five methylation sites, and
wherein the at least five methylation sites have an abnormal methylation pattern in HD samples.

84. The HD assay panel of claim 83, wherein
a) each probe of the of the at least 500 pairs of probes comprises a non-overlapping sequence of at least 31 nucleotides;
b) the converted cfDNA molecules comprise cfDNA molecules treated to covert unmethylated C (cytosine) to U (uracil);
c) each of the at least 500 pairs of probes is conjugated to a non-nucleotide affinity moiety;
d) the HD samples are from subjects having a hematological disorder selected from the group consisting of leukemia, multiple myeloma, and lymphoma;
e) the abnormal methylation pattern has at least a threshold p-value rarity in the HD samples;
f) the subject is a human, and each of the probes is designed to have sequence homology or sequence complementarity with less than 20 off-target genomic regions in a human genome;
g) the assay panel comprises at least 1,000 probes; or
h) the at least 500 pairs of probes together comprise at least 10,000 nucleotides.

85. The method of claim 51, wherein the cfDNA fragments comprise cfDNA molecules treated to covert unmethylated C (cytosine) to U (uracil).

86. The method of claim 51, wherein the bait oligonucleotides comprise at least 500 pairs of probes, wherein each pair of the at least 500 pairs comprise two probes configured to overlap each other by an overlapping sequence of at least 30 nucleotides in length.

87.-94. (canceled)

95. The HD assay panel of claim 83, wherein
a) each of the probes comprises at least 50, 75, 100, or 120 nucleotides;
b) each of the probes comprises less than 300, 250, 200, or 150 nucleotides
c) each of the probes comprises 100-150 nucleotides;
d) each of the probes comprises fewer than 20, 15, 10, 8, or 6 methylation sites;
e) wherein at least 80, 85, 90, 92, 95, or 98% of the at least five methylation sites are either methylated or unmethylated in the HD samples;
f) at least 30% of the genomic regions are in exons or introns; or
g) the genomic regions comprise at least 20% of genomic regions in List 1, or complements thereof.

96.-109. (canceled)

110. A method of detecting a hematological disorder (HD) with an HD assay panel of claim 83, comprising:
A. receiving a sample comprising a plurality of cfDNA molecules;
B. treating the plurality of cfDNA molecules to convert unmethylated C (cytosine) to U (uracil), thereby obtaining a plurality of converted cfDNA molecules;
C. applying the HD assay panel to the plurality of converted cfDNA molecules, thereby enriching a subset of the converted cfDNA molecules; and
D. sequencing the enriched subset of the converted cfDNA molecule, thereby providing a set of sequence reads.

111.-126. (canceled)
